United States Patent Application Publication US 2004/0214272 A1 - sequence listing, part 32

SEQ ID NO: 131858 - DNA, 750 bp, Zea mays
  unsure (1)..(750): unsure at all n locations
  Clone ID: MRT4577_51738C.1
aatagtgacttcaatcctgacatcatgttgtggagctttgcaatgaggatgactttcttgttttagcatgtgatggcatttgggactgtatgtcaagccagcagttggtggatttcatccatgagcatataaacacggagagcagcctttctgcagtgtgtgaaagagtgctcgacagatgcctggctccatcaacaatgggcggagacggatgcgacaacatggccatgatcttggtgcagttcaaaaaaccagtcagtgacaagaaaaaggctgacgtgggggagcaatctgcgaaaggcaaggaagagtcttgaggttcactgagtattacgcgttaatgcaaaggctccactggtgctgaggtctacggctcttgacacgggctaggatgcaaagttgccaatgtgaaattgtgtgcactctgtggctggggtatcgactgtatatcagtcaattgctgtggttggcgtgcattctgcctgcgaacccaggataaatcacattgtttggcgcaacatcgaaatcctggcaatcaacttctgtgagccgctctgttcgtcattgtacaatccatgtttcggatcatccacgcctcccaaattncataatttggaatgttttgttatgctatagtttgtgtgtatgctgaaacgtgggctggggtgttccttttggtttttttggttgtatattccatgcctctgcnggctgtagctgttccttctgatctgtaatgtatcaatctga

SEQ ID NO: 131859 - DNA, 386 bp, Zea mays
  unsure (1)..(386): unsure at all n locations
  Clone ID: MRT4577_51739C.1
gaagaacnggggggacgcacgcgtccgcaaagacggcgggctatttaagaagatactgactggaggagagaagtgggagaatcccaagtggcctgatgaagtgtgagttcactatgaagctcagcttgaggatggaacagtggttgcaaaagctgatggcaaggagttcactgttatggagggtcatttctgtcctgctttggctaacgctgttaagacaatgaagaaaggggagaaagtactttttacagtgaagccgctatatggctttggtgagaaggggaagccagcagcttgtgctgaaggtgcagtgcctgcaaatgccacactccagaacacctttgtagatgtttcatggaaaactgtgtctgaggtcacagattaca

SEQ ID NO: 131860 - DNA, 700 bp, Zea mays
  Clone ID: MRT4577_5173C.1
gtcgacccagcgtccgtgcaatccagccctcgtaagaaaccttaatccacaacagaagctttcgattcgatcccaccgagggcgaggaggaggaagaagaagacggcaatggcgtccgaggagggagtcgtcatcgcgtgccacaccaaggccgagttcgacgcccagatggccaaggccaaggaggccggcaagctggtggtcattgacttcaccgcctcctggtgtggtccttgccgcgccatcgctccactgtttgtcgagcacgccaagaagtacactcaagctgtcttcctgaaggtggacgtggacgaactgaaggaagttactgcagagtacaagatcgaggcgatgccgaccttccacttcatcaagaacggcgagacggtggagactatcgtcggtgccaggaaggacgagctcctggccctgatccagaagcataccgcgtctgcgtccgcgtaagaagatagtcagtcgtcgtcaataagggccagcgcatcgcatggctgtaaatgatgtcgttatcagtttggtttgtcatttgtgggcgattgtgaaccaatagtatgttccgatctgaataccttaaccatggatacttgttgtgagttgtgattttgactggtattggaatttggatgtctggcttcattttctgttggagtgcgactcttgaataaaccacattggtgatggc

SEQ ID NO: 131861 - DNA, 540 bp, Zea mays
  unsure (1)..(540): unsure at all n locations
  Clone ID: MRT4577_51740C.1
ctgccgcgtcacactaaaacctatgcggacaccaagtctccaaaaaacatactgccaggtactatctcgcctatcatgacctctgatcggaacacaagtaggatcgccacatcaagatggaactacgatcaaacaaaggtgagggacaaagattgacctacaagaatcataagggatcacaagctaatgaactagcaatattgacaccatgcacaatatgcataaataaaaggctaatggatataaatcaaaatgagcttgtcatgactgacttgtacaaaatatcttgaacaacaaaatcctttcaaagagaattattataatgcaaaaatctaccatatgtcaaagatgaaacaatngtacaccaaccatatgatgctacaagaccctatggaagacaaaaagaaaatacccttttgtgatatgtctataataataaaacactaaaactaaattcataaaacacaaatttatacagatagcccggctcaccatttattaatacatacaatggttattgcacctggtctcactgataat

SEQ ID NO: 131862 - DNA, 462 bp, Zea mays
  Clone ID: MRT4577_51741C.1
ctccatttcctcaacaacaaaccaacaccaacactccccaatcatcaacatgactcactccctcaagattaccgtccacaattgcgagcacttggaagacgtcgagaccgggggaaagaacgatccctatgtccggatctccctcgcttgcacggatgacaagcagtacggcgcgcacaagactagcactaaaaagaacgctggcaagaaccccgagtggaacgagaccatcacctttgagaactacgagaagagcacgagccctgagtgtttcatcgaggtcatggagcaagatatgaccgccgacgccccaattggttactgtatgatccccttgacgcaggttctcaatgctgagaatcacgtcctcaagggtcgcttcaatctgtttaacactaaaggaaaggagcacggaagtatttctcctgaccttgccattgtcgctcccggccaggctgcgcc

SEQ ID NO: 131863 - DNA, 332 bp, Zea mays
  Clone ID: MRT4577_51742C.1
atagggggtggggggagtaaggaagttttcttttggttaccgggaacggcacaagatggcaaaccaggtccaaagggcattctagccatcgtcttccgtggggggcgaactcttaaaaagaaagttcctttcaattttccaagatgcaatatccgcccaagaaagcgtccaccgtataagggctcataaccatggaaaaacatggggtctgcaagcacacccaccctccaaaataaggtctttaagacgcccaccctcccgggggaacaaaaaacaaacattgttggacccaaaaaaaaagccgggttggccaggggccttctcaaggaaag

SEQ ID NO: 131864 - DNA, 557 bp, Zea mays
  Clone ID: MRT4577_51743C.1
cgaagaattgtatacaatttaataccatgcatcatatgcatgcgtaattactccaagcatactacacttgtttaggatcaagaggcagacggacactagaccggaaaggatcacatcaccgggtactagggctttatggcaaaggagcacatgccctcccgagccctgacacgcctggccatccgaacgtagccattctatgcccatccctggccccacaagttgttgacgatccaccacttgcctccgacgctgtccttgacgagggatccgtaccacgaccaccgggacaacctggctgacggtagcggcgtctcatgggcccgaaaagaccccgctattgtaaaactggaaagcactgttcccgtgtatgaacactgggaccgggtgagcctgcacggctcgctcaaggtgggcctggttattgtgctgcaccgcctgatagccacggatcctggcctcttggtgaccaaactaggcggtaatgcattgcctatagctgcccacataccgctagtccgactccgtggtcaggccgccaccactggtgacccact

SEQ ID NO: 131865 - DNA, 249 bp, Zea mays
  Clone ID: MRT4577_51744C.1
tcatgcccgagttggccacaggtggtggtggtggcgatattggaaaaaggatcggtcatggtgggggtcatggtcgctatgatgctggtgtctatgccatctccttttgttattcacctatgggcaaatacatcaataccctcttcaagaaacaaattgagctacattggctatgccattgggcggctaaaaagtctatcatgactggatggtacacatcgactggagaattgtctactacgatttgac

SEQ ID NO: 131866 - DNA, 315 bp, Zea mays
  unsure (1)..(315): unsure at all n locations
  Clone ID: MRT4577_51745C.1
gccccgncgccacggacgcgaccgacagcgcggcggaccccccccgcgaccncgccaaggacagcgnccgccccgncggcgccgccacaagcccgaccgccaggagcgcaccaagggggcggcgcggacggcgaccgggcccgccgccgagggccccagcggcccccccgccaagcccacccacacccccaccaacaacaccacccgccggcccggccaggcccaccggagcacagggcgaccagcccgggagcagcgcaacacccccgggagcaacacacaacgaggaccccgggcccccgaaccgcaccgcca

SEQ ID NO: 131867 - DNA, 294 bp, Zea mays
  Clone ID: MRT4577_51746C.1
attcggctcgagatggtggatccatctttctttaggggcaatgcattatctttgaagaaggaagcttactcctggagtgggccgcctgtcctccacttccatatgaaatatgtatgacatgagagcacacggcgtaatcttgattgtagaacacctgctgaatagtcactctaaacggacagacattttgcgaaacaggccaaaagactgtcaatgcaggctgcttgaaataggaaatgttaacgtgaataattatgagcacgaccaagagaaaggttgccatcttgcggaaaa

SEQ ID NO: 131868 - DNA, 300 bp, Zea mays
  unsure (1)..(300): unsure at all n locations
  Clone ID: MRT4577_51747C.1
tnnnnnatagtaggagtnnnagggtggggggagggccacccccnccnnactgttctttattggccccaaaagcccacaaaacatcacccacgcccgagccaacatcgggggatctacaggccaaaaccccagncccatccaggacgcttcacgcacgcggccagaaacatgttcccccccagctaaaagctccaggggcgggtcgaagcacagctcgctcatgcagggggacaagacccccccccccaacatcttggggacagcgcccatcgagggccgctgccccgggtctgcggcggg

SEQ ID NO: 131869 - DNA, 390 bp, Zea mays
  Clone ID: MRT4577_51748C.1
tcgctccattattcgacctctccttgccaccatccatggctgccgtgaccgccgcagacatcggtctgtcctcctcctccgcctcctcccctgcggatgctgccaatgccaaagcagcgtccccgtctgtcgtcaccatgcaagcacctccaaattctgtctagcggcgagcccgctgcagcggtggcagtccatgcgcccgggcggtgctggcgcacgtgtccaccacctagaccatcgtggcggtgccggcgaagacgtccaataagcatgacgaggggctggtcaccaacaagtacaagcccaaggatgccgacgtcaggaggtgcctgtgcaacaccaggatcacctgcgacgacgcgcccggagagacgtggcacatggtcttca

SEQ ID NO: 131870 - DNA, 1130 bp, Zea mays
  unsure (1)..(1130): unsure at all n locations
  Clone ID: MRT4577_51749C.1
gttcccgggaaaacgacaccaaggttcccggtgccgtccaccgaccaccggtgacacggcgccgatagcaagagttcaggaggagcgcggagccgtttctggtggtagcggtgtccgtgaggcgcggcgagatgtctgtgcggataaaggcggtggtggacaggttcgtgatggagctcaaggaggcactggacgcggacatccaggaccgcgtcatgaaggagcgggagatgcagagctacatcgcggagcgcgagcgcgaggttgccgagagggaggccgcgtggaaggccgagctctcccgccgcgaggctgagatcgcgaggcaggaggcgaggctgaaggtggagagggagaacctggagaaagagaagagcgtcctcatggggacggcttcgagccaggacagccaagacggagcgctggagatcaccgtcagcggcgagaagtacaggtgcctccggttctcgaaggcgaagaagtgagaggttgaaccaggacgacacagtcactcagggtcaggggggggtagtggtacaccgaaatctcagtttggaggctagtgtaagagtatctgtcaatctggcacacaggctgtcgctgtacgtgctggtttgatgctcactgcgtcgtgcgtcctcattgatgattgaacgatagggtcattgaaccagcgcacaacctgagaaaatggttgcgctgtccgtcctggggtcacggtagcatgaacctcagaactgataacctctgtttcggagatacaatcgggttgaatgggagcctttcgtgtgcaaaaaaaaaaaaaaaaaaaaaaaaaaaaaaaaaaaaaaaaaaaaaaaaaaaaaaaaaaaaaaaaaaaaaaaaaaaaaaaaaaaaaaaaaaaaaaaaaaaaaaaaaaaaaaaaaaaaaaaaaaaaaaaaaaaaaaaaaaanggggggggccctttaaaagaaccaaattttactcccgggggttgggaaggtaaaattttttttttggggcccccaaaataaaatcccgggcccgggttttaaaaccgggggagtgggaaaaacctggggttacccaaattaattcgctttgaaaaaaaccccctttttccagttggggtaaaaaaaaaagggcccccc

SEQ ID NO: 131871 - DNA, 168 bp, Zea mays
  Clone ID: MRT4577_5174C.1
gcaacaaaaaacgggggcctgacaaacgacgggctgactttatgcccataaatgctactggggaccgaagccaacacctactacgatagttgcgagtgttgggagatctaggtatccatccggatcaaatcgaaggaagaatccttcatctacatgaatgatcaatat

SEQ ID NO: 131872 - DNA, 118 bp, Zea mays
  Clone ID: MRT4577_51750C.1
acgcgtcggacaattgtttaacatgaaagagcacatttgacagatacatctcagtatgtggaccatacagcttattgtgtagcgaagtacgactgtactggatgaagtgacgcagggt

SEQ ID NO: 131873 - DNA, 969 bp, Zea mays
  Clone ID: MRT4577_51751C.1
cccacgcgtccgcactgatccaaattctactggaccccctcctgatatgcaacttctgctcccatttgtggaatcggctttgccagtggcttacggtgtcttggctatccaattatttcatgaaattggacactttttggcagcatttccaaaaaatgtgaaactaggcattcctttctttattccgaacttcacccttggaacttttggtgcaattactcagttcaagtccattcttccggatcgaaagacaatgtttgacatatcaatggctggtcctgtggctggagctgcactttccttttcaatgttctttgttggcttattactctcttcaaatcctgttggggcaagtgatttggtggaagtacctagtcagctgttccagggttcattgttgcttggactaattagtagagcaacgcttggatacagagctatgcatgctgctacagtttcgatccaccctcttgtgattgcaggctggtgcggtttaactactagtgcatttaatatgcttcctgttggttgtcttgatggtggaagagcattacagcttggagggccactgtctcttccttggggtttgtacgtgctaatatgtcagagaacacccgagaaaccatgcttgaacgacgtgagcgatgttggaagttggaggagagcggccttgatagcttcagtatttcttgttgttttgacgctcattccgttgtgggatgaacttgcggaggaactaggtgtagggcttgtttcttcgttctgagatgcggtgcttaccgatagaattaggccgtgatgtagttcagttttgtattgaaatgtagcttcccacggcggaattgttgtaaaggtatgtggaatttccggattaggtgagcaatgatatcgcttatgcgagtgtaatgaaattgtgccaaagtaagactttaacgattatccaactaaaaaaaaaaaaaaaaagcggcc

SEQ ID NO: 131874 - DNA, 197 bp, Zea mays
  Clone ID: MRT4577_51752C.1
catgtattttcacataggcagagcatacgcagatcggcacaggttttttggctgcatccaccaacggaacgaatgaatcacctaccacgccacccaatcgttcctgcccatcatgcatgaagcggacctcactctatacgatctctagatgaactcagaccctgatcttctcagcccacgcaccatccatataccca

SEQ ID NO: 131875 - DNA, 2182 bp, Zea mays
  Clone ID: MRT4577_51753C.1
tggaaagcatcgccggctcgccgccaaactcgctgccacgtcggtccgaaccaaatccagcacctctctcccctcccccttcctcccgtccccgtcgacagtcgcatcgcaccctatcctccccagtccccaccagtccaccaccctctccccgcctcccgctgcgaccaccgcaccggcgaacttggcgggccgctcggcgctgcacaccaagccggggatggccgctgcgcttgcgagctcgccgcttgttcacctaactacctcccgcctccgcctccccaggccccaggcctccgcttccagttcgggtccagtctgctcgatcggcgtgtgcttgggatggaggctgaaggtcgggtggagggccctgaggcggcgcgaccggcttcgatgcttctccaccgacggcggcggcggggaggagggggaaaagcgtggcgaggaggaggcctcggcgacggcggcggcatccccggcctcagccccagcggagacacaggtgggcgctggggaggagctggcgtctgagcggagtcgatcagggagcttttcgtcctcatcctcgtcgtccgggaatcctggtgtatcaagcgagccaccgctgttgagttttagtgttgataatatcgatacagttaaactattggaacttctaggcccggaaaaggttgatccagttgatgtcatggcaattaaggaaaaactctttggttatacgacattctggttgacaaaagaagaaccttttggtgatcttggtgaaggagttcttttcattgggaacctccgtgggaagagagaggaaatctttgcaaaacttcaacggcaagtacgtgaacttaccggtgataaatacaatctttttatggtggaggaacccaattcagaaggggatgacccacgtgggggaccacgtgttagttttggtttgcttaggaaggaagtttctgagccaggacctactacgctatggcagtatgtcatttctctgttacttttccttctcactatgttctcctgcattgagctaggaattgcgtcaaagattagcagtcttccaccagaaattgtttcatatttcactgatccaaatgctaccggaccccctcctgacatgcaacttctgctcccatttgtggagtcggctttgccagtggcttacggtgtcttgtctatccaactatttcatgaaattgggcactttttggcagcatttccaaaaaatgttaaactgggaattcctttctttattccgaacttcacccttggaacttttggtgcaattactcagttcaagtccattcttccggatcgaaagacaatgtttgacatatcaatggctggtcctgtggctggagctgcactttccttttcaatgttctttgttggcttattactctcttcaaatcctgttggggcaagtgatttggtggaagtacctagtcagctgttccagggttcattgttgcttggactaattagtagagcaacgcttggatacagagctatgcatgctgctacagtttcgatccaccctcttgtgattgcaggctggtgcggtttaactactagtgcatttaatatgcttcctgttggttgtcttgatggtggaagagcattacagggtgcttttggcaaggatgctttgtttggatttggcctcacaacatattcgttgcttggactaggagtgcttggagggccactgtctcttccttggggtttgtacgtgctaatatgtcagagaacacccgagaaaccatgcttgaacgacgtgagcgatgttggaagttggaggagggcggccttgatagcttcagtatttcttgttgttttgacgctcattccgttgtgggatgaacttgcggaggaactaggtgtagggcttgtttcttcgttctgagatgcggtgcttaccgatagaattaggccgtgatgtagttcagttttgtgttgaaatgtagcttcccacggtggaattgttgtaaaggtatgtggaatttccggattaggtgagcaatgatatcgcttatgcgagtgtaatgaaattgtgccaagtatagacgctaacgattaccaattacatacatgtatgctcacttaacccgattatcaataaaaaaaaaaaaaaaaaaaagaaataaaagcaacacctaaagctacaatttaatgtggcttt

SEQ ID NO: 131876 - DNA, 1448 bp, Zea mays
  Clone ID: MRT4577_51754C.1
ccctcgagccggccgggccggtcttccgatctctatttccaaattcgggcggctcccgttctccacctcaattattgcccacccatccccgctccctcctctcctctcctcccgtcccacccatcacctcgcaccagcgccgggggaatggcggccgcgctgtggacgctgctagtggcggtggccctgtcggcggcgctggcctcgaaccgccccgtggcggcgacggcgacggcggcggcggaggcggcgaacgaggtgctccgcgcgcaccagctgccggggggcctgctgccggcggggatcacggcgttccggcacgacgccgccacgggggcgttcgaggcccggctggacgcgccctgcacggcgcgcttcgaggtcggcctccgctacaacgccaccgtctccggggtcatcagccccggccagatcgccgacatctccggcgtcgccgcgcaggacctcttcatgtggttccccgtccacgacatcaaggtcgacatcccctcctccggcgtcatctacttcaacgtcggcgtcgtcaagaagcacctcccgctcgccgtcttcgacgcgccgccggcctgcacgcccgacccgctcctgcagcggctggaggacgtgggcgagggcggattggccgtggtgggcgccgcggcgtcccggcgatgatgggtggaggagacggaggagggttcgacggcgccggcgagccaggatcacgagcgcagttttgagaggagaacgggcgatcgccggccttcttcgatgcacatagatagcgtgggcatttccatctgttttctttttctgcttcctactagtggctacactagtaaccaacctcgtctatcattgttcgtttcgtcaagctgttgtcatttcctgctgtcttcaaaaaaaaaaaaaaaaaaaaaaaaaaaaaaagggcatttttcatcctagcctccctctctcgatggcacgagctttaattcttcgattttggggccagggacccccttgacctcattcaatccccaatgattttgaatgttggcaccccctttataccccgttttttttctgaaaactgcaagtagcatgcgcgggagcttttcagcatgtcatattccccggggcaaaaagttgtgaatccccaaaaaccagggaaatattcccccctgagggctttattaaaggggggtttaaaagaatgaattcttttctttttaattttgaaaagccaaagatttaatccgcccccatttccttcaatttactcctaatcgaccaaggattaaggggttgttcgctttcctctcaatccatgtgaattggttggaaatgagtgggttttaatttccacccagtcaaaatcttttgggcttgttcgttttggccttaacccctgtgggttttttgggcttgttcgttttggccttaacccctgtgggttggggggt

SEQ ID NO: 131877 - DNA, 339 bp, Zea mays
  Clone ID: MRT4577_51755C.1
acaaatactaaaatttgtttttctatttttgcctcacgggcaacaattaacaattttgtaacattttctcaccaaaaaaggcctgattggccgaattctctaacctgaacccataccttctacgccgaaagcaaaaggaagcgaactatgatggacccgaacgctatgaatagatcataaactggacccagcccacaaagaagcccccctgcctctggccagaagcttcaccaacttctgaaacctgagacacaaacaacccttgcgagtctaattgatgcaccatatcctacaacatcatcgcacattttcttttattcctcaagtccggtgctaagg

SEQ ID NO: 131878 - DNA, 286 bp, Zea mays
  Clone ID: MRT4577_51756C.1
acaggtagaggtagcggttgagcaggtcgccgtgtcggttctcctcggcggtccagccgcgcagccagcgagcccagccgtggccgtcgcggccggtggcgtcggtgacgccttccgccgggccgatccggttccccatggtcatgtacgtgggcagcccttcctccgtgatcatgttgcccacgaggcacacgaggagctcgtcgggcacgcccgccgcgcgggcctggagctccgccacctgggcccgctgctcctctgcggcgacagcgaaggtgggcaggag

SEQ ID NO: 131879 - DNA, 329 bp, Zea mays
  Clone ID: MRT4577_51757C.1
agaaaaaacgagggatgattttataaggagttattatgttatccgtcctaagcagcggaggacaacaccggaggtaataatattgaggacaacagggggtggaacagaaaaagccgactccaggttgcatcataagaatcacggggaggctggctggactactgccaccagctccccttattattctaaaaaactgtcgggcgggtggattccttactgcctgcggatcatggaggggaggccaacaaagaaaacattggagcgaaggaaacaatagcccggctgtctttcatgtgaagcacccgcccgggccgccggtaaagaggact

SEQ ID NO: 131880 - DNA, 463 bp, Zea mays
  Clone ID: MRT4577_51758C.1
gggaacctaactacactctaccaacacatcttccagtcattttcacgctgttcttaccctgggcgtgacccggttcctctccaaatcacttacaccggagtactcacgtgggatgcataggggcatcatccgctcattttttggtcatgcctgccaagggactgaaatggaaatcaatagacattttctagcctaggaacgggaaaagaatgctaagagggggggggtgtgtatcaaatgtgtatgatatgtggtcaatgaggagacaagaaacataggttggaaaagggtgaagaaacagttaacaattactgagcacactgaaaccacactgaaatcgaaagtgtatgaaaatggtgcgaatttgatgcacatgggcgggatagggatgagactgggagagtacttgaggagtaatgtgaaagtatcgagaacgaacacaccgcgcagagattaagcaccg

SEQ ID NO: 131881 - DNA, 278 bp, Zea mays
  Clone ID: MRT4577_51759C.1
cccaggggggggggaaaggggcccttccttatacacaggaacaacattgtttacccatttcaggcgggtacaacacaggggggggtttttgacagttccaatggaacgatttacccatacacaaaggggggctccacttaataatggattttacaaaacaagggggttcactatttaccctttacacatgttttatgtagaggggggtgctttttcagaggaaaaaaggaaagcccttttgtgattgagggttggggcaaactgaatttgcccatcca

SEQ ID NO: 131882 - DNA, 368 bp, Zea mays
  unsure (1)..(368): unsure at all n locations
  Clone ID: MRT4577_5175C.1
ctcggngcccgggcccgcgcgcgctngcctngctgctcctgcctggttcgccgtngcccgtngcccgtngcncagcccccccnnnnnnnntcttttctttttctttgggnggtggtctgttcacctgggggggcggcggcgggccgtcggccgngatttgcccggtggcgccttcctcctcnncggcngcggcggcggcttggcggtcttcggcggcggcctctccgtccccgtcgtcgtgccctgcctcntggcggcctccggcggcctnctcttcggcttcgcccttggcctctcnngnggtgtgtcggtgttgggggctttcctgnncnngttcttccccgggttgctcnngnggccggcgcgcg

SEQ ID NO: 131883 - DNA, 1194 bp, Zea mays
  Clone ID: MRT4577_51760C.1
gtcgtcgttgctcacatgcccctgagatccaccgtcgcgccgccgcaaccgctcccacgtcatcgtcgtgcgcacctcaaggggtcgctaccgcctgcacctcagggagacgctgtcgcgctcgagccccacgagatccgccgccgcgaccgctgccacatcgccgtcgtgcgcacctcatggggccgccgccgcgtgcgtgccctcgggatccgatgccgcagccgctcccacctcgctgtcgtgcgcgcctcagggatccgccgccgcgagcgtgtcccctggtccgtcgtcgcaagcgtgtcccccagatccgccgtcgcgcgcttgctcccaggatccaccgtcgcgcgcgcccctcaggggtgggggcgtaaatgtcgacgtaactgaaccctagcggctagcgatctggagcttcttttataaacactttggaccagatgcggctgaaccggttggcaacatcgggtcagggcttccgctcaactattaaaagcctagggctcaaaatacataaactatatatatagtagtctgaatctgtcgcattggattttgttaaatcactcttgacctcacttcttcgctgatgtggatgtcaaatacgatgaggttttcctgtatgtctttcagaacgacatgtttcctaatgctatctatcctttttcactctcaagacgcgctactcacgacacgagcctctgctttgttgatccaatgcttttacttcactttctaaccatatggaggcgacagcaggatcacataaggaccaccagtgggcgggcccagcaatcagaatgtcactcccgagtttcaggttaggcgaaccaaaccgtattcccccatgatttccttcaaagaaagaatttacgtagccatgcgcagatttctactgagaaatcgaaagaagggcaagaagaagaagggggaaaaaaaagagtcctcgtcaaaatacgtattgtttctgaaacaggcacgtctcgcttgctttgcgaatttcagcggacgtacagtggaccatcctgatcttctcaagtactcctgtcaagtagaatgcagggtgcgccctgtgaagcctgctaggatctggagtgcaagaaccacagagccccagcaggaaaaatccgacggcgaggtcagcagctccgggtccagcgtggcagccgacttggacgcccgaagccacag

SEQ ID NO: 131884 - DNA, 292 bp, Zea mays
  Clone ID: MRT4577_51761C.1
aattcggctcgagctgatctggtggcagggctggtaagagtttctgtgctcggtccaaaggaaggagacagtggttcagcagcaaccccttttggtgcagtcttcacaggctgtcacccccacactgcctctgcctcccggtgcagctaacttcatcaacagagtatccaaacctgcatgataatatatatgattattgtctatattgatgaatgtttatagagcttagcttttcttattcagtagcactgacaataatcaagtcattttattgtgcaaatatctggtatgt

SEQ ID NO: 131885 - DNA, 740 bp, Zea mays
  unsure (1)..(740): unsure at all n locations
  Clone ID: MRT4577_51762C.1
cagaccggcggcggcgccccggcgggccggaacgaganggagcngnacgccaacgaggngcccaagaccgcggagaacncccgcgcgccgagcacgggcgagaagggcgngggcaaggccgggaagccgcgggggggcaggggcnccaccnnccaccgcgncagccccgagngcaagngccagggcggngaccccacccgcggcaacggcaccggcggcgaggccaacgacggcgagaagnnccccgacgagaacnccgngcgcaagcacaccgnccccggngngcccgccaggggcaacgccgggcccaacaccaacgggncccaggncgncaagngcaccggggggaccccnngacgggacggggaggacggaggggngcggcaggggcggggacggcanggacgggggggagggccngggggaaggggggcgcgggggggcggggggcgcccggcgngggggggggggggggaggccgggggcgngggggggggggggggggggggggggnggggggggggggggggcgggggngggggggggggggggnngnngggggggggggggnnnggggggggggggggggggggggggggggggggggngnggggggggggggggggggggggggggggggggggggggggggggggggggggggggcggngngngngggggnncgggggggggggggggggggggcggggggggggggggggggggaggggggggggggg

SEQ ID NO: 131886 - DNA, 1594 bp, Zea mays
  unsure (1)..(1594): unsure at all n locations
  Clone ID: MRT4577_51763C.1
tcggccatttttattttatcagttgtctactcacatttttagacttgaactgcaattccattgcatcaatgcaaactgcttctggtgcttgtaccatatcatggtcagtgcagacatagctgctttgtttggatggaattctgatatcaagcacaaagaatgttgttggcatggtcatatccaagtaccctcagtgcataactgaagctccatgcggcagaaaattctgacatgagcagaataaattgatgtatatgtaccttttggaatggctggagttatattggctgcagcactctaatatttttatctatcattgttaccttacagcctatggaaatttatgttgatgatgaggctaaactgacccttcatggtctagttcagcactatatcaaattaagtgaggcagagaagaaccgaaagttgaacgatcttttagatgcactcgacttcaaccaagttgtgatatttgttaaaagtgttagtagagctgcagaactcaacaaattgctctgcgagtgcaatttcccctcaatctgtatacattctggaatgacacaggaagagaggttgacacggtacaagaacttcaaggaaggacacaagaggattcttgtggctactgatttggttggtaggggaatcgacattgaacgtgtcaacattgtcgtaaactatgatatgcctgattccgctgatacatacctgcatagggttggtcgggctggacgttttggtaccaagggacttgcaataacatttgtttcttcttcatctgattctgatgttctcaatcaagtgcaggagaggtttgaggttgacataaaggagctgcctgagcagattgacacgtcgacatacatgccatcttgatgatcgaggtgaaccagtgtttagtttgagctggaaaggagagcttgtttgaaatatacaccttagatcgctgttggacaaccttagcaccttgtttgaaagatgttccatttgtacttaaccagcagtctagtggattaagcagtaggcgtcgcaacagctgttacatgctacctaggattttatttgcaactctgtaatgttttctatgctccgactgctaattgttctgtttgagactgccctctgggtgcatgttttactagtaaattactcgcaccatgcgcgagtcttcggagcaaaaaaaaaaaaaaaaaaaaaaaaaaaaaaaaaaaaaaaaaaaaaaaaaaaaaaaaaaaaaaaaaaaaaaaaaaaaaaaaaaaaaaaaaaaaaaaaaaaaaaccngggaaaatggctgcccttgggatcaaatcaaaaaacttcccaagctagggttcaattttttcaaaagaaaaaaacattgggtttcaaaatttgaaggttgttggggctttttcccgggaaaattcctgaacataaaaaaagctgaaggcctgtttcaaattttcagggggattgggttgcatgaaaaaaaatattccttcactatgaaccggggaggattgtaaagaattttattgactttttttaaaaaaaacccccttcaaatttgggtcaaaaaaaaaaaaaaaaaaagggccccccaagctccagtttt

SEQ ID NO: 131887 - DNA, 835 bp, Zea mays
  Clone ID: MRT4577_51764C.1
tgggaccctcgaggccggccccggcaacagcgtccatgttctcctccggccttcgccgtccctagggtttgtgatgtcccttttttcgccggtgagactgcttgccagttagtcgactagatcccgcagtatgcactcagccgctgtgagtgcctgaatgtagtatgttcttatgttttgactaaatttgtgcctcacaagaagataatggttcaaccaaatgccatatatcacgttactgcgtagttgtgctgctacctgcatttggcatcaagattcacattataatgtctatgtttgtgttataccattaatttgcagccaggtgttttgtacaaatagtcaatctaggcatgggcatatgaactgtgggttggttattctttctatgcaacatcaacggttgtggaactttctatctcttgttctctctggctctgccacccttttagctacaccttgtcgggtagtggtgttgccatgatatagatttgttgcagttactagtagattaatgggatgcttgttgcttggttgacgaatgggttagtacatcatattcccactcctaacttttttgtttgatttgtggaatggaacggattgatccatcaccacatcattccttataagctaataattagtataaccgcatgccactaaaattcatgggatgaacacatcatggaccacctcgcctctgtccccctccccccgactttagtgtacataggaatttgtggcatccctttcttccccagtgagattgcttatcattagtcaaagtgtcaaactagatccccgcatatacatttagctgctgtggatgactgaa

SEQ ID NO: 131888 - DNA, 166 bp, Zea mays
  Clone ID: MRT4577_51765C.1
cggcaagggaaacctagatgggcagggcccaaccgtgtggagcaagaactcctgcaccaagaagtacgactgcaagaacctacccaacacgctggtgaaggactacatgaacaacggggaggtgttcgaggacacactgtttaacttcaagttctttcacatgaac

SEQ ID NO: 131889 - DNA, 377 bp, Zea mays
  Clone ID: MRT4577_51766C.1
attacctttctctttattttttttttgtgtttttttttttttgaccaaaagcaaggttccatatcacaaaaaaaatacatgcgtcaacagcgacggaatgggccaccagggtgggtcccctagcaattgcaagatggcaacaacactaaagggaacacccaacttatcgaggtccgtttgccctatgaccacaaggctttacacgataacagccctcccctaacatgtcatttgcctgcacctcctcctagtccttgtactcctcctagtaagcagtcccgtcctggtactgctggtaccccaacacaaggtcgttcatgttgctttcggccttggagaactccatttattccatgccctcccccgtttaccaatgc

SEQ ID NO: 131890 - DNA, 233 bp, Zea mays
  Clone ID: MRT4577_51767C.1
aatgggggttttttatttaatagttttaatatttggttttttttttgacaggggggcacataatgggcatattggccagggaagcctccccctccaacatggaagggtaaaaaaagtgggagtgataaaaaaaaaactctatcctacatttaaactctgaactcccaattcccaaggggaaggaagcaccctcaaaagcttaaaaagcctttaaggaggccaaacctacaaac

SEQ ID NO: 131891 - DNA, 802 bp, Zea mays
  Clone ID: MRT4577_51768C.1
gcccgggcgcgggtggattggatgagtaggtggcggccggtgccgaaaggacggcaatgccggaggcggcgcggggtctgctggatccagcggacgaggggaaggtggaacaggaggagttctacgagtcgctagatcggatcctctcctctcctcctcctcctcctgctcctccgcctccgacgacgccgaccaccaccacccgctgtcccctgcatgcgtatgatgtctggatctctgagcccatgtccgtcgaggacgacgagtgccgctgcctccaactccagcaccggcacagtaataggagcgagtgaaagtactccacacatgaacaatagcaaagcatccattcaggactcagctaagaacaagaagatttaaaagctgggtaagagcaggatttagctgacagaagatgatgtgcttccattcctcttctcatttgacggtactcgtatctgaaaccaaaaatgatattaccaccagggattattttgaggtcaacaatagataaaaaggacctttgcatgcctggcatatgctgtttcagtgacatggtaatcaaacaaccaactgtgtgactatgtctccctttgctcctatcctatacacagaagaggcatgaaagagaagaaatatgactgataactagatttagataagagcataaccattagctaattttagttctcacaatatctcccagccattgttttctgaacacctggtcgttagtaatttctaatttttttgttttcttttgagtttttttttcaaaaaatgagtattgccttggagacag

SEQ ID NO: 131892 - DNA, 1001 bp, Zea mays
  Clone ID: MRT4577_51769C.1
ctgccccttcaattcgtaaatttcgtgcatgggcatggaatggatggatgtgaatgccacgaacgattccgccccgccggccaggtgagagatgagcctcacgggcacggcggccttccgtgccaccaaaatcccgcgcgctcttcctccaaagtgcggtgagcctgccgcctcctgctggggctgggcgtccttttatccgccgccgggggccgcgaagagtactaaggcgccgccgccgtggtgcgtgtaccttatagcctcatcccggatccgccgcacgtacgtcggcgtcaccaccgatttccctcgccggatacacatgcttgaaaatgcaaatttaattcacagtttttcaataggctgcggcaacataatggtgagttaaaaggtggtgcaaaagcttcctctgccggcaggccttggaatctcgcatgccttgttgaaggatttgccaacagaagtgaagcctgtgagtttgaatcgaaatggaagatcgtctcccgaaaaattgcacggaaaagaactgagcttagcatgaagtcagtgttgcaacatcgagaagcagctttgagcagagtggaaacattcatggattgtagccacctaaaaatcaaatggcagtcaagttgagaccatttaatcacttgcactatgcaggtggcaggcatctaacttggagaaacataaccacttaagaatcctcctgtcttctagcagctcgtagcaaagataacttataatcttctgctgaacaatcaagatggctgctgctatgctttcttaacatgaaaaaccaagagtagccccagtgaaattctatgtttgatttttttttctatgaacaattgtttccgaacaataatatggatcatgcgacacccgtttgtaaatgtaaattatacttatgtattgtaatcacctatatttcttctcgggcggccgaaaaaaaaaaagggcggccctgagcaattctatgtttgatttttagctctgtgaac

SEQ ID NO: 131893 - DNA, 152 bp, Zea mays
  unsure (1)..(152): unsure at all n locations
  Clone ID: MRT4577_5176C.1
atctcctcacctatcatcgccgctgcgccgtctcctccgctcacgtcgtccgaatagatggcgtcccacattgtttggatacgctcgcantgggccccagagggagctcaagtatgcacttgagtctttctggggatggaagagcaccgctg

SEQ ID NO: 131894 - DNA, 340 bp, Zea mays
  Clone ID: MRT4577_51770C.1
acgcgtccagtagagttcagggcatgggcttcgatcctgtagttgatcctgtcgatagaccgtgatacgacttccccagccaaagctgagatcgcacatgtgatcaaccatatggtgcgtctcggagtgttggctgggtaggctcgtttcgaggggaacgtttttatggtagcaccactgtcgggcttcaccaaagaggattccgtcgacctcactgcggtgaggttcattgcgctcacgagcctatacggcacgcacgccgatgattgtgtgcacaccctgggcgattgccatgtgtactatgccgatgtacaacggtagaattagtgagacagcagct

SEQ ID NO: 131895 - DNA, 231 bp, Zea mays
  Clone ID: MRT4577_51771C.1
gttctagatcgcgaggacggcacgccatggtcccagacaaagctcaaggtactcatgctgatgctgtaaccatgagccagtccaactgagcactgggactcatgctcatgtccggataaacgagatctagcctgagagcagagactagaaaagcttggcaaaggagcgacaagaagctgaagaggccaaggaggccttgctgcaggcctcccgggaccagaaaaagactca

SEQ ID NO: 131896 - DNA, 300 bp, Zea mays
  Clone ID: MRT4577_51772C.1
gatattttccaccaccaccagcgacagcgacgggggggatttgtgcttgtgacagcggtttaccgcaggtggtggcctggcggtacttagggcggcgcgcgctcgtgcaggaaaccactgggaatgtacgccttgaggtggcgcccaagcgcgcgtcaggttcatagcggtctctacactcgttcactcaaagggaccgaagccggtcacaaagacgagggcttcctacaggcccgtgtggtctttacacatcacctgcctacagaactgccactatgaggacccactggaattcgctat

SEQ ID NO: 131897 - DNA, 357 bp, Zea mays
  Clone ID: MRT4577_51773C.1
attcggctcgaggctgctggtgcgctctttgcgccgaggacaaacaggacatcagcgctgctagagatcggcatggggtccaccggcggagacgtggcccgcctggtggacgaggaggcgcgcatgcacgcgatgcgacttgcgtaggggatcatactggccatgacactgaagaaccacatgccgctgggactgctggacgtgctccaacaagaggtcggaggacctcaggttgaactacctcccgaggcggtggcggcaccacatgcccactgggccaagaggacctcctcggcgctcggggcctcctgtaacctatgctacgactgctcgtgtactacgagatccttcgacggc

SEQ ID NO: 131898 - DNA, 356 bp, Zea mays
  Clone ID: MRT4577_51774C.1
ccgtttttcggagtcctgtgctccatcatcgcgccgcgtgcggaggtcacatccctgtcgaccgcgcgcgttggccgttgggagcgcattctggtgcattagccgcccatggcctataccgacagagaaaaggtgacggctaaggagaagcccgacggcggtacggacgttgaggacaaataagaggaggaggatggctgcagggacggcgtctagcttgggcccgaggtccccgttatgggacagatcgagctcgacaaggaccatgagagcctgtggcggtgggaggagcaccttcatgggcaggctgacacctagcatctaggagaaactgcggagccagaggtcacggagct

SEQ ID NO: 131899 - DNA, 491 bp, Zea mays
  Clone ID: MRT4577_51775C.1
gggactatgtcggaccacagctaaccaacccactttgcttcataagctaggtggccagctccaactctactcacacttctctggaggagtacggggcccggacatcagcgccttactgtccaccttatgaaaggatattagacatggggggcgggctctcccagaatctttagggctcttcaatgtctgttagcggtggcatcaatgctccatagatgcccactccactttttggcaatgctccactcgagaaagggggcaaaaacttcatgattgaatgcatgatgggcggtgtttcagatagtgccacaaacactgcaaatgctcccattgaacgagcgaagctgtttattcagaatcaggatgagatgaacaagtctggtacgctatcacagccgtacaaggggattgctgattgcttcaaacgtaccatcaaggatgagggtttctctttcttgtggaggggtaacactgataatgttattcgttac

SEQ ID NO: 131900 - DNA, 606 bp, Zea mays
  Clone ID: MRT4577_51776C.1
acgacccgagaaaacaaatccaccggcgcggagttgccctccttgctgccaccagcaccacctccatccgtccctcctccccgatatatcgccaccaccggctctactgctcgtaacgtctcctccctgcccgccccctccacctccacctcctcccccacaaggttcggttacccggcggggcggcgcgttctctgtccggttcctgcgtcggcggccgggcggatgtccctgttccggcggctgttttaccggcggccgcccgatgggctcgtcgagatctccggcaacatcctcgtatttgaccactgttactccacggatttattggaagaagacgagctaatgccatacattggaggaattttaaaacagctacttggccgccactccatcgactcattcatggtattcaactttgagggaagcaagaaggacaatcaaattgccagcattttctcatactatgacatgtctgtgatgggttacccacgtaactatgaagggtgccccttgctcaccatggagatgattcaccattttctgagatcgagtgaaagctggctctcattaagccaggacaactttctgctaatacatgcagaa

SEQ ID NO: 131901 - DNA, 288 bp, Zea mays
  Clone ID: MRT4577_51777C.1
tactcgtggcctgtgtctccggaaacgacgacttcgagatgcgcgcgcggaaggagagtctgctggacagtggacgatgcggtgctcctgtaagatggccacggagagctggtgcgcgtactgcacgccaagatccatgtctccgattggcgcgagtggctctgcgatcgggcccgtcgctacgcgcgtggtcgcgttaggactcgtactgttctgagaaggtcgacctgcatcgatggcggctctgtatcaccaacagcagcgttcgaggacatgctcaatgcgatc

SEQ ID NO: 131902 - DNA, 231 bp, Zea mays
  Clone ID: MRT4577_51778C.1
accgctagccttagtagtgtacggatggcccgcacgaagcatacggcaaggaagtccactgtctgctcggctacaaggaagcagcttggccactaaggcctcgcgcaactctgccccggagaccggatccttgaagaggccgtaccgttgccttcccttttcatgatgctcgcaagatccgcctgtaccacaagagcacggagcttctgatacctaagctgccgcagccag

SEQ ID NO: 131903 - DNA, 180 bp, Zea mays
  Clone ID: MRT4577_51779C.1
atagtcgatatcagcaagctaacaggcggccttatttatttctggagtcaacttacttgtcataataacaataagaccggataaaactgccagtcatcacccctggtaactaattcctttttacaccatacctgccacacatgatgtgttttttttacaaaacacgagatttacccctgc

SEQ ID NO: 131904 - DNA, 571 bp, Zea mays
  unsure (1)..(571): unsure at all n locations
  Clone ID: MRT4577_5177C.1
gcgcactgctggactccaactcgactgctctgcgntagcggataggctgatcagaggcgagatatgaggagcggccggcggatggcggcagctctggtagcgctggcgtgggtgctcgcggctgtggctgtggcggcggcgcagaagtacaatgccatcttcaacttcggcgactccatcaccgacacgggngaacctctgcagcagcgggaggccgtcgcagatcaccttcacgcagccgccctacggcgagacctacttcggcacgccgacgtgccgctgctgcgacggccgcgtgatcccggacttcctctgctccaagttcgggctgccgttcctgccgccgtccaagtcgacgacggccttcttccgctcgctcgggctctccgacaagatctggaacaacgggcccatcagcttccagctggagtggttccagcaggtcgcgtccgccgtgtgcggcggggggcaggcgcagcaggccgactgcaagagctacctggccaactccctgttcgtgttcggcgagttcggcggcaacgactacaacgccatggctgttcggcaacta

SEQ ID NO: 131905 - DNA, 412 bp, Zea mays
  Clone ID: MRT4577_51780C.1
aggggaattggtgaatgattattgagagcaaggctcgagtcgagtacatataggcaaggatgcccactggaataggaaacgaaatccttgcctaatacacaaccaaacagggaggaggcgcacaaggcaacaagcatgtgctgccactaccaaacccaagggcgcatgctaccccccacccctcgcagtcagatcgtcaaccactgcgcacgttcagactagtcctgaattcggtaaataccgaggataggaagcccttggtgaagatgtctacatactatgatgtcgtcgacacatgtaggacccaaagatcaacgacagcaactcgttctctgacaaagtgaagatcaatctcgatgtgcttggtgtgttgatgctcgacggggttggaagacatgtagacaacactgat

SEQ ID NO: 131906 - DNA, 810 bp, Zea mays
  Clone ID: MRT4577_51781C.1
acacggagtgtcaagctttgaactagtgcaaacttcttgtgctcacacactattctagacagcctccatggctgctgctgctgctgctcaacctcgtgtcatggtgctacccttccccgcacagggccatgtcatcccgctcatggagctgtctcgcaagctcgccgggcacggcctcgcggtagacttcgtgaacaccgagttcaaccacgacctcgtcatggaagcaatggcagagaagggagcaattcctgatgggatccacatgctcaccgttccggacggcctgggccccggagacgaccacgcggacatcggcaagtttgtcaaggacctgccagccgccatgtccggccgcctcgaggagatgatccgatccaggaagattaggtgggtgatcgtggatgtgtccatgagctgggcactgcaggtggccaccacggcgggtgcccgtgttgcctcgttctcgacctactctgcagccgtgtttgctctcaggatgaacctccccaaattgatagaggatggcgttcttgatgaaagtgggaatgtgaaggggcaggggaagatccaaatggtgccgcccatcgacgcgtcggagatcccctgggtcagcctggccagcaccagcgcccctgagaggcgcagaaacaacatccagaacgtcctcaagaccaacctgtcgatgccacttcgccgaggtggtcatctgcaacacttcccatggagttggagcccgacgctctggccctgctccccaacgcgctgcctctcgggcccgctagtggagcccacgtcgaggccagccgg

SEQ ID NO: 131907 - DNA, 413 bp, Zea mays
  Clone ID: MRT4577_51782C.1
caggttgtagaggattcgtagatgcagtaacacgcggacccacttgactcatgcgggcagtgccacgtgggcggtctccaacgggagggcgccggctcgtgctacttctacacgcggttggcgtcacgcaacatgtacgtagagatttgacactcgtgtccctatcgggtggatgggtgtatgcgagtacaaggcgacctgctgatcgcccacgttcgccgccgtctgcagggagatggtctcagcgttaataaccgatccagactcgttcgcttgatcgtacttgctacgccttgggtgactctggcttatcgttctgcgagacctgcaaaccacttagatgaggaggaggaggatggtttccaatgcccatggcttccatgccgagcttctcgttcttatgagcgcgggac

SEQ ID NO: 131908 - DNA, 435 bp, Zea mays
  unsure (1)..(435): unsure at all n locations
  Clone ID: MRT4577_51783C.1
agcgagaggggagccgaggcgncacggcaaagcggcgcnccaggcgcccaagcacagcgccgacgacgcgcgcgcccacagccgggggagaggcgccccaagagcacaaccgcaggagangccagcaaacccgaggacgacgcggcggcggcggcacacagggacagcagggggaccgccaacgncaacaccggcgacagcgccgacgaggccgccgccgaagcngcgcggaggagaaagagaaggaggaaggccagccgaagcccgangacggnaccggcaacggcaccggcgccggagggggcgcagccaagccggngggcaacgagacgagccgacggagcgacaccggcgaggggganggcgacgngcgcgagcnggggagcacccagacgggggacgnggacaggcagaaccggaagngaaagaccaagc

SEQ ID NO: 131909 - DNA, 540 bp, Zea mays
  Clone ID: MRT4577_51784C.1
accaaatattggatcagcttgagctgtcgggcgctgggcgcccgggcttgcccatgatgccacagcaaccgagcgggccgcaggtgaatgggatgcatccgtcggtcacggccggggtcaacaggttcttgctcccggtgtcagagtgcgagtgtacactcagcacgttgctggacgagttacagcctgaccaatggccagtggaggctgggaaccgtgccatccggtgcaccggtgttgctctcagcgtggctgccgggttgcttggtgcttgcatgcctgggactggtgcaatgatcattgcattgctaggtgggccatgtaccgagggccctggaatgattgtttcaaaagatttggcagaaaccaggtattattagatcacatacatctttgacaaggatgcagccgtgtgtgctgacacaattgttggtcaaggaaatacaacagcattggaaaatgtgtgggctcgatagaaatacttctctgacagtattttttgatgtctcaccgagtgaacggtcgagccaaccaggacac

SEQ ID NO: 131910 - DNA, 583 bp, Zea mays
  Clone ID: MRT4577_51785C.1
cgggatcggttctctgctatcggctgcccaacagccgtctttgcgctaagctcattctcttccgccgcatacgttgccaaccacttcgctcggctactcgcgacgccctttgcaacctgatctgcgtgtgactcttgcaaacagatcccgcccctcgaatgttagatctgaaccgacgcagattatctaggacgtagctctggagcagctaattatggagatcgtctagaatctacctgagatcccacactataaagtgccatggaaccaaagggatgacattacacatgcctggatgaattatacatttatgtcttgatggacgtgatggactgctaaacctacatcggaatcctgtctcccctctgcttgacacgtgatgatgacagacttgcagtatatcgcctctagcgtcacacaatcctcttgtgcgctgttccactgagagcaaaccggctatccttggctatctgtgctgtcatgaacttcgccaactaaaacgactaagacttacaccccaggacaccatggatcatgtactcatcggatatgactgatagcatcactgatgatattactcatg

SEQ ID NO: 131911 - DNA, 362 bp, Zea mays
  unsure (1)..(362): unsure at all n locations
  Clone ID: MRT4577_51786C.1
acacaacacaagactttagnataatacaaaaggaacaccaaacgacgcaggaagataactttaaatagcccttccgcccaaaccccaatctttacgttcaagctgcattacacgtaacaaccaaatactaaacgcacttaataaacggactataaaagacaggcgccacataaagttcagggacacccaaatgccaactaagaaacaacaccacttaaaaacaaccaacaacaatcaatattctgcaaaaaacattcattacatcaagtgcaccatggcatgtgaataacaagaccgttacagccactcatcataaagatgccaaaaaaagaacacagcacgcaattacacaatgctaccat

SEQ ID NO: 131912 - DNA, 179 bp, Zea mays
  Clone ID: MRT4577_51787C.1
tacgcgcgcgccgcacagtcgcctctcagagcatctgtgtaagagagcgcagaccagagctcttctctgcctctgcgcccgcgcacacttctctgtgacaacacttgtgacatctttccccgcccacgcacacgcgatgtgcccccccgccacatgtggggtctccccgctctcgggcg

SEQ ID NO: 131913 - DNA, 285 bp, Zea mays
  Clone ID: MRT4577_51788C.1
ctgactcttgggctccaactcactagtacttttccgcctcaatcaggggggcagttacctgtatctcttctcttagttgctctgactctattctttccaagtggaagaagaataggatgctgatgctcaagtgtaagctcctgaaaatgtgacatatatctacttaatcttatattagttacttattattttatatttttttatgtaaattacctttttttttattaattattatttatattattttatataatattttttctatttatttttttatatttttat

SEQ ID NO: 131914 - DNA, 956 bp, Zea mays
  unsure (1)..(956): unsure at all n locations
  Clone ID: MRT4577_51789C.1
gtcatatgttgggagcgacaattgtggtagcgtggttggaggacggggaaggggctgatggctgtagactggtgagggtatgtcagtgttaagggccccttggtggcgcctccctctcctagttggcgacgaacagtttgccacttcttccacaagctcgaggacggtcaatgaccttgctgtctcctccttgaggaaggcacgtcgagcttgatctatggcgtgcttggtctccacttcgagctgcttggtgacagcctcacattccagcttttccttggctgcgggggcgatctcgtttttggaccctccttgcttcatgttgcccaggcagacgtcgaccttggcaaggtgctcttgcaccttgtccatgtgcttggtgagatcagcagcgagggtctcgagccactccatttctgtggacatggtggaattgttacccatgggatcgagacggttgggggggggggttgttgaattccaagcaaactagagtgagagataaagggaggagcaatagctctagtcttgcttagattgaaatggatacattgccgagtatgtatagtccttattagaattgtataccaagcaaactagatgattccttatagatttagacttgtattccaagcaaactagaagagtccttacagatttggattcactattcctaacaaaccaatctccttttctaaacgaactcgatttatttattccaatttatcgaaggctacctccagatttttgatctatttctgttctctccggcgcgatgaactctacgagcggcaggggctgcgccccctgtctcgtgcacttcttttgcggtgccagggtgaggccacggctcaccagggcctgacgttgggccttcatgagggcacagcttgccagcgctaggcctgatgctgtggcccttatttaggactgtggcagncattgaagtgttttct

SEQ ID NO: 131915 - DNA, 2102 bp, Zea mays
  Clone ID: MRT4577_5178C.1
ttcacaagtcagtcagaggaatgattatcgggaaatcggactactaaccgaggctgagatcttcatgctacgcatatctgccctagtagaaaataggaaccatgaatatgagtactttagaacactgcatgctgataatgttccaaataacaatgcttttatggaaaatgagagcaacttgaaagaaacagagggtacatgcacagggaacatcattgagaagacttgggtaaagctcctaaaggatgctacatcaggaaggaaatgtaatggcatggaggagaccatacatgctgttatagataaggcaggatttgcctctggttgccccaaagatgcatcttccaatgtcgtagaaggggttttcactttatcttgttacgaaaacccagctatcactgcttgcagagaagtgctaatgaggaacccagcttcttggagtgaactgaatatatctgaaagttttcatctccctccactgaatgatgggaacatgcgaagagctatatttgctgatgggcattctgcaggaactagcactgattataagtttggtttccagtttgatgatctggaacatgtccgccaagaagatgacagaaggaccttggaggacctttacgcatttccaacccttcttccttgcgcaaaagaaaatgcgctgctgtcagaaattttacctatgcagaaagatagtacactagcatcgagagttttgaagtttattcagaatatgagcatgaaagatccccttcagccagtgggtatcatccaagaatgcctttccaaatgtataaagagacaggtcgatctcataggcaatcaaatcctgtgcaagctaatgggtgaatggagattaatggatgaactgtttgtgttacgtgctatttatttgctaggatcaggtgacatgttgcagcagtttctgataacaatttttgataagcttgatagagggaattcctgggatgacgactttgagttgaataatttattgcaggaatccataagaaactcagctgacaaaatgctcctgacagcaccagattctttggttgtttcattagcaaaatatgacacacacaatggtgaggaaggtctatcaacttccaaaaaaggtcgtgcacttggttttggcattgatgcccttgacatgctgaattttacatataaggtgtcttggcctcttgatctaattattaatacagaggcactgaagaagtataatcaggtaatgggattcttactgaaggtcaaacgagcaaagttcgttttggatgaaacacgaaagtggatgtggaaggccagaggcaggaccacgcacaatttcaaacaacacctaatagtggcacagaagctcctccattttgtcgatgcatttcatcagtatgtcatggaccgagtttatcatagtgcatggactgagctttgtgatggcatgacggctgctaccacactggatgaagtcatggaagttcacgaggcatatctctcttctattcaacgacaatgctttgtggcctctgataagctgtgggccctcattgccagtcgagttaagactattcttggattggcactggacttccacaatgtagaacaaactctcagtaccggtgggacggcttcagctgtgaggacacgatgcgagatggaaatcgaccggattgagaagcaatttgatgagtgtgtcatatttctcctgaggatcctatctttcaagctcaatgtgggtcatttcccccatcttgccgatctagttacaaggatcaattacaatcactatttcatgtctgatagtgggagcttctctgctattcctgggtcccggccacggtagtagactagtagttgagcaagcagtggacagaattgttggtgttgcacctgggtgatttttcctacccttttttgagaagaaccagaggcgtggtttgtttactttcgaaatagaaagctccagaacagtgctaatgcttctctctccaaattggaacaaaaaatcatgcctcgggcttgttacaatatctatatgtacattgttttcaaaaggatgacactaaaaaaggtggcataaaatgcggctgaacctgttacatttt

SEQ ID NO: 131916 - DNA, 263 bp, Zea mays
  unsure (1)..(263): unsure at all n locations
  Clone ID: MRT4577_51790C.1
attctagatcgcaggcagccgctctagattttttaagtttacgtactccttcattgcgcggcttanaatgttagaggagaggcaggctatcctcaatncactggccgtcgatttacaacgacaagactggggtaacccttgcgatacccaacttaattgccttgcctcacatgcccatttctccttttgacgtgatctcaaataagatagtacccatcgtgttttccaacaattgctcagtcaaaatagcgaattggactctc

SEQ ID NO: 131917 - DNA, 3315 bp, Zea mays
  Clone ID: MRT4577_51791C.1
atggtggcgactactcgtcgagctctgttcctctcctgcttccacggcggctcagagatgagcccccgcctctccctgcgcccgcggtacccgtcaatgccgcggcggccgaagggagtggcggctgctggcggcggaggaaacggcgacctggaggccgcagtcggtacgggggacgacgaggaggagaaggtggcggtgttctccgtgtcggggatgacctgcgctgcgtgcgcggggtcggtggagaaggccgtgaagcggctccccggcatccacgacgccgccgtcgacgtcctctggggccgcgcgcaggtcgtcttctacccagccttcgtctcggagaacaaaattaccgaagccattgaggatgttggttttgaagcaaaattgattgatgaggaggtcaaggaaaagaacattctactatgcaggctacatataaaaggaatggcctgcaagtattgcacaagcacagttgaatttgccttgcaagcttctcctggggttcaaagagcttcagttgcattggctactgaagaggctgagatccgttacgatcgcaggataatttctgctagccagctaatccaagcagtggaagaaactggctttgaagctttactagtgaccgcaggagaagaccagagcaggatagacctcaaaatggatggtgttctcgatgagaggttgataatgatcttgaaaagctctatacaggcccttcctggtgtggaaaacgttaaattcaactctgaactacacaaggtcaccgtctcatacaatcctgaccacacaggcccccgggacctcattgaagtcatcaaggcagccacatttggtcatgtcaatgcatcaatatatctggaagcagatggaagggaccagcataggtatggggaaataaaacaatacagacagtcgttcttgtggagcttaatattcaccattccagtttttctcacctccatggtgttcatgtatatcccttggctgaaggatgggctggaaaaaaaagttgtcaacatgatgagcattggtgaactacttcggtggattttgtcaacaccggtccaatttgttatcggtcgcaaattttatactggtgcttacaaggcaatgtgccgtggctcaccaaacatggatgtccttattgctctagggacaaacacggcttacttgtactcggtttactcagttcttcgagcagctacctccgggaattacatgtcaactgatttttttgagactagttccatgctcatttcatttattcttcttggaaagtaccttgagatcttggcaaaaggaaaaacatctgaggctattgccaagctgatggatcttgcgccagaaactgcaacactgttagtgtatgactatgaaggaaatgtggtaggagaaaaggagattgacagcaggctaattcagaaaaatgatgtgatcaaagtagtcccaggtggaaaagttgcttctgatggatttgttatttggggccagagccatgtgaatgaaagcatgattactggcgaatcacagccagtagcaaagagaaagggtgacactgtaattggaggtacagtgaatgagaatggtgtgcttcatgtccgggctacatttgtgggatcagagggtgcactggcacagattgtaaggctagttgagtcggcgcaaatggcaaaggctcctgtccagaagttcgctgatcatatatctagagtctttgttcccctggtgattctgctttcaatggttacttggctcgcatggtttgtcgcggggaggctccatagctaccctcagtcatggataccacgattcatggatagcttccagctcgctcttcagtttgggatatcagttatggtgattgcctgtccttgcgccctagggctggctaccccaactgctgtgatggttgcgactggagttggtgcctcacatggtgttctgatcaagggtgggcaagctctggagagtgcacagaaggtcgactgcatcgtttttgacaagacagggacgctaactattgggaagcctgtcgttgttgacacaaggcttctcaaaaatatggtcttgcgtgaattctatgactatgctgctgctgcagaagtcaacagtgagcaccccctggcaaaagcgatagtggagcatgccaaaaagttgcgtccagaaggaaaccacatgtggccggaagcaagggaatttatttcagtaaccgggcaaggcgtcaaggcggaggttagtggcaagagtgtcatcgtggggaacaaaggcctcatgctgtcctctggcattggtatccccttggaagcttcagaaatcctcgtggaagaggaggggaaggcaaggacagggattatcgtggcagtggaccgagaagtggcgggcgtaatctctgtatccgatccgacaaaaccaaacgccctccaagtgatatcgtacctcaagtccatgaacgtggagagcataatggtgaccggcgacaactgggggacggctaatgctatcggcagagaggttggcatcgagaagataatcgctgaagcgaaaccggagcagaaggccgagagggtgaaggaactccagctgtctggaaggaccgtggcgatggttggcgacgggatcaacgactcccccgcgctcgtctcggccgacgtggggctggcgataggcgcggggacggacgtcgccatcgaggctgcggacatcgtgctcatgaagagcaacctggaggacgtggtgaccgccatcgacctgtccaggaaggccttcttccgcatacggatgaactacgtctgggcgctcgggtacaacgtcgtcggcatcccgatcgctgcgggggtgctcttcccgtccaccgggttccgcctgccgccgtgggtcgccggcgctgcgatggcggcctcgtccgtcagcgtcgtctgctggtccctgctgctgaggtactacaaggctccgaagattgccggcacagctaaagaaatttgaattactaccctgtaggcaggtatcactggccggcactgctgctgctgctggaatgggaaggttgtggctggctggctgctaagtgctaacaatcgctgaaacagaagtctaaaaagaatcgctggaacaagcaagctgtacatatgtgttacaagtatatatacggcgatgctaagtgaaagtggtggtgtaacgtaagtactactactgatctgccatcgttgcatggatgtataccgtttttcttttcctctcgaaatgaaaagtggtcctatggcacactactgctatgatggggcctgaataaaaaaaaaaaaaaaaaaa

SEQ ID NO: 131918 - DNA, 383 bp, Zea mays
  Clone ID: MRT4577_51792C.1
cgaaccagagctgaacggtttcgaagcagtattatatgctcatcaaggatccgagccaacgggggaattgttgcgggtgagcagacgcccacggaataaaacacgccgaaacaagggcttatcaccgaccctgatacctcgatctggaacaaccgacatgctgatgaaagataaggttgtgaaaaagtgtatggaggaatggattctagccactacaaaggtgatcacacgtttgtcccagtcactcggaatggatacaggctagtcaacattgggtgatgtccttgttgatgtaaagaccactgggttctgtgctggtggcttagcatccatctcatattcgggaactaccttgtttgttggtcccacatacattattactg

SEQ ID NO: 131919 - DNA, 3425 bp, Zea mays
  Clone ID: MRT4577_51793C.1
atggcggcgagcactcgagccctctttctctcctgtttccacggcggcggcggcgccgaggtgagccgccacctcgcgctgcggccgcggtacccgtccaatccgcggcgccctaggtcggccgtggtagccggcgaaggaggtgaaggcggaggaagcggtggtgatctggaggccgcgaaagggacggcggatagggacgaggaggagaaagtgtcggtgttcgcggtgacgggaatgacgtgtgccgcctgcgcggggtcggtggagaaggccgtgaagcggctcccgggcatccatgacgccgccgtcgacgtcctcgggggacgcgcgcaggtcgtcttctatcccgccttcgtgtcggagggaaaaattagggaagcgatcgaggatgttggttttgaagctaagctgattaacgaggaggtcagagcaaaaaacattctagtatgcaggtttcatataaaagggatgacctgcacgtcctgcacaaacacagtagaatctgccttgcaagcttttcctggtgttcaaagagcttcagttgcgttggctactgaagaggcagagatccattatgatcgcaggattgttactgccagccaactcatccatgcagtggaagaaactggctttgaagcaatactaattactacaggagaagatcggagcaggatagacctcaaactagatggcgttttgagcgagaggctaacaatgatactgaaaagctctatccaagctcttcctggcgtggaagacataaagatcgatactgaactccacaaggtcaccgtctcgtacaagcctgaccagacaggtcccagggacctcattgaagtcatcgagtcagccacttctggtggtgttactgcatcaatatatgcagaagcaggaggaagggagcatcacaggtatggagaaatcaaacgatacaggcaatctttcttgtggagcttaatattcactattccagtgtttctcacttccatggtgttcatgtacatccctgggctgaaggatgggctcgaaaaaaaggttatcaatatgatgagcattggcgaactattgcggtggattttatcaacaccagtgcaatttgtaattggtcgaaagttttatactggtgcttacaaggcaatatgccatggctcaccaaatatggatgtccttattgctctagggacgaacacggcttacttctactcagtttactcagttcttcgggcagctacttctgagaattacatgtcaactgatttttttgagactagctccatgctcatttcgtttatccttcttggaaagtaccttgagatcttggcaaaaggaaaaacctccgaggctattgccaagctgatggatcttgcaccggaaactgcaacactgttaatgtatgactatgaaggaaatgtggtaggagaaaaggagattgacagcaggctaattcagaaaaatgatgtgatcaaagtagtcccaggtggaaaagttgcttctgatggatttgttatttggggccagagccatgtgaatgaaagcatgattactggagaatcacggccagtagcgaagaggaagggcgatactgtaattggaggaacagtgaatgagaatggtgtgctgcatgtccgggcaacatttgtcggatcagagactgcactggcacagatcgtaagactagttgagtccgcacaaatggcaaaagctcctgtccagaagttcgctgatcagatatctagagtctttgtcccactggttatcgttctctctttgcttacttggcttgtgtggttcttagctgggagattccatggttacccatactcatggataccatcttccatggatagctttcagcttgctcttcagtttggaatatcagttatggtgattgcctgtccttgtgccttagggctggcaactccaactgccgtgatggttgcaactggagttggtgcgtcacaaggcgttctgatcaagggtggacaagctcttgagagtgcacaaaaggtaaactgcatcgtctttgataagacaggaacgctgactgtcgggaagccagtcgttgtcaacaccaggcttctcaaaaacatggtcttgcgtgaattctttgattatgttgcagctgcagaggacaacagtgagcacccactggcaaaggcgatagtggaacatgcaaagaagttctactcagaagaaaaccacatctggccagaagcaagagatttcatttcggtccccggacatggtgtgagggccaaggtttgcgataggagtgtcattgttgggaacaagagcttcatgctgtcatcaagcattgatatcccagtggaagcttcagaaattctcatggaagaagaggaaaaggcgcaaacaggcattattgtggctatggatcaagaagttgtgggcataatttctgtatctgacccgataaaaccaaacgcccgtgaagttatatcttacctcaagtccatgaatgtggagagcattatggtgactggggacaactgggggactgctaacgccattggcaaagaggttggaatagaaaagatcatcgccgaagcaaaacccgagcagaaggctgaaaaggtgaaggaacttcagctgttaggaaaaactgtggcgatggttggtgacggaataaacgactccccggcactagtttcagctaatgtaggcctggccattggcgctggaacagatgtcgccattgaagcagccgacatcgtcctcatgaagagcaacttggaggatgtgatcactgctatcgatctctccaggaaaacgtttttccgcatacggatgaactacgtgtgggcgctcggctacaacgtcattggcataccaattgctgcaggggtgctcttcccatcgacccggtttcgcttgccaccatgggttgccggcgccgcgatggcagcttcgtccgtcagtgttgtctgttggtccctcctcttgaggtactacaagagtccaaagaagtttgacaactgatgacaccgcccggaccggagcgaccaaagcagtgttattaaggtaataaaagaagctaatattttaatgggtaaaactatttggtgagcgacaggtgaacattctggagttgacaaggaattgcgtgcgtgaaataaactgtacatatgcattgcttatgtatgatatatattcacatggcaaaatcctggattttatgaacatgttggcatagcatagttacattgtaatatatatctcacctttcacttttgtaagaaactgaggccatgtttggtttcatttagtcttaggactaaactttagtcctaggagtaaactttagtccctacttgtttggttctagggactaaataggttctaaagtcattaaatacattgtccaaagactcaaatgctcttggaatccactcatgtgggctttt

SEQ ID NO: 131920 - DNA, 709 bp, Zea mays
  Clone ID: MRT4577_51794C.1
cattgggtacctcgaggccggccgggaattctcatgcaacttcatatgtagctctacgtctcgtttgaccactctcactacaagatgattctgagggacgagccttgtcagtgatgagaatctgccacgcgcccaccttggtccactcaccagcaaggtcttacggagggaggaccgtgcgcgctccgcgcgatgagcgactacgacgaagcaggtgaacgaccacgaggacatggcgaaccgccctcagctcgcctctcttgctgccagcgcggaggccctgcacgagaagcgcaaggccaagaacgaccccgagatgatgaacgggcaccgagagccggaggtggtggcacgtcggcgtcgccgtgatgctccgccggcttcttcttcctcgacgcacgttctacaagaagtgacgtacggatacacggccacgattgatgcgtcatagtgtgtgcctcatcctaatgcactagagcatcgtcgaggcttggtgtttcatctgttctcccaggctcgtctgcttctactgtgtgacaaagcaggccatgatttgaggcatttgagctaccgatatattgcacggaccttggtactgagctggtcctcggcgtggttgaatcacgatcaaatcaagtctttaagtaagtgcgagtgtgaacatatatcgttttttccaaattatcacgtattgtttgtatcgtgagat

SEQ ID NO: 131921 - DNA, 281 bp, Zea mays
  Clone ID: MRT4577_51795C.1
ctccaatcaaaggctataaacatttaaattggtcccggcgagaaagtgcacaaccataaaaaatctacttggcacaccacggaaactactttccgtaaaaaacatccttttttttaccctggactatgtgggaacagactctgaaaaaaaaaataatttcccaaccagaggcccaaactttatagactgatttgatcccccccccccaggccccaagtttttttatttaatgaaacccgggcacacccaacacaaatgtttctgcatttggttatttgggg

SEQ ID NO: 131922 - DNA, 225 bp, Zea mays
  unsure (1)..(225): unsure at all n locations
  Clone ID: MRT4577_51796C.1
caaacgggcgcctgagagggcatatatnttttgtcacaagctggaaggaacaaacgcccctttccagcaacatatgcatcacatgcaccgggacctggttggggctgggttggggtgccagtgtatttggtgccaacacgtggttagatatttcacatttctttaacccaaaagcagaccatccccaaaaaacgggcatttctgacgggaacctccaccgggggg

SEQ ID NO: 131923 - DNA, 250 bp, Zea mays
  Clone ID: MRT4577_51797C.1
agcaccttcccaaaaaatcccccattttcttcgaggcgacgagagcgtgaaagacagggtacacggcagcgacgatgtcggggcgcgtgcaagggcggcaaaggtctgggtcaaggcggtcaaagcgccaccgtaaggtgctccgtgacaacatccagggcatcaccaagcccgccatccggaggctgctctcggaggtggcggcgtgaagcgcatttcgggggcttatctacgaagaaacccgcggcgt

SEQ ID NO: 131924 - DNA, 421 bp, Zea mays
  Clone ID: MRT4577_51798C.1
ggtcgaccgacgcgtccacggacgcatgggtccgactatggaggttgaccctaggcgtttggttagaaaaactcacaaaggagagttccaagttgaagttgaagagccagatggtttctcagtggaggttgaacttgggagtaatgttactaacattccatcaaaagctgttgaagatcagacaaagtctaatggaacagatggtaaagtagatgttgaagaaaaggacaaagcatctgatagcgcttcacacaatgaggatggcagaacaggcaacaatggtataccaggtgatgtagaatgtatcgataatgagaaagctgatctcatgcaggaacttatcttggatgatgtgaaggacactgtaaatctcccaccaattccttcgttagatgaattcatgcagggcttagattctgag

SEQ ID NO: 131925 - DNA, 1350 bp, Zea mays
  Clone ID: MRT4577_51799C.1
tggcttggaacctttgggctgatttatgtgcttgtacatttgcgtgtgtatgtgcgggtgactatgataagacggtgcgtatagataacgtgacgagagttccgccttcttcggcttctcctcgtactgcgtacggcgagaaggaagagctaaagggtactgacgtgaaagtgcttgggttcggcgggcttcctgatactattaagccgggtgttcttggtaacggtaagatagatagtatgaaggtcgcgtaggaggtacgggtactggtgcgtggtggtatcgggaagtagataacttctacatttaagggtgatccttccgctggataatctaatcctataggtttccgtaagggtgatgcgattacttaggcggacggtaactcgtcggtgattatggattcaagttagcataaggactacggcaaccggactgagacctcatgtgcggacaattccgctactattggtaagggaaagtctgatgtgtaggggttaggtgcgcggagtaagcatgttcgtgctaagaagcatgatcgtatgacttcctttaatctgtcggcgacggatcctgcgaataatggggaggcgcttggggctatgtcgtctaatcttaagcctccttatacgaatacgcattagcgtaaggatacgtcgactaaggatgcgattgcgatggtgtttggggatagttttaatatggacggtacttatacgggtgatctacttgggactatgactattaatattgctaccggtgctggcgatgatcgtactcttactggttttgggattcttaaggcgaatactattggtgcgattcgtggtttcggttatggtactagtactggtagttcagggtggcataaggatgagaaggatgctatggatactaatgctaaggaccgtatctccaagaagatgacgcctggtgcttgtactaaggtgcatgaggatgttgctcatgcgtctattggtcggaagacttatcatgagaacactaagacggacgatctagttaattttactcctactgatacgaagcatcgttttaataagccgcgcatcggtaatggtgttcctaaagctattgctaaggacgctattcctaagaatactattggtattcttcgtaatttggaggttgccagttcgtctcgtatcgttaagagcttacgtattggtgccattacggacgatgcctatgctcgagcacagtggtgttaataatgagattacggtctcccgtttgaatgttgacggtgagtattagggccgctctaaggagtccggacgtcctcagatttcgtactgatcgatttactccctcaggcaccacccactctcc

SEQ ID NO: 131926 - DNA, 1458 bp, Zea mays
  Clone ID: MRT4577_5179C.1
cctcgaggccggccgggccgggcctgctccattcaagcgcactgctggactccaactcgactgctctgcgtagcggagtaggctgatcagaggcgagatatgaggagcggccggcggatggcggcagctctggtggcgctggcgtgggcgctcgcggctgtggctgtggcggcggcgcagaagtacaatgccatcttcaacttcggcgactccatcaccgacacggggaacctctgcaccagcgggaggccgtcgcagatcaccttcacgcagccgccctacggcgagacctacttcggcacgccgacgtgccgctgctgcgacggccgcgtgatcccggacttcctctgctccaagttcgggctgccgttcctgccgccgtccaagtcgacgacggccgacttcaaggagggcgccaacatggccatcaccggcgcgactgccatggacgcgcccttcttccgctcgctggggctctccgacaagatctggaacaacgggcccatcagcttccagctggagtggttccagcaggtcgcgtccgccgtgtgcggcgtggggcaggcgcagcaggccgactgcaagagctacctggccaactccctgttcgtgttcggcgagttcggcggcaacgactacaacgccatgctgttcggcaactacagcgcggaccaggccagcacgtacacgccgcaggtcgtggccgccgtcgccagcggcgtcgagaagctggtggccatgggcgccacccgacgtcgtggtgcccggcgtcctccccatcggctgcttccccatctacctcaccttctacggcacctccagcagcgccgactacgacagcctcggctgcctcaggaagttcaacgacctgtccaccaaccacaacaaccagctgcaggcccagatctccggcctccaggccaagtacaagtcggcgcgcatcatgtacgccgacttctactccgccgtctacgacatggtcaagaatccaggcagctacgggttcagcacggcgttccagacgtgctgcgggtccggaggcggcaagtacaactaccagaacagcgcgcggtgcggcatgccgggcgcctccgcgtgctccaacccggcggcgcacctcagctgggacggcatccacctcaccgaggccgcgtacaagcagatcaccgacggctggctcaacgggccctactgccacccggccattctccacagctaaagcgacaggggggcccaattaattattaattattattatttgttgtttacgttgccggggaagaaagaaaaaagaaagtgtctcagcaactgcatgcatgtgttcctggtccctcactgctgtgacttacagagtattatatatatattagtactatgtatactggtcctcatttacaaattaaatggtatagggttttctaaaaaaaaaaaaaaaaaaaaaaaaaaaattcaaggcct

SEQ ID NO: 131927 - DNA, 526 bp, Zea mays
  Clone ID: MRT4577_517C.1
aaaaaaaaaaaaaaaaaaaaaaaaaaaaaaaaaaaaaaaacaaaaaaaaaaaaaaaaaaaaaaaaaaaaagtttgtacctaaggccgaaaccacccttaagggggaatttatgaaaatttccataaaactgaagggctctttccttcttgcgttaacaagggccaagtgcaatcttttagggattcctttaacattggagtggccggggttttacaacggggggcctggtaaacccttggggttccccaatttaatcgcctggccggactttcccctttcgccggttggggaaatcccgaggaggccccaacttatcgcctttccaaacattccctttcctaaatggggaatggaccccccttgccccgcccctttaacctcgcagggtgtgggggttccccacagggtaaccgctccccttgcaagggccctattacccgctcgtttgggtttgttccctccctttgtgcccctttctttggttttccccttaaacctctaatttgggggttctctttagggttc

SEQ ID NO: 131928 - DNA, 733 bp, Zea mays
  Clone ID: MRT4577_51800C.1
tgcttcagcaatgaaatgttttcagcagtggtttatgaaggttcttcagtctttccttctggcctggagggagaatataccacgtgcatttctgtaatgccgctgaataatactgtactgcctatacaacaacatgacccttacagaactgttccaggctatcatattgctactggttgctctgatggcactgtaaaactttggaagatgacttgtgcagaggactctttgcatactaagaaagaaagacacatctgggagctagtaggcatgtttggtgctcatcaaggaccaattgacatagtttcattgtcaggctgtggtagagttattactgttggcagaaatttgaagaaaaatagcacctccattcatatctgggaagcaacaaaaatcaggggagacgggaattttctgctaggagatacactaatgttgcaagaccatattgttggtttagatggactatccttaggtgatggacgatttctacttgcagtttatctagctaatgagttacatatatattctcataagcacccgtccttccagaatgtactacacactaagaattcaaaagaagagcatctttggagctgtattgtattatcccattctcatcatgatattgttggctttctttggggaccaaaggcaactgttgtgcttgttcatgagaaccatctttcactcttcagttcatggctagtaactggagataatgagtacatga

SEQ ID NO: 131929 - DNA, 557 bp, Zea mays
  unsure (1)..(557): unsure at all n locations
  Clone ID: MRT4577_51801C.1
gctacctctaatcattaggcacctgctatgcccaaggaaacaaaagtcttccgggtccaagaacctgaatgtgctggactgggtatttggtgtgccgccaccacccgacagtgaggataagaattgctatctaccagatgaagccaagaaattccagtgacatactggcttgtagagttcattgcgtgatttttgtatggtcactcatgtgatcctagcgcgagactagacccattatagggtttagtgaacgaacctgaaccaagtagaacagagtcgttccatccctgattctagaaacggagccgctctgttctgtgtttggtaatctcggacggagcggctctgttttttgtttggatgcacagtgaacggaacggagcgtgactgtgcgagcgagctggaaactctatttatgttcattttgcaattaaaactaattaagggctggaacgaattgtggannnnnnnnnnnnnnnnnnnnnnngaggactagaacctttaattttagttaaaataggaagggatgagaatgcaaatagtaaatcatgcttatt

SEQ ID NO: 131930 - DNA, 782 bp, Zea mays
  unsure (1)..(782): unsure at all n locations
  Clone ID: MRT4577_51802C.1
aattcggcacgaggtctgcttcctcctcacgggcgtgcgacgacgtcagcaaccccgccgagtacccctccttcccctcgcagtcgccgagggagcaattccgcccccaatcggccgcctgaacccttcttccttcccttcccgcggcatccgatgtgcgttgccgccgccgccgcgctcagatagcccagcctagctggcgacgacgaggagggggaccgtagccctaacgatccggtccccacatggcggggagctttcgcgaggcgcgcggggccgggggacacccacgctcccccgcccccgcccaccccacccttcttgcagntcctcgcgctcgacgcgctcgcctcctggggctccgaccccaagcagccgcactggcgccaccccgagctccgccgggcgctcgcctccaacgaccagaccgacgagctcaggcggatccgcgccagcgtccaggactccgcggtcaaggccaaggagaaggtcaggtcgctgcacgaggccatccagaagctcgacaagtacaagaacattgtcacacgcaagcgccagcgcgccaccgaggcgtcgtcctcgcccgacaagctcggggctgccggtgcctgctcctcgtccacaggcgcgctcaggatgggggcgcagaacaactctgccgtcttgagcaagcgcgtgcgctcctccctcgctgatgcccggtggaaggacgtggtagtgttcctacaaggcaaggcccctttggttagtaatgagaaaaattcacctgtggagaaggaaaa

SEQ ID NO: 131931 - DNA, 239 bp, Zea mays
  unsure (1)..(239): unsure at all n locations
  Clone ID: MRT4577_51803C.1
gcctatacagctccaagctcanaagcatcagcatggcgactggactacttttatgtggggaaaatgtaacttaatacaatggccagcgttgctcaacttctcgtctggctaatccttctggcgctgcctttcattcgcgtttccatggatggatcatgggtctgctgaccgtaatagcgcagaggggcgctccaaggggagtcgccaacactagtgcatcctgaacggcgaaaggtact

SEQ ID NO: 131932 - DNA, 184 bp, Zea mays
  Clone ID: MRT4577_51804C.1
ggaagtcggtgcgcgttgatgcgcctgtgatccatggggaggagaccggcggcccgaatctgaacaccaataccatagtgagctgctcatggagagcgcggctgatctctgagtattgtgtcacgtttgtgaacacagtacacgtgaatggcgtggcttgcgctgaggagttgacttggagctg

SEQ ID NO: 131933 - DNA, 654 bp, Zea mays
  Clone ID: MRT4577_51805C.1
cctcgaggccggccgggccgtgaatcccgatgagcatctttgcgactagagtcccgaactaccaagagatttgacaacccttccttggtgcagacctctccacagatacgcacggcgcactgaacgaccacttgctgactcatggatatctgtcaatcgatgataaaagatacatcaacaccaatagagatacaccacgatgagctcttccttgccctaaacctcctgtaagctagacacacacgatcactggctgcgacaactcctgttgtggtccatgccttccagcgccgtcaatcatgtctactccagacactcacaacacacatcaaactgtccgatatactcgactagagatcaacgagagcattcaacgtgctactacacactatagaagtgctaccccagtactactagtgctcgcccgtaggtggaagcgctggagagacctcgacgacgatgtgagcgtctgcaccaacatcaaggcctaggtgcatcggaatccagctcaacgagcccattagactcaacttcatcactcacaactggcgcaggaattgtccagatgacttcacttgccccaactaagcttggaatccctcgagtgatccatctacgcgattctatttacgagcatgtcgacctcttgcaata

SEQ ID NO: 131934 - DNA, 823 bp, Zea mays
  Clone ID: MRT4577_51806C.1
gccgggccggccgggcactcgccccccaaaccgagctcgaggacaggagacacaccaccacgaacaagaaagaaccgcacggtccccgttgcgtggttccgccgcgtcgcgtgtgcatttgcgcggccgcccaatccgatccggcgaagatcggccgcccctccgacccggcgaagatcggccgctgctccgggagcacccccaccccaccaggtggtaggtaatcgttgctggttccagaagcgtcgctgcagcgaatcttgtgtcctcatggctcagtctcaacagatggcgagcaggaaacctcctggccttaggctattcggaggtgccggttcgctgagaacctaccagacgctagtcctggtcctcacattcttcgcatacgcatgcttccacatgactcggaagatcacgagcatcgtcaagagcgcgctggacccccagacgaagatggggttctcccactggggacggctgcacctgcacacgagcgaggctccggctcttaacactggctggctgccgttcaacaccgctgacggctcagcgttgctcggcgagatagacgtcgcgttcctcgctgcgtattccatcgggatgttcttcgccggacacatcggggaccgcatagatctaaggatctttctgacgatcggcatgggtcgggactgccgtgttcacggctctcttcggcgctggatactggctgaacgtccacagcttctactatttcctttccggccccacaccaagaaggggttctccccctggggacggctgcacctgcacaccgagcgaggctctggctcttaacactggc

SEQ ID NO: 131935 - DNA, 125 bp, Zea mays
  Clone ID: MRT4577_51807C.1
gggacacaaaggccactttgttttatagtttcagccagtcagctacatacatttgcacaaaatcgaaaagctagccaaatacactggacatttttacacaggggcgcggggcccaaatttagctt

SEQ ID NO: 131936 - DNA, 869 bp, Zea mays
  Clone ID: MRT4577_51808C.1
cggccgctcgaggcggcggactccacagctccaccattctctagtcgatcacacacgctctcctcgccgccaagatgttcgggttcgggcaccaccacaaggaccaggcgccggcggcgtcgggccccaaccagatcttcaagatctactgccgggcctcggaggactactgcctcgccgtccgcgacggcgaggtggtgctcgcccccgtcaaccccaaggacgagacccagcactggctcaaggacatgcgcttcagcaccaccgtcaaggacgaggagggcatgccggccttcgcgctcgtcaacaaggccaccggcctcgccgtcaagcactccatcggccagtcccaccccgtgaagctggtgccgttcaacccggcgtacgaggacgcgtcggtgctgtggacggagagcaaggacgtgggcaagggtttccgctgcatccgcatggtcaacaacacccgcctcaacttcgacgccctcaacggcgacaaggaccacggcggcgtgcacgacggcaccaccgtcgtgctctgggagtggtgcaagggggacaaccagtgctggaagatctggccgtgggccgaggcgcacgccgccgtcgagtccggcgccaccatgggcaacaacgcccacgccatgggcggcgggccccccgtgcacgccgtgcgcatcttctgcaaggccggcgaggactacagcctcaccgcccgcaacggcaccgtctgcctcgcccccaccaaccccagggacgactaccagcactggatcaaggacatgaggcacagcaacaagatcaggggacgaggaagggtacccctgccttcgcaatagtgaacaaggtcaccggcgaatgcatcaagcact

SEQ ID NO: 131937 - DNA, 177 bp, Zea mays
  Clone ID: MRT4577_51809C.1
gactcaaataatgtaatggagccgctggctagctacctacaaacctagtgcactagggaaacgatgacaaaccgaaaacacatgggctacacacataacaagctcagataacttgtcgtttgccctggtctaggtgaggcatgcattgagaaggaaacgccagagctgcactagttc

SEQ ID NO: 131938 - DNA, 2936 bp, Zea mays
  Clone ID: MRT4577_5180C.1
ggacccccgggtcgccggctcgcgttcccccagctcccagcgcgctgctcgactcgacgacttcctctgcaacgcctgtccggtcggtgtaggctgagagagtgagtgagaggcgagatgaggagcgggcggctggcggtggcggtggctctggcgtgggcgttcgcggcctcggcggcggcggcgcagaagtacaatgccatcttcaacttcggcgactccatcaccgacaccgggaacctctgcaccaacgggaggccgtcgcagatcaccttcacgcagccgccctacggcgagacctacttcggcacgccgacgtgccgctgctgcgacggccgcgtcatcccggacttcctctgctccaggttcggcctgccgttcctgccgccgtccaagtccacgacggccgacttcaagaagggcgccaacatggccatcaccggcgccacggtcatggacgcgcccttcttccgctcgctcggcctctccgacaagatctggaacaacgggcccatcagcttccagctgcagtggttccagcaggtcacctccgccgtgtgcggccaggactgcaagagctacctggccaactcgctgttcgtgttcggcgagttcgggggcaacgactacaacgccatgctgttcggcaactacaacgcggaccaggccagcacgtacacgccgcagatcgtgagcgccatcgcggccggcgtggagaagctggtggccatgggcgccacggacgtggtggtgccgggcgtgctccccatcggctgcttccccatctacctcaccgtctacggcacctccaacagcgccgactacgacgcgctcggctgcctcaagaagttcaacgacctctccaccaaccacaacgcccagctgcaggcccagatctccgccctccaggccaagtacaagtcggcgcgcatcatgtacgccgacttctactccgccgtctacgacatggtcaagaaccccggcagctacgggttcagctcggtgttccaggcgtgctgcgggtcggggggcggcaagtacaactaccagaacagcgcgcggtgcggcatgtcgggcgcgtccgcgtgctccagcccggcgtcgcacctcagctgggacggcatccacctcaccgaggccgcctacaagcagatcaccgacggctggctcaacgggccctactgccgccccgccatcctccacagctaagctaagctaagcgaggggagggcgattaattgttattaattttttattgttgccatgttatttatacctgtgtttacgttgccgggaaaaaagtgtcccggcagccgcatgaatgtgttccctcttgtaatttgttatactggtggtcttcatttacaaatcaaatggtatagatttttcatggaaaaaaaaaaaaaaaaaaaacaattaatcgccctcccctcgcttagcttagctgtggaggatggcggggcggcagtagggcccgttgagccagccgtcggtgatctgcttgtaggcggcctcggtgaggtggatgccgtcccagctgaggtgcgacgccgggctggagcacgcggacgcgcccgacatgccgcaccgcgcgctgttctggtagttgtacttgccgccccccgacccgcagcacgcctggaacaccgagctgaacccgtagctgccggggttcttgaccatgtcgtagacggcggagtagaagtcggcgtacatgatgcgcgccgacttgtacttggcctggagggcggagatctgggcctgcaactgggcgttgtggttggtggagaggtcgttgaacttcttgaggcagccgagcgcgtcgtagtcggcgctgttggaggtgccgtagacggtgaggtagatggggaagcagccgatggggagcacccccggcaccaccacgtccgtggcgcccatggccagcagcttctccacgccggccgcgatggcgctcacgatctgcggcgtgtacgtgctggcctggtccgcgttgtagttgccgaacagcatggcgttgtagtcgttgcccccgaactcgccgaacacgaacagcgagttggccaggtagctcttgcagtctgcgtgcgggtgatgatgatggttgatggtcgtcagtgagggaacagaggctagcagagagatgatggcaggagagagagagacagacaggctagtattttcattcgtcctggcacgcatgggatgggatgggatgggggtgtagtgtactcctactcactcaccctgcccgcacacggcggaggtgacctgctggaaccactgcagctggaagctgatgggcccgttgttccagatcttgtccgagaggccgaggccgcggaagaagggcgcgtccatggccgtcgcccccgtgatggccatgttcgcaccctgcttgaagtccgtgccgttcgccttggacggtggcaggaaaggcaccccaaacttggtgctgaggaagtcgacgatgacgcggccgtcggagcaccggcaggtgggggtgccgaagtaggtctcgccgtaggggggctgcgtgaaggtgatcgccgtcggcttcccgctcgtgcacaggttgcccgtgtcagtgatggagtcgccgaagttgaacaccgcgttgtacttctgggcctgggcggacgccgcccccgcaagaagcagcagggccaagcatggcagcagctgctgcttccgcgccgctaccgccaccgccgacgacctcatcgtccccatcgtcccagctgctgcggacgagagagcgagagagggaggcacgcaaagcggcaaagaagaaagctacggaaaggaaaaggaatggggatgcttcatgcttggccagtggccgggctttctatagcccccgtgaccggcgctttaattcgctttccaatctctcgcgcgcccggccgaccagagctagcccaatggggaggcat

SEQ ID NO: 131939 - DNA, 582 bp, Zea mays
  Clone ID: MRT4577_51810C.1
cccacgcgtccgcggacgcgtgggcggacgcgtggggccgagatggccccgccgcggtggcgcggctccctgaccgcgggctaccagttcttcctcgcgctcggggtgctgatcgccaacctcgtgaactacgcgacggcgcacgcctcctgggggtggcgcgtctcgctgggcctggcgggcgcgccggccgtcgccatcttcgtcggcgcgctcttcctcaccgacacccccagcagcctcgtgatgcgggggcgcgccgacggggcccgggcggcgctgctccgggtgcgcgggcccgacgccgacgtggaggccgagctcagggacatcaccaaggccgtggaggccgcgcgccgcggcgaggacggcgcgttccgccggatggccacgcggcgcgagtaccgcccgcacctggtgctcgccgtggccgtgcccatgttcttccagctcacgggcgtcatcgtgctcgcctttttcgcgccgttcgtggttccgaccgtcggtttcgggagcagcgccgcgctcattggcgccgtcgtactcggcgccgcaacctggggttcctcgtgctctccacct

SEQ ID NO: 131940 - DNA, 403 bp, Zea mays
  unsure (1)..(403): unsure at all n locations
  Clone ID: MRT4577_51811C.1
acgcgtccggaaactcttggattatcaaatctttgtttgctggcaaattttgaactgttcagatcacgcgcgtaagtgaacacgaaaatcanaagacttctgattgtatataaaatatggagccccgagctgtctgaaaagaacgatgcgccagctcattaattaaattggtcttcttctcagcatgtgatccttggcgtcaaatcagatgatcaatagctggtgagaatcgtaaaattagatgggactaaatacaggcttgaataccaaagccgaactcgaagactaaaggttttggtgcaaaataattatgtctgcacaaccgagaagtcgcgtgcaaagaattataattgagatttgattctccaataaatcatctatggcagagcgataaggtgttcga

SEQ ID NO: 131941 - DNA, 490 bp, Zea mays
  Clone ID: MRT4577_51812C.1
gtcgtccccagaaggagcaaactgagaggagacaaagcggcacaggagggagagaggggcagagacagcaagggaacagggaagggagagagagagaggaacagctccgagctctcgcctctgccctagctgccaaggttcttgattgattccaatccaaaacaaaaatctgagttctctcatcctctctcctgtcccaactcccaagagtgattactgttttttgtttcgtggatgcgatctgttttacgcgacgatctgcttcgctgttcgcgtgttcgttaacggcgggtgccgacggattggagctgtcattgtcaggcttcatctttcggttttaattctcccaggagaagttcctgggctgggagtaaatgagcggcgccctcccctgtcgatacatgccgtttctctgggtggaatttatggctgctcggacgccacgctgcttttagtagtaaccaatgcaggttcctcttcttccacaggg

SEQ ID NO: 131942 - DNA, 586 bp, Zea mays
  unsure (1)..(586): unsure at all n locations
  Clone ID: MRT4577_51813C.1
cagcagcagcgcgcgcgagcnagcnncggncggncgatagaccgancgancgcncggccancagggcgcgggaggagcaggcgcggcgggcgacggagancgngaaccgcgggggggagccgncgggcccggacgccggcncgccggccnncncggggcgcgggcgccgccgccggccggacnnccggcagccggggaaccncaagnacgggcgccncgggnaccacnaccncancagccacggcggggaccgggccaccanccccgncancgggcnggggggcggcgccgagcggggcagcggcagccgcgacgagcggcggcgcaaggggcggggggaggccaccnacgaccncgccaccgggcncgccnnccncgccggccccgccnncaccancnccgncaacancagggccaggcccaggcccggggaccccancgacnncgcaagcnacaagccggccgacgagcncaagggggccaaggcggagnncaccgaccgggcgcgcaagnccggcaagggcgacgaggacagccgggcgnnccagccgcggcggcgggccaagcccggcancggcgacgaggc

SEQ ID NO: 131943 - DNA, 436 bp, Zea mays
  Clone ID: MRT4577_51814C.1
acactaagttccgtatagacagtattgataacctctcgactatcatgggtaataatggacatccatctattacacggttatattattgaataccacaggaaagaggagcgtacgatgaaccgcactggtaggaggacgaatgggaacgcatgaaaacagagctccatggattattggtatacatggtggaagctgacatgggtacactgttgcctctaattatatgggctcataccatgtgacaagatcttcagattgcgagatcatgctggatggaatgtgctaacccacactcggactgagaagctcccaccacagagctggtggtgcttccgggagcccatatgtcccttggctgtggaaactgactatctagcgtcatgagaagccttcttgcagctacatttgggttaggaggttgccagaaactacttat

SEQ ID NO: 131944 - DNA, 367 bp, Zea mays
  Clone ID: MRT4577_51815C.1
gcgcagcgaacggataatagcttaaatcttccacgatggaaagaaaaaatcatgctcagttcggtacaggaattcacagagttcttgttttggttaacagaacgtcgcaccagtgtgcaccagccctgaatggacgtccaataggaatcgacagagaaactaggcctgggcggactagaagacatcactggaagacgcccgctctttgtactggcctgtcttggaacggtcacggtaggttaagacctgctgttgaacgggatggctattatgatcacctggtggtagatggcaatcagggcatctccattgaatggtcctacctagaatatccattggttgatccaggcgttatccctgttcggac

SEQ ID NO: 131945 - DNA, 293 bp, Zea mays
  Clone ID: MRT4577_51816C.1
atctactgaggacaccctgagtggcaagactatcaccctccaggcggagccgtctgacaccagtgacgacgctagggccaagagccaggactaggaggggatccccacacaccaccagtggctcatctttgatggcaaacagcttgcggacgaaagcacgcttgctgactacaacgtcaagaaggagagcacaacccagcttgcgatccccctcagggaaagaatgtacaccttcgcgaaaaccctgcccgaatatttttcacccccccgggggagtactctgacacccttga

SEQ ID NO: 131946 - DNA, 433 bp, Zea mays
  Clone ID: MRT4577_51817C.1
agcagtggtaacaacgcagagtactttttttttttttttttttttttttttttcgtttttttttttttttttttttttttttttttttttttttttttggcttaaatctctccatccaacaaagacaaaaatacggggggaacattgaggtctttcacaagatatcactaacataggtggacaaaaaaaataaatggctcgcgttgcttgaaaaagggccatcgatggcatgcagaacaacaacccttcagcagccccaatggaagcccccttggatggctggtcttcaagcgggcgggatctcgacctctccggcataaatctcctgctgcaggtccttggggtccttgccgtcgccggggcaccccgccctgccccaggggccggggatctccttgtcggtgccggccaaccccttggccctggccctgtt

SEQ ID NO: 131947 - DNA, 250 bp, Zea mays
  Clone ID: MRT4577_51818C.1
gtcatgacttcctgctgagtttaaacatatacataagcgggggagacgatacataccaggacatctctagtaacggttagctaaccgggagcagtgctactcgctaattaggcggtctcgacttccaggaccacaatttggggaggcgtaatcagccaccaccctttgccaagtcttggttaaagggccgcttgggaccgttagaggcctgtcgggtcatgacccatgggcagcactggttaccaaaaat

SEQ ID NO: 131948 - DNA, 962 bp, Zea mays
  Clone ID: MRT4577_51819C.1
aattcggcacgaggctcagccgtcgccgtcgccgtcgctctcctctctctgtccctctcctccacaccgctctcctctctcatccaagccgcagctcttctctctccctctcccttgcgcgccgccactgcgggcatctacaccgctgccgctcctctcttctccgagccgcagctcttctctctcctcccctgcgcgccgccgctgcgggcaccctgcacgccgccgctgcgtggccctgcacgccgccgctacgggtgccctacgcgccgcggtcactgctccagctctcctctgtttcccagccaatgccgccgctctaactccccaaggcatcgccccgacgacggctcaacgacgccccgtcgacgcctcgcggacgccctgcgccgcagcgggcgctttacgctccatggcaaggcgcgttagatgcctcaggttccacgcgcgccttagcccctaagcgacgctaaggcggcgcttcaaggacgccttgataagcatgattgggaggttatctatgcttatagcttctgctctggggtgaaaacatggattacgactttggtggcacctcacccgatccctatgggggtggaagcatccatctagtgtgtgatcattgcggtaccagtgacaactacaccactgacgacgcagatgatggccaattcacgtgccgtacatgctctgccgtgcacactacacaggcaactgctgctgaccctcatgacttccccgccactggcaacatctctgtccgtcgtgttgccacccagcccacccccaagcttggtgcccgcacacccgcgccttacctgaggacccctcaggctgctcccgtgcctgctactgccgcttttgatgacttcacagagctgagtgagccgcgggactttgtgtctggatctggcacgtgtggggagcctggagatctggcagtgcaggtccgctggcgctat

SEQ ID NO: 131949 - DNA, 416 bp, Zea mays
  Clone ID: MRT4577_5181C.1
cgagcggcggcgctcaggcgatcgagatagtgttctcggcgctggctcgtccggacggcaacagcttgctcccgaggcccggctacaagctctacgaggcgcgcgccgtgttcagcgggatggaggcccggtacttcgaccttgtacccggcgaaggctgggaggtcgacaccgacggtgtccgagctctcgccgacaagaacacggttgccgtcgtcatcatcaaccccggaaacccgtgcggtaacgtctactcctacgagcacctggccaaggttgctgagactgcgcggaagctcggcgtgtttgtcgtagcggacgaggcttacgcgcacttgacgtttggagagaggaggttcgtgccgatgggcgtgtttggggccgtggctccggtcatcacgctggggtccatttcg

SEQ ID NO: 131950 - DNA, 529 bp, Zea mays
  Clone ID: MRT4577_51820C.1
tcgagcggccgcccgggcaggtacaagctttttttttttttttttttttttttttgttttttttttttttttttttttttttttttttttttttttttttttttttttttttttttttaacaaaaaacaattttttttgtaaacttttcaaccatccccaaaaaaagagggggcccttccctcactacataaaaatttggttttaccggaggaaacaactagcccaaattttacaatttaaaacagatgaaacaacaaaaggggaaaaaaaaactttaagcccctaaacaaacccccttaaaattgagggtgcggaaaacaaagagccatttaaaccccactactttgggggggttattaaaacccttttggcaggggctaaaaaaacccccctctaggccccaaaaaaaccttcgtttttacccccccccctgggccccccctggaaacaaaagactatgcaaaaagaacttcatccttcccatgcctattttaaacaaaatgggcgggtctcacccccccaatttaa

SEQ ID NO: 131951 - DNA, 195 bp, Zea mays
  Clone ID: MRT4577_51821C.1
cgggtacaaaacaaatttgttttttttttttggggggggggcactcatttaaaacaaacttaacatggcacgttcaacaaaccgctcaatatgccgaacatacttttggggcacccctaatactcttcctaacgggggcaaacctctttcttgctttattatcctctgtttttcttagtacttcactcttccaca

SEQ ID NO: 131952 - DNA, 234 bp, Zea mays
  Clone ID: MRT4577_51822C.1
atgttgtctccccctgttggggtgctcttcctaaggtttccttttcctttttttttttttttccaaaagggagggggaaaaaaaaagaagggaaagaagagggggggggttttttttcgggagggggaacatatgggaccaggccaaaccaccaaaggtctatttcacactgccagggaagccgggggacaaaggaagcctcaggtaccattttattttgtcttccaataaaat

SEQ ID NO: 131953 - DNA, 349 bp, Zea mays
  unsure (1)..(349): unsure at all n locations
  Clone ID: MRT4577_51823C.1
gactagttctagatcgcgagctttcttcttttttccctttctttnnctgtgaagtgtcatttttaaattttttgggctcacactncccccctcctaacaaaaaaaaaaccccaccatattttataaaaaaaaaagggacccgcctacattaacaatatacctttcattttttcatttcccagctaaaatacttaccccattccaccctttcttccatacaattaacaccatttcccatcactctttgctcaatttttttcccctttaattacacccggtcatttttttatcaaattcccgatatttctttttttttcccccttctttttttaccttatacctcttcccc

SEQ ID NO: 131954 - DNA, 1468 bp, Zea mays
  Clone ID: MRT4577_51824C.1
cctctccggaattccgggtcgacgcaggcgtccgcccacgcgtccgcccccgcgtcgtgggcggcctcgtggggtttccgcgtcggctagtttggacgcatggctgctgcaggagagtagagaccacagcgcgcgaggcgaggagaataagctatgggcgcgccgaagcagaaatggacgtcggaagaggaggatgcgctccgcgccggcgtgcgcaagcacggcgccggcaaatggcggaccatccagaaggaccccgagttcagcccggtcctctcctcccgctccaacatcgacctcaaggacaaatggaggaatttaagtttcagtgcaagtggactgggatcaagtaaactgcgggttccaaagataactggaccctcatcttccccatcatctagctcgcagcctctgcttctcccagcggcaaacaaatttactgaagctacactgcctgcagatgctgagaaaaagccacaggatgggaaaactctgccaaagtatggtgccatgatcatggaagctcttttggaattgaatgagccgaatggttcagatattgctgcaatcttcggcttcatagagcaaaggtatgcggtacaaccgaccttcagaagatttctagcctcaaagttacggcgacttgcagactcaaacaaaattgaaaagatcgataagtcctataggctcccagactcccttgcaacaaggactccagctccaatgaatgcttcagctccaaaacagaaggatccatcaaagccatcgaaggtgtcaaaggccataggattgttttctgcctccagccctgcactagaggctgcgatggcagctgctgtcaaggtggctgacgcggaggcaaaagcacatgatgcgcatgatcagacgatggaggcagaaaggatcttcaagatggccgaggataccgagtctctcctcataattgcagcagagatctatgatcgatgttcaaggggagagataaccacgttagttccagtggcacaaagggagatttgagatctattggagtctctcttgtgttgtttgttgtacatggataggttctggaatccagtggcccggattgctcctgttgtatgatgtaaccgtttgtgttgtactacctccgttctcgaatatttgtctccaatatttatcgtccctagtttatttttgaaataaaatgcaacaaataaaaaaaaagaaaaagggcggccgccaccgccaggaaaaagtggtttaaaatatgtaacccggtcatcatgggatagtgttacgctgcgatcgtgtatattgtggtcagcagttattttcttttttcagaggcatgatgagagaatagattagtgttctgagacaacgaagtagggtaggaaggggaagtgttcttggcctttgatacgaataatatgtgccgataacagttttttcaatttgagaatgttgtgttagacccttgttcatc

SEQ ID NO: 131955 - DNA, 1542 bp, Zea mays
  Clone ID: MRT4577_51825C.1
atgggcgcgccgaagcagaagtggacgtcggaagaggaggatgcgctccgccgtggcgttcgcaagcacggcgccggcaaatggcggaccatccagaaggacccccagttcagcccgatcctctcctcccgctccaatatcgacctcaaggactttagggtgcttggtggtctccctgctggctgctgcagttttgtcggtagtaccgtagtagatttgggccatcgaaggcgagattttgtgttcggggtaactgataaatgtaggcgaaggttgaaatggccgtgttatgctgccgagggatgctttgatgtgatcattttgctcaaggacaatgatgctgtggtggtcatggacacgcagtgtcggattacatgtggcacatgccagcgaagaggcactctagtcagtgactcaacgtgctcagcagttattgctgttgggataggattcagtgtgataaatttgaaggatatcctgctaatgataccacactgtacagggattcatggttgggaagatattgccctcaagaagtttcttagagttttcaaccttagcaatttaaggccatggtatggtgccatgattatggaagctctttcggaattgaatcagccgaatggttcagatattgatgcaatcttcgacttcataaagcaaaggcatgtggtgcaatcgacctttagaagatttctaccctcaaagttacggcgacttgcagactcaaacaaaattgaaaaggtcgataacttctataggctcccagattcatttgcaacaaggactccagctcaaataaaagtttcagatccaaaacagaaggatccatctaaggcgtcaaagaccataggcttgtttgctgcctccagccctgcactagaggcagcgatggcagctgctgtcaaggtgactgacgccgaggcaaaagcacatgatgcacatgatcagatgatggaggcagaaaggatgctgaagatggctgaggataccgagtctatcctcacaattgcagcagagatctatgatcgatgttcaaggggggagataaccacattagttccagtggcgcaaagggagttttgagatctattggagtctctcttgtgttgtttgttgtacatggataggttctggaatccagtggcccggattgctcctgttgtatgatgtaaccgtttgtgttgtactatctccgttctccgatatttgtcttaccctagttcatttttaaaataaaatgcgacaaataaaaaagaacggagtgagtacttaggatgtgccctagggttaacaaaataacatcagcgcaccgcctgccttcaaaattctgtaatatgtaaccccgtctttcccagcctgtcactgcaagctgcgatcgtgtatcctgatgtcagtattgtattatttttccttggcatgatgagagaatagggaagtgttctaaacagatgaagtagggtaggaaggtgatgtgttcttggtatgcgataacaataatctgtgccgcacttgtacctttcaatttgagaatgttgtgtt

SEQ ID NO: 131956 - DNA, 648 bp, Zea mays
  unsure (1)..(648): unsure at all n locations
  Clone ID: MRT4577_51826C.1
ccgggggaagagaagctcagtcaaaatcaagaccctcgtttccacctcctgcggcgtgattcgggcaatcgggctctgccgctcgtctctcctttcagcatccatcgccgctgcttgagctctgcctccacttatctactacagtctacaggctcttggctggaactaggaagtcatgttgagtggccacgccgtgacactgagcgagaggagcgcctccggtacgcgcttgatcgaggatgtagcgtgcgaggcaggcgatgaggaggaggcggacgccgccgcgagagttgtgtaccgggcctcgttccaagagctgatgcccaactaccttcagtacgacaccatcatctgggcactcatatccctgctgcttgtcctggcgtgggggatcgggctgctcctgcttctctacctgccgtacaagagatacgtgctgaagaaggatatcctatcccgccaactctttgtcaccgagagtaagatagtgtacaaggcgactaggccttcgtacatgccattcatggggatagttaagaaagagattaaagtacctctccatttgattgntgatgttataattgagcaaggagagctgtgcatacctatataccccacttgatggattcatttgtgtgaagctataat

SEQ ID NO: 131957 - DNA, 1463 bp, Zea mays
  Clone ID: MRT4577_51827C.1
gggcaatcgggctctgccgctcgtctctcctttcagcatccatcgccgctgcttgagctctgcctccacttatctactacagtctacaggtgaggtgattctcttctctctccacccaccatccgccaatcagcaccgattctctagagaggacaagtgtatctgccgctgagtgagggaagctcgttgcttcatcggttctagatactgcccgtgcaggctcttggctggaactaggaagtcatgttgagtggccacgccgtgacactgagcgagaggagcgcctccggtacgcgcttgatcgaggatgtagcgtgcgaggcaggcgatgaggaggaggcggacgccgccgcgagagttgtgtaccgggcctcgttccaagagctgatgcccaactaccttcagtacgacaccatcatctgggcactcatatccctgctgcttgtcctggcgtgggggatcgggctgctcctgcttctctacctgccgtacaagagatacgtgctgaagaaggatatcctatcccgccaactctttgtcaccgagagtaagatagtgtacaaggcgactaggccttcgtacttgccattcatggggatagttaagaaagagattaaagtacctctccatttgattgttgatgttataattgagcaaggctgtctacaatctgcttacagcttatacatatttagaatagaaagcatagcccatgggaaacctgcttcagtggatgaactgcaatttcatggtgtccataatccagattttctaagaaaggttataaccagagaagcctccaggagcatcagagaagtccaaagttggaaaaatagattgtactccgaggaaggtccttctcatgttcaaagtagtggattacactcacctagtgcaaaggtcagagcttccccaatctgtgctgcctttgattctaagggtaaaatttctgacaatatattgctccataagattgaagaacttaatcgatcagtgaagaatcttgagtctctactcgtaagatcacatagaagagaatgatctgatattatatcatctttgaaaattagctcaaattaaacatggaaagaacaggaggaacaagtggagtatatgaactctgtttttctatttagtccttcagatcatataccatgggaaattgcaaagctgctcatgccgtgaaggagcttctagtttgattcaagtttcacaagttatctgttgtacataggtcttgctgattcttccaagtttcacaatttgatgtacaaagaatcacagaatcagtggacagtggtctagggtcacaaagtagatcaacgtacatgtaagcttgtttactgtataaattctaaaatggtaatctgtgccaatacgtgtactgtaatgggcttaggctcagcccatatatgtttatagctatcaatacaacattctaatcctagttagggttttctatt

SEQ ID NO: 131958 - DNA, 568 bp, Zea mays
  Clone ID: MRT4577_51828C.1
cccccctcgagttttttttttcctttttttttttttttttttttttttttttttttttttttttttttttaacaaaaaaaaaatagcttaggacattttattttacaaaatattcaaccgccgccccgggggggcgggggaaagggccatatttttttttagggattattagcccaaaccccttttatttttcactttatatacgggccatcgccccccgcagtcccggagtccccccaattctttctcctttgaacgggacgggctggacataagggcaacacacattatttttggcagggcccccactgccccctggggcctgggggatctatgctttccctgggttgggcccggccctggcggcaaaccctttttcgaggtacctctccacaacgtcgaggccgaaaagctccttgacaacgggcattgtccccggcccgtccatttggaaggggacgggggatttcggggggctggggctgaccaaaaactccttcctccccgccctgagggcctccctaatcgcccagggcaccgaggctggaaaaaccagcgggggctcccc

SEQ ID NO: 131959 - DNA, 619 bp, Zea mays
  Clone ID: MRT4577_51829C.1
cattgggtacctcgaggccggccgggtttcctcgctcgcttcttgcaagcatactgttcttgcgggctgcgtggtccgctaccacgtggcgtcaccgttccctcgtctcccccaacgagcctcgcgtgttcctcccgcgacgagacgctggactgtatcctctcacttttgacgtggtgtccaagcctgcatcgtccgctctcttgctgtcgctactgatagagcagcgaaccacgttcgaagtgctcacagacattgttgcaagaccattctgcaatctacgagctcacaaccaaagacaagaggagatcaaactatagccagcatcggatctgatgatctgtcgctactacaagatttgacctgaaagaggataatgctacccagaatcctcatgagcagacgttacctcggccagtgaacgacaagcacagataatcgtcaccgtaagctgacgtgacagcatcataaggaccgcatccatatgacgagatgatgaacgaatggaaatgattgatacactacactatacttgtacaaagataggatattctcagactgcatgtgcaacagcgaaggtgtaccattatgagcctcctttctgcacaataattgctgt

SEQ ID NO: 131960 - DNA, 582 bp, Zea mays
  unsure (1)..(582): unsure at all n locations
  Clone ID: MRT4577_5182C.1
ggggagttatagtaggcattgtgaggagtaattagttaattttttatcctaatattggtgaacctacatgaattaaggtggctggtttcgctttcatgtaagtttttttttctatcaacatttgcaaaaattttcggggctgaacgtgctgtcggtgcatctagaaaagagcacaagaattcatggggctaagaagactgtaggataaaatcaagcaagaccgtaaaatgtagtgttgaatataatttaagttttacattaatatatgatcagattctagaagaaaacaatataaacaaaagaaacgaatatatcgctaaatttttgctgacttaattgaagtcagatctattttgtcgaatatcgatctcctctaagtgtgagggcaccagtaaaggggctgggccaagtgatatcttcagttgagagataggactcgcgggttcaccaagctcgtcattcgtcggagacagtcaaatcatcacgacaagcgagatcagacctgttgggtggaccgacgtcgcgatgatgatgagcaagatgggggcactgagaggggagtgtggtcgggcagncaatcgc

SEQ ID NO: 131961 - DNA, 461 bp, Zea mays
  unsure (1)..(461): unsure at all n locations
  Clone ID: MRT4577_51830C.1
cgagggggggggcggggccgccgnccacaaccnncccggggggcgccaancccacagnggacncgcnnccccaccgngncgaagccannccccacgnccccaccgnggncccccccnccccacccacnagagaccgngcccgccccccnaacccnncgggggggggggggggcccacttttttttttncnanccccctgncaccttcaaccaccttggatgcgtcgnganctgccccccccccnaccggctcgatcctgaggatcttcctgccgcctcccgcgtgcgtgataacaacatgttccgcgtccgccgtcacccccaggacgagcgaagcccatggtccacggcaacgttgtnggcgccccctgggcccgcgagatgcaggcgcgcccttcacctttcgatggcgaccgcgtgatcgacctggcacaccatgtggactccggctctgggtccccg

SEQ ID NO: 131962 - DNA, 280 bp, Zea mays
  Clone ID: MRT4577_51831C.1
cgcgtacacagacgcgtggacagacgcataaacatacgcttgtaccggggctgataacccaaacattgctccattgaggtttgttgggctcatccaaatcacacacctacagtgcaagatcaatgacaaatcgaagctgtatgatgatcaagcgttgcagaacatatttttgaagaataatctgctaaatattgcgcacaacgtgaaagattcacagctcaagacattgctcggtgataactgcatccccaaacatcgaattcacgattatgcaaaactc

SEQ ID NO: 131963 - DNA, 370 bp, Zea mays
  Clone ID: MRT4577_51832C.1
acgaaaaagaacccgtctgcatttgggacgtacagggaccccatagcatgattgcacaaggcgggggttagcacacaacaaagctggaactactatgttacacatatacctcagtacactggaatggataaaccatctgctaaacaaaatttgccaacataatggcgtcagggtctactacgctgagtataaccgtagcaaccacaaggcgacgacatggatttggttcacattgaagaagagtgtctaaggtcatctagtcctgcacttggccaattatacgattaacaactccaacagcaacggagcgcccagactacctcaagtatacactcacaagagctcagctcttggagaatatctgaacaca

SEQ ID NO: 131964 - DNA, 576 bp, Zea mays
  Clone ID: MRT4577_51833C.1
aataattcaaaatgtgagagctcactccccttgtttgcggggtgtggaggatttcctctcgcctcccgtcgaacgggcgagcttttgcgtgtgaacagctggcgctatctccgatgagagggcgatcgctcgccagcttcatcagccgcgtcctggacgttatgcctcctcccaccatgagatcgtgcacagcctcgtccgacgacaataatccggaggagcaagtgcttccggcgtttgtgcctgaggatgtgatcggacgcgatgaggcgcatcacgacaagtactgaagccaccaccccaagaccggagtgctcggcccgcaggggttgttactaatttgctcacccccgccgctgacgtttgaacataggaggcaggggtctggaccaaaaggtgcgattacgcccgctcgaggacgccgagaagtcgccccccgtctcctgaaccgcatcatgaccacgcgtgacaacgcgacgactgcaccccacactgctgatacaaagacgatggacgttagggagcagtccgtgcaacgagatgctcgggcctgctataagaacaaacacgagcatg

SEQ ID NO: 131965 - DNA, 663 bp, Zea mays
  Clone ID: MRT4577_51834C.1
atgacgtggcgggggcaccggacatgtccggtgtgcaccggactgtccggtcagaccgtgctaggtggcatagttgaccatgactttggcccagtctttgacaagactcctattggaagtgtttgtgcctcaggcatcttcctatccaaattagaatgtgctcacgctctccgaacctacttgtgttctaaggacatggacatggacagaaatatcattgactttggtgaacatcgtggcaattgtcgtgacattcaacaatcccttgctgatggcgcgtgtatcgacaatgtgtttatgcaatgcttcattgagtgtgtccgcggtgactcgtctaaacatattccttcattgaatgctcaccagctcatactagatgttaatgttgggataatggtacccatgctacgtgcaggacattggaccttgtatgttgttaattttcagattggacgcatacatgtgttagattccaacccatatggtccagaacttggtgggactacctggaagaattaccattgtacacctatggatatgggtgataggaagatttcacggtccaggttaataatgagtacgctcaatctagccatacaaaatgttcgaccaagatcatcctgtaggaaacgggtgacgcctaagagggggggggtgaattag

SEQ ID NO: 131966 - DNA, 483 bp, Zea mays
  unsure (1)..(483): unsure at all n locations
  Clone ID: MRT4577_51835C.1
cccagcgtccggcgccgcctccggtgtcggggctgggtgccacgcgcccgcctggctgcctgcaccaccacgcgccggatggggccgtgcccgtgtagaagccggggccggctccaaggccgcggggctgcgcgcctgcgctggctgtggcccgcctggccggccgccgtgcccaagcgcctgaggccaccgcgcctcaccagtgcgcgccgggggccctcgcccgagccgccggggccgggggggcgcgcgtcgcaggcagccgcgcccgagccgccggggctgggggccgcgcgtcgcaggcagccgcgcctgagccgccgggccgggggccgcgcaccgngggcaaccgcgcccgagccaccagggccaagaggccacgcgncgcagggaggcgcgcccccgagccgnngaggccgggggccgccgnaccacggggagacgcgccgggacggagacgccggggccgagggcaccgcgccc

SEQ ID NO: 131967 - DNA, 511 bp, Zea mays
  Clone ID: MRT4577_51836C.1
gtcgccgttgtttttccgaacgtttcgcctttcagagaagcaccaaaaaaaacagccaacaagacagaggtggataaggcaacgggacagccaaaaccccaccgactacaccatgaaagcttcagcaaaaggcaaacagcgcctccaccccgccgcagaccaaacgacagccagaaggaaacccgccacgcaacggggtgcatgataatgcataagcctgcaaaaaacaactgacaggccagggtagcgaactccatagcacacagcgggcacgaagagctggaagcacggggccggcggaccagaaccggtagcgggcaggctgggagggaccctggaacagaacactgatggacacgggcagaaaccaggggagacaggacaggtagacaccaagctggcccaagtggaaagcagcaacctgctcagagaggcgctcggggagcacatacaccaacagctcatacgagccagagctcggctgaagccacagaccaaggggggcagagac

SEQ ID NO: 131968 - DNA, 792 bp, Zea mays
  unsure (1)..(792): unsure at all n locations
  Clone ID: MRT4577_51837C.1
cactagcaatagaagcatttggaaaggttggctccattgaccaggcagaaaagatatggatccatataaaatcaacaaagaagttaagccttacagaacagtttaattctatgttatcagtttactgcaggcacggtgttgtcgataaagcatcatctgtattcaaggaaatgagagcaaatggatgccagcctaatgctattacttatcgccacttagcattgggttgcttgaaatcaggtcttgttaaagaagctttgaacacaatagatatgggaaagaaggaagtcgtcactaaaaaggtgaggagttcaacaccatggttggagaccacacatctgttgcttgagaactttgcagaaattggagacttggaaaatgcaaagagactgtacagtgaactgaatgaatccaaatattctcggaattcctttgtgtataacaccctcctgaaagcttatgtgaaggcaaaagtttatgagccggatttgtcgaggacaatgattttgagaggggcaatgcctgacgctgagacatatagccttctcagactgattgaacaattcaagatctaatgctctatgtgtgttggtgctttgaaggaaaaccagtaaaccactgctggattttgtcatgcaaaaaccattagagatactctgtggacagcgtgttgcattctggcaataaattttttttttttttttgcacagtaatcccaacttttgcactaatcaatnggagatatgcagctttcttttctattataaacagttttagaactgcaagaaatac

SEQ ID NO: 131969 - DNA, 338 bp, Zea mays
  Clone ID: MRT4577_51838C.1
agtgtgggtgatgtgtcttcgtttatcacgcgtcgtgagcttggtagtcgtctcgtgcagattgactacggagtactttattcttaatgatgaatggacgtagaaagggagatacgggtgtgctttgacatcttgcctaccattgcatgaaacattgaggattcttcaaaatgtgtgtggcatacttcttttgggagaggagttgggtgtcttctgtgtattttctgagactcctactggagccaaatttgtaattttaggagacactttaattgtcgtttaattcctagtctggggacacttaagtgacatctaaagcattattgctttagaatgtt

SEQ ID NO: 131970 - DNA, 2656 bp, Zea mays
  Clone ID: MRT4577_51839C.1
aggccggcagcaggctctcgcttcgctctctcgttgtctgtcgagaggaagaagacgaggcgagggacggcagcagtagcagctccagcatcttctagcttcttcattcatgggattcggtctctactaggattaggggtgcttcatttcatccgatccccaacgacttgacctgattctgatctcgacgacgatgcggaagcgggatctgggcatcctgctgctcgccgccttcgccatcttcttctccctccaccacgaaggcgacttctccttccgggagtcctggtaccacctcaccgacgaggacttccccatcaagtacgaggtcctcctccccacccacgacgccaagatccaggttctccagccgccccacgcccgccacctcaacgatgactccgccttccaggaggcccgtgtcatggccgacatctctctcctccccgacaacgtccgcctcgcctcggggaggcgccccatcgccatggccgtcggcaacgtcgaccgctcctacagacctggcgaggtcaggaagcaggtgctcgtcgtcgtcacctccggatggtcagtcatgtgcttcgaccataacctcaagaagctgtgggagcacaacctccaggacgatttccctcatgccgcccaccaccgcgaggtcgcaatctccataaccaattatactctcaagcatggagatgcaggcctcgtcatcgttggaggaaggatggagatgcagcatcattcagcagatctcttcgatgaatttatgataccagaacacaacatggatgatcgccgtcgaagcgccagtgagaaacagggctctgaggctggcaatgcagacctgcgccattttgccctttatgccttcgctggacgtagtggcgaccgtagatggagccggaagaatgagaacatccagtcacagccatcagatgcttctgtgatgttaccacagcataattacaaactcgacgttcatgccctcaatagtcatcaacctggtcagttcgaatgtcgtgaattcagagaatcaatccttggcatcatgcctcatcattgggataggagagaggatactaccctacaacttgcacattttaggaagcataaaaggaaacaagttaagagaacgcctggaaaggctgttattaatagcgtgaacaagcccattgaacacaatccacctgggaaggatgcttccaatagaatagctagagctcttgggaaggctgcagatatggctaactcaaataaagccaggaaggcacagaggatgcagtatgttccgacaatcactaatcatactcaagtttggtgggttcctaatgttgttgttgtacatgaaaaggaagggatagaggttgtccatctagcttctggacgtacaatatgcaagcttcatttaaatgaaggaggccttcatgcagatattaatggagatggagttctggatcatgtccaggttgttggtggaaatggtattaaagagcagactgtcgtgagtggatcaatggaagtgctgaaaccctgttgggcagtcgctacatccggtgtgccagtgcgggagcaactttttaacgtctctatctgccattacaaccattttaatctgttccatcatggtgacttctcgagaagttttgggaggacatttgatacagctggtttagaggtcgcgactcctatcctggtccagacagacgatgggcataaacacaggagaggaagccatggtgatatcatctttttgacaagccggggagaggtgacatcgtactctcctgggctgctcggccatgatgcggtgtggagatggcaagtatcatcaggggcgacatggtccaaccttccatctccatcgggaatgatggagaacatagtggtgcctaccttgaaggccttctccctacgtgcctatgacccgaaagaggtgatcatcgccggtggtgaccaggaagcggtggtgctctctccttctggtggcatactggccatgatcgagctcccagcgccccccactcacgctcacctcctggaggatttctccggggacggtctcaccgacatgattgtggtaacttccggtggaatatatggattcgtgcagacaaggcagcctggggctcttttcttcagcacgctggtggggtgcctgatagttgtgatcggcgtggtattcgtgtctctgcacctcagttcgtccaatgccgccaaacccagggcttcctcgtctgaatacagatgatgttttgatatgcaaggtcaagagacttttggtactcctatgttctagtagtctatatatttaaccaaatgagaattcgtgttattgtatgataagaattgttcctactagtatatctcatgatatactgatagtgcaatctcgttttttgttgtctaccttggtgttcctagcccccacaaccatttgtacgttggtttttttttaagtttgtttggtcagcaggtcaggcaacaatccagtccatcgaatttgagtacatgatggtcaagattgtttcctggtcgacaagttgcctgcccggctataaacaaaatatgatgtcctagcatgcaaagctcgtcttgtctacagtagaatgtgtaaaatagaagatgcagacaagtttgaaatagaaaatgagatata

SEQ ID NO: 131971 - DNA, 158 bp, Zea mays
  Clone ID: MRT4577_5183C.1
cccgaccgggaatggaccgggtcggcccacgccacgcgattcagctctatctacatccacgagcgcaggaagatccttgtatctgacaccactgaggggtgggttgctcagttgcgcgctcagctctcactggggctctcggctggcgagcccgccac

SEQ ID NO: 131972 - DNA, 258 bp, Zea mays
  Clone ID: MRT4577_51840C.1
tccctttaatgagaaataggcggaaccgtctgagacggttcctgatgacgttggctatacagccagcacttcactgtctatgcttaccgtcacaggactcaggtccgctcatatccaccggcattgtgcgcctactttcatccttcttgtctttagagatacgtgctactctatggagatatgcaatgggctcccgactttcctgccttttgaattaccctcgatttctacatagtattgacctcattcttatacgca

SEQ ID NO: 131973 - DNA, 316 bp, Zea mays
  Clone ID: MRT4577_51841C.1
acttcacagggggagatcctttcccttaaaatttcattttcgctcaaagttttttcaaaaacccagcggggttcctaccaaacataattttttgaggaacctggcccaaagactcaaaagttttccaaggtgtttttgtaaaaaccaccaaggggccccccaaacaacaccatctttttgttttttttttggcccctcctcccccttatttttattaggcgcccaccaaaaaaaaaaaccagggcctccccctttaaactttccaaaaatctccgttggaacaaatggggggccttccttttttcgaacaaagggg

SEQ ID NO: 131974 - DNA, 326 bp, Zea mays
  Clone ID: MRT4577_51842C.1
gacaagaagcacatgtgcaagccacgacgccaacagtactcacaaactcacaagcagaatctttcattgcgcacttattgactcaaacaactgcattgcacagttattcttattgcacactgggaaccaaaaccttagatatcaggctgaaagcttatacatcggttaaaacaccagaaaaaattcaactgtcataaacctccaactagagcaagcactccatgacacaatctacactcattggttggccttggcaacactcttaatctcgaccataaactagaaggcgtaccctgtggaagatcatacgcttcggtcaaccccta

SEQ ID NO: 131975 - DNA, 259 bp, Zea mays
  Clone ID: MRT4577_51843C.1
ctcaccccaacgacgcgacaacccgaagaccgaacaaggcaacccaccactgagacgctcgcacaggagcaggaagccggagaccaagatgtcgtcgatgttcagcggcgatgagacagaccacttctgacggtttcctcggcgctgcgccacgctcgtcttctcatgcatagacgcaggtaaaggaccgcgacgagaggcgtcggcgtagcgtcgatcgactgaagcggccagagctctcatgaagtcctcgtgacgt

SEQ ID NO: 131976 - DNA, 486 bp, Zea mays
  Clone ID: MRT4577_51844C.1
gcctcacccctcccccgcgccccttcccccgccgtggatctcgcccgaaggcgccgcggatccaccgtacccccgccctggcgcctcggttctccgccatggacgccctggatccacctcctcctccttctctcccctcactgcgccgcctgcccccgccgcacacctccaccgtgccccttccccccgtggatctcgcccggtgaagcatgcccccgcccccgtcctcgctcccctcgtgcaagcggcaccgtaatctcctcccccattcccgatccgaaatctcctcgcctacccgaatgtgatctcctcccccatccccgagccgagccctagctccagtcgtgtaattgaaatctcatcggaccacagatggagagtgcgcgtgatccactcccctgaccctaatacgctatatctccctggaaggccaaaaatcgcgatccactacacccatcagattgacctcccatggaaataactgat

SEQ ID NO: 131977 - DNA, 622 bp, Zea mays
  Clone ID: MRT4577_51845C.1
ctccgaggcccggcccgggaaaaaaaaaaaaaaaaaaagcactttacaatccaattcactcttctttcgagatatcaactctttaaaccaccaacaatctcaaacatcaacttttacaacactctcatccgtcaaaatggctgtcaacactccttctacctgctgccgctccagcgacggtgccagtgaatgcgcctgtgcccaaaaggccacttgctcatgcggtcaaaagtctgctcttcagtgcacatgcgccaaggctcccgtcgaaaacaccgtcaacggccctcgatgctcatgccgtgctcgtcccgctggcgaatgcacctgtgaccgtgctgcttctgagaacgtcactcccagcggcgccacatgcgcttgcggatctcgtcctgctggtggctgcacttgtgagaaggctgccgatggtggcttcaaccctgccaacgagatcgactttaccaccaagaaataaatgtctgactctgatgggaattaacgaaaacaacatgcattaataaattactggacggcgttggggatcatgactaggtactttgggttggggtggggagacaatcgataccagatacgtaaaaaaaaaaaaaaaaaacccgcggcc

SEQ ID NO: 131978 - DNA, 354 bp, Zea mays
  Clone ID: MRT4577_51846C.1
ggggggggaggccccccccccaaagggaaaccgggatacaacggaaaaaaatgtggggaccaaaaaaaagggttgaaacccggagggcccaaaaaaagggcaccattttaaaaaaaaggaaaaaaataaaggggccaaaaccagggtaaaccccccttttaagggatcaccctggagggaagggaggcccctctaaaaggagggaggaaccgtttccagcaaaaccattggggaaaaaggctaaaaaacccagggcacaaaatttcgggggcccctttgggaaaattccccacaaaattggggcccacccaaaaaagaaaccccccttttggaatggccccaaaagggttaatc

SEQ ID NO: 131979 - DNA, 325 bp, Zea mays
  unsure (1)..(325): unsure at all n locations
  Clone ID: MRT4577_51847C.1
ctttcttacttcatctncctccaccncacctcncctccntccatccatccanccatcggcaaggggagcgatccttctcttacccatcctcnacctacccaaaacaacccgtgaaggcggtgtgttttcccttcaacggcctcgcctcgcctcgaggtgtgagctccttcaacatcttcttcggcgccaccttttctacaagcaatattatcttcccttcttcccgccaggagttagtcttttaatggatcttcacttggctggtctcttccaccaacttcaatgagaaagtaaaaaaaaaaaggcaacaacttttattttttct

SEQ ID NO: 131980 - DNA, 233 bp, Zea mays
  unsure (1)..(233): unsure at all n locations
  Clone ID: MRT4577_51848C.1
ccgggtcgacccagctttttgagggggcggctacggaatccgcggtgggtgcggaggtggctgcgtcggctacggtgggggaggcgngctatgcaagcggtggcctaccatcacttggtgactgcattctacgtggggaacatagggaacaaagcggatatttttttttttttttcaaattccggacgatttggggggggggagcctactgcagatgttaatcgtagcaacta

SEQ ID NO: 131981 - DNA, 483 bp, Zea mays
  unsure (1)..(483): unsure at all n locations
  Clone ID: MRT4577_51849C.1
ttggttggaactttgggctgattttgtgcttgttataatttcgcgtagagcctccgtagctctactaaggcgataggaatgatacgggatacggaggttatttcgcgtttgaagttttaccctgcggctactttacggttagttattagttatacgacttttactgcggatactggtcgttcttctgttgtgtatggtgttgtggctatgactactattatgtttcttagtctgtaatctgcttagagttgtgcggattgtgttgggtaagttctagtgggggctatggctattgtgactttgcctttgggtgtggaggttggttcgttggatggtcgtgagaggatggattatactttactgttcgattctgcgtttaatcctcctgctgttattgtgtggcctggtgaggttgcggtgtggtatcgttgttgntcgtttatggttatggtggtgtatttttggttgagtcgtgctgctgtt

SEQ ID NO: 131982 - DNA, 278 bp, Zea mays
  Clone ID: MRT4577_5184C.1
agggcgtgctgtctgctctgagttcctcagtcgtcgtccgtctctgctcggatgcctgctctctctgcctagctagctagccagccttcctgtagcgcggcagatatggctggctgcagcacggcggcggctgcggcgtcgctgctgctgctgctgctcgtgtcgctcgccgcggcggcggacatgtcgatcgtgtcgtacggggagcgcacacggaggaggcgcggcggatgtacgcggagtggatggcggcgcacggccggacctacaacgccgtc

SEQ ID NO: 131983 - DNA, 195 bp, Zea mays
  unsure (1)..(195): unsure at all n locations
  Clone ID: MRT4577_51850C.1
ggttggagaggctctacgctgttcggtttcgtggttcagcctatcgagatggcgccgtcngatgttgaataccattgtttcgtcggcgggctcacctgggccacggacgaccactacctacacaacggcttcaccacctacggcgaaggccctctactcaaaatgatactctatcgggagactcaaaagtgcccc

SEQ ID NO: 131984 - DNA, 310 bp, Zea mays
  Clone ID: MRT4577_51851C.1
gtcggttattgctacttagtgtcctggtttcatttttatttatgctcatcattttataagacaaacaaaccttttaagcgttacaatttgcctatttggggtggaaactttgtgccggctggagaaaaaaacttgcggtccgtatactcatttaacattgaccgccacatacccggattcacgataaagttttttaccatgaaggtgtccatcgccaggttgtttaatccacaggggggtaccggtcccaccatctatgtgccataatcccgttcagtatatggggttgaacatcccatggaaccacgtt

SEQ ID NO: 131985 - DNA, 440 bp, Zea mays
  unsure (1)..(440): unsure at all n locations
  Clone ID: MRT4577_51852C.1
gtggggtttttttttttttaaaatttttttttttttttttttttttctttttttttttttttttttttttttttttttttttttttttttttttttaaaaaaaccctccaaaccggggcttaatctaaatgaatcctgaaaaaaaagggagtttgccggttaaaatttctttttccctttaaaancnnctgaaaaaaataaaaaaaccccccccttggaaaagaaactttaaagcggccccccccggccctttggccgggcgggcttaaccaaaggaaccggcccttggggcccaaaccccctaaagtgggtnggggggggcggcaaaaaaaagccccggttgctaacttgaattttaactaaaaggcgttaaagaaaaataccccacaacgaaactttggcccaatagtttttaaaacaaaccccaaaaccaattttgt

SEQ ID NO: 131986 - DNA, 119 bp, Zea mays
  Clone ID: MRT4577_51853C.1
cgtatgatatcaagacctttggttggtgtctgtagtagacactgaacatcgggatcgaggctgagcgcctgctccacctccatgcacctcatataggtgccctttgaatgctctttcaa

SEQ ID NO: 131987 - DNA, 453 bp, Zea mays
  unsure (1)..(453): unsure at all n locations
  Clone ID: MRT4577_51854C.1
cattgtaatagatgaatttgcacatataaaaccaacattccaatatagatcaattttgtatcttcaaggtgcataaaaaggtcatgtggttctatttaggaagatatcgagaaccacatgggttgcagccaaattgctgatgatatctgtagatatactgaagaacacgtgctgtaggattggtaactgcgagtaaaatatgtttttatagttaaaatatgttcaatgtatataaccatatatctatttttcagcattatcttttttgagttaaaattaataataaagctacaaaatactacatcgatgtggtaacttacatcatgaggctgccctttcttttaataggctaaccctttgcagggttcacgaaaactaaatccttagccctaaaccctctacagggttccatgttttccaaactagtggnggagcctctacaacagctgaaaa

SEQ ID NO: 131988 - DNA, 360 bp, Zea mays
  Clone ID: MRT4577_51855C.1
gggggcgaggtggaaaacccacccctttcgacaaaaaaaatttctggtcacaaaaactggcggggtccaagggtaatgaagggcaaaacgcaaacttttttaaccgggcctttgggtgattttaaattcaaaagggggcataacccatggtaatggaaccattgggagcccttgctacaaaactttggttttacatagaacttgggcccaacagatgaacttggaaaccacagatgcctaatgccgcacttaaagggtgcccgttttgttggccccattaagggcattttaggggggggttaggttcacgaagccttttttttcccattaggcctgaacaaggggttgaccttttttgcc

SEQ ID NO: 131989 - DNA, 264 bp, Zea mays
  Clone ID: MRT4577_51856C.1
caaatggggggccaaggattcttctatttgtagggtagtggcactttcaaagaaggccaaggattctatttgtagggtagtggcactttcaaagagtttctttctcttttaaaaactcgttaatctcgagctgttaacataaacataaaagattacgaatttctgatttctgaaaaaaaaaaaaaaaaaggggggccccccatcaagggacctcttcaccccgggatttattccgggacgggtacctgaaggggtacaagtttc

SEQ ID NO: 131990 - DNA, 2157 bp, Zea mays
  unsure (1)..(2157): unsure at all n locations
  Clone ID: MRT4577_51857C.1
agtttcctttttcattccacgacatcccctgacatccttgccggtggcgacttcacctccacatcctgccagcggcgacttcaactccccatcctgccagcggcgactttacctcccatttcttgccggcagcaacttcacatccccttcagcactctgtcccaagatcaggatggctccagggaggatgggatcacgatgcaaaagggatgccctagcagaaactactcctactgaatatgagaaacagagggcagcacatgtgatgaggaacaaccaaatgttccaacggcttgggattaatcagctgcgcacaataatgactgctacaagagtaaggagcaaagatgattgttcagaggaatctgggtctttgtatgacggtgaggacagtgaaggctctgagcaagaggaggatttccaggttgcaaaaggtgtacgtagccacaactcaactcatgttgctgaaaaaactacgcaaggaacacgaggacataaaagggttgtggcccctggtgtaaatgaacaacaaattagaatcactaggcaaaggagtgctaccataaaccaacaatccttcctaaacctaactaccactacacatcctagttcaacagctaccacaaaccaagaatccacccaaaatattacttctgcaacacaatttacttcaagtgcagccgctgaacaaaattacacccaaggcctgactgctgctgcacaagctaattctcccatacaagctgacatcagcgaccacattgcagatgaagaattggtaccaaggcaaagaagtatgggcaaacaacttgaatccttgagcagagggttaggcactaagattccaatccaaatttatgatggaaagcgaaggccagaaccccctattcaggtcgcaaagtttgcatcagagggtgggatcatactcaggcaacatattccaatatttccacactggaaggagtacaagaagcaagagaacgagggtaaaattacagactatattggcaagcttgctggtcaattcaccatggatgtggacagtaaggcagtcaaagatgcatgtgttgatatgataaaaggagggcagcgccagatgaggtataggctgaaaaggaagtacttcaccggggttcctgcaaatcaagtgaggactacatcgcctgttccatgtatgactgatgaccaatggaaagatttggtacaaatgtggtctaccccaaaccacaagaacaattgtgtcaagaaaaatataaagatgtcgaacctagtgcaattgatcttttcaaggagatgcattgcagcaagaaaaaaggatttagtgaagttgttcagaaagccataggtgatatggaagcaatggtggcaacaccagctgaagatggacagcttgcaaagtctgcaacagaagttgtttccaatgtactgccgggttcaagtaaatttcttcacaatgctggccttttgccctcctccaagagaagcaacacagggactgtttcagcaagaatgcaagagcttcagtctcaattggacaatgagaggcgagaaaaagatggacttcgagaagatatggataccttaaaagccaagtcacaatcatctgaggcaaccattgctaatcaatcaactgagattgcagatttaaagaagtccttagcagaaaatagcatcctacttcgacagatattaagtattagtcgtgatcagctgaatccttaagcatgcttgctaagatgctggtgtcaaccatcctgaatacacatctcacaaaactgtggacctctttttatccttatgtttgctatatggaactgcaacttacagtctattatatgtgttctcttgctatagagttttagtacttgtctggttaaagaattatgaaccatgttcttttgtgtgttggacatattatgcttgaaatatatggatgttggaaaaagttgtgnnnnannaaaaaaaaaaaaaaaaaaaaaaaaaaaaaaaaaaaaaaaaaaaaaaaaaaaaaaaaaaaaaaaaaaaaaaattttttattttttttttgaaaaaccttgccaatttttttacaccaccaccgggccccggccgaacggaggtttaacgttcccgggacgtttggaccttaagggcaaaaaaaactttttttttcccccc

SEQ ID NO: 131991 - DNA, 371 bp, Zea mays
  unsure (1)..(371): unsure at all n locations
  Clone ID: MRT4577_51858C.1
ctgcaaccgcaattaagttaaaaaannaaaagaagaccggcgcgacgggcgcaacgacgacggggaggcagaggacgcacgcggcggcagagcagccgcgcaagcgcgcgcaggccggcgccaacgcgggacgcgcagggcaacagccgcgacgaccgcanggccgcacgcaacggccggaccaacgaccgccagcccacccgcgccagcgcacgcaacggagaagncggcagcacaaccagaggaacgacggccgcaccagcgaaagcagaagcgccagcagcagcaccacaagcagcacaagagcgaggcgccgccgccggcgcgaccgcgcacagagggngcaagccaccaacaccgacgacccgagg

SEQ ID NO: 131992 - DNA, 1023 bp, Zea mays
  Clone ID: MRT4577_51859C.1
ggcacacattccatatttccgcactggaaggagtacaagaagcaagagaacgagggtaaaattacagactacattgggaagcttgctggtcaattcaccatggatgttgagagtaatgcagtaaaagatgcatgtgttgatatgctaaagggtggacagcgccaaatgaggtataggctgaaaaaaaagtacttcactggagttcctgcaaatcaagtgaggactacatcacctgtttcatgtatgactgatgatcaatggagagagttggtacaaatgtggtctagcccaaaccacaagaacaattgtgtgaagaacaaacttaatcgtgagaaggtgcaatttccacagtgcacaggatctcaatcatatgttgcaaaagcttatgtagtgagacaagaaaaatataaagatgtcgaacctagtgcaattgatcttttcaaggagatgcattgcagcaagaaaaaaggatttagtgaagttgttcagaaagccataggtgatatggaagcaatggtggcaacaccagctgaagatggacagcttacaaagtctgcaacagaagttgtttccaatgtactgcctggttcaagtaaatttcttcacaatgctggccttttgccctcctccaagagaagcaacacagggactgtttcagcaagaatgcaagagcttcagtctcaattggacaatgagaggcgagaaaaagatggacttcgagaagatatggataccttaaaagccaagtcacaagcatctgaggcaaccattgctaatcaatcaactgagattgcagatttaaagaagtccttagcagaaaatagcatcctacttcgacagatattaagtattagtcgtgatcagctgaatccttaagcatgcttgctaagatgctggtgtcaaccatcctgaatacacatctcacaaaactgtggacctctttttatccttatgtttgctatatggaactgcaacttacagtctattatatgtgttctcttgctatagagttttagtacttgt

SEQ ID NO: 131993 - DNA, 1442 bp, Zea mays
  Clone ID: MRT4577_5185C.1
tcgttttgcagcaatgggaatgacctcattttgtgggggcccagcggatgggtcgaaccttactggtgtaggcgagatcagacttgtaccgtgggtgccaacactcgttaggctaccatggtcaaggcacgaggaaatggtgatggctgacatgcaaataaggcctggagaaggctgggaatactgtcctagaaataccttgaggaaagtcacaaaagttctgttagatgagttcaatgtgacaatgaaggcaggttttgaaaatgaatttttccttcgcagaaaattagtaagtaatggagttgagatgtgggttccatatgataataccaattactgctcaacttcagcatttgatggtgcatcatccatattacaagaagtatattcttccctcaaagattcaggcattgttgttgaacagttgcatgctgaagctggaaaagggcagtttgagatagccttgaagtatatcttgtgcactgttgcggctgacaaactcatatatgctcgtgagactattaagtcgattgctcgaaagcatggactggtagcaacatttcttccaaagcctgatttggatgattttggatctggttctcacgtgcatctgagcttgtgggagaacgatcagaatgtttttatggggtcaagtaaagataactttcatggaatgtcaaaaactggagaacagttccttgctggagtgtatcatcaccttccgtcaatattggcatttaccgctcctcacccaaacagctacgaccggattcagccagatacttggagtggagcttatctatgctgggggaaagagaacagggaggctccattaagaaccgcatgcccacctggtgtgcctcttgatttagtcagcaacttcgagatcaaatcctttgatggttgcgcgaatccacacttgggtcttgctgctatcgtagctgctggcatcgatgggctaagaagacaccttaagttgcctgagccaattgaatcaaacccttctgatcactcttcaaaactgaaaaggctaccgcagaacctgcaggaatctgtagaatcgctttctgcagataaggttttgcatgagttaattggtgataaacttgtcacaactgctatagcaatacggaaggctgagatcaatcactttgcgaagaatccgggtgcacttaaggatctcatccaccgttactagggcagaagaacggaatgagaagctacatcttcttggacgtggcaaggggtttcactgtatgaccaacggagagactggtagaataaattttgttccaacggttaacttcggattctcatatcctgtgactgaacttttgtgactgaacttttgatacccagtgtttctcttatcaaataataaaggttatttaaatttttaaaaaaaaaaaaaaaaaaaaaaaaaaaaaaactcgagctcgtgc

SEQ ID NO: 131994 - DNA, 1743 bp, Zea mays
  Clone ID: MRT4577_51860C.1
gttgaaatgaatcagtggaataaaatgtagatattttttctattaacatgtacatctaaaatgtcagtttagatatatctgacattactgcctattcgttcccagctaaaccattaagcaatggaacacttaaataccataactagctgcaatatgtctggcactgtttatagcataactacctattcgttctcatctagatcctccatcactagctgcaatatgattcaggatctgaataatttgggggtggaaaataattttaaattgctttgctcatgctttaattccttttaggcgatatcactaacctgaactttactgtgattgatgactaaggcagtatgtaaaggattcaccgctacctgaggcgaatgatagaatcaacaagtgacatctatagccatggctacaatctcaacagcagattagtccagcaagccaccacttgcaggattcacacatcaaagacttcatcgccaaacaggtcgcgcactacaagcagatccaccatgttttccttgtggattcgataccgaagaacgcggcagggcaagattttacgcagggacctggccaagctagcgtcgcggtgcattagctccaagctataggtcaataggtgcattgtatgtgacgtccatttctttccttctcttgttgcaatgtactagcagacactgtcagacttgtagttattaccgtaccggtttatttaatcaagacatggagagtaatcgtgtagcctctcaacaagaaaaagataagtacacagtactggcttggcaaaccatctgcactataccagaaagactggataacattcggcatatctacctgaactgctgaacgacaccaaaatcttctgcttctgatagacagccccaatgttcatgagcatgcgacaaatattcaagaaccgatgtagcagcttttaaatagaatctatttgttatataagggcatgtacaacagtgacacggtactccaagcataagacacagctaagacatagtgtgatacaataggctgtgtctaaaccctgtgtcttagtaaatatgtcatattctctcattaattaacaatgcttgatctgtgcaaacatttacgacttcgcatcacagattagtccagttgcaattgaatttatgctttttccttttgttcgtggcatcttgtttcctatggtttttatgcaggtctgttatgttgtgttaatcatgccttagcaaacttatgtgagtaacaacattgatcttgatgatgaaccagatggagaaaatccttgcggcgtacagaaaggcttcgaagcaatggtgttccacccagaacaagctggcacaaggtatgacatggtcttgtcggcccctgtggcagtgcatggccttcgttgctagctgcactgatgtgagtaatgactttttttctactctttgcaaaacagtgaggcaacgggtctggaagcgcaccatggtcgaataaacaaagaagaagaagaaaaatctgagatgattacggaacaagcttcatataggccagcaactccctagaatgttctggctatggtggggtgaacttggtggttgtggtcatcacaaacacaggaagacagcgcacacagctctggacagtgccaacttggtggcagtgggagaggagctttggcttgcaatacacatgaatccctcacaccactgcaagctttggctagaacaccagggcagagcccggccggcctcgagg

SEQ ID NO: 131995 - DNA, 1439 bp, Zea mays
  Clone ID: MRT4577_51861C.1
gtgtaacaacattgatcttgatgatgaaccagatggagaaaatccttgcggcgtacagaaaggcttcgaagcaatggtgttccacccagaacaagctggcacaaggtatgacatggtcttgtcggcccctgtggcagtgcatggccttcgttgctagctgcactgatgtgagtaatgactttttttctactctttgcaaaacagtgaggcaacgggtctggaagcgcaccatggtcgaataaacaaagaagaagaagaaaaatctgtagcatggaatagatgtatgttattagattaaaataacaaaatttatgtatggataggatcacaaatggattccaaaatattttttctcattgcaatataacacatatgtacctaagttatcgtattattatacggttccgttgcaacgcacgggcactcacctagtattattctaagtctgaatcctaacacctgacagtccaccttttggccacttttatttccaaatttatgtggaaccaagtccacctcactttacaaaacttactctctttactatggtatccagatttgctatggaaactttaatccaaaaccccacgaatcagtcacaaataaattccaaactaggcatcctgctgtaattcaattcttagaactgaataacaaaattcagttatgtacagtctgacggtccaactttagccaaccttttctccaattccaaatagcttacatggtatggccttcaaccaaacctggtcttctactatagctctattgctttgctataagagacctaatttaattccctacaggttagccactacaaaggtacaaacatggctaaagtttactgaaattcagacttagccaattagctaagtctgaaacccagaagttgatggcccagttttgagcaaggtttacaatcagttctgtatagtttttaggtcagatcactaaatcaaacttgtactcctataatagatctataactttgttatagtggccataagctataactctatggatagagcagcaaagagctccaaagctgcacccaaaacatacaaattcagactctgaatttgcaccaaatctgaaatctgacaaccctgttttagactaaatttcacacctagttccaggcaaccaatagtggtagagttcaagtagtaattgttgtgagcttcactgacctgagatgattacggaacaagcttcatataggccagcaactccctagaatgttctggctatggtggggtgaacttggtggttgtggtcatcacaaacacaggaagacagcgcacacagctctggacagtgccaacttggtggcagtgggagaggagctttggcttgcaatacacatgaatccctcacaccactgcaagctttggctagaacaccagggcagagcccggccggcctcgaggtacccaatg

SEQ ID NO: 131996 - DNA, 661 bp, Zea mays
  Clone ID: MRT4577_51862C.1
gcaaacagctcgctgtaccagcgtacccgagctcgtggcctcgcctggcctagcctggcctggctagcgtttcttcgtgcgtgcgcaagcaagcacctaggctgcatcctgcggccaccatgtcgtcgggcacgggcaggtcgtcaaccaggaggggaaggggcggcagcttcacgctgaggcatcagccgccggtggtggacatcggctgcaactgccgccgccccaagctgttctccgtcttctcgtcgtcgctgttccgcggcgggggcaagcccaagtcccccaacgcatcctccgcctccaccaccacggcgttcacggccaccaccgcgggcgggcgcagccgcagccgcagcggcacgacgacggccacctccaccgactcctcctcctggggccccgcgtcgttcgtcgccacaaactcgctgtacgaggagccggtgccggcggcggtggcgccgccgcaggagcgggagcagcaggaggcgaggcggcggcggaggcagcagcgccggcgccgcagcaggcgggcgccgccgcccgcgcgccacggtgcggtggcggaggaggaggtggatggggaagagcaagaacaggaggagtacgggctgcgcgtggcccgggagagcggggcggtggcggtggattcgcgggagcc

SEQ ID NO: 131997 - DNA, 654 bp, Zea mays
  Clone ID: MRT4577_51863C.1
atttcatcacccgccgtcgccgccgcgtctcctgtgcaggcattacggcatcgcttatccggagatgaagccccacaccaccgccatacccctcgttaacttctagagacactggatgaactatgtcttgacctgacctccaccaccccgcccggcatcagagagcgtcgatatcgcatccttctcactacggatgtagcatcatcatgcccaccccgctctgctggatcgcatctgcgctgcatccagttctgtcacacccgctcccacgacctgaaatctcaggcctagggagagtgatttacccttgttgaggtgaatgctgacggtattccaaataactttgttttttcattggcgtttctggggatctccgccgcaagaacaaatctctctagggactgcggggcaatgcccagaggctttggacgtacaagggccagctgggtatcttcccaaggcgtggtcgcaagggcaatggcgaagactctactccggaagagcttggcacgtgcacccaggtccggggagactacatgcctattactcgcgtcgagaagacgctcatgcgaggtcgtgaagattactgatgagatgaagccgtttgcgggctactgcaagctccgtcttgagcggatgaacgataaacacctt

SEQ ID NO: 131998 - DNA, 322 bp, Zea mays
  Clone ID: MRT4577_51864C.1
atacacccaaccactagacgtgtacttttgaatcactcgctccatagcggatgaaggatgcatacgaaaccagggttattcttgtgccccgataaaacaaaaggtcggacctttatgcttgggggagcatgactggacgggagaggggtggtatatacacacaggctcctctgcctatacacacacatgacgccgttgtctttttgacggtttggtggcaaaccatatccctatgccccacaaactaaagcctaccctcagcttgccataggcgaacaccgcgtgccgacacatctagggcatctaacatgacgatccagga

SEQ ID NO: 131999 - DNA, 271 bp, Zea mays
  Clone ID: MRT4577_51865C.1
gcggggactggggacttccttatttctgggaagccacaaacatcagacaaaatactttattatcgaactataactgatatgaaatctcaaagagggccccaccaatgatgggttgatggtagaatgctgctggggttgccaaagcaagatggatgaaaggctacaagtgttgcagttactagacggtgctaccgttaggaacaccgtgctggcagaacggtaacaaatgggtctgcgtcacgaagggaggagggctgacaacaggtagctg

SEQ ID NO: 132000 - DNA, 783 bp, Zea mays
  Clone ID: MRT4577_51866C.1
ggtaccctcgggtccggccgggccttccctcgctcacaccccatgcactctcctttttcctgttacgaggtcaaaaggacccgccggagcagagctgcgagtgccgtgcccacaagcactgcacatggtcgacgacgcctctcccttgcaaccaagcagtctgcagcctcggtttcagctggtcgcctggtctactgacggctaactgtggccgtgggcgccatgaccggtcttgcttcagaggtcagtcctatacgggggtcattgctcattgcttcagaggtcaggctgagcggttattaccatatggtgtggcagtgacacgactactggtaaccttagcttcgaatatacaatatggtgttctttagctaacgcaccaaaagagcattgatgaagccatttgcaacctgatctccagctccagtggtttataaaaccaatctcaagatgcttcatcgtaaccatttctctcacaaaataataatcaacctatatatgtttagcttataatgaaacacattattcgaagacaaatattttgctcacatgttgtcacattatatatagatgcattgtatttagattttcaatatttaactccttcaataggttctaaattcatataatctctgttatagcatttacagaccttgttggtcgaaaggctatataaggccttgtcaacgtgagatattgtaaggctcctaccacaatcttgtaacttgctgcatcgtttggccctatcaacttctcttcatgaatagtaagcttttcacttat

SEQ ID NO: 132001 - DNA, 329 bp, Zea mays
  Clone ID: MRT4577_51867C.1
acattatcggagatctactccgagcgaacagccgtggtggagacactcgacatgacgctggacgacatcatcatgaacatcaagatgagtaaccccttctctcgcggggcccgcctaatccggggcggatccgcccctggcggccggaccggagggttctgaccgaccaggcgcccctttaaaagggctgggaacaggcagtccccctaccatccgtccaaggcccccaacacctgacagtttcactacatgtaccctgcggccacctctagacgcggcggcagcatgagggtctagacttttgagacgggcgccaagctctacatctg

SEQ ID NO: 132002 - DNA, 600 bp, Zea mays
  unsure (1)..(600): unsure at all n locations
  Clone ID: MRT4577_51868C.1
cgacattgacccgtcgtgcggctgcccccgnngcgggccggtatcnngtgatggagnnctgtacgccaacnngaggtgcccaagnaccgcggnagnaacnnttccgcgcgctttgtgcnnacgggcgagtaagggtcgtgtggcataggtccgggnaagggccgctccacttacaatgggcgtccnnaccttccnnaccgcgtcattccnnccgagttcattgnnngccagggggtgcgactttnncacccgcggcaaccggcacccnnggcggcgaggtccattctatcggcgaggaagtttcccctgacgaggaagttctgtgccgcaaggcacaccgcccccggtgtggctctccatggtccaacgtccgggtcccaacatccaacgtgctcccagnttcttcattctgcactcgtcgtgaccccttggtctcgacggcaagctcgtcgtttttcggcctggttcgtcgtgggcatggtgtgttgttctggtttttcgtgtnggtgggttcctttgtctgtctcctcctttcttgttgccttttgtcgttttctgcttgttggttttgtttgtttttttttgtttgttttttttttt

SEQ ID NO: 132003 - DNA, 332 bp, Zea mays
  unsure (1)..(332): unsure at all n locations
  Clone ID: MRT4577_51869C.1
acggacatatattaacatatggacatgaagttcaacgggtttatgggtttccttggacagggtaggcgggganggcccctgcattgtctgaagcaagaaaaagaatggggttggggaaccttgaaccaacatctgaaaacatcggctgagtcatttgtagccgtggtcaagaacaaagatggatatgtcagtgagagtgagatgattcaggcaataaatgagaccattggaggagagcgctttgcagggcgcataggcatgaaaagatttgaggaaatggattgggacaagaatggtacagtgaccttcaaggaattccttttaggttttac

SEQ ID NO: 132004 - DNA, 444 bp, Zea mays
  Clone ID: MRT4577_5186C.1
gcagcactaaaaggagatccttgcaccataagccaccatgggggcccaaattttttgccttcctaaggcgcctggctttttttactggggtggttaccgcaacattttgccctaatggcgaacaagctctaatggttccctttcttccccgataccttccttgaatattagttccagttgggaaaaacccagcttttaacccttataggcttaaccaggcatgcgaagcaggcaccttaccttaatcgccctggttgtttaaacattaaccagccttatctttggtgcggtctttggtccaaaccataagggcacatcagctgcagcaactcgagctacctgtgatcacccaagtagctgtggcaaacctttctcctactctgacaacaccatgtgtttcattcaaccactgttacactgaaccgtgtgttatttgcagaacac

SEQ ID NO: 132005 - DNA, 170 bp, Zea mays
  Clone ID: MRT4577_51870C.1
ctcaccgcgccaggtagccggagacaagggctgggacaccggagggttgccagcaaagccccagacctgccccaagaaccgcgcagttggaggtgagccactcccgttggggcatactctgaaggctccgtatcgcgtcttccccaagctgctctcccgcacccccgtca

SEQ ID NO: 132006 - DNA, 1089 bp, Zea mays
  Clone ID: MRT4577_51871C.1
tgaaacaactccttatgcgcagtacataacagattatatacatataagatgtactaagtgaaactggtcatcaacataagctaaaaaccaaatttgccgcctgtgtacataactatttgccatgaactctgatcttgaaaccacagcatggatacccaaacttacagcggcgcaccgaaaaacagcctcctcatcaacactcaaccattgaattgccatggcagcattcatttgtttccaggcttcttgtaaattaggcaccctcttatcagggagctaagggtctatttgtttgggattataatctgaccagattatataatctaccttattctaagttatgtaatcggccgagaagttaggtggggtcagcacggatcttaacatatcagacgatttctctaccagctgctggacgaggttggggctgctcgaggacgatgaggaagaaactccgctctgactctctgatgtattggacctcgccacccatcaatttgaggatcttcctgcatgtgcttagtcctacgccttcttgtgttgaccattgggaattgctgaacatatcctggacgacgtcagcagggaggccctcaccagggcaggcaaacctgaatatgaaaagttctgtatttgttccatcagaattctgttttacatttggtctgacttgtatttctacccaaccattctcggatggagcagaccgcaccatgcttagcaagaagtcagccaaaacttgttgaattctacattgatcaccatacgctgatgcatccttgatttcatcagggatgtcccgaataagttgtaaatccctctgcctcaacaatgacattgtttggctgacaacagcattcataacgtctccaagagaaaactcacttttctcaagcaccaaagagccatcctcaatacttttgagactggcatccttaacaatcttggacatctgtttctcacaagcagagctagtttcaaggaactgcctctggtcatcatttaaatcagtcatctgcaatagagagttggtaaaccggatgccactaagaggattctttatctcctggcaaatataggccaattctt

SEQ ID NO: 132007 - DNA, 482 bp, Zea mays
  Clone ID: MRT4577_51872C.1
gtcagccattgcattgctagcttttcttcacttctggttggcatctcttcttgtttctagtacaaaaggacgctgtttgcttcataagcacgaggagagatacatcgtggaagctactcaccaagtgtcttactcagaaccctttgatcataagcacgaggagagatacaaaagggcgctgtttgcttcataggctctgagatgagtaatgggtgctgaggatagagttgcgcaagcttcctcccattctgcgtccctgctaacatctggagattgccagtggctatgatctgtaaccaaagaagagggaaagtgtgagattagcagctggttcagtgttagctcagtatccatcattcacttgtatggctactgatttgcttcgtattcacagaatcctctccaccttgttggagataaaggggataatcatcgtgaaatatataaaaggtggagataacatccaggaaataaccagatca

SEQ ID NO: 132008 - DNA, 188 bp, Zea mays
  Clone ID: MRT4577_51873C.1
taatattaagagcataaaaaattcacaaaacgaagcacattaggaacatactaacaacaatggctaccaagatataatacctacttgcgctaattgcactaattacgagcgcaacaaatgcagatcattataaacacaatagactaactaagcaacaaaaaaacataattacacaaaaactaccaaca

SEQ ID NO: 132009 - DNA, 196 bp, Zea mays
  Clone ID: MRT4577_51874C.1
atcctcgcaatctctccttggtttcctctcccccttcaccccccagatcgcagcgatctccgccgccgccctctctgggattccgcgcgacaaagtcaggcgtagatgctccatgaggaggagggaggctcagcagggctgttgggggagatgttcctcttggactgtgtctacggccctcttgcttccttctttc

SEQ ID NO: 132010 - DNA, 456 bp, Zea mays
  Clone ID: MRT4577_51875C.1
cctctctttatggttttggtggagtcaaacatgttaatatattgacgatatttaacattgttacgagtgccttgggttagatgattaccccttcattccttacttgggagctatactttacaggcttactgttacggcgttgcacaccacactctaagacaaaacggcacatttgcattccattagttggtcaactctgtgacccatacgatgcacagctaaccttgcattactactactactaggagcagctacatgcctacatgtacactacagcagctgcctgagcgaccgatcagggtgagaccaagtaccatccattaagactgcatgagttcccagttgctactactaactggagcaccatactgtccttcatacatcgattaacttaggcatgctaaggttcgattctgtagctatgtagctcgatactggaggtctacaccacctggc

SEQ ID NO: 132011 - DNA, 141 bp, Zea mays
  Clone ID: MRT4577_51876C.1
cctaattttaccacccgtccgcctcccgtcctcaatactctctctcctgcacaccacacattttggccttcaagtcgcgctacacaattccggagtccgggtgctctccaaacacgctcacatactctcccatgatctata

SEQ ID NO: 132012 - DNA, 291 bp, Zea mays
  Clone ID: MRT4577_51877C.1
gtgtcaactttaaaagctacgtggggaaattaccaacagcgctgacatacaatgtttcgttgcttattgtgaacaataataacacatccaatgaaaaagatcccatgcatattgataggtacgctaacaggtgtagcgtacacaccccatggccttgggagcacccactactaaaccactgcacaatgctaaagccagttccacaaaacatacacgcactatgccacatcaatttaactttactatgaatcgaatcaggacatccagaaaggaggaagctagatgcaatga

SEQ ID NO: 132013 - DNA, 417 bp, Zea mays
  Clone ID: MRT4577_51878C.1
attgataccaactagcaacatacatagtgatttacagtagcaacattttaacaccaaagggcggccagaattttggccttcttggccttcttggttttttaagaaggggtggttccgggaactttaattcaccatggttacacaaaataccttcttccgggaccagcgcgagatttgaatacccaactatacaatcctacaggctacaagagggcatcacagcaagcgtattacgggcgttagcattgactgtccaacaaccatatgccctattgcaacaaccatccttagtgaatctatatctccaaagaatcgcagcacaacaactacaacagcagttgcttccaacaatcaatcaagtagttgcagcgaaccttgctgcttacctccagcaacaacaatttcttccattcaatc

SEQ ID NO: 132014 - DNA, 267 bp, Zea mays
  Clone ID: MRT4577_51879C.1
tagccagcaccccagggtgctttataaattttaattaacttcaatctaactggaccaacgccaatttttaaaggcagctggatctacataactacaccatgctttactagatgatcatcaaccacaacttacatactaatcatgcaactcattattacattccctcagctcaatacaactcactgatcttcttatacaatctatctttcaaaactatatactaccggacctaatcatctactattcatattcccattacaactaatc

SEQ ID NO: 132015 - DNA, 351 bp, Zea mays
  Clone ID: MRT4577_5187C.1
agattcagattcaggtgatatagatgctggtgggtttgctctcactagtgctcggaaggctagcagactagccgtagatgggtactcttcatttagtccacatgaatcctcacctgcaacttctagtcttcaaatgcatggctgtgataatagtgctgctgtgggcacaattccaaaattaacccataccaaccaaagccctttcatcaacaatgctaagaagataaacccagttctcaaacgaaattactctgttagagaggagccgtatggggagactcgaagagtgagacaaagatccatgccggccacgggcgcccgccaaacagccccgcaccccaccaaccgcac

SEQ ID NO: 132016 - DNA, 328 bp, Zea mays
  Clone ID: MRT4577_51880C.1
gcgcaatcttttcggtccgcccgatcaacgtgatcccaccggcagacatggatccatactacgcacacagacccgtctaagtggacagcaatctccagacgactggaccaccaacgtccgacgccccagtctggaacaacaactgagtccttaccgtaagacagagaggaccaatcctcgttgaggatcatcatctaatccaaaagctccctcaaatccacagagaacgtatccctgaacagggtgcgcatgcacggagagcaagtgacaatggttcatttgaggacactcatgatgtatatcaccttacatgtgcttgattttctcc

SEQ ID NO: 132017 - DNA, 266 bp, Zea mays
  Clone ID: MRT4577_51881C.1
gttgatgaaactacaaaatatgcatgctagaatgaatgttgaattgtctctaatgtccataatctatatgctgaaattctgaatttttgaataatcgggtcaggtatggatacccatgggtatttagtacccggtcgggtatgcgttgggaggtttttttgtacccgaggtcgggttcggggatgggggcgggtctatgttcatgggtacgggtctagggagttaatccccactggggaattccccattgacatctctagtccggt

SEQ ID NO: 132018 - DNA, 358 bp, Zea mays
  Clone ID: MRT4577_51882C.1
tggggggctgccggatggcgcggcagcgggtcccctatgattcatggtggcgggtctttgccgtgcgcttcctggcggtcggaatgcagcagccgaccaacgatggccggggataccacgggaacccttgcttgacgatgcccccaccgtgggcgccctgctggtgcccgcattcagcgcgtctagggcccctcatggtcatcccccattacagggcccctggggatttaccccatatccaacggtcctgaccccgtatcttttcaagccttggaggaactcctctaggagatctatgcccgtcctggccttactggcatcaccttccttgacattcccctgtctcccccctccttgc

SEQ ID NO: 132019 - DNA, 465 bp, Zea mays
  Clone ID: MRT4577_51883C.1
gtgggggtgtgtttgtttttttttttttttttttttttttttttttttttttttttttttttttgcactccaaaaaaatcccaaaccttccatgaacaaaaattaaaaaaggggggggggggggagaatgaaaaaaaactcaaaaggaaaaaaagaaaggggggggggaagaaaaaaaaaaaactctcacaccacatgattgatgaactcgaattgggtgggacgggaccatgcagcccaacccaatgcagctgtgtggccaaagctagatagccccccccctgcccaatcatggcctcatcaggacactcgacgagctaccaaatttggggtgcaatttttggcacacaagcatcgcaccgcatcaagcactcgcctttccctttcccccccgtggccggccggtgcggggccgccgtccctccctcgtcaaaaaagcatccaatccgggcggctcggcggcgg

SEQ ID NO: 132020 - DNA, 238 bp, Zea mays
  Clone ID: MRT4577_51884C.1
aaaaaaaaaaaattgcaattttaatatttatttaaaaaaaaatatttatttccaatttaatttggcttaaaaaaaaacttttattattgacataatttttttataaaggatcattaaacaaaccttttaaacagtcaaaaatcgcaggcatatcatttaattgcaaaaatctaattctaatttgatcataaacttttaccaaatttccaaaaaaatactcttggaaaaacttttccta

SEQ ID NO: 132021 - DNA, 372 bp, Zea mays
  Clone ID: MRT4577_51885C.1
ataggggggacacggggcatatttggttattcttattaaaatttggggcgaagcacccacacaaatccagctacgtaggggcgggggatacccccgtacatacaaatgggggcacgggtaaagcacccttatatattattgggcaaatccaaatcaaaattattcctggaaaatccaaatcactagcccatgcaaatgcagagcctattccggcccatcacgggcaaaaggggacttgggaggtgctggtgcccccacatgcatgggttttcatgtcgggggggttgggggaccccccggggcatccaggggccgggcacaccaaccgcaccccggggttgtaagaaaaggccatggcgagggtgtaccccc

SEQ ID NO: 132022 - DNA, 278 bp, Zea mays
  Clone ID: MRT4577_51886C.1
ctcgtttctcaagtgtatgcatcatggtaaatataaactaaccacaagataggtagattgattcatttcattttaatctccttgtgtaattcagtacctccataattgttctaatcttcttcccactgtttacaaattaccagttaattaactcgtaaagaaaaattcacatatcagaataaaaataaatgtatactcactttataaaaatcaccactgctgtctttccttaatactagcagtggaaatgtaagtggcttactctacaaattttggtg

SEQ ID NO: 132023 - DNA, 114 bp, Zea mays
  Clone ID: MRT4577_51887C.1
aacagaatcgctccctcctgcgttcctactttcccctccgtgccctcagagtttagtcggtgtgcgtgatgtgcgctcttaaagaacgcccgaacttgtttaacatcaccttgc

SEQ ID NO: 132024 - DNA, 375 bp, Zea mays
  Clone ID: MRT4577_51888C.1
caaaacccccccaggacacgaccgaacgaaccggccaccgacccaacagggggcgaggccggagaagccaccgagagcgcgagcggagcggagccccagccaaggccgacgaggcgaaggcgaagggaaacgggggcggccgagccaaccgacgcgaggagggggagaggcacacacacggacgccagcgcgcgcgccccgagcaacacacggacaccagacgaaccggacggaggcgcgcgccgcacccaaccgaaacaccaacgcgcgcggagacgcgcagaaaaccggcgagcagaagagagacaggaccaaggagcgaggcccgccgcgccacggcgcaccgcggccacggggaaggcaccaagacccgcg

SEQ ID NO: 132025 - DNA, 384 bp, Zea mays
  Clone ID: MRT4577_51889C.1
cctttcaacctgtgctggaacatctttggcggacatagtcaatgcatctacggaagcttccttatagaaaatgcctatcatcatcggccatccgcgtcctgtccatgctgagatcctctctacatctcccccaaacgcagacagagagctccactagaaagctaaatacggcatcacagaaatgtgcgcagacctatagaactgggctagcaagagcccttatggatacacggcatctgactctccgaacctcaatgctagttcacgctgaacaacaccgattgtcccatgtggactcacttgtacatgagactgtagtgccagccaaccacgataaatgtagatctagtcggtcgctcatactgagagaagttctatatgcct

SEQ ID NO: 132026 - DNA, 201 bp, Zea mays
  unsure (1)..(201): unsure at all n locations
  Clone ID: MRT4577_5188C.1
gcgtccgcggaacgcgtgggtggggcgctggtgggttcgagcccggaataatacggcccggggcacggtgggcacttctcagaccttcacctttgcgagttgtacagtaaaattactctcaaactaagccaccgaactttgttctgatttgtgcttttaggnagtgtttcatttccaaatatttatatgcnntgatggaag

SEQ ID NO: 132027 - DNA, 252 bp, Zea mays
  Clone ID: MRT4577_51890C.1
gtacatgctacggaggattgctgcaaagcttccgatatcccagggtcaccccaccagcaggggctcgagaccagggattaccgtatggtgagccaaaaatggggactgacgtccagctatgaaaaaaccactgcctccccctatatataatacttgcattggcagcctctctgcaaaaaatatattgggatgagactccgcaccgatattctttttctagaccctactcacatgggagccatctctattttt

SEQ ID NO: 132028 - DNA, 373 bp, Zea mays
  Clone ID: MRT4577_51891C.1
aggcccacacgtcggcccacgcgtctgcacttcttcagcggcagcgtggcaacgagaggaacgaagtattcagaccgaagacaatggacccggtgcggaacagcgtgtgcgtgaccggtgctggcggcttcgtcgcgtcggatctggtgaagctcctcctctcccggagcgaagacgcggtctgcgggaccgtgcacgagtctggtgctaccacgaatgcccagctcaaggtgctggcaggagctgaggaaacgttgcaacttctcaatgctgatctgatggactacaacagcgattgcatcagcacttgccggctgtcatggtgtcttccatgtagccaatcctgtcgtttctcatcgaccctccaaccctg

SEQ ID NO: 132029 - DNA, 566 bp, Zea mays
  Clone ID: MRT4577_51892C.1
aaaagcgacggttcccataacaagaacaatgtccagctcgacgtgcttggtccggattttagacacataatgttagcgactctactttttttttaaaaatagaatacataccacttcgaaagcaatcagaaaactttgacctgaccttttgtcaacatttgtaacgaccattttcaaatcttagcatgaagattaaaggccttctacgatccacaacgcacaaatcacccgagattggagatagccacacctggtacacaaggcacgctccagcagatctatcccattcattatccgtcacttattttaaatttatctctgtaaacagtgtcagtttcttgacctctgttttacacaaactaatagaggacagtctaaaaactccaatctaccaacctaagacctaccggctaccgccgcaaagagcagaggtgctgtgacgaggcagcaagttccaaggtcatcgaaatgtactgtcgatcctttcgcgagtaagatctgcattgctcagtattatgaatgatcttctcaatgatgccagaagcatctccgaagtctgacatgcg

SEQ ID NO: 132030 - DNA, 314 bp, Zea mays
  Clone ID: MRT4577_51893C.1
agaagtgctgttaaatcgaacttaaacatgcaggaccatgtaaatgggagggctgggaaatcaagttcggagcatgtttcaaactgggggggtcataacgggcattcaccctttcatctgatttatcccctttttccaacctaaaacgggcatacacccccacggtttaaaaaaaagaagctggaactacatatccgggttccaaccccttaataccaatcccttggtttcagggtcagggggcaatcaattttttgtaaatcccaatccactcttaaaaggattggatcggaaccttggaaaagcaacccaaa

SEQ ID NO: 132031 - DNA, 1140 bp, Zea mays
  Clone ID: MRT4577_51894C.1
tcgagtgtacacaccagatgaacccggtaagcaagtccggagcgctgtcaggaactcaggatcaagaacatcagcaagtctcatgtggctttcaagttccaaacgactgcaccaaagagttgcttcatgaggcctcccggcggcgtacttgctccaggggaaagtatcatagcaacaggtaactgaatttgacaccaattatgtgttgattttctgtttcctgtcactgccaccaggaaagcgaaggatgtgatcaagtctgtgaagaagtgtatagggagcaggagcaagaccactcaactctttactgttatgctattggagatgcttctgaataattgcggagagcctgtccataggcaggtcattgataatggccttcttccaatacttgtgaagatagtgaagaaaaagacggatttaccagttcgagaaaaaatatttcttttgttagatgcaacacaaacatcccttggtggagctaaagcaaggttccctcagtactatgaagcatactatgagttggtggtgaaaaaggtgtcgggtccaatggcaaacctcttcactataagggaacaccattccatcgtattatccctggcttcatgattcagggcggtgacatagttagaggtgacggcaaagggagtgagtctatatatggaggcatcttcccagatgagaatttcactgtaaaacatacacatccaggtagccatatacttcttttttccttgacctccatggtgtgccacggttcagcaagacttctggaatgttgtatatcgtagctagcttatggccagtcgaattgactctgatcccttgagttgtgatgtggagacacatacatctgaaaaatctttaggccatgttcggttagggtggattgaaggggattaaatttccttccattcaaatttgaattcaaatgaataggagggagttgttcgcttcggattaaagctaaatgtttggactgttgtagctgtaatctatacagacaaaaatattgtagaagtgttgtttcatttcaaggaagagaacacgtcgtgaaagatcagatataaaaacaattcagctttttgtataaaaaaaaaaaaaaaaaaaaaaaaaaacgagagggggcgccgtgtaccc

SEQ ID NO: 132032 - DNA, 111 bp, Zea mays
  Clone ID: MRT4577_51895C.1
ccgatctgctccgccggcgaggtgaagtcagctgatatgatgtacctcatttggataacaatttgactggcaccaagttttaccagaataatccagaaggggcaagggcaa

SEQ ID NO: 132033 - DNA, 1352 bp, Zea mays
  Clone ID: MRT4577_51896C.1
ctcgaggccggccgggcggtacggcgatagggcgggacaaaaaaagaggagtgacccggtctaccggagcgtacggtgccgatcccgtcgccgccgctacccctcaatcgcgagcaacttcttccggattcgcaccaagctctccacaattctatcgctatgctgcggaaggccgtcgtcgccttcatcgcctgcaccgccttcttcctcgccttctctgcctactcccgtcgccagggcgttgcagaggttcaattaccagcagttactcacagggtctacctagatgtagaaattgatggccaacacataggtagaattgttattggtctctatggggaggtcgttccaaaaacagttgaaaactttagggctctttgtacaggtgaaaaaggtgtcgggtccaatggcaaacctcttcactataagggaacaccattccatcgtattatccctggcttcatgattcagggcggtgacatagttagaggcgacggtaaagggagtgagtctatatatggaggcatcttcccagatgagaatttcactgtaaaacatacacatccaggggttgttgctatggcgaattctggacttgattctaatggatctcagttttacataactactatcaagacaagctggttggatggggagcatgttgtcttcggcagggtgatccaaggaatggataccgtgtacgccatagaagggggcgctgggacttacaatggcaagccaaggaagaaggcggtgatcaccgacgctggtgagatacccaaggagaaatggggtgatcaggaagcgtagggtgttttctacttcttgtcaccttcaaatcaggtagccatgtacttcttttttccttgacctccatggtgtgccacggttcagcaagacttccggaatgttgtatatcgtagctagcttatggccagtcgaattgactctgatcccttgagttgtgatgtggagacgcatacatctgaaaaatctttaggccatgttcggttagggtggagtgaaggggattaagtttccttccattcaaatttgaatttaaatttcaataggaggaggttgttcggcccctattaaagctcactgtttagactgttatagctgtacaacctacagacaaaatcattgtatgtggagaagcttgtgattgttatgcattcgcgagctgctgtcctgtcaacattaaaagtgtaattgtaatgtcaaaagggtggctccaaggtgattcagtggtagttctgccatcatgttacagtaattcttccatcacttgtttgtacaactcatacatgtcatgccaccctgagatttatgtcattcagttgtcagtc

SEQ ID NO: 132034 - DNA, 130 bp, Zea mays
  Clone ID: MRT4577_51898C.1
tgatcatgcaatatcgacacatgcttggacgctcctatagaatctgatgaatagctttctaagaacacaaaaaggttctttgctaatgcagcagaaacattcaatgctgcattcatgtatatatcatcat

SEQ ID NO: 132035 - DNA, 158 bp, Zea mays
  Clone ID: MRT4577_5189C.1
ggtgctttcttagaggtgggttggcttctcctcccccttcggttcggattcgaggtggtgaggctagacgcggctaagtttatcaggagacgagatcgacttggccacgatagatctttactaaagaggatcaaatgaaaggaatataacagattggt

SEQ ID NO: 132036 - DNA, 334 bp, Zea mays
  Clone ID: MRT4577_518C.1
gccactaaaaaaaggatatttgtggcctacaacacgcaaagttagccatagataaaggcttgtttcaatgggtgtttatcgcccactagcccagatgaacgaaaccaacccccgcgctaaaaaacagtatcacaacacttttgggtgctacagctgcgcctcccggtctgggaagagctgccccgcgcccacctttctaaagaggtgccctgccggttgtatgacggagtggttatacgagaaaagtgcctggacctcacagaggagatatatagaagatcattatgcgccccattggagcactcttcgccctgcagaggccgagagtggatat

SEQ ID NO: 132037 - DNA, 1545 bp, Zea mays
  Clone ID: MRT4577_51901C.1
caggtccactcggaatgcgccgggccatcgaccgcctggcctcctctccctacccctacgggtccagtggccactgcctcttgccgcaggcagccctcttctctctcttccgccgtctcgcctcctcacgccattaaaccccacccgcgcgcgcggcggccggcggcgagccctcacccatccgagcaagccgaggaggaagcgagcgcgcgaaagtatcaggaggaggcatgggtaccctggggcgcgcgatcttcacggtgggcaagtggatccggggcacggggcaggccatggaccgcctcggatccaccatccagggcggcctccgcgtcgaggaacaggtttcaaggcatcgtacaatcatgaatatttttgagaaagagccaaggatccatagagatgtgtttgttgctcccagtgcagcagtcattggggatgttgagattggtcatggatcgtcaatctggtacggatccatattgagaggtgatgtcaacagcattcatattggatctggtactaatatacaagacaattcccttgtacatgtttcaaaagctaacattagcgggaaggtcctcccaaccataattggaagcaacgtgacagtgggtcacagtgctgtattacatgcatgtaccattgaggatgaagcttttgttggtatgggtgccactctgcttgatggagtggtggttgaaaagcacagcatggttggtgcaggatctcttgttaagcagaatacaaggattccttctggagaggtctgggtcggtaatcctgccaagttcctaaggaagcttacagaagaggagattgcgttcatcgctcaatcagcaaccaactatatcaacctagcccaggtccatgcagccgagaacgccaagagcttcgacgagattgagctcgagaagatgctgaggaagaagtacgcgcacaaagacgaggagtacgactcgatgcttggggtggtccgcgagatcccgccccagctcatccttcccgacaacatcctcccacacaatgctcagaaggcggttgcccgctgaaccttttctcaacccatgcttggcgttgttgcctgttgtcttggagcattttgacacgcgttcgttctctgtttttttatgaagcccaataagattgggtcgagcactgttttaggatcgaccgcacacaacaccacctctattttaaactgcaatggacaagaagctcagggtctcatttactcatctttgacttctctctgtggagcacttgtaatcgaagatcgtgccctgttttctgtactatttcaaactgcatgcagactcctgggttccgttgcttttgctttgcttcatagatattcctttggtccttcatacaatgctcgttttatgttcaaggcactattataatttaaggatagttttggaaccttaaaaaaaaaaaaaaaaaaaaaaaaaaaaaaaaaaaaaaaaaaaaaaaaaaaaaaaaataaaaaaaaaaaaaaaaaaaaaaaaaaaaaagtactctgcgttgttaccactgctaaga

SEQ ID NO: 132038 - DNA, 252 bp, Zea mays
  Clone ID: MRT4577_51902C.1
ttgtgggtgccgtatattaccatactctttcacccccctgggggaggctttttgtcgaactgcgggtagaaccactagcttgatgccattaaccacggcgtgcccgagctgacgcggcccaacttaaccgaccagttctgcagccagcggcttctattcaacaacctctgcgtcatcatcatgtgcggcgtgaagctgacatccatgagccttcccgacgaggcccacggggtgcaggtgactagcgcctac

SEQ ID NO: 132039 - DNA, 2181 bp, Zea mays
  Clone ID: MRT4577_51903C.1
aaacatatcatgctgttgttcttgcttatggtgcagaaagtgataggtcacttggacccacgcgtccgtatacccttggtctacactcacgtgtccggtttgtctgctcgtatactggacatccagacatgtgcgacttctgtccagatttaaaaaacacagaatctgctgttgtccttggacagggaaatgttgctctggatgttgctcgtattcttttacgctgtaaagctgagttggctactacagacattactgattatgcattggatgctctacgtggcagcacgataaggaaggtatatttggttgggcgacggggtccagtacaggcagcttgcacagcaaaggagctgcgtgaaattttaggtttgaaaaatgtccgtatttgcatcaaggcagctgatctcgtgaccacacctgcggacgaggaggagatgaggaatagtagaatacaaagaagagtttatgaattgttgtcgaaaactgcgcatgggggcaacaattacaatggccaaaaggagcttcattttgtgtttttcaggaaacctatcaggttcatccctgcagaaaatggttccacggttggtgctgttcaacttgagaagacagtattaaaaggtgatgaagtaactgggaagcaggtcgctgctggaactggtgagtttgaagacctaaaatgtggtctggtcttgaaaagtattggttacaaatccttgcctgtacaaggtttgcctttcgacaaaaacagaggagttgtgccaaatttaagaggaagagtcctgagcagcgaatcagagattgcgacagtagaaagaggcctgtatgtggtaggatggttaaagagaggaccaactgggattgttgcaacaaatctccactgtgctgaagaaacagtaggtggctagcatccttgaagatgataagaagggtgtattaaggcccccatttgattcgacaaagcatggaagggcaggactccttgagttcctttgtctcgaaaggccgcccttcctcccacacggaggcgtgccgaacataagtgccagggacaggaccgccgagccactgagagataccgccagaagaaagatgcctgtctggggtgggctccagaaagggccaaccgagtgggatgccggcaatcgcccctccccgggatgaagacaccgtagcttccgtcccgaaagaagccaaggagcgtgaaggaacccccccgtttgcaccaaccaagcatggaaaggaatgcttcagttcttagcgggaaagaatgtatgtcttctgtccctcattgcctggatgaggtaagattcagtccgtgagaaagatgggggggtgtttgaaaaaaaaaccaagaagataaaaaacaagtagcgaccacccacagagacaaacaaaagagtggacggacgccccccccccatccgacggagtctgccaacgtattgtttctagagaaccaagcgcacgagagtgaaagctttatgtagttagcaagaagggagtagatctatatcgcggtgagtttgaagacgtaaaatgtggtttggtcttgaaaagtattggttacaaatccttgcctgtacaaggtttgcctttcgacaaaaacagaggagttgtgccaaatttaagaggaagagtcctgagcagcgaatcagagattgcgacagtagaaagaggcctgtatgtggtaggatggttaaagagaggaccaactgggattgttgcaacaaatctccactgtgctgaagaaacagtggctagcatccttgaagatgataagaagggtgtattaaggcccccatctgattcgacgaagcatggaagggcaggactccttgagatcctagagcgaaagaatgtccgctttgtgccattcagtggctgggagaagattaattccgtggaaaagatggcaggggagctgagaaataaacctagagagaagatcacaacctgggatgggctccagaaagttgcacacgagtaaaaggacgggcctcggacctccacaagattttgtcaacgtattttttgtatcaaaagaatcacattaacgagagagaaccctgtacttagcaataaaagattatatcaacatatcttgctcatgttaaggggccgaattttttgtattttaatccttttttcgaaacaatttcacgtttaaatcctagataa

SEQ ID NO: 132040 - DNA, 298 bp, Zea mays
  Clone ID: MRT4577_51904C.1
ggcgctgccgatttgccgaagccacggctgctagtagctcctccacctacatgcatccactgttcgtcttcgtcgcctcagaccttgtccttccccccggcccgtatactcagcccaccactagggagagaaagagacatacgcatgccagcaacgcaaggacctcagatcctcagatacgcatcggttggcagcagcggcaaagctgcggcggcgaagagcggtaagtagtagaccgggggggcggtgcggcgtgcacgcggtaataggcggagcccgaacgcagacgcgaggggac

SEQ ID NO: 132041 - DNA, 162 bp, Zea mays
  Clone ID: MRT4577_51905C.1
ccagcgctaggagggcgcgaagtcgtgtagacggccgggcctcgccgtcgcggaggggcggttagcgtctctggaggcgaggcctggacggtgaccccgcacactcacagcgccaccctccatctgtgtgactctgtaagggctgaggccgagccgcccggc

SEQ ID NO: 132042 - DNA, 744 bp, Zea mays
  Clone ID: MRT4577_51906C.1
aaaacttcaatttcctattccaagcaatgactattccttccagttagctatccgcaaatgggaactatatggcaaagtttttcataaacatatatttaacttgagcaaggatgttatgagcttggatgaaaatgaaaggataatttctagaggtccacccaacattcttcactgtgatgacacaagcatggtcatatctttcacaagagggcctttatttttcatatttaatttcaatcctcaagtctcccatccgtcgtatcgtgttggtgtggatgaagctggggaataccaactcatcttcaacacagatgaaactaaatatggtggatgtgaaaccctcaagagtagtcagtatatgcggaggacctctgataaaagagctgatggttgtcgcaactccttggaattggcattgccatctagaagtgctcaggtttacaagttagttcgaattttgagaatttagcatgtcagcaatataggtattgtaatggaatcatgcaactgcgtagaaaatggggctttgtggtccttgtggtttttgttgataagatgaaaaaacaaagggattgtagccatcttactttgatagcttcgggacatctgttgacgttgaggaccctgcagttttgccctttgcggcaatgcaacttctctaaaatttatacatgctgtgactactgaggctcatctataaaaggctagacagtttatcaaaaaaaaaaaaaaaaaggggcgccc

SEQ ID NO: 132043 - DNA, 608 bp, Zea mays
  Clone ID: MRT4577_51907C.1
cccccccacggattttttttttttttttttttttttttttttttttttttttttttttttttttttttaagggcacgacacattccaaaatcttttattataattatttcctttgcgaataatcacagctaaagggaactcactatcatgtactgcatcctaagaaagtatcaccctcaccagccatgggtacactacccagtcctatagtaaaacttcactatacctcaacctaactacctgtagctgtagtttctacagcaggataaaaggccctacaacatactgcctaaacttgaccaactccaccatagggtttgccaaaaatggggaggaaactaactgctctctatcagttggggagatgggaaaaaatcttctcatgaatcaccacggaccccactaactgagcatctgatagcactgctgtcgagagatcaggcagggaagcttgataacaatggcttgattccaaaggaaagccattgttctgcccactatttactgaagcaggggtgcggctatttgcttggggcatcgtcctgttgattccccttgccttcgcaatacctagacagggcttcagcatccgagtcatgtatgcattc

SEQ ID NO: 132044 - DNA, 288 bp, Zea mays
  Clone ID: MRT4577_51908C.1
ccggccgggaacatgctaaagcgaatttgcaatacccagataaacaggaagatatgatgcctctctaccaagatccatgcgcgaggagggctcccttggatccttctcccgcggtgcagcctgatcatgcctggaaggtgcctcccgggcccaacattaccaccaagtacgacgacaagggcgtcggcgacagggccaccagggaccggcagcccaactgggcgcggagctactgccaaccgtaccgcatgcgggagccagaacgaggaacctgccacccctacaccg

SEQ ID NO: 132045 - DNA, 335 bp, Zea mays
  Clone ID: MRT4577_51909C.1
tcgccgtccgtaccgtacacaggcgcgtctaatcagaaatgtattcctgttgtcacagcgacggctgcggtgctgggatgcagcaggctccagagcgacattgcgggcgccggcataccgaagaatggaaaggtggggaggtctcctccggcggaggaggtggaggcgttcctcgtcgtatttgagcgcggcatgcgctgcgctttttggtcaattacaactatgacatcttcaaggacgctcccatggacggcggccggttctagtggtttctagtgcggccctgttaactgttagattcccagattcaatcctagaggttgtctagtgtcctt

SEQ ID NO: 132046 - DNA, 429 bp, Zea mays
  Clone ID: MRT4577_5190C.1
aagaaactataatctattatgctttcaataacccccgccgccgctgctgcctcctctccgagctgccgaccgactaagtaaaatgacatgatgtggactgactctgagatcattgatgctcccgatgccatgtacaatgctcagaagatatcccctggcccctccatgatttctgcggcatacaaggggatcatcaagtgcctgacggtcatgcaacgccatgactacattgatgagttctagtacgtggatgaccacagagctgataagatcgtgatgcaactgaatggaatactgaataaatgtggtgttattagcccacgttttgatgcaggtgttaatgacatcaaggaatggacattgaggcttcttccatctcatcagcatagctacatcctcctaacaacttctgctggaattatgtaccat

SEQ ID NO: 132047 - DNA, 358 bp, Zea mays
  Clone ID: MRT4577_51910C.1
ccggttgttctagcgctaacgctgtgcttgggcctgcactgcaccggttgtgcgcggtctgcgactgcgagccaaggaatccaaaaagccgggccggacggagtgtccatcgttgtttttcgcggttgcgagagcggagccagcaaggacaggttgtcgtgggactagccatgctgcacgccgaggagaagaaggggatggtgctgagatggggagtacgcagaggccccgcggctctggcttgctcaccttctccacggaggaggcgatgcggaacgccatcgagggcatgaacggcaaggagctggacggtcgtaacatcaccgtcaacgagtcgcagtcccgcggcggtcgtgga

SEQ ID NO: 132048 - DNA, 241 bp, Zea mays
  Clone ID: MRT4577_51911C.1
gagagcatagtatgaggattttattggtagtgtgataaaccacggcaaggcaccacaccaccctactaagatgaacaaaatagggggaataatcagcagtgttgacgaagacaacaagagaacagtggggctcctttccaacaaagcaaccatataccacaaacttcttagtagtgtcaccccagctgatgaaaaattattggagggttgtatcatcgcctgtcaagcaagcatccttgtt

SEQ ID NO: 132049 - DNA, 438 bp, Zea mays
  Clone ID: MRT4577_51912C.1
ctcgagcggcggggctagtgctacaagacaggaaggaacaccgccgccgccgccgcgccttccagtactcgcggaggaaaggaacaccagccagcgccatggtcacgtcgacgaccgccgccgccgagctgtccccgccgtccgtggccgggacttcacctggcgccgtctacccgggtgcgcgtagcgatcagagagaagacaacgagaagaacaataagagacaagacaaaagataagaccaaaaaaagagaaaaagcaaaataaaggaccaagaaataaaaataccaactaatgaagacacaaaaagagaaaaagaaaaaaagcaacaaaaaaaccaataaattttattatacacaacccacacaaaaaaaagacataagaaaaagtacttatgaatgaaacaaacgaaaaaaaaaaaaaaaaagacattgttca

SEQ ID NO: 132050 - DNA, 432 bp, Zea mays
  Clone ID: MRT4577_51913C.1
cccggaattccgggggtggaccaacggcgtccgccatcctcgcccttccatccacgtgttgcatacctcgtcaaggcagtcttcgcgctgccgagagccttccccacccaccgcgaggagcttgttgtggcaggtcgctccgaccttgcaaacggtgtcgcatccagcgggggctggatctccctcgactggtcctccactgacgatggctgcgccggcagggaccaccctgactatccgcccaagacagagccctggacgaccaacgcgacgtcgcctccagtccgcaccccttcggccatcttctcgccttcttcgggcctccggatgtctgtgcgccactagattcgtcgctcactcgctcatgccatccgcacacagcctgctgctgacctgctctgctcatctgctacccctccaccgacccacgcg

SEQ ID NO: 132051 - DNA, 295 bp, Zea mays
  Clone ID: MRT4577_51914C.1
agcggaccagggccccggcggagacacgccccttctcttgatctgtcgccggagggcgacgaggaagaggaataggaagaagagccccgtaatcgtaaagatggtcccggtggactgcatctatgctgtgctcccatcccttgagctgccgatcctcgaggttaatatcctcttccttggcctcaacaccgccggcatgaccaccctcttccacttgctcaaggacaagcggttcgtgcagcaccaggccatgctgtatgccacgtctaacgactgcatcatggacaggatcaac

SEQ ID NO: 132052 - DNA, 559 bp, Zea mays
  Clone ID: MRT4577_51915C.1
cacgcctgcatgtaccgggctgctattacacggtcgacctacgcgttcggtcataatacaaaatgacccttgttatttcaggaaccgcccaacctttatcaaaaaaaccctattgttgcatctgtgactcataaacaatctgaaacaggcaccaccacagcatgggctggcggaccaacactgatactcttagcaaaataagttggttgaatggaaccaactgtgctgaattgtaaactatggtgccttatttaagcatcaattaccattcaaacagctaaactgtggctaccccaagaaagcagttgcattcaaacaactaacatgattgaactgtgctggttattgacagcagcaacaactactaccattcaatgcatctagcttgatgtgaagccctagaaatcttcttgacacaacaacaactagtggcgttctacctgaacgctatgcctaacgctggcaccatctaacaactgcaacaattgctgacattaaaacaacttgctctgacagactgaacagaggtctaccaacaacccatgattgatggggccct

SEQ ID NO: 132053 - DNA, 634 bp, Zea mays
  Clone ID: MRT4577_51916C.1
ccggccgggaatactttgaagctggatgatcatcatcgagagtgtctggatatatcggatgcatgcccggcgacgtcgtctttctcagagtaacgatgggaccccctataagaagtgtggactcgctctctactgccgattctgccttgactgtgctgtatggtgaaccatacacacaggaagggctgacccccactcgatgtgcgtacataacccgagatacgtgctccgaccccactacctacaatcattacactgatcaacgatgaccataaggctgtgacaaatgagcgtgatgcagctcacctcaatgtggaacaacctaccgataggcggaacatcctccaagaacatgttactaaaacgtgaatactagatgatctatgagtattaggatagacgctctcagctaatgcaccgactcaaggaaaatcactgatggctatctggccacttccgccatcgctgacaacataaacaatatcatgctatgaacgcttgaggacactcacataaacatgcgactatgaaggaacgtactcctgctgaggcgtctctggatgcctccagaccggcaagagagagtggaacatcgaatcgactactaaggatcatgcatactgctcttcaccat

SEQ ID NO: 132054 - DNA, 285 bp, Zea mays
  Clone ID: MRT4577_51917C.1
ggggaaaaagacaaaaatttctcttttggggggttctgccagggaaccagcttttgaacaaatacaattttatccagggattatatgattctggggcactcctgaaaaaacaaaatggaaaaaaaaaggccatatggccgattacaaatattggacaaaagtggctttgttttggtacagttagctacaacctaaaaggggacgggaaaaaaaaaaagaaaagaattggcctgattgagtgttccattagggggacttgggtttttttggaaacagcccatgaat

SEQ ID NO: 132055 - DNA, 408 bp, Zea mays
  Clone ID: MRT4577_51918C.1
cttcaacattatgcacctggggtgcccgttgttttggcaggcacaaaattgggtgagttttatttacagcaagagcatgctgctgtcacttactgtatatagctgggctgactttgattcactatagtctgattagtcatgctatccttaactgctaaacttctatttctctgtgcactgttggaattactttggtttaggctgcactagtagtgaacattgcaattttgttataaatgtgatgttatgacgtgtcgagttgccaacagaacggacgaggagtcagccagccacacttttatctttctagtacaacttagtagtcatgggaagctcagggctattttttgttagtgcatgaactgtttgtgtttatgtgattagttgacacttagttaccattaaaca

SEQ ID NO: 132056 - DNA, 450 bp, Zea mays
  Clone ID: MRT4577_51919C.1
cccactgcgtacgatgattctcaggcgcgtagctcggcggacaaacttgaattgaaccagcgtgaccctgtggatggtaaagctgcacagctgttgaaaatacatgctatcaaatcaaaatgccgctttgagcagctggaatatgcccaagacacaaggcagaatgcatggcagcagttttaaaccacagggaaagccaaaaaggcgggggtcttctcctgtcgcatgagggagagcttctgagagtcaccggacgaccacataggttaggtgggtgtgactgggattggcaaaggcctgaccgactttcacaggagggagaagcttgtgctccttactggtggctcctgcgatgcagcggatgatgaccaggagtatactgaataaccgagcttgtgtttggatctagccgaacagacatttacataccgtgtgtttagcgccgacatg

SEQ ID NO: 132057 - DNA, 648 bp, Zea mays
  Clone ID: MRT4577_5191C.1
gccggccgggtcgggacctgcaaccaaccttctacccccgactcagcgagcgagagcagcacacgctcagctagctaggagcagcagcagcgacggcggcgatggcggcctccatgatctcctcgacagctctggcggtggcgcctcagggactgccgcccctcggccgccgcgcctcctccttcgccgacaacagctccaacaacaagatgcaagaccgacaagccctacgggagttgtgggcggactgaccgtggacgacgacgtcaacggacataaagggaaaagggaaggtagtgtaccaataccacgacaagtgactggcgcgaacgaccacggatacagaccaatctacaacgatgatgactgacctcccaccggtgactgatacgccgacggaaccactggagctgctgatctgggccgtcaccctcactgagagcctcagcggcggagcgctcctcgactacgacaccagagagcctctccgagtacagatatccagtgcatgcgacttcttgacatgcgacatgtaaaatcagagctgactggctataatctagtgtccatgcatgctcagacctcgtcatgaaacgataaacagaggtactcttatgtacataatttggatgcgatatatatagaccc

SEQ ID NO: 132058 - DNA, 661 bp, Zea mays
  unsure (1)..(661): unsure at all n locations
  Clone ID: MRT4577_51920C.1
agtgttcaagcgcaggatgaatacgggnagaatacatcatgtgaatgcaaagtgacacccctagtccaataaatccatttgtgaagggtatcgctagctcaaagagacaacagttcgccaagcactgttgatgccttttgagctgagaccgacccctgtgatcataagcagccccgcgagaactctccccctacccaggctatcgggccttgtcattgtgcggacgtctgaggtcggagcacttcatttgtttgggagctggaaaaatgaaggtgcactggttggtttctctgaacttgtgaaagggttagcgaaggaccgtactgtaatgttcatggcctggaggaatgatgtagcaagtaggatcagaaatcagaactagccagcgacaatcacgctccagcttctgaaacgttgctgtagccttttgttgatgttcaggactgggagctagattgtcacgatttgacactgaggacgttactgtgcctgcaagcctaacctaagatgtatcaagcatcaagtgctgctgctgctgctatggaaggtcttagccaaaattaaattatgtttctaagctctgcatgcatcttaacctgcgctaataggttttcttgatggcctcaatgggagcagcaggaacctactactttttatgcgc

SEQ ID NO: 132059 - DNA, 519 bp, Zea mays
  Clone ID: MRT4577_51921C.1
ggccgcttttttttttttttttttctttttttttttttttttttttttttttttttttttttttttttttttttttttttttttttttttttttttttttttttttttttttttttttggccccccggggaaccattcaaaaaaaaaaatacggccggggccacaaaaaccaaagtcccgcccccggaagaaaaaaaccacattttttttagggggcccaacagccccccacaggggaatgggggggcccctgaaaacaccaaaatttagccctcacatggggggccttggttgggcaccccctgggacatgccctcgggaaaaaccggggaggccaaacattgtttaaagacccccggggccctggccacccttgttctaaaatcccccccccttgggaacccccaaccccccccccggctgggcaaaaatccgcccctgccccccggggggaagtccggggccaaccctgaattccccaagaccccgaaaggggcaagaccaaacttggcggggggg

SEQ ID NO: 132060 - DNA, 161 bp, Zea mays
  Clone ID: MRT4577_51922C.1
atattgtattttttttttgttttattgtggaaaaccaaagaaaaaaatgttttgaaatgtgcactttccggcagtttcataaactaaaagcgcaatccaggctcagtaaacttcaagccactgttgcaagggccaaacgggatgttcgccctcctttgaac

SEQ ID NO: 132061 - DNA, 487 bp, Zea mays
  Clone ID: MRT4577_51923C.1
gggaaaaaaaaaaaaaaagatgaagataagtttattggaaagcattttttttaaaaaattagggcaaatgagctttatttttggggggggggggtgtaaatgccaaaattgaaaaaaaaaaactggaatggaaaaaaaaagagaaaggatgtttaaccacgtgaccctaaaattcggttggtaaatgacgtccctaatgttagcttttttggattttaggagcaacaggttgtcatggattgattggacagaaactttgagcttgagcaactccagttaaactcccttgattttttccttttggggaaaaaaatcccagtttttattagccagccaaattttccaggcaagggttagcttcaccaataaccctttgtcctaaccataaattgaaaaacaggcaagggagttccctgcttttggtggggaaaaagcaaattgccccataaaaacctttttttttttatgaaaaatgttttcaaaaggg

SEQ ID NO: 132062 - DNA, 650 bp, Zea mays
  Clone ID: MRT4577_51924C.1
cggccatagatagatagatagattaatctgctgctatgaattgatttcgcatccatcaggtttttaagctctcatcatcacaaccaaatgaagtcagaaatttatgaaagaaggggagggggcgccattcgtggtcgaggtcgtggtcatggcgccagcttcagcgttttatgtgttgggggttacccggccttcgtcttccggttctcgccatcgctctgccatcgatggatggtttctttctgcagtgcacccgcatactttgcgcctattttcctgaaggaaaggaagagaccaatcttgctttaccatgacgatataaaaacaccaataccactgaactgctttgcatatgactgttttcagatgccctcgcccacccgggcactaccagaaaccatgctctcttgcccgaagaatcaaccttcggttgttcaccaagaagcggttatgatagttcaaccatcggcaaactgtcagcttctctagaatattgcctaacccaattgtaagctgcatgagactatcaagacagggccaaaggctgattagcagcccacctagagtacatgcaggtcataaatgagtgttgccatcagtcatgtattgggggggcacatgcccatgtctccctcaagcaactaaacagc

SEQ ID NO: 132063 - DNA, 497 bp, Zea mays
  Clone ID: MRT4577_51925C.1
cactaatggacttagtaaccgaaataaatttcaacttcttatggaaaccaacaactcaaattccaacaacaaatgaaggatgtccaagagttaaactcaaaatttggagcaaaacgtgatcaacgacaaagttaagacgattcaccaataaacaaagcccagcaaggcaaaaagacgggttcataaagaagctaagaagcgcgtgcagcgcaacacagcaacatagaattggaagacaaggggaaagtcaacaccagggaagccgacaaagggctagggggcaagcataggaagaggtgaagttggtaaaggcgttggggccccgggagacggcgggtttggcaaaagcgcggggtaaaacgaagctgacggaggtcaggttcctgggggaggattgggggggcagcttgcttgggagcgtcaattttgggggcagtggacaaagtctaaggaaattgaccttcaagaaggccttcaatgtggaaaagggcgtttaa

SEQ ID NO: 132064 - DNA, 777 bp, Zea mays
  Clone ID: MRT4577_51926C.1
caaacacacgtgttttcttgttagcatcgacctagctaaaaccaggcagctttttaatactgatatacttcattgacttcttgactgccttcacatcctcccattggcccaatgatgcgtatatcccagaaagggatatgtgaataccggtgttatttgggatcaagtttcataagattctgagcagcaacctctcccaactccttgtttccttgcatacggcatgctccaagcaaggagcaccaagcataagcactgggtttgactggcatctcacttatgaatttttctgcttcatctagtctcccagctcgaccatacatatcaatgatacatgaataatgttctgctttaggctcaatgccatgtgcatccttcatggagtggaaatatcccagtccttcgtccactaatccagcatgactgcatgcagtcagcaggcagacaaatgtaatgtgatttggcctgataccacttgaggtcatcctatcaaaagcttggattgctccccacccatgaccgtgctgcgcataaacatttataaccgcattccaggcaatctcagtacggtatccaatctcattaaataactgaagggacaaactaatgaggccacaatttccatacatatacacaagggtggaaccaacaaatgagtcactgatcaaatttgtcttgagcacttgagcatgcagctgggcacctgttcgagcagatcttgcatggcacagccccacagcacgaattcagctcgacccgggatcccagagtcaccgc

SEQ ID NO: 132065 - DNA, 295 bp, Zea mays
  unsure (1)..(295): unsure at all n locations
  Clone ID: MRT4577_51927C.1
naaaaaaaaaaaaaaaaaaaaaaaaaaaattttattttaaaaaaaaaaaaaaaaaaatataggaaggggtttttttaatattttaaaaaatccaaatttaataattcttaaaataaaaaaaaaaaaaaggccgcccgttcaaaagaatccaaattaacttccccttcctttcaacctaataacctttttataaccccccctaaatcaaattcactgccccttttttaacaactccttaactgaaaaaaccctgcctttaccaaactaaatccctttgcaccaaatccccttttcc

SEQ ID NO: 132066 - DNA, 516 bp, Zea mays
  unsure (1)..(516): unsure at all n locations
  Clone ID: MRT4577_51928C.1
cctaaacaaaaaaaaaaaacaaagaaacaaagctaaataaaatacctaaaaaaaaaaaaactaaaaataacaacaaaaaagtaacaagaaaagtcacccaatcaccatgggtggcaagtgtgggcaaatgacctgaatgaaaccataaaaatggaggggggtggtgtctagggcaaaccggaggggtggatcctcaaaagccccacccccggggggggggtgaaacttacttttagggggcccatagccccctaaagggcgggccttcccatttccggggccggggtttgccaccggtgggcgggggaaaccccgggggccccgggggggnctgctttcggccttcccctntttgctnaggggggggttccccaggccccccccgcgccccccccccatggggcgcccccgcaggggggcgggccccccccgcgggggggccttccgcggggggggggggggggnccgcccggggggccccggatccctccccggggcccctggccccggcgcgtt

SEQ ID NO: 132067 - DNA, 636 bp, Zea mays
  Clone ID: MRT4577_51929C.1
caaaatggtgaagggaaaataaatgtaacaattttagtttggaaaagattaataaattagcagttcgacaattacttcaatcatctcataaactaattcgccattcagtacgaaatggcggacatgatacaaaatttttttaccgagaaccagcaatgcctggaaaatccagctaaagatcgtgcaattgctcatgtagtcggattttgtttttggtttccagctttattagcaggatatgtagactttggaaaattatatgccacaagaagagctccatatccagaagattttacaaatgaagaattgggaataccatctgacgaagaaggccttgctcctgtgaatgaaaatccaaagagttatcaaactggtaatttaatgcgtcctgaaaattttgtgccatatgtagtcaaaaattattatggagttacaccttatgaaggataattagcaatagaaaaattataaaatattacaattttgagaagccgagacaattatatttgtggtgattggttaaacaaaatataaatgtaaaaaattgattaaaagaaaattgtaaaattataaacacggtttataattgttattcaaatgcatagtttttgtacaaaacaataaaatttaattatg

SEQ ID NO: 132068 - DNA, 271 bp, Zea mays
  Clone ID: MRT4577_5192C.1
agcagtggtaacaacgcagagtactcttttttttttcttgtttttttttattccaacccacggcctacatgcttatattgctgtcaagccgacgcaggtgccacggatctatgacgacgtctggctaacgtgcctagcgctcatttgttcttttgcaaaattattgccggccatcccaaataagactttttttacgtctaaattcaagaagccgtggtcttttttatttgaggtgataaaactgtatcgccatagacttgtgctggaccaa

SEQ ID NO: 132069 - DNA, 326 bp, Zea mays
  Clone ID: MRT4577_51930C.1
taaactttgatcccttaaaatccacccattctttcctttaaacatgcccatcattcgggaagttgttcttattaccaacccctattttatatcccatcctttctacaagaaattcagtggaaacttcctttgtaaccttcttgggaagtggaaggagtcttaatactcttgccaatctattccttttggttgtcttgcttactatttaactgccccatcaaatttggctgatgttcttgcaaatacattccatgcactgttttatgtggtctttattctttcatcctgtgctcttttcttcaaagacattgattgaaatttctttt

SEQ ID NO: 132070 - DNA, 1346 bp, Zea mays
  Clone ID: MRT4577_51931C.1
cattgggtacctcgaggccggccgggccgtcaggggattctcgaatctcgatctccctgctctacccgcatcaccccgccgttgccggccccttcctcccgcttcccacctcgccgtcgccacctcttcctcttcctcatcgccggcgcttgcgcgccccttctccaccccgttgaccgccgcacccacggcctcgccgttgcagcactcgtgcgatccggtcacgagtggagcgcacgagctcattcgctgcttccgcctccccctcttccttgccggagcccgcgcctcctctcctcgccggcgccttcgcctgctcctgcgcccccttctccacgtcgcacccacggcctcgtgttgctgccctcgtgagatccggtcgcgagcgcccgacctaggccgctgcctcagtctctcctcgctcggtcgcatcaccaccgccggagacggaccgaggtgctctgcgagactccgcgccatagagctcctcctacggcgggttcttttccgtccggtagctgggttccctgaagccagtcatggcgatgaccaccgccgtgacgggcctcgccgtcgcagcaaccgctcccattcgctccttcctctcgtccgccgccgcctctgtcagcctgcccgccgatcttcgtgacctcgcctccgacctagcctcggaccctgccgtctcctaccgctctctgcgtgccatctggtgcgccacctcgccggacacccgcccgccgctccgcgacctcctcagggcgccgacttcgtgctacccagcccgaaacctcgtgagaagagcgatgagctgaaggcgaggctggagaagctccgggagacacaggagaggaaggagtatgctgagctcgtcagggacgtcgctccgcccagcaaggatgacgctcctgagcccttctcatcctacaaggatcagataggatttggtctgcatgtcgtggttattatgttcacaggttacttggtaggatttgctatgttcaaagctctgttcaacaataatgctgtactgaacgctgctggaggtatcttaggattagttggtggcatgctggttgagaccattctcttcatcatcagatcatcgagtaaagagttagcctctgttccaagatcaaagaaagctcagtagactcttgaaatgctatcatcagttagtggtgagagctataagtggccttagcttgtggaagtctatggagcatttgtatgggtttaaaaatgcaattcatcgaatatatgcaattgacatccgatttgaatttgcatcatgaaggaatagggcagagggatttgatttcaatatttttagctacccagaattttgt

SEQ ID NO: 132071 - DNA, 839 bp, Zea mays
  Clone ID: MRT4577_51932C.1
agatcttcttcctcgcctccgcctccacctcctcccccccttcctcctcccagctccaaacccaggaaaccctcgcctccccttccctcgcggcgtcctcttcccgccgcccgaatcccaccccaatcggacccgagctagaaggaggagcagagcaagatgcccccgaagaaggcggcggcgtcgaaggccgacgtagcgaagaagcagaaggtcgtggaggacaagaccttcgggctcaagaacaagaacaagagcaagaacgtccagaagtacgtccagtcgctgcaccagtccgtccagcccaagcccgacccgaccaagaccgccgccaagaagaagaaggaggaggagaaggcgcgcgagaaggagctcaacgatctattcaaggtcgccgtcagccagcccaaggtccccgttggtgtcgaccccaagtcgatactttgcgagttcttcaaggttggacaatgtcagaagggttttaaatgcaagttctcacacgacctgaatgtccaaaggaagggtgagaagattgatatttacagcgacaagcgcgatggagaggaagaagatacaatggatgactgggatcaggagacccttgagaaagttattgcatcaaaaaacgcagagtaccagcagaataaacctactgatattgtttgcaagcactttcttgatgctgtggagaagaagcagtatgggtggttttgggtttgtccaatggcggcaggagtgccgctacaggcatgcccttccgcctggttatgtactaaagtctcagatgaaagccttactagaggaagagagtaaaaggttgcaattgaagatgagattga

SEQ ID NO: 132072 - DNA, 3048 bp, Zea mays
  unsure (1)..(3048): unsure at all n locations
  Clone ID: MRT4577_51933C.1
gggaccctcgaggccggccgggccgcgcatcaccccgccgttgccggccccttcctcccgcttaccacctcgccgtcgccacctcttcctcttcctcgtcgccacctcttcctcgtcgccggcgcttgcgcgccccttctccaccccgttgaccgccgcacccacggcctcgccgttgcagcactcgtgcgatccggtcacgagtggagcgcacgagctcattcgctgcttccgcctccccctcttccttgccggagcccgcgcctcctctcctcgccggcgccttcgcctgctcctgcgcccccttctccacgtcgcacccacggcctcgtgttgctgccctcgtgagatccggtcgcgagcgcccgacctaggccgctgcctcagtctctcctcgctcggtcgcatcaccaccgctggagacggaccgaggtgctctgcgagactccgcgccatagagctcctcctacggcgggttcttttccgtccggtagctgggttccctgaagccagtcatggcgatgaccaccgccgtgacgggcctcgccgtcgcagcaaccgctcccattcgctccttcctctcgtccgccgccgcctctgtcagcctgcccgccgatcttcgtgacctcgcctccgacctagcctcggaccccgccgtctcctaccgctctctgcgtgccatctggtgcgccacctcgccggacacccgcccgccgctccgcgacctcctccagggcgccgacttcgtgctacccagcccgaaacctcgtgagaagagcgatgagctgaaggcgaggctggagaagctccgggagacacaggagaggaaggagtatgctgagctcgtcagggacgtcgctccgcccagcaaggatgacgctcctgaggccttctcatcctacaaggatcaaaaactatcttgaagactcatgtataagcatgaatgattgccaatagaagaattcttcttttcagaattagaaactttaaattttgatgcggtcttgactctgtgctaccctacttggtgcaaaagcattttggttatgtactactccctccgttcttttttatttgtcgcgatctagttcaaaaatgaattagcgggcgacaaatattcgagaacggaggtagtatataatagctagaggccaaagtttgatggatctatttaatttgtgcaccatgtttactttttgtttgttgttggcttcagcgtgtactgtaattcctctatcttgtttgggaatctggggattttaagggaaaacagactccttaagtttaaattagtgttggtgaaacttgtaatcaagttttcaggatggagtaaccatgcatgccaatagtagtgaaatgatacaaatgtttcttcacttaaatgcactactacacaaacctgcaatgcgcaattaagaatgattgctatgatgcgagaattgttcttttacgaattcagaactttttaactccaagaagtttagccaagtactggtcttgtatggtaatgtcagtaagaacgagtgggatctaacatttctgtgcttatttgcaatgggagtagagttatacaataaatccctcgtttcatttttaactatagctagcaaaaatggtttatgttttttttgttaacgtgtaaaaattggtgtttatgagtcttcataaattcaaaaaaataagttgaaacatggatgctagattcaggtttgaacttgtttttgttgcaactaatcgagcattttggttatctacaatgtaattgactgaagctgaaccgctaaagcttgttggatctactttaatttctgcatttcctttattttctttctaattgtggttattactgggaactataattcctttacctttgctaatgggaccctagggtcttgtgcaaaaaggatttctcaattaaacaggtgcatgtgaaacttgcaatcaagtatccaggaagtgttaatagactagtggtaaatgaaagcctacaaaatttgtacagtttgcatgccattggtaatgacatctacaaatacgtttaatgctaacatcagttagtagacagagctatgtgcggccttagcttgtggatgtctacttcaagtaatggtggctttttcatctgaatgctttggcctctagaatcactcttcgcgtatccataatcaccagtcactttcattaaaaggggtgattttctatctaattctgctatgcacctttttaagtaaaatgatattaggtgatcttttgttttggttatatcgatccaatttatcatcaatattaaatccacatgcctctaaaatagaggcaaacttttctatgtacaaagtgatcgatagtgttcttttcctataagtatatttatcctcttaagatgacatacagtctatatctgagctgaggctgctaggattttcttgtatgttttgtatggttttcattgttcaattgacttttcttctttttcaggtctgcatgtcgtggttattatgttcacaggttacttggtaggatttgctatgttcaaagctctgttcaacaataatgctgtactgaacgctgctggaggtatcttaggattagttggtggcatgctggttgagaccattctcttcatcatcagatcatcgagtaaagagttagcctctgttccaagatcaaagaaagctcagtagactcttgaaatgctatcatcagttagtggtgagagctataagtggccttagcttgtggaagtctatggagcatttgtatgggtttaaaaatgcaattcatcgaatatatgcaattgacatccgatttgaatttgcatcatgaaggaatagggcagagggatttgatttcaatatttttagctacccagaattttgtatctcgcccaatgattggctcgatgataattgaagaacatgtacctacggatatgtaaaaagtacatacaagaggatggtatgcttaacagcttaagtaccattggagagtatattggcttgaaattttgcagttcaaagtaagtggttatgtttgcaaaantaaattnnn

SEQ ID NO: 132073 - DNA, 1143 bp, Zea mays
  Clone ID: MRT4577_51934C.1
gtcaccagtgcttgcttctcccgtacttcttgccggtccccccaccgcagctgagctgcggaactccttactcaccgacacttaggtcccacccgcttgtggccccgccaccagtgacccaaaccatcagagcatcctgtgcacggagcttcctcctcgaatgcgcactaatggtggtagtaataattgctcattagtttaatgagcagcaggtaggcactgtgctggctgtgctgtgctgttcctgtgcctccatcatccgattcccatcccccgtcgtcgcttgtttgctgctgcctttttctttccgccgcggcaactgtgagccggcccgatcgagcgagccgccccccacgcacctcaagaaaccgccataattccatccatccatccgctgccgcgtcctacgcggccatttggggcgctcgtggggtgttcgtcacatcgtcgcatcaggcgcgcgcaggccgagatcagatcggcggcggcggcggcgacggcgacggcgaccatgttcagcgggacgcagcagaagtgcaaggtgtgcaccaagacggtgtaccccatggaccagctctccaccgacggcgccgtcttccaccgcgcctgcttcaagtgccaccactgcaagtccaccctctcctttagcagctactccccgtttgaaggggtgccctactgcaagccccatttcgcgcagctgttcaaggagaccgggagctacaacaagagcttccagtcacaatcacccgcgaaatctgcgacggagaagctgactcctgagctgaccagatcgccaagcaaagctgcgggcatgttttcgggaacacaggacaagtgcgccacttgtggtaaaacagcataccctcttgagaaggtgactgttgaagagaagtcctaccacaagtcctgcttcaaatgctctcatggaggctgcgccctctcgccgtccaactacgcggctttggaaggcatcctctactgcaagcaccatttctcccagcttttcaaggagaaggggagctacaaccatctgatcaagtgcgcatcggtcaagcgcgcagcagaggcgcaaacagcacaggcggcagcacaggcagcgccggcggcagctgaatcctcctgattatggctgtcatcttt

SEQ ID NO: 132074 - DNA, 371 bp, Zea mays
  Clone ID: MRT4577_51935C.1
ttggtttttgtgctagtgctgatacggagaccattgtggggcctgcctcacgaaggcggctgtaggtagaatactgctccggttgctataaccagcggggtgtttggtatgtgaaaacgcaattgttaaacggtgcaagatccaacaggcaatcgctggtggaatggtaccttcatcagccttgttactacagcatctgatccctaaactagctgtacctatgggtgcatttattggcgcagaacattagggcacaacaactacaacaacttgtgcttgcaaaccttgatgtctactctgagcaacagcagtttcttgcattcaaccaactagctgcgttgaactctgctacttatttgcaacaacaacaa

SEQ ID NO: 132075 - DNA, 636 bp, Zea mays
  unsure (1)..(636): unsure at all n locations
  Clone ID: MRT4577_51936C.1
cggcggtacgccgtcgccgtattcttctctcctcggcggcgcgctgctccgcttcgcgcacctcactcagccgcgcctggagaccggccgcctcttcacctgcgtccaccacggccggtgtcgctcctccgataagcatcggtttgttgagaactcgttgatcggtgcgtacgtcgcgtgcggcgatgttggtgccgcgggtaaggtgtttcacgaaatgacggtgaaggatgtcatttcgtgtacaagcattgtggcagcgtattctaggagccgtgatatgggttcagctgaggaggtgtgtgcgctctggtgaaggatatggtggcgtggacggcaatggtgacggcgtatgcacagaatgccatgccagtgaaggcactggagccatttgagcagatggaggtggccggcatgcccattgatgaagcttcactcaccggtgcaatctgctcagctcggtgcggtgaggcgagacgcctgggttcagggaattgtanaatggaatggtcttgggaggaatgcagttgtcgggtcgggttctttgctggtgataatacccacccatggatacctgacatatagaataagattattggagctacgggcgaaaaaaaaaacaaaaaatttgcgggc

SEQ ID NO: 132076 - DNA, 362 bp, Zea mays
  Clone ID: MRT4577_51937C.1
ccggtcgacccagcgtccgcggtcgcgtgggcggtcgcgtgggcggacgcgtgggttctgccccgttttcggctggggtctgcgcttgctgctgtgcccgcggtcttgttcgtgggattttttggagcgcttgctagctcagtgcagagctcagggcctgtggcttcgcctttggttaaggcttacgggttgggtttcgggggggctgttttgtttttttttgttgggccttgttgtgggccttgttgagttcgtgcttgtttccgttgtccgtcccgttgggggccaccgccggttcgagcgccttccctggaaccctttctggaaggcttctgtggttgtgggtggggtcttggatgttt

SEQ ID NO: 132077 - DNA, 1636 bp, Zea mays
  Clone ID: MRT4577_51938C.1
ctttgaggcgccaaatgccacactaccattcaagccaatcatttgttcttcataggatgcatacgtatctgctccgaagagacgcgtatggacatcaccaagtcaaagatctgaagattcggccacacggacgaacagaccaatcatgattactcaaacacacacacacacacacacaccagctgaggtttctcatacctacagacactgcaggattattataacgaacagcattctgttgatactacacagaaacaagaatctagctgtcatgtcttatgttcagataaactcctcgacgtctataaatagaccacagtagcatgaaactaagcataagtgcaaccaggctctctaacatctcctccaccgtcagcttctactcgctacagaagaaacatctccctcgtttgacaaggatggcagagaaagcgagcacaacccgtctcaccagagtttacagggctgagaggcaaaggagggctcgcccgctcccacggcgcgggcaaatcaagctcaagattgcacgcattgtggtgcgctccatcacctccgcactcctcagggccctttcgccgctcccagctctcaaccagaaatgaacataattgtaaagttagttcctgctgtaggtcagctccctgtgtaatctgtttatcagaaaacggcagcatgtagaggtctttcctctctctgcagtattggtgtgagtgagcttcatgaatggcaatgtggtccgttattcttttttttcgtgcctcgctcctgcttcacgcctttagcttgtcgctcagcgttgtcatcgctgttgggctgatcgccatctgattctgattcgctcccggagctgtcgctatctgaactatctacacagactaggctcttcgacggcttcattgtcataccgatgatacttcggatccatgccccctcaaagagggaatttcctgtcgaggttgagccacccgtatcctccgcatttgaagaggcgcttgacgatgtgccggtcaaaaatgttgaggctgctttgcatgcggtcacgatttcctttttcgcttgtttcagctttcctgctgtggtttcagcgacctctagagcagtgtcacccgcatttgcaaagcgattgacccaacctggaagcttcgatacttcaagcttttcgcagaaggtattgcagaagtgattgcagtttcttgacaggagttcatatgaatgtccaggccactcccagctcagctcccttagtatctgatttaccttgaggatacagcagttggtcttccccagcactatagactcgcgataagtgtacatgggatttttgcatgggggacagctaaaaaccccagtgccacgttcacagtagccaaaggaccattcttcatcaccgtagacctggatggcggtgtggaagatgccgccgaggccgatggcgtccttaaagaagcggttgatgtggagcacggtggtgtcggagccggcggtggcggcgtcgtagacgtgcgcgaccacatcctggcccataccccggtgcggcgcctcgccgccggagatcagtcgcagagaggcaggccttttgccgtactcccacccttctgccggagctgatgacgggccgggaccacctgtcccccgg

SEQ ID NO: 132078 - DNA, 1118 bp, Zea mays
  unsure (1)..(1118): unsure at all n locations
  Clone ID: MRT4577_51939C.1
ccggccgggaaaagaaaatccccgtccgcactgcgagcgcgcacccgctctcgtgccgctactggcgaccgccgccgccgccctaggccacgtgctcggcagctcatcgaagcttgttgcggcagtgaacccgtctcccccagacgcgcagcaccaaaaaccctaccaccaattctagaccctcccggctctagcttccccacactccgtcgcgggctcgtgggctccggcggtggctagattcagggtgcgggagtcggcgtcgtcgtccgagatgccatccttctctgccggcgcctcatcgcagaagcagcagttcgcgagagggaggcagctgattcgacaacagcgcaagtcgctccccattgcgtcagtggagaaaaggctagttgaggaggtgaggaataacgacacactgataattgttggtgagactgggagtggcaaaactactcagcttccacaatttttgtatgatggtgggctttgtcaggatggtaaagtcattggcatcactcagcctcggagagttgcagctgttacagtagcaaagcgtgtagcggaggaatgcaatgaccatattggcaaaaaggttggatactccatcagatttgatgattccacatccaatgcaacaaggattaaatacatgactgatggtttgcttctgagggaagcacttttggatccactcttatctaagtacagtgttatagttgttgatgaggctcatgaaagaactgttcatactgatgtcttgttgggtttgttgaaaaagtgcaacattcccgagctaataccaataaaaatgggaagaccttgcttgggcattctcaaaatgtaactattaaggaatgccaaggaataagatgtgctccactaaagctgataattatgtctgctagtttggatgctaagtgtttttctgattatttntggtggtgctaaagctgtacatattcaaggtcggcaatacccggttgacatactatatacttatcagcctgagtcggattatatggatgccacactagttactatcttttcagatccatttggnaggaagggcctggagacattctggcatttctaactggccaagaggagattgaatcact

SEQ ID NO: 132079 - DNA, 1031 bp, Zea mays
  Clone ID: MRT4577_5193C.1
ttctttcgtcacttagcttcactcggttctgcttctacacatctatatatcgttagtttggtatgtactaacggctcgatctgcacaaggcaaagaaaagaggcaacgacgatggctgctgcggcggcgatgatggtctccggaggacgggcggcgctggtggtggcgggcgtgctctgcgcggtggcggccatggcggcggcgcagcaggcgtcgaacgtgcgggcgacgtaccacctgtacaacccggcgcagaacgggtgggacctgaaccgcgtgagcgcgtactgcgccacgtgggacgccgacaagccgctgtcgtggcggcagaagcacggctggacggccttctgcgggcccgccgggcagaagggccaggccgcctgcggcaagtgcataagggtctgtgtctgtgctaccttcacttttcctcctgctggattgtcacaggagattgttggcctgctgcaggtgaagaaccgtgcgacgggggcgtccatcacggtgaggatcgtggaccagtgcagcaacggcggcctggacctggactacgacacggcgttcaagcccatcgacaccaacggccagggcttccaggccggccacctcaccgtcaactaccagttcgtcaactgcggcgacaactgaactgatagattattcacctgtgcatgcacctatatgtactagcaccattattccaagagttatatggatgtgatcccacacgtaagagccaataaaacatatatgcccagtggaataaactgaattacctagatactggactactcatgtatcgtcatgtctcacgaaatactacatccgttctcgaatatgtgtcgtccactaattcatttttaaactaaaatgctttggttgatatgtgtctgtatgtgtagagttgacgagttgtattaagtgattgtcaggatataaccgtcggctttggttgaatttggtgattatccattgcatgagtatatgggcaacatgtttgttggctgaaaaaaaaaaaaaaaaaagcggcc

SEQ ID NO: 132080 - DNA, 189 bp, Zea mays
  Clone ID: MRT4577_51940C.1
gtcgaggttcaacccgatcggcctcgccgtctaccctcaggcctcagcagacgggaacggggacgatttcaagagcgtgtggatcgccatgttcaggatgatcggcttcttcgcccaggccatcgtcaccgccaagggcgacgatcgagaaccatacccgagcacggagttcaaccgcagtgaacaaca

SEQ ID NO: 132081 - DNA, 367 bp, Zea mays
  Clone ID: MRT4577_51941C.1
cagaacaaacaaaatcgaacccggaatatccccgcggggaatttaaaaaacttgttacaaaaaatcttaatttaaaaagtggtcaaaaaaaaaaatttgggggcagagaaaaaccaattgaccagaaaactttttagggtgacgtaaaaaacaaccccatgtccaaactctcctaaaaaaaaaacttggaaaaaaactttttgggagaaagaaccttctgccaaaactaaattcccttgacggggctttaaaggttaaaacaaacattttttttggggtggccgggaacctccaggggtttcccaagaacgaacttgggggccctaagtattttcaccttggggaagaaaacactttgaagggggaa

SEQ ID NO: 132082 - DNA, 211 bp, Zea mays
  Clone ID: MRT4577_51942C.1
ggaccctctgttcatttttttggattttttattgtttgaatgggtggcaggaaactgcattccaccccggaaacattttacagcagaataaattctgacccacaccatacttcttgctgttgtcaagaacttaaaccctggtgtaaaattgttcctagaggggactcaactttctagcactggaaaaactaccgtatcttaaaggataact

SEQ ID NO: 132083 - DNA, 519 bp, Zea mays
  unsure (1)..(519): unsure at all n locations
  Clone ID: MRT4577_51943C.1
ggggggggggtttttttttttttttttttttttttttttttttttttttttttttttttttttttttttttttttttttaaagggggaaaaatggccaatttcattttggccatcaactttcaagaggaaaagagcccaaaacttccatttggggcccgangggattctccaaccccctcanatgaatcccgaaaaaaatttagggcaaccaaacccaaaaacagatggggctgaaaataatttcagtaaacaaagcaactggtagtctgcaagctacacctacctttgtttctagctaaataattccttggcaaaaccaaagtgcaaaaaaatggtacaggcgtcccccaccatactataaatgttgccctcccatttctcataccctttgaagcctgtgaaaaccaaaacagtcccttttttaaatgccgactgggaaaacataaaactaagggtgctgcccaccagcagagatagtgaaaccttgaaaaaaatagccaatcatttcctttacaaaa

SEQ ID NO: 132084 - DNA, 358 bp, Zea mays
  Clone ID: MRT4577_51944C.1
caggccattaccgtgatgagaatgggttaaaggccctaatcctaatggtctccctttacataaaactttgggtccgggagctccatccatagcatagctcctttggcaaacacttttcaggccacaatcttttagattccggcatgaatttatcctattaaaccctggggtttcccccagttggcaactttttttttgcccatccccggataacaaacggggcctgcttctaaagggcaaaacctcccgccttttgccgttttggaaaacccattcctttttttaccgaagtaaaaaaccgggggggggggcccccttaaaccctcccccatttttccgagggggccccggggggggg

SEQ ID NO: 132085 - DNA, 814 bp, Zea mays
  Clone ID: MRT4577_51945C.1
gagatttcgaattcgaatcctggcagaggctttatttgtgcctctgcctcctttattgccacatttgcacctttcccttcagctgcacttgagggggttgttgaagtgtataagtgaactgcctaccttctaatagctgaagtttttgggtttttaattggttagtggttacactctaacatggtattgcagccagatgtctcgagttcgaatcttgacggaggctttatttatgcctgtgcccctttatttccacgtttgcgcctttctatccgaccccacatgagtggggtgttgaagtctataagtggattgtctaccttattctagcaacttaagcttttgggttgaacaggtgagtgcgtccactctaaaaattacaagcattgtattatagttgaaatcagttctggaagaaatatccttggacccgcagactgtgccgtcaacatgaggtagaacaatgagatccagatgcaagattgcaagagtgggagatctcctttaaccgtgatattcttcagatagaaaaattttcatgcccacgttatcgccggtctttaacaaatcataccagcattgtgcataggtcccacacaacactttgacaaccaatgaaacattgactactcaacgacacaagcgcacaaagtgtaattgcttcacactgctagttcctgcgtcctgcgtgatcagtccttagttgcaagcgtgcaaatgagcagtgtgcacttacacacttgcacctaaggctatctccagcaggttacctatctcactccttatttcaaactctaactctataaatggtgtc

SEQ ID NO: 132086 - DNA, 288 bp, Zea mays
  Clone ID: MRT4577_51946C.1
catagaggtgcatgtatccaagctttgatgctgctgttccaagcaggtgtatgcctggttatatatgatgttcacgtttggtgctgtatcgacccagtgtacaatcaaatctgcggactgttaacttttactaatgaagctgacatgcgtactgctatacctgacaattatgttcagtgcattcagtagattaactactaggcgctgccgaaagtagagccggcaattgtcaagttcagtcaactggagaaagtccccatgaatgtcctactggatctccatttgtag

SEQ ID NO: 132087 - DNA, 547 bp, Zea mays
  Clone ID: MRT4577_51947C.1
ataaaaaaaaaaaaaaaaaaaaaaaaaaaaaaaaaaaaaaaaaaaaaaaaaaaaaaaaaaaaaaaaaaaaaaaaaaaaaaaaaaaaaaaaaaaaaaaaaaaaaaaaaaaaaaaaaaaaaaaaaagtttttttctttgggccccaaacccccttaggggcgaattttttcaaaatttccttaaaattgggggcgcgtttgaactttttttttagggggcccaatttccccctttttgggggtttttttaaaattaattggccgtttttttaaaacgtggggtttggaaaaaccttgggtttcccaaatttattccttttgaaaaaattcccttttttccaagttggttttttaccaaaaaggccccccccattccctttttcaaaaatttgcccaccttaattggaaattggaccccccttttaggggccatttaagccgggggggtgtggggtttccccccaggtggcccttttttttttcaaggcccttaggcccctttcttttggtttttttcctttcttttttccccagtttggcgggttttcc

SEQ ID NO: 132088 - DNA, 327 bp, Zea mays
  Clone ID: MRT4577_51948C.1
aggacgcgtcgtctctagtgagtgaacaccattcgctttgcccccaccccgaccgatcctggaccgctgcgaccattgggacctcctggtgactgttcaccttcaccaatacgaaccagctcttccgctccagcactttgttgttcatgccagtgaaagggcttggcctgtgcatggtccttgagcgcgcccagcagagcattgtgagccaggcagtaatcagcatatccgtcgaccgggcactcttctcggccatacattagatgatgaaccatcgactgctaagggcgagaaatgttaacgaccgtgatgatggtcttgccctac

SEQ ID NO: 132089 - DNA, 314 bp, Zea mays
  Clone ID: MRT4577_51949C.1
atagcatcatcaacatggcacagttactgatgcgcctgtagctccatatgctcatagcctccctgttcctcctgcgccttcatatcggccatgatccgatctgggacccaatagactcaagtgaaggattcctctggtgatccaccaccatggcctggaactacttatgggcccgctgggtctatatcaaaggtgtatgctcctaacaggcttatccgatgccccgcttctgcagctgctggcatgcatagcgctctaatgagacaggcgtgagagcataagacctctctggcatgaagatagctcttgggcaa

SEQ ID NO: 132090 - DNA, 203 bp, Zea mays
  unsure (1)..(203): unsure at all n locations
  Clone ID: MRT4577_5194C.1
ctgggggggggcccnctgggttccgtgtttgctccccgcctttgcccccctggctggcctgtggggtcccgtctcttggggcgtcgggcgcctgcctctcttcttgttgctgtcgctcccctgtgggggggggggcggttgnttcttgggcccccgcggcttcgtttgcctgtggggcgggcggcctccccggcctggctcct

SEQ ID NO: 132091 - DNA, 748 bp, Zea mays
  Clone ID: MRT4577_51950C.1
aattcggcacgagggtcaagggaggataagcaccaactcaagtcttcaaagggaaaacggaatcatcatatgagtcaagatccaccatccataatagaatctttctttgccctaatccttattacctcaaccttctccatttctgcctaatagctaaatatagtatacctatgtgttcctaatcatttccttatttaaatgacttaaaaaaagtatatagaaaacatttatgcttaaaaccaattgaaaaaaaaactcgaagctaaactgcaaccaaacatttggctttctacatccctttcttactaatctcgaggacgagattatttttaagggggtagaatttgtaataccctaattttttttgagatctaggaaaattctccaaagattttttttgaattaaaatatatttccttaccttctataaatgtgtcttctaataaaagattaaataagacgcctaaatgaactgggatcatccctttatggaactacatataggtattcaatgaaggttttggtaatacccaaagttttagagcaataaataattgttcttagtgaaatgcatgcatattccatatcgaaaggtaaaattcattaaaaagagagaaaactaaataagtaaaagtgtaaatattttaacgggaactagtgattctcttgctagatttttctttgatcgtgcatttacatttgtgaacaagagttgaatatagtaattcaaaatttagatagaaggaaa

SEQ ID NO: 132092 - DNA, 302 bp, Zea mays
  unsure (1)..(302): unsure at all n locations
  Clone ID: MRT4577_51951C.1
caggctcattttacttggaaacaattgaatttctttaaaaagggcgaaaccgggggggtgggtttaccagggaaacgggnttggttccgtttttggggggggggggggtttttctttaccccccggtggggctggacctttccgttgggtcccggttactgcctttggtgggggcttttttctccttttcccaaagggggttttttttctttttttgggccctgggttttgttggccttttttccttttggttcggggcggtcctttttttgtggtgttttttttttgctggggttcctttt

SEQ ID NO: 132093 - DNA, 143 bp, Zea mays
  Clone ID: MRT4577_51952C.1
ggcagataacaatcgagaccagcgacgttaggacagcctcatgccgtgatagggcgggaacattatgaaaggcaaatgcaacagcagtgacatacagacggaccggctatttggttatgccaaccccactaaccacttattcg

SEQ ID NO: 132094 - DNA, 403 bp, Zea mays
  Clone ID: MRT4577_51953C.1
acccacgcgtccgctgcattcatctcctccaccaccaccaccaagctcaacaacagccagctcgcgaaaatattgaaagccgcaacatggcatcatccggcgcgccccttggggtacccttcccccaattgggggcaacggcccaaaaggtaccgtaggcaaagagaagaaaaccggcggcaaccgctaaggcggcgaaggcaaaaatattcaggacgacttctgctcgacgctgttcaaaggcatgaaggggacggacctggtcctgtgcaaagagtcctgcgcgctctcccagcactccaacctggtgctgtacggcaggattcagtgcaagggcaagtgcaccgagcagaagggcatcacggcgccggccatgaaggtctgccaggaggattgcgacaag

SEQ ID NO: 132095 - DNA, 274 bp, Zea mays
  Clone ID: MRT4577_51954C.1
ccactcattaaatggaaaattttccatcgatacccaggtaagggtttccgaaaaacatgttagggacagagtttacacgttaaatctgtattacctgtggcaacaaagttcgggccgtcggccaacactaccaggggactgggcactactaaatctactcggaaggttttaaatcggttttcgactttttggggcccatggtaaagataaccggcccagaaaatttacactcacgggggctccttttgatgcaaacatgcattttagggtttgc

SEQ ID NO: 132096 - DNA, 206 bp, Zea mays
  Clone ID: MRT4577_51955C.1
ggcgctctaaccttaaagctggtttttttatcagctacagcacactatacacgggatgcatcacctacaactgaggctgatccatacacacatcgaacacttcgaagcatgtaacataacacacaataaatacactcatcgcctccacatactgatacgcaattaaaacttcaatcctgccatcatctcacatctatcactactca

SEQ ID NO: 132097 - DNA, 446 bp, Zea mays
  Clone ID: MRT4577_51956C.1
aaaaaaaaaaaattttaaagattttaaacccaaaggatctaactttaaacacaaacttggaaaaccggttgaaagacaaaataaaagaaacaatgttttttataaaacaaaaaacaacataaggcccccccccacataattattattcactcttaacaaatttttctttaaaaaaaacacttttttttttttttcttcccctccagggggctgggggggaaaaccgggaagcttttttttgatcttggccaaaaaaccctttttttcctccgggaaggcagaaatcgggggtggtgtttcaaccaggggggggggggtgacaactggggaaacctcgggtttcttgggggggcctggaagcttctccttgatcttaaccaaaaacccttttttttttttttccttgggtgggggaaccccaacccaatggggggctggcatggggg

SEQ ID NO: 132098 - DNA, 603 bp, Zea mays
  Clone ID: MRT4577_51957C.1
cattgggtacctcgaggccggccggaagaagctttcgcccccttcagtcgtgaatcacacatccctcggaacccaagatgacgagcatcagcaagcgaagaaaatttgtggccgatggtgtgttttacgcggaattatccgagttcttcactcgtgagctcgccgaagagggctactccggctgcgaagttcgtgtcacccacgctcgtaccgaggtcatcatccgcgccacccacacccaagaggttcttggccagaaaggtcgtcgaatccgtgaattgaccagcctcgtgcaaaagcgtttcaaattccccgagggaagtgtcgaactttacgccgagaaggtccaacagcgtgggctctgcgctgttgctcagtgcgaatcccttcgatacaaactcctcggtggtctcgccgtccgcagggcttgctatggtgttcttcgattcatcatggagtccaacgccaagggttgtgaagttgtcgtctctgggaagctgcgagacgcccgggccaagtcgatgaaattcaccgatgggttcatgatccactccggtcaaccctgtgttgacttcgtcgattcaagacggccgacacgttctc

SEQ ID NO: 132099 - DNA, 393 bp, Zea mays
  Clone ID: MRT4577_51958C.1
agactacgtgtctttcttaccttggagtgtcctccgcctctcacatccagctcacatggcaggcaacccgcactcaacagcctcgataggtaacagcgggtcacaaggttcctgaacgggctgtgcgacaaattcttattgataaccctgggcaacacaaacactcattaaatcgcgatatgcgtgaacctcctcaggtaaacgatgctccacaaacaaagccttatggacccaggaggtctaatgatacacctttgccacagcctacaggcctgaatgaactgagatgccatgtatggtatcctaccagagaaagcatacgacactcacaatcctgcactgtaggaagaggtacccaatagaggactaagcgacggaacttatgataatagt

SEQ ID NO: 132100 - DNA, 173 bp, Zea mays
  Clone ID: MRT4577_51959C.1
acacgcgtacggccggagccaccgcgtctagttcccgctaccgcaagcgccggggcgggtgcgccatgggcttcgggcacaggaccaccggcggtctgcccggcaagttctacgtggcgattgaccctagtgactacgccgccttaccttgtcacccccaggtagggcacgct

SEQ ID NO: 132101 - DNA, 333 bp, Zea mays
  Clone ID: MRT4577_5195C.1
attcccggctcgagccacgcgtccggcgctagcagaacagaatgaggacggtttttccatccttttttatttgcaaaaaatcgtgcccagatgaatggaaaaattttcttgaaagggtgcattgcgagagtgaagatcaactccacgagactgagcattctgaagagcagcttcgcctttgggcatcataccgatgacaaactttgacaagatctgtaagagggatgatgtactacagacaagctatagtgcttcaggcttcccttgatatggccagagatgatgaccttatggagggttttagagcagctgacctgttatctgaatctgatg

SEQ ID NO: 132102 - DNA, 240 bp, Zea mays
  Clone ID: MRT4577_51960C.1
ttttacgcgtccgagatttactcgccaattttgagtgagtggcggcgatcggcttctgatcggcgcaacgcggccgagcggagattgttgcccgggcggtggatggcctgatccgcggtgcggacgccgtgccggcggcggagagggaagcggtgagggcggtagctgcggaggcggctgccaagggcggttagggggaatcggggaaggaggaggtgagggagtattgccattttcctc

SEQ ID NO: 132103 - DNA, 624 bp, Zea mays
  unsure (1)..(624): unsure at all n locations
  Clone ID: MRT4577_51961C.1
cctcgnagccggccggggacggggttggggacggtcgagatggccacgcgaccatctgccgacgctgcgaatgacgagtgcctgctcaggttcagcgagctgtacctccacatgcgttgcaccggttcctagctttcaagagtggacgacaagttcaaggagatccccgtggaccaggtcggggatcccgctagcagataccaagacttcgcaaacagcctccccgacaatgactgccgatacgcgatctatgatttcgactttgtcactggacaacatagtccagaagagcaccgatcttctatatcctatggtccccatcctccgccaaggcgaagaccaagatgttttatgcaagctcaaaccaaaaattcaagagtgggctcaatgtcattcaggtgaaactgcacgctactgatgcaagtgaaatcagccttgatgagatcacgatcagactcgctagggatcatcatgatcatgcatcatggacttgccctactactgcgcatttgtatgccatgatagacttgctgctgcgaaagactgcttgatgatctgcgggcttgttgctgtgtaataaaaggtcccatggctcgcagaataccatgaagggtccgatctatc

SEQ ID NO: 132104 - DNA, 865 bp, Zea mays
  Clone ID: MRT4577_51962C.1
attgttatcagtttctttttttttctgataaaagaaaggcatagaaatgttgagcagccaagaaggaaatattaaaaaacgcacccgatggtttttggggctgaaagctcccaaatacctgaaccataaccgacagagacatagaactttcaaaagtcagcaaacccgtgaagccgagagtgaagaaggggacaagtcagatttgtcatttgtcgcaccccccgtgactccaggccaatctgatctgccctacgctgctatctagagacagccgtgacgagttccggtcgagcgaggagcaaccaacaacatggcactctcgtttaggctggtcgccggcgttcttctggtcctggcattagctctgctctcttcgagcgcggaggagaggagcgccgggcgcgctgccactgtcagcgcgatgggctcagatcacgatcagacgtcggaagctccggtgccgccgttgaggcctcttggctcgaggaaaccggtggcggctccgccaccgccgaggccggcacatccacgggcgagtataaggccatttcctccacctcgtccgtcacagccgcagccgcagccgcaggccgccgccaccaccacgctcgtaggtgtaggctgtgtacgtctaggcagccggcaagctctagtcctctaggtctacagacgtgagaaaatggtttgctggcgttggcattcctccagtattcctgtgaacctgttgtagtgttcctcagttgtgagttttcaacgaacttttggaagttctatgtctctgtcggttatggttcaggtgtttgggcgctttcagccccaaaaccatcggttgcgtattttaatatttccttcttggctgctcaac

SEQ ID NO: 132105 - DNA, 630 bp, Zea mays
  Clone ID: MRT4577_51963C.1
gccggccgggttcctacgctgctatctagagacagccgtgacgagttcgggtcgagcgaggagcaaccaacaacatgacactctcgtttaggctggtcgccggcgttcttctggtcctggcattagctctgctctcttcgagcgcggaggagaggagcgccgggcgcgctgccagtgtcagcgcgatgggctcagatcacgatcagacgtcggaagctccggtgccgccgttgaggcctcttggctcgaggaaaccgaaggcggctccgcccccgcctcatccacgggcgagtataaggacaaggccatctcctcgatctcgtttgttacaaccgccgccgccgccaccaggctcgtaggtgtaggctgtgtacgtctaggcggccggcaggctctagtcctctaggtctacagacgtgagaaaatggtttgttggcgttggcatccctccaatttcctgtgaacctgttgtagtgttcctcagttgtgagttttcaacgaacttttggaagttctatgtctctgtcggttatggttcaggtatttgggcgctttcagccccaaaaccatcggttgcgtattttaatattttcttcttggctgcacaaaaaaaaaaaaaaaaggccccta

SEQ ID NO: 132106 - DNA, 145 bp, Zea mays
  Clone ID: MRT4577_51964C.1
gccactcgtccgaatacgcttcagtctgcatgcaagggggaacactaactaagtagggggcatgcacgacctaatcaccttcacacgtaaaaccgtacgtactactggctacactcctcggcttcaagctgacatagtgcagata

SEQ ID NO: 132107 - DNA, 344 bp, Zea mays
  Clone ID: MRT4577_51965C.1
tttttcttttgtttttgtttttttttggcggtttccttttttttctcttatttttttttttgggaagactttccaaaaaatttttttaattttaaaaactgaggggttttccccgggaaagggtcccttttttccaaggccggattttcccaagggggaaaactttttccaaaagcgggaggggaaaaaccttccaagggtttaacccaggccaaactaatccccctccaaaacgggaaaggcccttcttcccggggaccccttaggggccccctaataacctacaaaaacaggggttcgaaaaccctgggcccggggggtcctttcggagggttttcccgctt

SEQ ID NO: 132108 - DNA, 658 bp, Zea mays
  Clone ID: MRT4577_51966C.1
tcttctactcttactcctctgctctttctcttcctccgtcatgccttcccgcgatccacacccgttgatagagaataagagatcgccggcataggctcgatcgcacctcatataaggatccatctcggcacgatccactcgtgggttcactgatgaaaccaccaccgccatccagatcattgtcctccaccagcttatgcgcaacatgccctcgtatgcctgcttcaacgaatccgagcgactcttgctagatgcatgcaagaagcaacgcgtcgtgaaccgcatcaacaccgtgtttgatgtcaattatctcatcggaccgaggatcatggaagtctctgcacagagtgatctgatgctgcgccccttgctcgacatttctgtgcctgtggataaggctatgattgttgtgcagtacaagattgactagacaactattgcagctgaatagatctccgctatgtctacttatcacaaggtgagagattgctgaagcttagcttggtatgactatcaagaatgctgtgattacacgtgcctgtctacttcaatgactcacaaacgcattacacaaaggatgctgaactgattgctgtcctcaatgtgctgcctatcttccacgagacaacagatgcagctatcgcctatggtcttgaca

SEQ ID NO: 132109 - DNA, 1424 bp, Zea mays
  Clone ID: MRT4577_51968C.1
ttaagaacctagtaggcagacccggccggctaggaggggactagggggaggtcgacgagacagagagagaaggccaagaggcttcctctccccattcctcccttccgtgccctagccgagccagccgcgaggaaggaggcatcccgccgtctcgcctggcgcccgcccgtcggccgaccttctgccgcagcttccaattgtaaaaagatcatagatttttgtgcaagagcgagtggatatggaaccatcccctcagcctatgggtgtcgctgccggtgggtcacaagtgtatcctgcctctgcctatccgcctgcagcaacagtagctcctgcttctgttgtatctgctggtttacagtcagggcagccattcccagccaatcctggtcatatgagtgctcagcaccagattgtctaccaacaagctcaacaattccaccaacagctccagcagcaacaacagcagcagcttcagcagttctgggttgaacgcatgactgaaattgaggcgacgactgatttcaagaaccacaacttgccacttgcgaggataaagaagatcatgaaggccgatgaagatgttcgcatgatctcagctgaagctcctgtagtctttgcaaaagcttgtgagatattcatactggagctgacacttaggtcgtggatgcacactgaggagaacaagcgccgcaccttgcaaaagaatgacattgcagcagcgatcactaggactgacatttatgacttcttggtcgacattgttcccagggatgagatgaaggaggacggaattgggcttcctagggctggtctgccacccatgggagccccagctgatgcatatccatactactacatgccacagcagcaggtgcctggttctggaatggtttatggtgcccagcaagggcacccagtgacttatttgtggcaggagcctcagcaacagcaggagcaagctcctgaagagcagcaatctgcatgaaagtggctgagaatattgctcagaagctatcacctgattcagagttctcattttaggttgtccaaactgcaggttttcttagtaatatcgttggttatcaaactgaaacaggcgattctaagtagggtgtagcatcatggtagtttcatttctgcttgtgatgttagttgaaaggataatgattagtggctagtggattaaagttaccataccatttccttctattccgaaagtttgcctccatgaggcctctgatataaaaatgctgggtgttaatgcttcaaagcaaagcatgtgttgtgccgttcatgcttctttattgattcgcgtggaaggtgttctgttaattcatggaaattctgttccgcttgtgttgggcggttaaaaaaaaaaaaaaaaaaaaaaaaaaaaaaaaaaaaaaaaaaaaaaaaaacaaaaa

SEQ ID NO: 132110 - DNA, 1472 bp, Zea mays
  Clone ID: MRT4577_51969C.1
gggacctcgagccggccgggaaaaagcacgagagcacctgcctgctcctgcgcggcggcggttggtaagccccacctccggtcccagcctggccagacttctgcccttctcctccgcctctctaatggtgattcgcagttactcttctttccactgtgggttgctgatttccagagcggcgtggaggaggcactacccgttcttctgggctgtcaggccttccgtaccgccgccgccgtcgccactcccactcccacagccgcgcacgcgcttctcctcctcctcctcactgcgctccaccaagagatccgccgcaaagacgtcaatggactcgtcttcagtcggtgaacccttctacgtcgtccgcaagggggacgtcatcggcatctacaaaaccctcagcgaatgccaagctcaagtcagcaattcggttcgcgacccttctgtcaccgtcttcaaaggctactcgctgcgtaaagacaccgaggaatacctcgccgcgcgcgggttaaggaacgctctctacgccattgatgcaacagatgcacgagatgaattgttcgacgatctagttccctgccctttccagcaacctgatggagctgcatcgtctactctgaaaagatcacaggagattgaaatcggaccatcaaagaagcatcccaaagttgatgagcaggtaccattacctgatagtcatctctcttgtattcttgaatttgatggtgcctctaaaggaaatccagggaaagccggtgctggagcaataataaggcaggtagatggttccgtgattgctcaactacgtgagggtctgggcattgcaaccaacaatgctgctgaatatcgtgcattgatcctagggctaacatatgcagccaagaaagggttcaagtatattcgtgctcaaggcgactctaagcttgtttgtaaccaggtccaagatatctggcgtgttaagaatgataatatggctagcttctgcaagaaagtgaaggagctaaagggaacatttcatttatttcaaatcagacatgtgttgagggaatataattcggctgctgatgctcaagctaactttgcagtagaacttcctgttggtgaagttcaagagcagtcgaacttcccatgctagcagttgtgttgtggtcaagtgtggtttgtgcatcgctaaggttctgggactgaagctatgtcacatttgttcagttctcattgacacaaaaggaagagacgaaacaacagttgtattggaagtggtagtgggtctgatatatctgcggagtattgaacagacagatgcaatattgagtagattcttaggaaatttaatcgtctcaaacttctagatagtgcgagttgatttgtccaggaccagtgtttgctgatatacgatgtttgtattcagaacagtattagtaccggaaactttaattgctccataaaaaaaaaaaaaaaaggcccctagggcc

SEQ ID NO: 132111 - DNA, 216 bp, Zea mays
  Clone ID: MRT4577_5196C.1
ctaagttccaactgcgtcaatctcatctatgatgactattgacggtgaatgttcatcatccactctaaacaattcactgactagctcgtgaccatcccctaggtactaactaataagtctactacctacgcctcgcaacaaagctgcagattcagaatatgcagcagcctcggcgactagagaattactacttccaggttcgccatatagtatcac

SEQ ID NO: 132112 - DNA, 573 bp, Zea mays
  Clone ID: MRT4577_51970C.1
atcacgcgatccgttcattcttcttgtagtactacctctcttgagctctcactccaggagctagcaatttcgttgcggttctgcgacatagcttgctgccgtaagccgaatcaaccttcatatcatgctgggtaacgtagctcatccacaggttggcgtaccaatgggtggaacactgatgcaatcttggatggagctgtggaatgagtgggagatccaaactgttgttgtcgccagcttcagtctgcaggttctcctctttttctttgctgggatccgccgctacaccgtctcttctattctcaaggtcctcctctggtttgtatatctgtttgctgatgtcgttgcaacatatggcctgggtcacatgtcctcgtcagtgtcgaagaaatcgtctagcgagcaccagctagtggcgttctgggcgccattcctcctgctgcacctcggcggccaggacaccatcactgcgtatgccttggaggacaatgaactctagcggcgccaccccccaaggcgacgtaccccttttctcctgaggatttatgcctatttttcccccagacctttctc

SEQ ID NO: 132113 - DNA, 123 bp, Zea mays
  Clone ID: MRT4577_51971C.1
agccggccgggtataaacgtaccagattacaacgaacaagttgcagtgagacagctacaggcatccgaccagagagtctgtaggtacgcgagcgggtcagcctgcgctacaagctgcagcgca

SEQ ID NO: 132114 - DNA, 204 bp, Zea mays
  unsure (1)..(204): unsure at all n locations
  Clone ID: MRT4577_51972C.1
cctgtgcggcgctcgagcacggcggtcagagctcgagcttttcttgtgcgcagctgcagccgctgcttttcgttcgtcttcatcctacgcgagggcgaaaacccacaaaccctctccctcccgtactccgnggctacacatccaggcggcgatgaccgctgggtagctccggcgccggatcgagcggcgtcgntccccgaaact

SEQ ID NO: 132115 - DNA, 610 bp, Zea mays
  Clone ID: MRT4577_51973C.1
ggccgcttttttttttttttttttggtttttttttttttttatttttttttttttttttttttttttttttttttttttttttttttttttttttttaggggaagggtccccataacttaaaaatctcttttcaaaaacatatggggggccaacgctccccccccaaaatgattccaggggaacccaacattaaattttttttaaaaaaatatggggcccaaggggacccgtactattttttaaaatcttagggaagctctgaagggttttactaagggaaaaaaaaaccctggatataaaatcctggggaaaaaggaactgattgaacttttttttccatttcttcttccttgggggatagcccaacaaaatgaatcggaatcttcaagaaaggttaatctttatctcctcctcaaaaaggtcaaatatttccccaattccccccgggtgatggtcatattaacatgccaaggggttaaataaacctggaaaacgggaagttaacaagatatttaacattgtttgggaaacatgacagctttaactagctaaatttggtctaatacaaagggaatccttctataaataatttggttacccattgacaac

SEQ ID NO: 132116 - DNA, 401 bp, Zea mays
  Clone ID: MRT4577_51974C.1
cagtggggtgattagtgtgcattttgatctttttgttgtagtagtttttcttgcgcagcgacaaaaagcagcctcagggggacaggcgttataaaaaggaaagcaaagggaaaacaaaagggggggggaagggcccacgggaaaaagacgcaagaagcgggccagggacggggggggccccaaaccccctgaagaaggggggccggggacggcccaagccctaaaagggggggggcttggggggcccacgcccatgaagggaagagcggcgccaccccagtgacaggaacctggagtcggcggcgatgaatactgtcatttaggcaccggggagaccatgagggccagaccggtgggggggatgtaggcctggggccaaggaaacaaaaaaaccctggcca

SEQ ID NO: 132117 - DNA, 275 bp, Zea mays
  Clone ID: MRT4577_51975C.1
ctaaaattagaatcctctcatgcatctttagttagtagttcacacccactggagtgaacaaagttagcttcgtcttcccacgttacttatgataatgggttttcgttgcataccaaaagcagcaacatagcaactgcaaatggtcatggtagagagcgtgcacagcccttgggtatcatttctgagcgtgcacatcaagctttagcacttgagcacctcgagaatatgtggacaaacggaaagaactcccaaccagaaaatgttgatcatatctc

SEQ ID NO: 132118 - DNA, 863 bp, Zea mays
  Clone ID: MRT4577_51976C.1
gggaccctcgaggccggccgggccgggaaaaatcggaactcaaacccctgatccgatcgagcccgcacactcccaccgtttcccactcccatggggctcctcagctccctgccgccccatcgccggggcgccttctcgggtggcggatggcagtggtcgttcctcgacgtcgtatggggggtcttcctcatcgccgtggtcgtcttcctcgcgctcgtcttcactccgcggcgcggggaccccatcctaaccaccccctctgtcgcccgcgccggcggcacggtgccgccgtgcgctgcctctgaggtggacctcctcccctgcgaggacccgcgccgcagctcccgcctcagccgcgagatgaactactaccgggagcgccactgcccaactcgtggcgaggcgctcgcgtgccttgtgccgccgccccgaggttaccgcattcctgtgccctggcccgagagcctccacaagatctggcatgacaacatgccttatggtaagattgctgaaagaaaaggtcatcaagggtggatgaagcatgaaggttcgtacttcatttttcctggcggtgggactatgttccctgatggagctgaacaatatattgaaaagcttagccagtatgttccaatgaaaactggtgtcatcaggactggtcttgatatgggatgcggggttgctagctttggtggatttttgcttaaggagaatatcatgacactttcatttgcaccaagagattcacataagtctcaaatacaatttgctttggagagaggagtccagcatttcttttgatgttgggcactcgccgtcttccttttcagcacagtcctttgattttgtcattgggtcccggg

SEQ ID NO: 132119 - DNA, 234 bp, Zea mays
  Clone ID: MRT4577_51977C.1
cccacacgttcgaaatgactatacctttgagctactcagctcgaccaatacggttccgtgtaacaatcatccaagtatgatacagaccatcctaacttacactacaactggcatactgaaacccacatataatatgacatacgatctacaacatataatatacaaacatattcttactacatccagattaagatcgaaacaacaacgctgatcctatcatcttcctataacacc

SEQ ID NO: 132120 - DNA, 1196 bp, Zea mays
  Clone ID: MRT4577_51978C.1
acgagggtttttgccgccgccatggcgatccctcgagcacgtctaactcgcctgctcctccacttcggcagccggggctccagattcctagcgcaacccttctctacctcttcctccgcacacggcctcttcccctctctgtgggcaacgccgtccaccgccggcgcgtggcggcgcgcgttccacgatgggcggccgcgagggccgctgtggcggagcaagaagctgatcgggaaggaggccttatttgcgatccagggcctcaagcggttcaagggggacgaggagaagctagcggatttcgtgcggcggtatgtggccagactgctcaaggcggacaagcttgccgtgctcggcgagctggaacgccaggaggaggtcgatctggctgtcaacatgtttttagtcataacaaaggaggactggtataaaccagatatttacatgtacaaagacttgattattgcattagccaaatgcaagaatatggaggaagcaatggtaatctgggggaacatgagagatgagaacttgtttcctgactcacagacttatgccgaagtaataagaggattcttgagatatggctccccatcagatgcaatgaatatttacgaggacatgaaaaagtcacctgatccaccagaagagttaccttttagggtattgttgaagggtcttttacctcacccactgctaagaaatagagtaaaacaagattttgaagagatgttcccagaaaggcatatctatgatcctccagaagaaatttttggcatgcactgaggtatattcagaggcatgaatgtgtttatcaattggatggtcgcgttgcaataaatgggcgaaaactgagaagctgattattctgatttctgatagacagattagttgtccatatcattgtgctatcctttgttgttcagccaagctcattaatactgggccatctattcaactcaaccagtacaactttgcatggttgcaatgcctgatcttaatgagtagtaacagaaaaaaatgtgttcttctttgggcccacttgtatgattaggttgttagaacaatgtactggcgtctggctacattcttgtcgttccttccctaactgcatgggagacctacttcgcatgaacattgtgatggtatctcatttcgtgaccctgttgagtttatgggtgaggaagaggagaagg

SEQ ID NO: 132121 - DNA, 581 bp, Zea mays
  Clone ID: MRT4577_51979C.1
taccgggccccccctcgagtttttttttaaaattggacatctccaaggcttttgattccgtttcttgggcttttctcattgaggtgctttctcaccttggatttggaaatatttggcgaaatttgatttcgaatctgttggcttcatcttccactcaggtgctgctgaatgggtctcctggtattcctattaggcatcggagagggcttcgccaaggtgatcccctttccccaatgctatttgttctaataatggacgtccttagtagtatgtttctgctagctgaagatagggggctgctccataaccttctggaagggaatgtccgaaacagaatttctatttatgctgacgatgtggttctgtttgttaaacctatagtggaagatctgaattgtgttaaggtaatattggactgctttggttcagcgtctggactggtgtgtaatatgaacaagagctgcgccatcccaattaaatgtagcgaccaggctgtgcagcagggttgcaaccttcttcgttgcagctcgacgtccttcccctgtaattatttgggtcttccaatatcagatagaaagctc

SEQ ID NO: 132122 - DNA, 1536 bp, Zea mays
  Clone ID: MRT4577_5197C.1
gcagcacagcccccaggccggggatcgtatcccctctcattaattccagctccaacatctctctcctagctacatctctccactgtctgtttgcctgtcgaggccgggcgccagcagcaacaatggcaaggatgatcagccggccggccgtcctcctctcccccctggccatgatcgtcgtggccgccgccgtcatggcgctggcaccggcgccggtggccgcgaccaagtacaacatcaccaagattctggcgccctacaaggagtactccaagttcaacgacatgctgtccaagacgcgcctcgcgtacgacatcaaccggcgccagaccatcaccgtgctggccgtcgacaactccgccatgtcggcgctcgaccactactcgctgcagaccatccgccacatcctcgagctgcacgttctcgtcgactactacggcgacaagaagctcaagaagctcgcccatggctccaccgcttcctcctccatgttccaggctaccgggtcggcgtctggcatgtcggggtacgtgaacatcacccggaaggacggcaaggttagcttcatgacggaggacgccgacgacaccgcgaagccgtcccggtacgtcaagtccgtcaaggagttcccctacgacatcgccgtgctccaggtgagctccatcatctcgtccgccgaggccgaggcgccggtgccgcccccggcgcccgtggacctcgaggagctcctatccaagaggtactgcaagtccttcgcgtccctgctctccgccaacgccgaggtgttccgcgccgtgaacgagaccaaggacaacgggctgacgctcttctgccccgtcgactcggccgtcgcggccttcgcggccacgtacaagaacctcacggccaaggccaaggcggccatcctcctctaccacgccgtgccggactacttctcgctgcagctgctcaagtccaacaacggcatggtcaccacgctggccaccgccagcgacaagaagatggactacagctacgacgtcaagaacaaaggcgagacggtcacgctgcagaccagggtcgtcacgtccagcgtcaccgccaccgttggcgacatggagccgttggccgtgtatgccgtgaacaagttcctgcagcccaaggagctcttcaaggtcgtcgaggcgcccgcgcccgcgccggagccgtccaagaagaagaaggctggtcgcggcgggagtgacgacgattcctcggacgattcgggagattcgaccgccgatgctgagaagggcgacgcagcaccggctctgctcgtgcgatggctagtcaccgcggtcgcgacagcgggagttgcatatgccctgatgggataaacttctatcagtcacctgaattatattcggactttcatttgatttgagcaaaaaaaaaaaaaaaaaagcggccttgttttcacttattataatggtgctctcgatcggttaaggtatataaactataagaagttattataagctttttatccaggccaaaaaaaaaaaaaaaaaaaataaa

SEQ ID NO: 132123 - DNA, 382 bp, Zea mays
  Clone ID: MRT4577_51980C.1
cactttctttttcttttttgcttatcgagggtttttttgtttttttaatgttttcttttttttaaatttgtggtcttttgggttccgatgaccaaaactgcggtctccaactgatcgagcggcggcggaagtagcggtgacacatacacgggggggggggaaaaagtctgtttttgcaccactactgggggttgagggcgcggaagcggcactaactcgccaagccacggctttgagatggtggggcacagtggcaagcgcctcatgcgtctcgtgaagtgagccgtccaaaccttcttcttgggcggcgggatcagcccgcttttgacatactcggggattgagtatatgggcccaacggcgcataacgacaccgcatgtt

SEQ ID NO: 132124 - DNA, 612 bp, Zea mays
  unsure (1)..(612): unsure at all n locations
  Clone ID: MRT4577_51981C.1
ccgccccgcgtccgtcagtacattctggaccatatgctgccgncgaggctgacatttccagtaggagttatttggacaggcatcagcaatcacatacgatgatgaactggagtcaactctctcagtcattgtgagttcagttgcacggtaacctattttcaaagaaaaaaagcatgggggggggctgaaaattggagcttatagcaaaaggtagacagtagttgtctaaagccattgttaatgtggcaccaaaaattagctgacaacttgaatttgatgtgtagtagctgagtagaacattccaaatgcccactaatgatccctttttttcacaaatctctcaatgcagtacaacaggatgggaagtggataattagtgctgtgtgaccggatttaattggttaggagttcggcagagagaattatattatacatatgtaaattatcacattttgttcgtctatatagccttggtgtgcatgcaagtcattgaacatgcagcttcttggatgcaataattgttgtgaacctagttgtgtagaaccttgtggtttaggttgctcggtgcccacaagatatgtattattcgtcagataagagttttctagcatc

SEQ ID NO: 132125 - DNA, 305 bp, Zea mays
  Clone ID: MRT4577_51982C.1
gctccttaatatcaggttggtcgtaccacagtcaaatctacagaagacctgattcttggcgttcccttgataactgtcaatctgttggacttgtacttaagtctcatgtatacacaattatacatatgaatatgttgtaagttgtgattagtcgattaggagtcttacattgaaaattttacatccagtcatctagctgcaaagcttgctatcttagcttttgaagctttagaaaaaagattgttagataaactgtctgtcccaagttcgcttgtcatgatatattatctacttcacatgtgttt

SEQ ID NO: 132126 - DNA, 1959 bp, Zea mays
  Clone ID: MRT4577_51983C.1
ccggccggggggggagcactgtcccaatggctggccgccgttcgccgtcggcggatcccggtctcggtctctgcgaagctcccgaaatgagatccggtggcgctttagagccctcgtccgttccaatacgcagtcggatgctgggttacgctcgcctctaaataaataccgggcgcgtaacgttcctccgctccatcggcctgcgggagtactcgaggtacctcaccttcaaccacccctgcagccacgagaagcccctcctgtcgcacctcaggttcttcccctgggtcgtcaatgaggtgtacttcaaggtctggaggcaagggaggaccggctaccctctcgtcgacgccggcatgagggagctctgggccaccggctgcccacgcgcgcgcatacgtgtcgttgtctcgagcttcttcgtcaaggtgctccagctgccatggcgctgggggatgaagtacttctgggacaccttgctggatgctgaccttgagagcgacgcactaggctggcagtacatttctgggtctctccctgatggccgtgagcttgaccgcatcgacaaccctcagtttgaagggtacaagtttgatccgcacggggagtacgtccggcgatggctaccggagctggcaaggctgccaacggaatggatacaccatccctgggatgcacctgagtctgtgcttcaggctgcaggggttgagctaggatctaactacccacgccccattgtcgagttagatgcagccaattccaggttgcaggatgccctgtcagagatgtgggagcttgaggcagcctctcgtgctgccatggagaatggaatggaagaaggcctcggcgactccacggatgagcggccaatcgacttccctcaagaactacggatggaagtggaccgacagccggttcaacctgctatccacgcacagggagtgactggtcggagacgagaggatcagatggtgcctagcatgacttcctcgttcattagagctgagaccgaactcactgcagattttggccacaccagtgaggacagtaggccagaagtgccatcaaacatccaccatttgcaggctcgcccggagagggaagagacagttgacggtggcactggcaatgctgtcagggtgcatggcaaccatcaccagcagaaccttcagaacaacatccaccgcgtgctaggtatcgctccatcgatttcagaggcatcaagcagttggacgggcagggatggtggagtggtaccagtctggtcgcctccggcagcgtcgggaaactctgatccttatgctgccgatgaggctgacatttccagtaggggttatctggacaggcatccacagtcacatacgatgatgaactggagccagctctctcagtcattgtgagttcagttgcacggtaacttgttttttttcacagagaaatgcattgtcataaattggaaattcgcagtgtgtcgcaacagagtagtcgtgttaagccattgttagtgtggtagttaaaatgaactgacaacttgaatttgatgatgtgtagtagctgagtagaacattccaaatgcctactaatgatgtttttttaatgaatgaatctctttgcaggacaacagggtgggaagtggataattagcgctgtgtgtccggatttaattgcttaggatttcggcagagagaattatacatatgtaaattatcagattttgttcgtctatatagccttggtgtgcatgcaagtcatcaatcatgcagcttcctggatgcaataatggttatgtgaagctagttgtacagaaccttgtggtataggttgctaggtgtccacaagatatatgtattattcgtcagaagagttttctagcatcaggttcattttgtatttggttattgtcaaattccatttttggtcatggaatagcaaccacaggtgtatttcccagttgaagcc

SEQ ID NO: 132127 - DNA, 637 bp, Zea mays
  Clone ID: MRT4577_51984C.1
ataatagtagacryacawayaaatygcayacaaatydacaggcgcatccctgatasttrytgayactcksccyagacagtrcgabacaabacgatacatkcttactcctagctagataatycccacraakacagkrcaagasackasactasacagcyccaacatctcmgtacaattattcgtkcccccatcaataccaccactatawraakgcgattgtgcagatagagcgaygygaatygcatsctatcccatcgcccattgcacgcwgctwactwtctwactwactccaacaagatrcaracaaractgctakaatattatactagagcttaahataaaagaktccttscratcccwtcactccctgcagcgtcatcgccgtcktcttgsttgsaggtgcaggggttgyaggtgcwgtttgcgcygtgsttgcrccckcygttcgcdgytgcggcggccgcctcgggcccgcccttgggtggtgcygcrcccrtggtygagggtctgggtggtggtcgcctgbtcrgccrtgtccgggtgcktcttgcgccctcygcrgcbstgccgbggsttgcggccggcgcbgcgcccgcggttgcctccgcggggckgcgtccttcctcctggcghgtcc

SEQ ID NO: 132128 - DNA, 888 bp, Zea mays
  Clone ID: MRT4577_51985C.1
gctacggatggaagtggaccgacagccggttcaacctgctatccacgcaccgggagtgactggtcggagacgagaggatcagatggtgcctagcatgacttcctcgttcattagagctgagaccgaactcactgcagattttggccacaccagtgaggacagtaggccagaagtgccatcaaacatccaccatttgcaggctcgcccggagagggaagagacagttgacggtggcactggcaatgctgtcagggtgcatggcaaccatcaccagcagaaccttcagaacaacatgcaccgcgtgctaggtatcgctccatcgatttcagaggcatcaagcagttggacgggcagggatggtggagtggtaccagtctggtcgcctccggcagcttcgggacactctgatccttatgctgccgatgaggctgacatttccagtaggggttatctggacaggcatccacaatcacatacgatgatgaactggagccagctctctcagtcattgtgagttcagttgcacggacaacagggtgggaagtggataattagcgctgtgtgtccggatttaattgcttaggatttcggcagagagaattatacatatgtaaattatcacattttgttcgtctatatagccttggtgtgcatgcaagtcatcaatcatgcagcttcctggatgcaataattgttatgtgaagctagttgtgtagaaccttgtggtttaggttgctaggtgcccacaagatatgtattattcgtcagataagagttttctagcatcaggttcattttgtatctggttattgtcatattgcagttcttggtgatgggatagtcacaaaaaaaaaaaaaaaaaaaaaggcgggcggtttaaagatcaag

SEQ ID NO: 132129 - DNA, 117 bp, Zea mays
  Clone ID: MRT4577_51986C.1
aactcgcccttagcgaattctggagactctatagcactaattggagcgactactggcctgcgctttagtgagtggcactctcgagctctggtactcaaggctggctgttaatattgg

SEQ ID NO: 132130 - DNA, 491 bp, Zea mays
  Clone ID: MRT4577_51987C.1
ggcgcgtgcgcccacgcgtccgcccacgcgtccgcccacgcgtccgaccggcactccccattgtccttcatgtggtggctgctcctccgcgcgggcatgcccgagctcgcggtcctcgttctcagccacgcgctctttcacgcgcgcctccgttgccgctcttgctcccagactttggcgtggccctctcccgtctctcattggcatttttttatgtggggttactcacactgttacaagggtcattcagcgcctgtcactgctctggctgatagattgcttatggatggtgaatctaaactgcttgcaagtggagggtaccaatccaccttccctacccgtgcagctgctcgatgcctctgaaattgatggagcgatacctagcacgcggtgcatgttgttctgaagattctgctgctgttgggtgccattcaccctgacagtattgccagtggcaccgtcaactatttcttccctctccggccgagcct

SEQ ID NO: 132131 - DNA, 2516 bp, Zea mays
  Clone ID: MRT4577_51988C.1
tcgaggccggccgggccggggacgaggctgacatttctggtaggagttatttggacaggcatcagcaatcacatactaccctgaactggattccaactctcctagtcattgtgagtttgcttgcacggtcacctatttccactgctgccgcccaattgtcataaactgaaaatttggagcttatagcaaaaggtagacagtagttgtctaaagccattgttaatgtggcaccaaaaattaggtgacctgtcgaggtgtccgtgggacgagctcatctttgaagacgagtccgagaggggcagcaatgcgctgctcgcgcgagcgtggtcaccagggtggcagaacgctgacaaggcgctaacggccttcctcgacggtccactggtcgactactccgcgaaccacaagaaggccgacagcgccagcacgtccctgctgtctccgtacctgcacttcggcgagctcagcgtccgcaaggtcttccacctggtgcggatgaagcagctgatgtggagcaacgacggcgaccgcgccggtgaggagagctgcacgctattcctccgcgccatcggcctgcgggagtactcgaggtacctcaccttcaaccacccctgcagcctcgagaagccccttctgtcgcacctcaggttcttcccctgggtcgtcgatgaggtgcacttcaaggtctggagacaagggaggactggctaccctcttgtcgacgctggcatgagggagctctgggccaccggctgggttcacgaccgcatacgtgtcgttgtctcgagcttcttcgtcaaggtgctccagctgccatggcgctgggggatgaagtacttctgggacaccttgctggatgctgaccttgagagcgacgcactaggctggcagtacatttctgggtctctccctgatggccgtgagcttgaccgcatcgacaaccctcagtttgaagggtacaagtttgatccgcacggggagtacgtccggcgatggctaccggagctggcaaggctgccaacggaatggatacaccatccctgggatgcacctgagtctgtgcttcaggctgcaggagttgagctaggatctaactacccacgccccattgtcgagttagatgcagccaattccaggttgcagggtgccctgtcagagatgtgggagcttgaggcagcctctcgtgctgccatcgagaacgggatggaagaaggcctcggcgattccacagatgagccgccgatcgacttccctcaagaattacggatggaagtggaccgacaaccagctcaacctgctatcatccacacgccggtagtggctggttggagacgagaagaccagagggtgcctagcatgacttcctcgttaattagagctgagaccgaactcactgcagactttggcaacaccagtgaggacagtaggccagaagtgccgtcaaacatccatctgcaggctcgggcggagagggaagaaacagttgacggtgccactggcaatactgtcagggtgaatggcaaccaacagcagcagaatcttcagaacaacatgcaccgcgtgctaggtatcgctccatcaatttcagaggcatcgagcagctggacgggtagggaaggtggattggtaccggtctggtcacctccggcagcttcagtacattctgatccatatgctgccgacgaggctgacatttccagtaggagttatttggacaggcatcagcaatcaaatacgatgatgaactggagtcaactctctcagtcattgacaacaggatgggaagtggataattagtgctgtgtgaccggatttaattgattaggagttcggcagagagaattatattatacatatgtaaattatcacattttgttcgtctatatagccttggtgtgcatgcaagtcatcgaacatgcagcttcttggatgcaataattgttgtgaacctagttgtgtagaaccttgtggtttaggttgctaggtgcccacaagatatgtattattcgtcagataagagttttctagcatcaggttcattttgtatctggttattgtcatattacagtttttggtgatgggatagtcaacacaggtgtattctcagtttggtagacaaagaacatacctgctatcggtgaggacccaaaagggaacatcttggcagggtgattgggtgccactcttagacatgccgcgtgctagttttatcgctccatcaatttcgcaggcatcgagcagctggacgggtagggaaggtggattggtaccctccacttgcaagcagtttagattcaccatccataagcaatctatcagccagagcagtgacaggcgctgaatgacccttgtaacagtgtgagtaaccctacataaaaaaatgccaatgagagacgggagagggccacggcaaagtctgggagcaagagcggcaacggaggcgcgcgtgaaagagcgcgtggctgagaacgaggaccgcgagctcgggcatggccgcgcggaggagcaggcagcag

SEQ ID NO: 132132 - DNA, 137 bp, Zea mays
  Clone ID: MRT4577_51989C.1
ctttttctctgcagggtgctgccagtaaaattaagatctacatggcgcttggagtagggaacggcggcgagctgttcgacaagatcgttatcaaggggaaactgctcgaacacgagggcaggaggctcttacagcac

SEQ ID NO: 132133 - DNA, 748 bp, Zea mays
  Clone ID: MRT4577_5198C.1
aattcggcacgagggcttcactcggtaagcacatcgatcgctgcatgcccgatctcgacttgctgagttcggagctggtggcgtacgtgcaggcaaagaaaagaggcaacgacgatggctgctgcggcggcgatgatggtctccggaggacgggcggcgctggtggtggcgggcgtgctctgcgcggtggcggccatggcggcggcgcagcaggcgtcgaacgtgcgggcgacgtaccacctgtacaacccggcgcagaacgggtgggacctgaaccgcgtgagcgcgtactgcgccacgtgggacgccgacaagccgctgtcgtggcggcagaagcacggctggacggccttctgcgggcccgccgggcagaagggccaggccgcctgcggcaagtgcataagggtgaagaaccgtgcgacgggcgcgtccatcgtggcgaggatcgtggaccagtgcagcaacggcggcctggacctggactacgagacggtgttcaagaagatcgacaccaacggccagggctaccagatgggccacctcaacgtcgactaccagttcgtcgcctgctgagcaggagagctcagtcagatccttcctgtgtatgtatgcatccatgcatgcaggcaggcagatgcagagaccgacgtcgttgtaaaacgcgtggccttacttgagatgaataaaacgcaacatgtagcgtcttgcactgtcgcaagcacagctactactgctactgattaaataa

SEQ ID NO: 132134 - DNA, 305 bp, Zea mays
  Clone ID: MRT4577_51990C.1
gttagagctttatattatacatatatttttattgagaggcaacaggaaccggtagagagaaatagccaacgatgttccaatagttggcctactaatatatcatgcatgttggtctgattgagggctctttaagaatgcaacatggggtaacacaagttgacaaaggcacaagtgcctggatgggtacagctttaggaggatgagaagacaagccccatgtcaatgggggccatatttatggccaggaagattcattacttactctcagttttcacatgactaaattgattggggcgcaattggcc

SEQ ID NO: 132135 - DNA, 193 bp, Zea mays
  Clone ID: MRT4577_51991C.1
acgcggactcgtgcgtgcaactcgtggtgggcgacaagaaaagtaggaaggcaaactcgcgggggctgtaacaatagctgaagtcccttgagcaaacatgcttgaactggaacagcatcaagacctcgtctgatggggtgttgtgatgaataaagtaattcgtacctgttggcttgggcgtgtacaaaatgtg

SEQ ID NO: 132136 - DNA, 566 bp, Zea mays
  Clone ID: MRT4577_51992C.1
aagatagcattacaggataataaggggaatgaggatgtgagagtttttgtgaaggttggtggcaaagagtttccgattggaacactatcagttgacaaataccctcaggccccgtttgtttcgttggaattgaattctattttaataattataatttagacaaaattaattaagttcatatatttatatatgtaatatatttatatattatcttaaaccatatgagagagatagttatatactacattcatgttataactaagcaagtagaagagtgtgctataagttgtacatcgaaaaaataacatgtaaatctatagaatcaattttcatttctcaccccatgaatttgagataggcttaacggataactgtggagagtggtggaatgtcatattctaaaaaaatagtctattctattagtaagattccaattcctcgaaatgacaggaaacaaacggggccttatattctgttgcaccttttcatttgcacatataactttacagtttttctgagattggtaaaaacacgtgtagtagcacataatattggtgcgaaaatgc

SEQ ID NO: 132137 - DNA, 568 bp, Zea mays
  unsure (1)..(568): unsure at all n locations
  Clone ID: MRT4577_51993C.1
ccgcncnccaccccgccctaccgacgcngggangaaggccgngccaggggacagcgccgcgcccccggggccgangccggcgaccaagaacaccanncccgnnnccgcggggggcggcgcggaggcggcgcnccncgggaaggggcggnacaaggncngggccnnggccgccancgcgccccncgcgcccggggggagggccgccgccttgatgatttccgcgggnccnccncgggagaccacgccnccggggggggggacnnggaggggcgggcgccgacgannnngannnnnnngaganggaggagagggngnnnaaaaaagggagnnnagagggncnngnncacacggaccagngangaggnacggcnnccacggnncnggcaggaggcgnnngaggcngcanacgaggaacnngcnggngangangngcaggnccgngangcagcnancncggagaaagcccgaagggcagcccacaaacnngagcncgagcagacanngaangagaaagaggaagagaaggccacgagcaacagnggnggcagacgggcaggccaaaggggag

SEQ ID NO: 132138 - DNA, 491 bp, Zea mays
  unsure (1)..(491): unsure at all n locations
  Clone ID: MRT4577_51994C.1
aaaaaaagcaccccgaaaccaaaggccccccccgagcaaaaaaggcaagggcgccccggcccggggcgcgcggaccacagcagagcggggggaccacgccaggccaaaaccggcgccggcgcgacgccaacccaggggggccggggccccaacggcacggaagagaaccgcaacccagccaagcgaagcgggggcacgcccggcgggaccgcagaacccgaggcgcgagacacggggcganncggcgaccggacnaaacaggcaanncgcgagggcaggaaagcncagccacgagggacagaagccaacggcgganaacaacacccgagcgggccggaagccccgagccgggaccgcgccaaagaacnggcncgncncagggcgngggcaaaancggccgcaacagcgcaaggacccgcaacccggccggacagggagaaacgccaggggcggcggggccgnaaacgaccacnnaccgggggccagcgacc

SEQ ID NO: 132139 - DNA, 437 bp, Zea mays
  Clone ID: MRT4577_51995C.1
gggcccccacaaaccccttggggtttatgactctaaaactagcccttaaaaatacaaggggggttataaaacgacccaccgggggtagaaacacactaataaccccaaggaaattcagccgggccaaaacactggaatatgcacccgggatggcccatggcaaatagtaaaaaacaccgttttttaagaacaaggggctttggtgctcccaagaaaaacgttctcatagaaaaaagggaagcccccctgggtgggactgggaggggacggatcgctcaaatgagggaactttaaaaccgggtaatgagggccttgatccagggcaggaaaccggttttctttttttaaaaaattgcctggtttttggcctcctcgggggggggggggaccaagtgggggaaaaagcgggaaccgggtccatggccggggccggggcc

SEQ ID NO: 132140 - DNA, 279 bp, Zea mays
  Clone ID: MRT4577_51996C.1
aaatgggggggggccaaaaaaaaaaaaaaccgatgcagggttaccttccctgcaaaatatgaatctatttgggggccccgacccttggaggttttactttctttaacccacatgacttgtggtttcagttttgggggggcgtttcagcgtttgtccagaccgggaatggaatcgcttttttttcagaagttttatgcatttgcccaagctggtaagcttgcttgcttggtccgtaaaccatacactacattacagctggagatgggtcgtatatttggg

SEQ ID NO: 132141 - DNA, 287 bp, Zea mays
  unsure (1)..(287): unsure at all n locations
  Clone ID: MRT4577_51997C.1
gggagccactcattcattcaattatgggtctgttgatgggtgccaataccctatggctatgaaantaccatctgggtggacattcaggtgtgtggctatcctaaaaactggtgaacatgcactaataaccctatcgtttgctgatcagtgtaattatactggcagtgggtgttggtaaataataaaaccacctgagaaatctttttgggctgaatattgtgactttgttggtttgcagaggatgtacataatttactcttgtcttattggaataaaaggtgtttctg

SEQ ID NO: 132142 - DNA, 234 bp, Zea mays
  Clone ID: MRT4577_51998C.1
agcggagcccccaggccaggccccagccactcagcctcctcagctgatcaaccgggtacccatctgctcagcctgagctgtcattcccgcgaagcgccgtctcccggatctattgatggaccgagtcgccgacctggtcgtagcgctcctcgtgctcttcttggtcgtcggggccacggagcacgccccggtcttgtcgcccaagcgcactacagcgccagcgctacacaggac

SEQ ID NO: 132143 - DNA, 580 bp, Zea mays
  Clone ID: MRT4577_51999C.1
ggtacccgggccctctctcgagtttttttttttttttttttttttttttttttttttttttttttttttttttttttttaaacacagaatttagcccccttttccagccaaaatatcacatgacatacacaaatatcggcctggcccaacaagcaaataaaaaccccgggggcagactcaaatgaatctaaaaatgatttttactggggggaaaactggatgtagggtaacaaaattttagaaggggattttaaaaataagggatgaaccaaatagggacaaaggggcagggtaagatgtactgtactttgtacgggcgtcgtcgtcgtcaaaaaaaatcgaaccaggcctggagcacgagcaggagcgggaggggcaaaagccttttaggcccagccgggtaccacaaaaaggcccccgcggggttagcggggcgggggacaaaaacgggaggccgcgcgcttggcgccccgccgccgtacatgaccagcaggaggccgggggacatgagcccgaacgccagggggacttgccccgtggggaaaaggttgagaggggtgccgcaaacggggggcgggag

SEQ ID NO: 132144 - DNA, 1050 bp, Zea mays
  Clone ID: MRT4577_5199C.1
attgggtacctcgaggccggccgggacctcatctctcattcttcaattcgtcacttagcttcactcggttctgcttctacacatctatatatcgttagtttggtatgtactaacggctcgatcacaaggcaaagaaaagaggcaacgacgatggctgctgcggcggcgatgatggtctccggaggacgggcggcgctggcggtggcgggcgtgctctgcgcggtggcggccatgggcggcggcgcagcaggcgtcgaacgtgcgggcgacgtaccacctgtacaacccggcgcagaacgggtgggacctgaaccgcgtgagcgcgtactgcgccacgtgggacgccgacaagccgctgtcgtggcggcagaagcacggctggacggccttctgcgggcccgccgggcagaagggccaggccgcctgcggcaagtgcataagggtgaagaaccgtgcgacgggcgcgtccatcgtggcgaggatcgtggaccagtgcagcaacggcggcctggacctggactacgagacggtgttcaagaagatcgacaccaacggccagggctaccagatgggccacctcaacgtcgactaccagttcgtcgcctgctgagcaggagagctcagtcagatccttcctgtgtatgtatgcatccatgcatgcaggcaggcagatgcagagaccgacgtcgttgtaaaacgcgtggccttacttgagatgaataaaacgcaacatgtagcgtcttgcaactgtcgcaagcacagctactactgctactgattaaataaacaggactgcaataatagtaataaactatttaggcctcgttcgtttgttccgttttgaaaacaggcatgtttttagttctggaccggatggagtgaatcctgctagttcactaaaacctgaaattttttggtttggtttggttccagttgtttataggtgtagcttcgactcaagccgagaaaaggatgaaaaggtctacaatggcttggttttattcttgattgagcttatcagaacaacactttcgggttggttccagttct

SEQ ID NO: 132145 - DNA, 379 bp, Zea mays
  Clone ID: MRT4577_519C.1
acgacattgaactctgctgcttatcttttacatttactagtactaccattcaaccatgcatcggatacctaacacctgcaatttcttccattcaacccactcacagcattgaactctcctgcctatgtacagcagcaacaactactaccattcatccagctagctactgagaaccctgctgccttcttgacacagcaacaattgttatcgtactacctgcacacttcgcctaacctaggcaccctcttacaactgcaacaattgctgacattcaaacaacttgctttgacaaacctcacatcttactacctacatctcatcaacagccgtaccctctattacaatgcatatgacttatctttcaatactcaagtttctt

SEQ ID NO: 132146 - DNA, 2904 bp, Zea mays
  Clone ID: MRT4577_51C.1
atggcgcccaagaggaagacctcgagttcatctgctgtggtgattcctccaatcgaccccaacagtcagttgcctttcgcaggtaaccacatgtccgtcatttctgagcctgaacttctccacctcgtatccatcggagttcttcctccgcgggaactctgttcttggcggatttgccatgggtttactgttccgactgaggatacccatgagtacgttgtttacgcccctttccttctccgcggccttggccttcccatttctccctttttccgcggcctccttgatttctaccatcttaacttgacccatttgaaccccaattcaatcttgcaaatctccattttcgttcatttatgcgaggcctttcttggcgtgctgccgcattttggtctgtggaaatacttgtatcattgtcgccctgggatggccgggggacaacatcagttggttgggggtgccagcttggagatgcgccgcgggaggaagactgaatatctcgagatccctctcaaggacagtatcaagggatggcgcttagagtggttcatagttgagaactatgggaattctctcccctcccggtcgggaagacagccggacgttcgcaccccaagctggaccgagtctcccacagatcaggaggtagctgaggcaggtgtgttgctagctgaagttggactgctgaaagagaggggtctgactgctgaagctgtggttactgattttgttttcaagaatattcagccattgaaagacagggcatacccagcttatctgtatagagggctagccgactcaactcgggttaccaacagaagaattccctctgcagacttggtgagccgactagagatgatccttaggggcaaagtgtcaaatgttggtgctccagtggcatactcggcctggaacctgcctcctcccaaagccttcaccctttttgtgtcgaatccacctatcactgatggcagtttgggccttagagtgcgaccctctgctgaagaagttaatgccttggttgcctcgcttggggagattcctgatgatgaacggcaggtccattttgaggtgcccctgaaccctagtgatgcagagataagcgctatgcttgatttgctagttgaggattcttccgacgctgctcctgctggggcgttggtagtggcgcccctcctagaggctgatacaactttggatactcagaagcctgtcagtactcgcctgaggcgcccttgccgagccaatcagcctgatccttctgctgatgagcagaagaagaaaagaagacgcctccggcgagtatccagtttggatcgggacgctggtacctcggttcctgctactgaagaagtgcctgcgactagatttactaatgctgaccccaatgggtgtacccaatccgctgctgatcccaatgtgggtgctccatctgttgctgatcccaatgggggtgctgcttgtgttgccaatgtggatgacgaggaggaagaagatgaaattcctttgacttggaaaaacagtcggcagatcatcgccagcggcgaaagtagtggagttccctctcctgctttgtctgccctcattggtctgcaagaactgtccgtggccaactttgatcagactcttgaggatatggtcccagaggacttgttatcggagccagtggatgatggtgcaatggaggtttgcgttgacgtgcctgatgctgggttgaggtcatcccgtgcctcgtcgaccttagagcgcgatctcgagggtcgggagactgacttggatcgtcctggtcctatggaagtagctgagggcccatcaaccttagaggtggctactgcagagaacttggaccccgaggatggtgctgacacatgcccagcccccgaggatgtcgccggggatgacttggctcgggtgaggagtgtaagcctctgcccagcccccgagggtgctgccggggatgatccggctcaagtgggtagtgcaaactatgacccagcccccgagggcaccgagctgattcctactggttcgttgcaagctgcttcgggcggtggccttacgcctggttatcaattgatctctcctgatttggggatcccttcgttcttttccaacctccaggctttggtggatggaatgactagccaactgaggctacagggtgcttctgtcccagaagtagcttcgtctcttgcatgttggaatccagtgttacttcaacatcgcgtctctgaattggaggcaaccaacgctggaatgactcggcagatctcaactcttgaggaaaaacattcccaagatcaggctgaattggtccagcggtgcactgactttgaggaaaagtactctcagagccaaactgaactgggtcaggtctccgctgccttggatgacgccaatgcactgagttcttctcttcatgctcagctcaattctgagaaggaagaaaaacgtatccttgctgcttctcgtgacagtcttgacaggttgtatcgtgattctagcaactcgctgaccatcttggagaggagtcatcgctttactatggaagaattggacaatcaacgctgtaagctgcaggaatccgcggatgaagtgatccgtctcaaacagctgatatcagcgaaggacgctaccatcaaagaactccgggcttccaagaaatccattgtccaggagttagaaactgctcgactggctgttaaggttgccgaagaaacttctgttactcttagagcccagcgcgacagagccatggacaaggctattcgggcggggcggatcttgatgaggagacccggtgtggttgttcccgaagatataagggctgatgtgaatgctgcccctgattcctcaagtcgcccttcttcgtcggtcgctcctgagaaagatattgcgaaatag

SEQ ID NO: 132147 - DNA, 310 bp, Zea mays
  unsure (1)..(310): unsure at all n locations
  Clone ID: MRT4577_52000C.1
ggagaggagangggaggggncaacgaggngggagcaggcaggaaggctcggggcnccnnccnccnnaaaacccaccgcaccngccnnacaggcncccannnncncggccgggagccgcaannccanccngcngcnagagnnacanacccaccncaaagaacaanncnangcccggngangggaccnccngaggnagaagagcanaccgaagcagaacncgagnggngnnggancgaaanggaaggcgggangncaagnnnggaagccgccangaaagcnncnncancganggcaagcagcaaggcaagga

SEQ ID NO: 132148 - DNA, 246 bp, Zea mays
  Clone ID: MRT4577_52001C.1
aacaaatgatgcctcaacattttgagctgctctgtcggacaaataacctggtcctcttgaggttatattttggatatacatttttaaactgtcagtaattattgtcagatgtggagttcaatagccagccagtgttcatttttatccttgagcttttagtaaaaacttcctggttttatttttagtcattgggtcatacagcactaaagtctgctatttatgggaactaacttttttgtttttaat

SEQ ID NO: 132149 - DNA, 741 bp, Zea mays
  Clone ID: MRT4577_52002C.1
acccgcccgcccgccgtttatagcgaacccagcggccgcacgcgggtgcgctccgctccccacgtccgcgcccctcgattccacccacagcagcacgcggcacgcacccgagacgctcgtacgggccggcgcaccctagccgggccgcgatgcccacggctaacgtgcgcgcggcgcagcctagcgccgaccgcaggttaagtacgctggtgcgccacctgctgccttcttccccatggtgctgaatgtggtcaggcgcgccgagcagatgctgatccaaaacgagtcacgtgttaaggagtacttgccgatcactggattggcagatttcaacaagttgagtgctaagcttatcttcggtgctgacagtcctgctattcaggagaatagggtggctactgtgcagtgcttatcaggaactggttccctacgagtgggaggtgaatttcttgcaaggcactatcatgaacgcacaatctacattccccagccaacctgggggaatcacccaaaagtcttcactttagctggcctgactgctaggagttaccggtactatgatcctgcaacttgtggactggatttccaaggactcttggaagacctcagttcagctccctcaggcgcaattgtactgcttcatgcatgtgcccacaaccctactggtgtcgacccaaccttggaacagtgggaacagatcaggcagcttatgagatcaaaagcattgctgccattctttga

SEQ ID NO: 132150 - DNA, 162 bp, Zea mays
  Clone ID: MRT4577_52003C.1
ctcgtcggtcgtcgcaacacactatactgactcgtattagacaagctctcgatctcaccgacaccgaggaagaacagatcaatagccctcgagcacggattcgcgactacatgccacagctatgactagtttggggcccacaggaccacagcccaggaagcc

SEQ ID NO: 132151 - DNA, 849 bp, Zea mays
  unsure (1)..(849): unsure at all n locations
  Clone ID: MRT4577_52004C.1
acgttcccagcagcgaccgccacctccgccgactcctccctcaacctttccccaccatggcgtcgccctccgtcttcgccgggatcgcgcagggcccggaggaccccatcctcggggtgacggtcgcgtacaacaaggatcccagccccgtcaaggtcaacctcggcgtcggcgcctaccggaccgaggaagtgaagcccatggtgctgaatgtggtcaggcgcgccgagcagatttcaacaagttgagtgctaagcttatcttcggtgctgacagtcctgctattcaggagaatagggtggctactgtgcagtgcttatcaggaactggttccctacgagtgggaggtgaatttcttgcaaggcactatcatgaacgcacaatctacattccccagccaacctgggggaatcacccaaaagtcttcactttagctggcctgactgctaggagttaccggtactatgatcctgcaacttgtggactggatttccaaggactcttggaagacctcagttcagctccctcaggcgcaattgtactgcttcatgcatgtgcccacaaccctactggtgtcgacccaaccttggaacagtgggaacagatcaggcagcttatgagatcaaaagcattgctgccattctttgacagtgcttatcaaggatttgcaagcggaagccttgacaaagatgcccaatcagtgcgcatgttcgtcgctgatggtggtgaattgctcatggctcanagctacgccaagaacatgggattgtatggaaagcgtgttggtgctttagcatcgtttgtgggagtgctgatatagctgttaaggttgaaaagtcacttaagctt

SEQ ID NO: 132152 - DNA, 227 bp, Zea mays
  Clone ID: MRT4577_52005C.1
ggttagacaaaacaccatacttccccattacataataaattatcccattttcccaatatccatcattcaaaaaaaaaatcatcgcgtccaaaaccacgcaacaaaaaccaaatactctccacccaattaaaaagaggccggcacaaaaaaaaaataacactcgccaacttccctcttaaaaagagaaaaaatagaaaacaatttcatccccccagaaattacaaaaa

SEQ ID NO: 132153 - DNA, 834 bp, Zea mays
  Clone ID: MRT4577_52006C.1
ccccacgaacatcagcagcgaccgccacctccgccgactcctccctccaacctttccccaccatggcgtcgccctccgtcttcgccgggatcgcgcagggcccggaggaccccatcctcggggtgacggtcgcgtacaacaaggatcccagccccgtcaaggtcaacctcggcgtcggcgcctaccggaccgaggaagggaagcccatggtgctgaatgtggtcaggcgcgccgagcagatgctgatccaaaacgagtcacgtgttaaggagtacttgccgatcactggattggcagatttcaacaagttgagtgctaagcttatcttcggtgctgacagtcctgctattcaggagaatagggtggctactgtgcagtgcttatcaggaactggttccctacgagtgggaggtgaatttcttgcaaggcactatcatgaacgcacaatctacattccccagccaacctgggggaatcacccaaaagtcttcactttagctggcctgactgctaggagttaccggtactatgatcctgcaacttgtggactggatttccaaggactcttggaagacctcagttcagctccctcaggcgcaattgtactgcttcatgcatgtgcccacaaccctactggtgtcgacccaaccttggaacagtgggaacagatcaggcagcttatgagatcaaaagcattgctgccattctttgacagtgcttatcaaggatttgcaagcggaagccttgacaaagatgcccaatcagtgcgcatgttcgtcgctgatggtggtgaattgctcatggctcaaagctacgccagaacatgggatgtat

SEQ ID NO: 132154 - DNA, 146 bp, Zea mays
  Clone ID: MRT4577_52007C.1
gttgttgacttttgttccaaatgtttgactgaaacaacaaactccgaatgaacatgtataggaaaacagccatgcggcgaaggcaccatctgtctgaaaccccataaaacagagaaaaagcaaaagaatcaagtacacaatcactc

SEQ ID NO: 132155 - DNA, 1029 bp, Zea mays
  Clone ID: MRT4577_52008C.1
acgttcgcacccctcgattccacaccagcacttggcacgcgcccgagacgctcgtacgggccggcgcaccctagccgggccgcgatgcccacggctaacgtgcgcgcggcgcagcctagcgccgaccgcaggttaagtacgctggtgcgccacctgctgccttcttccccacgaacatcagcagcgaccgccacctccgccgactcctccctccaacctttccccaccatggcgtcgccctccgtcttcgccgggatcgcgcagggcccggaggaccccatcctcggggtgacggtcgcgtacaacaaggatcccagccccgtcaaggtgaacctcggagtcggcgcctaccggaccgaggaagggaagcccctcgtgctgaatgtggtcaggcgcgccgagcagatgctgatccaaaacgagtcacgtgttaaggagtatttgccgatcactggattggccgatttcaacaagttgagtgccaagcttatctttggtgctgacagtcctgctattcaggagaatagggtggctacagtgcagtgcttatcaggaactggttccttaagagtgggaggtgaatttcttgcaaggcactatcatgaacgcactatctacatcccccagccaacctgggggaatcacccaaaagtgttcactttagctggcctgactgctaggagttaccggtactatgatcctgcaactcgtggactggatttccaaggactcttagaagacatcagttcagctccctcaggcgcaattgtactgcttcatgcatgtgcccacaaccctactggtgtcgacccaaccttggaacagtgggaacagatcaggcagctgatgagatcaaaagcattgctgccattctttgacagtgcttatcaaggatttgcaagtggaagccttgacaaagatgcccaatcagtgcgcatgttcgtcgctgatggtggtgaattgctcatggctcaaagctatgccaagaacatgggattgtatggagagcgtgttggtgctttagcatcg

SEQ ID NO: 132156 - DNA, 359 bp, Zea mays
  Clone ID: MRT4577_52009C.1
accaagcttttacctgaacaatggaagcaaaggtagggaaattcttcgattcggtgagtgagtgttcttctccggttcagatcagctttcttggtgcgatgctgatatcattgcaggatgtgaaaaggaggctgctgaggctaatggttctgatgagtcaaaaaacgaatgtctcacgcgtttttcatgggctcttgttcactcacgacgaacagaagatatagaacgtggtatagctatgctcgaagcttctatagccagcactaccgatccactgaaaatgcgagagaagctttatcttctggctgttgagcatttcccaagaggcgattcttcacggagcagttagcttgctgtgc

SEQ ID NO: 132157 - DNA, 399 bp, Zea mays
  Clone ID: MRT4577_5200C.1
ttctcgagggagcagctgcagcatgtgtcgggtatccagtgcccccagtagcaaccatcctggcacaaaggatttatcggacgagacacagggttcgcggtccatgctgccgtgccgccctcaattttcgctgtggaaataggagattggcagggggcaccacaccattcatcttcgtctcaccgccaggaggaccagcgcatcgagacgggaccaggtgggcctgccgtgttgtcatcatggtcagtccctcctttggttgctctatggtcctcgactgcaacggttactgtacggagaaagaaaaaactatcggatgggcactcctgtcagcagcaggtcatcaattcgcaaatgcacttgtccttgtgcatgatcactgctgattctgagcgcctt

SEQ ID NO: 132158 - DNA, 119 bp, Zea mays
  Clone ID: MRT4577_52010C.1
ctccccctccccgatcatcgcaggccgatcaatcggcggttccgccggcattgggccgaagaatgaccacatcgactggaagagcggggttctggcctacttctctcatggggccttct

SEQ ID NO: 132159 - DNA, 197 bp, Zea mays
  unsure (1)..(197): unsure at all n locations
  Clone ID: MRT4577_52011C.1
tgttcgctatggtctngacatctttaaagattactatctgtgaaatgttgaactattggaatctgaaagatgatatcttatcggtgaaatactccgtttgaatccggtatataatatacctgattactacttattcagtactatggatataaatattcccgtttcggcattagcacacccagtatataatattattt

SEQ ID NO: 132160 - DNA, 4567 bp, Zea mays
  Clone ID: MRT4577_52012C.1
atgccgtggagcatgagaagccggggcaactggaggatcgagctatctacgaggaaggggcaggtggattggaggagttatgtgccatcaccatttatgggagtggagggctcgcggtgtcgacatgaagaaggggttagggtcgatgactgtgggccccatgtgcgactgcctggagaacctagggacgagaagggaagggttcttggggggagagggaagaagatggcgcgcaatgcggtggacaaggcgacgtctatcgatgcgcagctgcggctgctggccccgcagaagctctctgacgacgacaagcttgtcgagtacgacgccctgctcctcgaccggttcctcgacatcctacaggacctgcacggcgaggacatcagggagacggtgcaagaatgttacgagttagctgctgagtatgaaaataagcttgaccccaaaatgctggatgagattgggaatgtgctgaccagcttggatcctggagactccattgtcataaccaagtcattctcacacatgctgatcctggcaaacttggctgaggaggtacaaattgcataccgcaggagaataaaactgaagaagggtgactttgttgatgagaactcagcaacaactgaatcagacattgaggagacactaaagaggcttatgcatcagcttaagaaatcccctctggaggtatttgatgctctcaagaatcaaactgttgacctcgtcctgactgcacatccaactcagtcagtccggagatcattgcttcaaaagcatggcaggataagaaactgtttaactcaactttatgcaaaggacatcactccagatgagaaacaggaacttgatgaagcacttcaaagagagattcaagctgcctttagaactgatgaaatcaggcgggcgcctcctactccgcaggatgaaatgcgtgctggaatgagttattttcatgagactatatggaagggtgtacccaagttcttacgtagggttgacactgctcttaagaacattggcataaatgagcggttgccatataatgcccctatcattcagttttcttcttggatgggtggtgaccgtgatgggaatccaagagtcacgccagaggttacaagggatgtatgcttgttggctagaatgatggctgctaatttgtataatgcccagatagaagacctgatgtttgagttatctatgtggcgatgcagtgacgagttacgtgtaaaggtcgatcagttataccattcctccaagaaagatacgacaaaacactatatagagttctggaagcaagtccctcccagtgaaccttaccgtgtgattctgagtgatgtcagagataaactctataacacacgtgaacgagcacgccacttattagctagtgggttttctgaaattccagaggaagcaacattcaccgatgttgaacagttcttggagcctcttgagctctgttacagatctctgtgtgcctgtggtgatcgctctgttgcagatggaagccttcttgacttcttaaggcaagtgtcaacatttggactatcccttgttagacttgatatcaggcaagaatctgaccggcatactgatgttatggatgctataactgaatacctcggtattggatcataccgtaaatggccagaggagaaacgccaagaatggctactatcggaacttaatggaaagaggccgttatttggtccggaccttcccaagtcagatgagattgctgatgtactagatactatgccaggggaagaacctccccagcgagacgctcggcgacggaggaaccgacgctggaatattcgacgacatcacgaagcttgggagcaggacccagcgcagcccgtatcccgggatgaagtctcagaagtaggagaaacttctgacgagcgagtctttagagaaaggaggaactctcgccgatgttatcgccggcaagctcaagatcgagatcgagagcaagctgagcaggatgcgaggttacgccgagagaaccctctcttcgcgcgaaacctgaactatgacttcgctcgtgcaatgaacacaccgagtgaagtcggaggagtgttggctcggatagctgatggcctcccccggactcccgatgctgaaggctatctgcggctgctcactcgggcagctaatcatcttctaccccccgctcatcctccgagcgatctgcagcacgccataaacagtcggcgagatgcacagagctccatcaacgcttcgcgcgaacgacgacatgaaaatgagatacgacgccgaggggagtacgatcgggaccatggtgtttcggcgcgaagtcgcgccaccggagttgagtcggcgacggcttcaactggtggcacgacccggggacggtcgagacggaacgtcagcaactcccctccccaggaccggcaccacaaccgtcgacaggacaaccagtggccgtttttcagggtgacgatagacctggtcgagatggtgttcgccaagggtgatcctggcatcgcggcgctgtacgacaagcttctggtttcagaggacctgtggccattaggggcgcgtctcagagccaactacgaagaaacaaagcagcttctcctgcaggtcgctgggcacaaggaccttctggagggcgacccgtacctgaagcagaggctgcgcatccgtgactcgtacaccacggcgctgaacgtttgccaggcctacacgctgaagcgcatcagggaccctggcttccaggtgaagccgcggccccacctgtcgaaggacatcatggacatgggcaagccggcgtcggagctcgtgaagctgaacaccaccagcgagtacgccccggggctggaggacaccctcatcctgaccatgaagggcatcgctgccgggatgcagaacacgggctgaagccagtgtgcctgtcttctttctgtaggggatctcatatcatatggcgtgaaccgctgaacgcctggatatgtggggattagttacaccctgttgcactcgaatttatgccccgcttggccgcgccctggtcgcatgactttccacgtattagctgaacttccatcagacagctttggtgcatatgtaatatctatggcgactgctccctcagatgtccttgctgtggagctcttgcagcgtgaatgccatgtgaaaaaaccactgagagtcgttcctttgttcgaaaaactggcagatcttgagtcagcaccagcagcgttagctcggctgttctccgttgaatggtacagaaacaggatcagcggcaagcaggaagtgatgatcgggtattcagattctggcaaggatgccggtcgtttctctgctgcttggcaactgtacaaggctcaagaggagctcattaatgtcgctaagctgtatggggttaagctaaccatgttccacggacgaggcggaactgtgggaagaggtgggggccctacccatcttgctatactgtcacaacctccagaaaccatccatggatcacttagggtaaccgttcaaggcgaagtgattgagcaatctttcggagaggagcatttgtgctttaggacactgcaacgtttcacggctgcgacccttgaacatggtatgcaccctccaatttcgccgaaaccagaatggcgtgctttgatggatgagatggctatcgtcgccacaaaggaataccggtcaatcgtatttgaggaaccgcgctttgttgaatatttccgcccttgcaacgccagagatggagtatggcaggatgaacatcggaagcaggccatcgaaaagaaagccgagtgcgggcatcgagtcgctgcgcgcaatcccttggatcttcgcttggacgcagactcggttccacctgccggtgtggctgggtttcggcgcggcgttcaagcatgtcttggacaaggacatacggaatctccagacccttcaggagatgtacaaccagtggccgtttttcagggtgacgatagacctggtcgagatggtgttcgccaagggtgatcctggcatcgcggcgctgtacgacaagcttctggtttcagaggatctgtgggcattaggggcgcgtctcagagccaactacgaagaaacaaagcagcttctcctgcaggtcgctgggcacaaggaccttctggagggcgacccgtacctgaagcagaggctgcgcatccgtgactcgtacaccacggcgctgaacgtttgccaggcctacacgctgaagcgcatcagggaccctggcttccaggtgaagccgcggccccacctgtcgaaggacatcatggacatgggcaagccggcgtcggagctcgtgaagctgaacaccaccagcgagtacgccccggggctggaggacaccctcatcctgaccatgaagggcatcgctgccgggatgcagaacaccggctgaagccagtgtgcctgtcttctttctgtaggggatcatatcatatggcgtgatgaaccagtgaacacctggatatgtggggattagttacaccctgttgcactcgaatttatgccccgcttggccgcaaaattgtcgcatggttttcat

SEQ ID NO: 132161 - DNA, 225 bp, Zea mays
  unsure (1)..(225): unsure at all n locations
  Clone ID: MRT4577_52013C.1
ggggggcgccgcggtgcgctcccctctcctcgtccaccaccgcgtccccctggtacatcccagcgggggaggctcgctccgggtcggctggcccggaattgggcccggacgggaggggcggcggtggggcgccccggttggggctagggttttggggggctagtnnnaggtctaggacttntncacatgtttntaagatagaggtggtgagttgtttaagttagt

SEQ ID NO: 132162 - DNA, 420 bp, Zea mays
  Clone ID: MRT4577_52014C.1
caaaaatcggaggcgcgcttcatttcgttggagatggatcaagctcagttcgaaggctggcgtcctgaagtggagaagcgccttgacaacatcgccctcgaactacatcgagccaacaagttcatggagcgcggttccatggcaacggacctctctaaaccgggtatcataccatcttcgacgtcggcgttcgggcgcacacagatcggaaatcacttcgccgacgggcctgacggcaaccgctttgctgacaaccaccgggatcctgggtttgggagggattctccccaaccccatggcccggtcaagggaaccattccctgtgggatcaaatgtccgttccaggcctggaaggtccaggattttgagctgggaacaaaaccaccaggacattgtgtctgatcataccaaaggtggaac

SEQ ID NO: 132163 - DNA, 239 bp, Zea mays
  Clone ID: MRT4577_52015C.1
caccttgcaacacacaccgtgggattcgctctcaacactacctcaccactggggacgccaagattttacctcctcatgcgcctcgctccctcttcatgagctgctcacacgacaatattatttcacagctcacaagctcctatagctgccttatttcacacataccttccctcaattattgcttgggcttgtgacaacccagctttccaaccatctaggcttaaacaagccatggcggc

SEQ ID NO: 132164 - DNA, 386 bp, Zea mays
  Clone ID: MRT4577_52016C.1
ggtgtgttgggtttttttttttttttcttgttcttttttgagtttgttttccaaaaggaaaacaataatgggggcgggggtcaagaatctgtgaaaccccaaaaaaaccccccccccgcaccgggggaaaaggggaaaagaaaacccggagggccccaagcccccaaagagggaagagaaaccccagggaaaggaacaacccccaggggtccgccgatctggggcgcaaaacggggccctggggaacccgcggtaaggggcccaaaaagggcacggaaaaagaggaaacaattggccccaaagaaccggggccccccggcccggggggaccccccccccacccggggggccgcacctaagaccaaaaacattttgggggaaagggg

SEQ ID NO: 132165 - DNA, 465 bp, Zea mays
  unsure (1)..(465): unsure at all n locations
  Clone ID: MRT4577_52017C.1
cgtagcttcatcttagcggccgcccttcttttttttnnnnnttttttaactatatccttctttgggccgtttttttttttttttttttcttttttttttgtttattttttttttttttttttccgaagtacctgaatttgcaaaaaaattcattcgggggccaaatcgagagttttttttgagagggaggaaattccccccccttaacgtgaaacacccccccttttttttcctttttttgggccccaagaaggccccctaaccagacttttttattttccagctggttttgcccttcggggacttaaaaaaaatttccctttttcccagtttagggttccccctttcttttttaaaacccaaaaaacccagttttagtccccttttttttttaaaaggttctaaaattttggtttttgatttgcccagggggcattttcccattttttgaaccaatccccccct

SEQ ID NO: 132166 - DNA, 186 bp, Zea mays
  Clone ID: MRT4577_52018C.1
ggcagtctagcaataagctcatcgactccatattggagaactcgacaccatgaaggtgcggatcgttgcccttgctcttctggcgctcgttgctagcgcctccttcagtacaagcggctgttgtggttgtcaaacaccaccgtttcatctaccgtcttcgttctatatgctctctttctttctatc

SEQ ID NO: 132167 - DNA, 267 bp, Zea mays
  unsure (1)..(267): unsure at all n locations
  Clone ID: MRT4577_52019C.1
ggaaagctggcacgcctgcatgtaccggtccttaattcccttttctacccactcttcctttccatttcgatctcncaaccaccttttggtttgttctaaaaagtatcgaatagctacaaaanatattcantttgcactttcattggacaccaactcaagtcctcaccaaataatatcttgtgagggtgatttttattttttttttgaaaaattaaaaataacacgcttaaagccctataaagcttttataaatatctgcttttctta

SEQ ID NO: 132168 - DNA, 280 bp, Zea mays
  Clone ID: MRT4577_5201C.1
agttgcggaaggagatcgtgggcaagaagaagggccggcgacgggatgccgcggttgggctgtttgtcttcccggcgcagtctcgcgtgaccggtgccaagtactcctaccagtggatggcgctggcgcacagaatgggtggcatgtgatgcttgatgctggtgcacttggccccaaggacatggattcactgggtctctcgctattccggccggacttcattataacttcgttctacagggtctttggtgcagacccaactgggttgggttgccttctg

SEQ ID NO: 132169 - DNA, 540 bp, Zea mays
  Clone ID: MRT4577_52021C.1
tgcaggaattcggcaccaggcaagatccctcttctattctatcgttcaatacaaatatttcaagagacttgtgtttttttgcccttccgaacagtgtcttctgcactaaaagaaatatttgtgattttgatttgacccagatagtctacatattcaatgagtaaacgaaagccggccgggttggcaataaattagagtctctgatgcgcttgtttcagtagcgtcttcagcgctgtacgttgcctagaacaattgggcaaagattctggcacttccatctattcttatggcttgtgcattcgacttcccgacagtttgtgaataaattaacaaaaaaaaaaaaaaaaaaagcggcccccatctgtcgatttccaggaatcttggttaattattgtttactcaaaattttgtaagtagaataaacgtctaaaatcttggcagtttggcactcaggttttaataaattatctttagttttgggagtaaatttcttcgtttcagggacaaactaaattcaattttgggaatcattaagagtac

SEQ ID NO: 132170 - DNA, 667 bp, Zea mays
  unsure (1)..(667): unsure at all n locations
  Clone ID: MRT4577_52022C.1
ggnaaagcatctacttggattgccgtgtactggtcgagtatgacattaggataaagagagggcagacaaggcaagaggatttgccggtcatcgatggggctgcaaccttcagtgagctcacatatatacgtggtgcaattaccaatcggatcagtggtgattctggtgggagcatggacatagcgcgcgcgctctttcgtaattcagtggaggccacagtagaagtttgggtatccaaccttggtaggtgtgtcagtggcttagacctgtttataactggttttgttggtcgaatacctgaagaaattaagatcttccgtggcagtattggtgacctatgtgtcgtaaagagatttgtggtggctgtgagattgaattctgtcttatttctactcttcaaggttccagcttttgggacagatcctatctgtaggtttgccttcagggcagtagcacacggatgcatttctggctaccgagaactcaattcctgtactgtagacgttaaagtgacttggtcaaacctgtactagccgtctagctgtatgtgagcactggatccatagtgcaagcttaattatcagaagaatattgatgtaatcttcttatgtgttcatgtcttcatgtgtagaagttttctaatccaatatggtctaatgttgttttt

SEQ ID NO: 132171 - DNA, 327 bp, Zea mays
  Clone ID: MRT4577_52023C.1
gtccacttgtagatcaagacacgcgctcgctttgcactaacatcactggacactggctatactcatacaataccctaaccaagatgttacatacacatacgatgctggcaatcgtggcttatggaaaggactcgcaatacttgaagacgctaacccttcgtagatttacattgggggcccagaggagcaagacctcgtcgagatatccgggcgggcaatcttgtatcgtggggcaacatgcaaggattatggataactaacattgcgctgccacgatgcgaatttttggactatccagtggaacacacatgcgcggtagtttgagga

SEQ ID NO: 132172 - DNA, 487 bp, Zea mays
  Clone ID: MRT4577_52024C.1
ggccgcttttttttttttttttttatttttttttttttttttttttttttttttttttttttcttttttttttttttttattttcttctttgtttttacaccattccttcactcactcatagcctgaatttattttgctgaaagcacaccgtaccggagcacgcccgaagcggagacggaaacgggcagtcatttcccgaagagcgacaggaaccaccacacccccccccccccggggggcgcgggggagcaaaacggcgggggggcgaccagcggagggcggggcagcaagctcacggcggagccttccaaaggggcccgctccaccagcggggggggcacgaccacgccaaagctcggggggctgcacaggaaccagaggccccccccacacggctcggcggagagcgcgtactgggagtcatcgtcaaacaaaagcacccaatagcccccggcgacggggacgagggaaaaaaagggggggggg

SEQ ID NO: 132173 - DNA, 176 bp, Zea mays
  Clone ID: MRT4577_52025C.1
ccggccgggttttccaggattgttgcttcccttttgctttctcatctgtctgctctggaaaaaggaataacattcttgttcaaatccatcccgctccacgttgttggtgttgagaaacctcctcttctctacaagcattcgatgaactgttgaaaaaaaaaaaaaaaaaagcggcc

SEQ ID NO: 132174 - DNA, 843 bp, Zea mays
  unsure (1)..(843): unsure at all n locations
  Clone ID: MRT4577_52026C.1
ccggccgggcacgtctagccatgaggtgagccggcgcggcccaacggcctgtggagacggctgtcagacatgaagctctggctcccgttcctgaggaacatcggcgatgacagcaccaggggcagcgacgtcggttcggccttcgctgaagatcacaagcctgcctggaggtgcttcagcttccaggagatttcagtggccactaatgatttccacccagacaacatggctggaagaggaggctatgcagaagcatacaagggcaccctagctgacggtcatcttgtagccgtgaagaggctagcaaaaggcaccccgagcgagcagaaggaaaaggagttcctggcagagctagggatccaggggcatgtatgccatccaaacacatcctaccttcttggatgctgcgttgagaatgggctgtacctgatattcgagttctgcacgaatggcaccctagcatcggcactgcatgggaagggtgggagaacccttgaatggcctctgaggtacaagatcgcggtgggcgttgcgaggggcttgcagtacctgcacatgttctgcaggcaccggatcatccaccgcgacatcaaggcgtccaatgtgcttctcggccatgacttcgaacctcagatttcggacttcggattggccaagtggctcccaaagcagtggactcaccattctgtcgtacccatagaaggcacgttcgggtacttagcaccagaatacttcatgcacggcattgtcgacgaaaagacggacatcttcgcctttggcgtgctgctgctggagatcgtcaccggaaggagacccattgactgctccnagcaaagccttcta

SEQ ID NO: 132175 - DNA, 711 bp, Zea mays
  Clone ID: MRT4577_52028C.1
tgccgacactatgatttttcatgacctcctgtgtgttcccacttcccgctcctctcctgcaggtgccggtagcggatgcggcgcagcatatgcgctaccatggctttcgtcatggcgacttcgaagttcggcgccccttcgcgatccgactcccggtcgctccggtcgccggcttactgaagctgcacaacggcaacctcacctcatctgatccgctgactgcgaccacaccactccatcgcctatcgctgctaatgagcgaaaggtacaagcattaggggctcataggaattatccataatgctgctgaagcgcagctagtgaaatcatgccactaagtgccggagatcggaccagcaagtcgcgttgtcctactcgtaaaagacacgagtactacctgctttggagcttcttgcctctcggatgaatcatcgtgttacgcctatatgtgttttggaccaccatccttaagtgtgatcacaagaccgacgatgacactacctggaatcttgctataggataatgtaattcaatagatcgcactgcctgctatatcttgtcccgctcaacgttctcctccccaggaaccatcacagatatactgcatctactcgcacacatttcttcagaggatatcacagacgtgcatgttggcctgttctcggaccacctttacacatatgtgcggatgacttccagtctctgctatct

SEQ ID NO: 132176 - DNA, 328 bp, Zea mays
  unsure (1)..(328): unsure at all n locations
  Clone ID: MRT4577_52029C.1
acccttccgttaccgattccgtaagtccatggttctattgtgtgttggaaaatatgatttcgctcttcatgtattcttctttttttggatgccaatgaggcaatgatctatatgcaaaaggctggattactccacaggatgaataaaccattatttcacactcgtagcattcatcagttgatacttgataattctgtggtaggagtatgtctgtaatggaacgcttgatcatcgatggtgaattggcacaccatgtgatgcattgaaatccttcttttgtaccaaatnaaaaaaaaaataaaaaaaaaataaaaataaatttaatata

SEQ ID NO: 132177 - DNA, 644 bp, Zea mays
  unsure (1)..(644): unsure at all n locations
  Clone ID: MRT4577_5202C.1
tccgccctcacgcaccagaacccachccagcgcacgccccsggascgggcctccccgaagccscrccagagcatcsccrtctcaccrgtartcacccaccsaascrgcctcacccccccmacattagcrttcaaasscacacasttaacaktccccccaacaatgrtsccgccsccgcatcaaagcataattcccaaagttctscttcttgccarcaaaccccacaacatcaacmaccttcacaatrktacccccaaacaccttctsaccaaacaccccctcaacacactccatsctcccagcaaacaacctattcccagcactctcactsccmcmcagctccvtatcctcccccacccccmtcaactcacccatcaccaacccctcctcctccascttcacacccccctscttatccacctccttaaacatcacscccmcccccccacacaaccccaccctccccctactattctaaaaactcaaccccaccaccaccaccascasccccttctacctacccctaaactcacyaacytccactcatcacccccaacactacacaaccacccccccatctccccracttaacccccacycttctaccactnacaatctttccttaacttccccacaccttccta

SEQ ID NO: 132178 - DNA, 189 bp, Zea mays
  Clone ID: MRT4577_52030C.1
agtcggtgagcgccggcccgcggtcaagatgctgatagggcattatgaagtgtacgacggggcgaatgcggtacatgcggcatggggagagtctctcatacagacgatcagcttatgtggactcgatcaccgataccttcacgcaaacggtgttaagcacggactggaagcactagagcgcggtcggaa

SEQ ID NO: 132179 - DNA, 606 bp, Zea mays
  unsure (1)..(606): unsure at all n locations
  Clone ID: MRT4577_52031C.1
aatgttcagctcgcgattcctatcagagcatttgcgaagattgacttctagcgtggatacaccactacactagaacttcattgtccgccgagacgacccgcttcatacaggaacatatggagcatgctctaggacatatcctattctgcctgacctactgatcgctgcctttgagcgcaacagactcgcaggcacgaaaaggcatcgtggtgatccagatggtgccacattatcttcaccccatttactgagacgacctcgttactacatgcgacactgactgaatgaaatgaatgcgcttcgtccattagcaactgtcactctgatcccactcgttcagatgtcatcctacagatccgtgtgtgaactatacaatacttgatcgtacatgcatccttgctctggaatcataaatacttcgtacataagaatgcacacactggaacgttcgtccacatggctaccttcagatgtcaaatatgtagccaaatgatgatgatagaaaaggacgctagattgctcgagctctccctttatgatacctttagtgagacccaattgccgactctcgcgcgatcatggccactatctaggtcctgtgnatag

SEQ ID NO: 132180 - DNA, 450 bp, Zea mays
  Clone ID: MRT4577_52032C.1
cccgggtcacatccactcttttttgcacacgagcacgcttattccgccggggtctcgcatgtgccttatcgaacactccttccaaccacctgctccagctacattcatgcacctacaatgagactacataccggatcgctatacgcagacgagggaaagttggtcatccaatgccctgttcatgtaggcattgatgcggatcgatccgcctggtttgaacaggacgagagtgtacatgacacagcatgacaaggtacgagatcttgtccacacagttgccgctacaggagcaacctgcttttaccaagaaatcctttgtggcttacatctacagaacatcaagaatctcactggtgggttggagctcgagagagccggtgagttcaaaaagggggtcgaggtacgcaaccaagtttctccttatcaagctgaaggacccgcaattttttg

SEQ ID NO: 132181 - DNA, 452 bp, Zea mays
  Clone ID: MRT4577_52033C.1
ggggccaaaatataaaaaaggtttgggggaccagtttaaaaccgcccaaaaccggggaaaaggctaaaaaggttttgggaaggggtgggaaccaaccccgggggaaccaaaaaaaaaaaaggggggccaggttttaaaaaggttccccccaaattaccattttttaaaaaaaatttttcccccgttcaaaaggacgcccttaaaagcccccctttttaacccttttttttttgggggaccccagggcccaggccaacccggggggggccccctttggcccaattccttctttccttagggcccaggggccaccgggacctttgggggggggatcagccctttttttttttttatcccccccttggaaaaaattttaaccatttggttgggggggggatttgggagcccttaccactttcagccccaaaccccccaaaattgaaaggctcccg

SEQ ID NO: 132182 - DNA, 227 bp, Zea mays
  Clone ID: MRT4577_52034C.1
cccacgcgtccgaaaaaaaaaaaataaaaataaaaaaataaaaaggtatactatataaacggatggtgcatacaacagcgacggtaacaatataaaaattcttaactagagaaaactaaaatagggccctttcgttctaagtattccaacttatactactagtaaattcatggatttacctcacttattgggctactaaaacatattcaaatatgccattttttaaa

SEQ ID NO: 132183 - DNA, 720 bp, Zea mays
  Clone ID: MRT4577_52035C.1
gacgcgatgattcccaacctctccgccctccagaaccacttcggcgccgccgccgccggcagcgacgacctcggcgccctcttctccgccgacgccgccgaccagcttgccctcgagttccccacctgcaacgacttcgatgggttccagaaggcgaccaaggagatggtgaacaacaagaagggaaccaccacgctctccttcatcttcgacaagggcgtcatcgtcgccgccgactcccgggccagcatgggcggctacatatcttcgcaaactgtgaggaaaatcatcgagattaatccctacatgctgggaaccatggctggaggtgctgctgattgccagttttggcatagaaacttgggggtaaagtgccggctccatgagcttgccaacaagcgaaggatctctattgctggttcttcaaagacgttagctaatatcctttactcgtaccgcgggatgggactttcaatcggtacaatgattgctggatttgatgaaactggtccgggattgtactatgttgacagtgagggtgcaaggctcaagggaagccggttctctgttggttctggctctctatatgcttatggtatcttggatgagggttacaaattcaacatgtcagttgaggaagctgctgagttagcacggcgggctatttatcatgcaacattccgtgacggagccagtggtggctgtgttagtgtctactac

SEQ ID NO: 132184 - DNA, 1912 bp, Zea mays
  Clone ID: MRT4577_52036C.1
aattcggcacgaggcgcacacctcagtctcctgccgtgcgtagtgtgtacgggccaggcggcagagctagctttcactacactcagtggccattgccgttgctagctttcactagctcttagctgcaatgtcggcggcggcgtcgcagagtagtgtcaaggcaatggcggcggccgcagccgctgtggcaatgctgctctcggccgcggcggcggtggccgcgcagcacgattacggcgacgccctgcacaagtgcatcctcttcttcgaggggcagcgctctgggaggctcccgccggaccagcgcctccgctggcgccgcgactccggcctccacgacggcgccgcggccggggtggatctgaccggagggtactacgacgccggcgacaacgtgaagttcgggttcccgatggcgttcacggcgacgctcatgtcgtggggcctgatcgacttcgggcgcagcttcgggccccacagggaggaggcccggaaggcggtgcggtgggcgacggactacctgatgaaggcgacggcgaagcggaacacggtgtacgtgcaggtgggcgacgcgttccgcgaccacgcgtgctgggagcggcccgaggacatggacaccccgcgcaccgtgtacaaggtggacccgtcccacccgggctccgacgtcgccgccgagaccgccgccgcgctggccgccggctccatcgtcttccgcgacgccgaccccgcctactccaagcgcctcctcgaccgcgccgtcgccgtgttcgagttcgcggacaagtaccggggcccctacagcggcagcctccacgcggcggtgtgcccctgctactgcgactacgacgggtaccaggacgagctgctgtggggcgccgcctggctgcacagggcgtcgcgccggcgggagtaccgcgactacatcaagcgcaacgaggtggcgctcggcgccagcgacgccatcaacgagtttggctgggacaacaagcacgccggcatcaacgtcctcatctccaaggaggtcctcatgggcaaggacgagttcttccggtcgttccgggagaacgccgacaacttcatctgcagcctcctcccgggcatctccaatcacccacagatccagtactccccaggcgggctgctcttcaaggtcgggagcagcaacatgcagcacgtgacgcagctgtcgttcctcctgctggcctactccaactacctgagccacgccggcgggcgcgtctcgtgcggctcgtcgtcggcgtcgccggtgcagctccgccgcgtggccaagcggcaggtggactacatactgggcgacaacccgctgcggatgtcgtacatggtggggtacggcgcgcggttcccgcggcggatccaccaccgcgccagctcgctgccgtccgtggcggcgcacccggcgcggatcggctgcaaggccggcgccgcctactacaccagcccggcgcccaacccgaacctgctcgtgggcgccgtcgtgggcgggcccaccgacgactccgacgccttccccgacgcgcgcgccgtgttccagcagtccgagcccaccacgtacatcaacgcgccgctcatgggcctcctcgcctacttctcggcacatcccaacccagccgagtcgggcggcgactgaaaaaagcctagggagagtgatagatgacgaacgcacgcacgggcctgggtattttagatgggctttggtttgtcttgttcgggcccgattgttgcctggtgtatccgtagttccgtacgagtagttgtaactagttaaccagagccactcccttgcctgcaaaagaaagaccagggaagaggaattagtaggctccaagattgtattagctgttaaggttatatacgctagtagcaaggttaactgtgctacgtcgtctgcgtg

SEQ ID NO: 132185 - DNA, 449 bp, Zea mays
  Clone ID: MRT4577_52037C.1
cgtccgcacggaacgacaccagggcagctgccggtccggccaccagcgcccccgcccgctcgacgcgatacccgaccgcaaccaacggctgacaggtgtggtggcacgcagccacaagcacatcctgctcattgttcacacggtccactgcccttagctatataccacccctggcctctccctacatcgtcggcgctctcccgcacccggctaggccgggacgccctaccctcgactgccgccagtgacacctccacacacaaacacagattcgcgccatgttcggtgggcttcttctggatcgtcaaccacaatgtggcgccctagctgatgcgagacttaattcgacagttcgcccccgttaaacatggtcccccatgcaggctaaccctgcgctctacttcagcgccctggcttgcaacctgcgcttcggctacaactttgacctc

SEQ ID NO: 132186 - DNA, 868 bp, Zea mays
  unsure (1)..(868): unsure at all n locations
  Clone ID: MRT4577_52038C.1
agtccgaactttccagcttctagggctaccttcttcccttcatctccactcccgcacacacgccggccaccactagggttttgccgatccgccttaccccacgccggccaccactagggttttaccgatccgcctcaccccacgccggccaccaccagatcccctccgccctacgctctcaccgctgccgacgatggtgggatacgggatccagtcgatgctcaaggatgggcacaagcatctctcgggcctcgacgaggccgtcctgaagaacatcggcgccggccgcgagctctccgccatcacccgaacctcccttggccccaacggaatgaataagatggtcattaatcatctagacaagctctttatcacgaatgatgctgcaacaatcgtgaacgagcttgaggtccagcaccctgctgctaagctcctggtgctcgctgccagagcgcaacaggaggagatcggagatggagctaacctcaccatatctttcgctggtgaactgctcgagaaggctgaggagctcatcaggatgggactgcatccaagcgagatcatcattgggtacaccaaggccattaataagacgcttgagattttggatgatctagttgagaaaggctctgaaaatatggatgtcaggaacagggaggaggtcgtgttgaggatgaaatctgctgttgcaagcaagcaatttggccaggaggatgtgctgtgtccacttgtcgctgatgcctgtatccaagtttgcccccaaaacccggcaaactttaatgttgacaatgttagagtggcaaagctggttggaggcggccttcacaattcttctgtagtccgtgggatggttctgaanaatgacgct

SEQ ID NO: 132187 - DNA, 147 bp, Zea mays
  Clone ID: MRT4577_52039C.1
agcaccaggccgtatatcatctcgcagcaagcttgctacctgagcctctgttccatgtcgacaccgtctgcaccggcctgtcccaagcttcagtagtgagtcttgtagagcggttgtatcgtccgagcgttgatctgaaccagcgca

SEQ ID NO: 132188 - DNA, 528 bp, Zea mays
  Clone ID: MRT4577_5203C.1
tcggccgggctaggcccactatgatgtcgcctgcgctgccgcgtccatagttgccgcagcagactgatatggagggcttcatcctgagcgacgccactgaagtacgctcatagcactcccactgggatagccattatactgtgcgctaccttgcccgaccatgctccgggaggacgctgaggaacctagacatgagatctgcgcactacaaccaaagacagattgctagtgagaatgactagacagggtcatcacacaccacatcaactatgttagcgtagaagatgatatgggtaaagatgctgaccactccaatgataaggcaaaagatgtgcttagggtcaatgttgccaactatggaggttgatactgtacctgctcctcagaggtgtcgcagtgggctgaaaagcacagggacaaatgatgagtaatacgtgaatgccgatgccaccggtgaggacttcactagcgagccacttaagaagagaaggcccagttcggctgtactcgcatgaaggctgattatgc

SEQ ID NO: 132189 - DNA, 230 bp, Zea mays
  Clone ID: MRT4577_52040C.1
tcccgggtcgtccctctcgtccggcggtccgttgtccccggattgttctttttccttccatcgctgctaatctgatgcgtctttttcaccatgggcgggcatcgttctcttggttatcctctaccccaaagtcttgaaatgtgagtatgctctccgtggcgtgaccgtgatccatgctcagcgcttgctgcctcttcttccatcacaaactgggtctcttccttttgatg

SEQ ID NO: 132190 - DNA, 266 bp, Zea mays
  Clone ID: MRT4577_52041C.1
ccgcgcgtcgcggtgaggaacacgtctccaccgttgtagctatgccgtccaagggtccgctgcagtctcgttcaagtcttcggacgcaagaaaacagccacagctgtggcccactgcaaacgaggaaatgggctcatcaaggtgaatggacgtcccctggagatgatcgagccgcgcacgctgcagtacaagttactggagcctgttctgcttctgggcaaggagagatttgctggtgtggatatccgggtccgtgtgaagggtgg

SEQ ID NO: 132191 - DNA, 194 bp, Zea mays
  Clone ID: MRT4577_52042C.1
aaaccggcccttaaactcagacacaatcctttttgttaaaaaaccggcacaaaaccagggaactgctaactctccaaaaaacggggagaaaacagtttcctatttaaagggggagagcccaagctctgaggggtttctcacccaggccggacaaacagaggagccgaggtgctcggccctaaaaaagaagacca

SEQ ID NO: 132192 - DNA, 993 bp, Zea mays
  Clone ID: MRT4577_52043C.1
gccaaaaggatatgtccgtcttatgggtctaggcccgactcctcaagatgttggtactccaggattaaagtgttatgcaccaacaagacttcaaatggaggttatggctcgaaagaaagctgaaagtgacagggatgctctagagcaacgtgtttttgagttgcaggctcaaatggagcaaagggcacaacaagatagggatgcaaggttgaatgaaactggtgatgctggactagatgaaggggaggaagattatgtttctgaagatgatgttgatgacaacttacatgaccaggtgcatggtttaacctcatcaagaacaacagcacacaaaaaagaaccgcaccaaggagtaatgaaacttctcgctctcaacatgatgctcttgttggaaaagatgtcatattatatgccttgttgagatcagatcaacctgtggctaaaggaacaataatttcaactaaaccaaacactattcttgcgggccagtcccttgggagacaatgttgtgaagttattgtgtcttgtgtgttgaaaagagatgcacatttgcctcgtccctatgccaatatggaaactatgggtgatgccaacaagatgtcaattgcatggccatacaatagactaaagattaccaacaaggcatcaacaccacctgcagtttgaggtatttaacattcaattgaaatcaatggtaatgcatggtgtaaaaagctagctacttgaggacaagctgacatgcttcgaggacaagctgacatgcttcttttggtttcaagttcttttgtgggcaactttgtatctaatagtcatgcaatgttgcgcagatcgaataggcatgatggaaagcttttgtaatgtctaacccatatactgtctctgatgaccaattgggtatatttaggaatatttgtagcttatgactacaactcaattgtggatgtttaagtgctgccgatgaatctatgattatttgaaccttgtgactcattc

SEQ ID NO: 132193 - DNA, 1849 bp, Zea mays
  unsure (1)..(1849): unsure at all n locations
  Clone ID: MRT4577_52044C.1
cattgggtacctcgaggccggccgggcacccaccaacccaccatccccgatcgcccttggagatggagatggtcggcggcagcgccgacgccatccccggcctcttgtcatacggctgggccgggctctggtccacgctggcgagcctcctgttcctgtggtccatggtgcaggaccacctccctttccagctcgaggagcagctgtccgcactggcgcgccgcgccctcgccgccgtcaccccctacgtcaccatcaccatcgacgagcacgacgccgactccttcggccgcagcgaggcctacctcgccgcggaggcctacctgggcgccaccttagccggccgcgccagcaggctccgcgccgagctcccgggcggcagcgaccgcgtcagcctcgccgtcgacgaccacgtcgaggtcaccgacgccttccgcggcgcccggatgcggtggcgcaagacgcggacgctccgccgcggcaacgtgatcgcctggaacccgcgtgaggaggagcgccgcgcctactgcctcaccttccaccgccgccaccgcgcgctcgtcgaggccgcctacctgccgcacgtcctcgccgagggccgcgccgccaccgtccggaaccgccagcgccgcctctacaccaacaacgccagcggggactggggcggcggcgacgacgggccccgcgcctggacgcacgtcaagctggagcacccgtccacgttcgccacgctcgccatggacccggacaggaagagggaggtcgtcgacgacctcgacatgttccgcgacggcagggactactacgcgtccgtgggcaaggcgtggaagcgcggctacctgctgttcggcccgcccggcaccggcaagtccaccatgatcgccgccatggccaactacctgggctacgacatctacgacctggagctcacggcggtgaagagcaacactgagctcaggaagctcttcatcgagaccaagagcaagtccatcatcgtcatcgaggacatcgactgctccatcgacctcaccggcaagcgaaagaagaagatccgggacaagaacgatactaggaagaagaagaagaaggcgccgtgggaagaagaagacaaggacgaaggcagcaaggtgactctttcagggctcctcaacttcatcgacgggctgtggtcggcttgcggcggcgagcgcatcatcgtgttcaccaccaaccacaaggacaagctggacccggcgctgatccggcggggcaggatggacatgcacatcgagatgtcctactgctgcttccagggcttcaaggtgctcgccaagaactacctgggcgtgcaggagcatgacggcgagctgttcggcgacatccgtcggctgctggaggaggtggacatgactccggcggacgtggcagagaacttgatgcctaggtccaagaccaaggacgccgatgcctgtctccggaggctcgtcaaagcgctcgaggaggccaaggaggcggcgttgttggcggccaaagccaaacaactggacgggatcaaggacgaggaggggaaccgacgatgaagacgacagcgatgacgatggcagcgttaccagcagaggtcacccctccgacggtgacgaaaagagtgccaaaaaagaggaaatgtaataaaaaagtttaaaacctataaaagcctgaaagctaggtgaggatacttgacttgagcattcctttccaaagctggtggtacctagaattacttttcttacttgtatgctaactatcttgtcgtttttaactgttgtccctccctctgattctaaaaccaaaggggcaactgcgtcattaaaacaatgcangcgggcatgca

SEQ ID NO: 132194 - DNA, 288 bp, Zea mays
  Clone ID: MRT4577_52045C.1
ccctgttgctgcaaatctttctcttaattttgcatctccgacaattgcggcactggctcgatccaatattatgggcacccagctcaacttcacggactcctaccgctactccaccgcagcgcccaccgcagcagctcataagattgtctcccttttcagcaagaagcctgcccataatcccaagcccgcttctgtatcttcctcttctacagacatcatctacgagctctccaagtgagtatggtcctgacaggaagatctaccttcctgatgggctgttgcaccttt

SEQ ID NO: 132195 - DNA, 104 bp, Zea mays
  Clone ID: MRT4577_52046C.1
ctcgagccgcaactatgaatatttgagtttgtgacttgaggaacacctcattcctcaagtcacaaactcaactatgaatatttgagtttgtgacttgaggaatg

SEQ ID NO: 132196 - DNA, 440 bp, Zea mays
  Clone ID: MRT4577_52047C.1
cccttaggatttaacttaaaataaagcctgacgggggtaacagcacccattgatccccaatccatgctggttgatgcatgggtctgctggaacccaggattaacacagcacttacaactgacacagagcgacctttaattaaaaacacagatgggccacaaccaaccccaaaccaaccaagattaaccctttggacttggggaaacaacccgggagccaacaggataacttgggcgggcgggccccaacggttaatttcttcaattccccttggaattgccctaaccccccccaccgttggcaacggcgtaacccgcggcaacaacaacgttagcggcggcggcaacaacgttagccgccgcaacggcgtaagccgccgccgcattaaggggcccggcaacggcgttagccgccgcttcaagggccacaacgttaccggc

SEQ ID NO: 132197 - DNA, 188 bp, Zea mays
  Clone ID: MRT4577_52048C.1
cacacttatgctcccacaatgatacttacacaccatacatcacatcccttgctaccattcccactattgaatgaacgaccataaattgcctacttgccaacttccattcaaacaactctatggtgcactcctcttctgcagaacacttctccatatctcactcattggctgacaaaaatcttatgcta

SEQ ID NO: 132198 - DNA, 303 bp, Zea mays
  Clone ID: MRT4577_52049C.1
cccggtcgacccagcgttcggttgacgcggtggaacagtgcactcgtgttgtgtcatgacgagccactgacgctctgcgctcctgaacaacaatagcctttgaatcttgtcatgatgattcattggcgtcaaaggacatctttgtatagataggatgacatgtgaatacgtcattcatggatcagcctggatgttatgtgatgattaagaattgcttatgcatgttatgtatcgtgcaataaacacattgtctgtgctttggatataattcttagaaccatgaagtaatcgcaacgttcctgc

SEQ ID NO: 132199 - DNA, 429 bp, Zea mays
  Clone ID: MRT4577_5204C.1
gagacttacgagcatgcatgcacgcctactttagctgatactttggctgaagtctaaatccttatcgccagcacctgctgcggcacgctacggttatatactaatcgactacaagaggaccataaccaggccatatcttgaagcccaccgtaacgaacctggaatgcctccaggacatcaaactctacatttgcaagtactacagaggcatagacgcgcacatatgacagggcaccatctggtttcataccaggtctatcctgaagccaatatcaacgtgaacggaagaccaggtgcactcccaatgccacagcgctaacacacaactacgcagaactgctgatatcataatagaacttattcggctccttattaggcatatactgacaccaaaggagatgatacacgctttcctagaaactaccgagc

SEQ ID NO: 132200 - DNA, 229 bp, Zea mays
  Clone ID: MRT4577_52050C.1
aaaaaaaaccccagggtccgggggattttgcaattcacccccggtttcccattttgttccctttttaatcggtgcgagagcccaaatttccctttcccggccccgggggcaaccccctccaacccaaaacaaggtgtttggccctttgaccccacaccggaagcttccctcttttattttcgaaacccggaagcaacatggcggttaaaccaaagggggcccctgtttt

SEQ ID NO: 132201 - DNA, 381 bp, Zea mays
  Clone ID: MRT4577_52051C.1
cccacgcgtccgcaagcattgaagccgtatctcggcgtcgccggacgagacaggttgaggcggggcggtaatggccgacggtgaccttgaggtgctcagcgtgctcgacaccgggaagactcaatggtaccaatttaccgccatagtggtcggcggcatggggttcttaaccgacgcctacgacctcttctgcatctccctcggtactaaacttcttggacgtatgtactacaccgtagaagggtacgagacgcccgggagcctaccgtcgaacgtgtccgagtgcgtcaacggataggccttactgggcaacgcttcatggcagatgttattcggctggctgttcgacaagctcgggctcatgaatgtctatggcatgac

SEQ ID NO: 132202 - DNA, 224 bp, Zea mays
  Clone ID: MRT4577_52052C.1
accacgcgaccgccacgcgtccgggaacagccatcacagatgagcagaacacaacagcgacagggccgacggccgaataagcggggagcagcgcgacggcaccaaacccgacacagaagacgaaggaccccagaacagcaacccacaggaccagagaagaccaaagcacaacaggcacacacggcgcaagggcaaacaggaaccgcaacaagaaaaggaggaag

SEQ ID NO: 132203 - DNA, 400 bp, Zea mays
  Clone ID: MRT4577_52053C.1
gtgtgcctaattttttttattacctgtttaagtacccagcgagaaggtcgcggcgccacgggcgggattcacaagacggggccgaccacggggatacgctgggggctcggggcggaagacaccgatgactaggcccgaaaaaagcgaaagaaaaggccccaacaacccggggcaatcaaccaccggcccgggcgcacgcaggcagcccaaggaaaggggcccaaggggaagggccaacccgctagacagaaaaaatccgccccaactaaatgaattcagagcatacactcccgcccgtacattacggacaccaaacaagagggtgccgctagaggggggaagccggtcgccacaaaaatgacgctcctccacaaaaagatttcctgaactacatgccccc

SEQ ID NO: 132204 - DNA, 529 bp, Zea mays
  Clone ID: MRT4577_52054C.1
attcggctcgagagctacaatgacgatgtataggttcaagctggggccgttgaatgtccgtgtatataagagatccgggaggccagccagaagcggggtcttctacgcgtgctgtgaacgcaacagatgagccaagaggtacgagactggttggacatgtcactcaaaaatgctgcgtcatgataagtggttagacttccaagagcgtttactgtgtgtggtagaatgaagccagaggaggctgctgtagcaacactatctgctttaccagacgaagttatgtatacaattggcacagtattgccatatgaagattcagtacgtgaaaggaggagaaaatgcgaattccttgagatgcaggaagaacttatcaaggcggaagaggcaaagaaagggaccgaagaaacggccaggcaaaagaaagaagagccatcgatgaatgaaccggaagctgtagaggatgattttgctttggaggaaatgtctgttgctactgttagggaagaactgagataagcaaggtacatga

SEQ ID NO: 132205 - DNA, 428 bp, Zea mays
  Clone ID: MRT4577_52055C.1
gtatggaagctccccgaggccgcgacggttcccgtcgcggtggtggtcgaaaaccccatcatggatgccgactcctggccggcgctgcccgggctgtcgtctccgccgccgccggctgcggggccagtggccaaggcatctccaaaggccgcttctccggcttccactggggcggtgatgtcgccgccgtctttggccaatcccggcgctccggatgctaaccctggtagtgaggctccggtgcgcaatcctgtggtccagcgtgccctggtgatgcctgcggcaaatgggctggagaagattgcccctgcaccggagccgtcccctgtttatgtgcctaacgctcggagcaacggtgcggatcctcatcagaatggacgttttggcttccaaccccatggcccgggtggtggttatgttgggggaaa

SEQ ID NO: 132206 - DNA, 428 bp, Zea mays
  Clone ID: MRT4577_52056C.1
cctaaggaagcttgacaacgggaaatttcagggctgcatcactgactgatgattccacataacatagcgggggtaactcgacttaggccacggctgcggggggttaacagatccgcaccgagggcggtgagataaactgcgggcggttcttgattgaactactaaccccctctcatacccccaccctcttattcaaaatcaaaggaacgggcacacggggagtttacaataactgggggagggcggccgagcccaccaattcaactagccctaggagagctgttcgaacccagcgaccttgaccaccattggatgttggatccggtgcggatgcccacctctctgcatgagacttgacgacgtacataccctataagacctacacggaaacgaaatctttgccacacactctaggggtacagacggtg

SEQ ID NO: 132207 - DNA, 286 bp, Zea mays
  Clone ID: MRT4577_52057C.1
ctcgctcctagccgcggacaagctgaagctgacggtcaagatcggcgaccagacgccctttgcctaggtgccgaccgggccgtcgacgctactcggctgcaaggcgttcggcgtggacaccaaaggctccagtatgacgtgctccgtgctggacgtccccagcaagggcgtggacaccgcgaagatagccggcttcgcgctagccacctccgagctgctagcctaggacgccagcacggatggcacgcccaagaaggtgacctacaacaagatcgacagcaaaacg

SEQ ID NO: 132208 - DNA, 539 bp, Zea mays
  Clone ID: MRT4577_52058C.1
aattcccgggtctaagctccatacttatccagaacacgcatgcaccctttcttcccttttgctgaccctgttggtgactacccttacgctgttcctgttggcgatggagaccatccacaaagcacgatccactctgcttgtagatcagctacataactctttcaccacacccatagaacgtaagccccaacacgtctttaccgtccagagctctaccgatgctgcttatgacattgtccgtcttacctgcaaagaggttcctattgatgatattaccattgataccgaaaccagagaaattcacgccggacgtagcctggatggctactggatatgctgctgagattacaaatacatagtgcctacaaagctcagctctagaactctcaaatgacaacggttccttactctctttatggccaaccaagtgcacacagacccatccttcaataaccactatgataaccatgagcttacaatagtactgtggcacaaaaagagcctcctctttcatcactatagaactgattaacacattc

SEQ ID NO: 132209 - DNA, 414 bp, Zea mays
  Clone ID: MRT4577_52059C.1
ggtcaaactttcttgtttaaaagcaccagctcacaaagggcgacaagggcacggaaataagggacagggagaaaatcttggggcaacagcccccacacaacgctagccaactaaggctcggggcttaaaacacaggggggacccaaaaaagccaccccaggaaggtgggggtcgggggttaacactcagggggagaccccaccagagagccgatacccccacggggggggggccacaacgggttggccacaccctggtgggggaagacccctccggacttgccctggacccccgggggggggaccacctgggggaccctgggctgaataccgaagggggacttgcacctccgggggaaccccacaggggggtcggcccgcggcaccccggacgcaaattccattgggaaaaggc

SEQ ID NO: 132210 - DNA, 228 bp, Zea mays
  Clone ID: MRT4577_5205C.1
ccggccgggatgcagctctgcacaggaaaaaatgatgaggctgttgtgggctcttcatctgctagatactgctgtcgaggcgaaacaaaggaagagatgcatgacaaggcacacgtatgcatcgtggtcgggcagaagggcctgggcttcgtcaaggacactgcttatgagggaggcagcgaggactctgacaagtgggggcgtcagagaggcggtgaaggccagacc

SEQ ID NO: 132211 - DNA, 600 bp, Zea mays
  Clone ID: MRT4577_52060C.1
aaatccttggaagagctcttcaagacaaagtggtgatgtatctccattagtacatcttgacgtcaagataggggatagaaatggtaccagtaacaatactgcttgacacatcattgtgttcacaagacaaaacaagctaaagctaaagcttcaagttggcactttacaaaaaagaaattgacgttaagtcaaaattggacttcgtatgaaattcaaggtaaagtctcattatttggaagtggaggtaatgttatatgtaagtcatcttcttctgatgagatgtcatcttcttctgaagaatactcttcaagcacatgatcttccacaacatgtgattctttaatacgtttattattctctttgataagattattgatacgatcagacaatgacatgttgtacacaggagtagttacaggaagacgttctctcactacccatgtctcttcagtgtcatgtctcatcacatcccagatattaatacccacaacaattgtcatcagcactgtgagagtcacaagtaacttaatgactttcttcaaagagtaattaacatgagccagattgagattatcacccatcttgaaatactccccggga

SEQ ID NO: 132212 - DNA, 276 bp, Zea mays
  Clone ID: MRT4577_52061C.1
cgcggatacaattttccatttttattctgaaacattcactgatcgaacagctgcttggcatccactatctgtttcactggctaccaatgaggctaattgacaaactgactatacacaccacgcattacattgaacgtatgtaaagcactttaaaaccacacctagtgcaaactaactgaacattatcctggctcgcgttcaaactgacgaatactacgaggcgtcatttagagcacccgcacctacacacttaacgttattcacaccagctgcagg

SEQ ID NO: 132213 - DNA, 186 bp, Zea mays
  unsure (1)..(186): unsure at all n locations
  Clone ID: MRT4577_52062C.1
acacaaaacaccgatgttagacagcancagtatactagtgcgctgtgactcgggancttcaaattcaattgtccggtttttcgtccctttcacgcttatccgacaatcgaaaaacgtccatccatagacccgggtttccggccgtttatcgcgcatcgtcgcctatatcttgatattcaacataat

SEQ ID NO: 132214 - DNA, 248 bp, Zea mays
  Clone ID: MRT4577_52064C.1
atttaattttatgattgttttccctctgtgtctaatcagatactaatccttggcttgtaatctctgtgatgggcatagaaatatgcttggggctgaattaacagtctcccatcgtacttgttcatcagtttaggttatggccataccttgttcgtttcatcgggccatgatctatttggtctctacttgtaaccatttttacaggtggagtatttctttgtatatttgcacccttgcccaattcattt

SEQ ID NO: 132215 - DNA, 357 bp, Zea mays
  Clone ID: MRT4577_52065C.1
aggaagaaattttttaaaatttataaattgcaaaacagaaaactgtgggaggggacctaaaaaaggggtaacctggaggaggaaaacaccaacaaagggagaagttacttaatttttttccccttccacaacctatttttacatccccacaggcccctggaaaaaagccgtaggagcaaggccccaagcaccaagaaaaaaactttcctttttttttgaagggcccaaggggaaagtctggggaggttggttagacgcccggggggttgtttttcctgaccactttttccgggttctccctccaccattcctaggcctgctgtttcaaaaactcccttttggtaaaccggaccccct

SEQ ID NO: 132216 - DNA, 295 bp, Zea mays
  unsure (1)..(295): unsure at all n locations
  Clone ID: MRT4577_52066C.1
gcacgcgaacgcaagcaattcaactcgagggttctccgttgttcggaacccccccanaccggagcgtgaccacgtgtgaggtaggaggcggaccacccccaccnccnccacctcccctaggccacggacgaccacatacctacacaacgccgacagcaccgacagcgaggacctcgaggcccaaaaaatcctcgatcgggagacgcagaggtcccgcggcttctgcttcgtcaccttctccacggaggaagccatgcagaacgccatcgagggcatgaaccgcaaggagctggac

SEQ ID NO: 132217 - DNA, 678 bp, Zea mays
  Clone ID: MRT4577_52067C.1
acacaagaacgcgcactcctacaacacgcttctcgctgcgctcttgcgcaggccggacaccctccccgacgccttccgcctgttcgacacaatgccggccgactcacgcaacctcgtctcctacaacaccctcatgtcgtcccttgcgcaccacggccggcaggtggaggcgctccgcgtcgttgcccggctggccagggacaggttcttggggccagggttagccatggatcggttcacggtggtcagcgtggcgactgcatgtgcgggaatcggagctgcgaggccgctgcgggaaatgcacggtgcggtagtggtatcagggatggagttcaccgtcatcatggccaatgccatgtcgaacgcctacagcaaggctcggagggtggaagatgcgaggcatttgttcgatcaggtcagcatccgagacaatgtcacttggacgtcgatgatttctgggtactgccaagtgaagaagctccatgaggcagtgcaggtgttcgatatgatgccagataaagataggattgcatggacagcgctgatatctgggcatgagcagaatggagaggaggacaccgctcttgagcttttcgaacagatgctggccaagggagtatcaccaacgcccttttgtcttggtgtcagcttttggtgcatgtgccaaaacttggactt

SEQ ID NO: 132218 - DNA, 473 bp, Zea mays
  Clone ID: MRT4577_52068C.1
cgcacatcgcctcatcttttggaggcaaacatacgatatgtggtatactgtcactgaagggtggatactgtgttaacatggaacaaaattttggcctatgacaaggtgtgctaaaatgacgactggggtccactacattcctagtgaacaaacgaaattactcctttcccacaatcccctgttgtaatgcttacaactagtttgacatttgtgctgaattatgttgcctctcatttcaaccgatgccatttttgagggccgctttttggccttccttgagaaaaaaaaacaaaaacataggttttcttgttaccatcgccaaaggcagggttagcaccaattatgttccaattatatacatgtcaacgggcgcagcttaaacctttaacatcgtccatctagaggttatctaccattaaaattgagctgtcctgtaaatgcccaacaaagaccaattgttttttaaacgcaaa

SEQ ID NO: 132219 - DNA, 555 bp, Zea mays
  Clone ID: MRT4577_52069C.1
ggccgcttttttttttttttttttgttttttttttttttttttttttttttttttttttttttttttttttttttttttttttttttttttttttttttttaacggacaattttaaaccaagattttttaacaaagggtgggaaacccccctcagggggcaagaaaaagacatcgaaaaaaaaaagggggctttgaaaattaagaggaaccagaatcaaagccaaacgcgggcaaagggttttctaggggaacaaaaaaaaccaaaggggcggggaaacattaaaaatgctaggtcgacgttaattagaagaacaaaaacttgggaccccccttttgggggaaaaaggggaacccccacttttggatgcaggccactggtacttacagggaggggccccacaacaaaaatttgccaaggtttttatgctgcccaagcctcagttttttacaaaaaaacacaaaaagaggcagaccctttaaccctccaggggttttcaccattcattaaaggccccctggggaaaaagcccccccaggttgcttttaagggggaa

SEQ ID NO: 132220 - DNA, 415 bp, Zea mays
  Clone ID: MRT4577_5206C.1
attccatgaccgacccacgcgtgcggatataccaactcatctagaagatcacagcattcccttgtctcacttacattgctgtgaacaaggagggagaaacagtctccaatatttcaccaaacgccgcgaatgctgacacgtggggagtttgccctggcaaggatattatccatgctacggatgcggatcatgcaagtttaatggttgggaaggacgaagcatatgaaatctggactcgggggtggggtcgcatgtaccctgaaggtgatgcatcgagggacctactatagaaggttcagatgacctactacctggtcacccttgttgacaactactacatccagggggacctgcttgctagtcttacgatctgattatgcattaatggacaggatagccgaatggtaggacccaa

SEQ ID NO: 132221 - DNA, 885 bp, Zea mays
  unsure (1)..(885): unsure at all n locations
  Clone ID: MRT4577_52070C.1
ggccggccgggactcnttcgcaacggatatctcggctcttgcatcgatgaagaacgtagcgaaatgcgatacttggtgtgaattgcagaatcccgtgaaccatcgagtctttgaacgcaagttgcgcccgaagccattaggccgagggcacgcctgcctgggtgtcgcacgtgcaacaagctagcattgctgcatgccagcatccacgtagcatctgagcttcatggttcagatagcagcggtgaagcggatgaaggggcgggccccgctgtcagtggtggtggcaatcatcggcgggctggctctcgcgggcgtcatcttcaccgacgacctccgctcactcactgagatcatggagaagaaggggaaagcgaaggagcacaagaggacgacgtctctacatgccgggacgaggacgaggaagatgccgctaacgccgccgccgcagccggcgaaggcagcgttcgacccgagccggtgcagcgtgaccgaggggtactgggcgtacaacaggtccaaggagctgctttacacggaccaaacatgcccgttcatcgacaggcaggtctcttgccagaggaacggcaggccggacagcgactacctgcgctgggattggcacctagacgactgcagtctcccaaggttcgacccggtggcgttgctggagatgctgcgggggaagcggatgatgttcgttggcgactcgctgcagatggggcagtggctgtccatggtctgcctcgtcaactccgccgtgccctacaccgcccggtccatggagcgcagcaccacccctgtccgtcttcaccgccacggagtaaacgcgacgatcgagttctactgggcgncgtacctggtggaggccactccgaccgcaacatc

SEQ ID NO: 132222 - DNA, 144 bp, Zea mays
  Clone ID: MRT4577_52071C.1
ttagcgttttcgcccacctccacacacgggacttgtggtatttacacagtacccggaaacccacccgccgcgctcgcaagatgttcgacccttctcccatgcgccctcacgacatggcctccaacgtctacgacttcgccaatg

SEQ ID NO: 132223 - DNA, 509 bp, Zea mays
  Clone ID: MRT4577_52072C.1
cccactgcttcccgcaacaaccaacgccattgtttgatgaagatccaggtccagggacgccgctacccgacggccttcacccggggcatgccgacgctcggcatcgctcctttgctggcacgcctactttgggcgccgctctaccgtggctggactacgggtaggactacgtcccgctggacggcggagcccaccaacatccattgatggcgcttcccgccggggtccggctacggcgtaggacgactccctgtcccgtagtaggcgatgctgcaacgcttcggggccatgaaaagcagggagcggaagcgccaggagatccccgtgaaccacggccaccccctcggcggccgggaacgggtcttcttcggcggctactgcacgtgggcggggaggcccggctacggacgggtgtgccaccgtcataggcgcgaggcctacggcaagctgcgggcgctacgtgggggcgccgcggcgcgctacgtgtggtgtgtgcgcggcacgcatac

SEQ ID NO: 132224 - DNA, 708 bp, Zea mays
  Clone ID: MRT4577_52073C.1
cattgggaccctcgaggccggccggggcacaagctagcattgctgcatgccagcatccacgtagcatctgagcttcatggttcagatagcagcggtgaagcggatgaaggggcgggccccgctgtcagtggtggtggcaatcatcggcgggctggctctcgcgggcgtcatcttcaccgacgacctccgctcactcactggtacatgtacatgcatgcagcatgcttctagcactgcacctactgagctccattccactgcacagagcgcatgcacaatgtgcatatatgctttagggtaatcgatcgatctctgtgtgcggtgtgccgcatgtgcccatcttcagagatcatggagaagaaggggaaagcgaaggagcacaagaggacgacgtctctacatgccgggacgaggacgaggaagatgccgctaacgccgccgccgcagccggcgaaggcagcgttcgacccgagccggtgcagcgtgaccgaggggtactgggcgtacaacaggtccaaggagctgctttacacggaccaaacatgcccgttcatcgacaggcaggtctcttgccagaggaacggcagggcggacagcgactacctgcgctgggattggcacctagacgactgcagtctcccaagggtcgacccggtggcgttgctggagaagctgcgggggaagcggatgatgtcgttggcgactgct

SEQ ID NO: 132225 - DNA, 481 bp, Zea mays
  unsure (1)..(481): unsure at all n locations
  Clone ID: MRT4577_52074C.1
ggttgccctaaaaaagacgacacaaaaccaaggttaaaaaccttctctcactggccctggcactggccggggcattccccaatttccaaacatcccaatcnccaagccggttaccccaagcattttttttgggttctcaaaatggggccttggtccccccaagngttttttccaagaagagatccaattgggaaggggccttatttggcccaattccacccaagccccaaattggtgcccccccttaatgccttgtcccattccccttcttcccgcaaagccaccccttcacccaaatcttgcaaacttcnaaggggttacctttaatggttcccaacgtcttggcttggaaggcttaccaatagaatcaagggcacccgaaggaacctttcgtaagaaagcccctgtgttggacaaagtgggtgaaggcccccttacagaaaccaaaacacgtctggccccaggaatatgaaacctaacg

SEQ ID NO: 132226 - DNA, 694 bp, Zea mays
  Clone ID: MRT4577_52075C.1
caaaatgttgttgaagaacttgagaaagatctgaatcatatgatagttcgccattcggcgtgggcagttgtacatgcctgtatcaagtgcctttgtgctctgagcgagtcagcaggtagaggtccaggattagtggaaaaccttgttaatattttctacaagcatctgtgtggagctaattcagatagtcagctgttgggtcgatcactgttttgtcttggactcctccttcggtatggttatcaattgatgctaacatctgaaaatcagcttgattttcccaagatcatcaacttgctccagagaaaatatcttctcaaggatgatttcagcttgaaggttcgagctttgcagactttgggatacatacttattgcgaagcctgaatttatgctacaaaaggatatgttgaatctcatagagacagcactctcttctgaggttgattatagattcaagattcaaggacttcaaaacctctacgagtatcttagagatgctgaaagccaacttactgctgagagtactgcgaaacctcctgggcagtgtgaaataaatggcagaagtgaagtgtctgttgctgctggtgctggagacaccaacatatgtggtggtattatccaattgtattggagttctattcttgaaaggtgcttggatacaaatgatcaagttcgccagagtgcacttaaga

SEQ ID NO: 132227 - DNA, 393 bp, Zea mays
  Clone ID: MRT4577_52076C.1
aacgacgacagcatccatgaatcatcccgagcaagaacaacaagcagcagagagcgagaaggcggtgacgaccctgctcggcgtctgggcaagcccctacgtcctccaggtgaaatgggcgctggcgatgaagggcgtggagtacgagtacgtggaggaggatcttcggagcaagagcgcccagctgctggcgtacaaccccgtgcacaagaaagtccccgtgctggtctacaagggcaggcccgtcgcggagtcgcaggtcatcctcgagttcatcgacgacgcctggagccaccgcggggaccccatccttcctcgggacccctaccagcgcgccatgggccgtttctgggccacggttcagcaggacaagctctcggcgccgatctggag

SEQ ID NO: 132228 - DNA, 866 bp, Zea mays
  Clone ID: MRT4577_52077C.1
ccggccgggctagaagccaccctgccgcctcaccgcctctctctctggtacgtgccgtccgtcgcctcagtctcctcccgccgccgcctcggagactaacctctctccctccgttgtgctctcttcgcagagaccgcagatccgttgtccggtgagtggaagccgcacgaacccatggcctccggcgagcttgcctgcacctacgccgctctcatcctcagcgacgatggcatcgccatcaccgccgagaagatcgccacgatcgtgaaggcggccaacatcaaggtcgagtcctactggccggcgctcttcgccaagctcctggagaagcgcaacgtcgaggacctcatcctctccgttggatctggtggcggagctgctccagttgctgctgcggcacctgctggtggtgctgctgctgcggctgccccggctgtcgaggagaagaaggaagaggcaaaggaggagtctgatgacgacatgggcttcagcctgttcgactgaggagaccccctcacccagccattagcaaatttcacttgtgctgtcaaagactatcttgtcttatgttatgtctctaggcttttgttacaactacccaagttttgagtttttgagatgtggctatggcatgaactcaaaaaaaaaaaaaaaaacctgatgagttatggggatccaagtggtgaaaatcttaccctcgaggaaaaggagcctcatcacgaatcagcaccagttgatgggacatcagcagatgaagagagtgatagcaacatatttccttaccttctgtaaatattggatcaggtgtcagcatgatagaggtaattgggtagggaaatgtttgaagaatataggatccccatcta

SEQ ID NO: 132229 - DNA, 1563 bp, Zea mays
  Clone ID: MRT4577_52078C.1
ctgtgcggccgctcaggcggcggtcccgacgagggaccctgccgcctcaccgcctctctcactctgagaccgcagatccgttgtccggtgagtggaagccgcacgaacccatggcctccggcgagcttgcctgcacctacgccgctctcatcctcagcgacgatggcatcgccatcaccgtgcgtccttctccctcgccgccggctcttttaaatctccccgcttattctttttgagcgggtgaggagatgcgtgattgttcctcttcttggcaggccgagaagatcgccacgatcgtgaaggcggccaacatcaaggtcgagtcctactggccggcactcttcgccaagctcctggagaagcgcaacgtcgaggacctcatcctctccgttggatctggtggcggagctgctccagttgctgctgccgcacctgctggtggtgctgcggctgctgctgccccggctgtcgaggagaagaaggaagaggccaaggaggagtctgatgacgacatgggcttcagcctgttcgactgaggagaccccctcacccagccattagcaaattttacttgtgctgtcaaagactatcttgtcttatgttatgtctctaggcttttgttacaactacccaagttttgagtttttgagatgtggctatggcatgaactcaaaccatcttatgagggtgacggaaaaaaaaaatttcaaaaaaaaaaaaaaaaaaaaaaaaaaatcgcattctcatcgcaccgcacgagctacggatctgcggcccgacgactacgacgacggggaggtaggggacgaatcgttgcaagcaacgaggtcagaactaaggaggccgatccatcctccagcctccgatcccatccgacgacatggtctgcgtcgcgtgcctgctgccgctcttcctgatcccggtggtcaacgccctcccttacctcatcgacctcatcatcagcaaggtgtatcggctatttggatgggagtaccggagacctgaaagagtcccacctgcatgtccatacaagcctgcagctcagaagaacgatgagggtgcgagtgaatcagaacccctggtcgaaccgcacggtgctggtgctgctgctgcggcggcagaagataagaaagtggaatgatgcagcaggcgcttaaaatggaggccacggctctgtgtggttagctaagaaaaaataattgttgtgggaatctatatacttgggtgatgggttgaacttgttatgacactccggatccttaccagttgcattactaatcgctgctgctggtctggtctgtctgaatagaagggagttgaacttgcagtcgcaaatgtaatagcgagagtgaatcttgttgtccaactgtccaaggctttcgtatagaatataatgcttgaataatgagctcaacccatcacccaagtacataaccatccacaacaattattgtttcttagctaaccacacagagccgtggcctccattttaagcgcctgttgcatcattccactttcttatcttctgcccccccagcaccagcaccagcaccgtgcggttcg

SEQ ID NO: 132230 - DNA, 362 bp, Zea mays
  Clone ID: MRT4577_52079C.1
attcggctcgaggggacaggcacgcaatgtatattaagtatgctctgttgcccccaattggctgcttactcggatcacaggtctatatttatttacatttgatctaagtcagttgttggtagactaagaatatgaaggtctccattgtgcgcacacataagacttccattattagctccatggagaaaaataacatatatataagtactctgttattcaatatagcagtaattacatattgggatatactcttttatttagatatgatatcgtgtcataatgacacatgtgtataagtggcctactattacagactatatggctcttctaaaagacttttaattcgaaattacttggttaaa

SEQ ID NO: 132231 - DNA, 546 bp, Zea mays
  unsure (1)..(546): unsure at all n locations
  Clone ID: MRT4577_52080C.1
ttgggaccctcgaagccggccgggaaaaacatacgagcatctatctctatttcaactatctctaagctcgaatggtgacaaaaaataatggcgcacgcatgcacccgaaccacgagcacgtccctgtgcccgtcaacatctctcaagaccgccagcccatcggtacgcgggcttacttgacgaatctaaacgactacaacgaaccgccaccgccgccgctattagagccaggctcaatcaagacctgaagcttctacggctccgggatcttccatctcctggctaccttgatcttacctctacatctcgataatgactgcgatgcgcggctccaggccaactaccagtgcaacatcatgcgctatccagcacatcgacctggtgcaatcgngcggcatgatcatgctcctcgtgtacggcatggtcatcatctacgtggtgacacatcaacccggtgatgaccttccgcatggtcatgacgacgaagatgtccatcaccatcggcggtgctttacatcatgatgcagatgccagtgatccacctgc

SEQ ID NO: 132232 - DNA, 642 bp, Zea mays
  Clone ID: MRT4577_52081C.1
gggtaaattggtactgattcaaaagctttaagagatctacacattctgtggtattatgtcgcagacttgatattaaaaagacataaatcttaaggcctggttcacatgttttcccgtttcttgtagctcataactcatcagcagtagatttgaccattttctttcaaacggtttggaattatcagctttgtttctcttttcgaaacacttatttccagctcgatcaaattgggcatggcctcttcttctatctgcaactcatctaaacttctcattaacaagtcaagcttcctcagcctaccaaaaccttgttcgctgacgctcatcttccccgagtaattacaacttaacaagatcagatcttccagtctcggcattttctgcaaaaaaggcattgggtcttcctcgaaagttattccaaccagtgtcacggattcaagactgcgtgatatcacatccatggacctaactgcttcttctgattccaacgataaatggacttcagtgggcgtcgccagcttcagaacacgaagactttccagtttagtcaaggaagcccagctcacatgaactcttctctcccttgacctagacatttcagaaatccccaaatctcgaagaattatgagcaactcagggttt

SEQ ID NO: 132233 - DNA, 635 bp, Zea mays
  Clone ID: MRT4577_52082C.1
tgaaaaaaaaaaaaaaaaaaaaaaaaaaaaaaaaaaaaaaaaaaaaaaaaaaaaaaaaaaaaaaaaaaaaaaaaaaaaaaaaaaaaaaaaaaaaaaaaaaaaaaaaaaaaaaaaaaaaaaaaaaaaaaggggcgccccttttaagaggtcccaattttccttccccttccttccaatttttttttttttttttggggccccctaatttaatgggggggcccctctttttacaccttctgacttggaaaacccttgggtttccccaatttattccctttgcaacacatccccttttccccagttggcttattaccaaaaagcccccccccgttcccctttccaaacatttccccaccctaattggcaattggacccccccttttaccggccctttaaccccgggggttttggtgtttccccccaggttaccctttccatttcccagccccttacccccccttcttttcgtttttttcctttcttttttccccactttccccgtttttccccttaaatttttaaatcggggcctccttttagggttccattttattgttttacggcccctcgcccccaaaaaacttttttagggtaatggttcccttttgggcccttcgccctaataaacgtttttt

SEQ ID NO: 132234 - DNA, 555 bp, Zea mays
  unsure (1)..(555): unsure at all n locations
  Clone ID: MRT4577_52083C.1
gcgacccggcaccagggtcatacaacaccacgctttttgttctgccgggagcgctctctttctgtatcaactggtgacgactcctgcaccggcgccgctctacgcaagacgcccaggacttccgcaacgacgagcatgccgactacagaggaaaagatggcgtcccaaacaatggcgacacattccggagctcggacacaaccaagattcaccaatggcgaccaggtgaggccttgaacccacggacacaacctcatactaaaggccgttcactcccagatggtcgcccaaagaggcacgcgcgggagggcctgatgcaagacactatgaggattgcgccgtgcttcggtactgatgaaaccgccttcattggcttcactgcaagaaacgatcaagaggatgtaactaaggctggaacatctgatgaactgaggaacgcatagatcgacatgcttcaaggtacgatgcggattgcagtggacaagtggcagacttggcaaagctgctgacagctcagctgagtgggcagtcaangaggacaacaacctgtactta

SEQ ID NO: 132235 - DNA, 375 bp, Zea mays
  Clone ID: MRT4577_52084C.1
gagattgtgtttagcacgtttttttatcaagaaaaaggaagattttacaggaccttgtaacacatacaagccaatcacagcccacatcgtagacactgttatattagaaactgatgcctttcatttttcaagtaacagaaggaaaacaattcagagtatgaaaccattccttgacataacacttcaaattactaatgccaatggcttaacatttcatcttcaaattactaatctcaattcagagtttttatacgacgacattttcaagagatggacagccaaagattgctaatacctgagaaccagtcccttcactgagtcaaccacataccatagcttgctaaatgctaagtactacccccattttttatgtga

SEQ ID NO: 132236 - DNA, 371 bp, Zea mays
  unsure (1)..(371): unsure at all n locations
  Clone ID: MRT4577_52085C.1
ttcaaacaatgcctagaagaatttattatgcaatcaaagaaccgngcttgcttgtctttctttatgttatttcccgccccgaattcagttcggggggggggggggggtggttccatcatccttnnccccctactatttttttcaatccaccctattcttattatgtatactattgctatgccaatttgcatacactggacaagctttgtgagttcaagggcatgactactattaaaccttcgtgcacactgtggggaggctggtgatatcgatcatcttggtggcagccgccttacttttccatacgttgaccttggctttgaacgcaccgcgttcgctttaccgcccatgtccctattgaatctgaaatc

SEQ ID NO: 132237 - DNA, 576 bp, Zea mays
  Clone ID: MRT4577_52086C.1
aagctgttgatgaaaaaacctgcactggtgcatccagtgcgatcttcagagattgtgatgtgtctcgctactctgagcttggtcctatccctccgcctccgccccagtgcaatcctctctgacaccactcctagcatacctcttcccgagcctgaacagacgacatggaccccgctcaacgcatgaggtatataccccgatcgggggtgccgacccggagatctactacactcctgaaacgtgagaagcgcagtcaatgaatgaatatcgaaatcatcgcctcagaggaacttcacctcattcgccgctatggaagtgctcggctccgtgactcactaacaatcactccgagggcatgcccgagggccattactacagtggaaacgacgaacacgacgatatcgagaacctctgacaaccacgcgcactagatgccttccgacttgacgccgaatgcctgggaacgccacgagcagcgcctactctggcgtcccctcgcacacgttcgccgccctactgaggagcttctcaaaacgcaagaccgaaatcatgaggcgtcgaacttcccaccggagt

SEQ ID NO: 132238 - DNA, 242 bp, Zea mays
  Clone ID: MRT4577_52087C.1
acattaacttggagggaaccaacctgccatttgggcgcaggtaaaaagcttttaaaaggttattatcagcgtgcttgaacaacaaaagggctggacagggaccagtcaactgccaggcaaagaagcctgctcctctggccgggtaagaccctggtccacaaagcagcccaaggacaagacggggggcacaaccagcctggacaccggggacataagaggatgcgctagaactacccacacct

SEQ ID NO: 132239 - DNA, 552 bp, Zea mays
  Clone ID: MRT4577_52088C.1
gggtacctcgaaggcggccgggtattctggtgtcctaggcgtagaggaaccacaccaatccatcccgaatttggtggttaaactctactgcggtgacgatactgtaggggaggtcctgcggcaaaatagctcgatgccagaataccagcactcagcttccatcaccactacaacatctaataaccactcttcaactctccaccttaatctaatcaccaaaccacccaaaaccatcaccatgaagttcttctccgccgtctccgccgccgttctcggcttctccagcatggcttccgccctcactgccagctacgaccccggctacgatgatgccgcccgctccatgaacgctgcctcctgctctgacggagccaacggcctggtcgctcgcttccccacccagggccgccttcctcgcttccctctcatcggtgcacaccaaggcattgctggctggaaccgcccccccgcgcggcacctgctaccgccctcaccctacaacgcccagacccctctacccccctgccctggcccatactgccaccaggcttc

SEQ ID NO: 132240 - DNA, 1109 bp, Zea mays
  Clone ID: MRT4577_52089C.1
gccggccgggtttcaaaaagggccgcctgagcagctattgtgatggatcctggtcagcggataagccacccgcttccgcttccgatccgattccacagctcgaccaactctccgcctcccgtcaccacctcgcggctcgcgctctccgatcccgcgcatattctccatcccgtcctctgctccgccccatcagtacatcaccactactaggacgccgcgccgcagccccaccatctccgagaccgagttctgatcgccgccggaaccggtacacggaaagccggaaaccaatggcgctcctcgcgccgagcccgcgcgcgctctgcgtgcgggaggccgcggcggcgtcgccgcacccgcactcgttggcgaccgccgcctgctcgaccgttggcggtggggtggctgggcgggcgctgtggctgtggaacggcggcggaacggggaggaggagggagcgccgggagagggtccgggcggaggcatacttctgggacgtgtccaagccggtggagatggaggagatcgacagcatggagaagctcgacgacgcgctcaggtggtccgtcgagaacaaccagcccatcatcatcgactggatggcaagttggtgtcggaaatgcatctacctggtgcccagaatggagaagatagcaggagaatatcctggagtcaggttttacttcgtcgatgtcaacaaagttccacaggcggtggtgaaaagaggaaatgtaactaaaatgcccactattcagctctggaaggacggagagtggaaagcagaagtaataggtggtcacaaagcttggcttgtgatggatgaggtcagagaaatgatccagaagaacaagtgacttagcacccatgttatgcaatggccaatggatattgtaccgtgttcaatgtaaatagagatatcagacgatctcttcatatactaagctgaaatcaaacacaaatagagcaaccatgttggaaataaccaaccaaataatactgctccctactccctacgttcagttctctttgtatatgtatgttggaacaagatggatttttatgccagcacaaggaagcaaggagcacattcatattcagttacgcaacta

SEQ ID NO: 132241 - DNA, 147 bp, Zea mays
  Clone ID: MRT4577_5208C.1
ccagcaacgccaacgccagcgcagcccaaccctaacccggtgtcaccgaggacacacagacaccagaccagccggggctcaccaggtacgaccagtgtcggcgccgcggatgagggcttgctgcgggagtagcgtgtcggcgaggag

SEQ ID NO: 132242 - DNA, 285 bp, Zea mays
  Clone ID: MRT4577_52090C.1
aaaaaaaaaaacacacgtacggacacggacttaaaaaaataaacgcacaccagcttactcgggaacaagtgaacacttcatagcatctaaagtatttgtcaggatggcatgatagggaaatgcatatgactttggacacacttgaaaaacgcttgatctggcttacaatgaaacatgatagggtcactgggatgattcactaagatctataattggttggagcactatgtaccattttcagtgctattatgtatctgtacaattctttatactgcggtttgaact

SEQ ID NO: 132243 - DNA, 309 bp, Zea mays
  Clone ID: MRT4577_52091C.1
acgaatcaaaagtccactctggaggttatactgaatatgagccataccgagcataatatactgagaggggaatacaacaagaaatgcattatccccaagcggtaaagcctaccaatcacacttccacctaaacaattcggccagcagatacaacagtcacaaataccttacagaaacaaaacctaggtatataggacaccaccatgttgagacatcttaagacggtgtcaacgtctcaaagtgatgttgcttccatcttcgacggctcaatgagcatgcccatggcttgactatgcatccctagctctg

SEQ ID NO: 132244 - DNA, 471 bp, Zea mays
  Clone ID: MRT4577_52092C.1
ggcaatgaaaaagaaaccgccctccaaacgataataacgcgggggggcaaagaggcatgggtaacaagaaacaagggaacaaaaaaccgccagaggaaacaacggcaccccggaccaaggggcaccgaaaagcccccccggcgaaacaacccccgggaggaacaagcgcaaactcgggggggaggaaacccagcggagaggcaaacccggggggggggccaaccggggctgcaagccaagggacagggcaggcaactgaacagacagggaccggaacacaaacggaaccgccagggggcccagccccccgggggggcagaaggcctggcaggcaaagcactgggggggccaaacaggggggggcccaagcatctcgggctagacgttcttatggggggcggattcgaccagcggcccaagaaggaggcccccacagaaggagcacacatcggccaggggggaaccccggca

SEQ ID NO: 132245 - DNA, 182 bp, Zea mays
  unsure (1)..(182): unsure at all n locations
  Clone ID: MRT4577_52093C.1
tcgaaataaatttatatctcaagcgtcctttctataagatccanncttacatacaggggggggcgacctcatagctgggctgtggtgtgacctaaattcaatacactggccgacttaatacaacgtagtgacgtgaggaaaaccttggcgttactcaatttaatctccttgcctcacatccc

SEQ ID NO: 132246 - DNA, 222 bp, Zea mays
  Clone ID: MRT4577_52094C.1
gggacagcacctcatatagaatgaattgattcttcaaaccaaacaccccataaagttttgtccctagttagaaatgctgaattgccaagactcctttcatacagcttagcagctttaccggatccagaatctatcattcctatttctattccttataaaggttccttctataaaaaatcttggctaaaaatacccatataaatgcatatcttcacttttttt

SEQ ID NO: 132247 - DNA, 249 bp, Zea mays
  Clone ID: MRT4577_52095C.1
taaaacaatgtcagccctattacaacattacctttggtgcatttattggcacaaaacattaaggcacatcaactacaacaacttttgctaggggggcgtgatacctactctgaccaacagcaatttctttcattacaaccaactaagttcatagaactatacttcttattttcaacaacaacaattaacattcagccatgtacctgctacctacacccagaacgttattcttttcaaccaactagcacc

SEQ ID NO: 132248 - DNA, 235 bp, Zea mays
  Clone ID: MRT4577_52096C.1
ctactggcaaaatacataccggtgccaggagggtgaggcagtcatcgaacaacgggtgcatgacgagcgcctgccccacctgcatccccctcgtctcgacgccctctgcatgcccgttcaagaagaccaccgactccaggttccggcaccgcacggacacgtgcagggccagcaccggcggtggccgtggcctcaacaccgaaaatgatggcccgctttggctgcccacctggga

SEQ ID NO: 132249 - DNA, 431 bp, Zea mays
  Clone ID: MRT4577_52097C.1
acaggccgccttcaaacggtagatctagccgatgtcgtcgtcgatgggacacgagagtagcggtggcggcgccgacgaggaggaccccgccggcctccagcgggtcatttggttgcggcagatgctccaccgctggcagtcctccagctccaggattgccgccgagaggaggtccagcgccagcgacgacggcgacagagccaacccagacgacgccaacgccacgacagaccaaagcagcaacggcgaccccacgcctgccgctgcagacaatgccagcagcagcagcagcagcaggaaccagatgctgccggcggcgccgcatggtgcggcggacgaggaggacgaggacgaggaccggcggctcctgtcgcgggtgctgctggtggaggagcgcaggcgggggtgcccccccgacgcggcggcgtgcg

SEQ ID NO: 132250 - DNA, 585 bp, Zea mays
  Clone ID: MRT4577_52098C.1
ttgtaaacaaatgcttgataacacaatcacacataagaaacacgttcatgacaaatacaaaacccgtaggagaaatacaaatccggctcatacatcatgatcgagtcgaaggtgctcggtgtaccatacctagccagcgagagtgaaattgaagttactgcacgtcgtctgccttccgaagagcaggccactgaagccgagctgcccattctcctcatcgaacaccagcaggttgttctccatctgaaaccctcctatgacaaccgccggcgccggtgcaccgccgccgtagccgtgccctccctgctgcttctcttccttcatctcgaggaacgcgaagcacgccgtgtcgtcgctgacctgcaccatggagttgccgccgaacaccgtccagttggcgccgctctcgagcatgaggtccacctgcggcacggcgtaaccgagccgcgtcgacccgagctcccgcgagtcgtagcacagctcgaacggcggcgtcggcggcttcctcccggccatggccatgacctcgaacgccctcacgaacggcgcgtacacgtccggccggagcaccgtgtaggggacgcg

SEQ ID NO: 132251 - DNA, 355 bp, Zea mays
  Clone ID: MRT4577_52099C.1
ggaaaacaatgaattctcaatacgacgactcgaccgtttgtttttttctaaacaatgaatccaaacatgagttttgttcctaagttttgtcctaaacaatgaattctacttcacacgtgggacacttgagaaaaaatgtcaacataggctcacatttttaaaaattatacaattgtttgtgacagaggacgtgagaccaactgatttgggtgtgcttatttaagtgcggggaaacttgagactaatttgttttgattgacatgcagaatggtattcattaatagtttgtacccaaggactgaatttgcttctagaatgattggacgggtgggtgggtccggcaattaatttccgg

SEQ ID NO: 132252 - DNA, 180 bp, Zea mays
  Clone ID: MRT4577_5209C.1
gacgacaccatgagaggtgcccatttcgatccacatctggcctggtccggtatccagtgtcggaaacgtcgtgcttgggaggctgtacttgcctctgagctatgcgcattcagggctgactggtcagatgcccgcgtgtctaagactcattggggtgcaggtgactgatgcttttcaaca

SEQ ID NO: 132253 - DNA, 449 bp, Zea mays
  Clone ID: MRT4577_520C.1
tcccttgacaagatttgaaggaagaaccatgtgcttaagaaaagcgccaacaacacctggtttaccaccgcaagccaaatgaggaaggccgcttccgcgaaggccactaacagaagaaggggaagcacccccagcactggagaaatgcggcaggtccggcgccagccgctgccgggtgcggacggcctaggaagaaaagcacaaagccaagaaggacccagagaacgagcacgcgcaccggttcaaggaagaggtggccgacgtcgacgccgtgggctccgacggcttcgctttccacgagcaccacgagaagagggacgccaagaagcacgcccacaactgatacgtcgcggatgctgttccatctgatcttccaggctcgtcttcgtctactgtgtgccgggcagaccttgatttggagtaccgatatttgcatggaagtaggaact

SEQ ID NO: 132254 - DNA, 109 bp, Zea mays
  Clone ID: MRT4577_52100C.1
taactacaccaccgccaccattatcatggagcttattttaaaaacaatccaggccctcccaactacctcaaccttcactcatacaaacttaatctactactaccaacca

SEQ ID NO: 132255 - DNA, 1970 bp, Zea mays
  unsure (1)..(1970): unsure at all n locations
  Clone ID: MRT4577_52101C.1
acgacgcatctcactcgctcatgggacgacgacccaagccaagaacaacaagaagagtctttcctcactcactcctcgccgtctccatctcgcccacggttgcgctgccggcttcgcttgcctgctttgcctcgcaccttgttctcctcgtacgccgcacgcacgcacagctcattgcttcgaggaggagggggggctaggaggcgcatccgcccgtggcatgaccgcatgaggccggctgtcggcccccgccaagaatgagaggctgggctacctctcccaccagcgcaccgacccacaccgcaaggaagaagacgccggcgaggaggcgaggaggaggcgatgggcaactgcggcacgcgggaggagaatgccgtcgtcgccgcgcacgcgcaagttcagcagctgcacttgctgcaacattctgccaagaatgctcttgcagataggaagcacaaccggaccttttcagacataagtgatccttcaacgcctggcaagattgaagataccaaggacatttccatatacaacaatgtgattgccttcacattgtttgagcttgaaacaatcacaaagagctttcgtgccgcttatgttcttggtgaaggaggctttgggactgtttacaagggttatatagacgagaatgtccgggttggcctgaaatcgctgcctgttgctgtcaaggtgctcaacaaagatggacatcaaggacacagagaatggcttaccgaggttaatttcctggggcagctgaggcatccaaatctagtaaagttgatcggatattgctgtgaagatgaccaccggctgcttgtctacgagttcatgtttcgaggaagtctagaaaaccacttattccgaaagacagcatcccctttgccctggggtactaggatgtcaatcgcgctgggagccgctaaagggctcgcttgcctccacaacgctcaaaggcccgtcatctacagagatttcaagacatcaaacattctgctggactccgattatactgccaaactgtctgactttggcctcgcaaaagatggccctgaaggtgatcagacgcatgtgtcgacacgggtgatgggaacctacggttatgctgcccctgaatatgtgatgaccggtcacttgactgctcggagtgacgtgtacagcttcggcgtggtcctgctggagctcctgacggggcgcaagtcgatcgacaagtcgcggcccagcagggagcagagcctggtggactgggcgctcccgaagctcaacgacaagaggaggctcctccagatcatcgacccgaggctggaggggcagtactcggccagagccgctcacaagtcctgcagcctcgcgttctactgcctgagccagaacccaaaggccaggccgctcatgagcgacgtcgtcgagaccctcgcgccgttgcagcagggcggcggcggcnnnagcggcagcgaccctccggccttcctgactgcagaggccgccgcaggctgaccggcaacagcgtcgtccacttcagggccatccccaaccccaagtgcacgcctgttgtcccggcttgcagagtgcggtgatgttgctgcgcttcggttgaagctgctgggataggttcaggtgtgtactgtgaccatgggtggtggtgcgttttgatgatctgcatgctgctgctgctgctatgtaatgccctcagattttcgctggggtcttgtgactgagcgagccctgctgaaactggcgggggttcaagattaacccaagaaatggaaggctgaactaagagcggttggatatggcatgcatgcatgctgctgctgtgcatatcttaggaatcaatcagtcagtcagtcagtctgtactgaatttcttggcaagttttctctttttttggcatcctgccatcgcagggaagaataatgggtggggtgacctcttgatgcatgatttgtctgccatcatcatctgaattg

SEQ ID NO: 132256 - DNA, 586 bp, Zea mays
  Clone ID: MRT4577_52102C.1
aaaaaacacccgcccaacgacccaggaacgatggggggtggttttaacgccttcctaaccgggttccaagttttcttggggccccaacttagccgggggggcctttaaaaaactaacttttaacattggcccagttggggcctttttggaccaaaattagggggttttccaaaagcgtttcccgacataactgggggggttccccctcccccaaaaaagtaaacccccggtttaaaaaaaaaacatggggctccttttttttttatgcaggcccggaattttttggaccggaaccctgccccccaaattttgccccccttgacggggggacgtttccgactttttattaaattttttaaacgggccaacctgaacagttgccaaatgggcgtaccaaatgggaccacccccgggtttgggtggggggctcctttggcccccaaaaaaaagggaaggccccccctcctggaaattattaggactgaagcctttttcattatgcggggggggggagggggtgggccttggagccccgatttttccagcttgcccccccatgtaaaaatcgaatttttttggaggggaa

SEQ ID NO: 132257 - DNA, 530 bp, Zea mays
  Clone ID: MRT4577_52103C.1
ggcggcacgagtcgctgctctggtccccttcctcgcgcacctcagcccagcacacgcacgtccctcggcctacctcctacctcctggcaggccgctgcgcgactctccagcttccaactcatgagcgaacttcgtgcggtcggcggaccttcctgtgtcacccatcggacggacttctctcaaccgctgctgcctcggtgttactcagactacgccctggcgtcctcgaccaaatctcctgcaatgctgctgtaagggctgcctgcaaggcacccagcctgcactgcaaagctctaaccatgtctcctatcagcaggcgactcgtccctcgactgtcggcgccggcacgatcccctcaagcactccagcgcactgcgcgccgcagcccagctagaccccgcagctcgcacgccagcacctacccattcatccctgtggcccctagccgcgcgcaagccagtcaccaaggactggcacctcagctgctccctggtaaggctgcacatcatctcgcacagtctgatccaacc

SEQ ID NO: 132258 - DNA, 2601 bp, Zea mays
  Clone ID: MRT4577_52104C.1
ctactgcctccgccagaaccccaacgtcaggcccctcatgagcgacgtcgtcgagaccctcgaaccgttgcagggcagcggtggaggcgacggacgcggccagccttctggccttcctgactataggggtcgccgcaggataaccgggaacagcgtccacttcagggccatcccgaaccccaagtgctcccccgccgtcccggccacggcttgccgagtgcggtgatgggtgctgtgtttcggttggagctgccggggtaggttccgttgtgtatattgcggccgtgggcggtggtgtgtgtgtgtgggtgcatgtgtgtgcttggcggcggcggggtttcggtttcttctcgggttttggccggcgttttgatgtgtaaatttgatctgcgtgctgcattgctgctgctgctgcttttgtaaggccctctaattttcactgtggtcttatgtatccttcgactgagcgagccctgctgaaactggcgggttcgggattaaccctagaaatgaaatgaaaggctgaaccgagagcggttggatggctgatatggcatatgctgctgttgtgttgtgttgtgttgtatttgaagaatcaatcagtctgtatcgagtctcttgggaagttttcttctttggggcagctgccgtgtagtgaaatgggagcactgcactttttaaggaccacggtccctccggcccgggtccttttctccaccattgaaacactctctgaccctcactcgctccctgtcacacacactacactcgcaattcatccgcagtcacaagctcggctgctgctcccgctaacggttgaggcgttgctggtgcacacaggaagggaagggaagggagagctgcacacagctttgctctggctcttggctcccctgtccagctgtcctgtccgtccatcatggaggaaacgcccagcccgcagctctagccgccgtcaatctcgtctcgtatcggagtcgaaggaagtaagaggcgggatggcatgaagcgacctaccaagaatgagaggctgggcaacccccggcacaagtaggaggaagaacccgagcaaccgagccacagggaggaggaggagatgggcaactgcggcacacgggaggagaatgccgtcgtcgctgcgcacgcgcaagttcagcaactccacttgttacaacagccttccaagaacgccaatgcagataggaagcacacctgcatgtcatcagatataagtgacccttccacacctaggaaagttgaagatgccaagaacatttccatatacaacgatgtgattgccttcacattgtttgagctagagacaatcacaaagagcttccgtgttgattatgttcttggcgaaggaggatttgggaccgtttacaagggttacatagatgaaaatgtcagggttgggctgaagtcactgcctgttgcagtcaaggtgctcaacaaagatggacatcaagggcacagagaatggcttaccgaggttaactgcctggggcagttgaggcatccaaatttggtgaagttgatcggatattgctgcgaagatgaccatcggctgcttgtctacgagttcatgtttcgaggaagtctagaaaaccacttattccgaactgttactaactacatttgaagaaaaaggcaaaataactggaatgctttccgatgctagcatagacagctacgccattgccctggggtactaggatgtcaatcgcgctgggagccgctaaagggctcgcttgcctccacaacgctcaaaggcccgtcatctacagagatttcaagacatcaaacattctgctggactccgattatactgccaaactgtctgactttggcctcgcaaaagatggccctgaaggtgatcagacgcatgtgtcgacacgggtgatgggaacctacggttatgctgcccctgaatatgtgatgaccggtcacttgactgctcggagtgacgtgtacagcttcggcgtggtcctgctggagctcctgacggggcgcaagtcgatcgacaagtcgcggcccagcagggagcagagcctggtggactgggcgctcccgaagctcaacgacaagaggaggctcctccagatcatcgacccgaggctggaggggcagtactcggccagagccgctcacaagtcctgcagcctcgcgttctactgcctgagccagaaccccaaggccaggccgctcatgagcgacgtcgtcgagaccctcgcgccgttgcagcagggcggcggcggcggcagcgacgcgtcctccggccttcctgactgcagaggccgccgcaggctgaccggcaacagcgtcgtccacttcagggccatccccaaccccaagtgcacgcctgttgtcccggcttgcagagtgcggtgatgttgctgcgcttcggttgaagctgctgggataggttcaggtgtgtactgtgaccatgggtggtggtgcgttttgatgatctgcatgttggattaatgtgggcttggcccaaattaatattcaataatagtcaatgctaatggccaatgctgcccaaaaaaaaaaaaaaaaaaaaaaaaaaaaaaaaagggcggccgccaccgcggtgga

SEQ ID NO: 132259 - DNA, 2940 bp, Zea mays
  unsure (1)..(2940): unsure at all n locations
  Clone ID: MRT4577_52105C.1
gtcacgcctgctggtgctgcgtacgctatacagccggccggggttccttttctccaccagtgacactccgacctgaccctctctctgtaacacacacagacacactcaggctccgcagaagctcggctgctgctccttcagtcagtctagcaacggttgaggcgttgctggtgctcctgccgcttaccctgccctgttcactgttctgttccgcgtatcccacaggaagggaaggggaggaagcagcagcagcacacagctttgctctcgctctcggctccccgtccaccaaaggaggaaacgcgcagcccgcagcgctagccgtcgtctatctcgtctcctagtccaaggaaggaaagaggcgcttggcatgaagcgacctaccaagaatgagacgctgggctacccctggcacaagtagagcaagagccccagcaaccgagccacagtgaggaggactcgagggaagagatgggcaactgcggcacgcgggaggagaatgccgtcgtcgctgcgcacgcacaagttcaacagctccacttgttacaaaatcctgccaagaatgccattggagataggaagcacaaccgcacctcatcagatataagtgatccttccacacctaggaaagctgaagatgccaagaacatttccatatacaacgatgtgattgtcttcacattgtttgagctagagacaatcacaaagagcttccgtgccgattatgttctcggcgaaggaggatttgggaccgtttacaagggctacatagatgaaaatgtcagggtggggctgaagtcactgcctgttgcagtcaaggtgctcaacaaagatggacaccaagggcacagagaatggcttaccgaagttaactgcctggggcagttgaggcatccaaacttggtgaagttgatcggatattgctgcgaagatgaccatcggctgcttgtctacgagttcatgtttcgaggaagtctagaaaaccacctattccgaaagacagctacaccattaccctggggtactaggatgtcaatcgcactgggagctgctaaagggcttgcttgcctccacaatgctcaaaggcctgtcatctacagagatttcaagacatcaaatattctactggactctgattatactgctaagctgtctgactttggcctggcaaaagctggccctgaaggtgatcagacccatgtatcaacacgggtgatgggaacctacggttatgctgcccctgaatatgtgatgaccggtcacttgactgctcgaagtgatgtgtacagcttcggcgtggtccttctggagctcctgacggggcgcaagtcgatcgacaagtcgcggcccagcagggagcagagcctggtggactgggccctccccaagctgaacgacaagaggcggcttctccagatcatcgacccgagactggaggggcagtactcggccagagccgcccacaaagcctgcagccttgcgttctactgcctgagccagaaccccaaggccaggccactcatgagcgacgtcgtcgagaccctcgaaccgttgcagggcagcggtggaggcgatggacgcggccagccttctggccttcctgactataggggtcgccgcaggataaccgggaacagcgtccacttcagggccatcccgaaccccaagtgctcccctgccgtcccggccacggcttgccgagtgcggtgatgggtgctgtgtttcggttggagctgccggggtaggttccgttgtgtatattgcggccgtgggcagtggtgtgtgtgtgggtgcatgtgtgtgcttggcggcggcggggtttcggtttcttctcgggttttggcctgcgttttgatgtgtaaatttgatctgcgtgctgcattgctgctgctgcttttgtaaggccctctaattttcactgtggtcttatgtatccttcgactgagcgagccctgctgaaactggcgggttcgggattaaccctagaaatgaaatgaaaggctgaaccgagagcggttggatggctgatatggcatatgctgctgttgtgttgtgttgtatctgaggaatcaatcagtctgtatcgagtctcttggcaagttttctcttgtttggggcatcctggtatagtagggaagaacaatcgtgtgaccacatgatgcgcgatggtaaactgacaatgtttggaaatgtaattggtgatgtttttttttggaaaaaaaaaaaaaaaaaaaaaataaaataagaacaaaccgctcatgagcgacgttgtcgagaccctcgccccgttgcagcagggcggcggcggcggcaacaacgcgtcctccggccttcctgactgcaaaggcccccgcaggctgaccggcaacagcgttgtccacttcagggccatccccaaccccaagtgcacgcctgttgtcccggcttgcaaagtgcggtgatgttgctgcgcttcggttgaagctgctgggataggttcaggtgtgtactgtgaccatgggtggtggtgcgttttgatgatctgcatgttggattaatgtgggcttggcccaaattaatattcaataatagtcaatgctaatggccccctttcattgctgctgctgctgcttttgtaaggccctctaattttcactgtggtcttatgtatccttcgactgagcgagccctgctgaaactggcgggttcgggattaaccctagaaatgaaatgaaaggctgaaccgagagcggttggatggctgatatggcataagcngctgttgtgttgtgttgtgttggatctgaggaatcaatcagtctgtatcgagtctcttggcaagttttctcttgtttggggcatcctggtatagtagggaagaacaatcgtgtgactcacatgatgcgcgatggtaaactgacaatgtttggaaatgtaattggtgatgtttttttttggatc

SEQ ID NO: 132260 - DNA, 649 bp, Zea mays
  Clone ID: MRT4577_52106C.1
cggacgcggggatcacctatagtattttgagcattcaaaaacacaccatgcgaagtacattatccacaacctaacaacaatggctaccaagaatattatccctccttgcgcttcttgcgctttttgcgagcgcacacaaatgcgcccattattccacaatggtcacttgctccaaggtccattattacacagctcctcccaccagctactttagtgggctactaacacccagctgagcaagcctatttgctacaacaagcaattgcggagagcgttttacatcaaccaatttaccagctgccacaacaatccttggcacatcgtaacaatacaaaccatcgcatcgcttcagccacaacaattcctaccagcactgagccaactaaccatggtgaaccctgccgcctacttgcacagcagttgcttgcatcatacccacttgctgtggcaaacgcagttgcagaccagccacaacaacagctgcaactagctcctgccagcgctcactcaagtagccatggtgaaccctgacgcctacctacatcagcaacaacatgcttgtatctagcacgctcgctgtgtgcaatgcacctacatacctagcacaacaattgttgcaacagactgtacctgccctgtcggacgctcg

SEQ ID NO: 132261 - DNA, 517 bp, Zea mays
  Clone ID: MRT4577_52107C.1
cgcgtcctccggctttcctgactgcagaggccgccccagcctgaccggcaacaacgtcgtccacttcagggccatccccaaccccaagtgcacgcctgttgtcccggcttgcagagtgcggtgatggtgtgtactgtgaccatgggtggtggtgagttgttttgatgatctgcatgctgctgctgctgtaatgccctcagattttcgctggggtcttgtgactgagcgagccctgctgaaactggcgggggttcaagattaacccaagaaatggaaggctgaactaagagcggttggatatggcatgcatgcatgctgctgctgtgcatatcttaggaatcaatcaatcagtcagtctgtactgaatttcttcaagttttctctttttttggcatcctgccatcgcagggaagaataatgggtggggtgacctgttgatgcatgatttgtctgccatcaaaaaaaaaaaaaaaaaaagcggctttgggatttaaaaaaaaaaaaaaaaaaagcggcc

SEQ ID NO: 132262 - DNA, 355 bp, Zea mays
  Clone ID: MRT4577_52108C.1
tgggtacctcgaggccggccgggatatcactgcaagagagcgtcggcgtataccatgatcgcgtccacacaccaggatgcgcagctcctctactcgacaggctgtcatggagaagattaagatcggaatcaacggcttcgcgaaggatcggcaggttcggggccaggggctgcctccatagcgaggatggagagctcctggccaactgaaacatcttagtcaccagaggaacataaactaaatggactcccgtactaccggcgagcgaaatgggagcaccctaaaccgagactccaggactgcgagacccttctcttcggtgacaagtcggtcaccgtctttggcatcaggaacc

SEQ ID NO: 132263 - DNA, 745 bp, Zea mays
  Clone ID: MRT4577_52109C.1
cgaggccggccggggatccgctaccaagatactcctgcaccgattaataaattcatgcagctctataatttatttgcataaagcagcgagagctcgatcatcatcaggaactatctacccccttcaatttgcagccgcaaataatctatcggtcgtcgtcagcttgcgagcgacaaggcgcgacagatcgagatgatggaaagcagtggtggtagtggcagcagtgatccgttgctgctggcgccgggattcaggttctacccgacggaggaggagctgctgaccttctacctccggcaccgccttgccggcaccaagcccgtcgtcgagcacctgatccccgtcatggacatctacggctaccatccctccgagctccaggcgatggccggcgcggcgaacgtgtgcgacacggagcagtggttcttcttctgcccccgcgcggagcgggagctgcacggtgggcggcccgcgcgcaccacgccgtcgggctactggaaggccactgggtcgccgtcctacgtctactcctcctcgcccaacaaccgggtcatcggggagaagcgcaccatggtcttctaccagggccgcgcgcccaccggcaacaggacccgctggaagatgaacgagtacaaggccgtcgccgacatgtgcgccgccgccgcccggggcgcccgtcatgctgcggaacgacttcagcgtctgccgggtgtacatcagcacgggcacgctgaggtccttcgac

SEQ ID NO: 132264 - DNA, 268 bp, Zea mays
  unsure (1)..(268): unsure at all n locations
  Clone ID: MRT4577_5210C.1
gggagcacgcgtgctatcacgctcaccacgtgccagctcccgccccactacaaggtgttctatcttcgggactgcggtcacatggagcttggtggcattggcccacaccttgagggagggcatcgcccccagtgtaccgtgccaccgaacgggggggttgggtcggtccccacactanacgtcgaggcggtcggatctgatgggagcggtcttgtgaaggctcggaagagggaccctgagctggattactcccttggtgggtggacct

SEQ ID NO: 132265 - DNA, 398 bp, Zea mays
  Clone ID: MRT4577_52110C.1
cttacttggttaaaacaggccccccccctattttttactattgggggggtgagggggcccccaaaaaaaacataattcaaacgacctgggggggcaacgaagaattgcccggggcagaaaccccccaagaaaacaccttattggggagaccccccctgcacccccctggggagtgaaccctttaggggggccccagttgcccccccctttggttggcaccccgcctgggcgcccctaccaggggggacatgtgttttgcaaccccaatcgtccccgggaaccccctgagggcgccgggaaaccccaacgaaccctcaaggaaagggacccccggggccaccaccggggggcccggcaggtaggctcctctgaccgctactcggagcgccacggggggg

SEQ ID NO: 132266 - DNA, 145 bp, Zea mays
  Clone ID: MRT4577_52111C.1
gcgacgcctgtgtcggcaagctctgcggcgtagtcgcggccgacgagaggcgctacgaggacggctacgctagggtgtcctatagggtacttagaggcaagacccgtacggtatgatgttggtcgttcgccgccgacatgcgcgc

SEQ ID NO: 132267 - DNA, 356 bp, Zea mays
  Clone ID: MRT4577_52112C.1
cgcttttacgcatgggtttccccatgtgccagaggggagactctagggctccgtacgatgaagacatggccctctatggggcaaaaacctcacctggacgggagcacacggacaaggatctctcacatgctgacttcggccgcctggacattgagctcaccaaagccgaaatgccctggctcatggcgtgccgcgcctagttcggtccgtccaagcccttcgccggcgctaggatctcggggtctctccacatgaccatccacaccgccggcctcatcgagaccctcaccgcgctcggcgccgaggtccgctggtgctcctgcaacatcttctccacgcaggaccacgccgccggc

SEQ ID NO: 132268 - DNA, 717 bp, Zea mays
  Clone ID: MRT4577_52113C.1
cattgggtacctcgaggccggccgggcgcaaccttcgcggggatgcgccgcgccgcgccctcctccaagctgcaagggatccttctaacttgcttgcccatgaggctgcatttgcacttggacaaatgcaggatgctgaggctattcctgcactggtggcagttctcaaagatctttcgctacatccaattgtccgccatgaggtccaagaaacttgcgagctggcactaggacgaatagaggagaataagaaagttaatggggctgagagtacaaccacttcaccctttctctcagttgatccagcgctgccttcaaagcatgggctttcagtagatcaattaaggggccttcttctcaatgagcaatagagcatgtaccaacgttatgcagctctttttgcgcttaggaatgatggtggagatgctgctgtttctgctattgttgcagctctgagcgtcaaaagtgctcttctacgtcatgaggttgcttatgtgttaggtcagctgcaaaacaaagccgcttcagatgcgctttctacagtcctgaaggatgtctgtgagcatccaatggtcaggcatgaagctgctgaagcccttggctcaatcgcagaccaagaaagcattgcccttttggaggagtttgcaaaggatcctgagcccatagtctcgcagagctgtgaagtagctctcagtatgctcgagtatgagagatcgg

SEQ ID NO: 132269 - DNA, 1751 bp, Zea mays
  Clone ID: MRT4577_52114C.1
gcactggcacctcccccgcgaggaactactacgatggcatcctcccgtgaacctcctcctcatcctcctcctcgacaggaagaggatccgcaacggaaagaagggcaccaacatggcgacggatgtgacgacgactagatcaccaccccgctcctgtcggaagcggctacgacgtcgtcttcgtcgtcgtcggagggagacgatccagagaactcggcgatctagtaggtggtgctgacggcgccgtaggttgattagcccgtggacgtcggtgctgacttgccggatgggggtgttgtgaacgtattcctgcgctgtggtgacgtttctgaaatatttcttttggtaccgttgggagccgttgagcatcattggtaccctcgaggtcttccgggtttccgagaggcgggatttccttcgccgccgccgcccccagtgaccaccttgccgaccggagcgtgtgaaccgtacggagtcgcccgcgtgagatgacggccacctccgcgttcgagtcgtccccggagatggagcggttcctctgcgagcggctgctgaacacggagcagcccatcgcggagcgcttccgggcgctcttctccctccgcaacctccgcggggatgcgccgcgccgcgccctcctccaagctgcaagggatccttctaacttgcttgcccatgaggctgcatttgcacttggacaaatgcaggatgctgaggctattcctgcactggtggcagttctcaaagatctttcgctacatccaattgtccgccatgaggcagcggaagctcttggagctattggcctggaaaagagcatccctgtgttggaggaaagtctaacaactgatcctgctgtggaggtccaagaaacttgcgagctggcactaggacgaatagaggagaataagaaagttaatggggctgagagtacaaccacttcaccctttctctcagttgatccagcgctgccttcaaagcatgggctttcagtagatcaattaaggggccttcttctcaatgagcaagagagcatgtaccaacgttatgcagctctttttgcgcttaggaatgatggtggagatgctgctgtttctgctattgttgcagctctgagcgtcaaaagtgctcttctacgtcatgaggttgcttatgtgttaggtcagctgcaaaacaaagccgcttcagatgcgctttctacagtcctgaaggatgtctgtgagcatccaatggtcaggcatgaagctgctgaagcccttggctcaatcgcagaccaagaaagcattgcccttttggaggagtttgcaaaggatcctgagcccatagtctcgcagagctgtgaagtagctctcagtatgctcgagtatgagagatcggggaaatcctttgagtttctcttccttcagactcctcatgtgcagtcctaggttcctcttcgtcgatgatcactcaatgcgaagtgactgaaagcttcttgtattggttaatgtgactggaccagccatatatccactggctttgatgatactctttatcctgataggatctgttttttttttttttaattaataaagataaggaggttgaaacacggagcagcatgaaaacaaatggaaaagaaaccatgaaaactatgaagacttataaatttcgacaaaagaatacatgtaaactaggtcagtggatggtttcggcaattatacactcgcagcaaagaaaactgggctatcctcaccaaaaaaaaaaaaaaa

SEQ ID NO: 132270 - DNA, 150 bp, Zea mays
  Clone ID: MRT4577_52115C.1
ctgaccgaggcagacttgctaatcgcaccaatagaaccgacttgaccgaacgccattagatggacgactagaaatcatcggctctgagtctgacacggctgactagcatatggacaagctcaagacacaagcaaactgaatgctggatct

SEQ ID NO: 132271 - DNA, 595 bp, Zea mays
  Clone ID: MRT4577_52116C.1
tccgcccctccatccgcgcctccaaataaagtaagcgcggccacccgcaccaccgaatcctcctccgcctcgcaatccgccctcgccctcccgccaccgcctccgctccccgcgaccatccatccccttcctcctcgcggaggagagggagcacgccgcgcgcggccgccatggggttctgggaggccttcctcaactggctccgcagcctctttttcaagcaagaaatggagctttcattgattgggctccaaaatgctgggaaaacttcgcttgtgaatgttattgctacaggaggttttagcgaagatatgattcccacagtaggattcaatatgagaaaggtaaccaaaggaaatgtcacaataaaattgtgggatcttggaggccagccaagattccggagcatgtgggagagatactgccgtgctgtttctgcaattgtgtatgttgttgatgcagcagatcgggagaacatggctattgccaaaagtgagctccatgaccttctgagcaagccatctttgaccggtatcccattactagtcattggcaacaaaatcgacaagcctgaagctttccctaagcaaagttt

SEQ ID NO: 132272 - DNA, 195 bp, Zea mays
  Clone ID: MRT4577_52117C.1
ccaggccaggagagggaataaacatattttttgggggcaaagaaggaattcccccatttcttatcccccaagagacttccttaagtcccccatgcatgttgggaccaagaaaacaaattttgcatcgccatgccatgatttcagatgcgattttttccctggctagcaaaggactcaaccaaaagctggcccccc

SEQ ID NO: 132273 - DNA, 247 bp, Zea mays
  Clone ID: MRT4577_52118C.1
gcctgttagtcggttccgatctcccgacctgatgcgtttctgctgtagtcggggtgttttccaggtctgtgccgttcttgatgtctgatagcttatcttctagtactcctcgtgtcgttctctttgtctctgcgcctgtgcagttgctctgatgctgcctgtcattgccattgccgttgtttcttattaagcactcactctagttgtgatgcccgcatgctatgtttcgattctctaagttgttatt

SEQ ID NO: 132274 - DNA, 394 bp, Zea mays
  Clone ID: MRT4577_52119C.1
attcggctcgagggacgaccctactgcttctactactagtgtacatatgcaaaaatggggaaggtgtttcagcatctccctctctaagcctgcaccgctggagagcccgtactataccctccccaatattatcaggacttacgcatgaaccctggaggcggcgccaccgagacccccctccggttgttcgtctccctactcgccaccgcgaagcacggtcggcccgtctcgggaccccacgagcaggccagtcgggacgttcgtccaccagcaggagggcgctcagggcggccaagcctatgggggggcaaagctgctcactgctcaatgctcctaccccctaccacataaaggcaggaagtgtggctgaggctgttaaaggatcccgtgttgc

SEQ ID NO: 132275 - DNA, 190 bp, Zea mays
  Clone ID: MRT4577_5211C.1
gcttctgactgaaggttccattgactatgatatcatcaacaacgtaccgacacctcgtctttcaagaggaaatacagatcggtttcttgctgatccaaacaggtctcctaaaaccaagctcggggccaacatgccttcacgagctgaacatctcgcccgcaagagcgactgcgaaccgcagctgatcgga

SEQ ID NO: 132276 - DNA, 361 bp, Zea mays
  Clone ID: MRT4577_52120C.1
ggtcctcgtcgtcgtcgacctctgcagcaggggtggagccgcccgcggcgcgatgggtcggggtggcggtcagcgaggcggcggcggcggggtggactggggaggggtgggcggagtgcgggtgcgtcggggtgggcggctcgacgaagcgcgacttgggcttggcgatggaggagcggcggcggagggccgcggggggcagcggcgggcgcgaggggctggaggttggcagcggcttctcggggttctgagagagtttgggagtctccggctgctggttatttctcgggtgcagtggcggcgggtggccgggcgggatgacgaggacgtggtccgcgttattggacgccgtggccgctct

SEQ ID NO: 132277 - DNA, 669 bp, Zea mays
  unsure (1)..(669): unsure at all n locations
  Clone ID: MRT4577_52122C.1
ggccgtgtgggaaagtcaagaactgccagcgtggaatctcagcagctgtgtccggaacagctcagaatggcaggcagggcccaggtgtcaccatgggtctctggtctagacactgtagagtgtatggcagagagcgtctgtcgtctgtgcgagatgcctcgatctggaccggagcagtgcttagaccaagggcgtccctccctcctgtctccccttctcttctctcgtctcgtttgcgttgaatgccattcggcgcatggttggtgtatcagagatgacagatggtcggttgctgaacaagaatttattgctgcttcatactaataacaataatactagttaagtcgtgcatctctacggtttctatatattatatatggtttatttgtacatcactgatatcacacatcaatatgagttgctgtggttatagaaagaattagagaccaggnttcaaatcctagcaggtgcaccttgctatacgcgtatggagtagggtgacacacaaagaagttctcactttaaagatgcagtgaaataatacaggttgtatctttgattgttctgtgttgtggattaagttatattgctatgctgcactcagcagatcgcgcatatagctgtgtaacgcattgaggtgatatgagagagctgctagatgaatttgca

SEQ ID NO: 132278 - DNA, 283 bp, Zea mays
  Clone ID: MRT4577_52123C.1
catccgctatcccccacctgccggcccggcagcacagagcgggggtgcagacagatcgagctccggaagccgagagtggcagcgccaacaccagcgactgcggcgatggcgagcacggagacgatcacagggtcgtcgacccgctccacggggctgctcgaggacgagctcgacatcgcgatacccacgatccgcgacatccacttcatgcacatgtagcagcccttgttccggccctaccacatggtgatcgtgcaggacggcgacgcgaccaacgccatca

SEQ ID NO: 132279 - DNA, 460 bp, Zea mays
  Clone ID: MRT4577_52124C.1
caggcaaggcgagacagggcaagaaaagagcaccctgctcataactgggaggacaaaagtcaggggtttgcaatacatcatccaaaaaacatcgaattgctcagcccacggggcaaaaaattttgcaaaggcaaaaacctttatttttttggacactaaaacacaaaacaaaggggcgcaaaagcccccccgccgaggcccataaaaaaaacaggttgggcctggaccccttgaagggggccctgagcttcctggggggcggcctcaccttggggaacagaagcggaaacttgatccccaagttgggaaactgcttcgtgttgcccctcttgcacagtttgaaggggaccgccccagtcttgataatctggatgcagggggacctcacccgggggcgcgaggccatttcgttgagcatttgctccacggccccgttaagggtcgggccggggaactcctt

SEQ ID NO: 132280 - DNA, 534 bp, Zea mays
  unsure (1)..(534): unsure at all n locations
  Clone ID: MRT4577_52125C.1
ctgcaanttattgctcctttgtgcgcaaagcacacaagaagnggcttgagccggcccagggcctacctgccatacgagcgggcccaggaggtatttggtgagacggtgaagtcgcagagttttcggactacggggctccagctcaaactccaaaagtgcaaagatacacagagctcgtggataagaagggaggcagagatgaacgtatgggctccggctctcaggatgcaagccaggacacatctggaacgctgggcgccacctgaaaacggagaacgggcaacaagctgggaggagtggtcaccaaccgacatgaagccggcgacttggactacccaaaccagaagaagtaacacccagagccacccaaccttgggccgggagtgcatccaggagctgacgaaagggcaacatcatttatcacggatgatgtccggcatggaatctatgcgggaacaaacccagagacatttgtacgggcggatggggcattcatcccataggctcatgacctggacatctccacaggcacaa

SEQ ID NO: 132281 - DNA, 414 bp, Zea mays
  Clone ID: MRT4577_52126C.1
gtgggtcgacccaagcctctacacagactcgtgctaacgcgtccgggcaaggatgtcggacgcgaagctaggaccaggctgccggagtcgccctgatctagcttctcaggaactccgaatgccctggatcctagccaatcatcctccttcccctttgaatggttgctagcttctcaagaactccgaatgctctggatcctagccaatcgtcctccttcccctttgaatggttgctagcttctaaggaacttcccattaataaattgatgattattttgtcattggtgataagtcacaggaaactaaccaaaacagaaacaactgattttcccctaattttgtgtttcatgcacagttttttaaatctacggtggatgtttcctggtaaaagtattgtgttccttgacaataatg

SEQ ID NO: 132282 - DNA, 1104 bp, Zea mays
  unsure (1)..(1104): unsure at all n locations
  Clone ID: MRT4577_52127C.1
cccgtgcagaaggctttgtccgacgccggtgtcaagccctccgagnacaacgacgtcatccttgtcggcggtatgacccgaatgcccaaggtctccgagaccgtcaagtccgtcttcggtcgtgagcccagcaagggtgtcaacccggacgaggccgtcgctatcggtgcctcgatccaggctggtgtccttgccggtaacgttaccgacattctgcttctggatgttacgccgctctccctcggtatcgagaccctcggcggtgtcttcacgcgattgatcaaccgaaacaccacgatcccgaccaagaagtcgcagaccttctctaccgctgccgacggccagaccgctatccaggtcaaggtataccagggagagcgagagctcacccgggacaacaagctcctgggcgacttccagctgaccaacctcccacctgcccccaagggtgtccctcagatccaaatctcattcgacattgacgccgacggtattgtcaatgttagcgccagcgacaaagccaccaaccgggagcagtcgatgactatcgcctcgtcttcgggtctctccgactccgagatcgagaacatggtttccgacgccgagcgatacgccgagtccgacaagcagcgacgaatggtcattgaggaggccaaccgaggagagaacttcgtcaccgagaccgagaagtccctcgccgagttcgaggctcagctcgacgctactgagcgtgagaaggtcaagaagctgctcactgagctccgagaggtcgccgctaagggtgctgccggtgaggccggtgtcaccgccgacgacatcaaggccgcccttgactccgctcagcaggcctctttgggtctcttccagatggtgtacgagaagaagaacaaggagtctggcgagtcggccacgcccaacgccgagggtgaggaggcgaagacagaggagaagaagtaaaatagacctggaacataggtccggccgtcattccctccccgctttcgtccccctttagcatagcatcaccgcgacgagccaacatgtactgctcggatgccggtaagtaggcccataatttgtacgaatgaatacactgctcgcatc

SEQ ID NO: 132283 - DNA, 796 bp, Zea mays
  unsure (1)..(796): unsure at all n locations
  Clone ID: MRT4577_52128C.1
ccaggcgggcggggctgcttccttcatctacaggggtcgacgggcacaattggatgtatccagtggcatttgggttttttgagtttgaaaatctggacagtgggacttgggtcatgacacatctacataaagcattgggggatatgcctcttcttgggggtggctcatatgcttgcaanggactgactaaagcagtggccactattttcccaaatgcggagaagagggagtgcttcaggcacttgatgcaaaattacatcaaaaggtatgctgggcaagaacacatgtatcctgcagctagagcataccggaaggaagtgtttgatcaacactttgctaatgtaataggcatttcagacttaatggcatggatgaagaaggagcattcacttctatggtatcgcagtggattcaatccagccattaagtgtgattacatcaccaacaacgttgctgaggtcttcaacaattgggtgaaagactatttggacctcccaatttgtgagttagccgataagattagaaccttgattatggatctattttttaggaggaggaggataggagaaaggcttaatggcaagatactaccagctgtcctaaatgtgttgcgggcaagaactagaggattagggcatttgtcactagtaaactgtgaccactactgtgctgaggttcgtgacaacaacaattgtcattctaggcacattgttgacgccaaagtgcattattgctcatgcgaggagtggcaacacaccggaaagccatgccaacatgctctatgcgtcataatagc

SEQ ID NO: 132284 - DNA, 1863 bp, Zea mays
  Clone ID: MRT4577_52129C.1
ctattctggcggttgtcctataaattgatatcttaattgaggcttccagcatcctttcgcaagtgactggccaagtaaatcagcaatatttgttgacatggtttgagcctcctgcacatgagggaagttgtcttccccaaaatgttgtgccaaccataggtacattgataggacctggtgttttgtctctaggtctaggaactgagtgtcatttgttgcataaccacttggcatttctaatcccatggtaacataatgactttcagaatagttattggcaaatctcaagagatggtccatggcttctgaattccttgtattcacgggagccaagcaaaaaccgtagcgactcttgagtgaaagaccatgcactccctcgagcatatcagcaaccttcttcatattgtcatgctggcatatgaagtatgtgtcatcgatgcgacaagtatcgcataatttatttaacagattattgaaggtaagctcggggaattgactcgcaaacatctcgagttgctcaaaagtgggaaagagtccgactttctccgcctcttcgagtggctcttccagacaccgagtcaaatagcacagatcatatttgaaggttgttgcaagtccatgtggataagcactgcccctccgaccagcacgaccagcaatctgttttaccagtgaagcaggtaccgacgccgtcttttctccatcgtatttaatcaaggtatagaacacaacccttctaatgttaaggttgagccccattccgactgcatcggtagctacaaggacatcatattcattatgctcctggttgaacagctctgcttgctgtcggcgtgtctctggcggaagagctccataaataacacaacacttgtggtgggtatacgtctcaattgccagcttgatctcaaatatcttcttgcgagagaaagcaaccacccagtcaccagaacgtatattctggaagtacccacgaagtgtattttcctcgactacaagaggcttgaaccgctcgtactggtgcaccaataaatcatccccagtgtctgcacaaatcttccggataacgctgagcacgctatcgtcgccgcagaggtgtatctcctccgccctgagcccaagcagagcgcgcgtccatgcagagcccctgacagggtcggccatcatctgtacctcgtcaaccacggcgacctcgtagatctcttcggtcgataccatctcaatggtgcaggcgagatggctggcgaaggccacctccttaacctcctggccagtgcgcaagctacagctgacacccgtggcgttgaccttgtcgaatatttccatggcgaggaggcgcaacgggctgcaatacaccccggacttggccgccgagaagctggcgagcgcgttgtgtgtcttgccgctgtttgttggcccgcagtggtacacgacgcggcggcgcatggcgcgcgcggaaggataccaggtttgaggtgccgtgaggtcggccgcggccatcatcagatcgcgcgccgtgaggtcgtctgcggccatcaacgatctgggcttcctcagctcgtccgccaagttggaggcgcagaactctgcgaaggccgtaaggaggaggtcgtgcgcgtcgtccgcagggatcggagcgagaggagatgcgccgagtagtaagcggaggcgagcttctcttcgctaacgttgtagattttgtggtttgcgtgcggtgaagagaggcaacggcgcctatacggggtcctaccacggttggaactttgggcgaaagccgcggatgagtcctaccacggactcttcggtaggcggggtccgaaggccgaagcggatggatagctcgcgcggagggagaaggacctc

SEQ ID NO: 132285 - DNA, 267 bp, Zea mays
  Clone ID: MRT4577_5212C.1
tgttgctacatatgtagtatgttagattcctacatcattctgccatctttggagattgtccaggttatgatataaccttatttatcagacagctagccagataaaagttgaagagtgacagattgacggacaacatactcttggttgttatgtgcagtggactcttgctacagacctgcaaaacctggcaatggagttcaaaaaaagcagtcatcatgtttaaagcatttcgcatacaaaacaagttatcttatgttgtcatcagat

SEQ ID NO: 132286 - DNA, 507 bp, Zea mays
  Clone ID: MRT4577_52130C.1
aatgaaaatgaaaaatggaaaaggtacaaagggacatgcaggcgggctaggcctcggtcacaagtttaggaactgaaaaaagggggggaaaaaaaaaaactaacgatagggaaaaaaaaaaacgaaggggaaagggggtatttgaataagagcaatagggacgctaaagggctgaatatgaataaccggaacagcaggaccaccatgattaccgagataaacaggaagaggaggcatggcaacggtaacggcctccatgtccgggaaatgcaaaagaaattgaacattatcatcaagcgaaagtgatggtttaagcttgaacctgaacaaaaccaaaagttagggcatgggcgtggggggcgcttggatctgaaattgttatggcggcatagcaacatatgaacatggcaactgaatgggagattgggactatcgtaaaaaccaaatacggtgcgtgaagaagaaaaactaatgggactggacgaagacaaacacaggtatggacgg

SEQ ID NO: 132287 - DNA, 209 bp, Zea mays
  Clone ID: MRT4577_52131C.1
ctcaatgattgctatagaattacgttgaggccatggtttttaagggcttgttcgttttaatgctaaatcatgtggattgggtgggattgagtcgttttaaatccataacaagtccttaaaaaccatggcctcaatgattgctatagaattacgttgactttatttcttttaggtaggctgttgaaaaatttccaaacttaactgaagtt

SEQ ID NO: 132288 - DNA, 272 bp, Zea mays
  unsure (1)..(272): unsure at all n locations
  Clone ID: MRT4577_52132C.1
cccacgcgttcgaactggtctaagtgcacggcgggacctttaggggtaccagatcaatgggcgtcaggtaccggnnntttttggtggaaatgggtgggaccctggccgaaattgaggaaagggcggccgtccttaaatttttaccggagaagagcctttcctaccacctttggaggtttcttgtaattttaaaaagtggattggcttccttctggggaaggttataagtgccccctttccaaaaaaaaaaaaaaaaaaaagggggggcggtt

SEQ ID NO: 132289 - DNA, 1100 bp, Zea mays
  unsure (1)..(1100): unsure at all n locations
  Clone ID: MRT4577_52133C.1
cccctaactcaacctagtcgcccggcactctgggcgacggcgagtatggcgaagggacggcnagggccagcgaatattagccatgcggccgttacaccaagcctgctacgttcctacgccgcctcccgccggtgtaagcaagcatctgatctgacccgtctccgtaaggtccgtgagcccatgtaccccagcagtgtctgactctgactgaggtaggatgccttgctcacctcactcgtttgaatgtgtggcgtcttgattgttggatgtcagtttacatctctggttggatgctaacccatcagtgtacgatggtggaaatatatagctgtcaggtcgaatacagctggcacgtgcaagtgcttagatgtcgggatggacgcgcctctatcagtgttaatgcaagtctaaccaaaatgcgaagctgtggtctttggttgctctgtttttgatctttctgttgttaattaatatatctaattaagggtcccatgccacttgggggaagctctctttttagcttcgaaatacccgcaggttctctgcggggtgctcggatgttggggccctagagcaaatgcagtggtctcatagtacgaggctgtactttggttgatgggtctctcaccaatcgcttcctcacagccttgcctccaacgaccacaacatttaccgtgtccttaaatttctgcgctcttgcgtggcaacatgtttgtaggtcgagatagttctgtttgatcattgtgtaaccattgtagtccggccctgcattaagtgcctttctatttaattatttatgtgattatatgttcatcttcactaggttattgaacaatttaaggctcttgcagacttaaaaactgttgatgtattggtatgagctataaaactgtgttgtatgccctggtttgtcttcagcgaaactgtgctttgctaggtagtcaatacacttgcgctattgcctctgatggttatccagtaataccctgttactaccgccgcagcagctatggaatcattgccttggcttgtcgccgcctctgccagcagaggcagcacagtagctcacttcgtggtccttctgcttgagtttttattgc

SEQ ID NO: 132290 - DNA, 180 bp, Zea mays
  Clone ID: MRT4577_52134C.1
ctgttatcgacgaccgagctgggaccagtggaacgcacagttaactaccaactacagctgacccatatagtggctggaacacatccgggtcagcatgcaagagcagctacgtacaccaatggcccgcaatgctagccagaacttgaaggtgaccttctttggacaatatgttcaccagcc

SEQ ID NO: 132291 - DNA, 325 bp, Zea mays
  unsure (1)..(325): unsure at all n locations
  Clone ID: MRT4577_52135C.1
gaatttctagtttgaaggaattatgctgggctcttcatatgagatggttgtggctacataaaactgatccagcaggccttgggcaaacctccctatacaagttcctaaaaaggcaagatctttcttctccactgttttggtctcagaagtgggaaatggagcacgcactctgttctggacagataaatggctcttggctcctaggttattcgccatcattcctaaaaggattgctaatangagaactgtcctcgaggctctttccaacagaaaatggatatctgatataaaaggtgccttgtcggttggacctaaattggaaaac

SEQ ID NO: 132292 - DNA, 834 bp, Zea mays
  Clone ID: MRT4577_52136C.1
gtagacatgactaggatgcaattgtttggttccttagtctattatgtacactggctccattcatgcattccccctctcaccgccttcctgaacgtgtttcttataatataaagtgataaagttgaaggtggccacactaagtacgataaaaagaagaaaatgccagaggatggtaatcaacatgttggtgctggcaggtctgatagtgcaaggcacaagttagatttggatttgcatttatcagcccacgcgtccgcccacgcgtccgctgagctaaggagtaatttgtagtgtcttggcaagattcatggtttaaacaaccaactgaatatgcgcaagaggatcaagagagaataagaggaaattaatggtaggacacaagggaaagtggttagctagcatttttgccttaccaatggagtagaagtgttgtggtatctattgcacttgcatcactttaggaatcgtcagaacttgatatttcacacctctaactcatgaaaagaaattgcgaactaaggttttaagccttgctaatcaacaatgcgggcttgtgctgttttgacaaagtgggatgagagtgacagtgaaagttttgaagggtttcatattggcaatggatttaaatgggatacaacaagacacatgtttgaacaatttggggatatattcattgctgcaatgtttgatccaatgggtattggttttgtatctttttatgctttcgtgtgtcaaagtgtaaaatacaaaatgcaaagaagatcacattatcattaaaaaagcgtcagcacaaaaaattccttctatctaactggaataaaaatcataagtaat

SEQ ID NO: 132293 - DNA, 606 bp, Zea mays
  Clone ID: MRT4577_52137C.1
gacgcctgcggttccggtccggaattcccgggtcgacccacgcgtccgtgtagagtgacgatctgagctacggggtcttaagtgcgtcagggcgtggaggtctggcgggagacgcatagttacagcgcgtccgttctccgtctcgcagccggcacagctagagcttcgagcgcagcgcggccatggatcccagcagcaagaaggtgacgggccgcctcatgttggctgtgggaggagcagtgctcggatcactgcagttcggctataacactggtgtcatcaacgccccccagaaggttattgaggagttctacaatcaaacatggaaccaccgctacggagagcccatcccatccaccacactcaccacgctttggtctctctccgtggccatcttctctgtcgggggcatgattggttccttctctgtcggcctctttgttaatcgctttggcaggcggaactccatgctgatgatgaacctgttggcctttgtggctgctgtgcttatgggcttctccaaactgggcaagtcctttgagatgctgatcctgggccgttgtgtcatcggtggggactgggggctgactactgggtttgtgccca

SEQ ID NO: 132294 - DNA, 332 bp, Zea mays
  Clone ID: MRT4577_52138C.1
gtgattatgtgagtttttttgtataaggaacggtaaagaaaaagcaagaaaaatagacaaagatggatttaaaccaaaactggtatgtcaatgaagaaatcataaaaaaggaaggaacaccaaaaaggtttggataaataaacataatggcccgcttaaacaaatttaaactaaattgtggttgcactcctacaacaggtttaggttaaatatgatacaactggcgccgttgacaaggaaaacttatatggcgctgttgttgggtttccagaaccaacctggagtggctagacccccctgatgaactgaaatgttacgatcgataggtggat

SEQ ID NO: 132295 - DNA, 476 bp, Zea mays
  unsure (1)..(476): unsure at all n locations
  Clone ID: MRT4577_52139C.1
gcactattatcttgaatctcgttttcactgagttacaacatgttatcagcactgctcgcgagatcagagaaaaagacttgggctgagttccttgttctaatgaacatagacttgggtcgctacagcaaccaactgagaaagagaccaagcgataaaaggacacagcatgcaacaacggattttcttgtaagatattattcttgaatttttggtcatattcaatggcatcgtctccatggacaaagatgagcgaacgggttttccttggaagacttacgttttgcatatgcccgggcggttgctccgtatggggctgttggtcgctagaccgcgcacgccccccgggacgtaccgcgctttggccggaggctgcgttggcccagggccccacaccaatggcctgccgcgaggcccagcccggggctagccgcactgcaaccggcagtgctacccccccccccccngggggggggggg

SEQ ID NO: 132296 - DNA, 344 bp, Zea mays
  Clone ID: MRT4577_5213C.1
gcctccgccgcgcgcactaagcaggtggagacagggtgccggctggccacgccctgcgctcgcggacgcgggacctcttcgcgcgccccttccgaaagaaggggtatataccggtcaccacctacctccgcaccaagaagatcggcgactacgtcgatggcaaggtgaacggcgccgtgcccaacgggatgccgcacgagatctaccacgaccgcaccggccgcgtgtggaacgacaccaagatggccatcggcgtagagggcgagaaacagccccatgggcgcatcatcaggaatggtttccatgtcccctgccgacatgagcagccgtccctctgcactgaa

SEQ ID NO: 132297 - DNA, 413 bp, Zea mays
  Clone ID: MRT4577_52140C.1
aaaaaaaaaaaaaaaaaaaaaaaaaaaaaaaaaaaaaaaaaaaaaaaaaaaaaaaaaaaaaaaaaaaaaaaaaaaaaaagcttgaccctggcccgggcggcacagggggaaggggcgattcttggcagatccccataacagcggggcgggccggctggatcttccttgccacaagggccccacttcgccctttagtggaggcggttcacatgtcccctgggccgggcgttttacaacccatgggactgggccaaaaccttgcccattccccaactttgaataacccttggggccacatcccccttttatgccggcttggcggtaataacccacataggccccgcaccgtttcgcctttccaaaaggtccgcgcaatgctgaatggtacaatgcgactcccccttgtataaggg

SEQ ID NO: 132298 - DNA, 642 bp, Zea mays
  Clone ID: MRT4577_52141C.1
ccaggttatcctgattatgtgcttaagtgggtgaaggaggcacaattgtaagtgatgaagttgcatattagcgtgtatttatcttgatgatttcacttcgtattttttaatctattagtatcatttgcaggtcaatatttataatttagaagcatatattactttggtagtggatgatacagtttaggcagggataaagtgacaggttgaggcatttagatcagggtttaatcaggtgtttggcatgtcatccctcctcatattttcacctcaagaacttgactatctaatatgtggccaacaagaaatttgggaggcgacctccagttgtagcagcggtgatggggtgaagaagctctgggacgtcctggactcttgcaagaagaagctcccgctctagaaccttcagagtatgttgtagtgttgctaaggaatgggaggcgcaaggatgaggctgcaaaggagctacatgtttttaggcgatgagactggtgcatttgtatcctggttatgggatcatttgtcctaaaatttgcacctttatgttcatcctaaagttgcctcttctaaggatgatgttaaaagcactcgcagtgctgccagaggattgcctgttcatagtgtgccaagcagcatgcaagc

SEQ ID NO: 132299 - DNA, 168 bp, Zea mays
  Clone ID: MRT4577_52142C.1
cgggacgcacgctgtatcggaccattaatcgcgccgggcgttgagggcacccgcagtgggaccgatacacttgccaacgccttaactcgcgatccttttagtttccgccctttctttcttgtcacgttcgcctgttttccccgtcgagctctaaatccggggctctct

SEQ ID NO: 132300 - DNA, 347 bp, Zea mays
  Clone ID: MRT4577_52143C.1
atttttcttggggcccaaacacacgtaaacctgcggggggagaccaaatccttctcagtgccttcgcgacacggaccgcacgccgaaggggcgactatgaccggagcggcggactaccagcagatggtggggctgaggccagcctcgctgaaggccatcacgctgacgcacggtcggtacagccgggtcgacccgctgggcatcttcctgcgcgtgggtcttgctcgtcccggctgttatcagccttggtggattggtctcccacttcctatgccgtccggagctacagggcctatggttggacgcagggcttgctaacttttaggcccttaatgagctcattaaac

SEQ ID NO: 132301 - DNA, 2262 bp, Zea mays
  Clone ID: MRT4577_52144C.1
gtctatacctcgccccgtgtccgcgaaggccgccgcaacacccccgcgcgcaacagtcgtcgcccatccctcctcaccccgcgtctgcgaccgcacacacacaacagccgccgcccatcccctctcgcatcgcgttggaaccacccgaagtccaccatcgtcaggtcatggggccgcgtaggttccagatctgggcaaacaacagcctatgcagttcttcggtggctcgtcgtcgacgtcgatcgcgcaggaggcgaccccaacctctggcagctcccccgttccaacagtggccacccacggcagctgcactgcccccgcccgggtccacgacctcggtcaccaacccaccgcctcccccgtctccggcgcgttcgatattgttgccgccgtcgaggtctgcaccatcttcacggacctgtctgcagatgtcaaggaaagggagctacacaacctgttgtgctggctcttgggattcgaggtgtcttactggatgcggacggtgccggagctgagagaggtcattcgaaggtcgatgccgcaggtggagaagacaagggtcataaatagagaagagagaaggctacctggtaattagtggaaagagatgcgatgacggcggtcatggtcgaagagcaggagaggccctagaagaaaggagacttcttcttattcttcggcagggtaagaatcttggaggtaccgaggaactggacaaagaagggtattcatgttattgtggtcactaatggtgagcacattttaggcctgggatatctaggttgtcaggagaggcacgctagcatcggagaagccgccgccggcagtggtcgtggagaaagcgggcaacgaaggtggaggagagggcgagggtctgtatgatgcgatcatgatcgcttcgaccgccgtccaacattgggagcatcgagtttgaggtgacctacctcaacgacgacacatgcgtcacccacccgctcatagctctttgtagctggctacagttacaggcgatggtctacacaccaccaaaacagcaggaatcaacgcgagctgtcagaagcgtctatcagaagctaaattcacctcctttttggtcctaggattaaggcagaaattggttatcctgattatgtgcttaaagagggtgaaggaggcacaattgtcaatatttataatttagaagcatatattactttggtagtggatgatacagtttaggcagggataaagtgacaggttgaggcatttagatcagggtttaatcaggtgtttggcatgtcatccctcctcatattttcacctcaagaacttgactatctaatatgtggccaacaagaaatttgggaggtaatgctatgcactctttatccaagttattatatgtaaaattgtggcactaaataagccttggaggacaagctactatcgtggatcgagtgcttcgagtcgttgggcctgccgatgtgaccctatcctccctctcatgccatccctcccgctgcgcccttcttgtcttccccggctcaggcgacctccagttgtagcagcggtgatggggtgaagaagctctgggacgtcctggactcttgcaagaagaagctcccgctctagaaccttcagagtatgttgtagtgttgctaaggaatgggaggcgcaaggatgaggctgcaaaggagctacatgtttttaggcgatgagactggtgcatttgtatcctggttatgggatcatttgtcctaaaatttgcacctttatgttcatcctaaagttgcctcttctaaggatgatgttaaaagcactcgcagtgctgccagaggattgcctgttcatagtgtgccaagcagcatgcaagttaatcatgaacctgaagctgaaacccagaagacaatggtgattcataaaaaagagattgggatatcaaaaaaagtgttggggaatgattgttcaaggtcaatcagaagtagttcttcttagaagcattgtagccaatgtttctcacgtggatgaaaaggattgtcacaaatgacatgtagataaaagggcttttcataaatcacattctataagacgaaccccgctcgcctgacatgcataaccacaaaaagaggagcagagaggcatatgtgtggtctgccaaggtttctaatcaccttcagttcatgcttgttatttggcatgcttgaacaacatttacagtatcttaattttttttgcatatgcatttgtcaattgtcattcataatatatggtctcatatgaaac

SEQ ID NO: 132302 - DNA, 298 bp, Zea mays
  Clone ID: MRT4577_52145C.1
aaaaaaaggtcccaaacattttttattaaaaaaaaactaaagctttaaaaaaaacaaaaaaaggaaaagaggcccccaaacaaactaaagcttccagaattaaaacggggggggccaaaggcaaaaaaaacagggccgggggaaaggggcccaaaatttccaaggggggccaaaaaaaccccataaatgggaaaaggggtgaacctaaggaaaatcctaaccccaataccaaaaatggggaaaagggctggtttggaccccaaagcaggcccaaaaaggacatttggggcagccccag

SEQ ID NO: 132303 - DNA, 2359 bp, Zea mays
  unsure (1)..(2359): unsure at all n locations
  Clone ID: MRT4577_52146C.1
ttttttttttttttttttaaattcggaggaagtaattaatatccttcctacggtatctcagaaaactgaagttccaaatgactcccatccttacattttagtagcagcaaagttgcacattattttgtacttggaaaaacgcactttgggcatataacagtcgaccatcaaggaattgcaatgaccctcggggagccaaaaaaagagcactagccaaactgtcataggcacgataacaatataacagcacagcagggattcacctgagtgaagtagataaacagataggcatcttcagggctcttagcctacgagcagtttgttctcctccaagaaactgtacgtacggacctggaggttgaacggcgcagggcccttgcggatccctcccggaaatgtcatagtgggaagcgcatggcatgggcagaaccaagccgccagagtctccggcattaggtagtgggatgcagccgaggtgcgtgcacacgccaatgaccaccagccactcagggttcttcacacgctctgcatcctgctctgggtggcgcagggatgtcacatcaacactgttggcaagctttatgccatcctctgtcggacgcctggatgaaggcggtcgttggccgcacggctgcacgcacacagctgggtggatcgcacggtggtacgccaggcggaagtacctcgaggcaagggcacgccggacccgcggttgctgccacgttgtcggcctcctcggagtaccagaagacgcagcagtcatgcatatctgcgcctcccaccactcagggcaaagtatgcaaaggcagtcttcctgggagctccaggaggaaatcttcgatgattgtactcatcataaaccatccttagggttaggattcttcacagcagccacagttgctgggaggtcagctaggcctgcatcttggttccttgggacaactgtttcagtagaagagaaacccctggaagcgacaaagaagggggagtcgatggagaaccgcggctggctccgtccgcgagccgagtcgtcgtcccggtcggggacgccagcgccggcgagggggcccctggctaccgccgcggcggggcgccaggagagggaagacgagagccttctccccgcaacccgcagcatcgtgtcgtcctcttcctccggcccggggtccccagcaaccagcacacatttccctttggcggatcgaaggaaggaaggaaggaggagatgggtggcggcatggaggtgcacaaaaaccggtggatcgaagagtggaacgccggccgcgagaacctcgagttcaatttccgctggacccgccgcagcctcgccgtcgtcggcctcttcggcctcgctgtccccatcctcgtctacaagggcatcgtccgcgaattccatatgcaggacgaggatgcaggccggccatacaggaagttcctgtaagcggcgtccagggccgcaggagacgtcgatccctcgaccggggctgcgaggaggggagtttccattcagtttgtgtcggtattgttttagtctgaatctgatggagcagtttggaatgctgaactattgtgcctgatccaaatgaataaggtgtaatgactcgtcttttcaattactgaacctgacaagtttgaaatttaaaaaaaaaaaaaaaaaaaaaacctcccgacaggccccgaaccaaatactcccaccgtctccacagcaaccagcacacatttccctttggcggatcgaaggaaggaaggaggagatgggtggcggcatggaggtgcacaaaaaccggtggatcgaagagtggaacgccggccgggagaacctcgagttcaacttccgctggacccgccgcagcctcgccgtcgtcggcctcttcggcctcgctgtccccatcctcgtctacaagggcatcgtccgcgaattccatatgcaggacgaggatgcaggtcggccatacaggaagttcctgtaagaggcgtccagggctgcaggatacgtcgattcctcgaccggggctgagaggaggggagtttccattcagtttgtgtcggtattgttttagtctgaatctgatgaagcaatttggaatgctgaattattgtgcctgatccaaatgaataaggtgtaatgactcgtctttcaattactgaaactggacatgtttgaatttatttggtcacttgtatggtaaaatagcagcgttgtcatatactgtttatgacttcattcgagcgccgtggaggaatatgggatatccatggaggattggagtttgcagnttgctttctttttccttccttagatgttatattgcaaacatagngggcaggataacctttttttaaacttaatatgttgtgc

SEQ ID NO: 132304 - DNA, 379 bp, Zea mays
  Clone ID: MRT4577_52147C.1
attcggctcgaggcatctcagatttaggtttttttaatccagcatgccttacctgctttttggaagctcagagaggcaccccgaggcacacagggcggaaaacaacccgggggaaagtaagcccgaagaggatgagccctaaggctcggcgcaaaaggcccccgctcgccagaagcctgaggaagccaatccgctcccggcgcgaaaatgccgcgctaaggaagatccggatgtcaagaaggagcactaaactgctaataagagggttgcgacttacaagacctacatgttagagggggcgagactatagcactgagccatggttatattcttccagggcatgggcattatgaactgcttcattaacgacatttttggg

SEQ ID NO: 132305 - DNA, 340 bp, Zea mays
  Clone ID: MRT4577_52148C.1
tccacgcctgcgcaacaaagccctgttcatgcacagcataacagattttcaggctgggctacaagatcccaaagagcgaatgacctatcacgaaaaggactatgaaccggtggaagaaggctcctacataaaaatgattgacatggtcagcggcaaggggggccaactaaagattaatgacatcagtggttactagactggaccgaacggtctcttcttggttaactgtcatctgacacctctccctatcctgctaacaagacatggcgaaagcattgctaatgtcagacgaagaatcgactgacactctcttttgactgaggacggcgagctctattca

SEQ ID NO: 132306 - DNA, 259 bp, Zea mays
  Clone ID: MRT4577_52149C.1
cccacgcgtccggcaacatacatagtgaagtacactagcaacatcttaacaccaatggcagccaatatatttgccctacttgccctaacttgctctttcagcaaacgttgctactcgcactattattgcacactgctcacaacaatacctctttccggtgacagccgcgagatttgaatacctatctatacaatcctacttgctacaataggccatcgtattaagcatcttacagtcgttagcatagactgtcctatat

SEQ ID NO: 132307 - DNA, 252 bp, Zea mays
  Clone ID: MRT4577_5214C.1
gtaaatttaaatgcaggggtaggaatacgtgggtgggtcctaccacagaggactgtccacccaatatcatctggcacacactgatgttgttgtcaggcttgacaattaaactatacatcacatgcgtacgctgtctcctgtcataggtagactaacctatattaatctgaataggattttgttccatgtcatcttatacgtaactgatttcctgacggtttgattgacctactaacatttaagtgatcttaa

SEQ ID NO: 132308 - DNA, 122 bp, Zea mays
  unsure (1)..(122): unsure at all n locations
  Clone ID: MRT4577_52150C.1
tacaattaaaganctcctaggtgnatntatattactattatncctaataaccctagtactattcttcccagacctactaggagacccagacnattatacacccgctacnnccnctcaacacc

SEQ ID NO: 132309 - DNA, 252 bp, Zea mays
  Clone ID: MRT4577_52151C.1
atggaaatggtgactggcgagaagcccgccacaagccacggaaaggctccatcgggggagtccggcaacaagaagagggaggaatcacctccccgcgtcaagtcgcaccagagtagcgacaagaaaaagaaaatgaagaaagtggtgtactacgagaccgactcttcgtcgccctccacctccggctccgacacgccttccgtcacttctaagcgccatgagcgcaagaagtttagaaccatccgtaggtga

SEQ ID NO: 132310 - DNA, 829 bp, Zea mays
  Clone ID: MRT4577_52152C.1
cctcgaggccggccgggccgggcatgtaatgctccatggtgcacatcaaaccatactgatcgagagagggacacaaagagagagagagagatgagcaaccatcacaggttcaaactatcccatctcatgcctaactcttggttctacaagctgagggacatgaagaaacccaggccagcaagcacaagaaacaggcaaacaacaagaacgtggtctaagagatcaacaagccactactaccatggagccatcagtcccaaaccgcttcttccagtatcaccacacagatcctactgctactacctgaacacaacgcatagtacgtcacttgagaagctacacccctccacctccacctccaccctccatcgtcttaacacaaaggcatcagacatccaattccccacagatcaccaccgccgccgcccagcaagccgcaccatggtcatcgaatccaagcacgagttccaagacttgcagctacgtccgatccgcacaagggcagtgctcaccggatctataagcggaacaagcccgagctcgccgaggctgaggagcagaaggttgccgcctgctcccaatggcgccggtggcatcagtactacgggtagtgctattggtggtggccggcggagaaccgctgctaggaggagcttcgccgtcgtgaaggcgtcggcagatccgcccagggatttcaaggagagcatggtgcagatgatcgtcgagaacgacatgagcgcgccggaggatctgcaggagcttcttgagtgctacttgtcccctcactcgatggagtacaatggcgttatagtggaggttttcagagaaa

SEQ ID NO: 132311 - DNA, 1248 bp, Zea mays
  Clone ID: MRT4577_52153C.1
aattcggcacgaggcaagcttcctccttcccacatgggcaccgtctcctccttccccaattgcaagctccattcgcgctcctcgtcctccgctgcctccagcctagtcccatttctgctcgattggagaggtttgggccatgcttcctcctcgcgcgccacgttctcgacggaatttctcgtctacacaggagccaaggaacgctagaattagacgcttcccggggtcccttttagttcccctctaacgaatcataggtttgcagtttggtgtggacgtatcctgtgatttgtggatggttttggtgtagagtttagagagatcaagaacttccaacttggggtttcctgtagccttttttagctgttctggggcttttatgggagtgcccgtcgcgcagaagtccgattcttgggtgactgtgcttgcgatgacggacagcggcgggctcggcgttcggcctattaacggaggccgagggagtgccgtggagcagcgtgggctcggactcggagacaacgggcctccagtgtccccaccagagcgtgtttctacgccgcctgcgccgagactagctgcttggtggcgcatgtcgtcgcctggtcctctccggtgctcaaccccgaggagcgttggatgtgaagatggtgatgattcggataggtacttttccccacagagtgagttttctcaagacacttctgatacagattcgatgagtacaagtattagtaggatgtataccttcaggttagggacttcgagcccattagatagtcctatcaaacaattgggagtaggagacacaagtcctccctcaaggaagggttgccattctcctagatatccttggaattcttgccggggatcagatgatgttgattctagctttttgagttcacctcggcatgatgatgaagagaggaaatatgatgtgcaaccaattgattttgagagtagacacatctggtatcctccaccacctcaggatgaaaatggtacttttcaatatgatgaggatgatgacaacgatgtttgtgatgggaaggtctttggacatattaaccatgattattatgacgacgaggacgacgacaatggggatgacgatgaggagggtgtagatgaagaagacgatgaccaggacgaggatgaggaggaagatgatgatgaagactcgctccagcccccaagaagaggaagaagtgaatatcttctgcggctttagttaccgggcgctgagttctg

SEQ ID NO: 132312 - DNA, 392 bp, Zea mays
  Clone ID: MRT4577_52154C.1
cccacgcgtccgcccacgcgtccgggcaggcaagaagaatatatttggttttactcaagggcctcctatgggagggcaagtaccggatctatcttgtcaaatatctgtgttcataacaatttggtattggagccaggctggcacatcgtcggccatgtacggcgccaacaacgatctggggaccctctctgttgtggagaaacttgatcgcatcctggcgcaactgcaaaccataaataacagactggattcccacgacgctcgtctggccaagcctgagtaggcgtggttcagctcctctgcttctaccacgggcggcttgggcacatacaacgtgagcacgagcggcgaaggagacctgggcgcaaccgacggaggcggccacatgggca

SEQ ID NO: 132313 - DNA, 269 bp, Zea mays
  Clone ID: MRT4577_52155C.1
tttttttttggagactatagaaatattactggggttgatcaaggggacatcatattttcggctcataagacaaaacccctacatcaacaagtaaatgtgccacatcattacttactttcaaacatatattaactgtgattgcaatagctcaaatgtccccttgaaaggactaatgaaaatctatgcaaaattgcttaaattcaatcagacataattaacgcaattcctggcaaactcacaaggaatctgccgaattgaagttccaagtc

SEQ ID NO: 132314 - DNA, 1206 bp, Zea mays
  Clone ID: MRT4577_52156C.1
tgggtccctcgggccgccgtcgagtgagtcctcctcatcgccgtccatggccgccaccgccctgagcatgagcatcctccgcgcgccgccgccctgcttctcgtccctactcaggctcagggtcgcggttgccaagccgctggcggcccccagcgccagcgagccaccagcaccctcatcctccgtttcgcggctcacagagatacctcaaaacccaaccaggccggcgtccaggtgtccacagaaagaggagagcagagagagcgggagatcatggagctctgcgtctctaccaccgcctccgtccgcgccaccgccgcgcccatatccttcgccccgccccggcgaggcgcgtctgcttccaccgccctcccgctccaccgccgaatcccaactcgaggctggtgttgcgccagcgcggccgtgcctgacccggcgccctccgaagagctcgcatccgcctcctacaccgtcgtcgtcgcggacaagcccgattcgcctgccgatgacaaggtcgacgaggttagcgccgcgcctagtggctccgcggaggcgcccgtagcagaaccggtgtcatcagaggcgtccccgtccccgtccacggatgacggcggtctggatgagatactaagcaagttgaacattgaagtgactccgattttaatcctcactggatctggtgcctttgttgctttatggatcctatcttctgttgtttctgcagttgattcagtccccctgctcccaaaattgctggaattagtaggaactggttactcaatttggttcaccgcacggcatctccttttcaaggaaagcagagatggcatgtttgcaaagttcaaggatctcaaagagaggatcatttgatctaccatcgatatctggtcacgtgtttaggctttacagcctgcttattattaggttttctcccctttcaaatattactgaaggggtaaagaaggtcgtatatctaatttttctcctcacggggtctgttatcaggcttctcaagtttggctagtgtgcttcttcaggtcactctggatgttttttactcaatcctatgtgtatgctgccgaataaagctttaaaaagatgaatgcaattagtatgttctcgctcctacccaaaaaaaaaaaaaaaaaagcccctatgtccagtaaacatttcagataccatatgttaagctcgagccttctgtga

SEQ ID NO: 132315 - DNA, 342 bp, Zea mays
  Clone ID: MRT4577_52157C.1
gtgcgctccatgctagtaggtttggactcgggagccatcgcgtggttccacaacgcagcttccgaattggacttccgtgaatagtcatagccaccttcgaacaacaaacctaaggctgattctgcgaaaggtactgcagtggggattgccacggacctgacctagaccaccaagtagtacggaactacacttgataccatgggagcccgacacttcataaacaatctcactactggatcggctcaagctgactgtgctggtgttatcattgactaaaccactgggggtgttgaagcttggatctccatagatggccagacggatgagcatgttcggcttgct

SEQ ID NO: 132316 - DNA, 282 bp, Zea mays
  Clone ID: MRT4577_52158C.1
ccttttccaagtctcgcctccacggctcgtcggctccatccctattcctctcgagtcgcctccgtcccctttgttcaccccagaccccacgcgtgtggctttgaaagagcaccctcatgcatggtctggccggttgaattgaaggagaactgggcgaccggcggttatccaactgtctctaaccggatagagaagaaagtgctccactctccagaccaggtaccgaataccctcgcattgcgcgtgtcgaatttttgccaactgcatgggggctggggcgtc

SEQ ID NO: 132317 - DNA, 1660 bp, Zea mays
  unsure (1)..(1660): unsure at all n locations
  Clone ID: MRT4577_52159C.1
ttgggaccctcgaggccggccggngaagcacagctgacagctcacactccactcgctcgctcaaagcaaaactgcccctccacgactttagcgccgatatcaaggccgcgccaaagcagtcctcgatcgatgcaacaatggcttcggttagtcgtcgcgtcctgctagcgctgctgtcccttctcctgctcgcgctccggcacgcggcgctgtccgctcccggggccacattcccgggcgacaaggcggcgctcgcggcgctgaggtccgccgtggccgcgtcctcggtcccgccccactcctgcctctcgtcgtgggacttctcccgcgacccctgcgcggcgttcccgtgcggcgtcagctgctacgctcctcccgccgccaactcctcctacctccgcgtcaccgccgtcgcgctcgaccccgcgggctactccggcgcgctcccagcggcgcttctgtcctcgctccccttcctcgcgtccttgtccctcgccgacaaccggttccacggcgcgctcccggcgggggtcccgctgccgccgaccctccgcatcctcgacctctccggcaacgccttctccggcgccataccggcgtctctgttcaccgcctcctccgcgctgcaggagctctacctctcccgcaacgccctctccggagggataccgccgcagctggcgctcctgggcgccctgacgcggctcgacttgcagcacaacgcgctcacggggaccctgccgagcctgggcgcgatgcgctcgctggtccacctcgacgtgagcggcaacgtgctgtcggggtcgccgctccgcgtgccagggacgctgccgccgtcgctctggtccgtcgcggcccggaacaactccttctcagggccgctcagcgccgcggcgctggctgcgctccccgcactgcgggtgctggacctcactggcaacgcggtgtccggcgcggtcccgggcgccgcgttcgcgcacccggcgctgcagcagctgcgcctgggttccaaccagctcgacgcggtccaggaggctcccgacggtggatcctcgagccagctcgtggagctggatctgagcggcaacaggctcgctgggcggctgccagcctgccttggcgcaatgccgcggctcgcggcggtcgcgctcgacaggaaccggttcaccggcggcattcccgaacggtacgccgtccgtgccgcggccgaggaatccacggaacagtgggtgccgttcgtcaggctgatgctgcaaggcaactatctgtgcggagccctgccgaggcagttgaggcagatccaggagggcagcgcagtggtgagcttggcggacaactgcctgccgaggtgtccacacaagttcttcttctgccaaggggccccgcagaaggaccacgccacgtgtcccaagtgcgatacttcgatccgtcgtcaggacattctgctgcggatgccctgattgtacattctgagctagtactaaaatctttgacaaaaataaaactacgtagtatgcattcttgtacgggtgtaccaaaacagcaaagtagaagctgcctatcaattgaatgtgttcaactccattcttgttaaaaacaaaaaaaaaaaaaaaaaaaaaaaaaaaaaaaaccaaagaaaaaaaaaaaaaaaaaagcggcc

SEQ ID NO: 132318 - DNA, 462 bp, Zea mays
  Clone ID: MRT4577_5215C.1
ttttctatggcttccttgcttccagacgacgccgagcccgcctcgatcaagacgcaacaacagccgaagaacatctctctctcaatctcttccatgcggaggtgaagcacaaacaggacacaacgaagatgatcaaccgctgtaccttctacgatgtgcagtgaaagaatctcactgaacgactacctcgttgcgaactgtacgaagcaagtcatgtacctgccgcacaccgcgccaccgttactccaataaccagggccgcaaggatcagtgcccgatcggcgagcacctcactaactcccacatgacgcacgggcgaaacgaccgaaaaaatgtcatgggtggacgcatcatcaagcataccctgcagatcattcacctgctcaccgatgccaaccccatccagtgccgcgcacgacgcgatcatcaacagagcgaccccgtcgaggatgccacccgcat

SEQ ID NO: 132319 - DNA, 452 bp, Zea mays
  Clone ID: MRT4577_52160C.1
gactggtctcttcaaccgtagcatgggtcatggctggcctgcttccctcttcgtacactgccatgactgctcggcctacacccctcttggcctcccatgtcactatatcgactcaaggtgctcctcaggagaacatattagcttaggttatgagccaagcttcagaaaagtgaagaggaaggtgaccaaataaagaccgcgtgccaacagttagagacagtggcaatggagattttcgcttatcatggatgatgtttttctagttgatttagtttggatgtttgtctctccctctggcgcagatggatgagctgctggtcctataataagttggccctatcctcataatgtggtgatgcaggatatttggttccataatctaaaaataccaaaacgtatgttaatacacatgtgtaattcattgcgatgataacaacttctcacaatgtttc

SEQ ID NO: 132320 - DNA, 1883 bp, Zea mays
  Clone ID: MRT4577_52161C.1
acttgaaccagataggggatggttgtagcaaaaacacattgaccaacacatatactacacacagcaacgtggtgatacaaaagccgcgtccaggcagcagtaccaaattctctgctgccgcccacgcatagagcgcccggcgccaggcggcgcgagcatagcccccccccggcgtgttcgcgctcaagcctccttcgcgtggatgctcccagttccaggggtacctgagccaaaacctaccatctggggcagatgtacagagtagcaggtagcgagcgtgagagacgagcagttgaacgccacgaagagcttgaaccacacggacgagaacagggtcaggtacgcgagcaggcccgtgacggcgaccacggccgcgaagttcgcgaggcagtcggccgtcgacaggtccccctcggtccctttcccttcgtcggggaagtggcccagcgcggagaagcccgacagcagctcgtccttgagcctgaaccgctccaccagccagccagccaccccgtcttcggacgccggtatgtcggagacctggatgctgctgatgtggatgtggacttccgaaggacccacgccgtagacgttgtccagaaatgtcggcggccggtgtttgtaggcgatcgtgatgtcgtacacagcatctatggtactcctcagcacttgcaaacagcaattgaaaccctttgtcttgggaaggagtacgtttttcagaacaggcaaaccatgctctgctgcatattcttgacttttgatacactttcttctcagtataatcagtgccttctgggaaaactgccagccaaaggggatcctttgggttcttaaattcagaaagcctgcttcggattattgcttcatcaatctcccactttctctctaccggaataaactcaataatgtgaaatgcccagttgaaaacaggtaacttcatcaaacttttcttaaggatatacttgatgcactgcaagcggcctttcctcaatgcaaaatcccataagtacatccagtcaacctcggctcgggccgaattcattaacagaacacgctcttttgctggcacactttcaccagagaaaacaaacctggtcttgttaatcttctcaaacaaaaaaggccacatggctaaccacatcccaaacaggaagcatgtagactttctgctgtaatgcacactgaacagcctcacaaggaaagtagtaacaggggacaggtataccatcatcataaatgctgttaatatcataatcaccaaacacaatactccacggcatcttctcatgaaactcagtgggaggtgacttggtcccatttcaacaatggaaggatcaatgatttgcacttgattccactttcctacatgatgcccttgggaactagttgaattggaacactccattttatatggctataatgaaaatcttgtccgcccactccccagtccccactacgtacttcacacctgtggcaccagcagaatcatctgaactgcacacatgatgggagaagtaagaactgctgttaggtgctcgttgccggagaagggcccgactaagaccagggtatctggcgtagggcggcggcggctggtagcctagtcgtcgctctgatagatcgaaagagaccacgcggtgagaaaatagccccgccgggagctgtttgtctgggcccgggggagagcgtgtctctgacgcggcgggcggcgggcggcggcgagcctctggccacggattccgacggattggggtgtcggtttcgcggtgggttgtctcacttgtctgcgggctctcactctcagtctcaggtcggtggaggggaaagcgagaacagtggagtggagtggagttttttttttttttttttttttccccggcccg

SEQ ID NO: 132321 - DNA, 1032 bp, Zea mays
  Clone ID: MRT4577_52162C.1
ttttttttttttttttgagagcctttccgttacaggccaaatctcattaatagggcgtcatgcacgagacgtgaatttccacgacagacgaccaaaacttggccggcgggtttttttttttttttttgttcatgcagaatcaagatgccatttcagaacctcgtaaccgaaaccctatggaatctctgaagagcaaaggggttctttttttttacttccttgctcaaacatgtaaaacaccgtgcccatgctccaagccacccctttagaggtccttcatccacgaaccaacaaacacagccgcccgtcccagtcaccgccttgctccagttccaaccatattcccctacggtctcagctcacgctatgagagagccgtcattgttgatgtgtgcgtgctcgagggaatgggtgtttcaaacgtccgtgatagaagaggggtagggccggagaggtggtggagggggtcagaagggatgcggtcccatttaggccttctcggcagtaaggccacgagcgcccttgggtgtgccagtctggaaaccgttcttgaatcgtcgggacacatccttgaggtagcgagtgcggccggtaccgacggtctttcttcgcttagccttctcggaccagttgtacttgcggatcttggcagaagggtaaccgcaagaagagcactcatgcttctggatgtggagagagcggcgaccgcatcgtcggcacagggtgtgcgtcttgttgtgacgcttaccgaagctggaggtacccttcgtcatcttggctgtggtgtttgggcggttagttggatggcgatcgagaaattctcaatttcagaccgctttttttggcgccggccgggctcgagaacacctcatcgccatcctgtcccttgaccttaaggttgatgtgggcacccccctgcgaggagttcttatagtcctgcgcccacgaccatgtatgttattagcgagggatcccatcgtcgcgctcacctgtgttattcgaaatgccgctctgtgtgtggttcccggccgg

SEQ ID NO: 132322 - DNA, 236 bp, Zea mays
  Clone ID: MRT4577_52163C.1
gccggtccggaactttccgggcgggccaaccgacccgtcctgttatgatggcgcgcacctagcaaggtatgttagctcatatatatatgaagatacgtacctgggcagtcacattcttgtccactcaaaaagtgattcttgattgatggcatgcattaggttctggcgaagctctttaattatcaaatatttgctgactggttgatggaaacatagaaatttattatatacatatt

SEQ ID NO: 132323 - DNA, 149 bp, Zea mays
  Clone ID: MRT4577_52164C.1
gcactccttatggatacacccaagctttccctttccttaattatctaggcgccaaatcgggcttttataacgaccgacggggcttaaactcccgaaccgttgctggatgcggcccttgaggcacctaaacacaccctgatgactcctgt

SEQ ID NO: 132324 - DNA, 151 bp, Zea mays
  Clone ID: MRT4577_52165C.1
cggacgcgtgggcggacgcgtgggcggactcgtgggccgacgcgtgtcgaggggcattacaggtgtcgtgttgaagaactgccttgagagaagagatttcactagctattcctcgaatatgaccttgcatgattctctcatgtcgacctat

SEQ ID NO: 132325 - DNA, 335 bp, Zea mays
  unsure (1)..(335): unsure at all n locations
  Clone ID: MRT4577_52166C.1
cgccgacaccgccaccggggggaggggggaagaccagcagaagaacgacggggaggcccaggcggcggccccagaggcccgccgcacccgcgacgccggcgcacaccacacgacaccagcggaagcaaaccagggccgagacccaggcagcaacccacaccacggagccacggggggggggggcgcaccattttttttaccgncgcacagcaacgacaccttgccgcacgggacgtatacggcatgctagccttagcactacacaaaggccacgaagcctacggacgccacagcgacctgacgcccaaggaagaagaaaccgagatgaacgggga

SEQ ID NO: 132326 - DNA, 246 bp, Zea mays
  Clone ID: MRT4577_52167C.1
aatccaaccgatcttttttatttgccgcaatttatttaaaatgagggggcggacgaaaaattaacatacttgctttccttatatctcctccaactcataaaaaacagctcttttacaccataacatctttccccaaccaaattttaaaatgtggctcatactgttagcttctattgatccttatgcctgtatgtttcattattccattcatccaaaccattattctctgatttctttatgcataat

SEQ ID NO: 132327 - DNA, 435 bp, Zea mays
  Clone ID: MRT4577_52168C.1
atcacgcatggcgttctcgcgactacatgcgttctcgtcgtgctgaactgcctaatcatgttccaaacttactacatgcaagtgcttgacagctttaagaccttctacaccaacgtgaaccaacagaccgtgctctacatgggtaccgctaggcttaagagtgttatacagatggatgttgcgtacgctctaaagcgccactgccagtactctgtacggcttgcctggctgatcgcatgtcttaccttgtctgcaaccgatgcctacgccggctccacatgtaactgcgtcttgattggcttgatgtagagagttatcagattccaatatctgtgacgtgcttcgatattgactggaatcatgtgtgccatcagagctgggaaatcgtgatccagatgtcaccatgttcagaaacatgagatgttaaaatctaaa

SEQ ID NO: 132328 - DNA, 374 bp, Zea mays
  Clone ID: MRT4577_52169C.1
ggcgccgagaaatactatggaggggaaagaggaggacgtgcgcgctgcgcgccaacaagatctcggagcgccagcccatcgggacggcggcgcaggacgccgctgacgacaacgactacaaggatgccccgccggcgccggtgttcgagcccggtgagctcaagtcctgggccttctacctctcgctcatcgtctacgtcatcgccaacttcctcttcttctacatcaccatcatgaccgacatgggcgtctccaagtccacctccaagtgggccacgggcgtcagctaatgcatcgcctggcccttcggaggaatgatcttcgcgctcgactactgcaccgccgccatcatgagaggacacatcaacccagct

SEQ ID NO: 132329 - DNA, 1654 bp, Zea mays
  Clone ID: MRT4577_5216C.1
cattggtacctcgagccggcggaaaaaaaaaaaaagacacactggctacacctgggactgggaggctgggaatcccggcaggcaaagcgaaagcatccgcgcgagaggcgtcgcgtgttccttgcttcgtcctcacgtgccgtggcccttccgcttcccccgtatccgcccgcccgtcctgttcccgccccgagcgaaccggcggcgtgtcggtcaggggagagggcggaggcgatgcagcacgagccgtggcggcctggcgctgagcccgccgccggggctggggcgggtcctgcccccaccaccgtcgacgaggcgtccatggagcggagcatgagcttcgtcaaggcgcttcaggagctcaagaacctgcgcccgcagctctactcggcctccgagtactgcgagaagtcctacctccgcagcgaacagaagcaagtggtgctggacaacatgaaagattacgctgtcagggccctggtcaacgctgtcgaccatcttggcacagtggcctacaagctgacagacctatacgaagagcaggcttcagaaataacaaccctcgagttgaaagtagcatgcttgaaccagcaagtccgtacctgccagacatacacggacaaagaaggcctcaggcaacagcagatgatggggactgccagaagacaccataaccattacatcgtaccatatgcgggaaacaaaagaatgcaggccttctctgttacgcaagccgatgctgatttcgacccaacgccaaggcctttctcttcagcaaggacccttgagtggcatttggtttccgagaagaattccaaaaccagtagaccagatcagtctgaaattgccttaggagaaacaaaaactactaaggcttcgtcaagtggtttccgccttctcggcaaggaatcatctgcatctcccttgtccaggaatgtgcagtccaacataaccagtttggatattgtcagtgccggcatgaaggatcagcccacgaccaggcacttgtcatcgttcagttctttggacaaccccaggggccgacaaatccagaaggctccgcttcgcacaaaaagtatgctagccgctttctttgtcaaacacagatcagcaaagatgaaaaacgtctctgtgcgttgatcaactgcaagccaagcctgtagtttgctccagccaaaccgacgtggaagtgttaagggcatgagatgtatacatgtttgtatatggtatttgggtcttgtatgctagtgctctagagataaacctttacggatgcgctttcaatctagagtctttggcatcttgctcatgaccttaatgtaatgatttatatggatatatattactagttttatgcatgctggcggctctcttcatcagacacaaatcgtccaaggcgaaaaggatcgcagttcgctgacgagcgggggccgggtggggggcggcgacagcactgtaaatttcattctgtggaggaccggaagcctgttaattgtacatctggcctatcgttatgtgttggggcagagtctgtagccgtatttcatttcagaatatgacatcttgcaggtgaccgaaatgtaatgatttcgcataatctcatcttggcattcagcataaataaatgcatctggaaataaaaaaaaaaaaaaaa

SEQ ID NO: 132330 - DNA, 259 bp, Zea mays
  Clone ID: MRT4577_52170C.1
cttcaacgagcttctgctcagtactttccacctgctgagcatctaggtcctcagttgcctgcccgtcgaggtgcacgtaggaggtgcagcagcccacggtgaagggcggaaccgcggtggcgacgcgacgacggcgagaaattcgcccgttctcgatgcaccgcgacccccgccaaggccaccaacatgctcttgatgcccagcacagcacccaaattccacaccgaagccccaacgatggcgtcaagagttcaccgac

SEQ ID NO: 132331 - DNA, 302 bp, Zea mays
  Clone ID: MRT4577_52171C.1
cggatattgatgacacgcccgcgccacccatcgagcatagagaagatcgtccagatcgcacataagccatggcttcctcctcttgtgtcattggccttattgccctgtcggcggtgccggtggcgctggcgtcgctggcgtcggcgcagttgtcgcagatgtcctacaccttgtactgcaggaactgcctcaacgcgctctccagcatcatgagctgcgtgaactgccaggagagtcaagagcctacatcggtggcgacagctgcatatgcaccactgctacgaccggtgcggccacggctg

SEQ ID NO: 132332 - DNA, 171 bp, Zea mays
  Clone ID: MRT4577_52172C.1
acaaatgctaccaataggaatacaaggggggttactgctccctggccttctgtcctccccaaaatcacttgccggacaaccgagatccacccatagcaaccaaattttccacctgctgcatttacagccctgtcctgacaccagctcgagtaacctactggccatggctgg

SEQ ID NO: 132333 - DNA, 488 bp, Zea mays
  Clone ID: MRT4577_52173C.1
ccggccgggtgttccacgtcgatgctgtggcattctgttgctttcaagtaaaactagtcaatgttatgtaccttcatgttattttttggtccaaaaaaaaaaaaaaaaaaaaaaaaaaaaaaaaaaaaaaaaaaaaaaaaaaaaaaaaaaaaaaaaaaaaaaaaccaaaaaaaaaaaaaaaaaggagggcggcaatttcccttgttgggtttaaggaaacttgggcggcccttcgggccacgcaagttcgccaaaagggtcgccaaaaggttcaataagaacaaggtgggggggtcgggcgttgccaaccccaaccgatgagcacccaaaaatttaccgaatgaagttttgggccataaacgaggttcgggcaaagtcaaagttttggtacttcttgaaaaagctgaaaaaggggaaaaaaagaaatggccaaatgctcgcaataaacaaaattttggagggcaaccaaaccaccataaaaaactacg

SEQ ID NO: 132334 - DNA, 657 bp, Zea mays
  Clone ID: MRT4577_52174C.1
gccggccgggccgggacaatcagcctgcttatcgattcacatacaaatcctcgatctccagtacaccctccgtacacatcttatcttacttaagcttcaaactatctctacttcactacatcttcataccaaacttcatcaacaatgtctgccatgaccgagtcccgccagcaagtctacgtctccggagacggcttctcagagcccatgagtgctcaacacaactttgccaacaactttgacctcaacgaccctgagcgagccatgtccgactaccaaaggatcatgcacgagcacaccaagcgccagcttagcactgctacagactcggcacgccgacgaagcggcgcttcatcatccgactcagtcagctccaccagctcataacaatcatcttgattgtcatacacaactatctattcgagcgtctgcgacgctatctgtattagcgatgcattgtcagagatcatattacgatctatttctttgtctatgagagcgggaggcgtggcgtttgggaatttacatctggctttcgccaatggcatgcacgatacggtgttggatggatctagcgacatcctgcttatctcaatcaatccaacttctctatcaggagatcatcatcaccaaaaaaaaaaaaaaaaaaggccccta

SEQ ID NO: 132335 - DNA, 2145 bp, Zea mays
  Clone ID: MRT4577_52175C.1
ttgagtcactaatgctagccagccaactaagaagtgaaattgcatacagagattctgatatatcaagcttcgtgattttggaagctatgacaacacttagatgctgtgaggacttctctatggagcgattagagttattgggggactctgttcttaagtatgcagtgagtgcccatcttttcatgacatttcttaataagcatgagggacagttatcgtccagaaggcaagaaacaatatgtaatgccacactttataggcttggtattgaacgcaggatacagggttacatacgtgatgctgcatttgatcctcgtcgatggcttgctcctggacagctgtccagacgtccttgtccttgtgaatgcccagtaaattctgaggttgtaactgaggatattcataggattgatgacaagtctataattataggcaaggcgtgtgacaagggacacagatggatatgttcgaaaaccatctctgattgtgttgaggctctaattggggcctattatgtcgaagggggattaaaagcagcttttgctgttctcaaatggttccagattgagactgaaatcgaggaagagttaattatggaagctctgtcgagtgcttcagtgcgaaactatcttccaaaagttgatgtagttgaattgcttgaagcaaaactaggctacacttttcaaatgaaaggtttgttaatagaggctctcacccactcatcacagcaagaatctggagcaacatactgctaccaacgcttggagttccttggtgatgcagtcttggatattttaataactcgccatctgttccttagtcataaagacacagatgagggggagctgacagatttacggtctgcatcagtaaataatgagaattttgcacaagttgcggtaaagcacaatctccatcagtttctacaacattcttcggggttcttacaagaccaaattactgaatatgtgaatagtcttgaaagttcgtccatggacagagccagccttttatccagtggaccatgtagggggccaaaagttttaggtgatattgtagaaagtatagcaggtgctattcttattgacagcaaacttgatttggatttagtttggcgggtttttaaacctcttctttcaccaattgtcacacctgagaatttggagttgccccgattcagagaacttaatgagtggtctgacaagaatgggtactttattggaattaagtgtgaaaatcgaggagacagcacaatggctatccttaacttacaactcaaggatttgcttcttgtgaggcaaggttgtgggaagaataaagtagatgcgaaagcacatgcagcttccttattgcttagggatctagaggaaaaaggacttataattccaaggaatgcaagcagagtggaacaacttgaaaagaattctggtactgtaaaacattgcaacaacgtgcttgatgttatggacacacaaaacgtagcaccacctaggcaaaaggaagtagctgtgttaagtaccaccactcctggctctgttcttgataagccattggttgtgaaggttaagttgagcaaaggaggacctcgtatatcattgtacgagtcgtgtaaaaagcttcagtggccaatgccgacctttgaattcgtgaaggtcgaaccaagcgtgtgctcctcttcctgtggttcgtcacaaaaggttgcgccccaaggattcgcatttgcttcgacaataacgttgcatataccgaacggcgatgtcatcagcctcacaggagatgggcgtgcggataagaagagctcacaggattctgctgcgttgctcatgctctatgagctgcagcggcaacgtagattccaagttcaagaagtatgaggaatcacctcgtggttccatcaccaaagatgcaatgttaccgccaccggcgattattgcttgggcatcttggagtaatgtcaccgccaaatcagtctttagtcgtcagccgcacgggggtgtaagaaaataatgtacttcattctgattctaaattataagacaccccgaattatgtaatctaattatcataatgtcctataatttgaaaaggagcggtgttggtttccaactctcgttcccgtctgatggattcagacatttcatctgt

SEQ ID NO: 132336 - DNA, 196 bp, Zea mays
  Clone ID: MRT4577_52176C.1
atctcttggagcagaagcaactggtgagctcactgagcccacaatggtaggtggccggacctggtggaccgaagatcctgagccgttctgcataccagcacatggtaaatgaagtgatttctagattgctctcatttcaggctttgctgaatatttcgttctccatggagttatggaggcatatccgttcttgctt

SEQ ID NO: 132337 - DNA, 304 bp, Zea mays
  Clone ID: MRT4577_52177C.1
caaatggtgcgaggagtttgcttggaattcgggtgactctgctgaggttgaacgtgcctggaggaacgagcccagtatattgcagttgaatgaagaggaacttcttgggcaaggaatttgcgctggatgggctgatagagttgcaaggaggattcacacctatttgaaaccatcagaagacgatcgaaaggttcgagccgttcgttatcagtcttgtgcacttgatgatacaatatatctgcagcgatcatcatctgtcgcccaagttgccccagagcttgtagtttactcggagctacttagt

SEQ ID NO: 132338 - DNA, 1591 bp, Zea mays
  Clone ID: MRT4577_52178C.1
tcgtcaaattactgaatatgtgaatagtcttgaaagttcgttcatggacagatccacagggggattcagtgcaccatgtaggaagccaaaagtgtgttttctcctctctgtaagccagtgcatactaaattcgagatcccatgaatgacatgtgctttacgagtagcatattagtgcactatttgtgaacatcctttacagcctattggactcctatggtagaaattaggatatatatccggttctacttgtttttcatgtagtttgatattgtcaactattgaaatcatgaaagtaaaagtgcaaaatgtgattggtaggtccatcacactaatcgccatttttgtccgaccccaaagatactgttgaaacacagtttttaaaaccttggtttaaacattgtttttatccagaatatgacatttcactgttttctttcgcataggttttaggtgatattgtagaaagtatagcaggtgctattcttattgacagcaaacttgatttggatttagtttggcgggtttttaaacctcttctttcaccaattgtcacacctgagaatttggagttgccccgattcagagaacttaatgagtggtctgacaagaatgggtactttattggaattaagtgtgaaaatcgaggagacagcacaatggctatccttaacttacaactcaaggatttgcttcttgtgaggcaaggttgtgggaagaataaagtagatgcgaaagcacatgcagcttccttattgcttagggatctagaggtacttccttttacgccccattcttttggtgaatcatgctgctggttgattcgggacatagcatgtattcttgttgtgttagcaggaaaaaggacttataattccaaggaatgcaagcagagtggaacaacttgaaaagaattctggtactgtaaaacattgcaacaacgtgcttgatgttatggacacacaaaacgtagcaccacctaggcaaaaggaagtagctgtgttaagtaccaccactcctggctctgttcttgataagccattggttgtgaaggttaagttgagcaaaggaggacctcgtatatcattgtacgagtcgtgtaaaaagcttcagtggccaatgccgacctttgaattcgtgaaggtcgaaccaagcgtgtgctcctcttcctgtggttcgtcacaaaaggttgcgccccaaggattcgcatttgcttcgacaataacgttgcatataccgaacggcgatgtcatcagcctcacaggagatgggcgtgcggataagaagagctcacaggattctgctgcgttgctcatgctctatgagctgcagcggcaacgtagattccaagttcaagaagtatgaggaatcacctcgtggttccatcaccaaagatgcaatgttaccgccaccggcgattattgcttgggcatcttggagtaatgtcaccgccaaatcagtctttagtcgtcagccgcacgggggtgtaagaaaataatgtacttcattctgattctaaattataagacaccccgaattatgtaatctaattatcataatgtcctataatttgaaatggagcggtgttggtt

SEQ ID NO: 132339 - DNA, 681 bp, Zea mays
  Clone ID: MRT4577_52179C.1
atccgctaccctacggccgaccaaaccctaacgtcgccgctccactcgtaaggcgacgccatggcctgcgcttccggtgcatgcgctaagcgcatcgcgtcggacgggacccaccacatgatgtgccgcctgtcctgtattatcttctaggcactgctctgtgcacagaacgtgatcggcgccccctgcgatgagatctgaatggcatgtgggctcgtaccccacaacataaaatacctccgctttctcctctcgcggatgaacaccacgccatcccatgggaccatccacttccgttccccgtcccagatcctgtgctgcaccatcccctccatgattccgcaccacaccaaaacgagagaggcgactctggtcaggctcaagacataccatgccatgccgccgccgcaccacaagaccaaacgcctggccatccctgaccctcttatcgttctgaggttgcgatcaaaacacaacaactgcctcctcgccgagctttctaatgaagtcagatggaactaccatgacaccatcacgtagcttgactagaagaggaaagagaaggccaaggcgacctatgctatgaggaaacaaatgggctagctgcgctgaaaggatgaggttacagtccaggagaagataaggtaccagctggacattcttactccaatccaatactga

SEQ ID NO: 132340 - DNA, 809 bp, Zea mays
  unsure (1)..(809): unsure at all n locations
  Clone ID: MRT4577_5217C.1
ggccggccgggcgtcaccgcgtcccganagcgcgattcattccgcgcgacgcaaaaccctagcccatccaccgatccttgtcatggcggccaccaccagccaggcgagcctcctcctgcagaagcagctcagagatctcgccaagcacccggtggatgggttctcggctgggctggtcgacgatagtaacgtattcgagtggcaggtcaccatcatcggcccgcccgataccctatatgatggagggtacttcaatgcaataatgagcttcccagaaaattacccaaacagcccgccatcagtcagatttacctctgaaatgtggcatccaaatggttgaaagcatagttctgagcattatatcaatgctctctagtccaaatgacgagtctgcagcaaacattgaggcagctgtaagtttgactaataatttactttttactgatttggtttacttgacctttactttttttggctgctgtaatatcaaatattccttcaattccaaattacaagggcgttttagcttttctagataaataggttttgctatgtatctaagctcgctgagtaatgggtcgtgggtttgaagtagtctctctccgcatttgccttggtttatccctaacccagacctcattcatgtgggatcctctggctgtgtctgctgtttttaaaataaaagaacataatatcttataatttggaatggaggaagtacttcatgtttgtgtcccgttgcatttgccaccaaatagttgtaaaatgacagaagttatttgtgtcacgacaagatagcagctggtatt

SEQ ID NO: 132341 - DNA, 764 bp, Zea mays
  Clone ID: MRT4577_52180C.1
ggtaccactcgaggccggccgggattatcatttccattcgcaccgaagatcccagaagcaagccaataggcaatagctacagatctctcttcgttgtgctgctagtacacataaaagaaagagcgagagcgagagagagagaagaagaagaagaagatgaggccggggagagatggtggaggtgtttcggcgaagctaacgggcggcgcaggcgggcccccgccgagcctatggaagacgccgaccccatacgtcttcctaggcctggccttcatgatgtgcgtcatcgcgacggctctgctcgtgctcatctgcacgcgcaagaaggcgtcgtcctcgcggcggcgggatgatggggcggccgacgagagggcggcgctcgcgccgctggaccgcaagcccaaggtcgtcgtcttcatgcccggcgaccgcgcgcagccgtccttcctcgccagcgtcaagccgctcggcggcggcggtgatgatggcacggcggcagcgtagccgccagagggggagagagaggacaaaagaggccagccgcgcgcgcatcgaactcgaaccgagccgagccgagccggcgacgcggggacaattttgtggatatatagatagtaatagtattagtgtgtatttttgagacggagtttggtttggctcaaaagatcccatgcatcttcaataaacgcgtgcggccttttggtttggctgcgtgcgcgcgcgttcaggttggatccaaaaaaaaaaaaacaaaacgcccctag

SEQ ID NO: 132342 - DNA, 259 bp, Zea mays
  Clone ID: MRT4577_52181C.1
cttagcatggtacgcggcacaaagaacaagcaaaaaaaaaaaaaaaaaaaaaattaaaaataaaaaaaaaacctttctttgggcaatttctgtaaaaaaccatcatttgggtggatcctccaaccatgcattgctagggggcaatttttgccaatgcccctccccgtgtgccatttcgcttggccatttatttacaagccccctttttggcaaaaccgttgtaaaatccaaattcctgggctttccataattacccttt

SEQ ID NO: 132343 - DNA, 296 bp, Zea mays
  Clone ID: MRT4577_52182C.1
aaaaagcgaaaaaggggcccgggtttttcaagttcttttaaaacatgtttaaaagaaaaccgtttcggccagacccaaaaaacccaaaccggccttttttttggccaacttggttgtaaatacccacaattttggcatttaaaatagccggtccatccggttttttaaaaacaccttaaacccgttccttgcggtttcacccttccgaaaaaatcggtagctaaatcaacccctggggaaccttatacaagggcaattgccccatagggcccccccccttaacctccctaatggcg

SEQ ID NO: 132344 - DNA, 654 bp, Zea mays
  Clone ID: MRT4577_52183C.1
gcgtatctaaacgacattccattctctagcccttagtgaacgcaggagcaaggcagggcaccatccgactgcagaggacggggcgagtagctatgccggagcaagccggcgacgttctacggcaaagatcgcacaccatatccaccgagggctgttatggagtgcgtggagaacccgaagactgacacgctgaatggaggcgcatcttgtactgatgcctatctcgtcactatattacagcatgcactgtcaactacaggcagatcaagaagggacacggcgaagcgactaaagccttgcataggaggaaatgggagctcgatgtgaaggcgtcggacacacctgccttttgagagactggtgcagctattctaggcagcagaggataagaacggccgaaaaggatcagtatcatatgaaacaagcctaatggggcgcgcttgcatgagctacaagaccaggcattgcttgctcaatgaccatgaatgagggtagtgcagctgaaacaacagatacagggttctgaaggacatgatgtgagaagcttatcgatggaatgacctcagatcatttaacgtgaggagcactagcgacacatttataagaggcttgcactggagatggggtctagattacattacgctttacaaacta

SEQ ID NO: 132345 - DNA, 577 bp, Zea mays
  Clone ID: MRT4577_52184C.1
gtggccggctccctgctcctccattcggagcccctgggtcaggcccggtcgacctccggcgacctcctgcccatggcacagcaggccgacgcccctgcctctactccatcttccccattggacagcacgagctcctgctcgccgatactccagcaaccctgcagcagcgccactcggatctcctgtatacgtgaacaacagcaacccggatcccatccacgtggtatgcgtggatccgatctgtgcagacccaacccacgacgtggcaacacccttggtgaggcctcgccacctgtgctggtcttgtgctcaaaatgcttgataaaatgtgtaaactgtgagagcgtccttaatcgcagccctccgtcgatgtcacgcttcgctcatcgcttcttgacgaagagccataaccgcggtacacatgcatgcgcgatccgaactgatttcatcaggttgatcgctatatatgattctagtctgctctaatgaggtgtgatcgatggccagaatatgtgtgcgaaaatggatgcggataaaaggggataagattaggatattaaatgggatagctgataaa

SEQ ID NO: 132346 - DNA, 172 bp, Zea mays
  Clone ID: MRT4577_52185C.1
attcgacatccgaacatcgtgtcctttgtgggcttcagcatacatgaggaggagccggtcatggtttatgggactaaataactagctacagaaaagggcttcacaaaatgggagtcagatttattatatctgcaccatgcacattccaatttgttgtcatgcctcattacat

SEQ ID NO: 132347 - DNA, 1136 bp, Zea mays
  Clone ID: MRT4577_52186C.1
tttttttttttttttcgcccggaaataattctttattacaaaatgattacaagttacaacatttacaagttataacaagattacaatatatatcatcggaggtgattacaaaagaaattgattcaaaaagattacaatttgaatgtataaaacatttataagttttaaaatacatgctagcttaagtgacaatcctcaatagggaagctaaagatgggatatacttatataagaaggccgagcccaccggcacttagcaccatccacaacagaacaaaattacaacctgggataaacactaagttagtgttgttaattgacgacccacttggtgagcatcttccatcctggcacttggttgattcatccattttagcttcgtccatcatcatcacttggagatcaattccactcgtcttccatagcacgtgatcaattaacatacctgatgaaatcagttcggatcgcgcatgcatgtctaccacggttatggctcttcgtcgaggagcgatgagcgaagcgtgacatcgacggagggcaagggtgttgcgacgtcgtgggttgggactgcacagatcggatcgacgcatacgacgtggatgggatccgggttgctgttgttcacgtatagaggagatcgagtggcgctgctgcagggttgctggcgtatcggcgaggaggagctcgtgctgtccaatggggaagatggagtagaggcaggggcgtcggcctgctgtgccatggggaggaggtcgccggaggtcgaccggccctgaaccaggggcaccgaatggaggagcagggagccggccaccatggttggggaaaaagacaccgtggaggaagtctgtcgcaggggagagagccaagggctgctcacgcccagaggccgacggccatggatccagagctccctgcggccaccatgggagatgagcaggggactagagggattcactgggaggagctcatggccggagtggagggggcgcggaacggcgttggggcagcaaacggcacccacagcgagcatcgggggggatcagagcagggagggtgtccatggattgagaggtgagagggaaaatgtgtgagaaggaggtgacgtgaagaagcaaggctcgtcccggcaggcc

SEQ ID NO: 132348 - DNA, 298 bp, Zea mays
  Clone ID: MRT4577_52187C.1
agcagtggtaacaacgcagagtacgcgggtattcgggatcgagttatgagttgataatcgtagatctgagacctcgttatttcctgtgatgattttctgtaccttttctaatctgttctatcatctaggccgtggattcaaaaaaaaaatcccgagccactgtgatctctgttgacatatatttaaaactgatttgggttaggttattaaaaccctaaccctaaaaacatcaaaaaaaaaaaacaaaaaaaaaaaaaaaaaaaaaaaaaaaaaagtactctgcgttgttaccactgct

SEQ ID NO: 132349 - DNA, 729 bp, Zea mays
  unsure (1)..(729): unsure at all n locations
  Clone ID: MRT4577_52188C.1
acgactttatcattcctgagagtgaggaattacctaccattaatcatcaaacatcttcgcatggacaagcaatagaacatggcattatggttaacttcggacgcgtgggtgccaatgctatgtgggaagactatcatgcaaacactatttgattgttatgtattttccagtatctctatcatttgtatggacatgtatcttttatttgtaaggacatctatatgttattcgtgtggacatattgctaaatttgggaagtatcttttatttgtatggacatgtatcttttatttatatggatatctaggtcatggacaaggagataagtggtgcaaaagctggtggtggactatgtcaatggacaccaactcaatccacatttgttctcacctttcttagcaacattgttgctgatgacactaaaacctccactggcttcaagaaagttcatctcaatgcttgtgctaaggctctcaacgaccattttaaggttattagaacaggcgatcaagttgctaatcacttgaagacatggaagaagtacattaggatcaactaccttaagaatttgagtgctgctctttgggatgaaaatgaattcattgtttctcttgatcacgagcattacaaagaacatatggcggtatgattcttactagacttttgtatttgatatcactgttctatgtcgtttatttattaagcccggccgagactncggagggtacc

SEQ ID NO: 132350 - DNA, 201 bp, Zea mays
  Clone ID: MRT4577_52189C.1
ttggtttttttggagaacggacgggcatcttcatccaaagcaaaacgaacaaccaatttgcaccatactaagcaccagaccctagttgcccgaaatctcccaaacaaggtaagaaaacgcgaatgaaccaaagttcttggaaaccaagtacacataactcctatacacgactaacaacgggaatagcggcgaaacatatcg

SEQ ID NO: 132351 - DNA, 835 bp, Zea mays
  Clone ID: MRT4577_5218C.1
ggctctcccgcgtcccgagagcgcgattcattccgcgcgacgcaaaaccctagcccatccaccgatccttgtcatggcggccaccaccagccaggcgagcctcctcctgcagaagcagctcagagatctcgccaagcacccggtggatgggttctcggctgggctggtcgacgatagtaacgtattcgagtggcaggtcaccatcatcggcccgcccgataccctatatgatggagggtacttcaatgcaataatgagcttcccagaaaattacccaaacagcccgccatcagtcagatttacctctgaaatgtggcatccaaatgtttattcagatgggctggtgtgtatctctattcttcatccacctggtgaagatccaagtggttatgagctcgcaagtgagcgttggacacctgtgcatacagttgaaagcatagttctgagcattatatcaatgctctctagtccaaatgacgagtctgcagcaaacattgaggcagctaaggaatggagggataagagggaggatttcaagaaaagggtcaggcgcatcgtgcggaaatcacaggaaatgttatgaagaaaatggaatactggggaagtcaaccgtgccataaatgcattgcgacgtggtgtatcgtgtggcctgggctctactaatgtttgacaatcctgaagtgccaccagtggtgaacctggtataagcaggcgccattcatgtcagctaatcgttgagaaaacatatcagtgaaatcgtgcaactgttagtgtaatgaggcagttcctggctacatattattactcgtgctacctgtctacagtgtcttgaatg

SEQ ID NO: 132352 - DNA, 451 bp, Zea mays
  Clone ID: MRT4577_52190C.1
taagaaggtatcaatggcatatttgataactgaaaatattctccacctgcagtaaaatagtaaaggaaggccctgaatgcccaaaattggccacagtatttcacctcaggtctacccactctgttatagtactatccacactcaatagcccatcttaccaactttgactggtttagttgtccctcctgttagcttaacaattctgttgagtgttgactcctcccatgaattagtcacctaaaaaaaggtagttaacaggtgaataagtgggttgaagaggataataattacctcaattatatttctgctttcataacttagtttactactttgtatcaggtcaactttcagcctctgtatacaacgcaattgaccaagagcgaggatgagtagaagaggatgatcctgggagcacgaggacgaagccgctgccaaaacagaaggcactgga

SEQ ID NO: 132353 - DNA, 453 bp, Zea mays
  Clone ID: MRT4577_52191C.1
aaaaagcccggggaattacaaacgggtttaatttttaaaacggccataattaaaaaaaataaagggggggggaaaaaagttgggttccccttaagcaagggaccaaaccttttttttttaaaaattatttttggggcaaagcactagcagttggttaaagttttgaaaaaagaagccgccctagctcctttattttttaagcctcaaagcacaaaaacacccggacgttgccggaaccaccggggtggttaataaagggcaaaaagcccccggggaaaaactccccccggaaaagggattggggttttccccaaccaaaaattgggggggggtggggcctacccaaccagggggaaaaattaaggccccccgggggaaaaaagcctgtcccaaaccgttttttgttcgtttgggccattttgaagaaaaaaatgggggaccgaaccaatttgt

SEQ ID NO: 132354 - DNA, 432 bp, Zea mays
  Clone ID: MRT4577_52192C.1
ccggttccgtgttacgttgtgggcggctgctggcttatgacagcagcgagagcgagagcgatttgccggacggggggcgcgcgccatggacgtggccgcggagctcgccttgctcttgtgctgcgtcctcctgctggactatggcgccatcgcctttctcctcatccggcacttcctggcctccggtgccgaggcgccagcagcagcgcaacgccatcgtcagccacagccagcggccaaccagcaacggcagcaagcagcgtcaatagccttcaagaatgaggaggaggaggctccgcggccgctggcttggcgggaggaggacgcgctgacaggccgtttcgacaagtccgccgtggtgggccgtggcggttccagcgcagtctaccttgccaggctcgttgacggctggcccgtcgacgtcaaggtgca

SEQ ID NO: 132355 - DNA, 789 bp, Zea mays
  Clone ID: MRT4577_52193C.1
ggaaccgcgcccagctcctctgtcatggtcctctctcccatgcgctcggcctccagttctccgcgggagcacgcctagccgagcggctcttccccacggcgcccttctccctcatcgcgacgctccggctcagctcatccatggcggctcctctgtccggcgtttctccctcgcgcccagctcggagttcctccctgcgctcatctccatatcgagcgtctccagctcttgcgcctggctggatcttccctcggctcgccgcgcccctgtttccgccggcgttccttccacggccgcgcgcaatgtttttctgctcgtgcacgcccgtctcccatggccgcggcgccctgactcctgctctcctgcgtcgcgcccgagcaccctgcttcctgctcgccggccaccagaaagcttcctgcgcgcagggcgttctcgtctcgacctccttccccgcgcgcaactttttctttgccccctgcgcacagccgccaccagtcgagcttcatgtacgcgcccagcgcgcgcccagctgtgaatcttccctggcgcgctcgcccatgccgtgcacaaccaagatcgcctacgcgccccatctccctctggatcccctgcaagctccttgcgcgggccgcgttcctctgctcggccatggccgcgcgccggcgctattctctgcgtgcgccctgcctttttccccgcgcgcagcttgtcccaatgctgagcttggccctgctctctgttccagctcgcagtcgctgcgttgccgagtccctggccgcgtcctgctgg

SEQ ID NO: 132356 - DNA, 641 bp, Zea mays
  Clone ID: MRT4577_52194C.1
tccaccgcggtggcggccgccctttttttttttttttgagcaagaaacgcgtctcaaatcttcattactagtagcagcttagctacaagcacaagtagacacaaaccagacctgcttctaaatcactcgcactgctacctaccacttcttcgtggacacggccttcatccaaaacgaaaggccagccgaacacacactcacacacacactgctatgctgcttgctcctgcgagacatacagtaggtaggaacagcgagaagctagctagcaaacagagcaaggaagaaacccaagaaaaagacgagctcgcaaagcacacactacggctacggctacgctacaaggacgacctggacgggggacacctggtcgtactggtactggacaatggacatacacacactgatgacacctggtgaagctaacagtaataaggggggggtttaatctctccttcacgagatcctatcaccacccggtggcagaggggcagaggggcggcggcggcggcggacatgaccaccgtccacccctgcagcaggtggagcccggccgccgggtggtgccaggatctcgggaccagaagacggagcccagccaggccacccgtgtttatttatttatttattttttagtagtg

SEQ ID NO: 132357 - DNA, 327 bp, Zea mays
  Clone ID: MRT4577_52195C.1
catcaggatgaccccaacgaatcctcgagacatcaaggacacatagaccatgaggactttcggggatggtggggctggtaactataggtcacgtttgtgcgacggtgatactgagggaataatcaatcgcctatggcatattcctagatgcaatctacttcgcttgatggagattgtatctgccattgccttacggatgaactgagactccatctctgtccatgttgtcacaggggacatagcacacaacacacatctttggtcaaaccttgacagatatgccttaccagacaggtttcttatgtgacttaatgataatgtcagtgc

SEQ ID NO: 132358 - DNA, 737 bp, Zea mays
  Clone ID: MRT4577_52196C.1
ctcggccgggatgtttcttctatttttccacaggaccaaagatagcttcctcacatacgcagcagtgcagcccacgctcgcgtcgctcttcctccgctcgcttctgcgtctcctaatcctctgcttgctgccacgccacgaacgtctttcgacagcagcaggctcatccgtcgtcgacctgagcagcagtcgtgcgctgatctacgtttccagccacgacccaagcggatcgaagctcccggcaacagcttcgctttcttggacagcaccgacgacctctctctggattttcccactctgttttgatttcaatattgtcgatggagagtacgtgctagtaccggcaccggcaacagaaggtggacaacaagagagtaatctgactgcggtcgaggttgttcaagacctgaatcccacttcgggagactttttccccggtccaactcaagaagatactaacatagaggagatggttgctggaataacttggccaagtcatttgccacctggatggacggtcgagtgggatatgacctccgcaggagaggatcatgtggagtagctcgtggtcggctttgccatcctacttatgtatcattagcttatcgttagcacgacgttacctttatttctgctgccagtgaaacttggaaccaatggtttatgttcaaacctatgtcttgtaataataataatcgtccttaatatggcatgtaaaaaaaaaaaaaaaagcggcc

SEQ ID NO: 132359 - DNA, 292 bp, Zea mays
  unsure (1)..(292): unsure at all n locations
  Clone ID: MRT4577_52197C.1
cgcgtccgctcctacttcatgncatcttcactctctatttcaagctcaccccaaccacttcctgggaccgacagtttttccatgcttgcctgcctcttctctacagttgtagaacgacaagccgctaattcatgggacgcttggacaactatacatgtgattcaacagtgaacgcggtcaaacgtgctcaattaaacatgctaatgccatttcacatgatcctaactcaaacgactcccttctgcaactaaatcaagaaatcgagctactgagtcagctgccacatccaaac

SEQ ID NO: 132360 - DNA, 179 bp, Zea mays
  Clone ID: MRT4577_52198C.1
attcggctcgagcatcaactcacgacctttcttgcctccttagcaatcttcgcttaatgcttctgttcaatgtccacattcattattcctctctcactcacaaacttttaatttctgctttcaaatccttattccacccatttggcattattgttacatatactttattaaggaagatc

SEQ ID NO: 132361 - DNA, 254 bp, Zea mays
  Clone ID: MRT4577_52199C.1
aattcggcacgaggccctcttctctctcgcctcgcctatctcctcccccgacgcgcctgcaccaacaggggaagagctcgctagcgaagcatgcctgggttgcggcgcacagcgagaacgcgttcggcgagagaccctcctcgagcgcactaccgaaaagggggagcgcctccggctcagcgcccttttgcgagaggcatgacaccatgagtcgcccagaaaaagagggcccgcaggccgacaggcattccgtg

SEQ ID NO: 132362 - DNA, 245 bp, Zea mays
  Clone ID: MRT4577_5219C.1
gggtgcctgagcttatattgatacggcactattaaaccgcggatacatcgcaaacagtgcgaacagctcaagcacttgcacccatggccatgcaagccagggacaccggactggggatcatttcagagaacgaagtggcggttgcggatctcagtcatcggccgcgatgctttgtaacggcggcgggaactataacggcggtgaccaccgagatgcttctggcggaatgtacaggaatgatccat

SEQ ID NO: 132363 - DNA, 1509 bp, Zea mays
  unsure (1)..(1509): unsure at all n locations
  Clone ID: MRT4577_521C.1
cccggttcgactcagcgtccgcccacgcttccgcggacgcgtgggttgccagcggtgagcactacanttgatcnagacactacttgcaattgatccagcagatcgcttaacagcgtcttctgcattaagaagtgatttctttacaaccgaaccttttgcatgcgaaccatcgagtcttccaaaatatcctccaagcaaagaaatagatgtgaaaagaagagacgaagaagccagacgtttaagggctactggtggtagagctaacggtgatggagccaagaagacgagagcacgtgatcgacctaaggcagttccagctccagaggcaaatgctgaacttcaagtaaatatcgataaacgaaggttcgtcactcatgcagctaagagcaagagcgaaaagttccctcccccacatcaagatggtgcggttggtgtccctttggacacttcaaatcatatggacccactatatgagcctccagacccgtcttccttcagcactgtgttcacgcacgagaaaggcgctgtgcctacttggtccggaccattggttgatcctgctgcagtggtgaaccaaaagcggaagcacaagtttgggcgctcatcgaaacaaccggccactgcccgtgctcggtaagatcctaaggatcaatatttacaggtaaaaaaaaggagacttcaacatgggggaaatgctccatgcagctgttttgcaaacgaaaaatgcaatgataatgtattttgttggttacctgttgtcatgtgagtgatttttttttctagacatcatgtataggctggggagggagttgaagtagttagttctgtatattaggttttctttcctgctctttaagcagctgcgtttgatgttagatttatttgaatggaagcttagatctctagcgtttcactacacccctttccattgtaacagtctgttgcctgcataatcagttatcaattcaacgcctattttcagcactgtgttcacttacgagaaaggcgctgtgcctacttggtctggaccattggttgatcctgctgcagtggtgaaccaaaagggcaagcacaagtccgggcgctcatcgaaacagccggccactgcccgtgctcggtaagatcctaaggatcgatatttacaggtaaaaaataaggagacttcaacatggtgggaaaatactccatggcggcacctgcacgctgttttgcaaacgaggcatgcaatgataaagtagtttgttggttacctgttgtcatgtgagtgatttttttttctagacttcgtgtataggctggggagggagttgaagtagttacttctgtacattaggttttctttcctgctctttaagcagctggtgatgttagattcatttgaatggaagcttagatctctagtgttcccgccactacacccccttccattgtaacagtgtgttccctgcataatcagttcttatcaattcaattgaaatcgtaagttttggtgaagaaaaaaaaaaaaaa

SEQ ID NO: 132364 - DNA, 269 bp, Zea mays
  Clone ID: MRT4577_52200C.1
aaaggagtgaaaaaaacttggattatttaggggttaggatcataacccaatagggcccccacccatatggggggggccaaccaattaaagggggtcatttttttttgggctttaatgggcgactttttcacccttgacggacgcgggggaccccccgaaaattacggacggggacttgaagggggaccaccttttcttaaaggaagccgtataaaagcttgggttaaaaagggaaaaacgtgttctctggggaaaaatggaatgcttta

SEQ ID NO: 132365 - DNA, 270 bp, Zea mays
  Clone ID: MRT4577_52201C.1
ccacgcatacgataccaacaagcatcctttaaagtgttatcttttacacaacactctaacaacaataggtggcgtgtattatatacattctctctctcacctctcaactcctctgcaatgcacaccccatcacccttcacaactcttcacaaactcaactaaatctccttcttcctcaataccattaatcaatcagccgtactgtacccctacacccaacacctcaaccataccaactgcatcacccattcggtacaagccctactacct

SEQ ID NO: 132366 - DNA, 325 bp, Zea mays
  Clone ID: MRT4577_52202C.1
gcgcgagcaggcactgagccacctcgcgattttgcacgtatccgcagaggtggccagcgagtggagctatgagatgccaggggccaatccggacccggatcgctctctaccggatagcgatggagagggggaggatgctattacaagcaatcagccgtcgcacgatcgatacgctgacttgcacgaccactatagtcctgttgcagataatgcatctaatcactagatgctgcttaggaagttccacttacaccatgacatgctcaactaacgaattcaccacctgcaacactaggtggattcagaggaggctaccaacgaccta

SEQ ID NO: 132367 - DNA, 697 bp, Zea mays
  unsure (1)..(697): unsure at all n locations
  Clone ID: MRT4577_52203C.1
gttgagttgcgagaggaggaggaacagaccttgattcttgagctccacgaggtacagcgcggcgcggcgcaatggtggagctgctccctgttggtttcatggactggctggcgctggctgtggctgtggcgttatactactttcttgtcgagcagctgtcataccgccgcaagaagggggccctgccaggcccgtcgttggtcgtgccgttcctcggcagcatcgtgcccatgatacgagacccggccgggttctgggacacgcaggcggcccgggcaaagaagtccggtgccgggctggcggctgaattcgtggtcggccggttcatcgtcttcatccgcgactcggagctatcccaccgcgtgttcgccaacgtccgccccgacgccttccagttcgttggccaccctttcggcaaggacctcttcggcatcttctacctgttcggcgacgagcacaaggacctgcgccgcaggatggcgcccaacttcacgccgcgcactctctccacctacgccgccgtccagcagcgcatcatcctcgcnccacatccggaggttgctagaccggaaccggagatcagtcgcggcgccgatacaggtgacctgccgcaacataaacctcgagacctcgcagacggtcttcgtagggccgtacctcaccgaggaggcgagggagagattccaccaggactacg

SEQ ID NO: 132368 - DNA, 567 bp, Zea mays
  Clone ID: MRT4577_52204C.1
cctgccacacacgaggccgatcacgctagctttttccaactcaagttactctatcgtgatcgagaaacgtgacagctatcagctagcctggacgggaatagaagagacggccgcctgggcggcaagaatctctcggagggcgagcacatcgacactgcgcggcagggcacgcgacgacaaggactacaaggagtccccgccggccccactcttccagcccgcggagctcaagtccgggtccttctaccgcgccgccatcgccgaggtcggcggcaccttccgcttcctctacatctccatcctcaccggcatgggcgccaccaagtgcacctccaagtgcaccaccgtcaggatacatgggatcacctgctccttcggcagcatgatcgtcgccctcgtctactgcacctgccaggatctccggcgacgacataaacccggcggtgacctttcggctagacctggcgaggaagccgtctcgacaacaactgggaggtctacatcatcatgcagtggctgcgcatcatctgcaactaggtcgtcgtataggtatatcagccagcgctg

SEQ ID NO: 132369 - DNA, 555 bp, Zea mays
  Clone ID: MRT4577_52205C.1
cgggacgcccttattctcagtcatgcattaagacattgatatcggggtgccactagaaccatttcttcgtttttgcaccgaaaaaccattgatatcaaggcgccaccgaaaaacaaccagccacattatgaaccaaaacattatcatttcttattcagtcatgcattaagacattgatacatattttgcatcataatgttttggtttacttgtctaatggcgtttcactatgcgatcaaataatcaccttgtaacatcttatttttgcgtatttactgatctaagtctcagttttcacacttatttcttccttgagtatatttaaactgatattctgagcaagcataagcattcagacaaatatatacttttaagcatggcattggttaagatgaaatcccttttgggattttttgtcagatctggaaataatgcgattttttgtaacccttgctggttggccattgaatcataaataacccaggattgatttttgaagatggaaaaaatatggatttgaagttgataaccaaggattacataacatgcaaagag

SEQ ID NO: 132370 - DNA, 383 bp, Zea mays
  Clone ID: MRT4577_52206C.1
tgtgcctttgcggggactggaactccacctccaattgtgactcctcggccaacacagcacggtcggtctcccccacgctgcccgctgtcgccgcgtttcgttgggccatcctcgcctcaggattgacgtcactatggtactacgcgtcgccgacatcaaatatgtgatggtgggtggattcatgcagctagcgacaactacccttcaaacaacagtacaccccccctaaaaaaagacgatgcgtttcaggagcttgaaacgatcgaatttcagaacccacgatccctatccatactggtttatgtttacaatcactcgtaatggacaaaaggccaaagacgatcatgtttgttgtagcaaggatatttttcccgtttggatgt

SEQ ID NO: 132371 - DNA, 564 bp, Zea mays
  Clone ID: MRT4577_52207C.1
cattgggtacctcgaggccggccgggttgaatagatacatagcatcaaagatatttctcaagagcacaagaaattagcaaatggattcaaccttttccagaaggagctggaaagactgaaagatgagaatctgtctcctcttcttcccctagacgtcaatctaactgacccatcactcagtggtttggaaaggacattgtcacaactcgatatgattactcgccttggaactcgagcttgcagaggctctccaagcaaagaagaaaacaaacatccttttccagagttcattcttgaagcagcacaatgatgaagcggcgatcttccaaagcttcagggacatcaatgaagtgatacaagatacgatcgagctgaagaggaggcagatggcggtagaaaacgagctaaaggagatgcagggcaggtattcagagctcagcgtgcagttcgccgaggtggagggcgagcgacagaagctcgaaatgaatctgaagaaccgaacaccatggagatcatagggaaccaccaatcaaagcgaagaaaaaaaaaaaaaaaaaagcggcc

SEQ ID NO: 132372 - DNA, 539 bp, Zea mays
  Clone ID: MRT4577_52208C.1
tttttcttctcctggcaacatgtacgtccgatccctcgccatgggcatgggcgacaccgagatcacggcgggccacgagatcgtcgccacagattacctcccgctcctctcctcgtacacccgcaacgcgcatgtcctcctcttggccatgctccagctgccgctcgagctgctgggaaactcctgcaacgacattgagaccgacacgatagtaccaggaggaccacaactgcggataccccatcgagatgataaatcgccgagatagagtgacgtgctactctcaagcgataagtataaggtacactacggctggggtggagccgccagatgaccgcacggctgacctcgagaaccttcccaacaacgtcaacggcgaggaactcgcgtacagcttcgatctatccgctgctgtccatgtattggaggatatctactgacccataaactggacatgaacgaaggattcggctaagtgtaccatgatcactgttgacgaagctgactgctgctttgatactgataaccgctatgatatt

SEQ ID NO: 132373 - DNA, 2690 bp, Zea mays
  Clone ID: MRT4577_52209C.1
gttactgtagaggaactcgagaggaccaaaatgtgtcttgtacaacatgaggaggatacccgtaccttgacccagtcattacagtctaaacatgaattgttagtgcatatggagagcgaaatcaaatgtttacgtgatgatctgatgcgcactgacgagaatttgctgagagaaaagagacttaaggaggaacttgagtctgcccttgctagtcttacatcacagattggtgagaaggatcaaattctactttcttttgatgaacacaaaacggagttcattcatctgaagggccaacttttggacatgggaaaaacacatagtttaatgcaagattcactgtcacagagtgaacaaatccaaagggacctcaactgtaagaatcactctcttcagtcccagctttcaattctggaaaaccagttaggagcagttgttgagaccatgttttccagtgaaattgaagctagttatatgagaagtcaggtaagagaggctgttgtgcagcttaatatgttaagaaatgagcttgagaaacttcaactcaaaagtaaagatgctaatgaatcattacgggcacacatgtccactgaagcagaattagctgatagaaatagcacacttgaagcagctatccattctcttgaaaccaaccttagcagtgttattcaagagaaggaaggtcttgaggagcttatgaaaggacatgacgaagcgtcaaatcaagttagtaacaagtctcgtgatatagcagtcaataacagtgatagagtattgaaggatcaagatgagattttacagcttagggtcttgcaggcagatcttgaagagcaagttgataatttgaaatctgcaaaagatgagactgaaattttaaacatgattcttaggtcaaaattggaggagcaacacactgtgatgtcattattgctccagaatcagaggcatgagttgataaattcaatagaagagaacaaggatctcactcaaaaacttgctgaacaaagtctgaaggcagaagagttcaaaaacttgtctatccatttgagagagctaaaagaaaaggctgaagctggaagaaaggagaaggaagggtcgctacataccatgcaagattctcttagaattgcatttattaaggagcagtatgaatcgaaggtccaagagctgaaaggtcaagtttttgtcagtaaaaaatatgccgaagagatgctgctgaaactgcaaagtgctttggatgatgttgaaactgggaagaaaaatgagattgctcttgccaagagaattgaggagttgtcgatgaaagtttctgaaatggaggtggagatgctggatttatcagctgataaaagagaactgtcaaatgcatatgacagcatgatgacagaactagaatgcacaaaattaaacttagattgctgcaatgaagaaaaacagaagattgaagtctctctggaagagtgcagtgaggaacgcaacagaataagggtggaacttgacctgattaagaagttattggagaatatggcattaactgacaataacacatcacatgatagttctgaatcatgcacccctggaaccacgtcgattaggcatgttcttggagatggtaaggcggagcctgcatcaaaggctacaccaaatacaacaaaaatagattcagggttacaggaacatgaaattcagagtagaagttcctcttcaaatttgtctcaaggagcagaggatgttgtgaagtttgacaataatgaagagagcaagaacttggagaattgcgatgaggaaatggaatcgccaacaaagaacaatttgaatagcaacaatagcatcaaagatatttctcaagagcacaagaaattagcaaatggattcaaccttttccagaaggagctggaaagactgaaagatgagaatctgtctcctcttcttcccctagacgtcaatctaactgacccatcactcagtggtttggaaaggacattgtcacaactcgatatggcaaatgagcatttgcaaagtatttttccatcatttaaagagcttcctggttctggcaatgctttggaaagattactcgccttggaactcgagcttgcagaggctctccaagcaaagaagaaaacaaacatccttttccagagttcattcttgaagcagcacaatgatgaagcagcgatcttccaaagcttcagggacatcaatgaagtgatacaagatacgatcgagctgaagaggaggcagatggcggtagaaaacgagctaaaggagatgcagggcaggtattcagagctcagcgtgcagttcgccgaggtggagggcgagcgacagaagctcgaaatgaatctgaagaaccgaacaccatggagatcatagggaaccaccaatcaaagcgaagaaaactaacgagagaagaaaaaaaaagtgtcagccagctgcaggctttgtatacaatcttgtgcgacggcagtgggatacattttgtagtgtatatatatcagctgtatcgattgtagagttgtagtgagcgagtgatatgcataaaatgtaacacagcaccttgtacaagaaacaagccttgttatctgattgttccttgccaacaaaccaaccatcagtctttgaagcagtgggtgtatccacgttgctgattgtattttgcagttatttgtatagatcgttgatcaact

SEQ ID NO: 132374 - DNA, 930 bp, Zea mays
  Clone ID: MRT4577_5220C.1
ccggccggggcgtcaccgcgtcccgagagcgcgattcattccgcgcgacgcaaaaccctagcccatccaccgatccttgtcatggcggccaccaccagccaggcgagcctcctcctgcagaagcagctcagagtgatggagggtacttcaatgcaataatgagcttcccagaaaattacccaaacagcccgccatcagtcagatttacctctgaaatgtggcatccaaatgtttattcagatgggctggtgtgtatctctattcttcatccacctggtgaagatccaagtggttatgagctcgcaagtgagcgttggacacctgtgcatacagttgaaagcatagttctgagcattatatcaatgctctctagtccaaatgacgagtctgcagcaaacattgaggcagctaaggaatggagggataagagggaggatttcaagaaaagggtcaggcgcatcgtgcggaaatcacaggaaatgttatgaagaaaatggaatactggggaagtcaaccgtgccatgtcaggctacgagattttgctttcaacctcaaaatgctcatctgacatcttgtgtattttccatttagcgtctgttcattggtgcaccagaaatgcattgggacgtggtgtatcgtgtggcctgggctctactaatgtttgacaatcctgaagtgccaccagtggtgaacctggtataagcaggcgccattcatgtcagctaatcgttgagaaaacatatcagtgaaatcgtgcaactgttagtgtaatgaggcagttcctgcttacatattattactcgtgctacctgtctacagtgtcttgaatgcatggaatgtcttgaattttacctgttttccttggtgtaagcatggtatgcaataatgggaaacgcaaatttctcagttaaaaaaaaaaaaaaaaaaaaa

SEQ ID NO: 132375 - DNA, 259 bp, Zea mays
  unsure (1)..(259): unsure at all n locations
  Clone ID: MRT4577_52210C.1
gatgagatttatgttgtcccagatgatagtcaaaatcgtattaaaattcgagactcatttgtagataacacccaaggagatgaagaaaatgggttctctgatagaacctcaaaaagtcatttggaacggaggccttcaaaatacaaatataaatctaaaaccttgtttagtaaagccaagtcatactatagaaatatacatncagatgccagtgatgatgaggctttcaccacttctacaaacacagaaatcggggggc

SEQ ID NO: 132376 - DNA, 2313 bp, Zea mays
  Clone ID: MRT4577_52211C.1
atgactaaggagaagataactgaggagaagaagttgtatgaagagaaaaaagttgtggatcctttcattgctaggttttatgagtctatggcaaaaacgaatacagaaaaaattattaaggagatcatagagggtttgtccaaagattctgatgacagtgatagttatgatgtggaaagtggggatgaagattccaaggaccgaccctggcagccaagccataccatattcggaaagtcgaccatcaaacatagtcatattgacgccatgagagggagatattttcgcgacatgtccattgtcagaattggaggagacaacactgcccctgcgcctgaggagaatgaagttgttatttaccgaagcttcttgaaggcaggccttcggttcccactgagtaaatttgtggttgaggtattaaagatattccagatctttctacatcagattacccccgaagctataatttggatgggggtgtttgtttgggctgtaaggagccaagggctggagccgagcgcgaagtgcttttgcagtatgcatgagctattatacgagacgaaggctaccgggaaagaacaataccacaacaactttggttgttacgggttcattgcccgctctaatgcaagttacccagtgccaacataccaaaaaagatggcccgaggcctggatggaagagtggttttatgttaaaaatgatctaattaaaaggaagacatcaaggaaatcatacagcgccccatctagtctcgcttcagccttcgaaggccaaagattcagagagaagttcgacgaaccaaatgataattggttaaaatgcattgaggctaccagcgacgagctgcttgggacatacccgaaggccgaagatgatgccttgtctgcagccttcaggggtcgagagaagaaaagattgaacagggtgtttgatgcaattggctttgtataccctgattatcactacccgttgcgaaggcaaggaaggaaaagaaaaactgccgcttcggccaccattgttgtgccactgtgccgaagggtgcctacagtaaggctagccgaagccgaaggtgatgcggccgaagaaccaaaattggaaaaatcagttaaaatgccagaaattctgagtccactagcaaaggcagaattgccgatagtgcaaaaggctcctgccgcaactcccaagagaaggagattggccaccatgttagatgttgttatggagactacaaaggccttgagccttgttcctaccaaaaaagctgccgaagctgtcaaagaccaggctgaagccgaagctaggccttcggcgtccattgagacgaaggctgtctcacctaaagataaagctgatcaacaaactttagataccggcatgaaattaaaatatccgaagggggctttagtgttcaatggtactgacgaagataattacctatactgtctcccggacaacaaagaaatatctgtctgtcgggagatagctaaaagtatgggtttttcgaagcttgaggaaggcctttcggtcatgtcgaaggatgatcttgctgatagtctggcatacaacagtataaagggcgtaattcttagcaatgccttgagggcacaaaagaataccgaagatgaaagctacacagaagctcttaccaaccttcgctcagagaaattaaagactagcttctccaaagtggacgcctactcttctgaagaaaattttatccgaggcgaccccgagggcgttgttgaatgcataagtggagaagccggagccttcgaggaaattttgaatgatcgcggggatatttgtgctttttctggcgcttggggaatcgtagctattctggagaaggccggatgtgatcacgttaaggctatagcccaggccgaagctgccttctccatagatgatatgaaggatccttcagccgaagcaactttagtgggcaggaagttttattctgatgtctgggtgaacggtggccgagagctggccaacgaaattataaaaaagaatgaaaaagacacccacgacgctcgggaagaagcgaagcgggctgaagaggctgctgaacgcgaaaggcgcataggtattgtttttgattttttggcttcaatacttgctttttggcttcgaattaacagtttacctactacaactgaactatccctgccatcggagccgtacaatcccctagctgatccagagatgaaggaagcactggacattataagcatggcaaactccattatcgatgaagtcgtcgataaactattaaacaaagttgcagaaaaagtctttagagaagaatag

SEQ ID NO: 132377 - DNA, 255 bp, Zea mays
  Clone ID: MRT4577_52212C.1
cttctgctgaatgcacgctctctcacttggcatcatcatcttcatttggtggagtgtctgggacatgatcatcatctatcatctttattaggtggagtttcaggggcatgatcatcatctggctgacattgcattgtcaccaaaacatgctggtgttacttttttttagtaaaccagcgaaaccacatcaactattataatgaaaacacatcggtggaactgcacaaaggggaatacatgatactaatgctacaa

SEQ ID NO: 132378 - DNA, 1072 bp, Zea mays
  Clone ID: MRT4577_52213C.1
gcattgcaaattttttatattcccttaaaaaaagccatgcaacgacacactcccttcccccgtagcctaaccatacaccaggagatgaataaagccacgaaaatatttccctttttctttgctccatcgcaaaaaaaaaccaaaagacactttcttttgcccggtacgtgttttttgttcaaaccctatatcttcatctcgtttaaaaaacaaagccccatttggtttgaaaaaaaaccggcctgcctacccccccttttgcttcccattcaagccaccgctctatgcgaattgatcgagtttatcttctctttgttcaagagagtcaagagtatcggccgcgggtttttttttttttttttgttttcaaccagcgcttaaattttgtctatttgagaagaaggttgttgattggcttaagcagaggtgatagccttgcggaggcgagcaccacgctggcgcgagctgaggtgctcacgctcggcaacagcatcggacttctggacaacctcctcagcctcggtcaggatgagctcgatgtggcaggggttggacatgtaagggttgatacgaccgtgagcacggtatgtccttcgtcgctgcttgggggcctggttgacctggatgtgcttgacaacgagggcaccggtgtcgaggcccttggcatcagcgttggcctcagcgttcttgaggagaccgaggaggaactcggcggacttgatgggccatcgagccttggagacaccgaactgcttgccttgggcggtgcggccagtgctgccggcgtatcgtcgcatggggacggcctccttgtgctccttgacgttctcgaggaaggtaacagcgcgctgaagcttccagccgttgatggcctgggcggtctcgcgggtgttcttgaaggacactcggaggtaggcaccgcgggcgcgggccgacttcgcgggctggatctcggtggcagcgtatcgaaccatctcggcgacttgggtggtgagtgacggtttcgacgacgggacgtgggttcccggccggccggccggaaattctcccggccggcctcgagggacccaat

SEQ ID NO: 132379 - DNA, 1841 bp, Zea mays
  Clone ID: MRT4577_52214C.1
cccggtgataacagttggctttctgttgcatgcttgcagcataagaaaatcccatttgattcaactttgctattccattccctcttctttcaatcagtttatgcacagtcatggagctttctaataccatctatctctagtctctttctatctttttttttctggaaaaacacacacacaccacccgccaccgccagcccaagaatctctatcgaacaactctcctcctgaccctcaccggaagcccgccgctgatggacgcggtgagccccgacacgaacttgggcgcgcaggcggtggcgccactgtccccgaccacctcgacgtcgaacgccctcaccacggccacagcgaccaccttcatctcggtgacggcgagctccttgccgaggcagacgcggaggcccgcctggaacaccgggtacctatacaggctctctgggacgaacgaggcgccggctccggtgagccaccggtcggggcggaaggcgccgtggtcggcgccccagatgcgcggcatccggcccattgcgtaggggtggtacgtcacgcgcgtgccgccggccacgtaggtgccgtcggggagcacgtcgggccccgcgcagaacttggagtcgaactgcaccggcgggaacaggcgcatgttctcgtacagcaccgcgtgggtgtagtgcaggcgcttgaggtgctcgtaggtgagcggcgctgagtcgccgtcgccgtcgccgtccccggcctcggcgcgcatggcggccaccacgcccgggttcttggacaggagcatgaacagcgtggtgagcgccgaggacacggtgtcgcgccccgcgaggaggaagctcacgacgatgtcgcggaggtacttgtcgtcgccgtcgccggcgccggccgaggccatgaagcgggacaggaggtcgtggctgccgacgactcccagcttccggcgctcccggatcacggcggccgcgagctcgtcgacgagcgcgatggcctcccggagctccctctcggacccgacgttcagcaggcgcttggccctccacactagcggcgacgccgcggcgccgcgcatggcgcacagccgcgtggcgacgtcgaacgcgtcggcgagcctcgacacgggcatctcccgctccaggcatccggggtccaggccgaaggagatcttgcagatggtgtcgaacgcgaagcgccggaacacgtcctgcaggtccacgaccgcgccagcgtcggcggcggcggcgagcaccggcacgaggcgggactccacctcctgcgccacgatcccgaacgcgtaggaccggacggcgacgctgccgagctcgaggctggccatcttgcgctggtggcgccaggcgtggccgtccacgttgaagatgccgccgccgaggaggtccccgagcagcgccgcgaaggccttccccttggggaagttgtcgaagttggtcctcagcatgtactcgacgttggccgggttggcggtgacggtgcagccgagcacgtgcacgtggatggtgcccgtgggcgactcccggagcaggtgcgcgtaccagtcgccgaggttggtgaagtcccgcgcccacgaccccgtcaggtacgcccggcacacgtggcagctgcaccagggccaccgccggaggaacaccagcacgacgcccagagccgtcacgcagagggcggcggcgaacagtgccgcgcccgcgcactgcgccgcccacggcaacgagtctgctgttgcttccatggcgatggcgggcgcttgtgttctgtctagaattagctcgtggaagaagagggagatggtaggggaaatgtgtggggacgtttgtgtttcgtgccgaatt

SEQ ID NO: 132380 - DNA, 220 bp, Zea mays
  Clone ID: MRT4577_52215C.1
ggggggaataccaagcactacgtacaatatctttacgatgaacaagcaaaagaaaagggggaaaacaaaaggcacgcttctatgcttttacagacatgggaagggagtctctggtgaacggccagaactgggctcttttcattactcatcactcacgttacatgccaaaatgacaaaagatgacatctgtttctaccaccagctggacttccagtcacca

SEQ ID NO: 132381 - DNA, 334 bp, Zea mays
  unsure (1)..(334): unsure at all n locations
  Clone ID: MRT4577_52216C.1
tcgactacatgcacaagacggacaccacggggggccgttggattgtccgcacgccggctcanaaanacgcgaggggcngacgaacgcttaactgctcgtctacacgccatagaagcctcgaatgagttgttggtcgcatgaaaccctgaaccaactaggaccaacgaatgggaaagcagagtatgtaagtcgacaggcaaccatcagggacatccaccataatgaggaggttgaacacgctgcgcctacatgcacctgaactcgcactacatagggacggtgcgtggaggttaatgtccatagaagacagggaattcaaaaaaaaaaaacaaaa

SEQ ID NO: 132382 - DNA, 490 bp, Zea mays
  Clone ID: MRT4577_52217C.1
ttgttaaaggccaaggaagaggttgagcgagccaaggcttctgcgacaacggcaggtaccaggttgcgtgcagtttcgaaggagatagaggcgtctaaagcatctgagcggctagccatagcggcagctcaagcgatgcatgagagcgaggacacaggaagcactggcgcttctcctcgagtagtaacgcttactgtaagtgagtatcatgctcttagcgagaaggttcatggagccgaagaacttgcaaacgagagggtggcggtcgcgttggcacaggtagagttggcaagagagtctgaatcgaggaacctagagagggtacaggaagcgtccaatgagatggagaaaaagaagagcgatcttcgaatcgcgctggagagggccgagagggcaaatgaagggaagcttggcgctgagcgggagctgagaagatggagagctgaacatgtgcagcgtcggaaagcccatgaggctgcacagcatgcag

SEQ ID NO: 132383 - DNA, 2100 bp, Zea mays
  Clone ID: MRT4577_52218C.1
ctatttggtaatgtctttctcagaggcaatggaagaagaagggcgactcgaggcatcaggcgcagccttgacgtcggcaacaatgtcatcaggaacaactacaccatgccttctcatcaagatccgccccgcaagaacggctttatccatagccttgtcgcgctgagctttcagaatggcacagttgtcctctgcaactttggtagccagtcgagcggcctctagctcctgggcgactgatttcttggaggcatgcagatctttgacgatggagtccttgcttgacaccaactgtctaagccgcaggacctcatcttgggacacttgcagttcgcgatgatgatgatccagatctgacatagtaaagtgatggcttctctccaagatggttaaggaagtgctagcatcacgatacaacctatccagattgtcacgagaagctgcaagtgctcgtttctcctcctcgtgtgctgccctctcggagttaagcctgagaatacttctcttcaagatcagagtaccgtcgggttgagtcggcttgatactgaagatgtttttcctcaagctcagagcaccgtcgagccatatctgaagattggagaagaatgagagtaatcccaagtcaggagaagctgcgtcatagctcgacgagggaagatcaaccgaaacgatttgaagaacattgccaggagttgactcagccccgccagcggatatcagaattcttgcatctggctcgccgacctccaaggcgactcgcttgctcgaagttaaagaaacaggcatcgctatcaccccatcagatcgtggtggagatgacccggcatggatatccatggaggtgcaggaaggagagctcacttggacaccctcgggggctgggttgcagctcaagccacccaacaaagccggatcactaccggcaacaccctcgagggctaggtcgcagctcgcgccacccaccagagccggatcactaccggtgacaccctcgggggctgggtaactgccagcaccaccctcgggggttgggttttttgtagcagccacctctaaggctgaaggatcctcagtcacccccatgggagttgggtaatcctctaataccacatctggaatttcagagcaaacatccatcatgtcgtcagcaatcggctccgacagcatatcctcaagaacgacatcctcaagggcctgatcaaaatctgttatggacaattcttgaaggctgacaagagcagacagagctggagaaggaatatcactatcccccctactacctctgtaataccggctattcttacgaatcagtggagcttcttcttcctcttcttcgttctcatcaaaattacggacaatagccggtgcacggtcacacccattgggaccagcttcaacaaggtcacacccattagggtcagcttctacacggtcatacccatcggggtcagcttcaacatgtacaccaccattgggatcaacctcaggaaggatctctgctaatacttcttcacaaacaggagcagaagggccagcatccgtaacagccatcggttcagcatgggccgagtcagaagattctctagccaacatattgagtacagcatctatttttgcatcatccggacttgacggcatctcaaagtgaacttgcttctcatcattgggaacatcacgaaggggagcaaccagagcctcaatgtcttcaggagagggtcgcactctaagacccagaccactatcactagcaggagggttggacacgaaattgaaaaatgacctatgaggtggcagattccaagcagaataggcaacaggagcaccaacatttgatatcttgtccctcaggatcatgtctagtcggctcaccaaaacatcagtattaattttcttgttggtgacccgagtagagtcagtaatgccactgtacaagtaagctggatacgccctgtctttcaaaggctgaatattcttgaaaacgaagtcagcaaccacagcttcgacagtcagacctctccctgcgaacggcaactggctattggggttgaggggaggaatgactaccgcagcagaactctggtacttccgcttgggcgccat

SEQ ID NO: 132384 - DNA, 690 bp, Zea mays
  Clone ID: MRT4577_52219C.1
cattgggtacctcgaggccggccggaaggatgcctctactggagccagtatgaactccccaactctcttctctacggcaatagcaaccccgatcacaactcccctttcatcgtcacctcctcctcgctctccccatctctgcgatgactactgacctgcccaaatgactccagaactacaattcaacgtctgcggctaataagttccatgcttaccgccgtgttgccgagcacaatctcttcctattccaccatgaactatactgcatacaaccatgtctatctcgctgactatgggcaccacaagctatatcatgggaagaatgccactggtgtaatctcatgtggcttggtaccatatcatgacgatgccttctgcccccaaatacaaaggcttttatcgacatatgatctactttatgatggacgaaagcatctggtgtctggtacaatatcggtgaatgtcacgatgacattgtcaaggttctgattcacaaccaggatcaaaaggtcaagactgtccatgctttctgaaccccacaaacagcattcaggactgctttgtctccgacaatcagagatcacacctttgacgtcctgaagcttagcaactgcgataatggcttccctttctttcccacacaggatttaactttgccgtcagggtcacttccaacggatggttgagttt

SEQ ID NO: 132385 - DNA, 374 bp, Zea mays
  Clone ID: MRT4577_5221C.1
acgtgcaagaaaaagttattcacaatcttcacagaggaaggggcagccagaaaaaaagagccccggaaaagatacatgttgaagtatgcttcaaagctgtagctgtttttcacaatactttttacgcttaatgcaaggtaaaccttgattggttgaaggagattgaggaggattaaattttttttctatacaaattttactactaagggctggcttgtttgggagaaaagaattgaagcagggctgatttcaaaataaggggattgagagaaaaaggaggggtcatcaaatcaaccaaggctaaaatccccttttaggattttggccccttcaaaatttaagagtcctcaatccccttacttcaaaaaaaaata

SEQ ID NO: 132386 - DNA, 2655 bp, Zea mays
  Clone ID: MRT4577_52220C.1
atggcgcccaagcggaagaatcagagttctgttgcggcagtcattcctttcatcgatcccaacagccagttactgttcgcaggtaaccacatgtctgttgtctcagagtcagatctcctccaccttgttgatgttggagttcttcctccaaaacagctctgctcttggcggatttgtcgtggggtcactgttccgacagaagatacccatgagtccgtcgtctacgttccttttctcatccgcgacctttctcttcccgtttctcccttcttctgcggtctccttgatttttacaatctaaacctgacctatttgaatcccaattccatcttgcaaatttctatctttgtgcatctgtgtgaggcctgtctcagaattcttcctcattttggactatggaagtatttgtatcactgtcggcctaggatggctggggcgcagcaccagctcgttggtggtgcaagtttggagatgcgccgcaggaggaagatagaatacctcgacattcctctcaaggatagcattaaagggtggcgccttgagtggtttattgtggaaaaccactgcaagtccctccccctcgtcggggagacagccagatacaaggcgcatccagcttacttgtacagtggtattactgactctacccgggtcaccaacaagaaaatttgtactgaagatctagtgagccgactagacatgatcctgaggggcaagatatcaaatattggtgctcatgttgcctattctgcttggaatctaccacctcataggtcatttttcaattttgtgtccaaccctcctactagtgatggtggtctgggtcttagagtgcgaccctctcccgaggacattgaagctctggttgctcccctttgtgatcttcccaatgatgagagacaggttcactttgagatgccagcaagtccggatgatgcagaaatagatgatgtactcagtatgttggctggagaatcttctgactcgacccatgctgaaccgatggctatcacggttgggcaagagcttaacaaaacagtggagacccgaaagcctgagggtacccgcccaaagcgtactcgccaagttagtcgtccgactatgcctgttgaggaaaagaagaagaagaggcggcttcggcgactgtcatgcttggaccaggatgccagtccttctgctcatgtttgtgatgtagtgccagcagaggtcctttctgaggttaatcccaatggtggcgtccatgttgaagttgatcccaatgggtgtaaccgtgttgaagctgatcccaatgggcgtgaccgtgtagaagctgaccccaatgggtgtgaccgtgcagaagctgaccccaatgggtgtgaccgtacagaagttgatcccaatggttgtaaccatgccgaagttgatcccaatgggtgtgaccatgccgaagttgatcccgatgcgtgtgaccgtgcgccggctgttgtccgtatttttgatgaggacgaagaagaggaagaagaagtcccgctgattcgtaagaatagccggcattacagaggtagttggggggatagtgatattccttctccagctctgtctgttcttgtcagccttcaagaactatccataacggactttgatcaggcccttgatgatgtcgtccctgaggatatgctatcggagccgactactgatgacatgatggttgtttgttctgaaattccagacatgggattagaggtatcccgagcagtgtctcgtgcatcatcgactttggaaggtgttgaggatccttcagccttagagatggctgttgcagaaaacccagccctcgagggtggtgccggcatttacccagcccccgagggtgtcaccggtagtgatccggctttggtgggtagcgcgagctgcaacccagcccctgagggtgttgtcggtagtcatccggctctggtgggtggcgcgagctgcaacccagcttctgagagtgttcaagtgagctctccttcctacacctccatggatgtccatgttggatcgtctccaccacgatctgatggggtgatggtgatgcatgcttctttggactcgagcgaacaagtcgccttggaggtcggcgagccagatgcaagaagtctgacatccgctgtcggggctgagccaaccctcgacaacgttcttcaaattgttccggctttggttgacggaatgtctgctcagttgaggtcgcatggtgccactatcccagaaggggctctatctctgatgcaatggaacccattggtgcttcagaaacagatagctgacttgaaggcatcaaacgctgatatggctcggtggtgctctgagcttgaggaaaaacatcttcaacttcaagccgactcaacccaacggtactctgatcttgaggagaagtattctcaaggtcaggccaacctgtttctggtttctgcttctctggacgatgcacattctttgaatttttctctcaatgctcagcttaactccaagagggcagcacacgaggaggagaaacgagcacttgcagcttctcgtgataatctggataggttgtatcgtgatgccagcaattccttaaccatcttggagaggatccatcgctttactatgtcagatctggatcatcattgtcgcgagctacaagtgtcctaa

SEQ ID NO: 132387 - DNA, 290 bp, Zea mays
  Clone ID: MRT4577_52221C.1
caaaactctttgcaaaaccctgtttcatattggacaggagatgctccagcatcaaaagtacatcccatggctgatacatctcgccaatctttgcaatctcaaaatgttgatttactagccatgctgcaaccaaaggagaagcctcaagttcctactggtaattcgggtctgccactatgctccaattaccctgaagcaagtatcgttaatcccaacttgcatagtggagatcttgctcaaggggcccttaatatgcgtcaagatatgcagaactcccagaacattggtat

SEQ ID NO: 132388 - DNA, 133 bp, Zea mays
  unsure (1)..(133): unsure at all n locations
  Clone ID: MRT4577_52222C.1
cggcaagnangcnaaggnctnggtaaaggnggcgcgaaacgcaacgcaagtnctccgcganaacattcaaggcatcangaagccggncatccggaagctngctcgcangggcggcgtgancgcatcttcggct

SEQ ID NO: 132389 - DNA, 352 bp, Zea mays
  Clone ID: MRT4577_52223C.1
gtccaaacacaaggcctacgtcgcctcggtttcgatgggagccgaccatcgtcaacacttttttaggcatatccgacaggcgtgttcataccgtggtacatgagattgcggatcaagactacgatgagaaagaagatgctccagatcccgcccatgccgtactggatagctgatggccaccgacaacgaccatgggtccaacacataccagcatgcactggagctgcagcacaactagattgtccatcggtgtagaaatgcataggtaagacgcactggaacaactagtgttctacatgctagaaggcacttgttagatttagtaagctcgaggtatttgttcatgtggagc

SEQ ID NO: 132390 - DNA, 194 bp, Zea mays
  Clone ID: MRT4577_52224C.1
ccctggtatcaaagaattcagagaaagctgcggaggatcaagcttaggggtccatcctaggggaatgatgcaaaactaacaaaagcacataatgccagatgataaatctcatacgccatgtcgtgtaaccgagatggcactaccatatcagtcgacctatgcataccacatcttaaacctcttcaattgaagag

SEQ ID NO: 132391 - DNA, 430 bp, Zea mays
  Clone ID: MRT4577_52225C.1
tattatttacacgggcaggcgatcccatcagctgttcattttggtatggattacacagtctatttgtcaaagccttattggagtgcaccaacacactatatgttcaattatacagcagaatgtagcagatacatactccgatagatgcaagctacaatgactataccaacataacataggaacacatggtgggatacagtggatcaccagtgcacaatgcctgggcagctctgagccttaagccattgcacatggatgctcagtgaagatagaaccttcactatgtagaaaggccaggcatagacactccatgcacggggcttctgaacgaacttctgcttaattcaacgcgtgactgaacgcctgcaagaactagcagctttattcgtacagaaggacgcggaacaccaaccagactgggtaccacgac

SEQ ID NO: 132392 - DNA, 330 bp, Zea mays
  Clone ID: MRT4577_52226C.1
cgagaggaagaaagcttgaggagatgttctgattggttgaaggaaatggatagcaagaataggatggtactcctagcattacgaagtgctggtgcttcaataattttatcagacgatatcagcctctgttttactctgcattcatggataccagaatgttttgttaggatgtgaccatctaatgatgcatataaccgtgcaaaacattattttgcctagtacaacaccagaaggccaagcacttgaagtgccacgtatgccacaagaagctatacaaacgggtgtggctgtttatacaatccaatcttacttcaccatgcgtgcgacacc

SEQ ID NO: 132393 - DNA, 567 bp, Zea mays
  unsure (1)..(567): unsure at all n locations
  Clone ID: MRT4577_52227C.1
tctaaacatgggagacagtccttgaacaaggcggaggtcaatgtatctaagaatgggcgggataagttgactgtgaagcagaaagagaagtgcanagaaaaatgaacagccaaaagaagataaggacaacacagcaaagactcaaagggtcatgtagcaccaaaaccacttcctgctttcaagggttttgtcatagaagaggaggaagggtctggaggttatgggactgtttatagggctcagaggacaaaagatggaaaaacattcgctataaaatgtcctcacccaaatgctcattcacatcatgttaataatgaactaaagatactggagcgttttggaggcaaaaattgtgtgattaaatatgaatgctctttgaaaagtggtgatctagactgttttgttctagaacatgttgagcatgacagaccagagattttgaaaaaagacataaccttgcttgagctgcaatggtatggacactgtcttttcagagctcttgcaagcttacataaacagggggtagtgcatagagatgtcaaacctggaaactttcttttctgtcgc

SEQ ID NO: 132394 - DNA, 222 bp, Zea mays
  Clone ID: MRT4577_52228C.1
gtacattctggtttcagcttgaactgctctgggtttaggttgaacttcttgcctacaatggtgaacgcaatgacaggcatggactcaagactggcacagtccacagatgataatgccatccggactcggaagacactcgcaaggatgagtaatggaggatcgaataagtgcctgtaacgggttacttagcaagagctcattgtgttcattacacaacccttt

SEQ ID NO: 132395 - DNA, 447 bp, Zea mays
  Clone ID: MRT4577_52229C.1
ttttttttttttttttttttttttttttttttttaatttaaatttgaaaaaagttcacttttaacctacccttctctccacccccaaattcccgaccctaacccacaaacctaccaacactttctcaaaaaaaaaacttatttaactttttcgtaaaaaaaaccaaacctccctcctctggaaaaattttatcctctcacaattccacacaacaaaccagccaaaaacaaaaaaattaaaacctgttttgcctaaaaaatcacctaactcacattaatccccttgcccccacctccccctttacaaactgaaaacccttctctccaactaaataaaataaatccccaaccccccatataaagcccctttcattatataacacccaaccacattttttttttaacatttaaacggccaaaaataaattccctctaacctcctgcccct

SEQ ID NO: 132396 - DNA, 1245 bp, Zea mays
  Clone ID: MRT4577_5222C.1
atagttctgagcattatatcaatgctctgtagggcaagatgacgagtctgcagcaaacattgaggcagctgtaagtttgactaataatttactttttactgatttggtttacttgacctttactttttttggctgctgtaatatcaaatattccttcaattccaaattacaaggcgtggtaggtgttctagataaataggttttgctatgtatctaagctcgctgagtaatgggtcgtgggtttgaagtagtctctctccgcatttgccttggtttatccctaacccagacctcattcatgtgggatcctctggctgtgtctgctgtttttaaaataaaagaacataatatcttataatttggaatggaggaagtacttcatgtttgtgtcccgttgcatttgccaccaaatagttgtaaaatgacaagaagtttatttgtgtcacgacaagatagcaagctggtattaaagaagaaatcagtattgagatgtctcaaacaaagtgtcttaatgtcacaattgccgtgcctaaacgaattttgatttaatgtccagcattgaagtgagctcgatggttctcatacaacttgttacatactcctgaaatgtcataaatttattatttgcataattccactggacgtctcatgcatcgaggcatcatcactttcatccagatatccttcgattgttaaggtcaataacatatgccagccctgagttgcgtcaggacttactgtcgctacaatgttgcaaagtgtacctctctgtttctgaaaaccgattgtttctcgtgcagaaggaatggagggataagagggaggatttcaagaaaagggtcaggcgcatcgtgcggaaatcacaggaaatgttatgaagaaaatggaatactggggaagtcaaccgtgccatgtcaggctacgagattttgctttcaacctcaaaatgctcatctgacatcttgtgtattttccatttagcgtctgttcattggtgcaccagaaatgcattgggacgtggtgtatcgtgtggcctgggctctactaatgtttgacaatcctgaagtgccaccagtggtgaacctggtataagcaggcgccattcatgtcagctaatcgttgagaaaacatatcagtgaaatcgtgcaactgttagtgtaatgaggcagttcctgcttacatattattactcgtgctacctgtctacagtgtcttgaatgcatggaatgtcttgaattttaccgt

SEQ ID NO: 132397 - DNA, 415 bp, Zea mays
  Clone ID: MRT4577_52230C.1
taagctcgaaattcgtctctagggaacttttgaagagatcatgtaatccatttatcaaccatgctatggggcgggggatcatgcatgaacaaggggtgatttgaactcactggggtcaagtgatcatgaaactttattcgcaataaataaaaccactggcgcactttccaacagtaaaccatattaagaatagctgaaatctgaagcgcccacaaagaaaggcgaaccgccctgaatgcagtctacttaactatcagactttaggaacccaacccctttatctccatgatagaggaaattcctggacaacgggttgaggtctcttgctttaggaggaccaacattggaagaactactgctacattatactaaaaacatctgggctgctacactggttgtaaataaagaggatgcc

SEQ ID NO: 132398 - DNA, 354 bp, Zea mays
  Clone ID: MRT4577_52231C.1
caaaagaaaacgcccacaacaagggggttggttttatttttacaggcccaagcaagcattctttttcgtttgggtttgggggggaggaaacgtcaacaaggggctcaattaaggagttgttgttgccagcggggtgcactgggaaggacggttccggttcccaagagacggggggggggggcacaaccccaacggtatccactttgccgtcgttcttggggatgaagaggccgaatcccccttccttcctgggggaaaggatgttcacctgccccggggcctcgtccctaaagcagaaaaagtcggggtccacgttctcaagttggtccagggcctcctccaccgggggcgggg

SEQ ID NO: 132399 - DNA, 1130 bp, Zea mays
  unsure (1)..(1130): unsure at all n locations
  Clone ID: MRT4577_52232C.1
aaaaaaaaaaaaaaaaaaaaaaaaaaaaaaaaaaaaaaaaaaaaaaaaaaaaaaaaaaaaaaaaaaaaaaaaaaaaaaaaaaaaaaaaaaaaaaaaaaaaagaaaaaaaaaaagagaaaaaaataattcaaataaaatttaactctgacgttgggccttcacaagaaggaataggacgggaaataccagatagagaaatagaaagatggaaagtataaaaaaaaatggaagatagtataattatccatttataaacacattgaaaagacgaattaaaaccgattaaattaatgcagaagattaagctttgatgatggaaaggcagtagggattgaattaattgcaaaagacgttggtaaaggaaatgatgaaagaaaagaagacaatggaattgaaagatagcacaacaaacaaggaaaaaaaagagcgaaacaatatgacataaaaataaaaaaactaggacagaataaaaaaatattaacggaaaacacatactaaaaaaaaagaaaaaaacatcaaaaagaaaaaacacaaacacatgtacatcattaacaataaaacaaaataacaaaagacgaaaatataaaaaaaaaaaaaaaaataacaactaataaaaaaaaaaataaataaagaaaaatataagaaaatataaataataataataaaaaatattaaaaaaaaataaaaaatatataaaaaaataaaaaaaaaaaaaaaaaaaaaaaaataaaaaaataaaaaaataaaagaaaataaattaatataaatattaaaaaaaaaaaaaaaaattaaaaatatcaacaaaaacaaaaaaaaaaaaagaaaataaatatataaaaaaaatagaataaaaataattaaaaaaagaataattaaaataaaaaaattataataataataanaaataataataaaaataaaaaaaaaagaaaaaaaaaataattataataaaataaaaataaaaattttaaaaaaaaaaaaaaaaaaaaaaaaaataatataaaaaaaaaaaaaaaaaaaaataaaaaaattaaataataaaaaaaaaatattaaatataaatatatataaattaaaaaaaaaaaaaaaaaaaaaaaaaaaaaaaaaaaaaaaaaaaaaaaanaattaat

SEQ ID NO: 132400 - DNA, 323 bp, Zea mays
  Clone ID: MRT4577_52233C.1
aaaacagaacgaacacgttgggcgaaactgataccaaacggggtttttgaattttatttgtcaagctgaaaggacagactcttactaaacttttgtcaaaaaaatttggtctaaaacctgaagttttaaagttatttgaagggttaaaaatggtgtcttcaagaagaattttctttcaccaaaatttccaaggatccttgtagggaggaacatatttttttgtcccggggagaaggctaaaggattccacttttttttgtaaaaagggccccataaattcccactgtttgctaagaggggaagtcttcattgagtacaggttc

SEQ ID NO: 132401 - DNA, 403 bp, Zea mays
  Clone ID: MRT4577_52234C.1
cggtcgcttgggtgtccctggaaaagaagtacagacatcctggtggcatctccacgctgttcttgccagacgtggtgttcgcattccttgcgctacaggcaaacgtagctgggataataataatcatgcaataatgccacatgtggtttattactaccatccaattccatagtgagctgcgccccctgaaacggggcactgcaatcctttcaggcatggcgctctacccaagtgcctcgctgtaacaaaaacggcaggcctgaagcgcgtttggctgacaggctgcaggcagacagagggcctctatgactgtgcacctgctgctgcatactgcgaaaagatgctgccacttgcgttgagcccagtccgagagccctatggacgacaggacggccacggcgac

SEQ ID NO: 132402 - DNA, 482 bp, Zea mays
  Clone ID: MRT4577_52235C.1
tcctcccaaaccaccatcggctgcgatctccgtagcctccgtcggcgtcggcatcgatcatgccggtctactgcgcaatgaccaggatgagctcatcaagaatgctggcctacattggcacccctgttaaggatatccttgctgctgatgagaccactgagaccattggcaggtgactttccagaatcattgcctacaacgatgaggagaaccgccgtgccctccgcgagttcctattctgctgccctggtgctctccactacatcagctgccgcgatcctcttcgaggagaccctgtaccataagagcaatgatggctagtcttttgttgatgacctcaaggagggaggtgtcctccctggcatcatggctgacaagggcaccattgacgttgatggcactgattaggagaccaccacccaaggacatgacgaccttggcaagcgctgcgccatgtactactaggacggtgcccgctttgc

SEQ ID NO: 132403 - DNA, 292 bp, Zea mays
  Clone ID: MRT4577_52236C.1
ggaatcggcaagctggtgttcagcggcggcgtggcggagatgtacagcctggaggagctgctgcgcgcgtcggccgagacgctggggcgtggcgaggtaggcagcacgtacaaggcggtcatggagacggggttcatcgtgacggtgaagcggatgcgcgacccgtcggcgggcggggtgggggccgccgagttcgggcggcgcgccgaggagctggggcgggtgcggcactccaacgcagtggcgctgcgggcctacttccaggccagagaggagcggctgctggtgtacg

SEQ ID NO: 132404 - DNA, 650 bp, Zea mays
  Clone ID: MRT4577_52237C.1
tttttaaattcttttttttttttttttttttttcaaaaaaaaaaaatccaaaataaatttttgtaagggaacaaatcaaatcaatctatcaaacaattaaccacacagcacgccaaaacaaaaacacaccaaagcatgcatgcaacaggaagaacagcagcaacatcaagcagcaacaagctgcaaaccaaaagggggcaaaacacgtgtggaaaccaaaggggatgcatggccatggccctcatccttggagatcacgagatcaacatggcggcctgctggccggttgctgcggcctgaacacgccgatgtgtgtggtgagcgcccaaagcacggtgatgaactcgcctccttgcaccagggcgtcctcgtgccccataacacgctcctcctcgttcgacggcgccaggtaaatgatgagctccgtccacacgtccgccaacacctgccactggttattattatggtcgtttatcgccagcaacttccctgctagcctcacgccgtcacgcacaactttgctgctgcatccatcaccgggggtcagggtcgtcgtcccgtcagccatgagcttcctgacccgctcccgctccggcgagaagtagtagtcccggcagccgatcatccccttcagctcctccttggccccc

SEQ ID NO: 132405 - DNA, 264 bp, Zea mays
  Clone ID: MRT4577_52238C.1
cttttcttttttttttttttttattttttctttttttttttattttggtgtgaaacaaagggagtttgttaagattgtgtccaatcgcgtacttaaaaaacaggaacctaatctccttgatctcaattatgaggctgcgtcttcccaaactttacaaagccgttcgggtttatcttccttatcaactaatcgaagcaacaaggactccctcttccccgggcttaaaaaagttcctgtccctgtccccctggggtgagggggaaa

SEQ ID NO: 132406 - DNA, 840 bp, Zea mays
  Clone ID: MRT4577_52239C.1
gacccacgcggccgcggacgcctgggcggactcgtgggcgtcgctttgcgagtgaggacgggacggatacatgagggagaacggcgccgccagggacgagggccccgccttgtgcaaggccgctgcggcggacgggggcggggatgtgggcgccgcctccgcccgccgccgccgccggctcgggcgtgccacggaggggcctgctccgacgaagagaatccggtcggggtcgcagaggtcgccgtacgactcgtctctggagacggcgacggacggctgctgctggccggcgcgcctatcgcatggcgccgtgtcggtgatcgggcggcggagggagatggaggacgcgttcgccgtcgcgctctcgttcctggcctcggaggcggtgggcggcgagcaggagcaggagctggacttcttcgccgtgtacgatggccacggcggtgcaagggtggcggaggcgtgccgggagcggatgcacgtggtgctggccgaggaggtcggcctgcgccgccgccgcagcggcagcgacgacctgcgctgggaggaggccatggcggccagcttcgcccgagtggacggcgaggtgaccggcggcttgtcgtccccgcaccatgacgacgccggcagcagcttgccctaccgcaccgtcgggtccaccgccgtcgtcgccgtcgtgggccggcgccgcatcgtcgtcggcaactgtggcgactcccgcgccgtgctctcacgcggcggcgtcgcggtgcctctctccagcgatcacaaggtacgtacgtcgcacgggaggcgactacgaatgcaaataataaataaaaccggccgacccgagggacc

SEQ ID NO: 132407 - DNA, 457 bp, Zea mays
  Clone ID: MRT4577_5223C.1
ccttccgtttcccataggctcattcttcgaaccccatttttttgggccgggaaaggaaaaaagatttgggtgcaattcattagaaggagggagcccttccctgttttgaattccatcctcctttaaataggatttgctctaagccttcccatactttcctttattgcctgcaccatttttttccattttgcgaatccctattttatttgaagttttttactttcatttccattttctaaatcgacccactttaattaaattggaaaaattcgaaggaaaaaaaaaaggaaggggttattattaaaccaggttttccggttccataatcctgaaataaagtccttttttttgagtttactcctcattaggatgttttttttaaccacccaattttaatttatattaaccatcctattttaattaggttctataccaattagtagtaagatttttcttt

SEQ ID NO: 132408 - DNA, 165 bp, Zea mays
  unsure (1)..(165): unsure at all n locations
  Clone ID: MRT4577_52240C.1
cttgtctctttttcttcttttctttttttttactctctctgttttctttcttnnnaaggagactttttttacacataccgtaggtgcgcttaatactgacttattttgccgcctacacacatgtgggctacacagcccaacatctatcttgaggcggcgaatata

SEQ ID NO: 132409 - DNA, 738 bp, Zea mays
  Clone ID: MRT4577_52241C.1
cccacgcgtccggccgccagctccggcgccggggccagaggcggcggcggcgccgcggagatgacgctggaggatttcctcgccagggattcctgcgccatggcggcggtgatggagggggacatggcgctggggttccctgacggtgacggagatgcggcagggagcgtggcggggggagtgggcggcgtgaggggaggcgggaagcgggcgcttctggatcccgcggaccgcgccgtgatgcagcggcagaagcgcatgatcaagaaccgagagtccgcagcgaggtccagggacaggaaacaggcatacgtcgcggagctggaatcgcaggttatgcagctcgaggaggagcagacagaactgttaagggagcaggaggaccgacgccaaaagagacttaaggagctaaccgaaagggcagttccagtcatcaggaaaaaatcaccacaagatcttagaagaaccaactccatggaatggtagaaatgaccctgagccctgatgttcttctcttagaagttacagggtttgtttttctttgacttctgtttcttctagttttctttgatagctatttaggaatagtggaacgtgcgtgatcaagaagtcacgccatttagaattgatctgttgtcagattgacggttttcttgtgaatgtggccgggtgttgtataaataagaacaataaggttagcttgaagagtggaccaaaatatcctaattacaggcatct

SEQ ID NO: 132410 - DNA, 2546 bp, Zea mays
  Clone ID: MRT4577_52242C.1
tgaaagttgaacatgaagaagaggaaggtgaaggataatgagatgaacagggagagtgatgaggatgttgctagtgacaaagcagtagacatgcaagatgacactgagaatatggaacaaagtaaggacgatgagctgattttgggcgaagatgatgtctctgcatggagggagcttacactgcaccctctgttgctcaaggcgatgcgcagccttggattctcagagccaacacctatacataagtcttgctttcctgcagcagcccatcgaggcaaggatgttatcggtgctgcagagacaggttccggaaagacacttgcttttggcctcccagttttgcaacgtctccaagattagcgagaaaacttcacaggattgtgctaacaaatcctggcttcaaaggaatgctgaatctatgggattgattttggatgctagtgacagtgaagaagaccatgtgcagggacacaagaaacgaaaggctacttctgcacatctccaaaagcttcaacaggagttgagtgatctcttgcaatgcccattgcagcctaagactttttctcgacgctatttggctggggctggtgtctcgccattacttcagaagggacacacatgtctgggcacaataaacgcctagttgagttgcactcattgtcattcttcatcttggatgaggctgatagaatgatcgaacgaggccatttccgtgaattacaatctatcattgagatgcttccactgaccaatggttctgatgaacaagctgcaagaacaatgccaaactgtgagactgtaccaattttgcaaataaagaagcggcaaacctttgtgttctcagccacacttgcactctcatctaattttcggaagaagttgaagcgtggcctatctacttcgaaggcatcgacgcctgatgatgtcagctctattgaagcattgtcaaaacaagctggaatgaaatctaatgctgaaatagttgatttgacaaaggcttcaatcttgcctgagaagcttgaagaatcttttattgagtgcagtgaagaggataaggatgcctatctgtattatatattgagtgttcatggtcaaggtcgcacaataatattttgtacatcaatcgccgcattacgtcacatttcttccatactgcgcattcttggaattaatgtattgacaaaccatgctcaaatgcaacaaagagctcgcatgaaggctgtggatcgcttccgtgaaagtgaaaattccattttggtcgcaactgatggttttgcaaggggtatggattttgatgatgtgcgaacagttatccattatcagttgccacattcaactgatgtctatatccacagaagtggaaggacagcacgcaagtcattggctggctgcagcattgcgttaatctctcctactgacaagtccaggttttattctctttgcaaatctttgtcaaaggagaatctccagcagtttcctgtagatcatgcttacatgtctggagtgatgaacagactctcacttgctcggcagattgacaagattgcccgtaaaacttcacaggaaaatgctaacaaatcctggcttcaaaggaatgctgaatctatgggattgattttggatactagtgacagtgaagaagaccatgtgcagggacacaagaaacgaaaggctacttctgcacatctccaaaagcttcaacaggagttgagtgatctcttgcaatgcccattgcagcctaagactttctctcgccgctatttggctggggctggtgtctcacccttacttcagaagcaactagaagagttggccaagagaaatgcaagcaacaatagcagcaagagtaagaataaaggatctgggtttgttgttattggtcaggatcgtgtcgagcccttgcaagcacttcaaaattctgggcaagaggtctgtgtgaacatagacaaagaaagggaaaagcgaagagtcgctgagaactggaggcggaagaagcatgaagaaaagaaacgtacacaagagcagaagcgaaaggataagagaaaagctaaagagatggcttgatgacacatgagatagctaggggccttcaaggggtttacggaagctctttaagctcgcgtcaatcctttcagaaaggaaaggaatgcattcatcaatgttttgctgtaatacaatgcgtgcgctaagttagcgcttgcctttaacagattggaggtggtagtttgattttgttttgcggctgaagaaaataaacttagaatgcacgagcactggctctggatgagaaaagaaattaagcagatagctcacgtataacctcattggatctgtaatatgtacgcctatcagatttaaggtacaaattaattttattagggatgggaatcgactgacctggcctatctttggacttggacctggcccattgccttaaggccaattttaggagtgatggagattatgatcttgctggctaaaaaaaaaaaaaaaaaaaaaaaaactcgaaacctcgtgcccgccgggtgcctattcctgcatgattt

SEQ ID NO: 132411 - DNA, 242 bp, Zea mays
  Clone ID: MRT4577_52243C.1
agcaggggcgcaacgcagagtcgcgggtcgcgccagtcctcgtgctacagatgacattacactgcctatactggacacgctcagatatgactgaacctaacgcccgccttggagacagcagcgttcctatgtaatgctgttgtacctaaagagtgagataactcacatgctgctgccttcgctcattgtccgcttttctacggggctaccgtgtctgccacatgcgctattgattgtgtact

SEQ ID NO: 132412 - DNA, 1034 bp, Zea mays
  Clone ID: MRT4577_52244C.1
agatcctcctctcgccttgcggctccccgcccctctccccgcccccgaccgtatcgtctccctctttcacatatccccacactcatcgccctctcgctccacataaccacattcccttcccaccacctttcctctctctctcctcggccgccgttcctgctccgtccacccccaccacatgcggcggcgcgggcgcctccccgcggtgctgtggctcgttgccgtgacgttggcggcgctgctggcgcggccggcgaacgcggcgtggtgcatcgcgcggagcggggcgtcggacaaggcgctgcagtcggcgctggactacgcgtgcggccccgcggggggtgcggactgcgcgcccatcctgaccagcggcctctgctacctgcccaacacgctcgccgcccacgcctcctacgccttcaactccatcttccagcgttcccgcgccgcgccgggggcatgcgacttcgccggcactgccaccgtcacgctcaccgaccccagttatggatcatgcacctacccttcatctccaagcactgccgggcaaacaggatcacctggttcaacatccatgccagggactcccacttctttgtcgccaaaaggcactgggagcaccggaggattgaacccacctgacgtcgattctaccgactccaatgctgaacctctggcgaccgcgtccctctcatctcttgctctgctctgtttcatgtacatgttcttgcagttgtggtgatgcatggatgatctagctaggttcagtagagcattgagacgcagtattgttgttgcatcgtgatacaggagaccccaccacagttttgttccagggaattggttggttatggttggtggtaagccgttgtggtctgccgttcaagtgcaaggcaagagtgcccattggttggattctcaactcattaggcttcttttcgtctaaaaggtcattatgtttcttttttttcttggggatctgattctgttttgttgacgatcttaatttttttggttgatttgagcttggtttt

SEQ ID NO: 132413 - DNA, 1069 bp, Zea mays
  Clone ID: MRT4577_52245C.1
taaatttacaccaatagtcgtcgggaactgtactggctgtgcagttaataggatgttgtgtccatacactcaatgagcactctattatgtaggcctgggtacctcgaggccgggccggggtgggtgccgctctccacgagatccaaacccccgcacccgcggcgccggcgacgcagggaggaggcgatgcacggccgcccgcggcgaccggccaagcctgaggacgaggaggcggcgtcagcgaaagccgccaagcttcgggaccttcaggcccaggtcctgcacaatcaccatgcccgcacgtacacaaaggagtcaattgggctgagcttcaagctgctcgagacaaatccagaggcctacacggcatggaactaccggaagcttgcgttgcagcacaatgtcaaggagctttctgacccacaggccatcaagtctgctattgatgatgagctgagagtggctgaggttgctttaaggcaaaacccaaaatcctatggagcttggtatcaccggaagtggttgctatgccaaaagctagcgcccgtggatttcaaacgtgagtttggcctcttggataaactgttgaaggtggacgccaggaattttcatggatggaactacagaaggttccttgcaagattcctgggtgcgcccgatgaggaggagctaaagtatacctatggataaaatccagcgacaacttcagaaattactcaccttggcataatcgtggcatactgctgtccaatgtactgatccagcgaacataaggcaaccagcccatgacatatggtgcgggccaagagacccaagagtagaagccactttttcaagtgctggccaagaagctagacgcgcgcctgaacgaggtgcgcaagaacggtacctgcgcctggctgaggcccgacggcaagatccaggtgacggatggaggacgtgaacgagggcggcgccatggagcccgaacgcgtgcacaccgtgctcatctacacccagcacgaatagaccgccaactacgactagatcgacgacagactaaaggagcacgtcatcaagcccgggatcc

SEQ ID NO: 132414 - DNA, 307 bp, Zea mays
  unsure (1)..(307): unsure at all n locations
  Clone ID: MRT4577_52246C.1
cccgggtcgcccagctttcgcagcgcctaaaagcacaacacctagtagctgaacacaccatatactaacccgatctcttgatattcagttgagccaaaaaggctaggaagaaggaggaaccatgatcagttccaagaggcttgttcagatggngaagaagtggcaggtaacggttgtcatggntaggaggnggntgagggggacgctggcgaaagagccgatggtttgtgcgggacgtngatgttggtggttgttaggggncattgngttgtgtatttttttgtagggangaggtttgaggttttgt

SEQ ID NO: 132415 - DNA, 277 bp, Zea mays
  Clone ID: MRT4577_52247C.1
ccgaccttatggaggggcgactgcacagagcgtacctgaaacaataaaagagcggtcagtttacttatgacgatcatccccaaaggcgggacaagacatgcgcgtagagagaattgatggctagcagaccagacaccgaacgatgccagtggagaaaccaacgagatgacatgtgcataccatcagatgtacatgcacctacgatcggcagtaaacaggaagcatcattcctcaagacgaatgcctaactatgagaagactgcatgattacagggag

SEQ ID NO: 132416 - DNA, 390 bp, Zea mays
  Clone ID: MRT4577_52248C.1
cccacgcgtccgcccacgcgtccgcacacaggctctgtcccatagatgtcggccaccacatggtgttcacgaccgcgctcgccgtcaggtggtagtcccggcgagcgagacctcccgactccaggctccctcccataggtcgccgccgcctcatgatcccgagcactacagcctccggagccgcgggctgtgcctggtgccggtggaccagacactgtagctgacccagagcaacggggccgacctgtgggcgccggcgaacacgaccaggcgcaggtgaggaggagcctgctgccggcctgtgccttcgcggtggacaaagccttcctcctctccggcaatgagggcatcgtcgctaacgtgagcacgttgcaaagctcgcttgcccat

SEQ ID NO: 132417 - DNA, 185 bp, Zea mays
  Clone ID: MRT4577_52249C.1
aagcgatcaagaggactcctgagtcacgatgccatgatgaagctcagcagcgagcgagcataggcactgtcccactccatctcctgaggtgtaaaggctagcaacctcgaggcttaggctagcaacgtggagacccatgagaatgcttcagcggacttaccctgcaggttctcggccaactccgt

SEQ ID NO: 132418 - DNA, 424 bp, Zea mays
  Clone ID: MRT4577_5224C.1
ccttctctgctcatttcttgcatctccgtctcgattcggtccctgcgtcgatttactgcaggaagttgcgccaccgacgtgactgagctatagcactgatgggtgacgagggcttggacccgattatgcacgtttagtacctcttcagttcctgcatgccttagcgatatgaaccctggtggatcgcgattatatggtttatgggctacgggatgtgtcaaatggccttttgcagctggtttagggaaaagtagctgttatccttctatgctatacaaagagaatgtcgtgatgtgcttatggagcctgagccacttcgttttttttatttctttcggtgctggcttgtgttgggtgtcagcaacattgggtgtagaaaagcactacgtgtatactgctgcagcgattgtgtatcttcttaaag

SEQ ID NO: 132419 - DNA, 855 bp, Zea mays
  unsure (1)..(855): unsure at all n locations
  Clone ID: MRT4577_52250C.1
attcctcatcatttacaacgtgacctctgtctagctagctggagaggatggcgcttgttccccggtcgtccctgcgctccctggtgctgctcgtgtcccacgggaagccacggctgagctctttcttctcctccgccgccgccacaccggccgccccaggagctgataatcttccggctgctccggccgtccaccccccagctccgacaggccgttcatgccccaagctccctgtggaggaagagtttgctcttcacccaattcctgggggtccacgtccacatccacgaccacgtccgcgcccatgtggagccgctaaagatgcaagtgtaaccgacaatgctttgctgaacgcccctgaagatccttgtacatacccggatcctgatcgtggttctgatggcatctttgaagatccccgacacccagttcctgatccatcaggtagggggcgtagcgccgtaaccgatgagcctgctcagtgcacccaggagcaccctaagtacccagtaaccgatagttcaactgacaagggccctgctgtggaacatcctgcatacacaactcctggttatggttcatgtagcacacctgagcctatgcctgataagcctccctgcggcacctccgaggatgtgaaacaacgagatgttgatccaccgcctcccgcgcgtgaaggtgttggacaccgagttgtcgatccaccacgcggnggcagggggcgtcgcgctgtgcccgacgagccagagcagtgcgcccaggagcatcccaagtacccagttcctgacagttcaagtgacaaggtcttctcctcctgctcctccgcgttccgcgctggctccaggagttgcaccc

SEQ ID NO: 132420 - DNA, 682 bp, Zea mays
  unsure (1)..(682): unsure at all n locations
  Clone ID: MRT4577_52251C.1
gttttttccttgatgtagaagacatttctgggaggaggacaatgcactctttctacagtgatgttgtgcgccttcagggtctaagggaaaggttttcacattgtaactcaaacatggacgcaggccagtgtttctttccacgtgaagttgtgaagcacattgtcaacccagttttcgttcttaatccagcatatgatgcctgcaggtacaacatgcgttggctccagaagcatctgaccctcaacattcatggctggactgcagattggatattagcaagtgcagccctaaacaacttggaattctccaaggtttcaggaaagaactgcatgacgctataagtgaagctaagcagaaaaggggctggggattttatatcaactcgtgctttgttcattgtcagtcgctgaactcgttgacttggcactctccaacttcccccagagtcaacaataagagcattgcagaagcagttggagactggttctttgacagaagagaggtgaaggagatagattgcgaatacccctgcaacccgacgtgccacaacttggtcttcgcaaggcctttcaagatatgaagttttggctctcttcttccgctatgattntgttgtaaaatcaggggaaaatataaacttgttattataaatcgttttacccgattggtggagttgacggag

SEQ ID NO: 132421 - DNA, 1025 bp, Zea mays
  Clone ID: MRT4577_52252C.1
gagcgatggaggttggagataaattttagccaagagctgttctgatgctttcatctatgaacttgcctgatggtattcaggagaactgctgttgatgaacttaatatgcggagtatctttgaagaaaatgatgttatctgtgctgaagttcgaggcttccaacatgatggatctctgcacctacaggcaaggagtgaaaagtatggttctgatttattgatgcagctggagaggggtcaattgctgatggtagctccatatttggttaaacgaaagaagcagcattttcatcatcttgaaaagtacaatgtcgacttgattcttggttgcaatggattcatctgggctggtgagcatgttgtggtgggtgaaaaaccaaaaacgacaggaggtcagcaggggttcagcactgaagctgagaatttcaccccattagagacaaggaagcatatttgccggcttgccaattctgtacgtgtgctctcagccctaggattcactctgaccgtcgaactgataatcgaaaccatggaagcaagtgcgtcatcaaatgtagagataaatgacatgctcggggctgagttttacgtccagacagcagagagggaggctaagcgccgggctgatctgttgagaaagaagaatgacgcaaggtgagtaggtagcgccctcgtcattgctgattggggctgcctgatttgcggagaacagagcctgacacgttgcgttgctccatccgcatgagatctgtagcagtgccataatacttatctgatggtatctaaggcaaaattagttaacatgttctatgtacacctttacgggtagcaattagcaaagatgtaaggggttctctctgctctgatgctgtacatgcatttgatcatggtgtctggtgccggcagtgttgtgcctggcaggtccgcaggtctttgatccgttcgttgctgaagtcgatgcacttctgagttgaaaaactggacgttcttcctattgaatattccagtaacatgaattatgttgcc

SEQ ID NO: 132422 - DNA, 647 bp, Zea mays
  Clone ID: MRT4577_52253C.1
atccatgacattcctgaatcatttattatatctaagtagtttatatcgagacattggaggccaccaaatttaggaaagacataatcgagagcgtggtgcgcatctatccaagacaaaaatgatactcactactatagtaagaataggtagggatccaacagcaataatgatgacgacaactttgttagttaggatacctatccaccgtgtcacttccacttatctactattttaaagcaccagtgtaacacactaaaaattcaaatctacaatatttcttgaactcgttctaaattcaaaataaattttaaaatttcgttttaaaatatttgtatgcgaattgatttcaacaaagaaaatatagtgctctatattctctctaaaattcttatcaaaatgtcatacaaatattttccaagtaattctctttaaatcctttccaaaaatactaactaaatattccagcgatagttctccaaatactacctgatgtttggtgtcctccaatcattcggatctgattttgcttgctctattgccttgaactcttcccctagctgatgtgacacttggttgttgtatttcttggacgaaaatgcctggtggaacctgtgctcggcttgatcccacttagatagagtatctgc

SEQ ID NO: 132423 - DNA, 1808 bp, Zea mays
  Clone ID: MRT4577_52254C.1
ccttgatgtagaagacatttttgggaggaggacaatgcactctttctacagtgatgggtacttgcttcccgtttgggtgttccctgttcccggtcggggttctcactctttctacagtggacatgtacgccatcagggtctaaggcaccggcactctcatgtctgccacctccgccgacccaaggccgcttccttgacgaagtcttctctctcatctttctgggagtctaacattctacctttatgttgtgcgccttcagggtctaagggaaaggttttcacattgcaactcaaacatggacgcaagccaggtgcttccaaaggaaccaaagtccatctgtccgatctacatgaacgaggtaaccgaagctgttcatgcgtggaagggcttcaccatcttgaaaagtacagctggagaggggtcaattgctgatggtagctccatacttggttaaacgtaagaagcagcattttcatcatcttgaaaagtacaatgtcgacttgattcttggttgcaatggatttatctgggttggtgagcatgttgtggtgggtgaaaaaccaaaaacgacaggaggtcagcaggggttcagcactgaagcatagaatttcaccccattagagacaaggaagcatatttgccggcttgccaattctgtacgtgtgctctcagccctatgattcactctgaccatcgaattgataattgaaaccatggaagcaagtgcgtcatcaaatgtagagataaatgacatgctcggggctaagttttacgtccagacagcagagagggaggctaagcgccgagctgatctgttgagaaagaagaatggggcaaagtgagtaggtagcgccctcatccttggtgattggggctgcctgatttgcagagaacagctccatccgcatgtgtagcagtgccataatacttatctgatggtatctaaggcaaaattagtaaacatgttctatgtacacctttacgagtagcaattagcaaagatgtaaggggttcgctccgctctgatgctgtacatgcatttgatcatggtgcctggtgccggcagtgttgtgcctggcaggtctttgatccgttcgttgctgaagtcgatgcacttctgagttgaaaaactggacgttcttcctattgaatattccagtaacatgaattatgttgacaaaaaaaaaaaaaaaaaacccgcggcctatatgaacaattcatttagccagtgtttctttccacgtgaagttgtgaagcacattgtcaacccagttttcgttcttaatccagcatatgatgcctggcaggtacaacatgcgttggctccagaagcatctgaccctcaacattcatggctggactgcagattggatattagcaagtgcagccctaaacaacttggaattctccaaggtttcaggaaagaactgcatgacgctataagtgaagctaagcagaaaaggggctggggattttatatcaactcgtgctttgttcattgtcagtcgctgaactcgttgacttggcactctccaacttcccccagagtcaacaataagagcattgcagaagcagttggagactggttctttgacagaagagaggtgaaggagatagattgcgaatacccctgcaacccgacgtgccacaacttggtcttcgcaaggcctttcaagatatgaagttttggctctcttcttccgctatgattttgttgtaaaatcagaaaaaaaatataaacttgttattataaatcgttttacccgattggtggagttgacggagaaaaaaaaaaaaaaaaaaaaaa

SEQ ID NO: 132424 - DNA, 756 bp, Zea mays
  unsure (1)..(756): unsure at all n locations
  Clone ID: MRT4577_52255C.1
atatagtacgncacacagcgcgcaaaaaccaactccaccatgaatccgcaccacaggaaggtcacttgccggtgccatctttcgccacagcgacgctgctcctgcttcccctcgcgctcctcgccgccgtgctcgtcgccgtctaccacaacgagttcgccctgcagtcctatctggcccgccccgcctgcccgagcaacgccagcgacaccagcctcacggggcggcacgtcgccgtgcgggtggccccggatttccggctgctcatcggcgtgctgacgctcccgggcctgtacgagcggcggcacctgatgcgcacggtgtacgcgctccagcagccgaacctgacggcgcacgtcgacgtccggttcgtcttctgccggctggcctcggaggagcagcgcgtgctggtggcgctggaggcgatgcagcacggcgacgtggtggagctggactgcccggagaacatggacaacggcaagacgcacgcctacctctccagcgtcccggcgctcttcggcgaccgggcgtacgacttcgtgatgaagaccgacgacgacaccttcctccgcctgccgcagctggtggagtccctgaaccgggcgcccagggaggacctgtactacgggtgcatggtgcccctgcgacgtggtccgcgcgcaggagaacgagtacatgtccggncatggngtatgtcatctcgtgggacctcgtggnagtggatcgtggcggccgcggagcagatcaggaaccaca

SEQ ID NO: 132425 - DNA, 240 bp, Zea mays
  Clone ID: MRT4577_52256C.1
agaagaggcagccccaagaacctaaagactgcaggctgctaattgcaggaaatgactttggaagggcaggctcttgtccagtttcagggctgaaatgcctggcgaactccattcagccatcacatattgactgagtggctgcttagcatgggccaccgcgctaggctcgggacagctggtctttccggccatctttcttgctggcaagtcagcaaacattaccttcttagtcacgtgcaa

SEQ ID NO: 132426 - DNA, 652 bp, Zea mays
  Clone ID: MRT4577_52257C.1
cgggcttgaagacatgacaatgcgaagatgaagttagttttatggggagagcagacttcacttgcaaatctgtgcagtgtagggagcatgcttgcactggacagacctttcatagcaaattttatagacaataatcatgaggattctcaggaactgtgccttgaatatggcagtgcaacacaggtttacatggtgccaatcgctcaacaagaggaacaggtcattaggtagagtaggagttgggcatatggtgtacatctccggtttgacttgtgccttgagttcaacaaatatccttgaagtctcatggcgtgaaaaggagccagggtctctgtttgttaacttaagcttgctgccagcactcctagactcatcgtgcctgcataatttatcacccttgtcagatcttccccgttcgacaaacagaacacatatatcccatgttcggttagatggcatcgattgtgacagtttaaaggtgtcgctgttccacaacatttgcggcagtgttgtgaatgaacattcaggtgtactccagtgttcattctgtaagtgtgcctgcgaaagtgtatgtgcgcgtgggttttcagctgcacttgaccatcgcagacgacagtgcgggatgtctttggcttgttgcgttgggccaaac

SEQ ID NO: 132427 - DNA, 2387 bp, Zea mays
  unsure (1)..(2387): unsure at all n locations
  Clone ID: MRT4577_52258C.1
cttgctcctcctggactagggttcatggatcccgacaccgccgtggcctccgcagacggggggccattcctagagttcgtagactatgccatctccatgctctcctcgtccgctggcgacggcgatggctatgagtctccgggggacgggccggcgccggcgcggccgccctnggggtgggcggtggcgcagctgctcaagtcctgctgcgcctactccagcggcgtcaccgccgccatccttctctccgacctcttccaatcttggacagaacagcggaaatccctgaccctgaagaggaaggtcaagctgcccaaacttataaacacgaagaataagaggaggaggcttccaaatactgtcacgatcgattctatccacgagaagaacttcctttctcccaatagtgtccttgaagttgttgtcattgccgtgtttgtccttcctggtacaaacatatacatgcttaccttgggagacatgtggagcgcatccacaatcgacatatatctacaccgaaggtactatgactgcataggacaaaatggtatattgaagaagggtcgagaagttatgctcacaggatgttgtcttcgtacagccatggagggatctggccatgctcgtattttgccaacagaatacatggtgatattactggatgaggaacaagatgaagatgccttgctacttgctgcacaattttgcaactattcattctcttctttgattctagaagaaagtagaaacaatgttccgtactcattttatgccaggattgaaaagattgagtccttggaaccatttagatgtgcagaaagaatgcagatcattcttgaagacaatgacaatgcgaagatgaagttagttttatggggagagcagacttcacttgcaaatctgtgcagtgtagggagcatgcttgcactggacagacctttcatagcaaattttatagacaataatcatgaggattctcaggaactgtgccttgaatatggcagtgcaacacaggtttacatggtgccaatcgctcaacaagaggaacaggtgccttttacacctacccaagtaaagagccaaggacctcggctgtcatgtgttctgactgataatgtagcttcgcaagtaacattaccacgtgatttgtatggttcagttgatttcagcaaatacccgtttcgagcatatgtaagtgaccttcatgataaaatggtgggaatcagtctgtttggtaccgtaactagtgtttgcaaaataagcacatcagggactacgttctatttggagttggaagacacaacaggagttgttctgatgaagcttatctttgttggaccctggtcattaggtagagtaggagttgggcatatggtgtacatctccggtttgacttgtgccttgagttcaacaaatatccttgaagtctcatggcgtgaaaaggagccagggtctctgtttgttaacttaagcttgctgccagcactcctaaactcatcgtgcctgcataatttatcacccttgtcagatcttccccgttcgacaaacagaacacatatatcccatgttcggttagatggcatcgattgtgacagtttaaaggtgtcgctgttccacaacatttgcggcagtgttgtgaatgaacattcaggtgtactccagtgttcattctgtaagtgtgcctgcgaaagtgtatgtgcgcgtggctttcagctgcacttgaccatcgcagacgacagtgcggatgtcttggcttggtgcgttgggcaaacggctgtcgagttccttcagatatctcctgacgaatacctggagctccccgaggatgaacgggctatgtatctctacactctccagaacgaaagcttcgtggtggctattgcgaataccaggaagcgagtcgatggatgtgttgtgggtgatgaagccgtcccagcttgggagatcacgagagcccagaaatgtgaatgagttcgtatagtgctcgagaaagaaatgttgatgctgaaaagttactgtaacacgtgtttcaacctccgtttttcatcaaccaattcgtcgttcaacaatgaaaccatatgcatgagttgtccattgactccaaatgatgctttagcacgacggttaggatgggtttttcgttgacaaagtccgaaagtaaaatgtcgacgaaggcatagcgtttaactttaagatgggttcactactaaaaaatttcggttgttcttcattcatgttgacaataggttatttgcttggcaacatagtcagccgagttcagatttatctgaaactgtgccttttacatctagggacttgtacccagcaaacaaacgttgcagtgctttgctggctacgttttcaaaggacagttgcttgtaactgcc

SEQ ID NO: 132428 - DNA, 826 bp, Zea mays
  unsure (1)..(826): unsure at all n locations
  Clone ID: MRT4577_52259C.1
aattagcctggcgtctactgaacaggaggtgacaagtaccggtcgttcatgcacggcgagggcgagaagaacaccgtgtggaggcatggagcccctcccaactacgacatcgtgaacaagctcttcgaggaagagaggaccaaggaatggccggatgggtctcttgaggagaaggtgcagcgcctgctcaagacctgggagatggagatgatccacaaggtgcgccccgacgaccagaagagcgtccactcccagggattcaccgcgagcaccaacgggatgaagcctctaacgcggaaggagtggactgccatcggcggctacaacgcgttcctggcgaccaagctgccgccggagcaccgcatctacgacccggacaaggagacggtcgactccggcatgtcgacgttcctcacggcgttccccaggggcttcgccatcgaggtgctggacgtgtacagcggcccgccgagggtcgccttcaagttccggcactgggnttacatgggaggggccgttcaaggggcaccctcctcacggccagcgcgtcgagttctttggggtctgcgtcttccatgttgatgaggagatgaaggtggagaaggcggagtacttctacgagcgcggcaacttcctcgcaagcttcttgagcgcgcctgctactgctgctgctgcatcggcttcaggttgtcctgtgatgagaggaaactgaagcaccaaagaaacatgtcgctcatatcgttggatgaccagcttcagatttccaattggcttttgatttcatgtgggggcattacaatgtttgaataaagtggcttattatgtc

SEQ ID NO: 132429 - DNA, 545 bp, Zea mays
  Clone ID: MRT4577_5225C.1
gcaggatataaatcagcgaattcgtgctcctcctaagaaggcccccgagatccttggaacttcagcattctctggcaagccagtgattggcaagacaagaatcagaacagaaggggggaaaggaagcatcacaatactaagaacaaagggctgagaaccggaaaataccttcgatccttatttatctgctagtctctccatttatcagatgagaaaggggagaaggcagctccttggtggtcaattgtgcaagtctgagcacctgaaacttccattgattcacagttcaaggctgagcctgaggatgccattgattcttatttatctgccattctctcgattgcttttggcactttggtcaatgtgcagacctctgtagctttccatcatttttttgttttagttttgcaccgtgggtgtcttgtgaattaatgtagacgcaaaacaacaactttcggcattcttctggtgtatttatgacatgtggtcaatgatatatatacatcaaactgaagtcaatagaattaatgtgttatattccattt

SEQ ID NO: 132430 - DNA, 1294 bp, Zea mays
  Clone ID: MRT4577_52260C.1
tgaaactgtcgtcttctcgcgcggagcgtctagctattgtgccaatcttcaaatacaatcgccacggctcatccatttgccgccacaaatctgataaccaccacgccatcatcgcgctaccagggtgggggtggatcccgacgcagaggtcacgttcgagttcgtccccgtgatccggcagtacaagagcggccgtgtggagcgcctgctccccgtcaatccggtcccaccctccgtcgacgccgccaccggggtcgcctctaaggacgtcaccgttgacaaggccacgggcctgtgggcgcgcctctacctcccagacccagatctatccgcgcgccccgacggcgacatgcgtctccctatcgtcctctacttccacggcgggggcctcgtggtcggatccgcggccgacgcccccgagcacgccttcgtgaaccgcctcgcagcgcgggccggcgcgctcgccgtgtccgtggagtaccgcctggcgccggagcaccccgtccccgcctgctacgacgacgcctgggccgcgctccggtgggtggtggcgccggcggccgacccgtgggtccgcgaccacggcgacgtggcgcgcgtgttcgtgctcgggttcagcgccggcgggaacctcgcgcacaacctcaccctccgcgccggctcggagccggacctcctcccccgcggcgcccgggtgcaggggatggcgctgctgcacccgttcttcctgtcgccgccggcgccgggaagcgaggccgcggagggcgaggtagcgaagtacgcgtgggtgcgcgccaagctggcggagatgtgggcgttcgcgtgcggcgggtggacggcggggcccgacgacccgcgcgtgaacccactcgtggacggcgcggccagccttaggcgccttgggtgcgcccgggtcctcgtgtgcctcgcggatgacgcgctggctgctgagggcaaggcctactacgatggcctgctggcgagcgggtgggcggcggcggacgccaagctgctggactccgcgcccgcggaccacgagttccacctccgcgagcccgagagcgccaaggcggtgctcctcatggaccggctggctgcgctcatctccgggaactagcagtagcagtagagtcacacgcacgtcaacggagctgacgcaagagcgtacgtgcacttgctgccattgatgtactggaattggtcaaacaattccaagttctaatcggaacgatataaaatgctgacctataataaagaacttattctcagttcaggccgaaaaaaaaaaaaaaaa

SEQ ID NO: 132431 - DNA, 612 bp, Zea mays
  unsure (1)..(612): unsure at all n locations
  Clone ID: MRT4577_52261C.1
gagtcgtaccgctggtctccttttgtccccattacactggacacttccatgctgactgtacttctgttgctctctaagtacagattgcgaaatgtccctgtgattgagcctgaaaagcctatcatcaggaatttcattactcagactggtgttgtcaaagggctgcagcaatgttatcaccgtcaacagtgatgatcttatcttagaagctttcaagtgcatgaaggataacaagattggtggtgtcccagtagtagaaggccccaaaagaaaacttgttggcagtgttagcataagggacatccgctttctgttgcttagacccaacttattttcaaatttcaggcaactgacagtcattgaattcatgaagactctaggctccactcttcctgattcagagagcaattgcctggtgaagccaccacccacttgcactcctgacgcttcccttggtagtgttattgacagcattgcatcaagaataacacacaggatatatgtagtggatgatgaccttgaggttgttggtgttgtgactctgcgtgatgtgatctcatgctttattcatgagccacccggttattgcgacaactattntgcttcagcgat

SEQ ID NO: 132432 - DNA, 1980 bp, Zea mays
  unsure (1)..(1980): unsure at all n locations
  Clone ID: MRT4577_52262C.1
cattgggtacctcgaggccggccggggcctggccgccgcgtacatgcgctgcggtcgtctgttgccatctcgcgttcggtggtgactccgggctccgggcgccctgcgcccctggatttcgaaccgagaaagaaagctgctgcccaccgtttcccaagtcccatcgccgcccaagaaccggagccacgccgcagatccgccaaaatcacacctcctagcccgtcctccgtcccaatctcttctcgggccagggaggcggcgggacttggtgcctgcatccgagccctagacatggatcaacctgaggaaaaccctgaattcccaagctgtgatgcctactttgaagctatccagtccaagaagaagttgccactgactttgcaagaatcactaactgctgcctttgctcagattccagtctcatccttccctgaggttccagctggtcgagtaattgaaattcctggtgatacttctgttattgatgctgtaaggactctctctgaacagaacataagggcagcaccagtactgaatccagaacctggggctcctactgattggcaggggaggtaccttggtgtcatcgattactcggcaatcatcctttgggtactagaaaatgctgagcttgctgctgttgcactctcggctgcatcggcaactgctgctggagttggcatgggtgctgttggtgctgttggggtggcagctttgggaacaactggcccagctgctgtagctggcttaactgcagctgcaattggggcttctgttgctggtggattaactgctgaaaagggtgtggcgaaggatgggctaactgctgcagatcatttaggggaggatttctacaaagttttacttcagcaggaacctttcagatcaacaacagttcgatcgattgttgagtcgtaccgctggtctccttttgtccccattacactggacacttccatgctgactgtacttctgttgctctctaagtacagattgcgaaatgtccctgtgattgagcctgaaaagcctatcatcaggaatttcattactcagactggtgttgtcaaagggctgcagcaatgtaaaggaagggactggtttgactacatttctgcacttcctctttcagacttaggacttccatttatgtccattgatgaggttatcaccgtcaacagtgatgatcttatcttagaagctttcaagtgcatgaaggataacaagattggtggtgtcccagtagtagaaggccccaaaagaaaacttgttggcagtgttagcataagggacatccgctttctgttgcttagacccaacttattttcaaatttcaggcagttgacagtcattgaattcatgaagactctaggctccactcttcctgattcagagagcaattgcctggtgaagccaccacccacttgcactcctgacgcttcccttggtagtgttattgacagcattgcatcaagaataacacacaggatatatgtagtggatgatgaccttgaggttgttggtgttgtgactctgcgtgatgtgatctcatgctttattcatgagccacccggttattgcgacaactatttggcttcagcgatggagaagcttgaggggaaaggagtcagatcagtggagaaaatttgagcttttctgtagcgtgaatgttgataataacaggtcagtatgtgaggaaggtttatttggttggaacggtgcattcgtgtcgtgttaatccagcaaatcctgtgtaggttaagtaacaaggcttctgtgctgttaaaaatattttactatgtcatttctttggacggttttcgaaaaaaaaaaaaaaaaagcggcctggggatgaagtgatcaatggcatctgtaacgccactgacagcatggtcggcggcggcggcggcggtgatgctttcgcgaaaggcggacgaggctccaagcagagcgacagncgagtggagggtgagtcgagcaatg

SEQ ID NO: 132433 - DNA, 493 bp, Zea mays
  unsure (1)..(493): unsure at all n locations
  Clone ID: MRT4577_52263C.1
ttgggtacctcgaggccggccggngagagctcgtcctctcccttctcctttcctttcctggcttatcctgcgggaaggcacaggagtaaattccacctctactcggcgccgaatcgggcgccggcttcggcatagtacctttcatgagtatgcatcctagaaggtacatatcatgaagctcgctaccattacgacggaaatgcggtcttagatagaatggatgagcgtcgaaggacagacgctaatgctcggccgttcactagcctcggggcacgaccaacaaacacgaggctttatggagggcacgccgtacctaacctcattaagtgctattaggtactcaaaggtgatttactctagagcttactggaccaatcttacgaagaagtgcttggtgacataaccatgtgaacgaaatcaatctaatgccatgcgaatggatgcgggcgacaggggaaaaatgcctaatccatgctgtaaaaactccctatgt

SEQ ID NO: 132434 - DNA, 416 bp, Zea mays
  Clone ID: MRT4577_52264C.1
gccggccgggctgcgacatacaaatcgatagaatatgcctgtaccttttgaagcacttcttcctttcgccatcattgccggtatgtttaccgtcactgcaacaggcttgaacgttactagataccttggcaacgataaaaagcctacaagatatggacttgatgtttgggagaagcaaatgatggagcgtgatagacgtttaactggatcacttagaggacaatccgaccaacctattgctccattagcatttgccaccaacagtatttggtatttggaaaagaagagatcacactaaacaagacgcaccaacccattgatacatacaataaaatgaattcaatacacaattaacataataaaagaaacgatgcctttttaaatagacggaaaaaaaaaaaaaaaaaaggccccta

SEQ ID NO: 132435 - DNA, 402 bp, Zea mays
  Clone ID: MRT4577_52265C.1
caaactccgaactcttcatttctcgtccatcgttacttggcaatattactgcgccggcgtcggatcgactgggtactcgtcttcaatggacttcttcctccggatcgccaaattactatacatttctcgggacaaaagaaaaaaccactacttctgaatcatacacaggtatgtctcgagaaaggacactctttttaagtccagagattcaatgcgagatctcaaaccatattacagctctaaggggatatgccatgttagaaggtggaaatagcggtcttatcttggctataaacaacccgggacagcggcatgataaaatgaatgacgagtaccgaacaattcaaactgggacacctgatattatacaatatggattgggatagccttgtacatcaacta

SEQ ID NO: 132436 - DNA, 444 bp, Zea mays
  Clone ID: MRT4577_52266C.1
gcggccgcccttaataattttatcagacttgttataagtgcagtggcaacatgtgggagcctctcctattggtggctttaatgtgtttttggggttgctttcttttccaaaattttggaaaatttgatctgcccggaaaaaaaagggaacctcttttttggctctcccgccaagatttttcttggggcaccttcctttttggtaaaaaaacatcctcaaaaagttaaaaacattggtggaaaaaaaatcattggaaccaggaggtttgggattttttaaaaaactggcatggcccatgggaatggccttagctttaaaaaggatggggaaaccaaaaaaagggttaatccggtttttcatagagaaattgaaaaaatggggaggggttaaccttggtaatttggccaaaaaaagaggttatggccccccccctgaataaaacct

SEQ ID NO: 132437 - DNA, 272 bp, Zea mays
  unsure (1)..(272): unsure at all n locations
  Clone ID: MRT4577_52267C.1
ggaaaaggggggggccgctttggggggcccnggctttcgtccgcgggcttgcggcgtcttggttcttttttggggtcccctggtttcactttactggccgttgttttgcaaggggggggggcgggggaaacccctggggtttcccgttttaatccctttggtgcgctttcccttttctgcccgtgggggtgctcccgttggggcccgctccggtcgtcctttccaggggttgggccccctggtggggttttggggcgctccctgtggcgggg

SEQ ID NO: 132438 - DNA, 292 bp, Zea mays
  Clone ID: MRT4577_52268C.1
aacatgaaccgtttttaactgtttaaaccttttaagctcaggtaacgttgttgtttgttaggcggttgctggtgtggtggcgggggttgatgaactaccatttgtacttcctgatggtgttctgaagcgtagagcggtggctctccgaaactgcaaacgattttttgccacaaaaatttgtgggcagtactggatgtgatagtgaaaacagcccattcttcaatacatgtggtgaatattgcgacggctactaaggggaacttaatgttcccctgaccggtgggcaggggcc

SEQ ID NO: 132439 - DNA, 211 bp, Zea mays
  Clone ID: MRT4577_52269C.1
tctttttgcggaggaccccggctccgcgccgtccggctcctgctgcagcgcggcgcacgccatcacgaagcagagccccaggtgcctatgttcagagatgctgaccaacaccaacaggagcgccggcatcaaggccgaggtccccatcaccatccccaaacgctgtaaccttgccgaccccccagttggatacaagtgcggggattacacc

SEQ ID NO: 132440 - DNA, 456 bp, Zea mays
  Clone ID: MRT4577_5226C.1
gctgtacgcgatcgctcatctactagtggtagaacccgaacggtggcacttgggtcacaataccaactgcaatcatttggtgagtattgtcagacaggtaacatatgtagcacggggagggttaggacataacaggacagggtggccaccatgctataacgattctccttaggaaagaagaccgacgccaccaataccatgctcatgtgtcgttacaggttatgaggggtaaccggcttaagagaggtgagatgtcaaatttgattgcatacaaattccaggtgcaggaggacttaacatatgtgatttcactgtcatccgaccaattagaagttgctacttttatgtgagaagaaggctcatggctgaagatggacctgtacataattccaaataacactccttttttcactgtaggtgaggtgctgacgctaaatggtatgatcacaggtgggc

SEQ ID NO: 132441 - DNA, 152 bp, Zea mays
  Clone ID: MRT4577_52270C.1
ccccccccgcaggatttttattcaaggacgaggtcagatctttgtaggactgtccatgatgtctcgtcgcagcgcttctagtgcctgaaggaccggttccaccgccatgaacggcgtacgaaaaaagaagcagcagggcttccaggtcccag

SEQ ID NO: 132442 - DNA, 251 bp, Zea mays
  Clone ID: MRT4577_52271C.1
ccctcctttttttttttctatacagagataataaacgggagaaaccacgggtacctggatatttttctataaacagctcatttgagacgcattgacctgcgaacacaatgttaaagcaatggccccggcactctatgtactacaccacaatattttgcagccgaggtgggccaatgttttcatgtggaacgaatggatgttcctgaattccactaaacccgatccgtttttggggggcgcttggggtgaaa

SEQ ID NO: 132443 - DNA, 278 bp, Zea mays
  Clone ID: MRT4577_52272C.1
cgtgcatgcgcgcacgaagctggattgctgggcctgctgccggtccgcctccgcctcgggaccccccacccacgtctaccgtcccgtcggtgcatcccgcggttaaaggctcctcggcaggtcacggtccgtcaactcctacctccacaaggcagcactcccgcgttacctcttggcccgcgcttctcgattgcttctcctatccctccgctgcgcacaggctcatgcgatttgcccttctttcaggcctaggaataaacaatcttacttctcccgga

SEQ ID NO: 132444 - DNA, 425 bp, Zea mays
  Clone ID: MRT4577_52273C.1
aatttggtgagatatactaatttacgttcgctaaaaaaaaaaaaaaaaaaaaaaaaaaaaaaaaaaaaaaaaaaaaaaaaaaaaaaaaaaaaaaaaaaaaaaaaaaaaaaaaaaaaaaaaaaaaaaaaaaaaaaaaaaaaaaaaaaaaaagggggggccgttttaggggttccaagtttacttccccgtgcttgcaacgtaatagtttttttttggggccccctaaattaatttaattggccgtgtttttaaaacgtggtgcctggaaaaaccctggctttcccaaatttaatggctttgaagaaattcccctttttcccggttggtgtaatagtaaaagggcccccaccgttcgcctttccaaaaatttgcccatccttaatgggaaatggacccccccttttatcggcctattaagcccgtgg

SEQ ID NO: 132445 - DNA, 817 bp, Zea mays
  Clone ID: MRT4577_52274C.1
attgggtacctcgaggccggccgggaccgtgccgttagcacctcgttgcctacccacgttcattcgctgaataacttcactcttttaggtgttcagcacacattcattcggtcgttcttgtagaagtctgcatctatccattcatccacacaccggtcgagtcaacccataatgcaactcactaccttcctttcgacggcttcggccattatcgcaaccgcttctgcaagggatgcggtaaccctcaaccaggaatgcgatttgagccagccccgcgctcgcatcatcaatcgctgcgactacgacattcacctctggtccgtcttcaagggtgacggttgccccgataaccaaatggtcacgctaaagaccggcgagacctacgcggagaactaccaaaacttcaccaacaccaaggttggcgtctctatcaagatctccaagtcgtcagagtgcaaaggctcagatatcacccagctggagtactacagggcatgggatgatgaaaatgaggatttccgattcaactacctcgacgtttcctatgttgactgtggaggactggactgcccggctaggaaggacggatactacctcgtcgccggtgaccaagtcggcgaagtcaaggcctctgctgccaacacatggtgcccgattctctcctgctccgatgccgagtcctgcgacaagatgtcttacgtccttcccgatgacgtccagactaagacttgccaactcaacgcaaacatggatttctacatgtgtggcagcgaggcgcccactgaagactacgattccacacccaagaccaagccag

SEQ ID NO: 132446 - DNA, 675 bp, Zea mays
  Clone ID: MRT4577_52275C.1
tcagccccaccagcggcaacgaccacctctgcaccgatgggcggtggctgccccagcacacacgaagaggtcctcgctcccatcctcacaacgggagtgaggacaagaccatccaagaacaccacccccgcccccgtggcgtacgacgtcttgtacgccccccggtgcggccggcggcgtgggagaagccgtgaatgtggccaacctgcgcacggcgcgaccgttgcccgtgcggtggacggacagccacgccccgtccaagtggcaggaggcagcgccggaggcggcaccaaggccacccaggccgaggagccaggcacgcggcagctgacgacgcctcagacggtcgaccccgcgtagccgaagttcgcctccttcgcaaggctggcgaacgtccttctcccccgaatgctggaggaagaagcgggtcgccagcccacgcgggaggcggagccccgactcggctcgccctcctccccagagcggatgatgaacatccttgaagctgagggcagggggaggccgcagcccggcttgcttctctccaccacaaggctggtagtcatccttgtggatgaccaccggtcggaggttgcgaccgggctgcgtgatgaaaatccttgaagccgagcgatggcggaagaacgccaacccccacggggttgcactccccat

SEQ ID NO: 132447 - DNA, 264 bp, Zea mays
  Clone ID: MRT4577_52276C.1
cggcggggaccatggcgggctccccagaccaggagggcttcttcaatctgctgagccacgtgcagggcgaccggatggagggacagctgttcactgcaagccgggccgggccagaccaccaagagccagagcgaccccacccccgagatggacagcctcatggacatgctggccagtacccagggccgccgcatggatgaccaacgtgtgacagtcacaacctgcccggcttcaagcccgtggggtccaaggacggagcacaaa

SEQ ID NO: 132448 - DNA, 183 bp, Zea mays
  Clone ID: MRT4577_52277C.1
gcttgttattggtactgccgcgaaaagaagatgtcccagagtagttcatctagctcgttatagtaacccatacgatctcgcagagtggaaggaacatgcgaatatggtgtactatgagagtccaggtgttgaaccctctgcgaaaattgcagcttttggcttcaacaagagtttagccacaac

SEQ ID NO: 132449 - DNA, 682 bp, Zea mays
  Clone ID: MRT4577_52278C.1
ctggccgggatacccccactgggtcttgagacaataacctatatctactccagagcgcacaacaacctgatagacaccgtgagggagatgttcgccgtccttgctctcctggctcttgctgcgagcgccacctacgcgcatactagtcggcgagtgctgatgcgatccaacggcgacggttcactcataccgctgccggcgcatacgccaccggcgtttcaactgccacctgcgcagcattacacactgccggtacagctggcggcgagggcccatactgccaccgacggtccatgtgccgcagccgttctatgtgcatgctaacactatgcacctacgctactcaacacgcaacagcactcagtctcagccatagctgcaccaattagcggggcagaagccgtgtacctactcgcgccagctgctgcttgcctgcaacccagttggtatggcgaacgtgggtcagtgccagcagcaactgcagctgcaacagattatgacagtgatgacctaacgatccatggagaaccctgccgtgtacctacaactactttaatatatcacgctggcggagggcaatgcacctacccacctacaacaacagcttggtgcatcagatcgtaccagcatctgactcagctaagtgtggaaaaccctgctgtctacttacaacagatggttc

SEQ ID NO: 132450 - DNA, 264 bp, Zea mays
  Clone ID: MRT4577_52279C.1
acgccgaccagcacctacgccccgcctgaagtgccctcgagggtcgccgccttgttcctcaccatcccctatgccttcttcctaccggagctggtgtttgggatctgggtgtggactctggtggctgccacacacgtggcataccccctgctgcacggatgggtcgtgtatgtctcgctcacgtcattcctcgtctccctgatgctcctgctgccctacatattcgggttttacaaacgatttgactcctggagagtactggac

SEQ ID NO: 132451 - DNA, 285 bp, Zea mays
  Clone ID: MRT4577_5227C.1
acatccacaataaaccaccctttttttgcacacagcctccaccaccttactgcatgacctttctctatctgtcttctatcgacaacaacatcatagatatacagtatctaccataggcgtttagaataggattatcaccacaacttcgtctttcctgaaccccaactcgccgctcttcatcccttcttcgtaccgtcatgtgtatgacttctctcccgaatggtgtgagctcgtcaacaccacctcctgcttcctgaaccacttcttcctgcagttccagctcca

SEQ ID NO: 132452 - DNA, 385 bp, Zea mays
  Clone ID: MRT4577_52280C.1
aatgataatatattatttaacacaaacaacgtaaaaattacagtgtagaaataagtaataacaccatcatatgttttagataacatctagtgaaacacaattctgaacatgaaactgcactgttggttgcttcttcactggagtacttgatgatgacactcgatgtattccatcaaactgtaatagaaaagttcaaagatgagttcacgctgcactaggaggggttccatatatgagtgcaccattacacagaacataaaaacataatttttattcaaaaatcggcaatgtaattgacaggagaaagatcatgacgtttgtaacattcccatatataccatacgaccatgtcatggcaaaatcggattgagaactatttgttttg

SEQ ID NO: 132453 - DNA, 110 bp, Zea mays
  unsure (1)..(110): unsure at all n locations
  Clone ID: MRT4577_52281C.1
tcactgccctgtaacctccaccaagcttcagctagctcattgcctcccttgcaagagtgtggagatggcggctatgccgcctctcgagntcgattgctggtgcatctttt

SEQ ID NO: 132454 - DNA, 373 bp, Zea mays
  Clone ID: MRT4577_52282C.1
gcctcccgttcgacctgcattgggcttggcacgctgtgtatgcatccttccggatgaaggtgcttgctgctaggtacatttccactcttgatagcatctctagttatccttggtgtttccaatctaattcatcgggatacactaacccatgcttgattctccaccagaagaggcataggctactcctgctgcaatcgaaggggatttggtcccatcccgaacattatatgtgcagagatatttccgaccaagcattagtggcctctgtattgccatttgtgccgatacattctgaatctgcaatatgatcattacctatacccttactgtcatgttgtgtgctaatggactgtccggtgccttcagcatatat

SEQ ID NO: 132455 - DNA, 604 bp, Zea mays
  Clone ID: MRT4577_52283C.1
tttctttgttggagttaacatcaaattttattgctttcatctaaacgtaaaaccataaatacgttcatatctggacacaacactgttttaatgtgcttgaattcatcgtgcggatctgctttttatttcctttagctatggccacatcatgtccaacgctcccatttgatgaagcacggtggatcgtccgaattcgccggatcttcgatgaggagatcgaggtcagcgaggatcagcccatctgcgtgtttgatgttcccaagcctctgctgatcacgaaacctgaagcttacgtccctcagctagtggcccttggcccataccaccattgccgcgaagagatctgtgacatggagaggtacaagctctcggcggcgaagcgagcccagagccaccttccagacatggacttccagaagcttgttgacgtcttcacgaaacaggagcatctggttcgtgctcattatcacaggtgaggtgaggtgaagcacgcatcgttatcttggtctcatgcctgaagagttcctgatttttcttttcctttttgtaggcatctaaacctgagcaacgaggcactagggtggatgatggccatcgacgtgtc

SEQ ID NO: 132456 - DNA, 402 bp, Zea mays
  Clone ID: MRT4577_52284C.1
ttttggtggagttaactggttttcttagggaaattactagccaaatccagcagactgagcaaataacgaaaaattgtaaggccattgacgccctacaaagttacagtaaacaaccgtttaacaacccctacataaaggccgactggcataattatctaacctaaacccggtgcactgtgctgagaagaggccaggaagcaaactaggtggggtccaatgggtatccacaggagtacaaactggttcgcgctgaacataaaggccctgctggctccggcctgcaggttcagaacatacgaggtctcacacagcgtcttgcattgcgactctgggttatgcaccatgttctccagcatcatgcacctgatctgggccagcctcagtgtagtttacagggatttg

SEQ ID NO: 132457 - DNA, 213 bp, Zea mays
  Clone ID: MRT4577_52285C.1
tcgtaataatgaaatggctaccctttcacatcattatttgctatagtcagttatgcgtgccacatttaccttggcttcttttatggtttaaatttatttttactactatgctgtgacctgacaaatccttatattgatagagcgtttgcgcaggcgctgtcagtggatccacatatatgtgtatgatacgatgcatccttatgcccggttgaa

SEQ ID NO: 132458 - DNA, 244 bp, Zea mays
  Clone ID: MRT4577_52286C.1
cgtccccgaggtgacggggactcataaggttactgtgctctttgctggaagctcatcggcaaagatccccttcgaggcgtacgtggattagtcacacagtgacgccagcaaagtgactgcccatggtcccgggctggagcccagtggcaacatcgcgcatcaagaccacctactgtgagatctttatcgagctggagctggcacggacgaagtcgacgctgtgatccaggaccccatgggacag

SEQ ID NO: 132459 - DNA, 801 bp, Zea mays
  Clone ID: MRT4577_52287C.1
ggtaccggccccccctttcgagttttttttttttttttttttttttttttttttttttttttttttttttttttttttttttttattgctagaccatgaacgatagtcatacgccttaactttgtttacaggcttacagcagtaccattactaatttacaatgtttttgaaggccgtggtagattattgtccttctgggtcatacttgctactatagttgggttgacaaacagtacaggaacatgctactactgacacgaatagcttgctacttatagttctgactcagttcaattagccggagctggaaaaccagtatcagaaccctctataattcaataccactgtccttcggctgggtcaaactaaacccaacaattcagtttaatcttgagctcagatcaccctgccgtttttctgtgttctgaaacgacccatgcagctgcagaagcaaagaattgctgacaacaaagattgagctaagggccatcaacccccctgagagagatggtgtcatggcgaaatcatattgtggcagcagcactccagcggcaattggaatggctactatgttatatgccactgcccaggccaaattttggtgaacttttgccatcgttgccttcgacagggatagcgcatctaccacctgagaaagtctgttgcctagtagaacaactgaagctgcatcagaggcagcgttctcttttgaatgagttcgcatggctattccaacatccgcggctgctaaagacggggcatcgtttattccatcaccaaccattgcaactctgtgtccct

SEQ ID NO: 132460 - DNA, 439 bp, Zea mays
  Clone ID: MRT4577_52288C.1
cgcgtccggcaggtttgtcttgtcattttcactaggagcaggccctgtcccaggacttcttttgcctgagattttccctaataaaatccgagctaaggctatggctctctgcatgtctgtacattgggtaagaactccatgagccaggatatcaggcacgcatgtgaattgttagatggaaaagaataagcataccagtatggaagaattatacattatattatatatctctaaaatggtttgccttttgtttagttaaattgggagcaaacccaaactagcacagaaatgaaaaggggctttattgtgtcaaaagtttctggattgagcggtgtggatagtctaggcttgtatttcatagattttgaagcccttcacggaaataatttttaaatcaggctgttgctacctttatccaattatttttttttgggtttat

SEQ ID NO: 132461 - DNA, 242 bp, Zea mays
  Clone ID: MRT4577_52289C.1
atagaggtcaactgtggataaatcacggtatgaacatattcgtgcttgtgggcttatatactacgagcactcaactagtagtttgtggaattttctgtttgatcgatctaccattgctgtcagcgtgcatatatatagaaaaatctgcacattggcgtgattctttaacgtatgtgtgcgcacacgtaggcaattctagattccttccagcactgcagcctgatcaaggtacagaagctaaa

SEQ ID NO: 132462 - DNA, 217 bp, Zea mays
  Clone ID: MRT4577_5228C.1
attctccgggtcgacgccactcgtccgctcactctttcgctcccttttttttttttttttgaaatctcactcttcattactagcacgccaggatcaggtcacacaacaccgtgggatagacctactactaactatatacctactacattctatcttccatcataacatcatcctcaaccattgcaatacctgactcaaccacctcaactaagcccat

SEQ ID NO: 132463 - DNA, 247 bp, Zea mays
  Clone ID: MRT4577_52290C.1
gaaagaaagaccccccggagggacccggccggaaaacccggggcgacccacgcgattgtcacgcgaccgaggagaacacgggccggggcaagtccaacgaccccgggggcttcaaccacgtcgacgtcccgccggggcacgccggccacgagccaacacacccgcaccagaggacgaccaacccggcggaggcagcggcgcgacacggggggccaacggcagaggagacagggacgccgcaggcccc

SEQ ID NO: 132464 - DNA, 380 bp, Zea mays
  Clone ID: MRT4577_52291C.1
tgatgcactcctatgtggtgaaaaccgatgtagtgggactaacgagaaaaaaagaaaaccagatatccaattaaaaacacaaacccaaccatcaccaccacatctaccaactacgcaccctctactacaaaaccttacacgactcattcttcaggaacccaccatccttctaaaccgtgacgtttctcaagagataactcacactttctccgttgtgcgttcagcggatggacttagcaatcgggctgctcacgtccataaccttcatcttgcggcagacttcctgcttgattccgaacggcaccgtatatgtgactaccacctttgacaagcacatcttgtttattgagatcaaacgccccccgctcaaaattcccatg

SEQ ID NO: 132465 - DNA, 291 bp, Zea mays
  Clone ID: MRT4577_52292C.1
ttttcgcgtgggctctcgacctggatatcctccactatattatcgagtgtggggcttaagtcgaggacaaagcgcattcggtgtccaccatctagatgggctgaatctaacattctaggtgtgcccggtggcactagatgttggctcttcattgtaagcaacggccaacagcgaatgcttaagtcgattgctgaaactctgcactgtgtgcagggctgttcttgagcagcggtagctgcgaccgctacaatatcatggctggctgcacctgactgcactggcactcatcta

SEQ ID NO: 132466 - DNA, 349 bp, Zea mays
  Clone ID: MRT4577_52293C.1
agcgtccgggctccatccttctcgggtggtgttgatggtctgttggcctgttgcctgcctcgcctacggccctttgttgtcttacaccttctcggtcacagagagagagatagagagagagagggagggagagagggaacccggagaccgacaccaagcgtgaggcagaggaggagcatggtggttccgccgtcgaggtcccggggcgactacgaccacctgattaagcttctgcttattggcgacagcggagttggaaagagttgattgctgttgtacttctctgatgacacatttcacaacaagcttcattaccaccattggcattgaatttcaatgttaggacgga

SEQ ID NO: 132467 - DNA, 850 bp, Zea mays
  unsure (1)..(850): unsure at all n locations
  Clone ID: MRT4577_52294C.1
gacgcctgcaggttccggtccggaattcccgggtcgacccacgcgtccgcaccgctctcctctccctgctggctggcagctcggccttcctctcccatccccgcctgaagggacgcttccagagggaccgcaggaacatccggcccaacatcatcttggtgcttacggatgaccaggatgtggagctgggctccatgcaagtgatgaacaagacaaggcgtatcatggagcagggcggggcgcacttcatcaatgccttcgtgactacaccaatgtgctgtccgtctcgctcctccattctcaccggcaagtacgtccacaaccataacacctacaccaacaatgagaattgttcctcgccctcctggcaggcccagcacgagagccgcaccttcgccgtgtatctcaacagcacaggctaccggacagctttcttcggaaaatacctcaatgagtacaacggctcatacgtgccgcccggctggaaggagtgggtcggcctacttaagaactcccgcttttataactacacactctgccggaatggggtgaaggagaaacatggctcggactactccacggattacctcacggatctcatcaccaatgacagtgtgagcttcttccgaacatccaagaagatgtacccacacaggcccgtgctcatggtcatcagccacgcggctccccatggccccgaggactcagcaccccagtactcacggctcttccccaatgcgntccagcacatcacaccgagttacaactatgcaccccacccagacaagcattggatcatgcgctacacgggacccatgaagcccattccatggaaatcaccacatgctac

SEQ ID NO: 132468 - DNA, 1283 bp, Zea mays
  Clone ID: MRT4577_52295C.1
ccaatgcgctgagtagcgcagcatcctttaccttctcccgccgtgaccctcggcctcgcttgcacccatccgccgcggctcgtctccgtctcccggctcctcggcgtctagctcgtcaacgcgcgcgtccgccgtcggctcctccgacgggcgtcccaccgcaggggaatacagatcgtcgatccgctgggcttgcaaacatgtatatccgagtgaagcgcaacaagagtacctacttcattcaatgtgaaccaacagagacagctttgagcatcaaacagaagttgcactcgctgatagatcaacctcctagtagtcagcagttggtcttgtggcctagcagtgatgtgcttgaagactcaaagactttggcagatcaaaaggtggataacgattccattgttgcattggcactaagaaaagatgacggtgagtttgaggaagttttcatcgctaggccggaggatttcatgtcatcatcatgataaagattagtccatcatttctacaaagggaccactgcgcgttcttggagtggaccgtcgctctatgctggttcttctagaatctgggatgtggcttgcttgtccctttgggaggaaaaagaaaatcttttatgtgagatcccaaacaaccgttgtggatgatattaagctttgatttgacgctccaactgatgccgtgcttcttgtacctactggtgtctgtcttggtgttgggatcagagcgcacctaattgtccttttttgtaccagctgttgtatgtgaatccatctgtgccttcatcacctaatgcactcgctgttgctgctggcaaaaaaaaaaaaaatcgtgctcacttgctgaattgttaatgggtttttgcctactttttattttccttatctttcaggtagtgccttttgcattattaatgtttcttttcttttttgcttactcttagtataccactcgatggttatgattattgcccagcaactgtttacatttgtagaaaataccttatattatgtcttaggtcatcattcactagtcagcagcttgatctgtcttctggactgcgggtttgacctaccaaaccatattattgctggtgccattctttctctagcagaaatttacacattttccctcatttctatgttaataataagctaagaagaatctatgattgcaaagtggtttatcatagcataacagcaggttgtccctattctaaataaagtgaatgcatgatgctagtccttttctaaaaactcaacctactcaatgcagcttcttgc

SEQ ID NO: 132469 - DNA, 485 bp, Zea mays
  Clone ID: MRT4577_52296C.1
ttttccagtattcctcggagcgtgtcctcgtcacagacctgtgccttggaggaccagctctccgacgaccagatggcggagatcaaggaggccttcgggctcttctataaggatggccacggctgcttcactacccacgagcttggcaaggccgatgccctcccttggccagaaccctaccgaggcagagctgcaggacatgatcaaccaggacgatgctgatgggatgtcaccatccacttcccggagttcctgaccctgatggcgaggaagatgaaggacaccgactcagaggaggagctcgaggaggccttccgtgtcttcgataaggaccacaacggtttcatctcggctgacgagctccgccatgtcatgaccaaccttggcgacgagctgaccgactaggaggtcgaccatatgatccgtgaggacgacgtcgacgtggacgtgcagatgcactacgaggagctcgtcaaggttatgat

SEQ ID NO: 132470 - DNA, 544 bp, Zea mays
  Clone ID: MRT4577_52297C.1
cattgggacccctcgagccggccgggataaacgttcacccttacgcgagaacaaaaacaaaaaattttaaaaaatgaaaaaaaaaaaataaaaaaaaaaaagaaaaaaaaaaaaaaaaaaaaaaaaaaaaaaaaaaaaaaaaaaaaaaaaaaaaaggggggtttctcgggccctttctaaaaaacctttggtggggcctagggtttccccccagccgcattcttttggggcccccctcaccccccccccagaaaaaccgtttcgggggtttcccaaaaaatcccggatttgttttgtaacagggtttttcggggggggttgtccccgggggggtatggggccaagtttgggaaattttcaaaaagctgaattttttcttaaagtggcccccgccaaaaaggggggggccaaaacccaggctttgaagggtcccaaggttggaaaatcggggccctaaaaaaaaaccaaaaaaacccgccctcccggggattttcccccccccaaaaccctgaaaaaggttggggcccccaaggccccaaaaatc

SEQ ID NO: 132471 - DNA, 297 bp, Zea mays
  Clone ID: MRT4577_52298C.1
ctctcatttttttccattcgatccccccttggaaaccaaaaccacaacttggggcgcattggttgtgctcaaaaccaaaaaaaaacccgcggggaagaaaccaggggaagaagagcccgcggtcgaaaaagcgcccgccgggaagaagccgaatgcggaaaatcttgtccccgctggcaagttcgctgtctaagaaagcggcaagggcatgatgggcaataaaaaaggcaagaagagcgtggcgacctacaagatctacatcttcaatgcgctttattatgtgcaccctgacattgg

SEQ ID NO: 132472 - DNA, 240 bp, Zea mays
  Clone ID: MRT4577_52299C.1
actgattgacttttataggaagaaattgaggaaaccaacttaagatctactgatgatgggggtgggctaaagttgtggttgggctctaggaagcaagcacctatatgctgttgacgtaaactattgcactctggacattcggtggaacaaacctatctactggctacagtttacagtgtgcgatggactgaattccatgccggtggcattgcattattgatcaaggcatggattaacgtt

SEQ ID NO: 132473 - DNA, 347 bp, Zea mays
  Clone ID: MRT4577_5229C.1
tttattgatgccttgcaccaagggccaagccaggccactgttatgcagtaactcgtagtctgcactttgggcaatgtggaggcccacagcagtgcaggtaacatacaagaacctgcgttggtctggtttgtttgctgcaagaataccaaacacggctagtgtgaacgtgtcccaaaatatcctggctacgatagatcatgcaggctccttggagcaaggcaagcacatggaattcattggttggcctaacgtgctgttgggtgttctgtctttcggagctcttcaatatcctgatgtccctttcatgagtttacccttatgttttttttattaacataatgttctat

SEQ ID NO: 132474 - DNA, 522 bp, Zea mays
  Clone ID: MRT4577_522C.1
ccagaggacagtgttttccaaagccccaggctgcccgccgccgccgcgacccgccacgccggcatggccgatgccgcggcgctccggccgatcgagccacttcccctcccgactgggctctccctctcgccgcgcctcaagctcctgcgcaccttctttcacgccgacctcaccgtccggcccctggaggagaggaagatcaagagcgccctcctcgcgaatctccgcgacgcaccgctccccctcgcgctcctccgccgactcagacctctccgggagccgcctccctgacctccagaagaggcggacgcgaggagcccgcacgcactggggacctccacgagcgagacctctccttcctccgcaccccgaaagggagacgacgaggacgacgagatgaccggagagcaggagaaggactccgagcggcggagcaccctggtacagaagctcgaaggaatcgagctcaacctcgagggagagaaaagccggacgacacgccaagatacaggcggctgaccg

SEQ ID NO: 132475 - DNA, 794 bp, Zea mays
  Clone ID: MRT4577_52300C.1
taaattttcttctaaggtgcaaaacgaaatctacccacaaaaggagcattataggcaggcttgctggaacaatttctagaccttgtgagtttccaacaatgctgatcagccgctccttgttgcactccaaaccatccaccaaatcccaaatgagaatagactctcttaggacctgtacacagcacttgatggccctttcgggaactattttgtggagattaggagccaaatcaaggttcgtcttcccatctagtcatctatcaaggtagtctgtgtctgtctattgccaaaatcgatttcatagtcgtacactcatactaaacagaacttggccattgtgaggaacttgagacagcaacccaacccatgggagggaaggatctgttttctcaagcacagccatctgatgcgaagggcccaaaaactgaagtggctgttatatcttctcccaagagaccatgcctccgttaaccttgtcacacctgagtcacaaaaaatccctgcatattttgttaacgaccatgatcacacatgtacattacatctttatgatgtttagtgagagttctgctttttttatgatggtatagtgtcttttgctggcagtgtagcctggttgttgtttgaactctgagttgagttgtttcgttggtgtggtggcagctagttctgaggccttgggagcctccagcatcgtcattttcattgataccttgatagtatgtcttgctagcttggtaagcgatgtaatgctgtgtattgctgaaggtaaaacgtgatgtaatgactgatat

SEQ ID NO: 132476 - DNA, 192 bp, Zea mays
  Clone ID: MRT4577_52301C.1
attgtgaccatttttttcactcaacttttgttagaagcggggataaatgggcggagggcggaactatgggaaagctactacgtgccaagggcggaacccatgcactttctgagaacaataggcggctggaaacggatggcaatatcgcgaacatgataacatgatatgtgatcactcatgtgtgctacaaat

SEQ ID NO: 132477 - DNA, 1210 bp, Zea mays
  Clone ID: MRT4577_52302C.1
cggggcctttgcagttgcggataacggggaggaggcggagcgaccaacggcacaggcaccatggcgatgcgagcagctacagcggcggcgacaggcttcttctctccatccaccgtccctccgaggcgcttctcgtccgttacaccgccggcgtcactctgcaccgcgcgctgcatccagcgtcaccgtctccgcgccttcccaagtacagtgctgcaatctctccgttccttccttttggtgttcccatttctcaatgtacaaataccgcctctctcaccattccctttgcaggctcggaaatacctctagaggaactcaacccatccgtcgatctacttgtaggctccacccttctccctccccctgttcctgtcatattttatcttcctgttattgtttttaaataatcgttgccctacttatggacggattttgcatggttttcttggttgcaatctaatgcagaggagaactgcggaggccgttggcgatttcaggaaaacgccaatctatattgttggtacggattgcacagccaagcgcaacatcgccaagctgcttgcgaattccataatataccgctacctcagcagtgaggaactgcttgaggatgttcttggtggcaaggacgccctcagagccttcaaggaatctgatgagaagggttatcttgaagtcgagaccgaagggttaaagcagctcacgtccatgggtagccttgtactgtgctgtggagatggcgccgttatgaactcaaccaatctcaaatgacatgttgaagagcacgggaacacaagctactacagatccagactctttttctcaggcgatgagcaagctccgtcagcgatgtggcttctcagcgggggtacagtagcattgacttggtgacgcttgaggacatggtccttgaaatcgtgaggcaaatcgagaagctgatccgtgcaaaggagatgatggaagctgcagggaagccattctaaacaagatacgcatacacaatagttctgctccggcatacctattttctggccagttaccagacctccgatgcttcgctgttcaagaaaccgattgcagttgcctacggctcaaagcacaagcgcgtgaaatctaaggaactgaagctggttgttccactcgaatatgcttatattgtattgcaagatcacttgccaattgatagtgcaaaaaatgcattaggcgt

SEQ ID NO: 132478 - DNA, 1429 bp, Zea mays
  Clone ID: MRT4577_52303C.1
gtcccttcgagccggtgcgagccccgtcaccggccagtctcacttcaaaggcggaggtgagctccttcggctctgcccctcgcccgttgcggataacggggaggaggcggagcgaccaacggcacaggcaccatggcgatgcgagcagctacagcggcggcgacaggcttcttctctccatccaccgtccctccgaggcgcttctcgtccgttacaccgccggcgtcactctgcaccgcgcgctgcatccagcgtcaccgtctccgcgccttcccaagcttggaaatacctctagaggaactcaacccatccgtcgatctacttaggagaactgcggaggccgttggcgatttcaggaaaacgccaatctatattgttggtacggattgcacagccaagcgcaacatcgccaagctgcttgcgaattccataatataccgctacctcagcagtgaggaactgcttgaggatgttcttggtggcaaggacgccctcagagccttcaaggaatctgatgagaagggttatcttgaagtcgagaccgaagggttaaagcagctcacgtccatgggtagccttgtactgtgctgtggagatggcgccgttatgaactcaaccaatctagggctgctgaggcatggtgtctccatttggattgatgttcctcttgaaatggcagcaaatgacatgttgaagagcacgggaacacaagctactacagatccagactctttttctcaggcgatgagcaagctccgtcagcggtatgatgaactgaaagagcgctatggggtttctgatattactgtttcagtacaaaatgtggcttctcagcgggggtacagtagcattgacttggtgacgcttgaggacatggtccttgaaatcgtgaggcaaatcgagaagctgatccgtgcaaaggagatgatggaagctgcagggaagccattctaaacaagatacacatacacaatagttctgctccggcatacctattttctggccagttaccagacctccgatgcttcgctgttcaagaaaccgattgcagttgcctacggctcaaagcacaagcgcgtgaaatctaaggaactgaatctggttgttccactcgaatatgcttatattgtattgcaagatcacttgccaattgatagtgcaaaaaatgcattaggtagtttggattctctagtattgactttaatccatatgtattgaagtagattggagtgtaacttaaactaatttacacactaatttaccttaacatatgtggattaggattaatactagagtgtccaaacaaagccttacgtgttaatctgccatggttgaattttgcaatggcagtttttcctatgcatggcctggccgccgaattagtagaatttagtgcaagaaggaaaaaaaaattcgggaacacttttac

SEQ ID NO: 132479 - DNA, 193 bp, Zea mays
  Clone ID: MRT4577_52304C.1
gaagaatttcgtcgctgcaggtagcaagcttacatatttcctttttttttctccaacaaaaaccaatttacaaatttgtgttggtacagcacaagaagagcattcggtacacacgccaaagtttattcagaaccaacgctcttccaagaaccaggttcaacttggagaaaaaagaacggaatcaatttaactt

SEQ ID NO: 132480 - DNA, 697 bp, Zea mays
  Clone ID: MRT4577_52305C.1
gtctccatccaccgtccctccgagcgcttctcgtccgttacaccgccggcgtcactctgcaccgcgcgctgcatccagcgtcaccgtctccgcgccttcccagctcggaaatacctctagatgaactcaaccaatctagggctgctgaggcatggtgtctccatttggattgatgttcctcttgaaatggcagcaaatgacatgttgaagagcacgggaacacaagctactacagatccagactctttttctcaggcgatgagcaagctccgtcagcggtatgatgaactgaaagagcgctatggggtttctgatattactgtttcagtacaaaatgtggcttctcagcgggggtacagtagcattgacttggtgacgcttgaggacatggtccttgaaatcgtgaggcaaatcgagaagctgatccgtgcaaaggagatgatggaagctgcagggaagccattctaaacaagatacacatacacaatagttctgctccggcatacctattttctggccagttaccagacctccgatgcttcgctgttcaagaaaccgattgcagttgcctacggctcaaagcacaagcgcgtgaaatctaaggaactgaatctggttgttccactcgaatatgcttatattgtattgcaagatcacttgccaaaaaaaaaaaaaaaaaaaaaaacccacgcgtctg

SEQ ID NO: 132481 - DNA, 244 bp, Zea mays
  unsure (1)..(244): unsure at all n locations
  Clone ID: MRT4577_52306C.1
cccacgcatccgccggcaacaagaccatggccgtctgcaagaacgccatcggcaagtccatcggcttggcaaaggagctcgcctgcatctgatccaattgactaacatgcatatattatatactaggtatatgcccgtgcatagcttttctctacannagagagacacaggnnannnnanagnaaagnnannaagaancaacccanaaagcagaacaaaaaaaaaaaaaaagggcggccgccca

SEQ ID NO: 132482 - DNA, 339 bp, Zea mays
  Clone ID: MRT4577_52307C.1
ggccgggactgcttccaacatctacgactgactcatggagcgagagcagcacacacgcagctagctaggagcagcagcagcaccgctgatggcggtctccatgatctcctcgccagctctggcgggggcaactcaaggactgtcgcccctcggacgccgcgcctcctccttcgccgacagctgctccaagaagaatatcaagaccgacaagccctacgcgattgggggtgggctgaccatcgaatccctcttcctaacgagactggaagaggctatggcaagggaaccaagtactggaacaagtccgcacataccgccaccgccaaggccgccgcacca

SEQ ID NO: 132483 - DNA, 151 bp, Zea mays
  Clone ID: MRT4577_52308C.1
taaataaaaaacactgtccttatttttacaacttcttaactgttaaaacctttctctaacccaactaaatctcctatcatttttattcccttttcaccactttacataatatccaattattcccaaacctatcatcttttccaacattttt

SEQ ID NO: 132484 - DNA, 394 bp, Zea mays
  Clone ID: MRT4577_52309C.1
gtacctgaggcagccgcatagcagtacagtggcagcggagcactactacgccgggtgtggacagacgagcgcaatgtaccagccgatccggcaacaaagctggcctcactaaatgaggatgatagacctgcactccatctcgcagcacttatagatgataatacaacttgagcgtgcacgatccgacagcaataaactgtacgagccacctctgatgcagtaccaacacaagctgttggcagctcacggtctaaacccaatggccatgataatagcccagaacatgccggctatggaatggactttaccatgatcagatgcatagctaccgtaccacctattgtggcgtatccgctgccataccaccctactactgatttatgatatgaggtaa

SEQ ID NO: 132485 - DNA, 360 bp, Zea mays
  Clone ID: MRT4577_5230C.1
ggctttgttttgggttttttttttttttttttttttttttaatttaaacaatcaaaaaatatatatagtccaaaaataagtccatacaaattctagaaatacaataatcttgcacataccatgagttgatgttgcgagataaatttatcttctgggtgggggggggttaaaatgtttcaaaatcttttcatcttgaaaatctacaaacatatccttcactggttggctcttcacaaatcacagctagggtttagtgcacgggcacaaaccacaaatcacagcttgtctgcttcacaaacgggggggcggcagctgggcaacggggtggtcgcgggctcgcgacggggctcctggcggggc

SEQ ID NO: 132486 - DNA, 605 bp, Zea mays
  unsure (1)..(605): unsure at all n locations
  Clone ID: MRT4577_52310C.1
tggtaattcgcggccgcgtcgacctaattttgaaacaatttattttcataaattaatattttaaataaataacataataaaatgcataattaaaatgtaaaaacaatgtcatacacttaaaagtagtaggtgtctaaacagtctaaaagaatgtaatgtttcgaaaaaaaaatatatataaaaatgtaataacaaatatttataaatggnaaatttatttatgggcgcatcaattttgtatatggcctcaaatcaaaatgcttgccacataatcacaattaaaccaagcgtatttagtgtccgtaacaggaacatataatgttcatgaatatttttttcaaattacatgaacaaataaaaacaactatgttacagaatttctagtatacaccagaatgttataagtaatacattttacactattttaaaacgacgccatgcaaagtgataaataggtttggtgacacatagagtttttatgcagactagaacaactaggacagctgtgtaatgtggcaatagcagcatttgggttttgttgagaggcgtgtcccacaccggtttatctcagcttgggtatttggagtaaaacgatacagttaagt

SEQ ID NO: 132487 - DNA, 866 bp, Zea mays
  Clone ID: MRT4577_52311C.1
gtctcaccagacgaccttctcgcctcagggcctgcttggcatcacttgccaggtccgttggatcggtcatcgtctagtcaacacgagttctccatcgaacaagttcgatcccgctgctcatctatcgcgcgcgtcgtcaatcgtctcgtcatcaccatggttggaagcagccccctgcaggccgtgctggtggcccccggcgtcaaggacaggaaggtgctcgcgttcaagcgcgacgcgctcaaggacaaggacgccgtctccggcctcatccactccatcctcgcgtccagcccggcgcagcgcagcgccttctacgtcttcgacctggccaaggtcgtcgacctcttcagggcgtggcgccgggcgctgccggacgcgcggccctgctacgccgtcaagtgcaacccggacccggcgctgctcggcgcgctcgccgcgctcggcgcgggcttcgactgcgccagccgcgccgagatcgaggccgtgctcgcgctcggcgtccggcccggggacatcgtctacgccaacccctgcaagcccgaggcgcacctcgagtacgccgcggaggtcggcgtcaacctcaccacctacgactccgaggaggaggtggccaaggtcaggcgctgccaccccggctgcgagctcctgctccgcctcaagggccccgacggcggcgacgtccgggtcgacctggggaccaagtacggcgcgcaccccgacgaggtcgtgccgctcctgcgcgccgcccagcgcgcgggggtcggcgtggccggcgtctccttccacgtcggcagcggcgcgtccaacctccacgtctaccgcggggccatccaggccgcgcgcgccgcgttcgacgcggccgc

SEQ ID NO: 132488 - DNA, 156 bp, Zea mays
  Clone ID: MRT4577_52312C.1
acaatgagataaatagtatatgtgtgcaaccatacaacatgctacttgtgatggggttccacctgggggagatatgtgatttttacgataatgattacctttcaaggtatgatatcaaacctagcactagaataatccgtgatataaaacaattgg

SEQ ID NO: 132489 - DNA, 242 bp, Zea mays
  Clone ID: MRT4577_52313C.1
cccacacgtacgtccagcgacatatacagtagaatccattagccaccattgagcaacagtatccgccaacatatttttcctccttatgcttcttgctctttctacatgtgttgctaacgcgacaaatgttcatcaatgcttacaagctcctatagcttcccatatttccccatacctttcatcaattattggctaaatatgtgaaaaccccactttttaaccctataagctttaacaagcaa

SEQ ID NO: 132490 - DNA, 152 bp, Zea mays
  Clone ID: MRT4577_52314C.1
gggacatcagcaagctgaacatggccgtcgccatgtacatggctcaaggtcctagactgtggcctcctatcaccgaattcttgggtatggcaagctccatcagcccatgcacgaatgtgttctgagggcttccattgactaacgggacaccc

SEQ ID NO: 132491 - DNA, 141 bp, Zea mays
  Clone ID: MRT4577_52315C.1
aaaaaacacaccattttttttttcattaagaatgacataaatcatcgtgagcttttcatatacacagccgaagtcatttcccttttacaacctacacattacaacattctatcctaactcaaaccctataccttttttaat

SEQ ID NO: 132492 - DNA, 578 bp, Zea mays
  Clone ID: MRT4577_52316C.1
atggacctcagccggcggaggctagttctgctctgtttcttctcctcgcctaaacagcgaccgcctcaacacgaaactgaaaggccagtacctattaccttatacccatattcctatccaaataaatagtgccgaacacacatcggacccatattccctgacactagctgaaggaggacaggagggagggtgaaacaccatttctgctagcacagatggggcagggaccaggatgccgatcgctggagtggatccccgccaatcccatgatgactgccacctgccctactatgtgctctgcccgaatctcaagtgacgcgaaagcttggccagttgccactagcaaccaccgaccgagagagaggactggccaaagtgacgcttccttcgctcgcacgggaaaactacgctcctgtcctgtgaccccgtgcacagttgggatgattcctgggaaggggacaccaattattatccagcggacctgaagaaaaataaagactggttggatcgcgttcgactgtgtacattatcaacatgggaagcttaccgtatgcaatgattgtaagcctgaagcacgg

SEQ ID NO: 132493 - DNA, 572 bp, Zea mays
  unsure (1)..(572): unsure at all n locations
  Clone ID: MRT4577_52317C.1
acgggggccytrgcgcgccgccaccttaaccttggcagccctdgccgccgcctccattgctgctatacccgcacccttgggtcccgtgttgaggcgcccgmcccsgggcmcggtgaagtgtttkgggcgcaagaaracggccgtggccgtggcctaaacgaarccaggccggarrrtgatcaargtgaacrgcgtcccgatcgagctgctccgtcccgagatgctgcrgctwaaggccwtggagcccgtgctgttggggggggggtccaggttgaarracatcraaatgaggattcgsgtgggcggcggcgggaagmcgtvgaagatctacgccatccrcmaggccgtcgccaarggtctcgtrgcatactacaaraagtacgtcgvcgaggcggcgaaaaaggagrttaaggacttcttnnatggctaggggggsaccctcctcgtcgccgacccccgcggctgggrgcccaagragttcggcggccgcggkgcccgcgccmggttccagragtcctrccgctgggcgccggcgcctgccggrccgctgtcgtggctccgtttvgctacga

SEQ ID NO: 132494 - DNA, 265 bp, Zea mays
  Clone ID: MRT4577_52318C.1
tttcggctcgaggggagcgggtcgaaacaaccctaggttacatcacaacgtctttcttacaccatgacgatgtgccaagcggagtgcgcgccacgaagatctcgcatgagaaatatctcatgaggccacgcgaaacttactacgtcagccctactgcgcctgtatcctagtggttgtaatgctacccgtattaatgagaccgaattgtcggagccatcaccggtgactaatataaccggctattaatcgatctcccttcatgtct

SEQ ID NO: 132495 - DNA, 368 bp, Zea mays
  Clone ID: MRT4577_52319C.1
gattcaacaaccttttcatttctcgtgtattcagatgaacaagaacacaacggaactacaagcgtgtatccatggggcggagaaaaaaagaaaagatttttagagtgtgtgtactggcgctgaattcggcttatagaggcttttcctcctgaaaaaatcaccgaatctgcggaatatcaggctcttcttgtgcttcgtggagtcctccgtgtcaacgtagtggctctcgtcgatgtggtcgaactcgtcgtccaagtcctccgtcgccgcgtccgccgaggacttgaggtcggcgatgttgctcaaggacgcgaacacccgatccctggggttcaggttccccatccgcgcggaccgcgagaagccag

SEQ ID NO: 132496 - DNA, 251 bp, Zea mays
  Clone ID: MRT4577_5231C.1
atgagtatgaggaaatctctttctgttgctggcttacagtgtctctgtgtgcgttgtggttgctgtcatatttgctctagaagaaaaaaaaaaagggagggaaaatgcattttccccagggataaaggcggccattttgggggtcggaactaatggcctgaaaatatttgggatccataactcgaaaaggcgtttactcagactattagggacactttccccttagagccccctaaggtttccccagacga

SEQ ID NO: 132497 - DNA, 184 bp, Zea mays
  Clone ID: MRT4577_52320C.1
gcatgagcatcctccgcgcgccgccgccctgcttctcgtccccactcaggctcagggtcgcggttgccagccgctggcgccccccatgcggcgccagtgctagcgcgcgcgagccacctacaatctgcagctgatcacgccggagggggcagtacatccgcaggtgcccgacgacgtctacatc

SEQ ID NO: 132498 - DNA, 1068 bp, Zea mays
  Clone ID: MRT4577_52321C.1
ctcgaggccggccggggatcctatctatttgcatcttgctcagatccgagtcactaaacacggatatatataaacacggatatatatgtattcttttgtagaagaaaaagaaagaaagaaataatttttttttcctcacccgatttgggccctcgcgctcgcgaaccaccaccacctactgtgtctcctctcctccctccctccctccccgtctccctgccgggaagagaccgcaccagcgcctccgcgagttccacccccaatccccacagcttcccggaccaacaaatccgcccaatttgcgggccactcccggcggaaattcgtgacaaagccgcggtttttttttccttttttctttcgctcccccgcccccgttttcccttttgactccgccgccgggtctgctcctttattgctgcgcctgcctgattgtcttttctcgtcggaacgcgcggtattccgagggcggcgaccgcggattcgcctccggaagcggcgatttggtccacaggtggcgaagggatgatggatttggggagatttctctagctagcgtggttctgatcgggggacctgtctgggggcgggcgtattacagtacggaccgccatgattaagcaaatcctcggccggcttcccaagaagccggccaaggccggcgagaaggagctggccggcgcgggcccgtcgctgcccagcccgacgtccgacgcgagaaccaccaccgatctgaccgcgtctagcaggcttgtcagccccagcaactacgcctccgcggcaacaaatccaggccagagctacgcgcccagggccgccgggctcggcgccggcgccagcaacgggttcgcgggctcggcggccgggtacgaggcgctgccgagcttcagggacgtgccggcgtccgagaagccgggcctgctcctcgggaagctggccatgtgctgcgtggtgttcgacttcgcggacccgaccaaggacgtgcgggagaaagaggtcaagaggcaaacgctgctcgagctggtggactacatcacctcccgccacagcaagttcccgggagcccgt

SEQ ID NO: 132499 - DNA, 107 bp, Zea mays
  Clone ID: MRT4577_52322C.1
ctccggaggtaaatttatcagattttgaatcgaatcaactgtcgcagttaccgtcgactcttttgctatcactagaaattccggttcaaaaatatctacgatcttcg

SEQ ID NO: 132500 - DNA, 837 bp, Zea mays
  unsure (1)..(837): unsure at all n locations
  Clone ID: MRT4577_52323C.1
ccnnggccgggaaaaaaaaccctcgaaaaaaaaaaactaacccatcatccatcaacgcaggtcctccccggtcacgcgggcagtcacccccactctgctttgctctcccgccccgccccgcccgcccgcactgcatcgcgtcctccggcgccctcgctgtcggcgccattggcgggctcgccttcaactgccccgtccgctggaaccaaccaggtctaaacatgcttcatcgttcaaatagccggaaccaaaggaacaggggatcaagaatcaaaacactactccaagctaccttgcttataggtgttattttttggctcctatatcaggtgaagcattcctatgataagaaaaatgagtacttggatgatgctgaggatcagcttgcccataatgatataagcatgttccaggggaggaaagaaaaggcaggtagttacagtgatagcaatatccaaatggttgacgacaattctgatgtaacgactaaaccagaagaacgtgatgcagatcaccattcagatacttttaattataatgagaagactggagaaactgtgttcgataaagacagtactaacttgaatgaagatgacaagagaaacactgagaggtcagaagcggaaggacaagtcaacagtgcagatggtaatacagaagttaataataataacaatgaagatgaaactaccggtcatgcagaagaaggcaagcatgatactgaatccaactctgctgctgagagtaaaagtgaagtcattcaactgggagatgatatgtcccgaaacaattatgcacaagaggaaaacactggggaggcaagtggacgtctcatga

SEQ ID NO: 132501 - DNA, 623 bp, Zea mays
  Clone ID: MRT4577_52324C.1
ggccggccgggaatatgctcctctcagatcgcattgcatcgcaacactcctctgcctttcaaggatggcctcaccctgcgcttttcaatacgtatctcgctaacatgaacaacttccaaagcaacaccccgctgtatttggaccctccgatcatggcaactgagaaccagccattggtgaaaccaacccctgcaccacttgcgcacccgcaccagatcattcatcccatcatgtttcactgcctgcaagcaatgttgggcccaacaaaatacatgtgaacttaccatagcaatgacaatctccttctgatggaacacctactgcaatttccaggaacccctcttgctgtagatcgtatacctgctagaaatcgactaccgcctagtcttgccctgctgtgctgattcacttgctctgtgccgcccggtgaccgcactataggccgcaaggcgtttgcaacttcaccattcttcatgctctgagagggatgtctaaatattcttttcacagggggcacgctatggagctataaaatgaaatagagagaaattgcagcaaatctttgttatcttatcaacacctcttcttcttcccatagcactatgtacaaggtgacattataa

SEQ ID NO: 132502 - DNA, 365 bp, Zea mays
  Clone ID: MRT4577_52325C.1
tattacgactgctgatgcagttagtattacaagaattgtgtactgccttgacagtctgtgcggaatacatagctgtcagaatcatatacacatttgatgtatgaatagtaacccatcttgcttccctgaggatgctttgggccctaagacccaagcactttccacttatgataaggaatacctggcgattattgcatgtctccatgcctggcgtgactacctccaacagtggcgaattctcattcctaactgaccacagaatccttactcaacttaacgagcagtgcctgtacacgccctgataacacaaatttttcaccacactttagaccttgtattaccgtgtgcagtacagatggggatct

SEQ ID NO: 132503 - DNA, 845 bp, Zea mays
  Clone ID: MRT4577_52326C.1
gcgccatggcggcaaacacgcccagaatgaatgacatccacgttggaacgcaaaggaaccttggcaagtgtcagattctgtaaacaccggcattgctagcttccgcttggtccatgctttgatcctgttgtacacagtacccagcccgacaactctgctccaccacacctttgatcctgtacatacatgcgcgtacgcccatttcattcgggggctgcgtgcagctacgaggagatcgtcagtcttggcctttcacgaggctggtcctagtccgtagcaatgtgctgcagcatgaacgctctcgtcttgccgtccggtaccagccccatgctccgcatcttggcgtacaccttgttggctagcccggtcttgcctcgcaaacacagcccgtggatgaccgcgttgtagatcgaagagtctggagccacctcctccaatatatcctctacttcagtccaaagagatccccagatgcaagctcgtataacagacaaatgtgtgaatgtgtctggcgaacacctctgattaatcatgcgctggtacactttaagagcaacttttggcttgctagcaacctcacaagcacctatcacatgattgtaagataccactgataatttcagtcctcttttttccatcaaccacagcagctgcaaaccatgttcccattgaccaagcttttcgcaggacatcaaagcagtgttgtagagatgatcatttaagagtgtcggatgcttgcctttgattccatggaaaagctttaggcaatcccagcatcgcccggacctgtataatgccaacaacagtgcgctccatgtatattgatcaggcttaaggcctatttt

SEQ ID NO: 132504 - DNA, 177 bp, Zea mays
  Clone ID: MRT4577_52327C.1
cggagatgtcgaattatattcaggccgaggttacttgtatcggcgtgagtatacctagaaacggatagatgcttacttaaacgggatcaacacagcggtacgatggtttcacatcgacgcgcctcataaagattacgttaagacttaaacgacaatgcatgtgtatatccatcggag

SEQ ID NO: 132505 - DNA, 335 bp, Zea mays
  Clone ID: MRT4577_52328C.1
ctggaggactgggggcttttttggtcatctctaccaactaaggcgagataaatccgactaccaatactagcagccacacgctcgtagaagcccagccaggcccagaggctatgcatttagtaaagaccctttggtggggacatgctggccttgatggtcaagctgcccacgttctgccagcccttcttcaggagggagacgaggtacttgatggccaacatgatgtttccgatgagctcatcctcagtcatgtccacgttgccgacagccacacccatacagagcaccttcttcaactggaacttgatggtcgacttgacctcggcgatctttcc

SEQ ID NO: 132506 - DNA, 200 bp, Zea mays
  Clone ID: MRT4577_52329C.1
attcggctcgagcgcaactttgccaaccggaagttcttcccccaccggaacgaaaaccaccacaggggcctgtcaaacaaccccgggggggcgcccaaccataccaaaaatttccccccacagcccacgtacacaaccaatcctcaccccaaggatgatgaccaacccccaacactaaccaggcatgcccaaaagccacc

SEQ ID NO: 132507 - DNA, 616 bp, Zea mays
  Clone ID: MRT4577_5232C.1
aaacaatcaaaaaatatatatagtccaaaaataagtccatacaaattctagaaatacaataatcttgcacataccatgagttgatgttgcgagataaatttatcttctgaattcttaagccttaaaatgtttcaaaatcttttcatcttgaaaatctacaaacatatcctataaacatgagattactatcaaataaataatcaaatcaaaactttaaatcaaacttaaaacaaacaataccacatgtttcaccttcactgcttgtctcttcacaaatcacagctagggtttagtgcacggtcacaaaccacaaatcacagcttgtctgcttcacaaacggcggagcggcagctggacaacggcgtggtcgcgggctcgcgacggtgctcctggcggggcgagcggcgctgcggcggtgctctgacagcccggcctccggacgagcggcgctgcggcggcccggccttcggacgagcggtgctgcgggctgcggcggcggggctccgggcgtggctacggcgggggtccgggcgggccgcggcggcagcggggctccggacgagcggcacggcggcctgcggggtgcgggctgcaggctggagcgggagggtagagg

SEQ ID NO: 132508 - DNA, 415 bp, Zea mays
  unsure (1)..(415): unsure at all n locations
  Clone ID: MRT4577_52330C.1
ccgggncgacccagcgnccggnnctagnacgcgagcggccgcgngacgngcgngaggagncnggagncggacgggaacgaaaaggcgaaaacccagnggcncgaggnnccccggagcggaggcganggcngggaagggagggaaaggcnngcncgccgcgaagaccacggcggccaagnccgccgngaaggacaagggggagaagggcccaancncacgcnccncccgcgccggcccccagnncccnngggggcggnnccaccgncagcngangcaaaggacgcaggcaaangggcgcgnnggggccaccgcagccgncnaccccgcngcccccccggaggacccgaccgccgaggggcnggagccggcggggaaggcnngcaaggagcngaaggggaagcggggcaccccncgc

SEQ ID NO: 132509 - DNA, 382 bp, Zea mays
  Clone ID: MRT4577_52331C.1
gctcgagataaaggcattgttacgcactcagtcgatgggcactatacgtttcacagacttcatttcgacacagaccacttcctgtggttctatacaagaacgggaaactcttttacggcgacggcctacttgccatcagtattcatctctcgtcactgtgtaatgtcacctcacaccctaatactgggccgtcaaagacttcctgacactctgtcactggtttacaactaacacatatctgatatacacattgtgacgttagatccacaccagagctagttcctgatcataagcctggctctaccaactgaatacacgatccgcgaatacctatctgacaacgagcacattacttccagctgtccatctagtgaatgctatg

SEQ ID NO: 132510 - DNA, 402 bp, Zea mays
  Clone ID: MRT4577_52332C.1
aataaacaagttggttttgagacatgcatgcttaaaatggtgatcaactacattaattacaaccaccagtactaatgaagcatgagtagtattaattactccaatcgtggtgtgtatcatcatcacatcatcgaccaaatccatagtccgagaacgtactagtactacgcaatgaaggatcgaaataaataatagagttgttgaaaggcacacttctcaactgcatgcggcgagcgggctcgctcgtcgctcgatcgtagtcgtcgtagccgatgacgtgtgcagtgctcacgagcagccgttgtgcacccgtagcgggcgccccgcggagccctgcgagacggccggccggcgcgcggcggcgcactcggcgaccagcgcgtcgcgggcggtgagcagccc

SEQ ID NO: 132511 - DNA, 1046 bp, Zea mays
  unsure (1)..(1046): unsure at all n locations
  Clone ID: MRT4577_52333C.1
acatcacttgtaaatcatcattagtttatgagaactgagtccttaggtttgaagctgtttagaatgtatgctcatttagttggctttttcaggtactacaaatcacttccacctataagcaaggcatatgggacattgtgtttctttaccaccgtgctagttcagctccagattttgcacccattatttctttacttagattaccccttggtgttcaagaagtttgagatatggaggctattgacaagtttctttttcctggcaccattttccatgaaatttggtattcgccttctgatgatagcaaggtatggtgtcatgttggaaaagggtgcatttgataagcggactgcagatttcttatggatgatgatatttggtgccatctcactattggtgttgtctgttattccccaattgaatacttatgtcttgggattacctatggtcagcatgcttgtttatgtctggagccgagagaatccaaatgcccagataaatatatacggcatcctccaattgaaggcgttttatcttccatgggttatgctcttattagatgtgatatttggatcaccattaatgccaggccttctgggtatcatggttggacatctatactacttctttgcagtgttgcaccctcttgccaccgggaagagctacctcaagactcctaaatgggtacataagattgttgctcgattcaggataggcatgcaagcgaactcacccgtccgtccaccagccaatggcaacagcgggtctggtgtgtttagaggaagaagctataggctcaatcaatagattcacccacctcgtaatgtgatccatggtcggagtggcaatgtagaagcaaagaccagaacgcatagtagggtcaatcaaaattaagggttacccgtcagcgcttttcttaaaaancctggacggacggaatggagaacccttccatttgctcatttagttgctaacaatgttcatcgtccatgtttacacatgaatataattctgtaatgacaatttgtgtacacttatgctgacct

SEQ ID NO: 132512 - DNA, 889 bp, Zea mays
  Clone ID: MRT4577_52334C.1
ccggccggggcgtctctgctcttgtccggaaggttctcgcaggcgcggcgacctcggttttgaacacctgctcttcttcctcctccggccgggagcttcgtacgggacgaggagaaccgaagaaggaattggacgcgaggagactcgagtactcgacagggaaaagtcgaggcctcggatccatcgactcgtgaagatgtcctcgcccgccgagtactacaaatcacttccacctataagcaaggcatatgggacattgtgtttcttcaccactgtgctagttcggctccatatcctgaatccgctgtttctgtacttatattaccctcgggtgttcaagaagtttgaggtatggaggatatttacaagtttcttcttcctgggaccattttccataaactttggtattcgccttctgatgatagcaaggtatggtgtcatgttggaaaagggagcatttgataaacggactgcagatttcttgtggatgatgatatttggtgccatctcactattggtgttgtctgttattccccaattgaatacttatgtcttgggattacctatggtcagcatgcttgtttatgtctggagccgagagaatccaaatgcccagataaatatatacggcatcctccaattgaaggcgttttatcttccatgggttatgctcttattagatgtgatatttggatcaccattaatgccaggccttctgggtatcatggttggacatctatactactactttgcagtggtgcaccctctcgccaccggaaagaactacctcagactccgaaatgggtacataagattgttgctcgattcagaataggtatgcaagccaacgctcctgtccgcgcaccagctaacggcaacgctgggactg

SEQ ID NO: 132513 - DNA, 1409 bp, Zea mays
  Clone ID: MRT4577_52335C.1
aggaccggccgtaggccggccgggaaggttctcggcttctcgcaggcgcggcgaccggcttcaaccccaactcttcttcttcttcctcgcaaacttcgaacgggacgagaaggaagcggacgcgagaggagactaaccgacctcggatccatcgacgcgtgaagatgtcttcgcccgccgagtactacaaatcacttccacctataagcaaggcatatgggacattgtgtttctttaccaccgtgctagttcagctccagattttgcacccattatttctttacttagattaccccttggtgttcaagaagtttgagatatggaggctattgacaagtttctttttcctggcaccattttccatgaaatttggtattcgccttctgatgatgtaggttaaagttttgctgactactgattataaaatagtgacagttatgaactatctataattgtaaattagctttggttgtttggatttgctttatcgtgttttggcatgcagagcaaggtatggtgtcatgttggaaaagggtgcatttgataagcggactgcagatttcttatggatgatgatatttggtgccatctcactattggtgttgtctattattcccctattcaattcttttttcttaggaatacctatggtcagcatgctcctttatgtctggagccgagagaatccaaatgctcagataaatatatacggcctcgtccaattgaggtccttttatcttccatgggctatgctcttattggatgtgatatttgggtcatcattaatgcctggacttctgggtatcatggttggacatctctactacttctttgcagtgttgcaccctcttgccaccgggaagaactacctcaagactcctaaatgggtacataagattgttgctcgattcaggataggcatgcaagcaaactcacccgtccgtccaccagccaatggcaacagcgggtctggtgtgtttagaggaagaagctataggctcaatcaatagattcacccacctcgtaatgtgatccatggtcggagtggcaatgtagaagcaaagaccagaacgcatagtagggtcaatcaaaattaagggttacccgtcagagattttcttaaaaaacctggacggacggaatggagaaccctttcatttgctcatttagttgctaacaatgttcatcgtccatgtttacacatgaatataattctgtaatgacaatttgtgtacacttatgctggacttattgtcgcctctttttagctaggataagaacaaaagatgatgagtttgctcatgctggtgcatgctgaacagcagaaggctagatctcggggtattgtaacctggcccaaaaaatgacatcaacaggtttccgtacacaagatcggagtttgctgattg

SEQ ID NO: 132514 - DNA, 435 bp, Zea mays
  Clone ID: MRT4577_52336C.1
ggggccagcacgcgtccgaacacacgtccgctcacaccagcacgggttagaagcactctccaccgcccttagatcaaaaacaatgcccgagtcggttggtgcttactgaaattcaaaaaaacgaaaaactccgatggagctcaaaaacgaaaaattccgaccacaattttcctcgaggacataaccgcaaaaggacgaaaaatggaccaatcaggaagaagaaagaaaaaaggacatttcaggacatcaggacttctgggaacttcaaaaaatttagggaaattcaaattgagatttattaagatttcggtctcccctgcagaagaccattaataacgccttctgagggccccgcaccctcgaaaacgctttttgcctccgcccctacaagaaaattacctcccagacgtcatttattaaaagccagccggtgta

SEQ ID NO: 132515 - DNA, 166 bp, Zea mays
  Clone ID: MRT4577_52337C.1
ggtttgagagaccccagagaggctgccgtgtagggaccacctgagactgatctactgcgaaggagggataaggggatggtcgggatcggaccgaccaggcaggactgtgagtccgccggtgcgcggaagaaggcagccaccgtgggcgccaagcaagatgagaagg

SEQ ID NO: 132516 - DNA, 1277 bp, Zea mays
  Clone ID: MRT4577_52338C.1
ctcgaggccggccgggatgaccgatcgcctgcgccgtagcgcggacacctacgtgtcgagccgtcttcatccctccgaccggaaatcaacggtgcgtttgcttctctcctccggaaggttctcggcttctcgcaggcgcggcgaccggcttcaaccccaactcttcttcttcttcctcgcaaacttcgaacgggacgagaaggaagcggacgcgagaggagactaaccgacctcggatccatcgacgcgtgaagatgtcttcgcccgccgagtactacaaatcacttccacctataagcaaggcatatgggacattgtgtttctttaccaccgtgctagttcagctccagattttgcacccattatttctttacttagattaccccttggtgttcaagaagtttgagatatggaggctattgacaagtttctttttcctggcaccattttccatgaaatttggtattcgccttctgatgatagcaaggtatggtgtcatgttggaaaagggtgcatttgataagcggactgcagatttcttatggatgatgatatttggtgccatctcactattggtgttgtctattattcccctattcaattcttttttcttaggaatacctatggtcagcatgctcctttatgtctggagccgagagaatccaaatgctcagataaatatatacggcctcgtccaattgaggtccttttatcttccatgggctatgctcttattggatgtgatatttgggtcatcattaatgcctggacttctgggtatcatggttggacatctctactacttctttgcagtgttgcaccctcttgccaccgggaagagctacctcaagactcctaaatgggtacataagattgttgctcgattcaggataggcatgcaagcgaactcacccgtccgtccaccagccaatggcaacagcgggtctggtgtgtttagaggaagaagctataggctcaatcaatagattcacccacctcgtaatgtgatccatggtcggagtggcaatgtagaagcaaagaccagaacgcatagtagggtcaatcaaaattaagggttacccgtcagagattttcttaaaaaacctggacggacggaatggagaacccttccatttgctcatttagttgctaacaatgttcatcgtccatgtttacacatgaatataattctgtaatgacaatttgtgtacacttatgctggacgtattgtcgcctctttttagctaggataagaacaaaagatgatgagtttgctc

SEQ ID NO: 132517 - DNA, 127 bp, Zea mays
  Clone ID: MRT4577_52339C.1
attccaggtgctcacgcctggacgacgccgtacggggccagcattttccagtccaaggagtcgtcctcagtcctgagttgtgacatctccagaaatagcaaatacatcgtgacaggctcgggggaca

SEQ ID NO: 132518 - DNA, 111 bp, Zea mays
  Clone ID: MRT4577_5233C.1
ctcgaggccggacggggcgggattttctcccatcccttcacgcatggagggaacaccccgcacgcccagctccagaacgaaacctactctctcgtggtgtctccgcatcct

SEQ ID NO: 132519 - DNA, 400 bp, Zea mays
  unsure (1)..(400): unsure at all n locations
  Clone ID: MRT4577_52340C.1
ccactactcanagtgttatgagaatgtttgggtcaatttggaatgagtggtatncaggaaaacaaatgtggcaataaggcatcctcatatctgaggagaaatgttgcgtggtgcgtgcatgaaatatatcacgcaagatcgcttggtggttcataacgaaaggttaagcgccaagattcacattttctcccataataacatcatctgcctgcatcgaagagtgaatcttcacgtgtgggtgcatgataacttcatgtggatttaaacatttctatttgtcgctgcataataaaacatgataggaatgtgtgtacacatgtgtagtgataagcatgacatgatttccgggatccaaagatctttgaggtgaatatgtcaccgaagacaataatttatcgat

SEQ ID NO: 132520 - DNA, 1073 bp, Zea mays
  Clone ID: MRT4577_52341C.1
ctggcctctgcgggtctcccccgccgcccccgtcggcccggccaagacattctgaagggaaaaattggcgcaacttgcaagacgaccacaagacgacgccctgcgccgtgacaaaactttgcagcttataagtaggcgcatgcccaagaccaccaccacctcaagcagcaaaaccccacacagcgagcgagcgaagtagacagacgctggctgagatacacacacacacacacatcaactgaaaacgaggagtttttgttcatcatgggggtacagagcagcgagggccagatgatgttctcctccatcgccctgctgcagcagaggttcagggagctggagaggatcagggagaagcgggaggagaggctactccacgtgctcgccccgcgccctgtggccaccacctccccgagggagatgcccgtgaagtggttcttccatccggagctgctctacccgtgcaggccactgcgggacaccgctgccgcctccttattcccggcctgtgaatgcaaaagcttccagctccacggcgataacgaccccatcacggtggagctgtggcccagtaagacttacaactacaaacatgtctctggtgaagtcgacgtcgacacctcgctgcacctctagactgctactgctactaaaaaaatgttccaatgccctataaacttctgttaaccacttggtgttgctctcgcagtttttttttggtagcctactactatgttctcttcttctgttgtaacaaggggtattaggaggggtgacggtgtgctgtaattattaccagtagtacgatggtcttgcagttcctttcttgtcatcttttggcactagaactgcttgcatcttccaacaaggcactgttatcatccgagtatgagagtaactctgcagggcaaccattctctgttacgtctggacactcgtcatcattggaggaatcatcagagcctttcttcttccgcttgatgatcttcttggaaatgaggcggttcacacccttgttgtcgacatcaacacattcactgcttattggcttctcgtgcgaacccgagggtacc

SEQ ID NO: 132521 - DNA, 857 bp, Zea mays
  unsure (1)..(857): unsure at all n locations
  Clone ID: MRT4577_52342C.1
gctgccacgtgggggtcactcatcacctcctgaaaaatcggacagatgaagtacgatggaggcggatcgtcttctgacgacgacgcaaatcttgatgccccggcggtcaagcaagcggctttcatcagttgctcgacctcctcccacacctccccggcgagatctggctggcgccccgagcccagggtgacgcacctaagcccaaaagatgcgccatctggctggcctgcacgagaggccactcccccgcggaggcgtcgatgatcgagtgcaagttccctttctccatcgcttcctccaccatctcaccgatcccttgctgcgatcgccctgtcagtaggcgaaggatggtgacgccgaacgagttcacgtcggaccacagcatgagctccgctgccgacttgaatccaccgccctgctccgtgtagcggagtgttcccttattacggtctgctgctgaagggtggcttcgcaggctggtggccgttatgtcgtcttcaccaccacctagaagaaggcagcagatgcccaagcctcccagcttgctggcgaaattggcgtcgaggaggatgtttcccaggttcagatcgccatgaacgatcggataaggcttgtgtgagtggatgaaggccaaggctgagcatatctccccgacgatccttgtgcgcgccttccatgtcagaggcggcatgcttttcttgcacgagagccaatcctcgagactgccgttgggaggccaattccggccggccgcgaagtcgtcgggacatacntcctacagcgtgacnatggtangatgcctcaccctactgnagacagcaaccctgcagagcgagtgaagtagtgatgtcactgct

SEQ ID NO: 132522 - DNA, 474 bp, Zea mays
  Clone ID: MRT4577_52343C.1
aaaacccggtgcgcgagcgcagactgggctatcgtattgagcttaatcttggaggatactatcaaacgatactagctatcgctataggtcgctcaggtacaaggcatcacatgaactatacatgcacacacgcatgcatcatgcatgcatctataaaacttaattacacacacgcacactatctgtagatcgagaggaatagagattgctagctctattccggtacgatgatgatatagacgcacacatatatatatacatagatccttgggtctacaatacgtagacagtaatctgtatatatgcttcgcgaaccggtaatggttggatcttattgtacttcaccgccgtcggcaacataccggataacgaccagtcgccgacgcccacgccatgatcagaacaagaacgccggacgcactaacgctgacaggggacgacgcctcataaacgtgtcagtactgcttgccgaac

SEQ ID NO: 132523 - DNA, 674 bp, Zea mays
  Clone ID: MRT4577_52344C.1
cattgggtacctcgaggccggccggggaatcgttgtcctcaatttctgcacgtccagggacggaagacatcgagcatcaacgagatgagaacatgcgtcctacgaagccgaccgccggagagttcagcggaggctgggccccgcgaccgaagctcgtcaccgaggcgccgaggaaggaagcgccgactaccgacgctgaagagaagccccacctgcacaggccaggtacggtggctgtgctcgaaatccacaagtaccatagcaaaaccgaactggtgatccgataggtgcccttccaggaactcgggcagagaatcgctcatgacttcaagacggatgtgaggttccagagccacgccgtcctggccctccaagaatccaccgaggcctacctcgactgtctgttcaatgacaccaacctctgtgccatccacggtgagcgcgtcaccatcctgcccaaatgacatccacctcgccttgcacgatccgaagataacgagtgcatgagtatctcacgcccggccccatggcaagaacatggatggatggagagcaatttgtaactttatgctgatagttcgatgttaaacggcgcgggaagacgcatcgaaaaacggctatactcgtgtattatgtgcaggagaacttgtatgccgcttcgtcccgaagcgaac

SEQ ID NO: 132524 - DNA, 271 bp, Zea mays
  Clone ID: MRT4577_52345C.1
ttgttttcctttgatccaccaactatttcggggcgtttttaaaaggcaaaggtggccaaccaactacaatacaaattagaaatatacccagttccaccaacttgttcatccattccagataattgacatcacaatgtttcacatacgttcactaggccatgccaatgcattaataccatcacatgattgcgtaataatatgctcctgtttgatagtgacacggagaagtatagcaccctttgaagacattctttcgagcatcttcacgaat

SEQ ID NO: 132525 - DNA, 222 bp, Zea mays
  Clone ID: MRT4577_52346C.1
ctgctcaggccagacaataagcactaggccctctgagacaccggggccactaactgcgccaaccggtgcagtgggcccgaatactacaacaaagcaaaacccaaccctgacttgatacctggatccagctaccagcccaatctcatgacatatccagggacacagaccaacctgatgaaagctcccgcacggtgattgcccacctggcaagcccatgacacg

SEQ ID NO: 132526 - DNA, 174 bp, Zea mays
  Clone ID: MRT4577_52347C.1
ctgggaatgtttgctgtgaacttgacctcccttggagggcatggtgctagataaacttggaacctaggactccaggttgctaggcagatgccctgacactaagccacatcacacattagctctgtgatgcctctttcttgatgaaggaccaagctgcccacatactaagtgaga

SEQ ID NO: 132527 - DNA, 370 bp, Zea mays
  Clone ID: MRT4577_52348C.1
gggtacctcgaggccggccgggccggggcatccaggaaaagaaagggcatatcgaggaggtttttagggcggtggtggtgttgtgaggagctgctgccgctgctctccaggctccaccgatggagatcaagaacatgacgctgcaagtaactcttcgaggagggtgtgctgtatgccaagaaggactacaacctggcgaagcacccgcagatcgatgcgcccaacctccaggagatcgagctcatgcagagcctcaagacccaggagaacgccacggagaccttctcctggcagtattactactgttatttcatcaacgctggcactgagcacccacccaaccacttgagcctgccgaatgatatcgtgc

SEQ ID NO: 132528 - DNA, 253 bp, Zea mays
  Clone ID: MRT4577_52349C.1
cgatcgggagattataatcacccctgattagggagtagattaaatttgtctcatagccaaatgagaagccctatagtaaaaactgcgaccggcgatgtttttatcaaagcgatgcgtgattgctgtgaccaatctagccaatcgatgaataagagccggctatgtttaacgggcactgaacgaatcacaaatgccccaccaccatcgatgatacaaacaacacaaactccgctgtgtattcttcgcgcacaaa

SEQ ID NO: 132529 - DNA, 603 bp, Zea mays
  Clone ID: MRT4577_52350C.1
attgggtccctcgaggccggccccggccggcgtcacggatcgggttccggaccaggtcggaggtggacgtgctggacgacggcttcaagtggcgcaagtacggcaagaaggcggtcaagagcagccccaacccgaggaactactaccggtgctcggcggagggctgcggcgtgaagaagcgcgtggagcgggacagcgacgacccgcgctacgtcgtcaccacctacgacggcgtccacaaccacgccgcgccgggcgacgcctacctctgcccgccgcctccgtcgcgcggcgcagcgcactactcgcctccggtggcagcgcccagctggagcgccgctcttgacgcgtgggaggcgcagctgcaccggcacgccgcggcggcggctcactcgtcggagtcgtcctactgatctatcatcagctacacgcacgtacacggaacatgtagctagctagactgttcgccaacgtggagatcgagacgatcgagccacgtttttcggggtctgcatagtttgtactgtactgccgttacagttagacatacatacacacacaccgagactgtttctgattaaaaaaaaaaaaaaaaaagcggcc

SEQ ID NO: 132530 - DNA, 620 bp, Zea mays
  Clone ID: MRT4577_52351C.1
ccggccgggccgggattcttgctagtgctaccaagaacaggaaggaaacaccgccgccggcgcggcgtccattccaacactctatcactgccatgtcgaggcggccactgcgtttacgagaacgacggccgagacctgcatgtgcaatcaacggcgtgcgataactgcgtgctcccaggcgttaaggcggggcctctctaacgagaacccgttccttgcatgcgtgggctactttgatcgtgggtgacgctcctctactttatctctgccatcttctggatctccgggctctattactgcaacagcctgggctacatcccctaggatggcgttgccacaaatgccgctatggataagtatatctctgcagcatcgaaggctatgcctttttactcatctgttccaatttatttgactctatgatatcaatgggatggactcgacgctactttaatatcagaccaactgggttgtctatgtacctctcctatatggttatgcatcgcatctttgtgaagcttcgaatttactgtatcggcaggaaattgcgtgacataacaccattatactaatctctgcatggaacgcaccatatctagtttaacgagaataccttgcct

SEQ ID NO: 132531 - DNA, 188 bp, Zea mays
  Clone ID: MRT4577_52352C.1
ttccaacgacgcggcctgtgagatacccgaagccgaagtccggttcttaggctatttggcaagagggttgtggttagtaatttagaccagcagccaagctccaatactgggagcctacaacacgcggcggacatggaactggatgatgcttcagccgagacaccaaccagtggagctgggaagctgtc

SEQ ID NO: 132532 - DNA, 365 bp, Zea mays
  unsure (1)..(365): unsure at all n locations
  Clone ID: MRT4577_52353C.1
agggctgctaccacgatcacctggcgcccgcgcgccatggatggcgccgttgagctgctcccgaccccggcgcggcggcgctgcacgggataaacccctacggcttcgcccctaaccctttcttcaataacttcctcccccagaactccgctgccctagctgcctaccaactgcagcagcagcaggctcatcacttcgactcccatgcctaccaccaaagcccctaccggtaacaccatgcaccgctctaccaaacccgncgacgctgtcaaacctgcgccgacaccgggcaaccagcaagccgtgctggaccgggctcaaaaggccgcgagggacgctctggaagagctcgtgaaaggtgggga

SEQ ID NO: 132533 - DNA, 839 bp, Zea mays
  Clone ID: MRT4577_52354C.1
ggtgagcagaaaaagaagaggatcaagtctgatacagattctgcacgattttctgctgcatctaggaggaatcaacttgaccaagctgcaagccttaaaggagagcagattggtaatcaggggactctgcaattcctcgaggctgggacagctcttcatttccttgggaaccccggcacactttgcctccatcaatgcatctttaccggggattgtgtgtgcagccaacgggtctggcaactggttgctgctagggtaaaatcagatgacggtaaagatgagtggtttgtcgtgattgttatgcatttcgataaagacaaaagagttggtgcggacctgctctacaaggtgctaatccctaaagaagggcttcaaattgctggtgatcttaaaggcttggtctatttggaagcatcgtacaaaggaagtctgatgattatattctggagttcgatgacgataaggaggacggtgctctgccgcaaagagccgtgccgttctacagggtggttgccctgccggagggccacaggcagtagtgacatttgacgcagttgtgcattcctagtgtaacatatagcgcaaggtggtggtcatatctacgcgaaacgagagagaaaacaaggacgtgcatgtagcacttacatgtggggtccttgtataaaagacgatgatgttttttttttcaatctgctagagcacgtctatgtaattgcaatccagttttaatctcttatattatactttagagagaaagggcatactgtaagggtctatttggcaacaatatatctcaaaattatagttttataatactaaaaatatcgtagtttttgtcc

SEQ ID NO: 132534 - DNA, 752 bp, Zea mays
  Clone ID: MRT4577_52355C.1
gctcagcggcggcggattcccaacccctccccccaaactcgacccccaaaaccagcgcgcgaaaccgagacagccgcccgccgctcgccccggcctgcgcagtcctcaccatttcccttcgtcgcggcggcatccgaggaggagagatggcgccgctcgtgccgtcgtcacaaccatgggtggagaaataccggccgaggcaggtgaaggacgtcgcgcaccaggaggaggtggtccgggtgctcaccaacaccctcgagaccgccgacttgccgcacatgctgttctacggtccgcctggcacggggaagaccaccactgcgctcgccattgcctatcagctctacggtccagagctctacaagtcaagagttttggagcttaatgccagtgatgaacggggaattaatgtggtgaggacaaagatcaaggattttgctgctgtggctgttggttctgcacggaaaggtggttatccctgcccaccatacaagattattatactagacgaagcagattcgatgacagaagatgcccagaatgcattgaggcgtaccatggagacttactccaaagtgacaagattctttttcatatgcaattatatcagcaggataatagagccacttgcatcaagatgtgcaaagtttaggttcaagcctctttcagaagatgtgatgagcaaccgcattttgcatatatgcaatgaagaagggctcactctggatgctcaggcgctatctacattaagt

SEQ ID NO: 132535 - DNA, 337 bp, Zea mays
  unsure (1)..(337): unsure at all n locations
  Clone ID: MRT4577_52356C.1
ctgcagagcccncgccgacagggnaaagccgngtttcaagaaggggaannccgcggggagagccgggaacggnacagaagaggcacagacggngnncacccccncnnnggaagcgaggaagcangncaaggcagagaacggagncanncncaccaagcccnnccnngangncngcaagcaaananngccngnccncganaaannnggagggggggggggaanngnaaagagnganancggnggnaanancacaagacgggaaaacaagnanaccgcagaaccaacaaagaaagaacacnggnacagcanggcgcaggaagaaggagaaaacaagacc

SEQ ID NO: 132536 - DNA, 1629 bp, Zea mays
  Clone ID: MRT4577_52357C.1
gctgtcgcaggacgcacgagcacgcgtccaccaagcccccgacttcccgaggccccgacctgcgcacccacgggatccctacctatccggccgtcacccctccccctgcccctcccgagttggattgttcgcggaattggcggaggggcagccggatatgtcgtcgtcggttgggggcggcagcgcgggcggcggcggagtggacatggtcagcctgctggagaaggccaaggatttggaccagctaaagaaggaacaggacgaaatcgttgccgatatcaacaagattcacaagaagctcctcgcatccccagagatggttgataaaccagttgacaccattttgctcaagcttcgtggtttatatgcacgtgcaaaggagctctctgagaatgaaatcagtgcctcaaatgctttgattggattattagatggtttgttgcaatctggagcttcaactgcacaaaagaaaaagatagttgctttctacatttcagaagttggtgagcagaaaaagaagaggatcaagtctgatacagattctgcacgattttctgctgcatctatgaggaatcaacttgaccaagctgcaagccttaaaggagagcaggttgctgctagggtaaaatcagatgacgaaaaagacgagtggtttgtcgtgaaggtcatacatttcgataaggagacaaaagagtatgaagtacttgacgaagaaccaggtgatgacgaagagagcactcaaaagaagtacaagttgcctatgtcttacattattccatttccgaagaaaggggatccttcgagtgccccagattttgggcagggtcgacaagttttagctgtttatcctggcacaacagcattatacagagctaccgtagcttctcatcgtaagaggaagtctgatgattatattctggagttcgatgacgatgaggaggacggtgctctgccgcagagagccgtgccgttctacagggtggttgccctgccggagggccacaggcagtagtgacatttgacgcagttctgcattcctagtgtaacatatagcgcaaggtagggtgtcttcagtgtgacaatgtggtggtcatatctacgcgaaacgagagagaaaacaaggacgtgcatgtagcacttacatgtggggtccttgtataaaagacgatgatgttttttttttcaatctgctagagcacgtctatgtaattgcaatccagttttaatctcttatattatactttagagagaaagggcatactgtaagggtctatttggcaacaatatttctcaaaattatagttttataatactaaaaatatcgtagtttttgtccctccaaaaaaaaaaaattttgagaaatattgttttataatactcccgccgagggccgtgccgtcctgctgggtgctcgccctgccggcgggccacaggcagggctgactgttggcgccgttctgccttccttgtgtctcatattccgcgtggtagggtgtcttcagtgtgacaatgtggtggtcatatctacgcgaaacgagagagaaaacaaggacgtgcatgtagcacttacatgtggggtccttgtataaaagacgatgatgctttttttttcaatctgctagagcacgt

SEQ ID NO: 132537 - DNA, 274 bp, Zea mays
  Clone ID: MRT4577_52358C.1
gtgaatggtgagaggctgggcacctacatgggccataccggagctgtgtggtgtgtggacgctgactgggacaccaagcatgtcctcactggctcagctgacaacagctgtcgtctctgggactgtgaaacaggaaagcagctgcccttctcaagaccaattcggctgtccggacctgcggttttgactttgggggcaacatcatcatgttctccacggacaagcagatgggctaccagtgctttgtgagcttttttgacctgcgggatccgag

SEQ ID NO: 132538 - DNA, 125 bp, Zea mays
  Clone ID: MRT4577_52359C.1
gccccatgcctgcttgcctcgatgcatgatcgaaatggctatcacaattgcagggcctttggccagttttattggccccacgggcatgccggacagggacttcctttgcatgaagagagcaggcg

SEQ ID NO: 132539 - DNA, 125 bp, Zea mays
  Clone ID: MRT4577_52360C.1
gccggccatgttcgatgtgtcgggatgggcagatttcagctgctctgatttgagctgggaggtgatcatcacttgggctggtgggtttctgttacctggctatgtgacccttgataagtcactta

SEQ ID NO: 132540 - DNA, 390 bp, Zea mays
  Clone ID: MRT4577_52361C.1
cgggaaaggaaactttttatttggggggggccccaaacatcatccaaaaaactttattatggaattacaactaaaaagcaatctaaaagagggcccccccaatgatgggttgtgggaaggaggcccctgggtctgtcaaagcaagggggacaaagggcaacaattgttgtagttgaaaaagggggggggggttagccccaaactgctggaaaaaaggcaacaactgttgctgggtaaaaaaggaagcacggtttgctgcaactagctggctaaaggggagaagaatttgctgctgcaaataggcaggggggttcagggcggccaattggttaaagggaaaaagttgttgcccctgaaagtaggcaaaacctacctggctaaagggaaaaa

SEQ ID NO: 132541 - DNA, 244 bp, Zea mays
  unsure (1)..(244): unsure at all n locations
  Clone ID: MRT4577_52362C.1
cgggcgtgtcaagctcgcgactcggnaagcgccaccgctcccctgtccgactccgtccagggggtgcctgcctaccacataaatcagagtgaccatccagcacattcccatgacgggccacgccagcctgctgctgctgctgctgccggcgctcgccgacgaactgctctgctgtcccctcgcgcactgcgctcagtataactacaccttcatgttcaggggcggtgacttgtttaccgactcc

SEQ ID NO: 132542 - DNA, 391 bp, Zea mays
  unsure (1)..(391): unsure at all n locations
  Clone ID: MRT4577_52363C.1
cgggaaaggaaacttctaatttggggggggccacaaacataatccaaaaaactttatgggggggggggaacaaaaaagcaatcaaaaagagggccccaccaaagatgggttgggggaaggaggcccctgggtctgtaaaagcaagggggacaaagggcaacaattggtgaagttgaaaaagggggggggggttagccccaaaccgggggaaaaaaggcaacaactggggctgggtaaaaaaggaagcacggtttgctgcagctagctggctaaaggggagaagaatttgcggcggcaaataggcaggggggttcagggcggccaattggttaaaaggaaaaagttgttgtccctgaaagaaggcacnacctagccggctaaaggggaaaag

SEQ ID NO: 132543 - DNA, 358 bp, Zea mays
  unsure (1)..(358): unsure at all n locations
  Clone ID: MRT4577_52364C.1
tccgatcagtcggcatggagcctctgtggcagtcgtgccgcaccgtggtggtaccctaagctcgcttctgctagtcctacgncatggctgatcaccatccggggtggcgactgggaggtgtgcgggggctaccggcgatccttcagctgcgggggccggcatgcacggctatggcgcagctagcagcatgaagcagggctccatgtatgacgttcgctcaagggccgcgacgagccgcgaccttcggcgggtcgatgctggtgctgtccgggctgatcctggccggcaccgtgatcgcgctcacggtggccacccccgtgctggtgatcttcagcccggcgctgatgccggttggtct

SEQ ID NO: 132544 - DNA, 176 bp, Zea mays
  Clone ID: MRT4577_52365C.1
gtcgttacacgcttggatgggttggatggtagtaactaaactatgaggccagccttattctggtggtctgtaaaaggaacacttatgcttgaactcggtgttgctttttgcctggctactgtcgtcaagtggaccgtcttaccttgcggaaaaaaaaaatacattatactttttta

SEQ ID NO: 132545 - DNA, 237 bp, Zea mays
  Clone ID: MRT4577_52366C.1
gttttgcaatttactaacattgagggggatggctcaacctagacctatccatttgggcgtcatatcagagacgctacggactacaaaggtcgcggtcccttctgccgcactagatctagctcatccaggactggcccctaggcactactgattctatgctcgagggcgacctccttaccctgactggcgaacaatgcctgaataacactaatacgccacaatgcccttttgacttcc

SEQ ID NO: 132546 - DNA, 481 bp, Zea mays
  Clone ID: MRT4577_52367C.1
gctcaaaataagagtgcatgcagggctgttgtagttaacaaaaggacattgtcaatcttggagctcaattatgttacatatttgaagtccgtccattcatttttccctataccttttagaaacaaataggtcactatatgcttgcttatattcaactaaccttaagatgtttttgtctgttttctgtagtcatggacgcgagggtcactttctactagttatagtgtctgctcttacgaaaatagtaaatgcatggctgactaattttactggtttgcactttgtagtaaaaggggaagagaatgaaagctgctaaacgtattattttggtcaatggcaaagtctacgtgtctcacttttagctccgcaactgcaaacctgcttatttggtaattgatatttcactgacctccttaactggcatttctggtactagtcaccaaatgccttgtgtactctgactggcaaaacttacaggtca

SEQ ID NO: 132547 - DNA, 1780 bp, Zea mays
  Clone ID: MRT4577_52368C.1
ccgggttcttcgccaatccaactcccgtcttccttcttcctcttccttgttcgaatccaagtaacctacccaaaccgccaaccccccaccccaaggaaggaaccctacccgtgagaaccgccgccgcacaaccccggacgtggtggcaggcgaccgatccggatccatcatcccaagcttcctttctgtctcctcttcatccatctccacaagtaagatgcaatttctcccttttcttcctgtcgggcggagatagtagtatattcttcgaggaaacctaggtgattgcaatgtcgttttgatgatgatgattcccgaccattttatctccacaaggataatcaaggaaggaaggccatggttttgttcgaacttgacccggacatcatccgatggggtcttcaccatctcctccccgctccggctggatactctcctcattgtcgcacccaaaccacccctaccacaccttgtacagcttttgctcgccctcctcatcagcccatcggagacatgggtacctcaagctccgttgagatcaaggtcgagcatgtcgatggggttgacaacgacgcgatcatcgcacaagccctccaggaggaattgtccaatgtcgccttcgccgaagcgtccgggccaacctctgccgctgacaatcaacaacattctgctgttctcacgcagcaatggcttcgcccacgcgccgtccatgtagaaccagcttctcaagaggcagggaccagggaggaacctttcagcacctgctcaagccctggagatgacaataacgtccaggacagccagcaatgcttgatagagctcatggataacttctctgtcattgacggtgaagtgggcaaaagattgaacaacatggttcctgttcctcatgttcctaaaactaatggagagattccttctgttgacgaagccatttcagatcatcaaagacttcttgacaggttggtggtgtacggtttggttgatctcaaggttaaaggagatggcaactgccagtttcgagcgctgtcagatcaattttaccgaactcctgaacatcacagatttgtccggcagcaagtggtgaagcagcttgaatcgcatcctgagatttatgcaggatatgtccctatggactacagggaatatctcaaaaagatgtcaaagagtggagaatggggtgaccacgttacattgcaggctgctgcagactcgtacggtgtaaagatcttcatcctgacatcattcagagatacatgttatattgagattcttcctgttgttgagaaatccagaagagttatatgcttgagtttttgggctgaggtgcactacaactccatatatcctgaaggagagttgccggttttggagtttgacaacaaaaggaaaaggtggtggcccttctagctaggattcccaggacagactagatagagcagctttaacagactgaggcctttctgttgggctgtgacactgactgatgacgaaaacgagcccatgggtggtggacggaactgcattggccttgccctccttgcccacacgatagacatgtacagtgcgtagtagatggtactatttgcctacttggtaacccattctcagatatatcttttatctctattactataataaagctccaacatgtaatgggctaacggacgatacaatcggtctgaatgggccgatacaattggtttgagtgcgtagtagatggtactatttgcctacttggtaacccattctcagatatatcttttttcaaaaaaaaaaa

SEQ ID NO: 132548 - DNA, 291 bp, Zea mays
  Clone ID: MRT4577_52369C.1
accaaaaattctatcaatatcccatctacattttaatttatgtccttttaaaatatcatcatccacctactcctcacactctcaacctccatactactctacaacctcccttctcccacccccaacacctacaccttctacattcttttactaaaccatccaaaacaactacttccctaactaccactcttactataccatccttaccttcatcatctaacctctcctactcataccatatctcaaaattatatacttcctttatctcacatacatacctttctacttact

SEQ ID NO: 132549 - DNA, 327 bp, Zea mays
  Clone ID: MRT4577_5236C.1
caaacaaattagggggacacatacctctcaaaaaaacaaaccaaaacagaccccgcaaaaaacgtttgcccaaccgaccgctaaaaaaccctgaaaaccatttcgggctaggacaacctacaaaaaaacgggggccatatactcaaactacaaggcagaccctaatagtccagactgaccaaggggggaacttggctaaatcaaaaccaggtaagccacttccacaagaaacaaccttgggccatgaacgtgaccccagggaatttaaagctccttattacacggagctgcccaaaagtgagaaagaacttggcaggaccgtcccta

SEQ ID NO: 132550 - DNA, 188 bp, Zea mays
  Clone ID: MRT4577_52370C.1
cccacgcgttcgctcacgctttcgatcgcaaacatcccggccaagatgcaataggggcagggggagggtatcagagaaagcagaggacaacttatggcagccacataccatatggccagtatcctcgtcaagaaagatgctgaggcttacctcttttggtccaagcctcatagatgggaagtcaactg

SEQ ID NO: 132551 - DNA, 500 bp, Zea mays
  unsure (1)..(500): unsure at all n locations
  Clone ID: MRT4577_52371C.1
gtgtgtgggtggtgtttttttttttttttttttgttgttttttttttttttttttttttttttttttttttttttttttattttctcacccctgtttttttaatgggtaccaaaatgcttttttttttattttcaaaatataaaaaatgggggggggggggggtttcaccccttttctaaaaattttcccttctaatctaaagggggggcctggccttttcttcattcaagggttgggtaaaagttttataacccaaatgccggacgggtgattttttttgctgctcgttacactccacaaaaggcctttagtttattttgatggaaaacgcctttttttgaaacccaaaaacaaacaaaatcttttttttcatggggcttaaaacggggagggtgttnntcgtccaaaaacttttttgccaccttaaccttgaaactggggacccaaaacaacattccgggatttttggggacctccccaacgacgggaatccggtgaa

SEQ ID NO: 132552 - DNA, 236 bp, Zea mays
  unsure (1)..(236): unsure at all n locations
  Clone ID: MRT4577_52372C.1
caaacattggacgggaacaaaaaccgggctgattcttgtttcgnctcgtttcatagcgggagcaaacaaagggaacaacaggggtaccaacacctaatccaaaggttgaacggtcactaacacggggacagaagcgaacggttacacgattctatagatagattagatatctccgacccaggccttattggcccccacattaaccgctcccaagggggagggggccctccttttgg

SEQ ID NO: 132553 - DNA, 220 bp, Zea mays
  Clone ID: MRT4577_52374C.1
acttatctggatggggtcgattgctgatcagaaagggaatggcctaggctagtggcctccattgcactctagaggaatgttggcttaccatctcctcatgagagtagacattataatttgtgttatagtgtatttattataaaatattttgttggtatcaccgttatttgtaccttgtgtaattttcattatatatatcttgaactagattggcgtgagc

SEQ ID NO: 132554 - DNA, 378 bp, Zea mays
  Clone ID: MRT4577_52375C.1
acgacgcgtgcgattttctctcgctaagcctatggctcgaaagggccgacgggtacaaggcgcactttgacggtggtgcagcctcgatacacaatcaatatcaggatcactacaattgctattgctgcagctccaaaacatttgcatcagcatgctgtcactggacccaataacgctggtgatctttcatgtcttctggagcctgatggccaaggtgataaagttagcaccgatcgtcgtacagctgggacagatgaccagcaccttaccattcaagctactaaagccaacgctgctgatgatccacctggagcatcttttcaaaatctgcgtactcaagctcgtgatcgcattaccattcacgaccatcaccaggac

SEQ ID NO: 132555 - DNA, 407 bp, Zea mays
  Clone ID: MRT4577_52376C.1
ctctatttgtttataggaaaaattgagtctgtatatgcatagtcagatgctgccataacatcaggtgtgtaagcatctgactatgcatactcagactctattggttgcttggaaaaattggatatggaactgcaagtgaggctttggcctgcaagctaccattagtgtttgttcgcagagattcactcctacgaagagccatttttgcgaaatttgcttgagcacgaccaaaacagcattgagatggtcagaagtgatccccttgctggacactggaaaccgtaccatattcgtgctctcacacttcaaccatgctacaatggcccaataaatggtggtgaggtggtttcccagattctacaggacactgctattcggaacaaatgtatttctgataaagctagtgg

SEQ ID NO: 132556 - DNA, 706 bp, Zea mays
  Clone ID: MRT4577_52377C.1
gaggttgccccacgcgtccgggaaaaacaatggcaaaaggcagtaaatttgtacactgaaggcataaggttaaatggaaaagtggctacatactacagcaacagagctgctgcctttctagaactaactagctaccgtcaggctgaggcagattgcacaagtgccatcgaacttgattccaagagcgtgaaagcttatttacggagaggcactgcaagggagatgctaggttattataaggaggccgttgatgatttcaaccacgcccttgttctagaaccaatgaacaagacggctggtgttgccatcaacaggttaaagaagctgtttccttgaatatgaagctgcatgaagatatgataacctcatattttgtgcacacacaagttgtgcgtgtcagtggggtgggattgaagtacctgagttcaaccgacggatgctgatcacagttttgagctagtgggaacggatttcaacactgagatcaggttaagggtcaatttagcggtttctctccccacccaaagttttggaaaagcaaaataaagaaggttttttgggaaccggaaagcagtttacgggtgtccgccatccccaccatgtatattatggtttcgccaattatttgttcagacgctttgccaatcgaacataaactgccaaaaaaaaaaaaaaaaaaaagaaaaaaaaaaaaaaaaaagcggcc

SEQ ID NO: 132557 - DNA, 337 bp, Zea mays
  Clone ID: MRT4577_52378C.1
ttattattttttcttttctattattttatcttgggggttttttaaaattttttcgcggtttttctcccaacaagcaaaagattgaacctaaacggttcatggggccacacggcacaggtacacaaccccacacacattccctgaattggaaatgcaattaaaaataaaaaaccctgaatcttcaaaaagagcacatgctgggactgaaaaagggatttattaaccgggggtgaaaatgcttttgggtagcttgggccccccaaaaaattgtttggccaaatcaacttgccactgggcatttggggccccaccgggtaaagactttttcccccctggg

SEQ ID NO: 132558 - DNA, 186 bp, Zea mays
  Clone ID: MRT4577_52379C.1
gcaggacctattcgccaccagtccttcatcatgtccgacggctaccgcattcttgacgacatagatgctttctaatacaccgtcggcagccgcatctacagccgcgccaaggcccttgatgtcaccgcgcccggcagcggcccgcttgccggcggggaacgtcccaacggcggcaacagcggttgt

SEQ ID NO: 132559 - DNA, 1160 bp, Zea mays
  Clone ID: MRT4577_52380C.1
ctctccttttcatcgcctcgcctcgccgccagcgcaactccagccctggccgggatctctttcacccccccctctctctccgccgcttcgctcccccgtctcggggcctgcctcggatgctcccggcctcgcatccgctgctctacgcctgcgtcttccgcgacacccacctcgtcgccgagctcgaccacgcccactcccactcccagagcaccgccacctccgccgaccccgtcgcttccgacgccccctcccccgcccctgacgacgacctcccggcgctcgccgctgcgctcgtcgccgccgctccgccgcaccaccgccacctcacacacacagccgccgggcgtgcgcacgcgctgctcctgtccccgccgctcgcactcgccgccgtctcgcgggcgccccacctcccggcatcgcagctcctgctcttcctccgccgcctgcgatgcctccccgaggcccggatgcgggacgagatgccgcgcctagcgctgcgcttgccactcccgccgggcgacgacgcgcgcgaggcgaacgaggtcgccgccgcggaggcccacgcggaggaggaggccgcgcggagggacgctgacctagccgcgcggaccacgcccaagagggaccgagcctcgcaccgggggcgggccggacccagctggacgtggaggcggcagctctggatggtcatccttgcggatctcctcctcctcacaatcctcttcgccgcctggctcgcagtctgccggggattcagctgcattggtcggtaaatagctacacaacctccaaggctgctgctcaatttttaagcaagaaatctggagtgcagtttgtttctcagacgaaaaagtgggtcataccaaccataactcggttgtaaggtgccaatattcgcaaggaaaggtgctttgccccccgcgcgcgcatactgttacgtctttattgtatgaatcgtatttaaaagtgaatgccaacagtcctggtagactacataagtttgaatttgatggtttttgtatggtgatctgtaaacccggtagtgcaatttttttgttcattttcctatagaaagcaaatgtcaaaattttgaccatggcagactcgggtatatgtgaatcttattgtcatgtaatatttgcctatttgccaggcat

SEQ ID NO: 132560 - DNA, 576 bp, Zea mays
  unsure (1)..(576): unsure at all n locations
  Clone ID: MRT4577_52381C.1
cctcgaggccggccgggcaactccctatccttcctccttttgctttcccacatctattgctccaataatcgatggcgtggcggtgggtttggacatgaacctgccgctgcggctgcgctgcatcccccaccctcgccgctccctcgttcaaatccaccagccgctggctttcctctcctctcctctccgtcatcccggtcgggtcgccaggcggcaccctccctttcctcttttctgctacagcatgagccttgcggagcacaaagatggatctgcttcccttcccctcccccgatcccttttccgtggtgtggatcgggaggacttcgggattctacccatctgcctccctggacacatctcgctccttgattgggggaaagccggttgtcggtgccgatactgataaccgggaacccgatttcgtgataagactggacgactggagcgtgccaaccacgagcttttcctgtgtcgctttgctttctcggctcacttactgactgctctgataggaacaccaacangtagtgtgtgcttgcgccgggttttcatggcgtgtttcgaagtcgatat

SEQ ID NO: 132561 - DNA, 488 bp, Zea mays
  Clone ID: MRT4577_52382C.1
tgacacgaaaaaaaacgaatccttttgtagctcgtcctttattctcaaaaatcgaagaggtcactctgaaagaagagaaagaaataatagtaacgtggtcccgggcctctagcattctacccgcaatggttggccatacaatcgcgattcataatggaaaagaacctatacctatttacataacaaatcccatggtaagtctcttattgggggaattcgtgcctactcggcatttcacgagttataaaagtacaagaaaggatactaaatctcgtcgttaattgaatccagaatagaaagattcagaataaacaaagaaatacccaatatcctgttggaacaaaatattgggtatttccggctttccttccttcaaaaatgcctatctgttgaggagaaaaaccctatccattaaggtaaggaacttcacgaccacctaggcctagaaggaagttgtgaagctttcgtccgggcattacctcctacca

SEQ ID NO: 132562 - DNA, 609 bp, Zea mays
  Clone ID: MRT4577_52383C.1
gccggccggtccgggatcatccactcagcaatccacacatgctcttcgacgtcacatgggcgctcgcacacatactcaccaagcgtcggctccaatggtttactaccaggagggggactactgctctggaggaggtgaggtcggtggacccggccggcttcgggcgccactacggcggcgtccagcaacacgtcgttctcgagaagttcgaggaggacgacacggcacgtacgcgccggcgccaaccaccaccaccaccatgatcaccacgaagagcacggcttcgtggcgcgtcgagaccagtgctcgaggaggacatcaacgcctgtagctggcgaggaccacgagcgcagggagagctttctccccagggttatctgagcagcccggatggtcggaatccacgcccgtgcgtgcctgcctgcgagccttatgcatgtctgtgattgtgcagggatgtcgtacttgactagtgctcgtacgtgcacccactcagctcctgtacgaattacgacgataagctcgtgagctgaatactacttcttcgtaatactactacctacatctgcacagagaaatataaaaactcccgggccctaggtgcgcgtg

SEQ ID NO: 132563 - DNA, 557 bp, Zea mays
  Clone ID: MRT4577_52384C.1
ggggggggggggggtttttttttttttttttttttttttttttttttttttttttttttttttttttttttttttttttttttttaaaggggaaaaaaaaccggccctgggccacggggggccctgggtttcccccctcccaaaccagggggggggcggggggctgttccgcctttggggggaaaaaaaaaaagagattcccgggggccccggggatttgaaccaccccccgggccccccaaaattcaacccccgcccccccgggggaatcagggggggcccttttcccgccctggggggggaaacccccccgggccaaaccccccctgttgacccccttccccaagcaggactgggggatccccccccccgtcttttgggccttttcgaccgggggcccccctgggttttcaaatcccctggggagagatttccccctgggtgaaacccaaccccaagtcccttgctttggggcccccttgacctggcccccccaatgtttgtttgggcggaaacccccaaccccggcccctttggcctgggtccccccccggaaa

SEQ ID NO: 132564 - DNA, 333 bp, Zea mays
  Clone ID: MRT4577_52385C.1
cggacagaaataaaaatggtttggccaatttgcccaaaacgggttacaacagctcactcgggtcaaattacatagtttcagggaaggctgcccccacccaatgacattttgcccggccgttgggttttaaaacaggaccgattgggccacccaatacaaaattggcagaaaatttacagacccggccacagggcagggtttttggcaggggcagccaggtttttacaggggcacccccaaaaaaaaaacattccagccccaggcccactgtttgttgccggggcatgaggccatttttccggggggggggggggtttttgaattaagaagaaa

SEQ ID NO: 132565 - DNA, 261 bp, Zea mays
  Clone ID: MRT4577_52386C.1
ggggggccctttgccatttcttttttcacaagaaaaccatagggcaaacaaacacacaactgacaatcaagacactaaaacagcagggcaaaaacactcccagcaaaacagaacaccgaacataagtaacccaacaactcgactaaccacaggcctgggaaaaaagcaagccgagcaacaacacaaatcccacagggggctacagggctacaacacccaaaactgtcaaggagggccaagcttctaacattgaaagaaaaa

SEQ ID NO: 132566 - DNA, 311 bp, Zea mays
  Clone ID: MRT4577_52387C.1
attaattctccagaagaacaataatgggggaggatttccttagagaaaagggacgcggaaacacgttaacaccagggctttctgacttaaagaactgccatgaacgtaacgaagtacacaaataacaaactcaaccaatctctaaacggatcaaccatgtctaattcaacagaggggacccaagcccggggagctccacagcaccatgtcgccggcactgtcaccagggctcgcctcaaacaacaagcttgacccctccggggcgccgtaaccgggtgaaccctcctcacaaggcggatcgacaacccctg

SEQ ID NO: 132567 - DNA, 332 bp, Zea mays
  Clone ID: MRT4577_52388C.1
gattaaactgacactgcaacccaaggagaggcacgacaaaacataacgaaaccagcgacattaaaagacaaaactagctagcaagccagcgaataaaccacaaaacaaagttacaaaagagggggacaccgaccgcaaaaggggaagggcatggagtccggtgctgcaggccgcacatcgccgtcagatgctgcactatctgggcagacaacagccaagcgacccggccgatttgccggtgatgtggcaggatggacgggaggaccaaaccaaagatcgcctggcaccggggctgaggccccacctgcctggactggtggcaacactgctga

SEQ ID NO: 132568 - DNA, 300 bp, Zea mays
  Clone ID: MRT4577_52389C.1
cccagcagctgtaccccttatccagcgaatacttgaagcaacaggtgatgtagttacggatcaatattatgagagactatcacctttggtgccactgaaatcaccacttgggtctttctctaacatcaaggcaggagattgtttagtaacattctcaagacgtggaatttataaacacaagaaaagaattgaaaggaagggaaaacatctttgctctgtggtctatggttcatagccaccagaaactcgaacaaaacaggcgacaatgttcaatgatgacaccagtgaccttaatgtgct

SEQ ID NO: 132569 - DNA, 336 bp, Zea mays
  unsure (1)..(336): unsure at all n locations
  Clone ID: MRT4577_52390C.1
attngnattggagaagtgggaaannaaagtnntgggatggttanntangatgntgaanaggatggtgtngttttttttggaaattgtatttttgtatngagtnttaggtggggggggaggagananttnantgganagtgaattttnagaaggggtgggggataggatattnagtntttntnagattttntgaagtnnnggttaaatggngtttttatgaagtanaaagaatttattanaaagagtatttgagggtggaaggagagattgttttnaagtaattnatttgtgggggatnttggttttgaagtgagaagagaagttaatggtggaatt

SEQ ID NO: 132570 - DNA, 439 bp, Zea mays
  Clone ID: MRT4577_52391C.1
ggccgcttttttttttttttttttctgacaagagtaataatactatatacataaaacgcgctagagtacgtcgctgcacagaggagcttaagaactctgtcgctcgtttagtagatcgtacagttaaaggagggggcccaaaaaaattacagaagtcggccaaaaaaattacaggagagccatcacgttctacgttctaggcgatggccgtggtgtgttgccgctgggtcccaaccgtggtccgcagcttgtcccgcagcttcgacggggacgacggcgacgaggcctccccggcggcgtccattgatctcgccagttccggactgaaaacgaagggtctcttctgttccctggtccttctgcgatttgggaagtggaggaaagaagtgctgctgcgttttgggaagtgtagatgcgttgcgatgcgtaaggaaaagtg

SEQ ID NO: 132571 - DNA, 796 bp, Zea mays
  Clone ID: MRT4577_52392C.1
tttttatacataggacgccctcgaggacgtcctttctcggaccggattcccaactccgacgcttcgtcaccaccacctccacttccaggcggcaccccaaaagatggaacgatgtcaaccctaataatacgaaaagagtaataataatcctagatccatgcaacgcgctagagtacgtcgctgcagagactagcttaggaactctcgcgctcgtttagtagatcgtacagttacaggagggggccaaaaaaaattacagaagtcggccaaaaaaattacaggagagccatcacgttctacgttctaggcgatggccgtggtgtgttgccgctgggtcccaaccgcggcagcggcggccggcgaggacgggaggcgcgcgttgaagttcctgtaccggaagaccgcggcggggtccgcgtacgcgtcgtcgtcgtcgccctcgtcgaagttgagcgcgtagctgagcgcgtcgtagcggaactcgcccgcggccgcgccccgccgccgccacctcgtcctctccgggccgccgcccgcgccgaagcaacagcacaccgtggtccgcagcttgtcccgcagcttcgacggggacgacggcgacgaggcctccccggcggcgtccattggtctcgccagttccggactgaaaacgaagggtctctctgttccctggtccttctgcgatttgggaagtggatgaaagaagaagtgctgctgcgttttgggaagtgtagatgcgttgcgaggcgtgaaggaaaagtggtttccgttccggcccggccggccgagcgccgca

SEQ ID NO: 132572 - DNA, 255 bp, Zea mays
  Clone ID: MRT4577_52393C.1
gcgcttttactctagaagaagacaccttctcatattgcacttacattagaggcggtatgtgttagggaggtttttccaccaaaagttcttaatttcaaaacctttgaagaggcaatcaaagggccaggagaatttctcatgagtgatttcttcaagttcgaccgcccaccttttgtgcatttggcctttcaagctttggacaagtttatgactgaattgacacgatttcctattgctgggtcaacttatgatgtt

SEQ ID NO: 132573 - DNA, 115 bp, Zea mays
  Clone ID: MRT4577_52394C.1
gattggtcactcggccactctctcctgtatctggactcatctcccttcactcccgtccagtctggttttgagagcaggggctgtacttcagcaactcagggaagggaggagagat

SEQ ID NO: 132574 - DNA, 550 bp, Zea mays
  Clone ID: MRT4577_52395C.1
ctgccgtagaaacttccagacgtccagtaaagcgtactctctccctcccccgtcgttcctccctggctcacccgcgtcctcacagcgaggtcttccaccggcgcccaggccgccaggcgcgaccgcccaggccgccagcgccaggcccgaccgctggccgctgctgcctgctggcttggctgccgcacgcggcacgcccgccgccggcccgtaaaacctcggcaggaaagttggtggctcaagcgcccacacgcctcgttaggatctgcagggagaacatgtgcatcataccagcgtcagcgactcagcgtgccggtctgtgcctgtgcctgtggactgctgcaggaaagctggggtacggtgcctttcctcattttttcctagaactttgccccttccagattttcctgtgttatgggcctgcatcattaaccgtacagctataatgactcgttctgatacaacttgacgagaaatcatggcataagcaataagcatagcagacaatcgatcttgcgatatgcacaattgtacttcagcagtatcaact

SEQ ID NO: 132575 - DNA, 809 bp, Zea mays
  Clone ID: MRT4577_52396C.1
tttcgaatattcgactcctggcggcggttgtctcctcaccacccgaaactaaaatccccaaaaatcgtgaacccctcgccctaggccctaaatcctacccgaaaactctgaggtcgcttgccaatttgatctgcctcaccgtcactcgcccgtccgtcgatcgacccgacccactcttcaactctgcttcctccctatccacctcaccatctccgccttcacccaaagttgttggtggtagtggtgcctccaacaatggggatatgacatggtaggagagagggtgtgtgccaccgctcaagggtgcggggacactgtcggtctctgtcgcgccgccgcagtggcgacacaccgtgctggcgatgttggtaggaccgtaggaggagggcctcgccactcgcgagcggggtcggtggccaacaacgcacgcacggggctctaagttttacaggatcatgcgccaacacaaagatatgccaattttggggaaggatactcatggagatgaactatatgcttgcttatggttcaactgaagcttctttgaggttgttgtggaggtttgtccaccttgaacatttgttgcccttttaggtaaacccatgtccaggaaaataaacatatcttggtatatataaaccgtagagaaaataaacttatatatttattctcttcgtgctctctatcccactctgcagagcaggatgtttcgtcattttcactaaaaactataatcaactaagcatttgtttttccttatgggagttagacttttctctatgttattcttatggacttcatttgctatc

SEQ ID NO: 132576 - DNA, 492 bp, Zea mays
  Clone ID: MRT4577_52397C.1
caacaggtaaactagaaagaacagaggggacacaaattcgggtccgatggactacaaagattttttggactcggggaattggaagcatgtccgcacaaaaattggcgtccaaaaagaaaatggaacgcacgaacagacaatctacgtatggttttccttgaaggaactgcccgcgggtgggggagggttgtcaaccaggaggatagcctccgtcgtggggcgctaccactaccaggacctaggaagggagcgctgttgcaaaccgggacgcgctgacacgggcagggaaaagcagcgcaaccgcacataagggtgctgccacctgagttgcgagggcgtcgtctggcgctgagagggccaccgtcgggtgctcaacggctgggatgcgtgatgacccaagcaaagagcgccgccgttagcatggaacaggaaacctagcgcaagatcttgcctggggattgaagcatttcgggtaaagcaaggcctcgccct

SEQ ID NO: 132577 - DNA, 303 bp, Zea mays
  Clone ID: MRT4577_52398C.1
cccacgcgtccgatgggaataggattcctcccccatggtttctctccaattcactgattgctcagaatccgctccatcttttgctactatcaatttgttttttccatttctgtatcattgaatactctgcataaggactattctgcagcagtgaatcaaaacttccaggcagcatgagtttttttgtttcaggttcgtgatgctcaaaatgatcagcaagctttaaagccagaccgaccttgcgatcgacaaagtcttttgtttgaaatatcttgtgtgtctattctatttattgttttgttt

SEQ ID NO: 132578 - DNA, 258 bp, Zea mays
  unsure (1)..(258): unsure at all n locations
  Clone ID: MRT4577_5239C.1
ggaanacccggtcgaccgcggcgtcccgactcaaccaatctacttgctgctacaacagtgtttgcctggtgccttgcttccacctaccggatggatctacacctgctgctcgaacggaacaaccgctcgcggcatgttaaccaccacctccaacaactctggctttaatgaaggggaaaaacatttgagattcgttgcggatcaaaagcccgagcaagagaattagacgtaaaacgaaaaaccttttgagattcaatt

SEQ ID NO: 132579 - DNA, 439 bp, Zea mays
  Clone ID: MRT4577_523C.1
aaaggcgctcggcgtttcgtagcaggccccacgtacgtttcctcgcagtactcacaccgcactggcagggaggcacgcccctcacgaccaatctaaactccctacccatactattaccagcaacaattttaccacacaagccaatgcagcagcgtttcagcagtacctcctcttctcatctgtacatgatacgatagataagcttctagctttccaggttttcatttgggttttaaagattctcattttgtaggttatctagataattttcttcatcttattcattcttgagttcgagatatttcatttcgtttcttaggaggtggttcaatttaactaggttaataagaataataactaggagatccccgttatggtcgtccttctggacgtcgttcacgttaaggttcatcccgtaaccgttaatttttacaagtag

SEQ ID NO: 132580 - DNA, 442 bp, Zea mays
  unsure (1)..(442): unsure at all n locations
  Clone ID: MRT4577_52400C.1
ataaaaaaaaaaaaaaaaaaaaaaaaaaaaaaaaaaaaaaaaaaaaaaaaaaaaaaaataaaaaaaaaaaaaaaaaaaaaagagagaggccagatttaaaggatcgggggttcgttctggggggttcccttcttggggcctcttttttcgggccccttattttctttttctggccctttttttgcgtcctcgggcctgggttttccgtggcgtttcccggcttactcggttgggggcccctcccgcctttcccccgctgccttccttgtttncgggcccgcccttttcgcctttccgccctgtcgcccggcctttttggtttttgggcccccccctttggcggtgctttctgccctttgggtggggtgttttcccgcgtggtttccgctcctttggccaggggctttccgcccgtggcttccgtttttttccctgctttttt

SEQ ID NO: 132581 - DNA, 239 bp, Zea mays
  Clone ID: MRT4577_52401C.1
cggggggaaaccccctgacaaaataaatataaacgggggaggggacacaatttcaggaaaaaaaggcccaggccccagcccaacaataaagggggattttggtcaacaaaaaaaaagcccaaaacccccctatgaggaaattggacccccaacccacaatttacccaccccgccctacgggggggaccgccccccaggggctaaagaaatccctcccctcaccaattttattcacaacg

SEQ ID NO: 132582 - DNA, 396 bp, Zea mays
  unsure (1)..(396): unsure at all n locations
  Clone ID: MRT4577_52402C.1
ttgggtacctcgaggccggccgggcattcggtccatcgtccgagggtcgagttcgtcacttcccaaaacgactgtgcgagggaggaagaggcgaggagaagatgcagatcttcgtgaagaccctgacggggaagaccatcaccctcnaggtggagagcagcgacaccgtcgacaacgtcaaggacaaaagccaggaccaggaagggattcccccagatcaacagcgactgatnttcgntgnnaggcagctggaggatgagcgcacgctggctggctacaacatctaaaaggagncaactcttcgtttggtcctcncgcttaggtgtggnacgatcgataaggtcaaaactcgcnctgggaaagagatcgagatcgacnttgaatccactgactcga

SEQ ID NO: 132583 - DNA, 200 bp, Zea mays
  Clone ID: MRT4577_52403C.1
acacattatgtttttttgatgggtttttacccacaggacgaatattcacagcacttgctttataggttaaataataaggtacgggaaccctggcctgaaacaaaggatatggggctctccactacggcaacctttggacaaagagctatactctaggggatgcacttaaattgcatacaactactagatgatgaaatagt

SEQ ID NO: 132584 - DNA, 763 bp, Zea mays
  unsure (1)..(763): unsure at all n locations
  Clone ID: MRT4577_52404C.1
gaagcttaattgtacaacagttttttcctatatatatacacacatatggttagatttagggtttagggaagtatataacatctgaatttntgttgtgttctttgcttatatattcccccaaaaaccctttcgtatccntggattttgatgtataagtttacaatttggcaaagaaccttaaaatccttatcgacttatacattcgaagcccaagcatccgcgacaacaacaaaanaaaacattactatatcgacgatgattgggaacctagaattttacccgagaacagcacaacactacctagacaatagtactcagaataaagcctttcccaaacaaggcgacgtctttgggcggccggacccaacaaatcccgcgcaactagacatggactggtcaaaaaggcgtcaacagaccgcaggtggagatcacagatccgagcgcgaacctggcgatcaaggtcgaagggcaggcgatcagcgtagcgagcgagggcgtccatgaggcgccgcaccagatcggtgagctcctcgtccttcccgcccccggcccctgcccctgccaccggggccgacaccgacgccgacgccatcgccgctgacgagaggtgagcggggttggcggctggggcagcggaaaccctagaaaagctcgcgcaccggcgagcggggggacagggatggggtgcgagatgccccacaccacgacggaggaagaagaggagagaggagggagggcccggccggcctcgaggtacccaatg

SEQ ID NO: 132585 - DNA, 426 bp, Zea mays
  Clone ID: MRT4577_52405C.1
ctcacatacctcgatccaaggttcaacaaattgagcacagaacccggcgtgtccttgtagaccgacccctcatcctgcgagtgtgcgacgagtctactgacgctctccccaggcgcaccaaatggacgatgcgcatgacaggacggtgatccctcgtgataacaattgcctgttcaacgatggacgctacgtgatagagcacaacccaaataaggactctgtgagctcagacaggtcatacgagcaacagccgaatggcgatcccgagaaattcagtgaatcaggatgcgagccaccaaatgaagctgatggagcttgcatcttgtatcctgaaaaggaccaggagccattgagctctatatgctatctgaatactacgggcgtgaaatcgcaatatatgacattcacaccacccgctgcgatctc

SEQ ID NO: 132586 - DNA, 1048 bp, Zea mays
  Clone ID: MRT4577_52406C.1
ggtgaacaagccccacaattcaggtccagctcctcgacatctggctcgccctctcctcactgcctccccatcagaaatgcatttgcagaagagcgtgaccgtctcgaacagcgtttgtcaaaaccgaaggacttgtccagcagaaaaacaccagggatcttcatgcagtacaaatattacttgggaagggttacgaaacagcggctgcgtgaagctaggctgctcatggttgatttcctgatactaggcctagctggtatctgcttagggacgatagcaaagctcagtgacaaaacattcgggatgcctggctacatatacactataattgcagtctctcttttgtgcaagatcgcagcactgcggtcgttttcgttggagcgattgcagtacttcagagagagagaatctgggatgagctctctggcatacttccttgctagggacacgattgatcatttcagtactgttgtgaagccgatcatttacctgtctatgttctactacttcaataacccaagatcaacaattgctgataactacattgtgctcctcgcgcttgtgtactgtgtgactgggataggatacacttttgccatctgcttcagtcctggctcagcacagctgtgttctgcgcttatcccggttgttctaaccctgttatccactcaaaagagtacaccaacattaatcaggagattgtgctactcaaaatgggcattggagggcttcataattgtaaatgccaagaagtatcctggagtttgacttataacccgctgtggcctgttgtttcagagtcaatttgatattcacaactacaagctctgcattttgattttgttcatgtatggtctgttcttcaggatggtggcatttgctgcaatgattttactgaagaagagatgaatgtactctagatgtaacatttagttcatctctaatatcttcattcatttttacatgtgtaaaacaattctgatgaaaggttttagagcactgacccttgtacagatgagaaaaaaggcaataggaattcattttttcc

SEQ ID NO: 132587 - DNA, 383 bp, Zea mays
  Clone ID: MRT4577_52407C.1
aaaacataaggggtgatcatggattgggattagttctgggtagtacgcacacacaacacaaccggtccattattaaaccaacactgccccaactcatgacacgaacggaaattctttggccaccttcatatggagagagggcaccaaacaacgcaagcacattggcagcttaaaacgacccatgacttactgaccaccacgggacacggagcacaaggtggagggtgctctcctttgggatgtggaactctgctagggtgcggccattctaccactgtgccggcgaaaatcacacactgctggtccggggggatgccctccttgtcctggatcttcgccttcacattgtcaatggtgtccgagctctcaacctccagggttat

SEQ ID NO: 132588 - DNA, 1480 bp, Zea mays
  Clone ID: MRT4577_52408C.1
aagctcatagagaccggctctctcttcgtctcagtaatagtgacagcattcaccctccaggatggttcgtcacactacctcaaggggatccttctgctgctgtgctacattgtgatcggtgcatgcttctttgttacgaggcaacctgcaagtaacaacaatggcgctgggctgtcgctgccaactggtactttgagtgcacaagctgcatgattggtgagcctgcagaaccttgtttttcgttgttcatcaatccactagtaggttatagtagtttaaaaaaggataataggtgtttggtttcgacctctgatggcagagatgatacgaaagcaactcctgttgtcttcatgcaaaatgcatgcccccgttgctatagaatcatcctgaccttattgggacagctggtgtgttcatcatctgatctgatgagtagctcatgtgtcgtattcataggttaagtatatataggtcctagtatataattttgccgcggaggtcacatgtcctgcatggaacttacttaaatgtgtatcgatttatttgtcatctctctgggccgaatgcttgttctcccacacagcaacaactatttttcagtcagcggcttctaacttacctgtatcaaataaaaaatgtgcccagtcgtttaaactcaactgatagggatggtgaggtttgaccgttccaatatatatatccatttcacgttctggccagcagatgactgctctatatctctgcagtcctgtcagattttttctgtcattatcggaaaccaccttatgtgtttgatgtgtagccaatatgctatattcatcatggatttaagtatgtgtgtgtctcctaatctgtacttctagcaatgaaatatatgtccaacatttacattaatgtgttgtgtcccaatatttgtcttttcttttaaggaacaggagctctaaccttttaggtgttgtttggttcacatatttgtaacctgaacggtaaccgataacgttaaactatgtttgtttaagtccaaccgtaatcagatatcacactagaaacttgttaccactggtaatcgagtgtaaatcattaccattaccatttatgttacgttctttagttgctctttttccccttttattttcttctgtaagcagtcagaaaaacttcgctggggctaatcataaatacatgcaggaaatgaacaatactataaccacagtaggacgtatatgaatttgggacagagatgtgaattgacaacgccagatggcggttctatctactttgtctatcagaccactgtacacatggctcaaaacttgtgaacagacaaatataccactatatcaggtggttaataaacattaactaatatttggatctcccaaggcttgtttgtttaacttgttgggagataaaactatccaatgctaatcaactgacatgcattgagagcaaaccgaacaagtccttaaggggaaataat

SEQ ID NO: 132589 - DNA, 399 bp, Zea mays
  Clone ID: MRT4577_52409C.1
cgccttggaaggcatccggcccgtcgaggctccttttgaagaggaagaggagttgggcttcgttgctgcgggttcccctgtccaggcggcttccgggtccctggttgctgcgtcacctcagggtcctccggttgcgccggtgagcgcgcccggtctgcctcctccggttgcgagttccggatcccgcctagctgttacggcggccgtcgcgcctttgtttgcggttgcgccgccggctgctgatccgccggtgtacaaccaggaggctcgggaatccctggcaggtctgggcgtgatagcttcgaccatcgagtcgggaatccgtccgtggcttcaggcgcttaacggtcgccttcggcaggcggagcatgggccctcagattgggagcgtcagctcgc

SEQ ID NO: 132590 - DNA, 312 bp, Zea mays
  unsure (1)..(312): unsure at all n locations
  Clone ID: MRT4577_5240C.1
cttttgtttgtggtggtgataacaaacngacgggcgcggtgctgctttatatgaatgtatccttccctgccctacactggcctagctgagccatgggtgcccggganctcaggcccgttgtccgccggacaactctggagttctgcncttaccgcctgggtatgcatgggtcttncatcatatcctcaaacaccaccccatactcccatctggagctaagtccttaatgccctgtgctgcctcgccgcgcncctgaggtcttgcgtctgtctacattccgctgtcccggtcgtggctgctgcctgtgagaac

SEQ ID NO: 132591 - DNA, 254 bp, Zea mays
  Clone ID: MRT4577_52410C.1
gagacagcaagacgaaaccagtgatttcacttcaccagtggtcaattaacaacagtagatgcagtagcagtcaaaagcagtacacatacaaaacataaattcacctcacaagcattaggtaaataagttactgctacatttgtcttataataatatcatacataaatttatgcactagggggttattccagaactggaagacatatttattgaattttaaggtggaaaggattctagctatctacatagcatca

SEQ ID NO: 132592 - DNA, 456 bp, Zea mays
  unsure (1)..(456): unsure at all n locations
  Clone ID: MRT4577_52411C.1
wtatmactagatctatatctmtcamtaccactatctcamcctcaacmaccccatcyccatctytatmtcwctcwcwcactctccahttccatacmtataywtayagtwccatwtctatwwatwttacctttacctctcyathaccttgtatyaccacyataactatawttattttttcwyactawcagcataayttcaattttaatattaghaytwmacccttwwcaytttttctttaammwtaaataatartawtatawwwayatttayatwwahawcwctaatcwtwatwtttttttttwwtttwwatatctwnttatawwaawwatatatatatatatatwttwatttktawyhthtmtmttatataaawakararatcagaratmkmtakabmtatayadadanagagagagagagagagagagagagagagagagagacgagaactagtcc

SEQ ID NO: 132593 - DNA, 413 bp, Zea mays
  Clone ID: MRT4577_52412C.1
caagagggaacacgcccaaaaaaccagggggcaaaagcaacttgggggggacaacagccggtttgggggggggggggaaaaaaaaacaccaggccccggaacaaaaaaccatgggggggggccaaagccttgggggggaaaaccagggcaggggcccccccacccggaaccaaaaggccccccaaggggtttacgccgggtaaaacttttaaaaaggccgggctggggggaccctacagggcctaagggggagggggcagccaggcgtaactcactcctggcctttttggcaaaaccccgcccgggggagggccctgaggcccctcacccacgggtcggggggcttttaaccggcggggggcaggaaggggccctccttcccgggcggggcccccccggggaaaagccccggt

SEQ ID NO: 132594 - DNA, 451 bp, Zea mays
  Clone ID: MRT4577_52413C.1
cgttacgctgttgttcctgtacgtgacggcggcgacggtgatcgggtacaaggaccatacggacgcgtgtgcgtcgggggccgggacggacagcggttggcggcggcgcgggcgtgctgggcatcgagtgggccttgagggggatgatcttcgtgctgggctactgcgccgacgtcatctcggtgggccacatggaccgggccgacaccttcggcctgttcctggcgcgcaaggtgtcactggtgcgctcgcttctgtacatgggggcgcagtgcctcggcgccgtctgcggggtctggctcggcatggcgttccaatgcggctacttcgaccggtacggaggcagagccaactcgctcgcgtgcggatactcccggggcgcggggctcggcgccgagatcgacggcaccttcgagcttgtgtacaccgtattatacgacaccgaccccaa

SEQ ID NO: 132595 - DNA, 682 bp, Zea mays
  Clone ID: MRT4577_52414C.1
atttctatatcggtgctgagagaatttttgaagctgattacttgggaagaaagggttttcccaggctcatggcgacattgcaactgctcagagggctcgcattgagctttgtttggaaaatcactcaggatcagcttcagatgatagaacagaaagctctgtagctaagagcaatactcatcatgacagagcccacagttcagtagagtttgctctcacgtttgtacttgaccatgcgctcattcctcacatgaacgtagctggtggagctgcctggcttccgtattgtgtgtccgtgagactgaggtattcttttggagacaacagccatatatcgttccttgcaataaatgggagccatggtgggagagcttgctggctgcagtctgaagattgggagagatgtaagcagaaggtggcgagggcagtggagactgtgaatgggacccctgctgttgcagaacccggccaaggaaggctgcgaatggttgctgagatgatacaaaagcaactccaactttgtctacagcagctgagagacggaccactttcggctggctcaactgcttcatgagataacaaattagcaatttagagccaggttaggtaaattttgttgtaattccctggagatggctgtgttgacatttggcattggacagcagaatgctggagccccgaa

SEQ ID NO: 132596 - DNA, 690 bp, Zea mays
  Clone ID: MRT4577_52415C.1
ggccgcgggttttttttttttttttttattcaacaatgatatatttgtccgagctgtaatatgtcccgaaacagtcaaagaacatgttcttcgtacaataggcagtccagaaccagtgacccagggtttgttaaagagaagagaagaagaagaaaaaaaaaccccgaatagaaacaaaagaacctgactccatatgctatgcatgtctcatcaacgccttgcttattcgccagagataccatatctcgaaccccataatttatatccgttaaaagtccctcaagacgtgacacgcctgacccaaagagtggaaggctcaaaggctgcctctctctcagcacgcttgttggccctgtagagcttgagacccaggtcatgctcttctctttgaatctcggccaactcttccttgagcccctcaaccttcttcttctcaatctcgcgcttgcgcatcacttccgtgctcgacaaaatcctgtcggtaggcatcaactccgtcatctgcttgatgctcttgttgatgttgttgcgcctgtgggccagactatcgagtcgagcagtgaggaatgctacacggtcatgtgctgattgaagctcgggcggtgcgggtggaagtgccttgtcggtggaaacgttcgagttcaaaatgctcatttgatggtgaagccggcttcattggaatgacgattg

SEQ ID NO: 132597 - DNA, 269 bp, Zea mays
  Clone ID: MRT4577_52416C.1
cccacgcgtccgcggacgcgtgggccgacgcacgcgttcacctaggtcggccagctgcgcttgctcgccgttttcctcgacgtttcaccttcacatcgcatccaacactggcgacatgtagaactgctcggacctcgccggtgccgctgaaccggacgaagatctcctattcacctgccgatccctctctggtcctgcgtcaccgcaccaccaggtctcttcctactcacggcgtgcttatcctcttcaatacctaacagtgacgagcc

SEQ ID NO: 132598 - DNA, 401 bp, Zea mays
  Clone ID: MRT4577_52417C.1
accctataacagattttggggggcttactaaaaaatgtggtgtgcatggaactagagcaaaagttccattcacattatttccaagaacaaatccgtttgacaatccactaacttattacctctcttgtggtacaaatagcacataaattctcaactaaaacgaagaacgacacaattctactatccttgttaaaagccttcaggctctcttaccaaaggcttgactttgctatttatccttgggttggttgctgtacacgcggtatctacagtcgaacccttgctgggttcctgaggatcactggtcccgacagcagctgttgccgcacttacaacgtgaacatatggttttgcccgtaccactttcagtgaaccccgaggtatcactgacttcggttgct

SEQ ID NO: 132599 - DNA, 526 bp, Zea mays
  Clone ID: MRT4577_52418C.1
cccctctcgagttttttttttttttttttttttttttttttttttttttttttttttttttttttttttttttttttttttttttttttttttttttttttaaacaaaccgtttttagtaaacccttccttttttggggtaaatttgaacccccccccattttaaggggggtttgttaaaaaaaaaaccccaaggaaaatttggggggttttaaagaagaagggggtggcaaattataaaaaaacctcccccccccccgggggaaaagaaaaaaccttccccgttttttgaaggggggaaaaaaagggggccattgggggggggggagggccctgaaggggacaacttttttgcgggaaaccctgggggggcctttgaaaaaagaaaggcgggaggaccctttttttttccccccccccccccctttttgaaagggggggggggtttaaaaaacttctttaatgaggggccggcccttggggtttgggctaaggcaaaaaaacggggggttgaaggacttgggggg

SEQ ID NO: 132600 - DNA, 424 bp, Zea mays
  Clone ID: MRT4577_52419C.1
tttcgaacggacacgaaccttggcagaacggggttgaagtcgttcgttgcgaacccactatggcaaacacgccagggatcctggccctcgggctgctagcgctgatgtacgctgtcgtcggtccggatgacgagcataactgcattttgaatgcaaacttctgttgtagcaagttcgggttctggggaacgaccgacgactactgcagggacaggtgccagtacggcccgtgccgatcgggcgagttccagaggatgagtgcggaagcggcggaggctagttctaacgtgactaacgtggttaccgacacgatcttcaacggaataaagaaccaggccaccagcaggtgcgagggcaataacttatacaccctgagcgcgttcctgagcgccgtcaacccgtacccaggcttgaaccattgctt

SEQ ID NO: 132601 - DNA, 850 bp, Zea mays
  unsure (1)..(850): unsure at all n locations
  Clone ID: MRT4577_52420C.1
ggtgctccttccctccctttcgcctccactcctatggcggtgccgctgcctcagcagccgggcccctacacctccggcagccttggctacttccacctccgtctcgtgggcccagcccccgcattactcctcgtgcgcaccgaccgcctctactcgctctcccactcccgccgctgtggctaccgcttccgcctccgcctcctcgccaatcctcaccgccggcgcgcccccgacctcctgctcagcacctacggctgcgaccttcgcctcacacaccgatctggcatcggctctccgagtgtcaatggccgtcccctccgcgcggggacccccaccgagctggccgttggcgacgaggtatcggtgctgcgctgcggcgccaggtacgggttcatcgtcgagaggttcgtctcatgcggaggatttgaggttgatgcggcttcaacggcggggtcctgcgctgagggtcttgtttttagggccgagtctctgcggaaacggctgagggcgatatctgagagcgaagatcctctttcgttattaagggattgttctggaattggcaacctggatgtggatattggacctaaaaaatggaggcaggatggtgctgctgaattgtgcctggacaatccaatcactcccgcttctaaggagaatgtgctgcaaggtgattgcaattttgagcgagacaatttgacaacgactttgatgttgtanatgatggcgacccagagctctttaatggggagtaaggatgcagagatgacagttcaangaagccaggatgtggaanngcgtaacgaagagcagtatcacagtgagggctgctactcagatgggagcacat

SEQ ID NO: 132602 - DNA, 186 bp, Zea mays
  Clone ID: MRT4577_52421C.1
agcagatgcacatgtacatagagtcccacgctgccataacacctgaatctttcaatagtgcctttgtgggtttttggtgtttggatgacaacacaattaaaggtctaataaaagtgttcagtgttggacaagaacttagtgttaaacacaaaaaaaataaacaagacccagaaaactacattccat

SEQ ID NO: 132603 - DNA, 684 bp, Zea mays
  Clone ID: MRT4577_52422C.1
ctctagctccccgcacccacacaccctaaccctatccgccacacgccgccgctccgccgtcgccgtctcctcgaccccgccgtcgcgccgcaacccctgtctccccccaccgctcccacgagatcaacgccgtcccgagcccgacctcaccgccgtccactgccgcgaggtcaccgtcgccctccccgcggccacctgacctactccgagccgaccgccgcccccttcctcgaccccgccgtcgccctccccttctcccaagggctataaatggcagggagacagcgcataggtcgccagtactatgaggaaccacgaggatttcgtgatggccctcctcctcgtcttgcacgagaaaggtctatctcaccacggcgcttcgagggagagctgtctagccgccatggtgagctccgcagaatccgtgacgacaaccagcatctggtggatgaaattgttggactcaggcaagcaatgtctcgtttgaaagaagatctccattcctcaagtcaggttatacccaatctccgtgcagagaaagaagctgaattgagggagctgactcagaggaatctgaagttggaagctgagctacgatcttcttaaccccttaggcaggatgaccttcagctacgatctgaagcaggctcgctggagtctttgaggcaagagctgatcgcaaag

SEQ ID NO: 132604 - DNA, 229 bp, Zea mays
  Clone ID: MRT4577_52423C.1
atacaagcggaagaacctatcacaaaagggggacttttgggcggacaaacctttcgtagaacaaatgaaaaatcatgggggggtccaacaaacaacagaaatgtgcaggggccatacattcaatctctgagctactaacagaacattagcagtaacacacacaggatgcattattacgctcagctccacttttaataaaatgaaactaaataaattcccacatgaagga

SEQ ID NO: 132605 - DNA, 579 bp, Zea mays
  Clone ID: MRT4577_52424C.1
tttttttttttttttccggttgcagctccgcacagtcccctggcatgagcaaggaagcggacgacgagctggacctggagaacttcgagatgatgccgatgctcgacgtcgacgaccccagcttcggcttcggcacgctggtggacaccgcgccagcgccgtacggctcggccgtgtccgtgtccgcgtccgcggcaacgtcgccgtgcgcctcgtccaagaagaagaagaaaaagaagacgacgaaggcagccgctggcggtggcgcggaggcgccgctgccgctcccgtcgccgtcgccgtcctcgtccacgacgacgaccaacttctccagcggcgactccggcgagcagcagagcaacaatgagcaaggaagcggacgacgagctggacctggagaacttcgagatgatgccgatgctcgacctgctcgtgctgcccgagatcgacatgggccatgagctgtggagcatcatcgacggcgacgccgccgaggcaccggcgccgcgctgccagaggaatccggcagagccgacgaacggcgccgacgcgggcagccacggagcggagggaaaggag

SEQ ID NO: 132606 - DNA, 1275 bp, Zea mays
  Clone ID: MRT4577_52425C.1
ccacgcgtccggcgcttctgtcccgtttaattgagtctcttccagctgacgctgaatctttgatcaaatgggttgtcgaagtcaggagaaaagaggagggtggaccaagcttaaacaaagaggagaaagaaaggcttttcttgaaggaaaatgtactaaagcaagttcgtgataccaggctatttaccatagtccatgatttgcagtatgctaataaaccatgttataattgctcatcgtcgctcggaaaagattcccttactaggattgcagccgttgtgtgctgtcagggagctgcaatgctatcaggtaaccttgtgccaagagatgccttctgctgcagagaaacaagctttgaatgtgtccaagcgaatggtgatgggcttaagactgttatctcaggctccgtggtatgtgaaggcagtgaacaaggtgttgatatgcttttaccaatgtcttcacctggtgccagttcatgcaattcaaacttgaaaagcaatgccgtcaaatatccatcaagcgtggatgttctaactgttcttctgctggctttacatcccaacacgtggttgggcatcaaagacgagaagctgaaagctgaatttcagactcttatttcaacagacagtttacctgatgatctgaaacgagagatattgcacctaaggcggcaactctactatctaaaggcctgtaaagaagaggaatgggaagatgccgagcaaccatcgcctaagcagcagtgctgaagtggcagtgtgcccatgtcgttagttttacttgtaagaaattgatgtgaagggaaaagttaccagagggtatagactatgaaatggtcagaattatgatgatactagtgtagtgatgattatcttgttgttcagttctggtgttgtttccttctacgagaggctattacaccctccttgctcaaggaggtgctgatgttctttttctagatgatgattaaaccatccatccttgctttgtgctaaaccttgtcatattctctttgcattgaataaatccctcgtatcgtatcctagagggtatagcctatgaaatggtcagaattatgatgatagtagtgtagtgatgattatcttgttgttcagttctggtgttgtttccttctacgagaggctattacaccctccttgctcaaggaggtgctgatgttctttttttagatgatgattaaaccatccacccttgctttgtgctaaaccttgtcaaattctctttgcattgaataaatccctcgtatggtatcct

SEQ ID NO: 132607 - DNA, 296 bp, Zea mays
  Clone ID: MRT4577_52426C.1
catctatatctactaacaatactggtactttatataattttgcgttcctcaacagctaaacattttttctactcacaactattactatcaccaaataaccttaatcgacatttttcacttaaaaccctcatctcatacctccacactatctaataaccccacaccacctttttcccataacataccatatactacattttcaacattataaatcaattctattcgctataacatctactacctacaaaactattactccgacctacctaatacattctcattcaacaccaatctat

SEQ ID NO: 132608 - DNA, 711 bp, Zea mays
  Clone ID: MRT4577_52427C.1
gccggccgggttgggaagagagaaggcaggaacgccgaatcccggtgctcgggcgcgtcgagtgatcccatcatcgtgcagcgatgcgatcgaacgagacgggcggcgtgtgctcaccatcaccaacctgcagaagcgtgttccgctccgccggaccgcccctctctcacgcgctcactaagggcctatagcgcaggctcgaggcacgcccatgcggtactgcctcgcgtgttatgaagaagaccaggtgacggacccggatgcccagcattgaggactggctctcacaaaacgatcaaggactacctccacaacaagctgaagaaaagtgagctccacatcgtatctgtcgccttacaggtcgtgatgcacgacagaacctactgtggcgaaatcgcctccgacgcctccgccaagaagcgcaaggacattatggtgcaccgcgcgatcatcaacatcgtggtgatcaacaacatcacctacgttctcacccaggtaggtacagcgtacgaccgggaccacggcatatgcgggaactatattctggcatctcgcgctatgatgccaaactactcacgtgtttgcgcctatcgaagaagcccatcaataccagacctatctacattctagatgaccactagcgacgtcgatgtactcccattgtagtgtggattgcacagtgctacgaaggcgagccaatatttgatttcg

SEQ ID NO: 132609 - DNA, 1438 bp, Zea mays
  Clone ID: MRT4577_52428C.1
agcccacgcgtccgcccacgcgtccgggacagggaagatataggagagagcatgacagcaacagaaggacttcagatgtgaggaagtgggatggtgatagtagcgagttcgaggcatcagatgaagaatgggactctggtgatgacaggggtaatgctctgggcttcgacaatgatagaggttctactgatgagcaccctcggcgatttggaagcatgaggaacgagaagagtagatccactcgggcacaggattttgtccctaggggaggcgtgggtgaggggaagggtttcaatagaagctatggcaacccagatgctgatgttcacaatagaggccagggaagacataggagagataataaaagaacatcagatgcaaggaggtgggatgataatagtgagatcgaggcgtcaggtgaagaatgtggctctggtgatgacagagatagtgttcttggactcaacaatgatatagacacaggtgatggtcatcctcggcaattcaaaagcatgaggaacgagaggagcagatccagtggcaggcagatttccattcctgggggattcagaggttccaatcggattccagggaattcagccgatgcttccgacggcactatgttcagaggcagcaacggtgatgagtcggacacggaagacgatgacttgtggatgttagattacaagggggaagaggcaaactcaagagccccaaaggtgaatttcccgaatttccacagcagcagtgaggatagtgatgacaacaggaaaaacggtggcaagattggtaaaacgaagaaaaatactgatgaaagttgggacagtgactgactgagggctcaagaaagagtaatgttgatccgtgatgcatggacgaaggtcggcaccaatggttgtcaatgtaggttcttccatcggtgatgttgctcgcatacttgactacttgtccaacggaaacttggaggaggaagaagattaggcatggtttccgtgagaacaactgtttgaacgtttgctgcatgttttcagacgtgttctattccagttggcatggtaacctgaaaagttgttgaagcggatgacaaagccagaacaacactgcacgacttgcacaagccggaggacaaagtagccagagttcgctgccgacaaacttgataggtcgaggttcctgaaggtttcagaaatgtgaaatcctttctgcgatcacatttatattctcatattcttgaagttttgatgtgagcgaaacatgcacgcagatgtgtcttgcgtgggagagttgtcttattttaggtaaattgcccggtacacgttcttcagagttcagagtgtgtgaagcttttactctgttttaatatcgagtgtttcagcgtcatcatctaacgtaagaacatctcaaatgggcactgggagcaacctacttctttctgacc

SEQ ID NO: 132610 - DNA, 487 bp, Zea mays
  Clone ID: MRT4577_52429C.1
ttgagagtgcagatgcttcccatcgtgccctcactgtgaattgtcgtacaattacttaaaagcagccatattttcgtgtaaagaattgttttcgcttcgtttgattgtcagaatttggcagcaaagaattgaatcgatgttgaataccaaatcagtttagatattgaaatgggcatcaaatcaaattcttgtttggatggacaagaatttggtatgtaaaatcatagggaattttccaattccaatggatgggctagacaggggtccggcgtgaactgcacgattggaaaaaggtcagccgattccacccaaaaggagtgcacggcctctgaattgtgcgcggccatggctactaaaatgaacagtagtgtggaattggattccaatgtattgctattcagaataaaacatcagcatttgcttcagccaataccatttcctggattctgagtgccaatcatccaacggtgtgttaatatgctcctgt

SEQ ID NO: 132611 - DNA, 273 bp, Zea mays
  unsure (1)..(273): unsure at all n locations
  Clone ID: MRT4577_5242C.1
tcaaactatctatttttagtactagcantgtcgtttcnttttcagctntgtttaaattgtattaagacatgcccttnaccatcaccantatctttccntttgaatcanttntaatgcattcatcntcattcttggctcttcctgatctatctttcattaactatctatattatatcattatcaatgttattcaattattctttttcaaaaaaaaaaaaaaaaatctgcctctctatattatccaaccttacttacgccttcattccacttcat

SEQ ID NO: 132612 - DNA, 487 bp, Zea mays
  Clone ID: MRT4577_52430C.1
gggaaaaggggccaccttttaaccccgggtaaattttttaaatcgaagggggggggcaaatttggcctgggaaaaaaggggggcgggggggggggttcccaaaccaatcaaacccccaaaaaaagggggggtcccaccaggggcccaaaaaggggaaataaaaaaaaaagcggccccccggcggggcccttttaaaaaaggggggacccaaggcgggccccccccaggggggggggttagaaaaattaaacccggggaaggcctggcccggtaaagggggggggggggggtggatccctggcccgggggggccgaaagaaattggaaaatccacctcccctgaaattagggagggcaacccccctccgaaaaaaatttccctttgggaaggaagacccaccccggggtttttggaaggcaacctttttccccagaaaaggggggggaactggaaaggtaccttggaaacccctttaaaaggaaaggg

SEQ ID NO: 132613 - DNA, 546 bp, Zea mays
  unsure (1)..(546): unsure at all n locations
  Clone ID: MRT4577_52431C.1
ggaaacaaacccgctggtttaattaaaagggtccccaaaacgaccaacagggaacacaaaacaactccccgaccaaaagggggggaacccaaccccaaaggggggacaaacaaaacgcgaggggggccctgcccccggggggggtttctccagcccggaccccggagcacccaagcccaggggggaggggggaaaccccgggccccccaaccgggggggggttttttttccccccgggggtggttcgctcccccccccccccgttccttgcctaagggggggagggaaacgggcccccccctggggggcgtngggggccgggggggtctcctgggggaggagccccaaccccctcggggggggggtaaatttcggggccggggaaaccccgggccccccgaggggggcccccagcacggcctcgaaaagggccttgttctctatcgccaccccgccggccgggggccccgaagagtccttggaaaagggacgggggggcctccggggggcgagtgccggaaaaaggtccctgggccgaattcccgc

SEQ ID NO: 132614 - DNA, 462 bp, Zea mays
  Clone ID: MRT4577_52432C.1
cattgggaccctcgaggccggccgggacgacgctgccgccacctatctcaacgaagctttttcttccctccggtgtggatccacactcttcatgcgctgaatttggcagcaaagaattgaatcgatgttgaataccaaatcagtttggatattgaaatgggcttcaaatcaaattcttgtttggatggacaagaatttggtatgtaaaatcatagggaattttccaattccaaaggatgggctagacaacctttgaattccaagcccggaggagtacagaactgtgaactgcacgattggaaaaaggtcagccgattccacccaaaaggagtgcacggcctctgaattgtgcgcggccatggttactaaaatgaacagtagtgtggaattggattccaatgtattgctattcagaataaaacatcagcatttgcttccaaaaaaaaaaaaaaaaaagcggcc

SEQ ID NO: 132615 - DNA, 1883 bp, Zea mays
  Clone ID: MRT4577_52433C.1
gccgccacctatctcaacgaagctttttcttccctccggtgtggatccacactcttcatgcgcgggattgggttttggatctgctcctgtgttttcattatttgctggtttctctttttgatcggggatttgagatacgtatttggttgtggacgatgaagattgtatctattggtctcgttcgtcgtaactggcatctgattggattgccttgccgaccatcctgatatatcaccacccatattccgagtccgctgcctacagtcctcagtccccatcgagattttcttatctatttagcctgtggtccatgatttactactattgttttctggccgatgattaaatcaaaaaaatagacaagcatatgtccgaatccatctatgtggataagcctaatcttctctatgaggtcgaccacatcttctaggtttactgtttttttttcatttgatctgattttgattcatctaggggcctaagacgaaatatttggatgctatttttgtatgatatatttgattacaaaaccatttctgccttccttcagaggcccctcttcatttggatcttgttattttgtacgttatgattttattttgtgatctataagtggttcatggcttcgcgtaaggtcgggtgatgagtaaatgtgcatagttcagatgatcaaccctagtggttttgattaccttgaataaatagtctttcgctcctaactgacgaccttatcaacgcccaatctttcttggattagataagtttcgctttgctgtaagattttggtcgccagaaaatgataaaaatttgcttgttttgaagtgttcgcgagatttattttatttttccgcacatgcggagaaagtattgaaatgcacatgtaaagaggccccgagtttgatcctgaatactcgggctcctaaccttggtgtgcgagagtttaatctggcgattcacgcttctttgagagcgcagatgcttcccatcgtgccctcactgtgaattgtcgcacaattacttaaaagcagccatattttcgtgtaaagaattgttttcgcttcgtttgattgtcagaatttggcagcaaagaattgaatcgatgttgaataccaaatcagtttggatattgaaatgggcttcaaatcaaattcttgtttggatggacaagaatttggtatgtaaaatcatagggaattttccaattccaaaggatgggctagacaacctttgaattccaagccctgaggagtacagaactgtgaactgcacgattggaaaaaggtcagccgattccacccaaaaggagtgcacggcctctgaattgtgcgcggccatggttactaaaatgaacagtagtgtggaattggattccaatgtattgctattcagaataaaacatcagcatttgcttcagccaataccatttcctggattctgagtgccaatcatacaacgaggtgttaatatgctcctgtcgctatcaagtgcttgtacagactgcagagttttgaatttgtatataaaatataaagatcgattaaacttgccgaacctttttattaggaagccatcgtaggggtcaaaacaaccgatatgtattgaaaataaatatactttttaggtactgaagaacaagtattagcatgcaaccattgaagggttgaggtgaataggagttgaataaattttcttcacaagaagctggccaaaaaaatgagaccggccgattttgtagattagccggccttctagctgattttatagtattctttttatagcattagtgctgctatttgtaatagttaaatattattactatttttagtgataagtgatgtcggatgaatcgatttggtttgaaaaaaaaaaaaaaaaaagcggcc

SEQ ID NO: 132616 - DNA, 263 bp, Zea mays
  Clone ID: MRT4577_52434C.1
agcagctcagccaccttgttatggcgatgcaggctgctttcctcgcggggttctctcagcgggccgggcagacgagccgcggctgcgccgctggcagtggcgccctcgctgcagggcggtgctgcggtgggtagcgccaaggcgagcgcgacggtaggcttgtaggcggagatcgggggggcggccatggcgccctgctcgtgccctgccttgcgcaggctgacaagcatgttcaagatcaaacgcaacgagcgaagaggacc

SEQ ID NO: 132617 - DNA, 148 bp, Zea mays
  Clone ID: MRT4577_52435C.1
cgccggcctgacgacaacgatgcacacccgcgcactataccactacgctgactacctgatacagccataatgcaacacgttctccgaccagccatactactccgcttgtaacaagtagctctccatgctacaatccatcaaccaacac

SEQ ID NO: 132618 - DNA, 291 bp, Zea mays
  Clone ID: MRT4577_52436C.1
aaaaaaggaccacacttttggtcccacccattctttggaaacaggaacccaaaaaccttccttccaattttttttaatccctatccataccccccccttaattttaaagaaataaaaaaaaaattcccccatttttgggccccataaaaaaaaccccaccccactaggtttaaaataacacttgcaacaagctaagttaaaacattatcaaaaggctttttcatttttattttaaggaccccttacccccttccatggagtgccccataaaaaccaagtggcctaataaaa

SEQ ID NO: 132619 - DNA, 326 bp, Zea mays
  Clone ID: MRT4577_52437C.1
agaaataacgcgcccaaacagtcctaattggactcgcgccgcatcagtattaacagattacatcctaacgaatgaagttgttaaaatgaagaaaaaatgatgaaatcaggagttctaggctaatctctctctaccacagatatccactgtgaggacgatctcacgggagtaagcaggcaaacaaaattgtgcctataaaaacaaccgggtcaaggcctcattagtttcaaaaacctattcagggtcttccattaaaatccatttttttaaggccttggtttcactgacaagaactttaaattttttggtgctatgaacaggggttt

SEQ ID NO: 132620 - DNA, 483 bp, Zea mays
  unsure (1)..(483): unsure at all n locations
  Clone ID: MRT4577_52438C.1
aattcggcacgaggctctctccgacagcccgccggtctcgccggagatcgatgacgcaaagtactgcagagcggtgagcacgccgaagccgcaggcctaccgggcgggcaacaagacggtggggcggtggctcaaggaccggaaggagaagaagaaagaggagacgcgggcgcacaacgcgcaggtgcacgcggcggtgtccgntagcggcagtggcggccgccgtggccgctgtggcggcggcgacggccgcggcctcggcgtccggcaaggacgagcgggccgcccgcacggacatggccgtggcgtcggcggcgacgctcgtggccgcgcagtgcgtggaggcggccgagtccatcggcgccgagcgggagcacctggaggccgtggtcgggtcggccgtcaacgtcaggacgcccggagacatcgtcaccgtcaccgctgctgcggccaccgcgttgcgaggcgcggcgacgctgaagg

SEQ ID NO: 132621 - DNA, 392 bp, Zea mays
  Clone ID: MRT4577_52439C.1
ctacaaagttccgagcctccttcggagagctgaagaactggtggccgccaagaggggctgcaccccgccgaccagaagtgctgtacaaggacagggagcgtgactccaagccgttcctggacactggcggcgtaagggaccgctccaaggtggtggtgctggaggaccccgaggtccgctcgcgccgaatcatctgtgagcgccgcagcggcacacactgcataagaccgacagggccagcttccgatggtcaccttcgaggtcagacaagctggcacccaacgtggcgacactaaacgcctcggtgcccatggaggagaatgtcgccgacaatgacgtggtgcatgtgacggatctgataatgaacaagctgctcatgctcgcacaccatg

SEQ ID NO: 132622 - DNA, 519 bp, Zea mays
  Clone ID: MRT4577_5243C.1
gtggggttgtggtttttttttatttttttttttttttttttttttttttttttttttttttttttttttttttttttttttttaattttataaaaggaaatttttaaaactccaactccaaaataaaaaaaaaaacttttttcccattgggggggggggaaaaaaaattcattttgccccattcccggtggcgaaaaatgccataaaaaaaaaactgatcgccccaaaaaaaaaaactattttgatgggaccaaactttactcggaatccttaatgggggaatttgcccccccccaggagttgaattggttaaacctttgaaaaaaaatggccttcctttgtttgtatttaaattttttggggttgaaccttttgggctcctttggggggtgcttgggtgacttgcccacaaaaggatcaacacggatggaaaaaaaaaccttttttgacaaaggttccatgtgaaaaacctaaattccctttttaaaggcctcactggaaggaaaaaagggacttttt

SEQ ID NO: 132623 - DNA, 553 bp, Zea mays
  Clone ID: MRT4577_52440C.1
gggggggggggggggttttttttttttttttgtgtggtttttttttttttttttttttttttttttttttttttttttttttccaacaaccattttccccaaagaaaaatttttagatttttagaaaggcggggcaaaaaaagatgaacggggggggggggaaaaacccagttggaaaacggacccccccccccccaagggggaaggggccccaccaaccatgggaaaaagggcaaaaattctacggggccggaatttttggggggggggcccattaaacagggggctaagcggaggccccaaaaattccccaaaggaaacatttggcagttcaggaaataaacaggcgggaccgcccaaaaggggcggggaaccccaacaggttggtttcccccaggggcccgggttggacccaaacaggcaggctgggaccttaaaaaaaaaaatagtctggaaaaaaaataggggggggggggccaaagaaattccaaccttggggcttttttaaaggggcttgggttcgcccccagccgaggagggggaccagggactt

SEQ ID NO: 132624 - DNA, 781 bp, Zea mays
  unsure (1)..(781): unsure at all n locations
  Clone ID: MRT4577_52441C.1
acgtcgggccgctatccctctggcctcgtctcgtcttctcttctcgcgaatgacggcgctgtgcgatctccgtcgctgccccctccgccggtgatttctgggacgcacgacgaacacgagttggaaggaggtggtcgtgctttgggcggcgagggacctgggcgctagcagcctcggaccctgacagatcacagcctgacagatcataggtgcgtcgaaccctaccagatctagacttgtctcgcctcctatcgatcacgccgttgcagttgcagttggagcgacgggcgctaccaaaagcgatcacaggcgctaccaaaagcgacgggcggccggcggcggcattgcagttggagcgagcgagcgcggtgcctttcggacgacactgagcacaggtcgcacatttttttcttgaaaggcgtgattattcaattccaccggcgccactgagcacaggtcgcacattgtcacatggagctagactagaggtcgtcgccatcctgtcagtgtctgctcgtgatcaaactgcctgctgcctgcccgccccaatacacccaaccagatttcaattcacttcttggaagctgctgcttcgagcttttgagtagcacccctgcttacagacatttcatatccatatatatgctcctcgtcctcgatctccttgcggnnattatattgccccccacaccacccccgactcccacgaccattaatctgaagcagtggctttggtgtagggctgctgctttgctcatcagctcgcgtataacatgtctct

SEQ ID NO: 132625 - DNA, 567 bp, Zea mays
  Clone ID: MRT4577_52443C.1
attgggtacctcgaggccggccgggactttacctctcccactgctataggctacccacatgtggcgcacactacccacatgcctaagctaaccagctgagctcgctcccagtccaagctgccggcgccaccaccgcagctcgatcgctccatgacgaaggagaagcaccaccgcgactggatcctccggcgctgctgcggttccatctccgcctgcatcctgacatgtggccgccgtccgcggcttcctcgagctcgtaatcttcctgcggctgcgcccctccaagccgtccttctacctgcaggacgtgcatctgcgctccatccacctccaagaacccgccctctccctcgacctacaacagacaatcccgtcgcgcaagccagaacgagcgcaagggcgtgcactacaagacgctggactggtacaccagtgactcgccacgacaaggcgacgatccccgtgcccatgactgctatctaccagtgccacaatgaccagccgcagcagtctgcaggcatgtcgcccgacgcacgtcccgcgttctatcactcgtcgtgacaccat

SEQ ID NO: 132626 - DNA, 180 bp, Zea mays
  Clone ID: MRT4577_52444C.1
atgggcgagcagagcgtgcagggctgggcgaaccaggacgcgacattgacacaggagcgcgtgcaggggcagagggacgtgccgaagggagataggtacgaaagaactgtgagcagggggcaagctcgcgcggacgaagtcgctcggctgggcgcgcagagctccaagcggatgagctga

SEQ ID NO: 132627 - DNA, 683 bp, Zea mays
  Clone ID: MRT4577_52445C.1
gtaccctccgagcctgccgggatccctctggcctcgtctcgtcttctcttctcgcgaatgacggcgctgtgcgatctccgtcgctgccccctccgccggtgatttctgggacgcacgacgaacacgagttggaaggaggtggtcgtgctttgggcggcgagggacctgggcgctagcagcctcggaccctgacagatcacagcctgacagatcatagcgatcacaggcgctaccaaaagcgacgggcggccggcggcggcattgcagttggagcgagcgagcgcggtgcctttcggacgacactgagcacaggtcgcacatttttttcttgaaaggcgtgattattcaattccaccggcgccactgagcacaggtcgcacattgtcacatggagctagactagaggtcgtcgccatcctgtcagtgtctgctcgtgatcaaactgcctgctgcctgcccgccccaatacacccaaccagatttcaattcacttcttggaagctgctgcttcgagcttttgagtagcacccctgcttacagacatttcatatccatatatatgctcctcgtcctcgatctccttgccggcattatattgccccccacaccacccccgactccccacgaccattaatctgaagcagtgctttggtgtaggcctgctgctttgctcatcagctcgc

SEQ ID NO: 132628 - DNA, 846 bp, Zea mays
  unsure (1)..(846): unsure at all n locations
  Clone ID: MRT4577_52446C.1
attgggtacctcgaggccggccggggacgtcgggccgctatccctctggcctcgtctcgtcttctcttctcgcgaatgacggcgctgtgcgatctccgtcgctgccccctccgccggtgatttctgggacgcacgacgaacacgagttggaaggaggtggtcgtgctttgggcggcgagggacctgggcgctagcagcctcggaccctgacagatcacagcctgacagatcatagttgcagttggagcgacgggcgctaccaaaagcgatcacaggcgctaccaaaagcgacgggcggccggcggcggcattgcagttggagcgagcgagcgcggtgcctttcggacgacactgagcacaggtcgcacatttttttcttgaaaggcgtgattattcaattccaccggcgccactgagcacaggtcgcacattgtcacatggagctagactagaggtcgtcgccatcctgtcagtgtctgctcgtgatcaaactgcctgctgcctgcccgccccaatacacccaaccagatttcaattcacttcttggaagctgctgcttcgagcttttgagtagcacccctgcttacagacatttcatatccatatatatgctcctcgtcctcgatctccttngccggcattatattgccccccacaccacccccgactccccacgaccattaatctgaagcagtgctttggtgtaggcctgctgctttgctcatcagctcgcgtataacatgtctcttctcacgcggaggtagagctagctagctagatgtgtgtatgcatagaatagcgccagtataactgtagcaggaatgattataactgtagcagaaatga

SEQ ID NO: 132629 - DNA, 858 bp, Zea mays
  unsure (1)..(858): unsure at all n locations
  Clone ID: MRT4577_52447C.1
ccggggagtcaacttacgcgtggaaagacgcccagcctcttgacgtcgggccgctatccctctggcctcgtctcgtcttctcttctcgcgaatggcggcgctgtgcgatctccgtcgctgccccctccgccggtgatttctgggacgcgcgacgaacatgagttggaaggaggtggtcgtgctttgggcggcgagggacctgggcgctagcagcctcggaccctgacagatcacaggtgcgtcgaaccctaccagatctagacttgtctcgcctcctatcgatcacgccgttgcagttgcagttggagcgacgggcgctaccaaaagcgacgggcggccggcggcggcattgcagttggagcgagcgagcgcggtgcctttcggacgacactgagcacaagtcgcacattgtcacatggagctagactagaggtcatcgccatcctgtcagtgtctgctcgtgatcaaactgcctgctgcctgcccgccccaatacacccaaccagatttcaattcacttcttggaagctgctgcttcgagcttttgagtagcacccctgcttacagacatttcatatccatatatatgctcctagtcctggatctccttgggnnattttatattggcccccacaccacccccgactcccacgaccattattctgaagcagtgctttggtgtaggcctgctgcttgctcatcagctcgcgtataaacatgtctcttctcacgcgnaggtagagctagctagctagatgtgtgtatgcatagaatagcgccagtataactgtagcaggaatgattataactgtagcaggaatgacactatattttggtccaatttgtttccttatttgc

SEQ ID NO: 132630 - DNA, 535 bp, Zea mays
  Clone ID: MRT4577_52448C.1
gatgggaaatcttcggatcattctgctgcgattaaggatctggtgggagggtactatgttgcttgggatgctatcaagtttaactttcctgcttcgttttccattactatgttgagttggagtgtgattgagtacagtgcaaagtatgaggctgctggggagcttgatcatgtgaaggagattatcaagtggggtactgattattttctcaagagttttaatagcactgctgataccatcaccacccttgctgctcaggttgggcttggagatacttctggtggtgacagtccgaatgatcactattgctggatgcgtccggaggacatggactatgaccgccctgtgactgaatgccacagttgttccgatctcgcggctgagatggctgctgccttggcttctgcttccattgttttcaaggacaacaaggcctattccaagaaactggtgcatggtgcgaccacgctgttcaagttttccagggatcagagaggcaggtacagtgctgggagttcagaggcttcaatatttt

SEQ ID NO: 132631 - DNA, 345 bp, Zea mays
  Clone ID: MRT4577_52449C.1
gggcaacgaaaacactgttatacaattttttgcactatagactgcactgttagatgttaggatggctaatctgctggagatagccttatgctatctatagttatttacacttcattttaatatataacccttcccaaccatagttttgttccttatggtttcaacttgtaactgaaatgagttcagaaaaaaatggtgatccaagaaagcaattcttacagttgaaacatgatacaaggtttgatcagacatattaaaccccgaaaggatatcacactacacaatgatcaaagctttgtttaaccccacggaagccttgtcattggtgggattccaagaattatg

SEQ ID NO: 132632 - DNA, 316 bp, Zea mays
  Clone ID: MRT4577_5244C.1
tctagatcgccgtggtcccccaattgagtaacctttgtccggaatattacccgttgcctggctggttagttaagccattaaccgccaataatggattattaaggggtaacgcttaaccatgggtggcatggtaagtgtaagcaatgacctgatggaccaatggaattgaaaagttaaacaaaaaaagcaaagattagaaggacccacaaaaaaaagctgatcactgagatcaacagaacaactacagttagacaaacgggacctgtccaaggtactggacactgaccttattcatacgcggtaataagataacaaa

SEQ ID NO: 132633 - DNA, 272 bp, Zea mays
  Clone ID: MRT4577_52450C.1
agcatttgcccgagtggaagctagatgtggatatgtagtcaatgctggccctaaaggcttatttaagcctgcgcaatctactatcattcaaacattgctctcaccttctctttactttttttattttcttactaatcttttatatagtttatttcttttttactatttacttaagtcatcatctttatattaattctctcttttcaattcttcttgtttaatttctatatctatattttcttaattttactaatcccacttatatccttttc

SEQ ID NO: 132634 - DNA, 436 bp, Zea mays
  Clone ID: MRT4577_52451C.1
atcgggataaatctcaaccaattttttggttttttttagggaaacacatgccgggttggggggccccttttcgggtacctttcatttggaatctaaaaaagggccccccaacgatggggtggtgccttgacaaggacagggtttattaaagagaaccggttgtttgggaacaattgttgcttcttttggaagggagccaccaatgggtttgcccctgccaatggattaagtaactgttgtcccttttgtagggacccaacaaagttcgacataattagttggttgaatggaaacaacttttgcaagtaggcaacagggtttgccacaacttgctgagttagagctggtacaatttgttgcaacaatttttgttgcaggtttgtaggggcattggccacagcgggggggcttgattaaaacaatttttgctttttta

SEQ ID NO: 132635 - DNA, 737 bp, Zea mays
  Clone ID: MRT4577_52452C.1
gggccctccctcgagtttttttttttttttttttttttttttttagcaagttttgtgtagcagttttaaacatgccaaatacagtgcaaatgcatagcaagtcattggaaaggataggaaacaaagccgagagtaacatagaaaataaaatggagtcaagtttctaaaaagtttcgcacaaatatacatatttctaaaaaaattcttcacacgttcgacatgacgtcctctagatgccacctctctcagcactttcctgaaaccagcagacattcgtaaggaataaatcaaaattttaatagcactttgtttatttacaatagaaatctcagtgcacagcatcaatgtattcaaaaataagaatacaagctcaaataaggagaagataaaatggagtcaagtcaacacattcatatttatcaatttttcacggacgacagaattgaaagtttgaacagaagttaaattactaagattttagtgatctccacaatatgggatatagagatcaatagagaacagcataatgcatgatgcagacctaatgctcaaagtaccaacaaatgtcaaagaagcacaacaacagagctccatcaaaatcacaaggtaagtagaatgcaactgtgtagcatttttgttaacagaaagtgtatccaaaaagggaggacagtgcataaactctctagcctgtgaataggtgcaaaaactccattcagaccaagaaagatcatcaataa

SEQ ID NO: 132636 - DNA, 700 bp, Zea mays
  Clone ID: MRT4577_52453C.1
cattgggtacctcgaggccggccgggacatctcttgtatacaattgcccgttgcctcctgtcgttctcctcccttgctccgttctctcttatttccctaaaaggatgccccaaaatttacctccgatactcgctcacatcggcatggccgcccccaacagtaacgaccactgcattgccagtgataccgatccgagtgtagaggatgacatctccatcgcaggcgatgctgcggcgagtaccaagagcacatgaccctcagttccaaccccggcgttcgccagctcaaattgtgacaaatgcatgcagctggccaattacgccacgtccaccatatatcgctacctcatctgctcatccagcctctcacaccactttcccaggtgcgcgccgactcctaaccgttacccgtcgacttccagtggctcacctgcgaaattcatgaccatctactcctgcgcggacctctactcgctgacttgcccacaacgtacgtcgagcactacgagaatatgtaccgcttcaactactctccggccttcctctgctgcgcagctcaaaccaccataacttcttcccggactggaacatctgcgttcatggcgatgagtccaacaatgtcgttaacttcatctggggcatttagactctcatccgcgctctcgaagacgtgttccgcatgctcgagatcaacttcctct

SEQ ID NO: 132637 - DNA, 529 bp, Zea mays
  Clone ID: MRT4577_52454C.1
ataaaaaaggaaaaaaaaaaaaacaggaaccccaccctttataagcaaaaagggataaaaaaaaatcaaaagcccccggggcaggcgaaaccccacaaaaaaaagggggggggggggggaacaaaaaaaaaaaaaccccccaaaaacgtttatttcgggggcaaaaagaaaaggaaaagggcgcccgggtaaaaagggggaaagcccaaagggccccggccaaaaccaaaatcccaaggggccaccgaaaaaaatccgggtccggcccgggaaggtccaaagaaaacaaggccggggggggccccggagggaaccccccccccccccgggccaaaaaaaccccccccggggccccgggagcaaaaagggccaaaccgaccccccccggaaacccagaaaaccaaggcctggcccccaaaatgggtaaacccggggcccccctaaaggggcccccaaggggggaaaaaatcgggcaccccgggggggccaaaaaaaaaccccggaaaaaggggccggggggggcaaaagg

SEQ ID NO: 132638 - DNA, 496 bp, Zea mays
  Clone ID: MRT4577_52455C.1
gctggtgtttttgttttttttgttttttgttttgtttttgttttagttggttgtttcatggtgatttattgtgtgttgaagtttgttcagtgctttggcgagacgagtggtgtattaaagaaaaggggggggctaataatgcattgtcggggggggggggggtgaaataaagcttggttttggagtgcagctcttaggggctctcggaaatgtctttaggcagaaaatgatttttggtccgaggaggggtggttgaggaagggtcaaatctcctagaatgatctcgtaatcggataaaaaccggttttaacagagaggttaacggttgatcactggggggggaattttcctccaaacaagggagggggaggggttttttgattccagggccccttaccgggggttttgggaaaggaccactggggttattgttgtgaaaggggggtccaacggctcattgaaggagaggttttcgccaaagaaaaaagttcttggg

SEQ ID NO: 132639 - DNA, 566 bp, Zea mays
  Clone ID: MRT4577_52456C.1
agactctctgactctctctctctccgcctgcgtcgagggattctcacattctccgagtaggagcagggagacgggcacctctccccccgtgccaacaacgacctactcgacgacggctctccgacggcaccgccagtgcttctacgtcgtcccgccctcgcaagcgacatatcggcggctctcgtgcgcggaagacccctggatttgcaccaacaacatgtcccatgtggtcatcctcgacgcctgacactgccacgggagcggccctgctgcggctcaggtatcctcctcctgctgcctagccaactacacacatgccggccttgattcctcgtgcctcgaagacatcccgggcattgccgtgagccagattcacctggggatccaccggagtgttctatgaccaagaccaggccgttgatcacttgctggggggagaccagaaggaggacctccctgccccctgggctacgcccctgtgatagagtgagcaggcaactgacttcaggaacccccccataccactgttgacgctaatgatgattgtgccagttgatgacgaggtc

SEQ ID NO: 132640 - DNA, 173 bp, Zea mays
  Clone ID: MRT4577_52457C.1
tcgcgtcggagcagccaggccagccagtcacctctgcttggtctccatggccgccgtgctcaggtccccggccttggccaagggctcgagccccgccgccgcctccaaggtgcgccaggcgtccagagtcgcggtggtcgggttccggcagcatgcgcggagccgtggcgccc

SEQ ID NO: 132641 - DNA, 455 bp, Zea mays
  Clone ID: MRT4577_52458C.1
ggaagggaattgtttaaaatagaatataatagcggcccgccctaaagtgctgggaattgatgtggaaagcactctctcctggaaccaagggcgttagaccctgagagcttttattgttccttcggaggggcggaagaagccaaggcaggtattggccgctcgcagtccttgaagaggtaggcctcgaagccgaagcacacgcactttatgcaggccgggctggaaggcgagcggaagcattccctgaggacctggcgggtcgcacgctcgtaatacgccccacaggagctcctatctggggcgaaatccccacacgtcaaagttgcttttggaagagggtaatggcaaacacggcccttttgctttgaccggagccgaaagcctacctcgtggccacatcttgggcaggagatgaacccttctgggtgggacggacgtgcgaaacagaccttgtg

SEQ ID NO: 132642 - DNA, 292 bp, Zea mays
  Clone ID: MRT4577_52459C.1
gcttccgcccacgcgtccgcccactcttccgcgctcgcttcgtctagcagcgataaaaagggggaggtgaggacatagattttttagcactacagcacatggattaatatcctgacacccgctccgaatgtgcaaggacaagcggagcctgaaatcggagccactgctgacgatcggcacttagcagccgaatcactagacaaagaaaaggtagctgcttcagctacagcaaaccaacaagatgttgcagcagaggaaacggaagctcccacagatgcctaacatacaccca

SEQ ID NO: 132643 - DNA, 793 bp, Zea mays
  Clone ID: MRT4577_5245C.1
acgtggtcacgcttctcccgtcctttccaccaggccagcgacccgccgccgcggagatcgctcgcttgctcgctgtcggctccggcgccggcgccggccaggagatccctccgctcctccccctcccttcgcccccgagacgctcggctcaggaatttttggttgatttaagatggacagggctaggaattttatacctggccctaatcaggagcttctggatatcaagccaataaggtctttagctccaatgttccctgcacccatgggagtcaacattaaccagtcaagcaccccaccgttggtctgtgtgactcctgttggccagtttcctacaggatttggtggtggaaaccttcctgcttttggatcattcaccaccttcagtgttaccgcgaatggtttttcgcaagcaggcacaagtgctaatggggccattgatgctactcctatctcagcatacaagacgagatcatctggggctacagcacttaatggtgacgatgaaccttattcgggtaatcagacttcagcatctggacgcaaggctaagaagaggtcagctggtttgtctgctgacggctcagatggagttaaggtcaagcgccctaagcctatctacaagaatcttgttgctggcaaggagcttgctttcttgccagcttcaccaaataatcctagggagattgtggaagcagttcatatgaccttcgaggcactcagacgtagacatcttcagatggatgaaacacaggatgctagcagacgtgcagaactgaaagctggcgccatc

SEQ ID NO: 132644 - DNA, 278 bp, Zea mays
  unsure (1)..(278): unsure at all n locations
  Clone ID: MRT4577_52460C.1
cggattccccggtcgacccacgcgtccgctgtataagatgagcgacggagacgacgctgctagacgccgtaccgcggcggtgactgattaccgtaagaagctccttcatcacaaggagctcgaatcccgtgtccgaacagctagggagaatttaagagcagntaataaggaattcaacaaaactgaggatgatttgaagtctcttcaaagcgtgggccagattattggagaagtactacgtcctcttgataacgagcgattgattgctaaggcaagta

SEQ ID NO: 132645 - DNA, 229 bp, Zea mays
  unsure (1)..(229): unsure at all n locations
  Clone ID: MRT4577_52461C.1
tcagcattcaaaaacacgccaagcgaatctcactagcaacgtactaacaccaatggctaccaagatatnagcccttcttacaaaagcttgccctcctagttatcgcagcagatgcgttcattataccacagtgctcacttgctcctaatgccattattccacacttcctcccaccagtcactacaatgggctacaaacatcctaccatgcaaacctacaagctacaact

SEQ ID NO: 132646 - DNA, 389 bp, Zea mays
  Clone ID: MRT4577_52462C.1
aaacagccttcccgtcacagacgccgccgcctcctggagacctggaaggtcgccgccgtcgacttccaccggatcccttctggtgccgccgctcctgcaggactcgtcgtcccaccgcaacctagcgaatccgcgacctctcccgcccaccaccagtcttcccctgcctccgcccaccacaccgtcccagtcacagagaagggaaaagaagaacctctttccggcagggctgtttcttcccgatgctccggattgcctctcgctcgggtttgcttggtggcaggagatgctacagcgccgccgcgaagggcggcctctcaatcagtggcgtaagtgacatcattgctgtcgcttcagggaaaggcggcgtcggcaagtccaccactgca

SEQ ID NO: 132647 - DNA, 435 bp, Zea mays
  Clone ID: MRT4577_52463C.1
aaacaaacaaaaggcgggggccttcacctggggacaaaaacaccacactcatccaaattcactccccaccagatccaaattcacactctcaccacttttttttcaaattttacaaccgcccaggggtcccgctcctccatgtatatctctcattggggggggggaacaccatcggcaccatccttggacgaatcgaaggcaagggggactaataagtcagggggtgcccaaatccatccattggaaacgtaaatcttgggggggatgagttttcatcggatccaacaacgacaaaaacggggcacgtacctactaataaaaaagggagatcctcaaatccggacggaccccacggaaaaaaccaatccggcaaactccgggggggggcggaccacgggccaacttttggttttgacgtcaaacacccaaagcgcg

SEQ ID NO: 132648 - DNA, 992 bp, Zea mays
  unsure (1)..(992): unsure at all n locations
  Clone ID: MRT4577_52464C.1
gggtacctcgaggcggcgggattccaccttcctcaccgggcgcacgaaaccctaacgccgccgcttcacaggtaagccgccgccatggtctccggttccggcgtatgcgcgaagcgcatcgtggtggacgcgcgccaccacatgctgggccgcctgtcgtccattatcgccaaggaactgctcaatgggcagaaggtggtcgtcgtccgctgcgaggagatctgtatgtcgggtgggctcgtacgccagaagatgaagtacctccgctttctccgcaagcggatgaacaccaagccatcccatggacccatccacttccgcgccccgtccaagatcctgtggcgcaccatccgcgggatgattccgcacaagaccaagaggggggaggcggctctggcgaggctcaagacgtacgagggcgtcccgccgccgtacgacaagaccaagcgcctggtcatccctgacgctcttaaggttctgaggctgcaaccaggacacaagtactgcctccttggggagctttctaaggaggtcggatggaactaccatgacaccatcagggagcttgaggagaagaggaaggagaaggctaaggtggcctatgagaggaggaagcagctggccaagctgcgcctaaaggctgaggctacagcccaggagaagttagggtcccagctggacattcttactccgatcaagtactgaatttgtggaacatctgatccatcgttttaaaagttgtgacagtataatcttgagtgctattccgaacacattttttagccggtgaatgtattgtttgttttatcagatgtggttcgcattcacattctaaaaaaaaaaaaaaaaaaaaaaaaaaaaaaaaaaaataanaaaaaaanacaaaaaanntttttaaaaaataagaaaaataaaaaaaaaagtcctctgcgttgtttcccctgcttatgggcgaattccggctctttggcggccgtttctggtggttcggg

SEQ ID NO: 132649 - DNA, 499 bp, Zea mays
  Clone ID: MRT4577_52465C.1
gtgcggcgctcgaggcggcaggcctccaagacatggtgttcgcctgctccgactcccgcgtgtgcccgtcggtgacctctgggcctgtagcccggcgaggtcttcaacgtgcgcaacatcgccgccatggtcccagtctacgacaagaccaatcactccgtaatcggctccgccatcaagtacatcgcgtgcgcgttcaaggtggagggcctctgtggacattgtaacacagttgctgcggagacatctaggagcttgtctacctccaggacggcgtaactgatcacttccacttccatgagatgtgagctcggaccctattccctgccacgatctagaagtagagaatcccccgatctgcgggaattcaagatcaaggttatatataacataaagctcgaggtaacctgtccctgcagaacctcaagatcatagacttcattaggatgggttgctgaacggcgttctacaggtggtggctgggcactaccatttcgtt

SEQ ID NO: 132650 - DNA, 226 bp, Zea mays
  Clone ID: MRT4577_52466C.1
aaacgttggctacattcagtttgatcattggctaccttgctgatcattggaacatggccacaaaggaactgctgtcacgaaaggttttgcagaatattaaaaagcataagcttaagcagcttatagatgatactattggttctggtcctgcagaatcttctctgataaactctggccttgaagtgtgctttggcccatccctccttccaaaaagcattagcgatgt

SEQ ID NO: 132651 - DNA, 848 bp, Zea mays
  Clone ID: MRT4577_52467C.1
cgttgctgtcgcccagccgcacgaaaccctaacgctgccgccgcttcacaggtaagccgccgccatggtgtccggttccggcgtatgcgcgaagcgcatcgtggtggacgcgcgccaccacatgctgggccgcctgtcgtcgattatcgccaaggaactgctcaatgggcagaaggtggtcgtcgtccgctgcgaggagatctgtatgtcgggtgggctcgtacgccagaagatgaagtacctccgctttctccgcaagcggatgaacaccaagccatcccatggacccatccacttccgcgccccgtccaagatcctgtggcgcaccatccgcgggatgattccgcacaagaccaagaggggggaggcggctctggcgaggctcaagacgtacgagggcgtaccgccgccgtacgacaagactaagcgcctggtcatccctgacgctcttaaggttctgaggctgcaaccaggacacaagtactgcctccttggggagctttctaaggaggtcggatggaactaccatgacaccatcagggagcttgaggagaagaggaaggagaaggccaaggtggcctatgagaggaggaagcagctggccaagctgcgcctaaaggctgaggctacagccgaggaaaagctagggtcacagctggacattcttactccgatcaagtactgaatctgtggtttcgtgcctatcagttttgtggaacatctgatccatcgttttaaaagttgtgacagtataatcttgagtgctattctgaacacattttgtagccggtgaatgtattgtttgttttatcagatgtgtggttcgcattcacattctgagggatttc

SEQ ID NO: 132652 - DNA, 854 bp, Zea mays
  Clone ID: MRT4577_52468C.1
ttcccccggccgcacgaaaccctaacgccgccgcttcacaggtaagccgccgccatggtctccggttccggcgtatgcgcgaagcgcatcgtggtggacgcgcgccaccacatgctgggccgcctgtcgtccattattgccaaggaactgctcaatgggcagaaggtggtcgtcgtccgctgcgaggagatctgtatgtcgggtgggctcgtacgccagaagatgaagtacctccgctttctccgcaagcggatgaacaccaagccatcccatgggcccatccacttccgcgccccgtccaagatcctgtggcgcaccatccgcgggatgattccgcacaagaccaagaggggggaggcggctctggcgaggctcaagacgtacgagggcgtcccgccgccgtacgacaagaccaagcgcctggtcatccctgacgctcttaaggttctgaggctgcaaccaggacacaagtactgcctccttggggagctttctaaggaggtcggatggaactaccatgacaccatcagggagcttgaggagaagaggaaggagaaggctaaggtggcctatgagaggaggaagcagctggccaagctgcgcctaaaggctgaggctacagcccaggagaagttagggtcccagctggacattcttactccgatcaagtactgaatttgtggaacatctgatccatcgttttaaaagttgtgacagtataatcttgagtgctattccgaacacattttttagccggtgaatgtattgtttgttttatcagatgtggttcgcattcaggttcttagattttcgtagcactctttacaacgcaacgacatcatcttaagtgctat

SEQ ID NO: 132653 - DNA, 646 bp, Zea mays
  Clone ID: MRT4577_52469C.1
accccctccgccgccactccaacacttgcgccgccactgcctacaggtaaggccgccatggtctccggttcgggcgtgtgcgcgaagcgcatcgtggtggacgcgcgccaccacatgctgggccgtctctcctcgatcatagccaaggagctgctcaatgggcagaaggtggtcgtcgtccgctgcgaggagatctgcatgtcgggcggcctcgtccgtcagaagatgaagtacctccgcttcctccgcaagcggatgaacaccaagccgtcccacgggcccatccacttccgcgcccccgccaagatcctgtggcgcaccatccgcgggtatgtcagcaacgccacgccgcccggatccgtctgatttcttccttgcgacgtgctttgtggcttgtgaggcttatgtttgctgtggctgatttgcaggatgattccgcacaagaccaagaggggggaggcggctctggcgaggctcaagacgtacgagggcgtcccgccgccgtacgacaagaccaagcgtatggtcatccctgacgctcttaaggttctgaggctacagcctggacacaagtactgcctcctcggcgagctctctaaggaggtcgggtggaactaccatgacaccatcagggaacttgaggaga

SEQ ID NO: 132654 - DNA, 225 bp, Zea mays
  unsure (1)..(225): unsure at all n locations
  Clone ID: MRT4577_5246C.1
gccggcagcggaggtggtggggcggctcaggatgacggcgacttcgtgctctccgccgcgccatcgtccgggaggtcaaggacaacgagnaactacggnaacaaaatcatctcagaggtaaagcagtcagtggttctacaagaagatggatctgagaggatgaaattaaaagacctatctgatgcaatttttcaagatattgggagcaaaataatgggtcaaatc

SEQ ID NO: 132655 - DNA, 1060 bp, Zea mays
  Clone ID: MRT4577_52470C.1
gggatacactcgcttcccccagccgcacgaaaccctaacgccgccgccgcttcacaggtaaaccgccgccatggtctccggttccggcgtatgcgcgaagcgcatcgtggtggacgcgcgccaccacatgctgggccgcctgtcgtcgattatcgccaaggaactgctcaatgggcagaaggtggtcgtcgtccgctgcgaggagatctgtatgtccggtgggctcgtacgccagaagatgaagtacctccgctttctccgcaagcggatgaacaccaagccatcccatgggcccatccacttccgcgccccgtccaagatcctgtggcgcaccatccgcgggatgattccgcacaagaccaagaggggggaggcggctctggcgaggctcaagacgtacgagggcgtcccgccgccgtacgacaagaccaagcgcctggtcatccctgacgctcttaaggttctgaggctgcaaccaggacacaagtactgcctccttggggaactttctaaggaggtcggatggaactaccatgacaccatcagggagcttgaggagaagaggaaggagaaggccaaggtggcctatgagaggaggaaacagctggccaagctgcgcgtaaaggctgaggctacagccgaggagaagctagggtcccagctggacattcttactccgatcaagtactgaatttgtggaacatctgatccatcgttttaaaagttgtgacagtataatcttgagtgctattccgaacacatttttagccggtgaatgtattgtttgtttaaaaaaaaaaaaaaaaaaaaaaaaaaaaaaaaaaaaaaaaaaaaaaaaaaaaaaaaaaaaaaaaaaaaaaaaaaaaaccccaaaaaaaaaaaaataaaataaaaaaaaaaataaaaaaaaaaaaaaatatggggggggcctttttaaaggatcaaaattttttttcccgttgttggaagattaaatttttttttaggggccaccaaaattaaaataactggcccgttttttaaaaactgggtaattgggaaaacctctgggttttcccaa

SEQ ID NO: 132656 - DNA, 991 bp, Zea mays
  Clone ID: MRT4577_52471C.1
ccgggtaaaataatataaaatttttgtaacttgtaaaatttggtaataagatttccgctgcaaaaaaaaaaaacccgcttcccccagccgcacgaaaccctaacgccgccgccgcttcacaggtaagccgccgtcatggtctccggttccggcgtatgcgcgaagcgcatcgtggtggacgcgcgccaccacatgctgggccgcctgtcgtcgattatcgccaaggaactgctcaatgggcagaaggtggtcgtcgtccgctgcgaggagatctgtatgtcgggtggactcgtacgccagaagatgaagtacctccgctttctccgcaagcggatgaacaccaagccatcccatgggcccatccacttccgcgccccgtccaagatcctgtggcgcaccatccgcgggatgattccgcacaagaccaagaggggggaggcggctctggcgaggctcaagacgtacgagggcgtcccgccgccgtacgacaagaccaagcgcctggtcatccctgacgctcttaaggtcctgaggctgcaacctggacacaagtactgcctccttggtgagctttctaaggaggtcggatggaactaccatgacaccatcagggagcttgaggagaagaggaaggagaaggctaaggtggcctatgagaggaggaagcagctggccaagctgcgcctaaaggctgaggctacagccgaggagaagttagggtcccagctggacattcttactccgatcaagtactgaatttgtggaacatctgatccatcgttttaaaagttgtgacagtataatcttgagtgctattccgaacacattttttagccggtgaatgtattgtttgttttatcagatgtggttcgcattcacattcttagatttttcgtagcactctttccaacgcaaccacatcatcttaagtgctatgaaactatgaatgacacaatgtctatcaattcaaaaaaaaaaaaaaaaaatgagc

SEQ ID NO: 132657 - DNA, 1545 bp, Zea mays
  Clone ID: MRT4577_52472C.1
gccgtcggggccggggcgggaaaccctaatcgtgaccgccgcgccagcgccagcaactgaagtttcgtcctcgcggccttctctccgtccactcgaaccgcgccgacgagcgacgacaaccgttgctgcattcttcaatggcgactgtgccagttaacccaaaacctttcctgaacaacctgacggggaagcctgtaattgtcaaactcaagtggggtatggagtacaaaggttatcttgcttcggtggactcctatatgaatctccagcttgccaacactgaggagtacattgatgggcaattctctggaaacctgggagagattctgatcaggtgcaacaacgttatgtatctccgaggcgttccagaggatgcagagatagaggatgcagaatgagaagatgtgaatgtaatttgattctgacatgtatgtttgaatatgccggtgacaactagacctatcggatcttagttatgatcagtagggcttgaggtgctgttcaaactgctttcagttggactatgttgtcgttctattgaatgtgaggaatatcagatttccttgaaacaaaaaaaaaaaaaaaaaagtttctcttgcctcaaaaaaaaaaaaaaaaaagcccccttccgccagccactccaaacacttgcgccgccactgcctcacaggtaaggccgccatggtctccggttcgggcgtgtgcgcgaagcgcatcgtggtggacgcgcgccaccacatgctgggccgtctctcctcgatcatagccaaggagctgctcaatgggcagaaggtggtcgtcgtccgctgcgaggagatctgcatgtcgggcggcctcgtccgtcagaagatgaagtacctccgcttcctccgcaagcggatgaacaccaagccgtcccacgggcccatccacttccgcgcccccgccaagatcctgtggcgcaccatccgcgggatgattccgcacaagaccaagaggggggaggcggctctggcgaggctcaagacgtacgagggcgtcccgccgccgtacgacaagaccaagcgtatggtcatccctgacgctcttaaggttctgaggctacagcctggacacaagtactgcctcctcggcgagctctctaaggaggtcgggtggaactaccatgacaccatcagggaacttgaggagaagaggaaggagaaggccaaggttgcctacgagaggaagaagcaattggccaagctgcgtgtcaaggccgagaaggcagccgaggagaagttggggtctcagttggagattcttgcccctatcaagtactgaggagctgtgctttgtcatcagttttggggaacatctagtctttgttttaagtgttcggtaacagtttgtgacagtataatctggtaaaccgtgttatttttctgccactcctatttgaacacattttctagctggtgaatgaactgtttggtcgatcttgttcagatgtctggttcgcattcgcattctgagagatttcatgtctcgtgctgaaaaaaaaaaaaaaaaaaggcccctagggcc

SEQ ID NO: 132658 - DNA, 321 bp, Zea mays
  Clone ID: MRT4577_52473C.1
aaccaaaaccccctttttaaagccaattttcaaccgggacaaagggggtttttttttaaagggggagggtccccccccaacctgacctttttttttttttttccaggacacacaagttaagcctactgggaccaacaacagttgttggccccccccacaaaattttccaccaagaaaccccaactccaactttaacacgaattcttttgttaagctttctatattccccatttggggaggataaacaaatccccgggttccccctggcaaatgggaacctcattagttttcccgggtgggccctgtatttagggggggggg

SEQ ID NO: 132659 - DNA, 243 bp, Zea mays
  Clone ID: MRT4577_52474C.1
tcgaccgccgtcactgaatcctcagatcacggctagccgtaatcacgccactctgctcactcccggcgagcagtgtaacattttccttcagccatgggccaggaaaagactcacatcaacattgcggtcattcgacaactcgactctggccagtcgagcatcagtggccaactgatctcatagcttcgaggtattgacaagcgtgtgattgagaagttcgagaaagaggccgcggagatgaac

SEQ ID NO: 132660 - DNA, 466 bp, Zea mays
  unsure (1)..(466): unsure at all n locations
  Clone ID: MRT4577_52475C.1
attcccatcaccgcgtgtgagccagtcgatcctgaagggagataagaaggaagcgaccggtgcggaggaggactactgctggatctgctgtcatgctagctccaacgaccaccatgtgcgcccgatcgaacgagcgacagactgcagccgccatcgcgtcatctcgccaccacgaccaaggagactgtgctgacggccacaatttgctacacgctgaagagatggctggacatctccctgctccactcctgatcggtcacgcaggtacagagtgcgcctctggtacgacatactaactccttggtgcttgcaaggagaacatgccgctaacacacaactcttacatgcaagtgccggccttactactaaaaaaattgctctggcgatcttcagctcaagcgatgcatggttcaagactccatggaaggnttaatgatatgcgtataagttagccgagtacctgaac

SEQ ID NO: 132661 - DNA, 275 bp, Zea mays
  Clone ID: MRT4577_52476C.1
ttagggtaggctgagcccctgcggtccggccggatcacggtcgcccttcgtccgcgtgcctcttatcggctgccatgatgctgcgcgctgtgggcacgcgactcctatgcgtatgaggaggctatccagcgcccatagtcgctgctgctgtggcggcgagcaggagcagaggataccacaagcggttggcggaccactacaacaacccggacagcaaggggtccttgaacaaggacgacactgacgtaggaaactgggatcgtttgctcgccggc

SEQ ID NO: 132662 - DNA, 291 bp, Zea mays
  Clone ID: MRT4577_52477C.1
cgtccgcgacgacgaccagtaaactgtaccacggcggcgtcgcggactttctgctttaaaactataacgatgatacagagggaacgcgcgcatggcatggatagcagtatccactgaaagaaaaggaagaaaaggaaataaaaaaatgtaacagagtgcttgattcatttgctgctgtcacccggtcaccccattccccgttcttaacatacaagttgcagcggtgcaagacggctaaaacatgacaataatactacaagctctgcgaaattaattaaaactcgccggcag

SEQ ID NO: 132663 - DNA, 372 bp, Zea mays
  Clone ID: MRT4577_52478C.1
tataatggtggaacgtttttttttttttgtttttgataaaaaaataattttttttttttaattttttatttttttttattaatatattttttttttttatatttattttttatatacacaacaaaacaattctttataatattacctactattgaaccagaaaaaacacatccaaaaaattataaaaaacctcgtttccaaccgaacacgcaaatcacacataaaaaagattcctatccttcggaaaaggaggataaaccatggttttaccactatttcatcaccctactatgctaaaaaaaaactctttcacatatttaaaaaacaaaatattccctaaaataatgtttttgcataaaaaaaaaacaattt

SEQ ID NO: 132664 - DNA, 325 bp, Zea mays
  Clone ID: MRT4577_52479C.1
atttgtctcgaggtcgacctgcgctactccttttttcctgaccactagaaatgacgctctggggggagaattacaccgaagcgggggctcctgctgccgacgccaccgcggtaccgtcggggaacggacagaccgcgtgcgtgaccggagcggccgggtacatcggctcgaagttgctgaagatgatgctcgagaagggatactctttgaagggcaccgtgcggcacctagatgatctaaagaacgctcacgttaaggggctggacggcatccacgagcggctgatcctatgcaaggtcgatctgctcgactacgacgccatctg

SEQ ID NO: 132665 - DNA, 894 bp, Zea mays
  Clone ID: MRT4577_5247C.1
atgactaaaatgaagagtagtgtaatagaaaaaaaaaaaaaaaaaaaaaattcctattcgagtgaaagcggcccccaatttctactgtaagcagcaatggcgctctcctgttgcttgctcgccggcgcccgggcggcagcctccccttccttctcatcctccgctgccatccgccggcgggaccaccgtctgctgaccttgtccgtggttccgctttcgctctctcagcgatgtcgccacggcctccgcgtgtgctgcgcctcctccacctcttcctcatctccgccgccggcaactcccgaggagcccgacgactacgagttattggacacagctgggaattgtgaccctctatgctcggctgatgaagttagctcacaatactttgaagctaactacaaaccaaaaaatgaccttctaaaagctttaactatcattggcacagccttgactggagcagccgcaataaatcattcctgggttgctgctaatcaggacattgcaatggtgttggtttttgctattggctatgcaggtatcgtttttgaggaatcactagcatttaacaaaagtggagttgcgttattgatggctgtctgcctatgggttatcagaggcattggggctccctcgactgatgtagctgttcaagagttgagccagtcaacttctgaagttagtgaaattgtgtttttcttgcttggtgcaatgactattgtggaaattgttgatgcacatcaaggttttaagctggtgactgataatatatctactcgaaacccaaaaactcttctgtgggtgattggtattgtaactttcttcctgagttcgatcctcgacaacctgacttccactaatgtgatggtatccttgcttcgaaactagtacctcatc

SEQ ID NO: 132666 - DNA, 700 bp, Zea mays
  Clone ID: MRT4577_52480C.1
ccggccggggcgcccgagcagagagagcctgactctgcagctatacgagctcagactccctctcctccctcctttctcttaccttcctcgtgagacatcaccgccgtctcggtacgtggcagcaaccaaccgttcgcttctctctcctggagcgtcgcgcggggcccggcgggggaccgtacgtacctgtgcgcgaagacggggacggtggcggagttcgagatggaggcggcgccgatgcgaaaggcgtcgtcgcaggcgtcgctggcggacccagacgacttcgacctgacgcgcctgctgaaccacaagccgcggatcaacgtggacaggcagcggtcgttcgacgaccgctccctcggcgagatatcgctcgccggcgcgggcacggccagccgcggtggctggggctacggcggcggggggatggagagctacgagagcatgtactcccccggcggcgggctgcggtcctactgcggcacgccggcctcgtccacgcggctctcgttcgagccccacccgctcatcggcgaggcctgggacgcgctgcgccgctccatggtgtccttccgcggccagccgctcgggaccatcgccgccgtcgaccactcctccggcgaagtgctcaactacgaccagggggtcgctagggacttcgtcccgagcgcgttggcgtttctgatgaaacgggagccgg

SEQ ID NO: 132667 - DNA, 423 bp, Zea mays
  unsure (1)..(423): unsure at all n locations
  Clone ID: MRT4577_52481C.1
cccaggcgttcgaccacgcagacgaagactgacatcaacactggctgcacagctagctgcacaagccaactgcgttgctgctattgctgaggagatcaatgacagggagggtatggtggcgactgtgcagaccactgctgatgccaacaccgctcctcaggggactgnagangagccctgaagtaatgactggaggggtggccggaatgttagttgcagcatcactcccagtagtaatggagctgctaaggcggttgctgaagtgattgctgagctgaacggaaagttgactggagtgccaacccgtgacgcaaccgtcgatgattctgctgttgagttgactgagagagtagaataggcagagaccaaggatgagatcaaggccgcggccaagggcaggcccgagggcagcctgaaggacat

SEQ ID NO: 132668 - DNA, 1843 bp, Zea mays
  Clone ID: MRT4577_52482C.1
tcccggggaatgtgcaatgctgttacaacagcatgcatccctctttctccgtatcttctgttacaccagtgtctttcgggtatcagaggtaggatgatataccactatggggtcatctaatttctctagctggagaacacggtaggatagcaccagaaggaactatatgttacaaaaaaaaagaaatctgatctggacaaaacttgctttgatatcgccaaaaaatggaaggcatggcactagtttctaccagcccaaaatgctcagaagaacaagattgaatcagaatgtgaccaatatacatgttaatttctgtagccaacaccaaagtgaaatctgcttgcttgcctatcattaaaggcgtactcaagccgtagaggtcccagagggggagtccacgcggacgccaacaccatagccaaagccactccctggctttccacgagctccggctgggtcaccaggaactttaggaccagaaccaagatcactaccatagtctccaaagaccacgccttccagtggcccaaacatgcggcatgacacttcaccactacctacagcataagaacgcccagagccaacagcaccttcttcatatcctcttacactatttgtcccaccaattgcaaatgcttcatgaggtggaaaatttccctccatgtgacctccagaggcacttagaagaagcctagcaggaccaatttcatagccctgcctcaagcgtgctgtcagtcggttgaagcttagccactcagggagaacagggagaccttgctcaatgttgaaaacaaacattgtagagctatggtctccagaatctgtgtagatactttcaaacttagctaacagtgtatcatcataatcatgtccactggcagtcaattggctgttatagaaatccctgatgaccggattccctttatcatcacgagcaccagcatgctgaaaaattaagccaagtgtcccactccacttgggtctgaatggtcgactatattctaagccagcaataacacgtccaattgttataggcgcatggtcaggatgatcaccaccatgaacaagtgttccaggagtcctagagttctgaaccataacagttctagaggttctcttgttgtctccatcaatccaagggtcagtaaagttcaatctaaatattgaatcgatttgccccctttccaaagagagatttaatttcttgttcctcccaaaaacattccgatgtgaatatgcaaagctgccaataagtccagaaaggggtccatttgttatcccacttgaaattccaccaccagcagagaaaccacccgaagggcgttcaacaagattcatgacaaggtccactttactagaatctccaactggttgtggaattatcgtaacatcctccatgattcccatagtaagtattgtttctacatcccttttcacttgtgctctattgtaagcctgccctttcttggtggtaagctgccgaaggatggtttccgtctgtgtttttccaacagttggttcaccggtcttcctgtctagaaagcgaatgctaatgttattaacctcagcttctgaaacctgcagcctcagaatccctccagaaagtatctcagcatatgaaaccaacccagttaggccacgctcctgataccatctgttaacagacttgatcacttgatccagatgcctaatgttaataatttttccatggcgatcgcgaaatgcatcttccatgaacttggacggtagcatgttggcgccctcgcataccagcccatggaagtcttggttcggctccacctgaaaccaaaacccacgcgtccggcgggtgtcgacagcgacg

SEQ ID NO: 132669 - DNA, 473 bp, Zea mays
  unsure (1)..(473): unsure at all n locations
  Clone ID: MRT4577_52483C.1
anggctttntnanggggnaatnatgntaantcnnnnnnnnnnnnnnnnnnnnnnnnnnnnnnnnnnnnnnnnnnnnnnnnnnnnnnnnnnnnnagttgaatggcangnatattcantgataaggaactgggtgttggaagancacagaaganggntgnaanagagatggagttgaaggagaaatttgnaangaatgttcaagaggtagctgagaagttccanaacncanacttgtatttnaagaacttataggngaacattgntagatnannaattncgntnactctttgcnganatggcnatagtacttnnctgcaaggntatgcnggattcnaatggnatnagcagaggttctggatttgntgctttcaaatctgctgaatatgctaaccgagctnttaccgnnatnaaangncaanaannngngngaaaccannnccngtnnnngnnannttnttgcgcatnggttnnag

SEQ ID NO: 132670 - DNA, 274 bp, Zea mays
  Clone ID: MRT4577_52484C.1
agctgctcttgtgacgttgtggagatggggagcgtcctggggctgtgctccatggcgagctggataccatgtttgtgtggaagtgccccgtgtttgctatgccgatgctgtcctagtggaaacaactccactgtaactagattgatctatgcacttttcttgcttgttggagtatgtgtagcttgtgtaatgttgataccaggaatggaagaacaactgaataagattcctggattttgtgagaatgagataggtgttgtcccttgtaacattt

SEQ ID NO: 132671 - DNA, 404 bp, Zea mays
  Clone ID: MRT4577_52485C.1
tccgtccgattcggtcgcccacgcgtcgtaaattttttatttcaacagtaatggtggaagattcaactgggggggatccataacttttgcatctgttgacaacacccttaaaaatggcacttgaatttgctgatattagtctgtgtggatgtattcctaccacacaatcttgttgatattgtttattccgtgtgcctaaactacaggtgccggtctactactactatccttttctgctctttagatccaccagctcttcaatgatctagatggaatatcagtagaccccagggttttgaggctgttatgcgtgtaagtgcagtcaggtctcaagttaagactattatggcaatttctgaagcgtgttccaccgattgatcttcagcgattgatttgacaaactg

SEQ ID NO: 132672 - DNA, 823 bp, Zea mays
  Clone ID: MRT4577_52486C.1
ccagatccctgttcgtcttcggccccttcggagggaacgactacaatgccatgctcttcttcgggctcaccatggatcaggcaaggaactacacgcccaagatcgtcgacaccgtcgccagcggcgtcgagcaactcatccagctgggcgcagtggacatcgtcgtcccgggagcgctgcccgtggggtgcttcgccatctacctcacgtttctcccgagcgacgacccggccgactacgacgggcacgggtgcctgagggcgctcaacgagctgtccgtctaccagaactccctgctccagagcaggctcgccgccctccaggcaaggtatccctcggcgaggatcgtgtacgccgactactacacccacatcgaccggctggtgcgcagcccggcgcgcttcggcttcacaactggcgccgtcccggcgtgctgcggcgctggtggcggcaagtacaacttcgagctcgacgcgcggtgcggcatgaagggcgccaccgcgtgccgggacccgtcgaggcacgagtcctgggacggcgtccacctgacggaggccgtgaacaggctcatcgccgagggatggctcagaggcccgtactgccatcctcccattgcgactcagtcgatagcgtaggtcacccccggcccatgcggggttgcggccatggtaagactgacacgagccttccctgacatacagtggcatggtggcgtagtgttgtaccgtatttacgaagtgaaaatctaaaagcttaaatcataaaaaaaactccctaaactctgatttagtatgttgctaaatacatattaggaataaaatcc

SEQ ID NO: 132673 - DNA, 142 bp, Zea mays
  Clone ID: MRT4577_52487C.1
acccacgcgaccgcggacgcgttggaggcaccgatctagaccatacagcgacagaggagagacgggcagatgggaaactaccagagggcacgggagatacaacaacagaaaagaccgaagccgaccagaaaggggaccgcac

SEQ ID NO: 132674 - DNA, 950 bp, Zea mays
  Clone ID: MRT4577_52488C.1
cgggtgcggaacacacaaagctcctattaatgggaactttgttgattccgcatccggcaagaccttcccactctggaccctcgtacaggggaggtgattgctcatgtggctgagggtgacgcagaggacattaaccgtgcagattgaagtacccatggtggcccgtcttatgcgttactatgctggttgggctgataagatccatgggctcattgtgccggctgatggcccacaccatgtacagatcttgcatgagccaattggtgttgcaggtcagatcatcccatggaactttcctcttctgatgtatgcctggaaagttggccctgctttggcatgtggaaatactctcgtgctcaagactgctgaacaaacccctctatcggctttgtatatctccaaattgttgcatgaggctggactacctgagggtgttgtgaatgtcgtttctggttttggccctactgctggtgctgctcttgctagtcacatggatgttgataagatcgcatttactggatctaccgatactggaaaaattattctcgagttggctgcaaagagcaaccttaagacagtgacacttggagttaggaggcaagtcccctttcatcataatggacgatgcctgatgttgaccttgctgttgagcttgcgcactttgccctgttctttaaccagggacaatgctgctgcgctggatctcgcacgtttgtacatgagcgtgtttatgatgagtttgtggagaaggccaaggctcgtgcattgaagcgcgtcgttggtgatccgttcaggaaaggtgttgaacagggcccgcaggtacatctctgaattggatatttaatgagttacttagttacaacctctacattgccacccatgaattccatgggagcttctattagtttgacatatcattcacatagtatctgcttcggccggtaactcat

SEQ ID NO: 132675 - DNA, 355 bp, Zea mays
  Clone ID: MRT4577_52489C.1
tattgcggggacgacgagtagtctagtccgcgggcgccctagactttggcgggatggaaagatgcacacatagtgtaaccatccgatgaaggcacatctaatctataatccaaattcaccaacaaaacattgctggcttcaccgacacaataggcaccagaccatgattaaaattcttgacgacgggcgttatatacgaccacctctcctaattcaaacatatttttatttccccaaactgcaaccacatacctgggctctgttatactgttgctattggaggaaataaaaatcaataatgattgcgagcggccttcttgtaaaatacacggccttaaggactgtaaggatgggc

SEQ ID NO: 132676 - DNA, 435 bp, Zea mays
  Clone ID: MRT4577_5248C.1
actgttcattttaatttagttgtacaagatctaaacgcatcatatggatgtactttttgtggttttcgtggaaagggcaaaaaaacaagaacctgaagggatgtacctttttgtaatataaaggaagcacacctactttgataaaaactttgcatggaaacatgggaaattcgggccaaaccgttttataagccgggcaatgggaaatgcttttggcccgtctgggctaaaacaacagggaattggggacctttttgttagaaggattttttttttttttttgtaaaaaaaaacctaaaaaatttttttatttggggggggggcagggtgaaaaaaattgcttccaaaaaccccgggaatttccccttttttttttttatgcccgggaccccttttttttttaacaattccgaaacggggggcttccccgaaaat

SEQ ID NO: 132677 - DNA, 383 bp, Zea mays
  Clone ID: MRT4577_52490C.1
cactcccacaccaaccaaccaacctcctctgcctgccgcttcttctgctgcgggcgggcactgctgcaagtactagaggaggacatccgcttacattactgcgcctgcggaggatcggaggaaccagtagcggaggcttcgattttcggcgggcgcaataaattacccgcatggctcggagggccgcgtcctcgctcgtctaccgctgcctcctggcgagggcccctgccggcgcgccgtccgctgccccctctgcaccgcgcaggacagtgcctgcagatgggatgcacaggctgttgataagatcgcatttactggatctaccgatactggaaaaattattctcgagttggctgcaaagagcaaccttaagacagtgacac

SEQ ID NO: 132678 - DNA, 769 bp, Zea mays
  unsure (1)..(769): unsure at all n locations
  Clone ID: MRT4577_52491C.1
ggccgggnaaaaccaaatccaagcgcaagagggggcaaagccgcaaagggggaggcaccaggcaccggcagccattacttactggtcctcactcccacaccaaccaaccaacctcctctgcctgccgcttctcctgctgcgggcggtcacggctgcaagtcccctttcatcataatggacgatgctgatgttgaccatgctgttgagcttgcgcactttgccctgttctttaaccagggacaatgctgctgcgctggatctcgcacgtttgtacatgagcgtgtttatgatgagtttgtggagaaggccaaggctcgtgcattgaagcgcgtcgttggtgatccgttcaggaaaggtgttgaacagggcccgcagattgacgacgagcaattcaacaagatcttgcgctacattaggntatggtgttgacggtggagctacccttgtgacgggtggtgataggttgggtgacaagggtttctacatccagccaacgattttctcagatgtccaggacggcatgaagattgctcaggaggagatatttgggcctgtgcagtcgatcctcaagttcaaagacctcaatgaggttatcaagagggcaaacgcgagccagtatggattggcccgccggcgtgttcaccaacagcctggacacggccaacaccctgacgcgcgcgctcagggccgggaccgtcttgggtgaactgctttcgacgtcttcgatgctgcgattcccgttgggggggtacaagatgagcggcatcgg

SEQ ID NO: 132679 - DNA, 366 bp, Zea mays
  Clone ID: MRT4577_52492C.1
cttggcgcagctggcggctccgggggcggtttattggttcggccctgttttttctcatgccgccatggccttgtgcgcccggtgcttcagctcacacgcccttgacagcatacgcatggactccgggtccaagagcgccgtcattctttgttcagcgctgggaggaaacaaaaaattactgcggtggtctgtacccatcggtgctgtctttgcacggccaccagacagccgaacggcggccagtagacagtcgaacgggaaagaaaggagcctttgtccttgcacctgtactgggtaattcagtctccatttggttttcttatgtgctgttttatctttgaactcaaacagattcgacctcttttc

SEQ ID NO: 132680 - DNA, 351 bp, Zea mays
  Clone ID: MRT4577_52493C.1
aaataacaataagttggaggttaacaaggtagatactaatgaagacaacagtggcaaccaaagcttctctgccactaatagaaacatgtctgcaaatattgaattaactgatggatggtattcacttgatgcatcattggatgtggcacttctggaacaactagagaaaagaaagcttttcgtagggcagaagcttcggatatggggagcttctttatgtggttggtctgggcctgtgtcatttcatgaggtgtctggtgttgtcaaattagttgtccacataatggcacctatcgtgcaagatggaatgatgccttaggattctgcaaacatgttggactcccactggca

SEQ ID NO: 132681 - DNA, 826 bp, Zea mays
  Clone ID: MRT4577_52494C.1
attgggtacctcgaggccggccgggggggaggcaccaggcaccggcagccattacttactggtcctcactcccacaccaaccaaccaaccacctctgcctgccgcttctcctgctgcgggcgggcactgctgcaagtactagaggaggacatccgcaataaatttcccgcatggctcggagggccgcgtcctcgctcgtctcccgctgcctcctggcgagggcccctgccggcgcgccgcccgctgccccctctgcgccgcgcaggacagtgcctgcagatgggatgcacaggctgttgccaggtgtccttcagaggttcagcactgcagcagcagtagaggagcccatcacgccgtcagtccatgtgaactacacaaagctcctcattaatggcaactttgttgattccgcatccggcaagaccttcccaactctggaccctcgtacaggggaggtgattgctcatgtggctgagggtgacgcagaggacattaaccgtgcagtagctgcggctcgcaaggcttttgatgaagggccatggccgaagatgactgcctatgagaggttccgtatcctactgcggtttgctgatttgatagagaagcacaatgacgagcttgctgctttggagacatgggacaacgggaagccatatgagcaagcagcccagattgaagtacccatggtggcccgtcttatgcgttactatgctggttgggctgataagatccatgggctcattgtgccggctgatggcccacaccatgtacagatcttgcatgagcccattggaggttgcaggtcagatcatcccatggaactttc

SEQ ID NO: 132682 - DNA, 167 bp, Zea mays
  Clone ID: MRT4577_52495C.1
gcgtccacgcattccgtgaaagcagatgaaggacaaaactaatatcacaacttcttgccatcacacgaccacagacacttcacaacaactgatacatggcctgttctggattaaaagaaaaagggacaaccccaaacggggccctactgatgtctatctttctctgc

SEQ ID NO: 132683 - DNA, 420 bp, Zea mays
  Clone ID: MRT4577_52496C.1
atgatgtggtctaacgtaccactcaccttcgacgcaagagacatcaacctccgaagcgtgccccatgcagatgcactggtgaaaaattgtaaagccacagggtgggacctgcacaaagtactcatcgataatggcagccaagctgacatcatattcttgcatgccatagaccacatggacataaaccacagcctgctcaagccagtagacaaccctctctatggttttggtggaaaagggacctttccacttggcaagatagagctgccactatcgatcgacacggccccaaacgcacgaagcaagcagatcaccttcaacatagttgatatggtctacccatacaatgccatcatgggacaaggattaataaacaaagtcgaggtagccatacacggcttgtaccttgtaatgccctga

SEQ ID NO: 132684 - DNA, 448 bp, Zea mays
  Clone ID: MRT4577_52497C.1
gggaggcggagggcccctttttttccctttaaggggggaaccggcccaaaaaaattcccagggggccaagtaacaagggcctaccctcaaacacaaaggagggaggcatttcaacacccaacaattctaaactaccaaaaaacaaacagggagggaaataacccaaaggccgccattagggcaaacccatcctccgagctgggcaaaaaaaggggaccccaccaagccagggctttgctccacccacccaagaagaaagctggggggtggcaacaaatcggggcacgggggaacaattcaaccgggatcctggggccccggccaaaggcaacctggccccccttggggaaaggagggcatcccatcaacaaaaattggctcatctagggccatccgatatcggggaaacccgaaaaaaattcaaacttttcaatccccggaaggaaac

SEQ ID NO: 132685 - DNA, 1423 bp, Zea mays
  Clone ID: MRT4577_52498C.1
cattgggccgctcccctcggttcggattcgggccgtgaaatcccaaaagcccaaaccaaatccaagcgcaagagggggcaaaaggggaggcaccaggcaccggcagccattacttactggtcctcactcccacaccaaccaacctcttctgcctgccgcttctcctgctgcgggcgggcacggctgcaagtactagaggaggacatccgcttccattactgcgcctgcggaggatcggaggaaccagtagcggaggcttcgattttcggcgggcgcaataaatttcccgcatggctcgtagggccgcgtcctcgctcgtctcccgctgcctcctggcgagggcccctgccggcgcgccgcccgctgccccctctgcgctgcgcaggacagtgcctgcagatgggatgcacaggctgttgccaggtgtccttcagaggttcagcactgcagcagcagtagaggagcccatcacgccgtcagtccaagtgaactacacaaagctcctcattaatggcaactttgttgattccgcatccggcaagaccttcccaactctggaccctcgtacaggggaggtgattgctcatgtggctgagggtgacgcagaggacattaaccgtgcagtagctgcggcccgcaaggcttttgatgaagggccatggccgaagatgactgcctatgagaggtcccgtatcctactgcggtttgctgatttgatagagaagcacaatgacgagcttgctgctttggagacatgggacaacgggaagccatatgagcaagcagcccagattgaagtacccatggtggcccgtcttatgcgttactatgccggttgggctgataagatccatgggctcattgtgccggctgatggcccacaccatgtacagatcttgcatgagccaattggtgttgcaggtcagatcatcccaatgtgacccccgtcttctgatgtttgcctgggaacatggcctgcttccgcatggggaagctcagggccgggcccgtttgggtgaactgcttcgacgttttcgatgctgcgattccgtttggcggggccaaaataaccggcatggggagggaaaagggcgttgccaccctgaaaaaccccccccaggtgaaggcggtggtcccccccaccaaaaaccccgggtggttgtaacccccccaagtgggcccttgggccccaaacccccgtatattcctttccggggcccacccccgaccaatgtgaagcgttaaccaaataaatgccgatccccccccccccctataataagatttgccccagcctgggtttcccagttatctcaaataacccttgtggttggggcccaaaaaaaaaaaaaaaaaaaaaaaaaaaaaaaaaaaaaaaaaaaaaaaaaaaaaaaaaaaaaaaaaaaaaaaaaaaaaaaaacac

SEQ ID NO: 132686 - DNA, 448 bp, Zea mays
  Clone ID: MRT4577_52499C.1
tatcccggggggatgagtcagaagtacctcttaacggtcgtgatacgggcgtatggctacaacgatgctgcaactctggaactaggctacgagtacgccggcggaggccatgaacaatagctagtacatcacatataagtaccgaaccaggcatagcaccatgcctctcggatcgtgctaggagagccctcaaacatgaggtgcaccacagcggaacatagacacatcaatcgatcgatgagactatagaaagtcacgccctctgtaaagtaaataaaataaacatggctgtgtctgtttttatattccagatgacaaacacagacatgctattgctaagctgttgtatattcgttagctgatattagtttaatgacctaaatttacactaccttgtcaacgtggtaaaaccatgattgatcccaacgtaattttcttagaagacatg

SEQ ID NO: 132687 - DNA, 863 bp, Zea mays
  unsure (1)..(863): unsure at all n locations
  Clone ID: MRT4577_524C.1
gccggccggtccgggatccttttccatcagtccatttcattcttttcaaagagctagtctctcacttcattctttcaacctaacattcattctatcaagttcgcttgcgactttaccattccaatcatttcaccatgaagaccaccacttatgtttccgctcttctcggcctggcctccgctgtcagcgctcactacaccttcgacaagctcacccttggtggccaacaggagggtactgataaccagtacatccgcaagcaccagaacggctacatgcccaccaagttcaagggcattcccgatggttccatctctcccaccgacaaggacttcacctgcaacaagggctctaccccctctaccggcgtcttcaaggtcaaggccggcgacgagattggtctcaagcaggctttcggcggtactggaatgcagcaccctggtcctatccaggtctacgctgctcctgtcaaggacgctaccagtgacagcccctatgacctcaagtggtacaagattcaccaggctttgatctgcaagtctggcaatgccgagtctctccgctccactgcttggtgctcttgggacgaggactctgtccacttcaaaatcccttctactcttcccgatggacagtacctccttcgtggtgagcacattgctctccacggtgctcacgccggcgaggccgagttctactatgcttgtgctcaggtcgaggtcaccggtaacagcgccaccagcattcccggtacctctgtctctatccctggtgtctacaagcaggacgacgctgctgtcaacttcagtctctggggaagctctacctcttacgatgtcatgcnctggtcctgatgtcatccc

SEQ ID NO: 132688 - DNA, 747 bp, Zea mays
  Clone ID: MRT4577_52500C.1
ccggccgggctgaaatcccaaaagcccaaaccaaatccaagcgcaagagggggcaaagccgcaaagggggaggcaccaggcaccggcagccattacttactggtcctcactcccacaccaaccaaccaacctcctctgcctgccgcttctcctgctgcgggcgggcactgctgcaagtactagaggaggacatccgcttccattactgcgcctgcggaggatcggaggaaccagtagcggaggcttcgattttcggcgggcgcaataaatttcccgcatggctcggagggccgcgcaggacagatgggatgcacaggctgttgccaggtgtccttcagaggttcagcactgcagcagcagtagaggagcccatcacgccgtcagtccatgtgaactacacaaagctcctcattaatgggaactttgttgattccgcatccggcaagaccttcccaactctggaccctcgtacaggggaggtgattgctcatgtggctgagggtgacgcagaggacattaaccgtgcagtagctgcggctcgcaaggcttttgatgaagggccatggccgaagatgactgcctatgagaggtcccgtatcctactgcggtttgctgatttgatagagaagcacaatgacgagcttgctgctttggagacatgggacaacgggaagccatatgagcaagcagcccagattgaagcacccatggtggcccgtcttatgcgtcactatgctggttgggctg

SEQ ID NO: 132689 - DNA, 521 bp, Zea mays
  unsure (1)..(521): unsure at all n locations
  Clone ID: MRT4577_52501C.1
ctgaagcgtggatctgaaccagaccgtggcgctaattaggaaacaatccctttgtgagtgtgaagatactgtacaccaaatcatcatcagttctatacgcattcatatgttcaacatgttgcaagggaaaataactccggcggtcgtttttagaggggcaaaacaacagacgcgtgcttacaaccaatgattatctaaacaacatgtactataaatatattaactggccggcagttgacaacattctgtactgggacatccctggcaaatcaacagacaagatggcctagcatctcaaagcaactaccctcagactggttaataatatatgagaggacccacgatcgcccttaccatatttgatcggtgctgataggcctgtgatgacgcngcatgtatcggaccacacatcgcattgggagtagtgaatgcaccctttataccatatacactcgcgatgagcatatcgcgcgctaaaggccctaacgtccgtatcttggatatcacgtgctatcaggcat

SEQ ID NO: 132690 - DNA, 2317 bp, Zea mays
  Clone ID: MRT4577_52502C.1
cgtacgcgcattgggtacctcgaggccggccggggagccctgaaatcccaaaagcccaaaccaaatccaagcgcaagagggggcaaagccgcaaagggggaggcaccaggcaccggcagccattacttactggtcctcactcccacaccaaccaaccaacctcctctgcctgccgcttctcctgctgcgggcgggcactgctgcaagtactagaggaggacatccgcttccattactgcgcctgcggaggatcggaggaaccagtagcggaggcttcgattttcggcgggcgcaataaatttcccgcatggctcggagggccgcgtcctcgctcgtctcccgctgcctcctggcgagggcccctgccggcgcgccgcccgctgccccctctgcgccgcgcaggacagtgcctgcagatgggatgcacaggctgttgccaggtgtccttcagaggttcagcactgcagcagcagtagaggagcccatcacgccgtcagtccatgtgaactacacaaagctcctcattaatgggaactttgttgattccgcatccggcaagaccttcccaactctggaccctcgtacaggggaggtgattgctcatgtggctgagggtgacgcagaggacattaaccgtgcagtagctgcggctcgcaaggcttttgatgaagggccatggccgaagatgactgcctatgagaggtcccgtatcctactgcggtttgctgatttgatagagaagcacaatgacgagcttgctgctttggagacatgggacaacgggaagccatatgagcaagcagcccagattgaagtacccatggtggcccgtcttatgcgttactatgctggttgggctgataagatccatgggctcattgtgccggctgatggcccacaccatgtacagatcttgcatgagccaattggtgttgcaggtcagatcatcccatggaactttcctcttctgatgtttgcctggaaagttggccctgctttggcatgtggaaatactctcgtgctcaagactgctgaacaaacccctctatcggctttgtatatctccaaattgttgcatgaggctggactgcctgagggtgttgtgaacgtcgtttctggttttggccctactgctggtgctgctcttgctagtcacatggatgttgataagatcgcatttactggatctaccgatactggaaaaattattctcgagttggctgcaaagagcaaccttaagacagtgacactggagttaggaggcaagtcccctttcatcataatggacgatgctgatgttgaccatgctgttgagcttgcgcactttgccctgttctttaaccagggacaatgctgctgcgctggatctcgcacgtttgtacatgagcgtgtttatgatgagtttgtggagaaggccaaggctcgtgcattgaagcgcgtcgttggtgatccgttcaggaaaggtgttgaacagggcccgcagattgacgacgagcaattcaacaagatcttgcgctacattaggtatggtgttgacggtggagctacccttgtgacgggtggtgataggttgggtgacaagggtttctacatccagccaacgattttctcagatgtccaggacggcatgaagattgctcaggaggagatatttgggcctgtgcagtcgatcctcaagttcaaagacctcaatgaggttatcaagagggcaaacgcgagccagtatggattggccgccggcgtgttcaccaacagcctggacacggccaacaccctgacgcgcgcgctcagggccgggaccgtctgggtgaactgcttcgacgtcttcgatgctgcgattccgtttggtgggtacaagatgagcggcatcgggagggagaagggcgttgacagcctgaagaactacctgcaggtgaaggcggtcgtcaccccaatcaagaacgccgcgtggttgtagacgctgcaagtgtggccttgtgcacgagaaccacgtatattcatttcctggtcacatccccgaacaatgtgaaggcgttaatcagatagatgacgatgaagaagaacaactataataagatttgccctagcctgggttctcagttatctctaataagttttatggttggtgcctatatattgtgcaatttggttgctcccttttattttgtttctttttgataagactgttctagcaacggatatgcagagttcattatgaaaatgcatttgttagtgtctttgatggttaaaaaaaaaaaaaaaattagtgctgattccctagatttggcgaagaatgtaaggaagagaaagattatgg

SEQ ID NO: 132691 - DNA, 168 bp, Zea mays
  Clone ID: MRT4577_52503C.1
agccgccgcggacaggaaccgccgggaccgcacgcggccggcgatatggcggcggcggcgctcgtggtcagacggggatccattacataggactcgcgatggggcagccgaacctcaacgatgcatctgcgcacgaaggtcaacgcagaccggcgggggaacgcataa

SEQ ID NO: 132692 - DNA, 273 bp, Zea mays
  Clone ID: MRT4577_52504C.1
ttctctgtctgtagtgaggatcaggaagctattcaggcacagaaaatttggaagaaagccatcatgcttgtatggagagctgcagctaatcataggtatgccaatgtcttcctgcagcctgttacagatgacatagcacctggctaccacagcattgtgcagaggcctatggatttgtcaactattaagaaaaacatagaaaatggactgatccgaagcacagctgaatttcagcgtgacattatgctgatgtttcagaatgcgtaatgtaca

SEQ ID NO: 132693 - DNA, 612 bp, Zea mays
  Clone ID: MRT4577_52505C.1
atagttttcctctcccttcttcctcgctagcgagatacctccacctcagagccgctcctcccgataccaacgatggcgatggccaacaacgcgcgcgtgaccgacgacagcgcttccatccactgcaagcgatgagaagctcctcctcttggctgatctctacaatgtccacgctctcgtgagcgaccctgtcgctcacaaatatgttcatctaaaagagatgaaaagacctagtgagaatttgaaacttgttttcgagtagacatgttagactaccacagggctacatctcaaattgcacgcctgtgagagagtcttacatgtctctagccctgtaccattcttcccctgctccaacccttctatgaacagcataggtcctgctgaatcctgtacaatcctgccttaaaggatctgtataaggaactgactaggcgtaaacatgttgtctgactacatgttcagcatgtctatattgaatcatatgtatacagatctgatcgaccttcatgaaaactgttgtatccatcaagattactgaacaaagaaccatgagtgtgattcccattccgagatactgactgaccgatatgcttgtgctgatgcatacct

SEQ ID NO: 132694 - DNA, 811 bp, Zea mays
  Clone ID: MRT4577_52506C.1
actgatatggtacctttattgctaccaaatgaactagtttctgtcaatcgttttcaaccattcctgtattttttttttcaagcccacaactggtagtctgataattacaaagcagttcgttcgcccacatctcgcatacacatcatacatggctaatatacacaggccgtagactctgttggtataagattgcttgtgagcaggtaaagagaaggtacaggtgatgttccaaggagaacaacaaggactgatgacgatgggcgatggtgcagctaaatattaaccacctcatctcatctttctgcctcacctagaggtaaaaagcctagctcacggatgccacactccaaaactaccactacccattgctaccagtgttgtttttattaccatgctggtcactgcttctatgatgcgcctttgttgtgtcaatctggatgctcagagtcgtcacaacgctaggcgcctcggactgctccagttcaccaattagctgtgaattctctgcttccatgtcttcacaggccttcttaagctcgtcgagttctgatctgagtgtgccattgacgacggtcaggtcagttaccttctgcgctagttcctcacattcttgctgcttgcgtagccttgatctcctagctgactccctgttagattgttttcttctctcccttttctgttctcgctcatccatcatcgacaaagtgctgccatgatgggaatgcgtcgcagcatttatttcaccctgtccagaggtctctgctttaactggagaaccagtccaaaggtccatcccaatttcaagttcggc

SEQ ID NO: 132695 - DNA, 318 bp, Zea mays
  Clone ID: MRT4577_52507C.1
cgctgtgacggcgctgactgctctggcagtgccaggcaaggcaagcaggcggagcacgtaagcggcggatggtgatggtggcaggcatctttcggcgttggtgtccttgtctgcgctcgatagcagcagcagcatatgctgatgagtgatgagtgtgtgcatgcatgctccaggtgaccgaccagcagctggaaattattactagtaaaaggacaggtaggtggagacgttcgtcgcggttcctccccgttctgttgtgttaattaagtttcttaattgtcagggattattacggaatataggtatatggagtcatat

SEQ ID NO: 132696 - DNA, 191 bp, Zea mays
  Clone ID: MRT4577_52508C.1
agtgagtcgtattaaacaggtcgcagggctgccagcttcaccatgagtcgtagcagcaccgcgtgctgcctacgctgtcggtagggttcgtcctgacttgagcggcaagcgcactggcatgtccgtccgggttcccaccgtggatgtgtcagttgttgactgtcactgtgagagtcgagaggggggcctgc

SEQ ID NO: 132697 - DNA, 578 bp, Zea mays
  Clone ID: MRT4577_52509C.1
gtaagctcggaattcgtctcgagatttcaagtggagttagcacatggctgtatagtggtgacattgatgccgtttgcccagtaacttcaacgctgtattcattagacatcctggggctgaagataaattcatcatggcgggcatggtattctgatgatggtgaggttggaggctatgttgttgagtacaaaggtctgatatttgcaacagtccggggagctggacatatggttcctacctaccaaccccaaagagcgctcagcctgttctcggcattcctgaatggcaaactgcctcctgagtgattgaaactttacaagcatctactcttttgtggtttctaacgatgaaagatagactattgtttgtcagaaaaaaaaacagaagcatagtgatagtgtacttgcttctgttgagattattacaaagaaccaacattgtgttctgaatcatccaatttctacaaaaagtccaacctaaacagttctgatgaaatacttgtatcgagatggttgcattttttgtggcagatacagacttcttataactcatgattcttagacgtttcgcgtttcact

SEQ ID NO: 132698 - DNA, 386 bp, Zea mays
  Clone ID: MRT4577_5250C.1
cttgggatttgcagatatggaaccctagatgaagctttggatctatgcgagaaaatgataaaaaacaactgtttacctgatatccatacctacaccattcttctcagtggtttttgcaggaaaggtaagattttgcctgcgttagtcatcttgcagatgatgttggagaaaggagtagtccctgatactgttgcgtatacctgcttgctgaatgggttgatcaatgaaggccaagtgaaagctgcttcttacgttttccatgagatcatatgcaaggaaggcctgtatgcagattgtattgcctataattcgttgatgaatgggtacctcaagagtcgaaatgtgaataccataaaaaggatgatgtctgatatgtatcaaaatga

SEQ ID NO: 132699 - DNA, 830 bp, Zea mays
  unsure (1)..(830): unsure at all n locations
  Clone ID: MRT4577_52510C.1
cattgggtacctcgaggccggccgggagctaactttcttcgcgtatcagcctggcccgtgctcgcccactgcgctagggttcacttgcctctcgagttcactcgcagccgcagccgccgcggctctcgcctctccggttcactcgcagtcgccatcgcggaggcgttccagagcggcagccaccatcgccggcacctccacgtggtcgacctcgacgtgtcgtacgacttccagtggccctccttgatctagtccctgtcggccgccgccgcgagcacgagcgcgagaacgagcagcgcataacacgacggcgacggcgacgagccagtttccctgcgaatcaccggctccggcacgagccacgacgagctgcggcgaaccaaggcgcggctggcgcggctgctgcttccacctttcacggccagtctccggtacttctccgtggtgttcgactcgctgcacaagtgcctccccgccgacagcgccgagaggatcgccatcgagagcggccacctggggcgtggagatcagcgacgggtnntgggttttggtttgttaattagtttttttatgcttctttaatttcttctttgattgattacatatatagattgattgattacatatatagatatatacacccatgtaaagtagatgtcaaaccagttattgcacacgattgatacgaagtagtcccaagagtcgtttcaaaatttcacaatctaaattatcatttggagagtcatttttccataaaataccactatctatatattttccatcttcaaaagtctttttatattttagagagtcaatcacgtttttatatc

SEQ ID NO: 132700 - DNA, 821 bp, Zea mays
  Clone ID: MRT4577_52511C.1
ggtatggtaatcaatgtttcaagaatgataatgcatcaagtgtttaatcaatcaacttctatcacctaatgcagcatataagtgataaaattttgtaaacacaaggaaggtggcaaatgcaccggggcttgcctaggataacactacgtcagtgttgttagatgatactcgcttggcgagcacctcccatcctggcactgggtcagatcatccatcttgtggttggtccgtcaatatcatcttgtggtccagtctggtccatgcccttcatatcgcgtaatcatctagcgtacgaggaataaacacaaggagacagtaggtcctcatcgggctgaacgatgacgtgaggaaactacaccgtgaggagaggcttgctggttttccataaccacgagtaggtgatgcgcgcggtcgacgaccagaccacgtggaggaactgcagtaggagatcgacgacgttcatggcgaggggaaaggagctgcttgctgctgggcggggagagcgagctcggctagggctgcaggcagccatgggagcagccgtgagggagatgttttttccctaggggtcaacgagcaggccgaacgaggacaccggcaaggggaggcacagccagccacctacgctggggagataggaaagatggcgaccaacaaaggacgagatgctcggaggggcgcgcgttcaaggagctgctgggcgcggccgagcagcctgatcctgagatgggaggcgaggaggaagatgcaccaggaagtgggcgagctcgagcaaggagagcatgcggcgaagaacccggcaggactcgggcgtacccaaa

SEQ ID NO: 132701 - DNA, 180 bp, Zea mays
  Clone ID: MRT4577_52512C.1
aaccagggaaacacaaacgactgttagttcgggtgtaaggtataaggtatacaggactggacctccgtacatataactcactatataagccaagccgtaaggcataaggctgggaacacacacggcatgataaaacgctgtaactgttgactggctgggaccctctcagcgctcactgga

SEQ ID NO: 132702 - DNA, 2076 bp, Zea mays
  Clone ID: MRT4577_52513C.1
gggggctgtccctccctccctccctccctcttggaccgagcgttcttctcttgcttttgccaaccagaagcatcgagcctccaagcatctcctccccttctaacctctcctcctcccaacaccatcagcgggcggtgccgactgccgagcaaggccagcagcgcctcgcaagcgagcccaccgccgctgatcatcaccaggcctggttgaggcgaccctcgcgtgggactgcgacagcgccacagcggcgatggcggggctgccgccggtcgccaggcggctccggctcgcgaccgcggcgctcctcctcgtcctgctgctcgcggtgaccgcggcggcggcggcgcgcgaggggcggggcctggcgcgggtgcagggcccgccgccgcggcaccgccacgcgtacgccgcgatgatgtacatgggcacgccgcgggactacgagttctacgtcgccgtgcgcgtcatgatgcgctcgctcacccgggtccgcgccgacgccgaccgcgtcctcatcgcctccgccgacgtgccgcgcgactgggtccgcgcaatgacagaagaggatggcatgagggtggtgatagtggagaacctcaggaatccttacgagggcaacctaggagggaccaacaagaggttcaagctgacactgaacaagctttatgcctggaccctggtggactatgagcgtgtcgtcatgattgattccgataacatcttcctccagaacacagacgagctattccaatgtggacagttctgtgctgttttcatcaacccgtgctacttccacaccggtcttttcgtgctccagccttctattgatgtattcagaagcatgcttcatgacctggagactggccgtgaaaactctgatggtgctgaccaaggctttttggttgggtgctacccagacttgctcgacaaaccaatgtttcacccccctgagaatggcacaaagctcaatgggacctatcgccttcctcttggctatcaaatggatgcgtcatactactatctcaagctacattggcatgtcccctgtgggccaaacagtgtcatcacattccccagcgcaccttggtttaaaccttggtactggtggtcctggccggtcttgccattaggtctttcctggcacaagcagcgctgggacgatcttgggtatgctgctgaaatgccagtgattctgatggagcttttgatgtacatagttatcatagcagtcaccagattggcaaggccagggatcaccaaactatgctataaccgacggcctgagaagcaaagtgccctggtgcagtggctgatcaagctggctgcaattgcggctatggtggctgcatattccattccattctttgtgatccctcgcacagtccacccgatcatgggctggtccgtctacctatttggtgcgcttgccttgtcagtgctcgttttcaatgtgtttctgctcccgccacttgatgtgcttacaacgtggcttgcaattgtgggcatgctcatcgttatggcattcccatggtaccatgatggtgttgtgagggctctggcgatctttggatatgcattttgctctgcgccaatcttgtgggcatccatggtgaggatgatggactcactgcagacgatgctcgagagggattcattcttcccccggattggtgaaccagcacaggagactgaattcagcaagctgtactgattcttttacgcacagatttgggatgcttcatcaccatatgaacagatgattcggatcagttaattctcgattgatgctggtggttttcgctcaggcattccgttgcgtactcatagtaatgtataaacattgccttatttcatgcccacttggactgtccagactatttttgagcaaattcttttttgcagtctccatgatgtaaactatgtaaatacatgatctgataaagtgctctctaaacttcagcatcttgtctagactgaaccattagcttgtcctgtaactctggttgcctggggagaacaatcttagcccctcgacctgaagacgtgaaattctcttcaaaacgcagcccggccggc

SEQ ID NO: 132703 - DNA, 346 bp, Zea mays
  Clone ID: MRT4577_52514C.1
ttttttttttttttttttttttgtttttttttttttttgttttaatattttttatttttttttattttttataaattatttttttttttttttatttattttttttaaaatttttaaaaaaaaggttattattaccataggtttaggaatgaaaaaaaaagacgtagcaaattcataaaaaaactggaagacgtgctcaactgcgtaaatttacatgggagttgtatactaaaaaaaaaaatctgggatgacggggggcagtttgtctatgtacatgaaaagtcgcataaagttaaaaattgggactggcgccatattcacgatgttattgttgggcgggtataat

SEQ ID NO: 132704 - DNA, 402 bp, Zea mays
  Clone ID: MRT4577_52515C.1
ctctcctcgactcacccatatcgacaccgccgctgccaacgcacgtctgctgacgcatgcgacatgagcggagaacatatatgtgtcgagcaactatggaggtagcaacgtactcggatccatgtgaccttccctgacgtgatgccgcgtcaatggtgacgctgggactgaacggcctcagctaccatcaccacgaggacgacctctcacgaaagaccgacctgctgctgaagctcaacccggtgcacaggaaggtgcccgggctgggccacgggggccgccccgaatacgactgtgtcctcatccattgtctatgccacgaccactcgccaaggtatcacccagctcatgctccacaggaacgccaactatggcgctatggatcagacctgacccaccctc

SEQ ID NO: 132705 - DNA, 168 bp, Zea mays
  unsure (1)..(168): unsure at all n locations
  Clone ID: MRT4577_52516C.1
gtgnntctcnnaannacanagataatgaactggtacnacntttcttttaaagagatgatagagganaatatagttttttgtaagantgtttatctctcttaaaagataatctttnnattttcttcagataacaagttattattattttttaagaaagcaagtttcacg

SEQ ID NO: 132706 - DNA, 1690 bp, Zea mays
  Clone ID: MRT4577_52517C.1
gtagaagaatctctagacatcatagaagctcatctcttgaatgggcaaaaatctcgatggttcaacgggcgacgagacttccgagccgatacacttcagtgcacacagatggcagatcattgaaaccggatgcaagcccaaggatgaactgtggttctgaacccactacaacagctgttgagccggcatcatcatcgatgttttctttcgctttctatggtgtagcatggcctcccagtgaactggaatcactgcgagagaagtattcttcagtttgtaggatgttttcttatgaagaactgaagcttgcgacgtccaactactcacctgatatgttaattgggaagggtggaaccagccaggttttcaaggcacaacttgatggcggaacatttgctgccataaagattctgaaaccctcggttgatgcaatacacgagtttgttacggaggttgagaccgtaaccagcttgcagcatgagaacattgtagcactaaggggattcagcttcgagaactacaaccttgtgttggcatatgattacatgccccgagggagcttggacaaagctcttcatgggaagaatgatggcacagagtttcttgtctgggagaggagaattaagatagcaattgacatcgcaagagcactcgaatttctccatctcggcggtatgacccagtctgtgatccatggagatgttaagtcttcaaatatcctcctttcagaggattttggggcacggctctgcgatttcgggttagcaaagcgagtgtcggcttcgactccccacctaacatgtactgacatcaccgggacttttgggtacatggcgccggagtatttttcacacggggaggtcaacgagaggattgacgtctacgcattcggagttgttctgctggagattgtttcgggaaggaggcccatcacaccagggagcgcgaagggtcaagaaagcctggtcggttgggcgaagcctttgctgtccagtggcgggatcaagcacctggtcgatccgtttctggggaacgattacgactgcgatgagatggagaggatgacgctcgcggcctcgctttgcacgaggacgtcgtggcactctcgacctgagatgtcactggtcctgaaacttctccagggggacgacgagacgatgggctgggcgaggtcggccagcttcgacgggtcagacgaggaggccatcgcggcgggacctgacctgaacatgcagtcgcacctgagcctcgcgctcctcggggtggatgcggacgacacgctgtcgcgctgcagcagcacggagcgcacctcggccgacggctactggagccggtcgtccagtttcgactagcggtagctgcgtgatggaactgatgcggcagagtagagtagtggtagtgtggttacgtacagcaggcaggcaggcaggcgattggtatgcttggtgagatggatgttcatatcaggattcaggtggttggaatgtggacagctgctgatttagtttagatggcagtgttgctttgctgatttggctaggagtcgagttctgttggtagtatagatctgaatctgaccttacgatgcaattggtttcgtatttgtattgttaaaaaaaaaaaaaaaaaaaaaaaaaaaaaaaaaaaaaaaaaaaaaaaaaaaaaaaaaaaaaaaaaactcgaaaggggg

SEQ ID NO: 132707 - DNA, 225 bp, Zea mays
  Clone ID: MRT4577_52518C.1
atcaaacacaactttgaatctcttgacaattacgattacacgttcgatacactctgtgaggtttatgattcactgagcgtgacccaagctcttattttctgcaatactcacataaacgtggcctggctcactaaaaaaatgcgcacacataacctcaccgtatcatctatgcacctttacatgccgcatcaagaaagggatgacaacatgggtgacttcaagtct

SEQ ID NO: 132708 - DNA, 273 bp, Zea mays
  Clone ID: MRT4577_52519C.1
gttgaatagagcttgtttgatgttaaagtgggtaacgtaggagtgagcttgagacacttgaactccaaactctcctggaggtttccagtagcactactgttcctacaagggcttcatttttaacttcatctgttttgttaacatcctgtctttttgaggtgatctcagaggtgcatcaggttctctcgcactggggaggccacttgccccgatagttgctcagaaaattggtctgggcagcctgttgtcctttgtccttcatgtatgtttttt

SEQ ID NO: 132709 - DNA, 436 bp, Zea mays
  Clone ID: MRT4577_52520C.1
ggggggggttttttttcccgcccccaaaaaaaatgggggggggggcttgggggaagtagcattttgttttggcgggacaaaaaaaaaaagggtaaaaaggtgggggggtttattttttggtttccttttttggctcaggtgccttttttgggggggccccggggggttttttgttaatcccctcaagggggggtttgccataggccgaaaaccccttttttttttttgggacctttaaaacctttaaagagggcttttccccggggggaattgggttgttgtccccctgtccctgggggggggggggaagcccctccaggggggaggcacccgccttgaccttgggagcagccttgggaaaaaaaccaggttggccttgtttgttttaaccctttgggatttggcctgcgcccccccaaggggtttttttttgggg

SEQ ID NO: 132710 - DNA, 141 bp, Zea mays
  Clone ID: MRT4577_52521C.1
ctagttccttgctagagtgatgtagttgtagggttccgaacaatcgccggcgtgatataaaacactcatgatctacttgtgaagcgtactatacatggtgaagcccatgggagtctgtgacgaggacctgtacaagatctt

SEQ ID NO: 132711 - DNA, 456 bp, Zea mays
  Clone ID: MRT4577_52522C.1
ggggggggcttgggaaggaccccatttttttttatacctgaaaagaactgggccccctaaaaaaacaaacccaagtttcctcaaaacgctttttaaaggttcctggaactcatgggggggcccccctacagtttttagcggcggaaggggcccctgggtttttccccctaaactcccaaaaacaggtggcccgttaagcaaaatttttgacgggtttcccgggggccccagccttgtttttttaaggggacaacccaggttttgctaataagggggtgaaggtccctgatgggattgaaaaggggggcttccatagaccctttggaaaccacaggtgccccttaaaaaattgggacccaagcgggggggggggaccttggccctgaaattggccggaaaacatacaacggttaaacagggttttattttgttaaagagtccaaggggaatccccgg

SEQ ID NO: 132712 - DNA, 301 bp, Zea mays
  Clone ID: MRT4577_52523C.1
cgcgtccgcccacgcatccgctagttctaaatcgctagtgggacctttttttatgtttttctgcccatttttattgctgtgcaacaactccatgttattcgtggctgtggtaataatgctctcttcttgggcttcataagcataattcttggtctccgaaaataattcccaccatgtgtaagagcgccggatcatgggcatcctccgcgaagtaaatgttctacacctccacaaatcattacttcaacctcacattcatttcctctacggtaggaataaccttggcttaggtttcaaacct

SEQ ID NO: 132713 - DNA, 914 bp, Zea mays
  unsure (1)..(914): unsure at all n locations
  Clone ID: MRT4577_52524C.1
accacaaaggaagcttgattgtatcaagaggcttggatttggtttgttgaacaaggtatcgatgctgtttccacatgttttctggagtactgnccttgatacctttgggcatctggttgaaaatccgaggcggcgcggggagttctttttgacctctagctaggcagcggtggctggtggtccattgttgatggccttggttgctggtgaagctgcccacaattttgaaacaatgccaccaactgatgctgtaagctcagctctccagatactaagaggtatctatgaaccacaagggattgaggtgccggaccctctacagagtgtttgcactagatggggcactgactcgttcagtctaggctcatactctcatgttgctgtgggggcctctggagatgactatgacgcattagccgaaagtgttggtgatggccgtcttttctttgctggtgaggctaccacgaggcgttatccagcgacaatgcatggtgcctttatcagtggtttgcgggaggctgctaacatcacgctgcatgccaatgcccgggcaacaaagagtaaagtagacagaagtccatcgacaaacacacaggcttgtgctgctacattaacggacttgtttaggcaacctgatttggagtttggaagcttctcggttatttttggaggaaaagcttctgatccgaaatccccagctattctgaaggtggaattaggtgcgtcgcgaaagaaaaatacagccgaaggggtaaagacggaacagaaccactcaaacaaattgttgtttcagcagctccagtcacacttttaacaaacaacacagctttatggttacacattgctatcacgacagcaagctatgggagtaangggagtcagaggaggcgatgacatgagggtgcactacctct

SEQ ID NO: 132714 - DNA, 202 bp, Zea mays
  Clone ID: MRT4577_52525C.1
aaaaaaaaagtccctctttacctcaataatccataacccagggagcaaaggtggtctctacaccctaaaagccaaccccatacaaaacaccactttttttttaacttaaccccttaaaatatccctttttaaccttcttaaaaaacactccttacaaaaaccaaccaaaccctgcctggtggcaaattccaacccttgcaaa

SEQ ID NO: 132715 - DNA, 534 bp, Zea mays
  Clone ID: MRT4577_52527C.1
ttttttcttgctgttttcgctgctggcatacagtcttctttttttttattttgcatccactcatgcagcttacgcttctagtatacaggcaaccaaacaaagacttaaataaagtcaatgcacgcactgatgcaggatgagacagtgcgactaaccaatcagagcgatagtgcacagggttcttcgttcgttcgttcactcgggtgttttgctagcaatgcaatgcaacaactagctagctagttggtggacggctggagatccataatcgtcgatcgatccatcaggcgaggaggagctcggccttcttcaccttggagatgctctcgaggacgcccgccggcgacacgtggcccatcaccgtcaccttcttgctctccaggtcgatgctgaacgacgtcaccccttccatcttggagatgggcttcctgactttccccgcgcagccctggcaggggatggccaccttcatcaccaccacctggagcagttggtcgcctggcggcgccgccgcggcggcggcctgcgcgcgct

SEQ ID NO: 132716 - DNA, 189 bp, Zea mays
  Clone ID: MRT4577_52528C.1
cccacgcgtccgcggacgcgtgggcagcaacccatcgttggaggtgccatctttgagagtacatattagatgtactccataatggtaccctcattccggcatgtgtttcctagaaacaatcaatatattgatcgtgattaatctcattatattctctgcaatatatataatcctaatatataaaatatt

SEQ ID NO: 132717 - DNA, 206 bp, Zea mays
  Clone ID: MRT4577_52529C.1
ggacctgctcaagacagctcacctaagcagtctcgaggaccgtctctgaaggcctaccggcctgaaccttcccaatttgggacccgccctgcccctgaggaccaagttgtttttgaaggccgccgcccggcccggccggaacttgcggtcttccggcaacccccatacggactcgccgacatattcacgcacggcaaggaagcgct

SEQ ID NO: 132718 - DNA, 312 bp, Zea mays
  Clone ID: MRT4577_5252C.1
ctcacgcgttcgaactacccgcaactaggaagagaagtatgtataagcgcacgactccaaagccgggggctctctatccatgcggtggtcgccggggaggtcacctgagatcacataggcagtggtgaaggctgctgctgcgcttggtagcaacgatggtgtcaacggcaccatactctgcacccaagacggagatggccctaccactgtcaccggaagtgtatctggcctcaagtgctgccaccatgggtgacatgttcacccacttggtgacaccaacaatagttggatgccaacatggtccacactaca

SEQ ID NO: 132719 - DNA, 896 bp, Zea mays
  Clone ID: MRT4577_52530C.1
tctatttatctacaggaagccgcaataaaactagcacgctactttcttttcttcacctcatcaggattcaggaccacccgccggcagcagatacgcccaacaaaaaccaaccacccaccaagccagcaagcacctctccaagcagacagacgggaagggagggcaaccgagagcgatcggcgatgggctccttcctctcgagcttagtcacgccccctccggccgccgacgaccccaactgcgccgtggtggccgcccactccaaggccacctacgacgagcagtgggcggcccacaagagcagcagcaagctgatggtgatcgacttctcggcctcctggtgcgggccctgccgcttcatcgagccggccttcaaggagctggcctcccgcttctccgacgccatcttcgtcaaggtcgacgtcgacgagctcgcggaggtcgcaaggacatggaaggtagaggcgatgccaacgttcgtacttgtaaaggatgggaaggaggtaagccgtgtggttggggccaagaaggacgagcttgagaggaagatccggatgttcacgtcatcttcctcatcgtaaactcctgtggttcgcctgggacggagttgctgaagtgaaatggttcccttctctgaatgctgaaaaaaggggaaaaaaactatgtgaaaatgatggtagacgtgtctgggtcagtaataagagtttctaaaatctgaatgagatttgaatcgctctccgttgatgaatttctcatggtctgtgtattccaccatgattcataaggtcatttcagtgtagttttaatacactgtttctaatgctgccccatcaaatttaaactaaccagggaactgtatagacagagtttcatccctataaagtctatcatttttt

SEQ ID NO: 132720 - DNA, 334 bp, Zea mays
  Clone ID: MRT4577_52531C.1
gaccttccaattcccatggggggagggttattcattttcctatttcctttccagaatatcacatatacacgggggttttctttcattatacatacaatttacatgactgcctggaacgttacacttaatacctcacctatgtcgcatgcccggcaacgaaaggccaagagcccataccattggggggaactacggcccatccggtttgtcctgttcccacttgaacaccatgcttaacatgaccatttccctgggccgatccttgaacaagacaaacttttcatagacggccttcctggcaaacccggcctttttcagaactccctgtaacccc

SEQ ID NO: 132721 - DNA, 126 bp, Zea mays
  unsure (1)..(126): unsure at all n locations
  Clone ID: MRT4577_52532C.1
cgcgngtgcagcatctagtaacgagctaggcggccatcacgtgacaacgttgggagctagcgatgaaggtctcctcgcccgcgcgacgttccggcgtgcacgggacgacagctgatgatgggcctc

SEQ ID NO: 132722 - DNA, 305 bp, Zea mays
  Clone ID: MRT4577_52533C.1
ctgcctgttactacccggttagttgactcatataagataacgcgtccgtcaacatacttcccaaacgctcggtatttacatggcaccagcccttttctcccaagctcgggacaatcgctggaagcttcgtcagccgcgtcctcgccggcaaggccgcctcgccgaggagggccgtgcacgctctcggcgtacgacaagaacctggaggaccaggtgcgcccggcgttcgtgccggacgatgtgatcggcagctccgggagccccgacaagtactggagcccccaccccaagaccgtcgtgttcgg

SEQ ID NO: 132723 - DNA, 345 bp, Zea mays
  Clone ID: MRT4577_52534C.1
gccggtccctacggcgccgccggcatgccgctccacgccgggcccggcaacgtctacacggggctgatctgatctagtaccccacgcggccacgcccggtggccagtttcttggttgcgttagcgctactgttgccccaccattcattctttttgtccaagttttcttggtgccattgtgagaaggaaatttgtagcacagacaggcaggcaggcaggtagaggcggtcacggttggttatttataaatagcagcgtcgggtggtgtcctgtacgtacgaggtgagtgcatgcatattatacaacatagagtttggccataaaaaaaaaaaacaaccccgcggtc

SEQ ID NO: 132724 - DNA, 277 bp, Zea mays
  Clone ID: MRT4577_52535C.1
gtcagggacaagatggtgccactggtgcaggtctctccgctcatcaagctcggccgctactccgccctgttcctcggtgtggcctacggagcctcgcgctacaattacctaaaacctcgggcagaagaggagaggaggatagcagcagaagagaagaagaagcaggatgaactgaaacggattgccagagaattggcagaagatgacagcatattaaagtgagtgaccctgcgacccactctttggaccagcagcggatgaataaagcttcctgtgt

SEQ ID NO: 132725 - DNA, 405 bp, Zea mays
  Clone ID: MRT4577_52536C.1
taaaaatcgacgtaaatcagaagacatccccctgtgatgctgccacataatggctactaatcccctgcagctgcaatactgctcgccgccgccgagctcggttgccttgtcgctccagctgtcatcgacgaaagaaccacccaccaactacaccatatacactccgccggggagcccaccgaaccactacgaggggacccctgataacaagggccgaccgacaagtctctgaaaccgcggcgccgcccgcggaaccatgccatacggatcacctgcgtcgaggggatgaacgagagccccaagcaatggaagaccacatccatcgacgacgacgggaataacgaccatcgacccacgcccgggtggcaggtcaaccttaaacactcacaccaagccttctgcccc

SEQ ID NO: 132726 - DNA, 265 bp, Zea mays
  Clone ID: MRT4577_52537C.1
agcagtggtaacaacgcagagtacgcggggttatcacgttcatcgcagtaccgcacaataatcatgcacatattttactatataacacaaaaaaaagggctgcatttggattttaactcacttgtccagtattttttccccttgccaggcaaaagtttactacagatcatgctggaaaaacacagaggtaattccacacgcgcgtgcacacacaaaaaaaaaaaaaaaaaaaaaaaaaaaagtactctgcgttgttaccactgct

SEQ ID NO: 132727 - DNA, 338 bp, Zea mays
  Clone ID: MRT4577_52538C.1
ctttgtttatctagtgagtggaggtcggtctttttgtgtattttttgtaccagaaaattttgacggacaaacaatggtcccacatggtcatcattacgcgagaaatgcggacacgaacatttctgggtcaccctgcaatataaaccccgctggtttaccaaactgggaggaccacaaaaacgggggaacaaacatccccccaagtggacactggccactggaggtaagaccttcttactgaactgggaacatatttcaagaatgcatcaaacaatgggtgccgctgccctatcaaagctggggcaaaaatgaaaacgatccttgctcagaggtgcaga

SEQ ID NO: 132728 - DNA, 237 bp, Zea mays
  Clone ID: MRT4577_52539C.1
aaaacaatccattaaacttccattaaacaaaacaagtgaacggaccgtttttttgtatttactccacctttttattatccgttagaatatttaatcaatataatgcggaatgcaaatccatttgactgggaatgaattattttacccaaggggggtgttacacttgaaaattccctcccccccctgtttttaatgggaactttgaatccctgtagttggggccccatctcttttaaa

SEQ ID NO: 132729 - DNA, 388 bp, Zea mays
  Clone ID: MRT4577_5253C.1
ttcgtccgggctcggcctagacaggaggggtctcgttagactttgtgttatttaacatattgcagtgcttagcattagctgtaaccacctttttatatatcctttgcctttgttttgaataacaccgcggtatatttcccccttcccaattgattatatttcttcctttgcaaaagattcggcggttcccaaaacacccacaggtggctcttttttatttcccccgtgttccccaaaggaaataaaaaagcccccccttcaaaccaaaaaagtttaaattccggcggaaaattttttaaccaaagggcggggcctttcataaacctatccttatgccccctaggttttggccccaattttttaaaaaaccccgtaaaaaaaccccttt

SEQ ID NO: 132730 - DNA, 328 bp, Zea mays
  unsure (1)..(328): unsure at all n locations
  Clone ID: MRT4577_52540C.1
cgaccgagaggggaacgaggcanccnccaanaaaagccattttatttatanaaaaccgagagaccccagccggcaggcatgccgaccgccgacggaccaccccccccacccgagagaaagaaggagaagaacaagaggaaccccaccgccgcgccccacggagncgccgacgcggccaccgcagagcaggcccccaccgaggccgacgccgccggcgccccaaccgactccgagacgccggcgaccgccgaagcccccgctggcgccaccggcgccggcgcccgcaccggcaccgacgcggggcccnccgccagcggcgccgagcccg

SEQ ID NO: 132731 - DNA, 570 bp, Zea mays
  Clone ID: MRT4577_52541C.1
ccggccggggaccacctccgcttcctccgcccaggggccctcgcccgcctccgcgacgccaggctccgccgtgggagtcgcgccgcccgcctgccctctccctcatcgccggctccggcgccggcgtccccctcatcgcctcctcctgcggctggagacggcgagggcatcgtggccgtgccgtacttcacgcccgcctcgaggctgctcgcgccccggtgcccgcagcggaagaagctcgcggcggccaagtctgtggtgctcttcgctccgccgcctcccagcaccgatctgcccatcgaggcggttatcgagttcctcagcgcgcctgacatggtggtcgccgcccactagagtgtctcgccgtacttttgtgttagccttgtagatctattcgtcgcttatcttgttagcttagtgccttagggtggtatgaaattttcgttgtttgtttgtactgatctggatgtgaaaatagagacatatacaaggaagcgcatgcttgatatgtagtaatacagaatactacaaaattgggtaacgaaaaaaaaaaaaaaaaaaggggcggcc

SEQ ID NO: 132732 - DNA, 3135 bp, Zea mays
  Clone ID: MRT4577_52542C.1
gtaagctcggaattcggctcgagggtaattacccaattatttcctcagtgctacatgatcaacttgcatctaggcagccaccagtaattctaggaatccactttttctctctcaagtgcgctctctctcactcctctctccagcatatttgtcttagctagattgtctctcaagtgtgctctctctcactcctctctccagcatatttgtcttagctagattgtctctcaagtgtgctctctctcactcctctcttcagcatatttgtcttagctagattgtctctcaagtgctctctatctccaacatatttctcttatttcgatcatctctctctctctctctctctctctctctcactctagctaacatgcttctgctacctccacagtagcaaacaacagagatgttctcgcctattctctgtctaaatatttacctccacttactctctttttacttcctggtgtcactccctacattaatttaatttacaatgattccattctttgtatccatcttgagcatctctctaatttactacaatcttgatatcaccctaatctttagtttctttccatctccatactttgtttatctcgtatctaactaatccctttgggctccatattctctgtagttctacaaagacgaaataaaccatccgttagctggttgacagttgtcaaaagaaaagaaaaaatctggcaaaccgttcatcctatactcattgctttatccactggattcacccgtaaccattgggcacgagtaagcttcttctgataatgggcatgtgtctttgctggggaatcgtaacccacctgatggcaggtctacatgggcataataacattggatttgtcatggaaaatactttcataatatagtattttattaccttttgttatcacataataccatattgtattacctttttcttatcatgtaaatctgtgtattggaggacgtgttgaagtcaaaacaacagtacacaaaaaaatgcgctgtgcgcgctcgagggcatgttattacccagttagcctggctccctcgctcgctcgctcgctcgcagcggccaccgggtggccggctggccgccaccgcacacctctgctgtggtctaccgcccctcttcgctcccgctcccgtcgtcggtgagccgcgcccgtccaccctctcaccgatggcttcggcggccgcgaggggcgccgcggtgcgctcccctctcctcgtccaccaccgcgtccccctggtacatcccagcgggggaggctcgctccgggtcggctggcccggaattgggcccggacgggaggggcggcggcggggcgccccggttggggctagggttttcgcgcgctactcccaggcccaggacttctccacacgcctccaagatagagctggtgagctgcctaagttagtcgaggaccttatccagacatcgattagcacagggcctcgaggtgctttcaggatggcccaagggatccaagctgtgcttggggttggtggggagtggctgaatgacctctcaaagacagccaacacatcagcaggaattccatctcagatgcagcttggtttgctttctccactttaccttcgaaggctttttgagcgcatgggtgccacttatatcaagttaggccagtttgtagcatctgcgccaactttgtttcctgcagaatatgttgaggaattccagaaatgctttgaccaagcaccagctgtcccatatgacgtgattgaatcaatattacgtgaggagctgcagcggccattagatagtgtgtatgaatacattgatccggtgccaatagcctctgcctcaatagcacaggttcatggggctaggttgaagagctctcagaaagatgtggtgattaaagttctaaagcctggtattgaagatactttggttgctgatctgaattttatctatgttgttgcacgtgttttagagttcttgaaccctgaactacaaaggacatcactggtaggcattgtcaaggatataaaggaatcaatgcttgaggaagttgactttagaaaagaggctgcaaatattcaggcatttcagggatacattgatgcaatggggtttgacaggcaggcaaaagccccatttgtgtatcagcactgtagtacaaaacgtgtattgactatggaaagattgtatggagttccgcttactgatcttgattctataagatctcttgttcctgatcctgagttgactttagtcactgcccttaatgtctggtttggaagcttaatttcatgtgaatccttccatgctgatgtacatgctggaaacctatggttgctccgtgatgggcgaattggttttattgattttgggattgttggtcgaatatctccaagaacttgggcagctatggaggtctttttggcttcttttgcaactgaggattatgatgctatggcctctgccctctctgaaatgggtgctacagggaatgatataaatactaatgaatttgcaaaggacctgcgaaagatattctcatcgatacaggacctggatactgaaatcatagtggcaacagcaaggacccctgatgctacagcagtatctgctaatgttgtccttgatgagaggcagatgaatgctctttttcttgatctggtcagggtgagcgagtcttacgggctgaaatttcctcgggagtttgctcttctcatgaagcagctgctgtattttgatcgctacacaagactgctggctcccagcatgaacatgctgcgagacgagaggatcaacatctccaccaatcgacaaccaagaagaactgatagatttcagtgaagccacgtcgttagtcaccggccacgtactagaggagtcgtgatgggcgataatagcaagctcatgtgacccaatactgtatatagttttgccagaccagcatagaaatgaaccacacgctagaaattgtacactccgtcgtattctgggattgagcgttatatcgtactagtaggtaacatgtaaaggctgtatcccacgaccaaagtaaatttcagatgaactgcttttgtctccaaaaaaaaaaaaaaaaaaaaaaaaaaaaaaaaaaagggcggctgctcgcgatctagaactag

SEQ ID NO: 132733 - DNA, 1174 bp, Zea mays
  Clone ID: MRT4577_52543C.1
tatattcaaaaattgagaagttggagcaggagctacgtgaagttgctgccctcgaggtttctctctactctgtggtgccagagcacggttgttcatcacataagttgcatacaccagctcgccgtctatctagggtttacattcatgcatcaaaattttggtcctcagataagaaagcttcagttgcaagaaattcagtttctgggcttgtgcttgttgcaaagtcttgtggcaatgatgtttcaaggttgacattttggctatcgaacacagttgtcctgagagaaatcatcgcacaaacatttggtacttcacaacactcaagtccagttaaggttttcagctcaaatggcaatgcaaacaagcctgacaggagtttcacttcatcgcaatggaaaagtaactacaatggcaagtatgtgaaccccaatatcatgcagctgccagatgattggcagaaaactagcacattgctggatgcattggagaagattgaatcttggatcttttctcggattgttgagtctgtgtggtggcaggcaatgacaccccacatgcaaacccctgtagaagatttgtcaactccaaagatagggaggttgttagggcagtctttgggtgatcagcaacatgggagtttttctattgatctctggagaagtgcatttcaagatgcattcagcagaatctgtcctcttcgtgctggtgggcatgagtgtggatgtttaccagtcttggcaaaactggtgatggagcactgcatagcccggttagatattgctatgtttaacccacgcgtccgtgaatcagagaatgagatacccactgatcctatatccgacccaattgtggactcaagagttctgccgattccagctggcaacttaagctttggatcaggcgcacagctgaagaactctgttgggaattggtccagatggttgactgatacgtttggcatggatgctgctgaatctgaaaagggtggtcaagatgtggaagttaatggcgatgacagaagagacacagccgaatcaacttgctttaagctacttaacgagttgagtgatcttctgatgctcccgaaggacatgcttctcgataaagccattaggaaagaggtctgcccttccattggccttccactagtaacaagaatactctgcaacttcac

SEQ ID NO: 132734 - DNA, 395 bp, Zea mays
  Clone ID: MRT4577_52544C.1
gtgtccacaatggcattgaccaggcattatatgggatacctgtagcctacagcaaacattgcctacatcacaaaaaacatgtgcctgaagcactaccggtatgtctgattaaatcaaacgggctaccacataatgcaattgcgttataacaatgttgcacggcagtaagcaaaccacgatgtctatatacatctgaaagatctttattgactgcgacctaacaaaggcatacatgatccctcaatcagcaggcttcttgctccacctggcgcttctatttaacactgtatttatgggctgcacggtctaagagacccctagatccataacaaatgccgataccttgacaatcatctcgctagtcgtgggaacatggaaacctggcacgtgccatt

SEQ ID NO: 132735 - DNA, 529 bp, Zea mays
  Clone ID: MRT4577_52545C.1
tattcaagcttgtcgaatcacaggtcttcaaaagattagcacaacacgccacttggagattgatgctcaggatccctctttcataacaactcgaccttattttgagccgtcctctactgtcagtcagggtggaactgagagctgcatctcacggtgatgaatgcccgttcttcctctattcttctgggtcttatgctgccttatatagtcgatggcactccaagtatctcgagttctcaaccgtcgtcgcacctctttctgcatttcttatcatgccaattggtgatggtcaaagctgctgtgatgcaacgctctgactaccatggacgactggaatacaggtagacaccgccattgttatcaacggagaaaggactagaacaaaccccgccatcctgtcctggagaaactggttcaatcttggttagcggttacccgtacagttactactacttacgggagttctttgcccgtctatttgggacaagagtaacctgagctcgcgtggggatgatattttggatgctcg

SEQ ID NO: 132736 - DNA, 249 bp, Zea mays
  Clone ID: MRT4577_52546C.1
caaagaagtttctctttgcttttctagaataagcatacccgacacatccggcagaaggccagagggacacagcacaagggcccctaaaggggaccggatgcacaacaaaaggaaacactccatttatcaaaacacggccccacacccgatgataaacttacgaacgggagccaccagcaccgaatgcaaaagcccgccccggaaggaaaaacttgcccgccccaacgaatgaacagaggggggcacggg

SEQ ID NO: 132737 - DNA, 186 bp, Zea mays
  Clone ID: MRT4577_52547C.1
attcccgctggacccactcatccggactcctattagtgttccctctttattctaaaccttgaggcttgtgaacacacaagtaattttttctaacactcgtacctcttaattgtaactgattgccatctcataaacttcttatcaacatctctttttctcaagtgactgcgaattctatcctttttt

SEQ ID NO: 132738 - DNA, 1251 bp, Zea mays
  Clone ID: MRT4577_52548C.1
ggccggccggaaaaaaaaaatttccaaaaaaaaaaaaaaaaaaaaaagcctcagcccaccgaccgttgcaccagctcgcatggcgctccacgccgtctcccccgcggcggtctcctccccgctgcgcgccctctcgcgcagattcccccagcgctcaggctgtggttgtttaccaaagcagtccgtcacaatttgctcctctacgaactttgcgagaaaacttcaggatggaccagtggacttcgctgccaggcgactggttcttggacactcggacaagagagcagttttgacgcatgccactattgaagaaatcgaagcggagaaatccctcatcgaagaccaagctaaagaaaagatggagaaggcgatcgaaacagtccaaactaacttcaacactgtgaggacagggcgtgcaagcccggcaatgcttgaccggatcgaggtcgagtactacggaactccagtgaacttgaagagcattgcacagataagcactccagatgcaacttctcttcttattcaaccatatgataagtcaagcctcaagcttattgagaaaactatagttgccgcaaatcttggtgtgacaccaagcaatgacggagaagtgatacgagtgactgtcccaccgttgacatctgatcgcagaaaggaattagcaaagacagtagctaaattggctgaagatggcaaggttgctataaggaacataagaagagatgcaatcaaagcttacgataaactacagaaggaaaagaagctttctgaagacaatgtgaaagatttgtcagctgacctacaaaaagtcacggacgagtacatgaaaaatatcgattccatccagaagcagaaggaacaggaactgatgaaaatctagatcttcaacaagctgagctgactgtgtatgactgcttggcgccgcgccgccggggactgcgcacgttttgaggtcaggtcaggtgctttgctgcaaccttctggatgcacacatgctgaggcaatgctgttgtgggtcgtttctcttttttttttcgtatttcttttgtaatgctcgtaaataggctctcgctcgtcgccgtgttgtctgactgttgttacgttgtcaatacttgtcgccatctgaatcgaatgtctgaaatgttcctgcccgactctcgtacgcttgtttgtcagaactcagaactctgctgaggttgtcaaagctatttcgcaccagctagcttagctccacgtgctgggctcaagctc

SEQ ID NO: 132739 - DNA, 1361 bp, Zea mays
  Clone ID: MRT4577_52549C.1
ggtaccctcgggttcggccgggatccagtcgcgccagctctcaccttgcgtctccaatctcgcctcccccgcgtctccggctgcgtttgctccaccggcgctccacccgccccaccgtccaccggctcccatggcgctccacgccgtctcctccgcggcggtctcctccccgttgcgcgccctctcacgcagcctcccccagcgcccagatgtcctacttcactggctgtggttgtttaccaaagcagtccgtcatgatttactccacaaaatttgcaagacctcaggctggaccggtggacttcgctggcaggcctctggttcttggacgctcggacaagagagcagttttgatgcatgccactattgaagaaatcgaagcggagaaatccctcatcgaagaccaagctaaagaaaagatggagaaggcaatcgaaacagtccaagctaacttcaacactgtgaggacaggacgtgcaaacccggccatgcttgaccggattgaggttgagtactacggaactccagtaaacttgaagagcattgcacagataagcactccagatgcaacttctcttcttattcaaccatatgataagtcaagcctcaagcttattgagaaaactatagttgctgcaaatcttggtgtgacaccaagcaatgatggagaagtaatacgagtgactgtcccaccattgacatctgatcgcagaaaggaattatcaaagacagtagctaaattagctgaagatggcaaggttgctataaggaacataagaagagatgcaatcaaagcttatgataaactagagaaggaaaagaagctttctgaggacaatgtgaaagatttatcagctgatctacaaaaagtcacagatgagtacatgaaaaagatcgaatccatccagaagcagaaggaacaggaactgatgaaaatttagacctcaagctgactgtatggctggtgaggagtaaccgcctccgtgaagcatggacccctgcatatgttggtgtttctgaagcaatttgtttggttcatggctttggcgtctcggcgctgcgccagggatgcacgttttgaatcaggcgctttgctggaacttttgggtgcacacaagttgagacaatgctgctgctgctgtgtgtgtgtgttttgagattaagacaatgctgctgtgttttttctttgagattaagacaatgctgttgcgtgtgttcttctcgttttctgtaatgttcgtaaatagtctcttcgtcgccgtgttgtctgactgctacattgtcaatatttcaaaacatacgtctctgaatcaaatgtctggattggttctgcctaaaaaaaaaaaaaaaaaaaagcggcc

SEQ ID NO: 132740 - DNA, 461 bp, Zea mays
  Clone ID: MRT4577_5254C.1
ctctctcccaagcaccggcccggcgcacgcggctaccatggcaggctgcaataacaggaggatctaccaggaagagatgggtggtaagaaaaagaccgtcgatcccttctctaagaacgactggtatgacatactggcctcatctgtcttcagtgtgcgcaacattggtacgactcttttgtacaacacacatgttaccaacattgcctatgatggtctcatgcacagattttttgcagattgtctagcttttcttcatggttactatgatcaggctcacagaaaatcttggctccatgctcaagatgcgcactgcaggtatgcgctcacagacttctctggcatgaattttaccaccgattagctcaaatctctagttcagatgtgtcatacattgatggcagaccatgtttgtgtccacacaacctgcatctacatgctgcgtctgctctgtgttggtg

SEQ ID NO: 132741 - DNA, 758 bp, Zea mays
  Clone ID: MRT4577_52550C.1
ccttcttctggtacgcggttcttagctggtcctcgagccttgcgcccctgcgcatcccctcctcatggctggccttctctgcggctaggaggccctagagacgctcgacctcggcgcggagcatggcggcctcgctctcgttggtggcgacgacttgctcggcggcggcgacttttttgcgggcctggacacaactagccggggccttttttgatgtgacgctctctgcaagacatgctgatatacgacaccggcgacattcgccagccgccctgcgccccgttcgtgaagaatgcgtcagccatgttcagtttctcgcagggctgcctttgttggaggcaagaatgcccgcagatatctggtgctttgttgtggcaccgcctcatgcatgggcaccaaggtcctctcgacgctcgacggcattcaacggcacaaacaagatccgtgcctacgcacactgcgcgaaaaactcggaagagatcgctctgctcctgatcaacctggacggcatcagcacgaaccgcatctacgtgacgagccaaggcgcgcacgcccggagcggaaggaagaaggagagcaggacgtccgacgtccacatcatccctgcagggctcggcgaagcagcagccgcgctcacgagacaggagtaccatctaactcccaaggacgggaacctgcagagccagcagctgctgctgaacggcaacgtcctggcaaccgacgccgacggggagatcccggagctggagcccgtgcag

SEQ ID NO: 132742 - DNA, 154 bp, Zea mays
  Clone ID: MRT4577_52551C.1
acgacctgacgatttagatttttcagaaacgccagcacaaaaagctgaggcaggggggcgtgaataagaaggcaggtggcgaccaaagagagccgagcaaacggaaagcgtcgctcaagggccactgcggagcggccatgatgcgactacaaga

SEQ ID NO: 132743 - DNA, 999 bp, Zea mays
  Clone ID: MRT4577_52552C.1
cctcgctagccgccctgcgccccgttcgtgaagaatgcgtcagccatgttcagtttctcgcagggctgcctttgttggaggcaagaagtgcccgacagatatctgggtattctggactcagcttcggtacgacacgaagagctactgcagacagaccttggttggaggcaactatggcctgctcaacacaagtacatttgaaccaaaccctgactattacagtgctttgctgtggcaccgcctcatgcatgggcaccaaggtcctctcgacgctcgacggcattcaacggcacgaacaagatccgtgcctacgcacactgcgcgaaaaactcggaagggatcactctgctcctgatcaacctggacggcagcagcacgaaccgcatctacgtgacgagccaaggcgcgcacgcccagagcggaaggaagaaggggagcgggacgtccgacgtccacatcatccctgcagggctcggcgaagcagcagcagcagccgcgctcacgagacaggagtaccatctgactcccaaggacgggaacctgcagagccagcaggtgctgctgaacggcaacgccctggcaaccgacgccgacggggagatcccggagctggagcccgtgcaggtggaggggacgcagcccataaccgtgggcccttactccatcgtgtttgctcacgtccccagcttctacgctcctgcgtgcctgtagctagagttttcgtctggattttttttttcccagcctttctcggtgtgcatctcgtaggttaggtaagtctgtccggggtgaacggcgaagcttgttcatctctgcccatagtccgtgaagtgtgtaagctgcgaggctggaaggtttgtgatttatgattgtttgggaaaggagtggtcagtcagatatataatgtgtgagcaaaagaaggaaggaagctggaaatgagataataaaagaaagggtttggagttttttttaaaaaaaaaaaaaaaaaaaacccaaccc

SEQ ID NO: 132744 - DNA, 213 bp, Zea mays
  unsure (1)..(213): unsure at all n locations
  Clone ID: MRT4577_52553C.1
tccggggggcccgatccccgaaaaatatttttccacgcgctcctcttctctgtgtttccactccacagaagagttcgaataacccgccccccctatttttctattcaagcccttcttgttcaatggaggaagtacgcctccgtggtgtgatactatgtcccgccgccgccgncggcccctccatatatttctcaaagtgcatctaggtcgagc

SEQ ID NO: 132745 - DNA, 441 bp, Zea mays
  Clone ID: MRT4577_52554C.1
gcgaagaacaccagaagatccagcagcgggagcccatcatgatctagaacctaccagtagcgtctgtggctgaccttgaccagctggcgtgcttcaactgtgctgattatgggcccaacgttccccagttactcagctgtgtagtgcctaaccaaagaagatactgtccgtccgaccccccgagatgggtgaactctcctacctgattgtcagcctgacagctactaacattatccggctctctggtggagccctgtaccttattgacacgacacatggctacgtgtaccagccgctgctcctaacgctgggaccctgttaacactggcagaaacgctaccaatcagcctgcttggtttgacaaacccgacagctttcttactaccacaaatgactggaggggccctcctttagatcacttatgaagtctagatgaataat

SEQ ID NO: 132746 - DNA, 361 bp, Zea mays
  Clone ID: MRT4577_52555C.1
gcaggggtaacaacgcagagtacgcggggattgcgaataaaacactcgagaattctaaacaaaaaaaacaaaaaatacaatcatattatgaaaatggaaatcaaggaaaggaaaaaaggtttgaaaaagataaccaatagcgcgtctgcgctgtatccacatgtttatgggcgaattacacatcactggtcgcccttctttgtggatcccagttgggccccaaggtctacaatattttggtcacaaatatttgcctgtgtgaaatttagtaaggagctgacaattccttaccatatacgggccggtagcacaaaaggctatacttggggggtcttttggggggagagacccgaattaattg

SEQ ID NO: 132747 - DNA, 403 bp, Zea mays
  Clone ID: MRT4577_52556C.1
gacgaggagaggggaaccctaaactggcggtgacactggctggggacctgtgtcgcgacagagggagtctatctatcgtgaatctcgcggaccctcagctatgctatggatacgcgtgcgtaaccagcaagcctgtaatgcactaagtattagtgagtgtacagcgcacttgatagagagcggtctatgacaccgtgcgctagcacctgatttgttgcccgcatgcctatgggggcgccaacaggaatagccgcacgggcccatgacggccacacgaggctcgtggtatgtgtcgctgccgggcgtcatacctcgcgatgtagctatgtggaataccgatcattaacgatccatgatacgaacctgatggtccttggtgataggcaagacaaacgcgacttgc

SEQ ID NO: 132748 - DNA, 217 bp, Zea mays
  unsure (1)..(217): unsure at all n locations
  Clone ID: MRT4577_52557C.1
ggggaaaancgcaccagaaccgngaagagccagcaacccaaccgcgagcgcgacacgcagcagagcgacccgacggccaccaccaccgccaagaggcggggggcagcgcgaaggaccaacgcccacgaagggaaagcacaccgcaggggcggaggaggcngccacgaccagcgagacgaaggaacagagggacgaggaagaggccgagcacaacgac

SEQ ID NO: 132749 - DNA, 4107 bp, Zea mays
  Clone ID: MRT4577_52558C.1
atggtccagatcgtcgagcaccgcgacttgactcctgaggacttcctgatggaggaagaggctgcgtcatccatgcctcggacctccaaccgccctgcacctggtgctgctgctgtgcatgctgcgcgacagaacactcctgcacagtcgtcctgggctccgtcaagggctgctcccggtgtgctgtctgcagccagggagttgttacgccaccctccgagctccacggcctcgccgggggccatgaagcagtggcgtgacgatgtcgatcgtctgctcagcatggtgcattctggctcggccagacctaggcctcggtcattccggcgtcaacgtgaggcgtcggcgtcagtgcactcaccctcggtgaaggctgcaccgactaaggacctgtgggcggaactcaatcgccgacgtgcgggcgagaatgccccaatttcttcggagagacctgaggacctgcgggcagaactcaaccgcaggcgtgcgggcgagggcacacgagtctctctggagagggcgcgtgagcgccggctaaacttcgagggtcgcaacctcgaccaggacttcgctctgctcgcgccacaaactccaaggggtgcccggacccacacgggtgtcccattggttggcgtgggctgtaccgcgctggcggaccacctccgcacggtgacttggacgcccaagttccggccgcacctgccagagaagtacgatggtacgtcaaacccatcagaatttgtacaggtttacgtcaccgctattacggcatctggtggaaacactactgtgatggcgagctatttccatgtagccttgaccaggccggcccggacctggctcatgaacctgaccccgggatctgtctactcctgggaggagctctgtgcaaggttcacaacgaactttgccagtgcttatcagcagcatggcgtggaggctcatctccatgccgtaaggcaagaacccggggagactctccgggccttcatcactcgcttcaccaaggcctccaacgatggtttgccacctcatcgcttacctggcaaggagaaggtcgacgaaggtgacgcggctgcaggagaacgggacctcgggtatcaatcacctgagggggttctcaaggacgttttgactggagactccgactccggtggcgagagcgaccgccgcaataagctgtacgtcatgtacggcgggagctgggagctcacctactgcaggaacgtcaagtccctgcgtcgagagcggtggaggagcactactatctccttaggggcatctgactgccccgacaacatggcaggggccggtatactaccgctcatcactgcccctgtcatcgccaacatgcgactgcaccatgttctgattgatggtggggctgggctcaacgtcatcagtcatgctgcattcaagcagctgcagatcccaaggtcccgactgggaccctctcgtccattctccggagtgggcccacaaccggtgtatccccttgggagcatcgcactcccggttacgttcgggaccgaggaaaacttccgcacagagaacgtcgagctcgacgtcgcggaggttaacctcccattcaatgccatcattggtaggttggccctgtaccggttcatggccattgcccattacgggtatttggtcctcaagatgccgtccccggcaggggtccttaccgtgcggggtgaccgcgccgctgcggtggcggctgtcgagaagctgcatgccctggcggcagaaactgctcgcccggatgatggagggagggacccctcgacttccggtaccaaggcacctaccaaggtgccaaaggtgcagccgtccgaagtagacggtggacccatcaaaaccatccagatgcctaggatccctagggaggtgattgagcaccatctgaagatccaccttgatgccaaaccggtgagtcagaagcctcgaagacagtccgttgagcggcaggacttcatccgtcaggaggtccggaagctgctagatgccggcttcatcaaagaggttcatcaccccgtgtggctggccaacccagtcatcgttctaaaggtgaacgggaagcttcggatgtgcatcgactacaccagcctgaataaggcttgtcccaaggacccgtatccacttccacgcatagatcaaatcgtggattctacctccgggtgcgacctcttgtcctttctagatgcttactctggtttccatcagatccagatggctagggaagataggaagcataccgcttttgtaacagtggatgggctctactgctatgttgtaatgccctacggtctgagaaacgccttgccgacatttgtacgggcgatgagtaagaccttcggggacctaattagggacaagatagagatatatgtcgatgacattatggtcaagactaagaggggctcgactctggtggaagacctgaccctggtctttgacaagctgtgggcgacgcgcatgaagctgaacttggacaagtgcgtctttggcgtctccgcaggaaagttgctgggattcctggtttcacactggggcattgaagcaaacccggagaagatcagggcgattgaggcaatgaggcctccggcctggatcaaggacgtccagaagcttacggggacggagcaacattcccaggggagtcaggaggttcccctaggagaaggtggtggtccgaccaccatggaccttgaggtctcgggaccagccgtaggagtccggaccatacagaggccggtctactacatcagcgaggtcctccatgaggcgaaggccaggaagctgcgccactatttccaggcacacagggtcgtggtgatgacctccttcccgttaagggctatcctccacaactctaacgccataggcaacattgccaacgctccagggggtccagatcccgatttggaccccacacctgcagagcctagggtcatggtcttcaccgagccccactggacactcttcttcgacgggtccacccgccagcaaggtggcagtgctggggtggtcctcgtcgacccaagcggagatcaagtcaagtacatggtgcacctcgagttcaaggccaccaacaacatggcagagtacgaggcgctgatctttggcttgtctgcgtccctatccctagggatccgccagctcctcgtgaagggggactcccagctaatcatcaagcaggaagctggaaaggacttcacgaccctagaactgcaacatgttcctcgagctgacaactcagcggcagatgaactctccacaagggcatcgacttgggcacccgtgcccgagggcgtcttcaaaagacggctgctgagacttaccacccagcctgccgaactgggcgaagggggtgagactagcacctcgaagctagcggtcccggtggcgttacatctacagaacccaccaaggattgtgtgtgctatagggggtcctgcctaccccttagcgccacagccagtatctcagagtggtcccgatgcatggatctccaagatccgggactacctgaaggagaatatccttcctgaagatcatgtatccgcagagcatatagtgcggttggctaaacgatacgcagtggtagaaggggatctctaccgccgtggggccaacggcattctcatgcggtgcattacccaggaggagggccatgagttattcacggagatccatggagatacacacaccagctcaggctctgcaaatgattctaccctcctggccgttcgccgtatgggggtggacatcctaggaccattccctagggccgtcggcgggtaccgtttcctcttcgtcgccattgacaagttcacgaagtggccagaggccacccctgtggtcaacattacccagggtgctgttgttgctttcctcaggagcaacggccaggcagagagggcaaacacagaaatcctcagggggctcaagacatgcatctacgtctgcttgaaaaagcatggtgcaaattgggtcaacgagcttccgtccgtgctatgggggaaccgaactacacccagccgagctaccggggagaccccgttcttcctggtctatggggccgaagcctgccttcccccataa

SEQ ID NO: 132750 - DNA, 814 bp, Zea mays
  Clone ID: MRT4577_5255C.1
gccagccgcacgggatagaacccgggagccgccgcactgccctgccttccgctgccgcgcccgcagtttccaaattcgtcttgctccgctcaatcacgcgaatacctgacctctccgttccttcgtcgtcgctcccggtcgcagtcgacctagcgaaggagcagcgcaacatgcaaacagtacggagtgcggtgctgcagcacctccggctccgcgcggcggctcctattgctgcacgtggaggcggcggcgggttcgctcggaggatgagcgcgccggcgggccaggaggacagtagcggcagcagctccgaactggagagggacatcaggacgcgcgtcgttaacctggtcaagaagttcgacaagatcgacgccgacaaggtgaccgagactgcagacttccaaaaggacctgagcttggacagcttagaccgggtggaacttgttatggcctttgaacaagagttctccgttgagatccctgatgacaaggctgacaagctgacctgttgtgcggatgttgccaagtacatcatatctgaatctcaaacgagtgatacaaatgccggtggatcctgagggacagatgaaaccgagtgcaatgtttcttttgtgtgtgtgtgtttatcataatgagtctgggttacaaaggacgatctgtgcgcatgatttccttttagtttttccagtatggaaaaaaatatctctacctcggttgattgttacaaagtgaaggttttttttatatgtcgatcatggtcatggatcatgttcatgattttccaatgctaaaccaccccccccccccccgg

SEQ ID NO: 132751 - DNA, 733 bp, Zea mays
  Clone ID: MRT4577_52560C.1
gggagaggcgctgccagatggagaggcgctgccagagggagaggcgctgctccggccatggctgcgtagagggagctgcgcagagggagctgaacagagggagccgcagagggaggcgcagagggagctgcagagggagctgcgcagaaataggcggccatggctgctccggccagatctggccgtcgggacggcgcgcgaaccagcagagagatggccggccgttcgacggccagcagacggacgagcgcgagccaacagagggaaggtggcggccgggcgcgcgagctagcaggaagatgacggctgggcgcgcgagccagcagaggaggaaggtgacggccgggcgcgcgcgagctagcaggaaggtgatggacgggcgcgcgcgcgagccagcagaggagagggcggccagcagagggaggtggcggcggcggccagcagaggtaggggtgccggtggcggccagtagagagagagaggtgtacctgagtcgttcccagcagagagcggtgaggagagcgggctgggaacggagccgctccgtcccctcaattttttggagtgggatggttccagatctggagagaatattctctaattggagcgactccgttctagtttcttgctaaccaaacagcaccaaaactaggacggaacgattccgttctacttggctcctcaaccaaacactaccttaatataaagatgcgcagctctcctgtgtttttcg

SEQ ID NO: 132752 - DNA, 316 bp, Zea mays
  Clone ID: MRT4577_52561C.1
caattgttgagggtgtcggcgatgatgtggtcgctgaacatgcatagatcacatgtggcaagcaacgtcagcacatgcatgtagctgcagtgatttatgatgctgttctgacgctggcgggaccagtgtactacgacatagatgttgtcgctggtatcatacatcgcactgccacaaccgcaacatatattaagtctgcagatcctatgccatcatcggaaggttcgctggccgattcaggagacatggtcatcaccatggcatggggtaacgtcctcgcatctcatctcacgatcactgaatatgatgtagactt

SEQ ID NO: 132753 - DNA, 139 bp, Zea mays
  Clone ID: MRT4577_52562C.1
ccaagacacatcctaagacctggcactgtgttaatttacatgagtatctgggtgaatgtaatggacgcacgtggggggtggtgtgaatgcccaccgaaggtgtaagtggggtgcagatttgtacagtagcagaaagtta

SEQ ID NO: 132754 - DNA, 472 bp, Zea mays
  Clone ID: MRT4577_52563C.1
tcgagcggccgcccgggcaggtacatttctaaaaaaaaaaaaaaaaaaaaaaaaaaaaaaaaaaaaaaaaaaaaaaaaaaaaaaaaaaaaaaaaaaaaaaaaaaaaaaaaaaaaaaaaaacttgggccgggccccccttaggggggatttttggggttttccttccccgggggggggggtgggcctttcttttagggggcccatttcgccttttgggggggggttttccatttcatgggccggggttttacacggtggggttggggaaacccttggcgttccccattttattggcttgggggcgcttccccttttggctggttggggtttttgggtaggggccctgcccgttggcttttccctttgttggtctttttgattggggttgggccccgccttgtttggggtctttttggtgggggggtgggggggtttcgctctgcggtcccgtttcttttcgcctgtccttttc

SEQ ID NO: 132755 - DNA, 208 bp, Zea mays
  Clone ID: MRT4577_52564C.1
gtacgtacgctcggaattcggctcgagcgttgacgcagattcttgagtatcactgccagggacaccaccctgggggcagttgttggcagaatcgccggtgtgctccggctcaccatggtggtcaacagcgtgcagtgccgaggtttcaggacacgcctgtgatcgcaaagtttacaccaccgacacttgagcatgagcaatgacacgg

SEQ ID NO: 132756 - DNA, 2123 bp, Zea mays
  Clone ID: MRT4577_52565C.1
cattggtggcgtcgaggccggccgggatttccccaacaaaacaaccccaagtccccaacccagtttcaaacaaactagatccgcggcgaccatgcggcgcggcggcggtcgccggttccccaagccctccttggcgccctccaccgcggccgaggccaccccggctctggacgccagcgtcatccgcaacctcgactccgccttctcccgccgcgactccgacgccaacagcctctgcagcagccgtcccgcttctaccgtcggcgccatcctcaacttctccgaccgcgccacgcaggtcgccgcgctccgcgtcgtcaacacattcctcgcccccgccgtcacgctccgggggcctctgcccgccgcgcgcgacatccaggcggcgctccgcctcctcgtcgaccgtctccacttgccccgcaacgacgccacattcgatgatgacctcatccaggaccttcgccttctcggatgcccctacaaggtcacccgctccgcactcaaggcccccggcaccccgcactcgtggccggtactgctctccgtactccactggctcaccctcctctgccactcccaaggagacgacctggatgccccgagcggcccatccgacgatctcttgctctacatcacccagtcgtactcccacttcttgtcgggggacgacgccgccgtcgaaaccgtcgacgaggagtacgcctccaaagcccggatgaccggtgaggcgtacgttgcaacggctcgtgccctggagaaggaggctgaggaactggagacccaggtgaataagctcatctcgggtccctcgcggcgggaagcactggagtcagagaaggaggccttcaatgctgatattcacaagttcgacgcagtggtgaatgcttggaaaactaagttcaatgaaagggaacaatcgttgggggatttggagaaagagttggaggccaaagtgtcggacacccagcgcgctgctgctgaaattcaggatctattgaaacaagtggatgctcagccggtgaatgtgaaggatgtggatagaatgcgtagggagatgcaggctattgaagatgacattgccaacgctgagaaggggaaaacagcactggaggataaggtctgggaacttgaagctaagctggttaccaagcttgaggagcttgagaggcatgctgagcagtgcaaccaggccctcaaaaagttgaaacctactgttgcttttcagtacatgatagattcaaaaggatcttctcctgctgagatgctaggtactggttacaaaacagtactaaaacctgcacttctggctcatgctgaggagaacaaaaggatctgtctctcaaatcttgaaaacttaaatgatctacagaagcagctgcaaggaaatgctaaggttctagaggaggaaaggaataatatttccagtctccaggaaaaaaatgacgaaatcgttgctcgtttgaatttactggatcgtgaaattataaatgatgactcaagattcacatctgaagctgcacaaatgaaagatgagttggagaaaaagaagaatagtttgatttctgctgaaaagcaggcagatgattttcttaagaaatcggagaagaggctccaagatgtaacacttaaagttgaagaagaaactcaggcagctgctaaggagctgctggagcttcttgattccatggctgaacataaagagttcatggaaacaacaattgctcagaggaggaaggacctctatgaaactgcagattatatagcatctgtggcatccaagacagtcatcacccaagtacccaaccctcctgaatcctgatacctgaattatgcagtgatcttttcgcatagaaagttgatcatagcaggcctgtggcagccttctctggcatgtaatataagtcaaagttgtcccacttgaagctctggtctttttgtccttggactttggtttgcgttctggtgaggtagtagttggtatgttcgggcttcaatcctagatgtcatgaaactgttgtaatttcattgcttcagtaatgaactttggattggtccgctgtgaaaaagtacccaaccctcttggtgtttgtttcagctttattaatctgcttctgctttac

SEQ ID NO: 132757 - DNA, 1638 bp, Zea mays
  Clone ID: MRT4577_52566C.1
atggccatcactttccagcacaagatcatcctccgccctggatccgtattctacttcggaaccatttcgtccgtggcagacaaagaaggaaatctacatcgcatcgcggatccaccgaagagaaagccttcctcaacaatctccaggaaagtcagagcaaagcaggaaaaagcgcaacctccagcgctccgagcgaagactacctcctgccagccaggagcagaggatccgactacccggagaactccgctgtccacctcttctacggaaaaatggacacggatcacaacgaaaaaggaagcaaacgagataaaggctcgtcaagctgctctccagctaatcatcttctacctgtcgctcatccaccaagcgatctacgacacgccatcaacagtcagcgggatgcacggagctccatcaacgcttcgcgcgaacgacgacacgagaacgagattcggcgccgagaagagtatgaccgggaccacggcatccctgcgcgaagaggacacgtgtgtagtatcggcgctcactccacgtctcagggccattcagtggccccctaacttcaaagtctccaatgtcgacaagtacgagcctaagcaggatccggaaggctggttggctgtctacaccaccgccgcccaagccgctggggcaactgaagatgtgatgaccacatacttgcccatcgtcctcgggcaggatgcgctgcaatggctacgacacctaccccgacactgcatcgacgactggagcgacttcagtcggtgcttcgtcgccaacttccaatctctctccgacaaactagtgctgccatgggacctcaaatccatcaagcgccgaggggacgagactctccggtcgtacctcaaaagatttcaaaccatgagaaatcatatccccaaggatgcggaagcagcagtaatcgagaacttctaccggggatctaatgactcgaccttcgtccgagccatactgcaaaagtggctcaacttcgatcaccctggcaagtacccgctcctcgttgatctggtgatccgagagagcagggtgaagaaggtgttagtggacaggggaagcagcatcaacgtcacctttcctcggacacttcaaggcttgggagtcgcactcaaagagctccacgagttagacattcctttcttcggcatcgtgccgactgaaggagaatatccactcggacacatctacatgctggtcacctttggaacttcggaaaactacagaaccgaggtcctgaggttcgaggtggcgagcttcgactgcggatacaacgccatcatcggcaggcctggattggcgaagttcatggctattccgcattacacgtacatgatattgaagatgtcgggaccacaaggaatcatcaccgtgcgtgctgacttccaaggcgccgcgaagtgctttcgagtggccattcaggcagccctcaccaccaaaccatcgatgacttcttctgcgcaggcgaactcaaagcctgaggagaacctcacagtacctgcgaatgaagctcaagccgtgacctctatgcggtcgactgaggaaaccaagaggatcaacctcgggttcgttgatgaacgcaagactgccatcatcagctccagcctggatgacaaatag

SEQ ID NO: 132758 - DNA, 857 bp, Zea mays
  Clone ID: MRT4577_52567C.1
cattgggtacctcgaggccggccggggaccgttgtgccccaactatggagaacagaagttcctcggagccaactcgacggcgcggcggcgcccgctcagctccctctccggaaacaagccgagcccggcgctgcaatccctgatctgcaaggcccaccctcacgccgaccccgccgcccaagcgaccaccgccgaggtagacgcggcgctcgaccgcctcctcttcgcccgcaccgacctcgggggtatcgtttcccagattgacgaattgatctctgaagccttaaaatgccaaaatgtgtccaaaaaagcaacacgagagatagaatccttcaatggcttcttaacagacactaaggcttccttcaagcaatggtcttcaagactgaagcaagcactagagaccggtctggtgaaaaccgaagctatcccaaaaaacacaccgggaacttgcttaaatactgctgcaaaagggaatgacaagctgatcagctgcagtaccaagctacctgatacaggtagctcagaaaacacaccaggaacatgcttaaataatgctgcaaaagggaatgacaagttgatcagaggcagcagcaagctacctgatacatatagttcacaaaacacaccaggaacatgcctacatactgctgtaaaagggagtggcaagttgatcagcggcagcagcaagctacctgatacagatccactggagtcaccttgcagcaactttactgaggtcgacatgattgtctcaccttcaccacttgtctcatggaacactggatcttgtatagttgagagcggaaagcagttgtttctcttgacaccactgccaaaaacaaaagcatgctcgt

SEQ ID NO: 132759 - DNA, 3282 bp, Zea mays
  Clone ID: MRT4577_52568C.1
atggccatcactttccagcacaagatcatcctccgccctggatccgtattctacttcggaaccatttcgtccgtggcagacaaagaaggaaatctacatcgcatcgcggatccaccgaagagaaagccttcctcaacaatctccaggaaagtcagagcaaagcaggaaaaagcgcaacctccagcgctccgagcgaagactacctcctgccagccaggagcagaggatccgactacccggagaactccgctgtccacctcttctacggaaaaatggacacggatcacaacgaaaaaggaagcaaacgagataaaggctcgtcaagctgctctccaggtatctccgccctcaaaggagaacatgaagaagcttgtcactatgacaattccattctaccccgacgtcctctttatcgggggaagggtggaatctacccccgtctccgacgatgaaccaaccgcgccgggagaagaacctcttcagcgggaatctcctaatcatcttctacctgtcgctcatccaccaagcgatctacgacacgccatcaacagtcagcgggatgcacggagctccatcaacgcttcgcgcgaacgacgacacgagaacgagattcggcgccgagaagagtatgaccgggaccacggcatccctgcgcgaagtcaggccaccagagttgagtcggcaacggcttcgacaggcggcacgacccgaggatggtcgaggcaccatgtcaacaactcccctccctgggaccgacatcaccatcatcaacaggaggacacgtgtgtagtatcggcgctcactccacgtctcagggccattcagtggccccctaacttcaaagtctccaatgtcgacaagtacgagcctaagcaggatccggaaggctggttggctgtctacaccaccgccgcccaagccgctggggcaactgaagatgtgatgaccacatacttgcccatcgtcctcgggcaggatgcgctgcaatggctacgacacctaccccgacactgcatcgacgactggagcgacttcagtcggtgcttcgtcgccaacttccaatctctctccgacaaactagtgctgccatgggacctcaaatccatcaagcgccgaggggacgagactctccggtcgtacctcaaaagatttcaaaccatgagaaatcatatccccaaggatgcggaagcagcagtaatcgagaacttctaccggggatctaatgactcgaccttcgtccgagccatactgcaaaagcggacctctacatcaccgccgacgaatgagctcaggacctcatcggaggagcgaaacctacaccggcggcaccacgacgcgacacgaaccaacaactcgacaagcattgggagaagaggcctcgtgaagaagtccacgccgctagaccacccgcctctcgcgcccgaggagaacctcgcggaggcgaacgtacattggacgacatccttgacgcccaatgcccgtaccacaaggacatgcgccacaccctccggaactacagagacttcaagcactccgttgggaacggccgacccttccaacctctaccacctcccccaccacaacgaggacccaaagaaccttgacagcctcaacagcaggaggggggaggaggcggagcgttcccgcgcgtcgacggagaagtcaacgtcatcttcggcggacatgggtcgcaagaaatggctcaacttcgatcaccctggcaagtacccgctcctcgttgatctggtgatccgagagagcagggtgaagaaggtgttagtggacaggggaagcagcatcaacgtcacctttcctcggacacttcaaggcttgggagtcgcactcaaagagctccacgagttagacattcctttcttcggcatcgtgccgactgaaggagaatatccactcggacacatctacatgctggtcacctttggaacttcggaaaactacagaaccgaggtcctgaggttcgaggtggcgagcttcgactgcggatacaacgccatcatcggcaggcctggattggcgaagttcatggctattccgcattacacgtacatgatattgaagatgtcgggaccacaaggaatcatcaccgtgcgtgctgacttccaaggcgccgcgaagtgctttcgagtggccattcaggcagccctcaccaccaaaccatcgatgacttcttctgcgcaggcgaactcaaagcctgaggagaacctcacagtacctgcgaatgaagctcaagccgtgacctctatgcggtcgactgaggaaaccaagaggatcaacctcggtgaagttctgggaccctcaaagaagaaatatcctcaagttcaaaaactattgtatgcagtacttctaactgcacgcaagctccgtcactactttgacgaccacaaagtcataatagtcactggatttccaatagggtatattctccacaacaaagaagccatcggaagaatagccaagtgggcctgcgagctgggagctcacgacatcgagtttcgaccttgcactacaataaagactcaagcactagttgacttcgtatcagagtggactgagcaacaagtgctagacaacccgaagactgcagaagtatggcggatgtatttcgatgtctcgttgaagctacagggggcaggcgcaagaatcctctttatcgcgcctggaggtgaacaactcaaacatgtccttcagttgttattctcagcgtccaataatgcagcagagtataaagctttgattcatggactgaacattgccatatcactgggcattaagagactgatggtatacggagattcactggtggtcataagtcagataaataaagaatgggattgctcgaatgaatctatgggcaagtattgcatagccgtccgaaagctagaggacaaattcgaagggctggaatttcatcatgtagagagagatcgcaacgcggcagcagacacgttgtcgaaactaggatccagtcggacccaggtcccacctggggttttcgtccaagaagtgccacgcccgagtatttccttagaacaggaagaagattgcaatgttctgagccaaccagagtcagattcagatgactggagggagccaatcatcagatatataaagaatgaagaagagccggatgacaaaactacggcagaacgcatcgcaaggcagtcagcccactacactcattggggaagcactgtacagaaggggcgcagcaggagtcctcatgaagtgcattctttcggctaccgggaagcaactactagatga

SEQ ID NO: 132760 - DNA, 234 bp, Zea mays
  Clone ID: MRT4577_52569C.1
catagtatgttcttagcgtgcccttgtacatatccctcattcattgatgtccttgcgatatgttttgtgagcatgttcgtttagcctttggttcggttctagaactgctggtttggatgtagtaggacttgattgaactcgtttccagctaaatcctttcaggtcttccacaactcactactaagaataccattatgatatactctctgcttggttctcatgcttacgataggt

SEQ ID NO: 132761 - DNA, 1953 bp, Zea mays
  Clone ID: MRT4577_5256C.1
ttttttttttttttttttatagaagaaacagagagcagatactagtaaatgtccatcgcatttcaatttagctgacaaacgacccaaacaatacaatagcttctgcttaatattgcagagtactggagtagcgagttcaccacgagagcagcaagacacaaacgagaagaaaatagcggcagagcacagggctcgcaatcatatacggccctttatttaaccgaccacggactcacgggaggacgaggcacccttcagcgacgggcagaggggtaaccttgacaggaacataggccgtagggccctcaccgtcgctggcttcctcctcttcctcatcatactgaaccaggccagcagcgctgaagatgtacgccttcacttcctcgaagcgctcctcggagagagagacctcggcgaggagtttccacgcggaggtttcagatgcctcctcatagtccatcctccgtttcagcaccatgtgtccactgatctcccacacagctgggttcacctgagtgtccagcagctcctggctcacttcacccagagcctgcttctctgcgtagcactgggggaacaggaaaaccctcttgccacagtcagaaatgagcacattgtaaggcacattgttgtcttgcagccaaatgcaagcattagaaaccacagtggccaggtcgtccagggtgttccctccctcaaataccaggcctctcacaggataatttatcagcttggacacggtcaccccattcttcttcgtgtcctcagagagtgggatcttgtgggtagctgccttctcaacagggaaaggcactgacaagtagtacgcctgaaagtggaggtgattgatggtggcaaacgcacccaagctattgtaaccaagcctgaagtatgggctacctccctcggctgccatttgcagtgcaagcaagaagctctctggatcaatcctctgaggcaggcggtccagaacacgaggaatgagaagcacatgtccatattcaattgggcttacattgatagcaataacatttggagcccgatcaacagcaatgattggagcgttgttcaggaaatagctgtcatcaccaccactattctcaaattggaagagaacctcttcctggccaacttttgtgaaattgaatttggcagggtcaaacggctggagcacacggtccacacgaaactcagtagggcgcttcttaagatggcgcccttcattgagttgtgcaacaaacccaaggttgccaggaatgaccttggtctcacaggcagtgacatcgtagcggaataagcctcgagtcatcctgtcctcccactcactaaggaggatatcaacaagtaacttggttgaagcagcatcctcctgcgagccctttgccggactcaacttgaacgcgtagaggggaagcttggaagcaggcaggcagcagtcgccgaggcagttcctcccgcagcccgcgcgcggcttgtcggcgtcctcctggtagttggagacgacggtgggcaccctcctgatggtcagcttcatctccatgccggtaggtcggtcagttactctcggggtgagaactcgtcggggtccgggggggttagcagaagggactaattgctaggaaaggaagaaggtgagagacaggaacggctcagaggcgaccgccgccggcgaggaagaggagatcggacgggcttcctccgacggagggcagcgccgcccggcccgcagctgcggggccgcgccggggggctgcaacgctagccgtgatgcctacaactcggccacgcccagaggggaggagggagggcagctgtggcaggattgggcggtgggtcacggaagctgccgaggcctgcgccccggggacggggttctcctgtcttataactcttctccggcgaggtgaggccaggcgagcggcggcggtgcgttggggttgtgctcgtgccgaa

SEQ ID NO: 132762 - DNA, 1840 bp, Zea mays
  Clone ID: MRT4577_52570C.1
ggcccctacgcgcgcagccttaaccccaggcagcgacattagccggcgcctgagttaccggccgcgagccggtgcacgcaccacttcccccacttcgatctaccataatccgactccgccgactcgcctgaaccctagccagccgccgccatgccgccgcgacgcggtaggggaaagggtaagggtagggcaaagccaagagcgaagcccaccgagcccgagcccgagtccgatcccgaactagacgaagccgccaagtccgaaatcgaggcgggggacgcggaggctggggaggagtccagcgccgagagcgaggactcgaaggaagacgaatcggagagcgacaccgagtccatggatgcagaggccagcgaagaagctggcgagaacggaacggaggagatggatgcagagcctgaagccaaagccgtcgaggccaaggctgaaacggtggccacggaggcggaggcgaaacctgacgcctcggatgaagaagctggtgagactggctcagaccgcgaaacagatggcaagggtgctgatccgaaggcgaaagcggaggagtccgacggcgaggatgaggagggagccaccgccgtgaccgacggcgatagtgaagaggaagccgctgagacgggcggcgagagcgaagaggatggtggcgactccgacaccgaaggtgatgccgaggaatctcctccatcccctcctcgccgcagtcgccgccgtaagcgagcggccactcccgatgacgaagcagaggagacccctacgccgtcgcgtcgccggcgccgtcggaagttaggggagcgtggtgactccccgccgccacttcctgaccacctccgctgccgtcgcagcgacgggaagaagtggcgctgctcgggccgtgcactcccaaccgttagcttttgcgagtaccactacgcgagggctaacaagggtaagaagttaccagcggatgaggaggtccttgctgttgttcttcagaggcagaagaacaagaggaagggcaggaggagcatcaatcctccgacgtcccctcaggcagccacgagtgacccccagaccagggatctcccaaatggactgatgacgatctcgccaggtagcagtggacctgcggcattgtcaactcctgtgaagattggtgtagaaattcctgcacccatacagcggtgctatcgttccaagaatgctgagccattgcctgttggtcctgtgaaggttgttcctcgtgcgatgagtgtgacaaaaacagcaagaacatgtcactgctgtggaatgaagaaggctgcgcgtgtggccaattgcaagaactgtgatacgaacttctgtaacagctgcattaataaatggtattctaagttgtccaggaaggatataaaggctcgttgtccagcttgccgtggtctctgcaattgtaaactgtgcagccttggtcataccaagggtgctactcataaggaaccgccaagtggtgaaaggaagatactcagcataaaaatttccaaccatcaattttacaagcttttacctgtaaaacttgaccgggagcaacttgacgagttggaattagaagctaaaatacaaggaacaaaaacatctaatgtccgtgtccaggttgctgaaaatggtcagagtgagtcactctactggtaagctcaaatctcttatgttactaccagctactatgtcgccatcagctacatataggctagtaacagtttaataggttttctcccttggctttgtgttattttgtacagagtaaagtgtaacctgggtccttgaactttaggttctatttttaaatggttcactctagagcaaccaattt

SEQ ID NO: 132763 - DNA, 345 bp, Zea mays
  Clone ID: MRT4577_52571C.1
cggacgcgtgggcggacgcgttggattggatacatggaaacgccgcgtagtaactacgccaagcattgtttatcagtaacacagcatgctactctatgtacttgaggaacctaatctattagacgcgccagtggtggatgtgcggatcgcgcataatcggagaaataccaattgacctccttcaaggagggcggcgagggaaagaggggccgagaagaagggcaaagaggggcgtgcggtactatacagatacatacattacttacggcgcgcatgccacgtgcatagcgtgtcatatggatgctactttaatgccatgtacatggacgaacttctacatcaacg

SEQ ID NO: 132764 - DNA, 218 bp, Zea mays
  Clone ID: MRT4577_52572C.1
ctcgacggctgcctattgcacctccaggtccgaccctggcccttgcaaaaacctgcgcaccaacaagcatgcgctcacgacaaggcccacatcaccagggcggaaattgttcacctcaacgcggggggggtgaccacccagctacaccttatcaacaatgttgccaggcactgcccgcgatgcgaccgagacggctgacacggcagctgcagtaatga

SEQ ID NO: 132765 - DNA, 423 bp, Zea mays
  Clone ID: MRT4577_52573C.1
tcggccgcccgtgtggtaccaggcggcaccatgtggtcctcccggaggaagtagggggacttgttcaccagcgcggggtccctcccgaggtgctcgaaccccgcgccggaaccgtggaagccgtccaacaagtgcatgtgcgcctccaggttgtggtagcacgtgaggtccacatggtgccgcccgtgtggtaccaggcggtgaacaagggcatggggaggactgtggacggccgtagggtgctgccgacgtggctgagggtgctctactaccacccggaggacactgaccatcacctacagcgtattggtctaaccgcgtgaagctcagcaatactctgatagtagcgttaattagggcgtgtggcgttcgcatacgtgcgcggcgcagtcggttactctgttgccgagcgcggtaactaag

SEQ ID NO: 132766 - DNA, 250 bp, Zea mays
  Clone ID: MRT4577_52574C.1
tacgtcgaatcggtgccagccacctcataagggatccatttccttgacacaagcaccaagatatttcctcttatgctcgcttttgatggtgtaccacatttctaagctacgcttatgttcttttccatccttccataagatgtcagatggaaaacccactttaaccctatagctcaacagaatccacagacataccttataccctgttaacaatcgcgctatttgggcagcattgtcaaccatagccaca

SEQ ID NO: 132767 - DNA, 182 bp, Zea mays
  Clone ID: MRT4577_52575C.1
cctcgaagccggcctggccgggaagtccagaacgccaggaagccggagcatcttgcctgcaccgcacgcccacaggcccacagcaagcaccaaacaggccaaacgatggctcttctggagctgcgcgcgcctgcagccgtccacgcggcctcccggatgctccctccgccgcggaggcggtg

SEQ ID NO: 132768 - DNA, 412 bp, Zea mays
  unsure (1)..(412): unsure at all n locations
  Clone ID: MRT4577_52576C.1
agcagtggtaacaacgcagagtacgcgggaactaagtactccggtttggccattgttggattgggaggaatggggaagcctaccttagcacaatatgtctataatgacaagaggattgaagaatgctttgatgtcaggatgtggatctgtatctcgcgcaaacttgatgtgcatcgtcacacaagggagattatagagtctgcaaaaaagggagagtgcccacgtgttgataatctcgatactctccagtgcaaattacgtgatatactacaagagtcacagaaattcctgcttgtcttggatgatgtttggtttgaaaaatctcataatgagacagagtgggagttattccttgcccannnaaaaaaaaaaaaaaaaaaaaaaaaaagtactctgcgttgttaccactgct

SEQ ID NO: 132769 - DNA, 431 bp, Zea mays
  Clone ID: MRT4577_52577C.1
aaaccaaaaagttcttttttgggggttcaaaaaaatccctaaaaacaaatagagcaactgcttaaccacagggaaggggtaccaaggaagctaacctacaaggggaatgggactacactttaaagcacaatccactttccgaagggggcccacatccccagggggggggaacatagcccatttaactagcaaaaagatatgggggaacacaagggaaggttttcaaataccattgagccccccctagtttttttataaaaaaccggctatttgggcactttggagcttctttctccaaaaaaaaaactggatgcccagcgcatgggttctatggacaggtaagcctggtcatcaataaaaaaaactaaaatttttttgggggggggcatctttgcagagaaaagagggaacctccacaaaaaaactggggg

SEQ ID NO: 132770 - DNA, 662 bp, Zea mays
  unsure (1)..(662): unsure at all n locations
  Clone ID: MRT4577_52578C.1
naacgaattgtaccactaactattagctctagtgcattcaaatactcctagcacggcctaataaaactcatattacttaatttctttaatttataattttgtaagttatagattttacatgtttgtaatatttaaactttatgttgtaaaagtgtgcttcacattgtttaagaagaaaaagttgggtgtcgtagcatgcaatgtgcacacacagaaaaagttgggtgtcgtagccatcaccgtcgtgcctacaaagcatggcaggggccacatgatctttgagggaggagaggacaccctcccgctgtcacgtcgtggcggtgcagcagagcgccagagagacttgagcgtccatgcagatgcaggcgactttctcagtaacatgtctgcggcagaggcatgatgccactgcccattgccccattcccattgggacggacggaagcgcagagaaaaaggtcaaaccggcacgactgcattatcacattggcggcggcgtgcatgggcctgccgccctgcccctcttcttgccttgtcctgtgcacatgtactgcgctccgatgctgtgcatgtactcgactttggagcttcgcgactcccgaaactatggtgtctcagtgctggttcacactctacattttgcggacactgaattttgctgg

SEQ ID NO: 132771 - DNA, 196 bp, Zea mays
  Clone ID: MRT4577_52579C.1
ttttggtacacttacacatatactgggtacacaaaggacataatccgtctatatagcatgacattaccctaccaaaacaggttgatcctgatagataggacgggggatataagaacaattccataagtacccaacaagcggaggtcatggcaaatgcggatgcggcacaatgtctagcaatgtggcactgcaaaca

SEQ ID NO: 132772 - DNA, 375 bp, Zea mays
  Clone ID: MRT4577_5257C.1
ctttcttgaatgtcagtttgggactttgggtacctctagctggtcatgtttgggcttttggttacctgcaccgatgtgatatgttgcatccatttacatacacaagcaactatgcacgctggtggtgaggtgtattgaactgtccttgattattgaggcctagtgtacgttgtgcagttgtttgtccagcctatggtgggttgtctacatctccatgaaatgagatggagagctgatggataaaggataatgttggttggacatatggtcataattacataagtttgattaggctcacagagtcacagtgatttgaactaccgtgacttgattgacatatcttcgggtatgtgattcccaaagtagccattgggt

SEQ ID NO: 132773 - DNA, 644 bp, Zea mays
  Clone ID: MRT4577_52580C.1
ctggccgggtttttggaagaaatcttctctggttactattgtttttggaacaatagcagctataagtcgaaaagtagtggccgatgagcttcaagtttttgacccagaaggggccatgtgcctcgctgttcaccaaacacattacatgccaaagcgatggcgtggtaaagagaacagcgaacttgtacgaagagaatttgagacattatttccgtatactataatcatgctacttgaagagatggcctccattttcatcactccttacttgcttatttctgaggtacctaagcgagttgatgacattctgcgcttcatctcagacttcacaatatatgtagacggagtgggagatgtatgcagtctaagcttgtttaacttcaaaaaacatggaaatagaaactatgggtcaccattcaatgctcttaaaggtctcaggagctcccaagggaagatggagaaatcattcttaagtttccagagtgtctatccatcatgtgagccaaatgctgatggcaaacaattcttatctaacctccaaaagttcaaagaaaggcaagtacgtcaacaagctcttgcacaatatcaagcactggaggcttcaggctttgtggcaggcactagaggtcaaagggatgatacct

SEQ ID NO: 132774 - DNA, 467 bp, Zea mays
  Clone ID: MRT4577_52581C.1
gggggcttacaaaacacttttttttcatataactggtaacattccaaggcagaaggggggggggggcacatgattaagccttccctaacataaggggggcattattttataccccctggcgggcagaacataagaaaaggggccagaacagcgccaatttttggggaaacccggggggggatttaacacaacagcaaatagtaaaggccctgttattttcaaaacaccccgggggggagtaaatgtgaaagttgttgaaagggaaccaattttttttggtttggtgccaaccagccccaggtgaaaacctaaaatttttggggggggggttgggggggggaatcattaataggggagcatgtgcggggcccccatgggcatgggggcagccgggtaggggaacttccaaggacccaaaaaggggttttcccccgggattttcttctggatgtccatggggacccccc

SEQ ID NO: 132775 - DNA, 664 bp, Zea mays
  Clone ID: MRT4577_52582C.1
gaatttgtagtgtttatgataatgaagtctctgcctaaggagtttgagacttttcacatacagtacaacaccagtgtcactgataagtggaatatagaccaactcttggcacagtgtgtccaggaggaagagaggttaaagcagactggagactctgtcaacctcgtcaaaggcaatatccccagacagaacaagaactcaaagaaaaagttcaagaagcaaggtaaacagaataaccaggcttcctcgagcaataataatcagccaagacaaggaggcagtttttcagttccccctgatacctgcctctattgcaagaagacaggtcattacaagagaaagtgccctgaattcctgcagtatctactagagagtgggactccgtacaagccaaaggctcccaaagggccgaagaacaattagagtggcaaatggagttgaagcagcagtcgaggccattggagatatacatcttaaattagttaatggttttgtactgttgttgagagacgtactttatgtaccttccttgcgaaggaaccttatttcggtttctagattagatgatcagcacattcattgccattttggtgatagacagtgtgtcattcagtttgataataaagatgttggtctcgccatccgacgagatatgctttttttt

SEQ ID NO: 132776 - DNA, 3977 bp, Zea mays
  unsure (1)..(3977): unsure at all n locations
  Clone ID: MRT4577_52583C.1
atgctgattagccagattgctcagatgaaaccgctagatggtagtaattaccattcttggcgggaggatatagacatgataaccacagtgggtgagatagattacgcactgaggtttgataaaccagttgagcccacagtgggcactcccaactatgaccacaggtggatgcaatacagcatcgacaaggtcaagtgggagagatcaaatgacaaatgtatgattattcttaagaggagcatcaaggagcctcttaagagttccataccagagtgcgagactgccaaagaataccttgagagggtagcctctcatcaccaagggtcttctaaggcttatgcttgctatctaatgacagaatttgtcaatgcaaaatacgatggaaatggtgtcagaccattcattcagaaaatgatatccatcgtagctaagataaacaagtacctcgggtctcctttacacgaggaatttgtagtatttatgataatgaagtctctgcccaaggagtttgagacttttcacatacagtacaacactagtgtcactgataagtggaatatagatcaactcttggcacagtgtgtccaggaggaagagaggttaaagcagactggagactctgtcaacctcatcaaaggcaatgtccccagacagaacaagaactcaaagaaaatgttcaagaagcaaggtaaacagaataaccaggcttcctcgagcaataataatcagccaagacaaggaggcagtttctcagttccccctgatacctgcctctattgcaagaagacaggtcattacaagaggaagtgccctgaattcctgcagtatctactagagagtggtaaggaccaagttacttttgtaaatgagtctttatacttagaatatcccagttattcttggtggattgactcgggtgcaactgttcatgttgcaaactctctacagggactccgtacaagccaaaggctcccaaagggccgaagaacaattagagtggcaaatggagttgaagcagcagtcgaggccattggagatatacatcttaaattagttaatggttttgtactgttgttgagagacgtactttatgtaccttccttgcgaaggaaccttatttcggtttctagattagatgatcagcacattcattgccattttggtgatagacagtgtgtcattcagtttgataataaagatgttggtctcgccatccgacgagatatgctttatttactttcgcaaagtgatgttgttaatgtattagatataccagaaaacgatccagccagcagtggcaggaaaagaaaacgaagtgatggagaaacctcgtcgaaattatggcactatcgtttgggccatatttcgannnnnagaatagaaagtcttgttaaggaacagattctccatcccctagatttcacagacttagagcaatgcagagattgcattaagggtaaattcgcgaagcagattaagaaagatgctaagcatagtacgagagtgttagaaattattcatacagatatctgtggtccttttccagttaggacagtagatgggtttaattcgttcataaccttcacagatgactactctcgctacggttatatttatcctattaaggaaagatcagaagctttagacaagtttaaacagttcaaggctgaagtagagaatcaacacgatttgaagataaagattgttcgatcagatcgtnnnnnnnagtactatgggcgccataccgagtatggccaggtcccaggacctttcgcgaggttcctaagagaaaacggtattgttgctcagtattcaacacctggcgannnnnnnnnnnnnnnnnnnnnnnnnnnnnnnnnnnnnnnnnnnnnnnnnnnnnnnnnnnnnnnnnnaagttactctaacctgccattgggtctatggatggaggctttnnnnnccgctatgcatatactcaacagagttcctagtaaatcagtggctagaactccatatgagttgtggactggcagaaaacccacgctcaactacttccatatatggggttgtccagcagaagctagaatatttaatcctggacagggaaagctagatgagagaaccactagctgccattttattggctaccctgacagatcaaagggatacagattctactgccctgacagacaaaccaagttcatagaaaccagacatgccattttcttagaggatgacatgatcaaggggagtaaggtactcagagaggttgaccttcaggaaaagaggatatatgtcccgtttccgatggttgaagaaccacacttctcgatacccactgtggttacaccaacagtcacaccgactgtgggtgaaacacctgctgcaaatgtggcatcatctagtgcaactactacagagcaagtagcttcaccttctgcgcatattggccctgagccagttgcacaggacagttcagaagatgatgatagtgttgcgccaagtgatgcaccattgcaggagccccaggtagaatctgaaccagaaccaagtctcaggagatcacagagactcagaaaatctgcgattcctgatgactatgaagtctatgcagcagaaaacatagaatgtgatgagattcatatgagtgaggacattgatacagaaggtgatcccactnnnnnnnnnnnnnnnnnnnnnnnnnnnnnnnnnnnnnnnnnnnnnnnnnnnnnnnnnnnnnnnnnnnnnnnnnnnnnnnnnnnnnnnnnnnnnnnnnnnnnnnnnnnnnnnnnnnnnnnnnnnnnnnnnnnnnnnnnnnnnnnnnnnnnnnnnnnnnnnnnnnnnnnnnnnnnnnnnnnnnnnnnnnnnnnnnnnnnnnnnnnnnnnnnnnnnnnnnnnnnnnnnnnnnnnnnnnnnnnnnnnnnnnnnnnnnnnnnnnnnnnnnnnnnnnnnnnnnnnnnnnnnnnnnnnnnnnnnnnnnnnnnnnnnnnnnnnnnnnnnnnnnnnnnnnnnnnnnnnnnnnnnnnnnnnnnnnnnnnnnnnnnnnnnnnnnnnnnnnnnnnnnnnnnnnnnnnnnnnnnnnnnnnnnnnnnnnnnnnnnnnnnnnnnnnnnnnnnnnnnnnnnnnnnnnnnnnnnnnnnnnnnnnnnnnnnnnnnnnnnnnnnnnnnnnnnnnnnnnnnnnnnnnnnnnnnnnnnnnnnnnnnnnnnnnnnnnnnnnnnnnnnnnnnnnnnnnnnnnnnnnnnnnnnnnnnnnnnnnnnnnnnnnnnnnnnnnnnnnnnnnnnnnnnnnnnnnnnnnnnnnnnnnnnnnnnnnnnnnnnnnnnnnnnnnnnnnnnnnnnnnnnnnnnnnnnnnnnnnnnnnctcctatgttcttggaatagaaattcgcagagacagacaaaagggagtactaggactctcacagaagtcatatatagaaaatgtactaaagaggtataatatgcacaagtgtaatgcctcgcctggtccaatagtcaagggtgataagtttggggaatatcagtgtcccaagaatcagtatgagnnnnncaagatgaagtcagtaccatatgcttcagctatcggaagcattatgtatgctcaagtatgtactcgccctgacttagcttttaccaccgggatgcttggacgctatcagaagaatccaggcatagaacactggaaagcagtcaagaaggctctaaggtaccttcaaggtactaaaggtctcatgcttacgtacagaagatctaattccctacaaatagttggctatgcagatgccgactggggagggtgtagagatacactgaagtccacttcagggtatgtctttatgctctctnnnnnagctatttcttggaagagctgcaaacagacagcgagagcatcgtcgacaatgcacgctgagtttgtagctacgtatgaggcaactggacaggcgatatggataaagaaattcgtacccggattaagagtggttgatagcatagagcg

SEQ ID NO: 132777 - DNA, 668 bp, Zea mays
  Clone ID: MRT4577_52584C.1
gaaggcatattatggattcatcaagattttatgtgggattgagagggttgagcatgctgtcaaggtattccgtatgatgaaaggttatgggcatgctcctggagtaaaatcatatagcttgctcattgagaagctggccagacacaatttaggggatcgttctaatgcacttttcagggaggcagttgcacgtggtgtacctgtggcacaaggagagtacaatgttgacaataggtatgtcaagacaaagaaggagaagacggtgaagaagaggctgactttgccagagaagatgagattgaagagcaagaggttatacaagctcagaatgagctttgtcaagaagcccaagcgtcgaatgctccgggtttaagcataattttggtttggttggagcggatgatcatgggagcggacaccaccagatccagttatatctcggaagatcagaaaattgtagtcccttaactgtgcctgcccttgtgagtgactatgcaacatcatttttcgaaggcgagagctctgtatggtttcttttttttttacttttttttggttgatgccctggcgactccggtgatctttgatgcaacaccttgcattccattatagcacaataacgcaccatttcactgaatttaatttacacttgtggtgatgttctgtac

SEQ ID NO: 132778 - DNA, 321 bp, Zea mays
  Clone ID: MRT4577_52585C.1
cggctcgaggtaccgtggactgggaggcaaagtcggagaggtcgatgcggtcattgacaccgttgggggcgatgttctgtcaagaagctggcgggctatcaaggctgatggggcagttgttacagttgcggacccccctccacgatgggcgctggagaagggtgtggtgcccaaggaattggcggctaagcctcacgtgagatatatgtacttcgttctctctgttgacgctgcggccttgtccaaggttgcggcgttcattgacgagggacatgtgaaaccgctccctcgtgttgagttcccctttgacataggtctgga

SEQ ID NO: 132779 - DNA, 226 bp, Zea mays
  Clone ID: MRT4577_52586C.1
tttcttttttttttttttttgcttacaaatgaaattattaacaagaggcaccaaggcaaaagtgggtctggcatctctcatgggctgaccccagccgatccaccattattctttagcaaaagcaaacagatccatcgctgcccccaagcttaagcgatcacccttaggaaacctgctacatgaccgccctatacagaatgcgtgtgcatgcaaaagaaacgaacag

SEQ ID NO: 132780 - DNA, 295 bp, Zea mays
  Clone ID: MRT4577_52587C.1
acccctgcgtaagctcggaattcggctcgagccaaacagtcctgctgaatttattctgcttaggcagtttcctgaaatggggggttgctctaggacaatctggcggttatcgcaccttaatatatcgcgtccctgggttgcgttcttttgacactctataactaatttcacttggttgagacttgcaaacaataaaaaataccaaaatgggctgtcgccgtctatcgagctcgccgacccggaaattaattcctgaccgctactttctggcttcccatctttccctatagtgcgt

SEQ ID NO: 132781 - DNA, 423 bp, Zea mays
  Clone ID: MRT4577_52588C.1
gcgttcgtggaaaggtcgaaagcgtcgcttgctggagctttcggggccagaaagaggaaagcagtctgtggccttgagctgagctagaggacgcatcatgagcgtccattctctatcgcgagcctgggtggttggatagacgaaggctacggttgctcagctgccattgtggcctcgaatgcggcgcttcttgggtacgcacgccacttgctagcacgcactgagactgaatacggtctatactaagactttagcgagagctgtggagctgacgtaatgcacggatatgtcgctggcaggaatcgacattgactctagaggtgtatattgaacatagatcttttgatgatcaagaactctgggggctcaggcggccgccatagacggttattgcttacttaagagaacattatgaggcataaa

SEQ ID NO: 132782 - DNA, 356 bp, Zea mays
  Clone ID: MRT4577_52589C.1
ggagtgggtttttttgggggtgggtttttttttttttttttttttttttaaaaacccatttttaaaaaaaaaacccggaaaaaaagggcccaaacattttcctgcagcccccttttgatggatatcccaaacagcttaaataaattcctatcatggcttactttaaaaaggggcccaatccgtcacactttggcccttggagggcaaaaacatcctttttgttaaacgggcaagcaaaatcaactgaggggttgggtcctttacccaatccaaaaaaagcccttcccccaagaaaaacaggtataatttccattttctcgatgcaaaacaaaccccaccaatctggggtttcttca

SEQ ID NO: 132783 - DNA, 755 bp, Zea mays
  Clone ID: MRT4577_5258C.1
ggggcgctgccctcggccggaggaagcccgtccgatctcctcttcctcgccggcggcggtcgcctctgagccgttcctgtctctcaccttcttcctttcctagcaattagtcccttctgctaacccccccggaccccgacgagttctcaccccgagagtaactgaccgacctaccggcatggagatgaagctgaccatcaggagggtgcccaccgtcgtctccaactaccaggaggacgccgacaagccgcgcgcgggctgcgggaggaactgcctcggcgactgctgcctgcctgcttccaagcttcccctctacgcgttcaagttgactccggcaaagggctcgcaggaggatgctgcttcaaccaagttacttgttgatattctccttagtgagtcccctgcttagggcttgtttgggaccaagggatttggaggggattgaagaggctaaaatcctctacgcgttcaagttgactccggcaaagggctcgcaggaggatgctgcttcaaccaagttacttgttgatatcctccttagtgagtgggaggacaggatgactcgaggcttattccgctacgatgtcactgcctgtgagacccaagtcattcctggcaaccttgggtttgttgcacaactcaatgaagggcgccatcttaagaagcgccctactgagtttcgtgtggaccgtgtgtccagccagtttgaccctgccaaattcaatttcacaaaagttggccaggaagaggttctc

SEQ ID NO: 132784 - DNA, 570 bp, Zea mays
  Clone ID: MRT4577_52590C.1
cagcctaatgaaaaaaaaataatccctcctctcgatgaaagagaaaagaggtactgagggagcaagagtcgcacactcagaccagaccgccgccgccgcgccggtgatcgagtctcgtcggcgctaccttcacgccacaagacaataagcatcgacagccaggttcggctccaccaaacgtccttgctgcaaaaacatcatcttttatacagtcattgtgcgcactggcccctttccactggcaagaagaccctgaagtcatcgatgtgcggtattgcccttgtcctcgccagtgaccgccttgtcatcgttccctgtgccactgcaactactgccgcattggagacccagcactcctgcaagaggaagggcgtgccagatgagctgaaggaggccctgcgccggcggggccctgatagcctaggctacagaagtcgctgccttcttgctgatggcacggttgttgttggtgatggttgcaatgatggagtagagggtaaaatcggtgtgagtgactctagtggtgctgatttgttcttcatcggagcaacactgcatcttaggggagct

SEQ ID NO: 132785 - DNA, 265 bp, Zea mays
  Clone ID: MRT4577_52591C.1
tcgaatggattgagcctgtctggtgacagcaggaatataatatcatagctaacaaagtgctagtgatccctggctatatctacatccttgtggaggagtggtccgacgtctgcagcatcagcaagacacccttgtggaggagtggtccttgcggccccaaaggtatccttgtttgctgtgtcttccaatccaactcgttcgttgtccttgcaccagcatgtgtgtagtacgattaattagagagatgtatatatatatatatata

SEQ ID NO: 132786 - DNA, 316 bp, Zea mays
  Clone ID: MRT4577_52592C.1
attcggctcgaggttttttgatccacattttgtttctccgccgtggatcactgagtactgccaggtttacactaaggttcttgtgaaccacaacaagaagcttctcgggtgtgatcctgaaacaaccatcaactgtgctcagaactatggggctgccctggaaatatgccttacccttgaccaatgggggatcgtatactcgctagtggcttgttgaagcatagaaggaccctacggtgtggccgcatctaccggctgtgacattggagaatataagctgtgcgctcatccagcgaaggcaggatcatggcatggc

SEQ ID NO: 132787 - DNA, 797 bp, Zea mays
  unsure (1)..(797): unsure at all n locations
  Clone ID: MRT4577_52593C.1
gtgtacctcgccgaccgccatcagcgccccccggtcgcccgaccgctcctggcgttcgtgcccctcccccgcccaatccatgctttggatctgcaaccgttgtgcgccccgccctcgcgcacgtcttcccccctgtggagctcggaggtgccatcacctaggcccagctgccgacaagggatggcccgggccgccgccgacgtcgcggccagctggggcgacagctgctccgcccgctgtctccctcgccttagcctccatgaggaggccggtgctccacaccaggatgccgcgtgcacgccgccctctgcgtcggcaccgcagcgccatgtccggcatcaggagtttccccgtcgacgacgcgtacatatctagggtctactatgacagcacgacggtcgcgtggctcaagacaaggtcacccattccccttagtctccaaccacatcgccccttgttgctgtcgcaaaaatcccccattgacagcaattgagcaaaccctcgcttagtcaccacctgtgtcagtggcggtgtcgccgctacagcagcatcacaagcacgacagctatctcgggtgcgtgccatgccttgtctcctcctctttcattccaaattggtctgtgaaattgcaagggtcgcagccagaactcgtgccccagccaagccttccctgactctccgcttccatgcccccacattttttatgtttaataggcttggtatttcatgcttggtggtntcacgcagcatggttcatggtaatgtgctctatcatttttttggtcanacattcctat

SEQ ID NO: 132788 - DNA, 784 bp, Zea mays
  unsure (1)..(784): unsure at all n locations
  Clone ID: MRT4577_52594C.1
cctcgaggccggccgggatacagtgtcagctaagagtgtggtttaagtatggttgtttatgcgcaacatatatgctaacagagcagcgtcactggaatgtttcatctaatacatatcgggtttttttttcttttgctgatggtagcagtatcattctctgactcacacaatgttttctcttttttttttctggattgttgtaggcattgcttcattatcggcacaaaaggtatcagtgttccataatccatagcgatccgatctcctgtcttgcgcataaagagtgttcctggactacttatattgctcgatactaaaaactaaaaaagcagattttttttcaaaaaaaactaaaaaagcagaatatggcttggaaccttttttgtattgtttggatggttttcaaagaaaaaaaaggtctataagttttgttgtcagaaatgcatctgatgtatcgtcaactttgtttttagtgttagtagatctttcttgtttatactctttcttggaatcttatcatatttatgttggtttgaatacacgtccacctacctgtttcttgtcattccacatgataattattccaagccgtgctcattagtcgtggacccgtaccaaccagttgacagacctatgtactgattcttccattaccaataaatgtactaaggaacanngggttggcccgggcccagccccagccccagccccagacgaagcgaaaagcgagcagctagcagctccgtcgtccaacaccaagcagggaggagaatcagcatacagt

SEQ ID NO: 132789 - DNA, 578 bp, Zea mays
  Clone ID: MRT4577_52595C.1
cagcggacgcgagctatctcgacaggcgatggcgccggcggtgaagatgtacgggtgggcggtctcaccattcgtggcacgcgcgctgctgtgcctggaggaggcaggcgtcgactacgagctcgtccccatgaaacgtgaggccggcgaccacctcctgccggacttcctcgccaggaaccccttcggccaggtccccgttctcgaggacggcgacctcaccctcttcgaatcgcgcgcaatcgcgaggcacgtgcttcgcaagtacaagccggggctgctggtgggcgacggcccgccggagtcggcggcgatggtggacgtgtggctggaggtggaggcccaccagtacaatccctcggcgggcgccatcacgatccagtgcctcctcgttccgttcctcggcggcgtgcgcgaccaggccgtcgtcgacgagaacgtcgtcaagctgaggaacgtgctggaggtgtacgaggcgcggctgtcggcatccaagtacctcgccggggaatcggtcagcctcgccgacctcagccacttcccgctcatgcactactttatgcagacggagtacgcgt

SEQ ID NO: 132790 - DNA, 573 bp, Zea mays
  Clone ID: MRT4577_52596C.1
cccaaccaaccccgcacgcagacgacacacaacattcagggagctacagggggcaccacttatggacggagtgaactacacattgtctggtttaaggactgcgggtaatggcaaaaggtcctcgccgtgtcatttcctgcgaaatctggtggcatactggtcacggcctgaatggccgactacgccgctgctgcctgggttctagttgggacggattaggccgctaccaacacaagcaagttatctgatgcctgatattctaaatagtctcatagaacaagaggaaggcatgtaaaggactaacttaatgaaacaggatcacaactagagcaataaattttgtacacgcatacattgatctgttcatcctctaccaagactattgaatattacttggctgcgaagaactaacacttatattaaaaaaacactttctatgcgacaacctcagaaattgagtgcgaggggaaggagaagttcaagtgcggctccaacgttttctggaagtggtgaagcagctagcagcagcgtctgattggaatggaggagatcattacctgtcttgtcgaccct

SEQ ID NO: 132791 - DNA, 1536 bp, Zea mays
  Clone ID: MRT4577_52597C.1
gtggctacctcgaggccgggccgggatcactgctcactctgcactctcgcgggatggagcttggcctagcgctccggctcgtcgcgccgccaccgctgctgccgtgtctctcccgtagagctctttccctaccaccggattttgtttcctcgcgtgtgcttcgaggaagacgcatccatgcctcgagactgaagcatggagctggggttgtgtgcaatgcgattatgacctattcaggagtggaagaggaggagatggtggaagaagaaatggaagaggaggctgaaccggcggtgagcacaaggccgcgcctggagctcatcgagaagccggaccggagcctggcgctgctggatgagtacgagtcggaggaactgggcacctctctttgcgccaatcatcgtagcggttatgttgctgtattggggaagccaaatgttggcaagagcacacttattaaccaaatggttggtcagaaactttcaattgtaacagataaaccgcaaacgacaagacatcgcattcttggtatatgttctgaaccagagtaccagattatactttatgacactcctggtgttattaaaaaggagatgcataagctggacagtatgatgatgaagaatgttaggagcgctatcggcagtgcggactgtgtgcttgttgttgctgatgcttgcaaaactcctgaaaagattgatgaaatgcttgaagaaggtgttggaaacaaagatattggacttcctgtactgctggtattgaacaagaaagatctcataaaacccggagaaatcgcaaagaaacttgagtggtaccaaaaatttactaatgttgatgatgttataccaataagtgctaaatttggtcatggagtggatgatatcaaggagtggatattgtcaaagctccctctgggtcctgcttactaccccaaggatatagctagcgaacaccctgagagattttttgttggtgaaatagtgagggaaaagatttttgttcagtacaggcaggaaattccttattcatgccaggttaatgttgtcagttacaaaagtcggcctgctgccaaggacttcattcaagttgagatacttgtggagaaagaatcacaaagaggcattatactagggaaggatggcaaaagcataaagatgctggcaaccgcatcgaggcttgacatcgaggactttctacagaagaaagtctaccttgaggtggaggtcaaagtgaaggaaaactggcggcaggacgagcgactcctgaagcggtatggctacggcggcgagatccaagcgctgtgactgtgactgtgactatgaccggtgcgctctagctcactgtcagctgccgcgagcgtggaatgacctggttttttttcaattcctctcgtgtgttgttgttgtcgatgcgaatgagtagcagttatttaacctggtgtcgaactcaactagcagctcagttgtgttaattagtcagcaagttatgtgctctgatcctgctgttgttgtcagcggaactggttttgccgcagac

SEQ ID NO: 132792 - DNA, 633 bp, Zea mays
  Clone ID: MRT4577_52598C.1
gccggccgggccgggttattcatgccaggttaatgttgtcagttacaaaagtcggcctactgccaaggacttcattcaagttgagatacttgtggagaaagaatcacaaagaggcattatactagggaaggatggcaaaagcataaagatgctggcaaccgcatcgaggcttgacatcgaggactttctacagaagaaagtctaccttgaggttgcaccttcttcacttatgtggttgccgtggacttgcttgccatctcccgccgcaacgcagtttctgtctgacagtgacgcgcgcgactccttccttgtattgcacaggtggaggtcaaagtgaaggaaaactggcggcaggacgagcgactcctgaagcggtatggctacggcggcgagatccaagcgctgtgactgtgactgtgactatgaccggtgcgctctagctcactgtcagctgccgcgagcgtggaatgacctggtttttttttcaattcctctcgtgtgttgttgttgtcgatgcgaatgagtagcagttatttaacctggtgtcgaactcaactagcagctcagttgtgttaattagtcaaaaaaaaaacaaaaaaaaaaaagcaaaaaaaaaaaaaaaaaaggccccta

SEQ ID NO: 132793 - DNA, 310 bp, Zea mays
  Clone ID: MRT4577_52599C.1
cccacgcgtgcgcgcacagcgtccgcccactcgtccggatcttgaagcgcggggaggaaccgcccgcttcagctgccgcgccagcccctacaccggtgatagcagtgccccccgctgcgcaagcctgggtggttgaccaatgcgccctctgctgcactggacggatcgggcctgaggcgcctcgccgggtgcctacgaagaagatagtgtcagtccccgctgcatctgcagcccacgcgcccctgttcgtgcgccgggtgttttctgccccggtgcccgtcgtggtgccgacgaagaagaccgccacggt

SEQ ID NO: 132794 - DNA, 876 bp, Zea mays
  Clone ID: MRT4577_5259C.1
gagtctggccggcgggaggcagtagcacgggatcatccgatccgaaacctagcaacacccccggacagacgggcgcgaactcaaaccctagaaacggtagccatggattcgggaggcggaggagggagcggcgcgcacaaggcggcctcgggctccgcgccctcgccggcgcctaaccccacggcgatgctttcggcgctcatgagcaagcgcgccaagctccaggaggagctccgctccatcgagcgccaggtttatgatatggagaccacctacctacaggagactaatcaatttggaagtgtgctgaagggtttcgaatcttttttgtcatcctcaaaaaacacctctaaccttaagcgctctcggaaatttcaggctgacgagaggttattctccctgtcatccgttacttctccagcggttgatgaacatttggctggacgagatgatggaagagagtatggagcaggtcgttctaagggtggaagcacccctgcgaacgggcaaggcaaaccgaagaagggagggcgccctggcgggcgagacggcaagagactacggccgtcgaatgacccagacctggacgacgaagatgactactaactcctccatcatgtaggcctactgtagcgggttaacttcaatttagcgtctagcagcacatgattctttacgaattgcttcccttctcgtttgttttgcttggttgcatcttcgcttccttccccaactcttccgatttgtaatataacataggtcaatgaaaattagccagattgttaaaattttgtgcaaaaaaaagcggccgctttttctggatttccgagtaaaaatatcttcgttacatccttaaaaaaaaaaaaaaaaaaaaaa

SEQ ID NO: 132795 - DNA, 400 bp, Zea mays
  Clone ID: MRT4577_525C.1
gaaaattcatctgacaccagcactatcacatccactgaaagacctcaatgtccaaagatttggaaaaatgttcacctagtggcaccacacctacgacttcagtttcacctgtagagtcaaaaaagcatgagaagactgtaccaaattatctcagagctactagaggttcgtgccatgatttttgcaagtatggacataaaaacccttctgaagaggagccgggtatttcaggaggaagaagaaagaaaattcctgctcatctgattaatttgacactacacagatcagctattttggatagatccaaggatatcaaaaataggagtgtttcactagccaagtcgagcatatctctgggtgaagctgaacggtttgcacccaagaaagcatcagcaagtcg

SEQ ID NO: 132796 - DNA, 127 bp, Zea mays
  Clone ID: MRT4577_52600C.1
acgcgctcgcggacgcgccgagtagccggccgaaccagtcggccgcacgcacacactccctccctatcgccgatatcagcgtcgatctgcgaccgaagagcgattcagaggcagggtgaggggggga

SEQ ID NO: 132797 - DNA, 501 bp, Zea mays
  Clone ID: MRT4577_52601C.1
ggtatttaaaagacagacgaacgggaggaacaagcaaaaattaaaatctaaaaccttaaaaagaaatttaaaaaaaatatgtttttttctttcccgggccccccctgggggggcctttttttggggttttcccccacacttggcggccgttgggggtgccttttaggggccccaatggggccccatattgggcctctattacagttgcctcgcccgtcttttttccccgtttttaactggaaaacccttggggtacccctgcttatccgctttgaaggaaatcccttttttccccctttttgtctattgggggggccccaacgggccgcccttcccccattttcccaccctttttgccgatgggcccccccttgtcgcgcccctttaaacccccttattgtgggggtttctccgggtgttaccgttatttttgccttctcttttacgccccctctttcccgttttttctccttttttccctccccgttcgcgggttttccc

SEQ ID NO: 132798 - DNA, 535 bp, Zea mays
  unsure (1)..(535): unsure at all n locations
  Clone ID: MRT4577_52602C.1
tttttttttttttttttnttttttttttttttttttttttttttttaattgtggtcttttttttttttttttttttttatttttttcattttttgcccttttgttccttctctttacttgcccttctacccacaaaacaaaaaaaagggaaagaactcccactcgcaactccccgaaactgcccgagctgcccccccaagccttccaaaccaatcgaaaacacctctaaaaagaccccagggacccccacgaccgcccccagcagggccacagcaagaccttgaagagcctggtgggaccggcttcaccgaaaacaccctgaaaccacgcggaaggcccccggggggcccaggggggcaagctggggatcgtgctccccgacccccccgcacaaagagcgcctcaaacccgtgggggcccccgggggggccacggaagcccccgattagcgggtccaccctggaaactttgctggggtccaatgcagggggagccgggcgctgcggaacctttgcaacatttgcagggttttccc

SEQ ID NO: 132799 - DNA, 530 bp, Zea mays
  Clone ID: MRT4577_52603C.1
ataatgtcaggtttaggagggcgcatattagaatcttctgccagagctgctggtgaaaacggacttcagcttctgggtacactgtccaaaccattctcccgtgctgaacttttagagttgttggcaaaggatacccatgaaactctttcaatccagagctccccaatttctcctgtttccgataggcaaatcggcgatgcgctaaaagcagaagcttttgttgctcactttcagcccaaaatttcctgcctgactggtggactggtgggattcgaatgtctagctcgctggcctcaaccggacggtagcatgatacctccagatcagtttatctgtttcgctgagcaaaaagggctaattgatgcgctgacccggcaagtttatgattacgcattggccaacttgcccctatgtaaccttagaaatcaactgaaatacgctttgaacctttcaccaattaacttaaaggatgcaacttttccacactggctacggaataaatgctgtgagcacaatgtcaagccatcaca

SEQ ID NO: 132800 - DNA, 279 bp, Zea mays
  Clone ID: MRT4577_52604C.1
cccacgcgtccgcccactcgtccgcccacttgttttgctttgttcacgaacaaaaccggagggggttcattagctaccaggaaagttaccaaacttaaccacttgaattaccttccaaacataacggccagcaccatgtgccacatggtcaattcaatgtccagcttaatggcaccaggtggaccttaaaaccatagaccaaaccaaacttgaacacctaccttccccattcttacgccttattaaaccgcaccaaggcaaaccaatgcttccaaaaca

SEQ ID NO: 132801 - DNA, 1233 bp, Zea mays
  Clone ID: MRT4577_52605C.1
atggcagtagatatcccacagtggggtttggatgctattgataaaattagaagaggttttctatggagaggccgcaaagaagctaaaggtggtcattgtcttgttgcctggggaaaagtttgccgccccctaaagcttggtgggcttgatctgtttccaaggctgatcggcgcaattccgaagcggctaattaattgtaggacagtccaggaagcaattgttagtgccaaatggatttctgacatcagaggagccttgtcagtgggggttttgacagattacattcagctttgggaattgatttctggcatcgagctgcagccggaggttgaagacatgcatatcttcagtattgcctcgaatggtgtatactcagccaaatcagcatatgaagctttcgcaatggtacctgcgattgcgatggatcaactactcttcatcgtcttatttgatcaggttgattctatgattctgcgggacccatgggattggctgctgtcagcacagggagttggtagctacgttgagcgtttagccgttcgctcctgtgatccaaacatacccttgtatgtaccttcatttataaagaaatatgtgtcgtggtttctaaaaccggaggacaataagatttatgttcggcagggtgctagcgcggactcacttcgaatggtgcatgcctggtacggcgtatggccccgtctcttctggtgtatgggtcactatagagactccggtgttgaggtccctatggtacaacttcttggcttcttggacgatatatatccctaccatgtgtttaagctctctaaggcgctatatgggcttaagcaagcaccaagagcatggtatgagtgccttagaaattttctcatttcaaatgctttcaaggttgggaatgctgatcccactcttttcactaagacatgtaatggagatttattttcttgtgaggagtttaacaagcttaaggtgcaaaagttcgagatgtcgatgatgggcgagctgacattctttctaggatttcaagtaaaattgcttaaggaaggcatcttcgtctcccaaacaaagcacacgcaatacatcctcaagaagtttggaatgaaggatgcaaagcccatcaagatgtcgatgggaacgaacgggcacttggacattgaagcgagaggtaagtccgtagatcaaaagatttcaatccgtcccaaggagtgtcaccttgtggcagtaaagcgttaa

SEQ ID NO: 132802 - DNA, 309 bp, Zea mays
  Clone ID: MRT4577_52606C.1
ggcaagcaatgctccccattcaaaaacatgttgcatttgggggggaataagaacaaagggccccaataaaaaaaatccaaaagtttttgttagcatgatcttttttgtttggcaaaaccccaggatacatttgcatgacttcagatcagcaagacataagcccggggggccacactccacagtttaacaccgggttaagctcaccaaaaaacctaccataacaaggttggggggcttttaattacaacttttcaaatccagtttgataaccagaatttggctaaatgcgggtaacacttatttttattt

SEQ ID NO: 132803 - DNA, 342 bp, Zea mays
  Clone ID: MRT4577_52607C.1
cgctgccttaccgaggggttaactatggaagcatttccataaaatacagatataaagccgggctgaaatacagataatgggggtacagcttacaacattatgtacaacaaaaataaagctggagcacttgtatgcgccaaacaaactatagctggcataaggaacataaaggtggaggtactgagaatgtgctccacctatcagaggcaaagtgaccacttttggagagtttatatagctagcaacccggagctttcgtcaatttgaccacaaaaaggacgtccggcttttatataaagactatgtagtcacttggagattatgtgactctcgagacagact

SEQ ID NO: 132804 - DNA, 778 bp, Zea mays
  Clone ID: MRT4577_52608C.1
cggggtggaagggatgattatggtagccgtggcaggtatgactctggtggaactgatgggcgatctcgtaggtctgctagaggtcgcagtagaagtcgtagccccagccccaagaggtcacaccatcatgaagctaggcgtagccgaagcaggagcaggagccgaagctgtagaaactttcgtgctagccgcagcaagggtcacagccctgttgctagcagtaggcatgaaaaggctgctgttatttcaggatctactcaacctaacttggggtatgcagagcacaaaagccctccaagatctcactctggggatgaccatgtgaaccaccctgaccaaaaggatgaccacatgggagatgggaagatggaaagggttgatcttgatcgctcgcccagcccacaatatgacaagtctgctccatatagtcctgcgtacaatggcaaagccagtgactcgatgagccctaatgttcagccaaaggcagatgccaaatatgtcaaaccttctgggaaacctgagcctgcatctccattgcgccacagcaaaggcagagatgatgatgaaggtatcatagacgaggatggagagattgctgagcgtgatttgcgtgcaagtgcagctgtgtagagaatggtaataactgacggagaatggcctgcatcttctgtgacaacaagactgttatgcaaactgcagtcgttcccatctgcaagaagtccagatgtagaaatgcatttgtgccattaaatgtctcgtaagacctatgataatgcat

SEQ ID NO: 132805 - DNA, 360 bp, Zea mays
  Clone ID: MRT4577_52609C.1
gttgacgacgactgaatcatcatgcatgtgagaaacaagggttttgttccgttgcattaattttattgccaagtggaggcagttttttccaacgcacatttttcctggttcccctcgcagatcaagttaataatatttaggagggaccacagaaaaaaaaaagaaagatagatagagaaagaaaaaaaaagaaaaggaaactaatattttttaattaataaacaaaatatataaaaagaaagagggggggtgtaaattggagctgcactgcaggaaaaaaggggggagcattgtgtagtggatggttctacccttcacccagatccaatgtaggtgcccgtcctttttctcatgatagtg

SEQ ID NO: 132806 - DNA, 270 bp, Zea mays
  Clone ID: MRT4577_5260C.1
cggaacatggctttccccccgttcataaaaatggagatttttccccccccgggaacagttcctttcctttcagccaattggctgggaaagaatataaatggttctttcccttgggccaaccatcccccacccctttttttggccctcccccttcccttgttctgaaaatcccattaagggcgggaaggaaggggttccccctgcttcacaaaaaccatggatctttccggggatcaatcccagggggaagggcttgcaacaagccggccc

SEQ ID NO: 132807 - DNA, 752 bp, Zea mays
  Clone ID: MRT4577_52610C.1
gccatgggcgcgggataccggctgaggcatggcaggcggctctggcttcccacccttctgttcagagatgggggtggtgggcagtatttcatctttgggttccacaatgctcacgtgatcaggcagaggcttcttagggccaatcttaccagtcgggtcccagggcagcatgatctttaccttgatgcccagcacaccctgtctgagcagcacatggcgcacggcggtgtccacatagtagttaacagggtccccactgtggatcatgaggccatccacaaacttcatggatttagccctctgtcctcgaagtttcccagacaccacaacctcgcagcctttggccccactctccatgatgaaccgcagcacaccatagcaggccctccgcacagcaagccctcctaggagtttgtaacgcagagactctgcctgggcaatggcacacagacctctagtggccaccttttcagcataaagctctacactgccctctggaaagccaaacctcttctgaactacagcagtcagttcccgaatccgccggcccttctcaccaagaacattctgtgttctggtggctaagataatgatttctgtcctggttggtgtaactcgcacctcaactccagagtagccatcttcagccagctcccgagtaagaaactcattcagttcagctttgaagatgccatcagcgacaaacttcctcttcttggatatttgcactgccatcttgccgccgcgcccgc

SEQ ID NO: 132808 - DNA, 305 bp, Zea mays
  unsure (1)..(305): unsure at all n locations
  Clone ID: MRT4577_52611C.1
ggaacacagnngaagaaccaaccagcganagcgggnccagggnacaaccggacaaggggaaggccccaagccgagcacaagcgcccgagganngnngacagcgacagacgnccnccaggaggggggcacgaaacagggaagacnagcagcgccgncgcaaccgaaagaagccncagacgaannaagcgaccgcgggcaaggccnnaagccaggcgncgagcggccggccgagggaggagacgaggaagccgancncccncagccgcgccggggcgacgacgnggcggccggcgaagacgaaggcg

SEQ ID NO: 132809 - DNA, 544 bp, Zea mays
  Clone ID: MRT4577_52612C.1
aataataatataattaatataatatagatgagtaccaatcaatatttcatacataagtgtactctaaattcaaaccaaaacactaagataatcttgtaattagccaaacaatttgtgcaagtgcagaatacaatgtacaacagattgatttgcatcatgtcaaaaccagattgtccaagggatacatcgattgccgctgccgcacccctcttgtcgatgttccatgactccattcttgctggccactgcagtgcctatcacctgtgtggtgctgcccggcggggctcctttaccttgtggccgtttgggtacccggtagtggaacgaactgcaacctgccctccctttgactgatgctcgtgtggcaagccccaattttcttcagattttgagaggatttcttagttgttataccatgttccttcagcctctcaattgatatatctctcatggagaatgattaacttgtctcccttgatagaaggaagagctgttgatgacagatagtggtttctagcccatctaacggccttatccacttctg

SEQ ID NO: 132810 - DNA, 278 bp, Zea mays
  unsure (1)..(278): unsure at all n locations
  Clone ID: MRT4577_52613C.1
gcccntccttttttttttttgggagtcaatattttagggggggggtggngcaaccaacattttttctttccttttcnncaaaaagcgacacactaaaattttatttcaccagctgtgtgcccccgcgctatctgaacagggcttccttgctagccccaaaccattcgggggggggatggtcaaagccttggcggggaattttccccagagacgaaatgagtgttttgggttttaggtcgcgccccacaaccgctgttagcgttcctttttgggggtgc

SEQ ID NO: 132811 - DNA, 429 bp, Zea mays
  Clone ID: MRT4577_52614C.1
ccgtccggcttggaggtaagacgtgcggtgtacccggttgagggaagactcttcctacacattcctttgtccgcagttcagggtggggggttctatgctagagagcgccgtgccaaacatctctttagaggcgtctgttcgctttacagtctggatatgcgacaccggaatctgttctcagctatatcaaacgttttatataacattatgagaaacaatctcggcttaagaatctgttctcgactccaccatatctcgacacacaaacgaacaaggcgcttagatcttctgggaaattttgttatagctcgatttttatggcttcacccagcattgtctttgcccggcaaggcgccgggccgtttcaagattgcgttcttcatatcttgtgacctttgccggggagggtgttcccagaaacccattctt

SEQ ID NO: 132812 - DNA, 450 bp, Zea mays
  Clone ID: MRT4577_52615C.1
gttcaaaacgcttttttattttgtgttattggtagattacataatacaggatgatggggaggaggaagaaactcggcctcaacatggattgacagactaccgaccagggggcctcttgatcggtacatttatcatcaatctcaaacaactgtgtgatcagcaaacattccatgcacctatttgttcgtaacttcagagtttggacaccggctagatccatttattaacatatctcgaagacatttcacttgccctaaccaactgcattttagggattctatatatgactgggagagattgcgctataaacgaatcccgagccttgcatgatcaagaacattaggcggagtaggaataagaggtaaaataaatctcaaaaggaattaatgatatcttttgggcagaggttataaaatctttcacgcgacatgtttgatgcactgaaattgt

SEQ ID NO: 132813 - DNA, 439 bp, Zea mays
  Clone ID: MRT4577_52616C.1
atcgggggccggcgacggcgacgacccgagggaagaagctcacgccgctggacctgggcgggagccccgaaacattggcgggggacaggcgcgacttcctacggtaggccataacaggggcgttgggggacaacggattggctcgggacttgttcgagcacgcgttgagcaacgcgccggagaagcttccattgcagtcctcgccgtcaaaatccgtccgggtgtccacgacactggtcgaggtcctgcgccgcgcgcagtccacgcagaaaaagcgcacgaacgctgctcgatctgctccaggactcacagatctccgtggagtagctccacatccccactcgctagataagatcttccctcgcttgtttcttccgctgctggtccgctgtttgctcactgctctgatgttttttcaggtccacatgccgaaagcaat

SEQ ID NO: 132814 - DNA, 1084 bp, Zea mays
  unsure (1)..(1084): unsure at all n locations
  Clone ID: MRT4577_52617C.1
agccggccgggccgggatagtaaatatactaattccctatgtcctaaccctaggcgagacgcatgcacctgccccagctgaacgagccgccagtcgtcgacgctagcaccgagctccgcacaactttacctgccaccgtcggtcgtccaccttcgccttccacccgacgtcgagttctagactccctgttccaccgagcgccagctccggaccgcccacactcggctcggcgtcacctccgagtcccaggccactcgcccggtcggacgagctcctcctctcggctccaggcagccagcaagccgaggtcctccccgcggatcctcccccggccgagctccacagtccgccctacgttgcagcgaccgatcggtcgcattacctgatgcgcccatggcgacgacgtcggcgcagccgccaccgctgacatggaccctctagccgatgtccacatccagcttcatgtgcaaatgagtactccagatccattccattcggactcgtgatgggtggccccacaacaaatcactctcaatgcattaatggtgtgctatgttggaagcggaatcttaaaaggatttgaacttcaaccaattaaaaaggtatttaaaaataataaaactagacaaatgtttttactagtttaactggcttatttcacttgtttaacaagttttaccttaatttactattattaattctttttcttctttttagatttattgctatacggcatttagttgtaaatagattatgatcatgatgaatgataactcttaattttcttaaactatattgtgaattttatttcgtagctatttagcaacactttaatcttagtgcgtcctcagccactggttgtagactggtagcaccgctgcgctggacagcacagcagccattgtacatggaggacactagtatgcacggatcacagcaggggtcaaagaaccatgaagtcgccgcgcacggtccagaanagtgccacgagtaaacaccgcacggacacgtgttggcaaagcatgcgtacgtggcctctccagttcttccccaggaggccaaggacccagtaggacgtcgatct

SEQ ID NO: 132815 - DNA, 335 bp, Zea mays
  Clone ID: MRT4577_52618C.1
ggccgcttttttttttttttttttccgtttccaactagctttttccagcatcttattaccattgttgttctgttcattgcaaaccaacgaaggtgccaatgatactgttgacgcctgagacatgtaggaccttctggggccatcagttactctgcgaggagtcttcgaatcttggtctttttctcttttgacacatgatctcaaacttaatccaagatgagagacaccccatctgtgaattgcacttaacttcccacctaaagcgtcagccaacatatttaactcattgatatcataacggaaaaagaaaaaatcttttgtcccagtcacatgag

SEQ ID NO: 132816 - DNA, 233 bp, Zea mays
  Clone ID: MRT4577_52619C.1
cctcctatttctatcattcccaatatcctcctctaattaacaaccttactaatctcatgccccataccacccacctctaacttcaaatactaacacctcgactccatattctatattatccccaactactgcaccactcattcaaaccactatcgtacacgcaaactctaatctgctcaaaacctacatcgcatctccctaccattcacccctactggtaatgccacttaaaa

SEQ ID NO: 132817 - DNA, 1480 bp, Zea mays
  Clone ID: MRT4577_5261C.1
agtagggcgcttctaaggtggcgcccttcattgagttgtgcaacaaacccaaggttgccaggaatgaccttggttctcacaggcagtgacatcgtagcggaataagcctcgagtcatcctgtcctcccactcactaaggaggatatcaacaagtaacttggttgaagcagcatcctcctgcgagccctttgccggactcaacttgaacgcgtagaggggaagcttggaagcaggcagacagcagtcgccgaggcagttcctcccgcagcccgcgcgcggcttgtcggcgtcctcctggtagttggagacgacggtgggcaccctcctgatggtcagcttcatctccatgccggtaggtcggtcagttactctcggggtgagaactcgtcggggtccggggggttagcagaagggactaattgctaggaaaggaagaaggtgagagacagaaacggctcagaggcgaccgccgccggcgaggaagaggagatcggacgggcttcctccggccgagggcagcgccccgcggccgccgtgcggagcggggctggacgcgacagcggaggcgatggtgcccgtgggctccacctgcgcagctgcggggccgcgccggggggctgcaacgctagccgtgatgcctacaactcggccacgcccagaggggaggagggagggcagctgtggcaggattgggcggtgggtcacggaagctgccgaggcctgcgccccggggacggggttctcctgtcttataactcttctccggcgaggtgaggccaggcgagcggcggcggtgcgttggggttgtgcctgagctgggtttggtttccgcgccacgccggctgcgggtcggcgacgagcgcggggacggcgttgcggcggcacgcggcgcgcagcgcgccgacgaagtccctgggcggcggcgcgagcgcggcggacgccttcacctcgcacagcggcgtcctggccttgcgctgggccacctccacctccttgtcccagatgatctgctccaggatgttgcgcgggacggcgcgctcggcgccggtgccctcggacgggtacctgggccggcagcgccgccggatctggatgccctgcgccgtggcgatggcgttcatggacttgccgctctcccactggatcacctccgccgaccggaacagcgcgtcgtccagcagcctgctgtacacgaccgccgagtccttggtggcgctgctggtgctgctgcacctgcagcggaagcctcgcccggtggtgcggagggcgggcctagtaaaggacggtgagaggggcaacatgacagcggccggaacgcatgtcctcacgacgaccgaggcggcggcggacatggacatggacgactccatctatcggcgtgttacgtgaggacggatcggacgtgcgagcgacgaagaggaagatagttatattggagcgagcaacaagagtgatgcccggccggcctcgaggggtacaa

SEQ ID NO: 132818 - DNA, 1852 bp, Zea mays
  Clone ID: MRT4577_52620C.1
tccgcggggctctccgtcgcactttctcgtgcctcggggaccccgatccgccaccgcgcgaccgatcgtcccggatgcacgggccgtacccgacggctgctgctgctgctgcttcttcttcggacgacatggcggcgaacggcatgaaggtggctctgcaccggcaggtctcggggggctcgatgaagcagaacgcggagctccggcgccaggcgtcgctcgagtccccgcggacggggcgggccaccagccggttcctgttcgggcggcagtcgtccatggacccgaaccggaggcgcggccggagccagagccccgtgcgcgcgccggaggacctgggcgtgccggacaacctggacgccaccatgcagctgctcttcttcgcgtgccagggcgacgcgctggggatcgagggcctgctgcgcagcggcgtcgacgtcaacagcatcaacctcgacggccgcaccgcgctgcacatcgccgcgtgcgagggccaccgcgacgtcgtcagggtgctgatcagctggaaggccaacatcgacgcgcgcgaccgctggggaagcacggcagtagctgatgccaagttctacggccactccagggtctacgatctcttgaaattccatggcgcaaaggttccgagaaccaagaggacgccaatgatggtgtcggccccagccgagataccggagtacgagctgaaccccggagaggtccagttccggcgaggctgtgacgttacaccgggtgtgtaccacatcgcgaaatggaatggcacaaaggtttccgtaaaaatacttgacagagacggttgctccgatcaagaagccgcaaactctttcaggcatgaattgactgtgctggagaaggtccgacaccctaacgtcgttcagttcgtcggagccgtcactcagagcatacctatgatgattgtgtctgaactccatgaagagaaagacttatcagtctgtatccagaagaaaggaaagttaaagcctcagaaggtgctaagatacggccttgatattgccaggggcatgacctacctccaccagtgcaagccggaccccatcatccactgcgacctaaagccaaaacatatcttcctggatagcggaggccagctgaagatcgcggggttcggagtgacaaggatgtccaaggtcgggaccgacaaggtgaggttgatctaccatggcgctctcgtcgacagcttcagctaccacaccgcgcctgagctgtacaggaacgacgcgttcgactcgagtgtggactcctactccttcggcttcatcctctacgagatggtcgaagggtcggtaagagcgccggaggattcagggcactcgatccggttcgagggactgcggccatccctcaagggcaggctcaagggctatcctcccgacttcaaagcgctggtggaggaatgctggcacccgcaagccatggcgcggccgacgttctcggagatcatcatccggctcgacaagatctacgcccacttcgacaagcatgggagctggaaggactcgctcaagctttggaaatgatcgatggcatggcctgcactgcacgccgccttctttgtgtacatacataccgcgctgcaaacgcgtctctttccggggaagattgagtactggttgtaccttgtaaaaggtggagactggagaatcatgtggcatggtgattgttttttttttttgctacgaattgtaacagattgtgagtaaaattgggcagaacaacacgtatacgtccccccccgcagtgtcaaaaaagaaagcacatttgctgttgttttttctgctggagtcgtacatacaaaagcaatactgtaagagatatc

SEQ ID NO: 132819 - DNA, 580 bp, Zea mays
  Clone ID: MRT4577_52621C.1
ggccgacgttctcggagacatcatccggctcgacaagatctacgcccacttcgacaagcatgggagctggaaggactcgctcaagctttggtccgtatcccggcggcttaagcgaattgttaagcgtcgctccgtcaggagcagaatccacaatgagccgtgaaaagttcggccaaaaaatagagagggagagagagatctttgcgtccggtgatcgaatattttatcctttttttcttctcaaccttcgaaatcaaacacactgagaatgtgctctgcgttgtttgtcccgttgttttttacaggaaatgatcgatggcatggcctgcactgcacgccgccttctttgtgtacatacataccgcgctgcaaacgcgtctctttcccggggaagattgagtactggttgtaccttgtataaggtggagactggagaatcatgtggcatggtgattggttttttgttttttgctacgaattgtaacagattgtgagtaaaattgggcagaacaacacgtatacgtcccccccccccccccccctgcagtgtcaaaaaaagatgcacatttgctgttgtttt

SEQ ID NO: 132820 - DNA, 442 bp, Zea mays
  Clone ID: MRT4577_52622C.1
cttacttttcaaagttcaaatctttgccccatactttcgaggaccgttccattattacagcataggaacataataaacttttccattaaatcattaacatgagatctcagtgccttccctagtaccccattccaaattataaatcattttagcttttctaggtacatattttttctatacacctacataaacgttatgtctaaatgcatagtgaaaactactcactacatttcaaattataagaatcttagatatatgctatgtctagaatcagtttaactagaaaagccaaaacatcatacaatttcgcacatagggggtatatatctaaaaaacccaaaacgacttgattatttggaacgaatggagtgaaaaagtaattgctcggggctattgactatgcttcttttcgcccatttgtaaccctttgtggccacatatt

SEQ ID NO: 132821 - DNA, 272 bp, Zea mays
  unsure (1)..(272): unsure at all n locations
  Clone ID: MRT4577_52623C.1
cccccttttccccaaccaattttcccgatttgagacaacancaagaaaacccancagaggaaagggggagcaatagcgacagaaaacccgaccccccacctaaagcccagacagaggaatgggtttctcttgccgcggaccggaccagacataaaacaaacagaaaaaaggcccatgcaaggccaacacaggaggcgcgagcacaaccgcgcgaacacgcgagcacaaggggcgcgcacgccccgagccaccagagagggaccaaaagcacg

SEQ ID NO: 132822 - DNA, 1357 bp, Zea mays
  Clone ID: MRT4577_52624C.1
agcttttgtatggatatatgaccatgaaacaagctgtctgatgctttttatatgtaacatcaaagaaacaatttgcttacgcttttctatgtatatacacttgtgttttgcatgtaataagtcgatgtggtattagttgtagcattgttatagcttgacctgacttttcattctggctgtggtgtagtgtaggtgcatactgtttcggtgcctctgtctgagtcctgtgtactcagtttggtgggcaatagttgttttttgggtctcaaacttggcatgaaacctctgtaattttgttgcttatcagtaatgaaattcggttcggacgtgatgggaaaaacgtcaaagaagcaatttgttcactctagtggcattcagtgatggcatgcttaccattttggtaatgaacatcttggttaggaataagttaaatcgttttttcatggaaagttttttttgttcatcttgcctttcaagttatggactggcatcttcgtataagtttatgcctatctatagactagtcaatgtttacactaattaagactgatgctgagtgttgaatttatggagtggatataccgctgcttgaggctgcttccgctatgttttgtactgattattttgtgctagtttccatgtactgatgatctctcacagagttgaatacttttttcctagaaagggtctaatgcaggaaacagcagaacctcttgcatgtaggtcggggcctgtaaaggcagtttagcttggtctatgagtggactagttactcactctatcattatatctggatttctgcccattgtttgaacatactttcaggttgtggacaagagaagagaaagagatagctattgtcagtcacagtggtttcttgtttcacaccttaagcatgtacagcaaggagtgccatccaaccataagagacgaagttagcaagcactttgcaaactgcgagctacggtcgatggtgttggttgacagaagcatgcttgggtcatattcgtcaagattcaactatgctggcaagaatccaaccgggctagatgtgcctagtgatattgcagataagaagcaggttgatgaagctcagaagaactgaggcaaccttgaaagcataccgtagatgacttggattatcaagaaattctgacctttgcgaagcttgtttgctttgaagaggacaagctaagagggcatctacagatagagtttacgcataccattttgttagtcaagttgaactacgcagcaatgtattagcatgtctgctcttttgtctcaggctacattgagattcagggcattggactatgatcatctatctatgataataataaccggatcacctaca

SEQ ID NO: 132823 - DNA, 185 bp, Zea mays
  Clone ID: MRT4577_52625C.1
gggggcggcgacgagggaacccgatctttctacatagcttgtcgcatttgctgacaaagagtagctactatgagaaactgagctccattcacagtgccagacatacatacgagccggatgcatgatatgaccaggctgaggtgctgatagaaggagcagacacacacttgcataggttgcgctca

SEQ ID NO: 132824 - DNA, 176 bp, Zea mays
  Clone ID: MRT4577_52626C.1
aatgacttcataaagtttcgtgtgaattttgaagacttgggttactaatgattgtatctttgctagtcaacaacttatgaaatatactcaatgcgtctgatgtgtcattaagtgcagaaataactaagacacaaataacctttgcaaaccttcaagctgtgtaatattccaatgtt

SEQ ID NO: 132825 - DNA, 797 bp, Zea mays
  Clone ID: MRT4577_52627C.1
ttgggaccctcgaggccggccgggcaaatatccgcgtgagcgtgacacccgacctccccctcccgctccgggcagcagcagcagcagtcatgcggatagccgtggtggctcccgtcgcggcggcctacccatgttcctcctccctcgctgcgccggcgagtgcgacgagccgcgcgcacgttgcggcggccgggatgtcctacagggcgtcctctttcgtcggaggcgggctcgcggcggtggttgcgtcggtagccgcgcggccgaggagggcgggctctgggagaggcgacgctctcgggtgcaagtgcctcttcgggctcggggtgccggagctcgccgtcatcgccggcgtcgccgcgctcgtgttcgggcccaagcagctccccgagatcggccgcagcctcggcaagaccgtcaagagcttccaggaggcggctaaggagttcgaaagtgaactgaagaaagagcctggggaaggtggcgatcagcccccacctgcaacccccacggcaacgggggtaggtggcgcggagaaggggcttgaggcatcaagtagcaaggagagcacgtgaggatctatcaagtgttgttagtgttgttggtgtaaaattgtattctggtcttctggagttagcatcaagttcatgtcctttttaaccacgtcgcggtttcaggccattgtagcgatatgtttgtagtctgtaccgggaataacaaccttccgtgattgattatgaatcggttgtcttgggcattaaaaaaaaaaaaaaaaaaaaagcggccctcgagctcca

SEQ ID NO: 132826 - DNA, 317 bp, Zea mays
  Clone ID: MRT4577_52628C.1
cgcaaggcgggctaatgagagtggcatctgaaacggctcgtgctagccccgatgcttgccatccatacatggcatgagtgagtcgatcgcatcagctgacacattgccagaagagcactgatcaacacgacgtacatgggcagcagcagcatgctgatgatagggtaagcacgaccagcgttgcagtgccagtgcagggcgtcgagtttagcgcgagcatcgagcgtatggctatagctgcacgagagctctgaggcgatcatatccgctgcagcgcctggacactgctgacgtataagctacgattgactgcgcgc

SEQ ID NO: 132827 - DNA, 234 bp, Zea mays
  Clone ID: MRT4577_52629C.1
cttttggggtatccttgtatgagatttttgaggtgataccaagtactgggaaattaatcatctcaaacaactagatatttttctccatctcaagctcaggctggcaattataatgctatggatcgctaaatcctgatgaataattgagtgccgattcatcatccagattgtgttgtatgatatacatttgaaacgagttattttgcatatatatattggtgtatcttgactgcc

SEQ ID NO: 132828 - DNA, 314 bp, Zea mays
  Clone ID: MRT4577_5262C.1
ccacgcgtccgacttatcttgttactgtactcaaggttcattattttattcatgtatgcagtatattcacattaaaaaaaaaaaaaaaaaaaaaaaaaaaaaaaaaaaaaaaaaaaaaagataaaaaaaaagataagggaggcagctcaaacagataaaatactagattgagcgaaaatgcaacttaaatggcgctcccctctaggcacgtactgtcaagtccagtcgccgtcgtttaacctggtacggccctgagaatcccttgctgttcttcaactgactcgtcttgttagaaaccccctttccgctggccg

SEQ ID NO: 132829 - DNA, 296 bp, Zea mays
  unsure (1)..(296): unsure at all n locations
  Clone ID: MRT4577_52630C.1
gggaaacctcattggttatttttttaacaaagcgcaaaagaactagaacttagtgaattcgtttcaggacggtggcagataagttaaacacaaaaaggcaacgtgtccaaaaccagcatggatccagcgtccagggggaccgtgcacatttttttttagcatatacaagccgcaaagatggnctgcgaccaaaggccatttgggacgaaccacgatagggaggcaaaaaaatnnntttttactgggtcttgaacatgtgggggatcaggttgaccacccggttgctgtaaccccac

SEQ ID NO: 132830 - DNA, 299 bp, Zea mays
  Clone ID: MRT4577_52631C.1
gataaaaatagactggagatatttggcaaacaattcagagtagtagtcatttagagacttcattccatggcaaatatctccagtctatttttatcaagcaaatggcaacggattaggactgaagatatttgccatggaatgaagtctacaaatgactaccactctgaattgtttggttgtacacctgtggtcggttccctttacctttgggcacctttgactaatcagtatatgtggtagaacttgcagttagcctaatatatttgtcacttcatgtagaagagcttctcaactgttca

SEQ ID NO: 132831 - DNA, 1205 bp, Zea mays
  unsure (1)..(1205): unsure at all n locations
  Clone ID: MRT4577_52632C.1
gtttcgtgctccctccggtggctccgatgacctggcgtccagaaccggcttacccctggccggatctggccgttgtgttgccggcgccccgtggtggttgctagccgggcccgtacaggccctcggcggccaggcgggcgtggctggggtccgcgtacacccacccccactgtgttgtgctctgcttcgtccaactacagtgcgtccgcgtgtctgctccttcctgtgcagctcaccgccggtggatccggtatgcctgtgcctggatctaacccctacgaagcggacgaggatagccattgccgaaatgcagcggggccctctccggcggtctctgccagctgggtcggggcaggacgcccgatctgttggtgctccgccgaagcccaccattggcggcgccctatcgtggatgtggtggcagtcctgagcagcgaaagctctgtgcccggtgcgcggggggtcctatcaccttcgctcggtctgctccaatgcccattctcggcggtgccatgaccttggcgggactgggctccatggcggtctccttgcagcgaaagctccatgtcagtacgtggaaggtgcccacctttgcaaggcccacgtcatggcttggtcgtcagggttttctttgcaggtctctttgtccctattggcacctctgctccgtcaacgctcttctgtcaacaagggacacatagatcttatgtcgggtcggtgttttccgcctctcctgctctcgtacggcgctggatggtggcatgcggagcccggatgcgctgtcgggtgttgctgccggcttgaagggagatcatcgtctctgggatcggctcacgcttgcgcggtccctcacctagagggccgcacggcagtggagcgacgttgctacgaggggccatgtggatgcgcaatggtcctcatgtgctggcgagtatgttgttctctggtggtgctagtcgtcgatcggctgttgtcgtcctagccgttatagcctgcgtcatgtttgtgtaatccgaccgggctgtgttgggccattggtattgttctccccttttgtaatctccgttctgctttgtgtaatcctacggcccattttgagccattgatctaatgaaatcaggtggtgtcaaaaccggaaaataggggtccgaaaannnnnnnnnnnnnnnnnnnnnnnnnnnnnnnnnnnnnnnnnnnnnnnnnnn

SEQ ID NO: 132832 - DNA, 736 bp, Zea mays
  Clone ID: MRT4577_52633C.1
acgctgttgctactcccctcccccttcttgcctgcttccgccgctacctgctcctccgctccgtcctcctcccctccgccgtcgccgtcgccgggacacgcccaagccaggacttgttctcggaagaatatgtcttgctttggatgctgtggtgatgaagatactcaaagagcaccagacaacaggaatcaatacccaggaaaccatccagcaaggaatgatgcatatcgcactgccgatccaactcccaaaggtcctcaacctgtgaaagtgcaacccattgcagttcccaccattcctatggatgaaattagggaggttactaagggttttggtgatgaagctttgattggtgagggttcctttggcagagtatattttggtactctaagaaatggtagaggtgcagcaatcaaaaagctggattccagtaagcagccagaccaagaattgctggcacaggtatctatggtatcaaggcttaagcatgaaaatgttgtggagttgcttggttactgtcttgacgggaacacccgtgtccttgcttatgagtttgccactatgggctctcttcatgatatgcttcatggaaggaaaggtgttaaaggggctcagccaggtccggtcttatctggatacaacgggtggaagatagctgttggtgcagcgaaaggcctagagtatcttcatgagaaagcacagcctcacgtcatacacagggacatcaagtccagca

SEQ ID NO: 132833 - DNA, 574 bp, Zea mays
  Clone ID: MRT4577_52634C.1
ggggccgagacttgaaacgcggctatctattcgagtgacactcgttgctacttcctttcccacccctgtaccccacgtgaactcagactacgtccaagttatcaaactcttacatataacgaacacgggcggagattacgcacacctactaccaacgaacgtctcctacttttttcccccaaaagcagtttgaggtccacgtgttattcgacttgatcatcatattggtagtgctaaaacagatggtgatgcaacatctcatctaggtcatcctgttgatggactctatcgaaattaaggttatgatcctcgtagatcaagtagtgacaaccttcctgattgctcccaactcgaagaggaacacgccaaacgtcgcaaaggtctgttcaaagattcctactaaggccgctagggaggtcgcgaagacgcttcttaaaaaggagatcggagtcattgtcttgaccaccaatctcacgaacactgcttccacattccttcacgcaactgtctaggtaacggactcgacttcctccagggcaaccactaaggttactacaattgtagtagcttccgt

SEQ ID NO: 132834 - DNA, 444 bp, Zea mays
  Clone ID: MRT4577_52635C.1
gtcggcgtgcgccatcccggacacgcccagcgccgccgccgcgccgagccgcatgctgtcgggcgtgatggcgccccgctcccggtccgccagcagcctgaaccccgcgcgcagctccggcagcagccccgccacgcccagacgctcggccatcaccggcagcatgttttattactcctcgccagcaccaccagcgccagcgcggaccctgatcaatgcacgcctgcatgcacttatgactacacgtacagtgcaggtgctgtcattcttggctacagaaaaccgtaaatagatagctaactaactcttagtcgtcggtgtaaacacaattttgcaacagggaccatgaggagttgaaggaagaagaaccttcagactatatgtggtaggagtggatttttatgagaagactatgtgggtataattgggcgactgggcgttgat

SEQ ID NO: 132835 - DNA, 369 bp, Zea mays
  Clone ID: MRT4577_52636C.1
gaaaagaaaatttgttctcaaaaaaaggctttaagtttaaaactttgccaagaaaacaaaccctttttaaagggggctgaccgggcatacaaattttaaacataaaggcaagttgggaccaacaacttgggcttaaaacccggacccctcccgggtgtaaaacaaagggctttaaccgctacaactaggatacaaattgggccaaatccttaaaaaaatcccgtttttccaaacccgaaccattaaaccgaccttggccacattacccaaaaaagccttaaagaaagttttccaatcctttaaatttttttttcccttgtggaaacgtaaatccccctaaaaacaacgggcctttgtttttaaacgggg

SEQ ID NO: 132836 - DNA, 293 bp, Zea mays
  unsure (1)..(293): unsure at all n locations
  Clone ID: MRT4577_52637C.1
acccacgcgtgccgcagaaaacccatggaagggtcactttgtgcctcgcttcatgatagtctggttgcgaaagggtatacccctccagcgtgttggcgcggactctnntttcggcccctgaagcggagtttcttggcaagcccctgtggcttttgggggtccctcgagcccccggatggagaaaagtacccgtcaagggtcaaaggtccccgaggctnaagcggagccgacccgnngctgcaggaggggtggtcccggaccctgctcaagaaacccatcctgctcgtgatgaa

SEQ ID NO: 132837 - DNA, 371 bp, Zea mays
  Clone ID: MRT4577_52638C.1
tgaatgctcacgcgtgcgcccctgcggtccccgggccgctgccgtgcaggccccagggcaggtaagagggagaagcagagggccacatggtgggacacaccaacgggatctccaagaggcactggaagaagcactggcagacctgggtcaagacattgcacccagggcccacccgcaagcatagactgccacaataggggtcaaaagatagctgcccacatggttgcccgcgcgactggtgatactgtacaacgcaaggctcaaaggcacaccttgaagcccaacatgacgtgaaggtctgccagagtggaacccatagcagagctcaacgcttgatgagatcccaaaaaagattgctacaaccatagccc

SEQ ID NO: 132838 - DNA, 397 bp, Zea mays
  Clone ID: MRT4577_52639C.1
gggccgcctctcaggcggactctatattttttttttttttttattccaaaacaacacattaatcgaagcagaaaaaccattcttggggggcctacaaaccaacaacccatccagggctttgaggggctgattgccctcatcgtcgactccccaggtgctgctaaacccggcatccaacgtttaccaagggtcagggttgccggggcgccagcctttgtgtgcacccgtgaggctgctgttaagggagaccgtcttccggtccacttcactgtctacaaggcgtgttctttcacccacggtgctcaccaatggctgcatttgtttacagtctctggcaaagctgtttgccacccatacggagaagaagttgtgcctgttcttgtcccaactgtttctc

SEQ ID NO: 132839 - DNA, 227 bp, Zea mays
  Clone ID: MRT4577_5263C.1
gaacaagtcacttgcagcgtggataatacctgtatcctttgctctggcttccgctagatgtgaatacagtattttcggagtattgaaagctacgcttctgtcatttcgttgccaagacaagtgcctggctccacgtgaactcgtggccttgacctgaagaaaaatcattttctctctctcactcatagtgtatttttttaatctttgcagccaaagctactgattgc

SEQ ID NO: 132840 - DNA, 432 bp, Zea mays
  Clone ID: MRT4577_52640C.1
gccactcctacgggacctaccaggggagccagggaacgtgttcggggacgggcggggggccggacgggggaccataatgggactaccgacgtgcgcaccacgaggcgcaggacgacgtgttctttgccttcgagtatatgatactagctacaatcatagcatcatcaacggtgaagactatattgaatgatatagacaagctaagggacgggctaagggagagaaagggagagaatacagcatactatgcgctcatatgggaccttatgcactagctagtatacatgctattatacatgcttatcttcataaactttggcgagcactaaccggaaccgtgaacgtgatcatgcatggaaacatgagacgatacttaagactatgattgagacaatgtctgagattaggactggtatgatgtactggttgatg

SEQ ID NO: 132841 - DNA, 567 bp, Zea mays
  Clone ID: MRT4577_52641C.1
cccccctcgagtttttttttttttttttttttttttttttttttttttttttttttttttttttttttttttttttttttgttttatccttggttttttcctgttctttttcttttgtctttggtctgaccaaaaacacagaaaggaccctatggggcactatttgaactttttttgtaacatgcgggggaaaaaggaagaaaaccaaagaaaaaacagcaaaagaagcgaaagataacagctagcaaacaagcactaacccaaaaccaacaacccacgcccaaccccaataaaaaaaccatctttcaccccagagggaggggaaaaaaaaacccaccaatggcccgcccagggcccccccgggccacccggggttccccaggcatacccccaaaaaaaccagaaatccgcccccattcaagatcttcccaacaaaaccccccggattcaccaccaacctgccaaccacctgggaaggacaaatgaaaaagaaaggaccccccccggaccccgaggagacaccgggtctattgggggtttaactcaaaagaaggcaaaagggggggt

SEQ ID NO: 132842 - DNA, 471 bp, Zea mays
  Clone ID: MRT4577_52642C.1
cttgcaacacagaccgaattgtggggagtggcgaagctttcaactaattgcatacactagtttcagcaccgggaaagtttataaatacagcagggccctataaatacttgatatggaacacatgtacaaaagggtatacatctctgacatggatgactgttaccactaacgagtgcgtgatgccaaataaaacatacatagcatgtcatggtatagacctaaatcaattttgaacccgaatggcatctacagcttcatactgacacataaaaatatattctagaggttttgataaaaacgtctctacatggacagggtattacctaacatatgtcagtgcaaaagatgtaaattaggcatacaaaatgtgcttagaaggtgacagctactaccgtttaagatgatgcagttcgatcctaataagccaaacatactgtgtaagagagggacgtgacaattgaaaggaggtgg

SEQ ID NO: 132843 - DNA, 366 bp, Zea mays
  Clone ID: MRT4577_52643C.1
gagagcgagcgcctcaccggtgtccgcgagctgaccgctcaccgtcgcacccacatgccgctcttgtttggacgaggtggtgcttgttcttgtacctcgttctgggtagacgccttggctggactgctggcaaaccccttccgggggtttaatcaaccccccaaaggagggcttcctgggcttgaagtccgcggcaaccggaaccctgcccaaccggttccccggcggggccaaggcgggggcaccaatccctgggccccgccggtggtcgccgcccttcaaggtgccccggcccttcaataccttgaccaaccgttgcaaccccaaggggtgcaccgggacctggagggcttcaacctgcttctg

SEQ ID NO: 132844 - DNA, 225 bp, Zea mays
  Clone ID: MRT4577_52644C.1
caacaacacatcatcattggttctcctcttttaaatagccaattaattgtaatgcaatgatcaattcattctcatgcaaacaagccattaaacctcttaaaaaatgtcggcccatctatagaaacctatccatcatacccaaccttgcaccttataccgtttaaatgtttacgcactaattccatcactcaccgctaatatttcacctatcgaatgttcaatcac

SEQ ID NO: 132845 - DNA, 266 bp, Zea mays
  unsure (1)..(266): unsure at all n locations
  Clone ID: MRT4577_52645C.1
cggacgcgtgggggtgggcaatggggcagcaaccctgttttggtcggatagatggattcagggtcagagaattgctgaccttgcaccacaagtctttgcaacagttcccaagatgagaattagcaaaaggacagtacatgaagctcttactgatcactcttgggtgatggatatctagggagctctaactnttggagttattaatgagtttcttagtctctgggatttgctctccgtagtggtgttacagcctgggattgatgatg

SEQ ID NO: 132846 - DNA, 356 bp, Zea mays
  Clone ID: MRT4577_52646C.1
ctttatttatctttattaacctcctaaacggcaataacataaatgttcgggggcgggctcaattaactttaactaatgttacataatgactccccaaagtgccatgatcttttgctagaccatcatggcctattccacttactgcaatatattaattagcatgctaacctctcgatcctgaacaataacacatggacactatcaaacttctgccctgagaacccacatccaaactttgatcactttaaaccaacattgccagcactttagcaacttatccactctcatgatcataaggtcctaactgataccttttgcactctatcatacctatctgattttactaatgacaaaat

SEQ ID NO: 132847 - DNA, 170 bp, Zea mays
  Clone ID: MRT4577_52647C.1
ttcagttctgaggcagtggtcccgttgcggttcggcgtgtgcgtggccgttgctggcgggttcgtcgcgtcggctcttttgcggctcctcggcgccccgggcgatgaggcggtctcggggactcgtgcacgactctgatgttgcctcgaagtctcagttcaaggtgttgt

SEQ ID NO: 132848 - DNA, 213 bp, Zea mays
  Clone ID: MRT4577_52648C.1
ggccgccaattaaccaaaaacttacagggaaggaatatgggagacacaagaaaaattaagggtaccgaagcttgtcagatccgaccccaacatacatgctgtctttttgaatggaccaatacaaaattgaaacccaaggaggaatagaacgtctctattctgccgacaattgcgattggctggacgggatataccaactgcttggcccttaaa

SEQ ID NO: 132849 - DNA, 205 bp, Zea mays
  Clone ID: MRT4577_52649C.1
ggtgcagcttaagtggatgagtgctacctttccgacttagtcctcggtaataagtttcagactacgatgtatcatttggacgtttcgagatcgtcaaatcagattccacagggattggtgagcaaccagaatgctcagacatctgattgctgacctgtccagacatcatctggtctccctgaacctgaaatcacaccatggatga

SEQ ID NO: 132850 - DNA, 422 bp, Zea mays
  Clone ID: MRT4577_5264C.1
gggatatattatattggcccaactgggacgttactacgtaaaaacataatccatccatgatactgataacagatcaaacgtggcctgttaagctgaatcatactaaaagacagcgcaactcagataaatcggtatttgcaacccagataaggtgcgaatataaaaaatattactataccctgtctccctagaaggggataaatcattaccaaaaaaaaaaaattactcctcctcggagctgggactgaaatattatattatatactgcccttcaatcgagtgacaaagaccgaatatatcatgagactgcgctgtcgttatattagaaacaactactcggggcccgtacgatctgttatcagtatcatggatagataacgaactgacagtacaaacgcccatgtgggcgccataaatatccc

SEQ ID NO: 132851 - DNA, 1737 bp, Zea mays
  Clone ID: MRT4577_52650C.1
gccggcctggccgggactcgcttccagactgccccctcctcgggcacgcgcccgcgttcgcccccggctgggatcaccgcgcgtttgccggcgccatggccgtcgcagtcgccgtcgccagccaaaatccactagcagcgcgtaacctcctgccgatctaggagacgggggatttcttctcgcccttttcctcgccttgcggctgcggaataccggggccggcctggatttgctcgagagtgagaggaaggcgtaacagtgtgaaggaggcgcgggggacaatatggctgcggaaatggtgaaagcggcgacgagcgacaagctcaaggagatggattgggcaaagaacatcgaaatctgcgagctcgtggcgcaggatcctgggaaagcgaaggatgtgatcaagtctgtaaagaagtgtatagggagcaggagcaagaccactcaactctttgctgttatgctattggagatgcttctgaataattgcggagagcctgtccataggcaggtcattgataatggccttcttccaatacttgtgaagatagtgaagaaaaagacggatttaccagttcgagaaaaaatatttcttctgttagatgcaacacaaacatcccttggtggagctaaagcaaggttccctcagtactatgaggcatactatgagttggtgtctgctggtgtgcaattttcaaatcggccaaatgttcttgtcacacgagcagaagtgccagtcccagaaacgagaacagaaccaaataatgaaagtttatcgacccgattgactgaagctcaacaggaagtgcatactcagcctgttcctgatgcaagtatagtccagaaagcctctagtgtcatggaagtattgagggatgtgcttaattctatggatcctaggcaccctgagggagcaacggatgaatttgtgttggatcttgtcgagcaatgtacgtttcagaagcaacgaataatgcaccttgttatgacatcaagggatgaaacgctggtatcacaagctatagagctaaatgaagagctacataaggttctcgtccggcatgacgcgttgctttcagttcatccgacaacagcagtagcttctaatataaaggaagaagaggaggaagaggatgctgaaagtctctatcggagactgcggaaggggaaggcactgtcgcaggactacacagatgacctggtgccgtcgttccgatccatgcccgaggacaagctgccaccctgacaagagactgggcgcgctgaacatccacttgccggacggtgaggagccaaggcatgatcccgctccgctgatcccgccgccgcccgcaaagcacgccgagagggagaggttcttccaggagaagagcatcgacgagcatcgacggcggagtggccagcctgccgggtcacctgaggggcctgtcgcagcacagccgggacagcagcagctcgtgtagcggcagcactgattatggcgactgaagggggagcagtggtacatataggggttcccttcttgggggttgttggtctcccacttggccaggcaggccatacattggtgttgcgccggagtttggcttggccgtgagcttcttcttcatgctgacctgtgtacacttggtagcattttgttcctccttttcacctttgccgtgacattattgggagaccgttgtgttggtggcggtgtgggttcttttctttcagatctatagatgattgtgatct

SEQ ID NO: 132852 - DNA, 1738 bp, Zea mays
  Clone ID: MRT4577_52651C.1
cagagcggcaacatacatcgacatgttttgacaaattcctctcccccgactgagatcactgatccagtgcgcgtgccgccggcgccatggccgcgccaccgccgtcgccagaccaaacctactagcagcgcgtcgggggtgcacctgcggccgatctaggagacagggatttcttctcgtcctgtcctgtggattattacgggcctggatttgcttgggagtgagaggagagagcgagtaatagggtgaaggagtcttggggagaagatggctgcggaaatggtgaaggcggcgacgagcgacaagctcaaggagatggactgggcaaagaacatcgaaatctgcgagctcgtggcgcaggatccggggaatgcgaaggatgtgatcaagtctataaagaagtctgtagggagcaagaacaagagcactcaacactttgctgttatgctattggagatgcttctgaataattgcggagagcctgtccataggcaggttgttgataatagccttcttccaatacttgtgaagatagtgaagaaaaaaacggatttaccagttcgagaaaaaatatttcttctgttagatgccacgcaaacatcccttggtggagctaaagcaaagtttcctcagtactatgaggcatactatgagctggtgtctgctggtgtgcaattttcaaatcgcccaaatgttgttgtcacacgagcagaagtgccagtcccagaaacgagaacagaaccaaataatgtgagtttatcggcccgattgcatgaagctcaacaggaagtgcacactcagcctgctctggatacaagtatagtccagaaagcctgtagtgtcatggaagtattgagggatgtgcttaattctatggatcctagacaccctgagggagcaacggatgaatttgtgttggatcttgtcgagcaatgtacgtttcagaagcaacggatgatgcaccttgttatgacatcaagggatgaaatggtggtgtcacaagctatagagctaaacgaagagctacataaggttctcgtccggcatgatgtgttgctctcagttcatccgacaacaacagtagcttctaatatcaatgaggaagagaatgctgaaagtctctatcggagactgcggaaggggaaagctctgtcacaggactacacagatgactcggtaccgtcgttccggtccatgcccgaggacaagctgcggcggctgctgaccatccaatcacctcaccctgacaagagactgggcgcgctgaacatccacttgccggacggtgaggagccaaggcatgatcccgctccgctgatcccgccgccgcccgcaaagcacgccgagagggagaggttcttccaggagaagagcatcgacgagcatcgacggcggagtggccagcctgccgggtcacctgaggggcctgtcgcagcacagccgggacagcagcagctcgtgtagcggcagcactgattatggcgactgaagggggagcagtggtacatataggggttcccttcttgggggttgttggtctcccacttggccaggcaggccatacattggtgttgcgccggagtttggcttggccgtgagcttcttcttcatgctgacctgtgtacacttggtagcattttgttcctccttttcacctttgccgtgacattattgggagaccgttgtgttggtggcggtgtgggttcttttctttcagatctatagatgattgtgatct

SEQ ID NO: 132853 - DNA, 1779 bp, Zea mays
  Clone ID: MRT4577_52652C.1
tcgagggcacggccgggattctgtctaacagaaagccgtgaactatcttgcacggacatgggtccgttctatgcggaaggtgtacaacgattagtttcaagcaacatgggttatctgatgagaattgctgcagctgacaagaggcaagagctgaggatattttcacaagaagtcataagatttgggaatcgttgcaaagatcctcagtggcacaacctagatcgttatttctccaagctagagtcagaaattacaccccaaccacaattaaaagaaacggcgaaagcagatatgcagcaactgatggcccttgttcggcacactggtgatctctaccatgaattacacgcactggatagatttgagcaagattatcgccgaaagttggaggaagagaaaagatcagttacatctgaaaggggggacactgttcagatcatcagacaagagctgaagagccagaggaagcatgtacacaatttgaagaaaaagtctttttggtctaagcctcttgactctgtcatggagaagcttgtagatattgtgcacttcttacatgtcgagatccaagatacttttgggccttgtgttggagagtcgagcgaatcacaagagagccgtcaaactttggggtctgctggtctctctcttcactacgctaatatcatttctcagattgacaatattggttcccgaagctccgtcccccctcagagcaccagagatgcgctctatcaaagtctgcccccgaacgtcaagtctgctctgcgaacaaggctgataactccgacagagtctcaagaggttccgatcactagaaccaggagttcaatggagaagactttgcaatggattgtcccggttgccaataacacggccagggcacaccatggattcggatgggttggcgagtgggcgaacacagggaacgacccggcgcagaagcaggccgggcaacctggcgcgctgaagatcgagacgctgtaccacgcggacaaggagaaggccgacgcatgcgtactggacctggtggtgtggctccacatcctgatcagctacagcaggccggcaaacaggtcggcgagccgatcccccgtccgttccccgacccacgcggccccgcgggtggtggttgcagcagccacttccgggcgccccgctgggctgacccgagaagagcgcgagatgctgcaggacgcctacacccggcggcggtcccccggggccgggaagagcaagagccaggagctggcggcggcccgcggcaacagggtggcgctgagcaggaacgacaggctgagcaagagcggcccgtcgtcgcgggagcacggcggcagggtcttcccgctggcgacgggcaggtcggccgccgcctcgtcgcccgtcgccgtcggcttcgacatcgaccggatcaaggcgctggaggacgtggtggacagagtggacgcgcagaagcagacgcggctgtgaagctgtggctgtggctgtggtggtgggttccagagattcaggacggaggcagcagagcatgagcaggtggccatgggtttagggatgggaaacaaacaatggtctctctcgtgtggactgctagcagattagcatacataatgcctgcagaaacgctgcaggatatacataggcaagatttaccccctttttgttttgcctttctgtcgggcggtcagtatttgtacatgtaccgtgccaaatcatcaggctaaacaaactctgttgcttgtaagctataataactgtatatattaattcttattagat

SEQ ID NO: 132854 - DNA, 1252 bp, Zea mays
  Clone ID: MRT4577_52653C.1
agactgccccctctcgagccctcgcccgcgttcgcccccggctgggatcaccgcgcgtttgccggcgccatggccgtcgcagtcgccgtcgccagccaaaatccactagcagcgcgtaacctcctgccgatctaggttggtgcgcgctaccgcttccctccccttctgctccccgtcgacgccatctcctcagccccagattgcatctccctcttcttcctctggttctttcggcccgggcagaatgcctcttttttttcttcttcttcttactcgcaggctgcgggcttatgctcgaaggcgcgatctttacgctcggagtggcttcgtttcaggagacgggggatttcttctcgcccttttcctcgccttgcggctgcggaataccggggccggcctggatttgctcgagagtgagaggagggcgtaactgtgtgaaggaggcgcgggggacaatatggctgcggaaatggtgaaggcggcgacgagcgacaagctcaaggagatggattgggcaaagaacatcgaaatctgcgagctcgtggcgcaggatcctgggaaagcgaaggatgtgatcaagtctgtaaagaagtgtatagggagcaggagcaagaccactcaactctttgctgttatgctgttggagatgcttctgaataattgcggagagcctgtccataggcaggtcattgataatggccttcttccaatacttgtgaagatagtgaagaaaaagacggatttaccagttcgagaaaaaatatttcttctgttagatgcaacacaaacatcccttggtggagctaaagcaaggttccctcagtactatgaggcatactatgagttggtgtctgctggtgtgcaattttcaaatcggccaaatgttcttgtcacacgagcagaagtgccagtcgcagaaacgagaacagaaccaaataatgaaagtttatcgacccgattgactgaagctcaacaggaagtgcatactcagcctgttcctgatgcaagtatagtccagaaagcttctagtgtcatggaagtattgagggatgtgcttaattctatggatcctaggcaccctgagggagcaacggatgaatttgtgttggatcttgtcgagcaatgtacgtttcagaagcaacggataatgcaccttgttatgacatcaagggatgaaacgctggtatcacaagctatagagctaaatgaagagctacataaggttctcgtcaggcatgacgcgttgctttca

SEQ ID NO: 132855 - DNA, 430 bp, Zea mays
  Clone ID: MRT4577_52654C.1
gagccccagatgaagtattgtttcagcctttcaggtagtgtggtcagggcatgcacgaccatggttagttgttttattgtgagctttacctctttgcttatggcatggcttaaattttaaaatttactattgttatcaaccaaatccaacttagcaagctatcattcaatttactgcatttttaattgttgtatttcaactttatttttttctctcaaacgcgcagaagagctacacatcattatattaagagaggaaaaaaggtccaaagtggaccaaagtacaatgcctaatgggcagacccgaccagtttgaaaaccttaaaaatcaggaatagccaaagccctaataaaagccgcagcaagggccagaactatattcttaagattagccctattccaaccacttaacttattttaaaaccaacttt

SEQ ID NO: 132856 - DNA, 1075 bp, Zea mays
  Clone ID: MRT4577_52655C.1
ataacccttgtttgtgatgctatgaaccagggcacaccatggattcggatgggttggcgagtgggcgaacacagggtaagacactcatcagatcttttaagagcatcattgtattattactaagctcgacgtgtgggcgccaaaactgaagaactctccggccggtttgtgcaggaacgacccggcgcagaagcaggccgggcaacctggcgcgctgaagatcgagacgctgtaccacgcggacaaggagaaggccgacgcatgcgtactggacctggtggtgtggctccacatcctgatcagctacagcaggccggcaaacaggtcgccgagccgatcccccgtgcgttccccggcccacgcggccccgcgggtggtggcagcagcagcagcagcctcttccgggcgccccgctgggctcacccgagaagagcgcgagatgctgcaggacgcctacacccggcggcggtcccccggggccgggaagagcaagagccaggagctgtcgacggcggcggcggcccgcggcaacatggtggcgctgagcaggaacgacaggctgagcaagagcggcccgtcgtcgcgggagcacggcggcagggtcttcccgctggcgacgggcaggtcggccgccgcctcgtcgcccgtcgccgtcggcttcgacatcgaccggatcaaggcgctggaggacgtggtggacagagtggacgcgcagaagcagacgcggctgtgaagctgtggctgtgggttccagagaattcaggacggaggcagcagagagcaggtggccatgggttcaggaatggaatgggatgggaaacaaacaacggttctctctcgtgtggactgctagcagattagcatacataatgcctgcagaaacgctgcaggatggatgcatagaaagaacaagatactatacacataggcaagattccccccctccttttgttttgcctttctgtcgggcggtcagtatttgtacatgtaccgtgccaaatcatcaggctaaacaaactctgttgcttgtaagctgtaataactgtatatatttattattattatatacgtacat

SEQ ID NO: 132857 - DNA, 2231 bp, Zea mays
  Clone ID: MRT4577_52656C.1
cattgggtacctcgaggccggccgcgagttctactccattcccttcaagatcgtgaaactccagagagaccagcctcgagaccggcgggttgcttcgatcgaggccggccccacacttcacctcgccgataaggctgccgcgccctccctcactcccgcggtcctgctccctatggagtcggcggcgattgggtcacagtctccgctctccttcccctccagcctctgcaaaggaaaagtatcatctagtttatcaatatacaatgtgaagatcaagagcaactgtaggcttgaggtggtttgccatgggatgttagctacaagaaagtttatgcaaaggaaaaagaaagaagaagttttcaaggatggtgctgatgagaccgagcagatgaattggaggagaatgatgagagagatagagcaggagggatcagctgtacccattctgaagacccagcgaaacaggaaagagccacttccacgggatgttattcttgggactcttattcggttcaaacaattgaaaaagtggaatattgtcagtgagattcttgaatggctcagaacacagcattggtgggacttcagtgagatggacttcttgatgcttgtgaccgcttatggaaagttgggggattttagcagggcagaaagggtcctaaagtacatgaacaagaaaggttaccagcctagcgttatatcacagactggtctgatggaggcttatggaagagggaagcagtaccgtaaggctgaagcagtattccgtaggatgcaaacatcaggccctcaaccatcacctgtgacatatcaaattattttgaaatctttagttgagggtgacaaatataaggaagctgaagctatatttgaagaccttcttaatgaaaaaagaacttcttttaaaccagaccagaagatgtttcacatgatgatttatatgtacaagaaagctggtgactatgcccaggctcgtaagctatttgcacagatgtcggagagaggaattccactatctacagtcacttttaatagtttgatgtcatttgagacagaatacaaggaagtttcaaatatttatgatcagatgcaaagagctggtctgaaaccagatgttgtgagctattccctgctcatcaaagcttatgggaaagccagaagggaagaagaggcattggcggtttttgaagagatgcttgatgctggagtcaggccgacacgcaaatcatataacattttgcttgatgcatttgcaatatctggattagtagaggaggctaatacagttttcaaggcaatgagaagacacagggttgagcctgacctttgctcttatacaactatggtcttagcttatgtaaatgcatctgaaatgaatggagctgagaaattctttcgtaggattaaagaggatggtctgaagcccaacgttgtggtttatggcactctgatgaaaggctattcaaagttaaataatcttgagaaagttatgcgtgtgtatgagagaatgcggatccagggtgttgaacccaaccagactatatataccactatcatggacgcacaaggcaggaactcggattttggaaatgctgtcatttggttcaaagaaatggaagctcgtggatacccaccagaccagaaagcaaaaaatatcctactttcgcttgccaagacaccagaagaggaacaagaagcgaatgatttggtagggaatggtccagttcagctggaagttaaacctgatgatggagaggtggatggtgacgatgggcatgaagttatacaaactgatgtcgaaaatcaccgtttgctagacgacacacgagcaagaaatcatgtaaatggtaggatcagagctggtgatgactataattttgatgaggaggatgatgatgacgattacgaggaagaggaggatgaagagttcgatcttgtttctttcaaagataagagaaaactgaattttgcaagttgatgtcataaatctttgtgtatatttttatccaacaaacacatcatcgcatgatggcctttcctatacagagactaacttgaaatgttagtagagtttggctcgaaccttgaaagatgtttctgttagccttgtcttttgaaggaaagtaatttaaggcaaaaaaaaaaaaaaaaaaaaaaaaaaaaaaaaaaaaaaaaaccaaaaaaaaaaaaaaaaaaaaaaaaaaaaagtactctgcgttgttaccactgct

SEQ ID NO: 132858 - DNA, 261 bp, Zea mays
  Clone ID: MRT4577_52657C.1
tccctggtcgtccctctcttcctctgtctcttggtctgtctcttggggcatcatagtttcttccggtacacccaatccttccgcagggataccacatccaatataggtcaagttcaagatcctagctcagggttccaccatcatcatcaccaccaacacatcatcatctcgcatctcgtccagtctatgcttgatctatattggatgtggtatcactggagacggcttgggtctgggggatgcatgatcctgctcatctct

SEQ ID NO: 132859 - DNA, 371 bp, Zea mays
  Clone ID: MRT4577_52658C.1
gcaccggcaccccgtgaacgcggcggcgcacgtgctgctcacctggcccatcctcttcaccaacctcttgatcctccacttcctgccgctgccgctgcccgtctcccccgcgctggccctcgcgctcgcatacgctcgtcacgcagctcttctgctggacctggcagttcctcggccacggcctcttcgagaagaaggggccgagtgttagtgatcttcctgaggtgttcttgatggagccgttcctcatcttcctgcagatactgaacaaactgttcggctatgagccgtatcctgggttctgcaagaacgtggacaggaagatcgaagccgatctcatggcgagcgagagctcaagcagaggaaggaca

SEQ ID NO: 132860 - DNA, 645 bp, Zea mays
  Clone ID: MRT4577_52659C.1
tcgaggctggccgggacgctccagccaggagtccgctcctccaggcacaagcaaagcagccgctcgcggagcttcccggcgaccctcccgacagtgtgctctctgctagtggctccagctccttcgccctctccttcactccatgtgctcattaatctgaaattggttggggatttgagctgggatggatcctgcttgtgtttcagaaggggataattcaaagaacctgcataaaatagatgttaccgtcaactcttatttcgccgttcttgatggtaaaaaggtgtacaatcgaggcagaacaataaatttggttgtgaatccagaacactatacacttattgatttagagaaagatgtggattcatatttcaaatggggtagctgccaaaagccaattttctgggttgttgaaaagggtgacaaatggcaatgtaagttgacttcagatgctcagcttagtgacctggtaagttcattcgatctggtgaagttatttatgacaatgggaagatgtaaggagggagaggagacgctgcatgttgtgaccgatgtggtgggtaaggagatgctagctgcagcatatccggtgggcaaggagatggatgtagacaatattgtctatgaagagatgcatgtagatga

SEQ ID NO: 132861 - DNA, 375 bp, Zea mays
  unsure (1)..(375): unsure at all n locations
  Clone ID: MRT4577_5265C.1
cattgggtacctcgaggccggccgggtataaaattccnnaaaaaaaaaaaaaaaaaaaaaaaaaaaaaaatcccgagtaagcgcagtgggaaagcgtgggtgggnngcccgcgtcccacacaactttccatttcctcataccgccctnctcgagctcccagctttttggttcccctttatagtggaggggtataattggcggccgctttgggcgtaaatcatgggtccataagcttggtttcctgggtgtagaaattggtatatcccgcttcacatattcccaccaccaactaatacagagccggaaagctattaaagtgggtaaagccctgggggtggccataagtgaggtgagcttaacttcacatttatatg

SEQ ID NO: 132862 - DNA, 954 bp, Zea mays
  Clone ID: MRT4577_52660C.1
cctcggggccctcgggggcgattgggaccctcgaggccggccggacggcactaccccttcagccccagatttctccaagcctccgggacgaggcgcatccgtccatgggggccaaggcggcacaccggcgtggggtgctggacctggaggcgcagttcgccttcttccggtcgcagcaccggcaccccgtgaacgcggcggcgcacgtgctgctcacctggcccatcctcttcaccaacctcttgatcctccacttcctgccgctgccgctgcccgtctcccccgcgctggccctcgcgctcgcatacgccgccgcctacctcgctgtcgaccgcagagccggcgcagtcgcggggctgctcttcctcgccgcatgggccgccagccgcgccctcgcggcccgcctcggcttcgctctctcctggaagcttgtcctcgtcacgcagctcttctgctggacctggcagttcctcggccacggcctcttcgagaagaaggggccgagtgttagtgatcttcctgaggtgttcttgatggagccgttcctcatcttcctgcaggtaaccacaggcacagctgacaaacatatactgaacaaactgttcggctatgagccgtatcctgggttctgcaagaacgtggacaggaagatcgaagccgatctcagggcgagcgagagctcaagcagaggaaagactacctgattgattgggaattcgggagtgatcatccggagcggtgcgcgaaattgtaccatctatacatgtagcatattgcctgccatttgtgttgttttattcaggtacatgatgtctgcgcaccattatatagtgtagtaaacatcagtcatgtgtgttgaggtcagcttgaatcccgggaggaaggtagagagcggtaataatctcctcgtttactgccctataatttgctggtcaaagataatctatcttgttt

SEQ ID NO: 132863 - DNA, 291 bp, Zea mays
  Clone ID: MRT4577_52661C.1
ggacattacgacaacaacacaatccaccggggggcataacagttttccaatttcgagaagcaataatgtagtgtagacaaccatccataacgacgtttttaataacccagtggcaaaggggggcgggcataaccagaaagtcttacaacatcaggtgttgcaaaccacaacggggacaagagcagcacacaagcctgacgatgaccgcataaggatacttttagtactcataaccatcataaccttcctcacccttataaaacttagaaccaacctccttgtagtcctttt

SEQ ID NO: 132864 - DNA, 730 bp, Zea mays
  Clone ID: MRT4577_52662C.1
gaatcaaaaaggggcgaaccgctacctcctttacacactttcgtggctccgccgcagcacgaaaccctagcttctgcatctccgccccctccacctcccctccgcgaagcaggcgagatgtcgtcgggcggcggtggggggcagcagttccgctacacgcagacgccgtccaaggtgctgcacctgcggaaccttccgtgggagtgcgcggaagaggagctcgttgagctctgcaagcccttcggccgcatcgtcaacacaaagagcggcgtcggcgccaaccgcaaccaggcctttgtcgagttcactgacgttaatcaggcaatctcgatggtttcttatttcgcatcatcttcagaaccagcacaaatacgaggcaagactgtttatataattaacaacaagagtcctggagagactgctggaaatgtcttgcttgttactatagagggtgttcaatctagtgatgtcaccattgatgtgatccatatggtgagttctaaaatcctttccttttcctgtcttctaaagtacttagatggttgtgttagtatggtaatgacaaacctcaagtatgcctgttattttcttgattgccgttgactgaaggaatccaagggagtctacctgacccgatccttgtaaatcaaagattttacatagattttaattttcgtagtaacatattctgcatgaatcagcaggcccatgataactggagaaaatatca

SEQ ID NO: 132865 - DNA, 674 bp, Zea mays
  unsure (1)..(674): unsure at all n locations
  Clone ID: MRT4577_52663C.1
agccggccgggccgggttacgattacacattgatcagacgcgtgtacccatgacttaccgaacgcgcaacgccactggatgaaaagtacgccatcgtttatcagcgtcgatcatgattcatacgtctcggggactgcatcacttaggatactacaagggccaaaactgaaccagagacttataccactattctctcgtcgcagatccgagagtccacgaacactcgacgatagatgatcagcgtaggtacgctgtgaagcgcatgacttacatctacaacgccagtacctacttagcaatgagacccactactgagcgcatcctgctttaaggtcacccatccacactgaaactcaattgtcggccgcgccatatgcaaggcacgacctcccgccagatgccacgaaaagcaaggacaaagtcgccatgtaccccaacatcatctaatggtttgctgtagtaaagatgaactacaaatgtgcatgagtctatttctcacttttctctgaacttanaatgccttgcgctgacaacttaaattgatctagtgctcaacctgagaaagctgtgacacaatttggtgtcaaacggatgaactattgccttaatggtatgccactcgctgaccgattttccaaaaaaggaccctatggccctcgatgtccaaatgatgc

SEQ ID NO: 132866 - DNA, 552 bp, Zea mays
  Clone ID: MRT4577_52664C.1
acagaacgatctacatctccctagcaatctctagcacgagatcctcgtgcgaaggaaagcgctatcccccttcatactgtcacgatggcccgaacgaaagacatggcgagtaatccctatggtgggattgcgccaaggaaatagctggtcatcatggtggagcgtaagtctgccccgtcgaccggaggagtgaagaagacacaccgtttccgaccacgggaccgtcgtgctccgggagatccgcatagttaccagaatagcaaggagctgctgatcagcatgctgccgttcctgagcctggtgcgtgagatcgaccaggacttcatagaccgacctccgcttccagagttccgccgtcagctcgatgcatgaggagtccgaggcctagctcatgagtgtcttcaaggacaccatgctctgcaccattcaagctgaagagcgtgaccatcatgaccaaggacatctatattcgaccgccgtattcgtgcggagaggtgctaagcgtcatgccgtaggagaggtaagaaataaagttcggatctgtcatcactg

SEQ ID NO: 132867 - DNA, 859 bp, Zea mays
  unsure (1)..(859): unsure at all n locations
  Clone ID: MRT4577_52665C.1
cagaacgaacgccagaaggcccagaaccgctacctcctccatacacttccgtggctccgccgcagcacgaaaccctaccttctgcatctccgccccctccacctccccctcccccgcccctccgcgaagcaggcgagatgtcgtcgggcggcggtggggggcagcagttccgctacacgcagacgccgtccaaggtgctgcacctgcggaaccttccgtgggagtgcgcggaagaggagctcgttgagctctgcaagcccttcggccgcatcatcaacacaaagagcggcgtcggcgccaaccgcaaccaggccttcgtcgagttcactgacgttaatcaggcaatctcgatggtttcttactttgcatcatcttcagaaccagcacaaatacgaggcaagactgtttacattcagtattcaaacaggcaagaaataattaacaacaagagtcctggagagactgctggaaatgtcttgcttgttactatagagggtgttcaagctagtgacgtcaccattgatgtgatccatatggttttctcggcctttgggtatgttcataaaatagccacctttgaaaaggctgcaggttttcaggcattgatccagtacactgatgcagatactgcttcagctgctagagaagccttagatggaaggagcatcccaagttacttgcttccagagcacgtgacatcctgctgcctgcggatttctttttctgcacataaggatttaaacatcaagtttcagtcaaaccgcagcagggattataataatccatatncttcaattaattattctgccatggatggtacattgcagcctgctgttggagctgacggaagggaagtgga

SEQ ID NO: 132868 - DNA, 1387 bp, Zea mays
  Clone ID: MRT4577_52666C.1
gtgattgggattgtgaagtggactgcacagcacacacaactcgtcctcggtcctccgtacccttccgcgctccgccccagcacgaaacgccgaaaccctaccctttggcttctccgtcctcgcccccgcccccgcccccgcctccgcccatccgcgcaccagccgaatgtcgtcgggaggcggtggggggcagcagttccgctacacgcagacgccgtccaaggtgctgcacctgcggaaccttccgtgggagtgcgcggaagaggagctcgtcgagctctgcaagcctttcggccgcatcgtcaacaccaagagcggcgtcggcgccaaccacaaccaggcctttgtcgagttcactgacgttaatcaggcaatctcgatggtttcttatttcgcatcatcttcagaaccagcacaaatacgaggcaagactgtttatattcagtattcaaataggcaagaaataattaacaacaagagtcctggagagactgctggaaatgtcttgcttgttaccatagagggtgttcaatctagtgatgtcaccattgatgtgatccatatggttttctcggcttttgggtatgttcataaaatagccacctttgaaaaggctgcaggttttcaggcattgatccagtacactgatgcagctactgcttcagcagctagagaagccttagatggaaggagcatcccaagatacttgcttccggagcatgtaatatcctgctgcctgcggatttctttttctgcacataaggatttgaacatcaagtttcagtcaaaccgcagcagggattataataatccgtatcttccaatcaattcctctgctatagatagtacattgcagcctgctgttggagctgacggaaggaaagtggagggtcaaggcaatgttcttcttgcatcaattgagaatatgcaatatgctgtttctgaagacgtgcttcatactgtgttctcatcatttggtacagtccagaaaattgctatttttgagaagaatgggggaactacaagctttgattcaataccctgatgtaaatacagccgctgtatcgaaggaagcattggaagggcattgcatctacgatggcggctactgtaagcttcacctgtcatactcccgtcatactgatctgaatgtggaggcacatggtgacaagagcagagattatacaatttcagctggcgtaatccaaggggcgccacaaccacctggtatacaagccacgacccctgggtggcaggcaaccttcaagcagcagggccataatgcccacccggtgcccctcctcaaatcccagtgccaatgtacaagtgccgaactggactcctggaattcaggcgattccccagccccaggaacatatccagggcc

SEQ ID NO: 132869 - DNA, 2866 bp, Zea mays
  Clone ID: MRT4577_52667C.1
atcaaataatttgtgcgctgtcgcaacgcaggggcacaatactataaacaaattaattctgaaaaaagaccttttaagcaaaacacgagagagccgagtacttgagtgcctacatgggcagcgcactcgctgtactcaggtactacgagatataaaattaactgaaggcaggtagaacacatgatccatcctgtgtgtgcttcctgcaggaacggagccaacgtgaaggggtacttcgtctggtcgttcctggacgtgtttgagctgctggcgggctactactcgcgatacagcctctaccatgtcgatttctaggacccggagctaccgaggatgccaaaactctctgcgctgtgttttcatgcgctgctacgagcatagtacaattcacgttttttccctgcgccgcgttcgcgggggcaccacggtcatgcacgcatgagcacgggagagacaaatgttttcttgtatagatgctcgatcgaattttcctccgttctgtatatcgctaaaaggattagattagtgtatggttgtcgacacatttgtctatcattacaaaattctaaattgactctttaaaataatgtctcgtattgataatgtttaacacacggatttacatatcatagtgatatttgtcgttccgtttatatatttcataaaatattaaacctctgtcgcaacgcatgggcactcacctagtagttaattaattgacatcagtgattataatcaaacggtttaatatcgagcgcggacagcgcgcggcacgcgaaacagcacgtgcgacatacacgaactccgcgtgaacagcgcgacgccgcgcacaacacgcgtgaacaacgtgcgcgacacacgtgaaggagcacacggacagcgcgcacgacaacacgtgaccatgtgcaactgacgcgtgacaacgcgcgcgaacagcatgcgacaaaacgcgaaccatacgcgtggcacgaacgaatgacgacgtacacgcagcacgcgaatgacacgcgaaacagcattgtcaccgcatgctgaacagcccaagcgacaggcaggcaaaaactaatcagatgtcgtgttcaaactaaacaagcaagtatcaaataaataaaaaaatatttaagttaatattaaccatgttaatgtttacttataaaggcgtaagttaacaaatatatatttaatactaatctaataagcattagtcgagcaaccattaaataaattaattagaatatgtgaccggataaattaatgttattaacatgaatgattataagcaaaaacaatttattatcatgagcagacatcgcgcgacccacgcgatcgacatgcgagacagcacgcgcgacacgcgcgaacgatacgcgaaatagcacgcgcgatacgcgcgaacgatacgcgaaacagcacgcgtgacacgcgcgaaacagacgtgacgacgatgagagcaacacgtgcgaacggcgcgcgtgaacaacgcgcgactcacgcgaatgacgcacgacgacacgcgatactgtgcgaaacagcgcgcggacgacatgcgaaccaacacgcgtgatagcgcacgatacgcgcgagccaacgcgactacacgcgcgaacagcacgatgacgcgcaaatcacgcgaacaacaaacaaataattaatgaaaagtatttaagctagtaataatcaagctaattaacatttatatttataaaagcacaagttaaaattatagactcgttctaatcaaattgttattttaataaccctcgaacaaaccaacaattaattaatcaactaaaagttgtgggcaacgtcgttacaattctaacgcaaccggaacaaaacaaaacatatttataacgcaagagctaacatgtaattagcgattcacggatttaaagtgatgtggcggattcctattggttgcaaacaagtcacacactaggccacacaaaacttagccacggagaattggaaagaggtgggatcgagcgtggcatttattcctcctctctgcatatgcccacgaacacaggaacataggttgccatggggactgccggggctagttcggcctgatcttcacgctcggagggacgggggcttgctacgcccgccggctggcaggagcaccacgcgctggaggggacggtcagcaagggctgcttgggctatgcgcgggcgccctgctgcctgtggccaggggcgagctcgtaggccgtgaggagcgaccatggggctggggcgggggcgaggctggggccaagcgcgtggggcctgcacgccagggcgccgggcacgctgtgcgctgcgggccgcgacgacagcaggccaccggccgcgcacagggacagggagcaggggtgaactggctactgccgagccgacccaggcgggctcgccggagcagaaacgcaggggctcggcaccgccggctatccacgcggtgtgcaggggcctgcagctgcgctgcaggggagggcatccatggccatgagggatggggaggcacacgcgaggggcttcgccgggaggagaggaactgttcggcaggggcagagaaggctgctcgccgaggaagaagaccgacgtccagcgatggttggctcacggaagggaacgagcggtcgcgccgttggagaaggtagccaggggcgcgcctgggctaggggatttcatcgaggcatgggggtgagcaggggggtgagccgtaggaccaagatcggcgagggggggctggtcgaccacgccaggccgccgtgcaggcaccatggccgctggtcggccgagcatagaggggaggggatgggaacgcgtggggagggagggaggagaggactcacctaaaaaccgccatgtgcagggacgtctg

SEQ ID NO: 132870 - DNA, 1149 bp, Zea mays
  Clone ID: MRT4577_52668C.1
gtggatacctcgagctcggccgggcagcgacccaggcgtcagcggcgtgatgcagttcctccgaggcagcggcggcgggggcggtgggttcccggtggtggcgtgggaggtgttgcggcggcacttctctaagaagcggtccgtggacgtgaggcggatcaaccccaaggtgcccaaggaggaggccgtcgccatttccggccgactcctccagatcctctccgaccatgggcccctcaccgtcgccaacacctggaaccacgccaaggatgctggcatcgctggcctgaacagcaagacgcacatgaagatcctgctgaaatggatgacagggagaaatgtcgtgaagctgacctgcgtgcacgtgggcaacgcgaagaagttcctctactccccgtccactgaaagcagcagcagcagcgccggcgcatcaccgtcatccacatcggcctcgcagtgacggtcagtcgctgttaagccttggtgtggttcttgatgttgctttgtggatcgatggaggttgcctctggtcattcggatcccatgtttaaccttgatgacgaacattggaaaaagcattttgttttatggactggaatagtctgcaaacatcacgatagcaatattgttctgctgctcctcagctgaggatgctgccctgtcctgaactcctgattttgcttttgatctactatgtgatgatttgctcttccttaaaaaaaaaaaagattggatttgattctcacttttttcccctctggaatgtgggaacgctgcatcgcattaagcaatggagtgagttgtggtcgtgccttgctactgcttaattcatctatcagagaaatgtctctgtctgtcagatgcacttgacagaaatcttcaagctggaaattcatacggcacctgcagccgccgtaattagatatgtcggttctgtttgtaaaatttacttgtgaactttgaaagatgaaacgggaaattctgatctttttccgtacaagcagccatcaggcgtgcaaccgtacaagcaggagctactgccatcatctatgactgtcatttgtctgtaataaaaataaagataatctaatttctgtttggaattgaaaaaaaaaaaaaaagaaaaaaaaaaaaaaaaaacccgcggcc

SEQ ID NO: 132871 - DNA, 124 bp, Zea mays
  Clone ID: MRT4577_52669C.1
tcaaatcgtacatcatattcaaaacacgacttcatgtttgtgcttatcgcacccccccctgttctgggggtcgtttatagcgcaagctgcggtacaagctgccacttactctcccatactctac

SEQ ID NO: 132872 - DNA, 249 bp, Zea mays
  Clone ID: MRT4577_5266C.1
ctccgcctccttggattttgctctttcggttatttgagtcgcgtgctgggaggccccgatcgaaaaaacacgacccccccccacaaaaaagggaggggcgccccccctcccagcaaaagagacgggtttctccccgcgcccggcggcgggaagggcagcgccccacccgcagggggggcagaaaacacccactaggcaaggaagcccgccccccaccgtatagccagagggcccccccgaagcggacga

SEQ ID NO: 132873 - DNA, 591 bp, Zea mays
  Clone ID: MRT4577_52670C.1
ggtggacgagtacttcatggccgaccagctgatctttagtgaccctcagggcttccaggatcctgtctgtccggactagagaaccgtgatcttcatgcatgctgctgacctggatgcgcctcaggcacttgtgggaggagcagttcaagtcccaactctcagtggcgacgattatacacagggcaagccctgtgctcaacctgaacaaaatgaagctctgagaggaaaagggagcaatacaatacactcaccgcactacagatatcaatacgtccattatactgtaaacaccctccaaaattagacttataaacgacctgagctcatcgatgaactcgcgcatgacgagcaaggacaacacaaaaacgacacctaggcacctgctggagcactatggggatatacctgttcaggagccatagctgtgctcttttaactggtattgataccgtgacatagacctgcctcaaattcgcatcgataaattatatatagatagggctttggtatacattgtgtggctgcaacatatggataatacgtctaaaactgagattctgtcttaaaaaacaaaagctggcggtcggtcta

SEQ ID NO: 132874 - DNA, 282 bp, Zea mays
  Clone ID: MRT4577_52671C.1
cccttttctacacgctttattaacctggggggattacacaggggtatttgggggcaacaccgagctagccccccaaggagaaatgacagtgccagaaggaatagcccccacagatagaatagctactcattatagtcagcgggttactgaacatctctcttaccagagggactgtactaaaaagcccgtctcgttgatccgatacaaccatgcctacgccaagcaaacaacctctgtctactatattctcctgaaaaacctcgttagcaacttgcaacaagc

SEQ ID NO: 132875 - DNA, 176 bp, Zea mays
  Clone ID: MRT4577_52672C.1
gagaccagcacgcacatagaacgttttaatctactatcacaacagcagcacagtggggccaacatatgtttactccgtacgctgcttgctatttgtacatgcgtcgataacgctacaatcagctctcaacggtcatatgctactatcgctaaccttcttcatccatacatttgatc

SEQ ID NO: 132876 - DNA, 539 bp, Zea mays
  Clone ID: MRT4577_52673C.1
atgattatgggaataacgccaaaggatataatatctgcggacacacttgattgtttagatatgagtgggcatcacgagcatcaatgagcaccatggtcatttgatgttacaaaccagacggttgatctttgtatttataggatcggaatacttatatataggtcatgtaggggaacagtattcccggattacaccgatcctaaggtgaaggggattcaacgcccaccatgtttatgctcatttgctaaatggtgaacaaggcacctagattttgcgtgcaccaaagttaattttactaaagtgcagaccagggctaggtttacccattcctggagatttactttgcagctgtcttgtccttggtagtttgattggcaggaccttcttgacaatcttttgctcctcgaccaataaagcacgaatgattttctctataacgagaattacaaagagtactccaccatatggacggttcacagtcctgcggctactaggcaacctgtaccttttgcactcagcaggcctcacgtgagggatcc

SEQ ID NO: 132877 - DNA, 246 bp, Zea mays
  unsure (1)..(246): unsure at all n locations
  Clone ID: MRT4577_52674C.1
aagcgtccgggcgggggggttcttttgaaaaacccggaagcgccacaccaacaactccattattggagtgtgtcatctttttagaatacgtatctgcaagtagggtgacatccatccgtgggtgacgatatgtggcgctgcctcgatttgccttattcctgcccttctagggcgggggggggggcggcgcccnncgacccactctacagggcggaattcttgcagaggtggcgtgacatctggcgt

SEQ ID NO: 132878 - DNA, 1022 bp, Zea mays
  Clone ID: MRT4577_52675C.1
cttctttcctctccctgcgtctcctcccacctcccagctcccactcgccctcaccacgcacgccatgtgcgctaggacgccgccatccctgcgccctatgctcgcctcaacccggcctcctacccaccgtcccagcgcctcgccgtggcaggagacgtcgccaggagcacttgcccctgctcctccctccacggatgcaccactcacccgtccatgcgctcctccagccgacagcctcgttctcgttatcaagcacgccgtcgtcgccccagggcacctccaccagtcaccggacccgcctcctcatcgcacccccacgcctggtggcgcgcgacctcgcctcggccagaccgctacctcctctagtgtccttcgtagcacgtgcttgctccctgcttcttgtccacgaccacaccgtcgccctcttccagcctcggctcccgcgctgtcacgcttctcctccgtcgcgtcgggctctcgccatcccggttacctctccaccgcacgctccagacagctgcagtctccgcagcgccacctagacattgctcttctcgccaatggcattacgtagcatcgccccagcctccagcccgcgccgtagcgcgttgcccctcgtctccactgtcaggcttcacatcgtcgtgccctactgcgccaacgacctcgccccaccgtctccttgctgtcaggctcgtcgtcgtaggcgtcggcacgacgtcgtttgcccccgatgagaccccactgtcctcgctcccttgcgctcttcatgctcgatagaatgaccgaaccggtaactgtgttgttgctcgtagcccgtcatcgatgccatgcctcatgctccgcctatgcgatgaagtgccagccgagtggacaacatgcacgactagagttggattcggctaggttgttcagtgtgtggtttactatccctgtgatttggttgatgtcgtgtatatatgtctggatcgaagattttgtagagaaggaagttaagtgggaaagactcaaaatgtttcctc

SEQ ID NO: 132879 - DNA, 280 bp, Zea mays
  Clone ID: MRT4577_52676C.1
accaatccctgccacccggggctggatcttaatggatcgggggagcaagggcacatttggcacttacaatggcccgtcgcgttttaagtcctctgcaaaggattcaacacgccgccccttgggaagggagctcttaggcggcccgccgcggcgcgtctgccgcgcgggctgtgccaatggcacgggccctttgggggcgaacaccctatcatgggtctgggcgggcggcgagcacaggcgcccgctgctagcttggattctgacttataggagttcagtc

SEQ ID NO: 132880 - DNA, 293 bp, Zea mays
  Clone ID: MRT4577_52677C.1
atctggctcgcgtctcttttcttcctctggttcggcgggccccggccccaaactagccaagggcggggagatccacatccagcgcaccggacccggacccgcccaacgactgcggccactgtttacttactagccagcggcggcgaaatgacagatctacatagcaccggacccggacccgaccgtcccggtggaacaggatgttcggacttcaggcgagcggcgcggcggcctcgtgggtggtggggcggatgggcaccgacgcgcatctctacgacgaccgcgacgacgcc

SEQ ID NO: 132881 - DNA, 221 bp, Zea mays
  Clone ID: MRT4577_52678C.1
cctcttttttttttttttttttatgatctctccgacccgtgactattgttttagcaaagcatgctccatccatttaacccctttttcttgggcgcgccacattgcccaaggtcgaatgcacgcacagtaccttttccatccacacacaaaccataccttttttttcatatgtttgccatccacacacaaacccacacgcacgcaggaaccatatatctatc

SEQ ID NO: 132882 - DNA, 133 bp, Zea mays
  Clone ID: MRT4577_52679C.1
gtgactcggatttgctcacctcaccctcactgcctctgcgtgcgtgggtcactgccgatctgccgtagccggtattccccctcccacattaaataaactcacctctatctgttctccgttctaactattcctc

SEQ ID NO: 132883 - DNA, 306 bp, Zea mays
  unsure (1)..(306): unsure at all n locations
  Clone ID: MRT4577_5267C.1
tttntttttttnnnnnnnnnnttttttttttttttgtttttttttttttttttttttttttttttctttttttttttttaaacggggccccaaaagttctgtttttcccttgggcaatttaaaacacgtttcaaactccaattttaaaaattgaaggctcaaccaagcgttttcctttggggggggaactcaaaaccgggaaacaacaaagaacttgtttttttttcccgacaaacaacctttgggaagggggttggaaaattggatacctcatttttgccccccggggtcccaaaaactgggggg

SEQ ID NO: 132884 - DNA, 677 bp, Zea mays
  Clone ID: MRT4577_52680C.1
cggacgcgtgggcgcagcagggtgcttggaagaagtttctggttaggagaatccggttgaggttgccatttcccaacttcttccagcggttcggctcggaggcgaactgagatgtcctgttcgtgatcggtttgttctggcagctgcagacagcttgtcgattccttgcttgaggagcagccatggacagaagaaaccgaccagctccgttggttgacagctctgcatgcttttgccgagtggacagatcatccgccgcggcggcggcgaggcgaatcccagtgtcgaaggcgtgcgtgcaaccgagcctcagggcgtccatccacccgctgaagccacggccgggcgcagagcggagccgcggaggggcgtgcccgctgctcccaggccttccggacgacctcgccattgcctgtctcatccgggtgcccagagccgaccactggaagctgaggctggtgtgccggaagtggtgccgcctgctcgccggcaactacttctacggcctccgccggcggctcgggctcgcggagcagtggctgtacgccgtgaagcgcgacggcagggacgggcgcgtgtcgtgggacgtgctcgacccgtcgcgcggcgagtggcgcgcgctgccgcccgtgccgggcgagtacgcggaggccccgacggttcgctgcgccgtgctc

SEQ ID NO: 132885 - DNA, 575 bp, Zea mays
  Clone ID: MRT4577_52681C.1
atgttcttctcacccagatacacctgtttcgtgggtatcggaggctatagatactgtgccagatcgggggctgggagaggaagctggctgcttacgacggactgggatgggcctcctcgacaagctgtgtggacgacaccgccgctggtccgagcccggacaccgtcctcagacgcctccataagcagcccgcgcgccccgtccacgataacatcagggatccgctcggggacgctgaagcggtcggggcgccctcgccggtttcggatagcgagcagacacctgctgaaggtgacgcgcaccatcatgatcaagcgccccgcgctgtacctgccttcgacaaggagcgcggcaagcacgccgccggcctctccacttgggactacccctcccatctcgtcgtttgccggcgatggcggaccattcagaaggaactcatcatgcgacgcatatgacaaggaaacccctccagggacgaccagccaccctcctcccttcgaagagtgaaccgggctgcaccctcagacttgttttgctacctgacaagcatctctttccctataataaggcatagg

SEQ ID NO: 132886 - DNA, 172 bp, Zea mays
  Clone ID: MRT4577_52682C.1
aggagcagctctaatctatgatcagatggcacaagtcacaacatagctgggtctggttatcgataccaaagaccgcctacaaagccaaagatccacagcattgtagataactcagttatcaaaaccctgcgacaggcatatatgtcgataccaactcgggcaataatgctgc

SEQ ID NO: 132887 - DNA, 364 bp, Zea mays
  unsure (1)..(364): unsure at all n locations
  Clone ID: MRT4577_52683C.1
cggctcgaagccattctagaccggtgatgcccaacatgacctctctgcatggtctagaatggctggtgatgcccaacatgacctctctgcatggtcggattggctatgcttgtacagattaaatacattgttaaaaatagtaacttccctatatgtcagtttcccagtagattttctgaaccgcagagagtgtatgccatcgagaagaaaataaacatggagcaagaagtaatccagaaaaagttagaagccatctcactagcctcagctccattatgaccgtcaaatattgccaccactcccacatcaacctccttaattctcatgttctctccagcanattcacagtgttacgattgacacc

SEQ ID NO: 132888 - DNA, 466 bp, Zea mays
  Clone ID: MRT4577_52684C.1
atttaggtgacactatagaagagctatgacgtcgcatgcacgcgtacgtaagctcggaattcggctcgagcgctggagctttataccacgtccgcacgcagggtggctacctcgctgtggtagcctgccgtcgctgatcaccaccatgctgcaagcataggagtccagagctactcgctacctgcagcactgtggcccaatgcacgcaatggcgcaactaaactaaaaaccatgtgccccgttgacggagctcatggacgaaaatgccgcgaccgtctgctgatcgatcacacagctgtacagactgatcctaaacgtgaccgcaatatcactgactgctgacatcctaatacttgtgactttaagcccgaggcttgggaccgacggcttggcccgtcaagatagggataatagcgtctaactctctagtaccactaagttgctgcccgatgaacatcgttttttg

SEQ ID NO: 132889 - DNA, 1482 bp, Zea mays
  Clone ID: MRT4577_52685C.1
ccggccggggacggacgcccaacgttagcattctcgccgagtcttcccacgacgtatacctccgacttcacgatggcggacactcagaaggatgtgctgttcaagacagtacagatcgatgctttggttgcgattaagattgccactgctagcggcaagtcgttcccttcgattgcgactggcagcatagtcggtatggagaagaacaatgtcttggagatcacaaactctttccctttccccgacgtctctcccgcacaggccgatggacagaatgagaccgccgcaaaccttgccgcagccgcccctcgcgcgaagcagaacattgcctacagcaacgagatgatcaagtttcttcgtgaagtcaatgtggatgcgaacaacgtgggctggtataccagcacaagcatgggcaactttgtcaacctgaacacaatcgagaaccaatacttctaccagagccagccaaacgagagaactgttgccttggtctacgatgtgagcaggagctcgcaaggtaccctgaatctgcgcgcatataggctctcgccctcgtttgttacggcatacaaggagggcaagttcacgactgagagtctacaaaagagcggccttcgctaccacgacatcctagtcgagcttccagttaccatccacaactcacacctcctcacctctcttctccaccaactgccatcgagcgcaccaaaggaggagctcaagttcccacccaacctagctgctctgcagcaagatcccaacatccctcagccacctctgtttcccaactacgactcgcttgacctctcaatcgacccgttcctggagaagacgtgcgatctactcctcgaaagcattgagaatcaccatactgagatcaacaactaccaatactaccagcgatctctcgctcgtgagcaggccaagattaccgcctggcaacaaaagcgcaaagcagagaatgctgcgcgcactgcctctaagcagtcactcctcccagaagacgagtggcagaggctattcaagctgccccaagagccaagcagactagagacgctcctcaactcgaggcaggtggagcagtactcaaggcaggtagatggcttcacggcgggtgtcacgtccaagatgtttgctgtcaagagcaatttgctgcctggagagtaaatggaggtgggtttggttgtgtttatgattatgcttctcttcgtcacggcatgggcatggcgttgcgggttagcggttcctttgatgggactgggtttgatcttttagacgagaggaaaagggcggatatgcgaagagacgtttgtagtgtgtgcttgagtatcgagatgacccaaagttggcggtgctgccaaagcgttgaagctcaagcgctgcccagtcaggcggctgaatgctgttctaggcgtgcagctggacaaaaagccacatacagagctgaatcagacaaagaagtaaacaagatagtgtcgcggc

SEQ ID NO: 132890 - DNA, 605 bp, Zea mays
  Clone ID: MRT4577_52686C.1
ctcatacgccgaacgttcaattaactcaaaatcatcaattgtttcaactaatctaccgaagtactcggctgagaggaaagaagacggacgaatccgagccaaagccgtacaagcgcgagataccttcgggacagcctaggcggatccatgctttccaacgaagcacgcccatccaacctaggcgagacaagggttcacatttcgttcatcacccttggccggctttcgaacagccggactcccatcaaaagatggttgccaagaacatcttcgttacggtttgctaattctcggaataacatcaacaaaactaggaaggtttaaaaaacccacggtggggggggggggtgctcttaattttttttacccgtctctgttttgttttttgctctttggtttcctttgctcattttgttcctcttctcttttttgtttctactgttgtatgttcttttgttatttttgtttttcaatgattttctgttttttcttttttgtcttattattgttttttttttttttttctctccttccttgattttcttttttctttccttttatttttgttttacttctttttttcttgttttttcttttttttcttt

SEQ ID NO: 132891 - DNA, 865 bp, Zea mays
  Clone ID: MRT4577_52687C.1
cattgggtacctggtacccggccgggaggccccgtaaaaaaagatagctgcttgcctgctccggagtttcttccgctgttctctctcgcgcaaatttttatgctgggcaaagacggtgttcttcagcttcgaccccccaaaagggcgaagctttcgcgtccttccccacacacacacaattacacaaatacctgggagccgtagcttttgtttggtgcggccacgaggtggaagaaatggaaagggaagggaagtgatgggggagtgcgaggacggcaaggagtacaggtgctgggaggagctgctgccggacgcgctggggctcatcttccgcaacctgccgctccaggaggtgctcaccgtcctgccgcgggtgtgcaagtcctgggggcgggtggtcgccggcccctactgctggcaggagatcgacatcgaggagtggagccagcagcaaagcaagccggagcagatcggccgcatggtggagctgctcgtcggccgcagcggcggctcgtgccgccggatcagcgtctccgggctgccctgcgatccgctcttctcgttcatcgcagacaatgcgcgagctcttgggaccttggagatccccaggagtgagatcagcgactccgtagtggaagccgtggcgccgcggctatcgaacgtgacgttcctagacatcagcagctgcacgaagatcggagcccgcgcgctggaggcgttcggcaggcactgcaggtccctggtggggctccggcgggtgatgcacccgatcgacctggcggacaaggtgtgccagcacgacgaggcgcacgccatcgcgcgcagcatgccgaagctgcggcacctggagatggggtacatgctg

SEQ ID NO: 132892 - DNA, 261 bp, Zea mays
  Clone ID: MRT4577_52688C.1
aaacttatgatttttttgttttacactacaacactacaggggggaaagttaaaagatttttaaaatatggaaagccaaacacaatttagacactttaaatccagcctaaactcccaaacaaacggacataaaaaccccaaaaaattgtaaagggagtttttacccaaataagacaacaccaacttattgggttgtaaacaaccacaccaaacacggaaggggaaaaaaactctaagcctttaagagggggaaagcccttcc

SEQ ID NO: 132893 - DNA, 320 bp, Zea mays
  Clone ID: MRT4577_52689C.1
acattattgttcatttgttcacccatttatctgtggcgggcactaatgaataagcttatatatactcaaatacagtgaaacaattaaatcactagatcatgcttcgctattggtaccacaactaacctctgatattaagatagaaagaagaactctactaacttatttaaattaaacacataccactaatcgaattattatacacagaatttattgcattggatacatatataaaactattcacactacaaattaacatatgatcaaaattaatgattaccggctttgcgacaataaaacttagtgtgtgctccaataaa

SEQ ID NO: 132894 - DNA, 205 bp, Zea mays
  Clone ID: MRT4577_5268C.1
ggcacatatgatcgggagccggtgcgaggttaccaaaagaaagggcgcacggttcgttcgcgctgtctttctgacaggccttgttgatcctgtacaataccgggaggagactctgcagtcggtagccatgttagacggagacgtacgcacttgtggtagtgtcaaccgtcatggctgccaccagacccagggccgagatggaggc

SEQ ID NO: 132895 - DNA, 765 bp, Zea mays
  Clone ID: MRT4577_52691C.1
atcttccgacctcctccttccctcgatcccctcctctcgaacccgctcgcaggccctctcccgatcccatctcactcacagtcctcccgccgccgcctttctaccccactttcccggcgccagcttgttagatcccggcgccagcttcagccacgatattcaactattgggtgtgttaaattctcgaggatgatgaatcgtcagtttgcgaatatgatagtacacaattaccccaagggagtttattccctgcgccggatcaacctcatggagtatctcttctacccttcaacagaagctgccgaaaaggcagaagtgaataagaagggatggttatccaccatgttgaaagggagccccaagcagagtctgcccaagacgaacatcaacttctcatcactgcctaacatggccgacttaactaccaggcatttcttctccctgctgagagggcagggggagggctctgtcatgtttgtcagccctaacgtccacacgatgatgtacgacactagcacggacttcgtctttggcatgccacaagccaacttctgtaagcagagtgactcaatcgccctgtccatcactcggcggagctatggccaggacaaccacaagctctatgtcataggaaaaggagaggacaatgcccttggtcgaggtcttgaactataccaggacaactgatcgttcgtcttgctactggcgacctctaccctgcccgccactggttcgaccgtgcctggctggcagcaacagcaaagt

SEQ ID NO: 132896 - DNA, 1063 bp, Zea mays
  Clone ID: MRT4577_52692C.1
ggagggggaaataagagaaaaggggggaaaagggggtaatacaagggggggggggtggggaaggagaaggggtaaaaaaaggggcgcgtcggatgggggcggtgaagaggggcggggtggtagacggacctcacatataacggcaaagggggggggggaggggagaaaaggggggaaacagcgaaaggcgggggtggggagaggagaggagagagggggagggacaaagggaagaggagggaaaggggagtaaaaaaataataggtagggggaggggtagggggggaaagaaaaggggggggggggggggataaggggaggaggggcggagggaaataaagggggtggaaagataggacggggggggaggggagaagaaggagggggggaacaaagagggggggggaaaaaaagggggggagggtcggttaagggaggagacagagcgggaggaggagtaagaggggggacgcgcggggggggggggggggaaaaaaaaagaacaacggagtcttgagtcatcacgaagatcgcaccagattcgcttaaggctgaaaggcggatggaagctctcatatagtcggtgaagacaaagaacgttgcacaataaggtatcagaccagggctgtgaacagcgatgccattcgaaatggcacccatagcatgctctcgcacaccgaagcgaatgtttctctcttcaggagtatccctctggaagtcaccaaacttcttaagcagtgtcatgtttgacgttgcgagatccgaactacctccaagaaatccaggtattactttggcaagtgcattcaagcactgctgagataagttcctagtagcatcaggagacatttcaggagtgtagtttcgaagagcattttcccacccagaagccagttcccctgaaattatgctctttaactcagcagcctcctggttgtatttcttttcatattctacaaacctggcattccattcagcttcaagtgaagcaccctcatcgatatggcgactccagtgcctcttcacaacaactggaacatggaaaggctcatgaaaccttacc

SEQ ID NO: 132897 - DNA, 324 bp, Zea mays
  Clone ID: MRT4577_52693C.1
acggccgcccttttttttttttttttttttttttttttttttttttttttttttttttttgggttggtttttttttttttttttttttttaaaaagggccggatcaaaaaattcagtccccagtttttttttggagtttgaatatccagggggggacctttaaaaaacatttttaacatatcaaattttacggattcccaagggatgataacccctttttttggaccactttgccagttgacaacaatacattcgggttctggaaaggaatcaatcaaaggtacaattgggtcttttaccaaaatagaccattttaaaacgcaa

SEQ ID NO: 132898 - DNA, 134 bp, Zea mays
  Clone ID: MRT4577_52694C.1
tagatactggtgacgaggtgatacataaggattacgatggttgtggtattacatgtactacagtgtgcgatcgaacctgaatttggtcccttttggatgcacagtcatggaaggatggaattgcatggtgaacc

SEQ ID NO: 132899 - DNA, 421 bp, Zea mays
  Clone ID: MRT4577_52695C.1
ctcttcccttctcttctctcaagaaagaaccagctagcgcgcgcgcacacacacacaagcctccccacacccgccatgtgtgcgtcgccggagttctacaagccagcgccgccggcgttctcgccgtgcagctcgccgctcctgctgcacggggcaggggtggcggtgggagcagtagccgaggagagcaccgccgccgcggcgaccgtgtcgcaggatgaggaggaggactaccgccgccggcgccgcggaagccgcgggcgcccgcggcccccgcgccgtgccggaagcgcctgttcgaggtggaggtgttcagcctgcggcttgaggagctggagcgcctcttctggcgcccgcgccccgcggcgccgtcaccgccgccgccgttcgctcagaaaaagcgccggagggtggcctgccc

SEQ ID NO: 132900 - DNA, 1183 bp, Zea mays
  Clone ID: MRT4577_52696C.1
gaccatatccccacgcaaaggccaaggccaagcgagacagggagggaggagaagtaaccaagtgtctcaagcaaccctaccgcccgcccgccggccgcttcatttcatttcctccactccatactcaccacgacacaccgccctcttcccttctcttctctcaagaaagaaccagctagcgcgcgcgcgcacatacaagcctgaagcctccccatacccgccatgtctgcgtcgccggagttctacaagccagcgccgccggcgttctcgccgtgcagctcgccgctcctgctgcacggggcaggggcggcggtgggagcagtagccgaggagagcgccgccgcaaccgtgtcgcaggatgaggaggaggactaccgctgccgtacgccgacgggcggggagagccaggtgaggccgccagggacctgcccgccggcgccgcggaagccgcgggcgcccgcggcccccgcgccgtgccggaagcgcctgttcgaggtggaggtgttcagcctgcggcttgaggagctggagcgcctcttctggcgcccgcgccccgcggcgccgccgccgccgccgcccgctcagaagaagcgccggagggtggcctgcccggagcccaagaagagatagtagctagcttggtgtggcagccggtgctagtagtagtagtagtgtagtacaggtcgtgtagcagcggtagctagctaggtgcagagccaagtggttttggcttggatcgatcacatacagcagcttattattaggatcggaggtccatggtaggggggtgcttaggagaggactgctgtacttgtactgctacagctcgtcggcacatctctctagctagtttcctctatctatagctcacaatcagttcctgtagttgctagatgctgttcagtgtgtgtatgtggtgatgatagtgtcatggtgtcaaaaggtgtagcgcaatactagctagctagctagctgtaggcaggagctgcatgccctgaatctccattcttccatgtagcccctgtgtgtaacgaagaagctaagctcacttgtaccactagcgtcaatatatatactctcattcacttgttacgcgatccgctcccaaaaaaaaaaaaaaaaaaaaaaaaaaaaaaaaaaaaaaaaaaaaaaaaaaaaaactcgaggggggggcccgtgtacc

SEQ ID NO: 132901 - DNA, 1497 bp, Zea mays
  Clone ID: MRT4577_52697C.1
ctgaaaagctcaatcctctccgccctttccacactaaactcccagcagactcccccactccccatgtcttctggagtaagaagtggcggcggaggagatcaccatggcgtccaccaccagcatggccacggccacctcgccggagccgacgacggcgccgagtacgcgttctacagcaacgacatggagagcttcttcttcaatcagccggcgtcggcggacgtcaataatggaggcagcagaactggcgccgacgagctcaccatgccgccgtactccagcgtcacggactacctacaggggttcatggacatggacccctctgggctagctcggcacctcgacgcgccgtgcctgctggcggaggacgccccgctcaagcatgagctgtccgtcgatgtgagctacgacagccagggcaccagcggcgcgcccggagatggggcggcggcgatgcacacgccgaactcgtcggtgtctctctcgtcgagcgaccgggagggggagggccagcttcgtcggtgcaggaagggcaggccgaaggcggaggatgatgcggagggggatgagaaagatcaagaagacggggagaattccaccaaagcgaacagatccaagaagaaggccgagaagaggcagccccgcgttgccttcctcaccaagagcgaggtggatcaccttgaggacggctaccggtggcgcaagtacggccagaaggcggtcaagaacagtccttacccaaggagctactaccggtgcacggcgcccaagtgcggcgtgaagaagcgcgtggagcggtcgtaccaggacccgtcgacggtggtcaccacgtacgagggacagcacacgcaccacagccccgccagcttccgcgccggcggcgcgcacctcttcatgcccaacgcgcacgcgctgccgccgcagcacctgatgctgccgtccagcttccgcccggcggacctgatgggcatggtgcaccccgtcagcatgggcgcaaaccttagcatgttcctgccaactatgcctcctcatatgccatcgccggcgtctcgtgctcatcctcttcagcagcagcagcaccagttcactgactacgcgctcttgcaagaccttttcccttccacaatgcccaacaacccataactaactgctacacaattagctagcctagctagaatcgacatgagagatgctgtccaagtactctgcgccatatgtgatcacctgatggccttgcgctttgggcttggtctaatggggagggaactgcagttattattgattgattaatctgctagctttcatcttaaacattggtttacagttcttacccttccatttgtcaactctccgctgcgcggattgcatgggaggtactagagatggaaccgagtactttttatagctatcactataacggcaactaatttatgtacggcgcctctagacttcttgtacgtgtacatatcatgtgttcctcattgaatcatttgggag

SEQ ID NO: 132902 - DNA, 249 bp, Zea mays
  Clone ID: MRT4577_52698C.1
gctacttcgtcacgccatgttttcaggttgtgttttctggagctacttacttggtgggtggaggtcagtttcaattctttccggtgtttttgtttatacgtacgaatctttacaaatatatttatgcgtgtggtttagatttgtctgcaaatatttgcttttttttaaactgtgtcgagtttacacggtgttgctctgctgaatggtgtctatgtcgaagcccttgagcttgacgacggactcgtctgt

SEQ ID NO: 132903 - DNA, 363 bp, Zea mays
  unsure (1)..(363): unsure at all n locations
  Clone ID: MRT4577_52699C.1
attgcagttagatactaccaacatacacaactattttttttgaagtaaatagtagaaaaacaatataatgcaagagaatgcaaataaattgtttttctactattgacttcaaaagaaatagttgtgtatgttggtagtatcgcactgcgatacgtcgcggggatcgctccgtggatctcagccagcaacatgtgggcgttgaaccggaatctatggagagccgnattttcttttgctgcttcttgaactatgttgcaatacaagacatgacacctatgatctggttgatcagacttcagatccgtgcgggacatcatatagagaaaacatgcgaggggagagttgttgcaaataatggagact

SEQ ID NO: 132904 - DNA, 896 bp, Zea mays
  Clone ID: MRT4577_5269C.1
ccttcccctttgcctttatactcgtcgaaggactgaactccctacctccgtcctgcctcgagcaatccccttctccctccttgtgatctccgggttcccgtctcagattcccaggttcgatcttgatccccagctatccccacctgcctctgccgtcctcgaatccttcgtcgcagaggcgccgcttttacctcttcttgccgcgatttgagaagaagactttattgatccgagcaagtcttcttgggcgggaagaaaggagccatgatacctgctgtgaagctctctccggccgccttctctgtcaccaatcaacggtctaaatcagcttttgttccgtcggtgtccattctcaacatgaaaaaatttgcgtcctgctcccttagaccactctacctcacacggctagatgacccacacacttccgagctgaagcctcggaggcagctgcttgacttccggtgtgcagcttcagcggctgatgacaaggagtcaaaggctgaggtggtgccagccagctcagaagcagcacaaaagttgaagatttcaatctattttgcgacttggtgggcgcttaatgtgatctttaacatctataacaagaaggttctcaatgctttcccgtatccctggctcacctccacactatccctcgcctgcggctcagcgatgatgctcttctcatgggtcacctgcctagttgaggcccccaagactgacttagatttctggaaagcacttttcccggttgctgtggctcatacaattggacatgttgctgccacagtgagcatgtcaaaggtggcagtgtcattcacacacattatcaagagtgctgagcctgcattcagtggttttggtgtcagggtcattctcggagagtcatttcgatgcct

SEQ ID NO: 132905 - DNA, 391 bp, Zea mays
  unsure (1)..(391): unsure at all n locations
  Clone ID: MRT4577_526C.1
tttctcttctgggaggtatgcgtgcgcgcacgcgtacgtccacgcgtccgatcgcccttagagtaacagtctagcagaccaagcatgtcgnnttgggctgagaacgaccccacggtgacggtgacctagcgcggaggcatggacaagcacgaggacagcggcgacaaggagcatggcggcggcggcttcatcgacaaggtgaaggacttcatccacgacatcggcgagaagatcgaggagggcttcgggttcggcaagcccacagtcgacgtgtgcggcatgcacatcccaaacattagtctccaccgcgccgaccttgttgtggacgtgctcataaaaatcccgtaccgggtcccgattccgtttgttgacattcactacctcatggtca

SEQ ID NO: 132906 - DNA, 520 bp, Zea mays
  Clone ID: MRT4577_52700C.1
ccgccctttttgcttaaaaaaaaaaaaaaaaaaaaaaaaaaaaaaaaaaaaaaaaaaaaaaaaaaaaaaaaaaaaaaaaaaaaaaaaaaaaaaaaaaaaaaaaaaaaaaaaaaaaaaaaaaaaaaaaaaaaaaaaaaaaaaaaaaaaaaaaaaaaagggggcgggcctttttgggggaaccaaattttccttccgggggtttgcaagtttttattttttttttggggcccccaaatttaatttcctgggccgggttttaaaaacgtggggctgggaaaacccttgggtttcccaatttaaatcgttttgaaaaaattccctttttccccagtggggttaatagaaaaagggccccccccattcccctttccaaaaatttgcccaccctaatgggaaatgggacccccccttttaggggcctttaaaccccgggggggggggggtttccccccaggggaccctttacttttgccaggccctaaggccccgttctttcggttttttcccttttttttttccc

SEQ ID NO: 132907 - DNA, 288 bp, Zea mays
  Clone ID: MRT4577_52701C.1
cccacgcgtccgattggtcagacacagagggacccttggctcctgtgtctggtccacacaccacagaagcttgtattatcagtgaatataaatgtactacatttgcatgccttttgggtttgccttaattcttacctcatttgcatcctatcgatctggaaagagctgttttggatgaatgcagtataaaatgtaaaaaccctgctaaatgacttattgattaagtatatctatctatatatacatatacacaaagatattatttatcgaaagtaaaaaagatggaag

SEQ ID NO: 132908 - DNA, 252 bp, Zea mays
  Clone ID: MRT4577_52702C.1
ccggacggcaggacaatcaacatagcatagtatgctgtagttctgtacaatatgcgcctctcctgaggaaaagggctctggggctcgccgtgggtccaggagaagaggagcggcaaaaaaagaaccccagccaaccacggcaagttaaggcggaccgggacgggagggacgtgacgtactactgggggcgcgacgggttaactgaaccacgtacggcgtcgctgcgggtacagggcgagctgaaaaagacta

SEQ ID NO: 132909 - DNA, 514 bp, Zea mays
  unsure (1)..(514): unsure at all n locations
  Clone ID: MRT4577_52703C.1
cgccgcgccccccgcgccnaagcngcgacgaccanccagcgaacaggaaggangacgggcnccaaggancncccggccaagggcgggnncagcnncgacccgngccgccggaacaacagccggggaagaacgggcncaaaggcccggggancaggaaaaccgggacaaccattttttttctcgncnnncagganggggnngnncnnggggcagggggggggcaaccgagggcggccgagnngcnganaagaacngngagaaaanccacnnnanggcaccgaaaaaaaaaaagaagaggagcaggaaccgcngcggacacggaggccgnnacagananggngagcncccagcnacagcnncaccgnnangcaacgggccgcgaancaagagnngnaacggcncnnacacnacngaagncacaccncnncaagnancaaggccangncagngcngcccnngnncnnggnggagngganngnaccgggccacannnacacacngnnnanccacacgg

SEQ ID NO: 132910 - DNA, 178 bp, Zea mays
  Clone ID: MRT4577_52704C.1
tgaccggtggaagagtatgcctcggattcagaggaggagcgaggaagctgaaggaggggcgaatctaagcccaattgaagacatagggcgtcgattaatcgtcccccgacgccgagctcgtaggatgatcgggataagtgagccttctctcggagagctcatgaacatcaagttggta

SEQ ID NO: 132911 - DNA, 1023 bp, Zea mays
  Clone ID: MRT4577_52705C.1
gctactatgggaagctcggaccacgcatgctgcagacgcgttacgtatcggatccagaattcgtgattattaatgccagctactttttctttccaggtgaaacgatacctcatcattctttaatttcaccgaaagaatatcacggtacagctatcgctttaataaaaacagaagaccgatcactagtagtgaatggtacgagagacttcaagcaaatcccgaatcgtatgctaacatcgctatgcaattgcaatctaaattaagaatgatgcaacaacgaattgatcaattgacaaccgtctctccgaaagaacgtcttcatcgtttacaagaatggttcaccctatatttaggtgacattcctatatatgaaatattaacacaaaccgaaattggtcaactgataggtatagtcgtgaaacaaccgtttattacgagaacaaataaaaaacgaggtaaaataaatactctttttgcttattgcttgctgggccgaattctttattttcacacctaaatagtgcagcatttatatgctaaatgctactggaccaaactctgcacttagttcgtaactttctacaagtttcgtctttttcgctgtaatttccatacgcatttctacatatttcgcattctcttcatctagacgctcgtttttagacgtttgctgttgcgattgttcttcaatcatagataattcattacgatgactagcttgttgatttaaaagctcaatatagtcaccttttaaattctcaatctgttcctctaaattgtcagcaaaagtagcaagcagttgctcattatcatgcaatttttgctccaactcttttacttcattcacaaattgcattaaagattctgtacttgactgaatcttaccatcgtaacttttagctttctcagttaattcaacaattaactgctcaggttgcgcacaatgcggttcgagcattttgctttctttcttattaacaactacgctggcctttttaggttttctagctctttactagaaag

SEQ ID NO: 132912 - DNA, 360 bp, Zea mays
  Clone ID: MRT4577_52706C.1
acaggacggccaagcgtggcttccttcctgaactgtattgatcaaaaatggattggagaaaacacttcattagagtttcccccaccaggattttccttccgcatagactgttatcttgcgccctttgccagttttttgatacagaatagttatttttgtaagctcttaataatgaaaaaagggtattattattgagatggtgtatcgactaatatttattacatgtatccataagaaaactattctaaccaccttacgttgaagatgttcatttctgaataataacaggtctagtcagatggggactgttatgtcatttttccagcttaaccatattcgtaccattgaataggggtttga

SEQ ID NO: 132913 - DNA, 312 bp, Zea mays
  Clone ID: MRT4577_52707C.1
ttatttttattttttttttttttggggaagttcgcacaagcgaatcctaacgctacacatctaaagttcctcaaccatacaccggacaacagtcgctgatcatgtactcaacactcggaggcctcgtaatattcatcgacctagcgaaggttgaaaatggcaccttcctccaccccagttcaagatgaaccaacacgaaaatgtctgattctcaatacaaaacatcactagctcgctctactgtccgagcagccttttgacacccgacttttgtgttcggcttgagcctcgccgggaacttgatgtccaact

SEQ ID NO: 132914 - DNA, 402 bp, Zea mays
  Clone ID: MRT4577_52708C.1
aaacccccaaaaaaacggggtttatttggggggaaaataggggggaaacaaaaaaaattaggggggggggaacaccaaaaaagggggtttggggggaaaaaaaccccccattgggggggggggggggggggaaaaaaagggttttgggaggtggggcctaatggaactgggagacccaatcaaaaaggtttcctccaaaaaagggggggacccggggggggtaaaccattccaattggggggggggcaaatttaatgggggcaaaaggggaagttaaaatgggttttcccaggccttggggccccaccggggaagaattttttgccaaaaggggaggcttgggggaacccctaaaaaaattatttccggggaaatcggggccagagggggaaaaaagggggg

SEQ ID NO: 132915 - DNA, 644 bp, Zea mays
  Clone ID: MRT4577_52709C.1
gccttcccggtcgaccccgcgtccgctcgcccagatccgaccgcggctctgattttccaactgacgcaggagcggtgggtctgaccgggcgcgacccgtcttctcatgggcgagacagcgtgatccctgcggctcgattgtaaattcgtgatctttcggggcattccttggtttgtctgtcggtgctggtggtgctgcgtttggagggccgcggagatgggcgtcggcggggagaagttccagctggggacggtgggggcgctgagcctctccgtggtgtcctctgtctccattgtcatctgcaacaaggcgctcatgagctccctcggctttaacttcggtgtgagatctgactgtgttcctgccacggtttcttgattattatgtgtatgctcgtgctggatgttatgtgattcgtgtagatctgcgttctccattgggggctgcagttctgttctggtgcatgagatgtgtgtgcaaggttcagcacttcagatggtgctttagggcttaagcttcagtggtaactttgaggcagggctaggagtgtcaattggtagttgtcgaaacttcaactgtcgttgccatttttttattgtgaatggtgaaacatgtgtgaccctggtgctaacttgctttctgtc

SEQ ID NO: 132916 - DNA, 588 bp, Zea mays
  Clone ID: MRT4577_5270C.1
gggccgaaccacccgtccgcccacgcgtccgcccacgcgtccgcccacgcgtccgcccacgttttcgcggacgcgtggccggccgacgatggcgtcgaataagacggtcctcatcgtcgcggcgatgcttctcatcacgctcgtgctggaggccgcccctccggcgaccgccatggactgcaaggccgggtgtgacgaggtcacgggcccactccacatgagcatggaggactgcatgaagaggtgcaaggagatcgctgctaagcaggggcctagggacccttacaaggataacaaacttgacatcccatgaactaattaatgctcctatatcatctgcctatccatgcatgcattgcattgcgtatgcacactgtgcgtgcctgcccacaaagttcgacaacacaccgatctcgacggatttgtaatcgtgtccactcgatcgagagatcgatcgatgcttgttattatatttgtattccacattatatataagaaatacaaattaaattaaatctaaaaaaaaaaaaaaaaaaaaaaaaaaactaaaaaaaaaaaaaaattaaaaaaaaaaaaaaaaaagcggcc

SEQ ID NO: 132917 - DNA, 123 bp, Zea mays
  Clone ID: MRT4577_52710C.1
gctcgtgcaatgactgatatgagtggaatacgatgttcttctaggtctatgtgtattgggtctgctgcaaacaagaagagctactgttgttcatgagccagtatctaatgctcatggagttca

SEQ ID NO: 132918 - DNA, 275 bp, Zea mays
  Clone ID: MRT4577_52711C.1
cggccgggccgggcatatcccctctcctacctctccagcatctccggtctccggagactcgactccgctcctcacgtcgccagtcatgggtccagatcaagataggaaccaacgggttcgcaaggataggaaggttcgtggtaatggtccccctgcacagccaggacgtccagctcgtcgcctggctacaagcccttcataccaacggatgacatgacctacacgctcaagtactccacgcgcgtacgtacaatggaagccccgcgccatccccc

SEQ ID NO: 132919 - DNA, 679 bp, Zea mays
  Clone ID: MRT4577_52712C.1
gttagccaaccaatcaatgaatatataaatgctaaaatatgtacaacaatttgtttcctaaatccgaatctaatttcattaccaaaactttttaattcgtgcaaaatcaatcttcagactcaggctgttgttgttgttgaaacctaacatcttcatgagctttcacaacttgtgaagtgaaattccccaaagcctcaaagattggtactaaaccagcttgtaagctgcttgaagctgcattgttcacaagtttaattgtttccttgtgtcttgctctttcttcttctagcttcttcctcattgaatccaagtccactttcaaatcatccaacgccgagatcccgctctcggacaagaccacgcttttctctgatgcaccgtcttgtagctgatcgtttctcattctcactctcgccctctccatccgaagatcattcaaccgtttctcgaaatcgtgtgacacatactctgctttcactctctgcctttgctcctcatcttgtctctcccatagttcatgcagactcgaggcaaagccttgcattgcgtttgaaacgttctctccagagattctcgccattgcttcttgccaatctttgcatataacgaaaacctgtggagctccaacacggctaggagagaaaggggcaattccgtcctccgttgattcaggttcata

SEQ ID NO: 132920 - DNA, 598 bp, Zea mays
  Clone ID: MRT4577_52713C.1
ggccctaggggccttttttttttttttttttttttttttttttttttttttttttttttttttttttttttttttttttttttttttttttttttttttggggggaaacccaaaaaattccccttcccggggggggggggggatttttttccccccgggaaaaaaatttccccccccttggaattttaaaaaaagggggaaaagttttttgaaaatggggccaaggcccaaaaatggggggggtggtttttttacccaaaaatttgaaaaaaaaaaaaattttttctgggctggggggtatttttccggaaaaaagggtcccccttccctttaaaaataaaccaacccctttggtcccccccgggaataaaagccctggttttaaacccgaaaaaaaaaaaaaaacaaattttgccaaaaaaattttaaaaaagggtccaacaaaaatttcccaggggggaaaccaaaaaaaaaaccccgctccggtggtcccttttttcaaacccaaaaaacaaattccttccccaaggtgggggacaccatccaccccaaaaggttggcgaccctggaaaaaatccccccccccccccccccaaaa

SEQ ID NO: 132921 - DNA, 716 bp, Zea mays
  Clone ID: MRT4577_52714C.1
cctcctgcctgcgcccacgccgagctcgtcctcgagcacgccgccgcctgtagcttccacggccgccgaccacgaccagctccgccagaccggcctcgccccatgccttccttccttccttttctttctccctctctcttttcttacctctctcctcgtcatgacaggagcagccatggcgccccgtgaagctctgcacgccgcaagccgtgacctccccatcgtcatcttcaagctcgctactgcctcgtcctcgaccttcctcgctcggatccgctgccgcgtcgtcccggagtcctctcgccggagtccttctccatgccgctgcgagagaacggctgcactgcctccgcctcggtgcaccttccctctgccgtttcctgctcatggccgcctccaacctctccaacggcgcctcgacctcgccaccacgtcgttgctccggccaactcctgcaagccgccggcgatctggccacccaggacgcccctgcctccttcctcgtcgccgccgagttcccctgcttcatgcctctgctcacgccgctgccagatcgagcgagcgaggggaacgctcgcgttgactgaggcccagctgcgcgacctaccggcctccctcctccaccgagtgggccgaggcccagctgcgccccccttccggcctcacctcaccaccgactgtgacgtggcccatgtgagcagccacccccagccctc

SEQ ID NO: 132922 - DNA, 115 bp, Zea mays
  Clone ID: MRT4577_52715C.1
ggggagcgagtgatgaactatcacacccctgaggccttggtgatactagctagcgctgctcaccttctacttcagagctactgacggaatgcttgccgacggagaatcttgtact

SEQ ID NO: 132923 - DNA, 1990 bp, Zea mays
  Clone ID: MRT4577_52716C.1
ttctgccggggctgcggcctgcgcgcgtacgtcttggcctcttccaagcgtggatgcgactgtctcatcgagggagtaagtatcatcctgccatgacactacctgacaaccacaaacgtcgtctccctccatggcactccgccacggcaataattgaagcaacgctgatctgttgcatctccggcgaggcagagcgcagcagctcgtgcatatatctagctaagccaattgcgcaccaccgcgcgcgccaccccaagatccccgtgccttttcagagcatctctccgtcgccgtgacaatgaagcagcagcagaccgtcatcctgtacccgagccctggcgtcggccacatcgtccccatggtgcagctcgccaaggtgtttctgaggcacggctgcgacgtgaccatggtgatcgccgagccagccgccagctcgcccgacttccgcatcgtcgacctcgaccgcgtggctgcctccaaccccgccatcaccttccacgtcctccctccggtcccgtacgccgacctcgccgtccccggcaagcaccatttcctcctcacgctgcaagtgctgcgacggtacaacggcgagctggagaggttcctccgctccgtcccgcgcgagcgcctgcactccctggtggtcggcatgttctgcaccgacgcggtcgacgtcggcgcaaagctgggcgtccccgtgtacacgttcttcgcctcggccgccgctactctggccgtcgtggcccagctgccggcgttgctctccggcaggcgagcgggcctcaaggagctcggggacacgccactccagttcctcggcgtcccgccgttcccagcgtcccatctcgtcagggagctgctggagcacccggacgacgacgagctgtgcaagaccatggtggacgtctggaagcgctgcacggacggcagcggcgtcttggtcaacacgttcgagtcgctggagagcccggccgtgcaggcgctgagggatccccggtgcgtgcccggccgcgtgctgcccccggtctactgcgtggggccgctgatcggtggcgacggcggcacaagagcagcagcggagcaagagcgcgcggcggagacgcggcacgagtgccttgcgtggctcgacgagcagcccgagaacagcgtcgtgttcctctgcttcggaagcagatgcgcgcactcggctgagcagctaaggggcatcgccgtcggccttgagaggtccgggcagcgcttcttgtggtctgtgcggacgccggccggcaccgacggcggttcggagaatctcggcgcgctctttccagaggggttcttgcagcggaccaaggaccggggcctcgtcgtgcggtcatgggcaccgcaggttgaggtgctacggcatccatcgacgggcgcgttcatgacgcactgcggatggaactcgacgctggaagccatcacagcaggggtgccgatgctatgctggccgttctacgcggagcagctgatgaacaaggtgttcgtgaccgagggcatgggcgtcggggtggagatggaggggtacacgacgggcttcatcaaatccgaggaggtggaagccaaggtgaggctggtgatggaatctgaggagggcaggcacctcaggggtcgagcggtagcactcaagaatgaagcacaagcagcgctgcgggatgacggcccatcggagacctcgttcgccaggttcctctttgatgcgaagaatcttcagggacacctcggtcacggatcggagtgaattttctttaattttctattgaggccttgttcgaaatttatattaggaataagatgcaggaagggttcttgaacttggcagtcatttgagtctcagggtcgacaatgtatcaaatacatatgtgttggagacttgttctcaaatgctataagttaagaacaaggcaaaaaaaaaaaaaaaaaaaaaaaaaaaaaaaaaaaaaaaaaaaaactcgaggagggggcccggtgc

SEQ ID NO: 132924 - DNA, 113 bp, Zea mays
  Clone ID: MRT4577_52717C.1
gcaagccccgaatccgactcttgagacgaatgccgagcacacgagtgagcaggtgctcgttggggatgtccgcccctaaaaatgcagaatggctcggcgcgagagcacagagg

SEQ ID NO: 132925 - DNA, 364 bp, Zea mays
  Clone ID: MRT4577_52718C.1
agcaccaagaccttcggcgcccgttcaggatccacatcttcccgagcgagttcttggttgacctcttcctcttcggaccacctccaaggctcttggtgtagcttgcaagtctcagcaatcaggactaaatgtctagtttaagaaaacacacgagaaaggatttggccttaagaaagtggaaatccccaagggccaaacttaccctgaggaagtgattcgcccccagcagggccttcccttccccaaggaattgcgcggcaatgggatgaactgctcaggtaagtctcgccactcaaatggtcatttatgctttcctcccacccccctaaattcattctagaccttctcaagaatgcccacagca

SEQ ID NO: 132926 - DNA, 1094 bp, Zea mays
  Clone ID: MRT4577_52719C.1
agggattatagtagctgggtttggtttgtggctggctggctggctggataccacaccggtaatagcggccgagagagcaaccacgtccacggccatttaactgtcatctcccctcctggccgggatctctcctttcctttttgctccgatccgatccgatcaatgaccaagtcgaagggtggttcggtggacgcgcgcacgctggtggcgcacgtcctggcagcgggcgccgtcgtgctggtgctcctgtggtgcatccacttccgcggcggcctcgccctccgctcccaggacaagccgctcatcttcaacgtccaaacccgtgctcatggtcctcggccccatcgtcctcggcggagaagccatcctcagctaccgctctctcccgctcgcccgcgacgccaggaagaaggtgcacctggcgctgcacgccgcgggcctcgctgcgggcgtcctcggcgtctacgccgtcttcaagttccacgtcgagagcggcatcccaaacctctactcgctgcactcctgggtcggcatcgccgccatcaccctctacggcctccagtggaccgccgggttcctcgcctacttcttcccgggcgcctcccccgccaccaggcgcagaacgctgccgtggcacgccgtcttcggcctcctcgtcttcgtgctcgccgtcggcaccgcgcagctgggcttcctcgagaagctcaccttcatgcagggcccgccactgcgcctgcccaagtacggcgcagaggcgctgctcgtcaacttcacctccgtcaccgtgctcctcctcggcgtcgccgtcgtgcttgccatcgtcgatattgacgggacccggtacaacaccatcatctgactcagcgtcaagctgctgcatgctactacgatcagggatcgatgttgcctgtggtgtgtaggtgtgtggtgtacagtacagtacagatttatatgtttgtccggtgtttctgtgtgactaaactaaatatcataaaaaaatatatatattacaagttctttgcatggcatgcatgggtttagatctctgaggaggcatatgtatattttgtcctaaataatttcaagttcaaggg

SEQ ID NO: 132927 - DNA, 1164 bp, Zea mays
  Clone ID: MRT4577_5271C.1
acaaatagcgtgcaccaggcaccccaggccgggccacacagcatgccagcagagcagaaagcagccgcagccccagcccccacaagacgaggcaacaatggcgctagaagcagccaccgccccccgcgcactcctcgccgcgtgcctcgtcctgctggtcctcggcggcggcaccggcccgtcgtcggtgctgcgcggcgccggggcgcaggccggcgggcagtgcctgccgcagctgaaccgcctcctggcgtgccgcgcgtacctggtgcccggcgcgccggaccccagcgcggactgctgcagcgcgctgagcgccgtgtcgcacgagtgcgcctgcagcaccatgggcatcatcaacagcctgcccggccggtgccacctcgcccaagccaactgctccgcttgaagcagggacctggcacgcgtgctgcaatggatggcaggaggggagaggaataagaagtgtttccatttcacagtgagagcagtcgagctccaacgttgtcgtcgtcgtcgtcttcttcttttgatattcagactctgtcttgcggtctatatcatcagcataataataataaaataagtaaaaccagaattcgcggccgcgtcgagcgcgtacgcggacgcgcaagcgcggccccggccggcaccaattaacaaaccaaaccgacgatggcgtcgaataagacggtcctcatcgtcgcggcgatgcttctcatcacgctcgtgctggaggccgcccctccggcgaccgccatggactgcaaggccgggtgtgacgaggtcacgggcccactccacatgagcatggaggactgcatgaagaggtgcaaggagatcgctgctaagcaggggcctagggacccttacaaggataacaaacttgacatcccatgaactaattaatgctcctatatcatctgcctatccatgcatgcattgcattgcgtatgcacactgtgcgtgcctgcccacaaagttcgacaacacaccgatctcgacggatttgtaatcgtgtccactcgatcgagagatcgatcgatgcttgttattatatttgtattccacattatatataagaaatacaaattaaattaaatttattcctttgtcaaaccatgcctgcctgtgtgatcgaaaaaaaaaaaaaaaaaagcggcc

SEQ ID NO: 132928 - DNA, 276 bp, Zea mays
  Clone ID: MRT4577_52720C.1
gggccaaggaacccaatttttcctggggggtggaacaatggtttccattgggggccaaacggaaaaccagggggccctcacatgcttccggcccccaaaggggcaccggggggccctccctaacttgccggggacaaagtggggggcgtaggcccaagcgttgttgttgccggggccggcaatggggccaggggggtttttgagcggccccttcccggggccaagggcctggacaaaaaatcccaccatggaaaacatggggggggggccgttctt

SEQ ID NO: 132929 - DNA, 174 bp, Zea mays
  Clone ID: MRT4577_52721C.1
cccccctttctttttttttttttgggcccccaagtataaccaggaatcgctaattatatcacaagaacaaatccggatcccctttaattattggccccgatgaacctccagcccaattcccagcttacctacccttttttgcgggggggtaacccttctataacgccccctaaa

SEQ ID NO: 132930 - DNA, 314 bp, Zea mays
  Clone ID: MRT4577_52722C.1
attcggctcgaggtcgagccgcatcttttttagtgcagccgcacctctgatccttgatggggggtttttaagacatgtttggaccaatggcacagggctttcctgctccatcgctcggcactacacgggtgacatgcgccgttcacgacagccaagcgcctaagattgcaaggagtcggggctcaatgggggcatcgaaaggtccgaccaggaggaggaagagagcacctagcccgacgcacggaagcgagccttgcaacccctgcactcatcttcagaggctgctcaagcccagagagacggcgtggcctttt

SEQ ID NO: 132931 - DNA, 742 bp, Zea mays
  unsure (1)..(742): unsure at all n locations
  Clone ID: MRT4577_52723C.1
ccggactgctcgcccacgcacctcctctctcgccctggctcctgcgctagcactactactgctaccagcgagtgcacgacacacacatcctcctcctccccccttcgtctctctctctctctctctctctctctgcctgcgcgcctgagagctgccaccgccaaggcgaaacggccgtcgccgcatgctgcggcagagctagagacgagaggcgagatggcggccgaggcgctggggttcatggcgcggggagccaacggcgggagggcggcggagctcgtcaccagggacttcctcggcgggtgcgccgccgccgaagacgacgccagggacgcgtccgccaggaatgacgccgtgcccgcgagggtgcaccagcagaagcacgcgtgcccggcggcgccgagggacctgaacctgttcccggtagccgccaccacgaagccctgcgccgcgacggcggcagcggcagcggcaccagcggtcgcgggcggcaccacggcgacgtaccacagcgtgtgcacgatcgagaaggtgaagacggccctggagcggttcgagcgcggcaggcagcaccagtccccgcacccgcaccagcagcagcacagcgggcgcgggcgctggcgcgtcccccgtcgtcgtcttccgtgaccacgtcctccgtgaagcgccgcggcgncgtggaacagggcgacggctgcgactcgccctccggcggcgggatggtggccgcggcgtgccccag

SEQ ID NO: 132932 - DNA, 1097 bp, Zea mays
  unsure (1)..(1097): unsure at all n locations
  Clone ID: MRT4577_52724C.1
aaaaaaataaaagccgttccatggccaatcttgcgtgaaccttccgtgtctttttgcttcccaaaagtttcgtcgccgtgatccgatagggatccacatcagataggttctacacgcacgcatgcatccgcggccgaccagcacatcaccatcacgctatcgaaagcctcgtgctccgtcgtccccgtctggtgacataccgcagaaacaaaaaaaaaaaagcaaaatcggaggaaccatagagacagatcaagtcacacaacagggcctgccgaaaactgaaacgagaggcttggacggacgggatggacatggcgcggtacgagtcatgctaccggcactggatcgccgggcgggaggcaggcctcgccgagctcgaggcggcgtcggccaatgccgccgcgggccgggcaacggacgccgagctgcgngaccgtggtggagcggtgcatgctcgggtaccaggactacgccacccgcaggcgcgcgctgtcgcgggaggacggcgtcgccttcttcgccccgccctggtgcaccgccttcgagaactcacggctctgaggctcggtggctccgcccctcgcagcgtccgcctgctctacggatcttccggggagggcctggccggcgcaggtggaggagctgctcggcggcctcagcaacggcgtcatcccgaccggggccctggggatcacgtccgctcagctggtgctcatcaacgacctccacagccggacggtgcaccaggagaacgccctgtcggaccggctcgccaccctgcaggaggacatcgccgaccgcccgctcctgcccatcgtgcggcagcgcgagctcgctgccgcggcacggttgggagctgcagctgctgtcgcggctgctggtggaggccgacgagctgaggatggcgacggcgcgggcgctggcgacggagatcctgacgcctcggcaagcggtggagatgctggcggcaggcaagcacctgcacctctccgtccgcgactggagccgccgtagggaagcagcagctggcgcacagcaacagcttggcgggcagagcgccggaacggacaacaccgtccgcccgagcacatgaaagg

SEQ ID NO: 132933 - DNA, 1295 bp, Zea mays
  Clone ID: MRT4577_52725C.1
gacagatcaagtcacacaacagggcctgccgaaaactgaaacgaggtaaagggtcaaaaaaggcatatgtgcatgaatacaacatgtagtgcgaacatataggccatgtgcttactccactctctcgtcacggcctcacactgcagaggcttggacggacgggatggacatggcgcggtacgagtcatgctaccggcactggatcgccgggcaggaggcaggcctcgccgagctcgaggcggcgtcggccaatgccgccgcgggccgggcaacggacgccgagctgcggaccgtggtggagcggtgcatgctcgggtaccaggactacgccacccgcaggcgcgcgctgtcgcgggaggacggcgtcgccttcttcgccccgccctggtgcaccgccttcgagaactccgtgctctggctcgggggctgccgcccttcgctcaccgtccgcctgctctacaacctctccggggagggcctggaggcgcaggtggaggagctgctcggcggcctcagcaacggcgtcatcccgaccggggccctggggatcacgtccgctcagctggtgctcatcaacgacctccacagccggacggtgcaccaggagaacgccctgtcggaccggctcgccaccctgcaggaggacatcgccgaccgcccgctcctgcccatcgtgcggcagcgcgagctcgctgccgcggcacggttgggagctgcagctgctgccagcggaagctgcgacggcgcggcgcggcggcggctcagggcggcccggctaggagccgcggacgccgaggtggacgcggcgctggacagctacaaggccgcgctgtcgcggctgctggtggaggccgacgagctgaggatggcgacggcgcgggcgctggcgacggagatcctgacgcctcggcaagcggtggagatgctggcggcaggcaagcacctgcacctctccgtccgcgactggagccgccgtagggaagcagcagctggcgcacagcaacagcttggcgggcagagcgccggaacggacaacaccgtccgcccgagcacatgaaaggcttgccattcctcgcccttgcctgcagctagttagtagcatcccgtgtgtagcttggacaccacacaacctctctagtacccgcctgtctttctatatagaccgatcgatcaccatgtgcatggcgtccattaatatgtacaaagttggtgcttggtgtttttgttcctaagaacctaaattaaataccgcagtgcttgcatgagtaaaaaaaaaaaaaaaaaaaaaaaaacga

SEQ ID NO: 132934 - DNA, 723 bp, Zea mays
  Clone ID: MRT4577_52726C.1
atttccatgggaacctccccccccttcgggccgggatacaaaaccaaagcaaggcaagtctagtcttgcttcgccgaattccaaaccctagcctcgcctgttgcggccgcggcggagatggcgaagtctctgcgatccaagcgcgagaagcggctgcggacattgcgccgggagatagcggagcccttctacgacaagaaggaggccgccaagctcaccgcgcaggccgccgcgcttgctgctcccccgctccaggtccgcgggcccccgccgtcccaggatgccggcagctcccgcggcgctagctcagcctcggctatggatgtggagatgtccgatgaaggaaacaacaggtctaaaaccttcttgaagccacttggcatcattagcaagaagaaggtacagcttcatttgaagatcaagaaagacaagagaaaagctaggaagaaggggaagttttcttttaaaaagtagacgcgtaaagcttgtagtcttataaatcatgtagttctgtttccagtttgaacaacaaatctaaaggcagtcatgcgcacctaagtccattcatggctagcttactatgtcgaaatgagtatggaaaagatggcgctgacctatcagttgtgttcatcttcacatggtatcgttgtgaactatttccttcacgccattttatgactgtatattcttgtcttgcattattgcatctcatgtttactgccc

SEQ ID NO: 132935 - DNA, 234 bp, Zea mays
  unsure (1)..(234): unsure at all n locations
  Clone ID: MRT4577_52727C.1
aaattttatttaaaatttattaaaaaactaagatatacaatttatacggcgagattgtcttcaatctttctttccaaaacctcctttnncatgtttctctccctctttattaaattactttttacccatcttcacattcttatctacatcttttnttaaaacacattgtttggttttatttggttgatcattaaaacaaaccttgaagacacccataaaaacacattccaacac

SEQ ID NO: 132936 - DNA, 839 bp, Zea mays
  unsure (1)..(839): unsure at all n locations
  Clone ID: MRT4577_52728C.1
ttgggtacctcgaggccggccggctcttgtttcgccgaaccccaaaccctagcttcgctcgttgcggcggctgcggcgagccggcgatggcgaagtctctgcgatccaaacgcgagaagcggcttcggacgttgcgccgggagatagcggagccgttctacgacaagaaggaggccgccaagctcgccgcgcaggccgctgccctagctgctgccccgctcccggtccgcgggcccccgccgtcccaggatgccggcacctcccgcgcagctagctcggcctcggctatggatgtggagatgtctggtgcagggaacagcaggtctaagaccttcttgaggccacttggcagcattagcaagaagaaggtgcagcttcatttgaagatcaagaaagacaagagaaaagctaggaagaagggaaagttttcttttaagaagtagaggagtgtatgataaatcatgcagttttgttcccagtttgtaaaacaaacgcactgcagtcatgtgcacctacctaagtccattcgtgggtgacctactaaatatgttgaaatgggtactaaaaaggatagtgctgacctatcagctgtttctgttctgcgggtataaatgtcaagtactcaaattgctaaaaaaaaaaaaaaaaaaaaagtgctgtcatcgccgcccgccgcctcggtttccttcgtaagcccgtcgtcctccgtccgcgactctgcgcgagaagcgagagtatggacacccagtgaagcnnnnnnnnnnnncctgctcggttctcgggggggtaaaaaaaaccagctggtttggtttggtttcgttttggttttggttgggttt

SEQ ID NO: 132937 - DNA, 664 bp, Zea mays
  Clone ID: MRT4577_52729C.1
ggccgggccgggttcttgtttcgccgaacccaaactctagcttcgctcgttgcggcggcggcggcgagccggcgatggcgaagtctctgcgatccaaacgcgagaagcggcttcggacgttgcgccgggagatagcggagccgttctacgacaagaaggaggccgccaagctcgccgcccaggccgcagccttagctgctgccccgctcccggtccgcgggcccccgccgtcccaggatcccggtaccccccgcgcagctagctcggcctcggctatggggaacagcaggtctaagaccttcttgaggccacttggcagcattagcaagaagaaggtgcagcttcagttgaagatcctgaaagacaggcgaaaagctagcattagcaaaagttaggtgcagcttcatttgaagatcaagaaagacaagagaaaagctaggaagaagggaaagttttcttttaaaaagtagaggagtgtatgataaatcatgcagttttgttcccagtttgtaaaacaaacgcactgcagtcatgtcatgtggtgcacctacctaagtccattcgtgggtgacctactaagggggtgtttggttacaccccgctaaaatttagcccatgtcccatcgaatgtttgaacctccgttccgggtatgaaatgtagtcg

SEQ ID NO: 132938 - DNA, 225 bp, Zea mays
  Clone ID: MRT4577_5272C.1
ctactgattgcttctcaccaccaactcactgaatcagaaagaccacacactaatactatacgcattcttaggtccgtcagtctcacaagccacatcaacacattggtagcctgcacctaccacgaggccacggaggtggccgaggcgcccgtgtcgacggacaccgacgctacgaccgttctggcggactgcacgctgctgcggatcccttaccgcacgcaggcg

SEQ ID NO: 132939 - DNA, 1153 bp, Zea mays
  unsure (1)..(1153): unsure at all n locations
  Clone ID: MRT4577_52730C.1
ttcgccgaacccccaaaccctagcttcgctcgttgcggcggcgagccggcgatggcgaagtctctgcgatccaaacgcgagaagcggcttcggacgttgcgccgggagatagcggagccgttctacgacaagaaggaggccgccaagctcgccgcgcaggccgccgccctagctgctgcccgctccccggtcgcggggcccccgccatcncaggatgcctcattgggtacctcgaggccggccggggctcttgtttcgccgaaccccaaaccctagcttcgctcgttgcggcggcgagccggcgatggcgaagtctctgcgatccaaacgcgagaagcggcttcggacgttgcgccgggagatagcggagccgttctacgacaagaaggaggccgccaagctcgccgcgcaggccgccgccctagctgctgccccgctcccggtccgcgggcccccgccgtcccaggatgccggcacctcccgcgcagctagctcggcctcggctatggatgtggagatgtctgatgcagggaacaacaggtctaagaccttcttgaggccacttggcagcattagcaagaagaaggtgcagcttcatttgaagatcaagaaagacaagagaaaagctaggaagaagggaaagttttcttttaagaagtagaggagtgtatgataaatcatgcagttttgttcccagtttgtaaaacaaacgcactgcagtcatgtcatgtggtgcacctacctaagtccattcgtgggtgacctactattaaatatgttgaaatgggtacgaaaaaaggatagtgctgacctatcagctgtttctgttctgcgggtataaatgtcaagtactcaaattgctgagattttgtttcattttcacattgtatcgtggtgaaccatgtttggaaacaatgtcgagcacttagggagcatatgaactgtcattttgtgtcactcatgtggatatggggttgccacgggttcttataaaaaaaaaaaaaaaacagtcagaaaaaaaaaaaaaaaaaaaaaaaaaacttttttttttttttttttgagacgctaaattactattacgattcttttacgagagctattcgagatagccacgccctgagnccatgaaaaaacagctcgcggccaatgatga

SEQ ID NO: 132940 - DNA, 790 bp, Zea mays
  Clone ID: MRT4577_52731C.1
gccggccggttcgggctctgcacgagccgaaccccaaaccctagcttcgctcgttgcggcggcgagccggcgatggcgaagtctctgcgatccaaacgcgagaagcggcttcggacgttgcgccgggagatagcggagccgttctacgacaagaaggaggccgccaagctcgccgcgcaggccgccgccctagctgctgccccgctcccggtccgcgggcccccgccatcccaggatgccggcagctcccgcgcagctagctcggcctcggctatggatgtggagatgtctgatgcagggaacaacaggtctaagaccttcttgaggccacttggcagcattagcaagaagaaggtgcagcttcatttgaagatcaagaaagacaagagaaaagctaggaagaagggaaagttttcttttaagaagtagaggagtgtatgataaatcatgcagttttgttcccagtttgtaaaacaaacgcactgcagtcatgtcatgtggtgcacctacctaagtccattcgtgggtgacctactattaaatatgttgaaatgggtacgaaaaaaggatagtgctgacctatcagctgtttctgttctgcgggtataaatgtcaagtactcaaattgctgagatttggtttcattttcacattgtatcgtggtgaaccatgtttggaaacaatggccttgtttggcacagctgctgcttgttgaaaaactggtaaaaagcagcttctgtttaaaaaaaaaaaaaaaaaaaaaaaaaaaaaaaaaaaaaaaaaaaaaaaa

SEQ ID NO: 132941 - DNA, 191 bp, Zea mays
  unsure (1)..(191): unsure at all n locations
  Clone ID: MRT4577_52732C.1
tnttttttggttcggcaagcaatggatttttcatgtttcagctaaggtctagatgcacccacgcgtccgtcaacggaaacggaaacacgtgggctgacgcgtggagagagctcgctctgcggggaggcttggcgagaaatgaaaaatgcgagcacgtgaaaatgacaaaagatacccggctaaagcgggaa

SEQ ID NO: 132942 - DNA, 162 bp, Zea mays
  unsure (1)..(162): unsure at all n locations
  Clone ID: MRT4577_52733C.1
ggtcttatcccctcgcccctcctcccctccgccgctcccccagncccacctggcgcgggagagccgggtccttggatagggttagagtgggcggggnacgagcgcgagccatggcctccttcacctgctttcaggtcggtgctgcggtagtgggcggagcct

SEQ ID NO: 132943 - DNA, 243 bp, Zea mays
  unsure (1)..(243): unsure at all n locations
  Clone ID: MRT4577_52734C.1
acgaanaaaaacacccncaanncccacaacaaagaacaaaacacaaacgcgnaaaaggaaaccncaacagagccgcagcngggcaagaacaaccnncaacngncggngaagcaccngcgagnccgcgacccaanccaagcnagaagggaaacncnggagcaaggaaggaaaaaagcaaagcaggcaaggacacgcccgcacaaaggacaccgcccaggacgcagaagaaaaaggaggcgaaag

SEQ ID NO: 132944 - DNA, 185 bp, Zea mays
  Clone ID: MRT4577_52735C.1
cagctaaccgactcctggtgaagatgcactcggagcacattgcacagccaattcgtaggacatcgagcgagtagatggtaaataggtcgacatccgcgcaatatgagcgtctatctatcgctacatgtgattaaatcacggttgtcataaagtacatgtgcgacgattatcaatataactatatc

SEQ ID NO: 132945 - DNA, 185 bp, Zea mays
  Clone ID: MRT4577_52736C.1
ggagcaggacggttctgattctcggaactccgacgacttcgacgagactgccgtgacgagcaccggcgttcagcactcgtcgatgcaggcgtcgccggacgagatcaaccggccgctgctcgtcgtcatggacctcatcatcgtctaccgcgagtactgcccaaagatcctcccacagaaaaagg

SEQ ID NO: 132946 - DNA, 261 bp, Zea mays
  Clone ID: MRT4577_52737C.1
cggacgcgtgggcggacgcgtgggggcgaattcttagacttggttaataagtaatttgtgagtggcgtattcacaaaggattttgtcgtatactaacaatgcccatgcatgtttactccgtaagtgcattcctaatcatgaagattatccaggatactacgagcataacaggattcatagggcaaaccacatgccgattctacaacgggcttaaaatccccgacattatcaacgatcaacctttaccccaacctgctctga

SEQ ID NO: 132947 - DNA, 264 bp, Zea mays
  Clone ID: MRT4577_52738C.1
attcggctcgagggggaacccggcagggttaattttatcgggtgcttatggcagagcctggggcgaggcacagatgggagacacgacctaaaagtggctgatctaacaggatgtctactgatgaccgtgagacattgcagggagcgacttcgatacttaacatgattgatggcggggcagctgtgaggactactgttacacattacaatgaattaaacatgaggctttttatgcgcattgctccagaaccatatctgacggaac

SEQ ID NO: 132948 - DNA, 643 bp, Zea mays
  Clone ID: MRT4577_52739C.1
ctaaggttttttttttttttttttttggataagcaaagaactgcattttttattcgtaaggggagttcgtcacaaacttgaaaccgactcattatgagtcggcctcttccaccccttggtcattacattacattgcactactctactacttacactacgctatactaatactactctaatctactactgcttagtactacttactattactaccactatctatactaatatctaaacaaacagcattatgccactggccttgccgttgccgccgtcgcccttgccgtcgttgtcgtcgtccttgctgccgtcgccgttgcccttgccgccgtcgcccttgtcgtcactgtagcccttgccgtcaccgtcgtcgttaccaccgtcgccctcgccgtcaccgtcgccatcgaccttgccgtcgtcgacgccgccgcccttgccgttatcgtcgccgctgctgccgtcatcctccccgccgtcacctttgctggcgctctactcctcggactcttccgaggagacctcctccgagtcatccgatccaccgagcccggcgtgctcgatggagcgccattacgctgggacttcatctaggcccactccctcttctatccaaggtagtgccgacatggtggccccgcta

SEQ ID NO: 132949 - DNA, 1626 bp, Zea mays
  Clone ID: MRT4577_5273C.1
ctcggagttcactgctgtaaatatgggtaacaccgtaccagttgaaaatttaaaggtaagaacaggtaaaattgggactgcattgcttcaaaagttactcccttttgtctgttgctggctagaatatgggctgggaagccgaaggaggacaaatcttggtcctacattggacaaagcacaagctgcaaagatacaggagcaggaaggcctacttagagcagcagtaaattatggtgaaggattacgggtacctggagatcagaggcatccacaatctcttcctatccatctgatagaagtgcttcctttaggagacggtgcacaaaattttggtgatagttctggtagttatcccaaaaatatgtcaacatttgcacctaatagtgtcaacagccagggaaatcagattcaggcatccggaggacagttacttggaaggcctgcgccatcacctggaaccacaggaacccctaatttcgagaatgtgtccactcctccaatgccatatgctaactctcctaggtcaggcaccaatatgatgaataccccttccccccagcaacatctaacaccacaacaacagaggcaaaaactgatgcaacattctcaaccgcttcaccagccggtgaggccatcagctgctgggatgctagcacagagcgcacttcctcaactacaagatttacaggggcaggctcaacaaaaactacaggtccctggtcaacagcaaatgcaatacaaccaagcattgtcacaacagtttcataacagacagatgcaacctggacgtatgcaaccaggcatggctcagagtcaattgaatcaaggaactcagctacgaagtcatttaggccagtttactggagctgcaaataatgcgatgttcaatgctgcacaggcatcatcaaactcacaaatgatggcaaatatgcatggatcacagtcgcttatgccacaaatgcagtatggtatggctggtgggcatccacataggagccatccccaaatgctgactgaccaaatgttcggtatgggagccacaaatagcagcatgatgggaatgcagcagcagcagcaagggctatacgggaacatgcaggcaggtgcacagaacgtgccacagggtatggcgggccttcagaaccagacccagaatcccaacttcactcagcagaggcaacaaaaccaacaatgatttaacactaacgttcacggaggttgaaagatgagcaatatatccgtcgttttgctgcttgtctgttggtctttactcagcttatctgtgagactgatagtagccccaggttagccttcgttttgctgtaaatcattagcgagatgcaggtcaattataattatatacgttgtaactgtgtttcggatatgtctaatatgttttgttggaatcgtgttacgcgcgttccttttatttataattaagcctcgcagcaaggccggcaatcgaattgcatacggctagacgggtgggtagttcaccaggatgaaaatcggtcatcaggtggaccctagaattatttgaggaactcacagatgtactgtaatatgtattccctgttgtctttctggataaatatcccaagatgttattacgtctttcatgcttgc

SEQ ID NO: 132950 - DNA, 377 bp, Zea mays
  Clone ID: MRT4577_52740C.1
tgggcgtgccgccgcctctcttcggcggggcccgcgtggcgctgcgcaagacggcggcctgggcgtagccggcggcaagctccggcagcccgggggggggggggacagcgtgcactacctgggcccgctgtccggcgcgcccccgatcttcctgacgggcgagttcctgtgcgattactgctggtataccgcgcgggtgtctgcgggccctggccaacgttcgccctgaaccgggagctggctgtcctccactcccggtcggccgtgctggctgcggctggctggctgtttccggcgctgcttgaccgctgccatgttcgttccgcgctgtcgtgtggttcgcggaccgccggccgtctttttgtccaggatgggct

SEQ ID NO: 132951 - DNA, 277 bp, Zea mays
  unsure (1)..(277): unsure at all n locations
  Clone ID: MRT4577_52741C.1
ggaangaccgggccgacccacgcgaccggccgcccacgcggacgccacgcgacattcacgcaagaaaatcgcacggggggaaaaaacccagtcggacggcacccaacccacacggactgagagcaaaccgaccaagccagcacaaggacagcgaaccgaaggacccaccagccaacagcaccacaggaaagaccccagcggccaccaacaagcaaccgaccacaacccggagcagcaagaagacaaaacgagaaaacaagccacgggagccgaacaa

SEQ ID NO: 132952 - DNA, 278 bp, Zea mays
  Clone ID: MRT4577_52742C.1
cgcagcatgcacccgagcgaccgtccgcccaaacctttttttttatacacagacacccacgacatggagaggggacaatcaaccagaaggtgccgaaaaaccgcacgaccgagcgacagcaccgcggagggccagcaccagaaagcagtgccccaggcaggaaacacccgcaggcatactctccccgcaacctaaacgaagcctggaaccaacgcgcccacggtgggagagcgccgccaccgaagagacccagaccatacgcgggatgggccggaaca

SEQ ID NO: 132953 - DNA, 372 bp, Zea mays
  Clone ID: MRT4577_52743C.1
gggacgcgtgggcggactcgcgggcgaaggctcataccttcgttgacgcatctatcgtggagttcatgaaaggtccacggatccctgagatctaccccgacgatcctatcatgaacgacctgaacgctgcttgcaaaagcgagcctgcaagttctgaacccaagagggcggctgagttgatatacaaggctgccctgatctacagtggggatactcctgacagtccaacgtagctgagatgcaagatctacgatatgatgaccatggccctcagcgggagatcggggatgttgcagacagatgaggctgaaggcatcgccagcatggactacgctgactcttctggaggtgccacgaccactaccacgacgg

SEQ ID NO: 132954 - DNA, 400 bp, Zea mays
  Clone ID: MRT4577_52744C.1
aataatgtacattggggggcgtagaagcctgaacaaatgaacctggactgcatcacctttcccatcctaagcatgtttaacaggaccgttcgcccggcccacaagctaatattcattcagctggccttttgattgcatgattactagctagtgaatccagagaaggaaaagcatcgaacgaacgctaggcatgcagatgagccgctgagacagtgtcacggccttcatgagctgagagtgagacggagatagaaatgtgtgcatatccattttcgtgtacctccctgactgttgacgccatcagccatgatcgtgcacgaccacactccaaccaccaaggcaatcaaaatgtccttaatgtgggggcaaacggctcacatgccatatactaaacatcctt

SEQ ID NO: 132955 - DNA, 477 bp, Zea mays
  Clone ID: MRT4577_52745C.1
ccctcctttcttttctcatatgggaacgctcccacctgggtaccttgtaggtaacaggcaggggcgcggaccggccgccgtgcgaggggagccttactgacgaacatctgtcacattggacaggcacatgcatcctatggagctcggagactaccctgatgggatgaggaggaaccttggatacagactagcgaccttaacggaccacgatgctgacctagagaaggggtatatcgactcagtgggattcaaccactacatcattgattacatcaaggatgaacttggccgcctagacgaccaagtgcgagactacatggtcgacacaggcgttacgtatgacatgccatttatcaaactacgcaaccagaacccgttacccagctcgacgagcgacatcacgaccgccaccccgtgcgctcataagaaaacgctggagcatttcctgaggacatacaagaaccattgaatcatgat

SEQ ID NO: 132956 - DNA, 490 bp, Zea mays
  Clone ID: MRT4577_52746C.1
tttcgccctcgtctccgaccaccgcagcggcgactccgcctcccggtgatcgggccgggcaggccggcaactaacgttcggccttgaccgtccgtcgttgtcaacacctctcccagctcagctcggctcggctcatctgccgccgcgccggcgttcgttgtgcgatccgtcgtccgtccgggcggctatatctgggctccgacgacaacatgatccaggtaccgaccgacaaaccgaccgaccgaccgaccaggatgtaaataaggtgaagcgtgattcattgttggaggctgtgtgactccggattctttttgaggtggtcgaagcgtgtgtgtagcattgcattggtctgtcgcgtgcatgtagtagtagtaagcacaacgtgtcctgctgctgctgctgctgctaggtatctgctttgagctccctccctccccctttttttgtgcatgcattgactcgttgttgactggagatggagcttgcgatc

SEQ ID NO: 132957 - DNA, 242 bp, Zea mays
  unsure (1)..(242): unsure at all n locations
  Clone ID: MRT4577_52747C.1
nagatcgcaagcgggcgccctttataatttttttgattactttgcactaatcccaaggcaggtgttatattttttataatcttttccaaatcatcaaacccattgtttgttacaattgcgtttgcaaagacttctaaattacttactttcccaatttaataaacctatttttctatgagttccaaccctaattttctgtttatttattttcttatatttttttatacttttatcccttatta

SEQ ID NO: 132958 - DNA, 177 bp, Zea mays
  unsure (1)..(177): unsure at all n locations
  Clone ID: MRT4577_52748C.1
agatatacatgtacagattggagtanttanaacattatttctgtagaacaaagcaactacgttcatcaagaagagaccacaggatataacagtagtanaggtatctaatgacattgttgtgaataattcacaggcattacggaatgacataaacagaacgcttcacttgttccgtga

SEQ ID NO: 132959 - DNA, 610 bp, Zea mays
  Clone ID: MRT4577_52749C.1
tgctggtcttgggtcgccatccagatctcgctggtctcggggacgctggcgaggcaccccctgcttcccaggcggaagccgtgctctcgtctcaatgtcggacttacgggggtagacaaccccctccaccacagatgcatccatgtgctgcagactcctgtcctgaactctttaaagaatggggctgctgataggtgaacgagtagtgaacatcatcatgacggtcgtggacctcccatgtgagggtcaggtagtgaacacaaaagcggtttacaatgcccgttagggctaggctaattctctcccaggcagctaatgcttaacaatctgagtgcttgccttcggaagcattgatgatggagatgaagtgtgtacttcaaaaaagctttgtgcgatggaactcttgagcttattgttgtcacgactgatcaggagtgcttgtcttgtagtgaatgagtgaggacagttcttaacagggctagggatcccggtcacaaatagatgcgatctgatatccttaccgagaatatgaagatcagggcgctgacccgaattgccttcctggatgagcctgacggattgtcgttttggtaattataggagatgcccg

SEQ ID NO: 132960 - DNA, 109 bp, Zea mays
  Clone ID: MRT4577_5274C.1
cgttagtgttatttattgtcactaccgcccccgggattgtgattcacggtcactacctccccgtgtcaggattggggaggtagagtcaataaataacaataccgggcgc

SEQ ID NO: 132961 - DNA, 715 bp, Zea mays
  Clone ID: MRT4577_52750C.1
cagatcaccaagcgcggcgacaccgtcgatgaaaagatcaagaagctcgacgccgagctcgcgcgctacaaggagcagatcaagaagacgcgcccaggccccgctcaggaggccgtcaaggcacgagccatgagggtcctcaagcagcgcaggatgtgagccaccaccgtcccttcctgctctctgcacccccacccccctagcccttgctctcttcattcacatacatgcagtacatctctcctcgactagtacattaccaatttattactttactttttgattacactcctgcttcagataattacaaagatgtctactttaccatgtccatacatgagagccagcctaccttcaatgcttatttgcatgattgcatctactcatctttagctaactgcttgggattgtgctgaatcaatcaatgcattccataaacatacaactgttgtcttacttgatacagacattttaactatcctattcctatttggctatttctgtatataataatatatactgtcaacaccagtatagataaatatgtataaattgattttctgatgtgtgtccatgtcaattttgcaaacaacatgtcgattgcatcatgactcgagggagttgagtatagtaatagtttctccaagacctaggcaaggggaaaatgagattgcttttattaccacttccttagtacattcttttagttttccag

SEQ ID NO: 132962 - DNA, 267 bp, Zea mays
  Clone ID: MRT4577_52751C.1
tgcacacgcacgcgtgcctaggatcctatagcagcggacggcccgtcctttttttttttttttttttttttttttttttttgctgaaatccagtgaataataccagtccacacggacttagtgacagcttgcggcaacacaacgcgccgccccactttttttttccttacccccaatttttaaaaaacaggggggggaacaggaaaccacctacaattatggcccggcacaaattttaaaatgaaaggtttgaaaagcccctttttt

SEQ ID NO: 132963 - DNA, 842 bp, Zea mays
  Clone ID: MRT4577_52752C.1
cggcccgggcccgccattccttccccgtcggcaggcgtccgcatcccttccctacgcacgcctctagtacagagtggagatccaaacggagttgtgtgttcccttccagttgtcttcgcgtctttggctggttcggaaagggataggatggacttgcttgtccgtttcgtttcggcctgcgttattctcgccttgtttgatttgagcgctggaatccaaactcccgcttacctttcaaatcagtcgttcaatgtagtcgttccatgtttgctgcgtgcctgtttttattttaacgattttttctagggattttccccggcgtgtttctgccgatgtacatcggtcgttattaatgcttccctgggtagatgtcccatgttatcttgaaactagaatcagaattactccaatttgggtcaatgtgaatatggaatagatgtatgtgttgtgccgacttattctggagatgagcagggcctggatctttgattcattagtggtggaggtacaaactgatttggatattcttgtttcagctttcaacatccaggaaaaaaaaaatcagatgtacatgggtcggcacatattgaatcacgggcatccaatccaacgtcctccccttcatgtcctatgtattttgcaccccgcaccccaaggatctcagatggatttaatatgtgcacatggtgcacctgatatgctctcggaaaaagcccttcgattccattgcgacagggaccaggatagtgcggcattaaggagtcgtttttgctgtgcgttgcacgctgtctttctgtacttccactccggcaatcccacccgtcacaaagaccatgctacct

SEQ ID NO: 132964 - DNA, 338 bp, Zea mays
  Clone ID: MRT4577_52753C.1
tttgtttgtctaatgccaaacagcgaacttattcatgatttgccatagttctgggtagtacgcacacacaacacaaccgggccattattaaaccaacactgacacgaacggtagatactttgacaacctacatatggagagggcaccacacgacgcaggcacatcggccgcttaaacgacccatgtcttactgaccaccacggaaacggagcacatggtggagggtgctctcctttcggatgttgatgactgctagggtgcggtgatgctccatctgtttgccggccaagatcatactctgctggtgcaggaggttgccctccttgcactggatcttc

SEQ ID NO: 132965 - DNA, 512 bp, Zea mays
  unsure (1)..(512): unsure at all n locations
  Clone ID: MRT4577_52754C.1
gcggcagcaaagggggcccagaccaccgacggggtaaaaaaacatcacgaacaccgcntctacatagcgggagtagngaggaacgaaagagagggggcggcctagggcttccattccgcacccatggcctccgcttactgtttggggccgctcatcgtcctcgtacttcttcgtccgccgtcgtcgagaggcgcaatcaggcgtcctacgatctcgccatggggatcgacaacgctctcgccttcgctgacgagctcgacgagccgctccgcggtgaaaagaaatacctcttccacttttcacacttaggcttgtgactattcctcctccgcctgctctccatctgcaagcttgccaaacaagagtcaagacactcactaatggatgttaaaatagcctctgagacttggtccctattcatcatgntctattggagtatgatgaggattgtgagacttgatttgaagcacctgaaacaacatgccccagtcaactgttgaagacaatggcct

SEQ ID NO: 132966 - DNA, 275 bp, Zea mays
  Clone ID: MRT4577_52755C.1
tttttttttttttttttttttttttttttttttttttttttttttttttttaagcaaaaaaaaagggccttttttttttctttccacagttgggggcccatttcccaaaaaggaaaacatcccccttttttacaattttggggaaacaaattttttccctcggggaaaaaccgcctccatttaatacctagcatgcccccttatttggtgggagaaaaatttgggtaaataacatcgcctccgtcacctggtttttaaaaagggcccgctgaacc

SEQ ID NO: 132967 - DNA, 266 bp, Zea mays
  Clone ID: MRT4577_52756C.1
aatttagagctggttttttttaacagtagtaggaagcgccgtggggggcagcagcaagaatctacagccgatccaactcacgctgatgctggtgctatccaccgacgtgacgcccatcatctagctgacagtgccagacgacgaggtagactgcgactgcgacaaactcaaagcgcccaagccgttgaacccgtccaagaccaagtcataccatcacgtagccagttcctaagcccaagaaccccaagccaatcaagggcattacc

SEQ ID NO: 132968 - DNA, 478 bp, Zea mays
  unsure (1)..(478): unsure at all n locations
  Clone ID: MRT4577_52757C.1
ggatatcgtggtgggcgaggaggaagaagaatctgagggagggaaagagcagctccccacccacccaccccaaatccccacgatgctcnccgtcnccagncacggagccgacctcatcctctccctcccgtaggacgtgctggtgctcatcttggcgcacctccgaccccacaacctcctcgtgctgtccgacgagcacctcctcatctttcgtgggcggctgggtcgacaacgtgcgcactcttgcctactcccccatttatgaggtgagcactcctacatcttgttctgcgcctcactggacgcatgcagatcttcttcaataccctcactgctgagactatcaccctcccagtgcagtcttctgacaccatcgacaacttcaaggccaatatccagcacaagtgagtgcatccctccacaccatcattggctcatttttgccggcttgcatcttctttgacgggcgcactctggt

SEQ ID NO: 132969 - DNA, 332 bp, Zea mays
  Clone ID: MRT4577_52758C.1
cggacggtgggcggcgctgctgaggacactaggcccgaccgcccgaggaaggaagagaaacccgcagagggcgagagaggtcagcgcgattcggagatgggcatgggcgacgaactgtgggacgactcggcgctggtcgtcgccttcgaccgcgccatttccacgttcaatgaaatgcattgcaagagcagtgcgaagaaggaacacgctgctgctcctgcagcagaagaggagcccattactgcaggagcagtggatgcgtgcagagaggaagatgccaactgtgacaacgcacagacagttgagcaacagcagctctctgacgacaggca

SEQ ID NO: 132970 - DNA, 848 bp, Zea mays
  Clone ID: MRT4577_52759C.1
aaccacctccattcacttcacccaggcaccgggagcgtgcgtgaccgtcacgaggaaggagatcgggagcgcagccgcaagccggcaagcggaagggaacggctcgtcgccggcggggccacgtacccaggccggggtcaccgtccgggcggctggggtgggcgaatcgattctgcgtgcgcggctgggtcgaggtcgagatagcctttggacggggtgaggaaagcgagagataaaagcgagacattgaaggcgcagaacccaaagaatgggtaagagaggaaagtggtttagtgcggtgaagaaagtcttcagctcctccgatccagatggaaagggagccaaggcccagaaggcagacaaatcgaaatccaagaggagatggccatttggaaagtccaagcactcggagccttccatatcgacggtgccaggcactgctccagcagtagctccgttgccatcaccaccagcaactcagccccactctctggagatcaaagatgtcaatccagttgaaacagacagtgagcagaacaagcatgcctactccgttgcgcttgcgtctgctgtcgctgctgaagctgcagcagttgctgcccaggctgctgcggaagttgtccgcctcacagcagttaccacggctgcaccaaagatgcctgttagttcgagggaagaacttgccgccaccaagattcagactgccttcaggggtaatctggcaagtagagcattgcgtgcactaagagggcttaatagattgaagtcgcttaaggatggaaatgctgtcaacgcccaacgctcacacttgcatgcacacagcaatgacaagagttcaactcaatcta

SEQ ID NO: 132971 - DNA, 505 bp, Zea mays
  Clone ID: MRT4577_5275C.1
cgaggaaaacttttttaattcagggggttttaaaagtcccacttttgttggtgatccaaggaaaaacaagggaccggggtaactttgaacgtaaatccagttaagggccattaaacaaatttttttttttatgcctttggaaaaaagatttgttcctttcaagcccttcaaaaagaaaaaatgattcattggcgaaggggatgcggttccatttttcctttcccaaaacactccttggacacaaaataacaaactttttttttgccagtttgcaaaaaaaataaatttcgtcataaatcccctccaaaaaatacaaatttattttccccatgacaaacatggaaccttttggtttgggagggcaggggaaccccttgatgccctttttttttttgaaacatatttttgaggtttttgttagcaaaccaatgatcctcctaaaaaaattttcctttgtgttctaaaaaatatggggaagggctccctgaaaaaaagttgccggatc

SEQ ID NO: 132972 - DNA, 398 bp, Zea mays
  Clone ID: MRT4577_52760C.1
ggtcaatctaatcttttgccatctttattgtatggatgtcacataaaataccatattaatgactcgactgttagtgtcatccgtaaagtcgataaaagattaagggtctgtttggttgggttgtggttgtgaaaaaaagttgttttgtgctatgggctatgaaaaagctgttgtaggttgtgatctgttaaaaagctaaaaaaagttcagcgaaacccactaaaaaccgcttaacattgttacatatatatttcgccactaaaagtaagtttagaggtggtttcagttttgcactgcgagaaaaccacttttagaaaaagctgctttccggatttagccctttggtttggcttttggtttttagagggtaaaagccaagccagacacacttttaatgt

SEQ ID NO: 132973 - DNA, 2158 bp, Zea mays
  unsure (1)..(2158): unsure at all n locations
  Clone ID: MRT4577_52761C.1
ggtggtgtactcggtggagggaaagaggaaagcgagagataaaaaggttgggccgcttgcttgccctgggacttctatctatccccacctccttctccctttccgcccccggtttattttttcttcgtcctggatgcgtcggtcgcgtgtttgatctgactaagccgcggaggagggtgctagatgtccgtgcggtgggcggtggctcccgagggcgaccggagttaggtccttgccgccttcagtgcggtggggaagcgagacattgaaggcgcagaacccaaagaatgggtaagagaggaaagtggtttagcgcggtgaagaaagtcttcagctcctccgatccagatggaaagggagccaaggcccagaaggcagacaaatcgaaatccaagaggagatggccatttggaaagtccaagcactcggagccttccatatcgacggtgccaggcactgctccagcagtagctccgttgccatcaccaccagcaactcagccccactctctggagatcaaagatgtcaatccagttgaaacagacagtgagcagaacaagcatgcctactccgttgcgcttgcgtctgctgtcgctgctgaagctgcagcagttgctgcccaggctgctgcggaagttgtccgcctcacagcagttaccacggctgcaccaaagatgcctgttagttcgagggaagaacttgccgccaccaagatccagactgccttcaggggttatctggcaaggagagcattgcgtgcactaagagggctagttagattgaagtcgcttgttgatggaaatgctgtcaaacgccaaaccgctcacaccttgcaatgcacacaagcaatgacaagagttcaaactcaaatctactctagaagggtgaagttggaggaggagaaacaggctcttcaaagacaactccaattgaaacatcaaagggaacttgagaaaatgaagattgatgaagattgggatcacagccatcaatccaaagagcaaattgaggccaacctaatgatgaaacaggaagctgcactcaggcgagaaagagcacttgcatatgcattttctcaccagtggaggaattctggtcgaactataacccctacttttacggaacctgggaaccccaactggggctggagctggatggagcgctggatgacagcaagaccatgggagagccggttggcggcggcatcggacaaggaccctaaagaacgtgctgtgacaaagaatgcgagcaccagtgctgttcgagcacctgtatcccgtgccatctcgattcagagaccagcaacaccaaacaagtcgagccgcccaccaagccggcagtcactttcaaccccgccatcgaagaccccgtcagcctcaggaaaggccaggccggcaagtccaaggaacagttggctgtacaaggaggatgacctgaggagcatcacgagcatccgctccgagcgcccaaggaggcagagcacgggtggaggctcggtccgggacgataccagcctgaccagcacaccacctctccccagctacatgcagtcgaccgagtctgcacgggccaagtctcggtaccgcagtctactactgactgagaagcttgaggttcctgagagagcgcctctggcccactccgttgtcaagaagcgcctgtcgttccccgtcgtcgagaagccaagcgttgtgccgacagagaagcccagggaaagagtgaggcgccattccgaccctccgaaggtcgatcctgcgacgctcaaggatgcccctgctgcctgaccagtgaccaggccttatgtgattgttaggtttcgtgctcttttaacaccgtgatgtattatctgagttaggttgctttgttcgtgtcatcgtatgatctgtccgggttgattttgagacagttctaactgtgtttacagacaatgcgtgatgctaaatgtatgtgtggttggttggctttcaatgtactgatatgatagtatttgatttaaactttgctaaggacttgaggtgcaatgtgaatacatttgcgagtgtttgggaacaaaaattttctaccgtattgactcaatactgcagtattgaggaatattgtagtattatatatntttgaggtgtttgggaaaaaanaaaaaaaaaaggcccctagggcc

SEQ ID NO: 132974 - DNA, 424 bp, Zea mays
  Clone ID: MRT4577_52762C.1
caaggaaacgcaggctttttaaaattttaagatttttcttcattgattaaacttacaattaccctttatcacaaccgtttacattttccccccattttttttagagcaaacaattttaaaattatttttccctttttcaaaaacaaaagccccggtttggtttttttttttaaccaccctttttcttttccccgaattaaaaaaacccaaattccccagcaattcggagcttaagcacttctcacttttttgtctttaccctacccttgggtgttaggacccaaagatttcagtcacaattgccctttaaaacaaaaaaaaaagtacccccgtttgtacaaaaaatttttttcaaccttggttgttccgcagaagcaaaaccttacagtacaggagggtccacgcccttttatagacctggggt

SEQ ID NO: 132975 - DNA, 519 bp, Zea mays
  Clone ID: MRT4577_52763C.1
atttacttttttttcttttttctttttttttgcatggccccatctgcatacacaacatttgatgagtgcaggtttcaacagcttgcatttggtaaagttccagaccatgatcggcgcccaccagtccctctccctaggtggcacaccatgcgcgtcctttacgttaggttatccccatcaccacccagaccaacatcttctctttaatctggtacccctcccggaacaactgcaaccttaccaactacctgaccaacccggttcactacacccacgaatcctatgtcaccgccgactactgtgtccccttccgccgccttaccggccactcccacttaggacaggactactctcttatgccatacggctaatgggaacagtctggactctgtgaacgcgagctccatcttcagtatctctgcttctgacccaacccctactggttctgcgctcacacgaaggactttgtcaacatctgctacctcgagtccaaccaccttatcgcatacctcaaccccg

SEQ ID NO: 132976 - DNA, 375 bp, Zea mays
  unsure (1)..(375): unsure at all n locations
  Clone ID: MRT4577_52764C.1
aaaccccctgggtttttttttttttttttttttttttttggttgatttttttttttttttttttttttttttttttttttttttggggccgggggttttttgcccccttggggggtngggtcctttttttttttttttgggccccccctcantttggcaattgtttgggtttccnctggtgggaacaactgtttccggntggggggggggggggtttcccccttnntttcttttcnggggccttnctggccctttgttttttccccccntgcctggntcggggcggggcgttnggttttccgggggggttgccttgccctttgggttttgggggcnnggcttttgttttttggtttgggtcccgttgggtggggg

SEQ ID NO: 132977 - DNA, 641 bp, Zea mays
  unsure (1)..(641): unsure at all n locations
  Clone ID: MRT4577_52765C.1
atgctctgcgtggcgtatccttggtttctgattgctcgagatgattgtacttgttctcttgttgctgttgatcggatcgggtcgatcgctgggctgcttggataaaaacgntgtcgngctcgtcgccgngnccgnccccttcttccgccccggccccgttcccggcctgggggggcatccctccgaccccgcacaggctaattattattgacacgcagttaggggccggacacaccctgtccgactccacctttacaaaggagagcaccctcccattaacgttgagtataaggggcggaatgcaaatcttgctaaaaactctgactgaaaaaactataaccctagaggacaagactagtgatacacattaaacaaaacaaggccaaaaacacagaaaaagagggcattcctacaaacaagcaccgattaatttttgccggcaaaaagctaaagaacggaagcacgcttgccaactacaacattaagaaagaaagaaaactaaatttggtgctgcttttcatggggtgaaagaaaaacttcgggaaaacactaactggcaaaacaacaaccctcaagggagaaatcttggacacaatcgacaatgtcaaggccaagatcaagaacaaggaggggattccacc

SEQ ID NO: 132978 - DNA, 379 bp, Zea mays
  Clone ID: MRT4577_52766C.1
cattggaaagagctgaacgaagttctgcgttccattttctttcactcgctggtcacgtacactaggccgtggagaagaacacaaattaaagcttcaaacccaaaaggggagctagctgtacatcgcggcacggtgagcgaggatctacgccggcggcctggcgcgtgcatatgggagggggagcgtacgccgtcgtcacctcgcctctcaacccaagtctctctctggctcaccagtctcctgtcaccaccgtccaccggagatcaaggcttctgaggtttcttcgcatgaacgcatggaccacgactgactgacgcctgcctactatagggaacataacgcatggccggagctacgtctagatgaacgagctcatgca

SEQ ID NO: 132979 - DNA, 1749 bp, Zea mays
  Clone ID: MRT4577_52767C.1
attgggtacctcgaggccggccgggagacaaatagcacacaatcaaccgtcgtctccttcctcgccttcataggcttctccaaattccaaatcgttgctagagaaaccaccaaaccggccggcagcccggcacctctcactcagtctctcaccccttgccaccactctcccgtggcgccttctagaagcttccggaaccagacaaccactctgcgccgagttttctgaaggcggctttggtctttcgagatctcgttgtcggtgccatggcgggtcagtactgagtgcgcgggcgggagcaggtgaaggtctgccagctcgagatcccgatgcagatccgggagggcccggcgcggcggcaggcgccgtcggccgcgggggcgctgcggtcgccgttgtccgccatgatgctcgccatgttcgctaccatggcctccttctacgtcgccggacgattgtggcaggatgctcagaaccgagtctacctcattaaggagctagacagacgaacaggccagggacaatcagcaatatctgtggatgataccttgaaggttgttgcatgcaggcagcaagggaagcggttggcatcgcttgagatggagctggctgcagcaaagcatgaaggttttgttggcaaatatactcccgagacaaatggaactcattctgggaaaaagccactggttgttattggaataatgactagctttgggaggaaaaactaccgtgatgctgtcaggaaatcatggcttccgacaggttcaatgttgaagaaactagaagaagaaaaaggcattgtagtacgttttgttgttggaagaagtgcaaatcgaggagatacttttgatagggagattgatgacgaaaataggagcaccaaggatttcttgatattggatgatcatatagagtcagatgaagagcttcctaagaagacaaaaagtttctttgctaatgcagcaaatacattcgatgctgcattttatgctaaggtcaatgatgatatatacataaacgttgacactttaagtgcaatgctcgaaactcactgggacaagccccgtgtatatataggttgcatgaaatcgggcgaggttttctctgactcaacccacaagtggtatgaaccagactggtggaaatttggtgatgggaaatcgtacttccggcacgcttctagtgaaatgtttgtcatatcaagggccattgctcagttcatttctataaacaagtctgttctccggacatatgcccatgatgatgttagtgtaggatcgtggatgattggccttgctgtgaagcatgtaaatgaagcaaagctgtgctgttcatcgtggccctcaggtgcaatgtgttcagcgctataacgagcaacaatgcatgctgaggagttttgcaaacatcgtgcctggtggataatacatgcaatatgaggtcgaatacctgaggaaattttgttttcttctgccattttctgtaacgtcttttggaggaagcttttgcgagccagttcataccgaatcagatatcttgttttttttctttgcaaggccactacactagaatcgtggcttctaacaaaaagccttctgcagattttatcctgttccgtgtgccatttgtagatgccccacccttaccattctttttctgacagacactgccattgttggagtgacagaaatcaatagcaattcaggaaattattttggtccagaaaaaaaaaaaaaaaagcggccggtcttc

SEQ ID NO: 132980 - DNA, 1876 bp, Zea mays
  Clone ID: MRT4577_52768C.1
cggaccgtgggcagcaatcaaccgtcgtcttcttcctcgacgcctcataggctcatagggttctccaaattctaaatcgttgcaagcgaaaccaccaaaactgtactcacaaccctcgtctgcgctgcgccaccactcccccgtggcggcttgtagttgtagaagttcccggaaccagacaacccctaggcgctgagttttctgatagcggcttcggatatctcgtcgtgggcggccatggcgggcccgtgctgagtgcggggcgggagcaggtgaaggtctccgagctcgagatctcgatgcagattcgggagggcccggcgcggcggcaggcgccgtccgccgctggggcgctgcggtcgcccatgtccgccatgatgctcgctatgttcgctactatggcctccttctacgtcgccggtcgattgtggcaggatgctcagaaccgacttcatctcattaaggagctcgacagacgaacaggtcaggggcaatcagcaatatctgtggatgataccttgaaggttgttgcatgcaggcagcaagggaagcggttggcatcacttgagatggagctggctgcagcaaagcataaaggttttgttggcaaatatactcctgagacaaatggaactcattctgggaaaaagccactgattgttattggaataatgagtagctttgggaggaaaaactaccgtgatgctgtcaggaaatcatggcttccaacaggttcaatgctgaagaaactagaagaagaaaaaggcattgtagtacgttttgttgttggaagaagtgcaaatcgaggtgatactttcgatagggagattgatgacgaaaataggagcaccaaggatttcttgatattggatgatcatatagaatctgatgaagagcttcctaagaagacaaaaagtttctttgctaatgcagcagaaacattcaatgctgcattttatgctaaggtcaatgatgatatatacataaatgtcgatactttgagtgcaatgctcgaaactcactgggacaggcctcgtgtctatataggttgcatgaaatcgggcgaggttttctctgacttaacccacaagtggtacgaatcagactggtggaaatttggtgatgggaaatcgtactttcgacacgcttctggtgaaatgtttgtcatatccagggccatagctcagttcatttctataaacaagtccgctctccggacatatgcccatgatgatgttagtgttggatcgtggatgattggccttgccgtgaatcatgtaaatgaagcaaaactgtgctgttcatcgtggccctcaggtgcgttatgttcagcgctataacgagcaacaatgcttaatgaggaagagttttgcaaacactgtgcctgttggatcgaatcggtattgggaaaattttgttttcttctgccatcttgtgtagtcctttggaggaggcttgtacgagccagttcatactgattactggatcggatatcttgtttttcttttccaaaggaaaggtcttgcatattttctttgcaaggccactacactagaatcatgagttctgacgaaaagccctctgcagattgtatcctgttccgcgtgccatttgtagatgccccaccctttaccattctttttttctgacagacactgccattgttggagtgacagaaatcaatagcaattcgggagattactttgctccagaatacatttatgcgtaatgcgtgtcttcacaaaaaaaaaaaaaaaaaaaaaaaaaaaaaaaaaagcgcttgattcggaacggctgaatcagcagccaaagttccgctgaactttggcacgacatacataggtggcatccaaacatgcccttgggttcctcactg

SEQ ID NO: 132981 - DNA, 784 bp, Zea mays
  Clone ID: MRT4577_52769C.1
tggcttttctgggcaagctgctggacggcgagaagcacgaggtcgcgttcacggtgaccaacgccatggacacgtggttcgtcgacgccaacctccacctctggctggaccccaggggcgcagccacggcggcgggcattgtgagctacgacgcgccgccgctggacacggccaccgcgactctgcccgatggccccgacaacgggctctactacacgacagcgttccgacacgtctccgcctccgggtgggtgcacacgccgtcgtacggcaaggtcacggcgacgtggacgcaaaggttgggctacgagaacactatcaacttccgcgacagctttttccagccggaggtgaaccagaccacggacgcgtactccgccgcccacgtcgcggaccacgccggcgtgctgtacgcgcaggaggcgcagcagagcttcacgctgtacaagttcgtgggagtggtgaaccagaccgacatcgactcgtacaccgcggcgacgaaggtgcagctcgggttcagcgacgaccgcgtcgccgccggccggtcggggttctgggcccggtcgctgagcaactcgcaggagtgcgcccgggacgtggacgtcgaggacggggaagccgtccgggagtcgtgggccgcgcgccagacgtacaggtatgaggcctccgacgcatgcttcttccggaacgtgaccagccgaggcaacaacgtggtgtccgatcactccgacgagacctgcgtgaaggaatcgccagccgccgccggtggcattgcagagcgggc

SEQ ID NO: 132982 - DNA, 684 bp, Zea mays
  Clone ID: MRT4577_5276C.1
caagtagcagtaatttagccattttattagtttttctcgacctattccttcatctttagacgactctacgccatctagagacgtcctgggtggcatgctgaccccggagcatctcctggaactctcctcgacgggtccctctcgatatgcaagctctagggtggcttcatcgtgaataagacgatctgcgttgttgcacacagtccggcgccgtgcagagaagagtcgctcctgcagcgaggtcatgaaccgtcccaacctgacccgcggatcatcccgacccgacccgcggaccttccgtgctcacgcaaagatcatcgtcaagagtttcatccctagtgcttagtcccgaatcggagccaacactatgattttatatttgatttattattggatttcttggtcttgtcaaggttatgatgaagggtcatgttaatggtttaaaaaaagctaatcatggaaaagtctccttctgcttattatattcattgctttgcacatcaactttaactcacccttgtggcgggtggtaaggacaatattgattgccattggttcttttgacagcttgcatatttgttgaatgtgcttggaatgtcttgtaaaaagatctctatgcttcatgttgctcaagctgaatatatgattgaagcattaaaaattggttaaatagaaactgggcca

SEQ ID NO: 132983 - DNA, 184 bp, Zea mays
  Clone ID: MRT4577_52770C.1
gtaccggtttcggaattccgaggtacgcgtacgcgtacgcgtacgcaccggattcgttgtccgatcgttctgctctgtccgacagtgagctgggtccggggatacgagtaggagatgccaccgacacactcagacctgagaataaatattggtattgcgtgtgtgatatttattagaagttaag

SEQ ID NO: 132984 - DNA, 459 bp, Zea mays
  Clone ID: MRT4577_52771C.1
ggaacaaaggcgcgaggaaaaaacttgttcgaaataaaggggcccccccttaatcctcaaccccagaggaacaggaccccggccagttcgggggatttaaaaaaggcccggccctccaccccgaaaaaatcagttttttttcccccaaaatgggaaaaaaaatccccaaacagggggaaaaaacaaatttttgggccctaaggacttttgggcccctgcaaggggtttattttggggtggggccctcgggaacagttggggcctttttggaggggtagtttggggtcccaggaggggggggttttcgaaaaaaagttgggaaaggggtttaatttttttggcccccagttcagggaaaaagggatcgaccagggggcgctgggcctttcgccctggaaaaaaaaaaaaaaatttggggagggggttcctcaggggcgaccccccctttttaccttttga

SEQ ID NO: 132985 - DNA, 592 bp, Zea mays
  Clone ID: MRT4577_52772C.1
aaaaaaggaagggcccaaagggcccttttttttaaggggtggctacccggacttttttaatatagaagaaatgggataacggtccccctccttggaactaaaagggaaccggttaacccttgggcggaaggatatgctccggcacataatacggaataaacagcccctaagggggggttacaacagcaaaggaccttgttatatccggaaaaatactacctgggaactaacaaaaataaggaggtttggcaaaaaaaatatatccttgttacaaacatgctttaacccctgggaaaaggcctaacgctcgccatcaaaaccgttatgcctccggccattgggttaataaaacttaaagggctggaacataaggcagccctgctttggaaggaggctttttgcttaaaccagtggagcttaaagctaaagctccgggccagtggcctaaaaagccactttggcccctttttgaccatttggaagtggggccattcggcccttgatggaagccatttttgggcccaaacttttttttatttgatctttggccatagaaaggggcaggtaaaaaacatccgttttgccaccaagg

SEQ ID NO: 132986 - DNA, 270 bp, Zea mays
  Clone ID: MRT4577_52773C.1
tgggatgcgtactcacatgcgttggccgatctgaaggagaccactgattctaccgatcgcagatccgatagggacgggaggactgtgcattcatgcacctgaacacgatgctcatagtcatgctgatgtgaggactgagctcttaatactattaaaccttgcatgtgctgacatatatggcgcccaatatacggtggctggaatatgacgattatatcctgctttagaaactaaagagacccttcatgtttcatgagagcttgaaccatt

SEQ ID NO: 132987 - DNA, 253 bp, Zea mays
  Clone ID: MRT4577_52774C.1
gttcctggccgccgccccggacggcgctagcagctaaaccattcggcgaagttcgcagctgtatccaccgggggcaggcgccgtggggagaggtggcgcgcatggaccaggagcgcacggggttcatctcctcgcacgcgcgtctccgggcgacagtagcgggccgggccaaacccaagcccaaggctaatgccaaggcagcgccggccgactaggccttctccatgccgttctatattgggcgcgtacacag

SEQ ID NO: 132988 - DNA, 128 bp, Zea mays
  Clone ID: MRT4577_52775C.1
atagccttaacctattctcaaactttatataggatccacgcttccgctccttcgcaggggcggtcctatcaatccgatccttcaacctaaacacaattcactagccgaactgagcacaacggcgcgaa

SEQ ID NO: 132989 - DNA, 799 bp, Zea mays
  Clone ID: MRT4577_52776C.1
ccggccgggattctttgcaccatcatcaattggcagagaaacaacaatcatgttcaaccttcgtcgccttttcgcgtcggccctgttccttgggctcggcctcctcttcctcgcccagacggccgaggctgccaagggtcccaagatcacccacaaggtctacttcgacatcactcagggcgaccagcctctcggccgcgttgtcatgggtctctatggcaagactgtccccgagactactgagaacttccgcgcccttgctactggtgagaagggcttcggttacgagggctctgccttccaccgtgtcatcaagaactttatgatccagggtggtgacttcaccaagggtgacggcactggtggcaagtccatctacggtgaccgcttcaaggacgagaacttcaagctcaagcacaccaagaagggtcttctctccatggctaacgctggtcgtgacaccaacggctcccagttcttcatcaccaccgtcgtcacttcttggctcgatggcaagcacgttgtcttcggcgaggttcttgagggctacgaaattatcgagaagatcgagaacagcaagactggagcggcggaccgacccgtcgaggctgtcaagatcgccaagagcggcgagcttgatgtcccccctgaaggtattcacgttgagctctaaagaggcaacatccgttttgcacttgtccagtccgctctcgccaccattgataaacttccaaaaaggcggaatttgctgatgcgtagcctctgtcccgttaggccttgtcggacatctgaattcgct

SEQ ID NO: 132990 - DNA, 399 bp, Zea mays
  Clone ID: MRT4577_52777C.1
tttaccttgggcttgatcgagaacagcactggctcttcaacgacaaagaaggatccgtccgtcccatagagcgaggatcactcaccgacacgagtagcaaggagtcttcaccgcaccccaacagagagaagagcggcggctggcggaggatctgacggcaaggaggtagcggccctgcgcttggtggcggcgaggcgctgggcctcttggggttaacgccctgtcgcgcagctaaaacgaacaactctcaccgacgctcttgcttcgtagctcgccaggcccagtgaggcccaacaccacaggagtcaatagcgcagtgaaaatttcctcctgggtcggccgcgcccaccgacgctctccgtctccgtctccggtgatgctgccctcgtcctcacgggt

SEQ ID NO: 132991 - DNA, 619 bp, Zea mays
  Clone ID: MRT4577_52778C.1
tgacgtcgcactggacgcgtacgttaagctttggctcctctagaggcggccgccacccacccccccccccccccccccccccccccccccccccccctttacaaactaaataagttactttattgagggaattccattttttttaaaaggaaaggatccaaacgccccaaaaattaaaccccccaagttttgagttggaaaaaacttcggggactggatatataattacaccttccaccaaataagttaagcttggttcgtttaaaaaaaatgtaggcgtgcaccgtgcaaaatttgccatgaggttgctcgggaaaaaaacagaaaaaattagcgtttttttgagttcgttatcccgcaccacttaataatttgcaggcgttggaactgcatgctatccatgctataaacagttgaaggtccggttagggaaaaaagtccatcttaacatcagggacatcgagttgcaatatctaagctttgcaccttattatggctccaatgctggaatgcgtgcgtccaaaatcaccatgcacaaattccttgatgtatgttccagcctgggtgcataaatgcagcaagtagtagtttgagctgcctggaaatttctaaatctcca

SEQ ID NO: 132992 - DNA, 276 bp, Zea mays
  unsure (1)..(276): unsure at all n locations
  Clone ID: MRT4577_52779C.1
caacaaagaanaacgggattgcagaaaaaagggaacaaaccgggcccaccacaaggaaccctaatagcggagcccacgcccccagcacaggacacaggaccgacaagcaccaacggcaagagggacgacgccagcaggagggagccaacccggcaggaacaagcacaacacaactgccgatagcacaaagcaccagggaaggccacgacaccaaagacagcggcagcagccccactctttacacactgacgacgacagcaatgcgcgccgagcccc

SEQ ID NO: 132993 - DNA, 337 bp, Zea mays
  unsure (1)..(337): unsure at all n locations
  Clone ID: MRT4577_5277C.1
gcagcaaccggncgcataaggaaaacgangagagaccaaccacnncnnccagncaagggggaggagggcgagggganacangagnncaagggagcnncanncncnggggcagnnnncaancngncgaccaccaaaggnggggcgggaannanggcncnnccagcaagnancaagaagcngggcancaacccggggaaacngnngancagccggggggggcggcncacagaggcanccancgacacgcccgnaaggggcagccaccagggcaagaaaacaccanangggnggcngacgggcgaggnnnncgggcagngggggagaacngcgcngcagg

SEQ ID NO: 132994 - DNA, 791 bp, Zea mays
  Clone ID: MRT4577_52780C.1
ttttttttttttttttttttttttttttttttttttttttttttttttttttttggggggggggggtttttttttttttttttttttttgggtttttttttttttttttttttttttaataaaaaaaaaaaacaaacaaaaaacccccaaaaaaaccccaaacaccccccacccccccccccaacggcgggggggggccggaaagggggggggggggggggagaagcgaaaaaaaaaacccaaaagaaaaaccaaaaacccagccaaaaaaccccaaacaccaacccaaaccccaaaccccaaccccaaaccccccccccaaacccggccccccccccaagccggggccgccccccccgccggggcccgagacgggggcccggccccgcgaccggggaaacaaaacgggaaacgggagcgacaacggggggcccaaaccgggagggcaaacgagggggggggccgagccgggagcgggggcgcggagcggcccaggggccctcacaaggggggcgagaccgggcaaagggaccggggaagggaacctcaaaaaggccccgggggggggtacaggaacaaccccttagcgcggagccaaacggacgggggaaatgacaggggggctggcccccccgagggggcaaagacccccccccccagcccgaccagggggggaaaaaaaggccgcggagggcatttggggggccaaaggggggccccggggcgcgccccggggcgccccaccgaaagggccccccccccggggggaacccaggggggaagggccggcc

SEQ ID NO: 132995 - DNA, 429 bp, Zea mays
  Clone ID: MRT4577_52781C.1
tttttctttttttcttttctttttagaaaaatgataaagggaacttggttcattagagtgatttcccgtgtttcttacaccagtgaaagtgatatgaaagaaacactcccactttgtggatttttatgggccaaattatctggaggattatatgtggacatatggtttgcctccataaattttcatgaatctttgaggctatttgtgtcatattaatttctttctacaaactatcaacaaaatgcacacagctttccagataagacttctggatttcccagaagattaatccgaataaaatatccggatattctatatccgacgaatattacacatattgttttctaattcgatatccgaacaaaatatccgtattcgtatccggtatccaaataagtccggattttcaaaaattccatctgaaccgga

SEQ ID NO: 132996 - DNA, 594 bp, Zea mays
  unsure (1)..(594): unsure at all n locations
  Clone ID: MRT4577_52782C.1
ccgggtcgcaccagcgtccggnagttcaccaggcctgncattgcttatgttcagcaggtttgtctccactgcatgaccagggagccccatctaacgccgatgaagcgtgttctatgctatcttcagggcactccagatcacgggctcctctgccttagagctcgttgtctacactgatgttgattgggtgggttgtccagatacacgccgatccaccgtaggttatgctgtgtttctcggtgacaaccttgtctcctatttctgcaagtgttagaacatcgtctctgaggcagagtatcgcgccatcgctaatggtgttgatgtaagtttcttgattacgtcaacttctctaggaactccaccgtgcactgtcccggagcaccctcatctattgcgacaacatcagtgccgtttacctctccaccaaccttgttcaacatgaatgcatgaagcacatggagaccgacctccattttgtatgtgaaaaggtcggcatcagtgaagtctacgtcctccacgttccgacgatgttgcagtttgctgatattttcacaaagggcctcccctccatggtgtttttggagtttcgatcca

SEQ ID NO: 132997 - DNA, 494 bp, Zea mays
  unsure (1)..(494): unsure at all n locations
  Clone ID: MRT4577_52783C.1
aacccaagncgngccnccgcnccggacacccgncgcnccacgcaaccangncgaggaggaagaccagggagcccaaggaggagaacgncacccnnggacccacngnccgngaaggagagnangnncgggggggggcncacancnnngcanccnncaangacaccaacanncanancacngannngncngggagggaaacccnggnncggancaccggnggcangaaggggaaggcngaccgngacgagncgncaccnnacgcngcnangcnngcngcncaagaagncgcacagcgcggcaaggagcnnggcannaccgcaccgcacaaaaagcnncgngccaccggaggcaacaagaccaagaccccnggacccggngcccagccngcccncagggcgcccgcncgnnccgggangaaaancggacgcanngaggacganacccccgnccccaccgacagcacncgcagaaagggcggaaggaggggaaggagg

SEQ ID NO: 132998 - DNA, 287 bp, Zea mays
  Clone ID: MRT4577_52784C.1
aaagacccctgtaggtttagtttgccatttgaacggaacggaaaccacagttcctggctccctgctgcttacagacatgaacaaaagacgcaatttcattcaaaagacgtgagaaggccactggccactgccctaccctaacaatctattcaacacaaccatttacagccaacattcattttgggcattacattacataggggtgaccacaggatctacactaccgaatgaacggccaatgttctaaattctaaattttggagcccaaatttccaccgaagaaagct

SEQ ID NO: 132999 - DNA, 807 bp, Zea mays
  unsure (1)..(807): unsure at all n locations
  Clone ID: MRT4577_52785C.1
acttttttgtactgaagcgccggcccttaaaaccctccccctccagaccccctcgacgcgagacggccgacgacaacggcggcggcggcgacgactacgtcagcgaggccgtccgccccgagggtgatacacatacgcgtgaagagggattgtcaaaatccagggatcgagacagagaaaaagacaaggataaggagcgccatagggaccgtgacagagatagaggaagagacagagatcggggtcgggacagggatctagacaaggatcgggacagggatctagacaaggatcgggacagggacaaggatcgggatcgtcaccaaaggcatcaccgtgacaaaagggagcaccgagaccgtcctgatgatcacgatcgtcacagaagccgtgattctgaaaggagaagggaccgcgagagagatggacatcgcaggcatcgctctcgttcacggtctcgttcaaggggcagggatgatcacagatctcgatctcattcaaaaagcaagcgagtcagtggattcgacctgggaccaacagcacaatccgtacttcctcagttccctaccattccaaccccaagtcagttaccgggctcttctattcctggaatgttcccgaacatgctcccttttgctgttggacagttcaatcccctcgtcatgcagccacaagccatgactcaacaggctactcggcatgctcggcgtgtttatgtcggtggccttccccatctgctaatgaacattctgttgcaatatactttaatcaagtcatggctgctattgnaggaacactgctggtcca

SEQ ID NO: 133000 - DNA, 230 bp, Zea mays
  Clone ID: MRT4577_52786C.1
gacactcgcacacaggcccgcgatcccctccccctcttccttctccggattcgcgcggcactagccggcggcgggcggtgcagcgatggcgaggtaaaaccagcggatcaacgtcgtgacgacggcgacgatggtcggcgccatgaaggcgcggctcgacggcgccacccgcggccacgcgctattcaacaagaagtcagacgcgctcacggtcacgctccgcgcaatcc

SEQ ID NO: 133001 - DNA, 319 bp, Zea mays
  Clone ID: MRT4577_52787C.1
gagctcattagtcggcggccgccctttttatttttctggggtttttttttagaaacggacggagatgacccattactcagttattcacaacggtaaccagcagacgatttacaagtgccacgaaacttaaggggatcgttggctacatgtcaagtgccatatttggaatctcctctgaggaagcagaagtatcttcctccttgtcctcccagcaaagcattgctttgttctttctgtgagcccttggccatccatcttggggcccatgatacgcaagcaagttccttcttgcctgataagagccctggtgcagagccct

SEQ ID NO: 133002 - DNA, 180 bp, Zea mays
  Clone ID: MRT4577_52788C.1
ccagcctagggggcgttctctacattgaattcaataatgttgttccaaatattaattttgttacaaaacccgctcctttaaagaagactaatctctctaatccaacaatataccgtttgttttggactcactcatgcacaacactgattactcctccattgttcttagttgagttcaaaa

SEQ ID NO: 133003 - DNA, 322 bp, Zea mays
  Clone ID: MRT4577_52789C.1
gtgacatctttttttttgtttttttatttttagtgacattattgcttgttagaattcttttgacggttttactacaaatgtttagagcgaggacatttgacaggggggggggattcaaggcccccaaaacagctattcccttttgtggcaacaaaaacagcccggaagacgagagataccaacgcatgaacaaaaaagcggacggggggaccttcgaccaaaaaaaaaaaggctacggtaaaaaaaacgggaggaacgatattgactgccacgtaggggggtgcccagggacagcaagagctaggtaaggagacggtgggtg

SEQ ID NO: 133004 - DNA, 788 bp, Zea mays
  unsure (1)..(788): unsure at all n locations
  Clone ID: MRT4577_5278C.1
cgccaacgccgcccctcccggccttggcccaagtcgtcacctcctcgcccctcgcccacggctgcggccacattgtcgccggcttgccacacgcccgtgtagatcggccgccgcatcgcgccacgccgccgtttcgatcccccgccagggcagcaggcaggaatctggcgatgaagagtaagaaaagtgtgcacggatcatcatgcaagaaggctaagttgtttgacggcctaattggtagacatggttctgaaatagatccatgttataaactttttcttgaacatttaagcaaagatcggaatacatatgtccttgatgtaccaaagggtgaccacggcttgcctttttctgtacgttatgaggaggactatacgtcctatggaaatactaagggcagaagtagtccaaattttcccaaccattcacggcgcacaagttggggcattccagatggcaaacagcctgatgtaaaagctatcaaggctgccagcagaaatatgtgttgctccttttcaccaaagagatcatatgtgaagaagaccacgacctcattagtagatgaaccttatgagttatttctgagccttgtgaagttcaaggatggtttcatggttattgaaccagaaccaggtgtcaccattgtatatgagcgagaagaagatatgccagctggctatgatgactggagaactggcagttccacaaatgaactgtctttggtgtctncacttgaaacacgnagggagactcaccatgcaaagatatgattatggccttgcacagct

SEQ ID NO: 133005 - DNA, 288 bp, Zea mays
  Clone ID: MRT4577_52790C.1
ccgcgttgcaccaagaaatacatcgagaggccgtcgccaggggaataaatggcgtcgtggtttagcaccagccaccgccgcctcatcctcgtagccgcgggcctgctctgcgtgctcgcggctgccagcgccagcgccgggacctcctgcgtgccgggggggggcattccgcacaacccgatcccgagctgtgcgctagttcgtgaccagacgaacctgcggtattgggccgcgcctcccgtggccggagctgaagaggagatgctttcgggagctggcggacatccc

SEQ ID NO: 133006 - DNA, 381 bp, Zea mays
  Clone ID: MRT4577_52791C.1
tttgtttttggggggccctgggcaaaccgcgggggtctgtgcccgacgtcgggacagatccgtccagactgggcatccgaatctaccgtgcgatccatacgtaaaggttacctataaattctctaaatgccaataagtaccggaccgctcaggcaacctaacacgactgcgagtcgactgctagtggtagggaacaccgtatcaacaatgcgtaagagctcagctacgatgctgatggttgcggaggaggcggcaggagaaagacaccgcagtatcccgtctagccgacttaacgctgtcccggccgaaacggccgagtgacgagggccatcggagacagggtccacactgttgacctggcagacacggacccatgggtgc

SEQ ID NO: 133007 - DNA, 531 bp, Zea mays
  unsure (1)..(531): unsure at all n locations
  Clone ID: MRT4577_52792C.1
gggaccctcgggcctgcgggaccgacacataactagcttcttctagctctagctatgctcgtttgctgcaagaggggaacagcgggcangcatggaggggaaggaggaggacgtccgcctgggcgccaacaagtgctcggagcgccagcccatcgggacgggggggcatggcacgggcgacaagggctacaaggggcccccgccggggccgctcttctagcccggggagcgcaagtcctgggccttctaccgcgcggggatcgccgagtgtcgggccaccttcctcttcctctacatctccatcctcacgcggatgggcgtgctccaaggccacctccaagtgcgccaccggcggcatccagggcatcgcctgggccttcggcggcgtgagcttcggcctcgtgtactgcgccggcggcatcgccggcgggcacatcaacggcggcggggaccttcgggctgttcctggcgagggaggtgtccctcaccagggggggtgtgttacatcatcatgcggtgcctgggcgccat

SEQ ID NO: 133008 - DNA, 1517 bp, Zea mays
  Clone ID: MRT4577_52793C.1
caattttaaaagattgatggtacttctttgtttgtatagaaatatcataaaagactcggatggatctagaatcttgtcatgttctagaccaagtatactgaattttattatcttttcctttcttatgtttttagattcattcgctctgagaatttttcataaatatatttcaacttatcgattaagatatgcctctaattgccatcttgatcttagatgggttaggttgtcatatgttttagaaatattagctaacatagaaaaaaaaggaatacaaatataattgtcagccaaaaaatgtttcgatagcctgttaatggtctttatttcatacgaatttaaccttccaacagttttgattgatattatgtacctctacagatggcagtagtggaaattctatgtgtgcaactagaaccaagttaccgaccgttgattagtgcctatggagctcaataggatattacattttatttgtgctcaaccaccgatggcgtctttattactgtgcattgcatcttcttggttagtgtaatgtgcaacctggttagtgtttcaagtaggtgcaagaggaggtgaacagataatgaagatttcaagtaaatggcgagttgaatccattgaacagataataagaatagttttaagtgtcattaatagtgcaagctactacactaggattttcaacatgatgaacagatcggccgatggatgctatgtggctgtatccagccaagggaacttctatttgatgtgggagcttgggcaggtctggtagaaccaccaattacctggtccttggtctacatgcctttgttgttatgtttgtatggacctttgtctctgtgtgcagccgttttggcaaccccacatcagggtggtggcatggagattctgaacatggggtggagagcggacagtggactttttgctgttgcgcggtgataactgaagactttgaggaggtgcaggtgcagagctgatggtttgggatccttgacgtggggtaccgctcataggaggaggcttgggctgcttgtggcagcaacgtgttgcacaagaccataaataaagggaagagctggatgcacgacaaggctgtcgccaccaacctctactccgtcaagatttgtgctaggcaacgacgacgtgttgcttcggggtcttggctgaacgatcagacatcctatgtatatctgtgtacaacaaacgacatctgctactactactaccataaaagattgccgactgtgcttgcgttctctcatctgtaacacaaatgagtgtaaagagacatgtgctatttccttggaacttgaaaactttgtaaactcatgtcttcatacgtcgtgcttcatgtgcgaaaacgcttaggtctcttccactcctccacctctcccttgcttcacctaccaatgagtaatcacaatgcctgatctatcatttaaaattctatattgattctttagaaataatttatacaataatataatgtttgtttgatatcagttcattct

SEQ ID NO: 133009 - DNA, 376 bp, Zea mays
  Clone ID: MRT4577_52794C.1
cgacgcctggcacatgatccctcattgaatgatgttgaagagaccatggtagagacgattgccctctgccagagaaattcacataatttgaaccaacagcagagagaggcactctggtttccgttattggaggcaatgatggcccctcagaagctgtctagttcagcttcacctcatccacactctgaagctctgaaatctttgaccatgcaagttctcaacagtatggcagcatttattgcccttccatccatcctgcagcgaatcttacaggacccagtttattgaaaaggaaaacttggagaaatccaaggccttattctgggaatgttggatacctttaactatgaacagaccctgctggaaacgacaacta

SEQ ID NO: 133010 - DNA, 1498 bp, Zea mays
  Clone ID: MRT4577_52795C.1
gccggccggtcacctaatagcagttaccattgcgcgcgtcgttcgccgccagcaccagtctgtcccgttccccacctcaccctcttcttccctatactcgggctacacctgcgaccactgctcacccgtcgcggccatgactcccgcatccacctcccctctcgccgccgccgtcctgcccacgaacttatcttccttctctcgctgcccacctcgccgcctcccgcgcatctcctgcctggcagcgcccgaacgcgggggcaacaatgcgtcgaacgcctcgccggcaccgcagcagccgaggtggggtgccgcggtatccgccgcgctcgcggcggccgtggttgccgcctctatgccagcttacgcggacctgaacaagtttgaggccgagcagcggggcgaatttggcattggctctgccgcgcagttcggctcggccgatctcaagaaggctgtccacgttaacgagaacttcaggcgggccaacttcacatccgctgatatgagagagtcagatttcagtggttccacattcaatggtgcctatcttgaaaaggctgttgcttataaggcaaatttcactggtgctgatttgagtgatacattaatggaccgcatggttctgaatgaagctaaccttacaaatgctgttcttgtacggtcagtcctcacacgtagtgatcttggaggagccatcattgaaggtgctgacttcagtgatgctgttattgacctatcacagaaacaggcattatgcaaatatgcaagtgggaccaaccccatgacaggggtgagcactcgaaaaagcctaggatgtggcaatagccgtcgaaatgcatatgggagcccttcatcccctctgttgagtgccccgccacagaagattcttgaccgagatggtttctgtgatccagctactggtatgtgcgatgcaagctgagaggtttgatccaacatggaaactggtcactggatggtgtacatacattggagattgagtaagagcagaacagtgcagagaaacaagtcgtttttcttttcctcttgccattgttgtaacattgcaacacggaatcaggtaaaattcaggatgtagatgagatatgcacgctgagtactgaatggcatgtatagcatagtatgtatacgaaaatagatcatatctgaatggcatgtattgcatggtatgtatacgaaaatagatcatatcaatcatgcatagccaaaagcagaagttcaacagaggagtgtctcagcaaataaactttccactccatttcacaaacattgctgatgcatcggcagcaaccagagctgccgttctggatgaaccgcacaaatagacgtccatcgacagcttgactgtttgtgcagattgtcaggtcagttgctgaagtccctccttagcttcagctttcagctagctaccttgttaacatcaggtcctgaaacctgatatcaaataacaatatatatatatataaccacttcggtt

SEQ ID NO: 133011 - DNA, 178 bp, Zea mays
  Clone ID: MRT4577_52796C.1
tagcttcctcaccgagggcccgcacaatcacgcgagccttcaacaccacgcgagcgcagatcgccgaagccagtccacagagagggagctcgacgcggcagccgaaggcgtacaccacagtcggatgatcccctggagaagagaacggactgtcctccaggaagctgtgcaaccgact

SEQ ID NO: 133012 - DNA, 261 bp, Zea mays
  Clone ID: MRT4577_52797C.1
atgaacagaaaggaaaggacaccccaacgcgggggcacatgcgccagacaccagggaagaaaccgaagccgaagaagacaggcaaacacagtgcagagaaaccaatggacggcgctcacaggaaaaacgaggctgaccgagacaagagagggccaaagaggaccaccaccactccgagaaccaggctggcagcgcaggaaacaaggccaccaacatggcgcaaaacaaaaaggatgcggacacacggaacgccgaaggggg

SEQ ID NO: 133013 - DNA, 814 bp, Zea mays
  unsure (1)..(814): unsure at all n locations
  Clone ID: MRT4577_52798C.1
ccggccgggacacccccagtctgtcccgttccccacctcaccctcttcttccctatactcgggctacacctgcgaccactgctcacccgtcgcggccatgactcccgcatccacctcccctctcgccgccgccgtcctgcccacgaacttatcttccttctctcgctgcccacctcgccgcctcccgcgcatctcctgcctggcagcgcccgaacgcgggggcaacaatgcgtcgaacgcctcgccggcaccgcagcagccgaggtggggtgccgcggtatccgccgcgctcgcggcggccgtggttgccgcctctatgccagcttacgcggacctgaacaagtttgaggccgagcagcggggcgaatttggcattggctctgccgcgcagttcggctcggccgatctcaagtatgccagcacctctgcttcttcatctcttcttcatgaccgttttgttgttacattgcctaggtaatttgctttgttttaatggtcttacaggaaggctgtccacgttaacgagaacttcaggcgggccaacttcacatccgctgatatgagagagtcagatttcagtggttccacattcaatggtgcctatcttgaaaaggctgttgcttataaggcaaatttcactggtgctgatttgagtgatacattaatggaccgcatggttctgaatgaagctaaccttacaaatgctgttcttgtacggtcagtcctcacacgtagtgatcttggaggagccatcattgaaggtgctgacttcagtgatgctngtattgacctatcacagnaacaggcattatgc

SEQ ID NO: 133014 - DNA, 778 bp, Zea mays
  Clone ID: MRT4577_52799C.1
ggccgctttttttttttttttttgcataataaacatgtaaccgaagtggttatatatattattattatttgacatcaggtttcaggacctgatgttaacaaggtagctagctgaaagctgaagctaaggagggacttcagcaactgacctgacaatttgtacaaacagtcaagctgtcgatggacgtctatttgtgcggttcatccagaacggcagctctggttgctgccgatgcatcagcaatgtttgtgaaatggagtggaaagtttatttgctgagacactcctctgttgaacttctgcttttggctatgttggctttagaacaaggcaggggccactcctttcaagcatgaagcacatgattgatatgatctattttcgtatacatactatgctatacatgccattcagtactcaacgtgcatatctcatctatatcctgaattttacctgattccgtgttgcaatgttacaacaatggcaagaggaaaagaaaaacgacttgtttctctgcactgttctgctcttactcaatctccaatgtatgtacaccatccagtgaccagtttccatgttggatcaaacctctcagcttgcatcgcacataccagtagctggatcacagaaaccatctcggtcaagaatcttctgtggcggggcactcaacagaggggatgaagggcttccgtatgcatttcgacggctattgccacatcctaggctttttcgagtgcttacccctgtcatggggttgggcccacttgcatatttgcata

SEQ ID NO: 133015 - DNA, 165 bp, Zea mays
  Clone ID: MRT4577_5279C.1
aaatggaagatgggggggaatctaggaggtcccatattgaacacatcttgttttattccaacttaaatgaatcaggggaaagcacactaaataagccgcgcctttaattgattttacaaggaatggggtttttgcccccttgaaaaattatgaagaagacaattt

SEQ ID NO: 133016 - DNA, 421 bp, Zea mays
  Clone ID: MRT4577_527C.1
gcgctccttatcggatgtctttctctactgtgtatatctgatctcataactatacattctacttatccaccattcacgcgtaccctctatgcggctagtaaacaatcacaaatgtttcttgctagcctcaacaatcggcaaaaaacattactagcggacctcttagaccatctctacaagataatccactccatcctgctccctgcgtcaaaaacaaaataaaagaaccccgtcttcatcaacgcccgcattttctttattaagacgcccaagacgcacgtgttctattccgacctccccgccgtgaagaaagaggacgtcaaagtggaggtggaggacggcaacgtgctgctcatcagcgtgcagcgcatcaagtagaaggaggacaagggcgacaagtggcaccgcttggagcgcaaca

SEQ ID NO: 133017 - DNA, 572 bp, Zea mays
  Clone ID: MRT4577_52800C.1
cctcgaggccggccgggatgcctttctcacttacttagcttctcgccaaatcaatcccaatcgctaacccctcaacagtacgaatatgcatctcgcggcgacgaggaggtcggcaagtcctccctcctcaccagcctcatcaaggacaccttcgtcaccacgcccctccaaccacgttctaccgcccatcaccctcccaccaaccctaggcacccctgaaaatgtcaccaccaccatcgtcgacaccgcctccgtctcgcaggagcgcgaagtcctcaagaaagaggtccgcaagtgcaatggcatcctgctactctacagcgaccactacagctactagcgcgtcgccctcttctggatggcctacttccgctctctgagagccaacgtgcctgtaatgctatgcgcgaacaagagcgatctcgcgcctgtggggagcagcactgcgcaggtcgtggaagaggagatgctgcctgtgatgactgacttcaaggagatcgactcgggtatccgcaccagcgctttggagaatcacaacatcaacgaggttttcttcctctgtcagaaggctg

SEQ ID NO: 133018 - DNA, 509 bp, Zea mays
  Clone ID: MRT4577_52801C.1
cggaattcccggctcgacccacgcgtccgcgacgagtgataaagaaaccacctgatcgagcccgtatctttgcagccgcaggagaggaggacgagtcgttcgttgggcagcaggaggcggcggcgaagatgtcgtggcagacgtacgtcgacgagcacctgatgtgcgagatcgagggccaccacctcacctccgccgccatcgtcggccacgacggcaccgtctgggcacagatcgtcgccttcccgcagttcaaaccggaggagatgaccaacatcatgaaggacttcgacgagccggggttcctcgccccgaccggactgtttcttggaccaaccaagtacatggtcatccaaggtgaacctggcgctgtcattcgtggcaagaagggatcaggaggcatcacggtgaagaagaccgggcaggcgctggtggtcggcatctacgacgagccgatgaccccagggcagtgcaacatggttgggcgagaggctcggcgactacctcgt

SEQ ID NO: 133019 - DNA, 590 bp, Zea mays
  Clone ID: MRT4577_52802C.1
gcacgaggcgagggcagccccgccgagcgttagtcacagttgttgcctgcctaccatgcggctctaactcgatccgtgcagcagacgccgagtcgcggcaaggagtagctaggaactaggaaggaggaggcagggaaaggccaggccatggcgctcgaagctgtggtgttcccgaaggagcacccggggtgtacggcggtcaaggcgcgcccggcgtcgctgggctgcggcttccacaccgaggagctcgaggtcgaggacaagggcggcgtggttctgcaaggagaggccgccgacgcgctgccgccgcccggtggtgccgccaccacgtgggactgggacgcggtgctctgcccgtgctccactgcaccagctgcaggcgccgtggaggagtgctgggacgtgcagcagcagcagcatcagctcctgtccgtgtccccgccgccctcgtccgccgtcgcagcgtcgtcgtctgggcgccgcaaggctgccgcgtcggaggcggcgcggcgacggcggcgacgccccatggcggtgaggaacacggacgagatggagagccagcgtcgcaaccacattgccgtggagcg

SEQ ID NO: 133020 - DNA, 372 bp, Zea mays
  Clone ID: MRT4577_52803C.1
aacgccaaacttaataacccagttgcaaagggggggaataaagtcttacaacgtaagttgtaaaccccacaactaccgattgattataaccgtcagaaacataacacgattggagccaataaaaaaaaaaaaaaagattttggtggcaaacaagcccgattatttcgggccagaaaagcgtttaatactcgtcacccttgtggccggcctaacccttgtaaaactcagcaccgaccttcttgtagtttttttaaagcgctggcagattcttacgagcctgggagaacttgtcttttttcatacccttaccgacgtaccaatgcacgaaggggcgcttggcgtacatgaggtcgaacttgtggtcaatgcggg

SEQ ID NO: 133021 - DNA, 577 bp, Zea mays
  Clone ID: MRT4577_52804C.1
aacgattcccgcgtgcgaaccaagcagaccccagcagaagaagcgaagtcgtcgccggagcaggaggaagagcgagcagcaagatgtcgtggcaggcgtacgtcgatgaccacctgctgtgcgacatcgaaggccagcacctcagcgccgccgccatcgtcggccacgacggcagcgtctgggcacagtccgagaacttccccgagttaaagcctgaggaggttgctgggatgataaaggactttgatgaacctggaactcttgcaccaactggtctttttgttggaggtacgaagtacatggtgatccaaggtgaacctggagttgtcatccgagtaaagaagggcactggaggcattactaccaagaaaactggcatgtccttgaacagggcttctaagtttgtcataatgctattttggtcattgggcacttaagtttgcacctcatttggttctgtaatatgtgggcttgtgcatgtgcttggcgtattgcatgcagtgaataatttatcttcgcgttgggttggtgacaatgttgggaacggatttgaattggggtttatgcttgccatcac

SEQ ID NO: 133022 - DNA, 719 bp, Zea mays
  Clone ID: MRT4577_52805C.1
attgggacctcgaggcggccgggaacgagacaccgcgtgcgaaccaagcagaccccagcagaagaagcgaagtcgtcgccggagcaggaggaagagcgagcagcaagatgtcgtggcaggcgtacgtcgatgaccacctgctgtgcgacatcgaaggccagcacctcagcgccgccgccatcgtcggccacgacggcagcgtctgggcacagtccgagaacttccccgagttaaagcctgaggaggttgctgggatgataaaggactttgatgaacctggaactcttgcaccaactggtctttttgttggaggtacgaagtacatggtgatccaaggtgaacctggagttgtcatccgaggaaagaagggcactggaggcatctggcatgtccttgattatcggtatctatgatgagccaatgactccagggcaatgcaatatggtggtggagaggctcggcgattacctgatcgaacagggcttctaagtttgtcataatgctattttggtcattgggcacttaagtttgcacctcatttggttctgtaatatgtgggcttgtgcatgtgcttggcgtattgcatgcagtgaataatttatcttcgcgttgggttggtgacaatgttgggaacggatttgaattggggtttatgcttgccatctcctcatatctcgaactcagctgctgtttcactgagtaatgtacatttccctggc

SEQ ID NO: 133023 - DNA, 754 bp, Zea mays
  Clone ID: MRT4577_52806C.1
ccccgcgtccggaaccaagcagacccccagtagaagaagcgaagtcgtcgccggagaaggaggaggaagagcgcggagcaagatgtcgtggcagacgtacgtcgacgaccacctgatgtgcgagatcgatggccagcacctcagcgccgccgccatcttcggcctcgacggcagcctctgggcgcagtccacgggcttcccccagttaaagcctgaggaggttgctgcgatcacgaaggactttgatgagcctggtactcttgcaccaactggtctttttgttggaggtacaaagtacatggtgatccaaggtgaacctggagctgtcatccgaggaaagaagggcactggaggcattactatcaagaaaactggcatggccttgattattggtatctatgatgagccaatgactccagggcaatgcaatatggtggtggagaggctcggagattacctggtcgagcagggcttctaagtcgtatgctattttggtcattgggcacttaagtttgcacctcatttggttctgtaatctgtgggcttgtgcatgtacttggcgtattgcatgcagtgaataatttagcttgggtttgttggttggtgacagtattgggaacggatttgaattggggtttatgcttggcatcgcgtcatatcaaactcagctgctgtttcactgagtaatgtacatttccctggtcgtggtacttgtggactctgctgctttatggaaacgagtgcattttactgc

SEQ ID NO: 133024 - DNA, 1219 bp, Zea mays
  Clone ID: MRT4577_52807C.1
cgtatcgactcctatgggcgattgggtacctcgaggccggccgggtcctgtcgccccccaggctagtcgcccaaactacgcaaccgatatattccccagcacccccgttccagccgtccaaccgagacaccgcgtgcgaaccaagcagaccccagcagaagaagcgaagtcgtcgccggagcaggaggaagagcgagcagcaagatgtcgtggcaggcgtacgtcgatgaccacctgctgtgcgacatcgaaggccagcacctcagcgccgccgccatcgtcggccacgacggcagcgtctgggcacagtccgagaacttccccgagttaaagcctgaggaggttgctgggatgataaaggactttgatgaacctggaactcttgcaccaactggtctttttgttggaggtacgaagtacatggtgatccaaggtgaacctggagttgtcatccgaggaaagaataaatgctttaacatttccctctcacatttcagtaacacccttgcaaatgttctttgatttacgcggttgtttccacattcgttacagggcactggaggcattactatcaagaaaactggcatgtccttgattatcggtatctatgatgagccaatgactccagggcaatgcaatatggtggtggagaggctcggcgattacctgatcgaacagggcttctaagggggtgtttggtttgaggaatcactccatccaaaatgtggtggtgcatcatggatccattcctcaaatttggtgggatgaccccattcctcatattagtactaactaactaactataaggaatgaggtgatgatggatcaactcattccattccacaaaccaaacaaaaaaagtgaggagtgagaagatgattgactagctcattcctcaaaccaaacagtctataagtttgtcataatgctattttggtcattgggcacttaagtttgcacctcatttggttctgtaatatgtgggcttgtgcatgtgcttggcgtattgcatgcagtgaataatttatcttcgcgttgggttgctgacaatgttgggaacggatttgaattggggtttatgcttgccatctcctcatatctcgaactcagctgctgtttcactgagtaatgtacatttccctggtaatggtacttgtgcactctgctgctttatggaaaagagtgcattttaccgaaaaaaaaaaaaaaaaaagcggcc

SEQ ID NO: 133025 - DNA, 307 bp, Zea mays
  Clone ID: MRT4577_52808C.1
gacgcgagagagacatgatgcatcttacttaacactgatctgtctatatgcttgatgaaatcgaactgcttcagctaccacttcgggtattccgcgctaacgctcaccattcacaaacttcattaatgacggagatggaccactaccccaggaagaggagggggctgatatatttttatcaaacggaccttcaacaagaacgactgtctcaccaaaaatacggatgatctaccatcactggcaaccaaggccctggacgaggaggacctcgagagggagaatgatgaagatggccatcctactgtgg

SEQ ID NO: 133026 - DNA, 371 bp, Zea mays
  Clone ID: MRT4577_52809C.1
ctacttctaactgtcaggctcatgcttcatcacctctcactgaagacgacacggcatgctaaaaatatggctaatgaatcagcatcttaggtgaaagaaacagaatcatatcacgctccggacaggcaggaacacgagacagatgactatcaacggttatacataactctagcactacgcaatgggcctgatgagtacattcatactagcaactggaatgcctatgcaagcgatgccgattgtaggtcccgtacatcaaacatttggacacttatgaacctaggttatatggcctggcatacacgtatagtctacaccctgcagatgactacatcttgtgcctgacggacttgaacatgcgacctatttca

SEQ ID NO: 133027 - DNA, 528 bp, Zea mays
  Clone ID: MRT4577_5280C.1
aaaaaaaaggaaccaggctttcctttcctgaaaacaatctacaatacaacatctaccatcactcggtttcatctgggggggacgggggcagcggtactggggggggctgcacagcaacagcagcagcagcattttcggacgttgcttccacagtatctgacgagtcattcaaacctgggatgttcggatcatcactttcgcttacttcctccccccaaaagctttgtaacagcttcatggctagctcgaaaatcctggcgctgcccacgtcctgcaaatcctccagtttttccaaacctccgcactttaaaaaaaacccgggggaggggttcgcccctgattcctcgccctttttccccgcctcacctgggcggagtatgttctcaaaaccttaaaaacacgtgtatacaaggtcaggatcgttgggggggaggaccctgcaaaggggctttaaacatccccgggtgaccaaatactgaatttgatcacttgaaccaccggacccagcagttgatataccccaacccc

SEQ ID NO: 133028 - DNA, 408 bp, Zea mays
  Clone ID: MRT4577_52810C.1
ggggggggaaaattcaacattttactaatttaaaaaggtttcaaacatgttttctacatcttgtacttgtagaacacacgtgatgatatcggaacaattgcttgcttagaacttaaacaccaatgctaggggtgaactcaaacgctgaaaaccatgaactattttcacacccggggccaccacttttatgcaccaggcagggttggggcataccctcagctcctttcaagaaaattcatatctaagtcccttccacccccgcagaggtgaaaacgcagatttgagaataaaccccctttctcccccaattgaattttgggtccctttcaccctctataacaagctgggaaacctccgtattttactaaagcccctctcctctgcaaaatataatcatttcctttcctt

SEQ ID NO: 133029 - DNA, 395 bp, Zea mays
  Clone ID: MRT4577_52811C.1
tgacactatagaagagctatgacgtcgcatgcacgcgtacgtaagctcggaattcggctcgaggtcgtgtcacccaggaggcggcgctcgatgacttcgtcgacgatggcgttgacgacctggtggtctcgctctaccagatggacctcgatctcacgctcttcctcctccgctcctaactcctcccggagaagatcaagaagtacacgatgcatatctctagggccacggccgaggcgactggtgaagttgcggcaatctgatgcgggaggtggccgacctcattcttagctttcctgacgagacgcccgtcgtcgttctctctgccatggggaagaccaccaataaccttcttctggccggagagaatgcggtgagctgcggtgcccccaagg

SEQ ID NO: 133030 - DNA, 386 bp, Zea mays
  Clone ID: MRT4577_52812C.1
ggggtggggttatttttttttttttttttcctttttaaaagaccggaaaacaaaaaaaaaaacttttaattacgggacaaaaaaaacaaaaaaaaaaaagggtaaaatttgaagacacactttaaatttgactcaagtaaaaaaaaaaaaaaatttgtcaaaaaaaaaaaaaaaaacgggggaaaaacagaggggttattaattaaaaaaggggaaaatactcttttgaaaacccaaggggggaaaaaaaaaaacccctaacaactcctttaggatggtttgggaaaacccggtaaaaacccttataatctcagggaaccaaccatttaaaggagggtatccccttgaaaaaaaaatatggttccttcaaaaggaaaaataaaccc

SEQ ID NO: 133031 - DNA, 264 bp, Zea mays
  Clone ID: MRT4577_52813C.1
attcggctcgaggtcgggcgagctttttctgctggtcgaccaccagcggaagggggggcatttgaagaaccatgtgggtgtaacccacccctacaacgaccttagcacggcgaccttcaaccgcggcgatgacgcggagctgcaagtactttatgccactatggtccacggctcgccaccatccaggaatttcctgggccatagggaggcgcttgcactactcgcaaccgttgtggtgctactagctgcacatgagagcgcaca

SEQ ID NO: 133032 - DNA, 510 bp, Zea mays
  unsure (1)..(510): unsure at all n locations
  Clone ID: MRT4577_52814C.1
tcgaaaaatgtggccgtagacctctgagttcggccaggcttcaccaccatgaccccgcgttcatttccataaatcccgtcgcgtccctaaggagccggttgaccgctattcattggaaaccaatctgggcatcccgggtgtatgccgcgcgggttgggggcttcgtcggtcggaattgtagccggggaaaccgggggaattgctcgccgccgtgtcgtctccaccgtgaagccgctccatcccgtggtcaggcttgccatcaattcaatcgcagcgcgaggtcacgtgtcccctgaagatcatcctggtacctggaatctcaagtcccaggtcaagaacaggtaccacaggatgaggcgcgtggaggatgctgcgataagttcgtgagtggtctaggccgtcgtctcccagtcaactttgggttgctggatcgttgtctccttataatgtaattatttattttgtatagaactcctattatatagtaaagatgtgacattcgatccnnna

SEQ ID NO: 133033 - DNA, 215 bp, Zea mays
  Clone ID: MRT4577_52815C.1
acgccaccagcgcccccactcctcctcctttctttgctgtttgcaatcacacgtggtgatctgccccttgggcctcccactcccatggctctgggcggtccagaaggagcaggccctgggcctccacctctgtgcagggcacagaaggctggggtggggggaagagtggattcctccccaccctgtcccaggaaggccactgtcggctgtctccc

SEQ ID NO: 133034 - DNA, 141 bp, Zea mays
  Clone ID: MRT4577_52816C.1
gcactcgtacgaccaaacctaattaacatctctcctttagtttgcctaaaccagcttcatattcccgcaagcttattattaaatcaccgaccaccacaacaatcacaacccttcttcctctacctaactctccaccttcat

SEQ ID NO: 133035 - DNA, 376 bp, Zea mays
  unsure (1)..(376): unsure at all n locations
  Clone ID: MRT4577_52817C.1
cnccccacanngaacaacgacggctttttttttccaaacaaaacaaagcaaacaaacccacgggggggggggttaataacaaagtgccgacgaccaaaccctgaacccaccggagggaggaagaaaaagctaatcccacgacacagcaagcaaaacacgggggcaagccaatccccaaaagcccatgcgcggagaagcaaaccacaacacggcagcgcaacaccaaggccccaaacaagacgacacccaaacgggggggagccccgagagccgaaaccacagcgcacatagaaggcccacagggcaaaaaccccaggaagaggcccacctaccagagaaaccaagcgcgcaccgacgacggacaaaagggggaaaa

SEQ ID NO: 133036 - DNA, 510 bp, Zea mays
  Clone ID: MRT4577_52818C.1
gtgtggtgtggggtttttttttttttttttttttttttttttttttttttttttttttttttttttttttttttttttggaacacaaaaatttttccttgccgatggaaccctgggccgggagggaatttacattaggggacaaactggaaccagggggggggggggggcatccgaacacctaaatatcggcagggggggccggggggggggggggggggcccctcccaccccctaatttggcgggcacaaagttgggggggtaggcccatgccttgttgttgacggggtcggcgggggggtcggggaggtttttgagggggcccttgccggggacaatggcctggacaaaaaacccgaacatggaaaacatggggggggggccgttcttgggctccttcaccttgagctccgcaaaggcctcggggtcgtcggggaggcccagcgggtcaaaactgcccccggggtagagggggtcaacaaccttttcgggggggccgccgggaacccg

SEQ ID NO: 133037 - DNA, 328 bp, Zea mays
  Clone ID: MRT4577_52819C.1
ctcctccactcccttactagccagtcattggggcacatacgagatctgtgggcctctagcagacaacgacacattgagaacaaaaaaatctgtccatcataataagccttcctactgctccaccccattctgcaagaccattcacccacgctccaagactaccacggaagcaatcgaacggaaccacattgacaacaaatgcccattcactcaaactttctatatcaaatacagaatgatcaccccgacatacaacaaatccaagatcaacagaactatgattgactcagcaagaactacctgcactttgacaacaaataccacatgt

SEQ ID NO: 133038 - DNA, 626 bp, Zea mays
  unsure (1)..(626): unsure at all n locations
  Clone ID: MRT4577_5281C.1
ttagatccattactttctcacttcaagctcctctcacctctatatcctcaggctcctcatccctcctccatatatgtacacacctgacctcctggttacctagctccaactcccataggaaaaggtcccgagtctaccctgctgcgattgccgaatctccgcgctcaggggtatcattaccatcacagcgcaccagactcgcactgccatcgctggagatcccacgggacgggtctccttcaccggagataagcacacaatacatcagcttcttgaacatcacatacttccctgacttctgctcccacgaggggcgcagtcccacaccctggcattgggcgaccggtctgctggatcgccagctagactcggacagtgctaccacactgtacgacaactgttatactgacctacttcgacaacgtggtcgcgccgtcaacctcaatgagggcgataatccgaggcgtcgtgacgacctctcccatctacgagctctatcgtctgtgtctgccatgaggagatcctccatcaggagcaggaatctcggcgaatcctgctcnacatacactgatgccatcagagtgctgtggagtctgctcttcgagtgcctcacagactgaaatgcg

SEQ ID NO: 133039 - DNA, 245 bp, Zea mays
  Clone ID: MRT4577_52820C.1
acgaactcgagttcttatcgagactggaattcagagcatatgggggatagtcgctttatggatggaatctaatacgcatatttacggtatagagtcttcgttcattgggacagaatcaatatacgtctcatgtcgtatcgggattcactgctagaggaatgtagcattgggtcgaactcttgtttggtgttaaggtattagctgtgcatagacgtcgactatccggaaagggttggagaatggga

SEQ ID NO: 133040 - DNA, 835 bp, Zea mays
  unsure (1)..(835): unsure at all n locations
  Clone ID: MRT4577_52821C.1
ccggccggctcctcacggttctatccttcgcgaatctagagagcaccttgttaatcttcgctttcgtcctttcgtttccgtatatcctcattaccgcttcactctttcagcgggcattcgtttcctttaccaactataacccaacttgtttaagttttgaatttctatcctcgtcttcacaatgaagggaggaattgccgccgctgccgttgcggccatggccactggtgcccaagctgcttaccctcaccaccgacgtgctcatgagttgttccgtcgcggtggagaggtctgcgttcccagctgcaccactatctggaccacttactatggcgagcctactcttgttcccaaccccccttcgcctcccaagcccaccgctcaggccgtcactactcatgaggctcctaagcccaagcctaccactgcttatgaggttcccacctacgaggctcccaagcctgttgctccaaccaccaccaaggtcgttgtccccatcccgacccctcaggagtacaagtgccctactcccggcacatacaccttccctgccaccaccatgactgtgaccgagtctaccaccgtttgtgttggcgagaccaccaaggttcctgctggaactcacaccatgggcggtgtcaccaccatcgtcgagactgccaccaccgtcacttgcccctacgccaaggagaccgagcacgagggcgtcgttaccagcgttatcgagactaccacctacgtctgcccctccgctggtacctacaccattgctcctatcaccaagacctgtgaggaggagaccgntatcgtctaccccgtccccacagctacgtcc

SEQ ID NO: 133041 - DNA, 516 bp, Zea mays
  Clone ID: MRT4577_52822C.1
ccgcccccggaacagtcatcctcttctcctgtctcgccccggcgccggcgagagcgcgactccggccatcgccgaggacaccagccgcaacttggagctggaccaggcccccctatcgcacgcgccaacaccactagatgtgacgacacgctgcagagctctccgttatccccgccgtgaaacaacaggaacgacgagtacgagagccacgcctggggcgacatccatcgcaccctcctctgcagcgtcccagtggcgcgtcgacctccgactttccccatctgccgcgctccccatcatcatcgccaacaacatcccgccctgcactgcatagccgccgtccccaaatccgcccactgaaggcgtgccctatcgtctcctcctctgtcaagatgcacatatccggccacgcttcccaagaacaatgatctctctgctccccgatcactctgcacctgttagacggcttccacgccgaacacctgccgggtggcgctctaccacccgtactatgac

SEQ ID NO: 133042 - DNA, 322 bp, Zea mays
  Clone ID: MRT4577_52823C.1
ttatttttttttttttcttttttttttttttttgggggggttattttgtttggggtttaaggatcaaaaccctaactgaattttaaaataatggaaatacaaactgaaaagaaactacaagaaatagaactgccagccggcctaacctttttgggttattttcttttcatttctcttttccctttggccggccatggccatgcgctacactgttggagaatctttgacaggagcccttgctgccgaacctcgaggggctcttaacgcaccagtcatttgctccactcgctacggagtctggggtgcatgccctctccttttt

SEQ ID NO: 133043 - DNA, 626 bp, Zea mays
  unsure (1)..(626): unsure at all n locations
  Clone ID: MRT4577_52824C.1
gngctgttccgtgagcatcccgngttcttgggccctgcagctccaagtctagaaggcaagctagccgtcgtggccagtgtcatgccagggcttgtggccgctgccgcagagaaagccattgccgaatggggccgaccggcttgaagacatcacgcacctcgtcttcgccaccagcagcagtgctcaactgccccacatcgatctccgcatcgcttcccttctcgggttaagcaccaccgtgcagcgtacggtgatcggctttcatggctgcagcggcagctccgcggcgctccgcgttgccaaggacatcgccgagaacaaccgcagcgcacgagtcctcgtcgcttgcgcagacatgttgagcgtcatggatggttacctagtccccaacgtagtagcccaccgctacggaatcatcggccacgccattttcggtgacggtgctggtgcagttgtcgtcggaagccggccgcaggaacccgtagagcgcccaatcttcgagatggtgtcagcgtcgcaggccacgctacccggctcggagctggcggttgctgccgagctcaccaatttcggcatggagtaccggctccagtttggagagctggcggcggtggtcggcgacaaca

SEQ ID NO: 133044 - DNA, 258 bp, Zea mays
  Clone ID: MRT4577_52825C.1
atcctctccgcgacgcacgcccgagatcctctctgcgacgcacgcctccctcacctccgcctccaactccccacgccatcatcggatccgcatcagatgtgcgcccttccatactctccgcgacggacgcggacgcctccctctacggcaccgtgatgcaacactcatctccgacccgcatccccgtagtccacttcgtaaccccccgaggagtggccccatgaggcaaccatcctctccgactagcagatgtggaga

SEQ ID NO: 133045 - DNA, 305 bp, Zea mays
  Clone ID: MRT4577_52826C.1
ggggctgcaagcctgcaacctaaagcaagaacaagcagagcaagagagagagatggagcaaggagacgaggcatcgtcagtagtgagcaaggccagcagcacagcagagcagcgactcaccagggagcagcacggcgacgccggcgtggctgaacctgagtggccgagcgaatgcgcgcgttcgtccgcccgagtgtcggctcatcgtcgtcggccgccccaccccacaggttgattctgcattatagcgggacaccaaggagccaactacaccagtggggtgtacacctatttacacgcgcgga

SEQ ID NO: 133046 - DNA, 284 bp, Zea mays
  Clone ID: MRT4577_52827C.1
aaaacccctggacccacccgaaagaccagtaacatacctccctgagaatgcttgtgatgctcttgcagcatctgtggcattcaggatggtgaagggacgtggttgggtggtatgtctgatacggaaagctttgtggatacattggatcggtggggcaaaatacagtatcaccggaagagctaagcttggtggtatacgagttgtgtcatagctgtagataccagactgtgatgctagtcatcccagctgatcctagtcagctcgattcggctgagcgcgtagtc

SEQ ID NO: 133047 - DNA, 255 bp, Zea mays
  Clone ID: MRT4577_52828C.1
aaaacccggacccctgattttccactttaaggaccacttttttggccaaaaaagctggggggcccggggaaaaccccagctaaagatttggggggagggtaaactttgaaagtaacggggctaagggggtcccaagggcccggcgggaaaaatctgaagcccctgggggggtgccgggaaagccttctcccccccaatagctttgggttttcgggtaattaagggcccacccgggggctctcccgggggcaaggg

SEQ ID NO: 133048 - DNA, 459 bp, Zea mays
  Clone ID: MRT4577_52829C.1
ggacgaaaccgggcgacccggggctggatctcaagggatcggggcaacaaggccactttgccacttacaaagccccgtcgcgttttaaggcgtctgcaaaggattcaacacccccccccttgggaagggagctttgagggggccccccccggcgcgtcggccgggcgggctgaaccaatggcacgggcccttggggcgcgaaccccctaacgggggtcggggcgggcggcaaacaaaggcccccgttgctaacttggattctgcgtctccctaggggttggcactttggccccccccatggggtcggcgtcgcgtgcgctcctcattttttgtgcgctccaggccggggccgtgtttcgccgcgtccccgccctcctgcgccctgtcgcttttgccgcgagcctcctcccaacggggggggggcccgcaggggcccccctcggcgctagggtgcggggc

SEQ ID NO: 133049 - DNA, 583 bp, Zea mays
  unsure (1)..(583): unsure at all n locations
  Clone ID: MRT4577_5282C.1
tcgctgcacgcgtgcgtaagcttggntcctctagcacggccgggggtggtggtttttttttttttttttttttttgtggtttttttttttttttttttttttttttttttttttttttttttttttttttttgggggccaagggccccagtcttttttaagaggggatctttgggggctccaaaaaaaagggggggggggggggggggtcaccaaatccacatgccgggggggacagttccccaaggccccaggtgcgggggggggtctaacccttttcccgggggtggggggggcttacacaggccttggggggggggccacggggggggggaaaaacctttgctttgcctggtgtgtcccccggccccccccgggggggctttcccggggcccctttttgggcttcggtgcgggggaaccggtggggccgttctgggccttccgccggcttgggggggggggggggggcccctggccccctgtggtttgggggggncccggggggccctggggggggggggggggtcccgggcgggcgttgggggggggggggccccggtgtccttttggggggggttttg

SEQ ID NO: 133050 - DNA, 1019 bp, Zea mays
  Clone ID: MRT4577_52830C.1
caggtattatattatcacttctgttctgcaatatttctacagtgcttgtccacgaaaaagcacaccaacggttcatggggcagagatgggtgcatagtccatgtccatccaagcacgcacccgacgctacgcctccttccgtatccaatccattggtcccctcccgcccagtaaatttcggcccacacccgacgctacgcctccttccgcattggccggcggagccacagcactcagccagcctctccatctgacttcagtccccacgcgctgttccatccaaccctagccaccgttggtgcctcggcggcatgccctcgtttgccttcgtctccgcttggtacgccgcggatgcggaggcggacttcctccgcatctccgcctcgcaggaagaccttctcgcccgcgcccccttcatcaccttctccggctccctcccctcccttggggagtccgagtcgggagcgtttcccctccctcggagactccgagtcggaagcgggtcacttgaaagccgcggaagagggtctgcacgaggaaggtgagaggagccaagctcaggactccgacgccgagctccagcagcccagccccagccccgaagtcgaccctctggccagggccgtgctcgtgacccccaccactccttcagcattcaccagtgatgaggatatcctcgagctcgctcgcagccgcgacatctagagttgcctatgtcacggtgactaagcagccccttctgttatgccaatcaatccatccatccatatgctaataaatatggtgtggttggatttttatgcgtttccatcaactacatatgactgtcttgttcggttcatgttgcaagtcgcagtattttgggcatgtggaagttaactatgccgtgcttgattggcacaagaaaactcactgtattttgggcatgtggaagttagctatgccgggcttgattggcacaagaaaactcactgtattttgggcatgtggaagctaactatgccgtgcttggttggcac

SEQ ID NO: 133051 - DNA, 446 bp, Zea mays
  Clone ID: MRT4577_52831C.1
ctcacacccgactttccccgcctccgcttcgaaccctagccgagcgagcgaaggaggcaaatgggcaaggctacggccaccttctccaagcgccggagcgaaacgccacgctgtgcatccgccgcggccggcgcaccttccatctccagaacagacctgctcctcctgcggctaccccgccgcccgcatccaccaccataattggagtggggaggacatcaggcgcagcaccactggcacctgaagaatgtatcacatgacacacgtgcctcgccgattacacaccaactatcgagaagggactgaggctaacccaaacaagagcgctgctgctgccaaatacaccgtcaaggttgccatgaacaaccacacaagctatcacgctgcgatctttctagctgccattgcactgcctgaacctattagccctcaataccatccaccgg

SEQ ID NO: 133052 - DNA, 463 bp, Zea mays
  Clone ID: MRT4577_52832C.1
atctccatccaggatgatcactttttttaaacacatctagttcccttacatataaaacctcaccattacattggaagataaaggacattccatacactgacacccatggggaggggagacactacctatccaatctcctatgagtgagtaaccaagacaaactatggccctgtgccatgggctccattcatttatcactaccgaccctagattccttagagaaaacatccgacagcttatgcatttaaaggctgagacccaggactcatgaactgcatcccttacatccccctcactttttagtgtgattggacactaataaccacagatagctcaacctgcgattgctgttgcttgaaggactcttggaccacaccacatgtctcttgggtcctgaaccaagtcacatccacctacagctggggggaaaagatctgataaaccgacagataatttgctgagc

SEQ ID NO: 133053 - DNA, 233 bp, Zea mays
  Clone ID: MRT4577_52833C.1
tcccgttgcggccgccctttttttttttttttttttaaaatttattatagaaatacatttattttttttcgtttcatttttatagcagatgaggaataaagaagctgggggggggtgaacaaacttaacactattttatgaaacatgctttaaaaaaaaaccccttttccttttttccaagagtttgcctcaaccccaactcgggcggtgacttccaacactacaatcaattt

SEQ ID NO: 133054 - DNA, 983 bp, Zea mays
  Clone ID: MRT4577_52834C.1
cttccgcattggccggcggagcctcagccggtgacttcagtccccacgccacgcgctgttccatccaaccctagccaccgttggtgcctcggcggcatgccctcgtttgccttcgtctccgctcggtacgccgcggatgcggaggcggacttcctccgcatctccgcctcgcaggaagaccttctcgcccgcgcccccttcatcaccttcgacccggaggaggaggaggaggaggccgaggtgtccagtacgccgcctctcacacaccaggccccgcagaggcagggggaagagggcatcgccatgtgctccatgcccttcacccagcctccctccccttctccggctccctcccctcccttggggagtccgagtcgggagcgtttcccctccctcggagactccgattcggaagcgggtcacttgaaagccgcggaagggggtctgcacgaggaaggtgagaggagccaagctcaggactccgacgccgagctccagcagcccagccccagccccagccccgaagtcgaccctctggccagggccgtgctcgtgacccccaccactccttctgcattcaccagtgatgaggatatcctcgagctcgctcgcagccgcgacatctagagttgcctatgtcacggtgactaagcagccccttctgttctgccaatcaatccatccatccatatgctaataaatatggtgtggttggatttttatgcgtttccatcaactacttatgactgtcttgttcggttcatgttgcaagtcgcagtattttgggcatgtggaagttaactatgccgtgcttgattggcacaagaaaactcactgtattttgggcatgtggaagttagctatgccgtgcttgattggcacaagaaaactcactgtattttgggcatgtggaagctaactatgccgtgcttggttggcacaagaaaactcactgtattttgtgcaaaaaaaaaaaaaaaaaa

SEQ ID NO: 133055 - DNA, 778 bp, Zea mays
  unsure (1)..(778): unsure at all n locations
  Clone ID: MRT4577_52835C.1
cattgggtacctcgnagccggccggggtggagatgaggaaagaaagaaacttcggcgactccgagttggtccacacccgacgctacgcctccttccgcattggtcggcggagcctctccatctgacttcagtccccacgcgctgttccatccaaccctagccaccgttggtgcctcggcggcatgccctcgtttgcattcgtctccgctcggtacgccgcggatgcggaggcggacttcctccgcatctccgcctcgcaggaagaccttctcgcccgcgcccccttcatcaccttcaacccggaggaggatgaggaggaggaggccgaggtgtccagcacgccgcctctcacacaccaggccccgcagaggcagggggaagagggcatcgccatgtgctccatgcccttcacccagcctccctccccttctccggctccctcccctcccttggggagtccgagtcgggagcgtttcccctccctcggagactccgagtcggaagcgggtcacttgaaagccgcggaagagggtctgcacgaggaaggtgagaggagccaagctcaggactccgacgccgagctccagcagcccagccccagccccgaagtcgaccctctgggccaggccgtgctcgtgacccccaccactccttcagcattcaccagtgatgangatatcctcgagctcgctcgcagccgcgacatctagagttgcctatgtcacggtgactaagcagcccccttctggtctgccaatcaatccatccatccatatgc

SEQ ID NO: 133056 - DNA, 809 bp, Zea mays
  unsure (1)..(809): unsure at all n locations
  Clone ID: MRT4577_52836C.1
ggggtacccctcgnaggccggcgcctccttccgcattggccggcggagccacagcactcagccagcctctccatctgacttcagtccccacgcgctgttccatccaaccctagccaccgttggtgcctcggcggcatgccctcgtttgccttcgtctccgctcggtacgccgcggatgcggaggcggacttcctccgcatctccgcctcgcaggaagaccttctcgcccgcgcccccttcatcaccttcaacccggaggaggaggaggaggaggaggccgaggtgtccagcacgccgcctctcacacaccaggccccgcagaggcagggggaagagggcatcgccatgtgctccatgcccttcacccagcctccctccccttctccggctccctcccctcccttggggagtccgagtcgggagcgtttcccctccctcggagactccgattcggaagcgggtcacttgaaagccgcggaagggggtctgcacgaggaaggtgagaggagccaagctcaggactccgacgccgagctccagcagcccagccccagccccagccccgaagtcgaccctctggccagggccgtgctcgtgacccccaccactccttctgcattcaccagtgatgaggatatcctcgagctcgctcgcagccgcgacatctagagttgcctatgtcacggtgactaagcagccccttctgttctgccaatcaatccatccatccatatgctaataaatatggtggtggnntggatttttatgcggtttcatcaactacatatgactgtcttgttcggttcatg

SEQ ID NO: 133057 - DNA, 362 bp, Zea mays
  Clone ID: MRT4577_52837C.1
attaataatttttggatgattaatcttaatcataaagggattgctaatgataagtccatagataactgactagttctagtaacttatcattggcaatctcgtactgattaaaagaattaaccgacctatgactaaaacaatcagatcacctgttaatttatttgctgcccattggtactcatcattttttggttacataggtaccaattaattgaactttactaccatattaatcgaccaatcacataaacaaattgattaacaactcagccgattgaaggacacaaattaatgacattactatgaaaattacgtcctatactatagatattaactaccataaaatattaggtgcggccaaa

SEQ ID NO: 133058 - DNA, 593 bp, Zea mays
  Clone ID: MRT4577_52838C.1
attccacctggcggcgctggacggcgccgcggagaggctgcggctgttcaaggccgacctgctggactacggcagcatggcggcggccattgccggctgcgacgccgtcttccacgtcgcctgccccgtcctcgccaaccacacccccaaccccgaggctgatttaattgcccctgctgtgactggcacgatgaacgtcctgaaagcttgctccgaagctaaggtcaagagggttgtgatggtgtcctccgtcgctgccgtcatggtgaaccccagctggccggaaggcaagcccatggatgaagactgctggtctgacgtcgactactgcagaaccacagagaattggtactacctttccaaaacactggcagagcttcaggccttggattacgcaaagagaagcggactagatgtcgtgacagtctgcccgtccttggtgatcgggcccttgctgcaacctacggtgaacgcgagcagttcggtcatagttgatttcttgaaaggtgataatgaggtaaagagcaaaatcagaaacttcgtggatgttcgagacgttgccgattctctcatcttggtgtatgaaaccccag

SEQ ID NO: 133059 - DNA, 183 bp, Zea mays
  Clone ID: MRT4577_52839C.1
ctaaatgatgagaaagacgatcttcgcgacgataaccagcaactgagtctggcgacagagagtctatagcagcaaatgaagactgatgggatcagttccagactagatgtacgacacgaggcttcagcaggcaggcttctcctatacaactctagcacgattccatggacatggggatactgc

SEQ ID NO: 133060 - DNA, 499 bp, Zea mays
  Clone ID: MRT4577_5283C.1
ggttgtgttttttttttttttttttttttttttttttttttttttttttttttttttttttttttttttttttttttttttttttttttttttttttttttgtttttttttttttttttttttttattttttttttttatttttgggggggggggggggggtaatgtagaaaaattttttttttatttttgtgggggggggtataacttgtggggaggggttatgttccatggattgggaaaagacacttcttcgggtggggggaggagggcacacctgggtggggctattcccgtcaaattgaaggggtcttcccaattgggggagaggtggtagagcccttctcggtggaagactcggcttaggattagggcccggaacctggttttcctactatgaacgaaccgtgggttgtagagcctaagggcatggttgggctccgcatttcggattgttggttgcctttatttttttgcggggaaatccaggtgctcactcc

SEQ ID NO: 133061 - DNA, 591 bp, Zea mays
  Clone ID: MRT4577_52840C.1
cgagggaactttttttttttttttttttttttttttttttatgtattatttttttttttttttttttttttttggttgtaaacaaggttattgccccggggacgaaatcgtttaaccccaagagggggggaaacggaaacgccaagggaaaacccccccggggcccccagaacaaaacccgcccaagaggggaaaaacaaagggcggggggagcccaagccaagaaccaaacccggggggggtgggccccaaacttgggaccacaaaaaacccgaaggggggcccagaggccctaaacccaaaaggccccgggcgggaaccgccctagggggaattccaggcccggggggggcggtccaggggggcccgcggcgggaccaagggggggggtacctggggccaaggcgggtccgggggggaattggtgtccgggccccaggccccctccccgagggccccggcccctttagggggaaaccggggggggccctcgggggggcccgccccaattgtggggggggggggctcctggcccgttgcccggggggggggcccggggggggccgccgggtttggtggggtcgccccccc

SEQ ID NO: 133062 - DNA, 946 bp, Zea mays
  Clone ID: MRT4577_52841C.1
cattgggaccctcgaggccggccggggcaaaggtagctacctgctcccgtcctattgtctcttgctctctgccaccaccagccgtgtgcacgtaccagcagggatgtggaacaacggatcatgcttggccggcggacatgacgacggcaacgaccagccgaacggagacggtggtggccagcagtatgaagcgaccggcggcaagaagcagctcgagtcctcgaggctcaagaagagcagcggcaacaaagataaagaagccgacgccgcagaggacgactaccccaaccccaagtactgcaccaacaacaccagcggcggtagcaacaaagacgactacaacggcggcagcgtagccggcgcgccctactgcgtctgcgtcggcgtcggcggatacgggaacagctctccctgcggcggcggcggccacagcgacagcggcagctatggcaacagctgtccctacgacaccggcggcaacgcaccatgcaacaacgctcccgccgccatctgggctccccaggacggcgccaggtcgtcgttgtacatcaatacccaggcggtgcacgtgtacggcatgccttgtgtgtccgacaacgataacaacaacgacgaccacaagaggacgaagagaggcgacgacgggttcttcggcccggtggtccatgccgtcgggccacttcttagaccgaaagttcggctacgacggcagggacttatgactgatccatatgtagacatagccgacgtgccatctattgatcatatatgtttaactaggtgagtgcccgtgcgttgcaacgaaaacatataatatcacgataattatatacaaatgtgtgttatgctatataaaaatgttttgtaatctatttgtgatcctagtcatacataaattttgtcaatcagcatggaggatgcttctgatcatgaaattgtaacaccc

SEQ ID NO: 133063 - DNA, 1556 bp, Zea mays
  Clone ID: MRT4577_52842C.1
cgggctctctctctctctctctcctgtttgcattgtatatcctggatctccaaatatctatgaatctatctttagttatacatacgcctacaccagtatgtgtatcaaattactaacgtgcaagcagaagcaacagtgttgtttcaattcctgtgttgtagtcgtatagctaaatagtaacagtatcgatcgtctcacttttcttgatcaactcggtctactgtgtgtgggcagtgtgcacgtaccagcagggatgttgaacagcggatcatgcttggccggcggacatgacgacggcaataacgaccagccgaacggagacggtggtggccagaagtatgaagggaccggcggcaagaagcagcagctcgagtcctcgaggctcaagaagagcagcggcaacaaagataaagccgacgccgcagaggacgactaccccaaccccaagtactgcaccaacaacaccagcggtggtaccagcgtagccggcgcgccctactgcgtcggcgtcggcgtcggcgtcggcggcggatacgggaacagctctccctgcggcggcggtggcgacggcgacagctatggcaacagctgtccctacggcaccggcggcaacgcaccatacaacaacgctcccgccgccttctgggctccccaggacggcgccaggtcgccgttgtacatcaatacccaggcggtgcacgtgtacggcatgccttgtgtgtccaacaacgataacaacaacgacgacgacaagaggacgaagagaggcgacgggttcttcggcccggtgttccatgccgccggccacttcttagatcgaaagttcggcttcgacggcagggactgatgactgatccatatgtagacatggccgacgtacgtgccatctatatatgatcatatatgtttaatttgcttcaccctagccgtctccacatgtagacatctatatatgatcatatatgtttaactagctgaatgcccgtgcgttgcaacggaaatatcgcacatacgccggcgttgccatgcattgcaacatgtatgctcgcgggcatctcgtcaatcgacgacagatctatctgccatctgcatgcgtgcaattacactacctagcttcttcgtccgcgcgtactagtgccctgctatcgttagctagagctcactgctcaccaccaggagccgtttattgcatcaaagtatttattccgagtgtgccatccagtgtcgtatttggtttccgttgtgatggagatgaaccgtatgtatacattaatacatgcatgtctatagcagaatgcaaatatgcatatgtgtggtgtgtgcttgctgctgagatttgtgtgcaagggcagcaagctagtgtgtgtgctatactattttgtttgtagacagtgtaataattatattatgtatatggtagtggtaattgtttaagatagggttgcgaaaacctttgaataatacgtacacagtgcatacacaaaatgggtgttatattgtaaaaagaaccctgtttcattttctgcttgggcggggtaagaaaaaaaaagttttaa

SEQ ID NO: 133064 - DNA, 424 bp, Zea mays
  Clone ID: MRT4577_52843C.1
tcggaattcggctcgagactaactcaaactaccaccgacacttcagtctaccagaaaaaaaccagacgacgcgaagaggtttcattggaagggcaccacctccccgaacagcttgacctagaagaactacaacctctataaccagggcaaccgagcgaagacgcacatagacaacggcagaaactgacgcaacgaacaagctcatggctagacaatgcacccgcggcagattgagataaccttttctggactacatcaaacacgccacctgtttcaagcctacacatctccgcatgatatgtgaaagacacactgtccctccaatcccgtggacgcgaattcttaaagctccaccggcttatcttaaggggccactgatcgagaccacacacaagcaatttcaagttgatcaaccatgggaaac

SEQ ID NO: 133065 - DNA, 145 bp, Zea mays
  Clone ID: MRT4577_52844C.1
gtttcagtgctaggccgatgtcgcactggcggtagcgatctgagatcgagcgaagctaaggtttttcatctagatggcgcttaatacagcggggtcagcgctgaaatgttataagacagtcagaagggtggctacaacaaaactg

SEQ ID NO: 133066 - DNA, 476 bp, Zea mays
  unsure (1)..(476): unsure at all n locations
  Clone ID: MRT4577_52845C.1
ccgggttcgacccacgccgtccgtatccgctcgtcggcttccacgccgcctcgccggtggcncggacngggctcnaacaacaaccgggngtcgggggccaagggcctcgcgccagcccttccgcctcaagnncgcccctcgggcccgtcccccactggccgcnnctcgacgtcccgcgtcgcccgtcaagggagcccgtcccaggtacttacgaaaccccaacccctaaccgcggggcgggcgggggcctnnacgccaacagcgggcggggcggcagcccgtgaaccacctacggactcgtcccgctttcctgctttgccggcggctaccctacggctccgtgagggcggataccggttccggtgngtggccgcctacggntggcggnnnnntntgnnnntccccccccctctctcccccccctccccccccccgcccccccccccccctctcttctgtcccgcccccccctcccc

SEQ ID NO: 133067 - DNA, 420 bp, Zea mays
  Clone ID: MRT4577_52846C.1
ggcgggtcaaaaaacattgggtttaataaagttctcttgcgaagaaaaaaacaaaaagaaaaaaaaaaaaaaaaaagaaaaaaaataaagagaaaaacacgagaaactggccgaaaataaaaaaaggcgcaaatgggaaaggctagagtaaaaaacttgataaaatagaaaaacatgcccctttgggcacctggcggcttaacaaagagggcccccccggtcgtgcggaaattcatttgcggtttttgaatggcggatggacacagagggggcaggggtaacaattttgccttatcaagtttttcgttaactggggtcattggcgttttctttaagacgagatcggcagaaaaccccctgcatcaacccattttacccagatgggggaaagtgccctttcagcgtggagctagagtccaa

SEQ ID NO: 133068 - DNA, 473 bp, Zea mays
  Clone ID: MRT4577_52847C.1
caaaagatccaggacacatcttaacaacacacacaacacaggtcgactgggctagccacctctctactctaagaggtgaatcacgtcacgacacacaccatcgccgcgaggcagtgctaccgctaccatctcaacaccaggaggtccgtccgtccgtgcgtccgtcgacggaaagcacttttaggcagaacgtaacgcacaaaaatcgggcgccgctagatgactctgcccaccacccggcgggggttgccgctgccacccacacgacagcggccgttgtggctgcaagcctcgccgccccggctggcccgacgacgcagtcgtcgtgtgcgccgggcccctctccaacagcgccgccgcgacctttttggtcgctgctccgttcatctccggcctcgggccactacccaccacccttcaggccacacacctacgctcctttcgctcccatcggggttttccacccccacccc

SEQ ID NO: 133069 - DNA, 141 bp, Zea mays
  Clone ID: MRT4577_52848C.1
agaacacagactccccgcatgatatgaagaacagaccttctcagaaaaaacggtttaaagcttactctacattttcacggacattttataaagctgatccacctccacctttatgatgagagcggccacactacattgacc

SEQ ID NO: 133070 - DNA, 237 bp, Zea mays
  Clone ID: MRT4577_52849C.1
gtcacgcgtccgcgcacgcgttcgatttttcaaatcttttttctctttacagggagaattgcacttgcggtagaacagtacaatgcattctattaatactattagcagtgcaataatatgtttcatacattctatttttgaagttccagacatcattaatcaatttataacttaatttatgaaatggagatttatatattgttcgtttgtttctatgtttacatatgttttttacgg

SEQ ID NO: 133071 - DNA, 339 bp, Zea mays
  Clone ID: MRT4577_5284C.1
tttcaatccggaggctgtagccacgggggagaaaggcgcatggttttcgcagcgcgcgctgcattccttttggccttgttgcggcctccggagcgcggattttgacattggcgacgacaacggcgaggaggaggatcttcttacggcacttggacccttcgagatgttgtctggtctctttggaaaatcagcggcccctactggccttgggattgtttatttggaactcatgggatcgggcttgcacattttatgattgtggctgcaaaaaactgatttaaattgccctttgacatcgtatgtgaagtgtgtggtgttgttggctacaggccaactttt

SEQ ID NO: 133072 - DNA, 433 bp, Zea mays
  Clone ID: MRT4577_52850C.1
attcggctcgagctcatcttaacagcattttttttttcactatagctctggataaagcgggggggtaaatgtgttgatgaaaagcagaatcactggattcatgattgaacccccacgagttgttgtgttggcatacgcgcgggattaggtgagggaccaaatagcaatatgccgcaaccatttatttgagggtcgtgcaggaggattataaatatgaatatggctttccaattagctgtttttgcattaatcgcggctctcgtcaggtttggcaattatgtgaaccccttggcttaggttgtcctgctgggtggccaaataataaaaacattgattgttgcgggacatcatgtatggactggattagcctatttggtgggtattccgacacctgttaagccttgaataggatgagcatatataaacccgctac

SEQ ID NO: 133073 - DNA, 822 bp, Zea mays
  Clone ID: MRT4577_52851C.1
acttcgctcacctaccaacttctacccagaaaaagcaagggaaagtttctcccacatctacgacgaagacgaaggcgatggggggagggacgaagagaggcggcggcgtggttgatgagccggaggacaagtccagcaagcgtcgcaagatctgcaacgtcgccaaggaagacgtgcttcccctcgctgtcttctcccacctaccggctcgcgacgccgctcgtggcgtcgtactctccaagcagtggagggagatcttgaccgggggcgacttctgggccaatcactaccagcgccccagcaaggaggtatgcctagcctatctcgaccgcggccataggctcccgttcaagttcagtctctacgggctcgagggaaagcacgccttctatcttgttgccgccggcgacacgtttcctatctctcacggcctgcccgtcgccggcaccgagctttcgtacaggttctttgggtcttgcaacggccttgttgccttcgagcagcgcgggctgagcgattcctctatgacatgtctcgtggccaatcctgcaacgtctcaacacttgaccgctcagctcttagatctgggcaccttctcctggatgctcgccttcgggtatgatcctaaggaagataagtataaagtgttcgttcagtgtggcagtgatgtacatgtcgtgccccttaccctgagcggcaccgacggcagcaggcctgtcactgttctacctaatgtggcttacgacttggacaattgcaaaacacacctactcgctgtgcattgaggaaactgctatgttctgctatcccccagggatgatg

SEQ ID NO: 133074 - DNA, 627 bp, Zea mays
  unsure (1)..(627): unsure at all n locations
  Clone ID: MRT4577_52852C.1
gcctccgcgcatagatagacagcggagcgtcgcaccttccggtgtgccccacccnttatgaactccgggccatctccagggcgtcctgcggaaggaagtgtcgagcatctcccccccaacgacaagagcgagtcggtccacctttcggcgcaaatgacttacacacacacccgtcaaccacctccagcccggagcactagatgtccttggaagttgagccaacgtgcccccacccgcctactactttcctaatacttttgtcacacctggaagcggcgcacagactcccgcggcctctgaagaccccgcctacttataactccacgaacccacacgacccccgcttgagagcgtgagaaaggatttgaagaatcatgtttaagtagtgagaagaaggggatgaagagggagacgaaggtgataacagtaggaactacaatgattgacagtgttaaggtttaggaggataagactagtacttgggacacttgtaacaattaggaggtaagaacccacttcgaggtcctctccattgccatccacatcatcaccattctcaactccgtaaccgctgtcgtggtttagtaggagagaaaggagatcgccacgaccgtcgaggttgaggtg

SEQ ID NO: 133075 - DNA, 260 bp, Zea mays
  Clone ID: MRT4577_52853C.1
attgccgtttcaccggcggcggggaggtttcgtgctagaggtgtgccggcagctggccggtgccggctgccaccgtcgacgtcttaacagcctaggactatacgaggggtgcagtcgctgcacatgagctcagagaatttgggctctcctgatgtcatctttcatcagctggacattatcgacgcttgtagcgtcatgcgtcttggcttgagatcctcaaggcttcgttttggaatgcctatatatcctgttaaataatg

SEQ ID NO: 133076 - DNA, 387 bp, Zea mays
  Clone ID: MRT4577_52854C.1
gtgatgaagatattgcgttgtgcagttacatgttgcagccctacaacacttagcacaataatgggatcacaacggatcgcacaaacagggcaagaatttatatccacaagaaatggctggtgcacacatggaccgtaggttaaataggacagggccagcttaccccctagcacaactagcacttggtggcttagatgcaaacaacccatttacccaggccatatgatggcttctacaaaactaccaacgatgcttcagcaaactttgtaagtcgaattaaggaatttggcaaaccccgccaggcccgatgaaaacgcgacctggatcactttgcagcaccggatacctatatcggattagggatgaccatccagctttttgagtggg

SEQ ID NO: 133077 - DNA, 483 bp, Zea mays
  Clone ID: MRT4577_52855C.1
cttaacatgcgtgacaacgacttttaaaaactgtaatgataggcgaccttgatgaccttacagaatgcttttttattagaaggggaaaagaacctaaattgctcatctggcctttggcgtcgacttaacaattataacagggcactggactcgctataggaacatgtttattcacaaaggacagcattcttatggggggctgggtgatcgtatcacgggacacgctctgaggaccaaggaaggatcctttatctgaaccgctgtgaaaaatcatatgggagcctgaagaacgccttcatttggtggaacctgtgcctgattgacatatcaggcaccttttgccggaatgacagcgactcacctctcgtgagggggggcgcactcgttgaggaggccaaaataggttcagattccccaccgatatgctgactggcttccctgagactgtttttctgctccttggggagcgaaagaactggcctg

SEQ ID NO: 133078 - DNA, 366 bp, Zea mays
  Clone ID: MRT4577_52856C.1
ggttaacattaattattattttttcattttttttatttttaaactaacattgcaacatctttacgaaatttctacacagaaagtaaacaaatcggcataacaattcccaagcccaacaaaagatgggcgcgcgcaaaaaaaaacccaatataaaccattctataaacccattgatgacaaaaattacaacccacaaacccccaaggtctttataaaaactccaacacaaagcgcactctataacaactggggggcgcccaagaacataaaaatctcatgggggatccaaccccaataaaaaaaagggtggaattctaacaaaaaaccccctaaaaccccccacccaatgtaccaccatccccacct

SEQ ID NO: 133079 - DNA, 462 bp, Zea mays
  Clone ID: MRT4577_52857C.1
ggttgttggggtgtgtttttttttttttttttttttttttttttttttttttttttttttttttttttttttttttttttttttttttttttttttttttttttttttttttttgggtaccaaatttttttttttaaataaaaaatggttggatcatgtgggggaaacccacaaatcccaggggtcgtttttctaattaaaaaaaattccaataaaaaaagatatcttttttaattctttttttcccacttttaaaaaaaaaaaaccccccccaacgggtttttccatccccggccttataaaaattttgtttaattaaatcaaaaaaaccttcccttagatggacggggcggaaaaaagcgggccttaaaaagacccccccaactttttaaaaattgttttgtgggcccgcttcttcaggggggtggccccattgtttgacggcccctttccctggggggg

SEQ ID NO: 133080 - DNA, 147 bp, Zea mays
  Clone ID: MRT4577_52858C.1
gcctagattttctcatatttatttgaggtgggggtggacgtggacgtggaactatggaagttatcacagcggagttttgacagaaattgtctcagacttaaagcatgacaaagtttatgaacattcctaggtacaatcgaagttacc

SEQ ID NO: 133081 - DNA, 624 bp, Zea mays
  Clone ID: MRT4577_52859C.1
agcagtggtaacaaggtaacaacgttttttttttttttttttttttttttttttggattagaaccatgccatgggtttggtatttaacagttattttgacaggttccatgattatataatcttggactgtaatccagtattctgtggaatatataactggtttattgataaaaccactaacccagctaatacttgcaaccaaatgcatgaggttcctcatatctttatattcagattcccagaaattgtaacattctttaataatagtttttaaatcttctactaccatataactaccaatctttcccagcagatcaatagctgtgctaaatttggatttcccatacacaataggcataaagatatttttgatgatatcacccccaaatctctgcgacacatatctggtgataatatgttcaccgtatttccgttcaatatatttcttaaaatcagagtcaataatttcataaatattatttattttattattctcacttataagattagtatttctagccatggtaatattacccagtaaataactcaacatttgatatgcacttgctgatgcgtccaggtgaattggggttctagcaatcttatcagagtcacggtttttta

SEQ ID NO: 133082 - DNA, 622 bp, Zea mays
  Clone ID: MRT4577_5285C.1
ccacgcgtccgaaacatctggccttggtgagtaacaaaggggcaaaactgccagaactcaattgattcttcgcagttcatatacagccctagcttaggagcataagagcaccggtcagaaacaaatttgtctattcctttgtacagtgagcatcatttccatgcctggtacagtgattgtaaccaacactagtgagaaatgcccttatctcctgtgcactgctgttgctagcctgcagcaggtgttcatcttcttcatatataaggtagggagcttcacctttcctccttgaaagcaattttgatgcacctctcagtacatggtattcccagccttgaacatcaactttgatcagaagaactctctcagtatctggaacaacttcatccaatggaattgtggaaacttcaacagcaacttctgcattagacttgaatgctaactttgcaccaattgcagatatagcactgttgtcaagtcggccaatcaccttgtgcatcgtagtagtcccaactcgatcagaagctgcagcgtgatacaccacaacgcggtcctgcacccggttgaggtagaccccatcacatatccgctgcaggttctccaacacgggctcgactcgtgc

SEQ ID NO: 133083 - DNA, 459 bp, Zea mays
  Clone ID: MRT4577_52860C.1
ggacctttgggctgatttatgtgcttgtttatgtgcttggtgttttgtggttttgctgggcttcttctttcttgtctgtctggaattagaggttctgtgatgctctgtgttacgtgggtctgtgactcgtcagggcccttcttggtgggtgtggttacgctgctggtggtggtgtcttcttcttctttttcttctattgctgtcggttaggggttggctcgttagaggttgtttgctgttgttgctacttcgtagtaggtgcttattcgctgagtggcggatgttttacggtcttggggctattgtcttggtcctgcggatggggacgacggggtttcgtaaaacgtagcagtatccgcgtcgtaaaataaggaggaccccgctgtcacctccctccacgtcctgcggcgttttcccctcaaaacccctaggataaacccctaaaaatcgctacttccc

SEQ ID NO: 133084 - DNA, 1497 bp, Zea mays
  Clone ID: MRT4577_52861C.1
cattgctgtcctcgaggccggccgggaggcccgactgccattgcgtctaccttctctatccccacccccaactccccaagagccgatcagaccatttgtaccgacccccgagaggcgaccaggcagtccggaagcgcgtccgtccgttggtgctgctggtgccttgtggtcgagcgatgtcgaacgccgccgacgtggaggcgggcgcccaggcgagggcggcgccggcgacgacggggatcaagccgcccccggggcggtacaacaacatgaccagcaacgggccgtacacgccaccgtcgccgttctactacgaccccgcggcggcgcacgggcggcaccactggtcgtggctggtgccgctggtggtcatcgccaacgtgctcatgttcgtgctggtcatgttctacaacaactgcccgcgcagcggcggggactgcgtcggccgcggcttcctccgccgcttctccttccagccgctcaaggagaaccccctcctcggccccacggccgccacgctgcagagatacggagccctcgactggtacaaggtcgtgcacgggaaccaggcctggcggctggagtcgtgcacctggctgcacgccggcctcatccacctgctcgccaacatgatcagcctcatcttcatcggcgtccgcctggagcagcagtttggattctggaaggtgggcctggtgtacctcgtctctggcttcggagggagcgtgctctccgtcttcttcatcaggaagggcgtctccgtgggcgcctccggcgcgctcttcggcctcctgggagcgatgctgtcggagctcatcaccaactggtccatctacaccaacagatttgcagccatgctgaacctgatcatcatcgccgccatcaacctggcgctcgggatactcccgcacgttgacaacttcgcgcacatcggcgggttcgccacaggcttcctcctcggcttcgtgctgctgatccagccccagttcgggtggctggagcagcccttcggtgccaagaccaagtccaagtacaaggcatatcagatcatcctcctgcttgctgccctcgtcttgctggctgcagggttcgctgttggattggtaatggtgttcagaggagagaacggcaacgatcactgtagctggtgccactacctgacctgcgtgccgacgtcaagctggaagtgtgacaattgaactgatcagagattagtgacgggttagcatgcttgcgtcgtacagaagagaacatgcgtccccaccacgagagacaatgtcaagatagatacgtgcccctcaccttctatgacattgtcaatgtattgctttcaagtttgatttttaaagtctgcattgtacagaattctcctgcctccattggatccaaatgaggagtttattggtattttttcttgtatatgttaaaaaaaactctgtaaatcactctgcctgtgttctggtttatggttttattcattgatttcccccccccccc

SEQ ID NO: 133085 - DNA, 176 bp, Zea mays
  Clone ID: MRT4577_52862C.1
gccgcccttttttttttttttttttttaattatacaatacatctttttttttagcacaaaaccatattccttatggggccctttaatataagtaaagggtccaatttaacccttttcatttaaatatatcccccactatatactctaatcaattcattccttaaaaacctaatccc

SEQ ID NO: 133086 - DNA, 367 bp, Zea mays
  Clone ID: MRT4577_52863C.1
ggcaatccatactgaaacagaagcacgcaagactgaattggtggtttgttccggcggccggcggctgtgccgccgtacggcatggcaggccctgccgaccgttgcgcgaagccaacatttgaagggtctgtacataaccctgaacggaacgagagcggacctgatgcctactactaaggaggagatcagacgactaacatagaccaggtcaagaaagaagaaaccgaggcggggaacacattcaggcattgactcggtacggagactctaacgacagactcgaagaggggtgtgaatcgtggagctaacggacgttcaagagctgtacgatgacgagacataacgacaacgcttaattgaggacgat

SEQ ID NO: 133087 - DNA, 369 bp, Zea mays
  unsure (1)..(369): unsure at all n locations
  Clone ID: MRT4577_52864C.1
ggccgcttttttttttttttttttcgtgtgtcttttgtgtatactacatacatactcttacttactcttcacacaaaaccacaaacatcacccaaaaaacactattcattaccaataactcatacacaagctaaaacaagacaccaccaattaacccctgtcgaaaaaacacacctatccctagcaggggggggtacctaaaccgaactaattattgcanttaaaaaagactcccacggtaatgttcaagctccaaaaaaaacaacaaccactgttcgtggtccaaaaaaaccatagggttaaaatcagatanccagttaaatgtgagaagttaccactgggggaacaaagacaaaaagttaaattttt

SEQ ID NO: 133088 - DNA, 519 bp, Zea mays
  Clone ID: MRT4577_52865C.1
actcgataatggtgccctcataccggcatgtgtttcctagaaataatcaatatattggttgagatttatctcgataaaaaaaaaaaaaaaaaaaaaaaaaaaaaaaaaaaaaaaaaaaaaaaaaaaaaaaaaaaaaaaaaaaaaaaaaaaaaaaaaaaaaaaaaaaaaaaccaaaaaaaaaaaaaaaaaaaaaaaaaaaaggttggccctgggcgggaaccccctaagggggaatttttgaaaattcccaaaaccctgggggccgttcaaccttccttttaaggggccaatttccccttaaaggagggggtttaaaaattaatgggccgggttttaaaaccgctgggctgggaaaaacctgggttttcccaaattaaatcgcttgggaaaaaaccccctttttcccagtggggtaaaaacaaaaaaaggccccaccaaacgccctttccaaaaatttgcccaccctaagggggaaagggccccccccttaacgggcgtttaaaccgggggggggtgggg

SEQ ID NO: 133089 - DNA, 1646 bp, Zea mays
  unsure (1)..(1646): unsure at all n locations
  Clone ID: MRT4577_52866C.1
atcgcaggtagccttgtattcctgcaagcgtcaaataaatacgtgcttgagctacaagcggaataatcgttgcgacatatatacctatcaattcatttatcaaactagtcaataaaaatagcaaagcagctcaccgttccaatatctgactcgaatccgcgagatcggtaatgattttccgattcaaacaatttgtcgagcgcttggcaggtgccacacgaacttcatgcacaccaccatccaatctttggacatcttctcttgggaatccttttgttcacgcgatcacaattcggaggcatcacgtagggactggtgtcgaagcgaggcgacggaacaacgacgaactagcgagctgaaacatggcgagtgatgtcttgacgcggatgagcaatgacaactagtggacacagaatggcgaagtaaggtgcacgatcagctagcaaagatgaatgtgtgtggcacggaaacgaaagcagaacttgatgaccggcttggagactcggcgagacggtaacatcatagcgacgtgtagccaaggtgcgtagagcttacagggccagatcttagcgaggacgagcacacacaacgcgacgacgaacgacgacaaccggcgaagtcgacgacgcgatggggattagggccgagcaagccgagagggcatgctggcaagccgaaagccgcgcgagcagagcaggcaggacgccgggcatcacgggcgagctgaaaaagaattcagcccgggagctcgatgcgtgtaggaaaacttcccggcgcgaagtcacagcaaaggatgacggaacgcgcacgacgcagtgaaaaactccggccatgtgcgcganctgatggagcagcaccgggcatccatggagaagcaccgggtgtcgaactaaggagtgcgcggcaaaatccgagctgggcgagcgcatggcagggagctgggagataattgcggcgcgagcaggaaccggccacggcgagcatagggacacggctgcgtgcggcgtgtgcgcagagagctcgaccgggcgcggcgagctggggactgagcgcggtccgagctaggaagagccggaaagcgcagggagaggcgaccgagctgggaaattccacggcgaggagacgcaggggatgaacgccggcgagctcgccatgggagtgattccgagcagagcaagcgcaggggcgcggcaagatcaaatccgagctgaagcaggttcgacggccacggacgagcgcagatcggcgcgatagagacaaagaccaagcgcggcagcaggaagggtgcgcggtcatgatcccggcgcgcgaccagcggaggaactcgcgcgcgcgacgagcgtcggggcctgaagacaacggctggcttagggaaaaatctgggcgcagctgacgttgatgccgagccggaagggactcacggcgaggacgaccgtcgtgcagggcagcacactaggctgggcggagagacaaccacggacgagagcggcacaggaaagcgagagtctagcgactgggcaccggagtagaggcgagctcgagctaggagatgcaggagcgagcgatgctgggcagataggaacaaaggagataggaacaaaggctgagcgtgggctggttccacgtacggtgaaggaaaactcgga

SEQ ID NO: 133090 - DNA, 427 bp, Zea mays
  Clone ID: MRT4577_52867C.1
atctcctatcctcgcatccacgccggtccctgttagcgccgcttctccctcctccgcaggctggtcttgctcctcacgcatgtctcacttctgggtcctacgtcatctcgactccggcagagccactcgctctggactctggagatattagcttggaagaggtctagatacgtgggagggacagtctatgttgagatcctcatgcggtcactaggagtttctacagagccacagtgagcgcgttgagccatcggagagaagagcaaccatgacggcgtctgcccgtgatagtggcgtgcctcctctcagaactcatgagcatctttgtcaagactgtcaccgcccagaacatcgagatgtcctccgacatctccgacgtcattgaacgctggcagactgtgatgcgcgaatacgaggctctacctcc

SEQ ID NO: 133091 - DNA, 1623 bp, Zea mays
  Clone ID: MRT4577_52868C.1
gccggccgggccggggctccgacactgcccccccttcggcctttcctctcagtcctctctcgccactccgcctcgccgtccacacccccctctccgtgaaaattgctgagatggccatcgacaaggtggacgccaaggagagggagaagatcgaggccgttcgcaagctgctgtgcaagcaggcgccgctctccgcgaagcaggcgcagtactgcaacgacgcgtgcttggagcggttcctgcggtcgcggggggacagcgtcaagaaggcggcgaagcacctgaggacggtcctctcatggagggagagcgtcggagctgatcacatcatggccgacgagttctccgccgagctcgccgacggcgtggccttcgtctccggccacgacgacgacggccgcccagttgtggtgtttcgaatcaagcaggactaccccaagttccactctcagaaatcgttcgtgcgcctgctggtgttcacgctggaggtggccatggcgtgcatgtcccggttcgtggaccagttcgtcgtcctcttcgacgcaagctttttccgctcggcgtcggctttcctcaacctactcatgggcacgctcaagatcgtcgccgactactaccccggccgcctccaccgcgccttcgtcatcgacgcgccctccctcttctccgtcctctggaagggagtgaggccgttcgtggagctggcgccggcgacggcggtggtgtgctccctggacttcgaggactcactggaggacgcctccttcacggcgtacccgcggaccgcgtccctgcggttcgagccgggcggccgtcacggggaagaacccgggcgtggggtcggtctcgtcgcggttctccgtcacccccaccgacaaccccatcaagccgtggtacctctccaccatccccacctcggtgggctcccgctccgtggtgcccacctccagcagcccgtcgctggtcggcgcgtccccgctctccgcgcgctccttctccttcgcctcgcccgccacgctgcgctccacggtcgccacgcctgcgccgttcccgcgcggcgcgggcgcgcccctgacgccgtcctccgccgccaaggcccagaagaccccgccgccgccgcagcagttcccgcggacgccgcgcccgtcgttcctgcagtcgccgtcgatgctgttcgcgttccggaaggacgggcaggccagccgcgtggagcgcgagcgcgagtccttcctcccgtacctgcgcttctaccgccggccctacgacgagatttcctaccgcgccaagatgcgcccgccgctcggcggcctcatatccatcgtcggcgacaagttcaggcagaagccggtgccgcagccgcagccgcagccgctgcgtcgccacgctgggctccacctccaccaccagcaccattaccagcagcagcagaggatctgattctcgtctcgtcgctgcatggcgaccagagaatttttctccatacaccatagatccgatgctatattatgccaagttaatcttttgccaactttttttcccctccagtgcttagtgcctatgatattcttgaagccatgtataataacatcccgaaaaatgtgagtaaaatcgacccctttctgc

SEQ ID NO: 133092 - DNA, 902 bp, Zea mays
  Clone ID: MRT4577_52869C.1
cggggaacgctttcggtagcctgcttgtttggccgcccggtggcaggcagacaccgtccccttttgggggcaggtcgttcttctcctcccctcgcccctcggctgctcgctacctcgctggcttcccgccggtgcagtttgaatcgagtagtggttggagtagcaaaaaaatgattgatgagctcgctgtcgctgctgcgggaaagtgcgggccgtggatggaatcggggggaaaaaaagggggaggagtcaggagtgggttggttgatggccgatgattgacgaatctcttcgcggcgcaggctttttccgatcggcgtcggctttcctcaacctgctcatgggcacgctcaagatcgtcgccgactactaccccggccgcctccaccgcgccttcgtcatcgacgcgccctccctcttctccgtcctctggaagggagtgaggccgttcgtggagctggcgccggcgacggcggtggtgtgctccctggacttcgaggactcactggaggacgcctccttcacggcgtacccgcggaccgcgtccctgcggttcgagccgccgccggcggcggtcacggggaaggccggcgtggggtcagcctcgtcgcggttctccgtcacccccaccgacaaccccgtcaagccgtggtacctctgcaccatccccgcctcggtgggctcccgctccgtggtacccacctccagcagcagcccgtcgctggtccggcgcgtccccgctctccgcgcgctccttctccttcgcctcgcccgccgcgctgcgctcgacgccgttcccgcgcggcgggggcgcccccccgacgccttcctccgccgtcacgggccacaagatcccgccgccgccgcagttcccgcggacgccgcggccgtcgttcctgcag

SEQ ID NO: 133093 - DNA, 352 bp, Zea mays
  unsure (1)..(352): unsure at all n locations
  Clone ID: MRT4577_5286C.1
ggttcctaaacacaccagggccggtgccaaatcattgggtttgggaatcaaaaancancccaccacnnnacaagacgaaaaacccagtacagtcgccaaacgcagggcaaccagaaacccctggtgcaccccttaaacccaaaaaaagaaacccgcccccctccaaacaggtagaaaaaaaaaaacgaagaacccaccggtaagggtccaaacaacaaaaacagaaaaccacgctcgcacaaccacaagaacaaagcggacgaggcgcaaacccctccacaaccccccacagaatacaccaaaagctcactccatcgcctacacaactgtcagaaaaatgggtgatacaatc

SEQ ID NO: 133094 - DNA, 912 bp, Zea mays
  unsure (1)..(912): unsure at all n locations
  Clone ID: MRT4577_52870C.1
gattgggtacctcgtagccggccgggagaacctccnacaacaggcacacacaccagccgctgtcctgcgtcggcactacgcctggtgtcccccgcggcctcgggtccggtcgggccggcgctgccgtgcccgctgctgcttccgcgcgtggcgtggcgtggcgtggtccccgggccttgactgggcgagcgctttgggtgtagcctgcttgctttggcttgcacagtggctggcagacaccgcttttgggggaggccgttcttctcctcccctcggcagctcgctggcttcccgccggtgcggtttgaatcgagtagtgtgatatgataggagtagcaaaactggtggtcgagctcgctgcggctgcgggaaagtgcgagccgtggaatcgggaaaaaggaggggaagagttgagtaggttggttgaccgatgattgacgagacgatgcgaatctctttgcggcgcaggctttttccgctcggcgtcggctttcctcaacctactcatgggcacgctcaagatcgtcgccgactactaccccggccgcctccaccgcgccttcgtcatcgacccgccctccctcttctccgtcctctggaagggggtgcggccgttcgtggagctggcgccagcgacggcggtggtgtgctccctggacttcgaggactcgctcgaggacgcgtctttcacggcgtacccgcggaccgcgtcgctgcggttcgagccggcggccgtcgtggggaagaacccgggcgtggggtcggtctcgtcgcggttctccgtcacccccaccgacaaccccatcaagccgtggtacctctccaccatccccacctcggtgggctcccgctccgtggtgcccacctncagcagcccgtcgctggtcggcgcgtccccgctctccgcgcgct

SEQ ID NO: 133095 - DNA, 163 bp, Zea mays
  Clone ID: MRT4577_52871C.1
ccggttggatgggattggaaaatttagggctctataaatatctggcctgctcgctcagttgtgagcggctgagactcacacaccaaatacccgagaaggccactccaaagagctagaaggggaaccgcggaagcaccagagcacgcgcacaaaacgcatgaga

SEQ ID NO: 133096 - DNA, 1825 bp, Zea mays
  unsure (1)..(1825): unsure at all n locations
  Clone ID: MRT4577_52872C.1
cctcgaccggccgggctctcggtccgtcgctccgacactccccttcggcatctcctctcctttcagttctttctcgccactccgtttgcccgttcacgctcccctctccctctcccacctcctattcttcgtcttcgtggagactactgagatggccgtcgacaagcaggcggacgccaaggagagggagaagatcgacgccgttcgcaagctgctgcgcaagcaggcgccgctctccataaagcaggcgcagtactgcgacgacgcgtgcgtggagcggttcctgcggtggcgcggggagagcgtcaagaaggcggcgaagcacctgaggaccgtcctgtcatggagggagaccgtcggagctgaccacatcatggccgacgagttctccgccgagctcgccgacggcgtggcgttcgtctccggccacgacgacgacgggcgcccggtagtggtgtttcgaatcaagcaggaataccccaagttccgctcgccgaaatcgttcgtgcgcctgctggtgttgacactggaggtggccgtggcgtgcatgtcccggtccgtgcaccagctcgtcctcctcttcgatgcaagctttttccgatcggcgtcggctttcctcaacctgctcatgggcacgctcaagatcgtcgccgactactaccccggccgcctccaccgcgccttcgtcatcgacgcgccctccctcttctccgtcctctggaagggagtgaggccgttcgtggagctggcgccggcgacggcggtggtgtgctccctggacttcgaggactcactggaggacgcctccttcacggcgtacccgcggaccgcgtccctgcggttcgagccgccgccggcggcggtcacggggaaggccggcgtggggtcagcctcgtcgcggttctccgtcacccccaccgacaaccccgtcaagccgtggtacctctgcaccatccccgcctcggtgggctcccgctccgtggtacccacctccagcagcagcccgtcgctggtcggcgcgtccccgctctccgcgcgctccttctccttcgcctcgcccgccgcgctgcgctcgacgccgttcccgcgcggcgggggcgcccccccgacgccttcctccgccgtcacgggccacaagatcccgccgccgccgcagttcccgcggacgccgcggccgtcgttcctgcagtcgccgtcgacgctgttcgcgttccggaaggacgggcagcagaccagccgcgtggagcgcgagcgcgggtccttcctcccgtacctccgcttctaccgccgcccctacgacgagatttcctaccgcgccatgatgcgcccgccgctcggcggcctgatacccatcgtcgagaagttcaaggcacaagccggtgcagcagacgctgcgtcgacacgctgggctccaccagcatcagcagcagcagcaccaccattaccaacagcagcagaggatctgagtctcgtctctcagtcggtactgcatggcgacccgagaattttctccatacagcataaaggcgatgctatattatgctaagttaatcttttgccaagtatgatattcttaaaggcatgtataataacatcccaaaaaaatgtgagtaaaatggactcctttctgcaaaaaaaaaaaaaaaagcgaccccaggtcagtcgggactacccgctgagtttaagcatataaataagcggaggagaagaaacttacgaggattcccctagtaacggcgagcgaaccgggagcagcccagcttgggaaatcggggcggnnctcgccgccccgaattgtagtcctggagagggcgtcctcagcgac

SEQ ID NO: 133097 - DNA, 1230 bp, Zea mays
  Clone ID: MRT4577_52873C.1
aggccggccgggatcggccgtcgaccgatccgtctccactccaggttcacttcgcctctccctcgccctctctctctctccttgcttctttccctctcccctccaggctccaggtgccctaccgccggaccggcgcctgcctcatgaaggccaaggcatccgccgccgccgccgaggatgacgccgaacccaagaagatccggtcctcacgcagtaagcaccgccgacgccgtcacagccgctcctcctctaggtccgaatctccgccccgcaagcgctccaagaagaacagcaagaggattcctgacaagaagagcaagaggagcaagggcagccgcggcggcagccttagacgtcggcaccatagtcttagccatagccgtagccttagtagcagcccttcctcagtagcccgacgcagcagctcctcatgtagcagcagcagcgcctctgagaggtcggtgagcccgccacccaggagcaggtccagagatgtaaggaggaaaaagggcagagggaggggcagggagagggatcgtaaggggagaaagttgcggagatcggcaagttcatctagcatctcagcaagcagtggcagtagcaggagcaagagcaggaagcggatgactgttggtggcactaaggatcgcgctacaactacaagggataagatggaaaagggctacactgatcgccgttcttgtcggtctgtcatgaacgtggacgagcacgttgatggggatgaagacaggctcgccattgccaaggtggtggacaatgatattgacaggcacaagaagaatttggaatcggagagctcaccttccaagaatgccaatacaacagaagagaaagtacctgcaagtggtggaaattcagatgcccaggatctggagctgattcttaggcagaaagctcttgaaaacttcagaaagttcagggcagcagcgaccatgggaggcaaaacagacagtggagctgcagggaaggaagcatcaatagacgatagcgtacacaatgctggcatggaggttgctgatgccacacattctcagagtcaggaaaccagtcttggagcgaggtattctgctggatcacctagatcacagaattttgggaatggtgcgaatcgttcttggaagcaggacaacggtgctggcatgagttgtggtgggatcacccggattacttgagcctgctgaaactggtggcccgactcactgaggggag

SEQ ID NO: 133098 - DNA, 525 bp, Zea mays
  Clone ID: MRT4577_52874C.1
ctaaggtgtcccaaactgttaataaaaacaagccaaccctaactatgctacagacatataagcccgcatgggatggtaccaagttttatacataccccactcgaacggactcaagggccattgaatctgccttatagggcacagcgtggtgttcaaaagaagcaccccgccgacacagggctaaggaaaacgcatgcaccaccctcggtggtttcaaaaaaaaaaaatgagtccctaaaagagcttcgaggaaccggatggccaaaaaaagggcattccgaggaagtttaaaaacagtaaaaagcttttgcggggcacgcttaagctcaaaaagaaaactacttggacgcgtaaaaacggtaaacactcctgtatgaggaccccgaagatcccccccactagcacttctgattggacgaagcaggtcacgacgggctccaggaaggatatgagcgtgatccctttcgggaccacacccatcaggcattctaagaagtttatgacacacaagtggcatacactgaa

SEQ ID NO: 133099 - DNA, 140 bp, Zea mays
  Clone ID: MRT4577_52875C.1
gttccaatgtttgcatcagtggaaatttgtgggcattgagaagctgaaacttttcttactactatgctgcagtcctggaactttctgagaaataccagaagaaatttggtccacttcgatattttgtggctggaatactg

SEQ ID NO: 133100 - DNA, 727 bp, Zea mays
  Clone ID: MRT4577_52876C.1
gtgcaggcgctcgatggcgggcgtttctacctaacttatcatttatcgtgcgtacttctgatttctgcactctctgtgcttccgtgtccgtctgattcatacaatacaggaatcgtcatgtgggactcagaggagcaccaattcgaatcgaaggacgacggtgcggagggcaagacctactcgaaaaatactggaaccgcccgtatgaacgaattcatcatcatcattaaccgtacctgcaaggtcgaggagggttctacctaccaagactggcacaaatgtgcacgccattatgccactttgtctgcatagacatatacaatggcaagaatgttgaagacatggtgccttcatcatataactgcgagattccgaatgcgaatcgtactgatgatcaaatgattgatatttctgaagatgtatttgtgagccttcttacttcagatggaaagactaatgatgatcgtaaactcccaaatgatgatactcttgtggcccaaattatggaaggtctcgaaagtgtttaaagatctaggtgtgactgtccaaactgccatgtaggacgagcaaatctgccgcgcataaggatgatggccccaacaaacttccatgacattgcactattaaccatactctatctcaacttaaatcggaaaagaagcgtatcaccagaggattgctaccgacacgttccctgccctgagctggctttttgtataccaggcga

SEQ ID NO: 133101 - DNA, 154 bp, Zea mays
  unsure (1)..(154): unsure at all n locations
  Clone ID: MRT4577_52877C.1
gggggccggnnccggggagttcacaaaaaaaccgaccgccgagaggcccggtttcgccggagcaaaaccatactccaaaaccctagctattaccctagangacgcgcggagcccggtagcttcgcacccaccatcatcgccgcctccctctctt

SEQ ID NO: 133102 - DNA, 614 bp, Zea mays
  Clone ID: MRT4577_52878C.1
gacgtcatggtcgaatccctcaagacgctgctggtcgcgcccgtcccgcacgacctgctggcgtccaccgagctggcgaggaccgtcggcgccctcgggagccacgggtcgtcccggatccggagcctcgcgcgcgacgtcgtgcgcgggtggagggtagccgtcgaagcctccttcgccactgctgtagcggtgaagaagaaactcgacaatctctctgctgatcagatcccgctcccgcgcgctgccgtcgacaaggtgcacgtaccgtctgccaagatgcttcccgctgctgctgaggtacacaacaagaagccggacataccaccagcaaagatgatttccaccgccaccgccgccgaggcacataacaagaggccacacgtaccaccagcaaagacgcttgctgccgccgttgccgaggtgcacaacaagaggccacaagtaccaccagcaaagatgctttccaccgccgaggaacacaagaagcagcattatgtaccgccaacgaagacgcttccgaccacatcaattctatcgaatcaacggaagaacatgagtgagaccaagaaccggtcttcgccgagagcgagaagatggaggcttacaaacgc

SEQ ID NO: 133103 - DNA, 500 bp, Zea mays
  unsure (1)..(500): unsure at all n locations
  Clone ID: MRT4577_52879C.1
ttaacgcccgacgcgancacctcctctaaaaaaaaaaaaaaaaaaaaaaaaaaaaaaaaaaaaaaaaaaaaaaaaaaaaaaagagaggattaaaccaaaaacaagaaagaaaaaatggacagaggaaaaaaacaaggggaacaatggggttcaataaaaaaaacaattgggggccgcacattccacctttttgccccttctctggggagaatattgggccgggttggggtaccaatggggggggccgtcttcccttgagaaaatgtggcgccctggtttccaggtgcacccactgggaatccctaagggggaaactgcttaaagctggggggccttaaggggggggcccccttcccgttggggggtggctttctcggtgcgtttttaattaattaacccgcgcgggccatggggttaatggaagggggaaagccctggggaagggggttttgctaattggccggaattggcttttcaccttaagggaatcttttggccca

SEQ ID NO: 133104 - DNA, 617 bp, Zea mays
  Clone ID: MRT4577_5287C.1
ttcttatgccctttggccaccccctcctctaacaacacactgagattcttggatgtcatgacctcctctaggaaatcccacctgactttgtcctaagctttttcaaaatcgattttcaacaacagactcttcttttttttagatttcaactcgtgcacaacttcgtgcaagatgacgaccccttctaaaatgtttcagtttttcaagaagccagtctggttccctccgatgagccccttggccaccgcagaaagcctatttgtgagcactttagtgaatattttgaagtctgcatttagaaggcaaatgggccggtattgtttgatgctactggcatccctgatcttggggatgagcatgattactccgaagttcaaccgttgcatgtctacttctgcttcgtggaaatccttgaacatcttataaatgtcctctttaatgatatgccaaaagtttttgaagaaatcacctccaaatccatttggacctggtgctgcgtcaacttccaaattttcaatgacttgaaagatctcttctttaaagggttttgcaagggagttcaaatcctcaatgctaagcctcggccgcctgttccagaaattttcctttaacttcat

SEQ ID NO: 133105 - DNA, 326 bp, Zea mays
  Clone ID: MRT4577_52880C.1
gcttatcgccgtatttgtctttttaattacgtgaaaggtcactaacaagaggacagggcaccacaggcgatgaattgaaccaaatttaataaaagcactactcggcgggataaagctacagtgctcccatcaattaagacaagaataaaaagaactgccaaggcagcccacatcatagcggctcgggctattggaggcattgccatggcgtcatgggccacatacccggagcgaggacaatactggacatggatgtaagcccatgagtgtcacgaacgatcatcaactgcatttccagagcgcactccatgaatattgtgctctcg

SEQ ID NO: 133106 - DNA, 562 bp, Zea mays
  unsure (1)..(562): unsure at all n locations
  Clone ID: MRT4577_52881C.1
tgagtaataagggggaacaagctgtgctcttgttattttctttaatttgaaagtgacccataaaaaaaaaaaaaaaaaaaaaaaaaaaaaaaaaaaaaaaaaaaaaaatgctcttttaaaaaaaaaaaaaaaaaaaaaaaatttgggcccggccccggccggccccctcnaaagggcgcacttccctcccactggtgggccgtttcttggggttcccggcttggttccaaacttggccaaattctggccaaagctggttcccgggggaaattgttttccgcttgcaattccccaccactttcgagcccgaaccaaaaagggttaagcctgggggccccaatgacggggctaaccccattaaatcgggttgggcttactggccggtttccccgcgggaaacccgggttgccccttggcttacttattccgcccaccccccgggaaaggccgtttcccttttgggcccttttcccctttcttgctcccttactccctgccctcgaaccgtctgtccccgggaccgggttttgccccctcaagggccgtttacccgttttccccc

SEQ ID NO: 133107 - DNA, 687 bp, Zea mays
  Clone ID: MRT4577_52882C.1
cgacctacgaagcttccgggctttccgggtcgtttctaaccagggttcctccagcccagccgccgccgccaccgttgcggagctcacatcgcctcgacacaacacggtctccggtttcaacattcatttctaaccagggttcctccagcccagccgccgccactgttgcggagctcacatcgcctcgacacaacacggtctctggtttcaacgtataataactgggctgcgagcactatatggatgatggcttcacgaggcaccagtgccgtgctttcaagggctgctcggatgaggcaaaaactgcagtctgccttggaggccagtgccctagatattgaagacgtttcttaccaacatgccgggcatgcagccgtcaaggacaatgcgaacgagacgcacttcaacatcaaggttgtttcaccaaaatttgaggggcagaaccttgtgaagcgtcacaggatggtgtatgatcttctgagggatgagcttagctcaggcctccatgctgtctccattgttgcgaaaaccccgaaagagttagggtcttgattgtataacaatgttgaataagcactgtcctatgtttcgaaataagtctgtcgtagcagtgtcatgtaaccatgaactgattgccaaaacaatgtcaccggcatgctcttcttattaagatctggtattcggatt

SEQ ID NO: 133108 - DNA, 814 bp, Zea mays
  unsure (1)..(814): unsure at all n locations
  Clone ID: MRT4577_52883C.1
agccgtccatttgagtcttttctcaccagtgcacccccaatcacacacacagcacactcctactctctctttgcggccggtctctgctttcagattcatttctaaccagggttcctccagcccagccgccgccactgttgaggagctcacatcgcctcgacacaacacggtctctggtttcaacgtataataactgggctgcgagcactatatggatgatggcttcacgaggcaccagtgccgtgctttcaagggctgctcggatgaggcaaaaactgcagtctgccttggaggccagtgccctagatattgaagacgtttcttaccaacatgccgggcatgcagccgtcaaggacaatgcgaacgagacgcacttcaacatcaaggttgtttcaccaaaatttgaggggcagaaccttgtgaagcgtcacaggatggtgtatgatcttctgagggatgagcttagctcaggcctccatgctgtctccattgttgcgaaaaccccgaaagagttagggtcttgattgtataacaatgttgaataagcactgtcctatgtttcgaaataagtctgtcgtagcagccatgacactgattgccaaaacaatgtcaccggcatgctcttcttattaagatctggctgcggagccagtttacctgcatttgctatgtggactttctgagctgaaagggaagcagaatatgggaggaaaatcgttgccagccatgagccatgtcgctgttgtacttgcatcgntgngtgggcaaaacgcaaaacatgtgaaatttttttaaaaaaaccctttgccccatg

SEQ ID NO: 133109 - DNA, 104 bp, Zea mays
  Clone ID: MRT4577_52884C.1
tgtcgttcggtctgattgtgattgcggcagcaccgtcgaccacgagcccggcgtaaggctcctcctcctgccgtttcagggtgcactttctccattgctcattt

SEQ ID NO: 133110 - DNA, 368 bp, Zea mays
  unsure (1)..(368): unsure at all n locations
  Clone ID: MRT4577_52885C.1
aaaggcacttccttcaagttggaaagaagtgattgaacttcttgacatattattaaggtggtttgtcttacgcttttgtgaatctaacacaacgtgtttgttgaaggttcttgactttcttcctgagctttttgatattttaaaagaccagtcatacatgttgacagaagctgaagctgcaatttttcttccttgcctcatagagaagtctggtcataacattgaaaaagtcagggaaaaaatgggggagctgataaagcaaatgatcaacatttactctcttcccaaactaattccctatatactngaggggctccgctccaagaataaccgacaagatagaaatgtgtgatattatggatatttca

SEQ ID NO: 133111 - DNA, 499 bp, Zea mays
  Clone ID: MRT4577_52886C.1
catttcttttcttcgccgcagagagcaagacagaagtactccgatgctcgagagtaaccagcgcccaacaagagacaggaaggactaggtgagaacacgcgagtacccatctgcctacgcagatccctccgcgccacgacatcattcaatacagcctccactgctatctcggaaaccacctcgccccgacgcaaccgatcgagtatacctgacattcggatagctgggtctgtccgcacgaaaatatggaccagagagatgccatatgcgcctccgcccgcaccatgccgcgagcatctccatgaccgaatcctctccaggactccaaaggaccactgtagtctcgtcgtcctctctgtgtgaataccacgcactgactggatcctcggatgatcttggatgtgaagaacatcttaacatgccgcctgattattgctctgtgccacctgctgacatgcaccatgtgaagggagggacgccgtgagcacgtaccaatgat

SEQ ID NO: 133112 - DNA, 876 bp, Zea mays
  Clone ID: MRT4577_52887C.1
ttggccgggcttacaacatcttcaccttcacagccgcaattcttgatccaaggatcaagggagagctcatccctgaaactctgaactccacgagcaacttggacgatgtaagaaaccattttgtccgggactacagcagcaccttccaagctgttggaaatggtcatggcgctcaggacaccacagaggatgctggtgcgttcgcctttgctgaagagattattcgcaaaaggcgccgggtgagcatgaccactgctgatgatgagctctcgcagtatctcgcagagccccccgcaccgatttccactgatgcccttgagtggtggagggggcattcctcccgctatccacgtctctccctgatggcccgagactttttggcaattcaggggacctcattggatcctgaagaactgttcacaagtaaaggggacaacatccacaggcagcagtactgcctccctcttagtagcatgcaggctatagtatgcataaagtcatggatgcaaagtgggtaccagttcaattttcagtcgactatcatagattttgagagattggtcgaatcagctactgctcctgatgatatcgatagttctggccttcacagctaaatgcatattcagcaaatcaaggatcccagaatagttctttggtttctgttttttcttcttttttctaggtgctcatgtaaatagtccttagaacttgtgaatgcgacttctattgctgtcccctgcaaaatcccagggtcagaactgcagcgagcagcttgtccttgcataactatgacacttcagaatcatgtactcattgtggtagtgaccaaaaaaaaaaaaaaaaagaaaaaagaaaaaaaaaaaaaaaaaagcggcc

SEQ ID NO: 133113 - DNA, 129 bp, Zea mays
  Clone ID: MRT4577_52888C.1
caacaaaagcgcttgcccacgccacgacgctcaccaacaaccaacgcgcacgcactgatcagcaccgcttgctgcatgctcagctgcacctctggcaccaccacatccgcttcgccaactccatcgcgc

SEQ ID NO: 133114 - DNA, 707 bp, Zea mays
  unsure (1)..(707): unsure at all n locations
  Clone ID: MRT4577_52889C.1
gcgacagagcaagcggcggagaaccacacggngcaggaccccgnggccccgaaccccnacaaccccgacagccccaacgatctttttttagccccccaccactcggggttgaccgggacacaaatttttttttcaaaccccacccccctccncttgtaccanttcgcgccccaaagcacgagcccaccccctgcggcccccctcccgcacaccgccctcatggcaacgccagcccccgaccccactttgtgcccatccccaacccctgaacacgcgcccccggcccacccacccccccgcaccgaaagcccccctccccctacccacacaccgccaccccccccccaaccccgggacccccgcccccaagtaaccgccccacccccccaaccgaccccgccctcccaccccccaaacccaaaccccatcccacctcaacccacccccccctcaccccaccacaaaagcccccacgccccacacatgccacacaccaccaaccacccaacggcaccaccccccctcctaatctcccgcgcaccccctcaccccccaccccccccccgaaaccaccgctccccatcctcccctcactccccaacccccaaccctccccccccccaaccaacttaacccaccccccccctcccccgctacagacaccacccccaaaaaccccccccccctccgacaaccccccccccaca

SEQ ID NO: 133115 - DNA, 504 bp, Zea mays
  Clone ID: MRT4577_5288C.1
ctcggccgggacaccgccgtgttcccctcccttgtagggtgtcccttcccccacttgcctttcctttccgaagagacgggcggatacggcagagccaccatggtcatggaggacgccgcctcggagagcagcgattgggaggtgctctctgccacctccgcctgcgggggcggagacgacgatgaggtattaatcgtctctggcgggggcggcgacgtacgcctctaccactggacctctaccccccacaccgtagccgcctgtcctggcgactgacatgggctcagcggaccgtgacgacccggggccgcctcgtgaaggccttccaactgactgcgatgtggttcgataccgcttccactaggcgatatcgaatcttgcagctggcgtctggaaccagccgctgctgatacgcggcgcggctgacgcccgctaatgggcgcgcggtgcgacccgcaccgcagctggcaatcaagaggaggtggcagacgccgcacattcatc

SEQ ID NO: 133116 - DNA, 777 bp, Zea mays
  unsure (1)..(777): unsure at all n locations
  Clone ID: MRT4577_52890C.1
ccggccggggccactgactagaattaattgtgcgtaccgtatgaagcctagcaatgagctggcatactcgatgcactactatattctgaggcctaacgaaggagaagaagactagtgttaagtgaacctgcaacttgcggtgatcactggctgctatccttagtgtgactgagtgatcgagctaactagagctcctatcctcgctagctaggataccgccataccacaagtcttcttcacaagtttaagatagacaccacctagagatcgatgtgctactggcaacgctctcaagttctgcttgcttccgacgaagatcctatggggtcgcaccacggcagagccgacgcccgagcgtccgcccaccgtctccatgggtcgtccgcgcctccgcctacgccgatgagctcgtgaagaccgcgaaaacgatcgcgtcgccggggcggggcatcctggcgatggacgagtcgaacgcgacgtgcgggaagcggctggcgtccatcgggctggagaacacggaggccaaccggcaggcgtaccgcacgctgctggtcacggcgccgggcctgggccagtacatctccggcgccatcctttttcgaggagacgctgtaccagtccgncgtcgacggccgcaaagatcgtggacatcctggcggagcagggcatcgtgccgggggatcaaaggtggacagggcccttgtcccgctcgccggctccacacgagttcgtggtgccagggcctggacgccttggcgtcccgcgaggccgcctact

SEQ ID NO: 133117 - DNA, 399 bp, Zea mays
  unsure (1)..(399): unsure at all n locations
  Clone ID: MRT4577_52891C.1
cgcatatcagngttagactctgttgccagccacttaggagagagcatgagagcgtccgattccctcgtgctctcgctgaagttggagttggagtacagtaaagtgaagcgggaacgggacgatgcggtcaaagaggccagggacatgcgcatgngagaaagagctcacagaacctcgtgcctatggagcaatgagctctgagttctccttggcggagttggagcaagctacccaggcattcagcagctcgcttaacattggtgaaggcggatttggatctgtctacaagggtcttctccggagcaccacggtagctatcaagatcctcaacactgaaagcttgcgtgcccaatcacagntcaagcaagaggtaaaaacgcttnttttgctgccttgttg

SEQ ID NO: 133118 - DNA, 1878 bp, Zea mays
  Clone ID: MRT4577_52892C.1
atggggggaggacaacatgctaatatccagtcaaccccacctatggttgaccagagagccggtggtctcgcaccggctgccattgatatagtgagggaagaaatagccggggcgttccgagagaagctcggagtaagaaatgcaggtggatacagagcccttcccggtaaatgtgatcgacttcgagggcaagagggtcctgattggaccgaagacaaagaaataatcatcgacgacgcatgggaggccgatgggaataataagatttcttgcagaaaagtggtggccgagaagactcctgatggaggggagacccttaaggtgaccatcacaacctttggcactaggggggcaagcgcagaccaaggggcgagtgcaggagcccgtactacgcatctcggacggtccgacgcacaggtgcagacggtccgggactacgccgaacggttcgaagaattccagtggacggagcatcagcaagtaagaccgattggaccacctcaccaatcgaaaagaacggaaggtcatactgtccagttgaggtctaacatacctgcatggacacctccacccccatatctacctatgtcatatccatatacatacataccaccaccatataccccgaatcaaatgtggagcatgccaccatatccatttgggatgtcacagaaccccgcttggggggcaccccaaacatatgtattcaataggttggcacctccagtacaagatcaattaagcgccactcaatccggtcaccaggcacaagcccaacaaggttgccggactactcagtctcaaaggccgaccaatctggtagaggggcatatacctacaacaactgaaagaacgacaaaaaaggacatcatcaaaataggtacaacagatgtcgtcatacaggaagataatgaagggccgatgatttttggtgaatcggccaacacaaacaaaatagaagataaggctgccatcaaaatagccgacccaaaattctccatgccccgatggtgcccatcgagattaacacggtcccaaaagcaaaaattacagcgcctaagagcaaaagagaaccaagaaaaggaggcggaaaagacattcaatgacacacatccacagtacccgccaccgcaaaagaaatggagaccaaaggccgttgagaaaaagcaaatggccacaaaaatggaaaataaaacaacaattgtgcaacaccctgcaggtatggcagacagcccggctggaaaggccggaccatctgcacaagacgtggaccgtccgacccctgagtctggaccatccgcactacaccaggacgcctccgacgacgtgtcgacaccaatggaggaggacgacttactgggggaagacctggtcgactacgaagcttctccagagcacccaggtaaggatataaatgttattacattctccatcggctgtaacattatcggcgatgatgaacccgttgttgctcagttttactttggtcctaaagaggccgctttcactaaaccaaaggaatcagtgaatcatttaaagccgctcttcgtgcgcggttatattgatgggatatcgattgctaaaatgttggtggatgggggggtggctgtaaatctaatgccttatccattgtacagaaaattaggtaaacaagatgacgaacttgtcaagaccaacatgaccctcaacgatgttgggcctgatagttcgatcaaagccaggggagtcacgtccgttgaattaaccatcgggactaagacccttgctgctgcattcttcgttgctgatgtagaaggaaattacagtctaatcctaggcagggattgtattcatgctaaccaatgtgtaccttctacgttacatcaaatgttactataa

SEQ ID NO: 133119 - DNA, 280 bp, Zea mays
  unsure (1)..(280): unsure at all n locations
  Clone ID: MRT4577_52893C.1
ctgcaggtaccgttctctaattcccttggcgggcgacgctttcnttttactgtacttacacatcaccaaaagcactcgcactattcgtgcccctgcttcttgggggggggggatctgaggggaggctttctttctgaatatgcatatacacagtaaccatttacacatggacgctacggctccatggtaactggttgcgatcagggctctggatgcggtggccaaaacctagatacactgattgtccgctggggtataccatctactacatacccctctc

SEQ ID NO: 133120 - DNA, 352 bp, Zea mays
  Clone ID: MRT4577_52895C.1
tcttttccgcgtccgggcagctcagtcagagcacaaacagttgcagtatcagtgcatcaccaccagcggggcgagctagaaacagagagagagccttgcctgctcgaatggcgttcaagaaagcggccatcggactctcttcccttctcctcatcctcgtcctcctcctcgtcgcgcccagcgctaccgcggcgagaccgacgcgtcagctgacttccgacgacgacgacgacggcactggtgctgcggcgcccgctgccgcaccggccatagcgcaccctgctgctgacgcaccggtcactgccgatgccagtcccctgtggtaggaggcgccggtgtggtggcggcgccc

SEQ ID NO: 133121 - DNA, 351 bp, Zea mays
  Clone ID: MRT4577_52896C.1
catcactccgatcccagttccattcgctgcggttgttcccaggccgcaccgccgcagcctcgccgatgcaaattgccgaccctgcgtcgtgcgcctctgttgatacagggcgctgcccatctgctcgacggaatgcctattttttttttccatggcttttagggcagggcgaaagcgtggtgtggcttcttcggccgtcgcttcttcgctggcataaatggagcaagaaattggcatcgcacaggggcgtgcagtggagatgctccagggcaaaccactgctttgcttcacaatccctgtgcgctcgctgcttccatttcaaacgccaagaaggaatctcttgatctgggc

SEQ ID NO: 133122 - DNA, 263 bp, Zea mays
  Clone ID: MRT4577_52897C.1
atgcggcgctacgggcagtcgctgtaccacccgcagagcccgatgacgcggtgcgtcaacttcctgtgcgcggtgctgctcacgctgatcctcatcaccggcgtcatcctgttcgtgctgtggttgagcctccgtccgcaccggcccaagttctacctcgccgacttctccatccccgtcgccaacgccaaccggcagtccggcctggccaacctgccggtgcgcttcaccgtcaacgagcacaaccccaaccaggagatcgg

SEQ ID NO: 133123 - DNA, 163 bp, Zea mays
  unsure (1)..(163): unsure at all n locations
  Clone ID: MRT4577_52898C.1
tcgaagaagtcgggctgctgtggcgactatcgcccggatatgatccaactatgggcctataacccttactgggaannttgggtgatgtgagcagcgcccctactatggtgtctctgatgagccaatctccatggcgcatgggggcacgcaccatcggattaca

SEQ ID NO: 133124 - DNA, 285 bp, Zea mays
  unsure (1)..(285): unsure at all n locations
  Clone ID: MRT4577_52899C.1
agcagtggtaacaacgcagagtaccgggaagaaaatgaccccaaagaagaagttgtgtgatatatccctgatgactgcgtatgtgttgagggttactacacactgaaaaatagaataacagactctatggttgttagtgaagagggattagtcaaaaagagaacaaggcgtccaaaacatgttggcaatgagggggcaatcagaaagagaagaggctctgataatgaggtnaaaaaaaaaaaaaaaaaaaaaaaaaaaaagtactctgncgttgttaccactgct

SEQ ID NO: 133125 - DNA, 938 bp, Zea mays
  Clone ID: MRT4577_5289C.1
gtaactttactcaaggaacaattaaagatagcaaacctggagaaggaagaaatttcgttgaagtttgataagttgtctgccatttgctcctctcagaggcgagagatacaagagcttaagcaagctttggctgcagcttatgttacgccaccagctaaacagttcagagaaaattcaagtgttgaagtcaccccacccagcaaaagcctcgacactccgccgagggagaagattgaaggaacccctccagagctccggcaaggcctgtttacttcaagcccaggaacaccaagccctgacctgaaaacatggtcagctttccttgaagagccaaaatctcaagcagctgtgaagagtgtccaccccaggtcagtccgaactctgcgtgcatcaaacagcaacaaagccagctcgttgggacagtcaaatataagttctagcaccgatccatttgcggcacgaggtttgataacaggggattactgagctgagaagtattccccatgtttgataacaggggaagtaacttcccagctcagtaatctgaatatagaagaaaagaaagacggatcctaccaaccagatggatggactgggttttgattgtgctatagtaatttatgtgccaaaagagtcaagagttcatatggtcttggtggtgtggtatactgaaggtgcagagaggaatgcctgaactggtgtaggtatgtgtgacaatgctttttgtacaattgttctggtcctgagctagcatcgtgatgcgttcagttgtaactgtagtgcaaatgtaagttgcaacttgcaattaattgctagatattagatataggaagatgtttttttttcttatgtagacaagcttgtggtgtcatgaattttggaggcatgctatatagatatagccatctattataccatatcatgaataaagggttatc

SEQ ID NO: 133126 - DNA, 293 bp, Zea mays
  unsure (1)..(293): unsure at all n locations
  Clone ID: MRT4577_528C.1
taattggngagttcatttttcgcttttgagagaagggattatacctcaatgccctgaagattgtgaatctggatgaggttgtttgctgagaagtactaggntgaccttgccttcaagcccttgttccagggcctgtagcactacatcatattatggtcagtgaagtggaaatgttcatgggagtgttagagattcntcactattgttcgcaagattattggcaccttcaacatattggcttctgagactgatttatccgcgagactctgctgtttaattgcatcattgttatt

SEQ ID NO: 133127 - DNA, 137 bp, Zea mays
  Clone ID: MRT4577_52900C.1
cagagactggagagagatgcgccatgaggaccacgaagaaggttagcgtacgtgtgactcctatgtctgcgcgtaaatgctgtgaaggcacgaacatggggggacctctaatgtagtctggaattcggtgacgctgc

SEQ ID NO: 133128 - DNA, 293 bp, Zea mays
  Clone ID: MRT4577_52901C.1
ggtagcgctcctgcaaacatggtgaacgttcctaatacacgccggacattctgcaagaaatgtgggaagcacgaagcccacaaggtgacgcagtacaagaagtgcaaggattctttgtatgcccagggaaagcggcgtgatgacgttagacagagtggctacggccggcagactaagcccattttccgctgaaagtctataactacgaagaagattgtgctgagacttgagttcgtggagcccaactgcagatctaagagtatgctggcgattaagagatgcaagcgttttga

SEQ ID NO: 133129 - DNA, 302 bp, Zea mays
  Clone ID: MRT4577_52902C.1
aaaaccaacattatttttattttcaaatggggggggggcccaattattttaacacaaacttaaacttgggacgaggttacaaccccacacaattttcgggggttgggcccgcatttttaaacacctaaaaacctacgggttaatggggtccctaaacccccaatatttttcgcttatttttttaccaaaaaattttaacaggggttttttcattaacttccttcaaaaaagagtttaaccaatgggaggttaagcattaaaatttttttgttgggttgcattggggggggccaacttcccat

SEQ ID NO: 133130 - DNA, 335 bp, Zea mays
  Clone ID: MRT4577_52903C.1
atcaaaagatgggcttttttttaacaaaagatggggcgcttttgatgctacatgcttatatacatcaaaatatgtagcgctgtgggggctacccccttaaaatttagcgcttttgatcctacatgggtttttacctcaaaagatgtagcgctggccctttcgttgtttttcgaaaccgaaaattttgattttttcctttaggcaagatcttttaaaggctactactttactttggctttttaggctatcatgcctcattttttgctttttgcttgggaggggggactcttgattttcttgaattggggaaaaacatttttttcatcagggggttc

SEQ ID NO: 133131 - DNA, 606 bp, Zea mays
  Clone ID: MRT4577_52904C.1
ttctgggggtacagcctgcaggttccggtccggaattcccgggtcgacccacgcgtccgcaacaactatggaggcgtttagtgtaagatttgaaagtgctagcagtatcgaagagcgaaaagaacagacccgtaatgccagggccgaggtgttacgccaggccaaacataattttgagaaagaacaaaggggtgaagaacgtaagcgacttcgggatgaggacacatggatgcttcctgatgtgcatgagcgaattgaacagttctcacaggaacattctgagaagaaaaagaagaaaaaggacaagcattcaaaaaaagtgaagaaagagaagaagaagaagaggaagaaacagaagtgtcagaaacagagtgagtcgactgacagctccgcaagctctgaagatgagtgggttgaggctgctccctcccagatatctgacaaagaaaagacctggagagtgaaagacaaaaggacagaagaagaatgtgacagccacgatattcagcgtgatgagtggatgactattgattttatgtccattaaaactgtgtcctcatcatcactcaaagctggacaggaaactgtaagacaggtagagcggga

SEQ ID NO: 133132 - DNA, 264 bp, Zea mays
  Clone ID: MRT4577_52905C.1
gcaggccgacccgaaccgccggacctccaaaaaacgcctgccccccaccaaaacccacccatggccatttttgcatggatggttttatttaaattgaaacacacagccaacccaaacccattaatgaaaccctagccaggggggaggggggcgggggggccgggggcccgcgggcggggggtttggggggggggaggggggtgggtggtattttacgggacaaaacccaaccgcgggcggtaagggggggcacggaccaacttt

SEQ ID NO: 133133 - DNA, 359 bp, Zea mays
  Clone ID: MRT4577_52906C.1
cgcggaaaatctgacccaccggttcacgcggctgccgcctacctgctcccccctataccgcgatggtgaaccctcctactcccctgtgattgtcccccgcactttcggtgcgcatgctggaggtgttgtactacgacgccacataccctcctgcataggctttgtccacatcctccacgcaactcctcgaacacgcagccacgacccccttcttccctccccttcgaaatgatccgcctcttctcgaggctctctcccctcctctacgatgctacgaacctccgctcggacactccgagccaagcaatatccaccacctgattgtgatgacagcaaggggatcaatagactgtggacct

SEQ ID NO: 133134 - DNA, 370 bp, Zea mays
  Clone ID: MRT4577_52907C.1
attatttgaatgcttatgcttatgatgctcaaattgctggtttgttctattggatatatcttacttctgctggattccaggtttctttaggtggttacaatgacaaaatgagagctctcttaaatgccatactagtgcaaattgcgagttttgaagttaagccaaacagattttctgccctaaagatttgaattgttgacatgatattttagaagtcctgaaaaagtaccaaggttccatgcaccttgtgcgctgcatgtgttgataaatttgctgaccaactacctaattggaaagctgatttgatgaccagagcaggcaggagaatactagtgcaacatgtgctcacaggaaacttctgtcaaggact

SEQ ID NO: 133135 - DNA, 3671 bp, Zea mays
  unsure (1)..(3671): unsure at all n locations
  Clone ID: MRT4577_52908C.1
tttgtaggcacgattgcggccgggatgcccaaatcgctggttgcccctgcggcctttttctttcgtggctggcctctgagtggttgagtcccttcactatgctagtataaaattgacaagagacaaaaactaatagcctctcaagtagtcttggcccctaatccaatccagcttccaccattgcgagagatcatcagaggatcgtctccagtcgaagcgaaaagcgaaaaggaggagaaggggcgggggattgcgagcctgtgctgatggcggcggcggcggtggccgcggcggggagcagcaatgtcgagttcatccgcgcgcgcagcgacaagcgggagtaccgccgcgtggtgctcgccaacgcgctcgagatcctactaatcagcgaccccgacaccgacaaggcggcggcgtgcatggaggtcgaggtgggctcgttcagcgatccggagggacttgagggcctcgcgcacttcctcgagcacatgctattttatgccagcgagaagtatcctggagaacatgaatatacgaaatatatcatagagcatggtggctcttacaatgcatatacaagctccgagacaacgaatttctttttcgatgtcaatgtggacaattttgaagaagccttagatagatttgctcagttcttcattaagccattgatgtcacaggatgctgttcttagagagataaaagctgtggattctgaacacaagaaaaatttgttgtctgatggctggaggatgtatcagcttcaaaagcattttgcttcaaaggatcacccttaccacaaattcagtacaggaagttgggaaacactagaaactaaaccaaaagcgaggggcctggatatcagacttgaacttctgaagttttacaagaattattcagcaaacgttatgcaccttgttgtttatggaaaggagaacctcgattgcattcagggcttggttgagcgtatgtttagtgacataaaaaacactgatcagagaagcttgaaatgtccaagtcatcctctttcagaggaacatttacagcttcttgtcaaagcactgccaatagtagaaggggactatctaagaattatatggccaataacacctagcatccagttttacaaagaagctccttgccattatctgagtcacctcattggacatgaaggcgaggggtccatcttccatattataaaggaactaggatgggccatgaacttaatggctggagagtgcagtgacagtaatgagtattcctttttctcagtaagcatgaggctcactgatgctggtcatgaacgcatggaggatattgttgggttgatcttcaaatatcttcatctattaaaagaagacggagtccatgagtggatatttaatgagcttgcggcgataaatgaaatggagttccattatcaagacaaagtccgcccaatcaactatgtgatgcgcactgtctcaactatgcggttgttcccaccagaagaatggctggttggagcagcattaccatcaaagtatgcatcacagagaataaatatgatactcaatcaactaatacctgaaacagtaagaatattctgggagtccaaaaaatttgaaggatctacgagttctgctgagccctggtataacacaccattttcagttgaaaatgtcactccttcagtgatacaggaatggattgaaaaagctcctactgaaaaactccatcttccaaaacctaatattttcataccaaaggatttatctcttaaagaagtgcatgaaaaggttacttttccaacagtgttaaggaagagcccactttcacagttgtggtataagcctgatatgctgttctccacaccaaaggttcacattatcattgatttccactgtccattatccagccactcccctgaagcagttgttgctactgagctctttgttgatttgttagtagattatttgaatgcttatgcttatgatgctcaaattgctggtttattctattcaatatatgttacttcagctggattccaggtttctttaggtggttacaatgacaagatgagagttctcttaaatgccatactagtgcaaattgtgaaatttgaagttaagccaaacagattttctgcactgaaggaaacttctgtcaaggactaccagaatttcaatttccgacaaccttattctcaagcgtcatactatgtctctttgatattgggagataaaaaatggcctgtagctgagaaacttgaagctctttctaagcttgaatcagattattttgcaaagttcgtaccacacctactgtcaaaaacatttttggaatgttatgttcaagggaacattgaaccaagtgaagcaaaatctatcgtagaagaaatcgaaaacactatatttactacgcccaattctttgttcaaatccatgtctccatcagaatatctgattaaaagggtcatcatgcttgaaaatgacttgaaatgctactaccaaactgagggattaaaccagaagaatgagaattcatcagttatccaatatattcaggtgcatcaagatgacgccattttgaatatcaaacttgagctgttctctctaatagcaaaacagccagccttcaaccagctacgaactgttgaacaacttgggtatataacaagtctttctctgagatccgactatggagtcctggcactccaggttgttatccagtccacagtaaaggatccttcatacctcgatgttagagttgatgagttctttaagatgtttgaaagcaaaatctatgaactctccgacaaggatttcaagagaaatgtgaaatcattaattgattctaaactggagaagtttaaaaacttatgggaggaatctcatttctactggggagagattgaggcaggaactctgaagtttgatagggtcgagtctgaggtcgctatgctaagagagctcaagaaagaagaattcatcgagtacttcaaccagtatataaaagtggacgcgcctcaaaggaggacactaagcgtgcaagtcttcggcggcaaccatttggtagagttcaagaaggcaatcaacgaagccgacccgcccaaaatgtacagaattacagacatattcggcttcaaacgatcgaggccgctgtacagctcactcaagggaggtccgggcaggatcaccatggactgacagccggcaatagcatgccttgtttttcatgtatgtagtgtaatggccagtgcatacgaatgatgaattcgattctgaatcctgctcctgcatcagattcggttgcatgattgatctatacttcactgttggtttcacgaccagcgtgtcactttctgggcaaaatctagggagctgtataaagtcatgtatgttcacatgtttgtttgcgtttcttctcacagctatgcagtttgtacagttacataaaaaaaaaaaaaaaaaaaaattgattgttgacatgatttttagaatcctgaaaaataccaaggttccatgcaccttgtgcgctgcatgtgttgataaatttgctgaccaactacctaattggnnaaagctgatttgatgaccagagcaggcgggagnaatactagtgcaacatgtgctcacaggtatgactgtgtacctggctatggcaattgatataccccactggcagttgat

SEQ ID NO: 133136 - DNA, 3818 bp, Zea mays
  Clone ID: MRT4577_52909C.1
aattcggcacgaggtaatcttggtccccaatccaatcccgcacccaccattgcgagagatcatcagaggaccgcgtccaatcgaagcggagaggaggagaagggtgtgctgatggcgacggcggtggcggccacggccgcggcggcgggtggcagcaatgtcgagttcatccgcgcgcgcagcgacaagcgggagtaccgccgtgtggtgctcgcaaacgcgctcgagatcctactaatcagcgaccccgacactgacaaggcggcggcgtgcatggaggtcgaggtgggctcgttcagcgacccggagggactcgagggcctcgcgcacttcctcgagcacatgctattttatgccagcgagaaatatcctggagaacacgagtatacgaaatatatcacagagcacggtggctcttacaatgcatatacaagctcagagacaacaaacttctttttcgatgtcaatgtggacaattttgaagaagccttagatagatttgctcagttcttcattaagccactgatgtcacaggatgctgttcttagagagataaaagctgttgattctgaacacaagaaaaatttgttgtccgatggctggagaatgtatcagcttcaaaagcatctgggcttcaaaggatcacccttaccacaaattcagtacaggaagttgggaaacactagaaactaaaccaaaaggcgaggggcgtggacatcagacttgaacttctgaagttttacaagaattattcagcaaaccttatgcaccttgttgtttatggaaaggagagcctcgattacattcagggcttggttgagcgtatgtttagtgacataaaaaacactgatcagagatgcttcaaatgtccaagtcatcctctttcagaggaacatttgcagcttcttgtcaaagcactaccaatagaagaaggggactatctaagaattatatggccaattactcctagcatccagttttacaaagaaggtccttgccattatctaagtcacctcattgggcatgaaggcgaggggtccgtcttccatattataaaggaactaggatgggccatgaacttaatggctggagagagcactgacagtaatgaatattcctttttctcagtaagcatcaggctcaccgatgctggtcatgaacacatggaggatattgttgggttgatctttaaatatcttcatctattaaaagtagacggagtccacgagtggatatttaatgagcttgaagcgataaatgaaatggagttccattatcaagacaaagttgatccaataagctatgtgatgcgtactgtctcaactatgcggttgtttccaccagaagaatggctggttggagcagcattgccatcaaagtatgcaccacaaagaataaatatgatactcgatcaactatcacctgaaagagtaagaatattctgggagtccaaaaaatttgaaggatctacgagttctgctgagccctggtataacacaccatattcagttgaaaatgtcgctcctactatgatacagcaatggattaaaaaggctcctactgagaaactccatcttccagaacctaatattttcgtaccaaaggatttatctcttaaagaagtgcatgaaaaggttacttttccaacagtgttaaggaaaagcccactttcacagttgtggtataagcctgatacactcttctccacaccaaaggttcacattatcattgatttccactgtccattatccagccactcctctgaagcagttgttgctactgagctctttgttgatttgttagtagattatttgaatgcttatgcttatgatgctcaaattgctggtttgttctattcaatatatcttacttctgctggattccaggtttctttaggtggttacaatgacaaaatgagagctctcttaaatgccatactagtgcaaattgcgagttttgaagttaagccaaacagattttctgccctaaaggaaacttctgtcaaggactaccagaatttcaatttccgacaaccttattctcaagcttcatactatgtctctctgatattggaagataaaaaatggcctgtcgctgagaaacttgaagctctttctaagcttgaatcagatttttttgcaaagtttgtaccacacctactatcgaagacatttttggaatgttatgttcaagggaacattgaaccaagtgaagcaaaatctgtcgtacaagagatcgaaaacactatatttaatgcccccaattctttgttcaaatccatgtctccatcagagtatctgactaaaagagttgtcatgcttgaaaatgagttaaaatgctactaccaaactgagggattaaaccagaagaatcagaattcatcagttatccaatatattcaggtacatcaggatgacgccattttgaatatcaaacttgagctgttctctctaatagcaagccagccagccttcaaccagctgcgaactgttgaacagcttgggtatataacaagtctttctctgagatccgactatggagtcctggcactccaggtggttatacagtccacagtaaaggatccttcgtatcttgatggtagagttgatgaattcttcaagatgtttgaaagcaaaatctatgaactctccgacaaggacttcaagagaaatgtgaaatcactaattgattctaaactggagaagtttaaaaacttatgggaggaatcagatttctactggggagagattcaggcaggaactctgaagtttgatagggtcgagtctgaggtcactatgctaagagagctcaagaaagaagaattcatagagtacttcgaccagtacataaaagtggacgcgcctcaaaggaggacactaagcgtgcaagtcttcggcggcaaccattcggcagaattcaagacggcgatcgccgaagccgatccgcccaaaatgtacagaattacagacatattcggcttcaaacgatcgaggccgctgtacagctcactcaagggaggtccgggcaggatcaccatggactgacagccatcacgcagctattccctagttttcatgtacgtacgtagtgtaacggcctgttcatacgcctgaattccatcctgaatcctgcatcagattcgattgcacgattgatgctattcttaactgatggtttgttatgttaaccaataatgcacgacagcgtgtcactttctgggcagatatagggggctgtataaataaagtcatgtatgttcgcatgtctgtatgcatttcttctgacagctatgcattatgtacagttacagttacatatccagtgcactaagaactagaaggcgccatgaggagcggagagaccaacacaaacagcatcttctacacaccataccaatatacagtttgggactgacagcccgtgccggacgccgtccggagaaccgtcaaggcgccgccatccgcgcgtgcatcgccggcccggcttcagcacgccccggtgtgttcgcgaacggccgccggcgcccccactcgaagccgctgcggtgccatcggcacctgaacgagccccggtgcgccgtgggcgagcacacgcagtagtggtgcggcgcaccgtggcgcgcccatggcacagacggtgagagcgacggtgccacggccgcctgctgctcccgccgcctgaccgcgcagctcggcggcagtcctggatggcacatgtttctgggctacaaaacgtgaggcgagcggcagctccaccctctataaaacagggcgccaaagaatgaatcggtttcccggccgtcatcgaggtacccaatg

SEQ ID NO: 133137 - DNA, 380 bp, Zea mays
  Clone ID: MRT4577_5290C.1
ggccggggcttgagggtctagtatgagatagcggatgaggtgctggtattctatatcgccgcttctagggacgcggcctcgagcaattatacgtaatacttgatcgagttaatacgacatcctcatgggcagggaccttgcgtatctccgcggatgctgctcttcgtcgtcgccggcgaggcggaggcttcggcctcgctcgactccgtggtcgactagtctggatggaccgagaactgggtcgactacagcatctgcagcggcctctacggtttcctcgacggtatcacgatagtgatctcctacgagagagacgccgacaagtggcttctcgtgatcaaggacgactactacgtgtgctccggtagcgaagtgatcaa

SEQ ID NO: 133138 - DNA, 177 bp, Zea mays
  unsure (1)..(177): unsure at all n locations
  Clone ID: MRT4577_52910C.1
gctcttctctatcctcnccacacctttcttcttcgtgcacgtctgggagcaagctgctgcccttctccctggccggcgccctctcccatggccgccccctccctcagcttcgtcttcagccgccgccgaaccagggtgagctccccatgctcgctgccactcncatcccctccccct

SEQ ID NO: 133139 - DNA, 1760 bp, Zea mays
  Clone ID: MRT4577_52911C.1
ggtctggaggtcgtaagaaaagtaaccacgcgagcgcaaaagaaaattgaaaaattgaggcagctattatcaggagttttcagtgagcttacaaactttgatgagccaattcgttcaccattagcaccaactcttctcctaacaggagttgtgcctcaagaatcgtctatatttaagagtgccttgaaccctttgcgcctgacatttaaaacagcaaatggcggaacatccaagattatttacaaaaagggtgatgacctccggcaagatcagttggttattcaaacggtttctttgatggaccgactactcaaattagaaaatctagatttgcaccttactccataccgagttcttgcaactggacaagatgaagggatgcttgaatttattagttccagttctcttgcacagattctatcagaacatcgcagtattacaagttacctacagaagttccatcctgatgaggatggtccttttggtataacggctcaatgtttggagacattcataaaaagctgcgccggttactctgtcattacatacatattgggggttggagacaggcatctggataatcttcttctaactgatgatggacgcctttttcatgttgactttgcttttatccttgggcgagacccaaagccatttccgccaccgatgaagttgtgtaaggaaatggttgaggccatgggtggtgcagaaagccaatattacacaaggttcaagtcctactgctgcgaagcatacaacattctgaggaagtccagcagtctcattttgaatctattcaagctgatggagcgatcaggcattccagacatctctgccgatgaaagcggaggtctcaagctccaggagaaattccggttggatctggacgacgaggaagctatacatttcttccaggatcttatcaacgatagcgtgagtgctctgttccctcaaatggttgagaccatccatagatgggctcaatattggcggtaacacaacgctaatgtcgtagaagcaagtgtgaatctgtacatgctgactgtcacaagccacggtaataagcgagaaccggccgggatggatggaagcctaggcgcctagcatttgggggttcaagctgcgtagcatctgcgaattgattgggctgatgcagggcatgggcaatcttctcgtgccggtgacacccaggaattcgggttgtcagttgtcacttgtgatagtagaattccgtcacgcactgctgtagacctatgggcattcgtcagatgtatatatgcgttaatgtataaaatcaacttcagtagcaaatttgtgaataccggaatacgtgatggtttagggcctgtttgtttaccccatggattatataatctggattatttttggaggattatataatctggattatataatctgagtagttctgtttgtttacccagattatttgagttgttaataggattcttttgtatgaggaagacaagaatgccctctatatttgtactaggttgaaactcatatatgagatgaacaatgtaacaaacgtttctgagtattcataatttattacaaaaaaccaaaaaaaaaaaaaaaaaaaaaaaaaaaaaaaaaaaaaaaaaaaaaaaaaaaaaaaaaaaaagaaagagggaaaaaaaaaaaaaaaaaaaaaaaaaaaaaatgcaaaaaaaaaagaaacaaaaaaagaaaaacaataaaacaaatttattaaaacgacaatgtctgaaacaaacccaatg

SEQ ID NO: 133140 - DNA, 300 bp, Zea mays
  unsure (1)..(300): unsure at all n locations
  Clone ID: MRT4577_52912C.1
cgccctttgngaggtcggggggggggggtgcctgtcacttagtaggagtttggggaggtgaatggggccgaccactgggtgatatggtacgtgttcggngagaactnttatgatggccttttccatgtgccgtngaagaaccaataattttcctgtgccctgaattgggtggtggggggggggggngcacggggtttgggtggaatgcctacngantcgactgtgggaagctttcttggttccgtngaaacgtgtgtggtttgacctggtcatggnggatctccgcttttgtggggccgg

SEQ ID NO: 133141 - DNA, 238 bp, Zea mays
  Clone ID: MRT4577_52913C.1
gtcgaaacccatggaaataggaaaggggatgaataccaatggatgagcccaaacggggggggagggaaggtcatgaaagacaaccaggaaaggcggcagcagacactactgatgagacgaaacgaacccgacagatcccaaagatacaataaaacgagtctgaaatgaggctttagcatcaaaaactatagatagggggaaggagaaaaaaaaaaaaaaagggcgaccgatctaaagg

SEQ ID NO: 133142 - DNA, 589 bp, Zea mays
  Clone ID: MRT4577_52914C.1
ggggcaagcaactcacttttaataaaaagggacaccgggcgttccttgactgggctggccccccgatcaaaaattctttaacactagcccgtgggggggccccaaaccatgcatgcctcctatttaggctttccataaaaaatgacccaccccctgcatgattcccctcccccatgttttaaatcccaaaataaaacaattttacaaaagttacacccagattttggaacgggcccttttgcccacaacctgtggtttaccaaccttgggccccttaaaaaatcctaaacctttgaacacggatgcccccggggttttccattcttccgaccttggggaaaaaaatgggcgtcagggtgtttttggccaaaccctactaccccttggggtacttgccaaaatacccctgcacaagcttgttcaatttttccttggagtagggcatttaaacctcaattttttccttgggcggaggggggttttccacggggcttgtaaccttgtccacaacctttttaacaaaggtcttggggacctccctgttaatttgcccgtttttccacgtgggttttagcgccttctttaaaaa

SEQ ID NO: 133143 - DNA, 661 bp, Zea mays
  Clone ID: MRT4577_52915C.1
cctcgaggcggcgggcggattcctaactgtggtgctgccatgtatcggacatgactggcgcgggtcgctctggagcgcccatgcgcgggtggaggatgagcactgccgaggcatgcaactgctccgtgcagcggtgcgcgggcgcttctccaccatatgctctacacgcacaacaggtgggtgctaataccgccgctcgaccccaagaatgacaagtacgtgcgacctcgggtgtgtcgttctacagcgccagctcctctgtcgaggcttgtgtggcgaccttgccgatttcgttctaatctctctccgcatgattatcggcaagtccatccctgcacaagtaagccgaaggctcgacctgccgaccagataaggtacacaggagtgcgctgcgcaaggaggcctcctcttcttctagcgcccagatgatatcgacgcgacctctcccgaaggaagcaactcgtgcaatgcaagatgcactgcagtgcacactactcgctgcatgtacagtacagcgctcctcacgcgcaaggtgcgtgcaaggtcgcgtctcggtcggctgtctactacgagcgctggcagacaacatctcgtccacttcccgatggccttctccatgacgctgctgagctggccgaggttcgacgacaccgccaagaac

SEQ ID NO: 133144 - DNA, 914 bp, Zea mays
  Clone ID: MRT4577_52916C.1
aattcggcacgaggccggtgtggtgtggtggactgggtgggtgtctctggcggtggtcgccgatgctgaccccctcggccggcataccgccgccctccctctccgcagctagcagcccctccacgtcctactctctcctctaccttccccgacgatgccgacgccttcccgtcccccgagcctcctccagctttgcccccaagcgctcggcgccggtccccaccaccaccctcccgcccgaggccccctccacctccgccgctgtcgaggcgccggcgcccttctcggtcacggccccggggacctaccggggaggggaggacccgctcgtctccaagctccgcacccagctcggcgtcatccacccgctcccggcgccccccatcagccgctccgtcgtcggcctcttcgccctcttcttcttcgtcggcgccgccttcgacaagctctggacgctgcggaagcgccgtcgcgccgagcgcgagctcaaggtcaacggctcctggccgcaggtgcccaccccgagcttctccctcttcctcgagaaggacctgcagcgcaaggagtccgtcgagtgggtcaacatggtgctcggcaagctctggaaggtctaccgcaccggcatcgagaactggatcgtcggcctgctccagcccgtcatcgacaacctccacaagcccgattacgtcaacagggtcgaaatcaggcagttctacctcggcgaggagcccctctccgtcaggaacgtcgagcgccgcacctcaaggcgggccaacgacctgcagtaccagattggcattcgctatgccggtggagcacgcatggcattggcactctacttgaagttcaccaaagtaccggtcgtcgtgccggcctgggttcgagattttgatatcgatggggagttgtgggtt

SEQ ID NO: 133145 - DNA, 388 bp, Zea mays
  Clone ID: MRT4577_52918C.1
ccctcttttaggttgttgtattatccatggcggaggagaagcaccaccaccaccatctgttcgaccataagaaggatgcgtagcacgatgagcagcttgtataacgccagtaccgggagtccgtcctgtgcacggctgtcacggagtcggtagaacagggcatggactagaactagtccgactagctctgggaggctaagcggtatcatgacagagcgtacctcagagaggcggacatccattagcgcctgctcactgtcgctctacgaggagcgcgaggcagagaaggacccgtggcactcgcacggcctcaagattgaggagggagttgcggcggtatttggccacgacatatgctgctactactataacgagccctgcgtgaaga

SEQ ID NO: 133146 - DNA, 438 bp, Zea mays
  Clone ID: MRT4577_52919C.1
ctcgagccggccgggaatacccaatatggtctgactccatatcctcgtgattcgtcccgatctacatgcgccgagctcgaagtcgcaccgcactctatgtcggctgtgcgcgactacaagcccaatcggcagtgtttgctccgacactatgccgctgacgagaacgtgctccttcgacaagcagcccctgttcgacaaccctcgtcatagcatcgtcaattcgccggcattgtagggcgtccacggatagattgcccgtaatgaacgtgcaaataccgtgtatagctcatatatctatatcttctctccgttgaactaaatgtgactctacattcgcatttcctgtatagccagtgtgatcgtgaactacatcatcgtcgacgtcttcgagatgctcgtcgacgaggactgcacgttccccctgtacaacccgaaagc

SEQ ID NO: 133147 - DNA, 1391 bp, Zea mays
  Clone ID: MRT4577_5291C.1
ctacgcgtccgcctcgctgcccccacactccagaagtccagaccaaagctctaaagtccaatccctcgctagccacttgccatctgagacatacggctctggctacgggaggaagccacaggtagaggagagctacggatcggagtatgggtctgggttcgggaggaagccgcagattgaggagagctatggatcggggtacgggaggacgccgcaggttgaggagagctatggatctggttacgggaggaagcctcaggttgaggagagctatggatctgggtacggcagcaggccgcagggtggggaggagtatggcagtggtggtggtgggtatgggaggaaggcacaggaggagacctatggctcctcggggtatggctatggcaggaagaacgaggagcagagctatggtggttctggctatggttatgagaagaaggcatctgaggaggacgaaggtgcctttggctctggtggttaccggaagccaaaaccctatgacgaggagacacagggttcatacggttatggagaggagcagcccaagtatcagagtggcgggtatgagaggccgagctatggtgggggagaggggtactatggccgcaagaaagatgatgacgactcggatgatgagaagaagcggcgtcattctaagcaccaccaccatggccaccactacgatgactaagcaccagtgccttctgctgggcgttgccctggttcaccgctactgctactatatccattcgcttgcataaataaagacggctgtgtaccttctggacactggaccaccgttgcgacgttgcctctgcattgttacagccgagccgtgagtgtgctgtttattatctaatgttcaaatcgttgtgatgaaccaccgtccacgcctgttgatgccgaaccgaatgtctggatttactttgcgcctgttcttgtggtgtttgtcgccttccctgtcacagttatgtttggtgtcgtgttgttgtttctggaacgttctcgtggtggtggatagatatccccatttctgccagctgctcttgtcgatacctttcaacacctcgttttggtgctccaagtccctccaaacaggtgcccctgatgtaactgcgaacaacaggtgtctctgatgtaaggccggttgctataggtcgtggcagtctgctcagtaacgagcgaagtgattgatctacgcttcctttgggaggtcaattatctagtttcgcaagtgaaggttttgctttgtagttcttgtgtcaaatttgcagcgacgaaccgaaacgattcgtttattgacatatcctattcatcgacatacctcgtaaattgtaattgtgtgtttctatattttgtctcagcgatctgattttactaaaaaaaaa

SEQ ID NO: 133148 - DNA, 616 bp, Zea mays
  unsure (1)..(616): unsure at all n locations
  Clone ID: MRT4577_52920C.1
ggccgcttttttttttttttttttgatcatttgacgtgatgtattatcttctcaagtctatcatgccgtcatgccgtcgatgcggatttgtccccatcgtctttctacaacccctaagtggcacttagggtaccccctagcttttgcccccgttacactcaaggcttcttcttctcgtccttgggcttctctttgctcttgtcgccctccttggcctcgccgttcgctccctcagccttgtcgccatccttgacctcgtccttcttcgcctctttgtcttcggcctgctgcttgttctgaatcttattctcgatcagatcgtggaaggcggtaatggcacggatcaaactcgaaagatagatggccatgagctggtcgttcgtcttgatgctcattgcgcgtgcgagctcgccgttatcgattgcacccgctgagcctgcaccatttgttgctccgcctacgggggccgcctttggtgtcgacagattcgggaggaggttgaagacgtcttngaggttgccgagaatggcgtggtttacgggcaggtcctcgtcgaggaccttctgcaggtactgtccgatatcgcgcagtcgcagatgcagaccttgtagcgact

SEQ ID NO: 133149 - DNA, 377 bp, Zea mays
  Clone ID: MRT4577_52921C.1
aattcggcacgaggagatgagtaatgtcgatgacgaaggaggccttccactacatggcgcggaagaacatgtgggacctggcctacgaccccgtagaggacactacatgacgcagcctaggcgctctcccttcagactgcaaagctctgaatgatgggatagcgaatgccactaaacgccaccagggcccacccgaggaccgacacctgcgatatggacgagctgagagcttcatctcaaggcctaggggggatggagcataatgtatacacactcttgtctgtcgtctaggaaatacccaaaactggcttgttggtctaagagcactagaatgcatccatagacttactgaatggggtgatgctacctctcgagaa

SEQ ID NO: 133150 - DNA, 1287 bp, Zea mays
  Clone ID: MRT4577_52922C.1
gggggcgggccgggctacctcaggctgcttgaagtagtatgcatcagcggccctggtcctctctcccgctcccgctcaagggcagcagagaaagcagctgagcgctgactgtggatctcatccgtatcgcgtatatacgtcgtcctgtttggatccaccgcgttttgctaattcccttcgaaccggccggtggccttcgttctcccaccaggcctgtctgtctgctgtatccgccagagcttccatggattccaccctcttcatcatcggcgtcataggcaacatcatctcagttctcgtcttcatatcgcctatcaagacgttctggaggatcgtgcggggcgggacgacggaggagttcgagccggcgccgtacgtgttgacgctgctcaacgcgctgctgtggctctactacggcctcaccaagcccgacggcttcctcgtcgccaccgtcaatggctttggggctgtcatggaggccatctacgtcgtcctcttcatcgtctacgccgccaaccatgccacaagggttaagaccgcaaagctggcagcagcgttggacatcggtggcttcggagtcgtgtttgcggccaccacattcgccatcagtgaatttgaattgagaattatggtgataggaatgatatgtgcctgcctcaatgtgctcatgtacgggtcaccccttgcttctatgaaaacggtgatcacgacaaagagcgtggagttcatgccattcttcctgtccttcttcctcttcctcaacaggaggcgtctgggcagatttacctcggtgcttgacccgccgacatcttcactcaggcatctcccaatgggataggcttcgtgcttggcaccatccaagcgatggtctacgcgatctacatgaacagcaaggcctcccaatgcagcaaggaaacagctgtcctcgcctcttttgatggcctccgaccggggagaagcatctagccatgtctgatgatgagcttcgatccagtgcgcgcgctggagtatagcatagaagtctcttgctgtcaaaaacttcccagaccaacggtacctaccagcatgcatgcatgcaagaggttaccaatttttattgtttgaaaattcatgtaaaacttgtgacctccatggattgtttctttctttggtataagcttccaagatgttagattattagcacgatagttttgccagagaaggatgttgtcaatataatgaagaaatggtgaaaatccatacctttgattatcgtaaaaaaaaaataaaaaaaggcccctaaccaac

SEQ ID NO: 133151 - DNA, 110 bp, Zea mays
  Clone ID: MRT4577_52923C.1
agaacgaacaattgtgaaatattcaccatgacggcatgacaccaaaaaaaagtcctgtcctgtgcggccgccgattacacatagggtgacgatgctacggatttcttctg

SEQ ID NO: 133152 - DNA, 325 bp, Zea mays
  unsure (1)..(325): unsure at all n locations
  Clone ID: MRT4577_52924C.1
cccacgcgtacgctcacgcgttctctcacgcgttcaaccacacctncgggtctggatcgcgtttccaccgctctaaacaatacaagaatacttactcgtgcatgccacgaactaacttttttatattgtcacctaaatataatatacattgcacgtcattttactattcgagaatagcaaaattctgggcgtatacacattaaatgatttgaggagaaatactgttacaagaattgaacggttaccttaaaggaattcatttattgttttattcaataggtgcgcatcattaatgaagaatatgacgacccatattaatgagcat

SEQ ID NO: 133153 - DNA, 648 bp, Zea mays
  unsure (1)..(648): unsure at all n locations
  Clone ID: MRT4577_52925C.1
ggccgggatgcagttcccnaggaggagccatgcgatcaggttggcagctccctggccttggcctcgccctcggctcccagcccgagcccatcattacgccgccgccgcctccagctccagctcatccggatgagggggaaggaagacgataccagacgctactcctacaaggctacaagtcaccaccacagcaccactacactatcccctccgctctctctccgcactactgcgtattaggcccgccccgaccggcgatgcagcggtggctcccggcgctcctccgccgcgcggcgcccggcggcggtgaggtgcggctcctcgccacgacctccctcttcngtgacgacacgaagcaggcgctcaaggagagcgtgcgcaagttcgcgcaggaggccatcgcgcagcgagacgcggacatcgacgcctccaaccacttcccgcgggacgtggacctgtggaggctcatgggggacttcaacctccacgggctcaccgcgcccgaagagtacggcggaaaggggctcgggtacatgcaccactgcatcgccatggaggagatcaccagggcctccggcgccgtcggagtctcctacggcgcgcactccaacctctggatcaaccagctcgtccggaacggaaaaccgg

SEQ ID NO: 133154 - DNA, 1538 bp, Zea mays
  Clone ID: MRT4577_52926C.1
gcacgaggccactcctacagttttacgtttacccatcaccaccagtccagcgctacgggcccccgaccagatcaaccaggcccgccccgacccgaagatgcagcggtggctcccggcgctcctccgccgcgccgcgcccggcggcggggcggcgcggctcttcgcctcgtcctccctcctcttcgacgacacgcaggagcagttcaaggagagcgtgcgcaagttcgcgcaggagaacatcgcgccgcgcgccgcggccatcgacgcctccaaccacttcccgcgggacgtggacctgtggaggctcatgggggacttcaacctccacggcctcaccgcgcccgaggagtacggcgggatggggctcgggtacatgtaccactgcatcgccatggaggagatcaccagggcatccggcgccgtcggcctctcctacggcgcgcactccaacctctgcatcaaccagctcgtccggcacggcagtcccgagcagaagctcaagtatctgcccaagctgatcagtggggagcatatcggggcactggcgatgagtgaacccaactctggctctgatgtcgtcagcatgaagtgcaaagctgagaaagtggacggtggctatgtccttaatgggaataagatgtggtgcaccaatggcccgtctgctcagacactggttgtttacgcaaaaacagatctagctgcagggtcaaaaggaataactgcattcataatcgagaaagggatgcccgggttcagtactgctcagaaattggacaaacttggcatgagaggaagcgacacatgtgagcttgtttttgagaactgctttgtgccacgcgagaatgtcctcggtgaagaaggcaaaggtgtttatgtcatgatgtcagggcttgatctggaaaggcttgtattagctgcgggccctattggccttatgcaggcatgccttgatgttgtacttccatatgttcgacagagggagcaattcgggcgtccaattggtgaatttcagttcatacaggggaaaatggctgatatgtacacctcattgcagtcatcaagatcatttgtatactcggttgctagggactgcgataatggcaaagttgatcgcaaggattgtgcaggggtaattctctttgctgctgaaaatgcaacccaagtggcacttcaggcgatccagtgtcttggtggaaatgggtacataaatgagtacccaactggtcgtctcctgagagatgcaaaattgtttgagattggtgccggtactagcgaggtaagaagaatgataattggccgtgagctcttcaaagaggactgaaacttctattttgcaagccagataccagtgcatattgttagctgggggaggtgagcgcgatttagatatttagcaaatcacccctgtggttcaatgcttttgtataaccgcagacatacatcaaataaagttcacttccttgtacttgctgcttgcagtggctctatttttctgtcaataaagttttttatgtctctgacttaaaaaaaaaaaaaaa

SEQ ID NO: 133155 - DNA, 2115 bp, Zea mays
  unsure (1)..(2115): unsure at all n locations
  Clone ID: MRT4577_52927C.1
cggccgggatgcagtccggacggtggatccaatgcgatcaggttgccagctccctggccggctcccagcccgagcccatcattgcgccgccgcctccagctccagctcatccggatgagggggaaggaagacgataccagacgctactcctacaactcaccaccactacactatcccctccgctctctctccgcactactgcgtattaggtagcctctcgcattgacaagccagccggtggtttggttcgctttgctttgcttacgtgctgcgctgcgcgctccgaccgcaggcccgccccgaccggcgatgcagcggtggctcccggcgctcctccgccgcgcggcgcccggcggcggcgcggcgcggctcctcgccacgtcctccctcctcttcgacgacacgcaggagcagttcaaggagagcgtgcgcaagttcgcgcaggaggccatcgcgccgcgcgccgcggccatcgacgcctccaaccacttcccgcgggacgtggacctgtggaggctcatgggagacttcaacctccacggcctcaccgcgcccgaggagtacggcgggatggggctcgggtacatgtaccactgcatcgccatggaggagatcaccagggcatccggcgccgtcggcctctcctacggcgcgcactccaacctctgcatcaaccagctcgttgcaaagcaagtagctccattcataatcgagactggttgtctaagcgggaacacaagtgccggcacggaaacccggagcagaagctcaagtatctgcccaagctgatcagtggggagcatatcggggcactggcgatgagtgaacccaactctggctctgatgtcgtcagcatgaagtgcaaagctgagaaagtggacggcggctatgtccttaatgggaataagatgtggtgcaccaatggcccgtctgctcagacactgcattcataatcgagaaacagatctagctgcagggtcaaaaggaataactgcattcataatcgagaaagggatgcccgggttcagtactgctcagaagttggacaaacttggcatgagaggaagcgacacgtgtgagcttgtttttgagaactgctttgtgccatgcgaaaatgtcctcggtgaagaaggcaaaggtgtttatgtcatgatgtcagggcttgatctggaaaggcttgtattagctgcgggccctattggccttatgcaggcatgccttgatgttgtacttccatatgttcgccagagggagcaattcggccgtccaattggtgaatttcagttcatacaggggaaaatggctgatatgtacacttcgttgcagtcgtcaagatcatttgtatactcagttgctagggactgcgataatggcaaagttgatcgcaaggattgtgcaggagtaattctctttgctgctgaaaatgcaacccaagttgcacttcaggcaatccagtgtcttggtggaaatgggtacataaatgagtacccaactggtcgtctcctgagagatgcaaaattgtttgagattggtgccggtactagtgaggtaagaagaatgataattggccgtgagctcttcaaagaggactgaaacttctattttgcaagccagatatcagagcatattgttagctggaggaggtgagggcgatttagatatttagcaaatcacccctgtggttcaatgcttttgtataaccgcagacatacatcaaataaagttcacttgtacttgctgcttgcagtggctctatttttctgtcaataaagttttttatgtctctgacttatgcaatgttgttcagttgcatttaaaaatattagtctagacaagacagtaacataaatgtttcaattggtgcagattagaggtattagtgaggtaagaagaatgataattggccgtgagctcttcaaagaggactgaaacttctattttgcaagccagatatcagagcatattgttagctggaggaggtgagggcgatttagatatttagcaaatcacccctgtggttcaatgcttttgtataaccgcagacatacatcaaataaagttcacttgtgctaaaaaaaaaaaaaaaaaaaaaaaaaanananaannnnananccc

SEQ ID NO: 133156 - DNA, 344 bp, Zea mays
  unsure (1)..(344): unsure at all n locations
  Clone ID: MRT4577_52928C.1
gggaaaaaccgataattgatgatgtattgaagaacagagttttgaaccatggagcagtttggaagttttacatgactggaaaaaaaaagggagatgggattgtagcttttatgagcactggtgggggggaggcaactnnttttggtttcngnaaaaaaactgnngaccaccacatccaccagcagcaggcaacccgcctcccaccgaggaggcagccccaaacaagcaccggagctgcagctagccnagcaaacggaaccctgaagggggagcaagaaacgnaanccagcccagccttcgcgaaaaaggccacagacgaaggctctccaccgtgttctccacaa

SEQ ID NO: 133157 - DNA, 296 bp, Zea mays
  Clone ID: MRT4577_52929C.1
atgaattaccatggttcatggttttgttcctggcaagggacatgatgtgcaattcttttgggattatgcactagaagggttaatcactaaattgtgattttagcaaaattattgctacatattttcactttaataggacggcctgtccttgtgggtcatcactatgaaacttagttgtaagggagaacttctgttgctgccagagtttgatgtttttggttttgggattcagaaaataggctgatctatcaatgcggatcatgactatgagactttgtcattgctctctttagatt

SEQ ID NO: 133158 - DNA, 519 bp, Zea mays
  unsure (1)..(519): unsure at all n locations
  Clone ID: MRT4577_5292C.1
gccggccgggccgggatctttaataaaatatcaaaaatggaacgtacatatattatggtcaagcctgatgtgtcgagcgtggtctcgttggtgaaatcatcaagcgtttcgaacaacgtggttaccaactcactgctcttgaattgatccaccccaccaaggaactccttgaagaacactactgtgacttgaagggtaaggctttcttcccctctttggtcgaatacatgctctctggtcccgttgttggtatggtctgganctggctaaggacgctgtcaagactggtcgtaagatgttgggtgaaaccaaccccttggccagtgcccccggtactatccgtggtgacttctgtattgaagttggtcgcaacatctgtcaacggttctgacctcttgttgaaatctgcctgaaacgtgaaatcgggtttgtgggtccccccctgggacggtttaactaaccccccaacccctcccacacaaccnccccccccccccccactcccctttgggatcttat

SEQ ID NO: 133159 - DNA, 572 bp, Zea mays
  Clone ID: MRT4577_52930C.1
actcagttaaagctttatttgttgaaacggaatttggaggtgtccggcctgcactgcagcaactagtgttctgtgttctgatctgttctgttctgtctgccatcaacttaaacctttacagccatcactagtgtccatatatatactagtgacaaagcaacatccatatagtgtgttgtgctgcaaaacatgacaaagcaacattatcatcgagcttttatttatgggtatcttcagtccacagttcccacgcattgctacgacgatgcatccgcatgcaacgctagctatagctagccacacacattgcatgtccggccgtcgtccctgccagaggcgacggcgacggcgaggacgcttcaatatatataatgcttcatcagtatgtggaaactgactctatgcccggtctagggctagcgagtgagtggcacatgccgccgtcgaccgtcggcaggttgcactccgccgctctggtcagccggcgagcgaaggccctctgcatctccctcgtgcagccccggaaatcctgcagccggccgtactcgccgtccatcatgaagcccagcgcg

SEQ ID NO: 133160 - DNA, 350 bp, Zea mays
  Clone ID: MRT4577_52931C.1
ggccgaaaaaaccgggttttttcatttttagagccccaaccccggggcttatttgatcaggggggcgcctggactttattttaaattcgggccgcacacagattttgtccccccgaacccaacgaattaagaggggggaaggtgtttcctaactttgcttaaactggcagccccggaacctggggcaattttaagcgccttggttttgtttccggctgatctatgaaaagaaaccacctggggggtttacctcccctacaaacgctggttttccagttcctcaaggaatctgacaaagttggggatgattttcttgccttcaggggggaagatgctttccggggggaatt

SEQ ID NO: 133161 - DNA, 728 bp, Zea mays
  unsure (1)..(728): unsure at all n locations
  Clone ID: MRT4577_52932C.1
gnaggtgacagcagcgaggcaggacactgaggtgggaggggcaagtggtattctcagctcaacggatcagatcgatcatgtgctgagctacactttttgaggtatctcaggtgtgtaattcttgcagggacaatggtgatgggatagcagagcagggcagcatgctcgcagtacctccttggcgccgcctacgatgccagcgtcaacttcttttgactctgcagagatgtaggctcatttgctccctcatctccctgcctcggtttgtgagtaatgaaaggtgaatggatgcacatttgcaaacctgtttccttgtcaggtacccgaactgccagtacatttcagtgtgggatactatggaagcacttgtggctgagactagaatagaagggaaagaatctaagacttatatagaagcagttgctcaagtattggcttcatcaaaatatcttcaaaatgttcttgtagctgcaataaagagaagcagcaatggtggtgatgctacatgcgtagaagtagaaatgttggtcttgtagctccaagagttgctcaaatattggcttcatcaaatttttttcaaaatgttcttgtagatgcaacaaagagaaacaacaatggtggtgatgctaaattttggtattgtagctccaagatttggtttttgatgaatgatatctatgataatacgttgataagtatatgtgatgatcaatcattgttatttaatt

SEQ ID NO: 133162 - DNA, 486 bp, Zea mays
  Clone ID: MRT4577_52933C.1
ttggccgggctatgagcgccctaacctgtgcttatggtgatgtgcctctgccataagctgactacgattgtggctgcccgacttagtccgaatggagccacctttgagaaaggaagttgatggatacatgagagactgtcattctcactggaggagcatgaagaaagaaaaagccagactcgttcacgacataggacagctgtatcaggcttgcttgcagatagcacgcgtcctaaagaagggtcgttatggacgaaccgcattaccactgggctagggctcactctctttataatggtagtgccttttcctgagcttatacttgcaacagtgttactgtgcatgtgacttatagaggactcgcatcttccggtgtcaacctctttatgctacacacatgaataccaagatctctcatgctgctggctcggtcatcaccgttgaactacgagcgaggagtctcgatacacatccacttaccaggct

SEQ ID NO: 133163 - DNA, 383 bp, Zea mays
  Clone ID: MRT4577_52934C.1
cgcgtccggggggctctcattgcgtacgctaagcggttcatccccgggctgtcgcgcaccggccggcgggtctggggcggctgcggcactgccgctgcgccgtcttcgtgcgatgtggaggagcagaaggcgcttctcgagaccgtcattgccaaccttccagaggaaaccatcaagagcaccgtccacaccggcacggtcgtgggcgccaccacggcgcgcgtcctcttcggtctcctgcgtactgcgagcatcctgcatgcgtcggaggcgtcacgggacatgcttgagcggcgcatcgccgcgcggctgcccgacgcggccgtcgatgacctgctcatcccgagctactcgtaccttgtggagacgctctacgacgtgga

SEQ ID NO: 133164 - DNA, 444 bp, Zea mays
  Clone ID: MRT4577_52935C.1
tcagaggattatcacctgcatcttgctgtcgaacacattatgcttatgctaggagatgaagctctctagggtggattacatggtagttcgcgcacagacatgtagacgacaatgcccacataactatatcatgctgctcctgtgtgtagatgagtcgcagcactctgcacctatggcattcagttatagcttgactaggtcaggaccgagcacttcagatctctgatgaaaccaatggttgctgcccctggaagaaatgatagtggataccaacttgctcaatttcgccattgattacccagctgaatatccctatatcgctgcaatgggagtctacgctttttaagagagatgctatgctagaccttctaaagtacacggtatgctagaattgcatgaatctggttctgaaattctgcccaaggctttgcctgagcacaatgt

SEQ ID NO: 133165 - DNA, 538 bp, Zea mays
  Clone ID: MRT4577_52936C.1
ggcgtacccagtcttttttagcgacaaggaagctcatctgacatgcgtgctggagaacctgtggtcctctactatcgaaactgaggacgcccagtgttatcaccatacacgacctggaggccaaacatgttggggctcagcctgccgagtaaacatatgtatcgggtggcctcgcgcgtgggattactgtatggaaggggggcgggttttttttttctcttggcacgaattatcctattattgtgcgtatgctccagaccgtaaatatgcctgtagcgctctagactgactgggcctacagctgtcgatggatgctctaccggatcatctgctgcttcaggcacataatctggatatgcagaaacatgagaacaacctttggcatatctgacgggaatctgatgcccactcaaatgcctaacatgtatcatcctgcccatgctgctcatgtaacaaatagaaatatgcgctgaattgtgagctccattggatgaaaacactttcgacgatcaacactcgtaatactgatctattggaa

SEQ ID NO: 133166 - DNA, 360 bp, Zea mays
  Clone ID: MRT4577_52937C.1
cggacacttggtcagacgcgtcgcctgacgcctgaggcctcaatctcaaggactagcactgactacgatcactactgtaagcccatgtaccgtctggacccaacgacagctgatgacctgataccagcactcttggcgtaacactctcacactgttacaactgcgacatacgctggcattgaactcaacttgcattcacgataccctacaccattctaccaacagctcataattgttgtgaccgtcctttaactatgccctaatacaaccagaacaatattaagaggctatacactatctttgccgatctccagacgtacgaacaggcatctctcaaagcggcagcaggggggaaagaag

SEQ ID NO: 133167 - DNA, 113 bp, Zea mays
  Clone ID: MRT4577_52938C.1
cacgcctgcgtgtaccgggccgctaattacacggtcgacctagtctagcataacaagtcgaactataacgtgataataaaatctacaaaaagtggcagccaccaaaggatggg

SEQ ID NO: 133168 - DNA, 470 bp, Zea mays
  Clone ID: MRT4577_52939C.1
gcacgaggttaaacacatatattgcaacatgtatgcatcagcagaccagatagctgatggttttccaccttgccaggcatgcaagtaccgtggtcaccctattgagcttgtcaccccaaataacgcaaaagggcttgtttcaataaacgaacagcttgcagcttctgatgttactgacactgctgtgagaattgaagaacaaacagtgttgtttctgcctacttcggaagacagtccaaacttgcagggagcctctgcggttgggttgatagcccagtggtgaaggcggcgttgtccctttcaccaggtcaggggttcgaccgttggttccgcacccataaaaaaaatcccctcactgtcccgcctgctcttggggatcgatgtcctgtgcgccaccttccgtttgggccgttgcagagtggacagttgtactcgggccgttagtgatgtgggccaaggttcagaggttt

SEQ ID NO: 133169 - DNA, 1542 bp, Zea mays
  Clone ID: MRT4577_5293C.1
acacagaccaataagtggccaatccctcgctccccccacactccagaagtccagaccaaagctccaaagtccaatccctcgctagccacttgccatctgatcaaccagccagccgatctcagcgatccgccatggccaccgcgtattacgagaggccccgtggcggcgccgtcgaggaggcggacgacttcgatgagttcgaccccacgccgtacggcggtgggtacgacctcgccgtcaccttcggtcgcccgctgccaccgtccgaggaaacctgctacgcgtgctcggcgccctcgacctcctacgacgcaccgcactacgccgcctccgagccgtccccctacggtcaccacgccaagccaaagcccaactacgggttccgcccccagcaggagcaacagccgtcttacggcagcggctacggatccaggcccgagcccgctgtggaggagggcggtggctatggatctggcttcggatccgggtatgggaggaagaagcaggaggaggagagctacggctctggatatgggaggaaaccgcaggcggaggagagctacgggtccggcgggtacggctctggctacggcgggtcagacccggccggaggagagctatgggtcagcagggtatggatctgctaatccgcaggctgagacatacggctctggctacgggaggaagccacaggtagaggagagctacggatcggagtatgggtctgggttcgggaggaagccgcaggttgaggagagctatggatcggggtacgggaggacgccgcaggttgaggagagctatggatctggttacgggaggaagcctcaggttgaggagagctatggatctgggtacggcagcaggccgcagggtggggaggagtatggcagtggtgggtatgggaggaaggctcaggaggagacctatggctcctcggggtatggctatggcaggaagaacgaggagcagagctatggtggttctggctatggttatgagaagaaggcatctgaggaggatgaaggtgcctttggctctggtggttaccggaagccaaaaccctatggcgaggagacacagggttcatacggttatggagaggagcagcccaagtatcagagtggcgggtatgagaggccgagctatggtgggggagaggggtactatggccgcaagaaagatgatgacgactcggatgatgagaagaagcggcgtcattctaagcaccaccaccatggccaccactacgatgactaagcaccagtgccttctgctgggcgttgccctggttcaccgctactgctactatatccatttgcttgcataaataaagacggctgtgtaccttctggacactggaccaccgttgcgacgttgcctctgcattgttactgcccagccgtgagtgtgctgtttattatctatgttcaaatcgttgtgatgaaccaccgtccgtccacgcctgttgatgccgaactgaatgtctgaatttactttgtgcctgttcttgtggtgttaaaaaaaaaaaaaaaaaaaaaa

SEQ ID NO: 133170 - DNA, 756 bp, Zea mays
  Clone ID: MRT4577_52940C.1
actctcctcccctgaaaaacaaacaacagtgcgcgctccactccccgtcacgcgacccggcgacgaacggccgcgcccgtcgagcgcaccgccccccccccctcccctctgccgggccttgttgccgtgctgtgcaacgtccccgtgtgacgagccaatgatggccagagctgcacttcttcctgttgcgctgctgctgtgccttgcactggctggcggcgccaatgctgcacggaagtcgacggccggattctatgaactcaagaacaagaagggggatttctccatcaaggtcaccaattggggcgctgccctcgtgtctgccatcgtccctgatggcaaagggaacttggctgatgttgtccttgggtacgacactgtcgctgaatatgctaatggctctgcttcattcggagcgacggttgggcgcgtagccaacagaatcgcaaacgcccgctttgttcttgacggcaaaacctatcaccttctccgtaacgacggcaacaacacgattcacggaggccccaaggggttcggcaaggtcatttggacggtgaaggagcatgtgagccatggtgactccccatacatcaccttctactaccacagcttggacggagagcaaggattcccaggcgccctcgacgtgtacgtgaagtaccagctgtcccgcccgtacgacctgagtatccgcatgaacgtgactgcgaggaacaagcgacgccagtgaacctcgcgaaccacgcgtactggaac

SEQ ID NO: 133171 - DNA, 1143 bp, Zea mays
  Clone ID: MRT4577_52941C.1
cattgggaccctcgaggccggccgggattgacattcgcgctccacgcctgcgcccccgaattccaaatcctgcggcgcctccgccccaaccccgctcgtcgactcctctcttccgaacacgccggaggaatccttctccgcgactcgtcttcctcctctctgccgtgctggcgtggagtggagatccaccaccacctggattggtctcttcttctgctggttagacgctgaatctgtccttcaatgccttcacaggctctatccctgaagaagttgcagagttagaagcatttgccgtgttttttaattgaaaggaacaaattttcgggtcatatccagattggatgcggaacatgtgaaagctgtccttttgggaccttaagagaatacgaagcaaaaggaacataagggtagaggacggaaataaacaatgggaaagggtgatgtggctactaggtccaaacctcaaaaatcgtcagcaatacagaatgagccgagtacacctgctaacccccccacagcatatcctgattggtctcagttccaggcatactataatgctgctgggacaggtccagtaaccccaccggcttttttttcattcatctgtagctccaacccatcaggggcacccgtatatgtggggtccacagatgatgcctccttatgggacaccaccaccatatgcaacaatgtatgcacaaggcacaccatatcagcaggcacccatgccaccgggttcatacccatacggtccttatcctatgccgtcaccaaatgggacaattcaacctccaacatctggtgctggcggtacagagacagataaatcaaaaaataagcggaagactcccctgaaaagatcaaaaggaagcttaggtagtctggatgttgttgcagtaaaaaataacaagtcagcggcaaagccttcagtttcttcctccaatgaaggttcttcacaaagtgagagtggaagcgggagctcttctgaaggaagcagtacaaattcaaaaagtggttcaagggcgaaggatggttctgagcgaggtcagggtaatgatgctaggagtaaaggtactcgaagttctgcagttgagcccacacaaccatcttctgggcctgttgtgcttaaccctatgatgc

SEQ ID NO: 133172 - DNA, 1147 bp, Zea mays
  unsure (1)..(1147): unsure at all n locations
  Clone ID: MRT4577_52942C.1
ccggccgggcagtcgacgcgacgctcgacggcacggcaacagagaaagccaacagcatggctccaccaccatggccggtcgtagcgctgctgctctgcgccgcgctagcgttcgcggcgcggccgagctcggccgtggacccggtgggcacgtactgcgccaagaacttcacgggagcgcagacgcaggcgagcatcgcccaggtcctggccgcgctggtcccgcgcgcctccgcggcctactacgcgacggcgacggccggcggcggcggcggctcggccaccatctggggcctggcgcagtgccgcggcgacgtcccggcgtccgactgcgcgcgctgcgtggcggcggcggcgcggcaggcggcggcgtcgtgccggggccaggcggacgcgcgggtctggtacgactactgcttcctccgctacgacgacgccgacttcctgggcctgccggacaccgggtacgcgctcatcctcatcaacaccatgaacgccaccgacccggccgcgttcgaccgcgccgagcgcaggctcatggcgcgcgtcgctgccgacgccgccgcgagcgccgggctggccagggagacggccaggttcggctccgacgggaccaccatctacggcctcggctggtgcaccagggacatcaccgccgccgactgcggcctttgcgtcgcgcaggccgtcgccgagctccccaactactgccgcttccgaaggggctgccgcgtgctctacagcagctgcatggctcgctacgagacctaccctttcttcttcccggtcaccggcgccggcgccggcgccgacgctgacgcctcctcctcccacgccggcgagtacgagactgtcgtcttgacgaaccacaaatagcagttccaactctcaagctagctagtagtgtacgattacgcttcctgtttgttaatcgcgcgcggtaaatcaatcgtgcaatagctatatgtcacctattatttgttgcacttatgatgataaatgtagagtaaataaatatggatgcttgcttgttgcatcgcatgcagaactgcactaatacaatatatatatacagatgatggaaattgttgcttgaacacaaannnnnnnnnnnnnnnnnnnnnnnnnnnnnnnnnnnnnnnnnnnnn

SEQ ID NO: 133173 - DNA, 248 bp, Zea mays
  Clone ID: MRT4577_52943C.1
acaatgagtcatcagcaccatcaattggaaaccatgatgacttcttatttgacattagtgcacgtattgcaaataaaaggccagcaagcctggggttcaagtctgagctagaccgatacttggatgaagaaatggtgaacatgcataccaagaacttcaatgtcttagattggtggaaggtagctggaactcgatatcctactttgaggagaattgcaagggacatatatgctatcccagttaccaca

SEQ ID NO: 133174 - DNA, 339 bp, Zea mays
  Clone ID: MRT4577_52944C.1
tcgaatccgaacccgccagctctacaccaccctttgttctgacggcgacggaccccgcgccggggccggctatgctctgctactcgctgccgccggtccggctgcccgcggaggacattctcttctgcgttgacgttgacctcgaggcccgcgccgagatgaattccgccgtcttctccgcatcagcgtcctctggctccacctagaccgcttcaccggatccgacgcagccctgggaggccgggggttcccaagcggcggtgccccggaccgcggtcaggcggacggactcggtcaggcaggcgctgttgctgatcgtccacagcaagctcaccatgt

SEQ ID NO: 133175 - DNA, 587 bp, Zea mays
  unsure (1)..(587): unsure at all n locations
  Clone ID: MRT4577_52945C.1
nagnccggccgggnaaaaactcgttgtcgaaagcaggttctggttgttctccgacccaggctacaaaagacaacgataaagacactaccacatagggtgtgaccgagatctcgctcgacgatgatgggaccgttcaattaccccagttgcaaactcgccatcggagctgatggtggaactgagacaaataccttcgccaaaaaccatctcactgcagatcgtgagacgatatctgaaccaatcactagccgtgcaagttcatgcagttgatttaaccactacatgtggtttaatcacacactactggtcgcatactccacccaagagaagtttggcgaactcaaggatggatactatatccatggggcagcgtgcaatcattatgttggatgaaacctcaaggcttacttacaagaatggtcctacatgacatacggacctgtgcagaggctgagaaaacattcccattgcgctctgcgtaaataaggatgttgatgactacacgcatgacaggagtcatacaggttacttctcatcagaagaagcatctgctgcactatgaaattattgccaacagcaggtacaac

SEQ ID NO: 133176 - DNA, 282 bp, Zea mays
  Clone ID: MRT4577_52947C.1
gcagaggaggagtctgaccacaactgagggctggtggggccggggacctggagccccatggacacacagatggcccggctagccgcctggactgcaggggggcggcagcagcggcggtggcagtgggtgcctgtagtgtgatgtgtctgaactaataaagtggctgcagaggcaggatggcttggggctgcctgggcccccctccaggatgccgccaggtgtccctctcctccccctggggcacagagatatattatatataaagtcttgaaatttggtgtg

SEQ ID NO: 133177 - DNA, 276 bp, Zea mays
  Clone ID: MRT4577_52948C.1
gagtcgcccatgccgaaccgaaggagcagaggagatcagttgatcttggaagctcattgagagctcgtcgtacatcttcttcacttaatgatgagattaacacacttcaagtggaaaatgaaagcatgtatgacaaacttcagcttgcagaagaaaggtttgatgatggagatgccaaatccatgcacatggagagagaggattctgatgctggcgatgcagcagaaaaagagccaattttgattaacaggaaagatgcagcgctagaacaaagaa

SEQ ID NO: 133178 - DNA, 217 bp, Zea mays
  unsure (1)..(217): unsure at all n locations
  Clone ID: MRT4577_52949C.1
ttnnnnnnncaagaaaatcattctccgactcgattttactgatcacagaaagattatctgggggggaaggggaggccttttcctatataaaccaccaccttaaccagccttatttttttcaataacccctttacaatgcaagggaattaacaacttttacaacattaagtgttttaaaccaaacaattctttaaaacaaacacccattacccttttt

SEQ ID NO: 133179 - DNA, 495 bp, Zea mays
  Clone ID: MRT4577_5294C.1
gtcaaactgtataaggctgtctgtagggaccctgatcttccattggcaatgcgggtaaaagttccgctataaattgtccaagctggcaagaatagctacatgacacgccttaaaaaccgctgcattttcacggtacggtctcgtgctgtctacaagaaatttcgcatgtcccgtattgtgttccggacattggcaaacaagggtgaactgatgggcgtaaagaaagcatcgtggtagatgttaacgagccagtagaaaaaaagcgctagctctgcactagtccaggaaaaataaggttgtttacatgcaatctttcagtgtgtgatccctgaaacaatctttgaagtttctgaccggcagaataattttatttaagtattttagttgaatcagtgtacttttttttggatattctgcactcatgaagttaaaggatcaaaacttgtttctgaatgcagaaatgttttctctgttgtgtggtttcgaggtacagct

SEQ ID NO: 133180 - DNA, 222 bp, Zea mays
  Clone ID: MRT4577_52950C.1
aggggaaccaattaggaagaggtcaccagatcaaccgcaggctaaaagatgactgttaccacagaaacagaagcaattcaacttttaccacgataacacgaacacaggtggaagcacttagttgacctaataaagctagggggcagcgggaatgccaccggggggcggagcgttcttgctcatgccggcagtggtacccatgttcgcttcagctatcctggg

SEQ ID NO: 133181 - DNA, 882 bp, Zea mays
  Clone ID: MRT4577_52951C.1
ctcgaggccggccaggaatgcttggagaggtgtacgaaaatgttcttgcttgaattgccttaacggacaatacacatctgcgcgcgcgggtttcggctgtttgatcatgtgaaataaagatggacctgtctagcggctggaccttgtgtacatttcactgagatagactaatgcacggcctgccgattttgttcgtcctgcttgcgtgctactctgtctctgctcctagtttttggcatcatgtttatgttgagcaaggtgatgcccaagggaagccattcccactcttgtctccattaataaaatgacgacctggccatgcgggacagtttggagaacggctatttaactgacgatggtgttttctgttctggtttaagcaactcgtcaagcggcaagttctttggtggcaatcaactaagccacagcacgccaaagaaaccccaagagaagttcgatgctggtgttcctgagacgtcacgctcttattctgctgcagtccctgctggtacaagtagcaagcggcatgctactaggaagtggaagcgctcgctcagtgaccccttccgttcacggccgcacagtgctccggaattggtgtcaggatgcaagggatcaccgcccgtgcctgtggctccagaggagaggtagccgatgagctacagaagacgtatcgtgttatgttttttagcataaattgcaaatgaattatgaatattgttatctgaggcatcatggatgtgaaaaaagtactatgcaactaactttttaaggtgttgattttgtaagaggatgtttggtgaaaggaccaagatgtccataggaattgaattaggctaatgtaattttttaataattaaattatatcaaatagttcactcg

SEQ ID NO: 133182 - DNA, 591 bp, Zea mays
  unsure (1)..(591): unsure at all n locations
  Clone ID: MRT4577_52952C.1
tntttttttttttttttttttttttttttttttttttttttttgttttttttttttttttttttttttttttttttttattaacctgtgcctttttaaaagtatcacaagactaaaacagtatagccagttaaagcatcccaaggtcatggggggggaaaaaaaaaagcgaacgagaaaaaaaaagaaacggggggggcaaaaaaaccaccacaaaaaaaaacgggggggccccagacaaaccgagggggagggggggggggacccacaggggaaccagggcccaaaggggggcagggggcacacgaagccaggacaacttgggggggggggccaccacaagcaggggaaggccaggggggccgaaaaccaactagtgaaaaacccccactaggggccaaaaaaaaaaaggagcggggaacattcgacggaagaaaaaaaaaaaacgcgggagggaaaacccacacttgccgaaaaaagaggggaggcccccgccatggggacccccacaacaagccgacccgggaagcccaagaggggggggagggggcccccccgggaaaaaaccccaaacgggcgggggggggggggg

SEQ ID NO: 133183 - DNA, 382 bp, Zea mays
  Clone ID: MRT4577_52953C.1
ccggccgggaggcgagtagccgaccaccgtcctgcccgtccaggtccagcagtccaggatttcccaaccctaactagcagcagctgccgccgtcgagcaccagtccatggtctgccatggcgccgtcctgacactgccgccgtcgagcagctaccacagcgtcgccctcggggttcatcgtgttgcgcttcgtggcgggtctcttcctcgccaacttcgtcgccagccagcactggatgtcgggcatctttgcaccctccatcatcgggctcgccaacgccgtcacggctcgctgactagtgtaaattccaggattcaggttgcccaacgatgcagagcatcacggtaagaaactgcatcaaacttaatcatattgcttact

SEQ ID NO: 133184 - DNA, 156 bp, Zea mays
  Clone ID: MRT4577_52954C.1
gacaacgcaacacgaccccaagttcccaacgcagaggatcagaactgaatcctccgcaagtagccggccgcccggaccgacccacccgatcctatagagcggggatgtcggacgcctacctgttcactacatcatagaggcgacacaggcgtgggg

SEQ ID NO: 133185 - DNA, 434 bp, Zea mays
  unsure (1)..(434): unsure at all n locations
  Clone ID: MRT4577_52955C.1
cccaacccgggccgcagcacccacgacgcngcgccgnctccgcgaagnccgaaccgacccgaccccccacggccagacagcancccgcgcccggcgccgacgacnccgggccccccgccgcgccgccgcccgagcccaagcgcgcagacggcggccaggccaacaccgaaggncccgacgaccacacacccgccgccgcngcggaaaccggcgccggcggccaggagggcagcgccgccgggcgcaaggaaacggacaaccccgacggcggagaagaattttttttttttgccccccccccccagagaagagagagggacgaaaggaggagaacggagccaccgaagacaagaacaagccgcccccgacgaacnngccaacccgaaaagcccacgngcggccgacgcggccaaagggcaccagccgaggggccc

SEQ ID NO: 133186 - DNA, 821 bp, Zea mays
  Clone ID: MRT4577_52956C.1
agtacgggcttctacatcactgagccttatcgtgctggcggacttgtgacttgagacttcagtcgctgctaataagaagcggatatagcagacaccttggaaaatccacagtggaaccggaccctcgatagcaaatgcaacactaacgctagatgcaagtccctgctggataccgatgccgcaagaaaaccacaccgtgtcctctccggctcctacatcgcatcgggtgatgcacatgctcactacagtgctgagccgctcattcccttgttgcgctaccaacgcgtggatgcacaaaactacaactgctgcaaaactgatatgcggcggaagtgcaccggcgcggcgtgcctgtacgaggtatggtgacatgaacatgcgaggggaggcgagcaacgccagcttcggctccagctctggctgcagcgaggatggagagcgaaccgcacccatgccttgcgccgcttgacgcgcgccgaggattcagattgcgacgtcgtgatgggcgtccttctctcgcatgactacaacacagagatctgcccgcgcgtctcctttggcagacgatgcccgacggacgtccgacctgcgacgcatcgacggcgatgcagtgctattgctcatctctgcgatgcatggcgccacccgtcgttacctacgaccaattcaaccgacctctcctgagttctacacacactgctcgtcaccatcgtcatgcgcgaggcgctcaaggactgttgattgaggtgtgttcggtgaggatgccagagatgagctgaagcttctagcattatgtacaaaaggggattgacatgctatca

SEQ ID NO: 133187 - DNA, 571 bp, Zea mays
  Clone ID: MRT4577_52957C.1
actaatgccgcaaagggtctgcctatgtagagttcttacacaaagaatcagctgaacgagcgttgtcgttgaatggcccatcatttatgactcgtattctcaaggttgttcgacgaagttctcatgaagcagctcacttttatggttggcctggtattggacggtcatcaatatatggtaggcatggtaggatggcatacccaagagctgttcaccccggtggttcctttagagggcgtgctccgatgaaagctggtgctagaagtttacagtggaaacgggagccttcaggcactgattcaagtgcaggtgcgaaaactgacatgagtgtgccattttcctgtgaacaggtcctcccgccggcaacataggggagcatactatgctgagctgatataatgagaactgaatggtatgttactcgtcgcccctaatggctgaatatggaaagcaagctgagaagattgttccttcctgatgcagcgtaaaacaaaagtccgaaaaaacatgaaaatacaaaaaaaacaacaactaaaacttaaggaaaaaaaaaaaaaaaaaacccgcggcc

SEQ ID NO: 133188 - DNA, 174 bp, Zea mays
  Clone ID: MRT4577_52958C.1
attggggggaaaaaggaaatttttacttttaaagatccaatcctttgacccggcttgaatggccattaaggggaaatcctttccaactaaccaacggggctattattttacttccccccaccccattatttccggcacaccgtttaaaattaatccttcctgggtaaggggggg

SEQ ID NO: 133189 - DNA, 2567 bp, Zea mays
  Clone ID: MRT4577_52959C.1
taccgaatcggagcgacgagggaacgccctggggaaaaagtaaggatcatgccaatgaggaacctcggatatttctaggggatgatactgcagtattcatttcctggttgtggggccatctttcttcaaatatgcacttatatgtgcaaccacaagaacgaactcgggaggttaaggatgatgagccctcctaacgaagtagctcggcgaaaaaaatctgcagatgttcacttgataagcaaacatcaaactcattctgggcacacaattgaatcaagtgaagctactagtaggagacggagtaaccgggaatggaaagggattggtcggaagggtaatgaaaaatttccgcttcgaaatgtactaactgatattcttcatggggaggacaaaagatcgcaaaagtccaatgaagtacgaccccctccatcaaaacaacagaacgacaggaagcgtgaaagggatgatgagacacatcaaacaaagaaggactcctcatcacgctccatgcttggtgatggtgcttcccgtcgtcttctacagtttgctgtccgagatgctgtaaaagctgtacagccaaccagtacctctgctgaaccagcatccaagcgcctgtgctctgtggtcgccactacttctacagagcacatgcgtgataggagatcagaaagatctcaggactacctgaacgatagaagatcagaaagatctcaagacaacttgagtgacagaagatcagaaagaactaggccaatgctacaggtacatggagctgctttagctcttagagctgcagcggaagctgctgcagattctgcaaaggttagatctactggaagtgttttcaagcgattgggtcaagggaatgttgtgaaacagccatctcgttctcgtgaagagaagagagattatgaagattttgagccagttacgatcgcagatgaacatgattctgatcaatatgttaataatgaggaatccgaagaggaatctggagagctaaccatggcagatagggtagctggaagtggaatgtatgttgattcgagctctgaagatgatatggaccgagatgagggtattacaagataccaaacttctctttcacatgacgatactttctcaccatttgcagagaagaaaactgtatcggcaccatgcagtgttgaactagagactaatgcaataagaccttcaagtgtgaatgacgaggaacaacctgttccttcaacaccaacagcaagtaaagctgtcgctatttctgttgatgtaaatatggtggagcctcccagttatgcaacaccaaaagatgttcatgttgtggagaagccttatgttgcacccatgaattcaaatgccgccagtattgctaccaatgccaaagaattaggtcatgctgaagttcaaaaggattctcagcggtctgcaccatctgttccggtttcatatagcacagcgcatccgatggaggatgcagattcaagaacgctttatgttaacaatgttcactttgctgccaccaaggactcattatctcgccatttcaacaagtttggtgcagtgctgaaagtagtcattgtcactaatgccgcaacgggccagccaacagggtctgcctatgtagagttcttacacaaagaatcagctgaacgagcattgtcgttgaatggcacatcatttatgacccgtattctcaaggttgtccggcgaagttctcatgaagcagctcacttttatggttggcctggtagtggacggtcatcaatatatgggaggcatggtaggatggcatacccaagagctgttatccctggtggttcctttagagggcgtgctccgatgaaagctggtgctagaagtttacagtggaaacgggagccttcaggcactgattcaagtgcaggtgcgaaaactgacatgagtgtggcattttcctctgaacaggtgcttccacgtgcaacataggggagtatgttaccgctgagctgatataatgagaaccaagtggtatcccactcgtcgctcctggccctaatggctgaatatggacagcaagctgagaagattgttccttcctgctgcactgtaaaagaaaagtacgaaaaaacatgaaaatacaaaaaaaacaacaactaaaacttaaggaaaaaaagagggggagtttggcattatgatatggcttatcattctggtaaccggattgggtcgtctttgccatatgcgagtaggatgacagcctgagcaattttctgtggactccagctatctgaaaaaaggattcacattcgaaataatcacaacatttgggttgtgttggatggaagatgcttatcagtagaacaagatgggcagattttggacgaggtaagcctcaactgtatagaagtaacctatcaatctgtacccttatctgaatcaatctctttcccaacctgaaaagaaaaaaaaagccaacacaaatgatgtgtcttcttctgttttttttactccatgaactgttatttattgtactgattgttgatttttagttggacattcaatttgttgtcaaacagtttaacaatgat

SEQ ID NO: 133190 - DNA, 2778 bp, Zea mays
  Clone ID: MRT4577_5295C.1
gcacgagcggcacgaggtgctgtatgccaagaaggactacaacctggcgaagcacccacagattgatgtgcccaacctccaggtgatcaagctcatgcagagcttcaagtccaaggagtatgtcagagagaccttctcctggcagtactactactggtacctcaccaacgatggcattgagcacctacgcaacaccaggcgctccagcagaacagcactcggagctcgcctgcccgacggcccaccatgatcatccccaagaagaaccgcaatgagatctgcaagtacctcttcaaggagggcgtgctgtatgccaagaaggactacaacctggcgaagcacccgcagatcgatgtgcccaacctccaggtgatcaagctcatgcagagctttaagtccaaggagtatgttagggagaccttctcctggcagtactactactggtatctcaccaacgatggcattgagcacctacgcaactacctgaacctcccgtctgagatcgtgcctgccacgctcaagaagtctgccaagccacctggccgcccatttggctctggccctcctggtgaccgcccaaggggcccaggtcgttttgacggcgacaggccaaggtttggtgacagggatgagtaccgtggtggtcctcgtggtgctcctggtgactttggtggcgataagagtggagctcctgctgagttccagccatcattcaggaggcctggctttgggcgtggtggcggcagcggcttcggcgcgggcccaacctcttccatggagtgaacagtgaagttgcccttggtttggacatggtgtttcccttcgcatgtggcctttaattttgaaggacagttattatgtactagtaatattactcggatcggccagtgctgacatatgcaaaaaaatgttctgtcggccatctgatcaaccagccagccgatctcagcgatccgccatggccaccgcgtattacgagaggccccgtggcggcgccgtcgaggaggcggacgacttcgatgagttcgaccccacgccgtacggcggtgggtacgacctcgccgtcaccttcggtcgcccgctgccaccgtccgaggaaacctgctacccgtgctcggcgccctcgacctcctacgacgcaccgcactacgccgcctccgagccgtccccctacggtcaccacgccaagccaaagcccaactatgggttccgcccccagcaggagcaacagccgtcttacggcagcggctacggatccaggcccgagcccgctgcggaggagggcggtggctatggatctggcttcggatccgggtatgggaggaagaagcaggaggaggagagctacggctctggatatgggaggaaaccgcaggcggaggagagctacgggtccggcgggtacggctctggctacggcggtcagacccggccggaggagagctatgggtcagcagggtatggatctgccaatccgcaggctgagacatacggctctggctacgggaggaagccacaggtagaggagagctacggatcggagtatgggtctgggttcgggaggaagccgcagattgaggagagctatggatcggggtacgggaggacgccgcaggttgaggagagctatggatctggttacgggaggaagcctcaggttgaggagagctatggatctgggtacggcagcaggccgcagggtggggaggagtatggcagtggtggtggtgggtatgggaggaaggcacaggaggagacctatggctcctcggggtatggctatggcaggaagaacgaggagcagagctatggtggttctggctatggttatgagaagaaggcatctgaggaggacgaaggtgcctttggctctggtggttaccggaagccaaaaccctatgacgaggagacacagggttcatacggttatggagaggagcagcccaagtatcagagtggcgggtatgagaggccgagctatggtgggggagaggggtactatggccgcaagaaagatgatgacgactcggatgatgagaagaagcggcgtcattctaagcaccaccaccatggccaccactacgatgactaagcaccagtgccttctgctgggcgttgccctggttcaccgctactgctactatatccattcgcttgcataaataaagacggctgtgtaccttctggacactggaccaccgttgcgacgttgcctctgcattgttacagccgagccgtgagtgtgctgtttattatctaatgttcaaatcgttgtgatgaaccaccgtccacgcctgttgatgccgaaccgaatgtctggatttactttgcgcctgttcttgtggtgtttgtcgccttccctgtcacagttatgtttggtgtcgtgttgttgtttctggaacgttctcgtggtggtggatagatatccccatttctgccagctgctcttgtcgatacctttcaacacctcgttttggtgctccaagtccctccaaacaggtgcccctgatgtaactgcgaacaacaggtgtctctgatgtaaggccggttgctataggtcgtggcagtctgctcagtaacgagcgaagtgattgatctacgcttcctttgggaggtcaattatctagtttcgcaagtgaaggttttgctttgtagttcttgtgtcaaatttgcagcgacgaaccgaaacgattcgtttattgacatatcctattcatcgacatacctcgtaaattgtaattgtgtgtttccaaaaaaaaaaaaaaaaaacccgcggcc

SEQ ID NO: 133191 - DNA, 112 bp, Zea mays
  Clone ID: MRT4577_52960C.1
accggcggcgtagtacaccacgcaggggctcgactccctgggcgcacgctgcgccaagtactacgaggtccgggcgccgcgcttcttgccatagtggccgcgccgatggctc

SEQ ID NO: 133192 - DNA, 275 bp, Zea mays
  Clone ID: MRT4577_52961C.1
taaaataaccattcacttgccccaaatactccgttggtgacaatcaaagcattcaggatagctattttgacatcccattgcaacgtttggagcatctcagggagggcctcttcatatgtcacgtgtacagctgcgctcattcagaaggagctctgtacaagagattgattgctaatgtggtacccgaaaaaaacatacagtaccaaacaagcggcccgagggggtggtctatctcaatgtgacatcataaattacacagattccctggggggcac

SEQ ID NO: 133193 - DNA, 452 bp, Zea mays
  Clone ID: MRT4577_52962C.1
aaaaaagggggggaaggcccccaaccaaaaatttaatttatacttcgggaactggggtacaaaggccgggtttacctataaaaaaggggggggttttttttaccaaagcaatcaccaacaagggaagtttaaaccaaaacaggcgggtttttaaatggaacacccacatttggaatttacgcgggcttgaagaaaacaaaggtttttttgccaatcccaaacaaggccccctttgggccaaaaaccccaattggaaccccaaattcggcccctaggggggcctatttgggcagcccctctttggagttagggcccccttttcggacaaaaaagtgtggccctgcaccctttaaggggcacctcgtttcttttaaagccccagaggggcccgtaaaggctgaagcacatcttggggagtgaacgaatccctctccgaataaaaggggtctttt

SEQ ID NO: 133194 - DNA, 653 bp, Zea mays
  Clone ID: MRT4577_52963C.1
actcctatagggcgattgggtttctcgagggcggccggcttaacttattgtagtagcgataaagatatctatggtcaaagtttgatatgcatgatcttaaaataatgctaccataatgtattataaaaatcatgaagacaacatcaactccaccgagcactaagactttttttccagaaaagaactgtgtccaggaaaaaataaatgagggctactgggtgtgcaacacatcatgtatgtaggttggagtatataacgattgcacacatatcttatcattgctttgtgtgcaacattagaatactataattatgatagtattgattctcaccctatctgagttatattatcatggatctgttgtgacatctcatgttttttcacagttgtgatgtaaaacaactctaccaaaatatcataagccaaagccagaggtgatcgatgatgtcccatcaataaaaatcgggtttgtgttttttattataataaaaaaagctatgtaaaggactacgaaatattgttgtaatgctctaatggtcaggcatgtatttatgttatctgggacgtagacgatattatatttgcttttatgttcctctcatcatgtgaaatgtgaagttaaggccaaaaaaaaaaaaaaaaaaggggcggcc

SEQ ID NO: 133195 - DNA, 276 bp, Zea mays
  Clone ID: MRT4577_52964C.1
cggacccgtgcactcacacgaggagaagatccatgagacagacgcaacaccaggcaagggaccgagaaccccgaccaacagagggcgacgcgccggcacctcgaccgcagcgcgcgtaaccagcacaaaacagcacggctgactgtcgcaaggaacgtgcaagacacacactacgaccgggcaataagcatggaactattaagagtggcggccaaggagaacagaacgagctccgctgcccgatcatgccaacatgaacattaatgaatgtgcgag

SEQ ID NO: 133196 - DNA, 189 bp, Zea mays
  unsure (1)..(189): unsure at all n locations
  Clone ID: MRT4577_52965C.1
gagatactgactcatctntaagcaacaactgtttgatacaaatagtgctgggaggacaacaaataatatgcaatcagaccttacgtaccaatgtgcaagcgagctcattggtccattacatcatgatcctactgtcgacataatcacccgcccgtccagagggttaatataaatcaacactacctaccc

SEQ ID NO: 133197 - DNA, 430 bp, Zea mays
  Clone ID: MRT4577_52966C.1
ccggactcacgcgaaccttgatctcgtctccttcctcccctctggcggcgccactccgatcgatcctccccgtccgcgaccaatatgaggagaggctacagctacagcccatccccaccaccgagaggctacaggggaagggcccgtagcccaagtccccgtgatcgttatgatggtcggggtagagatctcccaaccagtcttttggtcaggaaccttcgtcgtgactgcaggccagatgaccttcgccggccatttgcacagtttggtcgtcttaaagacgtatatattccaagggattactatactcaggagccacggggatttgggtttgtgcagtactttgatcccaacgatgcggcagacgcaaaatactacatggatggacaggtcattcttggtagagaagttgcagttgtttttgcacagg

SEQ ID NO: 133198 - DNA, 527 bp, Zea mays
  unsure (1)..(527): unsure at all n locations
  Clone ID: MRT4577_52967C.1
tcttgttcttgtatgataggtaaggtatatgactcgtcgatgtcgttgttgcggacatgtggctggcagcgtgtaatgtctgtgattattcttcccctgagctgtaaacaagattcttgtatccccacagtatttgattctttctattggtgccgtttttacctatctcaaaaaaaaaaaaagaaaaaaaaaaaaaaaaaaaaaaaaaaaaaaaaaaaaaaaaaaaaaaaaaaaaaaaaaaaaaaaaaaaaaaaaaaaaaaaaaaaaaaaaaaaaaaaaaaaaaaaaaaaaaaaaaaaaaaaaaaaaaaaaaaanggggggggcccctttaaaaaaaaaaaaattttctccccggggttggaaaagtaaaatttttttttttgggcaccaaaattaaaaaaccggggcccggtttaaaaaaccggggggggggaaaaaacccgggggtccccaaaataatacccttgtaaaaaaaaccccttttccccgggggggaaaaaaaaaaaaaggcccccccaagacccctt

SEQ ID NO: 133199 - DNA, 535 bp, Zea mays
  Clone ID: MRT4577_52968C.1
attaacaagtccctgatcattgttaatgcccactacacgtacgttcatttcagtaaagcaaaggtttaaacgataccggctatagtacagacggtgaaccaaactagcctcatgctacaacatacataaaggttgtcagggcccttgtggggaaaagattgagggtggcttccatcacttatcaacagtctgcagaccataattttatgaacctgaatgttgcatggagaacgggttcttagacatgtcaaatccccgcgaggcgaagacgaaaacgcgccaaagaacttatgaaagctcaggggtgatagataaccactcacgtcatgaggcataaccatgcggaggttaactgaaccatcagaacaactacacgggaagctatacaccatgctcctcactattaaattatgtggttcaacatcctgagggtgctttgaaacttatggtacattcaagtcttccaatgctagcgcatgcgcatggacctggaaaaatcttcatgaccaaaaagcttgggcttcctggagaaagt

SEQ ID NO: 133200 - DNA, 360 bp, Zea mays
  Clone ID: MRT4577_52969C.1
aacaggcaacatagaaagttgaatccagcagcaactgcagagcaacagtggcgaccaagatatgcttcctccttatgctcgttgctcttgctgcatgtgctgctgacaccacaattgcgcatcgatgctaacatgctattatagctctccttcttcccgcatacctaccatcaatgatagcttcaggatgtgaaaacccagttcttcagtactatatgctccaacaagccatcgctgccagcatcataccattatcaccgttggtgcttcaacaatcggcagtactatattaggtgccgtcattgctacaaacgatccaggcacagcagctgcagcaactacagctacctgtgatcaacc

SEQ ID NO: 133201 - DNA, 264 bp, Zea mays
  Clone ID: MRT4577_5296C.1
tcacatctcatcagcacatcatggctttctctcatatcgcacaggatttccgccttgacggctctttgctcattgccaccgtagccacagacgctggtgaatgggttgagagcgtgcttgacattaacgaatatgtcggcaacaatgacggattctttgagtttggaggcagcggcatctttgacactatcgacatagactcgtggagactggagggaccactgctcatcactgcgatgtacagactggatggctccttggcgg

SEQ ID NO: 133202 - DNA, 731 bp, Zea mays
  unsure (1)..(731): unsure at all n locations
  Clone ID: MRT4577_52970C.1
aggttgcatgccatggagcaacaggctcaactccgcgnatgctctgaatgatgcactaaagcaggagctggagaggcttaagcttgttactggtgagatgaccaattccagtgagacatataacatgagatttcagcatattccatacaactcttccttctttccgctttcccagcaaaatgcggccacacaccctggtaccacccagttgccaccaccgttccacccaccccatcccaatgtgccaaaccaccagatgctgtcccacccaaacactctcccagacataatgcagcaagagtctcttggacggctgcagggtttggacattggaaaggggccactggttgtcaagtcagagagcagctcgatctctgctagtgaaagcagcagcaccttctaacgaggcctaccaatgagaatctgccgtttcaatacgtcccattgttcataatagcctgacatccttgtgctgcttcctgctctgtaagcttatttgttatttaattcattcaattagttgaaattgttccttgtcgcactggcagatcgatccatgttgtagaatgatccaggaacccttctagtctgtttatgttttgggaccatttcatgtttatgtgttcggtattagggcatttggattttggagtgaaattctctgatgataaaaaaaaaaaaaaaaaaaaaaaaaaaaaaaaaaaaaaaaaactcgagtgtgttttaactat

SEQ ID NO: 133203 - DNA, 332 bp, Zea mays
  unsure (1)..(332): unsure at all n locations
  Clone ID: MRT4577_52971C.1
tgaatacgaaggagatttctcttccataaatcttttttaattctctgtccactaaaccagccttgagtcaattttaagcgtttctatctatgcttgtactgtccatgcccatcctagtatcagagattaataactagcgtcatttatatacttgtacctaggacggtgaccttgttggatagtgacattttttagctgctaatttatgtacttgtagctatggtactagcacgatttacctatataatcgagcttaggaatcgtggctggtttgctgtgatagtgctaccaccttgatcanagattgttaactcgagcaattataaatagca

SEQ ID NO: 133204 - DNA, 576 bp, Zea mays
  Clone ID: MRT4577_52972C.1
atttctctggcatccgcaattatctaccctctacatgtgaaccccactccagctctgcttacgccgccaacaagagctatcgtgggagcgggaccgccacttgctgatgccattcctgcaagacctcggggacactacaatgcctctccgccgcctcaactacttgcgaacctcccgaactcctcaatgagcagagagctcacccctgcttcctcacgctcctgtctccctctcccctttcgcatctacctcacaacatacactcactcccgccccctactcctacatcatgtaggttggcgggacctccctgcagatcggagcgatttcgtagacgaccacaacaagaacgccatctcagagatgctcaccgtcagatacgatggaccaaagacgcctgtacgacatacaaaatcctgtatgcgagaacagcgacgaaggaccatgcgctgccgcgtacactgatactgacagagatcgccccattgagaacatacacgacatactatcaacatgctctctgaagcaacgtgacatactcccacagatactaccgtctactgtgccggctgatca

SEQ ID NO: 133205 - DNA, 356 bp, Zea mays
  Clone ID: MRT4577_52973C.1
tttaatattatattatttttaaccggccaacatattacaaggtgccgtttttttttcccctgccgattcataccacacccatatatattgtgatatcttaaattacttaatttttcaaaaccaaccccccagtaaatttaatttgctgtaccttacccttaatagtacctattgctcactaacaaacaccaattgcaacaagcatccctgtcttcttcatatataaagactggttaatccatccatccttcttggcgctctccaatcaaaaaactaactttttccctgtttcatgcacctttaattctaagtcgttccactcaattttccattctgtctaaacccttggtcatttt

SEQ ID NO: 133206 - DNA, 584 bp, Zea mays
  unsure (1)..(584): unsure at all n locations
  Clone ID: MRT4577_52974C.1
cattgggtacctcgaggccggccggggaagccacgtctgcaacggtgtcgcctcctctccactctcacactcgaacactgcgggcgcctgccgcctaccccagcggggcccccatcccatccgccatgcctgccgtctcgccgctcgccactgcctctcgccatcctgcttcccggccggcgcgatcccctgacgagtgatcgctcagaggcagtcgaggagcctggtcgtgcgagacgccatctcccactgcctcttcgcggagacgtcgaccacgctgtccttcccactgaagagcgagagtggaaattcgataacaagccggtcaagatataccatgacgatcatgaccaggatgatggtgagaatgtgaagaacgttctcatgatccccacgatctcagatgtgacgactgcggaagagtgtagggagcctgacgctcatcttgatgtgcgcaaaggagatgtgggctaccgtgctagacttgtctgtagcgctgctgttggtgattcacatgagtcatcactgcaccacactgctgaagagatggacagctntctgcacgcactaatgaattcaccaaa

SEQ ID NO: 133207 - DNA, 233 bp, Zea mays
  Clone ID: MRT4577_52975C.1
gttctcsagggcsaggtgtggccgtmgatggcgcmacgaccacagcmgccccagccgcgacgaacgacgaccgacaastcsggaaggctacagcctgaaatgcgtgtgasggctgaggcaggctgcgtttgcggayagatcggatgagagtgtagagagataagcgttgtcgccggcttgatcgagcatgcatcggtggattcgttgagacsgagagaagtmggtthgtcagt

SEQ ID NO: 133208 - DNA, 362 bp, Zea mays
  Clone ID: MRT4577_52976C.1
aaaattaaaaagacccaaggtttttacaacaaaaaggaaggaaaggattacaaggatatatcactcgaacaaaatcttttcttaaaaaaccaacattacttacactgaacaaatttcaagaatttttttgggctatacctttgtggtaaaatgtgggacaaaccaacacattattttttacatatttatgagtcctaaaagtacctttacccaatatttaatctaaaacgaaaggacgggctttatgggggacatttttgggattttaaatttaaaaagatttatccttgaagtaaacctcaatggggattttgtttaacaaaggggtagccttcgggaaatggtaaaaaaaagaaaatttt

SEQ ID NO: 133209 - DNA, 398 bp, Zea mays
  Clone ID: MRT4577_52977C.1
cttgcattattttttttttctttatccttaacattttttttttgttacttaacccaaaccaaaggccctttattccataaaaaaacatgcttcaaacccaaaacaaaaacattcccgcttgataacaaaaacaaccccatctaaataattctaggattctcccaccaaacttttcacttagcggcacccaatcccaaaatacggtgtccattaaattcactgtgacctcccttttaaatttcaacacccaaaacttgtcccatacgccatttgccaactggtttccaaacaccaaaaacacccaaaaaggggtttgccctcgctcatttttattaaccaaaaccttccggcaaaaaaaatcaagccatacgtctattttcccccaaagatttttcttt

SEQ ID NO: 133210 - DNA, 303 bp, Zea mays
  unsure (1)..(303): unsure at all n locations
  Clone ID: MRT4577_52978C.1
cnctattgttcattttcttccttaccgagcaaacgggagcatttcaagcggatgagtataacattgaaagccccagcccaacactaacagaaacagttctgttcacctcccaaaactcaaacacaaattcctatggcagaaccacaggtacccccataacacaatacacaattgctgaccgacgcatcgaaacagcactactcccacggcaattaactttactcgccgaccccatagtggctatcagcaccaccggcagagctcagcaggtcgatacctctcaatgaagctggccatcctctg

SEQ ID NO: 133211 - DNA, 485 bp, Zea mays
  Clone ID: MRT4577_52979C.1
gctagaattactatctccgacgctacatgaccatctcggcgggcggaggcaggttgaggtcgaacccgaggcccgccagcaccgacggcggcgaccgggagcagcagctccgctcccgctccccttcctccctctccaccggcgccgggtccaggaacaggcacggctgggtggccaccgtcgccgggaagagcccgaggcccaggccgagcgacgacggcgccggaggcatcggcggtggcgggtggccgtcgtcccttgacgacgacgacgacgacgactcggtgctgccgctcgcgctcgcagccagagcaggggccgtgcacggcgcttctcggctgctcctgctccgccgccgcgcgctcctcgctgctcctcttgggcgccatggacagagctatctgtgcgtcgttgtagacgggcgtgctcgctttgccgctgggttcgttctgcgatcgaggcctctcttgctagcttggcattcg

SEQ ID NO: 133212 - DNA, 924 bp, Zea mays
  Clone ID: MRT4577_5297C.1
ctgtgcggcgctcgaggcggccggtcgggatgatgtccgggaaacaatcctatccccgccgcctacgccggccgttcgcgctcacctagtcaccacattcgttctcgccgtggacgcgcgcgcgtgaggtgagtgagaccaccacgccagacaagaattaatggccctggagacgtgcttcagagcgtgggcgctgcacgccgcccctgctggcagcaaggacaggctcctcgtctgcagcagcggcggtaaccttgtgctgccgtcgaagcgggtcgcggccgcgccgctgtccgtcggccgcgtcgccacgcgccgggcgcggcacgtctgccagtccaagaacgccgtggacgaagtgctggtggcggacgagaagaactgggacgggatggtgatggcgtgcgagacgccggtgctggtggagttctgggcgccgtggtgcgggccgtgccggatgatcgcgccggtgatcgacgagctggccaaggactacgccggcaagatcatgtgctgcaaggtgaacacggacgacagccccaacgtggcctccacctacggcatccgcagcatccccaccgtgctcatcttcaagggcggcgagaagaaggagagcgtcatcggcgccgtccccaagtccacgctcaccaccctcatcgacaagtacatcggtagtagctcatgagcgcgcgagagaggcagcccatgtctcgtgatgtgcccccgagctgcatctgcatgcatgggatactgggatcgatgatacatgtgcccagctcgcgcataaacaccatgtatctctagccttgcccttgcatatatatggatggatatatgatatgacgatgatgcgtaatgcgttcattcggttcaggcagccagccgtctgctactgctctctcatagtatatatacttgggcagc

SEQ ID NO: 133213 - DNA, 499 bp, Zea mays
  Clone ID: MRT4577_52980C.1
attgggaccctcgaggccggccgggaaaactcgcgcatcgaaggccattctttgacgacgacgaaatcgacgagcaattgaacgacgacacaggcttccaccgccctacgattcaagatggtttcctacactcccatccgcatggcggaattcaagagcaactatggtcctaagtaccatgctcagcccaacctcgctggctacactgctcagtctgccttccgaattgcttcccgtctggccatgtacggtgcccctgccgctgttggtgtcatgctcttcgccaacggtatcccccgtgtgcagcgtgatatcctccagaagatccccgtccttggtggcttctttcgaaaggaggtccaccccgccgacaaccccttctaaatcaactggggtattgcggaagatagacgttgctcagcgccgttaccggttctccttgtaaagatatctcaatagacatgttctgagccaaaaaaaaaaaaaaaaacccgcggcc

SEQ ID NO: 133214 - DNA, 168 bp, Zea mays
  unsure (1)..(168): unsure at all n locations
  Clone ID: MRT4577_52982C.1
tttattcttgtgttttatttgatggaacatgaccaaaccanggcattttctttctgcacgatgaaactaatggatgagcgttcatacaataataatatatataacgggctgaacatgacaactaactttagggattatgcctagatctacagacagcgtgactggtgt

SEQ ID NO: 133215 - DNA, 258 bp, Zea mays
  Clone ID: MRT4577_52983C.1
ctattgccgcgatctgttcctgggagaattccttccacggcatcaagcagcagcagcagcatgaagctcgtagctacactctacatagcgaccatggatccactcaagccgatacgctaagctatcctttcccgttcgacaagacaagagtagaggttattcatccatctgcgatggaggctgcaaagatggtgcaggatgagacacgagcttgatataggaaagtacgtggagctgctggacatgggcgtgcgcatc

SEQ ID NO: 133216 - DNA, 1077 bp, Zea mays
  Clone ID: MRT4577_52984C.1
ccctacaaactcacttcccccgtgcgccttcgttgtcctcccctccctcgcgagtccgaagtcaaggcgaaaaccctcgaggcgaagcgagagtcagataggataccgcgagagacgagagtcgagtgagagggtggaagggaaggcgcgatgaagctcaacgtgaagaccctcaagggcacaagcttcgagatcgaggcgacccccgaggcctcggtgggtgaggtcaagagaatcatcgagagtgctcaggggcagaatgtgtaccctgcggatcagctgatgatcatatatcaaggaaaaattctcaaggatgataccactctggaagctaacaaggttgcagagaacagcttccttgttataatgctgtctaagcctaaggcgtcatcatctagtggtgcttctactgcttcaaaggcacctgctagtcagtctcaacctgctactccacctgcccctgttgcctcagctgcaagatcaccaccttcacaggcacctgttgctgcatctgaaccggcgcctcccagtgcacagccttcagctgtttctgatactccagctcctgcagtaactgcatcaggcgatgctgatgtatacagtcaggctgcatcaaaccttgtctctggcggcagtctagaacagacggtccaacaaattcttgacatgggcggtggcacctgggaacgtgatatggttgtccgtgctttacgtgctgcatataacaaccctgagagggctattgactatctgtattctggaatacctgaatctgtagaggccccacctgtggctcgagcacctgctcctgctcaacaggcaccaaacctgcaggctcctcaggctcaggctgcacctctagcaccagtgcagccatctggtggtgtctctgcagggcctaatgcaaatcctctaaaccttttcccgcagggtattccaagtggcggggcaaatgctggtgccggtgtgggtgccggtgctggtgcccttgatgcattgcgacagcttccacagttccaagcactgcttgcattggtccaggctaatccccaaatcctgcagccaatgcttcaagag

SEQ ID NO: 133217 - DNA, 167 bp, Zea mays
  Clone ID: MRT4577_52985C.1
actagttctagatcgcttgctactcttgcttttgtattgttgcttaaatgataaaacatgtactgagagatatttctatttactgtttgattatatttgtgatgtatggacatgtggctactagaagacaatatttgttttgagtatgttgatgaaactacaaaata

SEQ ID NO: 133218 - DNA, 234 bp, Zea mays
  Clone ID: MRT4577_52986C.1
ctacttccactccacaaactctcaagataagttttaaattctaacctaccccatccacatctatatcttaatccatattcactctctaacccatttctccctaccttcactcaccaaccacaaccatcccccctacacaacccatcctctcccatcaaccctaccttacaacaaccacaacactctacctcccatttactacatcaccaactacaaccactctaccaattaaca

SEQ ID NO: 133219 - DNA, 472 bp, Zea mays
  Clone ID: MRT4577_52987C.1
cttcggtctaatagggcaaagacggggaagggaaataaatatttgaccatatccccacaaatttgctaaataaatatagatctagttgggtaaacatatgccggtatagatcctacgaatttttatctttttgcccatccaaaaaagaagcaggaacgaacagttccgcgcccgtgaattcggtgggccagcttgtctccccccgcatacagagcccccttcttgcatgacccgggagagcccctgtcgtggagaggcgaaatgagacactgcgttggtgcctcggaccgacggacggacgggtcgggggtcatctggcagaccgggcggtcaatggggttcctgctgacctggtgaatcgtacggggggcgtcgggggcggtgccggaccccccgtataaccggacggggtgtggggagtgtcccattcacagcccgcaccggggcggtttggtttttttcccggccccgg

SEQ ID NO: 133220 - DNA, 725 bp, Zea mays
  Clone ID: MRT4577_52988C.1
gccggccgggtcggggtccccggcagtcacacctcgaaagcaacagcaagtcagcaacctacctagctagagctatcactatatcagtatcaggtacctagacctagcagcagtcacacgctgcacgaggggacggtgctgatcccggggatggggcgctacgagatcggcagccactacatcccggacatcggcgggctggaccacagcatccccgccgccacccacggccagttcctccccggcgccgacgacacctgggtgcccaaccccggcttcgaggtccccaaccccttcatgcccggcgcggccactccctgaacacgtacccgcgctggcgaaggtggctctcggtcgatctgatcgtcgcgcgccgccgcccgccctgaacgaataatactactagctactactcgctctgctacgtattagctagccgtgcttgcctgctgcatgtacgcatgtcttcgtgtggcctgtcccacgtctctcttctagtctctgtgcactttacgctccagtgaagttactgaagtgtgcgcgcgcgatgcgtagcagatcttttgggccggtagttgttgctggaagtgtacgtagtatgtagccgcttgtttcttggccactatatattattacaaataaagtttgatggatgtagttatggacaaaaaaaaaaaaaaaaaagcggcctagggccaaacaaagaaaaaaaaaaaaggccccta

SEQ ID NO: 133221 - DNA, 598 bp, Zea mays
  Clone ID: MRT4577_52989C.1
tccgaacccggcagtccacctcgaaagatcagcaagtcagcaacctacctagctagagctatcactatatcagtatcaggtacctagacctagcagcagccacacccacaccgtacgtcggcatggctaggtggtcgtcgtcagctctggtcgccgtcctcgtggtcctggccgcggcggtggcgtgctccgcggcgcgccccgtccccgcgcagcagcagcaggcgggagaggacgtgaagcggccggacacgctgcacgaggggacggtgctgatcccggggatggggcgctacgagatcggcagccactacatccctgaacgaataatactactagctactactcgctctgctacgtattagctagccgtgcttgcctgctgcatgtacgcatgtcttcgtgtggcctgtcccacgtctctcttctagtctctgtgcactttacgctccagtgaagttactgaagtgtgcgcgcgcgatgcgtagcagatcttttgggccggtagttgttgctggaagtgtacgtagtatgtagccgcttgtttcttggccactatatattattacaaataaagtttgatggatgtagttatggg

SEQ ID NO: 133222 - DNA, 419 bp, Zea mays
  Clone ID: MRT4577_5298C.1
gccgtgttaatgtcatttcctatttgaattgttgtacaactttgaggtagtgtcttttgcccaaaaaagaaaacaaaacaaaaaaaatggttcaaccaggtgaatttcaaacataggcagacagctagacactgactgctcacagaaaaaaaggaactagagttgctgccatggcaggttcacttgtccgtcagcggatgcacttgccgggcttggtccagccgaaccctccgcggctttggacctccatcggcgccgccgtgtagttccgccagtcctggagcacgttcctgaggtcgtgcaccttgttctctagcccagtgcatcagttggcgtgcatggtggacaagccgcgcatgtcgtcgctgagctggcagaagccgccgcagcgcgccgtgtcgaggaactgcatgcgcact

SEQ ID NO: 133223 - DNA, 627 bp, Zea mays
  Clone ID: MRT4577_52990C.1
tgggaccctcgggccggccgggacccggcagtacacctcgaaagcacagcaagtcagcaacctacctagctagagctatcactatatcagtatcaggtacctagacctagcagcagccacacccggacatcggcgggctggaccacagcatccccgccgccacccacggccagttcctccccggcgccgacgacacctgggtgcccaaccccggcttcgaggtccccaaccccttcatgcccggcgcggccactccctgaacacgtacccgcgctggcgaaggtggctctcggtcgatctgatcgtcgagcgccgccgcccgccctgaacgaataatactactagctactctcggtctgctacgtatagctagcttagcttagctagccgtgcttgcctgctgcatgtacgcatgtcttcgtgtggcccgtcccacgtctctcttctagtctctgtgcactttacgctccagtgaagttactgaagtgtgcgcgcgcgatgcgtagcagatcttttgggccggtagttgttgctggaagtgtacgtagtatgtagccgcttgtttctcggccactatatgtaataacaaataaaatttgatggaaaaaaaaaaaaaaaaaagcggcc

SEQ ID NO: 133224 - DNA, 436 bp, Zea mays
  Clone ID: MRT4577_52991C.1
acccggcagtacacctcgaaagcacagcaagtcagcaacctacctagctagagctatcactatatcagtatcaggtacctagacctagcagcagccacacccacaccgtacgtcggcatggctaggtggtcgtcgtcagctctggtcgccgacgacacctgggtgcccaaccccggcttcgaggtccccaaccccttcatgcccggcgcggccactccctgaacacgtacccgcgctggcgaaggtggctctcggtcgatctgatcgtcgagcgccgccgcccgccctgaacgaataatactactagctactctcggtctgctacgtatagctagcttagcttatctagccgtgcttgcctgctgcatgtacgcatgtcttcgtgtggcccgtcccacgtctctcttctagtctctgtgcactttacgctccagtc

SEQ ID NO: 133225 - DNA, 1362 bp, Zea mays
  Clone ID: MRT4577_52992C.1
gcagcagcaaagtcatcagcaacccacgatcggtcgatcgatcgggtacctgctagcgaattcgatcggtcgggtacctgctgctagcgatatatagcagcagcagcagccagcagacctcgtcgccggcacgatggccagctcgtcgtcgtcgtcgtcagctctggtcgtcctcgtggtggttctagccgcggcggtggcgtgctccgcgacgcgccccgtccccgcgcggcagcgggcggcggcggcggaggaggaggacgtgaggcggccggacacgctgcacgagggcacggtgctgatcccggggatggggcgctacgagatcggcagccactacatcccggacatcggcgggctggaccacagcgttcccggcgccacccacgggcagttcatccccaagcagcaccaaagtcacctgctacccaacattggggccctcgaggccggcgggagccacccggcagtcacacctcgaaagcaacagcaagtcagcaacctacctagctagagctatcactatatcagtatcaggtacctagacctagcagcagccacacccacaccgtacgtcggcatggctaggtggtcgtcgtcagctctggtcgccgtcctcgtggtcctggccgcggcggtggcgtgctccgcggcgcgccccgtccccgcgcagcagcagcaggcgggagaggacgtgaagcggccggacacgctgcacgaggggacggtgctgatcccggggatggggcgctacgagatcggcagccactacatcccggacatcggcgggctggaccacagcatccccgccgccacccacggccagttcctccccggcgccgacgacacctgggtgcccaaccccggcttcgaggtccccaaccccttcatgcccggcgcggccactccctgaacacgtacccgcgctggcgaaggtggctctcggtcgatctgatcgtcgcgcgccgccgcccgccctgaacgaataatactactagctactactcgctctgctacgtatacttagctagccgtgcttgcctgctgcatgtacgcatgtcttcgtgtggcctgtcccacgtctctcttctagtctctgtgcactttacgctccagtgaagttactgaagtgtgcgcgcgcgatgcgtagcagatcttttgggccggtagttgttgctggaagtgtacgtagtatgtagccgcttgtttctcggccactatatgtaataacaaataaagtttgatggatgtagttatgggcagaaacttgctacaattcatattttaaaaaaaaaaaaaaaaaaaaaaaaaaaaaaaaaaaaaaaaaaaaaaaaaaaaaaaaaaaaaaaaaaaaaaaaaaaa

SEQ ID NO: 133226 - DNA, 144 bp, Zea mays
  Clone ID: MRT4577_52993C.1
accacacctaagctgaagcctctcattattattactaataacacacgtataatactacggggatattattacctctatacaaacttcagatcgttcaacaatatatcttataatcttcatattgaagggattcaatatctcttt

SEQ ID NO: 133227 - DNA, 2350 bp, Zea mays
  unsure (1)..(2350): unsure at all n locations
  Clone ID: MRT4577_52994C.1
ctccgctttcgagcggattcccaagccatcaagnagggaatttggtctgatggttgtgtattatgccaagcgaggtgataagcatcacgctcgtgcaacatttgagaacatgagagcaaggggaatagaacccaatgcgtttgtcttcacaagttgctggagatatgcgtggggcactgtcatgcgttgaggaaatgaaatctgaaggcatcgaaatgacagttgttacttatagtatcctaatttcaggatatggcaaaactaatgatgcccaatctgcagacaacttgttcaaagaggctaagaccaagcttgacaacctaaatggaatcatatatagcaacattatacatgctcactgccaatctgggaatatggatcgagctgaagagctggttcgtgaaatggaagaggatggtattgatgctcctatcgatgtttatcacagtatgatgcatggatatactgtcgtccaagatgaaaagaaatgtctaattgtgtttgaaaggttgaaggagtgtggcttcaagccaactataatatcttatggttgccttattaatctgtatgttaaggttgggaaggttcccaaagccatagctattagcaaagaaatggaatcacatggcatcaaacataataacaaaacttactctatgctgatcaatggatttatccatttgcatgactttgcaaatgcttttagcattttcgaggacatgataaaatcaggtttgcagcctgatcgtgccatatacaatttgctggtagaagcattttgtaagatgggaaatatggatcgagctattcgcatattcgaaagaatgcagaaggaacgaatgcaaccatcaaatagaacattcagacctatcatagaaggatttgcagttgctggagatatgaaaagggctttcgatacccttgacctaatgcggcgaagcggttgtgctcctactgtaatgacttacaatgctctcattcatgggctagttagaaagcaccaggttgaaaaggccgtttctgtacttgacaagatgtctattgctggcattgcaccaaatgagcatacatacacgatcattatgagaggttatgctgctagtggagatattgggaaggcttttgagtatttcaccaaaatcaaagagagtggcctaaagcttgatgtgtacatttacgaaacattgttgagagcatgttgcaaatcaggaagaatgcaaagtgccttagcagttacacgagagatgagctttcagaagataccgaggaatacatttatatataatattttgattgatggttgggctcggagaggagatgtctgggaggcagcagatttgttgaaacaaatgaaagaggatggaatccctcctaacatccatacatttacttcctacataaatgcatgctgcaaagcaggagacatgcagagagcggaaaatgtgattcaagaaatggcagatgttggattgaaaccaaatgtcaagacgtttaccacgttgattaaaggttgggctagagtgtcactgccagatagagcgttgaaatgctttgaggagatgaaatcagctgggcttaagcctgatgaagctgcttaccattgcttggtgacctcacttctctcaagggaaactgtgatggagggaagcacttacaccggaatcttcagtgtctgtagggaaatgtttgagaatgatttgactgttgacctgagcactgctgttcactggtcaaaatggcttcacaagatcgagaggacaggaggtgcactaacagaagcacttcagcgaatatttccacctgattggaattcgtcagaaaatttggaggcttcgaattctgcaagtgatggagattctgagtcttgcagtgacgcagagtttagtgataatgatgaggatcacgacgttgatgacttgtgacataatatcaagacagttttaacctttctccaattcctcactactgcttcaatgacagttaaactatcaaggctacttgcttgtggcctgccaagaggaaggtttggaatcttattgtgattttaagcgtgagccgtctgccctctgtggtgttttaagagtcacggactgtcagtaacagtactgctggggctgaagacaaaggctgtcaatgcaacagacgaagttccagttatatctgttgttgtacagatcagtgactcgtagtacaggtaggtaaatattctctatattcttgagaaatcgacaagttcatttctcatcattattcattgctctatttctagtgcaacctaactaagttaaatctacttttctgtaatcggagaaatgcaagtgaaattatggttttactttgtttatttccc

SEQ ID NO: 133228 - DNA, 590 bp, Zea mays
  unsure (1)..(590): unsure at all n locations
  Clone ID: MRT4577_52995C.1
gtggctacatataagccaccggcgcctcggatctcctcctccgccccacgggggtgaggcgttgatcctcaccggcgacgccatcgtgatcgccttgtacagcgggaccataacctctgcctccgcagaatgggtggtgggaggaggacgggggggcagttttagtgtttgggcgtgagttgctagtattcagaaagggagagcgagaagtgtgtagggggggtgaaagagggtggccctgaaggtgcagaaggggcttgccgcgagctacctggggtgggggagagggggggggggggttaggcgggggtgaggggggggaggtgtgggtggggggggtgggggggatgtggcgggagtgggggggggtgggggtgtggggggggggggggggggggggggggtgggggtggggggggggaggggggggngcgggcgggggggnggggggggggtggggtntagggggggggggggggggggggggggggtagggggggggggggggggtgtggtcggggaggagggggggggggggggggggggtgcgggagggtgggggggggggggngngngggggggcggtggtg

SEQ ID NO: 133229 - DNA, 454 bp, Zea mays
  unsure (1)..(454): unsure at all n locations
  Clone ID: MRT4577_52996C.1
cttcgccccaccaacccgattcctcggcgcgtggctcgccggcgggttcgccatgagcgtggcgtgggcgtacgtgatcgccaacgaggtcctgtcgctgctggtctcggcgggaatcatcctttccgtggactcggcggcgctgggggtgaccgtgctcgcctgggngaaactccatgctgttagcgtgctggagcgggtacccgcagccagtggagatacccagggagcgtgggctttaccgaactctggcttttgttgtcgctgggcttttgtgggccgttgtgatgctacctaggagaggaatgagggtggacaggacactgggcgttgggctcctagtcgtatacttttgcttcctctgtattaatgtttcagagcttaagaatgcacggtaatatattgggtttgttagggttttagggtttaaaaaaannnatntattgagaattat

SEQ ID NO: 133230 - DNA, 357 bp, Zea mays
  Clone ID: MRT4577_52997C.1
aggagaggtccccgtcctgtgcgcgtcttcctgctccgttccgttgctcgtctcgatcccggcgacgctcttctctccccggctgcctgacggtcgggttcccgctcgcgtcgctcgaggagtcgctcatcgggcgcaggaagatgctgctcacgtccctggtgaacatgtccgcctccggtgtgctcaccgacgttcgcgccccacgtgtgggcgtaggccgcgctaggctgcgcgagagacatggaagggtccatggagcacacctgcacgctggtcctgtccactggactcggagggaagaggcggcgcgatacgccgagcatgcccgtgggaatcttcttcagcggcggctac

SEQ ID NO: 133231 - DNA, 1971 bp, Zea mays
  Clone ID: MRT4577_52998C.1
gccatcctttctcctttcgctatacgctgaacagagtatgatttggatcgcctggcctactgctgctgctgtcgtgtccatgccgtcggtgctgtcaacatccggatcattgcgcgcgctccaacgcaacgggggtgatcagataatttccccaatcccccccgcgcaccgatcgcgacaaacatgcatggcgaagccttccgcttctgcagcggcggcggcgctccgtgcctccctcggcgtcgccttcgcgctgctgctcctgctcgcttcctcccgcctcccgcgccgcgccctgtccgccgaactctcgtccccctcggtggtggccaacgagcgacgcggccacggcgcctgcgcgggcgtgcggacccccgacgagagataccgcgccatcgcggccgggtctgacggccgggaccgctacccgcgcggcggcgggcacgtcgactacctgtacctcttctactgcgtcctcggcggcgaccgccggcccgccctggggtacgccgcgatggcggcgtggctcgccgtgctcttctacctgctcgccgacacggccgcggtctacttctgctccagcctcgagggcctcgcgcgcctgctccgtctcccgccggccatcgccggggccacgctcctctcgctcgggaacggcgcgcccgacgcgctctccgccgtcgcgtccttcttcgccggagacggcggcgagggaggagggacggccgccgccgtggggctcagcggcgtgctcggtggcgccatgttcgtctcctcggtcgtgctcggggtcatcgccatccgcctcggcggccaggaggtcgccgtccaccgcgccagcttcttccgggacgcagccttcctcttcctggcgctcgtcgccgtggccgtcgtcgtcgccgcgggccaggtcacaatctgggccgccgccgggttcgcctcgctctacctcgtctacgtcctcgccgtcgccttcaccccggaccgctggaccagacgccacgacgcgcacgcggtggatgaccccgcctccgccgctgccttctcggagctccacaacgtcacggagaccaagttctacaccgaccaggaagcccgagatccactgctccccgacaccgcaccgctacttcaatactacgccggcgaagcaaacagcaacagcaacgacggctccactggcaacaagagcgtcttctggaccgtcctgcgcgtgctagagcttcccctgaatctcccgcggcggctgacgatcccggacgcgagcaaagagcggtggagcaagacggccgcggtgaccgcggccacgctcgcccccatcttcctgtccttgctctggagccaccgcgccacggggggcccgttcgttaccgtcctcctcggcggccttgctggtctcgcgctgggcctcattgccttcctcaccacggatcccttcgccccaccaacccggttcctcggcgcgtggctcgccggcgggttcgccatgagcgtggcgtgggcgtacgtgatcgccaacgaggtcctgtcgctgctggtctcggcgggaatcatcctttccgtggactcggcggcgctgggggtgaccgtgctcgcctggggaaactccatcagcgacctaatagcgaacgtggcggtggcatcccgcggcggcggcgcgcaggtggccgtgtccggctgctacggcgggccggtgttcaacgttctcgtgggcctgggcctgtccatgctgttagcgtgctggagcgggtacccgcagccagtggagatacccagggagcctgggctttaccggacgctggcttttgttgtcgctgggcttttgtgggccgttgtgatgctacctaggagaggaatgagggtggacaggacactgggcgttgggctcctagtcgtatacttttgcttcctctgtattaatgtttcagagcttaagaatgcacggtaatatattgggtttgttagggtttt

SEQ ID NO: 133232 - DNA, 334 bp, Zea mays
  Clone ID: MRT4577_52999C.1
gaccggctggacggacgcgttcgttcgatctcgaccgtagctcaccggtaagttactctacgacgaagcatggcgtacgtcggcgggggcgccccggtcgcggtcctgcgcccgtcggcgtctctcaagtcgtcgtcgacgtcggcggcggccttccttggccactctagccgcctcggtcgcactgctaccgcgtcgccgactaggcgcagtctaaaggcggttgccaagggcgagtggctcccgggccttccctgccgcgcctaccgtgacggcagcctgccgggcgacaatggcttcgacccgttgggcctggctgatgacccggagaacc

SEQ ID NO: 133233 - DNA, 2122 bp, Zea mays
  Clone ID: MRT4577_5299C.1
ccggccgggatctcatgtacgccgatcatcacattggacttgcactggtgcttgctcataattactagatcatcagcaaacaacaaacaatggcaccgaggctagcgtgcctcctagctctggatcatggcagccatcgtcgaggcgacgtgcacggaccagaatacgccgcacgctacgagcccctcccgcgcgcccgcgttcgggcggctgctgcctcgtggatcgtcgacaaatccaattcttcaggcatcacatttcttcccggcccagaccgctccttcttcgtcagagctgagatgcatagcagctccatggccacgcgacgcctgctgcgctaccacgcgtacctgtccaaaccctagaaggataataacgcggcaggggaaccttcaggcaacggcctggtatcgcccgtggcctaccatcaccttgctctgtctcagccagccgttcttgtggtcccactcagcagcgcccctcacctcgaggccggccgggtcttggctttaacctttttcccttttgcaacctttttcgaccaaccttcgtctccagactcgtccaccctataaattgtctcgccagaccattcccatccggcaactcctgctctgcctgagcctgagcgtaggcggctaccagagagaagggtaggcggcgccggcggcgggagcaatagaagagcggtaaatccaagagagatcagagcctcggagggaaacagaagcgcacagagcatggagagcccgatctcgaggactaacctgaattgcatcagcctggcggacccgaacgtccagaaatcagtggcgctcctcaagcaggcatgcctggattcaggcttcttctatgttgtggatcatgggataagccaagagttcatggatgaagtttttgcccagagcaagaagttctttgaccttcctcatagtgagaaaatgaagcttctccgagacgagaagaatagagggtacacacccatgctagatgaaattcttgatcctgaaaatcaagttaatggtgactacaaggaaggatattatattggagttgaggtacctgcagatgatccagaagcaaacaggccattttatggtccaaatcagtggccttctaaagaagtactaccaaaatggagagaagtgatggagcaatatcacagggaggcgttgagagtagcaaaatcagtcgcaaggatcatcgctcttgctctagatctagatgtggacttcttcgatagacctgaaatgcttggcgagtccatagccacgctaaggctcctgcactacgaaggtggacaagaaacaggtaaggtgtcagatcctgcaaagggtgtttacggagcgggcgcccattcagactacggcctgataactctcctggcaaccgatgatgtagttgggctccaaatatgcaaggacaagaacgctcagcctcaactgtgggaatacgtagctccgttgaaaggcggatttatcgtcaaccttggcgacatgctcgaaaggtggagtaacggcgttttcaggtcaaccttacatcgagtggtcctagatgggcgagaacgctactcgatagcctacttcgtggaaccaagccacgactgcgtggtggagtgcctgccgacctgcaagtccgaatcaaatcctccaaagttccctccgatcacctgctccgcgtacctgtcccagcgctacaaggacactcacgcggatctgaaatcctacgacgacagcaaggcctgatcagaggactgccctctcctctctctgtctcagccatcggtacgtacgtacgacgtgtatcctgcgataacactgggtggaggacggcagtaccagtgtaccacagtatcagtataggtatagagagttctgttggtgccaccgtgccaccgtccatgtgttcatgtaagatgacgagaagaatcaagaacgggggccggcgttgaggtccccggccttaatctattctaggccttgttgttgctgtcgtgttgtgaggttcaatccccgagcttatcctttggtgctgttgaaaaaaaaaaaaaaaaaaaaaaaaaaaaaaaaaaaaaaaaaaaaaaaaaaaaaaaaaaaactcgagggagggccgcgggtaccca

SEQ ID NO: 133234 - DNA, 417 bp, Zea mays
  Clone ID: MRT4577_529C.1
ggtaacagccaaacccatacccagtggggattaacaccacataatgtggggtaatcatcccaaatggactatatagtactagggatcaactaacagaaatgacaagcatgttcgttgcggttttaatccaccggtttctgttttttctacagacagcagtagtccgaacggttttaattcagcagcagtgaacaacccaactcaggcattttgcaaaacatgcaccacattgtttgcctaaactttaaacctgcataaaggaactttttgggcgacttggcggaggcggccttcttgggagacttcttctctttgccttccttggcagcagcgacagcggttttcttggggagcagcacagggttgatgttgggcagaaccccgccgtgtgcgatggtgacgccggccagtagcttc

SEQ ID NO: 133235 - DNA, 443 bp, Zea mays
  Clone ID: MRT4577_52C.1
aaagggaaaaaaagggttaatggtgggcccccagggggccctgtcaagagaacaacaggaaccgaccacacaggggggggggggggggtagcaaaacaaaaagtagggaaacaatgccccggccgggggccggccgggggggaaaaaacaaatttttagaagttagaagaagcgcgcgtttttcttttttagttaacattgggggcccaaaatcccaagaaaggggtggggccacctaaacttgttgttccccaaaaagaaggggtgaacgggaacaaccaattttttgaaaagggggtcgaagtcttttttaacgtcttcaaaggggtaaacccccaaaaaggaaaaattgcatttgggccaaaatttaagctcccccgggttaatgtaaagggccttgttttaaaccagggaatttttttaagcaaaagggggaaaaaccc

SEQ ID NO: 133236 - DNA, 261 bp, Zea mays
  Clone ID: MRT4577_53000C.1
ctcctcctgagtctgggtaattatacctctcccaagcccccattgtgtgttgaaatcctgtcatgaatccttggtagctctctgagaacagtgaagtccagggaaaggcatctggtctgtctggaaagcaaacattatgtggcctctggtagttcttgtcctgtaagaatactgactttctggagtaatgagtatatatcagttattgtacatgattgctttgtgagatgtgcatatgatatcacctatgcagccttgttt

SEQ ID NO: 133237 - DNA, 471 bp, Zea mays
  unsure (1)..(471): unsure at all n locations
  Clone ID: MRT4577_53001C.1
ggattctttttttttttttttttcaaatacccttttaactcatttttcttaaattttttttccaacacaaacctaaaaaatactcaaaacacatccccctccaaaaaaccaacctaaataaacacatacataaccctaacaaaactattttataaaggggggtacctaacaattcaaatcccccagcaaaccaaataagcataaaggccaccggggacagaaagatagaggccccacatcatgttatggcacaaacaacatgagactccgacaaaagagaaagggtgatgatcttagcctttcaagggccctatgggcacgatcgtaattccggtactaacgcacatgctttctattccgaggggcatgctacggaaaacggtattcttgactggccatggacagctcaccctgtggggtattctcacggccggtgctntggtggcgcgcaagatgaggccacatatgctt

SEQ ID NO: 133238 - DNA, 521 bp, Zea mays
  Clone ID: MRT4577_53002C.1
gcctgttgttgtccttctatttgttgcttgaccattatcatatatatatataagaatcaatatgggaaggagtcggtcgatcataagcgtctggtggacgacaagctgccgttcgtctgcgtgggcgactccatgaccacctccactaaaaacatggtggaggagcagttataatacgacgccggcggagcgtgaaagctgacactagcagaactaccgtgtatggaaggccatgccctacgtgatatggaactagacatgctacaagctgtacaccattggatccacggccaaactgctggtgtacctaatcaccgtgtactgcatgtcgggcgccagcgccgacacgcctgctaagcctctggtcggacaccgataatctggagccgatcctgggtgcctttatatacgacacatactttggccgctacactactatggtcttggcttccatggcctgcttactaggaattatataccttaatgtcaccgtcttcttgccggtgctccaccctggcgac

SEQ ID NO: 133239 - DNA, 379 bp, Zea mays
  Clone ID: MRT4577_53003C.1
tttcctatcggatcgcgacgagacgccgagcgatcggacctaggctgaccccaacgaccactctcgcaggcggcggtcatggcgcacggtgatagtgttaccaccttggaggactcaaaggaggacagcgagtacggctatgacacgaaagatacttttgacctccaaaacgttgctgatggaacgggaggagcctgccatgcatgatactggggcgcgtcaggcatgatagcttaataagagagagcgatgagcatagcgggcgatttagttacaatgcagttttggaggaaacatctacactgtgggtgaatgaccctgttttgagaacaagaaaccatctatcagctagaaggtagcctggaattactggaaatat

SEQ ID NO: 133240 - DNA, 569 bp, Zea mays
  unsure (1)..(569): unsure at all n locations
  Clone ID: MRT4577_53004C.1
tccgcaaacgcttgtggccagcagtcttggacatgattatctatgatctatgatgcaagatcatttgctaacggtttagatttttcagattgccatggagctcctttgctaccacttctctacataactctgaacatggccttcaacatttctgtccttaatcttgtgaagatgtctacagcagtggttgcttcnctgacatcaactttagcaggttatgcattttgtttccccacttcatattttaatgtttaagcagagtacttgtgcaaggcaatatggcaacttggcaagggcatatggtgctttatgttttataaaaactgaggtgccatgcaaatctttttgtgcagttgtgctagaacagatttcctgataagtagtcgacgtactctataactcgatgcactcatggctcaccaccaaaactttaaggaaacaagccctttttaagctgacttctgtttggtttgttgtatgtttgttttaacactatatgcttctctgcagtacctctttccatctatatactggcactgcctctaccatatctacccgaaggaacaaat

SEQ ID NO: 133241 - DNA, 424 bp, Zea mays
  unsure (1)..(424): unsure at all n locations
  Clone ID: MRT4577_53005C.1
ccgggcccgacccacgcccgtccggatcaatacaagtatgcgacagggctcgtacatatgtatttggtgagggagtgatcnnncggcgctngnnagaagagtnatggctaannngatcgcnncgcagcnncgccgctggctgtgcgtgcggcngcctgtngnccttcgtctggtccctggtgggggccgttgcnccgtctgtccaagggcgatgtgtcgagccggcatgagggctcatgggaccctgcatgtgtctggcatggaggggtccaggatgaggcccgcttcgatctcgtgtccgccatggtccctcgtaccggcatgctataccggcgtgcggtcgtcgtgcggcnnccgttccggtgtgggcatccgggcttccggatggcggtgtctgccaagcagctccaggtacgtgaagccg

SEQ ID NO: 133242 - DNA, 418 bp, Zea mays
  Clone ID: MRT4577_53006C.1
ggccgccctttgtttttctttttacagactcatattacattgttttttgttgtccagtttttagtaataaaaaagacactgccgagcaactttattattatatgtaatataacaaggcacaatggcacatacatacagggatacagctgtaatattcttgaacaccctttgaatgactcctgctttaattatgcaaatggtggcatgcatgcaaaagactcctcgggagataaaacccctgttattctgttaggacgtaatcatgcagtgtcaccaacgtggggcgcaatggccatatcatcggggggttcaggagtaaggctggattttacagcgctgtgtgcggccttgggaccaattacaaagaactacatccgagccgtcacgaacacccccagaacatttgttccaggggggg

SEQ ID NO: 133243 - DNA, 200 bp, Zea mays
  Clone ID: MRT4577_53007C.1
gctggacgcgtgccaccgtgactttcggctgttccgtgcggaggcgctaaacagggtgccgacgagcacgggcgccgccaagggcgtggcgctggtgctgtcgcatctcatggggaagctgaacgggatcgatctgcgggtgccgaccccgaacgtgttcgtagtggacctggtgctcaacatcgtggagactggcatta

SEQ ID NO: 133244 - DNA, 815 bp, Zea mays
  unsure (1)..(815): unsure at all n locations
  Clone ID: MRT4577_53008C.1
cattgggtacctcgaggccggccgggttgcagtgancactaatctggtcatgataataacctaagtaaaaataaaaatatgatggttaccactactacactattggcatataaaacatacacttatcaaactcgctattataacaacactaagtaataatataccatactaataatccttagtttattcactaacgatacatattaaacaatatatggatggactcgtccggcaattttttatgccatatatatcccaacgtctgaaaaaatggttatttaaatatagccatttttattctgaatttctcgctagtcaaaaaagataaaaatagtgaatgacactctaaaatgtaaataagatatagaaaacttgttaggtattggaaatatatgagcatggtttttatgtaaatgactgaaatttagaaaatgtattggagtgttgcttgcttgtctctagagattcattagttttacctattctaaaatagtacgtctttatccgcatcagaaaattaaactggttttctctaatatttttaatggtccatgcttcgtccagttacctcatccaagaatggtgccacgctaccactggtccaccgtcacggcccgtggctctccggtcatgtccaaagagaagccttcgcacgaggaaacgctcggccgagaccaactacgagccgccaacatcncacgcgaagctttcttctcctcgaaaagtagcgccaagagctccanccagtcgggcgtgactatcccgactagctccggctactcctgggcacccccagagtacgtgatcaccgtcag

SEQ ID NO: 133245 - DNA, 468 bp, Zea mays
  unsure (1)..(468): unsure at all n locations
  Clone ID: MRT4577_53009C.1
cccaaacccccccccaaaccttcccngaaccggggggggaccccgaaaatttcgacccggaccttaaagggttacaattttttttttaaggggggtttttaaaagtttgggaaaaaaaaggaaaaaattttttttttggaaaaaattttttcctttaaaaattcaaaaaaaaaaaaaggccggaaaaaaaaaagtaaaaccctgggggccctaaaggggggccaaaccaaaataaatggggtggcctcaattcccccttttcaaagggaaaaacttttgggcccattttattaaaaaaaaccccaaacccccgggaagggggggttttttttttgggccccagggggtttttttttttccaaaagagagggggaaaaacttgttggcctttaaaccccttgccctaaaaaaagttcaaaaaagcgttccacctttttttttccccacaacaagaaaaatatttttttt

SEQ ID NO: 133246 - DNA, 513 bp, Zea mays
  Clone ID: MRT4577_5300C.1
tctatctcatttcccggcgccaccaagcgtaatagctaaacgaagtatgtgctcggcatggtgaacggacgcacggcacagagcgcttggctctacgtgcggaggccatacttggatacctgacgtccaactcaaaccagaacgagacctcgtctctcttgctgatcaacgtggcgatcaccaatgcaggatgtggctagcgtacgtctcgccagatgcactgtggctcatctaccttggcaataccatgatccatgatacccgctactcgagcatctgaggcgaggtcaccccatcgctccgatactcaggctgcgtccgagtcctgttcaagtccaacctcccgactgagtacatgtcagcgcaaggtcagagcgctcatgcacacgatgatgatctacaggtctgttgtactgagatggactagaaataggcatgtgattatttctcacttttcactgaacttgaaatgacttgtgctgataacttagattgatctagcgatgattctgt

SEQ ID NO: 133247 - DNA, 417 bp, Zea mays
  Clone ID: MRT4577_53010C.1
gcagcatcactcctctaagagggccagctgctccccggcccgctggaggacggataaactggaggcctactacactgtgtgctgcgatatgtatccacacctacttgaaaaagcacttgtggactgtggagatgacttgaactgtgtaataaagagactaaacgagctgggactggagtcagttggagctatcctatctggcactgtccgtgaatatgagcaggacatgtgatcagctcataacatattgactgaggggaccaccagtaacggccgtgtaaacatagcttctgaatatccacccgcaatcgataactctgagacaagtcgtcataactgtgaatgggatggcctattggtgaaagagatgatgagctactctgacatatatgacgcgcgagctcgagcatgcagggc

SEQ ID NO: 133248 - DNA, 238 bp, Zea mays
  Clone ID: MRT4577_53011C.1
attatcattgttttcttacgattaacttaaaaaaaaaacaggcggggggaacagttttcatggatccggaacccatgctgtacgaagcatggggctggtgaacccgaggaggaacaccgctttaacaatggtcacaaaccgggcttgcagggaaaaacacaaacgggggacatcaaacacgacacggacgaagatgaaccctggggactaaggaaaacgacacggtcgcgaacaggac

SEQ ID NO: 133249 - DNA, 227 bp, Zea mays
  Clone ID: MRT4577_53012C.1
tatcggggtgcattaaattgcaattcagggaagggttgggtttatttacgggcgggacaaatgaaagatattgaggggggcgtaaaggaggttcaccggggcgggaaccgggcaagagggggccttacatgaggtccacaggagacggcgccatcaaaggagggggcttgcccaacattggtgttgtggaattaacaacagatttaggcgtggggttggttgcgggg

SEQ ID NO: 133250 - DNA, 1368 bp, Zea mays
  Clone ID: MRT4577_53013C.1
cttctgcaaggctatgtggtccaggttaaaaggtaccgaactcgacgcccgggaacgccaccaccagagcaccaccgccccatcagttactactgcctgcctgcctgcctgcgtctctcctccaggtccaggctccaggaatccaccccccacctcctcggattctttccccctctccagctcccccgtcctgcagccgcctgcactgtgctgccgccccgttcgcctcccggcctccagcctcctcggttcccgcgggagggccatgaagttaaggacaaaacgacctgaatggaagtcccttgtgcctctacaactgagcagattgagcaggaaatctgccatgcgtttctttttgttccccaaggttcagtcggctggtcaatcgccagatgataccccagtttatcttaatgtgtatgatttgacgccaatgaacggttatatatattgggcaggcctgggcatatttcactcaggaattgaagttcatggtgttgaatatgcattcggagcacatgactttcccaccagtggggtctttgaggtagaacctcgccaatgccctggtttcagattcagaaaatcaatatttcttggtacaacatgcttggatccaatccaagttaggcagttcatggagctgcagtcagtaaactacaacggcgatacttaccatcttatcacgaagaactgtaaccacttctgcaaggatatgtgctacaagttgaccggtaacaaaattcccaaatgggtgaatcggctcgccagaataggcgccatttgcaactgccttctcccggagtcgcttaagatctctccggttggccatgacccaaacagtcaatccgaagactcggagaagaggcgtctgaggaacccattcagctgcttctcttcgatctcgagccaccggcagctgccgtcgtcatctcctttcccaccatctcctgtgaaagggggcctcccccgttgctcgtcgaggaaaagcagcacggcgtctccgaaaaataggtagcctgctggggcgcgcccctgcgtaacttccgagtcgtcgtgctaattcctgcggtgtcaacatctggatccgcacggcgagtgctgtgctgtgctgtgctgcggctgtagctttctgtcaggtacttgttttttggtcggtaaaagtcagatgcctgatgttgtatcatgtaaaaaacccctagcgacgtgtgctgctgatctgcctcgcaagatctgttgggagggtgaattgccactcggttctacccgccgcctatgtactctactcagggatttgtatattaatccattattctttcagctgttggaaaaagcccacttttttaaggacatgtgcttcaaggtgac

SEQ ID NO: 133251 - DNA, 626 bp, Zea mays
  unsure (1)..(626): unsure at all n locations
  Clone ID: MRT4577_53014C.1
cgtcccgcccacgcgtccgcggcgccctggcgcgagctcaacctcgnacgagggccccgntcatnnggggctcnnccgcagcgtagactggcttcgngnnaagctcgagcagnnatcggcgaggggcacctnacgnnggcaagtgtaccatggctgaaggtagtacgggtcacccaacgnagnatnncgtcgcgcctctaagtaagtatgccgcatggnaccaacgnanngcgcgaagnnggttcccngnnatcaccgnnccatacgcgnagnaatcaagaatnncctgnaagnannagcttcacncatcacagnnnaacgttnatncanagncnntcaaggnagnaatcgnntcacctnnccccagnngcccagnnagcgggnaccgagnncaagggannnagccaattgnnnacggtaacccaagtacccaaggggaagncnnatttacccatggttnnttcgagtatttatggnnaccatgatnnctcaccgnnggcttgctngnnatcggccanggaaaatgcggttcacttgnntgccgcagaattaanngtgttacccatgaggcanngctgcttacagnngcctgcnnactatttgtcatgtcaacccaaaggttctgc

SEQ ID NO: 133252 - DNA, 270 bp, Zea mays
  Clone ID: MRT4577_53015C.1
atgggggccgttgctggcccgtggccgggtggggtgggagtgtgggacatgggtcatgggtgtactgggtgcgctatttttttaagccggaatatgcttccgttgctctcacgatctggtactggtatggctttcgctgattccgagctttttatcgtccttctctacgccggacgtgaggttcttcacttcttcctcgacgagggtctgactatccgtaccgtcttctcatcgccggtcctcacggttggtgcggccactgcggcgtag

SEQ ID NO: 133253 - DNA, 111 bp, Zea mays
  Clone ID: MRT4577_53016C.1
tcggtgtcagtctggggaaaatgctgaatcttattcagttagtaaaagccatgattcaacattttcaccccactttgaggacaataattcgtaatctgtgagctttcgacc

SEQ ID NO: 133254 - DNA, 594 bp, Zea mays
  unsure (1)..(594): unsure at all n locations
  Clone ID: MRT4577_53017C.1
ggtctcgtaccttaaaacactataccccgcggacccacctgggggcgggggggggggcgatataggacggcggaggagaaggaggacctcctgtggngtctggggcgctcaaggaccatgggaatgagcagtgtaagggggggagctacctcaagggtgccgngctctacactcaggccatgaagagttatccctagggttttgaccgtgtacagtaaccgagctgcagcattnctgcatttgttataagattagcaaagngctttctgatgcanagacaacatntaggctgaagccacaatgggagaagggtcattttaggaaaggttgtgttttttaggaaatggagcgctatgaagaggggataggtggatttcagatagttttggagnataattnacaaaatacagaagtttttagaaaaattaagagggtattttatttggacagggaaaagaagtaagcccttgatttaaaaaacatgttttcaaatgttgacattgtaaagaacttagaattacttaaaactgagttgggtacaaagtatggagattataaaacagggcagaggggctttttttttaattgtaatgt

SEQ ID NO: 133255 - DNA, 439 bp, Zea mays
  Clone ID: MRT4577_53018C.1
ggaggagggtgttgttctacagtacataatgaaaaatagtttccaattattttagcatagcaattaaaggttcaacactgattagacatggtgattttctccatgtctgcactatcacgattttctcaaatctattgccatggttagttgagtactctgcaaattcaaacatgcaacagttgcttttttttgtcagtcgttaaagaagttaacctgtttgtgcagctagttgaaagggtagttccagtcatcaggaaaaaatcaccacaagatcttagaagaaacaactccatggaatggtaaaaatgacactgagccctgatgttcttctcttagaatttacagggtttctttttcttttagatttctggtctcctagctttctttggcagctatttaaaatagtggaaaacatttaagggaatgggcgtgataaaaa

SEQ ID NO: 133256 - DNA, 595 bp, Zea mays
  Clone ID: MRT4577_53019C.1
ccgggcccctggccgggtccgccagccctggggcagaaggccgtcgcctcccgacctggccgaccaccactgtcgtcagcatgcaggagtagcgagcaggtcggcggcctagccacggcgcacccattcaccggaggtcatcttctcgctctcgctctctgccccctcttcacagaggctgagaagggtggagtcgtggagagaaggaatgagctacatgaactcagcagtctgcggcaacatcctagtagcaaagcgccgagccatgatctttttgtcttcgcattccgagcggagctgaggacaagtcggcgttgtgggttggcctacatgcccctatacagccggccgaaaagattgccctagatgtagcccaacccgtgatgtgaatggattttgtgggtggcgtgcaaggagccaagcatatatggatatataacaggccatgatcatctcctctctctatatatcttttgatccatcgaactttttttctgctcgtttttttcgaaaaggatatgatcgatgttgtgtgttacatctatacggcatgctgcttctcttgtgaagaaaaaaaaaaaaaaaaaaagcggcc

SEQ ID NO: 133257 - DNA, 226 bp, Zea mays
  Clone ID: MRT4577_5301C.1
gaccatgtcattttttcaacaacgtccagaggttcatgaccatatgcataaacttgatgctgcatgtactacgattcatatcactcttacagatctgtctatatcaacattctgacctttcaaatgaaggaacaatcatcatattggattaatacattaacttaggctctgaagactctaacgaaatcaacgaatagaaatacacttggaaatcatatctcccggt

SEQ ID NO: 133258 - DNA, 244 bp, Zea mays
  Clone ID: MRT4577_53020C.1
cccacgcgtccgcccactcgatccgcccacgcgtccgatttataagaaaacaaaaagttggtgattgcattgggaaattcccagggtattactggacctatgtggtgtattgttaaaccagtgtccttgtgatactgttgctcttgatgttcctgatacaggtaaggaaacagttggtcaactctgatacaaagtatatatacagttcagtattgtctctgttcattttgtttttatttcattg

SEQ ID NO: 133259 - DNA, 387 bp, Zea mays
  Clone ID: MRT4577_53021C.1
tcccgggccgacaaacgcgtcagcccacacgtccgcaaagctccaactccgacgataatcgccactcctcgaaatctcgaacgactttctgcggcgaacatcttcgtcacgttacgtaatggtacaggtctcaccatcaatgtccatggaagtaatgcatattcataaggatgttgatgggcgttcatctaaacgactgtgacgggatggaatgggctcggacgtttcaacatcattcccaacaccactgaacctgctaacgctgttggcgatatgcttcctgtcctcaatggaaagttcactgaaaagtctttccgtgtcacaactgtcgatgtttctgttgttgatctgactgttacgcttgagaaatctgccacctaatatgag

SEQ ID NO: 133260 - DNA, 361 bp, Zea mays
  Clone ID: MRT4577_53022C.1
gatcgcgtcactgaaggcgcagctgaacgctgcggcggccaagaactctgcgctggaggaccgcctcgtccacctggacggcgccctcaaggaatgcgtccggcagctccggcgcgccaaggacgagcaggaccagacggtgcagggcgcgctagcacagcaagcgcggcagtgggagtcgcacaaggccgacctcgagctgcgcgtcgtcgagctcacggcgaggttggaggccaagtccgagcgctcggtggccgccgccgactgcgacaccggctccaggctagccgcgctggagaaggagaactcggcgctcaggacgcagctgctcgccaagacggaggagctggagctcaggacg

SEQ ID NO: 133261 - DNA, 623 bp, Zea mays
  Clone ID: MRT4577_53023C.1
gatacgagcaacacattacggtagttctctctaagctaaaaagtacagaggattgggttgtgactgttcctgagggccgtgtcgaggtcttgactatcattgaaagatacaacacaaaactttgttcactgacgaagaagtttgacattaaagatgagacctaccattggacccataattatcattttaattttaggttatatgagaagttactttgcagtgtgtttgatattctcgaagatgggcaacttgtagaggaggctgatgagatactggaaataacaaagctgacctggcctatattgggcgttactgagaagctgcaccacgtattctatgcctgggtgcttttccagaagttttctcaaactggggagattcttctactgaaacatgcaagccttcagatacgggaatttcgattgtaccatgacgttaaagaaatagagttatatacaaacagttctatttgttctgtggatgcctatggtggcaacaaggttctaagtttggttgacagtgtcctactcaaaataaatgtttggtgccgcagacagctaggcaattatcatgcacactataggaagaataactactcgaactttgaggccacactgaacttg

SEQ ID NO: 133262 - DNA, 453 bp, Zea mays
  Clone ID: MRT4577_53024C.1
ttttttttttttttttttttttttttttttttttttttttttttttttttttttttttttttttaaattttttttttttttaaattaaaaggggacccaccgttttgaaaccataaaaatggatccccttccatatttaaaaagctgggggttgttcaacactccttttggaagggggtttgaaaatttaattaccttaaagagaaaaaacgggcccttttttacgagcttggacacaggtttttaaagccacacaattagttggtggaccaggggcttttccccaagggtgtcctaaagttcctcccccaaattgtaatacggaattttttccaaaaatttggggcaaaggtgggatttgccaaaaatgaatacccccaaaagcccccggtataacaccgggcatggatacccagtcctgggggaaaaaaataccgggagaacaattttttt

SEQ ID NO: 133263 - DNA, 345 bp, Zea mays
  Clone ID: MRT4577_53025C.1
gggggtggtgttttttttttttttctcttttttcctgggcccaaaaacctcaaacaaatcgacggaatgccccgcaacccttgaaagggagccttaccctaaaaccccccccccccggggtttaatttttcctaaaaaaaaaacccctttttttaccccttccaaaaaattccctggaacctgcaacaacccttgttcactggggttccccataccaaaacctaaaagttataaaaaatccccaaaaccggccggggcccccaaatgtaaccccgttttttaacccaaaaaacctttaaataccgggggaacccaaaacgggcccaaggaacacctcgttaaaaa

SEQ ID NO: 133264 - DNA, 813 bp, Zea mays
  unsure (1)..(813): unsure at all n locations
  Clone ID: MRT4577_53026C.1
aattcaaaaaaacacacaacacgcacaacgatccatcctgtattccagaaaaaaaaaaggttagcaatatccatctccagatcgatctacgatggtgatcaagctcagcgtcggcgccgtcgcggtgtctgtctgcctgtcgctcgccttcttcgtcgggcacgggcagcccgtgctggccgacggtggcggtggcaagaagcacgatgttgctgacacggttaagaaggaagtggccatggccatgaagaaaaacccgcgcatcggcgccgccctcgtccgactgctcttccacgactgctgggtacacggctgcgatggatccgtgctcttagacaagacaccggacggcggcagcacggagaagaacgcgataaacaacatcggcctcgagggcttcgacctgatcgacaggatcaaaggcaaggtcgacaaaagcgtctcctgcgccgacatcgtcgtgctggccgcccgggacgcgaccttcatcctcagccgcggcaacatcgcctacaacgtcacgacgnggggcggaaggacggcgtcagatcatccgccgcggcagccgatgccgtcctccctccctccaccttcaacttcacgcagctcaaggccaacttcgccgccagaaacttcacccagacggagctcgtcgtcctctccggcgcccacgccgtcggcgtcgcccgcctctcgtctttccgcgaccggctcgacaatgccacggccacccctatcagcgccaggtaccagaaagccctcactgagcacgtcgaggaacagaagaacgtgcaaggggaccctggaccctac

SEQ ID NO: 133265 - DNA, 463 bp, Zea mays
  Clone ID: MRT4577_53027C.1
ccaagggaaaaagcaaaatagatagatcaaggggtcagcacccaacccatcccatcacggggtgcacccgaaccaagacaaagggttcccacaccaccttaaaatgaaggttcaggcccccaacttgccggaaaattaaaagacagtttacacccccatgcaggacgggaagtttcccacaaaaaaatcaaccatccccccaaagcattgcccggggtccccacataaaaggacaacggttgttcacaattcaaacataccccccagcaggcaggggaggaaaactttggggagccccccaccccgggcataagttgcccccaaacaggtaccccagggaaaacccccccccaggaccagcggggcccttggttgaaggacggcccgaaaggaagttcccagtgttctaaccatcacccctgggggagttattggttgggctggaaaccccaaaagcaacctg

SEQ ID NO: 133266 - DNA, 489 bp, Zea mays
  Clone ID: MRT4577_53028C.1
ggccgccagtgtgctggcaatacgccctatgagcaatctcgcaggaacgcggccttagcgttttttttttctttgttccttttaccaacggagacttgggaatgtgaatacccatttctggaagcctacatgatccaacagaaaactcaattgtcgtattacctctattaccctagttactacaagatcctcagggggggggcagcaggtaccagggtggcgtgtatgggcacaaaagatgggggaacggcaactactgcaacttgtgctagaaggatttggggttctaccctaaactgctggtataaatgcacattacaatcaactatgctaaaaaggattctcgtttttaatgagaaaaacagcaaaaaggaataaggcagatttgtaactgaaaggcgtgctttcttgttgacacatcagcagttgctgcatttttatcagcattttgaggggtaaccccagataccctgttacaactacaacaat

SEQ ID NO: 133267 - DNA, 353 bp, Zea mays
  Clone ID: MRT4577_53029C.1
cgttgatgcagctcctgacaccgtaagtgcttcgtttacggcggcggttgtagctatgacttctgtgccacatattctcgaagtgacgaagttgtttctacctatgatgttcttcaaactgctgttgcgacggaggaaaagctaagtgtgcattcaatcacgcttgtgccgccgtcgtgtgtggtgaggaggcgttggcatcccccagtaaggtttgcattcagctacttcttacctgaagcagtgaatatctcctgtgtacagcgttgtaatatgtacatttgttactgtctgaaaagcttgaattgatggaattattatgagatagatgatggctgataggaactactgat

SEQ ID NO: 133268 - DNA, 170 bp, Zea mays
  unsure (1)..(170): unsure at all n locations
  Clone ID: MRT4577_5302C.1
cgcgggggcgctntcggnctctcgcctgggtgtggccttgggcggngtttaccgcccggtttgggctgcgttcccgcccgtcccgtctggtcgccggcgcctggtggtgcctccggggtcgccccgttcggtcctctcccctcccgggggggggggggcccccctttttt

SEQ ID NO: 133269 - DNA, 112 bp, Zea mays
  Clone ID: MRT4577_53030C.1
cacacgcgtccgcggatcgtgggcagtacgtgtgttgggttctcctccccctcaggttcgtgttcgggctcgtgaggttctaccgggttcgatttcgtgggtgggcggatcc

SEQ ID NO: 133270 - DNA, 590 bp, Zea mays
  Clone ID: MRT4577_53031C.1
cctccctcgagtttttttttttttttttttttttttttttttttttttttttttttttttttttttttttttttttttataccaaccggggcttcagtttttttttgagggcccattggttatttaccatttgcctcaggaaggattttaaaaggccttcaaaggcccctccaaaaaacggaaggaaaccgtcttttgttccgggacctaaaaaaataaaaactttattttttttttttcggcgggatttttttggtttgttggggtacccctttgaaaaaatttttaaaacccctgaaaaaacccccttgttaaaaaaaacccttggccttccccggggggttttattccaaatcccccccccctattggcggggggaaatataacgtttttttgatcccaaaattaaaaattttaattaaccaaaggtggggtagggccaacctgggaaaaaatcttcctttttttgataaaaaaatttacccgctcgaaagaaaaaaaatgggcccccccatcgtggaagcccattttagggggggttgggcttattttttggccggttacccccttgggaaaagggctcccctgaa

SEQ ID NO: 133271 - DNA, 162 bp, Zea mays
  Clone ID: MRT4577_53032C.1
gcaacgcaactgcaggtgactgatacaacttcatcgacattagataaactatggtgtacaggaacggtaaagcgagccttgagcctactaaacaccataccgcaagacaccaccatcagaccagtacgcgccgaccaacgtgtgctcctataccgtacatca

SEQ ID NO: 133272 - DNA, 317 bp, Zea mays
  Clone ID: MRT4577_53033C.1
aaaaacaaaaaaaaacccccatttccatatttaaaaaaatttaactgaactaaaaaattggcaaaaaaactgaaaaatattgggaaaaagggtgtttcaaaaaactactttccggaaaaaatataactaaatatatttaaaggggctaaattttaaaattaaaccgacttgggtacacaaaaccagaaaacttcaagcattaaattttttcaaggggccaaattttgaggggctgaaaaaaaaattgttccttaacggaaacaaagcgcatctttttccttcgaaccaacaaattttgcattgggaaaccattttta

SEQ ID NO: 133273 - DNA, 325 bp, Zea mays
  Clone ID: MRT4577_53034C.1
tgaatgactgccaacgcactgcattctatgtgtggaattggtctggacaccaaagaatttgacgtggatgttatcattgagaccgaccgcacaacggggatgatcgttcttgctgtcctagacgtgccgaacgctgctttcaagaggtaccttgtacagtctcggcgacatgaacgagaagatcattgtcatcttagatttgcgcggaagtaccttcgatgtgtaccttttgaccatctctggtggcgtttttgtcgtgaacgccaccattggtgacacccatatgggtggtgaagattttgattacaccgttgtcaaccacttt

SEQ ID NO: 133274 - DNA, 528 bp, Zea mays
  Clone ID: MRT4577_53035C.1
cttttgttgctgtttattagtaattattacgggaactgtccttggttttgctccctaatgtggtcaagcacccctaggcctgagtgattcatcccaccaaggttccacctgcctggaaccatagcacagaggtcaaggacactatctcagccacagcatagcccccttcttgcagtgcataatcgatgctgaagtgctgcatggaatcatgcagtcactggcactgctgacagcgccaagcataaaagtggggaggaaaatgacttgcgttcaggagagaacaaagaggggaatgcgaagaggtctgagagaggaacaagtaccataagcagagaagagggcgatcctgttctgtgctcctggcagtaaactagagagggaaacatagagagaagggggaggggatagacatgagggatcttaagggtatttttgccacggcaacagcttggatggatgggggtagggctcattggcattaaatcaggggcatctcactaaatatttgaaaaaaaagcagtggatggt

SEQ ID NO: 133275 - DNA, 2830 bp, Zea mays
  Clone ID: MRT4577_53036C.1
cattgggtacctcgaggccgggactccaagccaaggcagcccacggagccacaccgcacaccccatcccgcccggagcagcaaagcataggtgctcgagcgctccctccagagctccccgcctgccgccccgtcctcaccctcctcggtcgcctcccgccgaggctcggctcccgtccgcagccaccacgtgcgacctcccctcccctgttcctgagaatctccgtaggtcggcatggggtgaccagatcggtgctctccagctgaattctgctcgcggctcgtctcggaggcagcggagatggcgagcgccggcgtggcgggctgctcagggagtgctggcgatgctttgttcagggaactctggcatgcttgtgctgggccgttggtcacagtgcctcgccaaggcgagctggtttactacttcccacagggtcatatggaacagcttgaagcatctacagatcaacaacttgatcagcacttacctttgtttgatctaccacccaagattctctgcaaggtggtcaatgtagaacttagagctgaaactgattctgatgaagtttatgctcaaattatgctgcaaccagaagcagatcaaagtgagcccaccagcccagattctgagccaccggagcctgaaagatgcaacgtctattccttctgcaagaccttgactgcttcagatacaagtacccatggtggattctctgtcctcaggaggcatgctgaagaatgtttgccccaactggacatgactcagaatccaccatggcaagaactgctggctaaagatctccatggaaatgattggcatttccgtcacatctttcgagggcaaccaaggaggcatctacttacgacaggttggagtgtttttgttagctcaaaaagattggttgctggtgacgcgtttatcttttttagaggtgagaacggagagctgagagttggggtaaggaggctcatgaggcaactaaataacatgccatcttcggttatctcaagccacaacatgcatcttggagtcctagcaactgcatctcatgccatctccacaggaactctcttttctgttttctacaaacctagaacaagtcgatcggaatttgtcgttagtgtaaataagtaccttgaagctaagaatcacaagatgtctgttggcatgaggtttaaaatgagatttgagggtgatgaatctcctgaaagaagattcagtgggacaattattggtctgggaagcatgccagctaactcaacttctccatgggctaactctgattggagatctttgaaggtccaatgggacgagccttctgctattctgcgtccagatagagtttcaccatgggaactagaaccccttgatgcaactaatccacaaccacctcaacctcatttacggaataagcgtgcacgaccccctgctttactttctattgctccagaacttcctcaagtttttggtttttggaaatccccagctgagcctgcccaagctttttcattttcaagaccacagcaaactcaggaattataccattcaaatcccagttcaatcttctcatcatcgttgaatgtaggattcagttcaaagaatgaccgttctactccaatcaacagtcatttgtactggacaatgaggcagacaagaactgaatcctactctgctagcattaacaaagctcctactgaaaagaagcaagaatctgctacttctggctgcagattgtttggcattgagataggttctgcagtatcaccagtggctactgttgctagtgttggccaggatcagccacctgctctctcagtagacgttgaatctgatcagctgtcacagccatccaatgccaacaaaacggatgccccagtggcaagcagcgagcgctctcttaacgagtcagagagccggcaagtcaggagctgcaccaaggtaatcatgcaaggaatggcggttggcagggcagtggacttgacgaggttagatgggtatgctgatctccaccgcaagttggaggagatgtttgatatccagggagagctttctgccaacctcaagaaatggaaggtcatttacacagatgatgaggatgatacgatgctggttggggacgatccatggaatgaattcctcaggatggtaaaaaggatatacatttactcttacgaggaggccaagtctttgactcgcaaggcgaagccgccggtcgttggtgacaccatcaagccagacccaaacaaattgccaccggaatctgacgtaatcaaacaacaatgctccgttgctgctgattatcaggactgatggatgctaacttggctcctaccttttctttcccctcttggatgtcggtcacgggtcatgggaggcaatgccacgctccttgggacttgtaagagttatctgttttgttgcttcacgggcccaaagggcgcttccctgcaccatctgccttggtttggaacggcttggaccgccgtggtccttttacctgcagcaaggaaaggaatggctgggagggaatggatactggtatcgttccgtgtgtggcaccccgtgatctgtttgccgtgctttgtaggaggcatggcgtattgccgggtactttggttttggagactgccactgactgctgccgtcgtcggggacgctcctctcacctctggtaaataggactttgtacacaattattttgttagtagcagtatatgtacatcatcggtcatgttgcttgctacatgtactcctatgtagcatcctcccctgcattttagtcctggctaggtatcagatgctctggtgcaaaaatgtctctgcttgttcc

SEQ ID NO: 133276 - DNA, 3310 bp, Zea mays
  Clone ID: MRT4577_53037C.1
ccgggacggagccacaccgcacaccccatcccgcccggagcagcaaagcataggtgctcgagcgctccctccagagctccccgcctgacgccccgtccaccccctcctccggcgccccccgcctacgctcggctcccttccctagccggtacgcgcgacctccccttccccctacgtgcgagccaactccttgctccctacccggacttcggcggctctcggtccctacatcggcgtggggccgcgggcctgacgcctaccagccgaatgctgcgcgcgccgatcgccgtaggtagacaaggggtcccgtgccggctggtcaggagctgaagtcagtgcgcgggtcgtctcgtaggcagcggtgtgggctacccctgccgtgacgacgtactcagggcctcaccatgatgctctgtttagacaactcaggatggcttgtacggggtgcatggtcatgcagcgtcggctaggcgagctgtttttcgtcttccctcagggttgtttccaccagcgttacacagctacggagtaatggtagaatgaggacttgcgtctgattgagctgccacctatgatcctctgcaaggtggtcaatgtagaacttagagctgaaactgattctgatgaagtttatgctcaaattatgctgcaaccagaagcagatcaaagtgagcccaccagcccagattctgagccaccggagcctgaaagatgcaacgtctattccttctgcaagaccttgactgcttcagatacaagtacccatggtggattctctgtcctcaggaggcatgctgaagaatgtttgccccaactggacatgactcagaatccaccatggcaagaactggtggctaaagatctccatggaaatgaatggcatttccgtcacatctttcgagggcaaccaaggaggcatctacttacgacaggttggagtgtttttgttagctcaaaaagattggttgctggtgacgcgtttatcttcttgagaggtgagaacggagagctgagagttggggtaaggaggctcatgaggcaactaaataacatgccatcttcggttatctcaagccacaacatgcatcttggagtcctagcaactgcatctcatgccatctccacaggaactctcttttctgttttctacaaacctagaacaagtcgatcggaatttgtcgttagtgtaaataagtaccttgaagctaagaatcacaaggtgtctgttggcatgaggtttaaaatgagatttgagggtgatgaatctcctgaaagaagattaagtgggacaattattggtatgggaagcatgccagctaactcaacatctccatgggctaactctgattggagatctttgagggtccaatgggacgagccttctgctattctgcgtccagatagagtttcaccatgggaactagaaccccttgatccaactaatccacagccacctcaacctcctttacggaataagcgagcacggcctcctgcttcaccttctattgctccagaacttgctccagtttttggtttttggaagtccccagctgagcctgcccaagctttctcattttcaagaccgcagcgaactcaggaattataccattcaaatcccagttcaatcttctcatcatcgttgaatgtaggattcagttcaaagaatgaccgttctactccaatcaacagtcatttgtactggacaatgaggcagacaagaactgaatcctactccgctagcattaacaaagctcctactgaaaagaagcaagaatctgctacttctggctgcagattgtttggcattgagataggttctgcagtatcaccagtggctactgttgctagtgttggccaggatcagccacctgctctctcagtagacgttgaatctgatcagctgtcacagccgtcccatgccaacaaaacggatgccccagtggcaagcagcgagcgctctcctaacgagtcagagagccggcaagtcaggagctgcaccaaggtaatcatgcaaggaatggcggttggcagggcagtggacttgacaaggttagatgggtacgatgacctccgccgcaagttggaggagatgttcgatatcccgggagagctttccgccagcctcaagaaatggaaggtgatctacacagatgacgaggacgatatgatgctggtcggggacgatccatggagtgaatttcgcaggatggtaaaaaggatatacatttactcttacgaggaggccaagtctttgactcgcaaggcgaagccgccggttgttggtgacaccatcaagccagacccaaacaaattgccaccggaatctgacgtgccacatgactcaaacaacaatgctcccgttgctgctgattatcaggactgatggatgctaacttggctcctaccttttctttcccctcttggatgtcggtcatgggaggcaatgcacgctccttgggacttgtaagagttatctgttttgttgcttcgcgggcccaaaggacgcttccctgcaccatctgcctttgtttggaacggcttggaccgccgtggtccttttacctgcagcaaggaaaggaatggctgggagggaatggatactggtatcgttccgtgtgtggcaccccgtgatctgtttgccgtgctttgtaggaggcatggcgtattgccgggtactttggttttggagactgctactgactgctgccgtcgtcgggccgctcctctcacctctggtaaataggactttgtacacaattattttgttagtagcagtatatgtacatcatcggtcgtgttgcttgctacatgtactcctatgtagcatcctcccctgcattttagtcctggctaggtatcagatgctctggtgcaaaaatgtctctgcttgttccaacggcatgctcttttcggcccgtgctgccttgctgggtgtcgtgtgtgccttttcggttggaacattgctgccaccgcccggcatttggtgctttcagcagttatgatcggctccatactgttccaaagggacgagggtttctaactctagtagccatggactcgctctgtcaagttgctccttgaccgggagagtcaggccacaggaggtggtattaatgtataataactcgttgaatcaattgcaataactggagtttgttagggagtatagcccccggcatgcattcgtcaaaaggcgaagttatgttctgcccctggcggttctgagacttgtgtttgctttgacactgcacttgaatttgttcatctgtaagtcagagatgagttatacaatcggccactgtcatatcaa

SEQ ID NO: 133277 - DNA, 1173 bp, Zea mays
  Clone ID: MRT4577_53038C.1
ttctaaattctctctcgctgcccaccgatcaaccaccccgcttcccccgaccgcgtctcggagcacccttctcaaccgcatcctgcctctgctcggtgtcgccgtctcgactgcaggagaggggagcgccccgtcgccgatctgatcgggagccggaggccaagcgtcgaggtgagcccgtcaggaaccgccatggcagcggccgccgccgattccgacaccgccgcagctgtgggcgccatgtccacctgcgcccactgtcagcgagaaatcccatttttgaacatcgacttgcactctgtacattgcgcccgcaacctccaaaagtgccagcactgcggcgaaatgattcctaggaaacttatggatgaacattatgatgaaaaccatgccccgatcaattgctccctttgtaaagaaacaatagaacgtgagagctgggatcttcataaaggtgaaaagtgcccacaaagaattgtcgcttgtgaatattgcgagtttgaattgcctgcagttgatctccatgaacatcaggatgtatgtggaaaccgaacagagctttgccaaacatgcaggaagtatattagactgcgtgaatggacagggcacgaaatacagtgccatacaaactcaaatggttctgcagacacatcccgagcaattccagagagagaactacgaccgccgccgccgccagtgcgacaggcgcgaccagcacgtcctgcccacgcttcaccacacaagcggctcctcttcacaatcgccgtcactggaatagcagttatgatcggctccatactgttccagagggacgagggtttctagctccagtagccatggactcgctctgtcaagttgcttcttgaccgggagagtcatgcggtcatgccacaggaaggtggtattaatgtataataactcgttcgaatcaattacaataactggagtttgttagggagtatagccccaggcatgcattcgtcaaaaggcgaagttatgttctgcccctggcagttctgagacttgtgtttgctttgacactgcacttgaatttgttcatctgtaagtcagagatgagaaaaaaaaaaaaaaaaagcggccttatactatacaatcggccactgtcatatctggaattgcgacacggtgcagcagatgttaatactttggctt

SEQ ID NO: 133278 - DNA, 294 bp, Zea mays
  Clone ID: MRT4577_53039C.1
gccggccgggctgcggatcagatattagagcatagtcgattactgacgggagacaagaacgaagtgcgccgctgcgctgtcggacatactgctggctctgacagctcatggcgatctacctgcgatcgagttcgtgccttaccgctcggcacacagagccctaatgcatgactacaactgaaggagttgcgattttgtaacataccatagcacgatgcacatgcgacttgatacaaataagcagcaaccgtcaatcaatccttttgtttcttttttacaaactcgcttccttgc

SEQ ID NO: 133279 - DNA, 372 bp, Zea mays
  Clone ID: MRT4577_5303C.1
gttccaataagcaaaagaagagaaaaaagaattcaagtagctcaagggagaacgccacatcaaatcaacttatttgataagttttctgggttacctgaccaaaatgcaccagcaacttcaactggaaatctgcaaggtggagtaacaaaatccataggggctgattcacgaataaaagagagtcatgaattatcccaagctaatggtaacaggggatgcagtgtaaatgcattaaactctagtgctgcgcgacagctcgtgactgtccctattggattgtgccttccacccactgatggctccgagatatctgcggactctggagatatcagtagcaatggcaagttatcactttggtctcatcaatctcag

SEQ ID NO: 133280 - DNA, 253 bp, Zea mays
  Clone ID: MRT4577_53040C.1
ctgttggtttgtgggtgctggtcaactggacattacgacaggcagacgagtcctgtcattaatcataacacgggggagctttattacccctcgggataagaccgccagagggtttatggacgaaaactacaattccttttgaatagaggacgactctggtacatcacacactccctgaccgatttaaaatcgaacacgctattctgcacacagtgaacgaaaaccttacgttctaagacatcatgaaggacgt

SEQ ID NO: 133281 - DNA, 392 bp, Zea mays
  Clone ID: MRT4577_53041C.1
tgccgccggcttggctgggccaccaaaatcgagttgctagacaatgccttggtctactacggtgagatcctggactacaacgccatcactagtgcgggggaacgggggaggatctcggcggccttgcgcgttcgttaccttggtcctccgagaactccatggtcgacgctatcgagaacataaactggatagagctgtacgggcgtaacattaccgctgaccaaacacaatcccctggagctggccgagggcaagaactgctacagggtgatggtggcggttaccgccgccaacagctgccgctggttggactgttgtgtgaccccatcctgggttaagcccaagtatcttatctatctatagcatcgtgctacacgataccttatattacc

SEQ ID NO: 133282 - DNA, 959 bp, Zea mays
  Clone ID: MRT4577_53042C.1
gcagtgcagtactacttcgccgaccgctacgacctcgtccgcttcgtcaagctcgtcaggcaggccggcctctacgtccacctccgcgtcggcccctccgacttcatcatggacactatcttctcgacgaacttctgcattgccgccttgaatgggccattgtctgtcctgaacctgatgcccggcacgtacttgagccaaacatgaaagccaccgaatttccactccgcgcaattcggcacgaggcgccactccactcgcactcggccaagaaagaagcggcaagtcactgcccagtgcccactgctgctccaggagcgagaaaggccagccaaggagggggctttgctttcaggaggagaggagcggcgaggtgggcggcggtcgccatggccgcagcgccgcgtcttcctgtcacctgcagcggcgggggcagtagcagtagtcgcatcctgctcatcgtcttcctggcggccgccctcttggcgtccgcggccaatgcggccgtctcgtacgaccaccgctccctcgtcatcaacggccgccgccgcatcctcatctccggctctatccactacccgagaagcgcccccgagatgtggcccgggctgatccagaaggccaaggacggcggcctcgacgtcgtccagacctacgtcttctggaacgggcacgagccggcgcaggggcagtactacttcgccgaccgctacgacctcgtccgcttcgtcaagctcgtcaggcaggccggcctctacgtccacctccgcgtcggcccctacgtctgcgcggagtggaacttcggtggctttcctgtttggctcaagaacgtgccgggcatcatgttcatgacagacaatggcccattctaggcggcggtgcagcaagacgtcgacaagaaagtggcgatcatgaagaaggagggggcgccgccgaggtgggcgtagaggccggtcctg

SEQ ID NO: 133283 - DNA, 759 bp, Zea mays
  Clone ID: MRT4577_53043C.1
ggaaatcgcaggattttcaccggcttcccgttgacgtttccgccactgcggcagctgacaactcgaaacccccccgcacactcccctcccttccgtgcctaggcggcaacgcttcttctcgcctcccctccccatctcctttataaccgagcgggcggcccctcccgcgtgaggcaccgaggacgggggcacagccgcagcgcagccgagccgagaccagaccagacgaaccgcgccgagccctaccctcctccaccaccgggcctctctgcgagggcggaggagcgacatggagccggccgagaagaagccgccggcggtgtccgacctcggcgcctgggggatgaacgtcgtcagctccgtcggcctcatcatggccaacaagcagctcatgtcctccgccggctacgccttctccttcgccaccacgttgaccgggttccacttcaccgtcacggcgctcgtcgggtggatttccaaggccaccggctactccgcctccaagcacgtccccctctgggagctcgtctggttctcgctcgtcgccaacgcctccatcaccgggatgaacctcagcctcatgctcaactctgtcggcttctatcagatctccaaattgagcatgattccggtggtttgcttgatggagtgggtactcaacagcaagcactacacaaccaaggttatatcggcagtggttgtcgtcgcagcgggcgtcgggatttgcacccgtcaccgatgtggaggtcaatgctaagg

SEQ ID NO: 133284 - DNA, 833 bp, Zea mays
  unsure (1)..(833): unsure at all n locations
  Clone ID: MRT4577_53044C.1
atttctgggtttcgctcccgtggccgtccgctccgctctgctccgaggagagtctaccgctcccagctgcttcactgaccctccagtgatcgatctcctactccaaggggagaggaggaggagcaatgggggagagcgagtaccggtgctgggaggagcttctgccggacgcgctggggctcgtcttccgcaacctgccgctgcaggaggtgctgacggtggtgccgcgggtgtgcaagtcctgggggcgcgtcgtggccgggccctactgctggcaggagatcgacatcgaggagtggagccagcagcggcacagccgcccggaccacctcgtccgcatgctcgacctgctcctccgccgcagttccggcgcctgccgccgcatctgcgtctccggcctcccctgcgacccgctcttctccttcatcggcgaccacgcgcgcgctctgaggacgctggagatcccgcggagcgagatcagcgacgccgtggtggaggcggtggcgccggggctgcccaacctcacgttcctggacgtcagcagctgcaccaagatcggcgcgcgcgcgctggaggcgttcggccgccactgccggtccctggcggcgctccggcgcgtgatgcacccgatcgacgtggccgggcgcaacgcgtgcgggcagcacgacgaggcccgcgccatcgcgcgcaccatgccggcgctccgccacctggaggttggctacatgctggtcaccacggaggccatcctggaggtgctctcccggtgcggggncctggagttcgtcgacctgcgcggctgctgggccgtcgacgaggcgctgctgcgggag

SEQ ID NO: 133285 - DNA, 269 bp, Zea mays
  Clone ID: MRT4577_53045C.1
cgcggggcggaggaacaaaaacaaaaactcctgggcaagccacaaacaacagacaaaaaacggaaggaaggaactagaacgcagaaggaaaaccaaaagaggcaccaccaaagaagggtctgatggaagcaacgcagcagggcctgacaaagcaagatggaagaaaggcagaaaaaggtgcagaagaaagagggagccagcgaaaggcgcagagagcagggagaacggaaacaacggcgggcgcacaaagaaagcagcagggcgtcaca

SEQ ID NO: 133286 - DNA, 212 bp, Zea mays
  Clone ID: MRT4577_53046C.1
gagcaaacaaaacgatatgccgttgccctgaaccgagaccaccaccgatctgcctaaggtcggcttagctaacctgacctgacattgtcgactaggagtttgtaccgccaaggatgtcgtcagatctgccatggacgtgtcgtacgcgggatcctccgaccgcggctaggctacgaccgcccgagggcaccggatggggactaccatcgatg

SEQ ID NO: 133287 - DNA, 312 bp, Zea mays
  Clone ID: MRT4577_53047C.1
ttcccgggtcgacccatcgcgtccgcggacgcatgggccatcaatgcctgccgtctccctgatgcccttgcacttcgtcgccgacgttccaccaccaccggtggagcgagatggagatgaagaggatcctcttcgccgtcctcgtcgtcatcgccgactcggtcaccgcagtgctggccttcaccgatgccgccgtcgtgggcgccccaactgcctccgagtcgcccgccgaggctcccgctggcgctggcgctggcgctgccgctggcgccgacgccgcggggccctccgccagcagcggcgcgcccgccc

SEQ ID NO: 133288 - DNA, 349 bp, Zea mays
  unsure (1)..(349): unsure at all n locations
  Clone ID: MRT4577_53048C.1
tttattttttttnnnaaaannnnnnnantttgttttttttgggggtttccccgtttttcgccccaaaaagggggggctatgcatggcatgggtcctttatttaaaggtgggggaaacaacttcgtataaaaatacaaacatgggcctaaaccatatgcatgaccgctacataattaccacgggaatattgacattttataaaacaaggcttttggaaccattattttcggctcccgcatggtttcatggatcggaagccacagggcattacccgaagctacccccttttgcctcgactgggttagggcaactttgacttgatgacaaggggaaggcttttggcttaaac

SEQ ID NO: 133289 - DNA, 490 bp, Zea mays
  Clone ID: MRT4577_53049C.1
attcggctcgagatcttagattggttggttcttggttgaataattcaaacgatccaataggatctaattacaagaagaatgaacagtattggaaagcggttgctgctttctacaacagcaccaccccaaaaaatcggtcaaggataccgaagcaaatcaagagtcactttgggagaataaagacgtgtctctagtgataatcttgaaggtcaaaggcttgctcaccaggcaccaaaagagaacaaagagtcagccatgttggaaacttatcgatccttattaatgcatgacacaacaggcatgactgaagatgtgaggtctgagcacgttctggcattgaggtgtctaaggcaaaagctattttcaaaatggctaagaacaatataatgcttttgatgtggcgatgctgctgttctacttccatccttccagagactgctggctgatgcaaatcggatggctactcctatttaccaaagctctaattatg

SEQ ID NO: 133290 - DNA, 343 bp, Zea mays
  Clone ID: MRT4577_5304C.1
aaaaaaaaaaacaaaccataaaacaaaaaatctaaaaaaaaacacctaaaaaaaaaaaaaaaggcatacttcgacaaaaactgtggcccctctaaacgatccaaacttccttactcatccttgcaatccattacatacttctctagtgtactctaattacaattaattacccaccattttaaaacctcatgcattcgaaaaaaatgcctctaccaaacttattaatctttaatcacatcctcattttctcatttgcccaaatatcaaacatcaccccatcaatctgccttcctaacaattccctactctccattgtgcatagaacccaccctttagttctcca

SEQ ID NO: 133291 - DNA, 849 bp, Zea mays
  unsure (1)..(849): unsure at all n locations
  Clone ID: MRT4577_53050C.1
aggattctcagaggaattagtagcatctcaggagcagcaacaggagatggaatctctccccgtcccgagcgtgcaggccatggtggcggccaccggcggagccgatgtgccaccgaggtatctccggcctgcggaggcggtcaccggcatcgtcgacggcgagggtgaggcccagatccccatcatcgactaccggaggctgctgctggagctggatcgccgcggcgaggagtccgcgcgcctccacagcgcctgccaggaatggggcttcttccagctggttaaccacagtgtcccggccgatgtggtggagggaatgaaggccaacattcagcaattctttcagctacccgcagagacaaagaaacgattcgcgcaggagcgagggcagctggaaggctacggtcagctgttcgtcgtctcggaggatcagaagcttgactgggccgatatgctttacctgtacacacagccacctgagagcaggaacaccaagttctggcctgaccagcctgttaacttcagatcgacgctggatagatactctggtgctgtgaaggagatagcggattcccttttggcgacgatggcggagaacttgggactgaaacaagaggtgattgctgacagatgcgtgggcggagtgcagtctgtcaggatgaactactacccgccgtgcgctcaagcagagaaagtcgtcggcttctccccgcactctgacgctgatctcctgaccctcgtcctccaagtgaaccatgtccaaggnctgcagatncagaggaacggcagctggttccccgtcaggnctgtcgagggcgctctcatcgtcaacattgggggatatcttta

SEQ ID NO: 133292 - DNA, 793 bp, Zea mays
  unsure (1)..(793): unsure at all n locations
  Clone ID: MRT4577_53051C.1
ccggccggggtaaccgaaggaaggcagacggcaaaggcctcgttagtcgttgaccgtctcgctcgcctccccgtccgctccgctcccgtgctttcccctttgctcgctcgcggacctccgtcccggactccgactcccggcggcgctctcgcgccagcaagctcgaatctgcacgccgccgccgccgccccacgcccacggcgcctaggggtgggcggttggcttctgagaacatgtaacgggtgttgattcgaaaataggttcctggaatagcgggttcattagcagtttggcacaactttgaagctgcaggggatttcaaatgccctttgtcatcagctccacggttccactgagccagaggattttttattgtattttcaaattccctgaggatgtttgacagtactcaaaaagctcaatacatggatgggcacagagagaggtttattaggctggaagagtcaagtcctaggtcatctgtaccttctgaagtgggaggcaggagtaccttgaggtccagcatgcctgggtttggttatggtccatttagtgcactaaggtctttcttgtctgggggctctggaagactgaagtcacttagacagtcacttacttctggtgctcctaagacagcttttgcggaagatcttaaatcatataagagaactatatttgatccccaggacaaacttcttttccgaatgaactgggttntcttctcgtcttgtctttttgctggtgcaggggacccactattcttcttcctacctatcatcaacgattcaaactg

SEQ ID NO: 133293 - DNA, 153 bp, Zea mays
  unsure (1)..(153): unsure at all n locations
  Clone ID: MRT4577_53052C.1
ctactacttcgcatcgctggccttccacaatgccgccggcgggttctgcggcatccgcgtgctcagcacgccgcagatccccgtcccgttcccgccgncggccgccgactacaccgtcctcatcggcgactggtacaaggccaaccacaccga

SEQ ID NO: 133294 - DNA, 495 bp, Zea mays
  Clone ID: MRT4577_53053C.1
ttgagagggattcataagaccgaacactctctcgagctgtaacgcgtgtgagtcatctctagcgtgaaccagaaggcgtgagcctgaaaccctaacagccacaagcatgaggaaaaaaagcctactcaggctcctgaggcgaaaaccctaaagattgaagaagcttctaaatctggagatcgcatatttgccatccctatggcccgtaaacgggatgaaaataacaatgctccactatcaactgtgaaaggtactgagcctgatggccttattttgaacgcagacattgccatatcactatacttctgtaaccataaggagggttgagggaggattccgcacatccagtgtgactgtatgttgctactccaaacgcacagcataagaaaggatactgcatatcggttgctatcatcaaagcacaccattcctcattactacttgacaatatatgcacgtgttgacaaacttcaccaggttctaggtgaactgaac

SEQ ID NO: 133295 - DNA, 691 bp, Zea mays
  unsure (1)..(691): unsure at all n locations
  Clone ID: MRT4577_53054C.1
gggaaaatgagaaaaatgaccttaacataaaaggagttagttgtaagactaaaactaagaggacttccttctgaagttgcaaagaagatgacattcgaagagcagtttactaagaagaaccttaatgaacaaaccagtaaattcaagcaagccttaaccttcacttcaacccgaaggactccgacccgaatctcgggacgagattcctttaaggggggaaggctgtaacatcccagtaattcccagagttcttctcagtgctaactcaaagaaccattatttcatgagaatcaaattgagcaaaagacaccaaaaacttgagagcaaaaattcaactaattattttgtcctaagactcatgcctaaatcatatcatgcattcaaaatgggaaaatgtttaaaccctagaacaaccctaattaggccatttaagtagaaaggaagaaattggtaaaaagaccatgaaaaacatggaatcatggcttaggccaattataaaagtggaaatacactaattaagctacaataattgttataaaagtttggccaaaataattgattaaaatccccaagaaggccatccaaatggaagctctctagggaaaatctgaaattcagattgctgaatttcagccctcacctagaacttgagcacgttcaccttgatacttagctcanatccttaagtccc

SEQ ID NO: 133296 - DNA, 635 bp, Zea mays
  Clone ID: MRT4577_53055C.1
aggcgagttgcagttgtatgttgtttagagccgcagtaccgtgggtgtacgaacggacggccaaaaaacaaactaggtagggaattggtccatacgtggatggagcagagcgcctggcttcatcttgctgagggcaacgaccctgaccaaagccagcacactgttgattggttggttcacggcagggaaggaaggaaacccaggaactcatcaactgggcaatttcaaaatcacgaacagccatggttcgtgttcgtgcatttttttttaatttgattacagaagacaaaaaaaatgttccagcctttttacagtttcctgcgtacacctatttacaaatctcgataattaactaaacatccacagtaaaaccaaagtgaactccctcgcaaggaacacgtcaaggttcaagcgtcctccaacccagtattaattggactttcattcacgccctgtgaagatctccatggccactacttctgatgctcgacacatcgcaatgtcctcggcgatgggttgatcttctttctgcaacaatcttcggaatctgaaccgatatgtcctacctgaaaataacatgcagagttctatttcgtactacctttccacccccatagtttcccacccccgaaaag

SEQ ID NO: 133297 - DNA, 381 bp, Zea mays
  Clone ID: MRT4577_53056C.1
atccacgacgtctgcccagcgcatcggaatgacgtgtgcatatgccaggacagagcagatgttcgcttgcttcagatgagaggataaatgctcttacgcacaacattatggctcttacacattatctgatagcatcaagctctcgagcgttccttgcacgtagtagatgtctgacatcgaactgcattttccgtgctatggatggactcccggtgaccatcttactccagcaggctctactccaagagttccttccacaatggaacatccaagacattgtacatcaagtatgtgcagagacaggagccatgtatcaggatactctcccgcgaagttataatcgttcagaactaacatcagacgcttggcttccatgggtgc

SEQ ID NO: 133298 - DNA, 214 bp, Zea mays
  Clone ID: MRT4577_53057C.1
cggtggcgctcggggggcgctttttttttttttttttaggcaaaggcatatgattgctatggcgggtgtgaaatgatatagcactgttatgcactaacattgaccgctgggaccacaagcatgggtgatgggatgatcacacgccaacgaggcaatggtcatactattcgtaaatggggctgaatggatacatacacgattgagtgtggagctg

SEQ ID NO: 133299 - DNA, 337 bp, Zea mays
  Clone ID: MRT4577_53058C.1
ctgtaccactgctatgaagggaggttccattgcggggctttccttcgggcgtcccgtaacctgcaggataccaccaggcttctcgccaccatgctatccaagattaagggccaacaagggtgccgctactgggggggctccggtgatgagcaagatctaatcgacagcatcaggcaacatctacaaggaaaatcgtaagtgctactgcatgcctcagttagttcataagaaaaacggcgcagctttatttcacgctctttgatgcatgtgtgtgcccgcccactagtctctctactactaaaaagaccctctaaaattttcaagagattattagaat

SEQ ID NO: 133300 - DNA, 524 bp, Zea mays
  Clone ID: MRT4577_53059C.1
gaacatacactgtgcgcgagccatccgttaattcaagtacaagcatgatttgtatcaacgtaaaatctatggaacaagcaggggcacgattcacaacacagaacagtcaccttacactttaggtacaatatcttccttacgggctttgttatgaatggggggaaagttataaaatgaactagcggggcaacaactattctagagcggaggtggaggaagtacaatgcattgatgcatgacagttcattcacgtgggtgtttgatgcttcggcaggggtcggatgatactcatccgtagcagctgatggaatcggtgaagcccttattggcggactgcccgaccttctcgaggtactgctggtggtactcctggggggtgaagaaccggctagccgacaggacctgggtgacgatcactgcctgccactcattctgcttaacagccagcgactcgtgcgccagtgaatcctgctctgccgtgtaagagtagatgcccgtacggtactgtgttccgacttctttgt

SEQ ID NO: 133301 - DNA, 579 bp, Zea mays
  Clone ID: MRT4577_5305C.1
gagagagagagagagggagaggggagccgaaggcatggagagcaagcacaccgaccaggcaaacgtgaaggcgaagctcagcaccatgcactcgaaggtgatctgttgcaagctctacatctctgaaagccaaaatgcggctgttgtcgatgccatcagccgcataggccagaaagaccctgaggtggttctactcaacaagttcgaggatgagtactacaaccgtgtccgctacacgcttgtctcctacatcaccaacgaaagctcgactggtggagctgtatttagcccaatcaggaaggtactgctggcgatgatcgaggctgcattttcagccataaacctcgaagtgcactgtggaactcatccaaggattggtgtcgtcgatgacatttcattccaccccttgaatcaagcggacacaatagaggatgctgctcagctggctaagctggtagcctctgacattggcaatggcttgcaaggtgtgtcctccgacaagatcttctataattagcaaatgatgatacgctatgtaaatgttttgattatgtatgcagttccagtgttcctatatgc

SEQ ID NO: 133302 - DNA, 275 bp, Zea mays
  unsure (1)..(275): unsure at all n locations
  Clone ID: MRT4577_53060C.1
gcggccttccttttttttttttttttttttttgtataaacagcgggcgtgtattaatggtggggggattgggttatttaatctatataaagtatgcgtggattatttaatttttggggggaaacaaacaggctctaaaatagcatttaatacatatttggctacaccttgggcnaacagatgggagaggaagcggagggccctggcacaaaatctgggccaactgaaattcagtccacggggcggcgtttcagatccatgttatagggtggaaac

SEQ ID NO: 133303 - DNA, 182 bp, Zea mays
  Clone ID: MRT4577_53061C.1
aaacactagtacggaacgaaaaacatcgaggctattgaccagactatacccacattaccgcttgacatgtgaactgtgaaaggcaaaagtgccgcagtaatattgcgccttctccatgaggttcagctctcggatgctcaaaaagaaagcaactcgaccaacaatggccactgaaaaagtta

SEQ ID NO: 133304 - DNA, 103 bp, Zea mays
  Clone ID: MRT4577_53062C.1
acttggactatcagttgcctatcacagttcttatttctaacaggcaactgataggctgcagtctcctggtcaatgcaatgcgctaatcctgaattgcggattt

SEQ ID NO: 133305 - DNA, 3440 bp, Zea mays
  Clone ID: MRT4577_53063C.1
ttcaccaccgccgacacgttgctcccccattccttccctccccactccccagtccccagccctgctcgctcccgcgggctaataatatctcacgccgctcctcctcctcggcctcagctgccgccactccccacactcgcttcccgtgggctgcgcgggtgaaggagcgcgcgcgtgcgtacgtacgtgcaggtggttggactcggatctgctgctgggtggggcgcgggatggcgtcgttcgctgtgtccggcgcgaggctcggggtcgtgcggcctggcggctcggcgcgatctggcggggagcggaggagtgcggtggacttgccgtcggtgctcttcaggaggaaggacgccttctctcgcaccgttctgagctgcgctggtgctcctggaaaggtgctggtgcctggaggtggcagtgatgacttgctttcctccgcagagccggtcgtggacactcaacctgaagaactacagatacctgaagcagaactgactgtggagaagacatcctcctcaccaactcaaacaacatcagcagtggctgaagcaagctcaggagttgaggctgaggagaggcctgagctctcagaagtgattggagttggaggtactggtggaaccaaaattgatggtgcaggcatcaaagccaaagcaccactcgtggaggagaaaccacgagttatcccaccaccaggagatggccaacgaatatatgagattgacccaatgttggaagggtttcggggtcaccttgactaccgatacagtgaatataagagattacgtgcggctattgatcaacatgaaggtggtttggatgcattttcacgcggttacgaaaagcttggatttactcgcagcgctgaaggtatcacttacagagaatgggctcctggagcatactctgcagcattagtaggtgacttcaacaactggaacccaaatgctgatgctatggccagaaatgagtacggcgtttgggagattttcctgcctaacaatgctgatggttcccctgctattcctcatggctcacgtgtaaagatacggatggacacaccatctggtgttaaggattccattcctgcctggatcaagttttctgtgcaggctccaggtgaaataccatacaacggtatatattatgacccacctgaagaggagaaatatgtattcaaacaccctcaacctaagcggcccaagtcactgcggatatatgaatcacatgttggaatgagtagcccggaaccaaagataaatacatatgctaacttcagagatgaggtgcttccaagaattaaaaagcttggatacaatgcagtacagataatggcaatccaggaacactcttattatgcaagctttgggtaccatgttacgaatttttttgccccaagtagccgttttgggactccagaggacctaaaatctcttattgataaagcgcatgagcttggcttgctagtgcttatggatattgttcatagtcattcatcaaataataccttggatggtttgaatggtttcgatggcaccgatacacattacttccatggtggtccacgaggccatcattggatgtgggattctcgcctattcaattatgggagttgggaagttttgagatttctattgtcaaatgcgagatggtggcttgaagaatataaatttgatgggtttcgatttgatggggtgacctccatgatgtatactcaccatggattacaagtgacattcactgggaactatggcgagtattttggatttgccactgatgttgatgcagtagtttacctaatgctggtaaacgatcttattcgtgggctttatccagaagctgtatccattggcgaagatgtcagcggaatgcctacattttgtatccctgtccaagatggtggtgttggttttgattatcgtcttcatatggctgtcccagacaaatggattgaacttctgaagcaaagtgacgaatattgggaaatgggtgacatcgtgcacaccttaacaaatagaaggtggcttgaaaagtgtgtcacttattgtgaaagtcatgatcaagctcttgttggtgacaagacaattgcattctggttgatggataaggatatgtatgatttcatggctctggacaggccttcaacgcctcgcatcgatcgtgggatagcattacataaaatgattaggcttgtcacaatgggtttaggaggtgaaggctatctaaatttcatgggaaatgagtttgggcatcctgaatggatagattttccaagaggtcctcaaagtcttccaaatggctccgtcattcctgggaataacaatagctttgataaatgccgccgtagatttgaccttggagatgcagattatcttagatatcgtggtatgcaagagtttgaccaggcaatgcagcaccttgagggaaaatatgaattcatgacatctgatcactcatatgtatcacggaagcatgaggaggataaggtgatcatctttgagagaggagatttggtcttcgtgttcaacttccactggagcaatagctattttgactatcgcgttggttgtttcaagcctgggaagtacaagatcgttttagattctgacgatggccttttcggtggatttagtcggcttgatcatgatgccgagtacttcactgctgactggccgcatgacaacaggccgtgttctttctcggtctatgcacccagcagaacagccgtcgtatatgcacctgcaggtgcagaggacgaatagggcacaacagcggttgttggggaagaacttcagagggatgtgctgctggtggactgacaccactgccacgcgcgatgctgccagatgttgccctcgagaccacgtggcaggacgatcagctattcaggtggataggttagcttaccgatgagctctcgctttcgagtgactggtgaaggaaatggacctcgcacaccgcattttcgctatgcattctgaaaatgtaccgtgtggttttgtacatatggcatcagtaggcattatatcattcatctcgctgaaccaaccatttacgctatactccgtactgcttgtgcaaatctctctctccgcatgataataggccatattcattctcggtttatacaccaagcagaacatgtgtcgtctatgctccagtggagtgatagcggggtactcgttgctgcgcggcatgtgtggggctgtcgatgtgaggaaaaaccttcttccaaaaccggcagatgcatgcatgcatgctacaataaggttctgatactttaatcgatgctggaaagcccatgcatctcgctgcgttgtcctctctatatatttaagaccttcaaggtgtcaattaaacatagagttttcgtttttcgctttcctaaaaaaaaaaaactctatgtttaattgactaataaatatattttttatata

SEQ ID NO: 133306 - DNA, 3504 bp, Zea mays
  unsure (1)..(3504): unsure at all n locations
  Clone ID: MRT4577_53064C.1
accgccccctacaattctctataggtatcccgcgccccacctaaatttagccctgcagtcgcccagagcagacccggatttcgctcttgcggtcgctggggttttagcattggctgatcagttcgatccgatccggctgcgaaggcgagatggcgttcgcggtttctggggcggtgctcggtggggccgtaagggctccccgactcaccggcggcggggagggtagtctagtcttccggcacaccggcctcttcttaactcggggtgctcgagttggatgttcggggacgcacggggccatgcgcgcggcggccgcggccaggaaggcggtcatggttcctgagggcgagaatgatggcctcgcatcaagggctgactcggctcaattccagtcggatgaactggaggtaccagacatttctgaagagacaacgtgcggtgctggtgtggctgatgctcaagccttgaacagagttcgagtggtccccccaccaagcgatggacaaaaaatattccagattgaccccatgttgcaaggctataagtaccatcttgagtatcggtacagcctctatagaagaatccgttcagacattgatgaacatgaaggaggcttggaagccttctcccgtagttatgagaagtttggatttaatcgcagcgcggaaggtatcacatatcgagaatgggctcctggagcattttctgcagcattggtgggtgacttcaacaactgggatccaaatgcagatcgtatgagcaaaaatgagtttggtgtttgggaaatttttctgcctaacaatgcagatggtacatcacctattcctcatggatctcgtgtaaaggtgagaatggatactccatcagggataaaggattcaattccagcctggatcaagtactcagtgcaggccccaggagaaataccatatgatgggatttattatgatcctcctgaagaggtaaagtatgtgttcaggcatgcgcaacctaaacgaccaaaatcattgcggatatatgaaacacatgtcggaatgagtagcccggaaccgaagataaacacatatgtaaactttagggatgaagtcctcccaagaataaaaaaacttggatacaatgcagtgcaaataatggcaatccaagagcactcatattatggaagctttggataccatgtaactaatttttttgcgccaagtagtcgttttggtaccccagaagatttgaagtctttgattgatagagcacatgagcttggtttgctagttctcatggatgtggttcatagtcatgcgtcaagtaatactctggatgggttgaatggttttgatggtacagatacacattactttcacagtggtccacgtggccatcactggatgtgggattctcgcctatttaactatgggaactgggaagttttaagatttcttctctccaatgctagatggtggctcgaggaatataagtttgatggtttccgttttgatggtgtgacctccatgatgtacactcaccacggattacaagtaacatttacggggaacttcaatgagtattttggctttgccaccgatgtagatgcagtggtttacttgatgctggtaaatgatctaattcatggactttatcctgaggctgtaaccattggtgaagatgttagtggaatgcctacatttgcccttcctgttcacgatggtggggtaggttttgactatcggatgcatatggctgtggctgacaaatggattgaccttctcaagcaaagtgatgaaacttggaagatgggtgatattgtgcacacactgacaaataggaggtggttagagaagtgtgtaacttatgctgaaagtcatgatcaagcattagtcggcgacaagactattgcgttttggttgatggacaaggatatgtatgatttcatggccctcgatagaccttcaactcctaccattgatcgtgggatagcattacataagatgattagacttatcacaatgggtttaggaggagagggctatcttaatttcatgggaaatgagtttggacatcctgaatggatagattttccaagaggtccgcaaagacttccaagtggtaagtttattccagggaataacaacagttatgacaaatgtcgtcgaagatttgacctgggtgatgcagactatcttaggtatcatggtatgcaagagtttgatcaggcaatgcaacatcttgagcaaaaatatgaattcatgacatctgatcaccagtatatttcccggaaacatgaggaggataaggtgattgtgttcgaaaagggagatttggtatttgtgttcaacttccactgcaacaacagctattttgactaccgtattggttgtcgaaagcctggggtgtataaggtggtcttggactccgacgctggactatttggtggatttagcaggatccatcacgcagccgagcacttcaccgccgactgttcgcatgataataggccatattcgttctcggtttatacaccaagcagaacatgtgtcgtctatgctccagtggagtgatagcggggtactcgttgctgcgcggcatgtgtggggctgtcgatgtgaggaaaaaccttcttccaaaaccggcagatgcatgcatgcatgctacaataaggttctgatactttaatcgatgctggaaagcccatgcatctcgctgcgttgtcctctctatatatttaagaccttcaaggtgtcaattaaacatagagttttcgtttttcgctttcctaatgctagatggctgattgtttgcaacaccactgccacgcgcgatgctgccagatgttgccctcgagaccacgtggcaggacgatcagctattcaggtgggtaggcttgcttgccgatgaggcagcgctctcgagtgactgtgctgcctgctctgcttacttttaaaatgcctcccctcccgattaccgactcactcagattcagacacgctaagcactacctttccagtgtccctgaagacactactcccccgtcncagcttgccgttgcaggtatacctcggcttgcctgccttagatgttaaccctacaacgatagacatggatacggggttttactaatgcttggatgcatgcattatcgtatcctcgcctcggagacgatcacgcgtgcatttggtcacaccaactggtggcagggaatgtacactgagattgctcaagagttactcctactcgacttgttggatctcacctaacgcttttcaagtttttatgatacttcgctgttggtcttggccttgggccagtccggagccgctctcctgctcacatcacatgtacgtggaatgatgttgtctcgggtcatggcatacagcttggttggttttatttcctccatcgatgcccaggaagcttgtgctatcattaccataagcagctaatagtatgagttgatgagtgacaagtgacacctgcactaagataccccgcgtactctgcgttgttaccactgct

SEQ ID NO: 133307 - DNA, 312 bp, Zea mays
  Clone ID: MRT4577_53065C.1
cttagattgacaagtgacgaccaaaccctatgccatggcttggcgcggcgccgccttccgatccattatcggcgacgtacgtgctcgcgccgcatcccagtcttccaccgacgcctcgcgcctccggtcgacagatccacttaccgacccctcgcgccggacgttggcggggatgtcggggtccccggctgcggccgcggtgaagctcaccgggcactctgcaacgagcgtgctggcgtgctgtgagctctcccagggccaaaatgggaaggatgggtgatgaggagatcagaccgaatgattcaatatcct

SEQ ID NO: 133308 - DNA, 484 bp, Zea mays
  Clone ID: MRT4577_53066C.1
gggggaagccaattttttttatgggggattttaccgggtaaagggaagaggggggggaagtttttatacatgaaaaaggggccaaggggaaaataaaaaaaacggccaaaattttttttttttaaaaaaaactttttgtttggtggccaacagaacaaaaaacaacccaggggtccgggctcactttttttttttccccccttttgggttttttgaactgccaccgggatggggggccggctcctggttttttggccttccgggagggttgggaacaagctttggtactgggaaaaaaaactggtttttggttttaaaagcaggattgacgggggagccctctttttttttaaggtgaaccctgaccctccccaactggaaaaaaacccgggggtgccccttatccaaattggggggggggggggttttgaggggggaaaagcaataaacgatttttatacagggggggccccggcaggccttg

SEQ ID NO: 133309 - DNA, 345 bp, Zea mays
  Clone ID: MRT4577_53067C.1
atatagcaacctcatttccattatagcataacggaaatacaagagttattatagcataacggaaatacaagagttattatagtacagtttgattatgctgtaactataacctgtgacacttcacaggttttatttacacttggtctgtgttgtaacttgtggcatcctacccagaaaaaactgaacgaaacaatattcctacatgacacaggtaatggcaaaattagcaaaatgtgactccatcttccgtagaacgcttcctcttggcacttgtagtccttcgctcttgaatctcataagtattggcatagctgtaagaaggggggtattgagatctccatgata

SEQ ID NO: 133310 - DNA, 476 bp, Zea mays
  Clone ID: MRT4577_53068C.1
acttcttgtaatgttctgtaaccttattgggggcgggacaaaaaaagccgcccccaaaaaagaaaaaaaaatcccccccaccccaaaaccacaccccaacccccacccccccgggggggggggcccacccacccccccccccccaccacccaacaccccccccccccccacccctcgggggccacccccccggcccgcgcgctcggagtgtcggtctggatgggaaggcttatgccaaaaactttaagggggggggcatcccgcctgccaccccccagaaccacccctttggcggacactcccctaggagcgggcccacttgagtgggtaaaggtggcggggccccccaataccgggggctgtagcaggggccccctcaaattggtaggcaccctcaggcaggcggggcccccccccccgcccccctttctgggttccgaatccactaactctctgaaggaggggggggggggggt

SEQ ID NO: 133311 - DNA, 622 bp, Zea mays
  Clone ID: MRT4577_53069C.1
ccggccgggacacacacgctcatctgtcacataaacaatggcacactaacaaataccgtcaccggcaataatggactcacagatcctgcattgagctcgtcacggggatgctatatacactattcgtggatgcgaatgtgcaccacccactgctcaccttcacaggtggttaaggaatccaagcctgaccacgtgatcctcacccagaacgttgactccatatacgtacctgagaaagcaaataataggaagatgattacttctccattacactgaatgaagtcccaatcgtatgctgaacactcgacacgaagggcccgctcaagtacgccctatgcatccgctttgctgacgagactggtgaataccgcagcttccatgatatgatacccgacgatgtcaaagctgtcatccacttataaaaacacaatcaatgtctaatctccatctgtggatgaactatatttcaaatgagctcatctggagcacgtgttatcaagacaattattgtctttgaatattttatgggaccaaaccacgcaagatataagttatgctacatgaacatataatgccttgcagtgctgacttgatatttttacataaactaaatacgttattt

SEQ ID NO: 133312 - DNA, 2200 bp, Zea mays
  Clone ID: MRT4577_5306C.1
atttttgtgtagtagtgtagtggtataggagggtatgcgcgagagagaggttgcgggttcgaatctcactatttacaaaacatatataagtttgattcaaaataatagtgaaaaatgatagggcaacgggtaaggtaataggtgagttggagagttgttcctagaattttaaaaaaaatttaaaagagagatcgaatcagatatcgcccactactcaggactaaagcagtagtgtactcgtacaattgagccgcaagaaaagcatcgcatccatcgtcttctccatcagtccatcccgattcccgagtaccattcgattctatattccgccattgttgatcggctcgctcgccttccttggttcatcactagtaacggcaggaaaggagccgagccattccaatccaagattgattcagtgctggccatggagaaggagactccgccgccgctgcatacggaccaggagactagtgtttcatccgagcaacaacgtccacggccgcatctctccatcgacatcccggcagcatcaagcctgccggcagatcacctgctcccgatggctacggcgacgcaggccggcaccagcatcaccccgccttccaccaggagggggcaacagacaagcagcaacatcctcagcacgcccgctccttcctccagctctagcaagccaagcagcaggccgcctctgcgctcgccgtccttcatgctgaggcagacggtgaagagcctgctgccgttggggagcttcaagtcgtcggccgtcaagagctacgaggcctccatctccaagctgttcggcgccagcgccaccaaggtgatggccaggacgccgtcgctgccgctggaccatgctctgtcgtcgtcgccacatccaccaccagttcagcagaaatcagccgcgctccaccacatgtgccgctcgcagtcgctccccacgaccaccaacatgaagaaggcgaagctgctgaacgcggccaacgccaagagctttaagcggatggactcgctcggcggcacgttccgcgtcgtgccttccacgcccagaacccccgccaccgccgtccccgacgacatagcccctgctccaccaggcggcccaggggtcgacggcggcgaggacataccggaggaggaggccgtgtgccggatctgcatggcggagctgtcggagggcagcgacaccctcatcaagctggagtgcgcgtgcaagggcgagctggcgctggcgcacacggactgcgccgtcaagtggttcagcatcaagggcacccggacctgcgaggtgtgcaagcaggacgtgcagaacctcccggtgaccctgctgcgggttcagagcgtgcagcggcgggacctcctgaatcgcggcggcgccagcaacacgcccagatacgaccggtacagaatgtggcacgggacgcctatccttgtgatcataagcatcctggcctacttctgcttcttggaagaactactggtggcccatgacggcattgttgcgctggctatatcgctgcccttctcatgtatcctgggcctcttctcgtccttgaccaccacaagcatggtggcaagaagatacgtatggatctacgccgcggctcagttcctcttggtcgtcttcttcacccatctcttctacagatacctccatttgcaggccgtgatctccatcatcctggcgaccttcgccggcttcggcgtgggcatgaccggcaactccatcgccatcgagatactgcggtggagggcgaggcgggtggcgcctcctacccagcaggcccgccgtcgtcgtcaccgcaggccgcgtgcacctcaacatcaggctcctgatctgccggcgtctggttctgctgatcagacttccagccagccttcagctgcagacatgggaatgggaattggagcgggacagcaccacgtcatggccaccgccgccggcgatgttgagaacccacccgtccctcaggcatagaacgtcgttactgtggagcaggagcagtttgtagtttgtattttgtagtttacctgaaagggaccttgttacactagtatacatgatactatgatagtacacatggagtctgaaccttgtttctctacgcatgccttgtgaaagagatcatcatttggcgctgtattttactgtatgtacattctcccaaaagccgtttcttacgtaaaggagtttgag

SEQ ID NO: 133313 - DNA, 276 bp, Zea mays
  Clone ID: MRT4577_53070C.1
agcgaggaggagagccggacggcgggcacacgcaaggtggctgatctgagcgtactcggtcaggctcgtgtactgtactcaatccaattcaacaacgccactgatgacaaggcgcgcgagccagtcacaatgcgtcccgtcgaggaggctgctctagtgctgcacgggaggcgagtgccactggcgcgcgaaccccaacgagaacgtgctccggcggcgagaccgaggtcgtcgcgcaagaccgggtcggcgaggcgagatgagccaagaggcgag

SEQ ID NO: 133314 - DNA, 500 bp, Zea mays
  Clone ID: MRT4577_53071C.1
gacctatgagactttggatgccatagagattcaaattgttcttgaggggaaaaagttggaagtgagatgataactctcttgatatggatgcttgctggttttattgcaggaatataagtagcattgcagtagtctacttttacaacgctttcccctcattcttgatgtggtgtaattgcagggtgtgaaatgctttgtcaatcatttgtcacatttatccagtttgggttattctcattatgacacctattgcaaattagcatcccatggcaaatatattttgaaaaaataaagaactatcaggattgaaaacagctcttttgaggaatgtcaattagttattaagttgaaagtaattaatgattttatgtttggttactctactagatttgataaaaattgtgcctttagccttctatatacatcagtggaaacttaagatgcagtaattatgttccagattgaccatgaataaactattttttaatctaaatgtagag

SEQ ID NO: 133315 - DNA, 2013 bp, Zea mays
  Clone ID: MRT4577_53072C.1
cccaagcgttcgctccccgcttggtgtccgtcgtgtgggtgcgagtcttccatgggagtttggagggaggaagaaggaagaaagtgcggaggaaaggaggatccgaagtggtcggacccctgggtcgttttttttttttttttggttcagcagttttggagatatcgaattttaaagttaaccatactgctgtctaaaacagattcagtcagttatcttgtcagatgttttagaacttgtagatggcagaatttaattatctattgaatactgaagttgtagagtattttgtgtagatactcctagagtatttgtttgatatcaccgctgttttaattttaaagatacaaaattaacaaacagcgttgctgctgtatggcatgtggttcagggtgggagtctttccactgggtcttggtttcaagtgtaggagtgttttgttgattgatggcaaatgtttgtgaaatatttgtactaagttttatgcccactagcaggtggctacactccagatcatgtctagtacatttcttcttcttcgatgaaggcaagtgaatgtagcggtggttgcttccgttctgacctgttatttctatcgcctacactctaatattcagaagtatcagattctttcataattggactctatggtgatgctttacttgcttgcattatactgatgctcaatcatatattgatgatgattatgatttgagtatgactcatgagattaattcacacccctgaaggtaaatgaagtattatttgaggttggtattgtatctgaaggtaaatgaagtattatttgaggtttgtgttgtatctgaaggaagtgaagtttattgataaatgtagcatgccatatacattgcatgactcatttgcatatgaagttttgtcgtgacctatggtccgaccgtaccggtacaacttagcatcgtacgttgcccgagaaggggtacgatgcggcttcatacccttagaggtatgaaggcagaggacatatgcattgcattcatatgcattcattgaagtgatatttgcagatgatgtggttttatactcccagaggtatgaagatagagtacctacatattgcattcctatgcatacattgaagtgatatttgcaggtattgttgacgcagggaagtgttatagaacctattgtggttgttcgaggaaatgagatggtattggttatagtgggactactgagttctatatctacaagcatctctaatttttacattgtgacacaaagaattcctttaaagttaaggtcaagtcactcatagaaattcttgtgaagaaatgtggtttagacgctgtgaaggctgtgatgcctgaggagcatatgaaattgctcacgaatattaggaagattaatgagcgaaaaatgcgaaaggcaaaatcttctgaggatggggatgccatgtctatggcctcaggagctacaaggcaaagtaggtggaatcacacacaaatgttttcggactttggaagtgatgatgaatcagatggtcctttttctacccaacatactgctacttctcgatctcgtactgaatcaaaagcttcaactcggttgagtcggaggcgccaaggagataagaaactactagacaagttcattgaccattcaactggcgaccccctagatttacttgaccagaaaacggtgcggttggctctcaaatcagcagcagggaaaaagagggctgcacccgatgacgacgacgagaagttcgaggtggaccctgaaggccgtataatcgtgcgcgaagagcgggagaagtggaaaaaaaagccggcccctcgtgacgacgaggaggctgatggaaagagctctgtcagaagccagtccatcaagaagaggaagacatccggctctggctgggcctacactggtcacgagtacaccagcaagagggccagtggtgatctgaagaagaaagacagaggaaccttacgcgtactggccgctggaccgtaagcttctcaaaccgcagtc

SEQ ID NO: 133316 - DNA, 780 bp, Zea mays
  Clone ID: MRT4577_53073C.1
gtttcaactgggttcgaatcgatattgatcgaacttacaaatcagaaccgactatgtgtaaccgacccaaccgtccaacagactaattgttaccaaccgctggctttaatgtggtcgatattgtccgttgaccggtgcccaacccacgtcgtcacgtgttgctatcgaccgctgttggacccagcctcaagaatggaagcaagcagggccggctctggccctatgcaataggggcgaccaccggggcccacgttggagaggggcccaaattttcaagtatataggatgaattcgttgcctagaatcaactcttctggtgaaaaaaatgatatgtcttggtaatccaacaaaatacactgattaatatgatgtaatattcaaaaagcatgataattagctaggtgcctaaagcttttaattccggtgatcactaactatttttactttcatgtataattttgattttataatgttgctcagaagcatttgtcggatgcttagacaaaaaagagagaaaacaaaatgatcaggtgttcatgtttgttttgtttcatggctcttttagtttctactgtgtgcattattttaaacaaattatatatacatatatcattagtactattatccttttaatcatggggtagggttttttaaaaatatatatatcacaaatgacccatctgtgctgtttagttcgcctaggggcccctaaaatcgtagagccggcccctgaagcaatgggctttgcgagtaagctattacttcatggatctcgcactt

SEQ ID NO: 133317 - DNA, 454 bp, Zea mays
  Clone ID: MRT4577_53074C.1
cccacgcgtccgcgcatgcacccaggaactgccacacgcatgcaggaaatcgaccatggcacacatgcagcaaacggctagggaggccttgccgaggatgcacggacgggttgccggagggccggagggggctagtggcgcatagaggcgggctggccgcacctggccctggttccaagctacaagagcggaggacactacgagctgcccatacctgaactaggaaacgacgacgttgtcagcgccagattgctcggtgtcgaagtccccctggcaacgaacaggccgtgcccgcagaacccttcgcgtagatcctccactatctctctcccatgctggttgcaggcgtagcagcgactcccgaggttcggtgaagcacccaggtcggcaccgagacgaggacatgggcccacagcggcggccgtcagctttcttccccgcggcgatgtagatc

SEQ ID NO: 133318 - DNA, 212 bp, Zea mays
  unsure (1)..(212): unsure at all n locations
  Clone ID: MRT4577_53075C.1
cacgcgtccaataagctcaaatactgatctcatctttccattatggctaccgcaaatgctggcgcgccgaggatctttgatttccatctaaccactctcggnccttcacccctctgcactcacaccctctccaacgaccatcaaaacttatgcttccaaccaaacatattcacaaaaaattctaactactaaaatcacaacctacaatatac

SEQ ID NO: 133319 - DNA, 226 bp, Zea mays
  unsure (1)..(226): unsure at all n locations
  Clone ID: MRT4577_53076C.1
gggcgaattgggatcatcattggcggccgggaccgcaccacatacaagcatagagacaccnagcgtcaaacttgtcaagaagctagcaancaacncaagaactacaccataccgatgggctcgcgctagcgtcttcttcgtcgatgctgctctcctcttcgtcnntttggttgtggnancgatgnncgaggcnaagtacgctgttgccccaaccggcagatgcacc

SEQ ID NO: 133320 - DNA, 374 bp, Zea mays
  Clone ID: MRT4577_53077C.1
ttcttccaaccacctggtgcatttaattccttgtacccaaggtcatgaaccatgggtaagctaaaccaagtccaatggccctgaaaactcaggtaaaatgatgaataccaccatccttagccacctatgtgaatgttttttgatcaggggggcgaacttattgaaaaacaagcccatggtggttagataacccatcctgcgggtaaagttccctgatgctgacattgctgatcgcttaaatcagctaattcacagtaggacttactacaaatttactatgggtgagaagcaccagttgtgattggctcaaggaaaaacagtcctcacgaacttttaaaagacttcagtaagggacttttaaaaggaacgatcct

SEQ ID NO: 133321 - DNA, 387 bp, Zea mays
  Clone ID: MRT4577_53078C.1
aacaggaaaaaaatttggaacacacacttgggggaaaagggggggggactttaaaaaaaatttttttaattttaaaaccgggggggttttacatggggggaattacattttttaaaaggccgggtttactaaaaggggaaaattttttaaaaaaggggggggggggaaaccctttaaaggttaaaaaaaaacctaggtgggtctcctccaaaaagggaaacccccttctggcaaaagaaaaattgggggtctcctaaaaacctttgggggaaaaaaaagggtttaaaaccctttacccaacctttggtaggaagggcccaaccacttgaggaggcggccctgggggaaaattttttaaaaaccaatttttttagggggtcttagggg

SEQ ID NO: 133322 - DNA, 769 bp, Zea mays
  Clone ID: MRT4577_53079C.1
ccggccggccggccgggaacttccacacactttaacaaccaacctcaactcaactcaacttctacctttcacttcccatctctccaacaaaccatcaagatgcacttcactaccttcctcactaccgttgtcgccgctggcatggcttctgccactacctacaacgctgccgctgtcagcagcaacaagaacatcaacggctccgctctccaggcctccaagagcggcttcgctctcaagctcaagaaccaaggcgccgcctgcgacaggggcctcaaggagaaccaagtcacattcagcctcaacaaggacggcgagcttaacctttacaccttccagaactctcaggttgcttacgtcgaccgctccggtatgggccagggcaagctcggctacgccaccattgccgacaagggcctcgttatccccaagaacggcgagacaaagggctggaaggttgctgccaacggcgacctcactttcgatggcaagggtctcatcgcttgcccttacgacggttcttactccctctgggtcagtgctggtgtcaataaccccggtggcaacaaggactgccaggctgttactattcgcgccaagaaggatgacaaggccgttgcctgtcaatactccgtctaagagttagcccaacagtttcatgagttgacggacatactttgattcttactacattattctcattatcagttgaggggagcatcatgttctctacatttgtagaaatctaatttaccatctgattaatacc

SEQ ID NO: 133323 - DNA, 281 bp, Zea mays
  Clone ID: MRT4577_5307C.1
ccggccgggatccttaggatctagtagatcgtccctgccgcctcgcgcccgcccaaggtgtccacggatcgcgagatccgatggttgttttcggctcccagcggacggatccgtgagatccgtcggtgggaatggagctgctcagggcttttcgcctgtcacgttccggtgcccagacgtggagcggcgcgggcctgcaccgactacttcaaggcgccttgctgacaggaagaccgcaaagttccagaagaacatcaccaggaggggttctgtgcctgaag

SEQ ID NO: 133324 - DNA, 2442 bp, Zea mays
  Clone ID: MRT4577_53080C.1
ggccacgaccccggcgcttgggcgtcgtcgggctgttggtggagaaggcgaggtactgtccacgagatgaacagtagccgcgatgaacactaatgggatatgggaagcacgggcaagataattgcctgcttgctcctttctttaaccaaaggggtacaatatataggctgtcatagcagcccctaacgaactaaccaactctatctacgagtttcaaactaatgcttatgcatctgaacaaactaattgatacttatgcatctaaacaaactaattgatacttatgcatctaaacaaactaagaactaactgatgcttatccatctaaacaaactacctgattttttagggcttttgggcgctgccagtcataacaccccccccccccccaaaaaaaaaattataatcacgcaacacattctctgcactagatatctgggtggtggtgaaaatactttacccatgtgccttaaaaagattctcattggtctttttatattttataaactttggttattcctatggttattttttgcctttcaatggttattattagttttctgcagacactgcatatcacatgttgaagatttggtttgtattttcagtgttaagatatggttagggaatattgaagggttaaatcaatgtgcaattggagaagaagtgccatttgtgttagttgctgaggttgccgctaatttatcagctccagtgtcgtcaatctcattgggcatacctgcccggtctcaacatgaggttagtttggcaattggaagagtatccgggttactagaaatatggatatggaatgcatctaccaacaaaattgagagttccagtgcatggcatgcacatgatcaagtggtttacgatgggctatcgatggcaattgtttattccgcgcctgtcgggacaattctacacgttgttggatatctcacgaaaaccaccttgaagaattttttttgcattcagaattttcagagctaagggagtcagaagatgtaagagtagtagacacttaaatgttagttattcttgatgtccaattattttcctccatatggttgggttttcaatatgcatgcagctatcaaaagtttctgatcgatgctatggtcttacgctatcacctggagaagagataattgctgtggtccgcagtttggatctgaaccttttgaaccagatgtatcaagtcaggacacaaaaggcggtggtcgagttcatttggatcggtggccaatttgttggtattccactggacgggagtatcgatatttgcagtccgcagtctgcggacttatcctcaagtaaccttatgtggtggggatccaacatcttgtggtcgctgaagaaatacgaaaatgtcgaaaagaggcttgtgttgtgggacgttgtagctgcgctgcaagagctgaagaaaaccgcgcccgcctttctggagactctagtgcacagttgggcctcagctttatttgcgggcgactcacagtgtgtttctatcactgcccagtcatcacgctcgatgcatgacatgatgccccatgtcagctcgcggaagctgcacttactgaacataatctgcagaaaagtgatgctcggcaatcatgcgcggcatggtcctggtgctggaaacaacagtaatgatggaacaactgatttctggagcactcttttggtagcgagtgaaacggagctgcgagagaggctggtgggtttcacctttgccgcggtcgtgaaacggacagcgtgtctgttcaacggcacctccaccgcaaattgctggttccctgtcggcgtcgcccagatggattcttgggtatccatgaactacgaaaaggtgcacggtcagctgcagtcgatcagatcgaagatcaaagagctaggaagcaggatcgacggatactccgacgtagaaagctgcccctactgctcttcgccggtccgtttcgagtcgcctgacgtggccatctgcggagaaaggcacacgctgtcgcggtgcaggacatccatgaccctgtgctccgtcgcgcagccagtgtggcactgctcgtgctgcgggggcacggtcgacaagctgctgccggagtcgttcttcaccatgcctttggacgccgtccgtgacgacaaaggatcgctcgatctgtcggcagcctccgccccgctttgccccttctgcggcgtcctgctgcagaggtcgatgccggcgttcctgctctccacctcgccggtatagtcttcggatgcccccaggtgttacatgcagtagcaatgcaatgggaatatcgtagtggagccaactaccaagtttgttgtagctgatgctgtatggctgcagagtggcagtgccgtcattggggctcgaaatgtttgtgataggttttgtgacttctttctgcttagcccctctaatatatctcgagatacctatttttt

SEQ ID NO: 133325 - DNA, 2420 bp, Zea mays
  Clone ID: MRT4577_53081C.1
caggggtcctggacagagaaaaataaagccagcaagagttggtggttttatttatgacggcaatgaagttgatttagatgcttcaaaggatgcagacttctcgatggaaccatgctcaaaatcaaagaagaaatctttgaaaaagactgtaaaacccagggatgaagtggttgctgtaaatggacgaaacagcacagggaatgttaaagcatcattgtcctccaatgaacaaaacaaatctcttcctcttatcacggcaaaacagtatgcctgtcgtgctgcacatttgtcttcccttgtagtttcatggtctccagttgtgtcattaagtgatagaacttcttgtttattgaggcattggtgcattcttgctgttggctctaaatctggaaatatttctttttggaaactatataagccagaatattacacaatagatgctggagtggttaccagtgatccgatgctcatcggggtttggcatgctcatgaatcatgggtcaatgccataacttggcaagttctttctgcgggctcttcaaaatcctcgttgcttttagctactggatgctcagatggaagtgttaagatatggttagggaatattgaagggttaaatcaatgtgcaattggagaagaagtgccatttgtgttagttgctgaggttgccgctaatttatcagctccagtgtcgtcaatctcattgggcatacctgcccggtctcaacatgaggttagtttggcaattggaagagtatccgggttactagaaatatggatatggaatgcatctaccaacaaaattgagagttccagtgcatggcatgcacatgatcaagtggtgacaggtttacgatgggctatcgatggcaattgtttattcagctgcagtcaggacaattctacacgttgttggatatctcacgaaaaccaccttgaagaattttttttgcattcagaattttcagagctaagggagtcagaagatctatcaaaagtttctgatcgatgctatggtcttacgctatcacctggagaagagataattgctgtggtccgcagtttggatctgaaccttttgaaccagatgtatcaagtcaggacacaaaaggcggtggttgagttcatttggattggtggccaatttgttggtattccactggacgggagcattgatatttgcagttcacagtctacagacttatcctcaagtaatctcatgtggtggggatccaacattttgtggtcgctgaagaaatacgaaaatgtcgaaaagaggcttgtgttatgggacgttgtagctgtgctgcaagagctgaagaaaaccgcgcccgcctttctggagactctagtgcacagttgggcctcagctttatttgcgggcgactcacagtgtgtttctatcgatgcccagtcatcacgctcgatgcatgacatgatgccccatgtcagctcgcggaagctgcacttactgaacataatctgcagaaaagtgatgctcggcaatcatgcgcggcatggtcctggtgctggaaacaacagcaatgatgaaacaactgatttctggagcactcttttggtagcgagtgaaacggagctgcgagagaggctggtgggtttcacctttgccgcggtcgtgaaacggacagcgtgtctgttcaacggcacctccaccgcaaattgctggttccctgtcggcgtcgcccagatggattcttgggtatccatgaactacgaaaaggtgcacggtcagctgcagtcgatcagatcgaagatcaaagagctaggaagcaggatcgacggatactctgacgtagaaagctgcccctactgctcttcgccggtccatttcgagtcgcctgacgtagccatctgtggggaaaggcacacactgccgcggtgcagggcgtccatgatcctgtgctccgttgcgcagcctttgtggcactgcttgtgctgcgggggcacggtcaacaagctgctgccggagtcgttcttcaccatgcctttggacaccatgcatgacgacaaaggatcgctcgatctgtcggcagcctccgccccgctttgccccttctgcggcgtcctgctgcagaggtcgatgccggcgttcctgctctccacctcgccggtatagtcttcggatgcccccaggtgttacatgcagtagcaatgcaataggaatatcgtagtggagccaactaccaagtttgttgtagctgatgctgtatggctgcagagtggcagtgccatgctcattggggctcgaaatgtttgtgataggttttgtgacttcgttctgcttagcccctctaatatatctcgagatacctattttttatttccgtctctgccactgcaaaaaaaaaaaaaaaaaaaaaaaaaaaaaaaaaaaggcgccgcccgggaatcggacggta

SEQ ID NO: 133326 - DNA, 740 bp, Zea mays
  Clone ID: MRT4577_53082C.1
actcgaagaaagggaactcccaggaaacctaatctataagagccgtgttcgtgctgtggatttcaaagtgaagttcttaggtggaggcgagttctgttctattctatgacaatcctcaaactccattcatcgattgctgttccattgaagggaaggaactctatgttggaagtcttcccaagccaagaaacaagatctgcgtctctattactcgagctgtgtcaatgacataaacacgccgtagtagggtgtgccgttcacccatctcagacgccataggttctctattcttaggatctgcctggcctggccactcaaagaaaaagtacaatctgctgggttttgacatcagtgaggataagtcacgtacgagttcagggcacatgatctttcgaagtgccataggaattctaagaataagggatggtgccaacgagaaagagacccagctattgtactggtagagaagtgactcgactggaaaggcagctaccttggttcttcgaataggtgtgggtaaactgctcgcattttcctatgtgggtggcgaaagattcttgctagatgtggatcttaactcataccgctgttgtggcttgaagggaaaaccaattcatccttatgctttttgcgctagataagaacaaggacttccctttaagtctttccgtctttctacctgacctgcaaaggactacatagaggctggcaagccatagatctcattggggtctaagtaa

SEQ ID NO: 133327 - DNA, 1899 bp, Zea mays
  Clone ID: MRT4577_53083C.1
atggctcctcaataccaagctgcgaccttgattgcctctccatcttatccaagtgccattgcttggtcaagcgacaatcttgtggctgttgcatctggtcatattgtaactattctgaatccatctgcgcttgatggaccccgtggattggttggactttgtcgcagtgacccttttcctataggactggttaatagagaagcggcacaacaatcaagtgaagcgcaactcaagaggccaaggcgggcacaatactgctcaatggaccccgtggattggttggactttgtcgcagtgacccttttcctatatgactggttaatagagaagtgcgagatggtgtggatggaccttcattctggttggcacgactacttcaagagccgtcttcacggcctgcaaggcgagagctttccatacagacacatgaagcgcgacctggatgtcgcggatgatttaggacgtcacagcctcacagggcgtggcgcatgtcgtccacactcctacattggtgcactggtgccacgcctggaatatctggtcctaacaaccaacgtatcagggcccctcagatctcttggagccatgtttattgtccacttccttagcgcgtgtttgctggctgtttgcactatggatggtcatgtgaagctttacaggtcaccaatttgggagctatgtgatgaatgggttgagaagaatacaaatactggggagacagaggttttaggatctgcttatgaattgcaagaatctctttatttcaggtgtcctggacagagaaaactaaagcgatcaagagttgatggttttatttatgacgtcaatgaagttgatttagatgcatcaaaggatgcagacttctcgatcgaaccatgttctaaatcaaagaagaaatatttgaaaaagactgtaaaacccaggcatgaagtagttgctgtaaatgaacgaaacaacacaggaaatattaaaggatcattgtcctccaatggagaaaacaaatcccttcctcttatcacggcaaaacagtatgcttgtcgtgctgcacatttgtcttcccttgtagtttcatggtctccagttgtgtcatcaagtgataaaacatcttgtttattgaggcattggtgcattattgctgttggctctaaatccggaaatctttctttttggaaactacctaagccagaatattacacaatagatgctggcgtggttaccagtgatccaatgctcatcggggttttgcaagctcacaaatcatgtgtcagtgtcatagcttggcaagttctttctgcgggctcttcaaaatcctcgttgcttttagctactggatgctcagatggaagtgttaagatatggttagggaatattgaagggttaaatcaatgtgcaagtggagaagtgccatttgcgttagttgctgtggtcgccactgatttatcatctccagtgtcatcaatctcattagccatacctgcccagtctcaacacgaggtcagtttggcaattggaagagtatctgggtcactagaaatatggatatggaatgcatctagcaacaaaattgagattttcagtgcatggcatgcacatgatcaagtggtaacaggtttacaatgggctatggatggctattgtttattcagctgcagtcaggacaattctgcacgttgttggatctctcacgaaaaccaccttgaagaaatttttatgcattcaaattttccagagctaagggagtcagcagacctatcagaactctctgatcgatgctatggtcttacactagcacctggagaacagatgattgctgtggtccgcagtttggatctgaaccttctgaaccagatgtatcaagtcaggacacaaaaggcgggtggttgagttcattttggattg

SEQ ID NO: 133328 - DNA, 467 bp, Zea mays
  Clone ID: MRT4577_53084C.1
tccttgcccgtactgctctctctctctattcgttcccggcctcaccccctgccgctcctctcgcttgtggttcgccgccgccgccattccttgcctcagctcagcatctgtctgccccacgcccagctccccgtgctgcttcactgaggaacccgccacagccagcacgccaggctcctcctccagttcctgtttgagatgtgtggcgtctccatgttcggtcgaattgggcccaccattgctcaaggtatggcgtttggcactgtcagtgccatggctcacagggctgttgattctgtattaggtccccggcccctccactgtgagactcttgccacagaagcttctgctgctgcctctgctgctccagcgatcaatcctgatgcttgcctcttcccattctacggcttcccaagattgtctgaacaactatggccccgaggatcagcaggtgccagttctaccta

SEQ ID NO: 133329 - DNA, 556 bp, Zea mays
  Clone ID: MRT4577_53085C.1
ggtacacgggcccctttcgagtttttttttttttttttttttttttttttttttttttttttttttttttttttttttttttttttttttttttttggacaaacccccctcgcaaaaattttcgatggaaaagaaaacggggcccaataaaacaaaaaaaatacggaaaactacttttttaacagttttactaggggcccctttttttcctagggcaaccaaaaaaccctaatttttcattagaaaccgtttttttttctttttgggggggggaacaaaaacataaaacccctgtttcctcccccccaaaaaaaacccctggggggctttggaaaaaaaaaaaccagggccttggactatttgcacccaaaaaacagtggtttaacccttattttggacagcctgaatcctttggggcaactgaaatagggatcccttttgggggtttggtttttcccccaagtttttgggcgcccgacccatccgtttaagctttggggaaatgtactggaggcgctttttgacgttgccctggccccccggggggtcctgtttg

SEQ ID NO: 133330 - DNA, 173 bp, Zea mays
  Clone ID: MRT4577_53086C.1
cttagagcctccccatcaaccgtgggcaggcgctgggctctagtgcccgaccccaactccttgctggacagaatgtagaaagccatacactgtaacactgctgcacctcgctctcacctcctgcgctcatgagccttccccagatttgtgaactgtgagactctttaggaatc

SEQ ID NO: 133331 - DNA, 1196 bp, Zea mays
  Clone ID: MRT4577_53087C.1
cgctgtccccatgtcaggaggccctgctcttcttcggtcggttttaaggcctgtttggagaggagcctacggcgccgcagcccgccacacctgcggcggccgatttgggcgccacacccgcggcagccggagtgtggcgcggtgtggcgcccgagccagcccaccaaacaggcccttagatagccaaaacgcagtacacacagcgctgcttaccttgacgacgaccacttgtgttggagcagcagtcatctacagccaaaactcttcacttccttcgccattgccgtgttaccagcccagccagcgacgtgggcgtgccgcgacagggttttttccccctgggaaacgttgtgttctggcagatgccacaaaaggtaccttgggctcggcaaatcccttcaaccctgagcctctttcattcatccacgcaagtgacaaggccaagaaccactccagctcaatgatcctctagcatgcttatacttatggcaaaaaatgtaccggactatcgtgttcgacaaccatcacattttttttggagatgacatttcaaaaagaccaaaaactatgatctctcatgatccatctgctactctttgggtatcaatgcctcatcagcttatcgtttccttgcaccttccgtgcagctctctgcccacagcacgccttaaccagttgctaataagagagaagacagaaaaatatctcagacatcagaaggattggacttgaagtaacttggcatagaaacatcagttgcctactaatctatataagtagctaaaaacatcttgccgacttagattctgttctttagttcagatatgccacatgcccacaggacaacacacactacaaacagtgtcacggtgcccaaacaaactgctaaatcatgcccatttcctggtggaaatcctggtatcgcgctattgctgtgtttaccaacaaaattagcatggctttatagtatatctagcagcgacacggttttagtgcagcggctggtagccaattttgtctatctatcacatgaacacttgtgttaggaaaaagaaagtagagcattgtatgtcattattggcttattgcattatacaacaatgaatgactaggtgatcatatttttttggcaacataaataaatggtaaatttattaattctcgcataaaaataatttatttcattggtttaaatg

SEQ ID NO: 133332 - DNA, 567 bp, Zea mays
  Clone ID: MRT4577_53088C.1
gcgctctagacggccggttccccgatcactcgctgcaccaccacatttgacgcaccactgaatcaccaagagaaaacaagaacccctccgcctccacatgtttttgcctcaacggcgcctacctggccaggcgcccggggctcaccaccacatccacaaggagcacgagaacggcggccaggaacaccccgaggaaaaggaacccgcacaggaacgggaggatcaccagaatgacgccaccccgtccactggagtgctggaggagagaccgagacggcatcaggatacagctgcaacaggctggagggagtcgtgaaacattccggccacaagagcaaccaccctcacgacaacacatcttctgcatcatacatcaaaaaatagcgtccagaatctcactgctgcgcccgtacccacacaaagctgattacgtcataaagactggccagggtgcacccaagattctgctcaccaacctgaagaacctcctatagggtaggaccgaggacaagaacgataatgcaactgggcaataccccaagtaccatgacggcggccctaatgcga

SEQ ID NO: 133333 - DNA, 319 bp, Zea mays
  unsure (1)..(319): unsure at all n locations
  Clone ID: MRT4577_53089C.1
gccgggcctttttttcttctccgattcccagcaggcaggtcggcgaggagggcaggaagacgaaaccgagccgtgcgggggctcggncgggaacggacaggaccccaaatctcagaccttcctgcccgcccgccggcccgtcacgcgngttcttgccggccgcgccccacctccgccctctctcctccaggggatcggggggggggaggctgcncgatggtgctgnggntcttcggctacggctccctcatctggaaccccaggttggacttggacgacaaaatcctagacttgatcaatggctacatgcggagcttta

SEQ ID NO: 133334 - DNA, 550 bp, Zea mays
  Clone ID: MRT4577_5308C.1
aataaaaccctttagcgtttatataaagttacaaagattacaatttttgaagtaagtggtgattaacgtgccagaatttgcaagtaatccaaagattctaactttcgttatccaaaactttgttgttaccaaacaaatgatctcttctattaccaaacccgtttgaatcaagacccgagccaccaccgcgataattgttatgatcctgtgcggttgttctatagtttccatcaaccggagctcttgaactcgggtcgttagctccaactgaccggtatgagccaccagcgtaccttctccgtagatccatgaggtcatcgtttcttcttgaaggttcagtaaatgttggctctttcgccgaactattttgtgcgccggtcggggtaaaaggatcatctggtccccatgcagtgagcgattctttcttcttggcaaaaaaatgccaagcccccgaatagaaatagtatgaagaagaacacaggactgctccaaagcattgtgttggaaatctcctttgagagttggcagcttttgatttgtaaacagcgaa

SEQ ID NO: 133335 - DNA, 698 bp, Zea mays
  Clone ID: MRT4577_53090C.1
ggagacggtgcccgaggtggcggcgccggagctggcgctggacgaggccgagcagttcgtggacaggtcgctcttccgcaaggtcgccaacgtgcaggacgaccgcagcctcgccgccggcgtcgctgaccccgtcgccgagtacccgacgaagaaggcggtgacgctcaaggacgtgggcgtggatacgccgggcatcgagcagggcagggagggccttctccacaagatcttcaagaagaaccacgcttagtttaagtgcaacggatgcatgtatggattgtatatatacttagggtctgtttgggaggcatctatatgttctcggatgaaatgtttcaggtttagatgctcccaataaaaggaaacgttaacgtttgtatcagaaataagatcactttgagaaacattagagaaataaaaaaaaaaaaaaataaaaaaaaaaaaaataaaaattaaaataaaaaaataaaaaaggatagaatattaatgagggttttgagagtaaatattgattgttagtggtgtttttatattattatacttttgaccgggggtgacttcgggatttggcgcgccgtttgcctgtgcttctcgaaggggggtgcgacggttgcctttacctttttgagggggctggttttaatgttttcaaattatgcgcatggcagtttattcccttttgattttattgtatt

SEQ ID NO: 133336 - DNA, 162 bp, Zea mays
  Clone ID: MRT4577_53091C.1
cagggaagatctcgcgctgcctccgggggggggtgggaggacagagctcgacgctctggggggggtgcctgccgtaggactcccccgggacgtttggcgggtaggagacgcaccccagccgacttccgtactatgaagagaccacagtaaatgagttactgg

SEQ ID NO: 133337 - DNA, 452 bp, Zea mays
  Clone ID: MRT4577_53092C.1
agaagaaactgccgtatcagcgacctctcccaacggagccggcgatggggcaacagcagacgcagataacactggctcgggcatcctgtatgccggcccgcttttcggaggctcctcctcgcggccacgtcctgggcctcgagttctggatgacaagctggcttgcgagaagcaaccactgcgtaggaagacacagaggcggcgccgatctacaccatcggcgatgcttagatagcctctttatcggttccatttacatgagaaccagagccctccacaacattcaggccgtcaattattgagagatatgctatagtgtttcaagtgaggatatttatacttattgcattctgagatctgtttgataacaacttatcgatattctatgaatgactatcgcgctagggtgacaaataaatgatcctagttatagacagaacaaagaatgctat

SEQ ID NO: 133338 - DNA, 493 bp, Zea mays
  Clone ID: MRT4577_53093C.1
aaaagcaatcaaatagtaacatgcgtatcatacataacatataacatgcgttgttgtgtaaagacaaacacatgtgcagaatgacagaacggaggattacaaagcaggatgcatcagttaatacatgaatggatgtaaatcgataattaactaaattaggcgacggtgatctagtcgaccattctggttccttaatgaaaatctggactcaagcaataaggttcccgaggactgcgagggtgacggagtagggctcgcctgctgcgttgcaggtactcctcttgggaaatcttatttgcatggacccctctctgcacctgaagtttgcctaaaattaccttcagtgggaagcctgtgttgtttttaaatgtcatagtaagcccggctctgaacagcgaactggctggcattgaagaccagcccgccgtcgcctgcccccagaagcacctgatgggcaatagcatcatcgggaagcaggtcactggcagtcatt

SEQ ID NO: 133339 - DNA, 271 bp, Zea mays
  Clone ID: MRT4577_53094C.1
acccactctttcgctgacgcacaatcacattcttaaccggtttcattattaatcaccaaaacaccaacgctcgccataaatataaaccttcctgatcatcctacatttttcgttacctcaacataacacttcatcatttcataaaaccttctaacttctaattccatcattacaaaccccataccatcaatcactgaaagctacatcatacacacacctatccatgcaaacctatatcatcaaacaatcaataccagcattcaacatcaat

SEQ ID NO: 133340 - DNA, 312 bp, Zea mays
  Clone ID: MRT4577_53095C.1
tccacgcgtccggtgcacccctagccattcaagcctcctgctccagaagcagctcaatgatcttgcgaagaatcccgtggatggttactccgcagatcttgtaaacgattgcaacttccttaagtctcacttcaccatcatctgcccgttcaacaccaattattactgatacctcttctatgcattaatgtctttatcccattactataccatcttttcttcatcttcactaccaacttcagttatttagcatactattgtctattcagactgacgtctactcattaatatatgacatgcattattaatatt

SEQ ID NO: 133341 - DNA, 332 bp, Zea mays
  Clone ID: MRT4577_53096C.1
aaaaaaaaaaaaaaaaaaaaaaaaaaaaaattaaaaacaaaaaaaaaaaaaaaaaaaaaagcagaaaggtcaaaaataaaaaaagcgtacatacactaacatacaacatatataacaatgccatcccctttcatgaatccaatttactgtccccttctttacaacgtcatccaccgttcatatcccttccctaacctaacttaacctcctctcggtccataccctttccgccggcaaacctcttgctttcccaaacttaccctatttcaattccctcctctttctcccacttaccggaaacttgaacacgccctatagcttcgcttttccca

SEQ ID NO: 133342 - DNA, 226 bp, Zea mays
  Clone ID: MRT4577_53097C.1
gccgcccgggtatctctgtctcactaccacttgccgcccgccctgcccgttgccttctcctccgactcttatcctatacggtcctgtctctcgcacggcccggttcgctggctaccaccttacctgccgctgactcgctgcagagggcaagacctgctgcaatggacgtcgtgcctgcgtgggggcacggcagaagcactcatggacgcagtgcaaactgcactag

SEQ ID NO: 133343 - DNA, 269 bp, Zea mays
  Clone ID: MRT4577_53098C.1
ccgagggcttcgccaagatggccaagcgtgctggctaccaggtcgttggtcttcccaactacgttgtctggcacatcgacacggaagagaagccacggaacctgggagatcgcaaggcctactaaaggcaatatgttgcatctcgtatagccgatcgccattcgggtcaaagttgatcttttctccccgatctgtcctctcgaccatcctccctctttcctcatcgaccatccggagccgcacgaggttccgttcatactcggtcatca

SEQ ID NO: 133344 - DNA, 356 bp, Zea mays
  Clone ID: MRT4577_53099C.1
tttggaactgttcatgttttgggaagtatgatcattattcccaaaacatgaacagtttcaaacccactcgtatttggacgcgtgaaaaatcgacatcgcgtcgctggggctattcatgggtatgcatgcacatttgaacaaattctaattatcacatgtaagctagtttgcaacactaaactaactcaatatgtgtcatagattcattttttgattatattgctatatcaattgccttattaccctcatcaagaagatcactcaacaatactcatggaataggtcattcattatttcaaacataataatttcatgtatagttagacgcatatagttatatcatgcttgggccttat

SEQ ID NO: 133345 - DNA, 364 bp, Zea mays
  Clone ID: MRT4577_5309C.1
tagaaaacataaaacctgaacacaaggacatatacttcatcacgggagagggtataattattgtgttaaatgcccccttcttaaacaaaccaacccaaaaacaccattatgttctacctttagtccacccctatgaataaatagtatatccaaaccttgactcaccacacaaaaaaaaaaaattcggacacattccaaaaaaaatgaatataagtgataacaatgaggaaagagagaaacagataaagcaccagatcaccccaccctgtgactgtataaagaaactctcttgcaacaaaagagcacacatcgacacatataaaaaactcacaaaataaccacatctattttttgcaacaaaatt

SEQ ID NO: 133346 - DNA, 336 bp, Zea mays
  Clone ID: MRT4577_530C.1
gccggccgggtccggaaacacaacgcacacaagcacacgtcgcaagggtgacgactgacgagagggggagagagagaggcgaggaaggagggagagagcacgggggcttgatcgaagatggatgccggagcaaaggtggccgactcgtaggtccctggcaatgctgatgcactgtctctctctgtcctctctgaactgaaacgctcctagctgtcgttgtcggtcatggtcgttgttgtttgatgcgcttttattgtggttgttcgtgcgtaattgcttgcctttcgcccatttggcatgcactgtgtagggccacactgttctaggatttcaatc

SEQ ID NO: 133347 - DNA, 1622 bp, Zea mays
  Clone ID: MRT4577_53100C.1
agtatgtctgaaggtagatcatgaaagagacaaatgaatcataggcttgtaccagcatttactgcatggtacacacatatcagactagtctatacaatatacatggtctagccagcaaaacatgtgtcattgtttgggactaaaattgtaaaaccacatacaggattacaacaataacacttgagcatctttgtttgcatctatcgaagagattcttgaaccctgtaccaaattcttatacagtgcccaggtccgtttggaatgcaggaatttcacaagaattggtccagtttcacagggaaagcacaggaatagagggggggggggattctgcattccaatataccttgatttcgggtacattgtttaacgtagctttcgtatattggtgttgtcttgtaggtggtctcgtgtagtaccacgtaatcttgggttgagttgtgacacaatctgtacaataacttatcatttgagttgtcttgtagtaactcacatttacttaatttgtgtatagaacaataggaatgttttgatttgcatctcgacaagtcatacaatggtgctgaagcagtctcatattcctaaattttagtttatgaggtggttgtttcaccaaaacaacaacctctttctctcaccctccctcttctcgtccacatcataaaaaaaatcatatgtggctttgtatgagaccatgtacttgccctaatggttctaaaaaaatcctatgtggctttgtatgacgtaatggtgtcattagtaactggtgagtaatgatttgattgctgtatcaacatggttgatacaaactccactgatttgtgtctgccaacagatttttcatactccagctgatcgagagaagatcaagtcatgtttatcagagctaggagagatcagtgcttcctttaagaagatccttcattctgcgctggagcatttagtggcatctgtggcgccacgcatccgtccaatccttgacactgttgctactgtcagttatgagttggatgatactgaatatggggaaaatgaggtgaatgatccatgggtgcagaagcttatacttacagttaacactaatgttgcttggctccagccagttatgacattaaacaactacgattcctttgtgcacttgatcattgacttcattgtcaagaggctcgaggtgattatgatgcagaagaggttcagccagctcggcgggctccagctggataaggaggtccgctctctgatcaaccatttctcagagatgtcccagagaccagtcagagacaagttctctaggctttcgcagatgtcgaccattttgaacttcgagcgggtatcggagatattggatttctggggtgacaatgctggccatctgacatggctgttgacacctgcagaggtgcggagggtgttaggacttaggactgacttcaggcctgaagctattgctgctttgaggctctgaatcgtgcgtctatatatacttgttaattcttcatatatgatagagcaacaagatgtcttagaattttttgttacaatgacaaacacctgcattgtaaagaaatctgtgaacatactttttgtctgttatgagcgaattgacgatgtttgggtccatt

SEQ ID NO: 133348 - DNA, 222 bp, Zea mays
  Clone ID: MRT4577_53101C.1
cccacgcgtcctcttgcaatagcattatttagctgttgatttgaggtctctgtcgccatcgcttcatctaggctctggaaaatcatttgttcatacacaatgttaatctgtgcttcctgaacttcagatgtttacgggattggaaaatgggaagcattttgttaaaaaaaaaaaacatttaaaaaacaatataaataataaaaaacaataaaaattacaact

SEQ ID NO: 133349 - DNA, 460 bp, Zea mays
  Clone ID: MRT4577_53102C.1
aagggccttgtgttagttctttttctttttgttttttttttttaaacacgggtgaaaactatttttttccctcaaatataaataaaaatactactgggttgatgcataatcaaaccggccccccgtaaaaggaaaaataaatgggagatggctattttgcccttgcaaacaccaaatccagaagaggggggaaaaacctgggggggatcagggggggttccttttcaagggttggggggttcccaccggtggatggaggactcccgggtccagggttcccttaaattaggaacccctccccgtttctgccgtggacaaacgcattattgggggggaagccttgaaaacctaaaaggtttgacacggggtgttagactattgttgacactttccagagctttttatgcaataatttttaaaggggggggcgtccttttagttccagggcctctttaaaatt

SEQ ID NO: 133350 - DNA, 521 bp, Zea mays
  Clone ID: MRT4577_53103C.1
gcagaagaggttcagccagctcggcgggctccagctggataaggaggtccgctctctgatcaacctttctcagagatgtcccagagaccagtcagagacaagttctctaggctttcgcagatgtcgaccattttgaacttcgagcgggtatcggagatattggatttctggggtgacaatgctggccatctgacgtggctgttgacacctgcagaggtgcggagagtgttaggacttaggattgacttcaggcctgaagctattgctgctttgaggctctgaatcgtgcatttatttgtacttgttaattcattatatgtgatatatagcaacgagatgccttagaaaattttgttgtaatgacgaaagacctgcatcgtagaagaagtctgcgaccatatctgtgtgtctgttatgagcttatgatattgcgaactggcgatgcttgtgtccatccatgccgcaagctgtaatattttcttctaataagcttttatacattgactctcttgttgactggt

SEQ ID NO: 133351 - DNA, 909 bp, Zea mays
  Clone ID: MRT4577_53104C.1
tgaaatctaagaaagagcgggtggttctttacagcaaccgagctcagtgctaccttctcctgcagcagccatcggctgccataagcgatgctactcgagcgctgtgccttcatagccccgtgaatcgtcacgccaagagcctgtggagaagagctcaggcgtacgatatgctcggctttgcgaaggagagcttgctggatacgatccttttcataaacgagtgttcgcagtcgaacgatcctgacctatccctgaagcagaacaaagtccctgattatgccgagcggctggtgaagaagcagatgcgcgccgcttggctgttcagggaagcagccctgaagcacgggggcgtccgtcgcgcgggggatgctagcgacgctgcgtttggccaggaggccgacgactccgagtgggagacagctagcgaaagcgacggcgagaacggtgccgccacggggggagaagcagacggtgagactggatggaagaatggtggccgccaggaagatttctgtgagaaaagctgagcaacagccaaatgtgtattcagagtctcaaactgagctgctacagaagcagctgctgggccttctgcggtcggcacactaacaagcatcaaatctttctaacggaacgatctggtgacgttttcattgtcctcatcaaagcaagggggcagaggcccaattaaattagttctccacgtcttctcgctgggtcagttgagctgtgcctgtgaccattcaatatttcctctttgatgctggtcctcctctggtgtttgtaacatgtttttggttcagtttgtcaagtccctgaaagaacagaactgtgtgcattgcttgttttgttttattgttttctgaagtttggtgaagaggccgtaaaaaaaaaaaaaaaaaagcggcc

SEQ ID NO: 133352 - DNA, 519 bp, Zea mays
  Clone ID: MRT4577_53105C.1
tacaagcttttttttttttttttttttttttttttttactttttttatttcttttttcttttttttttttttttttttttttttttttttttttttttttttttttttttttttttttttttttttttttttttttttttttttggtttttttttttttttgggggtttttttttttctttgccccccgggccggggggtgaaggggggggatccaaaggagggggggggggggcaaaaggggtcccccactaaaaacaattggggggatcaaagtgccaaatttgcgagcgggaaaaaagaattggccatcgcgttgcgccaaaagaaagggggcggggaaaaaagggtgggggccggggcccccctacggtgcaacaaaaaaaaaataggggggcgggggttttaggctttttcaaaacgggaaaaacggggggccccgctttaataaggaaatcccccaccccgggggaaagagcgggttagaaatggggccccatccccaaaacgggaacaagaa

SEQ ID NO: 133353 - DNA, 397 bp, Zea mays
  Clone ID: MRT4577_53106C.1
cccacgcgtccgcccacgcgtccgcccacgcgtccgcggacgcgtgggctgagcggctacagaagcagctgctgggccttctgcggtctgcacactaacaagcatcaaatctctctaacggaacgatctggtgacgtttttattgtcctcgtcaaagcaagggggcagaggcccaattaaattggttctccacgtcttctcgctgggtcagttgagctgtgcctgtgaccattcaatatttcctcttagatgctggtcctcgtctggtgtttgtagcatgtttttggtcagtttgtcaagtccctgaaagaacagaactgtgtgcattgcttggtttggtttattggtttctgaagtttggtgaagaggccgtaatcctggcgccctttccctttcc

SEQ ID NO: 133354 - DNA, 419 bp, Zea mays
  Clone ID: MRT4577_53107C.1
cccactcgtccggctagcgaaagcgactgcgagaacggtgccgccacggggggagaagcagactgtgagactggatggaagaatggtggccgccaggaagatttctgtgagaaaagctgagcaacaggtccggactgtttacgtgctattacgcgaatacctttgcgacaagaaacgctagtcctcttcgaaaagatagtttcagccactgacagttccttttctctttgcaagatcctttgctgtttatgtttcatatttttgcatgtaacatcccttagcaatctgttttttttttgtttcttcctgtgcagccaaatgtgtattcagagtctcaaactgagctgctacagaagcagatgctgggccttctgcggtcggcacactatgaagcatcaaatctttctaacgaaacgatc

SEQ ID NO: 133355 - DNA, 2116 bp, Zea mays
  Clone ID: MRT4577_53108C.1
aaggtaccttttgatatttagggcaatgctacgttaggtatagaatcaaagcagggtggagaaattggcgccaaacatctgacgttctatatgacaggagggtaccatagaagctaaaagacaagttttataggacaaaaactaaacctactatgttgtatggtgcataatgttggccatggtttttaaagcggtaaggcggtccaaggcgttggagcaccgcctggacgcctaggcggcgcctaggcgttagaccaccgcccggacgcctaggcgacgcctaggcgtcgcctaggtgacgccttaagaatagtggttggcctacaaaaacacattatgttcaacagataagtgttatagaaatgtgtatgctatgttggatttgtagccatacaagaagggatcgagtctggaaggatgatatatgtgataggttagggatagcataattgaagaaaagattgtctaacactgatcatttggacatgtctaacaaagacctctaaaagcacccgtacatagtgggtcctaaggcacgatagtaatatgaagagaggaagttgatatgagaagtaggaaagggatacctgaaaggatggagtatacccaaagaattagccttgaatagctgtgaatggaaaaaagctatccacacacttgaaccttgatttgtggcttttattgggtttcaactctagcctacccctacttgcttgagacagactttgttgatagacagctcatcggttattacaatattttcagcatattgacacaaagttatggaaaggtttcttagagctgcacaaaaaaggggaaaatacaacagcatgctcgtgatgctgataagctgattgtatgacaactgctgctgcataagcttccttagttgtgtttttatatcaatgaactgatgtttggtattacctggtttacactgaattgtaatattattactgctgagttatgtcttagaaccattccttttaactgtgatctctccatgaccatacacataccaacactgatacttgaggagaacattgtgcttcgttgttactattgaaagagaataaattatgcttttagctccgaaagggatctagtctcctttttttttggttccgttgattagtctaacgttggggggataaaaagcaagctgaacagtttagttagtaattgaatatattggataggcggagcggtggtcttgtagtgggtcagttgtttcataagaaagttttatagtttttttggatctttcatgtgtttcgatgctactatccttaagaccttaacaaccttggtcataaataacttaaaaatcagtgtgatcacatggttaggaatgtttcaccatgacattggaatcgttcataaataagaaaccatcagcattattctacctgggattctgtcttgatagctaatataaagatacgagctcccctgtgtgtaagaaaacaaaagctatatcattgagcattcactgtcatgtgtgttaattccaataacatgccttgtgaatttaatggtgtcctgtcgatgcattttttccatactataatttgaagtgcttcaatagcattttgtattttttataggtacaaaacttactcgagaaaccacagtatgatcatttgccactaattgaggctagcaggttatgcaatatggacatcatctctaaggtccaacaggtaatctgcttcgcgttccacgacagcaaactgctgatggaaacatgccaggaggccatgaaccttcggaagatcgtgacactcttctacttggattagctccggtagggatctagtctcctttttttttgggtccgtggcgtaggctaacgttggggggataaaaagcaagctgaacagtttagttagtttcggaatatattggataggtggtgcggtgaccttctattggaggagaaagtcattttgtttctcccattgttttgattcttgtcacaaagaaaccaataatcttgtcgatatgcctaattcgtcattgaagggaataagattattagctggagtatatttgttgttgacctcaaggattatagttagttcgtgctccagtttttccatctattttatgtccc

SEQ ID NO: 133356 - DNA, 1015 bp, Zea mays
  Clone ID: MRT4577_53109C.1
ccccgcgtccggaaagaggttatggatttagatggctcaattgaagacaaccgatatagagatcagaaattaaggatgaagaaatgtgggctgaggaagttgatatatcttgttgaaggtgatctcaaccgtgcaccaaagagggttaaaacagcctgtttcaccactgagattctcgatggatttgatgttcagagaactactgggtttgccgatacccagaagagatatgttgatcttacacgttcggtaatagcatactatgatgcaagtttctcgatcgttggtaaagcttcccctgtttgcccaacctacgatgacttcaagagaaagtgttatgatcttaagaagaaaacagtgagcgacatatttggctgtcagcttatgcaggtaccacaagtaacagaagaagctgcacaagctgttgtagagctctatccaacccctttgttactggcaaaggcatactctatacttggtggcgatacctctgcacaagagaagatgctaaagaagaagaacgagatggtaaatgcaggagcaagccgaaacatatttcaccttatctggggtgacggatgaaaaatactctggactggaaccagttgcgggccaactgaactttggtggcttatggtgtcaccgtcgtggtgaccatcttttgtgtctccgagatttagaggctcccatgttctaaagcaaatagtggctccatagaacactagggatctagattaggaagagtttctctctacgtcgcgtctagagagtactctgctgtggtgtcgtggttgcacagtggaatgaagtggtcccttggatttacgtggtcgggatttcgtgtatcggtctgggttgtctggattatgtgctgtctcgagctacctcggggctgttaagtctacaggatagcataaaatatcgcagtgtacctacagggaagattgtatgggtcgcccatgtgttccatggtcggcgccttgtctggtcatctttggctgaggccctcctccaa

SEQ ID NO: 133357 - DNA, 285 bp, Zea mays
  Clone ID: MRT4577_5310C.1
ggcctcccaattaagccgcccccgcggcgcgatccggtgtccaccgctgctccgccggaggtggggaaggggaagaaaagggagggggagcacagggggatgctagaggcgaagccgccgtcgccgggctccggcgcggccggggcggcggcgcacattcacggtcaccggcggtgggcggcgccgctgctggcctcggtcctgctctcgtcgctcctcatcaccgcgtcgctcttcttttcctcctcccgcgcgctgctactcttcttttcgccgctccccttc

SEQ ID NO: 133358 - DNA, 1563 bp, Zea mays
  Clone ID: MRT4577_53110C.1
tccggactcgactccaggaggggcgcacttgactttcccctcctcctcctgcgagcaccttcctcgcctcgctctcatggcctcatcagagcctatagagtgccaggttgtggcgctgagggtgtcgattcactgccaaggatgcaagaagaaggtgaagaaggtgctccagaacatcagcggcgtgtaccgatgcgaaatcgatgcccggagcaacaaggtcgtggcgacggtctcgacggagctcgacccctacatgctggtcgccaagctgcgcaagtccggcaagcaggcggagctgtggccggagcagccggtgcagcagcaggagcagccggcaccaccagctgagagccaaaggcaggaggagcccaagaacaaccagcctgcggagccgggcagacccagcgaacctgccgaggagcgcggcgccgccgccgacacggccgaggccgccgcggcggagccgagcaacccgcaaccttcgccgccggagcccaagccgagcgccggcggagaggccccgaatccggcggcccaggacagcaaagaaaacgccagcgccgatgacgtcggcggcggcgacgagaccgccgcggcaccggcaccggcaccggcgcagcagggacccagcgaggcgaaggggaaagcgaaatcgaagcagcatacggcggagatggaggagaggcagcccgtggacgccagagtgactgtggagtacgaccaccgaggcgtcggtgggggctacgtgagccgcatgccgccgccggcagtcatgagctacaaccaggtgcgcccgagcgtgagcgcgtcctactacgcccccgccccggctccggcgccggcgccgatgccgatggggaggcccgggccgtcgcagggctacatcgacgagcactacacgccgtcttacagcagcagtagcaacaactactactcctccaaccggtcgccggcgtacgagccgtactactacagcgctccgcagccggcgccgtatagctaccagtaccagtaccagccggcttcttcgtccgaggattactactacagcgcgccgccgcagaggagcgccttctcgccgccgcgggagggctacggcgacatgttcaacgacgagaacgccaattcttgcaccgtcatgtgaagggaggatgcatgcaaacatggaagtagctagtttacttacagttccttattaatcaagcgactctctctatatatatatatatatatttgtgtgtgttagtatattttagaaccagtaattaagtacgagtaaggagatgtattaaaagcactgttcagtcttgatggcgctgaataagttgagagctgagcttgaatgcttgatgcatgtaccaaccgtgatagatagaggagaatgtgaggatctgaatgaacagctctggtgttcatcacagcaaattttgtaatgtatgacatggtcaaaatggggacttccaatctcttcaacttcttcattcatgtaagaactttgtatgtacacagaacatgagcaaagacccgatcgagctgttttgtttcaaaaaaccacccaac

SEQ ID NO: 133359 - DNA, 339 bp, Zea mays
  Clone ID: MRT4577_53111C.1
gttcagcagggcattaacagagagggatacatatattacgcatatagagcgtgcacactattgcacaaactgatacaaactattttttaaactacatatatacatacattatgagcataccaccactgttacactagatttaaaaatactgcatactaatgcaagcatagttaggaagtccaaatactgcaaatctgctatgcagataactgagtggccttaccaatatagatctattccttcaggcttaaatatcgaacgccttatttaccataagcccataaccaaatcgtgcaggcaacatcttgactgtattttcatcacattatgatttcttga

SEQ ID NO: 133360 - DNA, 1579 bp, Zea mays
  unsure (1)..(1579): unsure at all n locations
  Clone ID: MRT4577_53112C.1
cntaaatagtgcggggtataaagctctctccctccgcgcttccngacagttcacgacgactccaggtccaggaggggcgcacttgactttcccctcctcctcctgcgagcaccttcctcgcctcgctctcatggcctcatcagacccgatcgagttccagttctggtacatgtttgcagagcgcgcaattggtcttcttcttcagcttgtctgattcctgttccagcggtccagccactgtttttattttcttcatcttcttcttctttctgtttgattcttcttcttctcagcgatccgtctgtgactgtgtgtcctgttttaattcaggttgtggcgctgagggtgtcgattcactgccaaggatgcaagaagaaggtgaagaaggtgctccagaacatcagcggcgtgtaccgatgcgaaatcgatgcccggagcaacaaggtcgtggcgacggtctcgacggagctcgacccctacatgctggtcgccaagctgcgcaagtccggcaagcaggcggagctgtggccggagcagccggtgcagcagcaggagcagccggcaccagtaccaccagctgagagccaaaggcaggaggagcccaagaacaaccagcctgcggagccgggccgacccagcgaacctgccgaggagcgcggcgccgccgccgacacggccgaggccgccgcggcggagccgagcaacccgctaccttcgccgccggagcccaagccgagcgccggcggaggagaggccccgaatccggcggcccaggacagcaaagaaaacgccagcgccgacgacgtcggcggcggcgacgatacggccgcggcaccggcaccggcgcagcaaggacccagcgaggcgaaggggaaagcgaaatcgaagcagcatacggcggagatggaggagaggcagcccgtggacgccagagtgactgtggagtacgaccaccgaggcgtcggtgggggctacgtgagccgcatgccgccgccggcagtcatgagctacaaccaggtgcgcccgagcgtgagcgcgtcctactacgcccccgccccggctccggcgccggcgccgatgccgatggggaggcccgggccgtcgcagggctacatcgacgagcactacacgccgtcttacagcagcagtagcaacaactactactcctccaaccggtcgccggcgtacgagccgtactactacagcgctccgcagccggcgccgtatagctaccagtaccagtaccagccggcttcttcgtccgaggattactactacagcgcgccgccgcagaggagcgccttctcgccgccgcgggagggctacggcgacatgttcaacgacgagaacgccaattcttgcaccgtcatgtgaagggaggatgcatgcaaacatggaagtagctagtttacttacagttccttattaatcaagcgactctctctatatatatatatatatatttgtgtgtgttagtatattttagaaccagtaattaagtacgagtaaggagatgtattaaaagcactgttcagtcttgatggcgctgaataagttgagagctctgagcttgaatgct

SEQ ID NO: 133361 - DNA, 445 bp, Zea mays
  Clone ID: MRT4577_53113C.1
atgactcaagtggttttttgtctcccgttaattttcgccaagcccccctccggcgacggggcccccaagcgaggtggtatggccccgtaacccaccaaaaataagactgattgagtgacgaaccctctgaaagataagaggcccaagcagtttgagatcctcggggcgttgccgcccaacaaggacctgcaccggatcaacaagtggcccaatgtcgtgcgtatgcagcgccagcgccgcatccttaatcaacgtcttgagcaccaccggggcttaaccggttaactcgcaccctctataaaacctcgtacgaacctgctaaaaagctgctaaataacggcctgatacaaggctgtcaaaagataggctttgacgaggcccaagcttgggaatctggaaaaactggtgcgtctaagaaaccaatagttgggaagtatggacttaa

SEQ ID NO: 133362 - DNA, 540 bp, Zea mays
  Clone ID: MRT4577_53114C.1
ggccgggagttcacgtacactccaggaggggcgcacttgactttcccctcctcctcctgcgagcaccttcctcgcctcgctctcatggcctcatcagaacctatagagtgccaggtaccaatgttctctcctcttctctctttgatctgtttccctgctggacccgatcgagttccagttccggtacatgtttgcagagcgcgcaattggtcttcttcttcttcagcttgtctgattcctgttccagcggtccagccactgtttttttttcttcttcttctttctgtttgattcttcttctcagcgatccgtctgtgtgactgtgtgtcctgttttaattcaggttgtggcgctgagggtgtcgattcactgccaaggatgcaagaagaaggtgaagaaggtgctccagaacatcagcggcgtgtaccgatgcgaaatcgatgcccggagcaacaaggtcgtggcgacggtctcgacggagctcgacccctacatgctggtcgccaagctgcgcaagtccggcaagcaggcgtagctgtg

SEQ ID NO: 133363 - DNA, 435 bp, Zea mays
  Clone ID: MRT4577_53115C.1
tttccttttcgtccgtggaccagcccctgcttatggccgacggtatcacctccaccaccgtggtggctctcctggaggagcacttggtgattcgtcactacttcatgggcgccgtagctgccatggtggccggatcttgcgatctctacggcgatctactcggcactgggcatctagttcctcaacttacaacggcgatgagagaagctgtggctccactagctagctagtattgcagccaccgccgacacagactccaccaacggatcgcatcccactgtacatgcatacacccgatcagtgcaggagggccagcatcaacatggaatactaactgccatgtgcctgcattccttacgaggaccacatgaaccacaccgctcttgtgctcactgcaccttgacgcgctacatagaggcggagatagggctgggg

SEQ ID NO: 133364 - DNA, 895 bp, Zea mays
  Clone ID: MRT4577_53116C.1
gccggccgggtcggggagccaaaacagacggacgcacacaaaagcgaaagggaggagagagaggggcagggcagagcaggagagagaaattcgatagggttcccatgccccttccccaccggccaccacttgccaagcgaaagcgggagtgaaggaggggagagtcccatttccccaagccctacacgagagaaagagagagaggggggagcagaggagcacgctacgagagagggaggtcgagggaggcagcagaggctgcagcagaggccagaagcattagaagcggcagttgtaaccaagtggcatcagaagatagagccagccatccgtctatccatctatctagctctacaggtataaatcctcgcgcatcggtagggggcgaggggaggaccgggaaccggaggggatttctcgggggtggagtggcggccaggacttctgattgggctccagtgcccgatctttgaacgcagatttggtgcccgcaatctgccatggatttggtttaagatttggggagatcggtcgggttcgcgctgcaagattcggtttttgtgcctgttttattcacgagattaggaggagcaaataaagcaagaatagaaagatttttgggggagaaggcatgatgctggaagggaagtcctaccttgtgtcgcgctccgtgccgagctcctgcgagccggagacggagtgggagtacctcgcccacgcggtcctcagcggcaagcgcccggcgccggaagatgacgtccgaggtcgaagacccggacgaaactggcagcggcggcaagcgcagcaagccggcgtctccgcagccgcacacgccggacatctgcgagggccacgggtccaaccgccacgcaaccggttccggagagcagcggat

SEQ ID NO: 133365 - DNA, 841 bp, Zea mays
  Clone ID: MRT4577_53117C.1
agggcagtgcagagcaggagagagaattcgatagggttcccatgccccttccccaccggccaccacttgccaagcgaaagcgggagtgagggaggggagagtcccatttccccaagtcctacacgagagaaagagagcagaggagcacgctacgagaggagagagggaggtcgagggagacagcagaggctgcagcagaggccagaagcattagaagcggcagtagtaaccaagtggcatcagaagatagagccagccatccgtctatccatctatctagctctacaggtataaatcctcgcgcatcggtagggggggcgaggggaggaccgggaaccggaggggatttctcgggggtggagtggcggccaggacttctgattgggctccagggcgcgatctttgaacgcagatttggtgcccgcaatctgccatggatttggtttaagatttggggagatcgatcgggttcgcgctgcaagattcggtttttgtgcctgttttattcacgagatcgcaacaacgagattgctaagcaagataagatttcaactttttttccctggatcgatctcagattaggaggagcaaataaagcaagaatagaaagatttttgggggagaaggcatgatgctggaagggaagtcctaccttgtgtcgcgctccgtgccgagctcctgcgagccggagacggagtgggagtacctcgcccacgcggtcctcagcggcaagcgcccggcgccggaagatgacgtcgaggtcgaagacccggacgaaaccggcagcggcggcaagcgcagcagccggcgtctccgcagccgcacacgccgaacatctgcg

SEQ ID NO: 133366 - DNA, 2359 bp, Zea mays
  Clone ID: MRT4577_53118C.1
cattgggtacctcgaggccggccggggacgcgggaccccggagccaaacagacggacgcacacaaaagcgaaagggaggagagagaggggcagggcagagcaggagagagaaattcgatagggttcccatgccccttccccaccggccaccacttgccaagcgaaagcgggagtgaaggaggggagagtcccatttccccaagccctacacgagagaaagagagagaggggggagcagaggagcacgctacgagagagggaggtcgagggagacagcagaggctgcagcagaggccagaagcattagaagcggcagttgtaaccaagtggcatcagaagatagagccagccatccgtctatccatctatctagctctacaggtataaatcctcgcgcatcggtagggggcgaggggaggaccgggaaccggaggagatttctcgggggtggagtggcggccaggacctctgattgggctccagtgcgcgatctttgaacgcagatttggtgcccgcaatctgccatggatttggtttaagatttggggagatcggtcgggttcgcgctgcaagattcggtctttgtgcctgttttattcacgagatcgcaacaacgatattgctaagcaagataagatttcaactttttttccctggatcgatctcagattaggaggagcaaataaagcaagaatagaaagatttttgggggagaaggcatgatgctggaagggaagtcctaccttgtgtcgcgctccgtgccgagctcctgcgagccggaggcggagtgggagtacctcgcccacgcggtcctcagcggcaagcgcccggcgccggaagatgacgtcgaggtcgaagacccggacgaaactggcagcggcggcaagcgcagcaagccggcgtctccgcagccgcacacgccggacatctgcgagggccacggctccaaccgccacgccaccggttccggagagcagcggatcaccgggagcaaccccatgacttcgatcggtcgtgacctgaccctcaattgcctcctccggctatctcggtccgactacggctcggtggcctccctcagccgggacttccgctccatggtccgcagcggggagatctaccggctgcggcgccagaacggggtggccgagcattgggtctacttctcctgcaacgttctcgaatgggatgcctacgacccataccgggagcgctggatccaagtgcccaagatgccgcctgatgaatgcttcaagtgctccgacaaggaatcgcttgcggtgggcactgagctgcttgtgttcgggatggcgcgtattgtcttccgatacagcatcctgaccaactcatggagcagggctgatccgatgaactctccgcggtgcctgttcgggtcaacgagtgtcggggggaaggccttcgtcgccggaggcactgattgtgtcggcaacatactgagctctgcagagatgtatgactctgagacacatacctggacgcccctcccgagcatgaacacggcgaggaagatgtgttctggggtgttcatggatggcaagttctacgtgataggtggtgtggccaacagcaacagagtgctgacctgcggggaggagtacgacttgaagaggggttcttggaggacaatcgagaacatgtctggaggcctcaatggagtgaccggtgctcctccccttattgcggttgtcagcaacgagctctacgccgccgattacggcgagaaggatctcaagaagtatgacaagaagaacaacaggtggatcaccctcggaaaactgcctgagcggtccgtgtcaatgaatgggtgggggcttgccttccgagcgtgcggtgaccgcttgattgtcatcggaggtccgaggacctataccggtggtaccattgagctcaactcgtggatcccagatgagcggccgcccgtgtggaatttgattgccaggcggccatctgggaacttcgtgtataactgcgccgtgatgggttgctgagtccactgaataaagatacaagtgaagtggacttcctcgtatttatgaaggatgctatctatgcacagaggcagcagcctgtccaattgcttcagcccttattcttcttcatagcgatttctgccgtctgcgcggttccggaattaactggacatcggctgattgtcagcagtctcatgtaaccattacgttctaatactcctgtttccctgctaatccattcctacattttgcattttcatcagctgatcgtgattccaaagatacgagactgtgcaaaaaaatgtcatattaataatctagaaacaacctcgaggtggtttttatctattgatgaggaacctgtcaag

SEQ ID NO: 133367 - DNA, 1026 bp, Zea mays
  Clone ID: MRT4577_53119C.1
cattgggtacctcgaggccggccgggaactccacctcgaggagccctgggcccctcaccgccgcggccacctgcgtccgcccgtcccgacctccgtcctccgcctccggcaccgtcgcggccccctgaacgcagtccgattccagcctccgccagcccgcccaccagccaccggcttccggcctccgcccgccggcggcggcctctgctctccgcccacctggccacctccgcatccggcctcagcctccggtgtccggtgtccgcccccgcagtgggcgtgccgcactgggctgaggaagaacagcttccggttcctgctgctgatcttgaacggcgcggcgctcaggtcggaggaggcctgccgacgagactgaggtagcagaaggagccataccaaaaagagaatcttcctccgccactgtcgactcccatctgcgagggtagcttcgcgccgaggcgtcagtggcgcgatgaacgtccctgtagtcgatccatatcagggggaatttcctgagacaatcgaagagtacttgcatcacggtactatgaaatgtatcgcgtttaaccgcaaaggaacacttcttgctgctggatgctcaaatggtagctgtattatatgggactttgaaacaagggggcttgcaaaagaatttcgtgataaagatagcaccgcacctataacaagtgtgtcctggtccaggtatggccaccgtttgcttgcctctgctactgacaagtcattgacactttgggatgtgccaactggggaaaaaattgcacgtattactcttcagcagactccattacgtgccagccttcaacctggttctccaactccatctatttgtttggcatgccctctatcttctgcacctcttcttgttgatttgaatactggaagtactacagttctccctgtttctgtatctgagaatggtaacccccctgcacctaacccccgcaataaatttgcggatggtaccccacctttcacgccaacagctgcaacatttgataagcatgg

SEQ ID NO: 133368 - DNA, 679 bp, Zea mays
  Clone ID: MRT4577_5311C.1
ccggccgggggagaccctcacggtcaccctcacggcctcacccacggcctcacccactcaccctcttggtctctccctctctcctggtttccccaaaaacgaaaccctagcgccgccgccccagtggccgtggacccctggagtagaaaaacagagcaggcgctggtggccatggacctgtggaggagagcaggcgccgccgcgccggtgtgcggcgtcgccgacgtgtgagccaaccactgtccactggtctgctcttgtttattcaatggccacgaaaggatctcatccagccgaggcgagtcatctccgtatagggacgtctgctgaactccctcgatactcatcttttcccccttcttctacctccttccatagctttctccccactatgtgcctcatcggtgcacttgaagaagcgtcattgagcaccgttcggagattccccttgccagcatcatcgccttaccaagtagtaataacgagtaatcctctaagtcccctgtatggcggtacctcttcgagctacgatttcgttaactggagcaatactaggaaccttgccattccatgttactaactattatgtgtaatggaatgaaactgttatgaactataagtctataatggttagctacatgtatttcaatatacaaaaataagaaagaaaggggcggcc

SEQ ID NO: 133369 - DNA, 395 bp, Zea mays
  Clone ID: MRT4577_53120C.1
gccaattccacattctccaagaagaactgacgcaagatggtccatatataactggtgatcattaacttgcttaataggacactccggcatccaaaagatcatgcccatattctagaagaatacaatgacacattttcaagaaataaggaggcaaaagctggcataaatgaatcacagtgatgaggtttcgtactatccctatcccaaagccaaactaatatatatcctgattcctcgcataatttcgatggcacattgatgagaatcacgtatgcacaaaactgtatatgtgacttggaatcatctgccaacatattagactatcctctagccaaaggaaatgagatcgcgcatgctataaagtgccaagctcaaattctctatagtgagatcta

SEQ ID NO: 133370 - DNA, 794 bp, Zea mays
  unsure (1)..(794): unsure at all n locations
  Clone ID: MRT4577_53121C.1
nnnnnnnnnnnnnnnnnnnnnccaagtgctgtcagcgcattgcagtggcgcgcaggaatctcattctcgtcctatagctcccaagtcccatctcaccaagcaagcaagcaagcaaaccctccaccacgtacgccggccggtcgcgggcgtcgatcgaggccaccgttcgacgcggtcatggtgggcggacgagccacgcgcctggcgccgcttctgctgctgctgctgctgctggcggtggtgtcctgtgacggcgagggctacgacgacgaacggccggcggccagccggacgacaccggccgtctgtgcgtgagcaagtgcgggacgtgcccagcggtgtgctcgccgcccgcgccgtcggacagcacggcgccgcnccaagcccggaggcgggtacacgccgccgtcgccgaagaccggcagcggcgggtatggctctccgtcgccgccggcgggagcgggacaggggggcaagggagcagggcggcccagcaacttctactacctcttcacctccgcggcaggcgggcggagcggcggcggcggcggcggggtgaccgtcttgttgttcgcgtcggcgctcacggcgctcgtcgctcggttgcagtgagacgcgccagatccacgtccaccgaccgactcgcagatgtttccaggctatggctcacctcacctgtgctgtgtactgttgtattgttcctacctctacggcaatacctcgtcagttaaactgttgttgtcaaccccgtagcaacggtttagcgatcaaaaaaaaaaaaaaaaaggccccta

SEQ ID NO: 133371 - DNA, 339 bp, Zea mays
  Clone ID: MRT4577_53122C.1
acgcgtcagcgaacgcgtgggcggaagagtggggaaatggtggcgtatcgtcaaatggaatcaccttcgagaaaattcctcgctgcaccacgactagcgacgacgacgattagtgcagtggtgtcggccagtgcaccctcgactagactggcttggctcgaaagtcccaggaatcctcctcaggaccttactgagattaagacaatctcacacatagcgcattctcatggtgctcgtgttttggttgacaacagcatcatgtctccagtgctctcccgtcctatataactgggaagctgatatcgtgagtgcactcggctaccacatttatagccggga

SEQ ID NO: 133372 - DNA, 758 bp, Zea mays
  Clone ID: MRT4577_53123C.1
gccggccgggccgggttaagtgctgtgcgagcgcattgcagtggcgcgcaggaatctcattctcgtcctatagctcccaagtcccatctcaccaagcaagcaagcaagcaaaccatcaccatcgtacgccggccggtcgtgggcgtcgatcgaggccaccgttcggcgcggccatggtgggcggacgagccacgcgcctggcgccgcttctgctgctgctgctgctgggcggtggtgtcctgtgacggcgaggctacgacgacgacggccggcggccagccggacgacacggccgtgctgtgcgtgagcaagtgcgggacgtgcccggcggtgtgctcgccgcccgcgccgtcggacagcacggcgccgcccaagcccggaggcgggtaccacgccgccgtcgccgaagaccggcagcggcgggtatggctctcagtcgccgccggcgggagcgggacaggggggcaagggagcagggcggcccagcaacttctactacctcttcacctccgcggcaggcgggcggagctgcggcggcggtggtggtgaccgtcttgttgttcgcgtcggcgctcacggcgctcgtcgctcggttgcagtgagacgcgccagacccaccgaccgactcgcagatgttttcaggctatggctcacctcacctttgctgtactgctgtgtactgttgtacctacctctacggctctccctcgtcagtgttgttaaaaaaaaaaaaaaaaaaaaaaaaaaaaaagccccta

SEQ ID NO: 133373 - DNA, 421 bp, Zea mays
  Clone ID: MRT4577_53124C.1
ttcccgcgtccacccacgcgtccgaaaccgcgtcgtaagcatccttctcggagatgccgttctgtttgccgtaggtgtggttctcgtcaaaggttaccatgacaagtgtgttgtgcatgcagttcttgttggtaaggaggggttccacgagcaacgcacttacggcatacatgacggcgtcttcagcatcgttcccggagatgctgttccggctgcgcgggtcggtaccacgaatgatgcctactacaaccagtacagcgagatctctaatgcacaagcgaattgcggcttgcacacatcaggccgttgggacgtaccgtgcaccatgttcatattcgtagctacgaatactgtgcatactgttgcagcatggtctgggaaggttgtcttcagcactacgtacatcactgcgtcggacact

SEQ ID NO: 133374 - DNA, 154 bp, Zea mays
  Clone ID: MRT4577_53125C.1
atgcggctccagggcaggtaccgcaccatgccattgcaaaaagctagatgccgatccgacgacgcgcgcgaacagcaagctgagcctcatcgtatgggacctcacgggcagagagacgaatggccacctgaaggctatcgcgctgcctgtgtgc

SEQ ID NO: 133375 - DNA, 317 bp, Zea mays
  Clone ID: MRT4577_53126C.1
gtgattttttacttgcttcttttgtgatctgtggtttcaaacactctcctttgttgcttggttttttgacagacaagaaggccaaataaaaatccaatatgggttttggcacttctttgaagaacataaatggggattttttgatccgggacctaaatcacttgcgtggcgctcctacgagacgggctagggctaaaaaaagtggatttttcttcccccctcaaagcccaagccccccacaataagaccccccgcctgaatgtaaagggggggccagagtttcccctgccccttgttcctggtcaccccccaaaacc

SEQ ID NO: 133376 - DNA, 344 bp, Zea mays
  Clone ID: MRT4577_53127C.1
tcgtggacgcgttggtagaggtgggtcggcttgtcctccccctccgattcggcttcggcttcgtgaggttctacggcgttcagtttcacgcctgagcagatcgagatagcaacgtctgatgtcgagtactgttgcttcttctgctacctgtcatgctccacgtactaccacatgttctacaacgccttaagcacctacagtgaggtcctaaagtccaagatcatgatccatctacagacgcagatgtcaagcctgttcagctatcgctatattctcaacagagaactcgatgcaatacgtcatcatgaccatgaactgctatacacatggacgctcgaacataa

SEQ ID NO: 133377 - DNA, 237 bp, Zea mays
  Clone ID: MRT4577_53128C.1
caaaagcccaattagaacatgttgtttcatcaaaaaaactccgggggggaaaataatgggagacaaccaaaaaggttagtttgttacatggtgtggccggtccaaagtgtttttccccacctatgccaaactgtaaagaattcaagggtcgttttcttgcttgatcacagttatccacactgaacatcaggcatcattagccaattattttaattggcacccatgcccggacagtcc

SEQ ID NO: 133378 - DNA, 174 bp, Zea mays
  Clone ID: MRT4577_53129C.1
cccacgcgtccggccatttgttaatgaaaggaagtgcagaggatttagaaaagtacatgatccccagaccacaacaaaccaaaacataaactcatgtctgtgtcccatggtcatagtcaaagattacaaactgctaaaattaccaaataatttaaataaagtggatttgaacac

SEQ ID NO: 133379 - DNA, 282 bp, Zea mays
  Clone ID: MRT4577_5312C.1
tgtgtttgttaagcgaaaaggagcaaggtgggcccggcaattaaagtggaatttggagctgggcttaagccaaatatcgagattaccaacgcgtgcatgcgaatgattagattgtttattgtgagacctaaatttaaataactggtcgctggaaaccaacgtccctgccggaaaaatcacagcggaaccaaatttattgaaccttgaacggcatgcaaagatctccagctggcctaatggcataaaggccaaggcctgtcgcccctttgaaccggtgagaac

SEQ ID NO: 133380 - DNA, 241 bp, Zea mays
  Clone ID: MRT4577_53130C.1
cctctcgctgaacgctgcaacacatcatcaagtgaaaccgtgagagggaatgggatcaacaacaatgtcccctccatctttttccgtcgaacttcctgctcctcctcctcgccaccatagccgcagacgccggaagcaacattgatgaggaggtggtggacgacctccactatcttattgacaacttcgacgacattcccaccaacgatcccgaccggtggcctgagggagactacgacga

SEQ ID NO: 133381 - DNA, 350 bp, Zea mays
  Clone ID: MRT4577_53131C.1
tcggtagcgatgactgcaatagtgatacgaaccggatcatctgcggccaggggtaactccggacccttcgtgaacatgggcaccgacactaggcgaaattcgaacccgtccttcctcgacgacaaggacgccaaggtggtggagaacgagcaccggcgcactggcaggatacggcatagtgacggcgactactgtcggtaggctgcatcaccgctggaacgcgaaaccacggcgcgctcgacatgactagtaaggccgacttggaggtcttcttgaccgccgaacgctccggctacgaggcactggccgacgccaaggactggggagtccacgcaaactataccttagtc

SEQ ID NO: 133382 - DNA, 269 bp, Zea mays
  Clone ID: MRT4577_53132C.1
agtgttgaataacagtgacttggttactttgaggtctgtgttcagaaactgatttataaatgatggttctaaaaactatggacgaatgattagcaagatacaagatttgtttgtttgctttggtagtcagaaaagaagacagtgctgcaccttcaggggcagaagccggtgtaagttaataaggtgaaaagagggcgggacaccagtttattacttgaaaaaaaaaggcccaccgacacagggggtgccccggggggaaaacgactgat

SEQ ID NO: 133383 - DNA, 551 bp, Zea mays
  unsure (1)..(551): unsure at all n locations
  Clone ID: MRT4577_53133C.1
cggggtccttgttctcgttcctgtattttggttccaaagaaagatggtagttggcgcatgtgtgtagattgtagagccattaataacatcactatccggtaccatcatcctattcctcgattagatgatatgcttgatgagttaagtggttctaaaatattttctaagattgatttgcgcagtggataccaccaaattaaaatgaaattaggcgatgaatggaaaactgcttttaaaactaagttcggcttgtatgagtggttagtgatgccttttggattaactaatacccctagtacttttatgcgtttgatgaacgaggttttgcgcccatttattggaaaaattgtggtggtttattttgatgatatcttgatctacaacacttgtttatttgaacatcttgaccatctacgtggtggttttgatgctttgcgcgtcgcgcgcttatttgctaaccttaacaaatgcaccttttgcatcgaacgcgtattggttcttggcttnnaaaaaaaaaannaaaaaaaaaaaaaaaaaaaaaaaaccaaaaa

SEQ ID NO: 133384 - DNA, 760 bp, Zea mays
  unsure (1)..(760): unsure at all n locations
  Clone ID: MRT4577_53134C.1
aattcagaccagcgccatcactgcttggaaggttcaaatctcccagcactacttggtcttgaaggaaagtgagaggcgaaagcagaggagtgactttgcccctagcccgccgccggccatggcctcctacgacaaggccatggagtcgtacaagaaggccgtcaccacggcggcctccctcgcggcgtccgcgatgctggtgcggggcgtcgtcaacgagctggtgccgtacgaggtgcgtgacctgctcttctccggcatgggctaccttcgctcgcacatgtcgtcccagcacaccatcatcatagaggagaccgaggggtgggccaacaaccagctctacgacgccgcccgggcgtaccttgcgacgcggatcaacaccgacatgcagcgcctccgggtcagccgcgtcgacgagaccaagagcatgatgttcagcatggaggagggcgaagagatggccgatgtccatgagggcaccgagttcaagtggcgccttgtctgccgggacaactccagcgccagcagcagcaacgccaacggccgtggcggcagcggcaatttcaagcttaaggtccggtccttcgagatgagcttccacaggaagcacaaggacaaagcacttacctcctacctccctcacatcctcgccgtggccaagaaaatcaaagagcagaacaggacgctcaagatctacatgaacgaaggtgagtcatggcttgccattgatctccaccacccatcaaccttcannacgctt

SEQ ID NO: 133385 - DNA, 599 bp, Zea mays
  unsure (1)..(599): unsure at all n locations
  Clone ID: MRT4577_53135C.1
cttaaagcttacaagcttcttcgaggtataatatacattggtgtggtccctgatgttgtgacggggaacacactgctaaatggactgtgtaaagtgaggaatcttgatggagccctgaggctcttcagggagcttcaagtgaaggggttccctcttgatgagatcacttatgggactcttatcgacagcctcttgagggcgcacagatataatgatgccttgacattgttccaggacatattacacagtggtggcactcctagtatgccgatctacaatagcatgatgagatcgctttgtaggatgcagaaattgtcacaagcaatcaacctctggtttgatcacctgccccgaaagtacaatctcttagcccaagatgaagtaatttctagtgcccgaaaaaagtttgaagagggttgcctgcatgaagcagttagggagctaatcaagattgatcaagaatatggttcagtaaattcatgtccttacaccatttggctcataggcctaattcaagcagggagaatagagtgccctcaatttttcatatacttgagggatcaggngcattgatatcacaccagcttgctgtgttcatc

SEQ ID NO: 133386 - DNA, 456 bp, Zea mays
  Clone ID: MRT4577_53136C.1
atgtccggtgcgacagccacgtcaccaaatagccgttggatcgaccgttggggttctgtcttctgggcccgccttgatgtccggtgcacaccggacatgaactgtagattgtccggtgcgcctgctcccgcgtgcctgatgactgcgcgcttctggcgcgcattaaatgtgcctgcagggactaggtgtaagcctaattccctttcagtattcttttgtatatgggtgatatacaaagaagacattaatatgaagacatgtgagacgattaactttgaaataagtggagatgtccatcttggttcagttagtctttgggatggctgtagcacaattgatttcacaaactttgcaacacaaggtttaataccaactacctcgttctataaggatgcaaagattcttcgaaggaactttgtgattgatctgttaagttatgaggacaattcgtgctga

SEQ ID NO: 133387 - DNA, 305 bp, Zea mays
  Clone ID: MRT4577_53137C.1
ccacgcgtgcgccacgcgtgcgagtggcatatgcgacaattcttgacatcacacctacctatatccatcaatgagtgcctctcggcatatggagcatggatgaaggggacaagggggaaaaactactagcttgattgtccctgctttatgacagatctttgttatgacatgtacttatcaggagatcgattttacggaaggaatatgtactctgtttttactacccgaattaagcttttcttagtctcatattgagatgaatcaaacaacttctactttgtggtattatatacacacactattaa

SEQ ID NO: 133388 - DNA, 292 bp, Zea mays
  unsure (1)..(292): unsure at all n locations
  Clone ID: MRT4577_53138C.1
aagccctcaccccgaccttccaatatcccaaatacacgatccaccttttctttgtcaaactcaccctncacatttaacactaaaaccatacaaacccaaacatagaatactacgccacaaacaaatcaccaaccaatcacatctgcctactacacaagaaccacgggtacacttacagtctacaacattactaacaaccccacatcacaaaacacacacacgtaactccttcagcttcgtgaccacactcactccaacatcaagaccattaatctctccaacaaataccacc

SEQ ID NO: 133389 - DNA, 275 bp, Zea mays
  Clone ID: MRT4577_53139C.1
ggagcgccaacagagcacaccgaaacacgacgcgacccaacaaggcgaaaaggaagaccagccgagcacggccaacgcacgcccgcgagaacaacccagggcgcacacgcaccgcgcacaaaaggagggaccggcgcagcagaagccaaccagggccgacacgtggcaacagaggaaaaaaaccgccaccaacaaacacgagaacaagggaacgaccaacaccagcacggccaaacacacggcaaaagccgccagaagcaaaagggaaggccagg

SEQ ID NO: 133390 - DNA, 361 bp, Zea mays
  Clone ID: MRT4577_5313C.1
cggacgcgttggctacacacacgggcgctcacatttgtctcggcttctgtacccccctcctgcgcgcagggctgtctctctctccctcactctctttttaggagtgaggacgactggggcgaacgtcggcggcgcctccctacatcacgcgcccaggtcgtcggtccggccttcgtcagctgttttttgggcacttccgcggagacgaacacccaccaggtgctgatgcaaggctttcaaaagattaacagcttcacttgatgcagaagcaacacaatcacactaaacgactggattatacatttcagaacatgggttcgcggtttccattccaccatctaaacaatggcttgtatgtctc

SEQ ID NO: 133391 - DNA, 651 bp, Zea mays
  Clone ID: MRT4577_53140C.1
aactgcattgcgctacccatggttatccgataaccacgtatgttacggtatactgggcagtttgacaccataagcagtactgaagccaccctacagtaacccatctcatgctgcttggaactgattgactatttaatctttcgtaaatctaatccagagatcattggaaccatataacttcatacccagaactccaactaagagaaaaatggacccgcctggagtatacacattaaactcggtagctgaatacagacacgctctttgccccccacatgcataaacataagcctacaggacttaactttaactcccacatgatactttatagtcaaaggcctcgtgtataacataatactatttgaccgctatacattgctagcatcacgaaatagagcaattgcgaatttcgagcaaccggacaagccgctaaaggatgctaagcagagataaaccctgtcaatataatagatcctaatgaatgttcatcgattaccaatctccagtggaaatcgacacatgtatccatttagaatcctcctttaactggattaaaggatcctccaattggaaatgataacagaatgcataagtcatctataggaattctaataaacgaatagctatagtataccagctaacgattttatt

SEQ ID NO: 133392 - DNA, 245 bp, Zea mays
  Clone ID: MRT4577_53141C.1
cccacgcgtccgccgggaggagtaagctgtcacgacgctccctctgccagctggtcccgggaattctgtgaaccaggctgctgtctcctccccagaaagagtccttaccttggagagggtcctggagagaatttcctcttccccagctaaataccctgcctgcaactgaagcagacccgggggtgtcctccctgccctctgcccagaggccacctccactcctacaaaatcaaagtattgtccag

SEQ ID NO: 133393 - DNA, 1413 bp, Zea mays
  Clone ID: MRT4577_53142C.1
ccacgcgtccgcaaataccattgataatgcactaaaatcctattttctagcatgtaaggggttctggtatatagatatttataacttgtacacaacactttatttgcagcaaacaaccgatttgtttctgagcatgcaaaatgaactgcatagactgggtcactattaatattaactgatggaattatggtattgtatttaaggaatcttagagcaactccagtagttctctaaaagacttcctaaatcaataatttaggtagttaacataaaaattattctccaacagttctctaaatgaacttcctaaatttaacaacttgtcatctaacctcattttctctctacatttggcaatcatttaacaactccctaaacaaaaatattgactgcattatgtagtttttgtgacttattttttatgtggatagatacaaaacaaaattacaacctatatttagagaactattggagaactcatattttttttactccaatggccatttaacaacttcttaaatctgtgatttagagagctaaaatttacataactattggagttgctcttacagtgttgcatacactgctaagcttacagcaaaacccaacagggcgccgactgtgacctgaagctccgtgtggccaacagattcactcaaccggtaatcctcctctacgtaagcctgcttcagctcagtcagctcagacccacggagcccattcacccttggtgattcggtgctacaaccgcgcttcaaggaggggctcgcattggagctcgcttcctcggagaccgaaacaaactcaggagctgccatgtccacttcagaatactccagaggtgccttctctttgaggatccaaaacctgttcaagaccttggcgtggttgcccacttctcttcttactccctgagcatcatacattacaattgctgcaaacaccactgacattccaaatatggagtctgcaaaccccctgcacactaaatctttctagcccaagcgaagtagcaactgcaacaacgctcgcggagtgggtggagggcatccctccggagcggaagacggtcctgaggtcaaggccggcgccgacgcccccattcttgaccgaggtgaagggcttggacagctgcccgatcgcgctcgccactgtcgccgcaatcaaaaccttgttgcgcgcgagctcggcgatctcccccgggccgaggtggagggaggccgccggcgcgactgccctgcggcgcggtctgcacgcggtaatagacgaggcgctagttctcgtggtggagaaggacggtgaggaggtccagggaggagggcggcgagtcacccaggatgaagacgggatgtgtggggaagagaagggtcgggccatggccgtcgggacggcgggcgggcacccacgcggccg

SEQ ID NO: 133394 - DNA, 344 bp, Zea mays
  Clone ID: MRT4577_53143C.1
cacggaccagctgagcaagcccgtctcgcccgagaacattctctactaccacaggatcggcgagtaccagaccgaggagtgcatgtacaacgccgtgcgccgcttccgcaaggtgcgctacgacacgctgcgcctgccgaacaaggtcgtggcgcggtaggccgactgctccgtcaagttcggccagagctagggctcctcctacctcttatacccggacatctacacatacaggaggatctccgtgcaaggcatcatacaaccgtgctcggctgcgcccgacgacactatggccacgcatacagtctgaccttaacaggaagcttgccgccatggtaaatgac

SEQ ID NO: 133395 - DNA, 1172 bp, Zea mays
  unsure (1)..(1172): unsure at all n locations
  Clone ID: MRT4577_53144C.1
ggcgattggcctcctgcacaccgcgtgcggcacgccggcgtatgtcgcccccgaggttctcttgaagactggctacgacggcgcgaaggcggacatctggtcatgtggcgtgatcctcttcgtgctcctggcaggctacctcccgttcaacgacaccaacctgatactggtgtaccggaagatcacacagagcaactacaagtgcccaccgtggttctctgtcgaggcgcgcaagctcctcgccaggctgctagaccccaaccccaggactaggatcaccatctcaaaggtcacggcaaatccatggttccagaaaggactctgccctctcaccaccgacaagcccctcgacttgtgggagacctccgaggtgctcggcaaggaaaaagcctgcaggtgccgccaccaccagcgcgacgacgccgacgccgacgccgacgccgacgacgaggagaacaccaggaagaggaagcggtcgaaggtgacggtgtcttcaccaccgaccgttgccgtgaggccttcgagcatgaacgcctttgacatcatctcccgatcgagcgggctggacctgtccaagatgtttgacgaggagcacaggtcagaggcacggttctcttccagagaatccaccccacgcgtccgcccacgcgtccgcccacgcgtccggacgcggaatctcgacatcaagctaaacaagaggggcagggtcgagatggagggcggtcagtactgtcgaagaggcacgcttgtcatcgaggcagagatcttcgaggtggcgccatcggtgcgcgtggtggagatgaggaagattggcggtgactcgcccgagttccgagagttctacaggcaggaactgaagccatcgttaggtgacattgtatggtcgtggcagggcagtgattcacctcctactcccttgctgccgccggcgccgaggcaggcaaccaaccaacgtccatgatttcctctgcataaaaaaatttgcagtggaattttggcacttatggttcactaaaaacatgatgttaaacatattgtcactattaagggtggctggcaaatgatttgtcactgtcatagggacgctgtactagtagcataacatttgtgataatatatcatcacgggctcataatagatatgacaatgaaaatgatttttattgcnaaaaa

SEQ ID NO: 133396 - DNA, 279 bp, Zea mays
  Clone ID: MRT4577_53145C.1
cctgcaccgacgccgcgacaccgagctcgcccgagctgcaaaccgtcccgcgcgaccgtccgctttaatggagatttaactcgtccgttcctctttctccccattcctctccccgttagtggtgataatggcgacgttaatggctttaaagaccgccgtttctctccccgtctctccctctcccctccctctctctataaagccacggccgaagcccttcctctacattcccctgctcgccatccctcctctcgcatactgtgtttgttgtgcgtgctg

SEQ ID NO: 133397 - DNA, 318 bp, Zea mays
  Clone ID: MRT4577_53146C.1
aaaaaaaaaagggccgcgcaaaatatatattatatatatcatatatatatatatatatatacctatatatatatatacattattaaaattattccaccacccccccctgcctgcttatcaatctaccccatcgaccctaaccttaaactgcgagggccacaacaaaaaggctccacctgcacctgtacaaaaaaaattgccgcattcacaaggaatactgcaccatgcatctgtaaaatgggcttggcctccccttgaatgggataactttgccagccaccaaccactttccaaaaacaaaacccctcccgatggaaa

SEQ ID NO: 133398 - DNA, 833 bp, Zea mays
  Clone ID: MRT4577_53147C.1
tatccttggagcattcctagtgatgatggggatatgatgacgtgaggaaaaaatatatactactcctaccactagtagattgattaattagtttgtataaatctacgtaccgacatattataagtagcttgtgtggactatttaagtaaaagaataaaaaccatgaacatgctctaaaaaaaaaaaaaaaaagcagtcggtcggtcggtcggtcggcgtggattaaatgatcggacatatacgaagggtgcacacggccggtatccttggagcattcctagtgatgatggggatatgatgacgtgaggaaaaaatatatactactcctaccactagtagattgattaattagtttgtataaatctacgtaccgacatattataagtagcttgtgtggactatttaagtaaaagaataaaaaccatgaacatgctctaaaaaaaaaaaaaaaagcagtcggtcggtcggtcggtcggcgtggattaaatgatcggacatatacgaagggtgcacacggccggtatccttggagcattcctagtgatgatggggatatgatgacgtgaggaaaaaatatatactactcctaccactagtagattgattaattagtttgtataaatctacgtaccggcatattataagtagctttgtgtggactatttaagtaaaagataaaaaccatgaacatgctctaaaaaaaaaaaaaagcagtccgtcggtcggccggtcggcgtggattaaatgatcgggcatatccgaagggtgcacacggccggtatccttggagcattcctagtgatgatggggatatgaatgacctgagggaaaaa

SEQ ID NO: 133399 - DNA, 906 bp, Zea mays
  Clone ID: MRT4577_53148C.1
actccatagggcgattgttatggcgattgggggccgggaaaccggccggggatctattgtagtagcaaagttttagaagttcgatgacagggcggacggtttgatggcccatctttctccccgcggtgaccacgcttccctggaagcctcccctgcacaactatggcgtggccgcttccttccttccttctttctcgctactccgtccatccccgttgtttggaacaagtgatagttcccacggttgcccgaggggatgaggacgtcgaggaagggcatggccaccatgccgttggacgtttcgtctcgcggatttcagcatttgttcatggcaccggtattcccattcaacgaagtataggtggaacgattccgggtgcaatccgacacaaacgaacaagtcccaagtatatacgtcgattgagctgacatggtctcgttggagctggtttggaatttgaagaaggggcgatcggagtcggagcaaagggaaaagacagtggcgtcagaacatggaagatccaatccaaggagggcaatgctctgacagtggggttggttcgtcattgtcaacaactcaacatcattggttcccggcaccaaaatgtgtttggtttataaggttaaactaggatgagctgagggtgacaccgttctctcgattttttaggaccatgccggcacaaaaaattgcttcggtgttcatctcgctcccgcatgactatcattcaaacataattaaaaatgtgaccgtctccttccaaaaaaaaaaaaaaaaatttccgcccccacgcacgctcacacaatcactggaatccgaggggtcatgcctgcaggatgagacacgtgacatttatgtagttagaggtgaccgcagggtgatgatactccaatcgtactactttc

SEQ ID NO: 133400 - DNA, 241 bp, Zea mays
  Clone ID: MRT4577_53149C.1
ccggggcggccgcgcctttttttttttactctatcctccgccgtctcgcaatcttttatggctccacttggtgcacagactatttgaacttaaatcgtgagggaccgtattaatattgtcattaatatccatatgatcacaaatgctatgaagatggttgcatcattaaagcttctggctgtttatactaggtctgaaaatatatgtgtcttgttgcaacctattcaccgccctttctttt

SEQ ID NO: 133401 - DNA, 758 bp, Zea mays
  Clone ID: MRT4577_5314C.1
ggatagttatatatgaattttatataatctgaaacactacaagcaaagttacaataatctgaattttcagaatgctttgtttttcagaacattggtgctgagttagggagttcctaaattataaaaaaaattggaaccatttggaaaccatggaaaccatgcaacctgtatctatcactgtgtatctctcacgacctgttgatggttcaagaaaggccatggaaaccatgcagcctgtatcttgaggcttttctgtcttgcagagttgcagttgcagcgacgactccaactccaacgaggggatccatgcctggactgcaagtataaggaggggtttacagagccacagcgccttgtccaatccaagtccgcaattcagcggcaggcaactagttgtcctgttccaaattcaaaaccccgctagatccgtgccatctccagttccatgtatgctccaatttttttttgtttttttaaaaaaaaatccaagttccagtacctgagcatgagtcacacacagctcggtttaggcgtttgctgggcagatcagctactcctccactgcaccgctggtaacgatccgcgaactagtccaccagcgatttgttgttttgttcttcagcctgtcagccaaccttaactgctacgatcggtcgatcaaggggggaggaagtttctggagctctgcccatggcgtcggcgatggagctcggacgcgtgggcggacgcgtgggcggacgcgtgggcggacgcgtggg

SEQ ID NO: 133402 - DNA, 1607 bp, Zea mays
  Clone ID: MRT4577_53150C.1
tgggaccctcgggccggccgggtaatctcttaaatgtgttgttccctccaccacttcacgtcccaggtcatcaccctctcggctttactgttcgcccatttgcttccttctacaacgtttcagattcccaagaaggcaagaactccctcccttctcaacaccagcggcagctttggagctaaaggggcaggcagcctttgaccctcctcctccgccatggccgtggtcgccgccggcgccgaggcctttgaccccgcggcgccttccccgccccgcgctccggcttcgcgccaggacgtgcaggcgaccatcgccaaggccgtcgagctgcgccagctacgcgccgcccttcttcagcgcggcgcgcccaatgcccgtgccagagccggcgccagccgcagcccggccgtcatccgcctcccgccggtcgcgtcccccacgcgctccatagcagcggacgaggagtaccccgtgtttactccggcctacgacgacgaggagcgcgtagctacagttgcactgaaccacatttgccaggacaaccgaagccggtcggaaaactggaccggggtcgccctggatcacgacgacgcggccttgttcgactacgacggcctccacgccttctggcgcttgagcccctcgaggccggccggggacaactcccagacacggcgtggccagccttgctggtttagagtgccacaggttggtctcattgcagtaaatgatgggattatccttcgcaatcatatctcacgaatccttcaacgccacttcaaaggaaagccatattatgttgatatcattgacttgttcaacgaggttgagttcaagacagcttcagggcaaatgttggatcttatcactacccacgagggtgaaaaggatctaactaaatataacttgacagttcaccgccgcatcgttcagtacaagacagcttattattcattctaccttcctgttgcatgtgcattgctgctggctggtgagaacttggaaaactttgttgatgtaaagaacattctcgttgaaatgggaacatactttcaagttcaggatgactatctagatttgttttggtgatcctgaactcattggcaagatcggaactgacattgaagactacaaatgttcctgggctagttgtgcaagcctcttgagcgtgctgctgagaaccaaaagagcattctgtttgaaaattacggaaagtctgatcccagcgtgtgttgcaaagggtgaaggacttgtacaaagagttaaaccggccgggtggagggggttttccatgagtacgagagggagagttacaacaagctgattgccgacatcgaggcccagccgagcaaggcagtccaaactgttttgaagtccttccttcacaagatctacaagagggacaagtagacccagatcgtcgacaagctgctccatcgacgcttgcatcaatcaaattactatacggccccgtttgtttcttttcatttcgaggaattggaatcttactaatgtaataagctatttttttagaatatgacattccaccactttccaaagttatcatatcagcctatctcaagaaaaaaaaaaaaaaaaaagcggcc

SEQ ID NO: 133403 - DNA, 405 bp, Zea mays
  unsure (1)..(405): unsure at all n locations
  Clone ID: MRT4577_53151C.1
aggancgagccgactcacacagaacgcgccgccggggccaaccgaccacacactacggancgaggatgttttacccccaccncnncaagnacaacancancggcgacacaggcggggggaagcaggcccgcagccgcagcacacggacaagcgccaccagcccgagcacgancncaccaacggcgcagaanaaggcgcccgcacgaccaccancgacaacaagcccaacaaactccagaacagggacacggccggccaagaaacacccagagccaccaccaggccacaccacagaggagccgcaggagacctttttttttacgccacccccacgagggagaccttcaatcatctcgcaagccggccagaagcatgccaggcaacatgcaaacgccaccatgacag

SEQ ID NO: 133404 - DNA, 1132 bp, Zea mays
  Clone ID: MRT4577_53152C.1
accaggtcccaccaccctctctcggctcggctactgttcgccaattccttgcttccttcgttcggcacgtttcagattcccaagaaggcaagaatcccctcccttcccatttcccagcagcagcagctttggagccaaaggggcaggcagcctttgaccctccaccgtcgccatggccgtggtcgccgccgggggcgaggaggcctttgcccccgctgcgccttccacgtccggcgccccggcgtcgcgccaggacgtgcaggcggccatcgccaaggccgtcgagctgcgccagcttcacgccgccctcatccagcgcggcgcgcccaatgcccgcgccgccagccgcagcccggccgtcattcgcctcccgccactcgcgtcccccgcgcgctccagagcagcagacgaggagtacccagtgtttactccggcctacgacgacgaggagcacgtagcagccgttgcaccgaaccacatttgcccggacaaccgaagccggtcggaaaactggactggggtcgccctggatcagggtggcagctgttagaactccggcgaggaggatgacacacgagaagcagatacagaggagacgattgattttggtgctgtcaatcagactgcattttctggttgttctctatctctttataaaggaattacatgcagtagaaattggtaagtaaatcacaatacctggaaggtgattgtgtgctaatctacttgctaagaaataaacactaattctgggcttactataacagcagcgacgacgcggccttgtccgattacgacggcctccaagccttctcgtcctccaacagcgacgtgttcttcccttcctccaacgaccaccgtcttcggaacagaggcacggcgtacaagatccaccccgccttcatgcactcggcgccgtcgggcgaccgcttcctgccgtccgccggccgggtgggctacacgtccgagctgaacctgccaccggcgacgtgcgggaacgcgtttcgggccgtcacgatcagcggcaccagggtgccacccccatcggggcactcgcggacgaagcaaggaggggcgacgcaaaaccttttctggctcttccccagttcgagaaagaaagccaagccaccgg

SEQ ID NO: 133405 - DNA, 366 bp, Zea mays
  Clone ID: MRT4577_53155C.1
cggacgcgtggggccactaccctacttaaccgccccggcctcagcctcatccggggccgcacccatgcccgtgccaacagccgcatccaagcccgtgccagctgcagggaacctgcggcgtaggcagcaccaagatcctgggccagtgcgtcgagtttctgaggcatctctacaatcgatccgaaatccactactgctcacctgaattccagtctaaattactgtaagttacaccgttaattacctcaatacatgtagattgatctcaatactagagtatccaaactatacctaagaggtgggcgttcctcctttataaatctagccacgtaactcactttttcagtcatgtgtttttggaaagca

SEQ ID NO: 133406 - DNA, 171 bp, Zea mays
  Clone ID: MRT4577_53156C.1
ttttttttatctaacatgagatttctatgtcaaaaaatttagatcattcgttgtctggttcgaatttcagtagttttgtacctgcgctagagttggactacatagggtccttattcctaattgtcatactatactaattaagaacacatggtcttgtttattttgatacgt

SEQ ID NO: 133407 - DNA, 120 bp, Zea mays
  Clone ID: MRT4577_53157C.1
gggacgcggggcctatggggttggggtatgtgcgagaccaggactacatggtgagtgaaacatgtatgagttgccggtgattcgatggaagactaatctgggcgcactgacgatcactcc

SEQ ID NO: 133408 - DNA, 167 bp, Zea mays
  Clone ID: MRT4577_53158C.1
cccactcgttcgttcaccttctttagtcgaaatgtgttggagacacgacccaaaggcctgggtcatgtatttatttgatcgataccgaaacacatgtgcttcagttccgatatgttcagttccttcataaaggatgctcctgataccaccatctgcaaaaccaatac

SEQ ID NO: 133409 - DNA, 271 bp, Zea mays
  unsure (1)..(271): unsure at all n locations
  Clone ID: MRT4577_53159C.1
angncacatagttttatcgcaccctataatttcatagagcaccccgcccaggtgaggaggacacgccttgctattctggccacacannaaaaacgcccatcctactccaacaaaggattctgcatgtaaacacccacagcttcaaagcgctctcaactctctaaactcgcccgcatacttaacactcccgaaaacaagcacggcactgatattgtttctgctacaaaagactaatacccacatgctgctgattacaacccttcgattgaaa

SEQ ID NO: 133410 - DNA, 400 bp, Zea mays
  unsure (1)..(400): unsure at all n locations
  Clone ID: MRT4577_5315C.1
actcaaagccccagggcttccattatatattatatatatatcggccaacttagngggtagtnngngggggannngcncnannacactccanagcatcctatacccttgtccatccatgcacgccagtttgagagcacattacatatgaggataggacgtaactgctctacatgtaaataatacgtatgaccaccaccacgaatcataactgcctggaagctagtatagcttcccatgatgctggctcccggcgtgtcatcgtccaccgctatagcggccacctctctcacgaaatgtgctcgcttggccatcagaatcgcactgatttatgactcagtacacatgcactcgacgagaangctggcattgccagacaactacccaacggccccagctccgg

SEQ ID NO: 133411 - DNA, 462 bp, Zea mays
  Clone ID: MRT4577_53160C.1
acatcaaattcaatgctttttgttacacaatttctcttgagcaaaagctcatcttgctaaggtggcacaatctaactggaggatccagtcctgaggacacacgcgtgcaaccataccaagttatgcaaggcaaatgaaatcccagcaactcttaaacttgttctcccgcaggatctactgaatacgatgccaacgtaagacaattgtgaacaaaaccaaaccaagaggggaatccatttgcgagattgaggagggatctcaataaggacacggcaggtagattaattcttggacatgctcatcacacccttactgggcgaacatccatttgaaacattaagcttgacactctatataaccgagaaccttcagttttaggggaaagtcctccaaatgaacgcctttgtgccggagacattggcggaaggcttggagccacccggaaagccccagccggtattg

SEQ ID NO: 133412 - DNA, 774 bp, Zea mays
  Clone ID: MRT4577_53161C.1
gggctaaatcaagatttaattcgaccttttcattgcattagcctctcttaactttgcttcttctttaagttgatgcacatgcaatatatgtgaggaatttacctttaaatgccactgaaactcaactggaggatgagttcaagaagtttggtaccattaagcaaaatggcattcaagtcagaagcaataagattcaagggttctgttatggattgggggagggcgaggattctatttctttccagagtgctatagaggcttcccctgtagcaattggcggtcgtcaatgttacgttgaggaaaagagagcacctggttcacgaggtcagtttatatacaaattaatacctaatacttatgcagtgtctgtgacaattatattgttgagtcaaatgaatatgatgattcatcctggtaccagtatgatgactcatcctggtacaaggtcatctcatccatcttgcgttggactgcctgaagtcccctcagaatggtattatgatagttgccacaatcttgttcgaaaagaaaaaggctcaagtggataattttttcatagctgtttgtcttgtatgtatattatttgctctgtatgcattttgacacctgaacctttgtggtttatgttgggtttcaactctagactaccccaacttgcttcgagactaaaaggctttgttgttgttgatgtatcctggtaccagtattgctaacattaaatcaggtggggattctgcattttagcttatggatcataagagaatggagatggat

SEQ ID NO: 133413 - DNA, 242 bp, Zea mays
  unsure (1)..(242): unsure at all n locations
  Clone ID: MRT4577_53162C.1
ggccgggatccgatacctcgaacatttctcttgtccagttccaaggcgcaacagctcgccgcctttgcccaaccatggctcccgccttgaaaaagacaactggatccttgccatcaccaccatcgcctttgtcttctcgtcggcttccaatggtgccaacgatgntcgccaactcctatngccaccntcggtggctgcccgcaccctgaagatgtggcaagccggtgtccctcgccctcctt

SEQ ID NO: 133414 - DNA, 196 bp, Zea mays
  Clone ID: MRT4577_53163C.1
ggggttgggttttttttttttttttttttttttttttttttttaaacgggaaaaacaaaaggcccattttttactgcccaaaatttcctgaaacaacccaatgttaagcccacaagccgggtgtccctcctgggaatttgtgatacaagggccgatataaaaaaacacaccctggtttgaaacacccttattaccc

SEQ ID NO: 133415 - DNA, 399 bp, Zea mays
  Clone ID: MRT4577_53164C.1
gttggccataaattggagattgcttttcacgagcgaagcccctcgacatgacaggaaaggaaatcaagaaggcaagaaagtaaagagaaatgtgcatgaaaggtgaggttataatatcacaagaaattaatttagatatcagccgatacttgcgaaaagttaacctgccttttttttagtgtttttgggtaatatctgaaatttcaattagttgcgtgtaggaaaaacattccgctagcactaaactgtgaagtgaatgatatgtaactataggagcatatcttttatttatgtgtttgaaaagtgtattaggagctgtgcttcatgtcagggctaatctttgccgtcaaatctttgtaacatggttaagagatggtagacccgatttttgctgctttt

SEQ ID NO: 133416 - DNA, 572 bp, Zea mays
  Clone ID: MRT4577_53165C.1
gtcggccggggaaaacacgattcctattaacaacgggtcaggcatacaagacgaggtggatgtgtagtatccagtctgtgccaaggggggaccccgtcgagctcttcgtactcagctgcgtcgatggagctctttcatggcgaccgggtcgaagaatcttgggagatgagaaccacaaggaagaacggcgctgggaacaggatcccggctacgggtgtccatgtgatgccgaagatcgctcaatctctgttcgttcacgcgaacaggcaagtgggcttctatgtgtttgcgagggtcaacttctctagccaatttccccttctgcgtcgccttcttgcagaacagcatccttaaagttcttcagctccctgccaacagaatcagtccggaagaccacatgtttagcattagcgctattttacctgtatttttttttttcataaagaataacgcggacagcatttaggcagtagctaggtactggacgaaaagtaaggagaattaatggaaaattactgtaaaagcgctaagggccgtgacagagcatgtatcatttctatagtacatacccg

SEQ ID NO: 133417 - DNA, 1311 bp, Zea mays
  Clone ID: MRT4577_53166C.1
gtgcggattgccatgtcttgcatgtggagcatgtaattatacccaccagctggtctatatgggaaccccgagggcggccggggccgggcaacaacagcatcatatccttagctgctgacacaaatggagatcttccaactccatctgatgatcctgccttcgctactcacatgcttcttctccacactcctactcacacagctgatggctgcgggggcggcggaggcgacggtgaaagtgagcactaccccgatcttccctgagatcccactgggccaggctagaaaggacttccaagtgctgctgcgcgtcgaggcgccggcggcggttgtgcgtcccgaggagcgcgtccccatcgacgtcgtcgccgtccttgatgtcagcggtagcatgaatgacccagctgcagtgccgccggagaggaggacgacaacgtcgaggctggacctgctgaggacggccgtcaagttcatggttgacaaactcgaagacggagaccgcctctccatcgtagcgttcagcgaccgacccgttagagaacttagctccggcttgctatacatgaccgccgacggcaggagaaacgcaataagaagcgtggatcggctcgaggcccgcgccggcagcggcactgcgcttgtcccggccttcgaggagggggtgaacatcctggacgagcgggtgggagacggccgggaccgcctagggttcatcatcctcctcaccgacggcgagggcacgaccgtgtccgcgctgagcgagcggcgccgagaggtgatccgacgcgctctcggcaggtaccccgttcacgccttcggcctcggcgcggcgcacgatcccgaggtcctgctccacatggcccaagagtctcacggcacctactccttcgtcgacgacgacagcatcggcgaggtggccggcgccctcgccgtgtgcctcggcgggctcagcaccgtcgctgccgtggacacgcgcgtggtcctcaaggccgacgagctgaacggggtgcgcatcgaccgcgtcgacgccggcggctacgacagcagcgtcagctgcggcggaacctcatgcgaggtctccgtgggcgactcctgtacgccggcgaggcgaagcatttcgtggtccaccttcacgtgccagctgctttgccatcgtcgtcagcaaagggcgggtactactgcgatggcctcggcgcctgtgaccgttactaccatcatcgccacgagcagcacctgctcgccgtcgactactcgtaccgcaaccatcccagcgcgcgggcgatagagggagaaggacacgatgtatatgtgc

SEQ ID NO: 133418 - DNA, 683 bp, Zea mays
  Clone ID: MRT4577_53167C.1
gggccggcgcgcctctatggccgcgtcacccctacttacctacgccccaacccggctgccatggacctcagctatgcgctcttccgctccgggcaccgtcctccaggacggcgcctacgagtaccagaacctcttcgacgccaccgtcgactccttctacgtggcgatggccaaccacgggggctccggcgtcacccttgtggtgtcggagagcgggtggccatccgctggcggcgtcgcggcgtcacccgagaatgcggccatctacaaccagaacctgatcaaccacgttggccggggaacgccgcgccacccgggcgccatcgagaccatcctcttctccatgttcaacgagaacctcaagcagagcggcgtggagcagaactgggggctcttctaccccaacatgcagcgcgtctaccccatcaagttcaactgaagctagctcgatcgaggcgatcatgtattgctttgcgaccaccactgggagtgtctaaggctactctcagatgagtatgccatgaggattcttatacgtcgaagtcgtcgagagaccaacgcatgggcaacgcgtgtgaagtgtgatcaatatttttctttgatttttttttttgtgttttcactgaaattgaacttcgaataaaaaagccagctctttgtacggctaagggatttatgtccct

SEQ ID NO: 133419 - DNA, 1117 bp, Zea mays
  Clone ID: MRT4577_53168C.1
cgaccctgtgggtcattgtcggaacaagggggtcggcactctgtgcgtggggggtaaaatctgctgactgtatcaggcgaaaaaataataccttgggcagacctccatagagaccggatgagaggggtccaccttcaccagcacgaggttcgaactaacagttgcggagaagaacattcttctagaagttgaacccattaaattacgtgtgagaagcatcttccgtgaagcatgtgacggtgttagacttaatccagaagacgagaagtttatcctggagaaagttcttgagcaccacccggaaaagcaatccaaggtgtctggtgaaatcgactacctaacggtcaacaagcaccagactttccaggacactcggtgctttttcgtggtctccacagatggatcccaggcagatttctcctacctgaagtgcctggagaactttgtgaggaagagctacacggaggacgcggacacattctgcatgaagtatttaaggccccgtcgcaggcaggcaccaccagctgatgttgggacagcatcaggcgccccggatgaggttccaccgtcaaccgcagctgagacagagcaaggcactcctccagcccctcaggcagaggttccacaagagacttggggttctcccgcagtgcctctggaaggaggaactcacatcgccggaccagactcaacaggcgacgctgtgatcctaggggagcagcacgatctgactccggcttctccagctgtggcaccacaagtggcttctgagccagacacaaccgacggcacggggcttctaggaaaggctccgcaagctgactggggacccagattcgacgctgactgatatttaggctgtgtgaagctgccgcatgtaaaagccagacctgtgctctgagcaagggagcattcccttgctaagtcgtcagttaactccccttgacttcatctggagaggtggacaggtagtagcggcaaacattctagcccttagcggcccaaagctaccccctgctgcccttaccgtatctagttggaccttcccctctgttggaatctgagtccgtctgctgttaaactttacagtatctagttgctgtggcttgccagcggt

SEQ ID NO: 133420 - DNA, 303 bp, Zea mays
  Clone ID: MRT4577_53169C.1
atgggtatgggtatgggggtaaatctatacccgccagtgtatatgggtgacccggtgggattatttttgtgtcgtgggtatgtgtatggggtagtaatacccggtagatatttacccattgccatctctagtccaacacagtccgcaggtccgccgctgacacttccgttgcggggcaacttccgtccgctcgccccgagcgccggaggagacgcggaagcggctggaggagctggatgcgctgctggaggggctggacgagcccaagatgtggcctccaaccccaccacctcctccgggtaa

SEQ ID NO: 133421 - DNA, 405 bp, Zea mays
  Clone ID: MRT4577_5316C.1
tttttatgatgggaagctttggaatctaaataactacagaacagatgtcatgcaagcacttggtgcagtagaaggcattttggagcatactttatctaaagggacttactcacccactaggcagggtctgtattgggagaaggcatcaaggttacaagagtcactgaaatacatgaaactgacagatgcacagcggtctggactcaatcaaattcacactggaagatttaccctgaggtggataccaaccatctatcgcgcaaaggtatatgttggttctcaggtccagctagatcttacgggcatattcatgcatggtacaatccatacattgaagatttctctgatccatatcttccgtgcacatctggggcagaagacccatgtacgatgaagtatggatct

SEQ ID NO: 133422 - DNA, 178 bp, Zea mays
  Clone ID: MRT4577_53170C.1
tcgctcacgcgtccgctccagagtcatcagaagaccctccccaagtcaccgaacaagatcgtcgtgggcagcactcgccactcgctctcgcaggcggtgaggcggcgctatcagagcggacttcgccctccccccacccccacccccacgttcccctacaggtagtcctgcaaccatg

SEQ ID NO: 133423 - DNA, 716 bp, Zea mays
  Clone ID: MRT4577_53171C.1
atwwtkkktwtttatattwtgtgtttttwtytktwttttttttytgtktgctgcatgtgtgtataatctatwatawtgttawtgtawaktgakwttgcttgttgttgctggcccgtatggcgatgacgkgwggkgggtsttkgtswtggwgatggcytgggwwggtagtgcagcyacacttcagggaggysatggttcskstkgrgggktskgaatgcagattttgtcaadggcacwgkyatgrtatggtagtkktgggbgccctggggatcktgcgcagttcatgtttgcctgctccagtgtcttctgccccttcctggagttgcatcttgcacaggcagtcaccaaattctcccattcccatttaccgccacgcgagatcggaataacatggtcaattgtcaagtcgtcaccacaagaacaatattgacaggtgaagtcatccctgtaaagaatgtttttacggctaaggctctgcttgacccttcttctctttactacctgcagcaactgtggaaccctcaaaactgcagggatgtagaaggacccgctaggcgaagagacggtctggtcgtagtactccaacacatgggcctgcatagcttcccaatgaactccaggcagatggcgcgcttccagcacaccacgttgacaggcctgtaggagagatcaagaaccaggcccctgaaaccggacagctcgtcggaggcgtactc

SEQ ID NO: 133424 - DNA, 364 bp, Zea mays
  unsure (1)..(364): unsure at all n locations
  Clone ID: MRT4577_53172C.1
gttggtggtcgggttttcaattttgattaaatgaacaatattgaaggggcttaattaatttcatgcacataataataatctcaagctgtgactgatgtctccacagctagctttccagggtatgcagcttctgattttatatcagcctcccatagttcaggcacagcctccctaaggttgtgaatgctttccaaagcataatctgcacctttacatctttgtgatgtaccaaccagcacagtgtgaagccccacacgttttccagcttgtatgttgcgggtactgtcctcgaagaacaaagttctctgtgggttaagattggctatattgagggccagttccntggcattttctgatggcttgc

SEQ ID NO: 133425 - DNA, 468 bp, Zea mays
  Clone ID: MRT4577_53173C.1
aagcgaaaaagtgaagcctgttccttactatgttcaaggatttttgctctctcagagaaaaagcaataaaaaaaaaaaggaaaaaaaaaaaaaaaaaaaaaaaaaaaaaaaaaaaaaaaaaaaaaaaaaaaaaaaaaaaaaaaaaaaaaaaaaaaggcgatcagagcgaggcacgggaagggcaacgacagagccatgagttacaaaaaggtcccggagtcttatccgccaccagggtactggaagccgtaccaaccgcccaaggttcaaccgaaggggccttactacccgtcgccgaattaatgaattctggggtaccagggttactttaacgacggacagaaaccctacggttatccgccgccgaagggtgggtattacaataagggtaacaaccaccataacgaccaccatgaccataatcatggtaactatcactaacaccacgaatatgatgactgatgcctt

SEQ ID NO: 133426 - DNA, 971 bp, Zea mays
  Clone ID: MRT4577_53174C.1
cgggtacagtccgtcggttgccagaaagcttatcccggcatcccgcggaatctcgctttgcgatgaaaccatagctccacccaattcttgcggcttcagagaaccagcgctccctgccgtcgctgtccctcgttctcccagcgcctctcattcagtcatccctcctctccgaactgaccgatgcggttggtgccaaggttccggccctctaatgctgcttgaactccagccttctaatgggcgcggctcagttggtgattctgttcttggcccttgccactgcggtgggggcgccgccgagcgaggtggccgtgggcgctctcttcacgtacgactccacgattggccgcgcagcgaagctcgccatcgagctcgccgtcgatgacgtcaactcggacggcaaggtcctcccgagaacccaactcaatttggtgccccaggataccaactgcagcggatttcttgggaccatcgaagcgttgcagctaatggaaaaaaatgttgttgcgctgattggcccacaatcctctgggataggccatgtcatctcccatgttgttaatgagctacatgtacctcttctgtcatttgcggctacagatccaactctttctgcatcagagtatccgtacttcatcaggacaaccataagtgactacttccaaatgaatgctattgctagcattgttgattattatcaatggaaaagggtgactgctatattcgttgatgatgattatgggcgaggtggtgtagaagccctcggatgatgcgcttgcattaaagagggcaaagatttcatataaagcagctattcctccaaattcaaatacagacgtgatcaacgatgtactatttaaagcaaatatgatggaatcaagggtcatgattgtgcatgtcaatcctgacacagggatgaggattttttctgtagctaagaacctccaaatgatggccagtggctatgtctg

SEQ ID NO: 133427 - DNA, 511 bp, Zea mays
  Clone ID: MRT4577_53175C.1
aaaagcccaaatggaacaaagggcattaaggaggcgttatatcgctcagttggggggggggcattagcccccccaccaatacaacattggtgatcatgggcaacaatacatattttgatcatccccattcatgaaacccccccattaaccatagctgtttaccctttttctgcaaggggccaagggggcccggcactatcattggcgggggcctgattattgcaacaaagcatgaaagcaagtttctcaaggaaaagggaaaggaaaggagctgaacctgaaacccccgaggaaaaaagccttcatgggagaggaacacaaacggcaaaaggaaaaagcccgcagtcttttcactacccctaaagggccgaggccccaaatataatctcaaaaacctctggggggatggatgcttggcgtgccctgttgtaagggaaagggagacgatcaagcttatcgccagcatttctgctaaagctgtccatggcaaacacacgggctccaagctcac

SEQ ID NO: 133428 - DNA, 453 bp, Zea mays
  Clone ID: MRT4577_53176C.1
gacgcaacaatatggacacataactacccattccaaaatgatttcacatatctgttatacctctgctatccacactgggtagcactcacaaatatccaaggctgaagcgcagcacactgttattggaacgggggcctaacgactatttggagacaggcctaaacctctactttaggctaatggacctaccaacacctttaagtggaaggccggacatgccctgggctcatgcggaatgaccaacccctgtactgaagctttatgaatctcgaagctattgtacacacatacttaatgtcgacaactttcactggggagccctacacaccactggtgcctagcccctttataacagaggcttgcctctcctggatatcgacaagattccactgggcacgtaccctactgcctatgcgaccaatacattgaaaaagcttaatggaacaaggcatg

SEQ ID NO: 133429 - DNA, 524 bp, Zea mays
  Clone ID: MRT4577_53177C.1
ggccgcttttttttttttttttttgtttttttttttttttttttttttttttttttttttttttttttttttttttttttttttttttttttttttttttttaaaggggggcccaaaacctttgctggattattttcaaagggggccccttttcccccaaaaaaaaataaaaaaaccttcgacccccacactgaaataaaaacagccgcaagcagccaaatatataaaagggcactgaaaaaccgtttttaaccaaaccttaccgggggaataaaaaaaaaacccacccctggaatggcccagggcccccggaggcacaaaaaacaaaagctggaaaaaccaaaaaaggcccccaagttcctttttaaaaggttcccctaatttgccaaaaaaggggggattggcccccaactttttttttgaaaaaaaaaaaggcaaaaaaacccccaaagggaaaacccctaacactttttttaaaaaaaccaacccgttgcccccaaaggcagaatccaagttccccaaaa

SEQ ID NO: 133430 - DNA, 1422 bp, Zea mays
  Clone ID: MRT4577_53178C.1
ttgggtacctcgaggccggccgggaccgggtctcagaaggatggaagcatgatggagcacccacacaggtcgccgagaaaatcctccccccaaacgccgacgaaattctccgcgagcaaaatataaagtttataaacccactcctccccttcccctgttccctctaccaccaccaccggcaccgcgggacagtctgctctcgtcccgccgcagcccgtccccgacccggaaccctagcgactgccattgcccacgcgccgctcgcccgatgaacggcgggggctctgggctggcgcccaacgccgcgcacaccgcggacgaggtcttccgcgactacaaaggccgccgcgccggcatgatcaaggccctcaccactgatgtggagaggttcttcaaactctgtgaccctgcgaaaaggagaacttgtgcctttatggctatcccgatgagacgtgggaggtgaccttgccagctgaggaagttccccctgagatccctgaaccagcattaggaatcaactttgctagggatggcatgaatgagaaagactggctggcgctagttgcagtccacagtgattcctggttactgtctgttgcattctactttggtgcacgctttggatttgacagagaaactaggaggcgactctttagcctgataaacaacatgcccacgatatttgaggtagtgacaggagcagccaagaagcaggcgaaggagaagacacctaatagtagcagcaagagcaacaggcctagttcaaaagtgcagtcaagagcagagtctcgttcaaaggctaaggtcccccaagacgaagaagagagcggtgatgacgatgaggatgaggaggcagacgagcacaacaataccttgtgtggaacttgcggaactaacgacagcaaggaccagttctggatctgttgtgataactgcgagaagtggtaccatgggaagtgtgtcaagatcacgccagctcgagctgagcatatcaagcagtacaagtgcccagactgcaccaacaagcgggccagggcatgagcggcaaacatcggcatcgggcgacctttgataggaaggaagaaaccacctcctggcttcaagatccctagatatggcgtaggtccctagtttacgaagtctgcattttcatgtgttcattaatatatctgctgattagctgttcgacctagcagtgtctaaaacgtgccgtgtgtcttctgtgctgagtgttgacatggggcctcctccctccagcctgtaaacgctgtcactgaaggtacctctcaactgaccatccttcattgttggtgtcgtgcagtgagtagtggccgtactctttgttcccagttcctagcatttgaattgctcaaatgcgtaccttgctgagtaaggccgttggaaaatgactaaacaaaataa

SEQ ID NO: 133431 - DNA, 1341 bp, Zea mays
  Clone ID: MRT4577_53179C.1
tgggaccctcgaggccggccgggataagtttcaaacccactcctccccttcccctgttccctctaccaccaccaccggcaccgcgggacagtctgctctcgtcccgctgcagcccgtccccgacccggaaccctagcgactgccattgcccacgcgccgctcgcccgatgaacggcgggggctctgggctggcgcccaacgccgcgcacaccgcggacgaggtcttccgcgactacaaaggccgccgcgccggcatgatcaaggccctcaccactgatgtggagaggttcttcaaactctgtgaccctggtgagtgcgctcgatctctttggttcctcgccccaggatgtggagtgatagccgaggaggcttccgtggtttttctgcttgggcttcgttgcttcgaaaaggagaacttgtgcctttatggctatcccgatgagacgtgggaggtgaccttgccagctgaggaagttccccctgagatccctgaaccagcattaggaatcaactttgctagggatggcatgaatgagaaagactggctggcgctagttgcagtccacagtgattcctggttactgtctgttgcattctactttggtgcacgctttggatttgacagagaaactaggaggcgactctttagcctgataaacaacatgcccacgatatttgaggtagtgacaggagcagccaagaagcaggcgaaggagaagacacctaatagtagcagcaagagcaacaggcctagttcaaaagtgcagtcaagagcagagtctcgttcaaaggctaaggtcccccaagacgaagaagagagcggtgatgacgatgaggatgaggaggcagacgagcacaacaataccttgtgtggaacttgcggaactaacgacagcaaggaccagttctggatctgttgtgataactgcgagaagtggtaccatgggaagtgtgtcaagatcacgccagctcgagctgagcatatcaagcagtacaagtgcccagactgcaccaacaagcgggccagggcatgagcggcaaacatcggcatcgggcgacctttgataggaaggaagaaaccacctcctggcttcaagatccctagatatggcgtaggtccctagtttacgaagtctgcattttcatgtgttcattaatatatctgctgattagctgttcgacctagcagtgtctaaaacgtgccgtgtgtcttctgtgctgagtgttgacatggggcctcctccctccagcctgtaaacgctgtcactgaaggtacctctcaactgaccatccttcattgttggtgtcgtgcagtgagtagtggccgtactctttgttccc

SEQ ID NO: 133432 - DNA, 203 bp, Zea mays
  Clone ID: MRT4577_5317C.1
aaacccaaaagcccccggttccattaattttgactaaaagggggggtcacttgattcccaactaaaaaccgggtaataaatactcctcccccccgccgagaagagggggggttaaccactccggccggggggctaaaaagccttggggggcaaaccccacgcgctgggcggtggtttattaaaaccaaggggaactgaggggg

SEQ ID NO: 133433 - DNA, 2035 bp, Zea mays
  Clone ID: MRT4577_53180C.1
ctgtgcggcgctcgaggccggccgggccgggaagcacccgcctggcccatgtgctggtccccgaatcccgacctcgcctccagttccactcttccggcggcgtcggcggccgccccttccccacgcccacaccatgtacggcgtcggcggcggcttcaacgcgccctccaccgctgcctctcggcgccgcaacccaggcgacgaagaggaggacgaggaggatgagggcggtgagggccgcgtcctggaggcgtgggagcgcgcgtacgcggacgaacggtcgtgggagtcactgcaggaggatgagtcgggcctcctccgtcccgtcgacaccaagaccctcgtccacgcgcagtaccgccggcgcctcctactccggtctgccgccgccgccgctgcccgcatccaaaaggggctcatccgctacctctacatcgtcatagacctctcccgggcggcttcagagatggattatcgtcctagtcgaatggctgttgttgcaaaacatgctgaggctttcataagagaattctttgaccagaatccattgagccatgttggcctagtgacaattaaagatggtattgcccatcgacttacagaaatcggagggagcccagagtcacagattaaggctttgatggggaagcttgagtgttctggtgattcatccctgcagaatgctctagacctcgtacatggttatttagatcaagtaccatcatatggtcacaaggaagttctgattttatactctgccctgaatacatttgatcctggtgatatcacggagacaatagcaaagtgtaagaagtcaaaaattagatgctctgttattggtcttgctgcagagatcttcatttgcaaacatctatgtgaagagactggtggatcttacacagttgcactggatgagtctcatttcaaagagttgttactggaacatgctcccccacctcctgcaatagcagaatatgctgcagctaatttgattaagatgggctttccacagaggggtgctgaggagcttatctctatttgctcttgtcacaagaagataaaatctggggctgaaggttacatatgtcctagatgcaaagttaatgtctgtgagcttccaacagaatgtcgaacttgtggtcttacgctagttagttctccacacttggcaaggtcgtatcatcatctcttcccggtaccaccgtttgatgaggtcacccctgtcccaaatagaattcaaaggggagggcagatctgtttcagctgccagcagagcctttataacccagacggccaatctaacctccatgtgcgctgcccaaaatgcaaccaacacttctgccttgattgtgatatttacatccatgagagcctgcacaattgccctggttgtgagagccaacgcagcatcgcttcatagagaccgtgttactgcgtgcattattcaggttgtaccttaagctttctcctacactgtaacagccagcaaagttgtttcatgatcagcttttttctggctagcttttctgagaatctagctgtagagagaatctggctgtgagaagaatctgtgtatcgtgggaattacgtgcggaggaagatgaagtggtccaaatagttcaggatctagaaagcgatggatttctaccatcgcgatgattcaaccgattctgtgtttatgttgattttggatggtttctaccaaaacgattcttataaaagcgggttgaaaagctggatgtttgacagtccgcagcagcttttggtggccagaagctaaaaaaaagcccaaacaaacagggtcattccggcatccttttattgatagttcctgttagattgagtacctactagctagtgttgagctattgctacccatcagaggccaatgggttgatagttttaatttgtgccgagaagagaagctgaaagtgtataacatgaccgagacttgactcttgctgtttttttttcttccctgaagcgtgacagtatatttatttgttttcatttgtttatgctaaaactttgtcat

SEQ ID NO: 133434 - DNA, 1244 bp, Zea mays
  Clone ID: MRT4577_53181C.1
gcacgagccgcgagcaaaatataaacccactcctgcccttcctccaactcctccgttccccgttccctcctctaccactggccccggcaccgcgggagcgccgaccgcctgctcgtctcgccgcagcccgtccctgagccggaaccctagcggccgccattgcccacgcgctgcgcgcccgatggacggcgggggctccgggccggcgcccaacgccgcgcacaccgcggaagaggtcttccgcgactacaaagcccgccgcgccggcatgatcaaggcactcaccaccgatgtggagaggttcttcaagctctgtgaccccgaaaaggagaacttgtgcctctatggctatcccgatgagacatgggaggttaccttgccagctgaggaagtgcccccagagatccctgaaccagcattaggaatcaactttgctagggatggcatgatgagaaggactggctggcgctagttgcagtccacagtgattcctggttactatctgtcgcattctactttggtgcacggtttggatttgacagagaagctaggaggcggctctttagcctgataaacaacatgcccacgatatttgaggtggtgacgggagcagtcaagaagcagcaggcaaaggagaagacacctaacagtagcagcaagagcaacaagcctagttcaaaagtgcagtcaagagcagagtctcgatcgaaggctaaggtccccaaagacgaagaagagagcggtgacgacgacggggacgaggaggcggaggagcacgacaacaccctgtgtggaacctgcgggaccaacgacggcaaggaccagttctggatctgctgcgataactgcgagaagtggtaccacgggaagtgtgtcaagatcacgcccgcacgggccgagcatatcaagcagtacaagtgcccagactgcaccaacaagagggtcagggcgtgagcaaccgaatccgatgcgaccttgctaggaaggaaaggaagaaacgacctccttggcgccaagatatggcgtgtagttccctagtctgtaagcctgcatttttcatttatggttgttttatctgttgattagctgttcgacctagcattgtctaatgcgtggcatgtctcatgtgctgagtgttgacattggcatgggccccgccctctagtctgtaaacgttgtcactgaaggtacctctcggctgaccatttctccaaaaaaaaaaaaaaaggccggccggcgccgtt

SEQ ID NO: 133435 - DNA, 142 bp, Zea mays
  Clone ID: MRT4577_53182C.1
cgtctggctgactattgacggaaccgcggaagaagcgcgcgtgaatctcctggatttacggtctcgagcgggcgaccgggcaggggcactctctttacctttggaatgtccattggctgccccaaaggttaggttcctgaca

SEQ ID NO: 133436 - DNA, 250 bp, Zea mays
  unsure (1)..(250): unsure at all n locations
  Clone ID: MRT4577_53183C.1
tgattagatctatctttggttgcggcgcattttttaggttttttgcaacttcttatcaaaaaaaaaaangccggtcttgctgtatttgcgggagcaaaaccctgtcctgggggccacttaatctgtggtgccagccaacgcattctggtcaacccccctgcgaggaaagccccgcccgtttttttaccaaaaagactgggcccccaccttgggcgggaaagggtgcacctgaaaactcttttgctttttc

SEQ ID NO: 133437 - DNA, 1508 bp, Zea mays
  unsure (1)..(1508): unsure at all n locations
  Clone ID: MRT4577_53184C.1
cctcgaggccggccgggatccacttcgcatgccgnaaaccccaaccaccgccccgccgccccgatcgccgcgatccccgcctgcacgcccgcctgccgaaaaccccaaccaccgcctcgatcgccgcgatccccgccgccccgaacgccacgatccccgcctgcacgcccgcatgccgaaaaccccaactaccgccccgccgccccgatcgatccccgccgccccgaacgccatgatccccgcctgcacgtccgcgtgccgaaaaccccagccaagccatccctccggccgcgaacgccgcgaaccccgcgcgcgattcgcagcggcaaaagctgaagcaaacaaacgcaaacggctcatcccattcccatcacatgattcccaactcagcgccgcatcgcgtcaccgcaatctcgcagtcaccccccaaattcccatctccgcgaccgctagccgtgaggatgagcctcctccgcaaccgccgccggcttacaacatcatcccgatccacgacgtggtgatgcaaggggagcacccgtcgctacggttcccggaggtgcgcgcggccgtggaggcgctggcgcacgcggcggacctgccgccgccgccgctcgcccgcggctgggacgccttccgtgccgacctcttcgactggctcggcgccacctgcggcttccagctcgacaacgtccgcaaccagcgggagcacctcgtgctcctcctcgccaacgcgcagctccgcgcaggcggcaccctccccaccgaccaccccgccgacgtgctgcaccactccatcgcgcgggacatccggaggaagctcctcaagaactacaagacctggtgctcctacctcggcaagaggccgcacgtccatgtgcccagcggcggacgccgtgtcgctcagggggtcggccctgacacacgccgcgacctactgtacaccgccctctacctcctcatctggggcgaggcggccaatttgaggttcatgccggagtgcctctgctacatcttccactacatgggcactcgatctcaaccatgtcatcgaccagtcgattgatatcgagactgggcgaccatcagttcctgcggtgcacggtgtggatgctttccttgacaaggttgtgaagccgatatatgacgtgctcgaggctgaggtgaagttcagccggaatgggaccaagccacactcggcctggaggaactatgatgatgtgaatgagtacttctggagccgcagagttttcaggcggctccagtggcccctgtcaccagcgaggagcttctttataaagccaggaaaccccgggcgtattggcaagactggttttgttgcagcagaggtcgttctggaatgtgtaccgcagctttgatcgggtattggtgatgctcattctgttctttcaagcagcaatgatcgttgcatgggatggccacactccgtggtttagcctactctaccgtgacatccagatccgggtgctgtctgtgttcatcacctgggc

SEQ ID NO: 133438 - DNA, 400 bp, Zea mays
  Clone ID: MRT4577_53185C.1
gggaaaaaaaaaaacccgggcgggggggggccgggcgggataaattttacattgaagccaaaaaggggcataaaacattaaattgggggaaatgggaaccctttaaaaaaaagggttaaagggggggagcacccccccaacgcaacgcagggcaaacccggggggggggggagggattttaaccggttaatttttaaaagaaaccccggggcccgcccttaaaacccatcgggcccaaggggagcacaaaaaaaaggcccaggggccccgttttttgccaaaaccaaaactgggaggggaccggcgggggcctgggaaaaggggccaactcctggccaatgctggaaaaaaaaaacccccggagggttttgcccttgagggccgggaccctggacggccc

SEQ ID NO: 133439 - DNA, 557 bp, Zea mays
  unsure (1)..(557): unsure at all n locations
  Clone ID: MRT4577_53186C.1
cctcgntcgccgcgnatccccgccgccccgacgcccgatccccgcctgcacgcccgctgccgaaaccccactaccgccccgccgccccgatcgatccccgccgccccgaacgccatgatccccgcctgcacgtccgcgtgccngaaaaccccagccaagccatccctccggccgggggcggggggaccccgcgcgcgattcgcagcggcaaaagctgaagcaaacaaacgcaaacggctcatcccattcccatcacatgattcccaactcagcgccgcatcgcgtcaccgcaatctcgcagtcaccccccaaattcccatgtactcctcttgctcccgataatggcttgatttctcagtccgcactcgtcactgaggctgggcgctgacgccttccccgtttttgcagctccgcgaccgctagccgtgaggatgagcctnctccgcaaccgccgccggcttacaacatcatcccgatccacgacgtggtgatgcaaggggagcacccgtcgctacggttcccggaggtgcgcgcggccgtggaggcgctggcgcacg

SEQ ID NO: 133440 - DNA, 624 bp, Zea mays
  Clone ID: MRT4577_53187C.1
gacaaagggtaaataaattttttttaaaggcatggcattacatctcggatgaaattgacacagtaataaactaagagcaactccaacaagtatcaaaaataactcccaaaacgtaaaaattgggatctccttaaaagtattatatccaaaaataaaggtaacactccaatagttttcctaaaaaccttttgaatggatcattatgtgcctgcatttttgcttctgaacgagctctgatccggacagtacggaggggctacagctatactccaagagcagctgcagcacagcaggaagaggccatgcagccgccaccgtagtactgcaactacgccaagaattggtacaccttcaaatccgtagaggcatcaagaaatgccaaagtgctttgaaaaaaggtattggctggcaagcatgccgccgcttgatggcctcgatggcgtactcgacctggaacagccgcccctccggagagaaggtgttcaccccacggtcgtactccgtcctcgtgagaaacatcctgtcggaaacagcggcagatgcaggatgaagaaaggactcggcgtcggcgcctccctcactctctctctccgctctcgccggacgcgtgggcgaacgcgtggc

SEQ ID NO: 133441 - DNA, 275 bp, Zea mays
  Clone ID: MRT4577_53188C.1
gggaaccacggaatcatcgatcatgttatatgttccagcaagcaatatagtatgaatgcaatcagttctttgacattccgatcggaatccaaccggcccccgatgaccgaaccgatacccacagcaaaagctagtactatactagcgtaattacaaaaaagaaagggaacgaacgaaccaatacgatttacatgtcctggattaaactaccgacgctactagatgacgagttagcctccccccaaataacatggagggattaacccgacccgatg

SEQ ID NO: 133442 - DNA, 296 bp, Zea mays
  Clone ID: MRT4577_53189C.1
aaaccaaaaatctttataaaaatgggaaacttccaaggggaaccaccccccacgggcaaactttaaaggaaaagggggcaaactaacaagggggacaactaaggaaatgggactctccaaccctgaaatttgggcggggggagggaaagcaacaagcaactttaccataaaagagctttttttaaaagcactggactggacacaagctcctgtccattaacaggactggggctgacagtaaaagatgccttacattcccgggagggaaagccccttcaaaggtaaaaggggggggg

SEQ ID NO: 133443 - DNA, 2673 bp, Zea mays
  Clone ID: MRT4577_5318C.1
ccggccgggcccccacctccgcacaaacgcgtcgcttccgctcaacaggatcctctgcgccacccacaaccgtgtgaccgtccgtgctgccggcgaccccgatccgccgacccgtccgtcccaccacaccccaccgccgctcgcagctatgtcgccgtcggagccgacgcgggaggagagcgtgtacatggccaagctggcagagcaggcggagcggtacgaggagatggtcgagttcatggagcgcgtcgcgcgctccgccggcggcgccggcggaggggaggagctctccgtggaggagcgcaacctgctgtccgtcgcctacaagaacgtcatcggcgcccgcagggcctcgtggcggatcatctcctccatcgagcagaaggaggagggccgcgggaacgaggcgcacgccgcctccatccgcgcctaccgctccaagatcgagaccgagctcgcccgcatctgcgacggcatcctcgccctgctcgactcccacctcgtcccatccgccggcggcgccgagtccaaggtcttctacctcaagatgaagggtgactaccacaggtaccttgctgagttcaagtctggtgcagagaggaaggatgctgcggagagcaccatgaatgcctacaaagctgctcaggacattgctcttgcagatctggctccaacccaccccatcaggcttggccttgctctcaacttctcagtgttctactacgagatcctgaactcccctgatcgcgcctgcaaccttgcaaaacaggtttgcttcttctccttctatccccactttgtgatttgctttcattttgagaccctttgtgatttgttttaattttgagacatgatgtctcctggattgtgtgtagcttctgggcaacggattgagtgtgcataaacagctcctgtctccatcagcttatgtagggttttggttgattaaattaaaaaaagatggtgcaagggaaatagttcacttgcctcccatctgcatgcctattcactgaaacaatttttttcttacattagacaccgtgtaagtgatggatctaattactctgggtgctaacaaaatgcttcttttgctaccacccacggaggctgttgtttttttcactcaatctgtgatgtcttcttgcatacatgtcctactacatattgaacattgataagctacaacctaatggttacaagtcacctatactgcgtttggatgctggtattgaggcccagattttggaattggaattggtaaagccgaatttcagcgtttggatgctcacggaattcggaactggaaatccatcccaattcccctggtattcaactacacctgcaccccctccccttcaataccaagccccccacctcggtattgctcagaattcaattacacccgcatccaaacaacaacattggtattgcagatcaattccatttccctcagatttggtattcctagatcaattcaattccaccacgtgaatgcctacatccaaacgaagcactagagaattctcgatttcccttgtatgatggttgcactgtctaacttgtctgcaatccatgaagttggacatgacggtcttcatacagtacttgagatgacagatgcattccctatgcaacgaagtactcttgacgttccccatcaatttaagcatcttgggctttatattggatgcagttggcttgaagtaaatttaatctttgttgcaggccttcgatgaggcgatctctgagctagacagcctgggagaggagtcatacaaggacagcactctgatcatgcagctcctgcgcgacaacttgaccctatggacttccgacaccaacgaggatggcggcgacgagatcaaggatgctgctgccccgaaagaatctgcggagggtcagtaagatggattcagtctcacgacctgctgctgctgatgttgaggagtaaccagaaccagaaccgccgtcctcgattctgatagattatcttctagtataccttgtgttgttgctgttgttgtcgtcgtcgcgccggtgtatgcgatgaagctgccattgctgctgttttaattaagcattctagatgttataccgcatgctttgtttcggtttctaatgtcgataaatggtggccggatgctggttttcgtgctccgagccggccaccaggaagaagacctgcctgcccttgtgggtgcagcgttgttagaatgacctacggtgtatttgacttcgacaggcctgctgcctagtggactgatattctgttatgcgcaaagctatttggcttgatgtctcaaaaaaaaaaaaaaaaaaaaaaaaaaaaaaaaaaaaaaaaaaaaaaaaaaaaaaaaaaaaaaaaaaaaaacaaaaaaaaaaaaatggaaagagaaaaaaaacaaaaaaaaaaaaaaaaaccggtcacaatgcaacacaatataccatccctaaaaaaaaaggaaaaaaccctcccgtgccaaaataagagaccaaactgaaatctaatagaaaaaagctaacctgaaaaaatttcaaaaaaaaaaccaaacgaaacaaataaattaaaaaatcggccatcccaaagagagaggcagcctgcaaattgcgggatggtccacttccccgcttacagacaggaaaaacattgggcgcacttcttctaaataatgc

SEQ ID NO: 133444 - DNA, 993 bp, Zea mays
  Clone ID: MRT4577_53190C.1
gtacctcgaggccggccggggcgtcgagccccatcccgttcccgcgcctcgccgagagatctgcgccgtcgtcggcaccaatccgtacacccgtcagtccgtccgtcgtcggcgccggcgaacgagtagagatggaggagacggcggcagcggcaccggctgagaaggcgtcgtcgtacaggtactgggtgcgggaagccaccggcgacgccgcgccgctccccgtcccgcgcaagctcgaccccgccgccaatgggaacgggaacccgccgcccctcgggtccgtctggaatcaggctggaacttgggaggaaaagaacctcaactcatgggctaatagtaggataaaggatttgctgggctctctaggttcattgaagttccctacagggaatgcatccgttgatgaagtgtccaagtgctcaggcgatgcctttcaggtcactgtccgcaacaagaagagagtaggatataactacgaactaagcttgagatttaaaggtgaatggttagttaaagaagaaaacaagaagatcaaaggacacttagacattcccgagttctcgttcggtgagatcgatgacctggaggtgcaagtaaggttcagtgacgacaagggcctcgcatccgacgacaaggcacggatctgcaaggatctcaagtcctttatggccccgattcaggagaaaatgcgcgtgttcgaagaagagctcaagggtagatagcgagcattagcgagaatcggcagtgctaggtgggcgctgccgtgcccgtgctggaatgacgagtaaaacatgttgacgtattgtggtgtctccacgttctaaagtcgtcttcggatgactgggactgtctgtgtactgatgctatgcacttccggagatgagtatgtacggttacgaactgcctaaactgtctcttcgtcctaatcattttcggcatatgatggtagtagagagatttagggcttgtttggttccaaatttgccataa

SEQ ID NO: 133445 - DNA, 440 bp, Zea mays
  Clone ID: MRT4577_53191C.1
acttggattcttttaaaggggcggcccttttttttttttttttgtttacggtgcactgggttaactgtcatcaacggacaccttatgacccgcaacgcccccaaccaaatctcgaagggggtaaggtatggcttggctagaggtgggcaaggcgggaccattggggttttagccaggggccttggatattttttcccaggctggatccaaaatggcaacaatatcgataattcaaaaaccatccgggtccctcatattcctggccaagggaacactacctagggggacggtacctgttgacatatactggacaacaacggtttggggggaaatcttaccatcataccgggttgaccgttcttgaggaccttggcttcatagtaaggcttgttaaatgacggcttaaccatactgttatggccctaaaaaaactgaacaac

SEQ ID NO: 133446 - DNA, 569 bp, Zea mays
  unsure (1)..(569): unsure at all n locations
  Clone ID: MRT4577_53192C.1
cccccaagtagttctgacaaagatgttgaggatgcaaaggaggatgcctacattacagccaaaaggataaatgaaaggtttggtttggaaggttatgaacctatcatcatcattgattgccatgttcctttctatgagaaggcagcctattatgctttggcagaatgttgcattgtgaatgcagtgcgtgatggtttgaatttggttccatacaggtacactgtgtgtaggcagggaagttctaaactagacgaagctttagaaattgcttctgacttcccgcgtgtaagtgcacttgtcgtttctgagtttataggttgttcaccatctcttattggggcaataagggcaaacccatgggatattgatgcagtagctgaagcacttaatttggcaatcacaatgcctgttggagagaagcagcttcgacatgaaaagcactatcgatatggtagttctcattttttggcatactggactcgaagcttttagcaagancaaaggngcacgggcaaggatcactatagtaaccgatgctggggcattggctttggcccgaatttcagaat

SEQ ID NO: 133447 - DNA, 867 bp, Zea mays
  Clone ID: MRT4577_53193C.1
gtgcgcgcgctcgaggccggccgggccgggagcgcacttctcttcctcctcccccatccatcattctcccaagaataccggaatcaccgcaaccatggcccagactctttctaacgccccgagcgtgttcaccacccgcaaggtcggcgctcctcacactctcgagcaccgtgtctacatcgagaaggatggcgtgcccgtctcgcccttccacgacatcccgctctacgccaacgagcagcagaccatcctgaacatggtcgtcgagatcccccgctggaccaacgccaagcaggagatttctaaggaggagaccctcaaccccatcaagcaggacaccaagaagggcaagctgcgcttcgtccgcaactgcttcccccacaagggctacctctggaactacggctgcttcccccagacctgggaggaccccaacgtcacccaccccgagaccaagatgaacggcgacaacgaccctctcgacgtgtgcgagatcggtgagctcgttgccaaggtcggtgaggtcaagcaggtcaaggtcctcggtgtcatggctctcctcgacgagggtgagaccgactggaagatcatcgtcattgacgtgaacgaccctcttgctccccgcctcaacgacgtcgaggacgtcgagaggcacctgcccggccttctccgtgccaccaacgagtggttccgcatctacaaaattcccgatggcaagcccgagaaccagttcgccttctccggcgagtgcaagaacaagaagtacgccatggacatcgtccgtgagtgcgccgagtcttgggagaagctcatcactggcaagacccccaagggtgacatcaacctcaccaacaccctcgttcccac

SEQ ID NO: 133448 - DNA, 168 bp, Zea mays
  Clone ID: MRT4577_53194C.1
cataaatatcacttatagatgattgttttggctttaatcccgtgaacaaggtaacctgagaaatgatcagggtaatttgaggtgggggaaccaagggcaagcctgaacacagctccggcagccgcataccttaaccaaatttgaggagcattggttcggccaaacaga

SEQ ID NO: 133449 - DNA, 355 bp, Zea mays
  Clone ID: MRT4577_53195C.1
gcgcacaaaccttaaaaaaagagcactaaccgccaagaaaaacgaacaagcggccaaaggaaagagcaagcagcaaacaccgagagaccgaaagaaacaaagcggccgaaaaaaaaaaacaggcggccgacaacacgaacaaacggggcaataccgccctaaccgggaatcacaaagaaagaaagagccgctccaaaaaggacgcaaccgcctagcccaagaggaaaggatccagcttcactgggcgggacgcggattaccatgggggggccgagctaaggatggggaaggagggctccgccgggacaaggagggttcttgcggggaaccgcacttcccggggggggccccccca

SEQ ID NO: 133450 - DNA, 278 bp, Zea mays
  Clone ID: MRT4577_53196C.1
ggcggtctctttttaacttggggggggtctcccacggagggaaaaaaccctttcatttaatggaaaggaacccaatcttatttttgccccaaaaataatgtgtattatatttttccagcaataaaagggcgagcccgatcgacccccctaccaataaatactttaaaaaacctctgaagcccccccaaatccaaaagcaggggggctttaagtcccaaattgcttacccaataacccgttaccattttagccccaataaatgaaataattccgacccc

SEQ ID NO: 133451 - DNA, 344 bp, Zea mays
  unsure (1)..(344): unsure at all n locations
  Clone ID: MRT4577_53197C.1
atcggtattcgcagatacacatttcactccggtggtcgacaagttacacaaatttagtctcggcaatggccgatcaatgacaggtttcatcttgtcaacacatatattccgtgcgtcacagaccacaagcccaagtcccaactcctaagggaaaaaaaaaactgcccacaagagttcaacaaatcactgtcttcgatgagatcctngtgtacaagatcatcatatctactgcacgacacaatgcattttgtaccggacactttattctattctaaatttctagctggattatctccatcaccatagacggtttcaggcgctaagaaccacacagtggagcagac

SEQ ID NO: 133452 - DNA, 283 bp, Zea mays
  Clone ID: MRT4577_53198C.1
aggacgtgcacatgttaggccttgaaagcttagccctttgggtataatttcagcacaaactatgtcagaattctcatgagttgctttgatctattagtaggtctaggaaacgtgcacatgcgttgcaagagaacccaacacgtataggaatcagactatatcttcgaaaaatgctaacttgtatgagcatgggtcatacgctcagcgttactcgtcctacagctccttgtccgtcatgtacacacacacacacacacattttcctgactgcctttgataaaaa

SEQ ID NO: 133453 - DNA, 127 bp, Zea mays
  Clone ID: MRT4577_53199C.1
ttcctctcttccgcccacgcgttctgtcaggaccggcaacaactcgccgggcggaagcctgcaatgagcgacagatccacctatccttaacaattggacaacttacagccttgtacaataaaacacg

SEQ ID NO: 133454 - DNA, 288 bp, Zea mays
  unsure (1)..(288): unsure at all n locations
  Clone ID: MRT4577_5319C.1
tccnnnnnnaannaaaaaaaaaaaaaaaaaaaaaaaaaaaaaaaaaaaaaaaaaaaaaaaaaaaaaaaaaaaaaaaaaaaaaaaaaaaaaaaaaaaaaaaaaaaaaaaaaatttttttgtggggggaaaccctgttccctgggggaggggaaccccccccccctttatttgggaaattttccccggaatcggattggtcctggatattttcccctggaaatttgccaaaccaaagaattttacaatttgtggttttcgcccctaaaaaaattcgggttaagggggggg

SEQ ID NO: 133455 - DNA, 290 bp, Zea mays
  Clone ID: MRT4577_53200C.1
agctggctcgcacgcgtgcacgggccgggactgatatgggccgaccgacccatgcgttctttttttttttgctttacacatttccactcgaggggtctaagtttaatcctttcactttgtcctctgcggagggagccacagatactccaactcctccttttgacggtgctccgattcggttggcgttaagtcaaccgcaaagtctatactcaccttttgggactacatctgatcccgctaggggtaggtgaccagaccgtagttgttgcctgcggcgtcgatcgtctcca

SEQ ID NO: 133456 - DNA, 683 bp, Zea mays
  Clone ID: MRT4577_53201C.1
cattggtacctcgagccggcgggatgcatctgctcccggtgccgcgagctgtgtagaatcacccgatgcagaaccttattgtcgttgctgggtgccatggacaccagccctgtcctcatactccccgtgctcttggactctctgtgtaatctaccgtcatccactcgtgtgacactggatacttctgcacttctcccctctccttcgactctttcctcttaccgcgacccttcacgaccgcacgaaagattcggcttccgtcagagcttcgtccccagagacctcactaatggaatccatgcatgacaggctgacctgcaccacctcaagaggaaatggctctctcttgagaaacaaaaaagaatcttgcattactcgcgctcctgatacacctctcatcggtcgcgatgacttggacccaggtgcactctccaactcgaggacacccttccacccacgagcttcagaatgaccatgtgtcaccgaacttgaccctcaatgaggagaatatgaaagccaatgctgacacgctgcgcgtgaagatgatgtgatcctggtccccgaacatgacccctgatgtttcaatgccgagatgattccggatggattctgcaacattccgctatgtgcgaagatgctgcaaggcaccaccatcgccgaagtggcactaatgtgatgccatg

SEQ ID NO: 133457 - DNA, 182 bp, Zea mays
  Clone ID: MRT4577_53202C.1
acacttccgcggcaagtgaacccacacataacaaataaaagcgtatccatgtagtatattaaatttatcttgaacatagctagcagaaacaaggaatgatatatggtggactttaggcaaacataaagttttaacaaagtacactggactcattaaagacatgtataacaatgttgtgatta

SEQ ID NO: 133458 - DNA, 656 bp, Zea mays
  Clone ID: MRT4577_53203C.1
cggacgctgtgggtctgacactagagactcaaaggggaagttgattgactatcagggtgagtcccctgatgaacaggcactagcatatgctgcagcatcttatggcattgtccttgttgagcgaacatctggttacatagtgattgatgtccttggtgacaggcagagatttgatatactgggacttcatgagtttgatagtgatcgtaagagaatgtctgttatcgtgggctgccctgataagactgttaagctgtatgtgaaaggtgcggacagttcagtatttggaattacaaacaattcatctgaattggacattgttcgtgctacagaggcacatctccataagtactcttcacttggactaagaactcttgttgttggtatgcgtaaactgagtcaatctgagtttgaggagtggcaattagcttatgagaatgccagtacagcagtacttggaagaggaaacttactccgatctgttgctgcaaacatagagatcaatgtcaacatattgggggccactgggattgaagataagcttcaagatggggttccagaagcaatagaatctattcggcaagcagacataaaggtttggattttaaccggagacaagcaggagaccgcaatttctattgggtactcctgtaagc

SEQ ID NO: 133459 - DNA, 501 bp, Zea mays
  Clone ID: MRT4577_53204C.1
ggggcgaagtccaatgcatcatctgatcatcccacaacctttgtttgtttcagacaagacaaagccgcttgttatgcgttcaaacaagcaggggattgaccacatgggcgcctaacagtaccacaccggcggtgtgtttttttgggtcaggaagactaaagggggatccgccctgaaaaagcaatgcgtgctggtcccaagtgaagcacccaccaccatcttcaggacagccgatgccgcagcaggctcggtccctttcttgggaacctccacaaccgacctgtggaaaacggaggagacatacaacatgggtggattaccgacacaagccctgctttttttgggcttaacagcagccagagccccagagccttatagagcaactaggacgcttctaacacgaaagacaccttgaacctggggaccttggtcttcccaactgggaccctcctccttgggatgtgcttgtccaagaacaccagctcggagctcagatttttt

SEQ ID NO: 133460 - DNA, 1181 bp, Zea mays
  unsure (1)..(1181): unsure at all n locations
  Clone ID: MRT4577_53205C.1
ttttttttttttgcacgaggagggaatggccctggtaaactcaatgaactgttgcgagtcaaagttacacgacaggcacagcaacatcctacataaatcttcttctatgaatacatgacggtacaacatttccgactaacaatgcattagcctctctaatcggtcgccctatgtcacctttgcaagaactcgttcctcacggtattgcagatctcatctgccactgcagcgttttcacgcaggaacttctccgcttccaccttgcctgccaggaactcgttgttgatccaatacccacacccgtctttcaggatcactccgacggaggaagccgtctccaggatctccgactcgtggcagatccccttaccgaatgtgatgtcgatgccggcttccttcttcaggttcgctggagccaatttgttcttgatgatctgcactgatatacctacgccggtagcctcatcttcactatagcgcagttctctccttgaagtcctcattctgactgcagcatagaatcctagtgcattaccaccgcaaggcacctccttgtagatcccaggattacttgatgtccgctttgttctaacctgattcacaaaaataataagtgtttcagatcgacataaagtgtactgaatttttctaagggcccgagtcatcaaatgggattggatgtctccacaatttgtgtatatttcaccttcaatttcacatttgggaataagtgctgccacactgtccacaacaacaacagcaacagaaccaccaacaagagtgtttacaatgcttagagaattttcagcagaatcaggttgggctatcaagagcctttcactgtctacgccaatagattcagcaaatgaagggttgaaggcattttctgcatcaatataagcacaataacctccattctttcccacgcgtccgataacatgaagcgcgagtgttgtctctcgtgccgcttctttcccatatatctccaccattctaccctgaagaggggagcggcggaggggagaggtcgcggacgctgaggcgctactgcagtccgtgcgcgagagctgggcgccggctcgccggaggagagcggaggaagaggagaggatccctcgcatggcggcgggcgggcagcggacggagcggtgggccgnncgcgcggcgcgtcgtagtggtgt

SEQ ID NO: 133461 - DNA, 368 bp, Zea mays
  Clone ID: MRT4577_53206C.1
gctaggaccacgcatgctgcagacgcgttacgtatcggatccagaattcgtgagcttttattttgtccaaagtgtagccaagccaacaggaggtgtcgattggtaacggttgcgatgaccacaccgtgcgattggtgcgacatgaccccacctgtgaggaggccgatgatatgctcaaggaagcatccgacttgcttgacgtaacggctcaccatgtccacatgtattcccaggtgcgcatggtactttcgccgtcatcgcaccccttggatagtatgattcctaatggactacctggtttgcggacaccactgcaagcaacaggggtgacttgggcaaaaaccattgcaggccaatcaggccgacaa

SEQ ID NO: 133462 - DNA, 718 bp, Zea mays
  Clone ID: MRT4577_53207C.1
cattgggtacctcgaggccggccgggcctccaccacccactcgagcgcgcgcgcggcccaccgctccgccgctgcccgcccgccgccatgcgagggatcctctcctcttcctccgctctcctccggcgagccggtgcccagctctcgcgcacggactgcagtagcccctcagcgtccgcgacctctcctctccgccgctcccctcttcagaatgggaaaagagacacattttgttcgctttggttcaaaggtcgttcggtatcaaccacagttgatatgcagttagactatgagagtgatccccctcttgacgatacaaaagctattgagaaggagtcatcacttaatgttgctgtttctcaactcgcaattgacttcgatagagactctaatttatgtttggagcgattttcccgtgcaaggaaagcatctgtagtctctactggttctcttaagcttgacctcgctctcggcgttggaggattaccgaagggtagaatggtggagatatatgggaaagaagcatctgggaagacaacactcgcgcttcatgttattaaggaagctcaaaagaatggaggttattgtgcttatattgatgcagaaaatgccttcaacccttcatttgctgaatctattggcgtagacagtgaaaggctcttgatagcccaacctgattctgctgaaaattctctaagcattgtaaacactcttgttg

SEQ ID NO: 133463 - DNA, 1890 bp, Zea mays
  Clone ID: MRT4577_53208C.1
ccggccgggagtaggggtgcatgtcgaccacgaccagcatctactggggatcccattcccatcccatctactgtgtatctccatgcctataaagtacattcccaggcaagaccgggatgtccctgccaccagcagtgcgtgcactaaacacaaactaggcagtagtgcactctacctatagctctctccgatccatgcagagctcggtggtcatgttgtcgagcacggtggcagcggcggccatggcatcgctgcgcaccctcccgctgccggtgctggtgcccctcgtcgcctcggggctcgtcttcctggccaccgtgctccgacgcttgctaaggcggcagcggccggtgtacctcctgaactacagctgccacctcccggacgcggagcggcaggtgaacctggaggtgtgcgagtacttcggcctcaagtgtcgccgctactccgacgacatcgccgacttcatgcggctggtgtacagcaagtccggtctgggccaggagaccttcgcgccgcccttcatctactcgggcaagttcgagaagacgctggcattcgcgatccaggaggccgaggagggtctgttcgccgtcgtggagcagctcctggcaaagtcggacgtgagtcccagcgacatcagcgtcctggtggtggcctgctccatgttctccccgatgccgtcgctggcgtccatgatcatgcaccggttcaatatgcggccggatgtgaagtcgtacagcgtggccgggatgggttgcagcgcggggaccgttggcatcgacacggcggcgcggtcgctgcgctctcggcggacgcccgggtacgcgctggtggtggtgacggagaacacgagcctaaactggtacttcggcaagaacaagcacatgctggtgaccaactgcatcttccgcgtgggcagcgcggcggcgctggtgacggacgtcccgtcccggcgcccggacgccaagtacgagctggtgcgcacgctgcggacgcaccacggcgcggacgacgcggccttcaacgcggcgctgcagatggaggacgaggagggcaacctgggcgtggcgctcaccaaggacctggtccgcgtcgccggtgcggcgctgcggaggcacatcaccacgctgggtccccaggtgctgccggtgtccgagatgctccggtacgcgtggcgcgtggcgcgcgcctacgcggccgggaacagcaaggccgcggcggcggaggtgcccgacttccagcgcgcgttcgagcacttctgcatccactcgggcgggaaggcggtgatcgactcgatcgcgcggctgatggggttcgggccctacgtcgtggagccggcgcgctccacgctgcaccggttcggcaacacgtccagcagtctggtgttctacgagctggcctacttcgaggccaagcgccgcgtccgggccggcgaccgcctctggatgctggcgttcgggacggggttcaaggcgtgcagcaacgtctggcgcgcgctccgcgacgccgcgcccgacgccgacaacccatggaacggatgcgtccaccgctacccagtgccgccgccgccaccgtccaagacgcacaagcatgcttgatatagtactatgtgctcctccgtcgccgcgtctcgtgcctgtgtctgcgtcgattgtttgataagcaacatcaacgaaggcgtatgtatcctagctagggaccgggtcagttgtttgatacgcttggatgcatgatgatcagctgtctcattggctccaagaagacctatggattgtttgatttctgtgtcagtgatatgtcatatgacaacatgagtatccctgtttggaaagtgaaatatataagaaatttaaatattaataaaaaaaaaaaaaaaaaaaataggcc

SEQ ID NO: 133464 - DNA, 130 bp, Zea mays
  Clone ID: MRT4577_53209C.1
tcttaattagattagatttgtgctataaaaatcctgtttttgttagccgccacacatcataattaatagtgttaattactcttgtagctagctaggcagatcgagttttatttgctaactgctgcttgca

SEQ ID NO: 133465 - DNA, 523 bp, Zea mays
  Clone ID: MRT4577_5320C.1
tttttttttttttttttttttttttttttttttttttttttttttttttttttttttttttttttttttttttttttttttttttttttttttttttttttttggaccaaaaaaatggcctggtttttccccaaaagtttagggggagggggggtttccccactaaaaatttttaaaaaaattttaaaaaaactttggggggggggggggggggtttaatgggcaacataataaaattccaatgttttggggggaaaagggacctttttttagcccattgaaaacactccccccaaaaaaaaggggtccaaggattccaaaaaatacaattttggccatttttaagggggaggggggttttatgcccggggaaatactgtttttgggggcccaggtttgccaaaaagggtttttttaactttggggagggggggttttacctttgaccccaccccagaaaaagggttttttttttaacggttttttggggggggtccggggggttaaatttttatggggggtt

SEQ ID NO: 133466 - DNA, 523 bp, Zea mays
  Clone ID: MRT4577_53210C.1
atcacacaacaagatttgcattattgcaatataacatcacaataacatagaaacgaagttgggggggtgccttacacgacactacaccgtactatgccgggcgcatacgtgcaatcacaacctgtatgtacagctggaagcaactctgaaggggtacaattgacccaagtacatgtaacggtgacacacagtaatagcactagcattaaccattattctaattacacggggaaaagggcctgatttggccatcataccctaacccaaattaccagtggatgaacagaccaaggccgatcacctgggcctaacaactcatggagctctcttcatgaggaccaacgtcttgagcgcagctcatcatgacttgacattgtctctgcttctccggatataatccaaagccgatgctatggaaagtactcggtaatgcccaccattacctctctgcacacaagcctcgcgagcttgatggatcatcatcatagagcaatactgatccaccgggaacccacaggatgca

SEQ ID NO: 133467 - DNA, 221 bp, Zea mays
  Clone ID: MRT4577_53211C.1
cccacgcgtccggacctgctggcgtcgtcggcgcggggggagacggtggacctcacccgccatctcatccgcctctccaacacctccatcatccggatggtggccagcaccgtgcccggaagcgtcaccgacgaggcgcaggacgtggtcaaggacgtggccgagctcgtgggcgccttcaacgtcgacgactacatctccctagtccgtggctgggatct

SEQ ID NO: 133468 - DNA, 643 bp, Zea mays
  Clone ID: MRT4577_53212C.1
gccccctctcgagtttttttttttttttttttttttttttttttttttttttttttttttttttttttttttttttttgggcaaccccaacgcccgaaaaaagaaagaaccaatccttattttgaaaaggggggccaaaaaaacccaccccacccggggcttaataaatccggccccaaaaaacccccttttttttttggttttaaccaccctttgtactttttatgacccccgagggccccagtcaaagcaaccagctgaggctgttttgatttgaaaaatgggccagggaaaaaattggaatccaacacgctgggcccgtcccacacccatacacaaaaaaggggggcttggcacaaatcctattaaaaccaccccctttaaccaatcggaacaggggggacagctccccgaaaaagggggtttttaccctggcgggtttatcatgactcgatcctgaaaagggggttgagggaggggctgttaaactttggggcgaggcctttgatcgggaggatgatgcggtctcccatgggccgggtttgccccattaagtcaacttcagtatcaccggcgacaacaattttgaaggggggcgggtctttggaatacagctcgacatggaacgggggagcgaaggttc

SEQ ID NO: 133469 - DNA, 306 bp, Zea mays
  unsure (1)..(306): unsure at all n locations
  Clone ID: MRT4577_53213C.1
cccacgcgtccgcccactcgtccgcccactcgtccggaatcatcaattaccaattcatttgctcggaattgttcaattaatgtatgtttctaatttaccttaaagttgattttctttcattctttgcatatatatgttgtcagatatttgctccacacttatattattctgatatctagttactagtagctatgcaactcaattttcaatcacatgattatgtatagttgtcttcttgtgttttagcacctttgataactgaagcacacttgaaatttgattcccacntataaaaataaaataaaa

SEQ ID NO: 133470 - DNA, 683 bp, Zea mays
  unsure (1)..(683): unsure at all n locations
  Clone ID: MRT4577_53214C.1
cttttgtgaattgatgcaagatttatggagtacttccaaatgcatatatactaaatgctaatgttaacttatatgtatctttttggtttctatacttaaatagttaaattacaaaaggcttatacaattcagtgtttatccatgttttactgtgtacaagtcctgggaatgcctttcaaaaacattgcatttatggtgatggttcattgcaacctgataataatgaataactgtttggcttccttctattcaagattttaattaatagatagctgtacaccactgatttgccagccttgctaataattgtcataccttatctgaatttttattttatgacccgaatcagtttcttgaggggcgaccaatatgccattgcattggctctgcttgatgaaggtaaagttgttttgggtgtattggcttgtccaaatcttccattgtcatcaataaacaacatcaatggtaactcttcgggagataaagttggtgccctgttttctgctacaattggttgtggngctgaagtagagtccttagatggctctccaccacanaaggttatagcttttattttgatcaataatcttaagttcttaacctaccttctctcgtactaaaacttttagtttctcttgctcattattttgttataatcttcaaattatgaattttttactgac

SEQ ID NO: 133471 - DNA, 177 bp, Zea mays
  Clone ID: MRT4577_53215C.1
tactctcccctcgtgaagaacacaacgtaatctcctcaagctcgtgaccatgctctgccttgtgcaataaacgccgtacctactgcaacaatgctcaccaacgccagtgcgaataaggcttcgctgcgtatgtgactactgcgtcatatctcacataccataacatcaattacttac

SEQ ID NO: 133472 - DNA, 252 bp, Zea mays
  unsure (1)..(252): unsure at all n locations
  Clone ID: MRT4577_53216C.1
cccgggtcgacctagcgtccgggagagtttcaatgcaagctctcagtggggcggggcatataccaanncacttnccaccagtcatgccattgggtaccatgaacccatgcatgcagtactgcatgatgcaacaggggcttgccagcttgatggcgtgtccgtccctgatgctgcagcaactgttttccttaccgctgggtgtggggccannnatnatnccacanatnataacacctaacatnatntcaccat

SEQ ID NO: 133473 - DNA, 2630 bp, Zea mays
  Clone ID: MRT4577_53217C.1
gtccgttggaatgaggcacgaggggcccgggctgtcaattaggcatgatgctgcgggctccatggcaggagctatcttcatgtccaacagcgtcacaagggaccaatgcttccaagcaagcattttcggtctacccttggagtatcgatcctttgtcagccacatcagaaaagggatgcccttgtttctctttgactatacactgcgtaagctttacggagtctttgaggctgcctctgatggagggtttaatattaacagtgacgcacttagatcagttcggcgctcatatccttcgcaggttcgcatcaatattatttggaagtgcaagccactaagtgaggatgagttttttcctgctatagaagacaactactatcggccaaggaagttctactttgacctttcctatgagcaggttgttcggctttatgaactgtttggcaacaagagagtaggacgccctattcatgactatcaaaaaaatgagtgtttgcaaacaaaccgctcaagcaaagggataccggacaaaaaaagcttgactccagatcctcattccagtaatcaatcacgccttttggttcccaacatttccgaaatcataagatattctactcctacaagcatacacacagatttaccacttaatgttgaggcatacccaagcacgttgatgcccttgggaactgaagttaatggagccaaaattgctcccaccttcagctcccatagtgaccaaatagaacctttttctcaaagtgagtttttcccagctgcttcaatgacagatgctgtttcaactcaagtatctgccccttgctctgaaactaataaccagttggttgggcaatcacatccattaccacacaactatccacagaatattttttctgctggatttacagcccaggacccaattgaaggatctaaatttgttgcaaaccaattgtattcattatgtcgtgattatatgcacgatggcttgttaacttctggatatggaactcaaaatcgaacttacaaagggatgaatcacttgaattcaacttgtcctccatatgacccattacatccttttttgccagtgtcaaataatttcgattatcaggctcaatgtgacatctattccaaccaaggctgccctgatacatgtaatgacatatgtgcatatgagtgtgagtgtttaagtgaagaagtggtagcagcggaggaactgaaccaacgaggtatttctacatgcccacaagttcttggatgggatgggaaagcagtatcagcaattcatcaacagaatatgtgttctactgattactttcagatttttgatcgtgatgaagactctgaaaatgatcagatgaaacatggtactcatagcaatgcttcagattcatcagatcgtgaaaatggtattgttgatccacgacatacacaacatgctgtaggaactgaaaacaacacaaaggatcagtgtagccagccaaaaaaaggtgtattttctcgcttatcagtgaggaaggaactgacttctcaagatgccactggttctacactcaaccaattggtttcttctcttgttcggaagacagaacagtggagccacaacaatagaccgattgaagatggtctcattattcctttgattggggagcaggctgactgttctcatgcagcgctgaacctgctgagtgaactagagctggataaagacgtgagcatagagccacaacttcccttcttgaacttcaagagacgcagtgaagcagggaaggtggatgcaaatttaggaaaggagatcagtgggaaaatgaagagaagaaagcttgtgcgtccttccttaggagaaaacaatgattctacaaattttggagagcagcttataggaaattgcacacaagacaagaatcaaaaccatcaggaaagtgaaaaccattttgacattgacctaaacatacctgcagcaccaatagacgacggcccagtggaggttaacagaattgcagtgtgtcctagtgttgttatcaaggtacaaacagagaaaccatatgaaatagatacaaacaaggtaaactcaaatgtgatggagacaactgaagaacatgatccatccagtgcacccacacaaaaggttatccctgattttaacatggcagacttgaacacaatggatgaatctaaacttcgcacaatcctcgagcatacatcatcattgttgcaagcacttgctgaagtaaaaaatggggagtccaacaactgtgaacaggctaagtcaagctttgaagataagaaagtaaacatggcatactctgacggggccaccaaatctgagtgcgattagcagtagctgcaaagatattgatgtttatacgctaaactggtgcccgtcagtgcatgcagtggctttatccttaatcatagtaatatttttttttgggttttttttggggtgcgggtgggagtgggattggggttttatcttctggaagagggaagagtgactatccccactcgttggaacctgaaagactagccatggaaccatgatccgtctaatgcgaagatgttctttaaattttgttcatatactcttgttactgcaattttagcgacaagaaattattgaattttctgcc

SEQ ID NO: 133474 - DNA, 154 bp, Zea mays
  Clone ID: MRT4577_53218C.1
tcggacgcgtgggcggacgcgtgtgctgacgcgtggtcggacacttgggggggggcgtggagcaggtacgggttcatcacggagttccagacatactggggttgcggaggcgggaaggacaactaccagaacagggcgcggtggggcatgccgg

SEQ ID NO: 133475 - DNA, 289 bp, Zea mays
  Clone ID: MRT4577_53219C.1
ctgccctaagaggtgttagtcccatttgcattacagaaaaaaaaagtagacatagtagtagtcggcatcaacacgggccacgttgtcaccaagcgcgagctgcctctgcgcccgtcctaccggatggggaacgcatctaacagggcgtccatggtcatgggcctcatcagagagggtgctggctttgctcctcatgagaagcgtatcaccgagcttctgaagggtggcaaggacaagcgcgctctgaagcttgcccagaaaaagcttggaactcacaagacgtgcctta

SEQ ID NO: 133476 - DNA, 427 bp, Zea mays
  unsure (1)..(427): unsure at all n locations
  Clone ID: MRT4577_5321C.1
cagcacagcgcaggcgggagggaagggggacgcggaggaagaaggggcgcgcgngcgggaagcncnacagccggcacggcgccaagaaggagangcggagccacanggncggccccgacgccgccggnaaaaccaccaggcggggggggcgcaagcacgacgagaacgacaccaccacccccaccaacggggacaagggngaaaccgangagaacaagaacannagccccacngacagggacgncgggggncaggacaagaacagaccncnnnggaggcnagacnnccagaacacccaggggcggagnnggggnngnggacagcaaggaccgagaccgngnngnngaagccagagangagccccacaggaagcngaacgaggangagcnacgagangcngngcngcnagcagnggccaacaagcaag

SEQ ID NO: 133477 - DNA, 2371 bp, Zea mays
  Clone ID: MRT4577_53220C.1
cattgggtacctcgaggccggccgggatttattttatttgtaatttcgtcggccgggtttaaatcctcggccggccgggcccggcatgcaacgccttccacacttgaagcagccaagctaagtgaggtgagcttagccatgccgacggcttcctctgcccaccgctcactcctcctctgcctctgcctggctctgctctccaacccggtcgccgcctcgccctcgccccgcggcctccgcttctccgccaaggacatcgcggcggtggaggccgcgctgccgcgacacggcagcagggcgtcgtcgtcgtccaagaccaccttcttcgaggtcgaccgcccgctccgcccgcccaggggcagctcggggccctgctccacgctgctgctctcgcactccttcgcgttcacgctcaccaagccgcccgtcaccgcggcctactcgccgccgccgtgcctgtccggctccgacgcgccgccggtctcgctcgccgtgctcgagtggcgcgccgagtgccgcggcgcgcagtacgaccgcaccttcggcgtgtggctcggcggcgccgagctcctgcgcggcagcaccgcggagccgcgccccggcggggtggtctggtcggtctccaaggacgtcacccgctacgcggccctcctcgcggccggcaacgccacgctcgctgtctacctcggcaacctcatcgacgacacctacgacggcgtctaccacgccaacctcacgctccacctctacttccgccgcggcgtgcggccgtccgccgccgccgccgccgccgatgccgtcgtcccggtctccaggagcctgccgctcaacgacgggctgtggttcgtcgtccagaacgacaccgacgtgcagtccgcgcgcgtgtcggtgccgcgcaacgcgtaccgcgccgtcctcgaggtctacgtctcgtcccacgacgccgacgagttctggtacatgaacacgcccgagcagaacgggccgttccgcgaggtcaccgtcctgctcgacggcgccgtggtgggcgccgtgtggccgttcccggtgatctacaccggcggcatcaacccgctcatctggcgccccatcaccagcatcggctccttcaacatgcccacctacgacatcgagctcacgcccttcctcggcagcctcctggacggcgaggagcacgagctcgggttcgcggtgaccaacgcgcagcggtcgtggtacgtggacgccaatctccacctgtggctggaccccaagagctccaggaccagcggcgggctcgtcgcgtaccacgcgccgaagctggcgggcagcatcgtgtcgcgctccgcggacggcgtcgacggggagtacgcggcgacggcgagccgcaatatcacggccacggggtgggtgagctcgtcgcgcggcaacgtcaccaccacgttcgcgcagcggctcagcttctccaacaccaacgtggtgagcgggcagggcagcgcgcaggcgatcaaccagacgaccgacgcgctgacggccgtcagcggcgggcccgcgcccgcgcaggtgcaccagagcttcccgctctacatcttcctgggcggcgacggcagcggcacgtcgtcgcagcggctgatgcggcgcgtggagatcgggttcgacgagacgcggtcccggggaggaggaggagcaggaggagagggcgccgcgtccacgaccacgagcacgctgcggaactcgcaggtggcggcggcggaggtgacgctccgggacgacgccgtggtgggcgcgtcgtggcggatgcaccagacgtacgagtacggcgccagcgacggcggctgctacctgaggaacgtcagcagcgtcggttacgacgtgcttttcgaccatcgcgacgcgtcctgcgccggtacgctgggccgctgacgcttgtcgccgacagcgagcgccttgtcggcgcctccgccgcgcgggccgctggataacggccggggaagcgacagggtgtaaatggaacgctgcaccggtggacaaaactgtactggcttggctcggcctggcccacgtccggtcttcaattattaaatataccacggtgacgggccattttcgtgggccaattagcttttcattaagaaaagatgtgacgtgacgtgacgtgatgcagctagtacacaggcagcactaaaatgtaaagaaaaccgctggctatgtttatttaacagtacctgttttatgaaatttgtagaagtgttcatgaattctatacgtctgtaaaaccgctgactaaggtcctgtttgtttgggattataatctatatagattatataatccaatgtaaataagctagtgaagaaacaaacaagcaacttatttgataagattatataatct

SEQ ID NO: 133478 - DNA, 722 bp, Zea mays
  unsure (1)..(722): unsure at all n locations
  Clone ID: MRT4577_53221C.1
gctgaaggctctggtactgatattgttttgaatacaataattttcaactcattcgtcttctgtcaggtgttcaatgaaataagctctcgggagatggagaagatcaacgtgctcaagggcatgacaaggaactacgtgttcatggctgtcctcagcagcacggtgatcttccagttcatcatggtgcagtttctaggagagttcgccaacacgacgcccctgaccatacaccagtggctagccagcgtgctcctcggtctggccgggatgcccatcgccgccgccgtcaagctgatcccagtcggctcgtcatgataccattggagattgctgctgcctgggatgggaagcacggcatgaaaagagtcacgctgtccaagctgcatggtattcggtggagctgagctgagctctctctgcgtaaacttttgaaatgcacggagggcaggctagggaaatggagcagccgctgcagtttgagaagttttgtagcctggaaatgtggctagattgcctcggacctgtaagaaaacatcgtgtttgttggcgccgggaaaaagcagctagctgtggtggtggtggtgcagcagaattgttagattggtgattagactgcaggatatttatggtggatgaatggacggaaaacgtggttcgttggttatttttactcttgcttattagagctctggtttggtctttcgaaaaaaaaaaaaanaaaa

SEQ ID NO: 133479 - DNA, 476 bp, Zea mays
  Clone ID: MRT4577_53222C.1
cagggactggagctggtggtgtcggagaccgggtggccgtcgggcggcggcggcgacggcgccaccgtggagaacgcggcggcgtacaacaacaacgtggtgcggcacgtcggcggaggcaccccgcggcggccagggaaggccgtggagacgtacctgttcgccatgttcaacgagaacggcaaggccgagggcgtggagcagcacttcggcctcttccagccggacatgagcgaggtctaccacgtcgacttcacggcggcttcttcctaggctagctcttctcgagtagcagcactaattctgtccgtgtgtacagtgcatgccagtgcacggcgttaccccatcccatggatttgtttagcacattattactgtcgtcattattactcattagtgatgcatttgctcagtagatacagatacagacatacagtagtacactccttcagtatgccatgcgtctctacttgacc

SEQ ID NO: 133480 - DNA, 560 bp, Zea mays
  Clone ID: MRT4577_53223C.1
taaaaaaaaaaaaaaaaaaaaaaaaaaaaaaaaaaaaaaaaaaaaaaaaaaaaaaaaaaaaaaaaaaaaaaaaaaaaaaaaaaaaaaaaaattaaaaaaaaaaaaattttgtaacttttcccgggcccctttttcaaacgggcaaaaattcggaatatttttttcccctttccccgtttttttgttccttggggtctagttttccccttttccccctttatgtggggggttttgcaattcctttcccgtggccccccttcccctttttgtgggaaatccctgtttttcccgccctttttttccttgaagcgtcttggtttaaccccgttgccccccttttttaaagctttttgcccaatcccctttttcatttattgccaaatttaaagggaaattggccgcgccttttttcccccttttttgccccctttttgttggttttaccccccctttttccgttttttttcccagggttttggggcggggtcccccccttgggtccccttttttttttgaggggttcgcggccggtccccgactttttttaactcgggttttcc

SEQ ID NO: 133481 - DNA, 2492 bp, Zea mays
  Clone ID: MRT4577_53224C.1
cgggtattattgggccgattggattattttttgctgttataactttcatcgtcctgtcgcaagggctattcagcaagaaatcccatgagcagatgcttttaagctggtcaggagatgatgcattggagctgctggagcattttgctattgcagttactattgttgttgttgctgttcccgagggattgccattagcagtcacgctgagtcttgcatttgccatgaagaaaatgatgaatgacaaggcacttgttcgccacttagctgcatgtgagactatgggttcggctactaccatctgcagtgacaagacaggaacactgacaactaatcatatggccgttgttaaggcctgcatctgtggaaacatcaaggaagttaatggttctcagaatgcatccaagttacgctctgagcttccagagattgttattaaaactcttttggagtctatatttaacaatacaggtggtgaggtttgtaattaaccaggatggtaaatatcagatcctgggtacccccacagagacagctttactagagtttgcattgtcactaggcggagatcttaaggcaaaacgtgatgaaactaagattgtgaaagtggagcctttcaattcaacaaaaaagaggatgagtgtcattcttgagcttccaggaggaggatgccgtgcacactgtaaaggtgcttcagagatagtcttggctgcctgtgataaattcgtagatgagacaggtggtgttcatcctctggataaaataactgctgacaagctcaatggtattattgatagttttgctggtgaagctcttagaacattatgccttgcttataaggatatggaagaaggtttttccaacgcaaaccatataccgctacaagggtacacatgcattggaattataggtatcaaagatcctgtccgcccaggggtgaaggagtctgttgctacttgccgggctgctggaattatggtgagaatggtcacaggagataacataaatacagcgaaggcaattgctcgtgaatgtggtatacttactgaagatggcatagctattgaaggaccagagttcagagagaaaagcctagctgaactccttgaactggttccaaaaatacaggtaatggcccgatcatcaccacttgacaagcatacacttgtaaagcatttgcgcacaacattcaatgatgttgttgctgttactggtgatggaacaaatgatgctcctgcattgcatgaagcagatattggacttgcaatgggcattgctgggactgaggtggcaaaagagagcgctgatgttataattctggacgacaacttctccacgattgtaactgttgccaagtggggacgatctgtttacatcaatattcaaaagtttgtgcagtttcagctgactgtcaatgtagtggcacttctagtgaacttctcttcagcctgctttacaggaaatgcaccactaacagctgttcagcttctttgggttaacatgatcatggacacccttggcgcgcttgccttagccacggagccacctaatgatgacttgatgaagagagagccagtaggaaggacagggaaattcattacaaatgtgatgtggaggaacattcttggtcagtctttctaccagttctttgtgatgtggtatctccaaacgcaagggaaaaatttctttgggcttgaaggctctggtactgatattgttctgaatacgataattttcaactcattcgtcttctgtcaggtgttcaatgaaataagctctcgggagatggagaagatcaacgtgctcaagggcatgacaaggaactacgtgttcatggctgtcctcagcagcacggtgatcttccagttcatcatggtgcagtttctaggagagttcgccaacacgacgcccctgaccatacaccagtggctagccagcgtgctcctcggtctggccgggatgcccatcgctgccgccgtcaagctgatcccagtcggctcgtcatgataccattgaagattgctgctgcctgggatgggaagcacggcatgaaaagcgtcaggctgtccaagctgcatggtattcggtggagctgagctctctctctctgtctctctgtgtgcgtaaacttttggaatgcacggagggcaggctagggaaatggagcagccgctgcagtttgagaagttttgtagcctggaaatgtggctagattgcctcggacctgtaagaagcatcgtgtttgttggcgccgggaaaaaagcagctgctgtggtggtggtgcagcagaattgttagattggtgattagacttcgaaatggaatttagactgcaggatatttatggtggatgaatgaacggaaacgaggtccgttggttatttttactcttgtataaggcagctctggtttggtcttaccttaaaaaaaaaaaaaaaaaaaaaaaaaaaaaaaaaaaaaaaaaaaaaaaaaaaactcgcagaggggcgcggtcc

SEQ ID NO: 133482 - DNA, 242 bp, Zea mays
  Clone ID: MRT4577_53225C.1
ccgggtcgcccacgcgtccggttaaccaaggtaaccagagcgtgctgccttattgctcctcatgggtcgtaatttgcgctgttttactcgttatgaagaccgtatcaattgccatgaggagcttcagtgcacgagtttcagatctgcgctccacgctgatcaacggtctcatacttataacttttacagccatcgcgacaatcctaataacaatccctgccatgaccggtcttgacatcttt

SEQ ID NO: 133483 - DNA, 344 bp, Zea mays
  Clone ID: MRT4577_53226C.1
acgcggaaatatatagttttcgtgtgccggaagcagcatcgaaggacaaagcttacctttctaggagaggaccggatagtgccgactccgagaaaaaggatatgaaaagagtgcacccaaatacagcggggctggtggatgatcctaacgagagcccaaacttaggtaaagactgggagaatgattggattgtagaagctgatgccgctccgagatgggatagctatccaccgcttgacgaggacatgattcatgcagagaggtcaaaggacaatttaaaggaggtttatgacaacatgcatgtacgcgactagatggtgcctgatgataatgaagaatatgat

SEQ ID NO: 133484 - DNA, 941 bp, Zea mays
  Clone ID: MRT4577_53227C.1
gcgtgcgggcaacacaccggtaaaccttgcgagcatgcgtgtgtgctttatcactgcccaacagatgagaaatgtcaggatggaggactttgttgaccattattactcagttgagaaatttagacaagcttattgtaggatggtggagcctcttgaggacaaatctttttggccaaaagtggacattgcaagtgaggttggtgcacctcttgatagaagatgtgttgggagacaaagggaaaatagtattaagagtagcctcgaaggtgtaagcggtaaggaagcaagtgaaaaaggcaagaaaatgatccgaaggaggttcaagtgtccgaactgtggagaattggggcacagaaaaaatagctccaaatgcccactaaatgggacaaagaagaggaaaagagcgccaaggaagaatacaactaaaggttggtttcctaaagaagtgcctacatcatcacaggcagcacccaatattactcctccaagtgatgatgtgcctgcatcttcagagattgtgctcacaatgcctcctccgccaggagaggatgtgcttgcatcttcacagatagtgcaaccaatgtctcctccaagagaggttgtgcctactacagaaccaatctctcctccaaaagacgcgtgaagaaggttgttcgttaaaatacacctaggaagagctagacatatatgtattcttagggtgtatgttagttaggacagttatctgcaaaactgctaaggttagtttaatgtatgtcagcttatttgattgtcagtttgcacagttatctgcaaaactggtaatgtcatcagctattgggtgcatttgtctgcaaaactggtaatgtcatcagctattgggtgcattatctgaaatatatagttgatgccttgatggcgtgcaatatagtttgagagaaaggagcgctatttcttctgtt

SEQ ID NO: 133485 - DNA, 251 bp, Zea mays
  unsure (1)..(251): unsure at all n locations
  Clone ID: MRT4577_53228C.1
cggccttttccatttcatcaccgccataacctaggctgtgcacatacaactattcacttaccctcanaccctcctcccccncccttccatccatgtcacgcaagaaccacnatcaccttgttggaggtagaaaaatatattttttatgttatgaattgacaaacatcccattcacctaaatcttacccccctcaaccatataaataaactactacttttatataaacccataccatccttacacccccaac

SEQ ID NO: 133486 - DNA, 714 bp, Zea mays
  Clone ID: MRT4577_53229C.1
gttatgtactccttccaacggttgtcctctaaccaataatattttttcacctaatgaatattgagcttttattttctttaccccaaaacaaaattatgctagttctgagattttagagtaaactaaaattgagtgttgcgattagactatgtccataggcatgagaattacaaaatatatatgtccttacttattgttggttatttctttgtgctaatgactacactgttgaagttactgttctcgtgaggaattatttgtgaaagtctccaattttctgtacaacgttgatatgattcatgtcggcgttgtggagcatgctcatatgcgtgaaagagaagatcatgtacccatgcttcgacgcgaacgcgaggcatgaaaccgtcgtcaacacttcatcatggccgccatgctccatgttcaccacaacttcaggcgccgcagtgacatcgtagccatgctccggatgcagacggactgccactgagaccgtctttcaggggaaaagaacgtatctcatcaaatcgcctggcatcaggagtggagacgaaactcaacaaccaaaagtgaacagatcagaaaacacggagatggcagctccagacattgtgttggacttggaggtgaatgaagacgtattagattatatgggtccgatcagacccaaattaacatgaaaaagtcattgtgtgcggggccaaatcatagttcaac

SEQ ID NO: 133487 - DNA, 334 bp, Zea mays
  Clone ID: MRT4577_5322C.1
agccagaggggatcttcaaaaaaaatgagcgatttcacacgcatccgcgcatacagggggccgagccagcgacagggttggggtcatgacgcttgaaaagttgagcaaaaacaaaatgccaagggcagcgtcaggttcattatttggtaacccagacaggtttggtgcgacgaccacaaccctactgctatgaacaggaaaatctgctcctaacgctggtcaattggtgctgcaaaacttttaccggttgcaccaattccatttgcttttccaccgcaacctgcaacgcgttttttgtcgcctccagttcaacctcgaggggttttatccggtc

SEQ ID NO: 133488 - DNA, 245 bp, Zea mays
  unsure (1)..(245): unsure at all n locations
  Clone ID: MRT4577_53230C.1
gcgggccggtgggtcttgcctcacgcctaggcatcctcagcccgcagcgcggtcgtcncttgcccgcccggatcgggtctctggctttggggattaagtggattcngcaacctttgccggggcccaagttggcggtgagcgcgtctgggaggaaaggcaacaacagcccagaggaccgcgacaagcccaaaaacaaaggcgcctttttttggaaaagtgatgcatttactcccaggggagatgct

SEQ ID NO: 133489 - DNA, 3046 bp, Zea mays
  unsure (1)..(3046): unsure at all n locations
  Clone ID: MRT4577_53231C.1
cattgggaccctcgaggccggccgggattcgtatcccgtagctcgcagccgactctgttctctgtaccagcccaacccagaagcctatactcgttacgattacgagcccaccagcatctcctctgcacgggggcattccaccgagcacctcacgtgatctccaccccgcggcggcggcgcgagcaccgtctccgcctctccgctctccggcgaatcaaacccctccggcgttgcccctcggttgcctttcccctccgccacaatgcggtttgacctggatggcctgcccgtgcacttcccgtacgcggcgatctacccggagcagcacgcgtacatgggggagctcaagcgcgccctcgacgcgcgcgggcacgcgctgctcgagatgcccacgggcaccggcaagacggcggcgctcatctccctcatcacctcctactccctcgccaacccggcccgcccgctccgcctcatctattgcacccgcaccgtgcacgagatggagaagaccctcgccgagctccgcctcctcttcgcccacctcccgcccgcggcctcccgctccctcctcgcgctcggcctctcctcccgcaagaacctctgcatccacccgcaggcgtccgccgccgccgcccgggactccgtcgacaccgcctgccgccgccttacggcctcctgggtccgcgagaaggcctcctccgacccggactccaccccgctgtgcgagttctacgagacgttcgaccgggccgctgccgccggcgacctcgcctccttcatgccgcccggggtgtacaccctggcagacctccgcgcgctcggaagggagcgccgggtctgcccttacttccttgccaggcagatggtcaagtacgccaatgttgtggtgtacagctaccagtacctgctcgaccccaaggtgggcaggattgtgtccagtgatatgcagaaggagtgtgtggtcgtgttcgatgaggctcacaacattgacaatgtctgcagaggcgctgagcgtcagcatccgcaagcagacgctggaaggcgcagagcgaaatctgcggcgcatctcgcaagagatcgacaggttcaaggccaccgatgccaataggcttcgtgctgaatacaacagactggtggatggactggcacagcgaggaaatctaccaatatcggatgcttggctcgcgaatccgtctttgcctgatgacatcttgaaggaagctgttcctggaaacataaggagggctgaacattttcttgctgtcttgcggaggcttgtgagattccttgatggccggcttgaaacagaaaatgttgagaatgaaatgccagtttcctttgttgcctcaatccattcccaggctggaatcgaccaaaaaatgctgaggttttgttatgaccggctacactccctaatgatgacattagagataactgatacagatgagttcatgcacatacagaccatatgtgactttgccacactgattggaacttatacacggggcttttctattataatagagccgtatgatgatagaatgcctgatattcgtgatcctgttattcagctgagttgccatgatgcttcactcgcaataagacctgtttttgatcgtttcgaaacggttgtgatcacttctggaactctcagcccaatagatctttaccctcgtctcttgaattttaatcctgtcataagcagaagcttcaccatgtccttaacaagagattgtatttgtcccatggtcttgacccgaggaagtgatcagctacctgtgagtacaaagttcgatatgcgtagtgatcctggtgttgtgaggaattatggccgcctcttgctggaaatggcttctgctgttccagatggcatagtttgcttttttgtcagttattcctatatggatggcattgtcaacagctggcacgaaatgggaattctgcaggacatcatgcaacataaattagtgtttatcgaaacaccagatgtcgttgagacaacattggctcttgataactacagaaaggcatgtgattgtggaagaggtgccattttcttctctgttgccaggggcaaagttgctgaaggtattgattttgatcggcactatggcagattagttatcatgtttggtgttcctttccagtacacattgagtcggatattgcttgctaggttggagtacctgcgggaaacttttcagataaaggagggtgacttcctaacatttgatgctttgaggcaagcggcccaatgtgtcggtcgtgttattcgctccaaagctgattatgggatgatgatatttgctgacaagagatacagtcggcatgataaacggtccaagttgcctgggtggatactctcgcatttgcatgatgcgcacctaaatctgagcactgatatggctctccatatagctcgtgagtttctccggaggatggcacagccatatgacaaggcgggaagcggtggcaagaaaacgctgttaaccgaggaggatctggagaatttggcgcaggatggcatggcgatgtaaaaaaatgagggtactgttgtacatttctttttgtagccattttatggcggtagataacttgtttgaagcatcggtaatgacgtgtggggccaaatcattcttactcgagttcgcacggatttgatcatccgaacatcatggtcgatgttcttctgaaaaaaaaaaaaaaaaaagccaaatcatgtcagcgggccatctgcagctacgtatacagacgaggatccaaacataaccgagaggaaacatagatcatgcttctaatcaaagaaaaaaaatccgcactcgatgcgcaggtgacgcctcattacatggctgggattcatatcttggtaaaaaccgcaagggtctgttttagaagtgaattatttttatagcttgtattcaatatcaaggttttggataataccgttgtattttatgacattagatgtttggttgcaattctggaaaccaatttttaaaaccattgtattttctnatatatcatggtatttttagagtattgaaaa

SEQ ID NO: 133490 - DNA, 452 bp, Zea mays
  Clone ID: MRT4577_53232C.1
cggccgtccacgcagcgtttcccccgtgctccgtgtatgtctgcctccctcccccgctccgcgcgggcgagctgagcgcctgagccccataataaataggcggccacgtagcagcaccggccggacgcgacgcaatgcaacacgaggaagagtgcgatactactaccggcggtgaaggcaacggtcgagggggtgaggaggaactcgagatggaggggcactcgttgatgaggatgaagaggagggatcacttgctgctcactgacggcgccggcgccgggcctctggcggtgcagacgccgatggagcccatggagttcctgtcgcggtcgtggagcgtgtcggcgtcggagatctccaaggtgctggctggcggcgtcggcgggaggcggagctccaacttcgtcgtcgaccgcctgtccgggatgctcatgccggagacgctcgcgctc

SEQ ID NO: 133491 - DNA, 396 bp, Zea mays
  Clone ID: MRT4577_53233C.1
aaagggagaacctttcggatccttttatttaagccttcccgccaagccctttttttttcctaccattttttggaaccaaaccaaacccttccttttttggggaacggacttccccccttaaattgtccaagtaattaatttaataaattgaattctaacccaagggggggggcctccggaacggggtcaacaaaaatccaaccccggtgggggcggaaatccatggtaaccggcgtgccaacgggcagaacaacaatttcggggtgggccttgtccaaaagaatcaccctttgggttttttcaaggttgaccccaaccatttccggccaaaattttttggccccatggcccccgcctgtggacctaatggtactgggttgccgcccacccttccgg

SEQ ID NO: 133492 - DNA, 239 bp, Zea mays
  Clone ID: MRT4577_53234C.1
acgtattgggggtgagtgaccaaaggggggggacaagcaacttggctccccttattttatttggacatcgaagtattacatccacaaaaccacgacaaaggaccaactcatcaacaagcggagaccagcattcatacgggagcgtaacaaattattgcaagggggtttaattgaaaccaaagcgagcatgcctaggggggaaatcctaggcttccggagacgacaatgacaaatcagga

SEQ ID NO: 133493 - DNA, 637 bp, Zea mays
  Clone ID: MRT4577_53235C.1
aacaaaattggggggccctttgtttttttaccaaactgatttttttttgccccaataatagggggcttttcatgaatctgtaaaatttaaaaattttgaactgaaaaaagcaaaactggaacaatggcccctaaactcggaagccggggggccctcaacgggttgaagggcacatacaaccaaatttcaggtttaatttcgacgacggccccaaattgaccagtttttttgagctgaacctggcacaaaattacctatttggcctgacccctttggatatcggcaagctgcaggagttgcaaaccctgttaaacctgagcaacaacaattttaggaggcccatccctgaaggggcaaactaaaaaaatttaaacccccaaagcattttgtcaaaaaaaaaattgcccccctttaaaatcaaaccaggaggccgttttaaacttttagtttgacatgtattaacaccattttttcatcctgggcaaaatggaagggggggttcttagttcttaccataaaaagctaaaggaaaggaacttcaaggggggtgctatttggtaaacatctagggggaaaaaaagcccaaggggacataaaggaaaggttgttggcatttggcctacactaatggttaaaa

SEQ ID NO: 133494 - DNA, 376 bp, Zea mays
  Clone ID: MRT4577_53236C.1
tttattcttgtgtgaacgcgaaggctagaatgggtcgatagataccacgtagggcggcacaagggatctgagttcgttgtagtcaatgagaccattatagagggtcccgaggcagcgcgtaatactgaccgatggcacgctgtcgattgatctagatgttaggatactttctgcgtgatattcctaagctgtgaacactcttgggaacaatgactgagataatggagcgagaaactaagctcacggaggcggctggacatacagagctcctacaagtgtgactacaggactgtatagcaaggctgacttggtcgatattgacctgcacagagctcgacaaagcgagcagtgtgtctgtgaatgagtgaaaccagat

SEQ ID NO: 133495 - DNA, 309 bp, Zea mays
  Clone ID: MRT4577_53237C.1
ggccgccctgttcttttttttttttttttttttttttttttttttagtttctctaaaaggtcttccatccatttaaatactttaaataactagtttaacaaaactaaaatatgtacaatatatttgagagtatgacaaatacatatgtacaaaaaaataaaaaatgtctttaatataggtattttcatatagaggacgtgatttagaggacgttatgctgcagacaacgtcaacctccttcggtcgtgcccttcgttggcccagtattgcgagccccactggcctgctgcggcccagcgccctgcacgt

SEQ ID NO: 133496 - DNA, 548 bp, Zea mays
  Clone ID: MRT4577_53238C.1
cattgggtacctcgaggccggccggaagatcattcccaaaaaaccctgtcgtggctgcagacgatctatgtcttcattaacataacaacttgctcctcaaacattgcaacaacatgcttcgaataattgtcgaacaaaatcctcgccggggaataaagctgatatgaatgaaatcaaacgggctgtgccacttcaaaggaacaagttctcgaacactaacatgtgattcagttctttgaaacgagcgcataagacctccctagaacgactgagtatgttttcttttctataccaagggatatcgaacggagactttcagagactgatgctacgcctgaggatcaaactatcaaaatcaaggatgaaggggaagctgatgcctcacaggctcacaaatcagcttgctgcagatcttgaaagattgagactgcaggatagccccataatttttattctttgccagcaagactctccttgtgcttgagctatcacaattgatgaggattggacaactgaatcgaacgtcagaactaattacttgctatatt

SEQ ID NO: 133497 - DNA, 379 bp, Zea mays
  Clone ID: MRT4577_53239C.1
ggaatgcttcagaagcagacttaaggacagtggaagagtgggcatccaaataccgggctgaagagctgtacatgatgaggcggcaaatagacgaactcactgaatgcctgggctcggcaatggacaactttccagtttcttgttcttcccttgaaggcttgctgctctcttctcttaggcgctgacttgagtatacggtaggattaaaattctgcgtgaactgatcacatttttgtacccaaaggagtctacagctgatcggcatgcctggtcatcctcggtttcttttggactttgagctaggccgtaatcatctctaacatctgtaatggatcaattgctgctgctaattgtaaacttccagggtctctataaatct

SEQ ID NO: 133498 - DNA, 357 bp, Zea mays
  Clone ID: MRT4577_5323C.1
atccacgcgttcggagaaggtgaaagaatactaaaacgtgccttttgcttttaatttagtttattgcaaactgcctattcagaatcgaccgtttttggttaccaacaattttcacttactcggaatactggcctgaaattgtatcacaatttacaccaggtgcgcattttatgagtgacaccgacacccacacgaccagaattcatacgtacccgccatttgctgtatggattaacactgcaccagacactctgccactcatgccctgagactcattacagcttgctggagacacgtatggacctgggcttgggccgggccggggcaacttccttgggcacaactactgtgaaaacc

SEQ ID NO: 133499 - DNA, 399 bp, Zea mays
  unsure (1)..(399): unsure at all n locations
  Clone ID: MRT4577_53240C.1
tcggtccaagcattcaccggagatttnccaacatcactactctaccagatatacctgatcccgccttggtgtcagcgcagcattcttttagcgcgaagttctatactatgctgcgctgcctaccgctcagcgcgtactgtaacctataccataattgtgctctagcttcggcctggaggtacacccgacattcgtctgtctctcctcagacgttcgatgcggcggcgcatgccccggccggcaccccaaccacagctcccaaggccgcgcccaggatggccccgttgccgccaccccctgagctgtccccggtcactgccccagcgccggccgtcaattctgcgaccgtcgcagcgccgttcccacttgcctttccttcggccccgtacatcgagggcc

SEQ ID NO: 133500 - DNA, 663 bp, Zea mays
  unsure (1)..(663): unsure at all n locations
  Clone ID: MRT4577_53241C.1
ccggccggaggctccactttccccagcccagcgtcaggcgcagtcgggcgaacggcatcgccgatttcctagccgcgaactccgccatgaaccaccgtgtcggatcgtgcgggtaccctgtgctagctcctcggggtccctgaccttgggcctttaagtagttgtgtctggcgtcctcttcttccatctgttggagcgagcttcgtagcgtgttcacccacccgcgccgtcaacagagaataggggagaggaaagtacgctgccaacgctgttcttcgctttccatggtcgttcgacgtctgcgaataattcgcggggtctgggcgcgtcgttagccggcgatttggtgcacctggaggtggggactcgtgcgggtgaccgggactttgtcgtccgactccggtgctcacgatcgagccgtcgcgccttggtgaacgagcttctacgttgtctaaccatcgcgcgaggtcacgaggatctgaagaatcatcctggtacctggaatttcaagtgccaggtcaagaacaggtaccactggataaggcgcatggaggatgctgtgatgagttcgtgagaggtctaggtcgtcgtctcccagtcaactttgggttgctggaccgntgtctccttataatgtaattatttattttgtatagaattcct

SEQ ID NO: 133501 - DNA, 286 bp, Zea mays
  Clone ID: MRT4577_53242C.1
gcaaccctccagcaaccctcaggtgttcttggaccttcacatcaaatcatcaacatggccaaccccagagtcgaagagctccccgacgaggagatccccaaggccggtgtcgaggatgctggcagcgactctgagtctgaggcaggcgaggagcccaccattcctggtggcgctgccgttaccattcactcgcgcaacgaaaagaaagctcgtaaggctattggaaagctcggattgaagcacgttcctggtattactcgtgtcactctccgccgacctaagaaca

SEQ ID NO: 133502 - DNA, 819 bp, Zea mays
  Clone ID: MRT4577_53243C.1
ctcctccggcgccgtggttttctgctcgcttggccggccatggtggctatgcatgccttctggccgtggatggttctgcccaggccaccgtcgcgcccagagaaatggtgcgcgtccctgcgcctggttttcgtttccgtcgcgccgatctgtgctccgtcctggccatcttctctgcctccgatctgtggcgccgtcgcaagctcgttagccactattgtcttgtccacgccagcacgcgttcatggtcgcgtcggccaaattcgccaacgttctattaccagttcgactatcatcgctgttgcgtgcgctcgcgctctctatcccctggtcgacctcgtcgtcaggcttcgccttgcaggtcgtcgttcttcgctcagcaaggtttcattctaagcgccgtccttcaagttcacgtccttggcggactcgcacctccgtgtcgtgtccgctcgtccatgctgtcgacccgtgaggacacagggtctcgctagagtcgcgctgccgttgacgcaacgcagggtctcgctctttttcgtgctcgaccttacaagtctccaactcgtcgacatcctttgcatcatggaaaaatcctgagagtttgaataaagcaacaaatcccatgtgatgcaacatttgccaagagctcgaccggatgtctaaactgagaaccgtcgtcgccctcacggttatcaaatcgattcgatcatgggggactactccgcacgatgatgttgatggtcgaacctgaagatggacagacgaaatgagtatcagtacaaaagatggtcgtcaagcgggcgtcgtctaacaacacta

SEQ ID NO: 133503 - DNA, 1049 bp, Zea mays
  Clone ID: MRT4577_53244C.1
attgggtacctcgaggccggccgggaaacttcctttcatttctttccgttccggactcctgtttccatcctcttgccacgggtccacttgcacccccatctcctcggcctcgggaagcccagcaaccccaatccccaatcccgtccgcttctttccccgtccccgaccttggcgaggaacctccaattccccagtcctggcctcttagccccaaccctaaccctagccaatcgcattcccatggacgacgacgccggcgacgcctcgccgccgccgggacctgccccccttgctgccacaggcgccccgtcgttgcgtgacatggcggcgtcccctaccagctcgcgctccgtgacggagacggtgaacggctcccaccgcttcgtgatccagggctactccctcgccaaggggatgggcgtcgggaagcacatcgcgagcgagaccttcaccgtcgggggataccagtgggctatctacttctacccagacgggaagaacccggaggacaactcggcctatgtttccgtcttcatcgcgctcgcttccgagggcactgacgtccgcgctctctttgagctcacgctgcaggaccagagcggcaagggcaagcacaaggtccactcccatttcgatcgctcgctcgagtctgggccctacaccctcaagtaccgaggctccatgtggggttacaaacggttctttcggcgaactgctcttgagacatcggactttcttaaagatgattgtttgaggataaactgcactgtgggtgttgtggtttcaactattgattactccggaccacactccattcaggttccagactctgatattggctaccacttcggttctcttttggacagtaatgaaaggggttgatgttattcttaatgtgagtggagagaggtttcatgcccataagttggtgttggctgcacggtctactgtatttagatccaaactttttgacgatgaatcagaaggagacaagacgcgagttatgagagtgaggatctgaaggagattgttcttgatgatctagagcc

SEQ ID NO: 133504 - DNA, 374 bp, Zea mays
  unsure (1)..(374): unsure at all n locations
  Clone ID: MRT4577_53245C.1
ctcttaaattatactttttactttatatttgaacataactcatatgaaatctaaagagggcaccaacaatgatgggttgatggtagaacactgctaggtttgtttttcaagttggctgaatggcagcagggggggcagttgtaatttttttttctgcgngaggcgcagcgagctggcagaacggcaacaactgggggtgngncacccacccagcagggctcacaccagctagctggctgaatggtactagntggtgctgctgaaaataaacaggagagttcattgctgccagctggttgaatggaagaaactgctgggggtaggcaccacgcagctggctcaacggttgttggtgctggttgcccgagtacctc

SEQ ID NO: 133505 - DNA, 281 bp, Zea mays
  Clone ID: MRT4577_53246C.1
atttaatcgcccccagttttaagacgactagatcctgggttttcatttttttgttctacaaaagctggggcctatcattctgacccatcagggaagggttcaagggcattctgtttcccgttaacataaaattaaatcactgttttcattgcgacccgacttatttggggggggggttcaaaggcccaacccccggtttaaaattccgcaaataagcatttttccttaccgttttgaaaagaactttcctgttcatgaaaagggggatatccctggctttt

SEQ ID NO: 133506 - DNA, 228 bp, Zea mays
  Clone ID: MRT4577_53247C.1
gcggcttcggtgaaggcgttctctgtcggcaggacggcctcggtcagcgggaacgacggtgggggcggcaagacgccgcctgtctcgggcgccaccggcgatggccggtcggacgagtcgtccttatatcgaccaagccgtgtgacgccgcagcagccctcggcaccccccggggctgagaccgccgcccaatacgctgcgaacgcggcggaggaggccatctgggaa

SEQ ID NO: 133507 - DNA, 594 bp, Zea mays
  unsure (1)..(594): unsure at all n locations
  Clone ID: MRT4577_53248C.1
cggncgcgtgggcggncgcgtgggcggacgcgtgggcggacgcgtgggccgacatggacatgttccaggaggacacgctgtcgtcggccacgtcgtctccggcgtcgtcgctgtgcacgccgtcgccgcacccgcacgggtcgtcgtgggtgcaggagctgagccacgaccagcagggcctgcgcctcatcagcctgctgtaccagtgcgcggcggaggtggcggcgggcgccttcgaccgcgccaacttgtacctggagcagatcacgcagctggcgtcgctggacgcgccgcacacgctgcagcgcctcgccgccgtcttcgccgacgcgctggcgcggaagctgctcaacctggtgcccggcctgtcgcgggcgctgctgcccacggggcccggcagccccgcggaggcgcacctggtgcccgccgcgcggcgccacctcttcgacgtgctgcccttcatgaagctggcgtacctcaccaccaaccacgccgtcctggaggccatggagggggagaggttcgtgcacgtcgtcgacctctccggccccgccgccaacccggtgcagtggatcgcgctgttccacgccttcc

SEQ ID NO: 133508 - DNA, 2308 bp, Zea mays
  unsure (1)..(2308): unsure at all n locations
  Clone ID: MRT4577_53249C.1
aagttcgtctgccaatttgttgaccggacttcagggtaaatcccaggtagtgcaagatgaacttgcaaggctaggagaacagatggtacaaagtgctgaaggaacaagagcagttgctctggagctatgtcttgtatttgaagataaatttcttgctcacattactggtggtgaggggtcnncggttggaaaatagttgcaagttttgagggcaagttcccagataggatcaaacaacttccattggacaggcattttgatttgaacaacgtgaagaggattgtgttggaagcggatggctatcaaccctatttgatatctccagagaagggtttacgttccttaataaaaggagttcttgaaatggccaaggagccatcacgactctgtgttgaagaggtacaccgagttttgttagacatagtaaatgctgctgcaaatgctacaccaggactaggaagataccctccattcaagcgggaggtcattgcaattgcatctaatgcattagatgctttcaaaagtgatgcaaaaaagatggtggttgcacttgttgatatggagcgagcttttgttcctccacaacacttcatccgattagtacagaggagaatggaaagacagcgccgtgaggatgagttgaaaaataacagatcatctaagaaaggacaagatgcatagctatccaagatgaaccgggcttcaagccctcaaactggatccgatgaagctggtggtaacctgaaataatgaaggataaatccaataagcaagataatgatacaaaagagggaccaaatttgcaggttgctgggcctggcggcgaaataactgcaggttaccttttgaagaaaagtgcaaaaaataatgaatggagtaaaaggtggtttgttctaaacgagaagagtgggaagcttggatacactaagaagcaagaggagagacattttcgaggtgtcattgtcctggaggaatgtaacctggaagagatagaggaggaagagatatcgaagagttctaaggattcgaagaaggcaaatggacaagagaaaggcccaagtcttgtttttaagattactaacagggtttcctacaaaactgtcttaaaagctcacagtgccgttatattgaaggctgagagtatggctgacaaaattgaatggatcaagaagataaaaggtgttattcaaagcagagggggctctgttaagggtcccactgaagatggtcctatgagacaaagccgttcagatggatcccttgatacaatggctcggaggcctgctgatcctgaagaagaacttcgatggatgtctcaagaagtccgtggttatgttgaagctgttttgaacagtttggctgcaaatgttccaaaggctattgtactttgccaagtggagaaatcaaaagaagatatgctaaacaaactgtacaactcaataagtgcacaaagcaatgcaaagatcgaagagctactccaagaggaccacaatgctaaacgtaggcgggaaaaataccaaaaacaatcatccctcttgtcaaagctcactcgccaactcagcattcatgacaatagagcagcttcatatgggaacgatagttctggagctgagggtagcccccggtctcctggccactctggtgaggattggaagtctgccttcgactcagcaacaaatggctctgttgaccggtccagttcacagcatgagacaaggtcaaaaagtgctgacagtcgaggccggcgccatgaaaacggggatgccaactctggcagccgacgcacacctaaccggttgccaccggcaccaccaaatggggggagatactaagtatgttgattgatcattacctgtgaccaatcatcatcatatgctcttgccaggttctcatcctctactgatactggttattggtggaagaaaacatatgggaccggagaacggaaagcttactggaagatttggatggacggtgtgtatcaagagaaccaaagttgtttatagaaaattagaatcatataggtcattgatgattgtcatttcccgatcgttttggtgtatttgatcttttggatcctcattgccagtgggattttgttgccacggatcagttaattttggttttgtacgcttcttctgtaagtctccccatcaaactggcaaatgtattctttacacacagtcatgtatcgttgttcttcccattcttttagactgaaccacatgttcagtggttgtgccatactgctgtatgattatattgtacaattcattattgggctggagtacacacatgcttgttgata

SEQ ID NO: 133509 - DNA, 333 bp, Zea mays
  Clone ID: MRT4577_5324C.1
gcatgtgctagtgggctgaccgctgccattgggatgcttactaacaatggcggcggcggagagacatccactgggggcacgagcacgacatgttctaagccgacccttgctgttcgtgggggtaccgccaagaacagccaccatactgtactagtgcgtagctacgcagtgtaacaccgatgaaactagacgtagtagaactagcgatacaaacggctgggtgccaagcatgcacctggtgctggcatctctgtgtggcgaaagcctctacatatgtgtatgcatgtctggtcgcgtgggacaataatgatatagatatctatatatatactt

SEQ ID NO: 133510 - DNA, 208 bp, Zea mays
  Clone ID: MRT4577_53250C.1
aagcacatacaatgatattattttcattatgaataacacgtctgtacatcaagtcatacaaatgaattctcaagattcagttacagaccaagtatgacatgacatgcgaaaacccaacaatgatgtgtgcctgagcatccttcatcatgtaggcgacccctaaaagaataaagctggtgttatgcttattttgacctcagcgcactgg

SEQ ID NO: 133511 - DNA, 1038 bp, Zea mays
  unsure (1)..(1038): unsure at all n locations
  Clone ID: MRT4577_53251C.1
gccggcctggcctgggaattatatatatacagcagcttcgagaccggccgcaaccacatcctcgccgcccgtcggcttgcattgcagttgcagcagcgcacaattaattggaagcgatcttctttcccgggtcatcaagtcctctcctcatcggccaaccatcacacagcacctccgcgagggatcccgcctctgcctggccgccgcccgtcgcctttgcagcaaggaagaagcgatcttctctcccgacaagtcctcgccggatctaagctagcgtgtggcttggcagtaccggggttttcagtaaggactaaacacgttagggaataatgcttccagaaagatgtgcttgtatgttgaagagccatcctgcgagggactcggcagagtagcatgccatactcatcatcatatatcatctgctagatcttgatgaccttgaagctcaagagtatctttcacacgatggcttcttggatcaccatcttgggggagacgattgaagtcttgcattggtcctctttttcttgtcaaggataaaaagcaagtacccgcgcgctatctgtgtgcacacacacgggcatgcatgcatgcaagatgatggcgggacaaaataaaagaaacattattctcatgcacaagtatgagatggggagattgcttggtcaagggaccttcgctaaggtctaccatgctcgcaacaccaggacctcagtaagcgtcgcgatcaaggtgatcgacaaggggaaggttgtgaaagtcggcctcgtcgaccagatcaagcgagagatttctgcgatgaagctcgtcaggcacccaaacatcgtgcagcttaacgaggtcatagccaccaagaccaaaatatacttcgtgctggagtatgttaaaggtggagagctcttggctaaagtaaagcgagggaggcttaagggagatgtggcgaggaagtacttccnacagttgatctgtgcgctggacttctgccatagcaggggtgtctaccatcgggatttgaagctagaaatcttttgctcgatg

SEQ ID NO: 133512 - DNA, 111 bp, Zea mays
  Clone ID: MRT4577_53253C.1
cgctcgagcttcattattttactgctattttatggttgtcatttcgcatgtatcaagaagagtggatcctggtgttgactttaaatgtgttggtcgacgtcagggtggcaa

SEQ ID NO: 133513 - DNA, 350 bp, Zea mays
  Clone ID: MRT4577_53254C.1
ttgatgagcacaactggataagatgaaatttgagggggcactttgacacacatttccttaacttcggcaccatattggagtgcatgagcgaaagaatgaatatgcatgcacgatgcatgttatcatgtgcatggttgcttgtgggcatatgcaggacgaagaagaggagggaaagtggctacttagaagtgataggacgcctggtccgtgacgccgaacttccaaacagcacgggagaacgtgccatcaggtggccttgcggtggacgcctgttaacaccccggacgaaagccactcgcaggtgaggtcctccactgtctgccacattttgcccccagtagcgcttaatc

SEQ ID NO: 133514 - DNA, 352 bp, Zea mays
  Clone ID: MRT4577_53255C.1
ggaaacacaagccgtctgcctctcctcctccagagctcttcgccctcggccaccgcgaccctggatccggctgttccgtccaggacagggcatcgcggtgagggactcggaggacaaccactccctatcgaacgtcgacgctggggcgaccaagacctacccgcagcaggtgtgcaccgcgcgtaccaacggcttattcggcttctagaacccttcgctgcgaggttgttgaggtttctacctccaagactggtgagcatcgccgcgcgcaatgccactttgtcgccctcgacgtattgcttggcaaaggcttggagaaattgctccttcttcacacagctgtgacattccg

SEQ ID NO: 133515 - DNA, 988 bp, Zea mays
  Clone ID: MRT4577_53256C.1
cgacgccgcatgatccgtgcacctcgactgctcgccgcgcacgcgccatcgccaatccgacaccgccaatccgtagccccgatctctactatctaccgccgccttccttggtcgccgcgcgcggccttcctcgccgcccaagccccaacctcgccgacgcgcctcgcgtcgtcgtcccgcctcggtcctcttctcgccctgccgatggatccggccgcccccgagcctgtccccgcacccgccactgacaccgatgccgagaccaatggttacgaggatgcctctgaattcgaggacgcggaggctgggggcgagggcgctggggccgggaccgagaccgggaccgggaccgggaccgggaccgggtccgggtccggaacgatgccggcgggcggtgtagcggagatgaaggagctgcccgaggagcttgccaagggggtggtgtgcctcgaatgcgagacatcggccgaagcggcggtgtcgggtgttggcgggacctgccgcgtctacgtcgtcggcaccgctcatgtgtcgcaggaatcatgtgatcaagtgaaggccatcatcaactacctcaaacctcaggctgttttcttggagctctgtatgagcagggttgcaattttgacaccacaaaaccttcaggttcctactatgaatgaaatgattgacatgtggaagaaaaataagatgaacacttttggaattatctacagctggtttcttgcaaaggttgctagccaacttgaggtgttacctggagctgagttccgggtggcatttgaggaagcaatgagctacggtggcaaagttctcctaggagaccgccctgtccagatcactttgaggaggacctgggggaaaatgtcactatggcacagggcaaaatttctgtactacatcattttccagtctgtatttttaccaagcccagaggaactgaataagatgttaaaggacatggatgatgttgacatgctaacacttg

SEQ ID NO: 133516 - DNA, 330 bp, Zea mays
  Clone ID: MRT4577_53257C.1
aaaccctcccccaacagggaacaagggcacatttaaatttttttgtaaagctcccgcatgtgctcaacagtttattcccaacaaacagggggggcggtttaattaccggggccccagggtttaggatcacaaaaatttctcccccgcagccatacccttctggggaaattaaaaccaaaagcctaaccgttaaaaaaaaatctcccacaattcccggagggttttgtttttcttaatcccaccccattgtgatgggggtgaatcccctggggggagcccagggactgaaaaacaccccggccaagttttacatgggggggatttgttttt

SEQ ID NO: 133517 - DNA, 440 bp, Zea mays
  Clone ID: MRT4577_53258C.1
agttctgtcaacaattttctccaatatttatcttttgttgtacactccaacagcacctgatttttgttgttctcaggttgatgatgctatcggggttgcacaaaaggttaaaagtaccataaaatcaaactgggaagatgcgacaccaccaatgaaagaattgaaatttaaacctttagatgtttaaatccttgttctgggcatttgctacggtatagttgtttttattcttggtttgtgtcaaatactcttttattttcatagggtagctttgccctcagatcttatataggtttcttagccccaagtttttttagattttatatattctacatgtttgctttctaaagttttgattttcctatgttaaggtatcttatcgccagtgttcttaaggcggttaggcgagcaagttaacatgaccaccggcggctaggcaa

SEQ ID NO: 133518 - DNA, 329 bp, Zea mays
  Clone ID: MRT4577_53259C.1
cgagatctatgtctcgccggtgttcaacgacgtgactgcgaacatcgtgatgtcacccaacgtcatggccttgatgaacttccccctcttcgacatctgtcgaaaaactgaatgacgacgccgcgatcgtccttccctacaactagaacaccacgattgcctcccggaaaatgcaaacgtcaatattgccgtctaaccttcctggtaagctcttcgaacaccacgtcttctatgtaaccaatagcgcgaccacggttacttcccctataattcccgacaatagaaccaaataggtctggagcgttgccccagactgttacgacagtgct

SEQ ID NO: 133519 - DNA, 264 bp, Zea mays
  Clone ID: MRT4577_5325C.1
tgtctcagcccggctgatgcctctgcagtgctgagtcaggatctggggccggctctcttgggtccttccccttttcccaggtactgccttacaacgctgtggccaggaagtggccggtataaaggatgcccaaggtctttgtacgtgtataggagttgcgtgtttgatattgttaatataataataattattttttagagtactgcttttgtatgtatgttgaacaggatccaggtttttatagcttgatataaaacagaattc

SEQ ID NO: 133520 - DNA, 247 bp, Zea mays
  unsure (1)..(247): unsure at all n locations
  Clone ID: MRT4577_53260C.1
gtaaggaaagggaaatatacaaaggggggnanagnnnnngttgccagatcccccattacaaagcgaatgtaatatactggttttgacagctccccgtgtccacaaagggtgacccacaaatcctcccaccacaaagattttcattccaagcttacaacgnncaatcttgtttccttactcaacaccaacagcacacaacccaggttgcacagcctgttattttcagttgttaatgtgnaaacccctg

SEQ ID NO: 133521 - DNA, 256 bp, Zea mays
  Clone ID: MRT4577_53261C.1
aatttcatttaaaagaggcataaaacaaacttctcagtcagcggatttatctataggggacaagatagcctatccattgggaaagcctaactaaattttcactacgcttatggtggctccagacaaaaccatggcattttgacgggatgaatggtgggggctagcttaagctctataaagttgttttattggggggtgatcccaatatacgaaaagtttgaggggggggggcatcctctgtctttccagctttaac

SEQ ID NO: 133522 - DNA, 215 bp, Zea mays
  Clone ID: MRT4577_53262C.1
aacacaccatccatgtatgagatagacaaacactgctgagactacaaatggttctgagtgtggacctttgcttaagaggaaaggagctcttgctagtagtaaggacgctgaaccctacaacgcttaactctggcactgacagctccaaggcaccaggtggtccttatcgaaactcatttggacagacgtctacctatcattcacctgcatcatct

SEQ ID NO: 133523 - DNA, 259 bp, Zea mays
  Clone ID: MRT4577_53263C.1
tcggaccaagatagttagagccgatattgagtagtcgtaattaatctgtttcccgttcagacttagtaaaaaaaccagaacccgaaattgtgtgttttggtacaacttgtgagctcttttgtgcatggtctatagaattgcgagccatattctttatagcaaatttagataccaagtaatagtaagtaagtttccttaagaaagcatggtctgttgttgctcagaattgggataaaatatggttcgaagatcagctgtc

SEQ ID NO: 133524 - DNA, 496 bp, Zea mays
  Clone ID: MRT4577_53264C.1
aacaaagtattactactggatattgtagagctgattgggtgcccttagggcattccttcactacacactgactaggttaagacatacatgctgacaagaggcatctatacttaccgaacggcgcgaccacgcacacaacgtgcgacatgcgccccatccttggacaggcatgcacagaacgacggcaaaccccgggtatatctgaccggaacctgctgggagcacatctcttcctatagtgagggcaattacaggttgcctttgacaagagatagctgcctcctgtgataaatttcaggccgatcacaacaccacctgacatactaagctgcaagcttaaatttacacaacattgaggcgcctaaagagaagatctaacttgacataaaatgagctgtgctaacatgtccaaattgcatattgcaaagctggtccgccctctgaattacttaatcgggcaaaccccgggaagaggcgaccgtgcctatgtgaggcg

SEQ ID NO: 133525 - DNA, 1590 bp, Zea mays
  Clone ID: MRT4577_53265C.1
atgaagatggaagcaccacgatcacaaaagaaagcgcaaagactcaccagatgtatggcagctctgagcagatttatatccaggctgggagaaaaaggcttaccattttataagttactcaagaaggtggacaaatttcagtggacttcagaagcacaagaagatctagatgcgttgaaaaagttcttgacaacaccaccagtgctgaaaccaccgcgtcaagccacgctgactcaaccagctgaagatctgctgttatatatctcttgcacgactcacgtggtaccagataacccagaaaccgcagaagtatggcaaatgtatttcgatggctcgttaaagctacagggagcaggcgcatggatcctctttactgcacctggaggtgaacacctcagatatgcccttcagttattatttccagcctctaacaatgcagcagaatacgaagctctgattcatggactgaacattgccacctcactgggcatcaaaaaactgatggtatatggagattctctggtggtcataagtcagatatataaaaaatgggatttgtcgaacgattccatgggaaaatactgcactgctgtccggaaactagaagacaaatttgaaggtctggaatttcaccatgtggagagagatcgaaacacaacagctgatgtattgtccaagctaggatccagtcgaactcaggtcccgcctggagtttttgttcaagaaatattacacccaagcatttcactggatcgggcagaggaatgtaatactctgagccaaccagagtcagattctgatgactggagagggtcgatcatcaaatatataaagaataaggaggaaccagatgacaagaatgcagccgagtgcatcgtaagacagtcagctcactatacactcattggggaaacactatacagaaggggcacatcaggagtcctcatgaaatgcattctctcagctactggaaatcaacttctggatgaggtccatgctgggcaatgtggagtacacgcaacatccaggaccctggttgggaaggtcttcaggtcagctaaggccgtagaattcatacaagacataatattcaggtttggaataccgaatagcatcataaccgacctgggatctaacttcacaagttcagagttcttcgatttctgcgagcaaaagagcattcagatcaaatatgcctcggtggcgcacccaagagccaacgggcaagttgaaagagctaacgggatgatattggaggcgctcagaaagaaagtcttcgacaagaatgaaaagttcgcaggaaagtggatcagagagctgccgtatgttgtttggagcctgagaactcaacctagccgagctctgcatggaaatactcccttctttatggtctacggttcggagacagtgctacctgctgatctcaagtttggggcaccaaggttgatctttgagagcataacagaagctgaagctactaggctggaagacgttgatgtactcaaagaagaacgactgaacacggtaatccagtcagcccgatatcaacaaactctgaggcgctaccatgacaaggccatacgacattga

SEQ ID NO: 133526 - DNA, 777 bp, Zea mays
  Clone ID: MRT4577_53266C.1
gccggccgggttgggacacatgtaagttgtgtgccattatactgggcggatttctcttacgtcagcaactccccggcccgagggaaatatgctgcttcaacgcactgcgccgctgtgagccgctactcccgatggctgccgtcgtacctgcgctgtagactgacacgtgcgcaactcaagatccccgatcggatgtgagacccctgttggagaggcccctcatctcaccggcctccgatggaagcgagacccaatatcctactggtacacctgtctatggtggacgcggacgcgacattccgcgccgtgctgacgaggagccgaacagtggggcatttattccatgtccccaaacctaggtcgcacgctcgaagttgatgctcgaaccgcgcatgttgaggccagggttcttcctcgagatggtggcggcgggcgagcgatacgcggaatccacgcggacatacgagggatacggaagacgcctaggaaccggaaagggcaggcgcctgaactgggataataactaataccctcccgtgggtggaaatgcgatcgaagaggccaggaaggaccttcactgccttcctcaccacgcggagcaagcgcataagacggtcagcaactgttagggttgagacgacaaggtgatgtggtatgctctggaaaggtgtaggtgtacgaggcgattcacaggacgcccggttctaaacacaagctgattgatgcgtgagattgatgattaactactacccgaatggtcaacaattctacgtgaaa

SEQ ID NO: 133527 - DNA, 2628 bp, Zea mays
  Clone ID: MRT4577_53267C.1
atggccgtcaccttccagcacaagatcatcctctgccccggatccatattctgcttcggtactatctcatctgtagcggatgagaagggaactctgcatcgccttgcggacccgcctgagagaaagccttcctcagaagtctccgggaaaatcggggcgaggcaggaaaaagtgcaacctccggcgctcctaaaaaagatcacctccggcaagataggggctgagggtccctcggcccggagaactccgctatccacctctccgacgaaagaatggacacgaatcacaaggaaaaagaaagcagagggtcatcaagctgatctttctgcacctccgccctcaaaggagaacagaaagaagatcgccgtggcagctactccattctaccctaacgccctcttcatcgggagagtggagtcgccccccatctccgacgacgagccgactgcacccggagaggaacctcctcagcgggaatcccgccgacgaaggaaccgacgccgaaatatccgtcgacatcacgaggccggagagcgggacccggcgcagcctgtatcgcgagacgaggtctcagagataggagaaactccagaggaaccaggaaagttactcgggtttattgtcagccacaggggaattgaagctaatccagaaaagatcgaagctatcatgaggatggaggcaccgcgatcacagaagaaagttcaaagacttaccggatgtatggcagccctgagcagattcatatccaggctaggagaaaaaggcttaccattttataagttactcaagaaggtggacaatgaagttctgggtccctcgaagaagaaataccctcaagttcagaagctattatatgcagtacttctaactgcacgcaagctccgtcactacttcgacgaccacaaagtcatagtagtcacgggatttccgataggagatattcttcacaacaaaggagccatcgggagaatagccaagtgggcttgcgagctgggatctcatgacattgaatttcaacctcgcactgccattaaaactcaagcactggttgacttcgtatcagagtggaccgaacaacaagtaccagataacccagaaactgcagaagtatggcgaatgtattttgatgcctcgttaaagctgcagggagcaggcgcagggatcctctttaccgcacctggaggcgagcacctcagatatgcccttcagttgttatttctagcctctaacaatgcagcagaatatgaagctctgattcatggactgaacattgctatatcactgggcatcaagagactgatggtatatggagattctctggtagtcataagtcagataaacaaagaatgggattgttcgagcgattcaatgggaaaatactgcactgccgtccggaaactagaagataaatttgaaggatccagtcgaactcaggtcccacctggagtctttgttcaagaaataccacacccaagcatctcactgaatcaagcagaagaatgtaataccttgagccaatcagagtcagattctgatgactggaagaggccgatcatcaaatatataaaaaatgaggaggagccagatgacaagaatacaaccgagcgcatcacaagacaatcagctcactatacactcattggggaaacactatacagaaggggtgcattaggagtcctcatgaaatgcattctctcagccactggaaagcaacttctggatgaggtccatgctgggcaatgtggagtacacgcagcatccaggaccctagttgggaagggattggatatgattggacctttcaaaaaagctcaaggaggacacactcatgtactggtggctatcgacaaattcactaaatggatagagttcaaacccattgcttctctaactttagctaaggcagtggaattcatacaagatataatatttaggttcgggataccgaatagcatcataaccgacctaggatccaacttcaccagttcggaattcttcgatttctgcgagcaaaagagcattcagatcaaatatgcctcggtggcacatccaagggccaacgggcaagtagaaagagctaacgggatgctattagaagcactcagaaagaaagtcttcgacaagaatgagaaattcgcaggaaagtggatcagagaactgccatatgtagtctggagcctgagaactcaacccagccgagctctgcatggaaatacccccttctttatggtttatggttcggaggcagtgctacctaccgatctcaagttcggggcaccaaggttaatctttgatgacatagcagaagctgaagctactaggctggaagacgttgacgtactcgaagaagagcgactgaatactgtgattcaatcagcgcgataccagcaaactctgaggcgctatcatgataaggccatacggcgtcgatcctttgcagtgggagatctcgtcctccgtcgaattctaacaggggagggacggcataaattgtcacctctatgggaaggaccattcatagtagcagaagtcacttggccgggatcatatcgcctcactcagatggacggaacagaaattgggaactcatggaacatagaacatctcaggaagttctacccgtag

SEQ ID NO: 133528 - DNA, 1503 bp, Zea mays
  Clone ID: MRT4577_53268C.1
gggtatagtggtcaccccgagttaagtaagcgtgagcatgtcgcaccgctttaagtcattgccgacttaagccgattgctccgttagtagggtatagtggttaccccgagttaagtaagcatgagcatgtcacaccgccttaagtcattgccgacttaagccgattgctccgttagtaggctatagtggtcaccccgagttaagtaagcgtgagcatgtcacaccgccttaagtcattgccaacttaagccgattgctccgttagtagggtatagtggtcaccttgagttaagtaagcatgtaggttgacagtgaacaattcgaatgcctttgaagtctttttattgatgatatatttcccagtttacagagtacattgtcgtcccaatagcttttgagatatagctaggggtaaaacttcctgaggtgttctatgttccatgagttcccaattttcgtgccatccatctgagtgaggcgatatgatcccggccgagtgacttctgctactatgaatggtccttcccatagaggtgataatttatgccgcccctcccccgttagaattcggcggaggacgagatctcccactgcgaaggatcgatgtcgtatggccttatcatgatagcgcctcagtgtttgctgatatctcgctgattgaatcaccgtattcagtcgctcttcttcgagtacatcaacgtcttctagcctagtagcttcagcttctgctatgttttcaaagattaacctcggtgccccaaacttgagatcagcaggtagcactgcctccgaaccataaaccataaagaagggggtatttccatgcagagctcggctaggttgagttctcaggctccaaaccacatacggcagctctctgatccactttcctgcgaacttctcattcttatcgaagactttctttctgagtgcttctaatatcatcccgttggctctttctacttgcccgttggctcttgggtgcgccaccgaggcatatttgatctgaatgctcttttgctcgcaaaaatcgaagaattctgaactggtgaagttggatcctaggtcagttatgatgctattcggtatcccgaacctgaatattatatcttgtatgaattccactgccttagctaaagttagagaagcaatgggtttgaactctatccatttagtgaatttatcgatagccaccagtacatgagtgtatcctccttgagctttcttaaaaggtccaatcatatccaatccccagcatgcgaacggccaggttatgggtatagtctgcagctgctgtgctggtagatgctgctgttttgacaagtactggcaggcttcgcacctctggactaactcggccgcatcactctttgctgttggccagtaaaaacctgacctgaagaccttcccaaccagggtactggatgctgcgtgtcctccacattgcccagcatggacctcatctagaagttgctttccagtagctgagagaatgcatttcat

SEQ ID NO: 133529 - DNA, 635 bp, Zea mays
  unsure (1)..(635): unsure at all n locations
  Clone ID: MRT4577_53269C.1
cagnagttgtatgtttagtttngatctggtgcatgttggggcaggccgtctgggtgattgagnattagacgtgtatcatgtgtgggcaacttgctggattctttcgttttgatgaggctgctcataaatggagactatttgagcttgaaacctgttgacttttgggttgtaatgatctggttcctgcgtgaacgttaaatccggaactaggaagatgtattgtgaccttttgggaggttaaaccgcgcttgctgttgctgacgcatgtttttttttctgattggtaaacttgaatcgggtattcaggtcaatacctgatttatctgttcatctgcagtagttcacccttttgtctaggtttagtgtctgcgatgtatctgttcatctgcagcgttttcttttgctgttctgaatgttacttctaagacttaactgtatttctgttatgcaaataatagaaatgggggtatccttcctctcagcgagcataatctatttgctgtgatgatgtatatactttcttgcaggttcagagatggcacagacggtgttcacccnctctttggaagcgatgaagcatgtcaaggcagagaacggagtcattctcaccaagcccttccttgatgtctgcaagc

SEQ ID NO: 133530 - DNA, 222 bp, Zea mays
  Clone ID: MRT4577_5326C.1
gtgcggccgacccctttgcatccgctgcggctgcagccgacgatgacgacttatacagctaaactgcacttctattgtgacgcatctttcctccctccgttatatgtgattaatatcatatgttaatgcgtgtgtgggagagatggggagttgctgtacctgcccggtcggacgttcgaaagggcgaattgcaagacactaggtgggcgatactagcggatc

SEQ ID NO: 133531 - DNA, 301 bp, Zea mays
  Clone ID: MRT4577_53270C.1
cttctttattttgactaaatttccacttataggggggtttttttaaatgttttgcggggttaatccaacattataggttgggccccaacaaaaaatacttttcataggatttaccccgtcattctgattctagataaccaaaacggtttaaagggggccccaagaccacaccttatggaaatttttcccatgaaacaactttcccaagtccaacaaaaagaggaagaaggcccggggggcggggttcaacaactccatatcctaaactgggctgtgcccaaacttaggggggggggaaaag

SEQ ID NO: 133532 - DNA, 380 bp, Zea mays
  unsure (1)..(380): unsure at all n locations
  Clone ID: MRT4577_53271C.1
cagtgtgctggtactcgcccttaagcagcggaacaacgcaaaggacgcggggaccagatgcagatttaagaaggggccgggaggggaacaagggnggcgnagacagagctgagctccggggggcggaccattaccatacactgttctacgcaggaggctagcgatagagtggtagaacggagccacgcaggccacaagacatgaaggaggggacgtagaggactgtctttcacanccgaacactacactgggggggggggcggacatctattggagaaaaagattaggaacttattttgatggacacaaccactgcttacgggcgaaaaaaggagaaanccagnacaccggcgggcgcncgaggaggcagngagaggggc

SEQ ID NO: 133533 - DNA, 253 bp, Zea mays
  Clone ID: MRT4577_53272C.1
aacttcctggtggaaaaaaaagagaaggcctaaatggcaaaatttgtgacccccatgtaacagatggggatatttttaaatcatatattaatctcaaaaacatcccttaggggaaaaccgcttaccccaagcatgatcaaaacacagagaatgatgtccccattttcataaaacaaatgggcaacgtagcaatttatacgggacgctgactcccggttatggacctttctccactcttttccggtaacttttt

SEQ ID NO: 133534 - DNA, 474 bp, Zea mays
  Clone ID: MRT4577_53273C.1
ggtcgacccaagcctctacacagagttctctatacatctgtactctctcttcactctctcactttatatccgagaatggtgcgttctaatctcaaaatcgtcatcgcggccatgcttgtggccttgatcgctaccgccgccatggctgcccctcaagctaaaaagaagcccgccgcacccaagcctatcaagggcaaggcaggccaaacaggagtgatcctcaaccaatccgacttttgcatcttcttgcctcccatgtacggaggagacatcgctgcgaacgaggaccgcgctgttgccttctgcaccaagcctggccttcccggtgccaacgctcagaacctgcccgccggctttattaagtcggctcactttttgtccgacccggccaatggttacgttcaggtcaccggtcgcatggatggcagcaagtacggcttgagcaagaatgatggcggtggacagtatgatatc

SEQ ID NO: 133535 - DNA, 362 bp, Zea mays
  Clone ID: MRT4577_53274C.1
aatatttttttgttcatgcactcataataaggggatgtttttatacgtgggtccactaggaaccaccaaacgaactaggcgccaacaaatacgataaaggcaacattgggatcctaacacccatgtaggcacgacactggtgcgcgaatcctaggacattgagcgtatgcaacaacaaggattcccattgcttattagaaagacagcaatatttgatgcacaaaatacacagggagcccatcgcacacctgggactaaaacactgggctcaaatagatggtgcaccggtgggaataattcttacagatgaacgcaacatgccatttatgcgtctggtgaacatttggcagttcttgttacac

SEQ ID NO: 133536 - DNA, 552 bp, Zea mays
  unsure (1)..(552): unsure at all n locations
  Clone ID: MRT4577_53275C.1
ggggggcgggggggggggtttacaacatatccagggggcgcacaattcccccatcgcgacagcgcatctacatccccgggttgaggaaagaaaccccccgaaccgtaaaagaggaacagaacccacagcaacaaaaccagccaaccaacaacacaggggggggggggcccccttcggtgcgtttcaaccaccaacccccaaacaccaccccccaaaaaaccacccaaaaaccgaaccccccaaacgaacccccgggggagggggccacccagaacagccccgggccagcccccccccccaacaacccaccaaccaccccacccccaaggccccccccaaaaccccccccccccccacccccccgcagcccggaccccccgcccgggaacacggcaggccccccgggaaccggggaaaccggcgacccccaggagaaaagggccccgcaccggcccacgggagccccccacacccccccgaccaggaggaacgggaaaaacagaggagcacagaaacaagggccccaggagcanacgggcgggaccaagcccc

SEQ ID NO: 133537 - DNA, 601 bp, Zea mays
  Clone ID: MRT4577_53276C.1
gaactcacagagagcgcggccgggaacaaaaataaattcctatcgactcgccgattcctcacgcaacgcggtagcatccaaccaataaatccacacacgaaatgggatcgaggacctcaggcaaacttggaaggcggatgcatggagcgcaacctgagcgtgtttctggatagcacgcctgtcagcctccatgacgctgatggagtaccaccagaccacgtggaccacaaccccaatggtcccgccagtatcttcacgcgtcatattctatcagcctcttcgtcaagaaatgattcatttccctctgaatctctgcagcgcgacatgcaccatcgatgaagaggcccgatcgatcagctgcttggatttctgttcgctagctcagccccggagttgccgatgtgctactaaggcatttgcaaaaatactgaagtagcgaacagatatttaagcacaatccgcatgtaagcagcctctgaagaggaataatattgtcaaagagatcacctggagctcacgctagtaagacgatattttatcgatgattattataaggcgtcacatcacccaataaatatgagatgctacatgtcccttatga

SEQ ID NO: 133538 - DNA, 662 bp, Zea mays
  unsure (1)..(662): unsure at all n locations
  Clone ID: MRT4577_53277C.1
accaaacttttcaatgtctcctgtgagctatttggagtattggaggttagacgttagtgtgtgactttggaattcaagacaaaattctacatcttccattcacctccctctagtcaacctatttgatccttgagcatcatccgatgtcgaggctatatattaacgggccgaggagaaactttagctgcgtatgttggatgggacatcagtgcaaaaacagatgattttgtcggtcgtgaattccattttgcctccctttcccatgctacaactataacacagaaaaagcccaagcctgcctagtagcttttaacgtcgtatgcagctacatttgcagtagagatttgggaaaggaccacatagctttcaaagtatggccccttgtcaatgaatcggaaatgccaaaggaggttgatgccggttcaagccaaagtgccagaaaaggtggtttagtatatctaaaatatacatatcgatatagaaaaatcagtatggtgaacctgatgacgaatgccttgaagcttttgaggcaacttgtgatgaaatgttgggggcttatacgaaggctanaagatgaagctatgactactgcttttggtgtccgagaaagnaaaagttaaacagggtgttcgacgttatcaattttatttatcctgactact

SEQ ID NO: 133539 - DNA, 238 bp, Zea mays
  Clone ID: MRT4577_53278C.1
acagcaaactagcatagcaacgtttaaatcttaaaaaatccagtccatataattcactggatttttctcccatgaaaaagcaaacttcagctaattatggcctaataaaggctgtcatgcctactgctggggagtatgtataccaaagatcaatgagccaacctttcttatatgtcaagcctgttgaacatcatgcactaatactatcaaaaactcttaccattttcaaattaatata

SEQ ID NO: 133540 - DNA, 565 bp, Zea mays
  unsure (1)..(565): unsure at all n locations
  Clone ID: MRT4577_53279C.1
atctattcttggagccagttgcttccggtccttcctgtcggaagccgagagttatgtggaataaaaataccatcttgtcagcagctagacgtgccttttcttatctgaattttggaaatggtatgtgtacgtgcgatagggcgggatccatacctgatctatttctcggngtagttaggccccgtttggtttgagagactaaagataagtccctctattttagtcctatttagtccataaattaccaaacgggggactaaaataaggactaaactgttttagtctctagtctctcaagtagtgactaaaagtgactaaatcatataaattctactttttgcccctactatattttagttgcgctaatgacggaagaatgctaagaggtattttagtcctcttatgattcatttaatgtattttgaatacttttagtccctagaactaaacatggtagggactaaactttagtctcctaactaaactttagtccctggactaaaggaaccaaacagacccttagtcatggtattgcttgctatcagtaacagccaaagcaccacca

SEQ ID NO: 133541 - DNA, 1307 bp, Zea mays
  Clone ID: MRT4577_5327C.1
tattgtgagcccctcgagggccgggaactaagcgtccggacaaagtggcgtactcttctctgtactagctttcttcttcctcctcctcttcctcctcccaaacagactggatttcatcaagataatcctgaaactggagccaacaagcagacagagaaagaagagcaagaagaccggctcccagccgatacaaggtaggagtgagcagcgttagatcagttttcatcacaggatcgatatggtgacagtgagagaggagactcgcaaggggccatggacagagcaggaggacctgcaactggtatgcactgtccgtctgttcggtgaacgtcgttgggatttcattgccaaagtatcagggctcaaccggacaggcaagagctgccggctgcgctgggtcaactacctccaccctggcctcaagcgtgggcgcatgtctccccatgaagagcgactcatcctagagctgcacgctcggtggggaaacaggtggtccaggatagcacgccgcttgccagggcgcactgacaatgagatcaagaactactggaggacacacatgagaaagaaggcacaggagaggaagaggaacatgtctccatcgtcgtcctcgtcttcgctgacttaccagtcaggctacccagatactccatcaaccattggagttgagggacaggagcttcatggtggcagtggctgcatcacaagcatcctgaagggcacccctccggacatggatggctatcccatggaccagatatggatggaaattgaggcgccacagatgccctcggaggagagctttgttggggggaaccataatgtgtgcagcagccttgccaccccgctgccaccaccaactgtctgggaatactacccagatgcctgctggaaggttgacgatgagatcaagatggcaccacaatttcaatttggttatagtgaaggagttgggccctgcttctgatgccataaatattgggtcagattactaagttatacacctacctagcagaagtgaagtgcttttgtagaaacaagctttagcatggatctgaatatttatctccgcgcttagaattgcaggtctatggatctatgcatggttgctatgtatctatctagtgtgcaagacaagatcatcttaatttgtccttgatgctatggaatacaagggcaaaggtactatgtctgtttactcagaataattagctaccctttgggactctctgttgggcatgaagccaacaataaatgttatattgatataaaaaaaaaaaaaaaaaaaaaaaaaaaaaaaagcggcc

SEQ ID NO: 133542 - DNA, 493 bp, Zea mays
  Clone ID: MRT4577_53280C.1
tttaaaaaaaattttttttttttttttttttttttttttttttttttttttttttttttttcgtcaccccgcccaattccaatttttttttcaaaaaatgtctcccaattcatcaccccaaaaaggcccccaaccccggggggggggggcccccctggccaaacccaacaaccccccttcccaaaaacatacaaaaatttttagtaaaaatctatggcccgacctggatttttttttattcaaaacacaaggggaaccaattcccccctgggggtgtggtataatttaccccagccataattaaccaaccaactttttttcccacattttttgggcaaggccacccatttttttccttaaaaccccttcaatccgaagcccctaaacaattttccattccccccccctgcattttactggaaataaaaaaaaaaaccccgaaggaacccctttttacccatcgaaatacccccccttgaaaacaaatgccccc

SEQ ID NO: 133543 - DNA, 361 bp, Zea mays
  Clone ID: MRT4577_53281C.1
acgcggtgggaaaatacatatagggcgccccgggaaaacatgcctagggcgacccgggaaacccgggccgggtacggggggggggccaagtttcccgaaaaaggggggaaaaaaaggctgggggaaaaaaggggatagcccgctcacagggggaaaaaagaaatccgcccaaaaataaaaagaaaaaacgggggggaagcaaaagagggaaagcccggggggccaaaggggggggctaactgacatttattggggggggaacctgggcccgatacaaggaagaaaaactgcgccaccccccggaagaaggaagtggccaaaggggggggggggggggtttttgttttgcccgcaggggggg

SEQ ID NO: 133544 - DNA, 621 bp, Zea mays
  unsure (1)..(621): unsure at all n locations
  Clone ID: MRT4577_53282C.1
ggcccgggtagcacaccctgacttgcactcatattttcagtatgttgagtaaccgattacaacaagcacagatagataccccgatcgccacacgccgtaccggacttcggtcacaggcggacacagcacaacgagcatgaaagacccggatcagcatgggcctggcagccccatgaagaacccggcgacgctgttgcggagggcgcacatccgctcgcccaactcgcagaacggggggtccttactaacgctcgttgcctctggcgccgggctgctggtgctgacgggtaccacgctgacggtctccaggacctcgctcgcattcctgtgccccatcgagctgactcccagaccgatatgagtgcccgccgctgatgcgatctcccgcattgttggcgacccgctatcccgctgagccttggaagctgccgggctgcccgaggcatacctgaatgtaccgntacttccacagcatccactccccgcgtgtgcccaacaaggggactacgaacgcagccagatcggcgacaccggcagccaagtccaggactacgcgcgcaagtaccgcaaaaacgtttacaaaggagccaatgcatccgcgccctgtgctgtagcatgcgc

SEQ ID NO: 133545 - DNA, 1254 bp, Zea mays
  unsure (1)..(1254): unsure at all n locations
  Clone ID: MRT4577_53283C.1
gcacgagagcttctctggcaacctctcactcggcgagtccaacatcgggctccaggccgtctcccgccaacccaaattcgcttcccgccgctccccattaaacccgcttgaaaggtcgcgccctcgagcagagcaacccctgaccacaaatccgatccgtagccgccgtgcctcgctttcgtcttttcccctctgctcgagtacgagcggctactcccggcggcggcggcgatgagcgcggtgaacatcaccaacgtggcggtgctggataaccccaccgccttcctcaatcccttccagtttgagatctcctacgagtgcctcgtgcccctcgacgacgatctggagtggaagcttatatatgttggatcagctgaagatgaaaactacgatcaacagcttgagagcgtgcttgttggccctgtcaatgttgggacctaccgttttgtccttcaggctgacccaccggatccctcaaagatccgtgaggaagacataattggtgtgactgtgctgctattgacatgctcttacatgggccaggagttcatgagagtaggctactacgtgaacaacgattatgatgatgaacaattgagagaagagcctccagcaaaggtgctaattgaccgggtgcaaagaaatatcttggccgacaagccccgagtcaccaagttccctatcaacttccatcctgaacccagtacaggcccggggcagcagcagcagcaggaaccccagacgacctcgccagaaaaccacacaggcaatggcgaggccaatggtagcaagcctgaggctgaccaatgaacacagttggcttcaggtattttgatgcgtgtttagaactctttgttctgtacacattgagatgcaaatgctgggtagtgggtagctgggtgtttccttggcaaagagtattttcagcctgttctcctgcaattgctttatgcttctttagagtttagagtagcggtttacctcaaaactaactggctagtcttggtcaccagctttggcctttgcggtatagcttgtaacggggataagcatgtgctccaagaacgcaagcatgaggaaatacagcaaaaaacagcagattaactgaaaaaaaaaaaaaaaaaaaaaaattatttgtgtttgcaagcatgtgcttttgttcacccccggttttcccatctggatccaagggatttttctttgaaggcnnnnnnnnnnnnnnnnnnnnnnnnnnnnnnnnnnnnnnnnnnnnnn

SEQ ID NO: 133546 - DNA, 3259 bp, Zea mays
  unsure (1)..(3259): unsure at all n locations
  Clone ID: MRT4577_53284C.1
ccacgcgtccgcttgaatcttactgagatgaaggaaggtagatcacaggttgaaaggatcacagcggacactttggagatgctcaagcttgaaaactccgtggagcacaactcgtttgaggtgattaggcagtgctcaaaggaacctacaacactagcatgtaccaaaaatgaagagttgcttcaggattatgttttgctaagaggtgtttccagtcttaggggctggcctcaggcagctcaaaattgtggtggggacgtcagcaatccagctgctgaggatctcatagttgcgatattgactgcattggactgtcttccgatcagcaatgagcaatcagtctcctgtggggttatgcctactgttggtcacctgctggctcacagaattgccgtgatcaaccaaaaggcaagagcactctgtcacaagtggggcggtgtaccaaaacatggtacaaatggagagcattttcatacagaggagtcaagccacactgaccagcttaagtctccagatgccggccacaagacagaaactaagagaaagtgtgtagtggacgaaggagagcctgatgaagaatcaaaacctgaggtgacaactcactcagatgcacctttgtccgacccttctctgactaatgataatgcagatgcaacagagcaaccagcagggctaacttcaccaaatccatcaaacggaaatgcaacattaggggatgtgaacaacttggtcaggtctcctacatctgcaggtcatgtgggtttagaagatgggcagtccacccccaatgaaatttcttccaatgatgctgaactgcccattaatggcatactccggtcaaactctactaatgcaaaaagtggtactggacaagatgctccagtggaatcaactccagtggccatgtctgtagaccataataaacctggaaagttgtttcctggtagtaaaatgggtctggaggatagtattatttcagttagctcaagtatcaaggagtctcagccatttgcagctggtagatcacatttggagaaggatacaactgaaactttgaaccatcttgcagttgtaacccgtgatttgcaagatttgtccgaggaaagtacaagcaaagaagatgaacctacatcatcatctagtacagatgatatggacatgagcggtgattatatattgcaaagatgcatgtcgagctttgggggctcctccaaggcagcagacacaaaatccactgcattggaaggggagaaatcaacacgaatggcagactttgatgatacagatgcactagaagttgcacgtctggtagctattgaggtggagcgggaagtcattgactacagagaacccttttgtagttctcctgatactaattccaggaatgctgacagtcctgacctggaaggaccacggcagcctgtagccattgccagtgaactgaatgataataaatcttccagtacagaggctaagtcaggaagctcctcatctcataaggaggatggatcaggcatcacagatggcagcggtccgttgagtagaaaacatacacacagtgtcgatctggggaacttagaccttaatgaaaatcagtgtgccgaggaaactgactttaatccgaagtcgatccttagtaattctgtcaatttgtcaatgcctatagctgtggctgcatcaagaggctcatctgtgtttccagctcggctccactttgaaggtggacttgggtggaaaggctctgctgcaaccagcgcctttcgaccagctccacctcggaggactcctgatgcagagaagtcactttcagcttcttcacataaaacaagcaacatattatttgatttaaatgtagctgacaacggcagtgctacttctggtgaaccactttcgacagcaatcctgccagcttcttctgaactaccttccgaggttgcttccaaagcagttgatgtgagcggaggactgaaacttgaccttaatttctcatgtggtgatgaggaagatgctatcactgcaagcaatgtgccgtcattgtggaatcaccaacaatttaatggcaactggagtcagccttctttctcatcttcaaagcaacctgcagccagaaactttgacttgaatgacaacatgtcgatcgctgatgtttctgtgcgaggaatggacgggtcttctgtcaagactccttcaaggccaagggatatgtcggaccattctgccgtcacaattatgggtaagaggatagttgtaggacagagagatgatggacagcaataccagcataactttctgggaccaagtgctgaatcaagagtttttgcaagacccactcaatcttttgcacatactcctgattatagtgttctcagttatccatctcaacctgccatgccttttaccccagcgttctttgccccagggggcagtccatacttggtcgatgcaaagggtgcaccagtcataccaccgctgtcaggtctaagcctcggcatttctcatccatctttcaacaccagagcaacacagccctcatctaatgaactgagttacttccatcctagcatggatttcagttatggagtgtcatctgaaggcgcacgtagggaagcagggagctactggcccatgtcctaccagggtcagacaatgtttgtggatgaacgcatgaggaatgtatcacaggatggtacttctgggttggtgctgaagcgaaaagagccagagtcaggttgggatttgtacccacgtcgttgagcgtgagcctgaaggtttgttgcagtcgcaatcgattttgtcccactctcttaaaaaggatatgttcaatgctccgtttatggcggcaccttggacattgtattttagggtatttctttggcacgggcccagttctactaggtctgaagacatacacggagaactgaataagagatcagctacaggtagatttgacagatgttgacatggcaaggacattgttagctgctggaaaccacctcgtgtagatctggttctttgtgaatgtattagctttgttttagttgacataatatagccaaattgctctctagggagctaaattatgtaaatcatcatcgtataactcatagatgaaatgcatccctttttatctatctttatttttccagtgttggtgcaagttgtactgtgatcaactatattgtatatatgtcattgtttgaagcgcgcaaaaaaaaaaaaaggtcggcaaaaaactagtgagtcttgnnnnncgggaatt

SEQ ID NO: 133547 - DNA, 1041 bp, Zea mays
  Clone ID: MRT4577_53285C.1
gtcaccattacaccgcccgaaaggccgctagaaatccgatcccgagccgccgcgtcttgctcgcgtcttttcccctctgctcgagcacgcgcgggcgcgcggctgctcccggcggcggcgatgagcgcggtgaacatcaccaacgtggcggtgctggacaaccccaccgccttcatcaaccccttccagttcgagatatcctacgagtgcctcgtgcccctcgacgacgatctggagtggaagcttatatatgttggatcagctgaagatgaaaactacgaccaacagcttgagagtgtgcttgttggccctgtcaatgttgggacctaccgttttgtcctccaggctgatccaccggatccctcaaagatccgtgaggaagacataattggtgtgactgtgctgctattgacttgctcttacatgggccaggagttcatgagagtaggctactacgtgaacaatgattacggcgatgagcagttgagagaggagcctccagcaaaggtgctaatcgatcgggtgcagagaaatatcctggccgacaagccccgggttaccaagttccctatcaacttccatcctgaaccaagtacaggcacggggcggcagcagcagcagcaggagcctcagacggcctcaccagagaagcacgcaggcagcggtgagggcaatggaagcaagcctgaggctgaccaatgaacacagtcgacttcaagtatttttgaagcgcgtccctacaggttgtgctgtaaggttacgaacgggattagcggttatacattgccctgggatcctgtttctagcacatggtggctgtttagaactctttgttctgtacacattgagatgcaaatgctgggtagtgggtagctgggtgtttccttggcaaagagtattttaagcctgttctcctgcaattgctttatgcttctttagagtttagagtagcggtttacctcaaaactaactggctagtcttggtcaccagctttggcctttgcgggatagctttgtaacgggaatcctttttgttcactt

SEQ ID NO: 133548 - DNA, 892 bp, Zea mays
  unsure (1)..(892): unsure at all n locations
  Clone ID: MRT4577_53286C.1
cgcacgagcgtaaattaaattactgtggcacactgacgctaactttgacatgttttttcctcagcaatagcaacaaatcaaacaacaggcatgtattctttttttttgaacggaaaaaaaggcatatatcttcggatgcttgtagatgtcaaatcacaaggagaaaagcaaggagcagctggaccaaggaaagaacagcggtgatctctcgggcaaaatgctcgactaaggaacctcgtgcgctgcggcagtggcggtgacatagtaggcgacggtgatcccgccgtggacgaagcacatgatccctccgagggccaaggtgtgtccgtgagtgaacccgcacgacgtcttggacttggagttggacatggcgccggcgagcagcagcgagaatccggcaatcagggcgatccatgagagaattatggtggtggctgccagcttcctgttgatggacgccttgatgaactccagctgggagcagatgcaggcacagccgccgaggaagttggctaccgcgtgggcaactaccaggagcactgcagctgcgaggccaagctggtacgctctgtacactggtttctcgcactggatgaagaggatcgtcaccttcttagtcttgttctgagcagcctgcgcctcaattcctagtatgccagctgtgacgtccagggctaaaaccactacgcagaccagaatagcaactcccatcctcgccattgtagcgtgctctcggacttgtaccagctgagaaggttgctgaatggaagatcacctgccctcaaatggtgttgtgagctgcgacctgttcgnatgaccaattggtgaataaatagaggcaaaagtnacagcaggggtatttgttataccaaccaggatgcagtnnccccgg

SEQ ID NO: 133549 - DNA, 476 bp, Zea mays
  Clone ID: MRT4577_53287C.1
cccaacatctcagaaaagcactacgtggtccggtctagtacactgttgattagatgctcttggtcaagccaactgatgaccatagtaagatgaacatacaagggtctcgacgtctgcatagatggctggccagggggactgatggcaggatgcgcaacaagcttgtgggggagtatgacggaggccagcatgctggacggcaggtgttacaccccgatttccgagcccaaacccgtaacgcgtaaataatcaccatggtgtgacacatattctcacacatatgataaacagtggtgtggttgcttttttgctttcttttatgctatccatgaaacaatgaagcactcattgatgggctgatacagggttatagaccgctatatcatgagcttgggcattaacatggtggatcctatggcgcaccgtactccggtggtgactaacctgattgataacacgagcgggcccacatgggg

SEQ ID NO: 133550 - DNA, 1115 bp, Zea mays
  Clone ID: MRT4577_53288C.1
tcgaaaggccggccgggttccggaaaaaaaaaaaaaaaaaaaaaaaaaaccgcagaccccagcttctctggccctctcactccaaacatcgggctccaggccgtctcccgccaacccaaattcgcttcccgccgctccccattaaacccgcttgaaaggtcgcgccctcgagcagagcaacccctgaccacaaatccgatccgtagccgcggtgcctcgctttcgagtacgagcggctactcccagcggctgcggcggcggcggcgatgagcgcggtgaacatcaccaacgtggcggtgctggataaccccaccgccttcctcaatcccttccagtttgagatctcctacgagtgcctcgtgcccctcgacgacgatctggagtggaagcttatatatgttggatcagctgaagatgaaaactacgatcaacagcttgagagcgtgcttgttggccctgtcaatgttgggacctaccgttttgtccttcaggctgacccaccggatccctcaaagatccgtgaggaagacataattggtgtgactgtgctgctattgacatgctcttacatgggccaggagttcatgagagtaggctactacgtgaacaatgattatgacgatgaacaattgagagaagagcctccagcaaaggtgctaattgaccgggtgcaaagaaatatcttggccgacaagccccgagtcaccaagttccctatcaacttccatcctgaacccagtacaggcccggggcagcagcagcagcagcaggaaccccagacgacctcgccagaaaaccacacaggcaatggcgaggccaatggtagcaagcctgaggctgaccaatgaacacagttggcttcagatattttgatgcgtgccccttacaggttgtgctgtaatattacaaacgggattagtggttgtgcattgccctgggatcccgaactctgttctgtaacttgagatgcaaatgctgggtacctggatgtttttttaggcacgagtatttaagcctgctctgcaatttcagcaaaatgtgatcaattgcattgaaagcatgtgctccaagaacgcaaacatgaagaaatacagcaaaaacaaacagattaactg

SEQ ID NO: 133551 - DNA, 357 bp, Zea mays
  Clone ID: MRT4577_53289C.1
ggccaagaaagaccgatcttatataccagcttttggtaaacaagcccaagattccagagggaaacgaatactggccaactaatccaaaagtaaaaagctcctaaaaaacttgggccccaacctttgggggccggaaagaaactggtatcctttttccaaaagcatagcagggggggattcctattcttggtttcacaaaaccaacacattggctaaaaaggcttcggggtaaggctccttaaaaaaagaatcactcagtaagccacgaaaaaaaaaactccctaacaaaattaaaaataaaaccctatcgaaaacgacccctataccaaaattttggtcctgggaaccacaggtaaa

SEQ ID NO: 133552 - DNA, 1126 bp, Zea mays
  Clone ID: MRT4577_5328C.1
cattgggtacctcgaggccggccggaggcaactaagacaaagtggcgtactcttctctgtactagctttcttcttcctcctcctcttcctcctcccaaacagactggatttcatcaagataatcctgaaactggagccaacaagcagacagagaaagaagagcaagaagaccggctcccagccgatacaaggtaggagtgagcagcgttagatcagttttcatcacaggatcgatatggtgacagtgagagaggagactcgcaaggggccatggacagagcaggaggacctgcaactgggctcaaccggacaggcaagagctgccggctgcgctgggtcaactacctccaccctggcctcaagcgtgggcgcatgtctccccatgaagagcgactcatcctagagctgcacgctcggtggggaaacaggtggtccaggatagcacgccgcttgccagggcgcactgacaatgagatcaagaactactggaggacacacatgagaaagaaggcacaagagaggaagaggaacatgtctccatcgtcgtcttcgtcttcgctgacttaccagtcaggctacccagatactccatcaaccattggagttgagggacaggagcttcatggtggcagtggctgcatcacaagcatcctgaagggcacccctccggacatggatggctatcccatggaccagatatggatggaaattgaggcgccacagatgccctcggaggagagctttgttggggggaaccataatgtgtgcagcagccttgccaccccgctgccaccaccaactgtctgggaatactacccagaggcctgctggaaggttgacgatgagatcaagatggcaccacaatttcaatttggttatagtgaaggagttgggccctgcttctgatgccataaatattgggtcagattactaagttatacacctacctagcagaagtgaagtgcttttgtagaaacaagctttagcatggatctgaatatttatctccgcgcttagaattgcaggtctatggatctatgcatggttgctatgtatctatctagtgtgcaagacaagatcatcttaatttgtccttgatgctatggaatacaagggcaaaggtact

SEQ ID NO: 133553 - DNA, 113 bp, Zea mays
  Clone ID: MRT4577_53290C.1
cagcagactactcagttgtgctatcgcagcttcaagtagaaggattgatgtttgagcactgataatggctacgaacttcgtcatctgcacccaattgacgtggacgacgaggc

SEQ ID NO: 133554 - DNA, 1025 bp, Zea mays
  Clone ID: MRT4577_53291C.1
agacgcatcatttaacccagggattgaaaacaaatatgctgctcagtagtacaataagtgtgctagttttcgacaaagcaaaatcctaaacccaaacagacagcattgtcttaaaatacagatcatcatcctggctgccctttttaaagtacacaaaggaggcaaatcaaatcctccagatcggatagttcaaaggtaaccatctccagacgggtggtcactcccctatcctcctctcttctcagttgtccttcccatttatgatggcatgtaggtcgaggtgtcaatttgctcaggcagttcctttatgtctacctcaaacctttcttgcacctggttaagaacatcagaatccgaagcagaggaaacaaaggtaattgcaagtcccttcgtgccaaaacgtccagccccttccaaccctgtgcaaataagtatcagctgagtctggcatgtcatagtttatcacaatgttgacacgctcaatgtcaatgcccctgccaactaaatctgtagccacaagaattctcttgtggccttccttgaagttcttatatcttgttagcctttcttcctgagtcattccagaatgaatgcggattgatgggaagttgcattcacaaagtaacttattcagttcggcagctctgctaacactcttcacgaatatcacaacttggttgaaatcaagagcgtccaagagatcattcagtttccggttcttctctgcctcgctaagttttatatagtgctgtacaagaccatggagggtcaactttgcctcatcatcaacatatatttccatcggatcttgcataaatttcttgcatacaggacggatctccttgctgagcgttgctgaaaacatcatgacttgcttatcatgaggagtcattttgaagatctcctgaacatctctccgcatgtcaagtgattccagcattttgtcacattcatcaattttttttttttttttttttttttttttttttccttttttttttttttttttttttttttttttcccg

SEQ ID NO: 133555 - DNA, 787 bp, Zea mays
  Clone ID: MRT4577_53292C.1
gcagcacatccagtgaaagtccacttggcaatttgtctgcagcaatgtttctgggagctctgttcgccgcggtgaccacgtcggcaccagcagcacgcagcctgctggtgtacggtgtccctggcctcgtcctgctgtggcagggcgggcggctgctgagcaggctatggcgggagcctcggcggctggagcgggctctgcgcgcgcagggcctccgcggcacctcgtaccgcttcctgatgggcgacctgagggagttcggccgcctcaaccaggaggcctgggccaggccgccgctgcccctggggtgccacgacatcgtgccccgcgtcacgccgttcctctgcggcaacgtccgggagcacggcaagacgtgcttctcttggttcgggccgatccccaacgtgaccatcaccgacccggcgctggtcagggacgtgctctccaacaagttcggccacttcgggaagccccagttcccggccctgacgaagctgctctccgacgggctcaccagccacgagggcgagaaatgggttaggcacaggaggatcctcaaccctgcgttccatctcgagaagctcaggctcatgctgcctacgttctctgcatgctgcgaagagcttgtcggcagggggggcggcgcggtgcctgggtcccgacggcggctcgtgcgagctggacgtctggccggagctccaggccctcacgggggatgtcatctcccgcaccgcgttcggcagcagctacctcgaaaggaagaagatcttcgagctccagtccgagc

SEQ ID NO: 133556 - DNA, 245 bp, Zea mays
  Clone ID: MRT4577_53293C.1
cacatgacatggtttcactttcagtcaaagactgaagaccctggacggacggcgaacgagacgagagggcatccgaaggcgaaggcgaggctcgcatccctccacgccgtgcctggccggcggtcagtcgggccgccggaaccggagagcgtacgtagagcctggagctagtcaggtagctccaggtagcagctagggcccaggcggtggcagcagcagagcagcatcggcggcgaaaccaacgg

SEQ ID NO: 133557 - DNA, 239 bp, Zea mays
  Clone ID: MRT4577_53294C.1
gctcatcaaaaagtttttatttagactgcaactgtgtaagcagcaacagcttgacatcagtcttgcggcctgaagcatgcgtccaacatccctttttcttcatagttcaggcagggggcagaggccacaccgtcgcagtcacgacggggactcagccacaaaccacatgcctccaggtatttcatcgcacactaaacaactcacgtgccatcaatccttcttcttcgtctttcgacact

SEQ ID NO: 133558 - DNA, 151 bp, Zea mays
  Clone ID: MRT4577_53295C.1
agagaggaccgtccaaaccgacacgcggaggtatcctcgtggtgtccggagagagagtaccaagacagaccgatgtatagctactatccccttgccgatgcccacctcactgtaagagctactggacctcgttcatgtttcatgtaactat

SEQ ID NO: 133559 - DNA, 541 bp, Zea mays
  Clone ID: MRT4577_53296C.1
cccagcgtccgggggcgcgtgggcggacgcgtgggcgcgcaccaccccctacatacaggagcggtggagccttcagaagctcccgcggcgccctcgcgtacttaggactgggacagactgctaacgcgacgggccgtatcggaccgcacatgcacgtccggaagctcttcttgagtgcaaggagaaatgcccgactttcttcagaaagaccgatgagaaaggcgagaacggctctctcctatccggagcaatgacctttcccatgaacaagcgcagatgtaaggcatagcatgcggagctcatctaggcagggattagcagcaagggccttgagtacatcaccaaggaaatctcatgtgagcgagcatcagctgaactacccaataattgtatgcacagcaaagctgctgagctagcttgactcgtgcattactttcagatgataaatgaaagatgccaaccaattcaggtacatggactactaagagaaatgcccaagcttgagcacattggctagctaacatagggcacagatgaacca

SEQ ID NO: 133560 - DNA, 669 bp, Zea mays
  unsure (1)..(669): unsure at all n locations
  Clone ID: MRT4577_53297C.1
ggtaccctccggagttccggccgggnatcaaaccaactatatatcacatattcaccgacggctncgctggctcatcttggcgctaagcaccgaatgtacgatggcccggacgaagcacacgaagcgcacgtcgaccgacgggacggcgcccaggaagcagctgaccaacaaggcgacgagcaagtcgggcacgtcaaccgcgggagcgaagaagcctaaccggtttcaccccttcaccgccgggctcggggagattcggaagtatccagaagagcacggagatgatcatgctgatgatgcccttgcagcgcttccagcgtgagatcgggcagaatttcaagaacgacctgagcttccagtgcttcgatgtctccgctctggacgaggtcgacgaggcctacctggtgtagctcttggaggacaccaacctctgcaacatccacgccaagcacgtcaacatcatgcccatggacatccaggtcatgcacctcatgaggcgcaagagggcttgaactgctggagctgccgttcacgttgttgaccctttcctctgtgtctttggttgtagaattcttgcttctgttggttttcttctgttcctatgatggtgatcatagtgttaggagtggcattagctaatctgcttgatcttgcagcgctgcctctgaa

SEQ ID NO: 133561 - DNA, 448 bp, Zea mays
  Clone ID: MRT4577_53298C.1
ctcgaggtctcttccgggttcatgcagtagaatttcattctcaactatatcctatacagatgttgatactggatcgaaactcggtgaaagcactcgacgaccttggtgaagatgttggcgaactgcagcgtggtcgggacgctaaaaatccaaacctttttttttgcaatttatccctttttcgaaaaaaatcaggtttagacttttgaacgacttaatgtcgtttttggactctttgttcagcgccattagtcatagtatcggtgtaacacggctcgacgccatagatcatgacgtcgagctaagaaatgtctgtgtgcttctaaagcacttgggagtaggccttcctaaggcttcctaacgtgggagcaggccttgtaaatatggctcggcacatttttcatctaagaaatatttaaatatttcatgaatattttcatattttttc

SEQ ID NO: 133562 - DNA, 309 bp, Zea mays
  Clone ID: MRT4577_53299C.1
acatagaactgttttcttttattcattcttttatttatttcggtcaggtcatttacccattggcggagagaaaccacttataaattcccactacattaaaaaagacactcgccagcatgtttcccattaccataaaaagcgcacaccagggttacctaattttcatctgggacgggcaacctttttcaacccaaccttttctaatttagtgactttgaagctttaactaacatttcctgtaaaatatctcaacattttgttttctttttacatgatttatactataataccttggggtgctgaaaaaca

SEQ ID NO: 133563 - DNA, 1011 bp, Zea mays
  Clone ID: MRT4577_5329C.1
ctcgaggccggccgggaggcaactaagacaaagtggcgtactcttctctgtactagctttcttcttcctcctcctcttctcctcccaaacagactggatttcatcaagataatcctgaaactggagccaacaagcagacagagaaagaagagcaagaagaccggctcccagccgatacaagggctcaaccggacaggcaagagctgccggctgcgctgggtcaactacctccaccctggcctcaagcgtgggcgcatgtctccccatgaagagcgactcatcctagagctgcacgctcggtggggaaacaggtggtccaggatagcacgccgcttgccagggcgcactgacaatgagatcaagaactactggaggacacacatgagaaagaaggcacaggagaggaagaggaacatgtctccatcgtcgtcctcgtcttcgctgacttaccagtcaggctacccagatactccatcaaccattggagttgagggacaggagcttcatggtggcagtggctgcatcacaagcatcctgaagggcacccctccggacatggatggctatcccatggaccagatatggatggaaattgaggcgccacagatgccctcggaggagagctttgttggggggaaccataatgtgtgcagcagccttgccaccccgctgccaccaccaactgtctgggaatactacccagatgcctgctggaaggttgacgatgagatcaagatggcaacacaatatcaatttggttatagtgaaggagttgggccctgcttctgatgccataaatattgggtcagattactaagttatacacctacctagcagaagtgaagtgcttttgtagaaacaagctttagcatggatctgaatatttatctccgcgcttagaattgcaggtctatggatctatgcatggttgctatgtatctatctagtgtgcaagacaagattatcttaatttgtccttgatgctatggaatacaagggcaaaggtactac

SEQ ID NO: 133564 - DNA, 392 bp, Zea mays
  unsure (1)..(392): unsure at all n locations
  Clone ID: MRT4577_532C.1
gagccttctngtctgcggccgcccttgatttttagggaaggttttatttgcaacacctttatttccaatacgaatcaaaggcaaaggaccacaagcacaggcacacgcacccaacccaagcagaacgagatagacatagacctttacccgaagcccaagcccacgctcacgtacacgcgcatgcaaagccatagcatagtgatagcgaaacccaaatcaaattccctggccgtacaactgcaacgctgggactagccagaccctacccaaccccaactgattggagagaagcccctttctccaaatggcgctattgctgaaaaggaatagacccatcgcgattgccccctggaacggaggcggaacctgaattgggaacgggaccccccccc

SEQ ID NO: 133565 - DNA, 294 bp, Zea mays
  unsure (1)..(294): unsure at all n locations
  Clone ID: MRT4577_53300C.1
tggcgaaacaattttacaatttcaccaaacccgagcacacgcaagggaggcnggggttggattattgaaacccaatccaccaaacccattgatccatggacggtatcgatgtggtaaaggtcgttatgcctgaggaatattaccaaaaggcatatagggggaggttataagcgcctataccagaaaaccgattgtagatagaatcaaaaatacatatattggcgcaaacacaaccaaagaattctacctttcacgatacgcaaacattcgtttcatacaatatggagaatggcg

SEQ ID NO: 133566 - DNA, 286 bp, Zea mays
  Clone ID: MRT4577_53301C.1
gccggccggtccgggtagtctgatctaaatgatgagaaatacctcctactcattctgaatgaaaaaaaaaagagaaaaaaaaaaaaaaaatgatcccgttacgtgtgaagaaccagctccatctttgtaacaaatttgtgttgggagaaacagaaagacggtggtgtttaacttattgtgaaaggtgatttaataataatatataataaacgggatacgttggatgtggtgtacccaaaaaaaaaaaaaaaaaaaaaaacaaaaaaaaaaaaaaaaaaggccccta

SEQ ID NO: 133567 - DNA, 226 bp, Zea mays
  Clone ID: MRT4577_53302C.1
agcacggaaaacggctcgagggatgttttgggtcaggacgcctactgcgccgacgcggccgttcgtgtttgtgcctgcctgtgccttcggttgttcctatgagcgaccacaagtcggggaccgaacatggagttacgagcgccccaggccgagaaggaattaatttggcctggttattgtgggggaccacagactcattaactgtgtgaactctttcaaaaggggc

SEQ ID NO: 133568 - DNA, 1616 bp, Zea mays
  Clone ID: MRT4577_53303C.1
ggcagtcaggcgcatgctgcgcgcggctccgcagcaccccttacctttcgccgattccaccggccgtgccttcctccaccaccagccgcggcacacccgcggaaccgccgctcgagctcgcgcctgacccccacaaactccgccaaattcccccaaacccagccggtcggaccccgcaaatcgccccccaaaccaaccgggccggccgacacaagccgcatcccgtggcgatggacctggcgtcgagcgaccttgcggcgctgggcgcggcggagctggtccgcgtctcggcgtcgatcccgcgcgcggctccccgcaccttcgcgctgctcaccgcctgcctcgtcttcccgctctccttcgccgtgctcgcgcactccctcttcacccaccccatcctgctccgcatccggggcgccacccactcggggttcgcgccgtggctcggcctcttcgcgtaccagttcctctacctcatcgtcctcttcaccttctccctcctctccaccgccgccgccgtcttcaccgtcgcctccctctacgccgggaagcccgcgtccatctcctcctcgctcagcgcgctgccccccatcctgccccgcctcctccgcaccttcctctgggtctccctcctcatgctcgcctaccacctcgtcttcgcgctcaccgtcctcctgctcatcgtcgtcttcatccccaacgcgtccgagtccgagtccgcgccgccctccctcgccttcgtactcttcctcgtcgtcgtcgtcttcgtcttcctcgggatccacgtctacatctccgcgctgtggcacctcgccagcgtcatctccgtgctcgagccgctctgcggactcgccgccatggccaagagcaaggatctgctccagggccgcaccggcaccgcagccacgcttgtcgtctcctacttcgcggtctgcggcgtcacctccgtgctgttccgtgccgccgtcgttaaggggcgcgccgaggaggggagcttcggtctggccttgcccgggcggctgcttgtcggcgccgtgctgctgtgcgttcttgtctgtgtcaatttgctgggactgctcgtgcagagcgtcttctactacgcctgcaaggccttccacaaccagcagattgaccggactgcgttgtatgagcaccttggagggtaccttggggagtacgtgccactcaagagcaatatccagatggagaacctttgagattggagcataggacaagggtaagttactcacctcattgcttcatactagcagtttcatgtggatctttatcagaatatgagtatggcttacaaggggctatctggtcttgttgattctagtaccatgtagtagttcataatctgtataagtggtaatgcacagtatggaaccaatctgtggaatggaagtatggaacagagatgcatgaacaaggttgtctttcatctcgcaagctgcgttcttgtttatcattgctttcctgtgtgtcatgttattgttcttgactgtgattcgtagggttaacatgcactgacccaaaaaaaaaaaaaaaaaaaaaaaaaaaaaaaaaaaatgaaaaaaaaaaacaaacattataaaaaattaaaagggaaaacg

SEQ ID NO: 133569 - DNA, 1747 bp, Zea mays
  unsure (1)..(1747): unsure at all n locations
  Clone ID: MRT4577_53304C.1
cacggcgtgcccccacgaactccgccaaattcccccaaacccacctagcaggtcggaccccgcaaatcgccccccaaaccaaccgggccggccgacacaagcagcatcccgtcggcggcgatggacctggcgtcgagcgacctcgcggcgctgggcgcggcggagctgatccgcgtctcggcgtcgatcccgcgcgcggctccgcgcaccttcgcgctgctcaccgcctgcctcgtcttcccgctctccttcgccgtgctcgcgcactccctcttcacccaccccatcctgctccgcatccggggcgccgcccactcggggttcgcgccgtggctcggcctcttcgcgtaccagttcatctacctcatcgtcctcttcaccttctccctcctctccaccgccgccgccgtcttcaccgtcgcctccctctacaccgggaagcccgcgtccgtctcctcctcgctcagcgcgctgcgccccatcctgccccgcctcctccgcaccttcctctgggtctccctcctcatgctcgcctaccacctcgccttcgcgctcgccgtcctcctgctcatcgtcgtcttcgcccccaacgcgtccgagtccgcgccgccctccctcgccttcgtcctcttcctcctcctcgtcgtcctcgtcttcctcgggatccacgtctacatctccgcgctgtggcacctcgccagcgtcgtctccgtgctcgagccgctctgcgggctcgctgccatggccaagagcaggcagctgctccagggccgcaccggcaccgcagccacgcttgtcgtctcctacttcgcggtctgtggcgcgacctcgttgctgttccgtgccgctgtcgttaagggacgcaccgaggaggggagcttcggcctggccttgcctggccggctgcttgtcggcgccgtgctggtgtgcgttcttgtctctgtcaatctgctaggactgctcgtgcagagtgtcttctactacgcctgcaaggccttccacagccagcagattgaccgcactgcattgtatgagcaccttggaggctaccttggggagtacgtgccactcaagagcaatatccagatggagaacctttgagagttggagcataggacaagggtaatcttctcacctctcgttgctacatactagcagttttctatggatctttctcgaaagatgactatggtttacttggagctatatatctggtcttgttgattctaatatcctgtagtagtttagtttagaatctgtacaagtgaaaatgcgcagtatggaaccaatctacgaaatggaacgtagatgcatgaacaaggttgtctttcgtctcacaaacggtgttcttgtttatcattgctttcctgtgagtcatgttattgttcttgactgtgattcgtcgtttagagactgggggttaacatgcactgacgcacaattggttctctctctgctcatgtgagactgtgagaggctgttcacatcagctggtgttgtcgattctgttgcgggatatccgtccctctcgcgttccataccgtttggtaagatattgcgttattagatgccattgttactctaactctgtacatcaagatcatgagtttatctttaggctttctatatataccacgtgtgctgaaatatttgnaaaaaaaaaaaaaaaaaaaaaaaaaaaaaaaaaaaaaaaaaaaaaaaaanaaaaaaaaaaaaaaaaaaaaaaaaaaaaaaaaaaaaaaaaana

SEQ ID NO: 133570 - DNA, 380 bp, Zea mays
  Clone ID: MRT4577_53305C.1
atgtagcacgcgcgccctcgtgaacgcagcttcgacgcggtctgcctcgacgacttgcgcggccgggctgagacaatcacgcgcgcccttgtggccctaacgcactaacgtaggtagccgctgacggtgtgctgaagcctctgttactacctcgaatgctcaattagaggcgttcactaataaaccgactcactgaaccttcgctccactggcttttaaaccaagtgcgatgaccacttgtgcgaatcatccgttgctgtcctactatgctgaattactatcgcgcgccggtcataactaccgtaaaactaacatgtctaacgacggcataaacgcagcttacgttacctattgctccgttaacacatctacacttactg

SEQ ID NO: 133571 - DNA, 1185 bp, Zea mays
  unsure (1)..(1185): unsure at all n locations
  Clone ID: MRT4577_53306C.1
acacaagccgcagcccgtggcgatggacctggcgtcgagcgaccttgcggcgctgggcgcggcggagctggtccgcgtctcggcgtcgatcccgcgcgcggctccccgcaccttcgcgctgctcaccgcctgcctcgtcttcccgctcaccttcgccgtgctcgcgcactccctcttcacccaccccatcctgctccgcatccagcgcgccacccactccgagctagcgcagtggctcaggctcttcgcctaccagttcctctacctcatcgtcctcttcaccgtcgcctccctctacgccaacaagcccgcgtccatctcctcctcgctaccgcgctgccccccatcctgccccgcctcctccgcaccttcctctgggtctcccttctcatgctcgcctaccacctcgtcttcgcgctcaccgtcctcctgctcatcgtcgtcttcatccccaacgcgtccgagtccgagtccgcgccgccctccctcgccttcgtactcttcctcgtcgtcgtcgtcttcgtcttcctcgggatccacgtctacatcgcaggtctcccccccctcgccagcgtcatctacgtgctcgagccgctctgcggactcgccggcatatggaagagatccttgctcttagccccgcaccggcacccgcagagcggctcgagcaccaacatgacaccggcgaggtgccacagcccgaagatgtacacgtggatcccgaggaagacgaaggcgccggcgcggagaaagagaacgaaggcgaggcacggcggctaggaagcggaatggtacgcgagcggagcacggcaccgactgagagcagtgtggcagatccccttcgccgtgctggagcactccctcttcacccaccccatatgctccgcatcagggcgccacacactccgagctagcgcagtggctcaggctcttcgcctaccagttcctatacctcatcgtcctcttcaccttctccctcctctccaccgccgccgccgtcttcaccgtcgcctccctctacgccaacaagcccgcgtccatctcctcctcgctcaccgcgctgccccccatcctgccccgcctcctccgcaccttcctctgggtctcccttctcatgctcgcctaccacctcgtcttcgcgctcaccgtcctnctgctcatcgtcgtcttcatccccaacgcgtc

SEQ ID NO: 133572 - DNA, 478 bp, Zea mays
  Clone ID: MRT4577_53307C.1
aaggtaaacccaaaaagaggggaatttggcccctggtaaattaaataaaaaccttagattttaaaaaaaaaaatttaaaaaaaggtccaaaaggtaaaaagggggaaggtttagaattttatggccttaaggggtaaaaaattttagcccaaatccaaaattttgggaaggggggggaaaaaaaagccggaaaaatttaccggggggaaggggagaatacccaatttcctttaaagggatggggaaaaggaacaccttggtggggccgacttccttaaatacaaattaaagggggaatgaccccgggggcacctccccgagggggttgaaaaagttattaaaaacctttgggggggtcaaccaaaccttaaaatccggataaaacttatttttgggggaaagtttgccgggacccgggccacgctttggggggcccaaaaagggtccccggggggggaaggggggggaaaaccctcgg

SEQ ID NO: 133573 - DNA, 1202 bp, Zea mays
  unsure (1)..(1202): unsure at all n locations
  Clone ID: MRT4577_53308C.1
ccgccgccgacgacgactaccccgagcgcgccttcgcggcggtgcgcgccttcaacgaactccccgcccacgagcgcgcgccgcactacagccgcgccgtggacggcggggtcaactacgccatcaacgtcgagctgcacaagccgcccacggccagcgggcgcgacacgatccagatcctgctggggccccaacacgccagtccacggacctcgcctgacctggatccctggcccgctctgccggcgccagaggtcgctcgatgtgggagggtccgcgccaccgccgtcgcccgcgccttgctcaggctcctctcccaggggctcggcctccgccccgaggcgctggaggacgcgtcctgcgccgacgggaagctcatggtgtgccactactacccgcactgccccgagccggagcggaccatgggcatcgtcccgcacacggaccccggcgtgctcaccgtgctcgcgcaggacggcgtcgggggcctgcaggtgaagcaccaggatgaggacggcaaaatctcatgggtggatgtgaagcccgtgcccggagcgctcgtcatcaacgtcggggacctcttgcagataatgtctaatgacgagtacacgagcgtcgagcatcgggtggtcatgaacacgcgtgaagaacccagggtttccatcggcatcttcttcagccctgggaagagaggggactcggtgttctatgggccgctgccagagctggtctcttcagagaacccgcccaagtacaggaacttcaccatgtccgagttttacgggaccttcttctcacgagaccttgccagcaaggctctactcgataacttcaagctgtcaccgtaaagtgtcgactccagctcgaagagtttagatagactcgtgtatactatagtcatgcgtgaattgtgattgccggctggcaatgtatagaaattgttctgttgtcctgtcagtcgtacgcaggtcaccagccgccaccgcagcgtgcccggccgcgctgggcacgctgcatgaccggccagagaagcagcgtcacagaaactagccaactgttcaagcgcgttggatgataccagacggcacaaacctgtggtaaacgaaccaaacataactgagctgaaaccgcgcttcgacttttctcatatgcacgaataaagtggaccaaacacctgacctagagttcagtgtcnatgcaaa

SEQ ID NO: 133574 - DNA, 244 bp, Zea mays
  unsure (1)..(244): unsure at all n locations
  Clone ID: MRT4577_53309C.1
ggggntctcatcccacgccacatcctcccctcnctcctccttgggttcccagcccgtgcgcccgcctgtcgcagacgcaacgcagncgccgaggaggggcggttttaacaacaggggcgggagggagggggaacacatgacctgcactaccacagcaggacagtagagacgcgcttaaacacaaaggaaggcatgcgacgcagacaccacagaggagatgagcagcagaaccgaggacctcgac

SEQ ID NO: 133575 - DNA, 614 bp, Zea mays
  Clone ID: MRT4577_5330C.1
tcggttatcactgataatatctcagagcatatcacaaacacaccaattctagcgctctagctcctacctaacatcaatgaggtccacaacattgttggtccttgggctgatcagctgttgttgtgagcacagcaagtgcgttgattggtagacaatgctgacttggtcctagggcgcctatgccacacatactgcgaccggataccggaatgaactgttgacgcctaaataaggcagcctacatgactatcacatgcgtttgtgaatggtagtattacaacgatcatgtaaataatcgcaacagctcaatgctgctacattgaacgatacgaacaatttgctggcagcaggcacaacatatcttactgaatgtgagccgactatgtgaataagaaccatagctcatagttgccacatgagttaatggaatacactgaagttgctgtgagtatgcagcacgtgttgctagcacaagctgctgtagatgatgtgccctgcatgttttgagccaccaaatggaccagaggcatctcttgtactatacgctgacggctgctggaggaacaaaggcgataatggtaagatgcctgatgctattgcctgctggatcctgt

SEQ ID NO: 133576 - DNA, 357 bp, Zea mays
  Clone ID: MRT4577_53310C.1
cgaactcgctctcatgcgcaggcgtggcttggcgttcagcgtcggccccaaccgcggccgaccgtcgtgcgccggggctacgaccgttcggggccctccctgcctccacgcggaagctcttcttcctccctcaagacgcgaaccccgttgcctctcgggtcatcttcgccacaccgtcctgcccggaccgccgtggcgctctgcctcgatctaccaaatccatggctcggcacgaggatgcggacgcagaacaatcacttccatccgccagcgcgttgtctcgccgtcggatcgcgggatgggagatacgaaaccaaccaggcatctgaagtatggacccctctgaacttccggagc

SEQ ID NO: 133577 - DNA, 374 bp, Zea mays
  Clone ID: MRT4577_53311C.1
ggggggggggggtttttttttattattttttttttgtgttttttttttttttttttttttttttttttttttggggggccttaaacaacacaaagctgttgggaaaccacttggaaaacgaaacgggggcctaataaacatgcctattttttggggggggggggagctttccatagatcctttaatagactcgggcgggtatggcaaccccccaaaccattttcccatccaatcttattctaattgggagcctgcttaggtggggtcaagataattagcccttaacaaacattattggggtcatttatgccaaaggaggggttttcatcatgtaatattgtttttttccttgaagcaaaacaacatggggccat

SEQ ID NO: 133578 - DNA, 314 bp, Zea mays
  Clone ID: MRT4577_53312C.1
ccacgccttccgtttaggttccggtttggccgccacgccaaagcttcttcaaaaaagggtggggaaaccttaaacttctcttaaccgcccctttgggttccccgcccccgtgccccccactacctggaccgctcgctggtcggcgactaccagttcgacccgttcggtctcgggaagcccgtggagtacctgcagttccagttggactcgcttgaccaaaacctgtccaataatgaggccggcggcatcatcggcacccggttcgagtcctcctaagtcaactccaccccgttgcagccctacagcgaagtgtt

SEQ ID NO: 133579 - DNA, 183 bp, Zea mays
  Clone ID: MRT4577_53313C.1
ccttacgaggctggggggaagcaaacaaccactggggggtatcaataggagccgggttcgccattatgtgcagcattattcacctgatttgtcctatccgcagggtaccccctaaaccaaacctacgtcaatactcatggcactatcatatccatctatggaaatctaacgttcatcccacaa

SEQ ID NO: 133580 - DNA, 299 bp, Zea mays
  Clone ID: MRT4577_53314C.1
atggtgaactggaatgtccgggtttcttgaatgtaaacggtacatacgcaaagtttgagcagctttctacgtttacatccatgcagagcacgcaaatgagctcgacagattcttcttcatttggtttctgcgccatctggtcggctatcatccagagcacctcccagatctagaaacgcctcgtatgcgcttggtcgttggcgacaaacgagctcacctcgcctgccacctgtaacgcgctatacacgagaagcttcttgatcccccggccgccaatcatttttcgtacccgacgcgcg

SEQ ID NO: 133581 - DNA, 261 bp, Zea mays
  unsure (1)..(261): unsure at all n locations
  Clone ID: MRT4577_53315C.1
cttcctggtgttgatgccaatgatccatctgttanagatttgttcgcatcattgcacaacccccgagagcaagagaagaaggaagacaagtaagactanacagaagacgagaagaactgcttcaagctggagcgctgtcgctgtggtgcttntgtgactgatcatctctggagcttntgtcgatgatctagctagctanttgtanatgatctagtcgtcgatgactatataattgtgatactcttgtcgatatataattgt

SEQ ID NO: 133582 - DNA, 206 bp, Zea mays
  unsure (1)..(206): unsure at all n locations
  Clone ID: MRT4577_53316C.1
cactagcgagtggctgcctccttccgacaacgccgagtgcgtcgggttgaccgtgagctcggacaacgacagctgcttccgcgacagatccaggcacagggccctctgcgcgactgaaaaagagctcttctgtgcggtcctgagacagaaagaccagcttgaatcatgctggagtcctcgcttgngcgttttacacacctaactgc

SEQ ID NO: 133583 - DNA, 466 bp, Zea mays
  Clone ID: MRT4577_53317C.1
tcgtctcggccacgttctgggtctcctgcctcatgctgctcgcctacgtgctgcgctccgacgccttaagcgacacgtggaggggcttctctgccgacgccttcaagtacgtgctgcccaccgtgaagctcgccacgccgtccgccgtcatggtctgcttggagtactgggcattcgagctcctggtcctgatcgccggattgcttcccaactccacagtgagcacgtgtctcatcgccatgtgctccagcacggaggcgatcgcgtacatgatcacgttcggctttagcgccgccgggagcacgcgggtgtcgaacgagatcggcgcgaggaacgtggagagggccaagaacgcggtgtctgtgacgatgaaactgtcggtgttgctggccgtcatcttcgtgctgctgctggcgctcgggcacggtctgtgggctcgcctcttcagcgggagcgccaccatcgc

SEQ ID NO: 133584 - DNA, 659 bp, Zea mays
  Clone ID: MRT4577_53318C.1
ggtgtccttagggtttagggttctctgctcattcgttcgccacctcgccccaagacgtctcgctagggtttcgccacagccgccgccatgcctcgccgcaagcttaggaaggtccgcggctcacgcccggctccacatgctgctccagtgaggaacccaccacagcctggtaaagtgattcacgcagacaataagtatctttagaactgacattggcatggtaatcatgcctcttttgactctgcagtattctattgtggacatgtgtttcaattatgtaactttagttatatttttgtataactgtttgctcagttgttgagaatgtgttcggtttgttactataacaatgttgatgacataaatatactgttaagtttatattggaatttgtggtacaagtctgaagttgttgattgtgtttgaagcagagtcaatggcatttcggtttatatagagaattacagttccttgttttttggtagaactggaacctgtttcagttctgttcctaatgcttacacatgggtttgtgctacaagtatagtattagtattacagagctcattgttttggaatcttgattgctttggaatcagaatcgtttatgtttagctcatattagtattagtattacagctcattgtgtttatataggc

SEQ ID NO: 133585 - DNA, 785 bp, Zea mays
  Clone ID: MRT4577_53319C.1
attctccacagctcacacacacacagccatctccgcacagctctgagagctctccaccgaacagcagcactagcagtgcagttgaagggagtgacagtaccgaagaaatagcagcaagatgatactgggcgggctcatcgacggcctgacgggggcgaacaagagcgcgcggctcaagggcacggtggtgctcatgaggaagaacgtgctggacctcaccgacttcggcgccaccatcatggacggcatcggcgacttcttcggcaagggcgtcacctgccagcttatcagctccaccctcatcgaccacgacaacggcgggcgtgggaaggtgggcgcggaggcggagctggagcagtgggtgacgagcctgccgtcgctgaccacgggggagtccaagttcggcctcaccttcgactgggaggtggagaagctgggcgtgccgggcgccatcatcgtcaacaaccaccacagctccgagttcctgctcaagaccgtcaccctccacgacgtccccggccgcggcaacctctccttcgtcgccaactcctggatctaccccgttggcagctacacctacagccgcgtcttcttcgccaacgatggcgacgtggagctgcaggcgtggtggaaggaggcgcgcgaggttgggcacggcgacctcaaggacgcgccatggtggccgaggatgcaagccgtgggcgagctggccaaggcgtgcacaccatcatctggatcggatcggcgctgcacgcggcggtcaacttcgggcagtacccatacgc

SEQ ID NO: 133586 - DNA, 890 bp, Zea mays
  unsure (1)..(890): unsure at all n locations
  Clone ID: MRT4577_5331C.1
cattgggtacctcgaggccggccgggaccgcacaggctcgcagcaacttgagctcggtggcctccacatcggtgctcgtcttcgcctcgtctttgaaaattgacaagggctcaaattcggctcgagcccttctgtatcttcatgcagggctcaaccggacaggcaagagctgccggctgcgctgggtcaactacctccaccctggcctcaagcgtgggcgcatgtctccccatgaagagcgactcatcctagagctgcacgctcggtggggaaacaggtggtccaggatagcacgccgcttgccagggcgcactgacaatgagatcaagaactactggaggacacacatgagaaagaaggcacaagagaggaagaggaacatgtctccatcgtcgtcttcgtcttcgctgacttaccagtcaggctacccagatactccatcaaccattggagttgagggacaggagcttcatggtggcagtggctgcatcacaagcatcctgaagggcacccatccggacatggatggctatcccatggaccagatatggatggaaattgaggcgccagaggtgccctcggaggagagctttgttggagggaacgaaaatgtgtgcagcagccttgccacccctctgccaccacctaccgtctgggaatactacccagaggtctgctggaagcttgacgatgagatcaagatggcaccacaatttggttatatagtgaaggagctgacccctgcttctgataccatatatattgggtctgattactaagttatacccatcctagcagaagtgaagtgcttttgttgaccnagctttagcatggatctggatatttatctcccgctttagaatngnangnctatggctctatgcatgatt

SEQ ID NO: 133587 - DNA, 359 bp, Zea mays
  Clone ID: MRT4577_53320C.1
gctcacttgaacgaagacccgggggaaaaagacggggctggggatcacttcatcggcccataaaagaaagagggcacgatacagggaagcctgaaccaggctgggacgctgataccaaaagcgcccataggctggggctgacgcactgttatactatgaaatgagcttgctgatcttctccacagtggcgccctgtgaattgctgcattggtccacctcgtctatattaagggcagaaaacaactgcttgcaaggatggctatagcacaacaatttgagtaattgatatactccattacttctaaaatataaatcatactcgtccttttatacacccacatgcgaacaaatgattatga

SEQ ID NO: 133588 - DNA, 624 bp, Zea mays
  Clone ID: MRT4577_53321C.1
agatttttccatgataaatttttaccgatactattacccaataaatgacgagagggaatccagagcaaatgctataatcaaccacaactcctaccaccggcgcatccgggaacagcacatctctccatctgctcctcgaccgcagcgcgctggccggctccgcgggtgcttacggcgcttaactacgactccataccccaagcagactagccctgtttctcaaaccgcctcatcctctactagctcctctctgtgagaccagaccctcatccagcgcaccaatgatcgaatcacagattattgcaccgacactcgaaggggatgagtgctgcagatgtggtgacttcttactttgaactgaataatcttgagcacgagctccctatcgaaaaatacgaacgatgacgaactattcgtagggctacccagaggcacctgatagatagcatccaccatcgctcagatctgcggaagaaggcggaagaaaactatcgcaattcatgaccgactagctcccaagggagatgatccccatagtctaggacgttccacatgcctgatgggatatagaaaacgcattatcaggtcgttgaataataataggtgctgatgccagagtgtcca

SEQ ID NO: 133589 - DNA, 275 bp, Zea mays
  Clone ID: MRT4577_53322C.1
catacttttagaaaatagcttacctgcactgaagctgtttagattcacttcttgaattattccaagatcagaatagggtattcttctcctaaccctagcatgatcttgtatccagctgttccaggattaggacgttcttatgctatccctagcactcttgtatcaaataagctcttagatacatgaacattgtgggtgtgattgttgtatcaaataaacgaacttttagttgctccaaattttgtatcaaatgaaaaatatatatcattgacctc

SEQ ID NO: 133590 - DNA, 737 bp, Zea mays
  unsure (1)..(737): unsure at all n locations
  Clone ID: MRT4577_53323C.1
gcatccggctccgggacacctgcttctgggggaagaagccggtgnccgggganacancggacccggccaggcggcgccagtacgaggcgacgtggtcgttcatctgcggcgggcggtacagcatcgacgacccgctggtggacccgctgtcgatgccggcgtccgagtggcggaagctggcgtgctcgcgcgtggcggtgacgtcgtcgggcctcgacgacttccggccgcgcgggctggcgtacgtggcggcgctccgcgacagcgggtgggacggggagacggagcagtacgagacgcccggcgagcggcacgtctacttcttggataggcccaaggaccccaattccgtcaaggagctggccttcgtcaccggattcctgagccgggagtaggtaggtagccatcacggcgagggcgtacagtttaggtgcaatcgtgaggattgcttgctgatcgaggcacgtgaatacgtgattgattaatagagactattattgctagcaccgtagcatgttgtttttgtttttttgtgtttggatcttgatagggttctcgagaggtggtgaggatttggttgatgacgagctcggtgaatgaatctggctggggatgtagttgaccacacatctgacatcgtgaggaaagctgcctgcagcagtgcagcctgaaactgtggctgagaataaaagcactacacaaatataggacttgttttcaaaaaaaaacccaccaac

SEQ ID NO: 133591 - DNA, 297 bp, Zea mays
  Clone ID: MRT4577_53324C.1
atggcctcagggcggacgctgctgcagcaatgctctcgcccacgtctacgctcgaggggcgaggacaagtacaaagagccggaggcccggagcacggacggtggcggtgatcccgtcggcgacgaggacttctccagccgccgccacctcggcaccgacgacaggagccgtctgcccaccggcagatccccactcggatcctcccggacgagcggagcaccgaccttcgcgcagaggcgccgtaccggggcaaagtatctccccaacgacctccgcccgcaaatcgagctgagctaa

SEQ ID NO: 133592 - DNA, 787 bp, Zea mays
  unsure (1)..(787): unsure at all n locations
  Clone ID: MRT4577_53325C.1
tgggtacctcgaggccggccggggcctcggctcaccgcagcagcctggccctgccccggcccccgggcgtggtgtcaggtctcaggtgtggtggcgctttctcctctccggcacggtggccgcgtcatcccagctctcccgcgcggcggcggcggccgtttcctctcctgcgctcctcctgccgcacacagccagaaaattccagctgaagtttgtttgaggataggcgacagctttgcgagtccttcgtgttgaaggagaaattgtagctgaagtgaaaaaacagcagggaacgatggcactatcacgaagtatgagagcatgtttgcacagtggaagacttgcacttcttgccatattggtctctggtggaattgtattgcaaatcttggcttgtgctctctataacaactggtggccaatgctaacagctgggtgaacttcacgaaattcttgacgggcgcatcaatagtagggagcatcgccattccgtcgatcctgaagcatgcgggcgtcattggatggggagccctgacgatggagctgtcatcctttgtggtctttggcgtggcaatcctgtggttcctccagatgaacggtgaagacgagtacagcggagtgttctaatccaaacctgctgctgctggttctcttgccagcgtggcactctgtgcatggtagttgtgaactgggctgtactgctacaacaggggaagcattgccctgngacctgatttactgacaccagtacatgtttggtctgcgaaaaaaaaaaaaaaaagcggcc

SEQ ID NO: 133593 - DNA, 981 bp, Zea mays
  Clone ID: MRT4577_53326C.1
ttgggaccctcgggccggggccagcaatccatccatcgcaccgcttggtgggccgtccacatcaccaaaccttctggcttctgcactgctctcctccacccctcaacgaagcctctggtgcctcggccaccgcagcagcctggccctgccccggcccccgggcgtggtgtcaggtctcaggtgtggtggcgctttctcctctccggcacggtggccgcgtcatcccagctctcccgcgcggcggcggcggccgtttcctctcctgcgctcctcctgccgcacacagccagaaaattgcagctgaagtttgtttgaggataggcgacagctttgcgagtccttcgtgttgaaggagaaattgtagctgaagtgaaaaaacagcagggaacgatggcactatcacgaagtatgagagcatgtttgcacagtggaagacttgcacttcttgccatattggtctctggtggaattgtattgcaaatcttggcttgtgctctctataacaactggtggccaatgctaacagttctcatgtaccttatcctaccaatgcccctcatatttttcctgggttctgatacttcctccatgatgtccaatgggggagacggctgggtgaacttcacgaaattcttgacgggcgcatcaatagtagggagcatcgccattccgtcgatcctgaagcatgcgggcgtcattggatggggagccctgacgatggagctgtcatcctttgtggtctttggcgtggcaatcctgtggttcctccagatgaacggtgaagacgagtacagcggagtgttctaatccaaacctgctgctgctggttctcttgccagcgtggcactctgtgcatggtagttgtgaactgggctgtactgctacaacaggggaagcattgccctgggacctgatttactgacaccagtacatgtttggtctgcgatttttgtttgtaaaaaaaaaaaaaaaaaagcggcc

SEQ ID NO: 133594 - DNA, 2120 bp, Zea mays
  Clone ID: MRT4577_53327C.1
atctaagatgtcatgattcggtcaaatcttatcatttgtatccgattacacccctagtaagctgctactctgctaggacgggaggtgtgaatgcttacgaggcgtcccgagagcctacccgacactcacattgccaaacacgctacagctatcacaacacagcctgaattctgatcaatatattcgctgaaatttgtaaaccatcagagaccatgatgcacattatgtttcctccacacatcctctaaatctaaaaaattgctattaaatctgtacagctgcactgttttacccatgcagagttggcgaggcaaacatatgggaaaacacggccaatttgtggacgtttaaaagtttgaaatgcgctctagcctgttctaggcccaatcaggtcaagccagatttttcacctctttggttgtaaaagacattctggcaggccaaaatttttctatagcgcagttagacaaaattctggtgtacaaaacagctggtcctaatttggcttccacgagcaaaacaaaggacattttggtgtgccctgctggggtgagaactgaacagcacctaaatcaagtggatgcaaatggatggtgctccgcgtcaggtgagattgttactggagtttctgcaacttctgtatatctgattctacatccaccggaattttgagcaagtcctgcagtttggaggctcctgcactaatgtcattgatttctaggtatcttccgctcggtgatgcaaacagaacctcatttatgtcttcttcaagttgcagtgagtacaggtgttcgaagaccgctttcagtcttgaaacaaccgtttccctcactgaggttgaccgcgagactaaattgatgacaaaaaggccgccctccaaaaggaactcctttgctattagaaggaaaggatcttcgacaaagttttctggtgggcaagacagcccagagcttagatcagatgaatcaacatcgaggataagtattttgaatgcatttctggtactgccatttactgactgatttgcagcaacactgtcttcaatgaacttgatgccatctcccaaatggacctaacatgggagaaatggtaagatgcaatgaaactttttttagaacatcgcagaagatctgtgagtcaattcattaagaaatgagacaaaacagaaacggagcgaccgaagagtcagcaccaggtacaaagaaggcaagaaatgcgcaggcccatcatcagccacccaaacagccactttacagaaacacacacctacacaggccacacagctacgagcgactcaaattaaaccctaagagtgggttggcgagtgaggagctcctgaagagcagaggcacccgcagcacaccaaagggtacattcattggccacaacctgcaaaacagtatgaacacaaggccattgcccttcgaatacacaatcattccgatgcttccagatttccaaggcagccaacatgatgagtgtgttaaggccttttctcaacttctttggaactgttttaacagctctactccaccagtttaggaacttgtcactagactgagggagtgtttggttagagggactaaagattagtctctagtttttagtcccatttagtcctttttttgccaaacactaggactaaaatatggactaaaataatttagtctttagtccttcacatatgtgctaaaatggactaaaccatattaatttcacatttacccctcatttagttcattgtactaatagcagaatgccattttagtcttcttatgagtcatttagtatattcttactatttttagcccctaaaaccaaacatgttagggactaaactttagtcccctaactaaactttagtccctggactaaagaaaccaaacatggcctgaggcgacagagtagacaacctcaatttggcaaataacagaaaccacacttctctagaaaagacacaggagactaaacagtgttggatagtctcctcagctgatcacacaaaggacaagcagcagggtgagccagcccacgtttagcgagcttgtccgctgtccaacatcgattcttgacagccaaccaaatgaagaatttgcattttaatggcgcccaggtcttcc

SEQ ID NO: 133595 - DNA, 265 bp, Zea mays
  Clone ID: MRT4577_53328C.1
gtacaccctacagaccacgcgtgatgcaaacagtgttgacatcagtgcatacatataaaggtatcggttgccacatgatgagacacggcttgcgtgacggtatacatggcgcttgatactgcgattgagagtggccttgtgagtgctcttgcgtactgtctagcgcgctctccgtatgcacttatatatgctcgaacatgtaaaggatcatgcatagcttataccgactctatcaccgtcttcttaatctactacgatcatgact

SEQ ID NO: 133596 - DNA, 189 bp, Zea mays
  Clone ID: MRT4577_53329C.1
cccacgcgtacgcggacgcgtgggcgagcggtgcctaggagatgacttgcggcaggtcgaagttgaccccggatgatgtgcggatggcggtaacgtatggctggtaaagtggctcgacactctgccgcccacatctaacagcgtagacacccattcaaaggcagagcctaatgctggacctttttagtg

SEQ ID NO: 133597 - DNA, 1920 bp, Zea mays
  unsure (1)..(1920): unsure at all n locations
  Clone ID: MRT4577_5332C.1
aattcggcacgaggcgccaacccagcgcacggcacaacccattcgcaccgcagcgcgtcgcggcgagcgggcgggcgggcgacaccgacagctcaggaagacagggaggggagcgagggaggcggaagaaaaaggcacgaaagccaagggaagcgggcgcgaccaccgccgcgccactaccccccctcccccgccgcctagtccgagttgtggaatccccgtggactcccgccccccgtccatcccccgcgcgtcgccgcggcgcgccgggccgatctgctccgccgccccgcccgcctcctcaggtgtccagccgaggaggacgtagagctgggcatataacgagctagatttcaaaaaaaaaaaagggaaccatgaagaaagtgttcgatcagacggtccgggacctaaaaagagaggtgaacaagaaggtcctcaaggtgcctggaatagaacaaaagatccttgatgccacaagcaacgagccgtggggtccacatggatctctactggcagacattgctcaagcgacgaataactatcatgagtaccagatgatcatgcacattgtgtggaagagggtcagtgacactggtaaaaattggcgtcatgtttacaagggattgattgttttggattacctggtggcgcatggcactgaacgagttattgatgacatcagagaacatgcttatcagatatcagcactagctgatttccagtacattgattcttctgggagagatcaaggtagcaatgtacgaaggaaatctcagagccttgtcagtttagttaatgataaagaaaggatacaggaagttagagagaaagcactctctaccaaggacaagtacaggagtgcgtttgcccccagtggcaggagcccaggtggatatggtggtggttatgataatgaccgctatgaaggcagctatggcagtagatatgacaacagaaatggaaatgggaggggagactatggatacagggacgatgacagatatggtggacctggaggtacacccaatcgggaaggagatcgttattccagagattctaatgaacgctatggcagagattatagagaagatgaatacaaaggaagtcatagcaaccatgaatatgctgaaggagcaggtcgcaggagctatggtcaggaaagagattcatatggggatggtgaagcttattcatcccgtggtcgtggcagcaatgctgatgatcctactcaggatgataggcctatagagcgaaagctttctaaccagcaaatttcttcaccaccaccgaactacgaagatgtcacaagagatggccaggacaatcttcacgatgacagaaatggaggaagtgttcctgctgctgtatcaagggtgccctctccttcagttcctgcaacaactgttcctgcagtacaggtgaatggggttcatgacagcactgttgaagatgtacctgcaccaccaactgctcatgccgagcctaatggatttgatgagtttgatccacgtggatctgtaccagattcttcccctcctgtaaaccctgcatcagtagcgaatagcttggagatggatttgtttggatcagatcctattagttcgttggctttggtgtctgtgcctcaaccaacgactacatcaaatgttgaagcaccggcaaattcaggttttgaaacaaatagttttgtgggcatgcctcctgcttcaactggatttggcgagattgatgcttcaaatccttttggggatcctacacctttcaaggcagttcttgatgaaagtccaacactactcaaacacatgctgacagttgggtccttccaaccactggaccggggatgttngaacccttccaactgctccaacgaatggtttgggggaaaactggggaattcactttggacaatgtgaccgaatg

SEQ ID NO: 133598 - DNA, 371 bp, Zea mays
  Clone ID: MRT4577_53330C.1
caaacatcgggacgtggaggagaaccgtgagggacaggctggaggaagctgtacccagatgcctcaagaagctgttcgagctgccgccggaggaagacgacgaggacatgaggtggaaactggagaagaggcgcaagctcctgctcctgcttgccatcctcgcagccagcctcacctaccaggcaggcttgaacccaccgggcggcttctggcaagagaacagcacaggccacgtcgtcggcaaccctgtgctcaacgacaactaccgccgccgctacatggctttcttctactgcaacgcgacggccttcgtctcgtcgctggccatcatcatgctgctggtgaacaggaagctctcggcgagaggaata

SEQ ID NO: 133599 - DNA, 383 bp, Zea mays
  Clone ID: MRT4577_53331C.1
agcactagctagacctgaagctccacccgccatggcattcacgcccgctacgggctggtgcaaggcttgcctggcacttgcaccaggggcgtaacaccggggcccggaggactgcgaacaggcgggactcctatgcacgccctccacctgcgaatatcacggcctccaggcgcccgaatccggcgcgccgatcacgcgccagcgccgctccagggtgtacactggcataaactgtggaaagggcaacaatgacacactgccttctaacttaaacctaaaggaccagaacgggaagcccgtgtcggtcaacaaaataaagggcgagcacccctatgattacttgtaccccgacccaaagacgcccggatgcacaaagaaagagt

SEQ ID NO: 133600 - DNA, 813 bp, Zea mays
  unsure (1)..(813): unsure at all n locations
  Clone ID: MRT4577_53332C.1
ctctccccctaccaacgtattagggtttctcccagggtttttccccgcgccgccgccaccccgctcctccggatcgccgccatggcagccgccgccgccgccgccgaccaggctacgaatttgctgcagaagctatcccttgatgccaaggctgaagccatcgacgcgccggcggcgaaggagaaggcgtccggagggctgggcggcaagctgaatggtgtggcggcgactgggaagccacgggcggctgagcagtgggcaaatcctcaggattacagcgatgcaagcatgtattatggcgcctaccctgctgcttactattgcgcaggttggggtgattattccatgtacttgaatcaggatggagtggaaacacctaccgctggtgcctatggtgacatgtactgctatcctcaatatgggcatgatggtcagatgtatgggtcacagcaatatcagtacccatcatcataccaccagccccagaatactgccagtaagccacaatacaagtctaaaactgacaagctagccccgtcaaaggatatttcctccactgttgctgatccgctgcatgccgtagccagtgctcccaaagccactgcaaacagcgttgatgaggtaagaggtctgaagaagacatccacaccactgaacccaagtgggaacaatggtagttacctgaaccaaagtagcagaccagcttatccatggtacggtggccaaatctaccagggaaaacagcagaagccttctagtggcaatcctacttcaactgattcaatcctaanaagcaaggttcagtcgaagaat

SEQ ID NO: 133601 - DNA, 207 bp, Zea mays
  Clone ID: MRT4577_53333C.1
gggtcagcagctcaatcatcctcacacacacagctcacacacactccaatatgaaacgacatgatcacggcctctggacctcggctatcgcacccaagacgagaagaaaaacgcgaacgcagcgcgagcaaaaatcagacactctgctcacctgtgcagggcagaagggaccgacctggtcgtgtgcaaggagtcctgcgcgctctc

SEQ ID NO: 133602 - DNA, 623 bp, Zea mays
  Clone ID: MRT4577_53334C.1
ccacgcgtccgggtatgccatgcagttgttcaacacattcggataagtaacattgacgaagagatggaaattgaccaaataaagttagtaattcagtggttcactatgtttatgcattctttcttggcgcacatcaggctccagtttttcaaacttgatgcactgcattctacaacactggctgaagaggaactgatgaaggaaaaactcaaacaggaagtagtatcaggtgaattagaccaatttcctgatcattgcgttactctaccagattccaattctgtcattgaggaatttatccattttaagaaacaaaatgatgatagtcatgttgaccaaaaaatggctttggatggtgaccagcttatggatgacagaccgatggaaattactattttacgcagtttgttttcaccagaggcttgttctacacttgcagtgagaaatgagcctacagaagctcatttgaggtctggtgggagagcatcatcagaatatgtagatcttccagataacaataatcactgtatttctgttggaattgactaccaaggaggttgttctgctagttctattcctacaagtcatggttcaatcaatcaagaattttcgactggtgatga

SEQ ID NO: 133603 - DNA, 998 bp, Zea mays
  Clone ID: MRT4577_53335C.1
cagtccgggccatgccgccctcacgctacgccccgtgctccctccctctgctgtccgggctgctccacaccgtccgttctttctcttgcagtgcagtgggagggacgccaacgcctccgcccgctttatatgccccgccctccacatcaccacagcccccgaactcaacggctccaccgtctctcctctcctctctctgccctcaccaccaccacatcgactagcggggccacccccggcctctgcctccctgcatttgattcatccgtcgcttgcccggtcgcccgtcgatccgttaacccgccgtccgtccgcccgtccccggcagccgcgccgcagttgcaggtggactgcgaatgtcatcgatgcagttcagcagcgtgctgcccctggagggcaaggcgtgcgtctcccccgtcaggagagagggctccgcctgcgagcgcctcaaggtcggcgacagcagcagcatcaggcacgacagggcctccaggaggatgtgcaacggcggcaggggccccgccgccaccggcgcgcagtgcgtgctcacctccgacgccagcccggcagacacccttgttctccggacgtccttccggaggaattacgccgatccgaacgaggtggcggccgtcatactcggcggtggcaccgggactcagctcttcccactcacaagcacaagggccacacctgctgttcctattggaggatgttacaggctcatcgacattcccatgagcaactgcttcaacagtggcatcaacaagatattcgtcatgacccagttcaactcggcctcgcttaatcgccacattcaccgcacctacctcggcgggggaatcaatttcactgatggatccgttgaggtattggccgcgacgcaaatgcccggggaggctgctggatggttccgcggaacagcggacgccgtcagaaaatttatctgggtgctttgagactattataagaataaatccatagagcacattttgatc

SEQ ID NO: 133604 - DNA, 329 bp, Zea mays
  unsure (1)..(329): unsure at all n locations
  Clone ID: MRT4577_53336C.1
tgtttaagctcatgttgctatccaaatatccatcttgaggaataccaaaaaaaaaaaaaaacttaaataacaataatnntttccacanattttcacacattcttaattatacttgaaaaaattaaaaaaaaaaaaaaacttccaccacttaaaggcgaggggggaagctctgaaaaccactattaagcgggggcggtccgggggttcttctaagggggaccattatccttgcctgcgcgcttatacgctataattagcgtttgtttccttcctctttcnccaggtaagacctgtgttgccgcaacgctctcttgcgggggcaacctttc

SEQ ID NO: 133605 - DNA, 498 bp, Zea mays
  Clone ID: MRT4577_53337C.1
aaatgtacaaacttacttttgggaagccgcgaacactcaaacaaaaaaccaaaaaactgaactataactcaaaaaaaaactaaaaaagggaaccaccgcaccagggatggtgggggaacgctgcaacgctggtgaaatcaagaaagcaggatggcagaaagggacgcattggtaaaagggtgacagggtgccgcgcatagggccagtggaacggcaaaaactgaggaactgtcaagaaggtaaaaaggctcacaccatcaaacaacttaccagccggccggtcgaaagggcgaaaggggcaaatatccatcacaccatcagacggtcgagcatgcaagcatagggcccaagggcccctatagcgcgttggagaacaatacaacaaccgacgggtcacaacgtcacaactgggaaaacggtaaaacccccaacttaccaacctaatagcacatccccatatccccctttggccaaatagcgaaaaggccaaaacggccc

SEQ ID NO: 133606 - DNA, 411 bp, Zea mays
  Clone ID: MRT4577_53338C.1
cccacgcgtccggtcgtgttttccgctgtgtaagcatctccaacaaacaccagacgtcgtatagcggcagtccagtccacctcctccgaagccggcggtcgccgccggccatcgccgcggaggatatggcgtccctccgtgtggtgtcggtgctagtgttggtggcaatggcggcgagcgcgggcggcgtcgcggcgcggcctctggtagggggaggcggcgcgtgggagaacagggcgccgctgcagacgtcgcgccccttcaacatcgcgcaccggggctccaacggggagcttcccgaggagacggcggcggcctacgcgcgcgccatcgacgagggcgcggacttcatcgaggcggacatcgaggccaccaaggacagccacctcgtctgcttccacgacaccacgc

SEQ ID NO: 133607 - DNA, 762 bp, Zea mays
  Clone ID: MRT4577_53339C.1
aatgtctctctgcacatgtcaccgaacaacttaagtctttctacgtatgaaaaatagattctgctcgtctgctctcactacccactgtaggccggatttgtctgatactcaattatcgtattctgaccgacattcgcagctatgtccatctgctctgactaaaagttgcatactccatgctactagaacgttatgaccacgctcttagccctacattataacatgatctataataaaggtgtgcatgactctcccatcagacgcacttatctcggtgcccccatgaagttggctgcttgtttgctgtgctccatggcttccccatgcatgacatacaggagattatcgatgctcatgagtctcgaccctgatgctgccttcactggtcactgctttgcctatctctgagcgtcctccttataccttacaagaggcagtcattagatacgataaccctgtctggatacgtgacaacagcgctatgcatctcacacacatgccagcactgtactcgatcgccatgggggtccactcctacctccctgctacttacagtccaatcaagcacgtgctctactggccccggatgaacaggtcatcaatgagcttgtcgctgcatgcggctcgtgccaccaatccatgccagaccgggccctgtatcctggacttctctcacccttggcagtaccaacacatgcatggtgagctatatctcatgatttcttcgaaggcttatcaccaagtgtagcttacgacagtatc

SEQ ID NO: 133608 - DNA, 277 bp, Zea mays
  Clone ID: MRT4577_5333C.1
cccgctcgctcgctcgctcgctcgctcgctttataagtccgtcacccagccccgcccgatcgtcatctccatagagccccgtatccgtccacgcccgcccgccttgccaccagccagcaccccctcaacccccggcctcgccgccgccgccgcacccccttcagccgtcgttctggccgtcgctggttttgtgtcttcgcctgctctctttggggggggggggccttctttgtttttttcttgggtgccctctcctgtgttgctgcctgtcccgttg

SEQ ID NO: 133609 - DNA, 2374 bp, Zea mays
  Clone ID: MRT4577_53340C.1
ccttgcttaaagtgcaaaacatgtttcctcggggatttttacaagctactgggcagcttaaggtggccagaagctgccagaagccgaaacaaacagcccctatgcatgcaatcacgtcaccaacatgtaatgtgcagggggtttatctctgtgggtataattctgaagactcatatggggcaacatcggacctggtaattcatccacaaggaaacatactgattgacagcccaaggtatactccaaagctggccaacaatattgaaaagcttggtggagcgcgctacatgtttttgacccacattgatgacgtatcagatcacatgaagtgggctgagcagctaaaatgtgaaagaataatacattcacgagatgtggaggaggctaccacacatgttgagtggaaacttgaaggaaatggtacccggaacttaggacagcccaaggtattctccaatgctggccaacaatattgaaaagcttggtggagcgcgctacatgtttttgacccacattgatgacgtagcagatcacaggaagtgggctgagcagctaaaatgtgaaagaataatacattcaggagatgttattttcagatgtactcactggttaagattctggagactgctacaaaaggaggaatcgcaacaacaaatcctcattgcttcgcaagttttggaagtggtggcgatggaagtcttcgcaaaccatggatggcgctcaaattcaagaattgagtatggctagtgttagtcatagtattgtaatttagttcctttgagttagtatcactattcatgcaacagttcttaattgtaataatcgacttgtattggctgtacgcattatcatgctaaagccggaactcttgtttccattatcaaaaaataagccgcagtagccagccatactgcaggtcctcttcttgcatgttattgcttctattccacagtcatcgtcagtcctgcatctgtggctagcgtgcgcatctggaacatggcacgcactctcccatggggtaccaacacttcttcggaaaatcgtctcgggacaaacttgagacgataatgcgctcgcgcgaattggttggatctcatccttaacagatgtccaattgctgggaacatatgctgcaggaaatttctcatgccacgtgcttcttattggaaggggatgaccctctgttgtaaatatgtaattttgattcctcaagaatgaatcatcatacagaagaaaaagatatttgcacgtttctgaaagaaagaagctgtgctggtgatcttcaagtttcattgttgaaacatctctgatgctagcaaaacctccatccactttagtatagtaattaagtgacctcacaatggtttcacccacttctaggtaccaaggatctttagtagcttgataaagataaaatgttgactcagcaaactcaggacgcaagggatagtacttctctgtaggatgcaacattccatagtccaaaagatatctttcaggtagcacaccaaatctttgccatatattgtaaaactcacggtgtgatagatttgcagcagttacgtctccaagaagtgtctgaagacctggccagaaagcctgaaggctagttagctgccagtgcgttgcttctccagtcctcatatcagcctcatgataccatggaccatgtcggaagtacttctgcaccgcaagataagctgaatgaaacatatcccagtactcatcgcttccgaaaagaatatatgctttaatcagatactcataaaatgaatcaacaccagcaccaattccggatgaatactcaatccacttgccagtaaaaacatcaagtgtggtgcctactagattcagtgaacttctcatgctccataacttgcggagagcacgaagagctgcagcttcatatctagaatcaccagtcaaacgtgacaacacacccatttcaagtataagggagccacaccctgatgtgcttgtttcagttgtttcattttccatcaccccatacttaagattaatccatgaatacggcaatccagtaggtgtctcaaatgccggtagaaaacgattgcctaaactttcagcaagacgtagtaattgatcttgatacagcccatgcttaaactggctgctgtagtcttttgcaagaatatgagcagaaataagccccccaagaagtcttatgttacactcaaaaagattaatccgagcatcaacatcaaatgtcagattttctgaaagccagagaactcctctctcaaactctgtgaggttacctaagacaacaagacttgataatgactcaaccagtgtcaacgcggatccactataatcctgtggcaagtgttcaagatttaaattgcccggcctg

SEQ ID NO: 133610 - DNA, 597 bp, Zea mays
  Clone ID: MRT4577_53341C.1
cccctcttcgagtttttttttttttttttttttttttttttttgtttatcctttcacacatccacagccttccggaacggacataatcttagttatgaattttcgacttcggtgtaccctgtttgcgcatacccgttcagctgatataatcgacccactcgtttctgcaaacccccagttccagatttcccttggacattatgtgaaatagaaaacaatgcgagaagtgggcatgcctaaaacaaccacacgcaaactgtcccactgtataggccaaggactattaccaaactgggtatgggcccttacacaaagcgccaagtgatgttaaccaggaccacgctctttacatctggaccgaccttagcccctcccacatggatggggctgctagcggctataacattttctggagcgaacacatccaaaacacgtaatcgaccacagctgacctccaagcaatcagattacacggcactaggacagagtcattgctcctcatcatactatctgtgaggatccttgtgggtaaggatctcttgctctttgagacggtgctggaaccgggccaaacccgcttggaggctgaccaaccct

SEQ ID NO: 133611 - DNA, 1623 bp, Zea mays
  Clone ID: MRT4577_53342C.1
attgcaacatgtttggaacttgttatgagaaaaaaaaaaaaaaaaaaagcggccgctttttttttttttttttaggacaaaacagtcaccttatatggcatatatattatctcacaaactgtaagcaacaaacagtcctctccagcaacatatgcatcacatgcaacgagaacggtatggaactgagtttctggacaagtctatatggattcagcacctatttcgaatattcacatttctttataccaaaagcagacgatacgcaaaaaacgagcatatctgacagtaacatgcaacgggtagcgctacaacatagatctagcataaccctggcagtttagtaacttggacccatgctacaagaacgggacagtcgcttttccatctctcgtccagtcccaactgttgctcttgagccacctccaccgccgccttctgctgcagaaactgtgttgtattgcttcctgcaacctgggcagcgcccatcttccaccaagatcctgttgtggcagaagaggcacatgtgaaacccacaagggcagggacagaagctcgaatctgtcaggtcaagatcgtcacagcaaatggggcacgacagcggcaatgaaagaattccctgctgcgcagcactcattcccatatcctgccagcggttaccaatgcttgctgggaagctggtctgcttggagatgctgggtaagctctgtggtcgaaatatgtcatccggtgcccaagcccttgtcttgctttgaatcggttctggtttcgctgcatgagaaggttctgcagtggtcggagcttgtgggagtgtcggtgtgggacctgaactctggttacaagaactgtcatcgacataaagcgcatcagcagccatttcccaatcatcgaagacttcactctcatcctcagggccgcctgtatcctcctcagcatcactcacactccttgagctggaccatacactgcttccactgctgaggctgggaccaccgccattgccagagaaccccttcctctgagggcagtcaccactttggcgcttgtctgagcctggggagtcaaggccactgccatctgcctcaaggccagcagcaatagcctcatccctatcctccggatcactgccccttgatctggaatcagcacggcgacgaggaagtggagggtgcggggaagcgagtatgggcgacccagaaactgctcctgttggcgaagctgcagatttggcatccttattgccttgccccctagacagaaactgctcacggcgtgtctcgcgcttgctctgcttcagcttcgccgccgagcggctccccctcttcttcttggagtcgcgcgcggcggccgccgatgcgggcgatgcagcgtcgctgttgcccatttctccttgtagtgagtggcggcggcggacagatgcgcggctgccggtcgtcgtcgacgcgcgtgcgttgggaggagcgagggcgagggtgcggaggatgggggagcaggagcgagaaaaccctaaaaagcgatgcggcgagcggcgagagggaggcgaaccgatgggtggatagataacacggcacacgggggcggagttttagtggaaagaaaggaggaaatggagacgaaatctgaggt

SEQ ID NO: 133612 - DNA, 257 bp, Zea mays
  Clone ID: MRT4577_53343C.1
aatgcccgggtcgacccacgagtccgaaaaaaaaaaaaaaaaaaaaaaaaaaaaaaaaaaaaaaagaaaaggaaaaaaaaaaaaaaaaataaaaagattacatacacatcaataaaaagataaaaattcttcgagatggtcacaaaactttaaattcattgtcgtgagttattaaaactttgtgactggaaataccctgtcgttagccatcttaatctccttgcattacttacccctttcgctatccagcgtaatat

SEQ ID NO: 133613 - DNA, 251 bp, Zea mays
  Clone ID: MRT4577_53344C.1
ccggccggcaggcctatgtttgcactatcttcttattcttgtttcgattaccatgcatgttgcaacatgtatgcattgcatgcatggtcttgaatctatattatttgtttatctgtgattacggtagtgttgtgttcgaatgtacgtacgagcaaaaacttgcactgaacaaaaaaaaaaaaaaaaaaaaaaaaaaaaaaaaaaaaaaaaaaaaaaaaaaaaaaggaaaaaaaaaaaaaaaatttgcggcc

SEQ ID NO: 133614 - DNA, 347 bp, Zea mays
  Clone ID: MRT4577_53345C.1
gccggccgggacccgtcatccaaacagagggcggtccatcgaccacctagcttctcctctctctcgcatgtcgtcgtgctgggcaggtcctcacggcgctccttctactctgtaagctcagtcagtgagctcgttactcccgcaagaaggggaggccacggcagcctccccgcaaaaggccctgccgagaccggtacatggctccacttctccccgtaccatccgtgtgccgcaaggcgctgctcgcgccctccgagaggcggtacggagcatgcatgtatgaacgacgtggccctacacccgccgcgggagtgcaccctcgtccagaaatcctcgcacgcgagggc

SEQ ID NO: 133615 - DNA, 353 bp, Zea mays
  Clone ID: MRT4577_53346C.1
attcggctcgaggctgactgcgtagtttttttttgacagacagaactgctgcacaagggggggggtatttacaaccagcttgggggtcctcgtgcctattggtcaccgccgttgcgagcattgtttgcagggacttcaagccgggctacgagcatgaatagagcattactgctaggactgaatggaccatgatggtgcacggatcttacgcaaagggggttgccaatggcacatacatattctcgggacacactataacctgttgcttctcctcaatacgctgcagtctcagatcggaatgaagaactggcccgtacgagaacactgcactgctgctaacagcggatcaccct

SEQ ID NO: 133616 - DNA, 294 bp, Zea mays
  Clone ID: MRT4577_53347C.1
tcccggtcgcccacgcgtcctcccactcttccgcccactcgtccgctttctcgttcgctccactgacagccgcggaagatcaatactcaactatacaatcctacatggttcaagaggccatccaagcttgcatcttacgttcattaactaaaatcctacatcaaccatatactatattgcaacatccattcttaatgcatctgtataatcaacgaatttcataacaacaactactacatcaaattcataccaacaatcaatcaagtagtttcagcgaatctttgtgcttacttt

SEQ ID NO: 133617 - DNA, 133 bp, Zea mays
  Clone ID: MRT4577_53348C.1
tttacttttaggagggggcatgggctacggaggctagtgtaattatctgttcacatattacaccaactgctagcatggggacatgccgaacagagacgatgacgatggggaaatcttggcgcatgacaaccac

SEQ ID NO: 133618 - DNA, 182 bp, Zea mays
  Clone ID: MRT4577_53349C.1
aggcgagctcgagactctagcatggaactttgccttatacccagttcgattcgtgcagaatacactgcctgtcgcttgtagctcattaccatggcttcttctgatatccaggtgaaagaactggagaagcgtgcctcaggccaggcttttgagctgattctcagccctcggtcagaagaatc

SEQ ID NO: 133619 - DNA, 1371 bp, Zea mays
  Clone ID: MRT4577_5334C.1
aaaaaaaaaaaaaaaaaaaaaaaaaaaaaaaaaaaaaaaaaaaaaaaaaaaaaaaaaaaggcaaaaccagtaggcccgggaggcaactaagacaaagtggcgtactcttctctgtactagctttcttcttcctcctcctcttcctcctcccaaacagactggatttcatcaagataatcctgaaactggagccaacaagcagacagagaaagaagagcaagaagaccggctcccagccgatacaaggtaggagtgagcagcgttagatcagttttcatcacaggatcgatatggtgacagtgagagaggagactcgcaaggggccatggacagagcaggaggacctgcaactggtatgcactgtccgtctgttcggtgaacgtcgttgggatttcattgccaaagtatcaggtttgaggggtggggatccacaaattaggtagctaaattgaagtcacccgcgctaagtcgcaaaagcagctatcagcctctctgaccgactctattcttgcttcccctctccccttctgtatcttcatgcagggctcaaccggacaggcaagagctgccggctgcgctgggtcaactacctccaccctggcctcaagcgtgggcgcatgtctccccatgaagagcgactcatcctagagctgcacgctcggtggggaaacaggtggtccaggatagcacgccgcttgccagggcgcactgacaatgagatcaagaactactggaggacacacatgagaaagaaggcacaggagaggaagaggaacatgtctccatcgtcgtcctcgtcttcgctgacttaccagtcaggctacccagatactccatcaaccattggagttgagggacaggagcttcatggtggcagtggctgcatcacaagcatcctgaagggcacccctccggacatggatggctatcccatggaccagatatggatggaaattgaggcgccacagatgccctcggaggagagctttgttggggggaaccataatgtgtgcagcagccttgccaccccgctgccaccaccaactgtctgggaatactacccagatgcctgctggaaggttgacgatgagatcaagatggcaacacaatttcaatttggttatagtgaaggagttgggccctgcttctgatgccataaatattgggtcagattactaagttatacacctacctagcagaagtgaagtgcttttgtagaaacaagctttagcatggatctgaatatttatctccgcgcttagaattgcaggtctatggatctatgcatggttgctatgtatctatctagtgtgcaagacaagattatcttaatttgtccttgatgctatggaatacaagggcaaaggtact

SEQ ID NO: 133620 - DNA, 705 bp, Zea mays
  unsure (1)..(705): unsure at all n locations
  Clone ID: MRT4577_53350C.1
cctcgaggccggccgggaacctgggtggggtgtggctctactgttttctcttaccataatcatcaatggcttccttatccctctcctctcccccatctctctcttccgcacaccacaacgcctccacgcgccttattctacgcacccctaactcccttaaactgcgcactccaccccactccctccccgccatccgcgccatcaccctcacccaggacgacctcaagagactcgccgccgacaaggccgtggagtccgtcaagagcggcatggtcctcggcctgggcaccggctccactgctgccttcgtcgtcgccaagcttggcgcccttctcgcctccggccaactctccgacatcgtcggtgtccccacctccaaacgcacggaggagcaggcccgctccctcggcatccccctctccgtcctcgacgacaacccccgcctcgatctcgccatcgacggcgccgacgaggtcgaccccgacctcaacctcgtcaaaggccgcggcggcgccctcctccgcgagaagatggtcgaggccgcctccgacaagttcgtcgtggtcgtcgacgacaccaagctcgtggacggcctcggcggaagcgggctggncatggcggtggagggggtccagttctgctggaagtacaatctggatcggcttcaggagcttttcagggaagaagtgtggaagcaaaattgag

SEQ ID NO: 133621 - DNA, 192 bp, Zea mays
  Clone ID: MRT4577_53351C.1
tgtctctctggactgatcttgctactacgactggccacgagcttttggacatggttgccagttcgcctgttgttgcgctaacgagcctacacgtatctgacttccacggcgtgtactcttcaactattggcagcagtactctcgagattaatcctgcactgcctgaggctaagaatctgcagtcctggtatg

SEQ ID NO: 133622 - DNA, 256 bp, Zea mays
  unsure (1)..(256): unsure at all n locations
  Clone ID: MRT4577_53352C.1
cgnccgannctccttctatggannctttcccgagcgtgatgtatggacccaagtgactacatacccagatgcagcccatggaccaacgaaaatgcgcaagagctcgaggggcctctgccattcgaagaggcgctacctgcgcgcggatggcacccacacacactttggctgggtccactactacggaactgaactagaaagccgtatgacgacccgcacgctcgagggaggctcctaataaccaacgaccggcaag

SEQ ID NO: 133623 - DNA, 356 bp, Zea mays
  Clone ID: MRT4577_53353C.1
gacgattgtgtccctcggaggcgggcgggggaacatactctcatgacacacaccgctcgccagttgggagcctctctcctcttcctctccccgcaccgcgcctaggaagacagagagacatcgtgcgtcctcttctctgcgacgctgcgcgcagatccatgacgacccgagtcccctcatccctcctgcggccagcgcccccgcggacgagaaaccccaagcggttcccgagccggaggccgccaattactatgctcgacggggtcccccctcgtgaggccggtccccatgtactcccacaccctttgctggactccgcgtgagacatagaactcccccatcgtctcctgctcggg

SEQ ID NO: 133624 - DNA, 622 bp, Zea mays
  Clone ID: MRT4577_53354C.1
cttatctcttatcgtccgcgtttctaatttctgctctctctgctcctccatgtctgcctactcctgatccataccagacaggaatcggcatggcggactcggaggagcaccacttctaatcgaaggccgacgttggggagtacaagatctacccgcatgaaggtggccccgaccgtaagaacggattcctcggcatcaagaaccgtccctgcaaggctgtggaggcttctacctccaagactgacaagcatgcacacgccaaatgccacttatgtcgtcatatacatatacactgggaaaaagctagaaaatattgttgcttcatctcacaactgtcgacattctcgcatgtgaaccgtacatgaccatcagctagagtgatatttctgaggatggatttgtgagtcttcttacttcagatggcaactctatggatgatcttacacccccaactgatgatactcttgtggcccatattattgacacgtgtgaaagagcgaaagatcttcttgtgactgtccagtctgcgatgtgacacggacacatctgcgcgctgaaggatgttcggccctagaaacttccgtgactttgcagacctagcctactctatctcaacttaaat

SEQ ID NO: 133625 - DNA, 145 bp, Zea mays
  Clone ID: MRT4577_53355C.1
cctacgcgtgcgagctttttcttctcttttactcataaccccctgcgggggctcattaacctgtggagggtcgaaaccaacaagaagcacttcatgcacatcaacatcaccattctatgcctttaaacaattcattcctaccggc

SEQ ID NO: 133626 - DNA, 1462 bp, Zea mays
  Clone ID: MRT4577_53356C.1
gtaccctcgggctggccgggtttattcttgttaccatgtattaatgaaacaatttgtagctgaaggaaggtgacacttccagccaaaaaacaaaaaaaaaaaaaaaaaaaaaaaccaagaacaaaccattgttggacgcgttcccctcctgcacgcaacctcatctcgtcctccagatcctggatggccgtcctccttgataccttgcctcgccgagtgctctcggtgagctactttgttttgatttatcaggaaatccgtttgcttcatgttatgcaggctcagatctgattgctggattcggcatcttacgggcttgaatagagctaggactgggagaaaacaacaaacccgcgttggatcctgtatcggttagtccttgccttcaaggttcatgttgttttgttttggtggtcgagcatcgcatgttctgcttctggttccagatctggagaaatttctaagtcgtcgtcgtcgtcgtcgttcggttcggagcggatctgaggcgacgatggctggaggcggcgggatctcttggtctgcagtcctgcttcacctcgatggatgatgtctctgcgctgataattattggatcaatttcgataattattagtagatctatgagatatgccgcctggaagaggcgaggtaagctgcagcatgtaaaagtctgcgtgcgtcgacagcaaaaaagagaaaaaaagatgtgacatcctagaggaggcctttgccatgatgggtgcgctcgcatggcaggccaggtattaataaaaagatgattattgtgtgccgggggaggagatcgcacgggggttgatgtttttggccccggggtctcctccctcatcttgttccgtgttcctgtatccgttgtttccgcgcctgttggtccgctgcgcacgccggatttttgcatcgagcacggagatctacaacaaaaacatggagctacgacgcgactcccaagcatgtttgaaccatagcaattggtggacgtgtgtagagaagattgcaaaactgcagtatgatggattccactattcatcaaccgagatcatggcgcgcttcaatcgtggctacgctgatggggaattgatccgttatggctcgtggctgtggagatgtggaactcattggttatagtgtgcttcaatcatgggtcatggcgatgctgatggaactgatttgttaccaaggtttaagttttcgctaccgttggacggcctgactggtactttgccctgttgactgtttgagaacgtactgcccaggtttacttaatacttgctgttttttgacggtactgtacatattgttcgacaatttatttcttggcagttcaattcgtccatttagaatttctaggggcacgagagcatgtgttaccctggagatcaatttcatgctgctttttgtaattgatcttgctgctttttgttacgaagttccctattatattttc

SEQ ID NO: 133627 - DNA, 1761 bp, Zea mays
  Clone ID: MRT4577_53357C.1
gccggccggttcggggataccaagaacaaccattgttggacgcgttcccctcctgcacgcaacctcatctcgtcctccagatccaggatggccgtcctccttgagaccttgcctccccgagtgctctcggtgagctactttgtttcgatttatcaggaaatccgtttgcttcatgttgtgcaggctcatatctgattgctggattcggcaaacccgcgttggatcctgtatcggttagtccttgcctgcaaggttcttgttgttttgttttggtggtcgagcatcgcatgttctgcttctggatccagatctggagaaatcgcgaagtcgtcgtcgttcggttcggagcggatctgaggcgacgatagatggaggcggcgggatctctcggtctgcagtcctgctccacctcgatggatgatgtctctgcgctgataattattggatcaatttcgataattattagtagatctatgagatatgccgcctggaagaggcgaggtaagctgcagcatgtaaaaaagagaaaaaagatgtgacatcctagaggaggaggcctttgccatgatgggtgcgctcgcatggcaggccaggcaataataaaaagatgattattgcgtgccgggggaggagatcgcacgggggttgatgtttttggccccgggttctcctccctcatcttgttccgtgttcctgtatgcgttgcttccgctcctgttggtccgctacgcacgccggatttttgcatcgagcacggagatctacaacaaaaacatggagctacgacgcgattcccaagtatgatggattccactattcatcaaccgaaattatggcgcgcttcaatcgtggctacgctgatggggaactgatccgttatggtgtgcttggatcgtggctgtgtggagatgtgtggaactcattggttataatggtgatgctgatggaactgattttgctcccgttggacggcctgattggttactttgccctgttgactgtttgagaacgtaccgcccaggtttacttatacttactgctttttgacggtactgtacatacagttcgacaatttatttattggcagttcaattcatccatttagctaggggcacgagagcatgagttcccctggagatcaatttcatgttgctttttttttgcgaagttccattttctattttcaatttgattagggctagtttgggaacttattcttccaaggtttcctaaggaaaattagttcatttttttttttgggaaaatgaagtttccaaaagggtttcaaatccatggtggtgtgggaattgattgcagtaaaggcgatgggtaagctgataccggtgggttgagaattagaccatcagtagcttactctttcccatatttaaactataatctacactacaaaatagtgcaaaaggtgttcatagtgacctatgaataatataatctacactacaaaaatagtccaaaaggtgtttgtagtgaccatatatgggtgtacattgtacctttttacattgtatttgtagtgatcatatatgggtgaactactgtacttttttatattgtagatcgtattatttatagtgtgcagtttgaatataggtaagctgatggtcttattgcctgtcaagttcatatataaaaggtttggggttaattttttttgggtcatagaaattcataagcatgtgagtttttcccctatatacctccgaatattaactagaatatattttaaattgggtttgttcc

SEQ ID NO: 133628 - DNA, 1072 bp, Zea mays
  Clone ID: MRT4577_53358C.1
ctgctcgcgccgccccatgctcctccagccaggcacggcgcctttttctcctcctgccaggtgaggtcgcgcgccccttctcctccagccaggcacggtcgcgcggctcttctcctccagccaggcgcgctccaaatggcggtcgacgatgcagcagctgcccaggccgcggaggaccagcgcctcgcatttgaggccgaagcccgccgtgctgaagacgtccgccgcgccgaagaaacccgcctctgttctgcccctttggatgagtttgagcgcgcccatgaggccctctgggcgcaagccactaccgtcgtcaacgtcaaggtgctcatccctgtcatcctcgaccaggcaacgaacacctacaccaagtggcgcggcatgttcatcaccgtcctcggcaaatacgccctgactcgtcacgtccttgaggatgaagccttcccatcacgcccggcatgggttcaagtcgattgctgtgtcttgacatggatctacaacaccatctccagtgacctgcaataatctctaatgatgcggcagggccttgctcgcggggcgtggtgctacctcgaggatgagttccttggccaaagggaatcccgggcgcttctacttgagacaaaaaatccgcaacttccgccaagagtccttgagcatcaccgactactgccaccagcttgagtcgatggcggcttcccttgccgagttcggcgatcccatcggtggtaggcatatggtgctcacgctccttcgcggcctcgacggcaagttccaccacatggtgtccatcctcaagatgcaccggtcgttccccacgtttgcagaggctcgtgagcacctgctgttggaggagctggaaatcgacgcacgacctccgtcaccgccatccgcacttgttgctgcagcgccgctgaaagggaattaggctcacacctagttcctaaataattttggtggttgaattgcccaacataaataattggactaactagtttgctctagtgtacaagttatacaggtgtaacagattcacacttagccaataaaaagattaaatattggattcaac

SEQ ID NO: 133629 - DNA, 2027 bp, Zea mays
  Clone ID: MRT4577_53359C.1
ctcacgggcaatgatctcccgacacgtgatctctatgtgagccgctcgaatcgaaccgcctgatctgcgccgatcgctttggccaacgggagtgggtaccataaataaatacctttgtttccgccaattattcgataaccaagaacaaaccattgttggacgcgttcccctcctgcacgcaacctcatctcgtcctccagatccaggatggccgtcctccttgagaccttgcctccccgagtgctctcggtgagctactttgtttcgatttatcaggaaatccgtttgcttcatgttgtgcaggctcatatctgattgctggattcggcaaacccgcgttggatcctgtatcggttagtccttgcctgcaaggttcttgttgttttgttttggtggtcgagcatcgcatgttctgcttctggatccagatctggagaaatcgcgaagtcgtcgtcgttcggttcggagcggatctgaggcgacgatagatggaggcggcgggatctctcggtctgcagtcctgctccacctcgatggatgatgtctctgcgctgataattattggatcaatttcgataattattagtagatctatgagatatgccgcctggaagaggcgaggtaagctgcagcatgtaaaaaagagaaaaaagatgtgacatcctagaggaggaggcctttgccatgatgggtgcgctcgcatggcaggccaggcaataataaaaagatgattattgcgtgccgggggaggagatcgcacgggggttgatgtttttggccccgggttctcctccctcatcttgttccgtgttcctgtatgcgttgcttccgctcctgttggtccgctacgcacgccggatttttgcatcgagcacggagatctacaacaaaaacatggagctacgacgcgattcccaaggtacaatcgtaattatgttcaaacaatttttaagtcgtcctgcgctccttctattacgagcaacgttttatattctgtgcttgcataataaatcgaagaaatcctgacaccaatcgaactgaagatcctgaaacgcacgttaataccgttgacgtccgcttcacccagctcgattttcagtcttgtaataataattgagaactccaatgaactgagagttactaatcgctccatgagtctgaagcgtgcaaaaatttaggtcgcagctacacaaatttacacgctgttctatattctatattctatattatatttaggtcgcagctacccgtgaatctcctattttgaaaaggtcactgcttttttatttcattctatattctatattatatttttgtaatattcagtctcgtttaattgctttcagacttaatgttagataattgtttacattttctacaattcagtctggactaattgctttgggactaatgttggagatatccatatgtatctgcgtctaagcatttttcatttgtatttatcatgttttgtcaatagggatacttgtttcttgtaagtctgttagcatgtttgaaccatagcaattggcggacgtgtgtaaaactgcagtatgatggattccactattcatcaaccgaaattatggcgcgcttcaatcgtggctacgctgatggggaactgatccgttatggtgtgcttggatcgtggctgtgtggagatgtgtggaactcattggttataatggtgatgctgatggaactgattttgctcccgttggacggcctgattggttactttgccctgttgactgtttgagaacgtaccgcccaggtttacttatacttactgctttttgacggtactgtacatacagttcgacaatttatttattggcagttcaattcatccatttagctaggggcacgagagcatgagttcccctggagatcaatttcatgttgctttttttttgcgaagttccattttctattttcaatttgattaaggctagtttgggaacttattcttccaggtttcctaaggaaaatagttcatttttttttgggaaaatgaagttccaaaa

SEQ ID NO: 133630 - DNA, 186 bp, Zea mays
  Clone ID: MRT4577_5335C.1
aggagctcgtcgaggcgttggtcagggaggcgtacatgcgcgacccgtacgacgtcacgaagaacttcaacgccgctgtccatagatctgtcatcatcaatccgcgtgagaggtcggagaggccggggaatcactttggaggggggccaatgcttggctacgagccctagcaacatgtgttggcga

SEQ ID NO: 133631 - DNA, 500 bp, Zea mays
  Clone ID: MRT4577_53360C.1
cattgttggacgcgttcccctcctgcacgcaacctcatctcgtcctccacatccaggatggccgtcgtccttgagaccttgcctcgccgagtgctctcggtgagctactttgtttcgatttatcaggaaatccgtttgcttcatgttgtgcaggctcatatctgattgctggattcggcaacttacgggcttgaatagagctgggactgggagaaaacaacgaacccgcgttcgatcctgtatcagttagtccttgcctgcaaggttcttgttgttttgttttggtggtcgagcatcgcatgttctgcctctggttccagatctggcgaaatcgcgaagtcgtcttcgtcgtcgttcggttcggagcggatctgaggcgacgatggctggatgcggcgggatctcttggtctgcagtcctgctccacctcaatggatgatgtctttgcgctgataattattggatcaatttcgataatattagtagatctatgagatatg

SEQ ID NO: 133632 - DNA, 747 bp, Zea mays
  unsure (1)..(747): unsure at all n locations
  Clone ID: MRT4577_53361C.1
tccggggataccaagaacaaccattgttggacgcgttcccctcctacacgcaacctcatctcgtcctccagatccaggatggccgtcctccttgagaccttgcctccccgagtgctctcggtgagctactttgtttcgatttatcaggaaatccgtttgcttcatgttgtgcaggctcatatctgattgctggattcggcaaacccgcgttggatcctgtatcggttagtccttgcctgcaaggttcttgttgttttgttttggtggtcgagcatcgcatgttctgcttctggttccagatctggagaaatcgcgaagtcgtcgtcgttcggttcggagcggatctgaggcgacgatggctggaggcggcgggatctcttggtctgcaggcctgctccacctcaatggatgatgtctctgcgctgataattattggatcaatttcgataattattagtagatctatgagatatgccgcctggaagaggcgaggtaagctgcagcatgtaaaaaagacaaaaaaaagatgtgacatcctagaggaggaggcctttgccatgatgggtgcgctcgcatggcaggccaggcaataataaaaagatgattattgcgtgccgggggaggagatcgcacggnggggttgatgtttttggccccggggttctcctccctcatcttgttccgtgttcctgtatccgttgcttcccggctcctgttggtccgcttacgcacgccgggattttttgc

SEQ ID NO: 133633 - DNA, 700 bp, Zea mays
  Clone ID: MRT4577_53362C.1
ctgcaggcttcgggccggaactcccgggcagcttaattattggacgacgacaggagagatcgatcgagcatttgcaattaatggcggccatgggcatgaagaagggtgtgctgatgctggctctcgggctcgcgatggccgttacctcgtcggccgtcgtctacaaggtcggcgacgcctctgggtggacgatcctcggcaacgtcaactacaccgactggacttccaagcagaacttccgtgtcggagacaccatagagttcacgtaccccccgggcatccacaacgtgctggaggtgaacaaggccgactaccacagctgcaccaactccacgccgatcgccacgcacacctccggcgacgacaagatcgtcatcaagagccccggccaccgcttcttcatctgcggcgtgcccggccactgcgccgcgggacagaagctcagcatccgcgtcctcaagacgcgctcctctgacgccccttcccctgcgcccgccgcgcgctcagcctcggcggcgtcgcccagccccagcggcagcaccagcaccgatccgagcggcgccggcgcctcggcgtcgccgcctgcgtcgtccacggacagcacgcccgacgcgacgaccaccaccgcgcccgcgcccgacgccaatggcgcgggggtcagtgcaggccaccgggccgtcgtcgctgccatggcactggc

SEQ ID NO: 133634 - DNA, 1148 bp, Zea mays
  Clone ID: MRT4577_53363C.1
cattgtatctccctggttcgggcgggagcagcaaattcgtctgtatagatcggcaagctaagcgcggctacacataaatatattccggccttccctctcttgtgctcttggcatctcgttgctttcgtgcacaaggtcgtcagagaccaggtgtggcagcttgggcacgagaggtcgatcagcagcaggccggtgcagcaatggcggccattatgggcgtgaagaagggtctgctggtgctggctcttgggctcgccatggccgctacctcgtcggccgtcatctacaaggtcggcgacacctccgggtggaccatccttggcaacgtcaactacaccgactggacttccaagaagaacttccgtgtcggagacaccatagagttcacgtacccgccgggcatccacaacgtgctggaggtgaagaaggccgactacgacagctgcaccaactcgacgccgatcgccacgcacagctcgggcgacgacaagatcgtcatcaagagccccggccaccgcttcttcatctgcggcgtgcccggccactgcgccgcgggccagaagctcaacgtccgcgtcctcaagacgcgctcctctgacgccccttccccggcgccctccgcgcgctcagcagcaggctcggcggcggcgacccccagccccaccaccgagacgaccggcgcgtcgtcggcctcgggcggcagcagcacgcccgacgccacgaccgcgcctgcgcccaatgccaacggcgcgggggtcggtgcggcaggccaccagaacgtcgtcgtcgtcgtcgtcgctatggcggtggcggcgctcgcctccatgacgatgctacactagctcaccactccctatcctacatattatatatagtggtctcgtgtgcatttgtctatatgcgatttttttggccatgatgcctgtggaggttttcgtttcttgtctctgttgttagctgctgatgtggtgtggtcgtgtggattatacatattgttgagacgttgtgttttcctctgctttcttgtctccaacgttcttagtattttcctgtttgacttgcaacatccacggacatccattcatatttggcttgaatccaacaacgacttgtgtttaaaaaaaaaaaaaaaaaaactccagaaaagg

SEQ ID NO: 133635 - DNA, 1170 bp, Zea mays
  Clone ID: MRT4577_53364C.1
cgggataaccaagaacaaaccattgttggacgcgttcccctcctgcacgcaacctcatctcgtcctccagatccaggatggtcgtcctccttgagaccttgcctcggcgagtgctctcggtgagctactttgtttcgatttatcaggaaatccgtttgcttcatgttgtgcaggctcatatctgattgctggattcggcaaacccgcgttggatcctgtatcggttagtccttgcctgcaaggttcttgttgttttgttttggtggtcgagcatcgcatgttctgcttctggttccagatctggagaaatcgcgaagtcgtcgtcgttcggttcgaagcggatctgaggcgacgatggctggaggcggcgggatctcttggtctgcaggcctactccacctcaatggatgatgtctctgcgctgataattattggatcaatttcgataattattagtagatctatgagatatgccgcctggaagaggcgaggtaagctgcagcatgtaaaaaagagaaaaaaagatgtgacatcctagaggaggaggcctttgccatgatgggtgcgctcgcatggcaggccaggcaataataaaaagatgattattgcgtgccgggggaggagatcgcacgggggttgatgtttttggccccgggttctcctccctcatcttgttccgtgttcctgtatgcgttgcttccgctcctgttggtccgctacgcacgccggatttttgcatcgagcacggagatctacaacaaaaacatggagctacgacgcgattcccaagggatacttgtttcttgtaagtctgttagcatgtttgaaccatagcaattggcggacgtgtgtaaaactgcagtatgatggattcccctattcatcaaccgaaattatggcgcgcttcaatcgtggctacgctgatggggaactgatccgttatggtgtgcttggatcgtggctgtgtggagatgtgtggaactcattggttataatggtgatgctgatggaactgattttgctcccgttggcccccccccttggttactttgccctgttgactgtttgagaacgccccgcccaggtttacttatacttactgctttttgacggtactgtacatacagttcgacaatttatttattggcagttcaattcatccatttagct

SEQ ID NO: 133636 - DNA, 1959 bp, Zea mays
  Clone ID: MRT4577_53365C.1
tgttgttcgcgttcccctcctgcacgcaacctcatctcgtcctccagatccaggatggtcgtcctccttgagaccttgcctcgccgagtgctctcggtgagctactttgtttcgatttatcaggaaatccgtttgcttcatgttgtgcaggctcatatctgattgctggattcggcaaacccgcgttggatcctgtatcggttagtccttgcctgcaaggttcttgttgttttgttttggtggtcgagcatcgcatgttctgcttctggttccagagctggcgaaatcgcgaagtcgttgtcgttcggttcggagcggatctgaggcgacgatggctggaggcggcgggatctcttggtctgcagtcctgcttcacctcgatggatgatgtctctgcgctgataattattggatcaatttcgataattattagtagatctatgagatatgccgcctggaagaggcgaggtaagctgcagcatgtaaaagtttgcgtgcgtcgacagcaaaaaagagaaaaaaagatgtgacatcctagaggaggcctttgccatgatgggtgcgctcgcatggcaggccaggtattaataaaaagatgattattgtgtgccgggggaggagatcgcacgggggttgatgtttttggccccgggttctcctctctcatcttgttccgtgttcctgtatccgttgcttccgcgcctgttggtccgctgcgcacgccggatttttgcatcgagcacggagatctacaacaaaaacatggagctacgacgcgattcccaaggtacaatcggtaattatgttcaaacaatttttaagtcgttctgcgctccttctattacgagcaacgttttatattctgtgcttgcataatgaatcgaagaaatcctgacaccaatcgaactgaagatcctgaaacgcacgttaataccgttgacgtccgcttcacccagctcgatttttagtcttgtaatactaatcgctccatgagtcctgtagtgtgcaaaaatttatgtcgctgcttcccaaattaacatgctggttcggctctacccgtgaatctcctattttgaaaaggtcactgcaaaaaaaaaatttcattctatattctatattatatttttgtaatattcagtctcgtttaattgctttcagacttaatgttagataattgtttacattttctacaattcagtctggactaattgttagataattgtttacattttctacaattcagtctggactaattgctttgggactaatgttggagatatccatatgtatctacgtttaagcatttttcatttgtatttatcatgttttgtcaatagggatacttgtttcttgtaagtctgttagcatgtttgaaccatagcaattggcggacgtgtgtagagaaggttgccaaactgcagtatgatggattccactattcatcaaccgaaattatggcgcgcttcaatcgtggctacgctgatggggaactgatccgttatggtgtgcttgaatcgtggctgtggagatgtgtggaactcattggttatagtgtgctttattaataatggtgatgctgatggaactgattttgctaccgttggacggcctgattggttactttgccctgttgactgtttgagaacgtaccgcccaggtttacttatacttactgccctgttgactgtttgagaacgtaccgcccaggtttacttatacttactgctttttgacggtactgtacatacagttcgacaatttatttattggcagttcaattcatccatttagctaggggcacgagagcatgagttcccctggagatcaatttcatgttgctttttttttgcgaagttccattttctattttcaatttgattagggctagtttgggaacttattcttccaaggtttcctaaggaaaattagttcatttttttttttttgggaaaatgaagt

SEQ ID NO: 133637 - DNA, 2543 bp, Zea mays
  Clone ID: MRT4577_53366C.1
ccggccaggaaataaccaagaacaaaccattgttggacgcgttcccctcctgcacgcaacctcatctcgtcctccagatcctggatggccgtcctccttgataccttgcctcgccgagtgctctcggtgagctactttgcacgaggcgccgtcaacgagtcgggttgtttgattccaactctaattcaatgacctttttgatttatcaggaaatccgtttgcttcatgttatgcaggctcagatctgattgctggattcggcatcttacgggcttgaatagagctaggactgggagaaaacaacaaacccgcgttggatcctgtatcggttagtccttgccttcaaggttcatgttgttttgttttggtggtcgagcatcgcatgttctgcttctggttccagatctggagaaatttctaagtcgtcgtcgtcgtcgtcgttcggttcggagcggatctgaggcgacgatggctggaggcggcgggatctcttggtctgcagtcctgcttcacctcgatggatgatgtctctgcgctgataattattggatcaatttcgataattattagtagatctatgagatatgccgcctggaagaggcgaggtaagctgcagcatgtaaaagtctgcgtgcgtcgacagcaaaaaagagaaaaaaagatgtgacatcctagaggaggcctttgccatgatgggtgcgctcgcatggcaggccaggtattaataaaaagatgattattgtgtgccggggggaggagatcgcacgggggttgatgtttttggccccggggtctcctccctcatcttgttccgtgttcctgtatccgttgtttccgcgcctgttggtccgctgcgcacgccggatttttgcatcgagcacggagatctacaacaaaaacatggagctacgacgcgactcccaaggtacaatcggtaattatgttcaaacaatttttaagtcgttctgcgctccttctattacgagcaacgttttatattctgtgcttgcataatgaatcgaagaaatcctgacaccaatcgaactgaagatcctgaaacgcacgttaataccgttgacgtccgcttcacccagctcgattttcagtcttgtaatactaatcgctccatgagtctgaagtgtgcaaaaatttaggtcgcagctacacaaatttacatgctggttctgttcaacccgtgaatctcctattttggaaaggtcacagcgtttttatttcattctatattatatttcagtctggactaatgttgagatctccatatgtatctacgtctaagcatttttcatttgtatttaccatgttggtcaattgggatatttgtttcttgtatgttagcatgtttgaaccatagcaattggtggacgtgtgtagagaagattgcaaaactgcagtatgatggattccactattcatcaaccgagatcatggcgcgcttcaatcgtggctacgctgatggggaattgatccgttatggctcgtggctgtggagatgtggaactcattggttatagtgtgcttcaatcatgggtcatggcgatgctgatggaactgatttgttaccaaggtttaagttttcgctaccgttggacggcctgactggtactttgccctgttgactgtttgagaacgtactgcccaggtttacttaatacttgctgctttttgacggtactgtacatattgttcgacaatttatttcttggcagttcaattcgtccatttagaatttctaggggcacgagagcatgtgttaccctggagatcaatttcatgctgctttttgtaattgatcatgctgctttttgttacaaagttccctattctattttcaatttgattgagggttgcaaaattcatggcgttgtgagggaattgattccagtgaaggcgatggcgactggtaatttgatatcggtgggttgggaattagactatctccaccagattgtctatattcaaattacgctctacaaacaatataatttacactatgggtctactatattgtagattgtactgtttataaattgtagttttaatatctaattgtagattgcattgtttataaattgtttatagattgtttataaattgtaggtgttttaattatatatggtcattcatataatagagttttgggattaagggcccctttggtagggctctggcttctccaaaaacggcttttaactctggctcacgaggtgaaaccacttctttagatgagacaaagctattttaaaaaatcatttggcaaaacggcttataggttgtttttcagaaagatccttatatatgtatatctctcctgtacgtggctagggattgagggcaggaccaaaaaataataatctggactggtgggaggactatagtgcaaaaataacgtgagccgaagccgggtgagccactttttttagttcattttggaaaagtacttcactggtgaagccatctgaaaaagaggtgtttgacataacttttgcatgagccagagccgaagctgaaaaacattttttatc

SEQ ID NO: 133638 - DNA, 103 bp, Zea mays
  Clone ID: MRT4577_53367C.1
cgcgtacgaagctcggaattcagctcgaggaggaaaatttacctcttctggggccaagctgctcggctcctggggcgtggaccttcccatcaggccgttgcac

SEQ ID NO: 133639 - DNA, 264 bp, Zea mays
  Clone ID: MRT4577_53368C.1
gccacgcgtcgaacgtacaggcttctcgcgcgtcgagcctactcgcgccacggtctcaactcttcacgtcagctgatgccggtgacgaccgcacgaccggcgtcgacaagtgttcgccgatgcggaactgcagcccggatgagacgggctcatcgtgtacgggagggcaccctggacgacctcaccgtggagacgtgcatgcgccacgccgccaccggggacgacggcgccgccggccaacgtcatccgcagggatcagctgca

SEQ ID NO: 133640 - DNA, 283 bp, Zea mays
  Clone ID: MRT4577_53369C.1
cgcaattccgctcgagctagtattcctctgttttttccatactttgcgactgcactgtcctggggcatttacagatcttgtggtgggctcctacccccagacaagcacttgcagattaaagcagcctgccagaaaccgttgcctcggacactgacggacacaatcagaccgcgccgcgcttggcgggcaggagagggcgctttatgcggcttcagaccacatacagatcactcccgccaagactgataataaaacacaccgatgcaccaagacagtatcaggt

SEQ ID NO: 133641 - DNA, 655 bp, Zea mays
  unsure (1)..(655): unsure at all n locations
  Clone ID: MRT4577_5336C.1
tcgaggccggncgggacgcccttcgagacgagcccactcctctccccgtattttcgggtccctgtcatgacgtcctcgacgcctctgatccatggcatctccatctccgtctccgacgacaacgaggacaccggcaaggtgcgcgtccgcgcatcgccgcaagcgctcccgcgggcccgtatccgcttcggcgcgccgcacgccgcatcctctccgcgcgcgcgcggctgggcgagacgctcctcctcgacgccctcgccgtgaggctcctcctctacgagtcctaccgcctcacgacgtcccgctcctccacatgtctccgacgtgcttctcgaacatcatgcgcctctcgcgcaaggtccgcgacgtcgatggagacaggaatgcatgactgaagttacttgatactgataagattgaaaaattgaaacttccagaaattcctgaaacaagtgtgtcgatgaaggaagtcccgtacagaatcaagactgtcccatatcggcaactgagacaccacctgatatcgataatgcccgggacaacttgatcgcaggagatcagacactcactgaacgataacaaagcgtcaagatgaagatcagtgagaccgagcactgtggcttctataacgacaatggaggcttcagagagactg

SEQ ID NO: 133642 - DNA, 409 bp, Zea mays
  Clone ID: MRT4577_53370C.1
aacttgttcccttttgtttttttttttttttaaaattaaacggggccccactgtgtttttttctttaaaacactcactgggaacctgtgtctgactttctgtgaaccaccgggggggtaaccattgccaaaagacctgtggaccaccaagcggttaaccgggattcaaaaacctgtggaaccagatgccctccctggggatcccaatttcaaaacaaacaacaaaccttgcctgaaacctaaaaataacacaatccccgaaaaaacccccgagttctaaaaaaacactttgcatgaagacactatttatggggacaccatatacacgggtggaccacttaaataaaggtcgcccttgacaacctttttctccgggcccaaaaaatcctcctctgggacccttttcccac

SEQ ID NO: 133643 - DNA, 1515 bp, Zea mays
  Clone ID: MRT4577_53371C.1
attacgtcagtattggttcaactgcttctactagcagatcagttcgccatcactgttcttcagttcgaatgctgcaaacgaataatggaatatctttcagaggacactgtatgttcagtcttacaggcagtttgatcaatcccatcttgtaaactgcttgaagaagtatgcaagaggaattttgctacgcattttgattattgcacaactgcttgcacggactttgtgtcattagatgaggcaacatttaaggatattcttgagcatggtgatatgacagtaacgtcggaagagagggttctggatgtcattttaacatggtgcatgggagcttgtgaaacttttcactggacttcagtagatgagctgttgagaacttcaacaccagagcagctctttggggagaggctttccgccatcaatactttgctaccattagtgaggttccctttgatgcacctgtctatactaaagaggatggagagaagtaatctagcaaaccacatacaagcattcagacagttggttgcagaggccattgaattctctcatgctggacaattgatgcctacagcatgcgaatgtgagagatttcagcatagacggtcaagctataaagagctgcagtatatctctgatggtgatagcaatggtgttatctactatgctggaacatcatttggaaaacatcagtggatgaatcctgtgttaaccaagaatatcactgtggtggcaagcagtccaaattcaaggcacacagatccaaaggctttggtttcaaagaattaccaggggacatgttttgctgggccttgtgttgaaaatggcaagagggtttcttggtggatggtagacatcggacaggagcaccagttgatgtgcaactactacacggtgaggcaggatggctccacagcattcatgaggtcttgggctttccagggatccatggacggccggaactggacaagcctccgtgtccacgacagcgaccctaccgtctgctatccaggccagttcgcctcttggcccatcgttggcccggcggcccttctgcccttccgattcttcagggtcgccctgacaggccctgccgtcggctgtacgtggaacctctgcatttgcttcctcgagctctacggctacttccattagatcttcttcttcctcttcttcttaataaaaaatatagatgccggagtttttgtgcaaacacaagtaatattacctgcgatgccacaattgctggtcattgcacatcatgaaacaagtattcacagttgaaaaaaaaaaaaaaagggcggataggcctaagtgagctctggcctatcttatactcacgaaaagatcatgtccacattatctcccgtttatttgcatactacactcgtacggtacctttgcttaccccatcttatactcgcgaaagcatctagaccatcaaaagttttggtaattaatgatgaaataagatcattgtaactaacatttgttccgtagagacaaatttaagtt

SEQ ID NO: 133644 - DNA, 316 bp, Zea mays
  Clone ID: MRT4577_53372C.1
gtgcaaacacaagtaatattacctgcgatgccacaattgctggtcattgcacatcatgaaacaagtattcacagttgaaaaagaaagttgttagaacgataggcctaagactccgatggcctatcttatactcacgaaaagatcatgtcaacattatctcccgtttatttgcatactacactcgtacggtacctttgcttaagctatcttatactcgcgaaagcatctagaccatcaaaagttttggtaattaatgatgaaataagatcattgtaactaacatttgttccgtagagacaaatttaagttaaccccc

SEQ ID NO: 133645 - DNA, 692 bp, Zea mays
  Clone ID: MRT4577_53373C.1
ggccgcgggttttttttttttttttttaataaaagtttacctactccttatttaacgctaattctaacgtaatcctagatttaaagagaagatacgaaaaaactcctcggcgcgtcgagtttgttcatatattctttcagtcaatgctggttactagttacctagttgctgctgaacgtgagacaacagcatcgcaaccatcttcccatcaatatgccttagactcctgctattaatcgtacatccaatgcttgtctgtcaacccgtcaatgcgccctgacgtccgctcgaccttgttgcccgtttcgtgtcgattcatggggtttacagagtataaagagaatgtactcggcttccatgttctggctgatccaaagaacgacggaactcacgcccaccagagcgttgctgagtacgttctcaatacccatacccagcgcaggcattgcgacacttgggacaacaaacttgagaacaaaaactgtaacaccgccagccattccaccagcaagagctgcgaaaccgaggaacaagacgacgcgagccttccatgccaccccatttccgctataactgaaggaatcggcgctcaagcgttgtttctcgactgaattgatgatgagcatgcccaagctggagaagatgaagggcagccagtcaacaaacttgacgtggatatcggagcccgtgcg

SEQ ID NO: 133646 - DNA, 302 bp, Zea mays
  Clone ID: MRT4577_53374C.1
aaagtatctctatctacatcccttcacgtgaacctgcagccatgtcatatccagtgactagtcagcctcagtgcaccaacacctgctaccagacacagctcagcgattggcacacgggcctcaccgactgttgcaacgatatgcccgtctgtctgtgtggcactttcgctccactgtgcctcgcctgccgcatctccgatgactttggggcgtgctgttgtgcgccatacctgcctggaggactgcactctctccgcacaggcatgcgggaacgctaccacatccagggctccgtcgggcac

SEQ ID NO: 133647 - DNA, 326 bp, Zea mays
  Clone ID: MRT4577_53375C.1
gccaccacagcgagacgctgggaagctcgatctgcgagggcgccagggttcggcttgacccggcgctcatcgcgatgtcgcgcggcggggagccgctggagcaggtgatgggccgcgccgaggaggaggagctacccaagtacgagcccggcgcgctgcaggtggaggggccggcggcgggtatgccggtgcccctggtggacgcagggttcctcaacgactacgtacccaccggcgggatcgggatgcacactatgagggcgctgctcgagtcgacgcgcgttgtgccacccggtgagctgcactgctcccagtgggttgaagaa

SEQ ID NO: 133648 - DNA, 199 bp, Zea mays
  Clone ID: MRT4577_53376C.1
cttacaatgggtgtatatggattagatcgattttggttgatactaaacgttacatctgaggctataatctagcacagatgggactaatgttgggcagtgggaaaagtggccattccttttttttctaggaaccactacgacctttgccagatgccagtggtggatactggctgatcggggagctgaggagggaggtctc

SEQ ID NO: 133649 - DNA, 260 bp, Zea mays
  Clone ID: MRT4577_53377C.1
gcggccgcccgaccatttcaaccgccgggacgagccctacacgcagcgtctaaaccgaaaagacgacaggagcgccccccaggggagaccacaaaaccaaaaccgccggggcgcacaacaccggcggggccagaaacaccggcaaggcacttcttcaaaagcgggcgaaaagaaagcacggccgaaacaaaacaagaacaaagccaaaaagaccgggcgcagcaagccgcggacaacgacaacaaagaccacggacaaag

SEQ ID NO: 133650 - DNA, 352 bp, Zea mays
  unsure (1)..(352): unsure at all n locations
  Clone ID: MRT4577_53378C.1
ccggatcgccccagtggccgcgtcctcttcatttccgccatccgtatcgtctccctagggtttggcactttggccgtcgccgtgtctcgccgcgtccccgccctcctgcgccctgtcgctgctgccagcgagcctcctcccagcgggggcggggccagtcgggcccgtcctcgaggccagggtgcggtgcnttgcatcccagccagcagccatgtcgctctatccccaccgctatgaagatctacaacctcgnacgaacggtagaacgcccctctcaggctccgctcgnntcatccctaaggaagatccgatcaaaaccaagaacngncaccaagcccaaggctgattgata

SEQ ID NO: 133651 - DNA, 405 bp, Zea mays
  Clone ID: MRT4577_53379C.1
cccacgcgtccgcccacgcgtccgcggacccgtggggcagctgctttcccttcgggagggcgacggcgacctccccgacgacttcgagttcgacatccacgtggacgtcaccttcgccaacgagcgcctgcgccgcgcgtacgtcgcgctccaggcctggcgccgcgccatgtactccgaccccaagaacttcaccggcggctgggtaggagccgacgtgtgctcctacttcggcgtcacgtgcgtcccggcactcgacgacgctaacaccaccgtcgtcgcgggcatcgacctcaacggaggcgacatcgcgggttacctccccgcggagctcggcatgctcaccgatatcgccttcttccacattaactccaaccgcttctgcggtatcatccccaagagctt

SEQ ID NO: 133652 - DNA, 443 bp, Zea mays
  Clone ID: MRT4577_5337C.1
tttttttttttttttttttttttttttttttttttctggggttttttttttttttaaaaccggttttttaaccggtgaaccccttgggggggggaacccgggaaaaatcccttttaactacaatttttggggggtttaaaatacaaattttgggggttttggtggttttcaatgggggctttaaaaaagattttcgggggggttggggtcctttaccggggaactggcctcaagtacccaaggtttttttttgtcacaacccggggtaacatttttttcgggcaaaaaaattttttgaatccccacataaatcccttttttttttaaataaaaaaagtgtgtattgtgtaaaaaaattttttaggggtggctcttcggagactttttttttttgtgccccccgagaggaaaactctctccccctgtggtttttttttgggggt

SEQ ID NO: 133653 - DNA, 352 bp, Zea mays
  Clone ID: MRT4577_53380C.1
gaaacggtgaacattgtatcaacggcaaaagcgcataattggataaacaggaggcaaattcaccctctctaagccacagggcagaggctgcaagaagagtgcactgacatacaggacacctagcgctgacaatagaataggtccagcaccacaaggcccagggatgaagacggtcaaggcaaggaaacacgggtgccctagtatacatgacttgcttggcaagaatggccctcatccaatccaaatgggaaaatacgtaccgcagctgcaggaggcatgctccaatgatcatacaaaaacattgtaccaggacttgtttatgtgatcacaagcaacatgcaaatcatgctgc

SEQ ID NO: 133654 - DNA, 733 bp, Zea mays
  unsure (1)..(733): unsure at all n locations
  Clone ID: MRT4577_53381C.1
agccgcactctccctgctcgcgctgggatattttcctgaagcagctaccgtccttatctccatgatatttccagccgagctccctgatttttgtcacagccgtcttcctcccttatcctcgccgccgccctggtcttcaaaaaatctgccgcgccgcttcagctctggggaaaatcccgccggtgctgcccagccgctccttccccagcgcagaccgctccttctccctcctctacgcagtgccgcgtccacctccatctttgccggctggagctccctggtgcttgctcctctgcagtacggagctcctccctgaagcttctatcccctgccatggcgcttcgcttcccctgcggcattctcctttctctaatctccctgctcgccggcagcaacatccagccgcgcagctcttgactcgccggccgagctctctgctcctccctctgttcgctcgcgtgaagccgcgcctctgcgctcgcccagtcttcgcgcggcagctttcccctgccggtgcctagccctgcggccctcctctatcctcccgagcttctgcacagccagcgcgctcgagcccctctcagccatggtcgttcctctgtgcttgggttcaagcttctgcgcgccctcctccctcagggcgacgctccggctcctgctcgctctgctcgcttggctgactcgcgcgcatncctggctcgcctggntcatcgcgcgcacgcccagcgccctg

SEQ ID NO: 133655 - DNA, 150 bp, Zea mays
  Clone ID: MRT4577_53382C.1
tattctctatatacaatgtatcagcggcttccgtgctcattcctggggggtagttgtctcagcacattatcactacctatttaatagctaagtgtcatcaagcaacataatactgaatctctgaatcggttatgctatcatattgcaccc

SEQ ID NO: 133656 - DNA, 194 bp, Zea mays
  Clone ID: MRT4577_53383C.1
atattcggcacgaggcagacgcgcacgccttgcatttggcttcttcgcggcttcagcagcgaccgcgtccccgcccccgtcgggcaccaacccagcccaacgctctcccccctgctgctccccttttgctctgcccaccaattgataggttacctgacctacgtgcccgttgtttcgtgcaccgaacttaacct

SEQ ID NO: 133657 - DNA, 246 bp, Zea mays
  Clone ID: MRT4577_53384C.1
cccacgcgtccgcccatcgtccgttgacttgtgggcggacgcgtgggctcccgggggggtgtcttgtcgcatccggcgggccaaagctctctctgctcgcaggtcgcagccatggcgaagaactacccgaccgtgagcgccgagtacagctaggctgtggacaaggccaggcgcaagcttcgagccctcatcgccgagaagagctgcaccccgctcatgctccgtcttacgtggcactacgcgggg

SEQ ID NO: 133658 - DNA, 280 bp, Zea mays
  Clone ID: MRT4577_53385C.1
agacaatatttgatattgatgtggaaactgcatttgaggagaagccatggaaattccctggtgctgatatttcagacttttttaactttggccttgatgaagagaagtggaaagatttttgcaagcagctggaccaacttcgactagaatccacaatgcaatctaggatacgggtgtacgaaagtggccgctctgaacaggattatgacccagatttgccacctgagcttgctgctgtgactggtcatccagacatctctgctgcagtcgcaataaaatg

SEQ ID NO: 133659 - DNA, 255 bp, Zea mays
  Clone ID: MRT4577_53386C.1
ctgctggacatacccgaccctcaatctgagccggaaacacgagcactgatgagagactctgacacatgtcaaagcaagaataactgccctgggggccaaagcacagaagagcctgacgacggtttttttttttcttaggaaaaagcccgccctgggaacaacctttatttttattctggcctgattcatttgttcttggggcacactggcgggctcgtacactgatggaaaagaactaccacgcgctggctatgt

SEQ ID NO: 133660 - DNA, 371 bp, Zea mays
  Clone ID: MRT4577_53387C.1
gaccatttttgtcgttagtgatagaagaagaagggggtttcctcttccggccgtacggtgttcattcttcgctcgtccgtgcgtacctgatctacatgtgtgggtgtctgtattattataattatgatttgacggtccctacgtgtctatatctaaacgtacgccgccgtactggagccgtcttcaataccagggagatacctgcggattcctatacgaagaatgtacgatgacactccactcctaaaactgatgagtagtagtagtattcggccgcagagaacataggggtcatcatcgaaagtcactacgacccccctgtgtctctcattagacaacgatcgctgacatgtctcgcacgaccacgaccc

SEQ ID NO: 133661 - DNA, 380 bp, Zea mays
  Clone ID: MRT4577_53388C.1
attcggcttgagtgaccgcggtttgttatcgcctgggccacatgtacagccggggcgggctatacaacggttggagcttcatggacgaaatgctgggttcttacggaaaagcgtggcgtgagagggggcttgtagttcatgatctggcttgtctgattaagccgttcactaaatgatacgcagaatatctatgctaggctggacactccctattggcccttgcggactatgaatccatacaagagccttagccacacttacaacagtctaactccagattatgctaaactgacctttgccatatccctgctaggctgaaccccgagactgtaaatcagttcggatcccacttaaccgttcctgccatgctacagcacacc

SEQ ID NO: 133662 - DNA, 847 bp, Zea mays
  Clone ID: MRT4577_53389C.1
tatgaattcggcacgaggctcgcgccggagatgagcaagacggggaaggccaccacaagcaccgacgtgttcgcgttcggcgccttcctgctcgaggtggcgtgcgggcggcggcccatggagcgcgacgacgaccttgatttgcccgggctcgtcgacctcgtcctcgagtgctggaaggccgggaggatcgtggaagccagggacaaaaggatcggcaagtgcgacgaggccgacgtcgagctggtgctcaaactcggcctgctctgttcgcaccctgacccccggtgccggccgagcatgaggcaggcggtgcagatgctggaaggcgcagcgccggtgccagagacaccgcccaaagatctagccagcaacagcaggttgttctacggatacagcgagtctttcgacgagttcgccaccatgttcccggcgacgtcggaggtcaccagcgtcaccacgcagccgtcttcctcacactccaccggcgaggggcagcaggtctcctccgaacaaatcaccaacgtatagtcatgtgttttacgatggttgggttaggaagcaaacagtgatcataggtttaggtgttgtgtggtattttcttcaagtgaatataggatatggtcagccattttgtagggatgaccacaaaaacaaagttagataaagctccaacagattgaactagtcctcgcttgtttcatcatggagagagcaagaaggtgaaattcttcattcaggtaaggagtcatatacgaatctcaaaagaaacaataatatggcatcgaaatttctgtaaaaaaaaaaaaaaaaaaaaaaaaactcgaggggggggcccgggtaccca

SEQ ID NO: 133663 - DNA, 277 bp, Zea mays
  Clone ID: MRT4577_5338C.1
ggatttcagcatcattgactcagtgtggaggggagagaaaaccgagggtctccacccaaatcggcgcccgtcgccgtgctttccgcctcgctgcaaccggttggtgtaccatgggggtgtcatctgcgcctacggagtgtgttcccagcaagttgcgggtctcggtgggcacggattggtggcgattcctcgctggagtcgggctccgccactgatccatcgtgcctcattgtgcagctgccgcatcatctaaaatcgaggtgtgaacccaggatga

SEQ ID NO: 133664 - DNA, 499 bp, Zea mays
  Clone ID: MRT4577_53390C.1
ccttaagcagtggtaacaacgcagagtacgggggatgatcagcagcaggcgctgacggagcagcagctgggagtggacgaatccacatggagagcattctgatggtcatcgccgcgcgcctacatataatattgcacacaaaaaagaccgttgctactactgcgccagatcgatcaacttaatattatttagctattatggacttgtggtcaattactataaatatatacacttgtagggggatattctaggcaattaatatatacgggacaaacccactattatattaggtccatgctatgtgttaaaatgggacaagccccattgttaggtcaaaaaaaaacaagtcagttttactatagatatagaagtgaacgtgtctcttgatttgtgtcctatgttttaattgtaagaaaaatatatattactacatgcttggtccaaaaaaaaaaaaaaaaaaaaaaaaaaaaaaaagtactctgcgttgttaccactgctt

SEQ ID NO: 133665 - DNA, 284 bp, Zea mays
  Clone ID: MRT4577_53391C.1
tttttatctgtttccttggttttttttttggttttggttgaaaaacaaaacctttttatacctttcttaaccttgggtgcactgtatcatcatataaaaatacaactcaaaatttcttttttacatgtactccccccaattttgtttctttcccattacatttttatgctcaacttattgctttccccctatgcattctttttttggataagaaactaattgatctagcaactaatctttttataccttcatttaccctataccatccaattttgtttggacca

SEQ ID NO: 133666 - DNA, 313 bp, Zea mays
  unsure (1)..(313): unsure at all n locations
  Clone ID: MRT4577_53392C.1
tcggtctcgtgggcaaagatctccttcaaaaagaggcgcttgtgcggattctctgagagtgataagaaagaagcatttggtgggtcaattgctcnncttncgttgcttgctcacctgggagttgagattnactgggagatggttcctttggagcggcttggnngggcctacccttttcacaccttaaatctatgggcaggacaaacttgtttctccagccaggggtatacataaggatccctcaccgaaagaccttcctaccaaatgggcgcccttaatggctgatgggtctccccctgcttttattgattaa

SEQ ID NO: 133667 - DNA, 253 bp, Zea mays
  Clone ID: MRT4577_53393C.1
gagctcattagtcggcggccgcccttctttttttttttttttttttttttttggatgtttgtttttgacccccaattcacttgcaaaatcttaataaggggtaggaggtcccaaaatatgctaaagactaaagggacaccgatacaacgtaacaaggtaagactaaggaacagtataaccaacggcccaggttcgggtcaaacaaaaaatgaaaagtaggaaaagggacaccggcaagggtttaggaaggaga

SEQ ID NO: 133668 - DNA, 174 bp, Zea mays
  unsure (1)..(174): unsure at all n locations
  Clone ID: MRT4577_53394C.1
gaagcaaaannttttgtgcttattattanaagaaccgaacgcaggatagtgagagtttttatgaattttttacaacaaaaccgccccacgaagagtaaaaaaacatatgtatacagacacaaactacattatggtaaccagtaaataccactgtttgagtacttataacattgt

SEQ ID NO: 133669 - DNA, 247 bp, Zea mays
  Clone ID: MRT4577_53395C.1
gtccggttctcctgctctatggatctgcggggcacgggctccatcaaaagcgacctggtccgccgaaactacatgcactggaagcacgcactaaaggggatcgcgttgatgaatatacacacaatgatggtggcgctcatcattcactatggggtatttattgtggcacttacaacggactctacgaggataaacagtcgtacataataactgggcgaaaactccaacaatggcaggcgatctatac

SEQ ID NO: 133670 - DNA, 2130 bp, Zea mays
  Clone ID: MRT4577_53396C.1
cctcgaggccggccgggcatttaaaaggaagaaggaagaacatgctccattctctccaagtcaccagacgaatattggcaagagattagagctgttcagagtacacatgaagtggcactggctaacaggttgaagtattctcttgatgagaatgacaaagatgatggtgttaatattgaagtcataggggacaacaagattgcttcgccatcgatgcctccaacttcagtcgatgaacctattctggttggttcagaggaaattgcaagagttacatcattgtggtcagggataccagtccagaagttgactgcagatgaaacaaaacttctagttggactagatgatgaacttagaaagcgtgtcataggtcaagacgatgctgttgtggccatatctagagctgtgaagcgatctcgtgttggcctgaatgatcctgacagacctattgcaacactactattctgtggtccaactggagttggaaaaactgaactcacaaaagcactagcagcgagttattttggatctgaatcagctatgattaggttagatatgagcgaatatatggagaggcatgctgtgagcaagcttataggctctcctccggggtacatgggatttggtgaaggtggaactttgactgaagcagtccggagaacaccattcactgtagtcttgcttgatgaaatagagaaagctcatccagatattttcaacattcttctccaagtatttgaagatggacacctgacagactcacaaggacgcagagtttccttcaaaaatacgttgattgtcatgacatcaaatgttggttcaacatcaatctcaagcggaaggaggagtataggtttctcaacacaaagggatacagaggagaccacctatgctgcgatgaaatcacttgtgatggaagagctgaaggcattttttcggcctgaattgctcaatagattggatgaagtggttgtattccaccctcttgaaaagacccagatgatggctattctcaacctaattctacaagaagtcaagagtagacttctagcccttgggattggcctagaggtatcagaatcaatgaagatcctgatttctcagcaagggtatgacagaagctatggggcacggccacttcgaagagccgttactcagctggttgaggatgttatcagtgaagcaattctctttggacagttcaagcctggtgacacgatattgatgggcactgatgccacagggaagccttgcttgagccgactcaatgatcagaccgtccaattgtccgacactgctccaacaatatgaacatcccagcaccctgtgtatatagttgcagattacacatttattctgtacatagaatccccatctcagcgtggacataatcttccagatgttggtttgtctccacaacattataatgtaaatcttatccttaaatccaattgtacatatttttattattaatgttagaccgtgttgcgtgtataggcctgaggtctagttcatgtgtagtgtatatattgtactctttttaatatttagctattctcatttatcatggtatgagactatcaagcaatgacgatctctacagggtcttgtccccgaggtatcagaatcaatgaagattctgatttctcagcaagggtatgacaaaatctatggggcacggccacttcgaagagccgttactcagctggttgaggatgttatcagtgaagcaattctctttggacagttcaagcctggtgacacgatattgatgggcactgatgccacagggaagccttgcttgagccgactcaatgatcagaccgtccaattgtccgacactgctccaacaatatgaacatcccagcaccatgtgtatatagttgcagattacacatttattctgtacatagaatccccatctcagcgtggacataatctcccagatgttggtttgtctccacaacattataatgtaaatcttatccttaaatccaattgtacatatttttattattaatgttagaccgtgttgcgtctataagaaaaaaatctagttcatgtgtagtgtatatattgtactctttttaatatttagctattttcattttcaaaaaaaaaaaaaaaaaa

SEQ ID NO: 133671 - DNA, 175 bp, Zea mays
  Clone ID: MRT4577_53397C.1
ctctcgtcgtgcccaccctttccatctggctgctggcccttttttgcaatcaatcggtgggctcttggttcttccgtctgctggggtgaatctctctctttctcttccgggagaaaccagaagagagagaaggaagaagaaaaatcgggaccagcctggtctttttgcccggaat

SEQ ID NO: 133672 - DNA, 396 bp, Zea mays
  unsure (1)..(396): unsure at all n locations
  Clone ID: MRT4577_53398C.1
gaagcacaaggaggagcgcacgaagaacgcggccgacagagacaccccaggcaagggaaccccccgccgcagaggagccaccggcaccannggcaagcgccgcgccagcagcaacgccgagggggggaggagaaccgccgcgcccaccgggagcgccgaggcggcggccccgggcgccccagacaggagcggngagagccgcnccgaggagacccaggaccagaagaccaaggacggcaagccgcaaggcgagggccgcaaggagggaggcgaccccccgggcagcaagggcgacaagggcaccagggaggncggnggcaccgacaaggagaccaccacccaaggccaggacgagccgggcaagcgcggcgccaaggaccacgaggccggggcccg

SEQ ID NO: 133673 - DNA, 1422 bp, Zea mays
  Clone ID: MRT4577_53399C.1
aggagattgagctagctcgtcgtcccgggtgagcacccgctgagctgactggcctatacatacgtaggctacgagggggtcggatacccacgcgtccgcatcgatgagcggagcgtgcacggcggcgccgcgctggtcctgcggctgctggtctgcgtcgtcgcggcgcgggctgtctcggccgtcgccgatggtcctctgctgaacggcaacttcgaggacccgccgaaccagtcccagatgagcgggtcggtggtgaccggggagcacgcggtctcctactggaagacgtccggccacatcgagttcatatgctccggccagaagcagggggacatggtcctgacggtgccggacggcgcgcacgcgctgcggctgggcagcggcgcctccatccagcagcagatcagcctcacgcggggcctgtactactccctcacgttcagcgcgtcgcgcacctgctcccaggacgagatgctcaacgtgacggccgcccccgtgtccggctcccctgcccagaccggcgagctccccacccagacggtgtacaccagcagcggctgggactcctactcctgggccttcagggcggatgccggtctcatgtccatcacagtcacccacaactgcggagaagaggaagatcccgcgtgcggccccatcgtcgacgcctttgccatcaagacgctcagccagcctgaggccagccagaataacatgctgaggaacggggacttcgaggagggcccgtacatcccgccggactcgcagtggggagtgctggtgccgccggtggacgaggacgacgtctccccgctgcccgggtggaagatcatggcgtacaagaagtcggtcaagtacatagactcggcgcacttcgcggtgccgagcggcgcgcgcgccgtggagctggtgtccggcgtggagaccgcgctcatgcaggaggtgtacaccaccgtggaagggagctggtacaggctggagttctcggccggggacgccgacgggtgcgcgtcgtcgtatgatgacggctcctcgtccgggatgaaggtgaaggcgtacgcggggacggccgaaacgaccgtggacgtcgatttccgcgacgccggcggttccaagcgcgggaagatcgagttcagggccaccgccagccccaccagggtggtgttcgttagcttgggctaccacaccaagtccgacaacagcggcacgctctgcggtcccgtcgtagacgacgtctcgcttgtccccataccgcagccgtatgctcgccgcctgcttctataaggcctaactcatgctgcgtctgttttttctttttattttttgtagaagtacccatgttgcttgggtaatggagagtgtcactgtgctggtttactggcccattttggcttaccttaattttgcactactacattt

SEQ ID NO: 133674 - DNA, 641 bp, Zea mays
  Clone ID: MRT4577_5339C.1
ggatccgattcccagaaccaggagagggcgtgtcctccacagactcacgcaaaagccacaccccgtgacgtcaccagcaagaactaggacgatcgatcgtcgaggatagaagctgtactcctcttcacgagctggcccagcccaactccgaggaccactgtctgtctcgtcgtacgtagtccatgtgtagtatcgagaccaagatatggtacgacctgcctgaaggtgatgttctactatgtcctccagtgaaccaggatgctaacggatcatattctaacatgaggatcacaagcaccaccgaacatggctatgagatacaagaacctcgtctgtcagacagaggctgacactttactcggcatggtggaaatacacgccccgcccagtatccggactactaccagtataatacccccgatgacggcgactgcatccttcagctcttagaccacatgctgagactgcatctgttcgttgctgtagaggatctacacgacgccttcactctgtctaagtctctgaagcaatcaagagagagttggatctagtaccagagacgcatgacagacagttgaggcttggttgacatacggatatatacatgtgtgagtctgatctgcccaagcgccctatcatct

SEQ ID NO: 133675 - DNA, 299 bp, Zea mays
  Clone ID: MRT4577_533C.1
cacccacggccatgggctgccgctcggcgcgcggagccgcgcccgatgggtccctcgccacgacgcccaaggggacgatgctgtcagccacgctgtgctacacgggggagacatgcaaatacattacctgcctcactcctgcttggtgcctgaactatgatgatgcgcgctgctacatcatatttactccctgctgtggttgaggccattctggacgtgaatgaagccactatactctcacacacagcatgcgccgggcgacgacgcgtacgtacgtacgtacgtatatatatacccta

SEQ ID NO: 133676 - DNA, 814 bp, Zea mays
  unsure (1)..(814): unsure at all n locations
  Clone ID: MRT4577_53400C.1
gggtacctcgaggccggggagatgctcaacgtgacggccgcccccgtgtccggctcccccgcccagaccggcgagctccccacccagacggtgtacaccagcagcggctgggactcctactcctgggccttcagggcggaggccggtctcatgtccatcacagtcacccacaactgcggagaagaggaagatcccgcgtgcggccccatcgtcgacgcctttgccatcaagacgctcagccagcctgaggccagccagagtaagatccactccacttcattccaacgatcggctgtgctggtggctgccttgttgcgtcgttctctcctctcctgatttactatatataatactggcccgcccgggccccggcagataacatgctgaggaacggggacttcgaggagggcccgtacatcccgccggactcgcagtggggagtgctggtgccgccggtggacgaggacgacgtctccccgctgcccgggtggaatatcatggcgtacaagaagtcggtcaagtacatagactcggggcacttcgcggtgccgcgcggcgcgcgcgccgtggagctggtgtccggcgtggagaccgcgctcctgcaggaggtgtacaccaccgtggaagggagctggtacaggctggagttctcggccggggacgccgacgggtgcgcgtcgtcgtatgatgacggctcctcgtccgggatgaaggtgaaggcgtacgcgnggacggncgaaacgaccgtggacgtcgatttccgcgacgccggcggttccaagcgcgggaagatcgagttcagggccaccgccag

SEQ ID NO: 133677 - DNA, 197 bp, Zea mays
  Clone ID: MRT4577_53401C.1
tcatacgaccaatccatacactcaccatgttttatcatttacacaagcaccactaccacaggggataggtgcaattcaaccgagggtatgccctcaacattcaatacactcactacataatctttatcctcatatactatcacgtacattcctaacacactctctaccttccctacatactctaactgataaaacac

SEQ ID NO: 133678 - DNA, 316 bp, Zea mays
  Clone ID: MRT4577_53402C.1
ggaggttgctgtgtttggctgcaggaaccctgaggagatcccgtggggttcggttggtgctgaatatgttagtgagtttactgatgttctcaatgaccaggagaaggctgcatcttcacttgaggggtggtgccaattaggttgttatctctgctcttaacacggttgcccccatgtttgtcgttggtgtcatcgagaaggagtacaaggctgacattaacattgtctccaatgctagcttgtacaaccatcgtgtctagttccttttgctaaggtcattaatgacaagtgtcggtatcgtttgaaggtattgatg

SEQ ID NO: 133679 - DNA, 2910 bp, Zea mays
  Clone ID: MRT4577_53403C.1
cgtccgatccaaaagcagggtgggggggggggggacaccaaagtgaaggggtagtgcgaccgtcgtgagcaaggagaagtcagcggcgacggagacggtggagatggaggatgaggaggaggtggtgttggttttttgttttttggccggccggccgggcctgggcagcctgaaaccttgcctttctttcttcggttcttccattacccccaggccccagcgtgcgtggtctccttcctctcgtggcgacgaccgagcggccgtcgctgcctacgtgcccagtcctgttcgtcccttcgccggcgacggccacgacctggttataggcaaagtttgtcctgaactgttcatcatggtggaaggctgggtattctctgctttgttagtggtgtttctagcgttcacaacaccttgcgagtcattctacttgccaggtagttatatgcacacatatcagcaaggtgaagtaataagggcgaaggtgaactctctcacttccattgagacagaactacccttcagttactacagccttccatactgtcgtcccagagatggggttaagaagagtgctgaaaacttaggcgagcttctgatgggtgatcaaatagataattctccgtaccgtttccgtgtaaatgtcaacgaatctctgtatctgtgtactacaaccccacttgacgaggctaatgtgaagctcctcaagcagcgtagccatgatctataccaggtgaacatgattcttgacaatcttcctgtgaggaggttcacagagcagaatggaataaccatccagtggacaggctatccagttggttatattccagaaggcacttctgatgtctacatcatcaatcacctgaaatttaaggtcttggtccataagtatgaaggaggcgaagtaaaggtagttgggactggggaaggaatggaagtgatctcagagactgacaaagatgccaattctggatatgagattgtgggatttgaagttgtcccatgcagcgtgaagcgtgatcctgaatccatattgaagcttaatatgtatgataaagtcgatcctgtgaactgccctgtggagttggaaaaatctcaattggttagggagaaagagaagattacttttacttatgaggttgaatttgtaaacagtgatatcaggtggccatcacggtgggatgcatacctgaagatggagggttcgaagattcactggttttcaattatgaactcattgatggtaattctatttttggctggcattgtatttgtcatattcttgcgtacagtgaggagggacttgactcggtatgaagagttggataaggaggcccaagctcagatgaatgaggagctctctggttggaagcttgttgttggagatgtcttcagagaaccaacctcaccgaagctgctctgtgtcatgattggcgatggggttcagattttgggtatggcaattgttaccattttctttgccgcatttggcttcatgtctcctgcatcgagaggaatgttgttgacagggatgatagtcttttatatgttacttggaattgtgtctgggtatgctgctgtcaggctctggaggactttaaaaggaacgtccgagggatggaggtctgtctcctggtcaactgcttgtttcttccctggcattgtcttcattgtcctcactgtgttaaacttcatgctgtggacaagaaatagtactggagcccttcccatctcacttttctttggccttttgtccttgtggttctgtgtctccgtgccacttacccttttaggtggtttctttggcacaagggctgagccaatagaattccctgttcgaaccaatcagataccaagagaaatccctacgaagaagtactcattgctcttcatacttggtgctggaactctaccttttggaacactcttcatcgagctcttcttcattctttctagtatttggcttggaaggttctattacgtgtttggcttcctccttgtcgtgcttcttttgctgattgtggtgtgtgctgaggtatcagttgttcttacctacatgcatctctgcgcggaggactggaggtggtggtggaaagctttctttgcttctggaacagtggccctttatgtgttcctttactctatcaactacttggtgtttgatctcagaagcttgagtgggccagtttctgctattctctacattggatactctttcgttgtctcccttgccattatgctagcgactggtaccgttggcttcctgacgtcgttctcttttgtccactaccttttctcatcagtcaagattgattgaagatccagggttgtctttacacaaaatcacctgtgagctcaaatgatatgaccattgcatcttgaaggcctttcacagagcagtgctgtttgtaatgtagcttattaccgagagtctgagactactgtaccttgtaatgaatagtatatttcagcagatgtgttttgaagtttgtcacactttgctacagcattttgttgacctgccaatactgtaggaaaagtcttgcgtttattaaaaaaaaaaaaaaaaaagcggccaggcgccgcctgtcgcgatctcatctccgaattccgggacctacccagtcggctgcaggagacgctgatgccggacctggcgcgcctctcgcaccactccaaggcgtacctgtccgcggcgaacgccgggatcgccgacggcgtgcgcccgatcctgggcggccggtgggcggcggtggccgcctccgcggcgtcggtggcggtgctgctgctgccgctcttcatgctcaccgcgctggtgcgccggatgggcccatacctgccgctcctccaccgcgcgctgctgctggcgcaggcgtatctcgccatctacttcgccacgctcgcgctcgccgg

SEQ ID NO: 133680 - DNA, 228 bp, Zea mays
  Clone ID: MRT4577_53404C.1
gacaaatattcagggctctgttatctatcatctgctagattttttaggaggatccctcacatggcaggaccttaaagctggcactgaggaagatgtctacgtatccgattagtgacaaggagtatgcttacctcggcacacattctgtgcagatcatacacgacggagttcgtctcatatttccactattgtcgctccctgcaatttgtatacatgccagattactct

SEQ ID NO: 133681 - DNA, 171 bp, Zea mays
  Clone ID: MRT4577_53405C.1
cactccttagggcgaattgggactcaagagggcgggcggggaacccgcctttccgtcggagagtccattcccgtctcctccctcctccccagccgcaccccagcctatgaaagaatatcatctgatagccgtcagcggcatcaatccacctgctgactgggaactcgcagc

SEQ ID NO: 133682 - DNA, 759 bp, Zea mays
  Clone ID: MRT4577_53406C.1
gtagatccagctgcaactgacgccgccggccagagagatcggccagaagagaagacacgcaaaaaagggggtgcagcgccaggaaagaaaagggcctcgccgccggccgccatccgtcgtgatccgagagaacaggaagcagccgtcgggagacgcgaccagagagaagccaccggaggagagtgccaaccgccatcaggaagtcatcgctcctagcattcacgccgttcagtcagagaagtcatccacgcgcagcaacacatattcccagccatcatcagagagcattcccagccatcatcagagaaaagaaggcagtaaaaggaagctaacagaggaagacgccaggaggttgctgaagacgcccaaatacaagtcagaataaagcaccaaagcagcagccaacgcttgcaagacaatcaacatccatccatatggcattcacgacatccatggtccatcagccacctcaccttcatcactgtcggtgcgtccaccttaccactgcagcgagctgcgctatcaatagataccaaggttccctggaagcaccgtcccacgacacacgcgcctgtatcagcatcggcagcatcgtcccagcatccatcggctcaccaacgacacgttctggtgatctgactcacatgggctccttaccgcgactttgcccctgtatggcagactccggcatcgacaccgactcgtcactcggcggatgacctgcctttcagtgaccatcatgtgtcggctagcgggcga

SEQ ID NO: 133683 - DNA, 381 bp, Zea mays
  unsure (1)..(381): unsure at all n locations
  Clone ID: MRT4577_53407C.1
cgttgacgccgcgngcacnngcgattccgatcnnctgggttttacctaagnnaaataaacaactctgaatttcccaaggacctgaagaccagccagcgcaagcctgtggctgccacggtgccaccatgtcccgcggcagtgccgcctgcgtgtgggtgggcgtcgacgttggtactggcagcgctcgtgctggnctcttcgntgaaaacggcaatttgttggggtctgtttgctgcccttttctgttttggtttgttgttggctgtttcgtgttttttttttttgttttttttcttgctgttttttttgtgttgttttttttgtttttttggcttgttttgttttttttttttttcgtttttttgtttttgtgtgtttttt

SEQ ID NO: 133684 - DNA, 422 bp, Zea mays
  unsure (1)..(422): unsure at all n locations
  Clone ID: MRT4577_53408C.1
accatactttgaaacatactccatgttcatgtcatgcctatgcaaagcaggtagatcagaggatgggttgcatcttatccacgatatgtcagattgtggtttcattcccagcacagtaaactttatgactgttgtccatggtctaaatgtggagggcaaacatgagcttgctgagtctgttctactgtcaaaatggcacttgcggaagcaaagaaccatctcatattagtttttgcttctctcacgctctcaaaagatttcttggtgtttacatcttggaacgcaaggaacaagcatatggtangggcatgaagtaaaatgaatcatggacacttttgctcnccccccccctccatttgtcaatggtggatggagaagggtacagtaaaaatcgttgtgaggactgactcaatgtggcatgt

SEQ ID NO: 133685 - DNA, 1178 bp, Zea mays
  Clone ID: MRT4577_53409C.1
gtgcggcgctcgaggcggccggttccagttttgcagctgcctataaagaatagagaccagagagggaggccatcgtagatccagctgcaactgacgccgccggccagagagatcggccagaagagaagacacgcaaaaaagggggtgcagcgccaggaaagaaaagggcctcgccgccggccgccatccgtcgtgatccgagagaacaggaagcagccgtcgggagacgcgaccagagagaagccaccggaggagagtgccaaccgccatcaggaaggcatcgctcctagcattcacgccgttcagtcagagaagtcatccacgcgcagcaacacatattcccagccatcatcagagagcattcccagccatcatcagagaaaagaaggcagtaaaaggaagctaacagaggaagacgccaggaggttgctgaagacgcccaaatacaagtcagaataaagcaccaaagcagcagccaacgcttgcaagacaatcaacatccatccatatggcattcacgacatccatgggtgagaaacatttttaatctattttctattatctaatcgcagggggtaaaggacagaacgtgacgagctacctgatcgcacccagtccatcagccacctcaccttcatcactgtcggtgcgtccaccttaccactgcagcgagctgcgctatcaatagataccaaggttccctggaagcaccgtcccacgacacacgcgcctgcatcagcatcggcagcatcgtcccagcatccatcggctcaccaacgacacgttctggtgatctgattcacatgggctccttaccgcgactttgcccctgtatggcagactccggcatcgacaccgactcgtcactcggcggatgacctgccttcaagtgaccatcatgtgtcgcctagttgtagcgggcgaccatggcggtgttgtccctgacgattgcgttccagccacctgagagaaccagaagcacgaccgtcaagagatataggctcgagtagccgagctatagagaggtgtttggccagggggcgtgcgtccatgcacgtacatggccatatatgtctaatactacttcgacttcatcaccgttagttgaaaaaaaaaacgacagcaacggcgacagcaacgaaaaaaaaaaaaaaaaaaaaaaaaaaaaaaccaaaaac

SEQ ID NO: 133686 - DNA, 2270 bp, Zea mays
  Clone ID: MRT4577_5340C.1
gtgtcggaagctcccttcatttctttcacctccgattcgattccttgtcccctcttgatccgagccgccaccaaaccctaactatctaaaacccccgtctcgctgtccgatggccgccgcctcgccgccgccctccccaccccacgcaaagcgccccaagatgttgtcctcctccgacccggaagccgatgctgagcccacctcggcctccgccgccgttgagggcgccgaccctgctgagcgtcgtcccaggtacaagcgccgcaaggtcgccatccttctcggggactgcagcgcggcgtaataggacaagaagaagaaggatgccgcgggcaccatcaacggggacccctatgaggaggtggccgaagagttcaaggtcaagtatattttcactcatattgcggcgatggaacacaaggagggagctgtagctttgtggttgcattcattgaaccccagaaattatctagatttccgttacatggaaactgctgagcccaatgctggtgctgaagttgagagtattgctgctggtgcagagcccaaggttggggctgaagttgagaatactgaagaagtacagatgccaagcgccaatgtaagtgagtgaacatttttgccaagggggatgctgacccgaacacactatctgtctgtcatgtcgccgggggggtcatggggagtgggagcgagcttaccaagtgcctggagtgctccgagagaggcaggaagattcctggtgtcatgggccgggatgggaaactgcccagccccgggcagaatggtgttgatgctcccgtggagggaagtagccatgacgaatctggaacacttggggatgcaaaatgtgaccatacaagttcagatggtggtaacccatttgcccatggggaagttggatcgaacagcaaggagaagcctgatttgccggtctctggtgatggaactgaagttgcaaatgctgagatgggatcaaatggcgacagtgatgttgtatcatcagatatttatatggggaacgaggagaagaaacttcctgcagccactgaaaataaagctcaaggtatggaatctgagaagagcaatggagaagagaaactgccaactaagactaccttttcttacactgatgaagtgaaggagaggttcaacaggattctcaaatactatattgggacacacaatttccataacttcactacaagaaccaaggcagaggatcctgcagcaaaaagatttatcatttcctttgctgctgaccgtgttgtcagcctggatgggattgattttgtcaggtgtgaagttgttggacagagtttcatgctccatcagatccggaagatgattggtcttgctgtagctgtgatgaggaactgtgcacctgaatcaatttatgatgtcgcctttcgcaaggatgtcaatcttaatgtgcctactgcacctgaggtcggactgtacctagatgaatgtatgttcacatcatacaacaagaaatggaaggattcacatgaggcagtttccatggaaccttattctgaggaggccgaagagttcaaggtcaagtatattttcactcatattgcggcgatggaacacaaggagggagctgtagctttgtggttgcattcattgaaccacagaaattatccagatttccgttacatggaaactgccgagcacaatgctggtgctgaagttgagagtattgctgctggtgcagagcccaaggttggagctgaagttgagaatactgaagaagtacagatgccaagcgacaatctaagtgagtaataaattttgccaaggggcatgcaaaactgaagaaaatatctgtttgtcgtgttactgagagggacccggactcaaacatttccaatgagatatcataatatagagaatgaaaactcatatgttctccaatggaatatgaacatcaagaggttaatgtgcatcactttatgccatcatgatccctatgttaatcttctgaaataagaacctataggtctatattagtcttatatctgaacttcattaattgcttccagacaattgtatgacaaatggcacttggaaatgtttcagcaatgtttttgtttgctgaaattattatgggattcactattttctcttatctacaatataggtttattttcttgcactttttttttcttttggtaatagctgtatatcacttagactgccatagtgcgtcaaatttcattgcagcataatatctattgatattgctagtaaaaaaaacaaaa

SEQ ID NO: 133687 - DNA, 990 bp, Zea mays
  Clone ID: MRT4577_53410C.1
ggcacgtttttttttttaggaactgaaacgtctattcttttttttgtatgcaaggacaaaatcaataggtgaaagacgaaaatagctattcgcctattccgaccttgtttcttaagcattccattgaaccaaagttacagcagtacgaagtatctgacgaggcagacaacgtgtgcaccgtgaaccacatgcaggataccatcgatcatcgatgtcatggatacacgaattctgaatcagaaccacaattcaggctgacagaggactggattccttgggactgccaacggagagagcgcgactcccggaagcagagtgccggagctcctccaccatcctaaccacctgcgccatcgtcggacgccggtcgggagaccacgccgtgcacgccatggcgatacggagcatctggaccagctcgtcttctatgttgggatacttcatcagctggacgtcaaacacctcagcggtccactcctcgcggaccaccgaatgcacccacctcggtaggtcgacggcgtcgtcctgaccctgtgactgaagcggggccttgcccgtcagcgtctccatgaggaggacgccgaaaccgtacacgtcggacttgtgggtgaacttcctcgattcgaaggtctcctgagctcggtagccagcgacagctcgggaagtggtgatcggaaggctcgtcaacgagctcagcccgtagtctgagacgtaagggttgtggtctccgtcgagcagaacgttggttgacttgatgttgccgtgtgcgagcctggagccgccttctgaatggatgtgctcgaggccgcgtgctgttccgagtataatcttcatccttgtgttccaatctaatggggtcttctcacacacgcccttgataccatgcaacagagctgagaagctgcctctaccaatatactcataaacaacaagcttctcatccttcgagtagtagtaagcacgaataggcgcgatgtttgcatgtttacc

SEQ ID NO: 133688 - DNA, 398 bp, Zea mays
  Clone ID: MRT4577_53411C.1
aattcaaataagaagggtctgaagggtttgatccatacttatctaacatagcttatggcccaagggccccatgggcaacacaaatatcgcaaacttattaaagcatataaggggggtgatggtgaccgtactgaccatgcccacaagctcccttatgtaacttggggagcaaacaaaccggccctacgtgcatctattcaacgtatgcaatcatcctatatcatcaatgagcgtcatgatatgaaacaaacctcccagacacaactgccagagaaggcacttaacgggtcaaacaaaccagctgataaataacaacaactataaagcttcccaatgagaatcaacaaactctatctttgaaagttcaaaaaagtgccaaattttccgaagattgccag

SEQ ID NO: 133689 - DNA, 378 bp, Zea mays
  unsure (1)..(378): unsure at all n locations
  Clone ID: MRT4577_53412C.1
tttttttttttttttttttttttttttttttttttttttttnnnnnnnnnnnnnnnnnnnnnnnnnnnnaaaatgctttgttaacccacagaacagttctcccagtgggatgaatttctcaaatagtttaatacattttttaaaaaaatcgggggcaggtaaccccagttggaaaacaagacctggagggaaatggaataaaaaaacacactttgcaaagacagcttgaaagcactgtaacgggcaacaccgtcccaaaatcaaaatggaagctactacttgcttggggtaccctcctgggaaaaatggagatgaaattaacaaccaccgtaaaagcccacataaaccaacaccaatttggtccaccgacaaactaag

SEQ ID NO: 133690 - DNA, 305 bp, Zea mays
  Clone ID: MRT4577_53413C.1
ccgccgccatgttggttcttgtccgtctacagatttctctttctaccctttatgttctctctttcttctctggtttcaatatttggagcttttgttctgcgttggacgatgatgatttgctcatatataccatcaaactctgaacaatcatacgctatgttgattgcacaaagcttccgtgagtctgatgcgatcttctgcctctaatcccgtttttgtttattcgtcttcttccatttttcgtttctttgttttctgaattaatttattcccgatgcaataaattagagtctctgatgcgcttc

SEQ ID NO: 133691 - DNA, 242 bp, Zea mays
  Clone ID: MRT4577_53414C.1
aatggtatggatccaagggtgggttttttttttttattgaaaaaaaagggtcctctttttttttttttttatgactatgtgtttagtggggtaatcttagaatctgcaaataagttaggggggaaaatcaaatttgggggaacaactggtgggcccaacaactactagaaacccccccctctgttacagtatcccaataacggagcgggtttgaaaacctataccgacatgtgtgttccttt

SEQ ID NO: 133692 - DNA, 423 bp, Zea mays
  Clone ID: MRT4577_53415C.1
gaccaaacctatgcatagcggacagggtaatcaattataaacacacatgaagacatatacaagtctagattgccaaacaaggggctgaggctaccataagaaacctatcccacggggatagattgcctggtgaacagtggttggagtgtttatgctcactggctatcctactgctgggggggttgggagcaacccatagcaaacgatcaaggagctggatactccaaacgggcccgggactgcggggggccatgttgttccgggccagctgtaggagcctaacggacaccatgatgtacaagctcgacttgaccattgccagctttcgctccttcgactgaggcagcttcatgcgactctagaccatcttggacaatttttggggctagagcttcttctgcaagttcttcatcgacgtcgaca

SEQ ID NO: 133693 - DNA, 231 bp, Zea mays
  Clone ID: MRT4577_53416C.1
gcaaaacccaacaaaataaggggaaattcctgccagccagcttgcaaacaaagacatcaatcaagtgaccaagcattcatttgctatgggaattgcttgctataaaaatgacaaacggctacatcattaacacggatatcgttctagactcataacaaggtctcaaaactgttgtgcgacattggtataagaatagagctgctgactatggggcaccaaccacacgaacac

SEQ ID NO: 133694 - DNA, 290 bp, Zea mays
  Clone ID: MRT4577_53417C.1
tcgggtcgacccacgcgttcgctgtgttagcaaacccccggcggggaaagaacttttatatctgtccacaatagactgcgtccacagacacagggattaaggtggggcatactatggcgggagaaaaggaaggcgtaacattcctcaataacagggccgggggattttttttttcctttttttttttttttaagccctaatcggcgatactgaaaactttgggttcccatttatcctgctttctttgggattgctaggcaaggtctggccagcccccccttttttccccc

SEQ ID NO: 133695 - DNA, 165 bp, Zea mays
  Clone ID: MRT4577_53418C.1
atttttagtgcgagcacacatcaccttgctctttctagaatcaccgaggatgatatttcgacaagcatttctgtcgcgaccactgcacgaatatcaggcagtacaattcaacttctcaccattagtccatgtgaaagtcttccatctaaacaaggtgaaagatgt

SEQ ID NO: 133696 - DNA, 405 bp, Zea mays
  Clone ID: MRT4577_53419C.1
accaacaaacaaaaaggcatttttggttgacatcacacgaaccatccggggacaaaactggtattaagggccttccttctaccatttcacattttttttaaaaaaaaaaaacaaaaaaaaaaccgaaacctttttacatcccaataaccaaagggggatttgggacgtacgtccccttaagcacgtcaccgatcaactggttttcccctgggcgcgacggacctggtagaaaacccgttacacaaaccaccagttgacgaacatgaagcaaacccagggcccccccccgttgccgttgtagagcacctttcacgccagggcctttttgtacgaaaccgggcgggctagggccgacacgcacattccgggggggacgcacgcgaacccctgtttcatgacgccggg

SEQ ID NO: 133697 - DNA, 489 bp, Zea mays
  Clone ID: MRT4577_5341C.1
ggccgcttttttttttttttttttctttttttttttttttttttttttttaaaactacaccatcttttagttacaagtatacccttaccagttccagttccagtcccaacaccgacacactctcacactaacagtagggaggactacgaccacgatcagtttaattaccacaactagaaagctcacaggccaggcacattgatggtgccactaccgttgcatgagctggggctgccgatggacgggcgacgagcataaccgtcggcgttgggatcagaggaacctgagcctggggttgggcccggtccggatgctgacgctgatggtgagggagggggactccgtcaggggcacgcggtcccagttggagtacgccgacgggtccgggcacacgctggacctgcgcacgcggaagctggacttcgggttggcgttgaccgggcccccgccgccgcagtacgttcgcagcggcccctgcgcgaacccgaa

SEQ ID NO: 133698 - DNA, 142 bp, Zea mays
  unsure (1)..(142): unsure at all n locations
  Clone ID: MRT4577_53420C.1
ttttcnanaagntgtgtgggcaaaccgacatcaaaatacgttccgagaataaatcaggcatcaaccgctttggttacccatattttacacacatggcttgagatttatgtggaccaaaacctaatgggtgccagttataaac

SEQ ID NO: 133699 - DNA, 629 bp, Zea mays
  Clone ID: MRT4577_53421C.1
ttttttttttttttttttttttttttttttttttttttttttttttttttttttttttggaacataaaacaaacatttaaatagaaggcagggggaattaaaattcctacagagtttgacctgaagttgcttgccagggatacatgattcattcaagtaaggatagagcataaaaatttatagacctcatacaatttacgtttaaaaaaaaccccaacgggttttccttaaccttataaagatagggaaaaacattattttaaaccaaggatccttttttaaccaatacgcaagctgattttcctccctaagggcataaattcactggttgaaaatgggacaaaaatcgctccttaacaggtctactgaaagttgatagcgagttcaagtctttgttcaaataaaatcaaagatgaaaaagggctacccaaaatccagggaaactggcccacccgagtttatcctaaatcagccgggggaacgtccttttttttcataaaaaaaacaccgataaattggttccacatttgaaagatacaccctaattagttcccttgggtcctgaccatcaaggcaacgaaagggacagtctatcttctccctaaggacttgaacttgggctttgatgg

SEQ ID NO: 133700 - DNA, 274 bp, Zea mays
  Clone ID: MRT4577_53422C.1
agctaccttgctcaaaagctaatttccattgatccactattttctcaaacagggattcgcagggggcaattgctttacctttataaaaattcataatatgtctatttataatttctaacgtattacccattcttgactaacgatttacatatgcacacactctatctggtcattaatattttgaaatggatgattatgagaataatatcaaattttacagatgctcacttaaggtacatcaaaggcactacaattctttgtatggccttatttg

SEQ ID NO: 133701 - DNA, 262 bp, Zea mays
  Clone ID: MRT4577_53423C.1
agatgctaaagctggtagtcagcttttctatgagccagctgaattgatgccggagcgtggatgtgaagacgtttcatttggatatgatccagcaatggattataatagtcagatacagagtcaatctgccaccatggttgaagatgcacatatggaagatgcattgttgagcactgtggatgaaataaagaagccagagaaagacaagaagctaagaagttcacaggagagtttggataaacgtagaaaagatgcttcagcg

SEQ ID NO: 133702 - DNA, 304 bp, Zea mays
  Clone ID: MRT4577_53424C.1
ctcacgcgaccgtacatacatcacacaaattataaggaaaggattcgacctttacatctgaggtttacattgtctgaggaaatgatacgtacatctacgcgtcagcaatatcggcctaggtttccgctccctcgactacatccgaagcgatgatgccattcctaagccttatgcgctcatgtgtctcgactacctatacgaaaatacccgactacttcatgaagcgcagcgtctactgataaacatgccgtgcttgatccttaccctacgtgactgaaaccatatgatgctccaacacgagcct

SEQ ID NO: 133703 - DNA, 178 bp, Zea mays
  Clone ID: MRT4577_53425C.1
gtacatgctaaagaggattgctgcaaagctaccgatatcccagggtcaccccaccagcaccagctcgagactaggcaccaccatatgctgagccaaaaatggagactgctgccaagctatgaaaaaacaactgcctcgcccaacatataacattggcttggccggctattctccaaaa

SEQ ID NO: 133704 - DNA, 180 bp, Zea mays
  Clone ID: MRT4577_53426C.1
cttttctttaatacggaaaaagagtacaagcaaaacttacaagatagtgatagagaagagataaccataggtcagatagctcttctctaccgcaaggcatggcgctccatgaatcggcgtcgcatcctctcatacacaaccagcatccccaccgccacggattcatcaccccgtgccata

SEQ ID NO: 133705 - DNA, 356 bp, Zea mays
  unsure (1)..(356): unsure at all n locations
  Clone ID: MRT4577_53427C.1
gcagagaaaaaggagccggggcggcaaaaccccacgacgggacgggaagggcgacccggcaaggccnggggcgaaaagcgggaggcgnaggccgcnganccagggaaaccgacggaggcttgccgcgggagcancacanaggggggggggggggcaccggattttttttcttcccaaccttctgggtcggggaggaagaacaggggaggcggactggcgctggtgctgaggggggctgtgggcggcgccggggaagcaggcctggctgcgcgcggtgggggtgccgcgccgggggcgagaggacccggctggggcggggggcgggtggcgggggggccgggtgggggtgtgggcgt

SEQ ID NO: 133706 - DNA, 431 bp, Zea mays
  unsure (1)..(431): unsure at all n locations
  Clone ID: MRT4577_53428C.1
ccagctcccatttcaccctctggcacatggttagcggcacgaggctccaaccggagggcagacacgaggggggagcgactcgcccaccatgggcatggcgaccgcctttcgccagctctgcgacgacgctctgcacggtcagcctctatgccgcctgacacacctctattatatggaangctcattcctgcgacagatcgagagaaccatactcaccttcactaagaatgttaacactcctgtgtacaagaacattccctagattgcttacatatagtcgagcactcagaacgaccatccaaagctatgtggaggcagtctcattccagaacaccaattgtacttatcttgtgcatgtgatacaggacagaccgttcaccgcatgaccaacaggcacagatgagcttcccatgatgcaggacactgctgag

SEQ ID NO: 133707 - DNA, 560 bp, Zea mays
  Clone ID: MRT4577_53429C.1
ccacgcgtccggggccagctattggaaaaagctcgtaaaatccgtatagaagattatattagctttgaagaactgtttgatggtgtcacaagtgatacgatgtcagcttttcaggaagaagaaacttgcactcagtctgatgcgggtaaagattttggccatcaaccatttgagccatcactttctgatgttgaattacttaacgatctatctaacaaggttgcgttagagtgggaggaactattcattgacccaagcaagccaaagaagcgacacaagaagtataaaaggcgtcatcatcagaagaaaccaaaaaagaagcgtgagaagaaggaagacgaggctgagggggacaaactgtaagtacccgacgtccgacgatcgcctggacttctccattcttggtatattgtgaaatggaagtgagaaaaagtggtggtagctttagtgtcagcttagacttgatattctcaaaaattggtcaaaagggatattgtgtttgtgaatctgagtgtttgttgagggactaagagtttcagtatagccaatgattgcgagga

SEQ ID NO: 133708 - DNA, 558 bp, Zea mays
  Clone ID: MRT4577_5342C.1
gggccaaaaaatggggcaccaaaaaaaattccccttggtttggttggcttccaccaatttttcggaaaaaaaaaattttttttaaaatttgggtggttttccaacccgattttccccattttttatttttttaccaaaggggggggccaaaaaccaaatttttttttgggggggtcccctttattcccctaaaccccattgggggcccaaattttgggccccccctgtggcaccgggccaaaagaaaagggggccccctccggtcctccagggcggccggggggaaattttcccccaaccaaaccaaaaaaaaatcctttttttttcaacccaaccaaaaggggccgtttttccgggccaaaacataaaacccttgacctttgaaggggagggaattggacctttagggttcgggtaaccccccaattggttaggaccccatcctccgggggccctcaagggggggaggtaaaaagggccccttttgtttaggggggggacctttttttttggcccacttttggttttcaaggccttttttttaaacctttaaccccc

SEQ ID NO: 133709 - DNA, 1605 bp, Zea mays
  Clone ID: MRT4577_53430C.1
acgcgtctacaccggtctaatgacgcgcagcgatttctgaccatcccctgacggtttgcggtggccgtccaaatccaatcccaggcgaccatgatctgcgtggacaactcggagtggatgaggaatggggactatcccccatcgcggttcgcggcgcaggcccacgccttcgccgtcctctccggcgccaagacggaggcgaacctggagagcacggtggggctggtggccatggcgggcaagggcgtcagcgtgctcgtcccgccaaccaacgacttcggcaaggtcctgtcaggcatgaacgggctggaaattggtggtgaagcaaacttgactgctgcgatccaggtcgctcaatttgcactcaagaatcggcagaacaagcagctgcggcagagaataattgtttttgttggcagcccagtaatagatgagaagaactggctagaagtgatagggaaaaatctgaagaagaacaacgttgctcttgatgttgttaacttcggtgaatctgataacgaaaagcctgagaaactagaagctcttgttgctgcagtcaatagtggtggcaacagtcatataattcatatccctgcaggacgtgacctttctgatgccctattcagttcaccaataatattatcggaagaccgaggaagtgattctgctgctgctgctcgtggagcatcgggttttgaatttgacgtggacccaaacgtggacccagagctggcgctagtacttctgatctctatggaagaagagagattaaggcaagaagctgctgcaaaaaaggccagggaagaatcgtcgaaaactgagaatgaaggccaatcttcaacctccaatggtgacattgttatggctgacgcagaacctgaaccaaattcatatactgaagataaaggacttcattgtaaggatgagggccagctattggaaaaagctcgtaaaatccgtatagaagattatattagctttgaagaactgtttgatggtgtcacaagtgatacgatgtcagcttttcaggaagaagaaacttgcactcagtctgatgcgggtaaagattttggccatcaaccatttgagccatcactttctgatgttgaattacttaacgatctatctaacaaggttgcgttagagtgggaggaactattcattgacccaagcaagggccacaaggtttttattttgcctcgctcgatgaaaaaggatatttgttctcttgctgaagtctattaaatttggactgccaaagaagcgacacaagaagtataaaaggcgtcatcatcagaagaaaccaaaaaagaagcgtgagaagaaggaagacgaggctgagggggacaaactgtaagtacccgacgtccgacgatcgcctggacttctccattcttggtatattgtgaaatggaagtgagaaaaagtggtggtagctttagtgtcagcttagacttgatattctcaaaaattggtcaaaagggatattgtgtttgtgaatctgagtgtttgttgagggactaagagtttcagtatagccaatgattgcgaggagatggtggtctctgtttgcaccgaagcgattatattacattgttgtacacc

SEQ ID NO: 133710 - DNA, 1243 bp, Zea mays
  Clone ID: MRT4577_53431C.1
tcgaggccggccgggccggcacttcctccgatcgactagcctgcggcggcgccggcgccggcgaccagcggccatgcgggtggcacccagggtgctcttcctcgtccgcgacgccgcgggctacggcgctgccctcgccgacgcgctccgcccgccgcccgggctaactagggagtcctcgcccttcgagctcccccttggaaagtacggcctcgacggagagaaggcgtgcgccgagctcctgagcttttccgattccagtggctctccacaggtactgcaatgcttaggagagcacttggccaagcacacggctttggaattttccaaaggaactgttctcaagagagggatcgaaaaatcacgaattgatcaggaaccctggcgcgagctgtatgggtgacggtgccctcatacagtttggtattagcttaattggctatacatgtttgactcggatgaatgatggtgttttatggagctggaatcacgaaggatctggtccgtcgaaaccactatatataatgtggttcctttcgcctgggtaaatcaactcatcagcaagatatcggatgtcttagaacttgtagacgctttgcagttaaacattaaacgaaatacatttacacttctaacctcttggccagtagtattcaagggttaggtttattgcctgactcgctggaatgtttatagccaaagctccaattttgctttcgaaggatatatatacatatattctcaaaaaaaaaaaaaaaaaaaaaaaaaaaaaaaaaaaaaaaaaaaaaaaaaaaaaaaaaaaaaaaaaaaacaaaaaaaaaaaaaaaaaaaaaaaaaaaaaaaaaaaaaaaaaaaaaaaaaaaaaaaaaaaaaaaaaaaaaaaaccccttttttttttttttttaaaaaccccccccgcggggggggcccccccttcgggcccggggccccggaaaaaaaaaaaaaaaaagggggggggccccggggccaaaaagggcccccaaaccccgggaaaaggggaaaaaaaaaagaaaaacccggggttaaaaacggcccccccccaaggggaaaaaaaaatttccggggggtaaggagccccagggtaaaattgggggaccccaaaaaggggaaaaacacaaaaggggaaaaaaccgggggggcttttagggaaaacctaaaaaaggggggggtaaaaacccccctttttgagggggggttaaggaaaaccggggggggggggggg

SEQ ID NO: 133711 - DNA, 388 bp, Zea mays
  Clone ID: MRT4577_53432C.1
aatcccgaaaggactttcttatttctgggaagccacaaacatcagacaaaaaccttattatgggagggtgactcataaaaaatctaaaagagggccccaccaatgatgggttggtggtaaaacgctgctgggtttgtcaaaacaaggcggttgaatggcagcaattgtttcatttgtaaaagggtgccaacgttaggccccacgtgttggtagaacgacaaccactctggttgtcgcaaaaacggaagcgggctctcccccactagctggcggataggcccagaaccctcttgctgctacaacactggagaggccattgaccaactggcgtgtgaccgccccgggcgccttctgccgacatcacataatcgggggggccctcttgcag

SEQ ID NO: 133712 - DNA, 226 bp, Zea mays
  Clone ID: MRT4577_53433C.1
ttccggatgtgacccatacgtaacctctgaagttacttgtagctcattttatccttagagggggtggtacgggaatgtgcttttacatcggaggggctgatccattaactgcgctgcagggtagttgttaagccatgcggaagactactgtttcgacgacccgaaggagtgtcacgaacactaatacgtattcttgtcatgccgctggattcgttatacgaacatg

SEQ ID NO: 133713 - DNA, 1240 bp, Zea mays
  Clone ID: MRT4577_53434C.1
gcgggccttgccttattggattcctcgcctcgagggcggccgggattccactgtttctctctcgaaatcggccgtctctctcccgtccggcacttcctccgatcgactagcctgcggcggcgccggcgccggcgaccagcggccatgcgggtggcacccagggtgctcttcctcgtccgcgacgccgcgggctacggcgctgccctcgccgacgcgctccgcccgccgcccgggctaactagggagtcctcgcccttcgagctcccccttggaaagtacggcctcgacggagagaaggcgtgcgccgagctcctgagcttttccgattccagtggctctccacaggtgaccatttttgttctgccagactataagccacctcttgcagcgtgtgttgtaaatggggtcttggaactgatttcttctgaagctacctccactgagcgaactctaattgtcccatacatcacaagatcgtcaagctatcatcatggaacggaacatgcaacaaaggcatcgactgtacttcatggtgctgaaataggggcaacaactgactatactcacctgttggttggtgggaccactaaacctcctacatccttgcaaatacgtagtgaaccaatattatgtttgctggaaatggtgcgtgtgttgaaggtgcctacagttcttcttgtcacttctggtggacagcagcaaggcaagagctctacagtttctgatcttgaggtactgcaatgcttaggagagcacttggccaagcacacggctttggaattttccaaaggaactgttctcaagagagggatcgaaaaatcacgaattgatcaggaaccctggcgcgagctgtatgggtgacggtgccctcatacagtttggtattagcttaattggctatacatgtttgactcggatgaatgatggtgttttatggagctggaatcacgaaggatctggtccgtcgaaaccactatatataatgtggttcctttcgcctgggtaaatcaactcatcagcaagatatcggatgtcttagaacttgtagacgctttgcagttaaacattaaacgaaatacatttacacttctaacctcttggccagtagtattcaagggttaggtttattgcctgactcgctggaatgtttatagccaaagctccaattttgctttcgaaggatatatatacatatatttttcaaaaaaaaaaaaaaaaaaaaaaaaaaaccccccccaac

SEQ ID NO: 133714 - DNA, 497 bp, Zea mays
  Clone ID: MRT4577_53435C.1
ggaacaaaacgggggacagaatcacccccctcgcaacggggaatgaaaaaggaacgggaatgaattcgacccccctccctttgccatgggcgggggttggtgcatgaacgaaaaccggaaaagaaggggctcatccatccgcccgtccgtaaggctcagttaaggccagggctcccgaccggtccatggacgtgacggaaaggctggccctggaggagctgttcccaaacgcgccggtcccgggggcggggtcgtttcccttgcaaagggcgaaggccgtctccaggttggccacaatgtcggccatggggggggggtccttgccctccagctggacccagggcacggggggggtaccccaccagttccaccgccttggccttgggcgccgggggctccggggcgcgcgggtccagcaccttcccgagctccccgcccatgatgctgggcaccgcgtagtccacccgctcacggggctcccgccctccgcctccttg

SEQ ID NO: 133715 - DNA, 195 bp, Zea mays
  Clone ID: MRT4577_53436C.1
gggaatacatccctcggcaaggcttaaaaggaccggccaaaaatagggaactgggctaagcaatgcactaaagcagcgtactaaaaagaccgaacttgggactgttcgaatctataggaacctagcaacttgctgtttcgcttgccacgggtaaattgggctgtagaacttgcgctgcgctttcagatcaacttc

SEQ ID NO: 133716 - DNA, 554 bp, Zea mays
  unsure (1)..(554): unsure at all n locations
  Clone ID: MRT4577_53437C.1
ccgggtgacngcggtgctagtgacggttgctctagatccgttcatcctggtggttttgtgaggtcgaaagcggcgagcgaattagaagatgctggacaagctgtgggacgacgccgcgggcggctgctctccctgatgcttttcctgacggaggctgcactgggcgatgctgctcaggagccaacaggaaataacgcggagatctgtctcctgccgggagactacggaccctgccgggccctacttctccgttactactacgacaggtacacgcagagctgccgccagttcctgtacgggggctgcgagggcaacgccaacaatttctacacctgggaggcttgcgacgatgcttgctggaggatagaaaaagttcccaaagtttgccggttgcaagtgagtgtggacgaccagtgtgaagggtccacagaacaagatttctttaatctaagttccatgacatgtgaaaaagtcttttccggtgggtgtcaccggagccggattgacaacagattaccagatgaacctactggtatgcggcttccgcgcaccaa

SEQ ID NO: 133717 - DNA, 2283 bp, Zea mays
  Clone ID: MRT4577_53438C.1
cgcttctatggagcctacagaaaatatggaaaagattggagaaagtttttttttatgcccttctagacagaaccgagacataaaaatacatttagttgctggtgcaatacgtgataggacatctgaaatggtggaggctctttacaacattaataaggcatatttatctcttccagagggaacagctactgctgcggggttaatagcaatgatgaccgatcactacaatattctggatggaagtaacagtgatcatgaaagcaatgattcaccaaaagcttcaaggaagccacagaagcgtggtcgtgctaggtttcaatctgtttctaagacatctgatgcacgttatgctgatctagggcaatctcagccttcttcatcaagctatggctgcctttcgttgttgacgaaaaaatgtgctggagatctgcttgtagggaacaggcctcgtgctgttggaaaaaggactccaagagtacctggtgcaagtatatactatcgagatgacaggggtgtaacagataggcgtgcaaaaacagttgctaacaatggtgatgatgaaggagctcatgtagctgcgcttgctctggcagaggtatttcaaagaggaggctcacctcaggtttctgaaacatccaaatggtgatcacatgttcctgtctcctgttaaaagtagtgacagaaaaaatgctgattcagagatgggaagctcaaagttgcatgggtttcatttggatgctgattaccccgaaggtagcttaggaagcagggaggccgagactggtgaatattgcaaaggttcatcatttttgacgaaaaatgaaggttctggtaagcctctgaagaagggaaaaaagtctcagaagaggaggaaaaaagctgcacataaaacaggtgatcagttcgaggatgacagagaggcttgtagtggaactgatgaagggcataggtcgataaagattaaagaagactcagagctggagtcattgggatggccgtctagcacgtcaaataaaagaagtcgtcaattgttttttggtggattgctaacaaaagaacagtagcggaggcccttgagggtatggcgtggattagtgatatcagggggaccatctcttgggcagttattttcgatctcctgatcctgtgcgaagctgtcacagaagttcatctacaggctgggaccaccgacaagcacttttggagattttccacttctggccagtattctgcgaaggcagcttatgagctgttcttccttggctccactgccttcgggcctttgaaaggatttggaaaacttgggctcctgccaaatgcaagttctttttgtggttggtcatgcataacagatgctggacagcagatcgtttggcaaaaagggatctccctcaccctgcggtctgtcctctctgtgatcagcaagcggaaacaatccaacaccttctcatttcttgtgtttttgcaagacaattctggttcacgctgctgcaaaagatgggggctgccgaacctctccccagacttggatgccaccaatctggacagttggtggaatagtgctgctgagaagctgcctggagaccttcaagccggctttaattctatcgtgatccttggcgcttggagtatctggcgtccccgcaatgactgtgtcttcaatggcatgtcacctagtgtgaccacggctatcacccttgctagtgatgagctgaggatgtggagcctcgctggtgctaaaggtctcaacctgctgtcagccctggtttttgtgttcgatccagggtaggggttttttcttgagtttttgggtttttgggtttgtgtgtgagttgtgctgtgttttgtgggttagtgttctggtgaccttgtggtcgctgggctgtttgggtgtgtgtttgtgtgtgtgtgtcgtggtagttttagtactccctttttatctttaatggaaagatacgcagctctcctgcgtgttcgagaaaaaaaaaaaaaaaaaaaaaaaaaaaaaaaaaaaaaagggcgaacagtctaaaaaatccaaaattacgtacgcttgcttgcggggcgctcgctctaaaaaatcgaacctaaattcaactgactggcaatggtttaacatttttataactgacaaaaacttgaattacccgaccttaattgaacaacagcgtatcgggcaaaacccagctgttacaaaattaaataggcttgaacaaattgccctttttaacagttgggcaaatatgaaaaagattgggaccaatcgctttatccaaaattaaa

SEQ ID NO: 133718 - DNA, 240 bp, Zea mays
  Clone ID: MRT4577_53439C.1
ccagaccacagcgcgacagttagtacagcagcagcagctgagagcgtgagatcgtgcgaacaggtatgtaggacaagaagaagccgattgcggttgtgagctgcaacggcgggatgctgaactcctgggcggagccattcgttccttccggggcgcggtaccgcggcctgcggaccgtggagtcgactccggagcaggaggtggaggacttctcccccgagtggtggcgcctggtgtccg

SEQ ID NO: 133719 - DNA, 1035 bp, Zea mays
  Clone ID: MRT4577_5343C.1
cattgggaccctcgttggggaccgcgcgtccgacgggggtctccgtctccgtctccgatagtccgactccacgaagcgaagccgctcaacatcctcttccgctgcgcctgcgcgcgcgggaggacgaaatacggcaagaagctactcgagaaaggccacgcacgatgatggcgtgtcggcggctggcgagggacgccgtcgcggcctcgctccggcggggcgccgccaccgagaccaccgcctccacgcccgccttcttctcctcttcctccgccgctgcgtcctcctgctcctccggcgcaccagtcgccagcagccccattcgccacttcctggcgcgctattcaagccccgctttccagatccagcctagcgctgcggggctcggcccttcgttcgccgcgagagtggcccttggtctccggccgcagttgtcaggcctcaatctgatcaaaggatttggaacaagcaccatgctagcgatgacgcttcatcagggacaggttactgctgccacaaaagagcaaccatcaaaagccatagctggaccaccccaggggtctttgaaaaccaagcttggttcattttggcctttggtcaggaaacttcagctgccagttggattgacttttctgattatgtctgggttacacagcccattaagtctcaccctaaatattttgcttctcctctactgctcaagaccaagccgctattcaatatatttgtttcttcaggagcttcgtcatagggaggtggatcaaaacatgctgtgtcgaaggaggagtacatgcgtacaagaaatattattacttttttccctctagataaatcgaacataatatgaactgcatgtcttcttttcactgccccacagaaaaaacataaaagaatctcaatgagtggttaatggcatacaaaggctcatggaccatagcaacaacaatcttctaacacatgattaaagtgctagcactaaaatgttgtgcaaattcaaaatctgcaacacttgcgaaaatgactggtgttttaaca

SEQ ID NO: 133720 - DNA, 950 bp, Zea mays
  Clone ID: MRT4577_53440C.1
gcttaagcagcgttattatgagagtgaaggtggatgtgctgctacttcccacttcccttgacgagcaacaagcactggcaatgttttctgcgtgctgacttgaccaggtactactcgacgtacggccacgtggcgaggctggcggaggagatcaagaagggcgccgactccgtggacggcgtcgaggcaaccatctggcaggtggcggagacgctgccggaggaggcgctggcgaagatgcgcgcgccggcgaggagcgaggagcacccggtgatctcgggcaagcagctggtggacgcggacggcatcctgttcggcttcccggcgcggttcggcatgatggcggcgcagatgaaggcgctgttcgactccacgggcggcctctggcagcggcaggcgctggcgggcaagcccgcggggttcttcttcgcgctgggcacccagggcggcgggcaggaggagacggcgctcacggccgtgtcgcagctcacgcaccacggcatggtgttcgtgcccgtgggctacacgttcggcgccggcatgttcgacatggacgaggtcaggtgctgcagcccgtacggggccggcacgttcgccggcgccgacgggaggagcaggctgcccagcgacgccgagctgcagatggccgcgcaccagggcagctatttcgccgccttcgccaagaagctcaaggcgggagcggccgtcgtggcctgagcctgcctgagtagtgctctctcctctctgcccatcgatgccagctgctcttgtctgcggaaataaaataaagctccattacgtaaaaaaaaaaaaaaagatagccgataggtggttgatgtgaaatcaggaacgtgtagctttcacttgtactatacttttggagtgccagcgactttctcggaaccttgctcactataaaatgtcaaattaaataagcgggtgattgattt

SEQ ID NO: 133721 - DNA, 214 bp, Zea mays
  unsure (1)..(214): unsure at all n locations
  Clone ID: MRT4577_53441C.1
ccagaacgcacctccctctccgaaacaagnagcgnacaccgctgcagnnnctagagcccncgcngccacncgngancccacnaggcacaangccngcccacgccaagcccgccacccgcaccgccaagcccgccgcggcaccgaagccgaagccggccggcgacaagacgaaggcggacaccgggggagccaacaacccaacacacgggggggg

SEQ ID NO: 133722 - DNA, 346 bp, Zea mays
  unsure (1)..(346): unsure at all n locations
  Clone ID: MRT4577_53442C.1
gtcgcgccnccgccttcgtcgaaactctcatctctctctcgatctcagccatggcgcaccgccagcattcccaggacgcggcgagagctcttcaaccgctggaccttctacgatgtccacgtgaacgatatctcgctgaacgactacctggctgtgactgcggcgaagcacgcgacattcctgccgcactccgcggggcgctactccaagaagcggttccgcaaggcgcattgcgccatcgtctagcgccttactcaactcgctcatgatgcacggtcgcatcaacggctataaggttatggccttccccttgaggaagcacaccctgtaaatcaattcacccttc

SEQ ID NO: 133723 - DNA, 525 bp, Zea mays
  Clone ID: MRT4577_53443C.1
ggagctctgagcatttaggatgttttatcattaactggcgccaggtggggaggtggggctggtgtggctgagacctgtgtaaacagctgttggaaccactagttttttgagcgttgtcagagtgctgatacaccgggacctctgtcaccctcgtggatctccgtggccggctcggcagcctaccggggctagctgcagctggctggtcttggctgtctggccgacatgcagacatgactggttatggtggtctgcggtgcggggcgcccgacgcacacactaatatatggtagctgatctgtgttttaaaaaaatgatagctacattctatcctcattgcggttatatgtggtctgggagacaaattcattgtgttgggcattgaggatgagggctgctctttatgtggcacaagcgttggactactgcagtagccaatggagggcactgtcatcatgacctgaatgcatacagggttgtatttgatgttgatggtaacccaagattatcatgttttggtctgat

SEQ ID NO: 133724 - DNA, 696 bp, Zea mays
  Clone ID: MRT4577_53444C.1
gtacgcctgcaggtatcggtccggaattcccgggtcgacccacgcgtccggtttaacttaagcaattttttggataaaagtggattgcaaggatatgatatgtctacatttattagacggtatagtagatacttaaatgaaaaagcagtttatacagacaagttgcattcgatttcacaaaagtgaagagaggagctgatggagttatgagaacaatgaacacagaaaaactcttaaaaactgtaccaattatccaaaatcaaatggatgcacttcttgattttaatgttaatagtaatgaacttacaaatggggtaataaatgctgccttcatgctcctcttcaaagatgccattagactatttgcagcatacaatgaaggaattattaatttattggaaaaatattttgatatgaaaaagaaccagtgcaaagaaggtcttgacatctataagaagtttctgactaggatgacaagaatctcagagtttctgaaagttgcagagcaagttggaattgacagaggagatattccagatctttcacaggcccccagcagtcttcttgatgctttagaacaacatttagcttccttgggaggaaagaaaatcaaagattccacagctgcaagcagggctacaacactttccaaatgcagtctcttctttggcaagcactggcctatctctgaccaaa

SEQ ID NO: 133725 - DNA, 263 bp, Zea mays
  Clone ID: MRT4577_53445C.1
tggtcgtggccatggcgtcgtccatgctctccgctaccaccgtgccactccagcaggggggcggtctgtccgacttctacggccttaggagctccgagtatctgcttatgcgtggtaaaggcacttcggagaggtcggtgtctgcaagctcaacaaggttatcaactttaatccagaggactgagtatggaatagcaatttaccctccggaccgtctgctgtacgtgctgccactgataggataaatagcgatgtacctgacg

SEQ ID NO: 133726 - DNA, 300 bp, Zea mays
  Clone ID: MRT4577_53446C.1
aaaaaaaaaaatcgttccatccctgcgagatctgccgtgcttctccccttgctccccgtaccgactcccggttcttttctccggttcctcggcgatggtcgtctgcaaatgccgcaaggttacttgatcatttctccacctattcggcgatgcccgtgcggtgtcctgcgtgttctgtctgttgcgcgtcgacatgtgaggggggattttggatctgggcaggggaagtacgcggtggcggatttggcgttcgcgtggtctggatctgagagggcactgcgagcgcggattcgaaatttt

SEQ ID NO: 133727 - DNA, 169 bp, Zea mays
  Clone ID: MRT4577_53447C.1
ggccaaaacgaaagaggtacggttatttcaggaagagataaagacataactgaagacatgaagaaaagacatgatgacagaatacatggcaaaaacttgttgctaacaaccctttgatatacagagacgtaaacgcaccacatatgctacacaatcatgacaactagat

SEQ ID NO: 133728 - DNA, 248 bp, Zea mays
  Clone ID: MRT4577_53448C.1
cctacaccgccatagctaggcagccgtcttagccacgccaagctagaagcaagagcaagcgtcgctgctaccaacccgagctacaccaccgtcccgctcagataggagatcggggacgaccaccgtagcatgccacttgagcccagcgttcggaatttctcaacggcgaggaaggccgcaagaattgctgcacgactcggctagcgtcgtctatgcctccatcgctgagcgaggttatgagtcatctg

SEQ ID NO: 133729 - DNA, 347 bp, Zea mays
  Clone ID: MRT4577_53449C.1
ctcaatgattaaggcaacgacattcccttttagtagttatatacacaggctaatagcttatgaaatggcttggatggacagtacccgtttcattgagtattaatagcaagatctcgtgtgatgctcgacttggtgctgggcaaaatatctgagatacgaaaccctcactgacttggtcgttcttgctgacatcaagaccgattcagttatagtgagttatttccctatttcagttaattagtttaactagtggaccgaatagaatataagtcggcctgagtgatgaaatgatataactgcttgtaacggtgtgattcgattattactttacctgctacgacataaaa

SEQ ID NO: 133730 - DNA, 474 bp, Zea mays
  Clone ID: MRT4577_5344C.1
gctctcccccgctccgtctccctcccccctcctcccccgatccgctccctccgccgccagatgccgtcgagcccccccgcgcccccgcgccgaaaaggagggagtgcatctcgatccacatcgggtaaggcggcatccagaccggcaacgcgtgctgggaactttactgcctccagcactgaatccagcctgatggacagacgaactgagacaagagcatcaggaggtggagatgacgccttcaacagcttcttcaccgagaaaggagccggcaagcacgggccccgagctcgcttcgacgacctcgagcccaccgggattgacccggtccgcaccagcgcctaacgacagctcttccactcctagcagatcatctgcgacaaggaggacgcggccaaagacttcagacgcgctcctgacaaaatagacacggaaattgaggatcactgcctggaccgcatccgcaagctggcc

SEQ ID NO: 133731 - DNA, 376 bp, Zea mays
  Clone ID: MRT4577_53450C.1
cccactgcgtccgccacgcgtccggtcgcgttgtgttgcgttgtgtcggaggttggagttggagcggctcgcgtgcgagaggatctgagcggagaaggccatggaggagagtaattagcggttgctgggtcgggaggaggtggtgtggttttgatcgttttcgcgttcgccggggctggagggggggggagattttttttttaccggatattctttgctcggtgacttgttcgttctcggtggggttgatgctttcatcacctttttctttgtgactgccgctgggaatcacgtccctcttgctgtttttggtgaccttggacctgctgtcatccttgctgtgaggactggcacctacctgtctctcttcctccct

SEQ ID NO: 133732 - DNA, 382 bp, Zea mays
  Clone ID: MRT4577_53451C.1
acgcaagctcggaattcggctcgagggctttaccaccagggtgttgcccccccggtcctgtctagtgactaccccggcccccaacattggcctgctgctgctgccatgtagcccaccgctcccccctacgattaaccagctgtgcccaacatccactgtgaaaactacataggatgctagctacgacggtggtgcgtgcccagccgacgatagggcgcgcggggcgcgggcagcttgtaagcgttcgatcggacatgtagggcaactatacatgtcatggcaggaccccatcatactccgggggagagaagatgcatgggaatggagtgcgtgtgtatgtattatgtatgcccatggcgcgcgcgcgcggcactggtcgagt

SEQ ID NO: 133733 - DNA, 366 bp, Zea mays
  Clone ID: MRT4577_53452C.1
cttctagtgagcaccaccaccctcaggaggtggaggtggtcacctcaggcgtcctgatgctcatcctccccaagggcttctaattcgtcttggacaacaaggcctacctgtactccatcaccctactcaacatgctcacatcggccggccgcttcttctagacgcgccatgaccaggttcgctttccgtagatccacacccatatgctcgagacgacctgccagtactagtattggccgatccattattccagtggcaagcagacaccatagcttctgatcgaacccaataccaccctggagctgatgatggctcgaaactacacgtacacttgatgaggagcctgtaggatctaaccgctatgac

SEQ ID NO: 133734 - DNA, 417 bp, Zea mays
  unsure (1)..(417): unsure at all n locations
  Clone ID: MRT4577_53453C.1
cccagctccgaattgtgaagtccacattgtcacctttgctgagaagcacactgcgtcaaaagcaactcggggggaggaagatttggccttggaggtggcgggagtattctctggtggcggccctgtgggcggcttccccggtggcccccagagcataggtggcgttggcgccaggggatgcgggggcaatacattgaacaggaggaatcaaaagctgctgccatcttaacagactttacaatgacgcaattgtcaggaagatggggagggaatatcctcaagtttagctgccatagtatcagggtgctgcccttactgatcgtgcgacaacgagaatactacacacanttttgccaacgctnnnngntnnntnnnngcaaaanaaaaaaaaaaaaaaaaaaaaaaaaaaaaaggaaa

SEQ ID NO: 133735 - DNA, 475 bp, Zea mays
  Clone ID: MRT4577_53454C.1
ccattctcacccaaaggcgggctttttttaaaaaaatggggggggtttaacatattaaaccatttacttcccaatattaatcgccacaaaacacctcacaacatttgtcattttacaatttattttctatgctcgctccactttttgtatatttttacaaatggacccttcattccttcctattccttttcatcgcatacgatacattcattatcactttacatgtcacactagagccaaaaatcaatgtctactttgcaagactgcttgcacttgtagcttcccttgcttttctaacctacctgtactgtaaccttttgctatctcctctatacaactgcctttaaaaggtaccatccattcaagcactgtgatgtcaccacttgcttttttccaaacgaatttaatatgcgccctttttgttcccatgaccatggactcttttacccccacaaaacggtaactgacccctctt

SEQ ID NO: 133736 - DNA, 101 bp, Zea mays
  Clone ID: MRT4577_53455C.1
ttttgctttagtaaaactaagtaacatcaactgtgagccaacttcaagtactatgagtgaggatcactccaactatgatagtagtgtatagctacacattt

SEQ ID NO: 133737 - DNA, 344 bp, Zea mays
  Clone ID: MRT4577_53456C.1
gaaaccagaaatttcaaagtgccaacccttttgtgggtttgggcttaaatgccctgtttaaaccgacctttcaagagttcgtagaaaactgagagatgttaatcacattcatccaggggacctgcattcccaaggacagtctagggattcacaattggcccaagcaaatgggcctttcactttcttttgacaaaaaggtcaaaaactggaatgcaccaataattcatttgccagaacctccagaagttccgattgggatctttttaaggagccatggaccataccatgccaactttcacttttgacaggataggcactacaaagcccgaaaagttgggccggac

SEQ ID NO: 133738 - DNA, 248 bp, Zea mays
  Clone ID: MRT4577_53457C.1
atggttcaaaccaccgcggagacgagggacactcgggggagatttaaaaaccccccgaggcggagctgcccccagccgaagctgcccccaacgccgacccgcgccccacacacctccggacatgagcaccatcccagagaatccctcaagacccctgctcatctaccatggtggccgcagggagctcaggatccatggccgaagacctctgggcgagagcagaccttgactcactccccagcaacaga

SEQ ID NO: 133739 - DNA, 699 bp, Zea mays
  Clone ID: MRT4577_53458C.1
ttgggaccctcgaggccggccggggggccgtcgcagagcccggcgtcggcgcccagatctcgttccgacggcagcacgtacgccggcgagttcaagtgcggcgtgaagcacggtctcggctgctaccatttcaggtaaacaacgtaaaacatgcctgccaggaatggcgaccggtacgcaggtgagtacttcgcggacaagatccacggcttcggcgtgtacagcttcgccaacgggcacagctacgagggctcatggcacgaagggaagaagcaggggctgggcacgtacgcgttccggaacggggacgaacgggcgggggagtgggactctggagtcctgaagaagtcgctgcctctgtcagacccagctgtccagcgcgccctacaggctgctcggagggctgcgaacggcgccttccacctcccgagagtagaggagcaggtgaacggggccgtcatggctgccaaccgaggggccacggccgcccgtgtcgccgcgatcaaggcagtgcagaatagggtcgatggcaagttctgcttcatcgacgtgtgaagtgggtccatgaatcgtgtggcaacaagcttagttgctgaggttcgcgcgaccggagcagcacaactgcgtgctccgtgttggagaggtcagtatatatatggtagccaccgaagggtttgagctgctgcggttttcatcatc

SEQ ID NO: 133740 - DNA, 167 bp, Zea mays
  Clone ID: MRT4577_53459C.1
ttctgtaaataactttcttttattaataatatgcagtatgggcgggggtgcaccgcaccacaaaaatggaatctataaaaagaaaattactcgcattctgttattacactacaggtaccatcaggctcaatatgtttgactacatgacctcagcctatagacaaacg

SEQ ID NO: 133741 - DNA, 445 bp, Zea mays
  Clone ID: MRT4577_5345C.1
gaatccgtatgacactcgtggatcaatgtcatgcccatcacgagcttgaaaaaaaaaaaaaaaaaaaaaaaaaaaaaaaaaaaaaaaaaaaaaaaaaaaaaaaaaaaaaaaaaaaaaaaaaatgcacaattgaaaaaaatacagaacaaaactagaacaatgagaaaaaaggaaatccccaacacgggtcctttcgatatacgacccggcggccccttttggaaggccagaaggggctaccccaaaaaaaccctccccctttttgcccccctaaaaaaaaccccccggggggccagatttttgttaaaaaaaaaaaaaaaaaagggccccccaggcccccagccccccccttttgccccctgtaagggggtccaattcccccctgggggaataccggggaacatgggttccccgggggaaattgttttccgctcactttcccccc

SEQ ID NO: 133742 - DNA, 652 bp, Zea mays
  Clone ID: MRT4577_53461C.1
gaatcctattactagcctcttccttcagccccatctctaccagctcccagcgcagctcgtcggccggttgctccgatagctcagtcgatcgcctacctcggttcttgctcgcaatagccgcctccatggttccacatcagcgagcctagcaagttgctgtactactagtccctggcctcaggattcaaggagagaggcgtccccaccgcggctgggcgtgggtagtgcaactgctgcaaatctgcaagtaccaccaccgcatgcagcagctgccgtcaggtctcagggctcacatgatcggatcgcccgcccgcgagatctgatccgtgtgtgtgtgtggagctgatcaggaattcggcagcagcagctagctggctggttgatcgatcgaggggggagaagagaggatcgagatgatgctcaaggatttcgcggcaattcagcagcagcagcagctggccctcgccgccgacgagaacatgtcgaatctcacctccgcctccggcgaccagaccagcgtctcctcccaccccctcccgcctccttccaagaagcgcagcctaccgggaaatccagaccccgacgcggaggtgatcgcgctgtcgccgcgcgcgctgatggcgacgaaccggaaccgtgtgcgagatctgcg

SEQ ID NO: 133743 - DNA, 1376 bp, Zea mays
  Clone ID: MRT4577_53462C.1
attcggcaccagcagggattgaaagctgttttagagagtaatctgcagttaacaaagttgggtattttcggtgctttccggattactcatcaaggtcttgttgacagtctgaggtcatttagtatggaagcagatattggtatcaagaaactcagagttgcaaatcgtgtcactgcatcagaagtgcaatatgtagagctgttgtccttgatgaaaatagacaaggagatgccattacacaaacaggagcctcggatctttcatgctgatcgtcttttaccagatcttcatggtggatatgttcctgattctttcgtaccagatcttcatgatgagtatgctcttgatattgagaagtgtcctctttgtccgaactacaagcttgtttatgattgcacatcaaaggaatgcaagaccagcggatctagtatttgcagagggtgtgttgtttgcatctctagatgtttgcgatgtgggagatgtatcgacagtgagtttgaatttgaagagacattttttctggggagcatttgccgtgactgtgtcaagtattcaccccaccacagaaaaatagatgtttgattctgttatccattggatggatacagttgtaacattggatttctgtgattgatgctcccatccatcagacatcttgactgagtatttctaacaaggaaaaaaaagagagaaaggtctaccagtttgctatcggtgtaggtgcagcagctgatatattgtttttgcttgcaagaaaaacgaaaaaaaacagtataacctaggaaatcagaagatcaaagtatggtttccgtatcatggtgtcagcagtgaatggtgacaactgacaattgctggatgtttccttctggaataatgggagtgctctgctcaggagtgttgaagtacaacagcatactttttttttctctccagccggttgcttgatgctgcatgttcctggaacgtcagaagtaatttaattcattggcccaaaaataaaatcagatgtatctatctgtcccttacgttacctatctaattgcgtggctgtgtgctattacttgacaattgacaaatgtaatactagttactttctaggttgtagacactttgtaccacgtgatttattagaataaaataaagacaaacctctaacccaactagattatatcgcgactgcatatgctcaggtgcctggttttgccaggtgcgtttcagttctattttctggtggctatatatctgtcatcctgttgtggttgtggctagtctgggaactgtccgtcttttatgtgctggtgagcgaaataaatggccattctttgccactgtactgctgatgaaagctgaaacaaagcatgcaaagggctgcgtcc

SEQ ID NO: 133744 - DNA, 145 bp, Zea mays
  Clone ID: MRT4577_53463C.1
cccacgcgtccgacaaaccttatatgcacacgtaagctgacgagttcgaggacgcgtggggtcacacgtctgtaacaaccttgatcttcagtgaaggattcgagttgtatcactccatgcgagaccctaaagaagagcaactatg

SEQ ID NO: 133745 - DNA, 607 bp, Zea mays
  Clone ID: MRT4577_53464C.1
ttttttttttttttttttttttttttttttttttttttttttttttttttttttttttttttttttttttttttttttttgggggggcaaatactaggcaaaacaaaaaaaaaaataattttttaaaaaaaaaggaaccccctccccctaaaaaatctaatctcccaactaaaaattcaacaaaaattaaccccggccccaaaaaaacagccaaaaatttgctcactcaaaaaagggacttgatgggacctggccagggacccatcctaactttaaaggcagggaccccagtttatgctttgttgccccaaacttaagggggcatttcctttggaaaacgaagggtatccagtccataaaactggaccatttaaaaaccctggggatcccagggcaagtttttaatttcaaatgggaaaagcgagggaccaaatgcgttttgcttcccccaactggaaaatgccctttttgaataagcgctttaaaaaaaaacaacttttgcaaattttgactttttaaggaacaaagtttcaccctccaaaaaggggccataaaaacggaatatgcttttggtgtcaaaaaaaaaaggaaaaactttgggacgggt

SEQ ID NO: 133746 - DNA, 248 bp, Zea mays
  Clone ID: MRT4577_53465C.1
ttttgaagttgcaaaaattagaccagagtatcagctttgggttctcaatgattgtgtctggacagatcctagcttaacagtttttaaggcacttgaacttagcaaacaaatcaaatcagatacaaaaaaatcagatgtatcacaattaccaacattagttttacatttaatccaaccagtggcaagtaaaaatgcggaatttaatgttttgttgaagcttgatgacctgcgaattgtggtcaatctca

SEQ ID NO: 133747 - DNA, 410 bp, Zea mays
  Clone ID: MRT4577_53466C.1
ccacccgcttaaatagactggggttttaaggaacaatggcatcagtcccgaacaaggcgtagttattccttttgcaggtgtgtcacaattttagcaatggggggggggggacaagtcccaacgtgggtctttgtaatacaatggcttgaatcccagagtagagggatccaatgccggcaatttgggtaaaaaccccagcgaagcaagaaagctaggggtttactttgcacgggtcgacttcagttttccgtttttttccatttcaagaacgatttcacatcccccaatcagctccgttttgtagtaaagctgggggaaggtaggccatttggagtacgtttttaaaccttgcctaacttcctcggcggataaggagttcgaggggacccaaagttgacccctttcttttt

SEQ ID NO: 133748 - DNA, 664 bp, Zea mays
  unsure (1)..(664): unsure at all n locations
  Clone ID: MRT4577_53467C.1
aattcggcacgaggccgcgtcccttcgcacaactaccagatccatttgtgcgttcacatcttctctcctccctggcaactgcttccatcatctccatcaccgtccccacgttctcctccctccgcctctcgctctgcgcacatccccatgcccacgccgagcgcttgcgcctcaccacccccgtcgcagccgcggccgtggcggcgtcgacgacctcccccgactttcccgccgtgggcgccgtcctggggaagcccacagtgctcgtgggtagtggccgagaagatcggagccgcggggttcatgctgaaggaggtggtgcgatgtccagctcccaggtcgtcgtcctcacgctcctggagttttggtcagtgagatgttcgtcttcgtgctcagcctcgtcctcgagtcgtcgcgcaaacagcgagagcagcgtgggtctcatcatcaggatcacaccaacagggacggagatctgtcgtcgaagaccacctgactgtttctcatggcaggcttgcttgcactagcttggcacaataagccacttcaggcttcagtcggttatgtgatcaccggaacattatgggctctagagtangacttttgagaaatgctangcgatggtgcatgcatgatgaagctgctgtccattatattgacatga

SEQ ID NO: 133749 - DNA, 2043 bp, Zea mays
  Clone ID: MRT4577_53468C.1
gacaccgtgattcaccgccccacgcgctccagcaccacacagaagcttcgggctccatctgggactattgagttccgaggcgaacgtacgtgccctgggtgctcgaggtgcgtactacgatcgcgcgcaggcgcttgacacgaacctagcgaacaggacgcatgggaatcaagaagggcggctgcacgagctggctgaagcatatactgttgcggagcttgagcctgggacgcttataggatcgcgagcagaagcgggttcgaagagtaggaggacgaggcgaatggaacagcactatcggacaacgtgccgagctggcactgcttataacatgccgaagtcgcgccagccatcagccgcgtcccttcgcacaactaccacatttgtgcgttcacatcttctctcctccctggcaactgcttccatcatctccaccgtccccacgttctcctccctccgcctctcgctctgcgcacatccccatgcccacgccgagcgcttgcgcctcaccgcccccgtcgcagccgcggccgtggcggcgtcgacgacctcccccgactttcccgccgtgggcgccgtcctggggaagcccacagtgctcgtgggtagtggtcgagaagatcggagccgcggggttcaagctgaaggaggtggtgcgatgtccatctcctaggtcgtcgtcctcacgctcctggagttctggtcagtgagatgttcatcttcgtgctcagcctcgtcctcgagttgtcgcgcaagcagcgagagcagcgtgggtctcatcatcaggatcacaccaacaggaaatgctaggcgatggtgcatgcatgatgaagctgctgtccattatattgacatgattgatcagaccacgcttggtcaccggatgatcaagaaacaattcaacaagactccaagagctggctggcaaatcgattgcttggaacagagcttggcttcgattctgcattttgcaagaatcgaaccaagataagacctggcaaaggctatatggcctcaagaactttcggttcatcttcacagcatatttacaaatgtatttcctgtcgattatagccctccggatggctttggctttgaagttgtagatgaaaatatcttgcctgtctaggtacataatgagttaatgattttgttgctgtagccatagaacaggcaaattttacgcgtacaaaccacataatgtggaccatgggagatgattttagttatcagtatgcagaatcttggttccggaatatggacaaacttatctatcatgtgaacaaggatggccgagtgcatgcactgtattctaccccatccatttacacagatgcaaaacatttgtcaaatgtatcttggccagtaaaatatgatgggtatttcccttatgctgattcgaaaaattcatattggactgggtactatacaagccgtccaactttcaagcgatatgttcgagtgttgtgtggttattacctggctgcacgtcaaatagaatttttagtaggtaggaggagttccttagggttgttcacgaccagcttggaagacccaatggcaattgccctgcatcatgatgcagtctcagaatgaaagcattaatggtataatgttggatatttcattcagagaggctcaagtgatagctgcaagtagttctaccttgtgcccagttttcttgttcttttaggaggtggagaggtgggaacatgacatgactactggccccggcgacgggggaaacagaagcgacaaggagcgggcggaacatgatgccaccacaagcagctccttgccgccacctcctacttcgacatgctcaacggcgcctctcgcaaccgtgtgtactgcctcgccatcggcgccatggtcacggaccccacatcccatgtcctcggcatcggaactgggagatggttactgtccatgatggttgcacgagctttgatagctgttggaggtgaaggaaacaacacacatctgtccatgatggctccgtgatcatcgagcgacccaacacgagcgttatgccccccctcg

SEQ ID NO: 133750 - DNA, 1861 bp, Zea mays
  Clone ID: MRT4577_53469C.1
atcgatgcgctcgtcggggccggcgggcaaagccaccagtggtcagagatctagctatggcgccggcgcttctgctgctgcgacttctggcattgattgcgacggcaagggaggcctgcgcggcgagggcgttcgccgcggcgtccaacgcgacggcgcatggggcgacggtggtggccgggaagctgaacgtgcacctggtgccgcactcgcatgacgacgtcgggtggctcaagaccgtcgaccagtactatgtcggatccaacaacagcatccagggcgcgtgcgtgatgaacaccctcgactccgtggtcgacgcgctcgccagggaccccgcccgcaagttcgtcgtcgtcgagcaggcttttttccaaaggtggtgggcagagaaaatcccaaacattcaggcagtagtccgcaagctcgtggattcgggtcagctagagttcataaatggtggatggtgcatgcatgatgaagctgctgtccattatattgacatgattgatcagaccacgcttggtcaccggatgatcaagaaacaattcaacaagactccaagagctggctggcaaatcgatccttttggacattctgcagttcaagcttatttgcttggagcagagcttggcttcgattctttgcattttgcaagaatcgattaccaagataaggaaaagcgtaaagctggcaaaggcttagaggttatatggcgcggctcaagaactttcggttcatcttcacagatatttacaaatgtatttcctgtcgtcgtagcccacctggctgtttctcatggcaggcttgcttgctctagcttggcacaataagccacttcaggcttcagtcggttatgtgatcactggaacattatgggatcaaaagtatgccttttcagaatgacatgctgatgtttgactataatgttgaagaacgagttaatgattttgttgctgcagccatagaacaggcaaattttacgcgtacaaaccacataatgtggaccatgggagatgattttagttatcagtatgcagaatcttggttccggaatatggacaaacttatctatcacgtgaacaaggatggccgagtgcatgcgctgtattctaccccatccatttacacagatgcaaaacatttttcaaatgtatcttggccagtaaaatatgacgattatttcccctatgctgattcgaaaaattcatattggactgggtactatacaagtcgtccaactttcaagcgatatgttcgagtgcttagtggttattacctggctgcacgtcaaatagaatttttagtgggtaggagtttcttagggatgttcacgaccagcttggaagacccaatggcaattgcccagcatcatgatgcagtctcaggtacagcaaaacaacacacgacagatgactactcgaaacgccttgctcttggagcatctaaggttgagaaaggagtcaatgttgctctgacctgtttactaagttccaacggaacatgtgcgccttcagtacaaaaatttagtcagatttacctgaccacactgtttctcttattgacaattcaagtgcccacttctcaatataagctactgcccttcaactgaggaaacagtttcaggggcaaagaatttagttgtagttgtttacaatcctcttggaagggaacgtagtgacttcatacagattcctgtaagcgcctaacaacttcataaaatgtgttaagttggttgcaccaaccagtttaacccaaaagcttaacctggtgagaagaggtgggcaatccacttatattccaacaaaatgtaacactcaatgacaacttcactcggtataataaccattggtcataatctatt

SEQ ID NO: 133751 - DNA, 977 bp, Zea mays
  unsure (1)..(977): unsure at all n locations
  Clone ID: MRT4577_5346C.1
cgcggncgcgtgggtctcggccgacgcgccagagttcacgcggtccagcttggggcgagcggtggccgcagccgccgccacggtgcggtgatagccgccccaaacaacgccggcgtggggaaggcggcgcggaggtctgcaagcaataatgggcaacacgcagagtcgacaatgcctacatttttcaagtctcacaggtctcagtgggatgaaacagtgaaaagaacaatctttgtcaaatacattgatcacaatgtcactgaggacattctggcttgtctatttcagttgtttgggacagtggtggattgccgcatttgtggagatcccacatctgatgatggtctcaggtttggatttgttgagcttcaacacgaggatgaagcaattgcttcgttggatcttgatggatatattattagcgtatcccctttgagcgtttcacgctcaaggactgcaatctgccctattaaccccaagttccttcctcagtctgaagctgagtgggagacgtgcttgaggactatatattgcaccaatatcagcaaaaatgtcacaagtagtaatttgagatccttttgtgaggcgtactttggcaaggtgtgtcgcgttaggcttctggataataaagagcgctccaccaatatagctttcattgagtttgttgaggtttatggtgctattgctgctcttgggtccggtggcatttatgtggatggcgttcctatcaggatgtgcccatccaagagcccgataaggacccattgctttgggaagcttagtagctaataagctggagtgcaggacctaatgccatcatggtgtgtcatgatccggcaatatatatctgcatattatccgttgcatttggttgactcatgacatgagccatgaacaacctttaaacttttgctttagctttaatgccccagaacaataacaacaacaacatttcagaataaaaacacaaaaaacac

SEQ ID NO: 133752 - DNA, 1271 bp, Zea mays
  Clone ID: MRT4577_53470C.1
gacgagtcgtccgtcccaggctcccagccccggcgccccgtctcaaatcaaaaaaactcgactcagatctcaaacccataaaaaatactgtattttccaaccaagccactcgcccgaccttcatccgcattccacgcgcactccgctgcctcactccgagactccgccgctgcttccaacttccgttgcgcacgagcgaaacatccggagctagcaagggaggaggaggaggaggcgatggcggggggcggggataaggtggactacgtcttcaaggtggtgctcatcggcgactccgctgtcggcaagtcgcagatccttgcgcgcttcgcccgcaacgagtttagcctcgactcgaaggccaccattggggtcgagttccagactcggacgctcgtcatcgaacacaagtccgtcaaggcgcagatctgggacaccgccgggcaggagaggtatagagctgtcacaagtgcctactacagaggtgctttgggagctctgctagtctatgatatcacaaaacgccagagcttcgaccacatacctcgctggctggaagagcttcggggccatgctgacaaaaacattgtgatcatgctggttggcaacaagagcgacctcgaagacgagcgtgccgtaagcaccgaggacgccaaggagtttgccgagaaggagaacctcttcttccttgagacctccgcgctgcaggcgaccaatgtagaaaatgccttccagaccgtcttgacagagatctttaagatccacagcaagaagaacatggcagcggacccaagggccaatggggccgcaccatcgctggcagggaagaaggtcatcgtcccaggcccagctcaggagatccctaagagcaagtgctgcagttccatgtgacatgttgcctgaattttatttgggtttgttcgtgtccgagggaccgatatcgtagtttagatttgtcacccgtcttcaagatgacgaggatagggagcgagaagaaaacatatgtttgcatagactttgttggattttacaaaaatagcagtgtaagcacattattttttccccgatgccttgaaacccttgtgtacagtagagatggatcctaaacatcttaattacaggataaatttaatatttgaaatagatatgtataaaatatgatgttaatatttagttatgctgttaaacatattatggaaaaacaagactaaatttttgtatttttttgcattaatcatctggatctgtatctatatttgaatgttatatct

SEQ ID NO: 133753 - DNA, 1510 bp, Zea mays
  Clone ID: MRT4577_53471C.1
cctccgcacaactaccagatccatttgtgcgttcacatcttctctcctctcggccagctgcttccgtcatctccaccatccccacgttctcctccctccgcctctcgctctgcgcacatccccatgcccacgccgagcgcttgcgcctcaccgcccccgtcgcagccgcggccgtggcggcgtcgacgacctcccccgactttcccgccgtgggcgccgtcctggggaagcccacagtgctcgtgggtagtggtcgagaagatcggagccgcggggttcaagctgaaggaggtggtgcgatgtccatctcctaggtcgtcgtcctcacgctcctggagttctggtcagtgagatgttcatcttcgtgctcagcctcgtcctcgagttgtcgcgcaagcagcgagagcagcgtgggtctcatcatcaggatcacaccaacatggtaagcctgtcattggtcatgactgccatccgcgacgagccggatctcaaagaggcggtaatactcaggcccttgggccacacctcacacctctgattgaggtgttcccgaaaccatcgacttgaacattttttcagatccagcaaaaagcagatccaaaacggatcaagaaaataatgtttcagtttcattcgcgagtttagtacatgattaatgtattttctcgttggactccaatctgccaattgatttttagcattgtttgcacaaaggacggagatctgtcgtcgaagaccacctggctgtttctcatggcaggcttgcttgctctagcttggcacaataagccacttcaggcttcagtcggttatgtgatcaccggaacattatgggctctaaagtaggacttttgagaaatgccaggcgatggtgcatgcatgatgaagttgttgtccattatattaacatgattgatcagaccacgcttggtcaccggatgatcaagaaacaattcaacaagactccaagagctggctagcaaatcaatccttttggacattctgcagttcaagcttatttgcttggagcagagatatgctcaaatgtatttcctgtcgtttatagcccttcaaatggctttggctttgaaagtttaggatgacatgctgatgtttgactataatgttgaagaatgagttaatgatttttgttgctgcagccatagaacaggcaaactttacgcgtacaaaccacataatttggaccatgggagataattttagttacaatatatagaatcttggttccggaatatggacaaacttatctatcgcgtgaacaaggatggccgagtgcatgcgctgtattctaccccatctatttacacagatgcaaaacatttgtcaaatgtatcttggccagtaaaatatgctgattatttcccctatgctgattcgaaaaaatcgtattggactgggtactatacaagccgtccaactttcaagcgatatgttcgagtgctgagtggttattacctggctgcacgtcaaatagaatttttagtaggta

SEQ ID NO: 133754 - DNA, 647 bp, Zea mays
  unsure (1)..(647): unsure at all n locations
  Clone ID: MRT4577_53472C.1
ctgcttttttgattaggtagcataagggatacagcnctagagtacccaagcgcacagatgtgtggtggttgtcttcttcagtactttgtactgaaatgaaatactccctgacccactgggccaattggttcgatgaccttgatgaatttggtcgacccaaagccaataattagcttttaggggaaacattgcaacccagctgcaccaatgcagttgatacagatgtcatagcacttcacacttttatctgaaacctcatatctttgatgtactatctagtagcttgacagcttctcatgcttgttgtttcaacaactgcaggtatagagctgtcacaagtgcctactacagaggtgctttgggagctctgctagtctatgatatcacaaaacgccagagcttcgaccacatacctcgctggctggaagagcttcggggccatgctgacaaaaacattgtgatcatgctggttggcaacaagagcgacctcgaagacgagcgtgccgtaagcaccgaggacgccaaggagtttgccgagaaggagaacctcttcttccttgagacctccgcgctgcaggcgaccaatgtagaaaatgccttccagaccgtcttgacagagatctttaagatccacagcaagaagaaca

SEQ ID NO: 133755 - DNA, 472 bp, Zea mays
  Clone ID: MRT4577_53473C.1
caggccggccgggaacccataaaaatactgtattttccaaccaagccactcgcccgaccttcatccgcattccacgcgcactccgctgcctcactccgagactccgccgctgcttccaacttccgttgcgcacgagcgaaacatccggagctagcaagggaggaggaggaggaggcgatggcggggggcggggataaggtggactacgtcttcaaggtggtgctcatcggcgactccgctgtcggcaagtcgcagatccttgcgcgcttcgcccgcaacgagtttagcctcgactcgaaggccaccattggggtcgagttccagactcggacgctcgtcatcgaacacaagtccttttttgcgcacatctgggacaccgccgggtatgagaggtatagagctgtcaccagtgcctactacacaggtgctttgggagctctgctagacttgatatcacaaaactccagatctt

SEQ ID NO: 133756 - DNA, 1137 bp, Zea mays
  Clone ID: MRT4577_53474C.1
ccctcctacaacccgacccgtttgcccccctggtctcgctcgcctctccctcgcttccttcgcttcgactcaaatcaaaacctccacgacccacacgcctcgctcgctcactcctccggccgccgccaccgccgccgttctgcacgagcgaagacgatggcgagcggggagaaggtggactatgtgtttaaggtggtactgatcggggactcggccgtcggcaagtcgcagatcctggcgcggttcgcgcgcaacgagttcagcctcgactccaaggccaccatcggtgtcgagttccagacgcgcacgctcgtcatcgaccacaagtccgtcaaggcccagatctgggacaccgccggccaggagaggtacagagctgtcacgagcgcatattacagaggcgctttgggagctctgctagtctatgatatcaccaagcgccagagctttgaccacatacctcgctggctggaggaactccggggtcatgcagacaaaaacattgtcatcatgctggttggcaataagagcgaccttgaagatgagcgggctgtaagcactgaggatgccaaagagtttgccgagaaggagaacctcttcttccttgagacctccgcgctgcaggcgaccaatgtagaaaatgccttccagaccgtcttgacagagatctttaagatccacagcaagaagaacatggcagcggacccaagggccaatggggccgcaccatcgctggcagggaagaaggtcatcgtcccaggcccagctcaggagatccctaagagcaagtgctgcagttccatgtgacatgttgcctgaattttatttgggtttgttcgtgtccgaggtattctcagcatctttgtggatgtataatactggaataggcttagatttgaattgctggttaacttgattttcggttttgaagggaccgatatcgtagtttagatttgtcacccgtcttcaagatgacgaggatagggagcgagaagaaaacatatgtttgcatagactttgttggattttacaaaaatagcagtgtaagcacattatttttccccgatgccttgaaacccttgtgtacagtagagatggatcctaaacatcttaattacaggataaatttaatatttg

SEQ ID NO: 133757 - DNA, 546 bp, Zea mays
  Clone ID: MRT4577_53475C.1
atggagctctggccacggtggccatggaaagatggtgatgcaagaaataagagtcctcagaaggtgttgcggcattttcctttgattcctagattgaggaggatgtttgctacagcaaaaatatatgaggaggcacagtggcacaagttgaagaggaaagaagtggaaaatgagcttagccatccagctgacggaaaagattttgatgtatttctagagccactagtttatgagttacaagaactttggttgggtgtttctacttttgatgcactgagtaggaaagattttgatctacatgctgctgtaatatggtgtattcatgactatcctggtttgagcactttgtctggtagagttacgagaggatactatgcttgtgtccattgtgacaaagatccttgctccagaagaataaggaataaaatatgctatattggtcatcgacgttggctatcacatgaccatccatggaggaaaaagaaggattatgatggccaaattgagaaccgtgataaaccacaacaatttagtaccactgagtag

SEQ ID NO: 133758 - DNA, 562 bp, Zea mays
  Clone ID: MRT4577_53476C.1
agacctcctgcgccgcgccgccccgccgtgccgtgtccttgcacacggcggttacccgcagctaccgttagcggaggctatggcattgggcgcaacccgccgcagcacgaggcgatgggcgccaaggagcgcggcggtggtgcggtgcgggctgttgcacgtggagccgtgggcgccgacgatggactcccagagcatggcctctcagttcttcgccgtttcgctcttcccctacctcggcttcctctacttcatgaccaggtccaagaccgctcccgggctcacgctcttcggtttcattcttcctcctggtcttcgtcagcgccaccagtacgtgttacttctccgatccccccagtccctactctagtttcgcatgtcagtgtttggccaaatcaatgtagtgttgtgtagtaattcctcataccttggctgcacctgccatgcaaatgagatggtaatgcacaagttgtgcttttgccgattgccatcggtagatcactagtaactactgtgtagtattgtagtagtaatgtgcttataacttggatccgttattctg

SEQ ID NO: 133759 - DNA, 242 bp, Zea mays
  Clone ID: MRT4577_53477C.1
gttataatccgttaggtgagcaaaaaaaaaaaaaaaaaaaaaacaaaaaaataaaaagggacataaacactgcgcggtatcaacttgaaaccaatgttaaatatgatcaagcctgtccaatatgttaccttctcatctgataatcaaacgttgttctcttgcacactaattttaaacactccagttgaacttccttacttctatcattttaactttttaccatatatacctattttgatacc

SEQ ID NO: 133760 - DNA, 254 bp, Zea mays
  Clone ID: MRT4577_53478C.1
acgggaagagcttacgggtggccctcttattggtggttacccagacgatgtttaagcccgggttaaacaggcgtccaactggggattcggtccccggacaaacaaacaaacaaacaacaaacccctccgggggactcattttcaggccaaaacgacacttccaccccgggaacaggaaagctcactttccgggagcaggagcgaaaacttttgataaacatgcagggcagcagcagcagcaacatcaacagggg

SEQ ID NO: 133761 - DNA, 389 bp, Zea mays
  unsure (1)..(389): unsure at all n locations
  Clone ID: MRT4577_53479C.1
aaaaaaaaaaaaaaaaaaaaaaaaaaaaaaaaaaaaaaaaaaaaaaaaaaaaaaagccaacannnctgctcctccggatgaggcccgccggcccttcttcctggaaaaaagggaccggccttgtttttcacaatttttgtcccccctaggccccgaagccttttggtgccaaaaaagggggatccccgaacccgggttccaaagggggccccaaaaacccccgggagctaaaaaaagaccccagctttgcccgggtagaaaaaccgggctttcaaagcgccttgggagtgtaaccttttaaaaaatcccggggtgggggggcctttttaaattaaaaaaaaacgggggacacctttgtttttaaaaaaaaactttgggcccaaaaaggg

SEQ ID NO: 133762 - DNA, 186 bp, Zea mays
  Clone ID: MRT4577_5347C.1
cggctttgtcaaggatgtagccaacatcataatctatgactgaggaagcgatggtggaggctgtggccctctacaaccctgtgagctttgcctttgaggtgactcaggacttcatgatgtatagaacgggcatctactccagtacttcctgccataaaactccagataagtaaaccatgcagtact

SEQ ID NO: 133763 - DNA, 385 bp, Zea mays
  Clone ID: MRT4577_53480C.1
ccggccgggaccgagcttcatccaagagagagaaagagagaggggtcgcgttgtgtgctagccgtggagtattgacgcgggccgtgcgtggcgcctgttgctgtggaaacggcacgtatggccaaccatggcgccgtggcgagccggatcggctgctgccggtcttcacaaggaggaagaatcgcttggcttcgccgtatccaccatgcaccagacccccgcgtgcgtcggcgtgcaggccagagcttcgccctgccaaatcgcgctgatgaccatcccctccggcgagcttgtaaaggtcagtgagcctatacttgaatacaacgtactgctccgtctggttcccgcgaagaagatcgtggtcaaccgggggagatgggatgaa

SEQ ID NO: 133764 - DNA, 263 bp, Zea mays
  Clone ID: MRT4577_53481C.1
agcatttccagttggaagaatatgtagatcagctacgcgtgttgttcttgttccgtctatacgtgatgctaaccatgatgttgtttttcctcagcctgcattggacatgaaatctcagatagtcagtctcagtaatcctggaatctttgaggcaaataaggttaaggttggttgctgcaccgtggatattctgaagcaaatcagtggggaggagatatcacgaactgcagcagatggacaacccattgatcgcttgagtagat

SEQ ID NO: 133765 - DNA, 179 bp, Zea mays
  Clone ID: MRT4577_53482C.1
cttatgataaaagtatattataaaaaatgagtataaagaaagtaattaaaaaggaaatatacatggcctttaattctatcacataaagacaacgagcttctgccaaggttttctgtgtttgcatctcattgtgagtacactccatgcagtttgcatcctgctttcccacttagcactta

SEQ ID NO: 133766 - DNA, 431 bp, Zea mays
  Clone ID: MRT4577_53483C.1
gccggcccctctctcctctctccttccttaaaccccccataagccttgttcctttcccttctctctagctactcttgcagcctcgctcctcttctccagcaggcctctccggctccaaacacgaacggtgaggaggcgccggagcaagctgccgtcgcggcgcgccactgccggtggagtcgagtctcgaagccggagtagtggagatagagcttctgccccctctcggcggcgttgatcctctgcagcaggaaaaaaggggcgaacgtacgcgtagccagcagcagtagcgggggaggaagatgatgatgactcaagtggccaaccacagcaagaggaaccacaccgacagctacttcagcgggaagcagcagcagcagcagcagcaggccggcgccaccaccaccagcggcggctcggaggagttcgcg

SEQ ID NO: 133767 - DNA, 585 bp, Zea mays
  Clone ID: MRT4577_53484C.1
tttcccccccccccccccccccccccccccccccccccccccccccccccccccccccccccccccccccccccccttggcacccaaaaatacagcctttttaaaaacaaagggtttctttcagaccaaaaaaatgggggggcaacccaaaaacggcccctaaggaaaaagcccaaaaccagaacctaaccctatatgcccttttttttttttttacagggccaaaaaaaaaagggggaaaggcccctaaaaggaaaaaaaacttttaaaggcccaaaaacgaaaaagcctcgcaagtataaaggcccaaagggcacccctccctttttgggaaaaaaaaacctaattttctttgacccaaaaaaagggggggccggcccgtatttggggcccttcctttaaaaaactcgggggggggaactttgcccccttttttcacccccccccccggcaacttttaaaaagcttaatggacctcccccggttttcaacaaaaaacggccctatttttaacgaaggggcaagggccaaaccccgaaggggactggccccccttgcccttgcccttgcctttgccccccttgc

SEQ ID NO: 133768 - DNA, 373 bp, Zea mays
  unsure (1)..(373): unsure at all n locations
  Clone ID: MRT4577_53485C.1
tggcttggaantttggggtggtttatgtgcttgtgtcgttctcttcttcttattgatttcttaagttttactcttcttatttcagtgtgggttgtgttcttacttgtaatgttgtacttggtggtggtcttggtgaatttatttttgttgtggaaatggttctaggcattctcttgttagttgtcgttaagttctgtggtgctaaggattgttctaaggtgaggaattaggtttgttgggcttggtcggatcttttgttgttggaggcggcggcggcgttgaagaagaagtttgtttttgatgtgctgatgctcttcgcgttgaagaagaaggcttggtggaaggggcgcgaggagacgagtttgggtgagaa

SEQ ID NO: 133769 - DNA, 696 bp, Zea mays
  unsure (1)..(696): unsure at all n locations
  Clone ID: MRT4577_53486C.1
cctcgaggccggccgggagtaatctgttaaccctctcctgatgccatcatcggcctcgccctcaccggagcaccgaactggtactccttgctcgcgggggaaaagttctcatctttctccccgagctcacctcggcatccccgacggtctgggtcgccacagccaacttctccactagctggccgacctccaccccttccttcgccttggccagcgtgaggcgcacgacgctgccaagggtcgtaggggatgtgagcggcacggcgttgacccagttgacagcggtgatgtcgagcgcgttggggaggacgtgcccctgcacggcggccacgtgcgtcgggtgcgctgcgtaggacgccaggctctccctggtggcatggcgggtgtggaggaggtgcgtggggttggcgaggtggtgcgaggccattgcggcaacgcacgcacggtgttcggtggattgccaccacggatggcggcgctacggagcagaggaggtgacggggacgggggctggaccgctaagcggagccccactacagccgtcccaccgacccgggagtccgggacccaatggcgtcgtcatcgatggcatcgttgtcgcgtcgttccgtcttgcacgcctcctacacccgntcgcagntttccgcgaccgacatcttcagncacttcattcctctcgtctcgaagtacgtactt

SEQ ID NO: 133770 - DNA, 331 bp, Zea mays
  Clone ID: MRT4577_53487C.1
gccacgcgtacgagccaagctccacttcaccgacacgctgcgctcgagcccgcccgagccgcccgctagatccatggcgcggctgctcccgtcggccgcggcagcggtcatcgtggccgacgtcatgatggcggacctgccgaacgcccaggcggcgtctgactcgccggctgcagacgacgcgccgtcgggcacgaaccacaccgttggccgcggatacgagcggttattggacggccacagcaacgccttgttcgaggactactgcgactggtacatccgcgagaccttgtacctcggggacaacctcattatcgagacgaacgacaac

SEQ ID NO: 133771 - DNA, 478 bp, Zea mays
  Clone ID: MRT4577_53488C.1
atgtcataaaacatcagagtatttattacatagcggaagacttattacaaaataaaagaataaatataaaatgaactaaggatcgtcggcgccaatgtcaactgagaaacgccacctagatcagatcaaactcctcgccttgtggctcctcctgaaccacctgctcttctcctggcacttgagattccagttaccagggtgattcttcagatcctcatgacctcaccgcgaggattattgcaggaggttttctggccacggtgataggcggaagtgcggcggtgtcgaagttcgacgagagattgctgctcgccgaccgtcgcacatgcccgagatgatggacgagcacccccgcggcggcccaaggaagctcccagacatggcccatagaccttccgatggtgtacaggcggaatcgactgcggcgcccgcacccaatttctccgttcatgctcccttccacgcgcaaggagtcaac

SEQ ID NO: 133772 - DNA, 222 bp, Zea mays
  Clone ID: MRT4577_53489C.1
aggggcggggcaggcgtcccttgacccatgcttttctttaacagcaacgtatcaaaaaagcagagcggaacggggggggagttgttggacactctttggagccccatcagcggtgatggacatggaatatggagggacggaacaaccgctttagtatcctgagggggctgcggaaccagctgaaggcactcgtaccaaaaaaaaaagaagcacggtctgccc

SEQ ID NO: 133773 - DNA, 347 bp, Zea mays
  Clone ID: MRT4577_5348C.1
aaaagaagagcacaggattgctcttttccaaacatttaattgtttggttacaggcaggcttgctcacacatgggccctaaactttcgtattaaaagacacattattgaacaggcaaacaccccaaaacagactgggctttttccattcaccgtttgacggggcacccgtttaaagcagatggtttattaagggcagggaccttttggacagacggcctttctattaaaccaaaccaccaggccttaaaatgcgggtgggcttcaagcacaattgcgttgggcgttccaaccaggcaaagggggacagacacttgtttaaggtcggcgaggctgaggaagtctccaac

SEQ ID NO: 133774 - DNA, 793 bp, Zea mays
  Clone ID: MRT4577_53490C.1
tatcctcactgcagtcagcccgctttcggatatgaacctgaagtcatcttccactatatatgtgctccagtgttcttgagaattggcgtggcctttgccgtcccatatccgttgcagatttggtactccccttgtagccccgtcactctggtcaccgcgaacaccgacgggtcgtcgtcgccccagctggtgctctggccatagtccgctgtcactgtgctgtctttgtttgcctgcaagaagagcctgtttgccgccataatccgcatcctgttctggccggcgttgcgcactaaccggaacgtctccgactttcccggcgacgtggccgtggccaccaccgagccgtcgctctggacgcccacgaactggttgccgaacaccttcaaattgaacgtcgtctcgttgatccgccatagcttgaaggtctcccagccagatgcctgagaccggttcgccaccagccccgcgccgccgcccttctccgcggccacatagccgttctgcgtcaccgacttgaactgcagctgcgtgccatccaagaggtccttgttggggatgccgtcgaagagggacggcaggatccagccctccgtgacgagccagccgccgaggttcaccgctcgcacgggtagacgaggagcagccgccgcacgccgggagaggaagcacagcgcgacgaggagccagaagcagtgggagaggcggctcctcatttggctgctacgtacgtactgctgcttccgaacgaccggcctcggttactcggaacgcaagagctctcggtgtgttt

SEQ ID NO: 133775 - DNA, 514 bp, Zea mays
  Clone ID: MRT4577_53491C.1
attcggctcgagagcagatccgtctagtgcactagggctcacaatctcgaagctagctatatcttctcagtttgctcgtcaccaccggcaatggctacggcgacgactaagccggcggcggggcgcggcgggaggcgctacgcgctgctgctggcgctctgggactcggagtacgccaaggaggtgtacggcgggtactacaacgtctttgtcgccgcgttcggcgccgacgacgtcggcgtcggcggtggggagggcccggccggcgataggtggcactgcttccgtgtgatcgccggcgagttccctgcgccggaggacctggcgtcatacgacggcttcgtggtgagcggcagcccgcaggacgcgcacggcgacgagccatggatccggcgcctctgcgcgctcatccagaccgtccacgccatgaggaagcgggtgctcggcgtctgcttcggccaccaggttctgtgccgagcactgggcgggagggtcggcagggctaggaacggct

SEQ ID NO: 133776 - DNA, 283 bp, Zea mays
  Clone ID: MRT4577_53492C.1
tgtgaaaacatggtcagaacccattcagagtcctcggaggactttgagttcatcgagactcctcctgcgcccgcatctcccgcgcctgaggactgtggagtgaggacaacatcgtatcctgcgcatcaagaatgctccccttccagcagactctgctggtagtgacagcttctccaatgtcctcttgatcatcctcctgatcggtgttcccttctacattgctcgccaattccacggcggcttctacaccactattttctttgccatcttcacaacgatccct

SEQ ID NO: 133777 - DNA, 423 bp, Zea mays
  Clone ID: MRT4577_53493C.1
acaaaacaggaggttacacaatgcgacacgccgtcatcttgggtcgctcacggtctcaccctttctcaggtttttccacgcgttagcttcccggtagaaaacgacagtgcgagcgcgagcaccagagaggagagcggtgcatgcacggcaccggccaccaggggtagggcagggcaggccagggagcagtcgctgcaggtaaggtaacgtgtggccaccacgtgccggggtccgtctgcgtctgctcctattccaacaacaacccatggacctcacgccccgcaggcaaacaaaggtgacatcgcccctgtcctggattcatcgttcatctcgatcgtgccgtactcgaggactggcgtgtggcaatgggaagacccagttggagatctggaggaaaataacccttggtttcctctgccctcc

SEQ ID NO: 133778 - DNA, 257 bp, Zea mays
  Clone ID: MRT4577_53494C.1
ctggttaaaaaaaccaccactattgcacatacatgtgtcatcttagtgtacaacgccaagtcatgatctcgacttgcctatgcaatgcaacgtgaaacaaaagacacacatgcatctcgcagcatcaatcaatccacgtacgtacaccctctccgatccgaaagacaatgaagttgcatagcatagccgctgagcttagttgctggggacgaagttggaggcgtatgcccatgcgatgtcgttgactgggtcagcga

SEQ ID NO: 133779 - DNA, 2478 bp, Zea mays
  Clone ID: MRT4577_53495C.1
ggacccttcgaggcggccgggggcccccgacggggaacttggctcgtgtcgtgtctcagtgtctgccaccgagacaaaaatcgtcgtcagaaatttaacgacgcatattcgtctgactgacccgcccgtgcgccttcctcccgcctcccgcctccccctccaccaccaagagtgacgacagagagacagacagagagaatggcggcgccagatgcccggccctcgtcagccggtccaccgccggcccgctccctcctcctgcctctcctgctcgtgctcctcctcgcggcctactcgctcccagccgactcagcagcgcgcccgtcctccaactccaacccacggcctgccttcacgccgccgctgctgaagcgccaccagctgcggcgcccgagcagcagcagcgccgagctcgtcgccgggcccgccaacgcgtcgaccaagcccttcacggcgcactacttcccgcagctgctcgaccacttcgccttcacgcccaacgcgtccacggtcttccgccacaagtacctcctcaacgacaccttctggcgccggcccggagccggcgccggcgacgacggccccggcccgctgttcgtgtacacgggcaacgagggcgacatcgagtggttcgccaccaacaccgggttcatgttcgacatcgcgcccacgttcggcgccctcctcgtcttcatcgagcaccggttctacggggagtcgaagccgttcgggaacgactcgtacaggtcggccgagacgctgggctacctcacgtccacgcaggcgctgggcgacttcgccgtcgtcatcagggggctgaagcgggacctcggcgccgaggccgctcccgtcgtcgtcttcggcggctcctacggcggaatgctggcttcctggttcaggctcaagtacccccacgtcgccattggtgccctagcttcctccgcgccgatcctgcagttcgaccacataacgccgtggagcagcttctacgacgccgtctcgcaggacttcaagtccgagagctccaactgcttcggtgtcatcagggcagcctgggacgtcctggatgagaggggggccacagacaaagggctcctggacctcagtaaactcttcagagcctgcaagaccgtgaagtacgcttattcaatccggaactggctgtggacagcattcacctacactgccatggtggactacccgaccccagccaacttcctggagaacctgcctgcctacccagtcaaggagatgtgcaagaccatcgacgcgttccccgcgggcgcagacgtcctggagaaggcgttcgcggcggcgagcctgtactacaactacacgggagaccagacctgcaacaagatagaggacggagacgacccgcacggcctcgatggctggcaatggcaggcctgcacagagatgatcatgcccatgacgatctccaacgagagcatgttcccgccgtccgccttcagctacgacgacaggtccgacgagtgtttccagagctggggggttcggccgaggccgcactggatcaccactgagtacggtggatataaaatcgataaggtgctcaagaggttcggcagcaacatcatcttctccaacggaatgcgagacccatggagccgtggcggggtgctcaagaacatctcgtccagcatcatcgcccttgttacagagaaaggtgcccatcatttagacttgaggtcttcaacgaagggtgatccagactggctcatagaacagaggaggcaagaggttgagatcattcagggatggattgatcagtatcatcaggacatggcggaaacatcttcctgaagacagggcaagtcagtattcttcttcttacacatggtggaaacagggcgtgtatcatcaggacatggcggaaacatcttcatgaaaacaggacaccttcctgttacggtcatgtttggatccatggaaaaaaataaaggacaaaaaatcaataatttacacactaaacatcagaaattgctgaatcttacacaaagcaggcccctttgtgaattagtaaggggtggtgcaggtgctgggacttcaatccgcgccagagcagtgatcgactgatctcgcaggcctctggccagcggaccaaggcagtcttgagtcttgactcagtttctgttttttttaactgtattgtttcttcttttgttctcggcaaggaacagtcttgacatttttctctgttttatgcatgtagattagggctgggttttccgcagcaatagcagagccgttgttccttccgttccgtttgcttattattgttattatctagctagatcatcttggggtcaggtcgtcgtggtgtgccaaaacaggacacagaaagaggaagaagaaaaaaaaaacaagacgtgtggcgtttatgttatatcatccaataatggccgtaccacacttgtggtacctttcagtaaaaaaaaaaaaaaaaaagcggcc

SEQ ID NO: 133780 - DNA, 303 bp, Zea mays
  Clone ID: MRT4577_53496C.1
gggcccacccaataaaaggcctacccaatttaaaaattgaaattaggggccccccaaagaacccccgctcttacacaaaaaaacctaggggccttggcttttaatttttgggggcccccttaggggtcccgccaatttttttttggcccggtttttttggaaacaaggggggaaaatcctttgtttgatacaacatgggtgcgggaacgggacccgtggggacccccccccttgggggagggcctaaaactgtgacttggaggcccccaggggccataatttttacccctttaaaaatttcat

SEQ ID NO: 133781 - DNA, 349 bp, Zea mays
  Clone ID: MRT4577_53497C.1
tgacaggctcggatctgagacgagacgagacgatcccctttcccctcaaccggaacttgttttaccccatctcatcccactgactccacccacccacccgtccgttgccttcgtcggatctctgcggactcggatccggccgaccacgaccaccccgcgtcgccgcctcgcagcaacagcagatcagagaagatggccggactcgacacctttctcttcacctttgagccccagaaccagggacaccctgacaagctctgctaccaggttttagatgctgttctggacgcttgactcgctgaggaccctgacagataggttgcttgccagacctgcaccaagaccaaca

SEQ ID NO: 133782 - DNA, 506 bp, Zea mays
  Clone ID: MRT4577_53498C.1
gcacgagcggagcaccgctgccactggaaggtagtgaccccgaacacgacggtggccatggcgttcgggcccctggcggcgcagcggtacgggtcggagctgacgctcggggaggcgctggaggggcgcggcgacatgtaccgcacgctgctccgggaggccacggcggcgctgctcaacgcctactacaacgcccccgggggtcccttcctgtacccgaccacggccagcgtcatggaccacatgaacggcgcgctcctcagctccgggcagagggtgctcctggagggcgcgcggttccgcagggccaacgcgggcggcggcgggcggacaaggctcatgtgcgacttcacgacatgcagctgaggatcatgtacttgttgattattactacctgttgatgatgatcatcaatcagaccagtagcagtagcgcagcaaatgtttctaaaaattgcacggagcgcatatgtagcaaattcgatccaaaaaaaaaaaaaaaaaaaa

SEQ ID NO: 133783 - DNA, 263 bp, Zea mays
  Clone ID: MRT4577_53499C.1
ctccgggacctcctttcaggggcggtttttactgtaagagggggggctaataggaagggctctcacgacccatgacagggggcctgaaaggacggggcagaggcgttcgcccacaagagcaagcccctcatgactcgcgtggtcgggaaccaacagctaccgtccacgctcaatgggctgcataagggaggttgccccattcccaaatgatcgattcacccacggatgacggttcacgtccgtaggccgcaccaaactttcta

SEQ ID NO: 133784 - DNA, 801 bp, Zea mays
  Clone ID: MRT4577_5349C.1
taggggccttttttttttttttttttggaccaaaaagtattcattattataatttagaaacctgtgccagattaaaagcaacacaagacgaaaacagagagccagcaaagcaaacccaaggacattgaggcgctgctctgctagcgtagtacgtgctacagcatgtcacgtacgaggtacacgacgacgaccaccaccaacggcgggccactagacgaagcgatcaccagggggcgcatgacctacttctttattatgcgccagcctgatgacacacacgtagctaggacctctctgctaccacgaccactgcatgctgctgatggccacgctgccatcccaaccgagctacctccactacggttccatcgaacagttgatcttggtgcaacccacgggggggctgaagggcccccccaccgaaaacccccccacttgcccggggcatgttggcggaccttggccatggctgaccccaccgaccaatccggaaccgtcaaggctccctgaggccaatcgccaggggcccccttgccccggcccccccaccgaacaaccccccccgcttcacaaacaccacccccatccccacccccccaccgccccccccgcgcccaacgccacacccccccccccccccccctccgacagtaaccccaccgcccccgcctgcctccccccccaccgaacaacacaaacacacaaaactgcaaccccccaccccccccccccccccccccccccccccccccccccacccccccacccccaaaacacaccgcccccccccccccccccccc

SEQ ID NO: 133785 - DNA, 614 bp, Zea mays
  Clone ID: MRT4577_534C.1
gcgcgctactccactgatccattacttacgcagtggggtcagtgagtgagcactgagcatgcatgtggctatttcaattgcaagttgcatcgctactaattctggagccatggacgacggtgccgcaaccacaatcttacaaagaggcgacgcgcacgtactgctcctggcgttccctgggatgcacggccatcgcgaaccctatgctgcaaattggccggcggctggccttacacggcctgcgccccaccttggtggtctaccgacacgtcctgtgcaccacctacaccttcatgtcgtgccccatccccgtggccgacatataagacgggttccacgactgcgggatcttctgatgcccggacacctaagagtacttgcgccggatggaggcacgggagtctgagacgtcttcggggttcctgtacgctgatgctaggcgaggagctgggccccgacgacctgcctccggtcgtggcggcccccgagtggtacccggcgttcaacgagtccattctgaaccagttcgacgggctggagcacgccgaccacgtgctcgtcaactcgctacgtgacctgaagccaatggaatcggattacctgaagtatacgtg

SEQ ID NO: 133786 - DNA, 308 bp, Zea mays
  Clone ID: MRT4577_53500C.1
attcttctttaggtttttttatggatttttttgcattttttgcttataatcttttttgatcacttcttttaagaaggagggcagacttgccaaaaaaaatcaatcctcaccaaacatacaatgttgccacgctccatgaacagctgttttttcgtgcaccatttgagtcatcctgatacgcagatattaaatcatccttagttcaaaataaaagactgtggcacctattcaccggcgatattccttgatatcactagggaagatgtcagttctgttaaggaaacaagatttcatttgaacagatacat

SEQ ID NO: 133787 - DNA, 2230 bp, Zea mays
  Clone ID: MRT4577_53501C.1
gcgagatactgtctaccatgctggtttttggggtgtcatgggacgggaatgtattacgcattgtccctccatgcattacagcatggattcctccggtggccaattctcgtgccgcggccgtgactggtgtctgggtcggcggcggtggtcggcctcctagaggctttcagtcacttgctgggggtcgccctccccctccatctggctaggtatacaatggtaggctaaaggatatattcggcgcgaggccatgcaaaacaacatggagccttctgatgataattcactttcttcgaccatgagtaatgacaggattggcaaagattgtggttcaactagaagcattcagtcaaaagctgaggatctccctttctctccaagtaggtctgtagacaatggaagcccaaaggatatattgtgcgagagggacacagactgcaaggtggagccttctgtaggtggtccagttagcccacggtctccagctttagaggacaaacttgttgacccattgtgtgcccaagaaaaatgtaacgacgaggatgatcaaggcatggccatggcttacaaatcagacctaacttgcaaaggagaatatgatgttaatgatcagtatgatgggggcattagtacaagaagcaaacaggagagcaatgaagatgacaaagatgccactgaagatgaaatctcatgcagaagttatgaacagaagagcaaggaagataactcatgcaacattgaagatagtagcaaaacatatgagcagaatagtggagaagatgacactagtagtctagtaaatggaagtgaaaagtatcagtgtatgaatattaaagatgaagatagcagccccggaggcgaggacacatgcaataaatatgagtcaaaggtaaaaagagatgaaaattatgttcttggagctgagagcattagaaaaaactgtgatgaaaataatgcagatgtcatagaaactggaagcataagtgagagacatgatgggctgaaaatcgaagaagaaaatgagaaattgcagcaggcatttattgaagatgccaattcccaagcagggagtggttcatcaattaatgagcggacgaattctgggttttctcgcggttcatcagaggctgggttagatgaagatcagtcctcaaccggtaagagtggggactcatcattttttgctggtttcttgaagaagggtttcaaggacctttctttattaaataagtccatggacagcgttaaggtttcaattaatggtcatccaatctctgaaagagcccttaagaaggcagagaagaaagctggtcctgttgacccaggttcatattggtacgactaccgtgctggtttttggggtgtcatgggacgagaatgtatcggcattgtccctccatttattagagaatttaattatccgatggccagaaattgtgccggtggggattctggtgtttttgtcaatggcagagaactgcatcaaagagatttagatctacttgtaggaagaggactaccacggacatctggaaaatcatactctcttgagatgtcaggaaatgtaattgatgaagacactgggaaaaaactacgcagtcttggaaaacttgctcctacgattgagaagttgaagcgtggttttggcatgcacgtccctgaagagtttagatagctggttctagtacaggatcttggttttgctaataatacactcttcaaagctgacaatggggtggcaaacgtgtggcttctgcgggacggtggtatcaaatctcagatttcttggactggagctctggaagcagcagtacttaagatccttggtgtgcggcgaaggttgtctggcactcaagaaaccaagataatctggtctaatgacttgactaccaatagtatccctcctgctaatttcaattgcttcaatggaagcgacgtgtgctgctagtgactctagactatcaggcagttcttaacttcactgctctgcctgtacgtgctattccttaaatgtgttatcattatcggtacattgccccatcacaggcatagaagtgttgtcagatgtaccatgagcaattgtcggcttgtaatatattggtagagctatgcttcccctaacatttatatgtatatatatgtgatcttgattcttgaaaaaaaaaaaaaaactctgccgataaaaaaaaaaaaaaaaaaaaaaaaaaaaaaaaaaaaaaaaaaaaagcga

SEQ ID NO: 133788 - DNA, 407 bp, Zea mays
  unsure (1)..(407): unsure at all n locations
  Clone ID: MRT4577_53502C.1
ttaccctactgcatgcgtgaagacgacgagagtggccatcacagatgacgttaccatgggcgtctttggtggagagcaaacccaggcggacagtaagcctgatgccgatccggctacaacatagagaatgggccccctctcttgggggggtgtntcgccgccctgacatggccctaggctgtagaggtgacggattcgtgggatccatcacctccgccattggcaccggagtgtacctcggctgggcatacacgcccgaacccggcctccagtcactctgtataacctactaccctaccaagtactgagcactggcggagccatcgttcgcggttgagatcgaggtgctgtccatgggcatatacaaggcccttaatttagcggcgaatactactgatactcactta

SEQ ID NO: 133789 - DNA, 1296 bp, Zea mays
  unsure (1)..(1296): unsure at all n locations
  Clone ID: MRT4577_53503C.1
cattgggtacctcgaggccggccgggacaacttcccacagatagattccgcgggctgcgagcatcccccacctcatcggcccccgcgtgcggcggcgggcgactctacctgacctggcctgcgtcctcccgctttccagccagcaagccagactccgcccctctccgaaggctccgatcgtctggtttcgtccagatccggctccgctgaggctctagatcgcgtcgcgcacgatgcaacgcgacctgtcgcggtcgctgtctccgccgcgccggcgtcggcggtcgccatcacccgagcggtaccgcggccggaggggccgtagggaccgaagccctagccgtagcaggtccccctatcgcccctcgtatagaaggaggagccctttcccatccccgagaaggcgtgagagctgttctccatctcctaggaggcgcaatagtccacctccatcacggaagcgttacagaagaaagagcagtccgagtgtcattagctctccagttactgcatctcaaagttcccaccttgggttggaagagaataagaatgctattgatacgcaaaggctagaagaagaaaagaaaaggcgccggaaggaagttgaacttagactaatagaggaggacacagctaaaagagttgagcaagctattaggaagaaggttgaggagagtctgaattgtgatgaaattaagcgtgaaatacaacgtcggattgaggaaggacgaaaaaggatacatgaggaggtagcaatccagatggagaaagaaaaggagtcagccttaaatgaagccaagctgaaagtggaacgagaaaaaaaggagcggaatgagctagagaaaaagcttgaagaagaacgaaagaaggctgaagaggcgttgaggaaaaaggcgatggaacagcagcagaaagagctagagcggtatcaggagctggagaggcttcagaaggaaagagaggaggccatgaagcggaaaaaaatggaggaagagcagcagaggcaaaaccagatgaaactgctgggcaagaacaagtcgcggccgaagctgtcatttgcttttgggatgaagtagcgttcgagtcaccgaacgaaattagtgttttagtttcctgtaaccctgtatttcctgaaaccaccattgtctaactttggcagacaaattgggacgtcttaaatcctcctgatctgctttgtaagttgccgtctctcggtgatgtggttttctctcctaaaaaaaaaaaaaaaancaaacaaaaaaaaataataaaaaaaaaacacaccaataaaaacac

SEQ ID NO: 133790 - DNA, 363 bp, Zea mays
  Clone ID: MRT4577_53504C.1
agcagttctttttttttttttttttttttgtgatgttttttttttttttatatttacactttcttcaatggtgatgggagcaacactttttctttttcatttcaattgaacattcaaggtattgatcaaactgacactgccacccaaggggatgcgtgacacattatgactcacccatcgccgctaaatgactgcactagctacctatgctgcgggtctaccacagcccatagtttcttcagtgggggaccccccccgccccagcgaacgggcctggattcggctgctgcaggccgaacatctccgtgagttactgcgctatctgcgccgacaacagccccggaacctggtcgcttagcgggt

SEQ ID NO: 133791 - DNA, 1257 bp, Zea mays
  unsure (1)..(1257): unsure at all n locations
  Clone ID: MRT4577_53505C.1
cattgggaccctcgaggccggccgggaacttcccacagatagattccgcgggctgcgagcatcccccacctcatcggcccccgcgtgcggcggcgggcgactctacctgacctggcctgcgtcctcccgctttccagccagcaagccagactccgcccctctccgaaggctccgatcgtctggtttcgtccagatccggctccgctgaggctctagatcgcgtcgcgcacgatgcaacgcgacctgtcgcggtcgctgtctccgccgcgccggcgtcggcggtcgccatcacccgagcggtaccgcggccggaggggccgtagggaccgaagccctagccgtagcaggtccccctatcgcccctcgtataggtgaccacatctcccgacacacgccacagaaatctggcgagtcttcgttttatttttttggggtttgtactgtaaaaaatttgaggcgatgctgatcgccttcattcgaattttgtactatagcttggtttgtgactgttagaggtggatagtgtggtagtatattgtgccatatcatacttgaattaaatatgattatgaacgtcaaatttcataacaccatgatttctgatttccaaggggaaaatgatttggatgcttttgcattacagaattaaaataaaaatgcttcgatgcagcatggaatatatcagcagatgaagcttagatatagttatgccatgttttgcattacctgcctatacagactaacaagagttgttttcgtaaaacgcatggaatctacaaagattttactctgtgctgtattgctgtggaatgctctacccctgtaacagtgtctaaggtaactgcttttgcccatgttttagggcttcaagagataatggtaattccttgtctattgttgtgatgatcctaattttatccttacagtgctcatctttgtcttgcagaaggaggagccctttcccatccccgagaaggcgtgagagctgttctccatctcctaggaggcgcaatagtccacctccatcacggaagcgttacagaagaaagagcagtccgagtgtcattagctctccagttactgcatctcagagttcccaccttgggttggtagagaataagaatgctattgatacgcaaaggctagaaaaaaaaaaaaaaaggcgccttaccgaagggagctactgctattgttctacttgttatatttgatgatgcaattggttatcatttatctactcttgatcagttnttataa

SEQ ID NO: 133792 - DNA, 2088 bp, Zea mays
  Clone ID: MRT4577_53506C.1
cagatgcggccggaaggaggcagtcagtggtggaggtggcaggcatggctggaataggcaggtggtgctggaggcagcagagaggaggctggcggtggtcaaggtggtagggaggaagtaggcgcctgagagcagaggaaggtgcgacagggcagagagcggatggataagctgggaaggtataaggtgggctaggttgtttttgatggactaggctgcttttgatgggcctttctatccaaccctaggcctgtaatctcctgttttttcttttcctttgaggtaatatttgtatatgtttgtctatttgtgaaacacctaggcttgcctcgcctaagctttaggctgaaggtcactgcctcgcacctaatgtaacattgttatttagttagcgctctttttttgtcggttcacttggtgtttgtggactgtaaggatggtatcatattaactaggcagtagaatgatagatggaggatatctgagttagtttgacctctgcgctgtaatgttatttttagaaggtaaggaaaccaacagggctaatttcaattatataacatggtgtcattgaaattcaatttattgtgctctaaatttgtaataaagtgattttagtttgtttcttatcgcagttctcctgcgtacttgaggaaaaaggaacttgtcaggataaattgtccacaaatggttcctgcttctgcagtttccactaattagcagtaggtagtttattctataattgcattgaagcttgaacattgattttggttgggcatgcagtaagtagcttacaagaacatggcttagttgggatactgaaatgcttcatcaatagctctaaacctgccacaaattacttgacattcttctctacaggcatttccgaagaaagatactgctgtagttccgcttgttatatttgatgatgcaactggtgatcctttatctactcttgatcagttttgataattcgtttttggatctggaacacactagaggtatgcctgaaatgcattagcttgtagtcactatgctgatgaaaggcatagtggatcatagatagtatttagatcttagatcatgtgctttgctttttgctgcttttatggccttgaagggtttgaataaaaaaaatcggctttggtcacgccttgcctttggtagtacatttcgttaacttgctatatcaactgcaggcgccggaaggaagttgaacttagactaatagaggaggacacagctaaaagagttgagcaagctattaggaagaaggttgaggagagtctgaattgtgatgaaattaagcgtgaaatacaacgtcggattgaggaaggacgaaaaaggatacatgaggaggtagcaatccagatggagaaagaaaaggagtcagccttaaatgaagccaagctgaaagtggaacgagaaaaaaaggagcggaatgagctagagaaaaagcttgaagaagaacgaaagaaggctgaagaggcgttgaggaaagaggcgatggaacagcagcagaaagagctagagcggtatcaggagctggagaggcttcagaaggaaagagaggaggccatgaagcggaaaaaaatggaggaagagcagcagaggcaaaaccagatgaaactgctgggcaagaacaagtcgcggccgaagctgtcatttgcttttgggatgaagtagcgttcgagtcaccgaacgaaattagtgttttagtttcctgtaaccctgtatttcctgaaaccaccattgtctaactttggcagacaaattgggacgtcttaaatcctcctgatctgctttgtaagttgccgtctctcggtgatgtggttttctctgctcctttgctgttcactgttgagttgacgttgcgagaagactgccaaagaagaatccggttggtccatagggatggatagtcgaatgccaacacgtttttactcgatactggattatcttgtatgttagaaattttgatcttaaaccatcgcgttttctcgttggctgtaatcgcatacatatttgttcgttaaaaagaaacagactagttgtacgaaataatttcaaaaatggactcgatttgtg

SEQ ID NO: 133793 - DNA, 203 bp, Zea mays
  Clone ID: MRT4577_53507C.1
ccgtccctttggttttgcacagacgcatcggtacaaacccaacggaaaagggggcaaaaaaagatgtggtggttcttacaatggcgtgcggcgctcctgggcaaatcaaatcaaagcatatcatctgccgggacaaacccacacgggcagcccgaccgcgcgcgcaacaccaacaccaagcaccgccaccaccctttcatgga

SEQ ID NO: 133794 - DNA, 222 bp, Zea mays
  unsure (1)..(222): unsure at all n locations
  Clone ID: MRT4577_53508C.1
gggcaggcaagaagagcagtcagccgcttcgcgatcggggacgcggggggggaaatgtagtcgtcgtccgtccacggcagcttccctccctctcctctccgncctcgnttacttgagggggcgccgtggtagctgtctgctccttctgccgcgtcgcgggcctcttggtcgccgcgtcccctggcgtcgcgcgccccttcgtctccgtcccgtggggggggg

SEQ ID NO: 133795 - DNA, 365 bp, Zea mays
  unsure (1)..(365): unsure at all n locations
  Clone ID: MRT4577_53509C.1
tggaggcacgcgtgcgngctcgtccaccctgaccgcggatcacagacagcctgtgcccgccttccaggccacagggtccctggctcttctatcgagcctacgaaaagcaagctctgggcggaccgtcccaccgggcgcgcgcatacacacagagatagagagaccgcacgggcgatctgggtgttctttggtcaggcgcacgacacgagcattgtgcagcgcgacaagaaggaggagcccaccgagctccgggctccagagatcgcgctctgcgccaacaacatgggatttccaggcaaccctggcacgcaaaacctgtgccagagctggttctcggcgtcgaagacatcgaccgagacgacatc

SEQ ID NO: 133796 - DNA, 510 bp, Zea mays
  Clone ID: MRT4577_5350C.1
aaccggcgggaattttttaattttttaagggtaaaattttggttttgggggaaaattggattcaacccggctttggggggaaaaaaaacccgggtttttgttttaccaaaaacccccggaaaaaaaggggggtttccccccaaatttggccttttggaaaccaaggagcccgaaaaccccccaaagggggtttcaccatcctttttctttggaaggggatttttggacacagccaaaaaacctttaaaaatggtttaagggtttaacacttttggaacaatttttaaaccatttgggtttgggggggggaaaacaaaaagtccctggggttgaacagcccttattggtttggaagggcttggcctcgcattttggaatttggacaaaaccttaaaacaggttttttttttagggcctccaaaaacagggaatttgtggtggccggaacctcataaaaaaggaaagggccctctttcaggaaaaagttaagggcggccttgggggggggga

SEQ ID NO: 133797 - DNA, 613 bp, Zea mays
  Clone ID: MRT4577_53510C.1
gttgcgcagtggggcggcgctcctgtccctcgccggagcccccaacgcatctccgctcccggcgccggccttcatctcatctcccggcggcggctccccatctctcctccgcatggccaaggtggtgatgcacaggaggtgtgcgcgaagaccacgaccgaggagggaaagtgatggcggaggtgcctctatgcgggaggaagaactcaggccgcatccgcacgttgtccctggtgccgttgttggttctcccgccgtcgtgcaggcccgtgagccggtgctcttgacctcaagcccgtccagcccgccgcgcctctagatcgcccccgcacaggctgccggcgcccgcctgtcccgtgtctcccaggcgcacctcatggtcgacacctgaaggcatctggcgccgcccatgtgttgatattgcattattgcacgcgtccaggccaccgaagccctcagtcccccgtcatcgtcgtgggaaactgctgcttcggctagcctagcaccgatgtcggcacgcgcctgagctccctatcgcgccacctctgtgtaagctgtagggcggtaagcggaggaaatgacggccgcttcctgcttgctctcttggccaggt

SEQ ID NO: 133798 - DNA, 244 bp, Zea mays
  Clone ID: MRT4577_53511C.1
aatcaaaatcaatttaaggggactacttaataggacccaacacttacattcttacacacatacacactatatttgacccaaatataccaataaacctcaaaaaaacaactaaacctcctaatctgaagcccaaacgctctcttcaagtctaaagacttttcactaacacattaaacaggtacatacagacattaccatcctctcaacctgatttcttctcccaatcctagggaaaaatcaagcg

SEQ ID NO: 133799 - DNA, 289 bp, Zea mays
  Clone ID: MRT4577_53512C.1
gaggacccccaaaataacccccaatttatttccactgtttccaggcggaaaaaccacattggttatttatttgaaaacatgggtttatttttttatgccaaaaagcccccctttaaagttggaatatggaccgggacattactgggcacactaatttccaacaaaaagccgtctggcttgtccacaaggcctttccattcatttcaaaagatggaaacggggaccccgataacaacctggggatcgggtccaacagtaacattgtttatgggtgaaggggaaacctttt

SEQ ID NO: 133800 - DNA, 282 bp, Zea mays
  Clone ID: MRT4577_53513C.1
ggctggtggattcacatggcaatcatacaatgaggatataaactccttgggtgacgaatcatttgcaacagttgggttactggaacagataaatgtgacaagggataacacagactacttatggtatacaacatacgttgatattgctcaggatgagcagtttctcagcaatgggaagaatcctatgctaactgttatgtcaactggtcatgctttgcatattttcgttaatggacactaccagggctgtgtatggaatgtagagttccaaaaggacatata

SEQ ID NO: 133801 - DNA, 768 bp, Zea mays
  Clone ID: MRT4577_53514C.1
gctctttgtccccggccgggatcgtggccaacacccaaccggccgcaacgcacactgactgaaccagagcgcgaggacagcagctcgctcgaccatggagaaccgacaccaagtggctgcacctgcacgaggcgaggtgtgggccgagatgaagaagcaggtgcgcctcgccgcgccgctcgccgcggggttcctcctgcagaaggtgatccagacgatctccatcatgttcgtggggcggctcggcgagctgcctctcgccagcgcgtccctggccacctcgttcgccagcgtcaccggcttcagcctgctgacaggcatggcgagcagcctggacacgctgtgcgggcaggcgttcggcgcggcgcggcaccagctgctgggcgtgcacaagcagcgggcgatgctggtggtcggcgcggcgagcgtccccgtggcgctcgtgtgggcctacaccggcgacatcctggtgtggttcaggcaggaccgggagatcgcggcgggcgccggcagctacatccggtgcctgatcccggcgctgttcctgttcgggcagctgcagtgccacgtccggttcctgcagccgcagaacgtggtggtgcccggtgatgctcagctccggcgccaccgtcgcgctgcacgtggccgtctgctggctgctggtgcgcaggctgggcctgggcgccgacggcgccgcgctggccaacgccgtctccaacctcggcaaactatccgccctggcgctctacatcaggctctcgccgtcct

SEQ ID NO: 133802 - DNA, 266 bp, Zea mays
  Clone ID: MRT4577_53515C.1
cagcttaatgtactcgcgagcgcaggatcgcccgacagaacctaagggtggggcatggtgccctcggtgtgctggctcttgctaggatgccaccgcttctgcatacaagaggcggtggccgtggccagccatcgacggcttgtaaggtaccggcgccggcgcatctaccatcatgggcgcacctggaccgtacccgtatgtggaatagctatggcagctgcagtgcacgcccctgccggcagcgccctactatgccccgtctgcgc

SEQ ID NO: 133803 - DNA, 651 bp, Zea mays
  Clone ID: MRT4577_53516C.1
ggaaatatcaataaccgaacaagacaaaaagttgttttgccaatgacatacatatattccagacccaaagcacacaacacacacgcacacactgacgctcatatttgtgcagtagtactagtacacaatgcagtacttgcagaaaacttaaacattcaactaaagatcagaggagagcataaaacccgtctcctcttccaagcctttagggagatcccttaaagacagaacactacttcatgccgctatgcaacagaaaaccatgcaacaagggacacatgctagaaatacctaaatatcatgtcggaatatcaacaaggatggcggttggaacagaggccatccttgtcccagccttaaaaatccagctgggattccttatgctgtttcatcgggagagaaaaaaaaaagcagtcagagggaaaggtccagataaaatggtggtccttcgatgcccctgttcggtgaatggtgatcgtgctgcgagacgccacaagccgactcttaaaacctgcaacttgtgagcatcccgattccggtggatacttcctgcgcgtgaaaatcgtgtgccatgttcacctcgtgccgaattccacctgtaggttggactgcggggaaaaggaagagggggaggaagaaaaaagggaagca

SEQ ID NO: 133804 - DNA, 442 bp, Zea mays
  Clone ID: MRT4577_53517C.1
aaaaaagaaagagtagaagagggtcgtctcctccgtctccgctggtcaccgtgctggcgattcgtgcccaactgctgctccgtcccagcgcaccccgccgcggagaagatgagaagagagaggagggtggtgcccagctttatactccgaagtcgcgagtccaaggaggatgggatctgggaaatcgtgcggagcctgcggagtttgttgcggtggaaatctgttacgaggatagcggtgagccggtgagcgtgggcctgcgaagtttgttgcggtggaaatctgttggcgaggaagggtgatcctgacgacctgggcccacgggtcattggcgatcggtggcgcagtgcatccgtcgccttccattccaagatgccgcgcaccggattcttcgagagagagctcaatgcgctgtggcgatactgaacgtgaaaccctatcg

SEQ ID NO: 133805 - DNA, 294 bp, Zea mays
  Clone ID: MRT4577_53518C.1
ggttcccgccaaagacaccaaaaaacatttttttgttttacaacaagaaaacaacacacggggggcacgaagggacgaccccaatgtgaccacagattcacacgagagggggggtcacgcacgcacaggtttggccacggatgccaaccacacaaacaaccgcctgcggaaagcctacagtagcgaccaataaaaaaaacaacatgggacacactaagtgggcgaatttgcctactggtccttgatggcagctttagcgatgggactgaataaagccttggcctctgtgcccaa

SEQ ID NO: 133806 - DNA, 145 bp, Zea mays
  Clone ID: MRT4577_53519C.1
gtatgggaagacattgcaagaactgcaagttttatttgaacgaaagcagacccttgcattgacattctggcaagaaccagatacaagatggagatttgcagtcccatggcgcttttatagaagatttgtgtttagattataactc

SEQ ID NO: 133807 - DNA, 696 bp, Zea mays
  Clone ID: MRT4577_5351C.1
aaaaaacatattatagaaaccactccactataactgccagtaacgccaaaaaagagtggggcgctagaccaccaccagttatgttgctctgtctgtgggggacggcttgttcggcgaggattgtggcgccgggtaagccgctagcttattgtgcgcctgggttaggccatcctgtaccgaccggtgtccgggtgatcctgaaacgtagtgagccaaacctacaagatgaaacaggccatgctacctaccaggtcagctttataagagacgtgcttcaaacagttgtaggacatactacaagaagtgccttggcggcatctatgggagaagatataaacgcccatcaactacgacacgtagcgctagcccaccttgatgtctagtctcaggcacagccgtttcttcccattcaatcaactacgtggcatagagctgtgtgcttaatgtgcaacaacagcagcttccattcacgcatctacctgatggataccgcgaccaatggcgatcattcagccaactagcacgatcgaactctactgctaatggacagtatcatcaacgactaccatctaaccaattagctggtgtgagccctgctaccttcttgacacaacctcaggtgttgccgctctaccagcacgttgcgcctaacgctggcaccctcttgcaactgcaacaattgctgacattcaacca

SEQ ID NO: 133808 - DNA, 379 bp, Zea mays
  Clone ID: MRT4577_53520C.1
cccactcgtccgggcttgcgtccggttattcccaggtgtcagtatggactggttttgtttgtattccattctactgtttcacaagttacatgtatatttatcgagtctattgaatatagttcttattatcatttttcatgttcaatctctttttttcttgatcagatcaattcttttctttaattatttttttttcttttttaaaatttttttatatatttttttttttttttttttattttttttttatttctttattctttttttttttatctattttttatattttttttattttttttttttattttattatatttttatttttttttatttttttattttttattttattttttttatatatatatttatattt

SEQ ID NO: 133809 - DNA, 340 bp, Zea mays
  unsure (1)..(340): unsure at all n locations
  Clone ID: MRT4577_53521C.1
cacgaaactgccgaacataaacgagaccattttcaccaattgaatctattacgctacaccgggctccttgtcctcattgcgagcaaaaacgcctgagccatacttgtctgaccacctgatcgaactgatgacatcggcaacccttttattctccaacgagtataatcttgtagtcggcccattctttcgaaccctgctcatctatcgcccttacaacaatgtgacccacatcgacaaatacctctatgctcgtaccgtgctcgcactaactatgaaatattccaccancacgtgcaacttactacatttctacatccaacttcttccgcgacgtcatggc

SEQ ID NO: 133810 - DNA, 573 bp, Zea mays
  unsure (1)..(573): unsure at all n locations
  Clone ID: MRT4577_53522C.1
acgacccagcgcgcatcttatggaaccccngccccggggctagggggggctcccagccgncatcgctgcacgcccgctacagaccggcgaggagacgaaaggagggagcnnngagaagctcaaatggctcctaaagccgctcctgccaagaagggtgatgccaaggcccaggccttgaaggtggccaaggctgggaaggcgggggcaggttagatgaataccaagaaganncgcacancngcaacaacncaccaggcggagannnngaagaagccgggggacccgaagnannnaagaannagnacnacgggaagagccccggaaaaacngaaccggaaacncangnncccccncaccacagaancngcaaggaagaagaaagaagnaaacaacacncgggncannannggaggaccncaaggcangacaagaaaaagaacaaggcgggcggncaagaagangnangacanncaagcaaagaagggcaacacccnggagcaggcccgaggggaagaagaaggcgnangngaaacnggacacccgacnacgangccccnngagggggccaacaaa

SEQ ID NO: 133811 - DNA, 571 bp, Zea mays
  Clone ID: MRT4577_53523C.1
acaaacaatcatatcttattctccgccgtatcgtggcctccatgaatctcctcccccgaattaggggaatgggcgagctcttcctcagggagcttgcggtctcgcgtctgacctcgtggaagactacgatcaactgttcgagaggtaggcttcgatctccggcgactacgaccatgaggctcaccagttctccgattcagaggcaggcgcctatgatttgtcatctgtgatggcgccgtccctgccaagaaaggcctatccggagactaccacgggaagtcccagtctttctcgtgcatgtctgaagtaggatgcctccaacatctgcacaataaagagacgccctacatgaagatctggacatcaaggagtagcctcgcgttagactaagagcatcactgtcatacgccgccgtcgtacgaacagcaggacatctcccggaacttgttgcacaaacctgagggatctgactacagataaaacgtgctgcacagacctcccccagtccctgtcaacagaagtggataccggcattaggctctactgcattaactggatgatatctatccag

SEQ ID NO: 133812 - DNA, 369 bp, Zea mays
  Clone ID: MRT4577_53524C.1
ctcaattttctcccacttctctcttctctttactttcctccgtctcttcctgcccctccgctaactttccacgagcatccggctccatcctcacccccacaccccaactcccctcgtccttcacactctccattattatgtccatatcgtctccttattttctatctatctatgataaaattctttatcacttctcttcataccaccatcaacaacttattcataatctactcaagatcctcacctacactctctgctatctctcattctctattctttgccatatttactacctctcctccactttcatcttttcatataatgactacatgcctctttatcacgtcttcaaaatcattatatcctatc

SEQ ID NO: 133813 - DNA, 343 bp, Zea mays
  Clone ID: MRT4577_53525C.1
aactcacccaccttgttagctccatcaacaagacctgccctcagccagtcccacttatagattggccgagggcacgtgaggcagcatacgacattagctccacctcagagcagatatcgcatctgccacagatatggagataagcagttggtacacgagccctgatttagcacaatgaagcaaataaagagacaagcaggcaactggagcacgtgtccacgatccatttagctcgccatatttgaagacctttattcctcgcatgcgactctgttagggttagagttagatcatgagttaggtgggttcacccactgaatcatacctccttgagaatttctga

SEQ ID NO: 133814 - DNA, 199 bp, Zea mays
  Clone ID: MRT4577_53526C.1
ccggttctcggaattcccggctgcgacgccacgtcgtctcggcgaagatgcaagcatagaagatggactgacatagttgcggcgccacgagatgcctgtgcggactcgcgtcggctgtcgcggcgtaggctggaccctgataatagctgcttcccgagccggcatcggtgattcctggttccatgttcctagatgcccg

SEQ ID NO: 133815 - DNA, 663 bp, Zea mays
  Clone ID: MRT4577_53527C.1
ccccgcgtccgcccacgcgtccgctttaacatactttttaatataacaggctagcaaaataagtgtgggtgtcaggtccatattctgtattgtagaaaagctgagccaaatggtggaagaaacttgttcgagatgatcaaagggcacctcactttgtgaaagttgattgggacaaatgggttgacgaagatgatgatggtatgctatgtacttgtattttttgatactactaaaggaatataatttgtgtatcagatacagaaactggtacatgcgcttgacctcatgtcagtacacaaagatttggtttaagtgctcaacattcccaagtttaatgagcaacaacgaaccatgatcttagcaaaccacagatgcagcaagaactatgttacttgataaatgtacactgtggagtagtggattatttcttgtaactgtttctacttgaaaaatatgtcatgagcaacacctctgccttagattatacccaaacacaacctaatagacataagaatcagtgtgcccagcttcctggagattgcacctaagatgatagccatcctagcttcaggaaaacattttgtatattcgatgtacagacttaatactgcaacattatcattagatgtaccgacagacaacaacataacaacaagcttttgt

SEQ ID NO: 133816 - DNA, 327 bp, Zea mays
  unsure (1)..(327): unsure at all n locations
  Clone ID: MRT4577_53528C.1
gctatcatagcggcaggcagcctccctcctcaagnaacatgggcccgcacgcagcagttggcagtagtggcgaccgccgtggtggccttggtgctgctggcgggggcggtgacctcggaggcggccatcatctgcgggggggggggggttttttttttgccctgcttttnctacgcgcgcgggcngggctcggggccctccgccggctgctgcggcggcgtgnggagccttaacaacggcggcctggccaccggcgaccgccgngccggctgcggctgcctcttgaacgccgccgccggggtgtgggggctgttcgccggggacgcc

SEQ ID NO: 133817 - DNA, 460 bp, Zea mays
  Clone ID: MRT4577_53529C.1
acgcctgcagctacctgcacctacctttccggaattacccactcgacccacgcctccataccattacaatatttcagattcaacatttcaacaccacatctaaaaaatcaatggcgattgagggtttatcatttacataacatctcattccaatctatcacctctaattattcatgctagaacagatttcacatcccaaatttatgatctcattccacatctacttcacaaataatccttcctatgaccaatagcagagggactactatataacttcatcttctgaagcaaacaatcacagctcgttcgtagggaatataacagcacacatgcacacaacaatcctacaactttaacgatagcttctcctactaatgcatcatacacgacctaggcggataattctatgtctcttccattgcaacttcatgaaagatgacaaacttccatcatatcatat

SEQ ID NO: 133818 - DNA, 572 bp, Zea mays
  Clone ID: MRT4577_5352C.1
gctaccttccctctccttctctgccgccgcttccgcggttgcgtctggccccggcgccgtctgcttcccttgctcgccccggcgccgctcctcgctctctctttactccaactgctcccactcgttccccaaccacctcccacctctgtctccactccatctccacacgtggccgcgctgaaagcggcggtgcgtgcccgggcagccaagcaccagcgccgcgccatggctccgtgaattcgctcgcccgccgcgatcaagccagggttaatagttactcagctgcgggtttggcgcgagctcggtgccaccgcttagacttggccatgacgaggcgccgtgctgaggcggcgacggcgccgagcctcctccaactcctccttgccttgcactgcggggtgctgttcctacaatgctcggcagcatctgccatgggcgccgacggaagctgtcaaactcatctctcaagggattcatcgcacctgaacttgggcggcttagtttcttgcaagagctgtatttggaccataacctgctctttggtacaattccaaaactaattggctcactga

SEQ ID NO: 133819 - DNA, 655 bp, Zea mays
  unsure (1)..(655): unsure at all n locations
  Clone ID: MRT4577_53530C.1
ctcgaggcggcgggattcgttttcctcgtgagccccgccatgagctccttgccgcgcaggagagagagagcaatatagagcgccgctagggatcccgagctagccgaagaccctacgctccgagctgaatccatcgcaaggaaattactgccgtcgccatgcagaaagtagtcaccagctcgtgctgagtgattggccaggtatcgccgtggatgctctcgggccgtcaatgcttctgatccgctcggccgatcgaatggctagtggtggctggggcgaatcgcatgtgtgccctaaccatggtagtggcagtgacacgcatggaaaggcctagtttgccggtcgtttgcttgccgatggtccggtgttgttggccgtgccgccgtgcaccgcggggagggataatccacgtgccagacaccgcagtgaggacacgtgtcatcttaagagcaagttggtacctgaaatctcaagtgtcaggtcaagaacaggtaccacaggaggaggcgcttggaggatgatgtgctgtgttcgtgagaggtctaggctgtcgtcttccagtcaactttgggttgntggaccgntgtctccttataatggaanttatttatttatttgtgcagaactcctattatatnagtaagatgtgacattc

SEQ ID NO: 133820 - DNA, 138 bp, Zea mays
  unsure (1)..(138): unsure at all n locations
  Clone ID: MRT4577_53531C.1
tcgtattacanattttcctgaagaactaacatggcacgcattgctctcgtgacatcactggttgaggcaaccttgtgtggtttgcctacacactggcatcgggacttcaccatagagaacatccttgccctgctcaag

SEQ ID NO: 133821 - DNA, 217 bp, Zea mays
  Clone ID: MRT4577_53532C.1
gcttttgttccttcggctaggcctgttgctggttctttttttcggaaggcaacaaccatctttccgtttactcgccgtggttgttaacttcgcatctgttattcataaccacaagacatccggtttcttctgttcatacaggcacagtggcccaggggactgggtgcgggtcacccaaagccggcgacaatgacaaacgcgtggtcggaaattatgc

SEQ ID NO: 133822 - DNA, 408 bp, Zea mays
  Clone ID: MRT4577_53533C.1
ccggccgggagatcgcatacgcctgcctgcccacccacctccccttttccttcctcttcgccccagcgacgcggattaagtgcaccaccattctgtgattaccgcaccgtttattatgctattctgagaggattggaactctattcccttgtctagtttattcttgttaccatgtattaatgtaacaatctgtagctgatggaaggtgacttccagtcatgttttggttttggtggtgtcgagcagaggttatttatttttgggttaaggtcggagtcggacggatgctcttgggctaagtggatttaattttatccttgctgaataaagaacacggaattgtagccaaataagaacgtgatatataaatatttctttcccaaaaaaaaaaaaaaaaaatttgcggcc

SEQ ID NO: 133823 - DNA, 985 bp, Zea mays
  Clone ID: MRT4577_53534C.1
ggcaaggccaatccgaaatctcgagcgttcgcgccggcgaccacagcaaagaggaggccacagcacgacagcgccccagggttcctactctcgtcgcagcggcagcactgaggggaagatgtcgtcggtgttcagcggcgatgagaccgcccccttcttcggtttccttggcgccgccgccgctctcgttttctcatgcatgggggcggcgtacgggacggccaagagtggcgtcggcgtggcgtccatgggtgtcatgcgcccagagctcgtcatgaagtccatcgtgcccgtggtcatggctggtgtgctgggtatctacggcctcatcatcgccgtcatcatcagcactgggatcaaccccaaggccaagccatactacctttttgatggctacgctcacctttcgtccgggcttgcctgtggccttgctgggcttgcagctggcatggccatcggcattgttggtgatgctggagtcagggcgaatgcacaacagccgaagctttttgtgggcatgatcctcaccctcattttcgcagaagcgcttgctctgtacggtctcattgttggaattatcctttcatcccgtgctggtcaatcccgggcagattaagtgcattaccattctgcaattaccgtactgtttattatgctattctaagagaattgaaaccctatgcccttgtctagtttattcttgttaccatgtattaatgaaacaatttgtagctgaaggaaggtgacacttccagccatgttggttttggcggtgttaagcagaggttatttattgggttaaggttggagggatgcgggttaagattggatggatgctcctgggctaagtggatttaatttttatccttggtgaataatgaacacggaggtgtagccaaataataacgtgatatatatatttctttgcccctttaaaaaaaaaaaaaaaaaaaaaaaagaaaaaaaaaaaaaaaaaaggccccta

SEQ ID NO: 133824 - DNA, 981 bp, Zea mays
  Clone ID: MRT4577_53535C.1
cattgggacctcgagccggcgggagacgatacgcctgcctgccccccacctccccttttccttcctcttcgccccagcgacgcggccgcccggagaccgagcgaggcaggcaactaaccaccgagaggcagggacaggaacaggaagccggaggcgaagatgtcgtcggtgttcagcggcgatgagacggcccccttcttcggcttcctcggcgccgccgccgccctcgtcttctcatgcatgggcgccgcgtacgggaccgcgaagagcggcgtcggcgtggcgtcgatgggtgtgatgcggccggagctcgtcatgaagtccatcgtgcccgtggtcatggctggtgtgctcggtatctacgggctcatcatcgccgtcatcattagcacggggatcaaccccaaggccaagccctactacctctttgatggctacgcccacctttcgtccgggcttgcctgtggtctcgctgggcttgcagctggcatggccatcggcattgtcggtgatgctggagtcagggcaaatgcgcaacagccaaagcttttcgtcggcatgatcctcatcctcatttttgcagaagcgcttgctctctatggtctcattgttggaattatcctttcgtctcgcgctggtcaatcccgggcggattaagtgcaccaccattctgtgattaccgcaccgtttattatgctattctgagagaattggaactctattcccttgtctagtttattctcgttaccatgtattaatgtaacaatctgtagctgaaggaaggtgacttccagtccagtcatgttttggttttggtggtgtcgagcagaggttattttttttttttttgggttaaggttggatggatgcttttgggctaagtggatttgattttatccttgctgaataaagaacacggaattgtagccaaataagaacgtgatatataattatttcttttccaaaaaaaaaaaaaaaaaa

SEQ ID NO: 133825 - DNA, 982 bp, Zea mays
  Clone ID: MRT4577_53536C.1
caaaaagaaaccaaactcggctcgagagagatcgcatctgcttgcctgcccaacccaccttccctttcctccctccgtccctccctcctcgccccagcgacgcggcacaccggagaccgagcaaagcaagccaccacacagaggcaaggagaggaggaggagcaggaagccggaggcgaacaagatgtcgtcggtgttcagcggcgatgagacggcccccttcttcggcttcctcggcgccgccgccgccctcgtcttctcatgcatgggcgcggcgtacgggacggcgaagagcggcgtgggcgtggcgtcgatgggtgtgatgcggccggagctcgtcatgaagtccatcgtgcccgtcgtcatggctggtgtgctcggtatctacgggctcatcatcgccgtcatcatcagcacggggatcaaccccaaggccaagccatactacctctttgatggatatgcccacctgtcgtccgggcttgcttgtggccttgctgggcttgcggctggcatggccatcggcattgttggtgatgctggagtcagggcaaatgcacaacagccgaagcttttcgtgggcatgatcctcatcctcattttcgcagaagcgcttgctctctatggtctcatcgttggaattatcctttcatcccgtgctggtcaatcccgggcggattaagtgcactaccattctgcgattaccgcactgtttattatgctattcagagagaattgaaactctatgcccttgtctagtttatttttgttaccatgtattaatgaaacaatctgtagctgaaggaaggtgacacttccagtcatgttggttttggtggtgtcaagcagaggttatattttttgggttaaggttggatggatgctcctgggctaagtggatttaattttatccttggtgaataaagaacacggaattgtagccaaataataacgtgatatatatatatttcattgccccttt

SEQ ID NO: 133826 - DNA, 1056 bp, Zea mays
  Clone ID: MRT4577_53537C.1
agttttctctatattattgttatgtcgttgcatgcattcgttcgttatctttgtattttttgttgcccacacacgaatttcatctcactacgaatacagagttaaaaaaagatattacaataactgttcacaaatgtaacgcgactaataaacagtaaagcagaaaaaaaattaagtgttgctgtttgctccttaagttgagagagaacggatggacttctctctatggtgttcttaacattttttcagctctctactcatctggccaacgaacagatgctatcagcaataatgcaacaaatacatttgcgtgctcgcacaaacggtagtaatagtcacaaggaaccagagaaatcaggcaagcttaagacgagcagcaagacgtcttctggttgacgggttgcccgcggatctgcaccgtcgctggccttgcgttggccgcggctggttggctggccatcctgtccttgatggatgcagccatagccatgaaggcctgctccacgttggtggcgtttttggcactcgtctccatgaacgggatgcccatctcatcagcaaatgcctttgctgtctcagttgccacaactttgttggcagttaggtcgctcttgttcccaacaaggagcttgttaacattgtcacttgcataacgatcaatttcatttaaccattgcttcacattattgaagctttcttggtctgtcacgtcatatacaataatgattccatgagctccacggtagtagctgctagtgatggtcctgaagcgctcttgcccagcagtatcccaaatttgaagttttatggtcttcccatcttgctctactgtccgaattttaaaatcaaccccaattgtgctgatgtagctgtccaaatatgaatcatccgcaaatctgagaagcaagcatgatttcccaacaccagaatcaccaataagcagaagtttgaaaaggtagtcgtactcgggattcatgtcgaatcgaatctggctgaatcgctcgcttgccgcgccttcgaacggggacgacggaaggggcggtcagagactcagag

SEQ ID NO: 133827 - DNA, 368 bp, Zea mays
  Clone ID: MRT4577_53538C.1
caagacaaactagagatgatgatgaatagaagaacagaagtgacaaccatacaccatcagggaaggtcaacatgactggatgaaaattatatatcagcaggcagcaaggtatgagcactggtacaaaaaaagcgcacatacaacgggtccggaataacgctgcaggacacaacatccaccacaaagaggcaaaccgatccacaatgacgaaggagcctcagacaagcacaggagcctcagctaccctcataatcggaaacctggagagcgagcccgaaaccggaaccaccccaacctccaggaacaaggccacacaggaaggctcaacagcgagtgccccacaaatgcccaccttccacggaccccta

SEQ ID NO: 133828 - DNA, 1162 bp, Zea mays
  Clone ID: MRT4577_53539C.1
ccggccgggccgggaattgattgcagctggaagggaaaggttatcctctgtgccttcaggtggtggtgcaattgacatgggagctccagcagctgtagctggcggtggcgcagcacctgctgaagaggcaaagaaggaagaaaaggttgaagagaaggaagagtctgatgaagatatgggtttcagcttgttcgattaaagatcgcatacgcctgcctgcccacccacctccccttttccttcctcttcgccccagcgacgcggccgcccggagaccgagcgaggcaggcaacccaccaccgagaggcagggacaggaacaggaagccggaggcgaagatgtcgtcggtgttcagcggcgatgagacggcccccttcttcggcttcctcggcgccgccgccgccctcgtcttctcatgcatgggcgccgcgtacgggaccgcgaagagcggcgtcggcgtggcgtcgatgggtgtgatgcggccggagctcgtcatgaagtccatcgtgcccgtggtcatggctggtgtgctcggtatctacgggctcatcatcgccgtcatcatcagcacggggatcaaccccaaggccaagccctactacctctttgatggctacgcccacctttcgtccgggcttgcctgtggtctcgctgggcttgcagctggcatggccatcggcattgtcggtgatgctggagtcagggcaaatgcgcaacagccaaagcttttcgttggcatgatcctcatcctcattttcgcagaagcgcttgctctctatggtctaattgttggaattatcctttcgtctcgcgctggtcaatcccgggcggattaagtgcaccaccattctgtgattaccgcaccgtttattatgctattctgagaggattggaactctattcccttgtctagtttattcttgttaccatgtattaatgtaacaatctgtagctgatggaaggtgacttccagtcatgttttggttttggtggtgtcgagcagaggttatttatttttgggttaaggtcggagtcggacggatgctcttgggctaagtggatttaattttatccttgctgaataaagaacacggaattgtagccaaataagaacgtgatatataaatatttctttcccaaaaaaaaaaaaaaaaaagcggcc

SEQ ID NO: 133829 - DNA, 276 bp, Zea mays
  Clone ID: MRT4577_5353C.1
ttttgtgtttaaataacggcagtaacggagtatatacccgagatatgaatactttaccaagggcagtatcacagcacaacctggtgcgaggtggccccagcacagtttacaggagaactcatgtacagaacaacagctcacctgcagggcatggtaacaccaccctaccattactccggtgctgcaactactaacaggctcgttcactacagaccagaggcgcccgtcaggagtctacataacctacggatccaggaacgctaccgaggagccacc

SEQ ID NO: 133830 - DNA, 1119 bp, Zea mays
  Clone ID: MRT4577_53540C.1
tgtatgatagggtagaaaggaatggaaagtcgagagtgcaccaaggacctgcttacatatttgcagctctctaatagctaatttggtaactcccatttttccaaaaaaaaaatcttatttttccaagaaaaaataaaataatttctcttagaaaatagaaatcccttggaaaaatggagttcgacaaactagccctaatcgtccgatcaatgaatagatgctatcagcagcgtcttctgaaaataatgcaaatacatttgcaagcgcacacaaaaggtagtagttgtgtgtttgagtttacacaaagtacaaaaaaaaatcaggcaaccttaggatgagcagcaagacgtcttctggttgacgggttgaccgcggatctgcacggtcgctggccttgcgttagccgcagctggttggctggccatcctgtccttgatggatgcagccatagccatgaaggcctgctccacattgatggcgtttttggcactcgtctccatgaatgggatgcccatctcatcagcaaacgcctttgctgtctcggttgccacaactttgttagcagttagatcgctcttgttcccaacaaggagcttgttaacattgtcacttgcataacggtcaatctcgtttaaccattgcttcacattattgaagctttcttggtctgtcacgtcatatacaataatgattccgtgagctccgcggtagtagctgctagtgattgtcctgaagcgctcttgtccagcagtatcccaaatttgaagctttatggtcttcccgtcttgctctactgtcctaattttaaagtcaactccaattgtgctgatgtagctgtccagatatgaatcatctgcaaatctgagaagcaagcatgattttccaacaccagaatcaccgataagcagaagtttgaaaaggtaatcatactcgggattcatgacgactcaaatctgacggaaccgctcagcctgccgcgctttggaacggggacacgagaagggcggtccgaacgaattgatggatctggggaggagacgatgctgcttggagatgcaaaacgtcggaggtttggggtggaacgataaaatacttaggtaacccctaccgacctcgtgc

SEQ ID NO: 133831 - DNA, 853 bp, Zea mays
  unsure (1)..(853): unsure at all n locations
  Clone ID: MRT4577_53541C.1
gccggccgggctgcggaggagcgtcacagcggtgccatcgacgagcaacccagccaggagaatcctcccgcccagacccaaattgaaaggtgccacacgcagcaaagattatggtgaaacgagggagctagttcttacctgtaaccaagcaatacagagcccagatgacccgacggcgatctcacccttcaaatcgttccccgcacgattaccccacggttccgttgagcaagagcgaggtagacaagggttgaagggtccccggggtcccatttatacactgctagtaagtccgattgagccgaatttgtcggaccacgcgcatggtgtttgcggcaatactattgcggggatgacactggccacacggtccccccccccccccgtcggtaatggactagcgctgcacggtgaccgcaacaggcgagcggcctgggcgaggaacaaggtgcggttgttgcgcggatctctcagtcggcgaggaagtcgcgtggcgatctcggtcgccattggcgcgatccggttgaggagacaaccctgacgaagacgtcccacctggcggcgatagtggttaagctgtagaagcttgggtgcctgccccgtggggcccgaccgtcagtgccgacgtccaagtgtgagctaagtgggccgcgtttgaggggaaaacagggaatgggccaagtggcgccagaattggcccaagnnagttttctgttccttttctttttctttcaaatttctaaactccctatttcatttaaaattttcaaatcccttattccaaattcaaacagggttcactttgaattttcagcacaattctaatgtacaaaaaaaaaaaaaaaaggcccct

SEQ ID NO: 133832 - DNA, 1270 bp, Zea mays
  Clone ID: MRT4577_53542C.1
gattttcagatcagatcgggaagtgagatggatagccggataggggtagtcgcaacaaaaagaaaccaaactcggctcaagagagatcgcatcttgcctgcccacccaagcttccctttcgttcctcctcgccccagcgacgcggcctcccgtagaccgagcaaggcaacccaccactgagaggcacgcagaggagcaggaagccggagaccaagatgtcgtcggtgttcagcggcgatgagacggcccccttcttcggtttcctcggcgccgccgccgccctcgtcttctcatgcatgggcgcagcgtacgggaccgcgaagagcggcgtcggcgtggcgtcgatgggtgtgatgcggccggagctcgtcatgaagtccatcgtgcccgtggtcatggctggtgtgctcggtatctacgggctcatcatcgccgtcatcatcagcactgggatcaaccccaaggccaagccctactacctttttgatggctacgctcacctttcgtccgggcttgcctgtggccttgctgggcttgccagctggcatggccatcggcattgttggtgatgctggagtcagggcgaatgcacaacagccgaagctttttgtgggcatgatcctcatcctcattttcgcagaagcgcttgctctgtacggtctcattgttggaattatcctttcatcccgtgctggtcaatcccgagcagattaagtgcactaccattctgcgattaccgtactgtttattatgctattctaagagaattgaaaccctatgcccttgtctagtttattcttgttaccatgtattaatgaaacaatttgtagctgaaggaaggtgacacttccagccatgttggttttggcggtgttaagcagaggttatttattgggttaaggttggagggatgtgggttaagattggatggatgctcctgggctaagtggatttaatttttatccttggtgaataatgaacacggaggtgtagccaaataataacgtgatatatatatttctttgcccctttaaaaaaaaaaaaacctctgcttaacaccgccaaaaccaacatggctggaagtgtcaccttccttcagctacaaattgtttcattaatacatggtaacaagaataaactagacaagggcatagagtttcaattctcttagaatagcataataaacagtacggtaatcgcagaatggtagtgcacttaatctgctcgggattgaccagcacgggatgaaaggataattccaacaatgaga

SEQ ID NO: 133833 - DNA, 1248 bp, Zea mays
  Clone ID: MRT4577_53543C.1
gggtttgtttttttttttttttttttttttttttttttttttttgttgcccacacaggatttcatctcactacgaatatagagtaaaaaaatattacagtcgctgttcacaaatgtagcccgagtaataaacagtgcggctataataaagtataaaaaacgaagtaaagtgttgctgtttgctccttaagctgcgagagcactgaggaacttctctctatggtattgttcttaatatattttcagctctctaatcatctggccaacgaatagatgctatcaggaataatgcaaatacatttgcgtgcgcgcacaaaccgtagaaatagtcacaaggaaccaaggaaatgaggcaatcttaggacgagcagcaagacgtcttctggttgacgggttgcccgcggatctgcacggtcgctggccttgcgttggccgcggctggttggctggccatcctatccttgatggatgcagccatagccatgaaggcctgctccacgttgatggcgtttttggcactcgtctccatgaatgggatgcccatctcatcagcaaacgcctttgctgtctcagttgccacaactttgttggcagtaaggtcactcttgttcccaacaaggagcttgttaacattatcacttgcataacggtctatctcgttcaaccattgcttcacattattgaagctttcttggtctgtcacgtcatatacaataatgattccatgagctccgcggtagtagctgctagtgattgtcctgaagcgctcttgcccagcagtatcccaaatttgaagttttatggtcttcccatcttgctccaactgtgcgaattttgaaatcaaccccaattgtgctgatatagctgtccaaataagaatcgtctgcaaatctgagaagcaagcatgatttcccaacaccagaatcaccaataagcagaagtttgaaaaggtagtcgtactcgggattcatgtcgaatgaaatcgctcgcctgccggctgccgcaccttcgaacggggacgacgggaggggcggcccgagcgagtcgatggatctgggaagggagacgcgaggacaggtggatggagatgcaaacgtgagatattcaaggggcggaacgataaatactcgagagccgcggagcgaaagccgcgtgcgcgtcccgcgtgggtcgtcgctgtcctcgccctcgcggaggccttggtggccgttggccccgcgtttcttccccggccggcctcgaggtaccc

SEQ ID NO: 133834 - DNA, 325 bp, Zea mays
  Clone ID: MRT4577_53544C.1
cccggaacaaaaagcctggggggttaaccaaaattttcccaagggcgggcccccccccccggggaaccaggtttcgggagaacaactaaccccccttgggcccaaaaaaaaccccggaggggcccccccggggggggatggggttaattcaggcaggaagggccaggcggtaaaaaattggcaaaacccccgccgctggggaccgggaggggggttttggtccggcaactatttttttgggaaaacggggcgggggcaaacggggtcccctggccccaggcccctaaaaaaggcccccccgttaccagaccctccgggcgaaggg

SEQ ID NO: 133835 - DNA, 794 bp, Zea mays
  unsure (1)..(794): unsure at all n locations
  Clone ID: MRT4577_53545C.1
ttctcgaccctggtttcctccaagcttccagtcccagttccacgcatccttcttcactactactactactcttttgcattgcgacaacttctacaccgacaaacatcattctaacacaccatggctaggtgttatatcgacagatatggctacaggcgctgcagaagctcagcctggaacaattgggtcagatgggtagtcctcgtcgttgtcgtcgtcggcttcctcctgctctttgtactctgctcttgcttaacggcgcgtcgtcgccgcaaggctggtcgcaagcccttttacggaacaggctgggctgctcgtcctggtctctacaacaaccaaaacaacaaccagtacaacgcccagccatactacgcaaaccaacccgccccgccctatgacgccgctacaaacaacaacaacaacggttactacggcggcggcgcaaaccaaaactactacggtcagcaaaacggtgtcgagcttcaacagccccagcctagctacggcggaggcggctatgcaccaccaccaggccctccaccagccaaggcttaagcatctcgcgatagccgtacaagaccaaaaatgatcagaaacatgtcgacacaaacgaagccttcacaacaancctggatgatgtgaacaatgacgacgaanatgtggcaaatttgattgggcaaaaggccggagtacaaggggggacttctctgactttttctttttgtgtaatcacgcttgatacctcttttccttttacttatgcttanatttcaacgttttttccccctctataa

SEQ ID NO: 133836 - DNA, 320 bp, Zea mays
  Clone ID: MRT4577_53546C.1
atgaacgcaaaataattattgtcttaactatagctgtttggtttgttttgacaaaaaccaaaaaaacgttttaataaaggacatattgcaactttgtctggaacaacaacgaaaccttattattgtccggcacattgacaccccatctcactatccttaagctgctacagctactggaaaacaagaccttgttaactgtgccagaccaatggggcccataagtactgtggcactcagaagcacaaagaatgaattatttttcaggcaaacaacaagcccggagaccattcgaccaagcacaggacaggcatggggttgag

SEQ ID NO: 133837 - DNA, 216 bp, Zea mays
  Clone ID: MRT4577_53547C.1
cggctctcgttcggcttcctcggttctctttgcggcctatcagcagtcaggttctctcgtctgtgctgatggcgtccaactacgtcgacaccggggcggaggagggcaggttccacggccaccacaacacgacgccgaccaagcgcggcggcgtcgcccaaaacgcttccggggagccttcttggtccgccaccagcaccggcaacggcccaagtg

SEQ ID NO: 133838 - DNA, 688 bp, Zea mays
  Clone ID: MRT4577_53548C.1
tcggccgggatcccatcttcgacctctcgatcgttcgcactatgttgttccctcccgctcgctctcaggtcggcgtcctccgcgtcgtcagggcggtcccgaccgccgtccgtcccgcgtcgaccctcgtgtccccttcgtcacaccctcagctgtgcacgtgcgcgaggtgtgccccgcgatcgtcgaccgtctcgtccctcccgactccccgctcgcccatccgctccgtttcccacttggccaacacgggtgcgtctcacccgcgctcgtgcggctgcgcgaggtgcgccccgaggtcgtctccaatctcgaccatcgtctcgcgcccgtcgaggcccctctcttcctcgaccctccagccgcccaagcgccccgtcgtcgtcaagcccgacctcgacacgcccgattcaaagcgcggcatgaaggtccggtcatccatcaagaagtactgtgaaggctgcagcatcgtcaagcgccagggtaccctcttcgtcctgtgctcgagggaccccaagcacaagcagcgtcaaggatagatctcgtcccgctcggtacctctttttttcgatccaccccagtccctcggctgtagctttccttcgcatcgcgcactttacgttcccccctctgtaccgaatacgaaccctatcattttttgagcaaaaaaaaaaaaaaaaaagcggcc

SEQ ID NO: 133839 - DNA, 240 bp, Zea mays
  Clone ID: MRT4577_53549C.1
gcacctcctctgtggtcgctcgcgttgcttggcggtgcggggcgtggtctctcctgggacccctcgacgagagaataaaacaactaccgatgcgatccgcgtaaatatatgactccgtatatgagcagtgacatcgagtatactgagtgttgtctctatatgcaacaaccatactaaattactctgtggtggcattatagaaaaaatcaatgactgtatctagctattagactaaaagaa

SEQ ID NO: 133840 - DNA, 371 bp, Zea mays
  Clone ID: MRT4577_5354C.1
gtccttttttttttttattcccaaagatctggattaaccagaaaaaaacggagctgtacatatgactgggcaactcaattcacagaactttgatcccgtgcggaaggtaggagaaacattcacagcccctgagggagtgccatggattatataaattgaaggagggcaactgaaaaaaaaacgacgccatagatgtttatccagacccaggggggggtcccagaaggctgtctgccatacgaacattacggtttttagggtgcaggggaagcagacgctgatgatccatacggatagaccaatggagcaaccactgtacgatggccgaatttacagacggctccttacttgcacgtaccggaacgagaata

SEQ ID NO: 133841 - DNA, 162 bp, Zea mays
  Clone ID: MRT4577_53550C.1
tcccacgcgtccgctcaatgtttgttgtgtgaacagagatacgcgtttgaatttggcataaagttaactgttgtcttctttttcccttcccctctctctctatctccagtcatcggtaataggacaagtacctttccttattccatcagttctagatcgcga

SEQ ID NO: 133842 - DNA, 1047 bp, Zea mays
  unsure (1)..(1047): unsure at all n locations
  Clone ID: MRT4577_53551C.1
ggaagcaagaatcatgttctactgggcagctttcattcttagaattgtgaacagacaacctagcttaaagaattcagggaggctattgtaaacaatgcccatttttgggcaagaggagatttttttttacaatggctgacttccattcaaaatttgtacatgatgacagtctgcttatgaaccatgttcaacagttattccacccaaaaccatttgatacttcattgacaatggatagtatcctactggagtcagatcccttgttgaggattattgtcagttgatgtagttagcaacttagcatcacaaattggtcttatactccacggaggaatctggagtttccattctagcagcatatgctttacaataatacaagggaaaaaccgctacattgggagaacagattgctttcaatgctgtgagaactggcaagtatgctggcagatgaagtgatgaaaagccgcacggcatatgaagaatgaacaaactaaactggatgtcagaaagaatagggttagtctggaaatgcaactacgagatactatctactctgtttggatttcgagtgttctgttctgttcaagcggcacatgcagtcaggacacgggaaggtatatatagattcgtttggtcttttcatttcgatccccttggcatcactgtgtgctctcatattaagcaagtgccgcttcaatgccttccaccctatacgtggattatccaagagtacagcaagccttcttttgtctggtttaattgtttttgaatgcccaccatacaagtatctcctgtgacccataagaaaatgcgggaaatttccaccttgtgtggtcacaaaaacttcactttgggcacaaatactatagtcaacagcagccatcttgaatggagcaagttcctcttctgatgccagtgtctcttttgtctgtaggagaggaaacatttcaagaagagaagccatgttcttctctgctttgnaaatctttccagatgccaaaaagattgcagtcttattgctgaaatccattccacgaagcattaacc

SEQ ID NO: 133843 - DNA, 329 bp, Zea mays
  Clone ID: MRT4577_53552C.1
gaagaagcgaaagtatgagcttggtctcctgtcagccaacaccaagttgtcaagcagtaagacagttaggagggtccgcgttcgtggaggtaatgtgaaatggagggctcttcgcctagatactggtaactactcatggcgaagtgtagctggcaccagaatgacccgtatgcttaacgtggtctacaatgcgtcaaacattgatcttgtgaggacacatacccttgtgatgagtgccattgcgcaagtagatactccgccattcaagcagtggtacctcactcactctggagctgacattggtacgaagaagaaaacccctgctgcaa

SEQ ID NO: 133844 - DNA, 174 bp, Zea mays
  Clone ID: MRT4577_53553C.1
agattattgttcttcctttatattattgggaaacacaagagattattctcagactttgacacttcattccgctttgccatgccttctatatacaatatgtgcttttggaaaaatttgaggagcaccttaaaaccaaactaacccacttcggccaatgtttttttttcttatttt

SEQ ID NO: 133845 - DNA, 365 bp, Zea mays
  Clone ID: MRT4577_53554C.1
ggggcaaaaccccctgggaaacattttcttttcttgtggggttcccgataaaaaaaacaaactgtaaaacaagggccccttttgctccaacaaacttattgcctggccggggggaaaacccttaacggggggaaaaccccaaacagggggcaaaatttagcttttcatttttaattgggggaaaaccacagggatcccaaacttaatccaccccccccattttgtttttgccggggttttcccccaggggggggatttaaacttgggccccagaaaacttgtcctcatttatgctcaaacccggctttaacatgcgatggatcccggggccaaaggggggggggccatccaagcttaaccccggg

SEQ ID NO: 133846 - DNA, 216 bp, Zea mays
  unsure (1)..(216): unsure at all n locations
  Clone ID: MRT4577_53555C.1
aagacgagggcgagctggtcacgggagcgagcatgcaccacgatcgaaaccctttgagatgagggctcggacgagaaccctttatcaaatggaggcggaagagcgcgtgcactgaggcggcaggccgcagcaaggttttttttcaacggagccgggggggnccggcggcggcaggggcgatacgaccaccgacaaccctccggagacgacgaacga

SEQ ID NO: 133847 - DNA, 317 bp, Zea mays
  Clone ID: MRT4577_53556C.1
tttttttttttttttttttttttttttttttgttttttttttttttgggggggaaccatatatctaatattcaaatgagcatactggctaaaaatgggtgttttattacaatgggttttaattgttacaaaaaaattgggccctaaaaggaaacttttaagggcttcaacaaccaaacacatttggtggggggttattttatggacaaacctggttggacatttaaacattggttggaaaaaatgggattttattagggttaaaagtttcttggttttgcaaccctttttaattttcattgattttccatttttggg

SEQ ID NO: 133848 - DNA, 285 bp, Zea mays
  Clone ID: MRT4577_53557C.1
gggccaaagggttttttgggtttcccccggaaaaaccccccaagggatgccaatggggaagggccaaatgttccccctttttttttcccacccctttgtttgcaagttttaatcttttgacatacccccaaaaatttttcccccccccccccaacctttttccccccccctttttttttaggggaagtttcccctcccctcccgcctttaaaaattaaaaccaaatttttgcggggccccggggttttttaacccaatggcccccctaataaaaggccccggggg

SEQ ID NO: 133849 - DNA, 791 bp, Zea mays
  Clone ID: MRT4577_53558C.1
attcggctcgagcacatatgctaatttaaaattatggaagaagcaaagctaccaaatgttgctaaggtgcctaagataaaactttgaagtgtgtataccatttgtaataccacttgtaatattgattcattatttggtttcgacccttaacacttgagatagctagacctcaaagagactagaaacatttgtgagaccaaaattactagaaagatttctagataccaattaaaaaagcaaataatattaagtctagctatcgcttaacatatgcatgctagttcatcaaattatcaatcaaaaaatattaaaatacatatcataaacaagaatgttgggggccttcgtcttccgaaggtcctcaaaaacacgactaacatatttcccaagtataatatatgtacaggaaccttcggacatgaaatgaagttatacaataatatggagagcgcggttcgggagaaggatgaatcaatgctgaagctacccgtgaagaagcttcggcttaacgatggaaaatgaaaccgacttaaaggggaaaaggttgtctagtcctcgatagatttctctaagtcaatagtaagtgtcgagggcatgaatgtaattctacacaggttgcgccctgtgcctataaatagataaatagtgacactgcactgttcacgctgactgatattcactcacacgtcacacttggacttttaccttccgttaagccgaaggtataaatgtaattcaatactgtccatgtttattcatgataatataataaaaatgttctgataaacaaa

SEQ ID NO: 133850 - DNA, 152 bp, Zea mays
  Clone ID: MRT4577_53559C.1
tctgtccaatccattccgtctgcctattcacccccaccaacatacgggccccacatggctgccaccggcaagctccgccgttgcccgtgcgtcggcgactgcagcggggaccacctccgcttactacgtcccggggcttgtatgccggctac

SEQ ID NO: 133851 - DNA, 252 bp, Zea mays
  Clone ID: MRT4577_5355C.1
gttagcttgaacacattcgtggcgaatttcataccgagaacactagcttacgtgtcggaaggctttatgcacaatgcacggaagagggaaatgttgaagacttgtgctataagaaagaaagagaaaaagcaatgttacccctgtagtactcaagactcatatgggcaagcttcatgggcattctcgtcattgcatacaaagctatatctcgcccctataaatcgagaatcagtactatgcataaattcacct

SEQ ID NO: 133852 - DNA, 203 bp, Zea mays
  Clone ID: MRT4577_53560C.1
ttggcaactcctcataactgatgcaaggtcaacacaccgtttgactcacaatgtcagtgtcaggctccatgttcccagtggtagcgacctcatggtgactgaagtcacgttcgtgctgcatctaagcgtactctcatcgattcacaccatcatactattgaagattaccatcaggtacttcgactacacgattctacttgcta

SEQ ID NO: 133853 - DNA, 703 bp, Zea mays
  unsure (1)..(703): unsure at all n locations
  Clone ID: MRT4577_53561C.1
gccggcnncgggaaaaaattccacaaaaaaagaaaaaaaaaaaaaaaaaaaaaaaaaaaaaaaaaaaaaaaaaaaaaaaaaaaaaaaaaaaatcccccttcccacagaaatccccacaagcacttcgacgtcacacgggggttgggcacaaacacaccaagggtgggcaccaagggtttactaccaggagggggactactgctcggaggaggggaggtcgggggccccggccggtttcggccgccacggggggggggtccagaaacacgtcgtcaaggaaaagttcgaggaggtcaacacggtttcacgcgccggggccaaccccccccaccaccatggtccccacgggggccacggtttcggggggggggagaccagggtcaaaaaggacatcaacacctgcaccggggagttccacgagggcagggaaagtttcctccccagggttaattgagccccccgggggccggaatccacccccgttcgggtttgcctgggggccttatgaatgtctggggttgactggttgggcagggccatcgaacttggttatcgaacgggcacgcactcagctcctgtacaaattacaacaaaaagctcgggacctgaaaaaaacttcttcgaaatactaaaaaaaaaaaaaaaaaagcggccgctttttttttttttttttagggttttttttttttttttttttatctct

SEQ ID NO: 133854 - DNA, 397 bp, Zea mays
  Clone ID: MRT4577_53562C.1
cggctcgagcaatatttagatcacactgttgtcccaattttattatctggcttggcaaccgtagcaaaagttcgtccggagcaacctatcgaatatcttgcccaatatttacttgacaacaaatacaaatatgataataaccaagaaaactcttcaattaatggtaatcaataaaatttgattactatttaaatcatttagaactattattcaatttttacttgtgtttttatacatttcatttaaattcgcatataatttagcatttttgtttttacattgctatttttgttataatgtttaagcaattactttgatttgttattaatttatattaaaatttttttcttttcactatgctttctacttctgttttggtgcaatcttctgctttttt

SEQ ID NO: 133855 - DNA, 546 bp, Zea mays
  Clone ID: MRT4577_53563C.1
caaatggagtagatgttgaggatgctattcatgatctagatggtatgctggcagtgtctttcggttgaacttgtttgaagccctgcccaacctggatattttttagtttaggtctaaaaagagaaaccctagggttgtttgaaagggcttgtttctaggcttggcatttttgggtcagtgaagcagttagtatggttgtggatttgcatttgctactcggcattaggtcttattttttgccagcgctaactcaaattgtattgctgaaacttaagtgttgcttatatattccgttggtaacggatactattctgcttcaattcccttctacattgcagattcgctacaggcttggctcttggctagccaagcctgcagtttaggactttgccaaaactgcatttgccatttaacaggcttctctaattccttttttctaattacttgatacaaagcagttttaaattaactaatctgcctgaaggagctgtaaccctcgtcacctctccaagacgcagtagtccttcaccagctcatgggggcagt

SEQ ID NO: 133856 - DNA, 381 bp, Zea mays
  Clone ID: MRT4577_53564C.1
cggttgtctactcctccgcctcaggatcgaggacgggagcattaggacctctcgagcgccagttcgagctgaagaggaaccagatacgcgagagaacacgggatatccagaagatcatcaagctgacaaacgaggcgcaccttacagcacttcatctgcatggggttgagtacgcacacccagatcttgtagagctacatgatgccacaccgtccatcgacctgaacgctgaagacgctaatggcatgaccgcgctggcagctggtgaagcagcaactgcgctcagcgacgaacgaccgggtaatcaagcagatcgtctatgaccgaggggacttgaactccagcatcctgagaacccggtcagccatcgcttctcagatc

SEQ ID NO: 133857 - DNA, 251 bp, Zea mays
  Clone ID: MRT4577_53565C.1
tttacgcgttggcttaattgttacattctgtcccttgtggtgcacaagtctgctacgattgacaatgtgatggtctgcttccttgtcaaataggctgtctccatcacccagtattagctcatgtatagtaagatgatcctggagcatggcatcccgttgtactattggaacatccacatggacagctctgtgcagctgacgatccaattgatgagcggcatgcttcacgtcttgaagacattggctggcca

SEQ ID NO: 133858 - DNA, 340 bp, Zea mays
  Clone ID: MRT4577_53566C.1
gaaaaaagggtgcgacccacgcgtacggttgaatccaaaatatccaccgacctgtattatgggaagacaacaaacctacaattgggggattcttatgaacaagaacgcttaacgaccattatatgcagatactaccgaggagctcatggcattattaatgtgtaagatataacagaccaggatagctgtcacaaagacaatcaatggacaaatgaaaacgaattgaatgcctgcgaaaatgacaacaacattattgtgatgaacacatatgaccaggatcagaacatattaatttcttacaaagcttgaaacgtcattgctgatgacatcggaatactat

SEQ ID NO: 133859 - DNA, 289 bp, Zea mays
  Clone ID: MRT4577_53567C.1
aaaaaaaaagaaacggttttttttttgaaaaaggaaaaacaaggtcaccgaacggttaaaggtcagaggcccggttccgaaaaacacacccccggcccggtcctccagaatccagtgggggtaaaccacagttttgatccaggtaattttagttcccagccttaaacgaggggggtttcacatgccgggggcaaaaataataaatggggacaaatgggccatgtccggggggtccccccccaagggggtgggggttttcaaccgccccaaaaaccccagggtggggcaa

SEQ ID NO: 133860 - DNA, 299 bp, Zea mays
  Clone ID: MRT4577_53568C.1
gacaaatccaacatcaaccgacagttggaggtatacacaagcggaggtgaccctgagagtgtggctggggagtatgggcggcactccctctacaaaatgcttggttacttcagcctggtcgggcttctccgcctgcactccctgttaggagattactaccaggccatcaaggtgctggagaacatcgaactgaacaagaagagtatgtattcccgtgtgccagagtgccaggtcaccacatactattatgttgggtttgcatatttgatgatgcgtcgttaccaggatgccatccgggt

SEQ ID NO: 133861 - DNA, 618 bp, Zea mays
  Clone ID: MRT4577_53569C.1
cattgggtacctcgaggccggccgggaaaataaggatcaccgccgcgacgacgatggcagcctcgctccaagccgcggccaccctgatgcagccggccaagatcggcggccgggcgccctttgcctcgctgccgtcccgcccgtcgtcgcaactcgcctgcagggcgttcggcgactacgccggcgccgccaggatcacatgctccctgcacgactccgccagcatgtgcgtcgacgccgcgaagctcgccgggttcgcgctctccacatcggatgtcctcgtatcgatcgcgagcgcttagggaacgcccaagaggatgacctacgagaaaatccacataccaacggacatggaggtgatcgtcatgggcacacttgaaccagtgactgaccgtccacggaaacgtgtaggcgctaacggtaccgcacgtcacgtaccggatgaggaagctgcgaatggtgtctgagacccacaactgctttgctttaggcacaggcaacaacgattgacacaagctgcacaagaaccacttgatgaccctgcccacgacaacttgaaaccagatcgagatgccgatagaagcggcattcatttgctagtgcggatatgaggagata

SEQ ID NO: 133862 - DNA, 2400 bp, Zea mays
  Clone ID: MRT4577_5356C.1
acacgacattccccacctctctcctcacatcctctgctaccttccctctccttctctgccgccgcttccgcggttgcgtctggccccggcgccgtctgcttcccttgctcgccccggcgccgctcctcgctctctctttactccaactgctcccactcgctccccaaccacctcccacctctgtctccactccatctccacacgtggccgcgctgaaagcggcggtgcgtgcccgggcagccaagcaccagcgccgcgccatggctccgtgaattcgctcgcccgccgcgatcaagccagggttgatagttactcagttgcgggtttggcgcgagctcggcgccaccgcttagacttggccatgacgaggcactgtgctgaggcggcggcggcgacggcgccgagcctcctccgactcctccttgccttgcactgcggggtgctgttcctgcaatgctcggcagcatctgccatgggcggcgacgtgtcggcgctcatggcattcaagcgcgccatcatcgaggaccctcactccgtgctctcggactggactgacgcggacggcaacgcctgcgactggcgcggcgtcatctgctccgcgccccagggctctgtcatttccctgaagctgtcaaactcatctctcaagggattcatcgcacctgaacttgggcggcttagtttcttgcaagagctgtatttggaccataacctgctctttggtacaattccaaaactaattggctcactgaagaacctgagggttctggacttgagcgtcaatcgactcactggaccgatcccttccgaattaggtggcttgagcagtgtgagcatagtaaatttccattccaatgggttgactgggaatataccgtcggagctgggaaaattacagaatctcgtcgaacttaggttgataggaatagattgaagggatcaattccaggaagcaatactgccagtttttctcctgcttcaaatattggatccacagctcacaatggactatgcccttcttcccgattatatgttgctgatttttcttacaactttcttgtcggaaaaattccatcctgcttgaaatatcttccaaggtcaagtttccaagggaactgcttccaggatgagtactctgtccaacaacgacctttgcaaatttgtacaagtggttctactggccagcaaggtgtcatatacggatccaaacatcctggccataaacatgaaaaaatggagcaaccaatttggcttcttgctttagaaatcgcaacgggtgttcttctggttgtttttgtgattactggtatagttactgcttccagaagttgcaagctgaagccttctataagaatatcatcatggaatcgatcgaaaagttggagcgacgagataacagtgttgattgattctgatatgctgaaaagtctaccaaaattaagtcgccaggagcttgaagtggcctgtgaggattttagcaacatcattggctcaactccagagacagtagtctacaaaggaaccatgaaggatggacctgaagtttctgtgatatcgttgtgcgccttcgaaggtcattggactagccaccatgaactcttttaccaaaacaaggtcattgatctggcaagattgaatcatgagaacatagcaaagttcttagggtactgcagggagagtgatccattctctcggatgctagtcttcgagtacgcaccaaatgggacgttatttgagcatctacattatggagagggaggccaattttcttggctcaggcgaatgaagatagccattggaattgcccaggggttaagatacctgcacacggagctgcagcccccatttgctatatctgagctgaattcgaactccgtgtatgttacggaagattttactccaaagctggtggattttgaatgctggaaaatgatgttctcgagacactccatctcgagagacgagaaggctcgtgggcacttgaacagcaagtcctcttttcccggccacggggattctgcagcggatagacaagccgatgatatccaggccaacaccttcgctttcggagtgattttactggagatcatcagcgggcggcttccatactgcaaggataaaggctatttggtcgactgggcgagcaagtacctccagcaggcagaggagatcgggaagctggtggacccggagctgggcagcgtgcggagcgaggacctggcggtgctgtgcagcgtggtgagccggtgcatcgacccggacccgtcgaagcggccgtcgatgcagatcatcacgggcgtgctggagaacgggatcgacctgtcggcggccgccatcctcaaggagtcgtcgctggcgtgggccgagctcgccctcgccttgtgacacgctactcccacc

SEQ ID NO: 133863 - DNA, 302 bp, Zea mays
  unsure (1)..(302): unsure at all n locations
  Clone ID: MRT4577_53570C.1
ccatcacncccacgcnncccgcccaaaacttccaactttttcttccccaaacatacaaacantataaccagccaattttttaacacaaatcgcaagccactaaacctnccctttacaactaaaataactataaaaaccctatctatacccaacattttccccctccaaaacattcccattttacccaccttcacaaaaacaaaataacccctcaccaatcccccccccaaacaatttcccttcctttatttaaaatattactcccctcttaaccccccaattatccccactttaattctctt

SEQ ID NO: 133864 - DNA, 472 bp, Zea mays
  unsure (1)..(472): unsure at all n locations
  Clone ID: MRT4577_53571C.1
aaaaaaaaattttttttttttttttttttttttttttttttttttttttttttttttttttttttttcccaaaacaactttaaaaccccttacctttttttttttttttaaaacccttccataacccccaaaagcgggggggggcctctantnnnnnaataancnnacccaattcaaccccccacacctacccctttttttgacagtgaccgtcccgtccaaattataaacaagggcccgatcaaaaatcacaatttggacccttaaaaaacttttttaatcccaggccccccagaccagaccaaaccaaaccaaaattttttttcaaaacaaaaaaaccccctttttcaaaaaaccgtttttccccctttaagggtttcaccacctcccaattaaaatcggggtcntccctcccaaaatccccctaaccccccctttttaaataaccccccttcccccctttttttaaatc

SEQ ID NO: 133865 - DNA, 338 bp, Zea mays
  Clone ID: MRT4577_53572C.1
atgtggggggcacatccgtaattttcccgaaaaaaaaaaaccttactacacatgatgggaacatgtttaaacaggcaagggggtagcgccccaatattttgattggggttcccaaaccagggaaggaccttttaataaataagggggggggcctataaaggagctttttttttcaatttgaggcaagggaccccctgaaaaacacagctgcagttcgatgcaaatcccatcacaggttcctggggggcaacagtttgcaaaaccaatggcattatttggtaggcacaaccaagatttagtcccattttacaagccctgggttttaattttttaaacct

SEQ ID NO: 133866 - DNA, 838 bp, Zea mays
  unsure (1)..(838): unsure at all n locations
  Clone ID: MRT4577_53573C.1
atttcaaaattcactggcgcggacaaattaaccaagtgattagccatggacacggatgtgattagcggccgggacgcgatggcgccggcggcgggggacggcggcgcgcgaggcaaggcgggcggccggaagcacctctcctccatcgccaactacgtcctccaccaatgctccctgacgctgcacagaagcgtcgacgatctagtcgcggacttcgagtcgggcctgaagaatgccgcattggacaactactcaagaagactagtcgagtactgcagccttcaggcgctgcaatctctaacatctcctgatctaggagacacgcttcatgagggatcccttggtcggttcacgtttgatatgatgctagcctgggagacgcccactccttcggatcaacaaattaccatggagagcatatcaaaagagagagaagatcggaaggaaccacttggagcaaatgaagctgtgatgggtgatgacacgtcgctgttctattcggatatgatgccccttcttgtgaatgaagatccgacagtcggagaagatgcatacgtggtggtttggatctgtatttcctttggcttgcgacgttgtcaatgcgcgattcactttcgaagccctcaccgccaccacagctaacaggctccactatcctgcttatgacaaattcctgaagnaaatggataagtccttcaactttttgcaaagcttgccaactccaacaggagttgaattcgctgaagatgaatttatcttgcacacggagggtacagcaggaacacaaagggtggttcggcacattgggaccgcagcctggcctgggcagttgattctg

SEQ ID NO: 133867 - DNA, 705 bp, Zea mays
  Clone ID: MRT4577_53574C.1
attgggtacctcgaggccggccggggaaccttgaagcgccccgtagtgcagtgcagtgcagcagtgtgctaccctcctcagtcctctcactccatcacaaacgctagtcttcctctaaagctcggagcgagtctcagaagcgatggcgtcaaagaggctgctgctggcggcgctgtgcgtggtggcggcggcgctgctcgccgtgcggtcggagtcccacggcctggaggacttcgcaagcagcgacgcgacgccggagatgcagaccttcttcaagcccgaggccgcggcgctcccggaggccctggacgcgtcctccatgcccgccgccgtggcgtacgtggtgcgcggcaggcgcagcagggaggtgcagctcggcggctcctccccgtgagcacgccccagcgccccggcccgctttacaggcaggccgtcatcgccattaggatctggttaagcgcgtcgtctagctctgcgatttgtgtgtggcttttgggttagtggttgaattctttttttcgcgtggggttgtcggtgaagatcacgctaccgggtacggaccagcagtggtgcatgtaacataaataacgctggtggtattagcgtcattgttgttgtggcctgtgtgtatggtgtctagacctttgctatatattttgatttcaggatttttgctgttgtaaaaaaaaaaaaaaaaaagcggcc

SEQ ID NO: 133868 - DNA, 508 bp, Zea mays
  Clone ID: MRT4577_53575C.1
ttgcggggaaccttgaagcgccccgtagtgtagtgcagtgcagcagtgtgctaccctcctcagtcctctcactccatcacaaacgctagtcttcctctaaagctcggagcgagtctcagaagcgatggcgtcaaagaggctgctgctggcggcgctgctcgccgtacgtggtgcgcggcaggcgcagcagggaggtgcagctcggcggctcctccccgtgagcacgccccagcgccccggcccgctttacaggcaggccgtcatcgccattaggatctggttaagcgcgtcgtctagctctgcgatttgtgtgtggcttttgggttagtggttgaattctttttttcgcgtggggttgtcggtgaagatcacgctaccgggtacggaccagcagtggtgcatgtaacataaataacgctggtggtattagcgtcattgttgttgtggcctgtgtgtatggtgtctagacctttgctatatattttgatttcaggatttttgctgttgt

SEQ ID NO: 133869 - DNA, 1367 bp, Zea mays
  Clone ID: MRT4577_53576C.1
ggttcggccgagagctagctagcttcgttctcactccagggtgccaggctccaccacgcacagacaacgagctctgcccccacaggccagcaggcagatagatcctcaccattttctctttcactcgcatcggatctgctctaccataatacactctcggggtctcggttgccaggaatcactggagccgagagcgagcgtgtataaaaggccggcgcttggtcctccggaggcggaaccttgaagcgccccgtagtgcagtgcagtgcagcagtgtgctacctcctcagtcctctcactccatcacaaacgctagtcttcctctaaaggtatgtgctagtgttactcaaagaaagcgacattttcgttggagctctagtcctaatacctttgtggaattgtgaactgggaactgaagctgggcaagtttgctttttgcctaagcttctttcataatcagatctagcatcgttgttgccttacgattgggtgaaccgtctggatcactctgtccgcagttctcgagctgctcggagcgagtctcagaagcgatggcgtccaagaggctgctgctggcggcgctgtgcgtggtggcggcggcgctgctcgccgtgcggtcggagtcccacggcctggaggacttcgcaagcagcgacgcgacgccggagatgcagaccttcttcaagcccgaggccgcggcgctcccggaggccctggacgcgtcctccatgcccgccgccaccatggccgcgaagccggaggccacgtcgatcccgaccaccaccaccggcaccacggcggcggcggcggcgggcacctccgccgcggcaggcactactgctgcgtcgccgccgcgcaggtccgtgtccgtggccgccggcgtggcctgcggcgtggctgccgtggccgtggtcggcatcgcggccgccgtgggcgtacgtggtgcgcggcaggcgcagcagggaggtgcagctcggctcctccccgtgagcacgcgcccagcgccccggcccgctttacagacaggccgtcatcgccattaggatctggttaagcgcgtcgtctagctctgcgatttgtgtggcttttgggttagtggttgaattctttttttcgcgtggggttgtcggtgaagatcacgctaccgggtacggaccagcagtggtgcatgtaacataaataacgctggtggtattagcgtcattgttgttgtggcctgtgtgtatggtgtctagacctttgctatatattttgatttcaggatttaaaaaaaaaaaaaaaaaaaaaaaaagggctcctaaaaaaaaaaaaaaaagggcggcccggacgcgtggtattagcgtcattgttgttgtggggtgcatggt

SEQ ID NO: 133870 - DNA, 1473 bp, Zea mays
  Clone ID: MRT4577_53577C.1
aaggattgggacaaaagatgaggtcccaaaaacagaaactctcctttcatgtcccgccaaaacagttccatcaaaaggttctagaaactgaaaccactgagctaaactggggccggggtccgctgggggggcacagcattttcagcagccatttgcaagcgcgccggtagcagcagtttcctgtccctagtcccctacatgcagatcggatcaaacaaattgtgatccaatccaacgaagacatcgctaattaattatactagcctggaaatgttctttaataaacatcattcccgttccgctgctttatttgctaagtacatacaaccgtgatgatttatttgctaagtatatacaaccgtgatgagtagcagactagcagcactgcagacggatatctcggctctcgcatcgatgaagaacgtagcaaaatgcgatacctggtgtgaattgcagaatcccgcgaaccatcgagtttttgaacgcaagttgcgcccgaagccttctggcggagggcacgtctgcctgggcgtcacgccaaaagacactcccaacacccccccgcggggcgagggacgtggcgtctggccccccgcgccgcacggcgaggtgggccgaagcaggggctgccggcgaaccgcgccgggcgcagcacgtggtgggcgacatcaagttgttgttctcggtgcagcgtcccggcgcgcggccggccattcggccctaaggacccatcgagcgaccgagcttgccctcggaccgcgaccccaggtcagtcgggactacccgctgagtttaagcatataaataagcggaggagaagaaacttacgaggattcccctagtaacggcgagacacagcagcagccagcaggaacacagttacacagaggtcctcggccgtggcagcacgttcacgttgaccgccagagctcaaacacaacagccgtcagccagaaatcatcaggaggtggtgaccgctgaggagagttcattcaggtcgtgcaagagctgcgggaaaaacaaaacatcgatcgatccttcccatcggtcgcccaatcatgattctgggcttgggaggatgctgcggagctgccgccgccgccgccgccgtgtcgccggctgccgtcggcaagcaattgggaggccatctagaggccagtgagcggcagcagaagaagcgggggccaagtgatgagcagaagatgaacaagggaggcgagcagggagcggcggtagcagcagggggcggcaaggagaggagcaagacgaagggatcgtcacaaggctcccccgatcgttgtgcatcagttccccttccactctcgccccggcttgctctgaattcctctactcatcttggcgtcatgtgcgtgtttgtgatcctgtaattattcgcgatctcgtgtgttatccattgagatatagtattacagtataagaaaaaaaaaaaaaaaaaagggccctagggcccgc

SEQ ID NO: 133871 - DNA, 474 bp, Zea mays
  Clone ID: MRT4577_53578C.1
gttcatcatgaaaccacaaggcgagggtacggggcagagatcagaaggtcacatactgaagcagaccaattctcgtccaaatggttcgacagccttacaggcactgccttactgccagaacaaaatctctagcatgatctcatgaatcaacagcccggtcagctacatcacaccgcttaacggatgaaaggggaacgaagaaagaaaaaagaccatactgtaacaacaacaccagccccagccgtaattctacgggagcattccccttgaggcgtccagtgagccacccacccaggaacaagaacggcggtcgggggagtcaggtcccttgcggagcagcagccagcatatactctgagcatcaggtacaacagccataataacacacaccacgatggatccctacacgagacagctatgaatgttcgccgatggtggcctctttgtcgtgccctgattcctaaccggtagttc

SEQ ID NO: 133872 - DNA, 278 bp, Zea mays
  Clone ID: MRT4577_53579C.1
caacaaatgcgttcattattccacagtgctcacttgttgcgctcactaaaagggcacaaaacgcaaggagggctaatatttcgggctccattggtgtgaggtggtacctcgactattaatggccaatgctgacagcgcgacctatgtccaaacatagccgcgagatgcaaatacccatctttgcacatctacaggctacaagacgccatgtactcagcatcatacccgacttgtattgaccggtcaacaaccatatgccctattgacacaaccatcct

SEQ ID NO: 133873 - DNA, 211 bp, Zea mays
  Clone ID: MRT4577_5357C.1
ttttggtattttttaaattttttttgggttttacactgctgttggatcaacaaaaacgtagggcttttcatagagtctgcagcatgcatttcttgttgttggactgagtacattcgggaatgggccataaattaaggaacctatgcccacgctggaccaaatgtctgcacatacgggggaacctgtttcgcaaggaatcctgaaaaaacaa

SEQ ID NO: 133874 - DNA, 191 bp, Zea mays
  Clone ID: MRT4577_53580C.1
cccaaaaccgaaaccccattcacaggggtcatacgggaaaacatttcaaggggccccctagggacacccccacaaacacggttccagataagttaaacccaaacagccaacgtgtccaaaaccagcatggatctagcgtccaggggcaccgttcacatttattctcagcataaacaacccgcaaaaatggt

SEQ ID NO: 133875 - DNA, 818 bp, Zea mays
  unsure (1)..(818): unsure at all n locations
  Clone ID: MRT4577_53581C.1
ctcgcggccggccggagaatcatcggcccgacgtcgacatggcccgtggcgaggtgtccatgtgcacgccgggtttcgcgttaagggtagtgcagagccggtggttcgtggtgtacgcgtcgatcattgtgatggcggcgtccgggtcgacctacatcttcgcgctctactccaaggtgctccgctccaagctgggctacaaccaggagacgctcaacaagctctccttcttcaaggacctgggcaccaacgtgggcatcatatctgggctggtgcagcaggtagccccgacgtggctggtgctgctcatcggcgccggcatgaacctggccggctacctcatgatctacctggcgctgacgggacgcacggcgccgccgcccgtctggctcatgtgcttctacatctgcttcggcgccaacgcgctcaccttctccaacaccggcgcgctcgtcgcctgcgtcaagaacttcccggagagccggggcatcgtcatcggcctactcaagtcctttgtcggcctcagcggcgccatctacacgcagctctacctcgccatctacggcgacgacgccgcgtcgctcgtcctcctcgtcgcctggctccccgccgccttcaacatcttcaccgtctacaccatccgcgtactgccgtatgcccgccgccgcgacggcgggaagccatacaacacgcccttctacccacttcttgtactctccctcgccctcgnctcctacctcctcgtcatgatcgtggtgggagagcangtgcagttctcccacgccgcgtacgtcgtcacctcgacgggtctgctcatc

SEQ ID NO: 133876 - DNA, 370 bp, Zea mays
  Clone ID: MRT4577_53582C.1
cagcgataacacttttcatttttatgctgatcaaattataaaacactaggcgtccttacacaaatatatgacggtgtataaggcgcccgctcccgaatacattgcatagcatagcacactcatttaggcagcttcctcaacaacggggaaattggtggggggcacatttccaaaccgatcaaaatctagattggattgcccaacggctcccatatactccccatgcaacctcatctctgcggtgaagacacccagggcatccattccatgtgctatccacctattgcaaagttcggtcgctacattgcccccattgataatcaccgtactctatttctcctttagggcttttccaaacacatttagttca

SEQ ID NO: 133877 - DNA, 354 bp, Zea mays
  unsure (1)..(354): unsure at all n locations
  Clone ID: MRT4577_53583C.1
gcctccggccccctgacctaacaacccactgcgcgacccaaaggtgttgggggcaccaacaacacgagggggaggcatcgcctacacgcagagcagcccggcggccgcacaggcacccaaccacaacgcctggtccagcaacctctcataagttaacaaaggacacatgaatgctaattatgctcgaacaattgttatgccaccaacaagaagggctccaaaaatcaatcaaaagtataacccgcatcgccctgttctcacgacgcttctgcatcaaatcctcaatgcggngaagaatagcaacaaagacactccttcnncacctttatcccttggcgctccctttgacacaac

SEQ ID NO: 133878 - DNA, 106 bp, Zea mays
  Clone ID: MRT4577_53584C.1
gaatcctatctctcgccttatcgctaccaaatacccaccacgaacaaccggaagaaggcccaaactgtggagtcggatgctctttggggctcttctcatcggttcg

SEQ ID NO: 133879 - DNA, 1386 bp, Zea mays
  Clone ID: MRT4577_53585C.1
tcacctattcaccccccctctaggtgctctcacatatttagtggaggattttgattttaccttcttccttttgtcgtcctttgccatgaggcacttgtggccgacgttggaaaagaggaggcccttggtgacggtgatgtttgcggcgtcctcgtcggaggaggagtcggtggagctttcgtcggagttccattcgcggcacacatgggcattgccgcccttcttcttgtagtacctcttcttttctctcctcttgcccttcttgtcgttatccctgtcactatcacttgataatggatattttgcaataaaatgattgggcttaccacacttgtagcaaactttcttggagcggggcttgtagtccttccccctcttttgcttaaggatttggcgaaagctcttgatgatgagcgtcatttcctcgttgtcgagcttggaggcgtcgatggggaccctactcgttatagagtcaactttcttctcctccgttgccttgaatgcaacgggttgcgcatcgggtgtggaggaggcgccttgctcgatgattttcttggagcctttgatcatcaactcaaagatcacaaattttcctattacttccttgaccatttcatggtcatcccatttggtgctcccgaggttgcgcacttggttcaccaaggtcttgagccggttgtacattgcttgtggctcctccccttggtgtagcatgaagcgaccgagctccccctcgatcgtttcccgcttggtgatcttggtcacctcgtctccttctagcataggtggtttgcctaatggaacggaaagtaatggagtgtgttttgaaatacgagggtagcgaaggggcatcttactatacttcttgcgctcatggcgcttagaagtgacggatgccgattccgagccggaggtggagggtgacgaagagtcggtcttgtagtagaccaccttattcatcttcttcttgtcacccttccgttgggacttgatggaggaagaggattcctccttgtgcttgtgggtggactcccttgagtgcgttctccccgagcttgcggacttgtcgccggtcccgagctccgtcttggcggatgctcccgacatctttcttggagcggggtttatagtccttccccctcctttgtttgaggatttgacggaagctcttgatgatgagcgtcatctcctcgttgtcgagcttgaaagcgtcgatgggttgtctactcgatgtagactcctccttcttctcctccgtcgccttaaatgcgaccggttgtgcttcgggtgtggagaaggtgccttgctcgatgattttctttgagcctttaatcattagctcaaagctcacacattttcctataacttcctcgggagacattggct

SEQ ID NO: 133880 - DNA, 2217 bp, Zea mays
  Clone ID: MRT4577_53586C.1
atgtcaggagcatccgccaagagggagatcgagaccggcgataagtccgcaagctcgggaagaacgcactcaagggagtccgcccacaagcacaaggaggaatcctcttcctccatcaagtcccaacggaagggtgacaagaagaagaagatgaagaaggtggtctactatgagaccgactcttcgtcaccctccacctccggctcggaatcggcatccatcacttctaagcgccatgagcgcaagaagtatagtaagatgccccttcgctatcctcgtatttcaaaacgcactccattactttctgtcccattaggcaaaccacctatgtttgatggtgaagattattctatgtggagtgataaaatgaggcatcacctaacctcactccacaaaagcatatgggatattgttgagtatggagcgcaggtaccaaaagaaggggacaaggattatgattcggaggaggtcgaacaaatccaacacttcaactcccaagccactactatactccttgcctctctaagtcgagaggagtataacaaggtgcaagggttgaagagtgccaaagagatttgggacgtgctcaagaccgcacacgaaggagacgaggtgaccaagatcaccaagagggaaacgatcgagggggagctcggtcgcttcatgcttcaccaaggggaagagccacaagcaatgtacaaccggctcaagactttggtgaaccaagtgcgcaacctcgggagcaccaagtgggatgaccatgaaatggtcaaggttatttttagatcactcgtatttcttaatcccactcaagttcaattaatttgtgatgatcctagatataagctaatgtctcccaaggaagttataggcaaatttatgagctttgagttgatgatcaaaggctccaagaaaatcatcgagcaaggcgcctcctccacacccgatgtacaacccgttgctttcaaggcaacggaggagaagaaagaagactctgcacctagtagggtccccatcgacacctccaagctcgacaatgaggagatggcgctcatcatcaagagctttcgccaaatcctcaagcaaagaagggggaaggactacaagccccgctccaagaaagtttgctacaagcgtgaagggaaagagaagagaaaagaagaggtactacaagaagaagggtggcgatgcccatgtttccgagagtgggactccgacgagagctccaccgactcctcctccgacgaggacgccgcaaacatcgccgtcaccaagggccttctcttctccaacgtcggccacaaatgcctcatggcaaaggacggcaagaagaagaaggtaaaatctagatcctccactaagtatgcaacatctagtgatgaggctaattctagtgatgatgaggaggatttattgacactttttatcaacctaaacatgcaacaaaaggagaaattaaatgaattaattagtgctattcatgataaggatgaactcttggatagccaagaggactttctaattaaagaaaacaaaaagcatgttaaggttaaaaatgtttatgctctagtggtagaaaaatgtgaaaaattaactagtgagctaagcacttgccatgatgttatttccaaccttagaaatgagaatgctaaattaattgctaaggttgagaatttaaatgtttgtgatgattctcttgtttgtcttaggaataataatgctagtttgattactaagattgacaagttaaatgcatcactctctagccttaaaattgagaatgaaaaactgattgctaaggctaaagatttaaatgtttgcaatgtttccatttccaatcttagagatgaaaatgccatattacatgctaagattgttgaattgaattcttgcaaaccctctacatctaccgttgagcatgttactatttgcactagatgtagagacattaatgttgatgctattcatgatcacctagctttaattaagaaacaaaatgatcacatagctcaacttagtgctaagattgatgagcatgacttagaaaatgaaaaatttaaatttgctagaagcatgctctatagtgggagacgctctggcattaaggatggcattggcttccaacagggaggctgttggagacttgttctcaaatgctatgaatcaagaacaaggcaacataaaatgttaaatatcaaaagcccttcgtcctcttaa

SEQ ID NO: 133881 - DNA, 1004 bp, Zea mays
  Clone ID: MRT4577_53587C.1
gtagcaatttttaggcaggcattagcttgacattgctccctgtggaagcaatgtcatcctgatgcaggggcgtctcccactatagagcatgcttctagcaaatttcaatttttcattttctgagtcatgctcatcaattttagcactatgttgagctatgtgatcattttgtttcttaattaaagctaagtgatcatgaatagcatcaacattaatgtctctacatctagtgcaaatcgtaacatgttcaacggtagatgtagagggtttgcaagtttttaattcaacaatcttagcatgtaaaatagcattctcatctttaagattggaaatataaacattgcaaacatttaaatctttagccttagcaattaatttttcattcctcaattttaaggctagagagtgatgcatttaacttgtcaatcttagtaatcaaactagcattatcatttctaagactaacaagagaatcatcacaaacatttaaattctcaaccttagaaattaatttagcattctcatctctaaggttggaaataacatcatggcaagtgcttagctcactagataatttttcacatttttctacctctagagcataagcatttttaaccttaacatgctttttgttttctttaattaggaagtcctcttgggtgtccaagagtccatccttcccatgaatagcactaattgactcatttagtttctccttttattgtatgtttaggttggcaaaaagagttaataaattatcctcatcaacactagagctagcctcatcactagatgttgcatacttagtggaggatttagattttaccttcttcttcttatcgtcctttgccatgaggcacttgtggctgacgtttgggaagaggagacccttggtgacgacgatgtttgcggcgtcctcatcggaggaggagtcgatggagctctcgtcggagtcccactcccggcaaacatgggcatcgccgcccttcttcttgtagtatctc

SEQ ID NO: 133882 - DNA, 1650 bp, Zea mays
  unsure (1)..(1650): unsure at all n locations
  Clone ID: MRT4577_53588C.1
atgtcgggagcattcgccaagagggaaatcgagaccggtgacaagtccgcaagctcggggagaacgcactcaagggagtctgcccacaagcacaaggaggaatcctcttcctccatcaagtcccaacgaaagggtgacaagaagaaaaagatgaagaaggtggtctactacgagaccgactcttcgtcaccctccacctccggctcggaatcggcatccgccacttctaagcgccatgagcgcaagaagtatagtaagatgcctcttcgctatcctcgtatttcaaaatgcactccattactttccgttccattaggcaaaccacctatgcttgaaggtgaagattattctatgtggagtgataaaatgaggcatcacctaacctcactccacaaaagcatatgggatgttgttgagtatggagcgcaggtaccaaagaagggagacaaggattacgactcggaggaggtcgaacaaatccaacacttcaactctcaagccactactatactccttgcctctctaagtcgagaggagtataataaggtgcaagggttgaagagcgcaaaggaaatttgggacgtgctcaagaccacgcacgaaggagacgaggtgaccaagatcaccaagcgggagacgatcgagggggagctcggtcacttcatgcttcaccaaggggaggagccacaagcgatgtacaaccggctcaagaccttggtgaaccaagtgcgcaacctcgggaggaccaaatgggatgatcatgaaatggtcaaggttattcttagatcactcgttttccttaaccctacgcaagttcaaatgattcgtggtgatcctagatacacactgatgtctcccgaggaagtgataggaaagtttgtgagctttgaactaatgatcaaaggctccaaacaaatcattgagcgaggcgccacctccacacccgaggtgcaacccgtcgccttcaaagcgacagaggagaagaaggaagagtctacatcaagtaggctccccatcgacgcctccaagctcgacaatgaggagatggctttaatcatcaaaagctttcgccaaatcctcaagcaaaggaaggggagagattacaagccccgttccaagaaggtttgctacaagtgtggtaagcccggtcattttatcgctaaatgccctttgtctagtgatagtgacagggataacgacaagaagggaaagaggagagaaaagaagaggtactacaagaagaagggtggcgatgcccatgtttgccgagagtgggactccgacgagagcttgaaagggaaatgtgcccttgggccatttctaagtattttggtgatctagggactcctcttccccaacgtcggccacaagtgcctcatggcaaaggacggcaaaaggaagaaggtaaaatcaagatcctccactaaatatgaaacctctagtgatgaggatgatgctagcaatgaggaggataacttgcgcgttctttttgccaaccttaacatggaacagaaggaaaaactaaatgagctaattagtgaaatccatgaaaaggatgacctcatggactcccaagaggacttcctaatcaaaggaaattatnagcatgttaagaataaaaaagcttatgctctaaagtcgacctgcagg

SEQ ID NO: 133883 - DNA, 179 bp, Zea mays
  Clone ID: MRT4577_53589C.1
atcattcctgtgaacggaatcaagggtcgccttatcatagcttccttctgactgtgctggtgacattgcttatggagacacgcgatgaaaggaaagctctgaccttaaacagaaggtgaggccagctgctattgggaggcactgcaagccatggcgccgaaaggatggagtatacatgt

SEQ ID NO: 133884 - DNA, 144 bp, Zea mays
  unsure (1)..(144): unsure at all n locations
  Clone ID: MRT4577_5358C.1
tgtcaaccctgtccatcgaaagatgaagctaagagagttgcatgcttgaacacatgatcnaacttcatgaactcggtgctttgacagattttcttctacctggccaaggctctagaaagattaaggtatctacaacaaataatt

SEQ ID NO: 133885 - DNA, 469 bp, Zea mays
  Clone ID: MRT4577_53590C.1
agggtgaaccttcaccattttattttagtcaggcagaggggtgggccctttgcatcacgggattccattcagttacaggggaattaaaaccggtgggtaccggcaaccggatttacttaaaaaagccaaatttggatcggtgccaattccacaaacagaatttggagacttttaatcaccagactgggaacaaacaatgggtcgactggctcaagatgaaaacaaaacaagggttagaagtggggcgggattggcgaccatgttgtgtccggggaagggccccataatattattcacaggaggcatgcgccctttttccttttctcctcttaaaacttagccttaatggaagagtacatagcaacccccgctttgggaatggacgggccaattccaggttgggggctaattttggtgccaaaaacaatgattgggaaaccgatgacaaaaacacgtttcaacacattgc

SEQ ID NO: 133886 - DNA, 359 bp, Zea mays
  Clone ID: MRT4577_53591C.1
ggggagcccccaacaacaatcgaatggggagcagagcgacttctttcccccatacttagcaaccaaacaaccccttaaataccggggaacaaaacctagcattatgaaaattgccacatttagtttaacagcaagagcatcatgggtttactgggggggatcacccagggcttatttacaaatttggcccgaggcaaaggatttaacacgttggaacccagcattcatttaccaaagctaaattccaacagggagaacattaggggccggcatcctattcaggcataagcagggaaggcagggagttttttgggcccatggcaatggcaaataacccgggcatgggaaagggttttttg

SEQ ID NO: 133887 - DNA, 951 bp, Zea mays
  Clone ID: MRT4577_53592C.1
gaaagtagtaccttcaatggtgaactgatcagccaccaaagaaatctgacactaacgttagaaggatgagtgttcaggatgcaattaacctttttgagagcaagcagaaggatcagaatccagattcacaaaataagaaagctggcttgtttgccactaagtctgtcttgagaaggtggagtgcaggaatgggtgattctttgaatgaaaactcagaaggaaaagtctcagattccacatctgaaagtaaatcaaacaacatagcttctgaaactgagaaggttgaagctgaaatgaaggctgaactaggtaacataccaaatttttttgttacacctgaggctgaagatttaactttccatgctaattctcatgagattagagtgtcagaaacagagagtgctgtttgtagtaatgtttgtgcagaacaagcaaagcctggtctggaggaaagcagtgatcgggcaatggcctccgctgagtggaatcgccagaaggaagccgagcttaatcagatgttattgaaaatgatggaagtcatgcctgggaaatttgcgggtgctaatgccaccgctacaggtctcagttccaccaatcagcaaaaagctgtatctcatggccagcatacagagaagcgagacacaaaagtcagaactgagaaaggcacaaggcgaccagcaaaggaaccaagcaccaagcccttgaaggaaacagctgggaagaataaaccagcaatgacctcgaaatctggctcttcaacagagagacgtatttcaccagttccacaaagggcgcggcgaaattcatcacctccagtcctaccgaaagaagtagcatcaaagacaccaccagtcaggaaaagctcaccgaaaccatcacctgcacctgcatctgtgcctactacacgtagttcatggtcaggtggttctttgactaaagcaactacaacac

SEQ ID NO: 133888 - DNA, 875 bp, Zea mays
  unsure (1)..(875): unsure at all n locations
  Clone ID: MRT4577_53593C.1
cnnnnnnnnnnnnnnnnnnnnnnnnnnnnnnnnnnnnnnnnnnnnnnnnnnnnnnnnnnnnnnnnnnnnnnnnnnnnnnnnnnnnnnnnnnnnnnnnnnnnnnnnnnnnnnnnnnnnnnnaattcggcnnnnnttattttcatctgtttaacaaaatcattgagcagatnnnnnnnnnnnnnnnnnnnnnnnnnnnntaggatctgctcaatgatttattaaatagctgcagtattttgactgtgcaaaggtagcataataattagtcttttaattgaggacttgtatgaaagatttgatgannnnnnnnnnnnnnnnnnnnnnnnnnnnnnnnnnnnnnnnnnnnnnnnnnnncttaaattatttaaagggacgataagannnnnnnnnnnnnnnnnnnnnnnnnnnnnnnnnnnnnnnnnnnnnnnnnnnnnnnnnnnnnnnnnnnnnnnnnnnntnnntnnnnnnnnnnnnnnnnnnnnnnnnnnnnnnnnnnnnnnnnnnnnnnnnnnnnnnnnnnnnnnnnnnnttaattaacggnnnnngttactttagggataacagcgtaattaannnnnnaagtccaaatttnnnnnttagtttgcgacctcgatgttgaattaagattaatcttaggtgcaaaattttaagtattaggtctgttcgacctttaaattcttacatgatttgagttcaaaccggtgtaagccaggttnnnnnnnnnnnnnnnnnnnnnnnnnnnnnnnnnnnnnnnnnnnnnnnnnnnnnnnnnnnnnnnnnnnnnnnnnnnnnnnnnnnnnngacgcggccgcgaattccaggccgcgtcgacctcacgaggccgccagcacccaagtccggcgacgccctcttcg

SEQ ID NO: 133889 - DNA, 375 bp, Zea mays
  Clone ID: MRT4577_53594C.1
cagtctttttttattttttaactcaaacaaacggggcgtgatacacatgaactagcccgaagaaataatctgtctattcctgatgttcccaccaagctcataattcttgcaagggaatctagattggggcttgagctttctcatattcctgtacaaagacttatgccagagacacttaactcatgtacctcaacccatgaatacatgcaaaagttaccattttttgacaaacattcttcaaaataaaacaaaaatcctttaactccgggaaaagtactgcattatgtcttactcctgtatgtcctcaactagaaagggcatctgcagctgttatcctacaaaaaacaccaccccttcccccaggtatctggttcc

SEQ ID NO: 133890 - DNA, 294 bp, Zea mays
  Clone ID: MRT4577_53595C.1
gcacgcgcacaaaagctggaaattggtctcgtggtcctgtataacctctgttcggacttcgtagtgctcatttgagttttgattcggccgggcaactgtaaattctgtagtgttcgagaaaaaactgtaaattctgtaatattgccaagaattatgaatttacatgaactttacaggtgaaaaaaaaaataaatatataagattgtaaaaaaaaaataaatgccttaattaaataaaaaggggcgttcgccaaataataaagttccgaaccggaaaataaagtttggaaacggg

SEQ ID NO: 133891 - DNA, 179 bp, Zea mays
  Clone ID: MRT4577_53596C.1
acgcgcttctatgatactgatttgctccgtaagctcccgtttctagccgcagggtttagatcctgattcggtgtctaactttcgagcgtgcgctgtttttctgtagacactgatctagtgaatattgtgactcaccgccttctatccacaggatctttttacaaattctcttttcaata

SEQ ID NO: 133892 - DNA, 378 bp, Zea mays
  Clone ID: MRT4577_53597C.1
cggacgcgtgggcggacgcgtgggcggacgcgtggggtaatgatgaatgcaattaacttgaagaagttgtgtaactcaattttttttctggacaaaaaaaaaaaaaaaaaaaaaaaaaaaaaaaaaaaaaaaaaaaaaaaaaaaaaaaaaaaaaaaaaaaaaaaaaaaaaaaaaaaaaaaaaaaaaaaaaaaaaaaaaaaggggggggccgttttaaaggatcaaagtttacttccccgtgcatgcaacgtaatagttttttttttgggccacctaaattaaattaacgggccgtgttttaaacaacgtgggattggaaaaaccttggggttaccaaattaattggttttgaaaaaaatccccttttcgccagttggc

SEQ ID NO: 133893 - DNA, 326 bp, Zea mays
  Clone ID: MRT4577_53598C.1
ccacggcaaaaatggcacaggatcaaatttcatttccccaaattcaaaacgggacccgcgggcaaatcccaaaaacacaactttgggatcccacagcaaaaaccaaatttaaggggcattttttcgggaaaacacccacaccagggattccacatttccactaaataaggcccccacaaaaatgcctgcaaaaaccaactccaggaaaccccaataatttaaaaagctatatcatgcttgagtctcccccctcagacggcggatactgcccctaacggtgaccgcactaacaacggacgcctgggcggacgcctgggtcaaccccg

SEQ ID NO: 133894 - DNA, 1808 bp, Zea mays
  Clone ID: MRT4577_53599C.1
ccggccggggtcttttcaaggtctttggggggtcccaagaattaaagcatgtacagtccatccaagtggccgcatatagagatagggaataaaatggaggacatatggtctgtctcagattgaatcagggggatcttgaggattttcaggaactgagtaggttgtttgtatcagggggatcttgtggatattgaggaactgtgtttgaatgcctgatgcataatattgcataaggccaagggaagttctacacatttttcatgcgcaaggctgcctagttacaaacatatgggagctgataagttactatgtttctaggtgtcagcatttcgggaaagtaagtcagatgacaggagattttacatattttcccccactaagacgcttcacttgaagacagactcaaaagttgaccgtgttgcctggattgaggctttgatcctggcaaggagtgtttattctcttggatcacttagcgggagagcaacttttgtgcagagtgatgtttcaatttcaactgcaaggcttagagatcgaatgcatcaggagggtttgaatgagagtcttatacaggactgtgaacaaattgtgctttccgagttctcaagctaccggaagcaactgaagtgtcgttacgaggattacttaagcttgtttgggtcctgcagacataattttgaggaattttacatagtgtattacacacatatttgtgcaggaaggtaaagatggaagtataacacaggggacattgacacgaaatgacttctctagttctaggcatggaaagggtagcgaatatagcacaacagaatctgatgagcatgagtttgagaaacacgatggaggtgaattgatttgtgaagatgaatctgcattctttgattctatagattacttcacagagtcagacaacaggtcttcaaccatgttaagtggcaaggaagtagtggattcccaaacacatgattccagtaataatatacaagcacaaatcagacgacggagtaggctgcctgaccctattgagaaagagaaagggatcagtctctggtccattattaaagatagcgttggaaaggatttgacacgagtttgtcttccagtttacttcaatgaaccactctcatcccttcagaagtgctttgaggatttggagtattcatacctcttggatcaggcatatcaacatggaaaagtgggggacagcctcatgagaatcctcaaagtagctgcttttgcggcctctggctatgcttcatctgttgcaaggccttgcaaaccattcaatccattgctaggagagacctatgaagctgattaccctgacagaggaattcgtttttttgcagaaaaggttagtcatcatccaatgctgattgcctgccactgtgaaggcaagggctggaaattctggggcgacagcaatctcaaatccaagttttggggacagtcaattcaagttgaaccagttggcattttgactctagaatttgaggatggtgaaatcttccaatggaataaggttacaacaaccattcacaatctcattcttgggaagttgtactgcagccaccatggaacaatgcatataaaagggaatcgccaatattcatgtaaactgaagttcaaagagccatcacttcttgaccggaatccccatctagtacaaggctttgtagaggacaacaatgggaacaaagcttcgtttttgatagggatgtgggacgaaagcatatattgtagtaactctgatacttccaaggtgaagagcgccgatcaatgaaagtgcctcgctgctgtgggaa

SEQ ID NO: 133895 - DNA, 164 bp, Zea mays
  Clone ID: MRT4577_5359C.1
ctaatatctctaacgtgcaggtgattgtgatggtctttactatgattgcagttattgtctgagtgctcatctctcttgggtgatgaggcatgatttagatatcataagaggtcaatgatagataccttaggatcagatgagttggagaacaatggtagtgatgg

SEQ ID NO: 133896 - DNA, 216 bp, Zea mays
  Clone ID: MRT4577_535C.1
gaccaagttacccactccactttagttttcacggacccatccgacaaaatgccggttaagcaactatgttatgctattcaaacccaaacaaaccagtcacatacagagagagaagtcgtaaaattatttgcaaacacttcctccacttcttgcacaacatgtaaaatattgcaacaagagacaatatctccccaaggtggaagaacctccacaaac

SEQ ID NO: 133897 - DNA, 578 bp, Zea mays
  Clone ID: MRT4577_53600C.1
acaccttaccccgtcctacctgagctatgagcaaacgaggcttgacaacaagcgacgcacacctattcgaatcaggagcgtccccatgtcgaccggcaacgctgctgagagtgatgctgcatgggcacggcatgcaggagagcatgaacgcgctgcagcgtgcgctcgacaacctcctgcctgcgccccgacgcgagctcgtactgctgcatcgtccagccggtgcccaacatcgccgcgagactcaacccgcatgcccatcgccctatcaactggccccagcgttgttgttacgcagccgtgcgttcactacagcgccatacgagagcgcaccgagcggcgcataatcgcaagcgcatacctgtagcaccacctgaaaaatcgttccgataacacatgtgcagacgaacacgctcgtggaggacttctccgccaggctgaacactgcctacaatgggcccaccagaaagccgccgctgctggcgcatgggcgtgccacgctctggggcctgatccaacgcacgaatatatcttggcactgtgtgctacttatctcttgatactgaggaccacaccat

SEQ ID NO: 133898 - DNA, 318 bp, Zea mays
  Clone ID: MRT4577_53601C.1
atgctgctcctggtcctgctcctgcttctggtcctgctcctgctcctggcgtcggcgctcctgctcctcgtgcaggcgacgatacagtctttccaggtgactggacttacctggcaccgtgcgacacagtggacgctccaccagaggttgtacactttacccacaagtcgtgatccctttatgcctcgagtcgatcaaaacctcaaacactaccaaggtgagtcggtccttacggagaggtactcaggaaaaaggcctgagccccctagagtatcacaaggtcatcatcatagtcaggataacaatatcgtatcgtaa

SEQ ID NO: 133899 - DNA, 249 bp, Zea mays
  Clone ID: MRT4577_53602C.1
acgcgtccggtcatcaccttctctactactatggcattctttctccaagccgcggccaccctgaggcgccgttcaaaatcggtggtcgggcaccctttgcctcactgccttcccgcccttcgtcgcaactcgcctgcagggcgttcggcgtttactccagcgccgtcataatcacatgctccctgcatgacgtcgccagcatgttcgtctactcctctaatcttgccagcttcgcgctctccacctttg

SEQ ID NO: 133900 - DNA, 129 bp, Zea mays
  Clone ID: MRT4577_53603C.1
atccgccgagacgcagcgagaggtgcggccctgtcccctcgctaccggaggatcaagacgactaagtggcgcctgtgcgaggtattcacgcgcctgcatgagcggcggtgtcagagtctcaggcggagg

SEQ ID NO: 133901 - DNA, 391 bp, Zea mays
  Clone ID: MRT4577_53604C.1
ccacccccgcgaaccaagaccaccacgggacagggccccccagggaacagcggaggggcgaaggcggcggccgaggagaagcaccgcagccccaccggcgggcccgccagggccaccagcaacgagccgccggagaacgcccccgccccccacggcgagaaccacgaccccaaggccaccaccgaccgggagacggggaggacccgcggcggcggcaacgagaccacaccaccgagaagccacgcccgacgcaaccgagaacacgaacggcaaggagcccgacggccgaaacaccaccggcaaccaggcccaaccacgcggcgccggcggaggacgcggcgaccacagcggaggccgccgcgcacgccgaccacgacgacccgcgccggga

SEQ ID NO: 133902 - DNA, 350 bp, Zea mays
  Clone ID: MRT4577_53605C.1
ctgcaccattctttcgtggttgccccttctacaccctgtgctgtttgtgttcgcttatacaaaatgaggagctcgtcccggggatgtatgggggctaaactacttacacgaacaaagggggactcctcttgtgtcgcttccccaaggcgaagaccacgccgcttaattgggacgacacgcagcggtggatcttcttttggcgggcgcacgaatacgaagaccatggcccgcgctcctgctgggactaccgcctcctgctgtcgacgtgtttgtaacaaggcgcgacactctctagagcgccgcgagatagaagacgctctcctgccccccgcactggtgctcgtggcacg

SEQ ID NO: 133903 - DNA, 452 bp, Zea mays
  Clone ID: MRT4577_53606C.1
gtgtaaataaaggcttgaataaggactattttttaagttcagtggccaaattgacatggcggtatggcctccatagctcataagcagcatttacccctcttaggaattaggataagacatgtaatgcctacattattgtcttggttcatattgcataaccattggagcaatgaaagcctcacccatttttggattgtctagattggtttgacgctgaagaagctatttgaagagggtgtagtgaagcgacgagatctgtttatcacctctaagttgtggtgtgctcaaatctctggtgatattccaatatttatgtctcatgcatctcattttggaaaaactcatacgaaaagcagatttcaagtggaatttggtcttcagtgtatatacacctacaatttggtatttctatgtgatttttttgtttgagtctgaacatcaataatttatgg

SEQ ID NO: 133904 - DNA, 360 bp, Zea mays
  Clone ID: MRT4577_53607C.1
gtcctttttttttttttttttttttttattttacttttttttttttttttttttttttatgtttttgggaaaaagggcaaccacttaacccaactcaacccttttaactcggaccccggggcgagccccggaatctcgcgcccgtcccggtagaggccccaaatttccctatggacgagccatatcaaaacttggcggaagaatgggcaaaagcgctccctgggggaaaatgttatccgccgaccagtcccgacactatacgaccctgaagcaaaaaggggaaaggccggggggcctaatgggggagccatctcagattaattgcgcgggggtctcggcccgcttaccaatagggaaacc

SEQ ID NO: 133905 - DNA, 689 bp, Zea mays
  unsure (1)..(689): unsure at all n locations
  Clone ID: MRT4577_53608C.1
ccggccgggaatacactcaccaacccccaattactctaccaaatactacagtcacaatggccgatgtggaaatggacgtcgatgtcgaggcgggatctccccctccccccgcgcgcaacgaatccgacatgcaaacacacaccaaagccacagccgtccgctccatcgaaggctggatcatcatcgtcacaaacgtccacgaagaagccgacgaggagaccctacaagatctctttggagagtacggcgagatcaagaacatgcatctgaacctcgaccgaagaagcggttacgtcaagggatacgctttgattgaattcacaacactcgaagaagcccgggctgccatcgatggcgcgcacaaccagaagctcctcgagcagactatttcggtggactttgctttcgtgcgacccccacctggtaagcctggtcgtggaagaggcgctggtggacgaaacagaggacgaagcaggagtcacagccccgagggcaaggatgaacgggcaggcaacgagcgggattgagaataaaaacagaagaaattaagatcaagtcacgacgatcaacggcggacaaggcatgggaactcgttacatgcagaatcgccgacgtgcaaggtcaagtgggagcacgttggcagtgtcatggttatacatgagatncaccagaatggaatgcgacacttg

SEQ ID NO: 133906 - DNA, 437 bp, Zea mays
  Clone ID: MRT4577_53609C.1
ataaaaaaaaaaaaaaaaaaaaaaaaaaaaaaaaaaaaaaaaaaaaaaaaaaaaaaaaaaaaaaaaaaaaaaaaaaaaagtttttacctttggccggaaccaccctaaggggcgaatttttaaaaaatttccttttcccttgggggccgcccccccttgggtttattttgcccatttccccctccctggggggggtttccatttccttgtccgggggcctactccccctttttgggggaatccctgattttcccgccttattttttttcggcccttccgggttaacccggggggggccctaactaaaagggccttgcccgatcccccttttcacagtttggctttttagaatggaggccggcccccccctgttttgcaacttttaccccggcctttttgggtggttcccccccctttaccgttccctttgccccccc

SEQ ID NO: 133907 - DNA, 382 bp, Zea mays
  Clone ID: MRT4577_5360C.1
actagttaaagaagcgggagagtccgtctacccctacgccgttttccagtcaagaacggagtctacccgttgccgttcgtcggtcaccatgccagcacagctgcttagtcgacgcgtacccgtacacccagttgatgagtggaggtgccctacagagcgaaaacgatcatcgtgcccgtgccttggcatagccaagctgagctgatgccttggatctattgccgccgagcagatgtggactcgaatgtggactcgcaggaatcgaccggcaagctttagcgaccaagtggactagctctttgggttccacgaaggtgaagactctgagcatctgtttggagaaggttgtcacattgcaaccactgctcatgagaagacgaag

SEQ ID NO: 133908 - DNA, 364 bp, Zea mays
  unsure (1)..(364): unsure at all n locations
  Clone ID: MRT4577_53610C.1
cgagccggcnncgccagtgnntgatggactactctgcagtaatctcgccccctctagcgtggtcccgcggccccgaggtcaagccctttttttttcttttctttttctttcttttgggtttttttctttttttctttttttttctttttttttttttttttttttttttttttttttgggaacaaaacttttttcttttcatttcaatgggccattcagggcattgctcacacggaccccgccccccctggggaggcgggacacattattacccaatcatcgccgctaaaggacccaactagctagctagccagggggtataccacaacacaaagtttcttcacccgcccgggcggcccctcaa

SEQ ID NO: 133909 - DNA, 162 bp, Zea mays
  Clone ID: MRT4577_53611C.1
tgttaattatgttgaagatattgatagacatatatgccatattttggctagttcataacatgtaaaataggtttgggattttaagcaggcagccaatagtttcgacgtgaatagtagtggtgaagtagtgatttgctttatgaaagacgtgttggcacctta

SEQ ID NO: 133910 - DNA, 1202 bp, Zea mays
  Clone ID: MRT4577_53612C.1
aataacatttcctactcctgccgcatcagactagcgagccaagccaccgacggccgacgtcgagcctccgcggccgagcctccgcctagcaccaactccgtcgtcgatcgtcctatgcgaccacgcccccgtccgccttccgtctcctgcctccactgagtcgcgggcgcgacatcggggaacgccaaggctgagcttcgcccagacgcctaccgccctgttatgccccaaaccgccgtgctaaggtccgcccaggccgggccaggagcttctcccggcagacccacccccgcccaacggagctccatgcctccgcccagggccattgtccgagctacgccccacgctcctgtccagtgccctggccacttagatggttctgctcagtcatggtatttgtctggttcaacaacttcaacttcaaccaagggacgcatctatcacaagacgtatggttgccaaatgaatataagtgacatggagattgtgctttctatcatgaaaaatgaagtgatacgggtctgccatctctatatgacatttggctgtaaatggattatgatcatagttgaataagttggagcgtcaggtcaatggtccccccaataattaaactagatggtggagtggagtgtgacggaacctcccaagtaactaggcccacctacagttgtccttgtctaacagacatcagacaccctgtagatgttcctaagtcacttgacaagctcggtatctttccttacctcaccaggaacgtttcacccgtcttgcagacattacagaacatcggagatatagatatgcggaagctattacataaacttacatttattatttaaaagtaagatcaatttgtttattacagaccagagctataaacgagtgctgagtagtacacatatcaagggaggcaaaacacctcccgatggctttaaacaaaaagtcctatatggaggaccacgtcctcccgcatcttcactctggtttttcttcatttgataccaccttggagcaaaagcaacaaaaatttggcgcttcctcacctaaaaacaacaaagggataaaccctgagtatggaattactcagcaagttttacccgactaaagaaaagactctcaagggtatgctggataaataggaatcaaggagaggctctagcaagaatcaacttatatacttttgcagaaatagcttacta

SEQ ID NO: 133911 - DNA, 129 bp, Zea mays
  Clone ID: MRT4577_53613C.1
gtcctatggtcgagcccgttcgtgatccgttttctgatcgccctgaatctgaagggcggggagttcgagttcgtggaggaggagttgagcaagaatagcgagcatgctgctgaggtctaaacccggtgc

SEQ ID NO: 133912 - DNA, 402 bp, Zea mays
  Clone ID: MRT4577_53614C.1
caggaatgaccatggttcttgctatgaattggcatgacagaaaaatagccctaaagtacataggtgacctacaatttgatgcatcagtatttataatagtcaacaaaattataatgtttgttaaattgctttgtctcgacagtacaattatacagtttaattgtcagtatttcttagcctatgacagatatgaactcatgcagtttaatgtttaagcctatccctgtttctagatacatgtgaaggactcatgcagtttcaaatgttattggaaatgatcctgaactttgttttattggttattgttctagggatcattcagtagttaattagctgacgatttacttgtgattgttgggggagtacttgagcgtgtgatctagatgggtgttctgaattatt

SEQ ID NO: 133913 - DNA, 1215 bp, Zea mays
  Clone ID: MRT4577_53615C.1
aatacatttcctactcctgccgcatcagactagcgagccaagccaccgacggccgacgtcgagcctccgcggccgagcctccgcctagcaccaactccgtcgtcgatcgtcctatgcgaccacgcccccgtccgccttccgtctcctgcctccactgagtcgcgggcgcgacatcggggaacgccaaggctgagcttcgcccagacgcctaccgccctgttatgccccaaaccgccgtgctgaggtccgcccaggccgggccaggagcttctcccggcagacccacccccgcccaacggagctccatgcctccgcccagggccattgtccgagctacgccccacgctcctgtccagtgccctggccacttagatggttctgctcagtcatggtatttttagtgtctggttcaacaacttcaacttcaaccaagggacgcatctatcacaagacgtatggttgccaaatgaatataagtgacatggagattgtgctttctatcatgaaaaatgaagtgatacgggtctgccatctctatatgacatttggctgtaaatggattatgatcatagttgaataagttggagcgtcaggtcaatggtccccccaataattaaactagatggtggagtggagtgtgacggaacctcccaagtaactaggcccacctacagttgtccttgtctaacagacatcagacaccctgtagatgttcctaagtcacttgacaagctcggtatctttccttacctcaccaggaacgtttcacccgtcttgcagacattacagaacatcggagataaagaaatgcggaagcaattacataatcttacatttatttcaaaagcaagcttgagttattttattacagaccagaactaaaagtgagtgcagagtagtaatattatacaaaccaagggaggcacagactcttcccgataagttataagcaaaagatcctaagtggaggaccgagtcctcccgcacttcagtcttgtttttcttcatttggtaccaccttggagcaaaagcaacaaaaatttgtcgcttcctcacctgggcgagtgctcggcgggtggctgacctcaggagttgtagatccgaacggctggtggtccgggtcggcggagtcgcgccaaccaaggacgcagcagacgcacgtctccatggcgctggcacggttgaggtcctcagaaccctagcgatggatgtgat

SEQ ID NO: 133914 - DNA, 249 bp, Zea mays
  unsure (1)..(249): unsure at all n locations
  Clone ID: MRT4577_53616C.1
cccacgcgtncgtggacgcgtgggcggacgcgtgttccagaattgccatttgatcccgaactccaagggcgtaaaggacgatggctgttgtgacaaaagcgtcgatcacaataagtgctgatgctcccactataaatataatagcggatgatactgcgatgcatatatatatgcatggctcatatacctctgtggggcaaaagtctgaataaaatctgacttttttggggaaaaaaaaataaatctaat

SEQ ID NO: 133915 - DNA, 911 bp, Zea mays
  Clone ID: MRT4577_53617C.1
ctcgaggccggccgggaacctaataacatttcctactcctgccggatcagactagcgagccaagccaccgacggccgacgtcgagcctccgcggccgagcctccgcctagcaccaactccgtcgtcgatcgtcctatgcgaccacgcccccgtccgccttccgtctcctgcctccactgagtcgcgggcgcgacatcggggaacgccaaggctgagcttcgcccatacgcctaccgccctgttatgccccgaaccgccgtgctgaggtccgcccaggccgggccaggagcttctcccggcagacccacccccgcccaacggagctccatgcctccgcccagggccattgtccgagctacgccccacgctcctgtccagtgccctggccacttagatggttctgctcagtcatggtatttttagtgtctggttcaacaacttcaacttcaaccaagggacgcatctatcacaagacgtatggttgccaaatgaatataagtgacatggagattgtgctttctatcatgaaaaatgaagcgatacgggtctgccatctctatatgacatttggctgtaaatggattatgatcatagttgaataagttggagcgtcaggtcaatggtccccccaataattaaactagatggtggagtggagctttgttttgggatgatgcaagcaacttttatgtttcagaacattgtactcaactgatgcttgtggccgttgaacctattctacttacttttggatttaagttaaggatagttaaaaatatttgatgtttaatacttgtgttggatgttttatgtgtcaattctatgtggatgctagaaaagttgtgtacactcatgttatttgatgaaattgtatgcacgatttggtttgaattcaattgaatattgatttt

SEQ ID NO: 133916 - DNA, 616 bp, Zea mays
  Clone ID: MRT4577_53618C.1
aattcggcacgagggtctcgctcatcagccgtggaaccttcggactgtcgccccgacgcgtcaggcgggatcggacgatgcggccgaggccgcggagcgcgcgcctgcgccgacgccggaggtgaagaagcaggcgtcctccgtcgcgctgtccaagcaggagatcgcggacgacttcacggcaatccgtgggacacggcccccgcgctggcccaagaagcgacctcgcacggtgcagcggcagctcgacttgttgtacctaggattgtggttagcagatgtggcgcctggctcctacaagatcgaggagagagtgcagaagactaccattggtggtgtaactatagatgggcttcttgcagcagcagctagattctcgattgggcttgcatttgtgctgataggatttttcaccactcaatgtgctcctgatgtattctggaatcagctgctagctatacccttggcacaactgccggcctatgtggaagtttgatcggttccttcttgggcgcaacagttcagtacaatgggttctacagtgttcgcaaaaaggaaactattattgtcaaagctctaaaacttaatgatgttgaaagaggctgctagatgctga

SEQ ID NO: 133917 - DNA, 377 bp, Zea mays
  Clone ID: MRT4577_53619C.1
gtgattggttatttttttacgaacagaacaccacagcctgagttacgggcacttagcagaataaccccaccgcgggggaccggatacacaaacgttaaaccagccgccggccccggggatccacaacaaccagaaaaataacaagaagcccccgaaacccccggggggccggccaaaagggaaaaaaaacgcgagacactgagcggccgccagataacacggactcgcggggggaccaaggcgttcggggggcgaaaagcgtgaccctggggccaccaaaggtgaagaggctcccacaagaaccagagaaaccgcttgccccccctaaggcccccccttgggggcccgccacccaatcttagcgagagtcagaaaaa

SEQ ID NO: 133918 - DNA, 839 bp, Zea mays
  Clone ID: MRT4577_5361C.1
cctcgaggccggccgggggatcgatacaaacggcgggcccaccggccgcttcttcccggcctcaccaccgtcgatgtcatcgctaagctcctgggtttcgacgacttggtgcccccgttctccgaagcaagcggccagcagctcctccgcggcgccaacttcgcctccgccgccgcggggatccgggaggagacgggccagcagctgggcgcccggatcagcttcagcgggcaggtgcagaactaccaggcggcggtgcaggaggtggtgagcatcctgggcgacgacgaggccgcggcggcggcgcacctggggcggtgcgtcttcacggtgggcatgggcagcaacgactacctgaacaactacttcatgccggccctgtacagcacgggcagccggtacacgccggagcggtacgcggacgcgctggccgagcagtacgcgggcgcgctgcgggcgatgtaccggtacggcgcccgcaaggtggcgctcgtcggcgtggggcaggtcgggtgcagccccaacgagctggcgcagcgcagctccgacggcgtcgcctgcgtggagcagatcaacggcgccgtccggatgttcaaccgcaggctcgtcggcctggtggacagcttcaacaggatcctccccggcgcgcacttcacgtacgtcaacgtctacggcatcttcgaggacatcatcaagtcacccggagcccatgggctgaaggtgaccaacgcggggtgctgcggcgtgggcaggaacaacgggcaggtgacgtgcctgccgttccagacgccgtgcggcaaccgccacgagtacctcttctgggacgccttccacccgac

SEQ ID NO: 133919 - DNA, 280 bp, Zea mays
  Clone ID: MRT4577_53620C.1
agaaaatcgggcggaaaagaggtaaaaaacccccggggatagatagatggatggattttataagaggccgcccgaaatcattttttaggggaataaaaagaaaagaaggccttttttttttttggtccagcccaattttgtcctactggcctagcaaagcataaaaaagaagagggggacgggtgaaaacaaaaaaatgggttgccccccaagccacgggggaacaggttgggccccaaattttccctggcgcgactggccctttaagagcccacggggt

SEQ ID NO: 133920 - DNA, 202 bp, Zea mays
  Clone ID: MRT4577_53621C.1
ggctaaagcctttgccccactttctttcacagaacaggggataaaattttcaggggggggggagttacctcgacctgcttaaattggctccctttccaaaacgcaaataataaataaccccctgtttgttttttgtccataaaaacccctcccatttgaaatttgcatgacccggtgggccataaattctgcccccgacccc

SEQ ID NO: 133921 - DNA, 123 bp, Zea mays
  Clone ID: MRT4577_53622C.1
aacaaactatcttatcgaatactatagcatcttcctcatcgatagaatatataagatgcactagggagcgaaatacgtcgttccttaatgcagatccggcgtccaccaacctcctgcgatcac

SEQ ID NO: 133922 - DNA, 198 bp, Zea mays
  Clone ID: MRT4577_53623C.1
tacaggatcccagctatgtaccttactcgctgtgctcgtggacatagcggatgccggtgctgccgagggatacgctaacagctccctttttttgctatatcaactatgcatggagtctggcctggtgtggctaaagacagatctatctgctgagaagtgggcggcgctcactgatactgctgctgagttggagacacg

SEQ ID NO: 133923 - DNA, 588 bp, Zea mays
  Clone ID: MRT4577_53624C.1
gtggcggctctgggtgagtccgagcagcaggaggacggcgactctgacgcaatcgtgctccatgtcgggggaatgacgtgcggcggatgtgcggacaaggtgaagcgaattctggagagccagcctgaggttgctgcagctacagttgatgtcgaaaaggccaccgctattgtgtggacgacacctgaagcgaaggctaccaaagactggcaaaaacaattggccgagaaacttgccaaccatctcacctcttgcgggttccagtctcatctgcaagacgaaggcgaggctgaacaaactgatgcttaacctcagcagtgcattacgtatgtatgactatgagtggccaggaagttttagcatggagggtccttgcatgaagcaatgtctcccacttcagaagttgttacatgcgggtctacgatgtacttcttttatttatttgtcgcagtttagttcaaaaatgaactcgcaggaagtttttatgccgttatattgttgttaaggacttgtggttgaacttcgaaacagctgaactgttgagtatcgaaggcgaactagcgataaaataaaatgatgaagtatcgt

SEQ ID NO: 133924 - DNA, 795 bp, Zea mays
  Clone ID: MRT4577_53625C.1
cattgggtacctcgaggccggccgggggacttgggaataacgcaacgcccgccgcgaaaagcactaccggcctgtgctgcgtggtagttagtttcaagcagcaatggaagccgtggtggccacgacgacaacgagggtgtccttccctctgctgcccaccgcggggaggcccctgctcccgccggtcctggcgcggccccgccgcggcttcgcctccgtctccgccacctccacatccggcgcaggcggcggcggggggcgctcatctgcaggcggctgcggcggcgacggtggaggggacgactccggtgccggcgcagccgcggccgccgcggctgtggcggctctgggtgagtccgagcagcaggaggacggcgactctgacgcaatcgtgctccatgtcgggggaatgacgtgcggcggatgtgcggacaaggtgaagcgaattctggagagccagcctgaggttgctgcagctacagttgatgtcgaaaaggccaccgctattgtgtggacgacacctgaagcgaaggctaccaaagactggcaaaaacaattggccgagaaacttgccaaccatctcacctcttgcgggttccagtctcatctgcaagacgaaggcgaggctgaaaaaactgatgcttaacctcaccagagccttacgtatgtatgactatgaaggggccagcaaactttattattggaggacctttggatgaaaaaatgtctcccatttaaaaaattgtttaaatgggcggtcaaaaaaggaaattttaatatatatttttcacaaat

SEQ ID NO: 133925 - DNA, 836 bp, Zea mays
  Clone ID: MRT4577_53626C.1
cctcgaggccggccgacttggacctaccgcaacgcccgccgcgagaagcactaccggcctgtgctgctgtggtagttagtttcaagcagcaatggaagccgtggtggccacgacgacaacgagggtgtccttccctctgctgcccaccgcggggaggcccctgctcccgccggtcctggcgcggccccgccgcggctgtggcggctctgggtgagtccgagcagcaggaggacggcgactctgacgcaatcgtgctccatgtcgggggaatgacgtgcggcggatgtgcggacaaggtgaagcgaattctggagagccagcctgaggttgctgcagctacagttgatgtcgaaaaggccaccgctattgtgtggacgacacctgaagcgaaggctaccaaagactggcaaaaacaattggccgagaaacttgccaaccatctcacctcttgcgggttccagtctcatctgcaagacgaaggcgaggctgaacaaactgatgcttaacctcagcagtgcattacgtatgtatgactatgagtggccaggaagttttagcatggagggtccttgcatgaagcaatgtctcccacttcagaaattgttacatgtggatctatgatttactccctccgttctttttctatttgtcacagtttagttcaaaaatgaactagcgggtgacaaagattcaaaaacggaggtagtacatctaactgagagatatatagttctatgagtgcgcaggaagtttttatgccgttatattgttgttaaggacttgtggttgaacttcgaaacagctgaactggtgagtatcaaaggcgaactagtgat

SEQ ID NO: 133926 - DNA, 853 bp, Zea mays
  Clone ID: MRT4577_53627C.1
attgggaccctcgaagccggccgggacgcacccccacgaccgcctgtctgcttgccgctgagtctccgcgccagcaattgacttcgctctgcgcgccctcttccgctgctgttgctgctgccacttgtccatcgcttcctcgcctgccgcctcacccgcccgtctccaccgcgctccttgcaggcccctggatccgcccgtctcgccttttcgcgcctcctgccctcttgacctgacccgccctcaacgcctgcccccatggccgacatgaaccaggaaactatacaacagaagatccagctcgctcgacgcgacgctgaggcgctcaaggaccggataaagcgcaagaaggatgagctcgctgacacaaccctccgcgatgttgccagagatcgcgtcgaggccctgccgcgactcaccatgaaaacaaagcgcaccctcaagggccatcttgccaaaatctacgccatgcactggtcgacggaccgccgccatctcgtctcggcctcgcaggacggcaagctcatcatctgggatgcctacacaacaaacaaggtccatgccattcccctccgctcctcgtgggtcatgacctgtgcctactcgccctcgggcaactacgttgcctgcggtggcctcgacaacatctgctccatctacaacctgtcggcacgagaaggtccgacacgcgtggcacgcgaactgtctggccactctggatacctcagttgctgccgattcatcagcgacaagcgcatcctcacatcctcgggcgacatgacgtgcgtgctctgggatctcgagactggttcaaaggtacacgagtttgccgatcacctttggcgacgtgatg

SEQ ID NO: 133927 - DNA, 558 bp, Zea mays
  unsure (1)..(558): unsure at all n locations
  Clone ID: MRT4577_53628C.1
gccggccgggccggacctacgatctcttcgagttcaaacaccactcattcccacctgagcactgagcaggactctctctctctcacgcacacattccctcacacgacgatcaacgtccattccttcaattcttttttggatagattcattcctgtggaacagaatcgaaaccatccttcctttgcctagcaatccatcgcgttgagataccctttcgtctacacaccagacgtaccacagctacagccactctttggttgaataacagaactcgaaaacaacaacaacaacaaactatccatatatcaacatgaagtcttttactcttgcttccgccttcttcgccgctgcggctgttgcccagccccatgccaaccctcacggaaaccaccaccgccgtcaccaccagaacgagaagcgcgatgttgtcaccgaggttgagtgggtgactgagatcgcgtacgttaccaagatggtcgacgctactaccaccgtctgggttcgacctgagggcgagnctactactgctcctcaggccgagacaactcaggccgcccc

SEQ ID NO: 133928 - DNA, 410 bp, Zea mays
  Clone ID: MRT4577_53629C.1
gggaccggttacctgtagggggaccagctgtccggagggggaggggaaccaggggggggcgaagccaggggcaaaggggggggcggggggaaatggggaaccggggacaaagccggaaaaaacaggaaccggaagcaaaaagggcaaagccgggggggacaaaaaaggaagcaaacaaaaaggaaggggggagcgcacaggggcaaaattaaaggagggaaaccggaagggccagggaaaaaaaaaaaaaggccaagggggggggaaaggcggataggggaagggggccaaaaaaggttacacccagaaaaaaggagaggggcaaaaggggagaacccgtaagggcctggccaagagaaagaagcaggaagagggcaaagggggacagccccagaaggggaaaatgctgg

SEQ ID NO: 133929 - DNA, 228 bp, Zea mays
  Clone ID: MRT4577_5362C.1
taattttaatcaagcagtatatgaatcgaattaaccattaattcaaccttgagctcatacctgacgtgataataagaacaacagcagaagaactttgcttttgattgagtttgaacacttgtgtgagatataaaccagctctacatgtgcatgcttgtcagttgaggaaggcgcaaacatggcggacgttttccagaaaccggttggtattgacgtcgactcggacga

SEQ ID NO: 133930 - DNA, 306 bp, Zea mays
  unsure (1)..(306): unsure at all n locations
  Clone ID: MRT4577_53630C.1
aggcggagctcggaattcaggactcggcctggcaaactcaactaggctgtccggatcctcaagcagacctacagcaagtttgacacaaactcgcacaaccatgacgcactgctcaagaactacgggctgctctactgcttcaggaaggacatggacaaggtcgagacattcctgcgcatggtgcagtgccgctctgtggagggcagctgtggcttctaggtgcccgagtggcatcctgtnacccctccccagtgccttcctggccctgaaggtgccactccagtgcccaccagccttgtcctaata

SEQ ID NO: 133931 - DNA, 421 bp, Zea mays
  Clone ID: MRT4577_53631C.1
ggcccaaaaaacttaactcattattagctttttaacagggggggggacaaaagggcaacagcttttacggggggcatttttttctacataggggataaaacatgcctgggggtttagccctaataattaaacaggctaacttggcctttccccaccaaatcccacaagcccaaggaaacactttaccagggggtccacgttaaccccccccttgggggttcctggcgggaaggggccggccgggaccacccccccaagaaattagcttgccttcccccaccacttgggcacaaagtacctgggggggggaaccttgggctttcgggaaccaaaattgtttttgggcaggaccgttttggcgggttccctaaccgggaagggattgggcccgggcttcttggggggggcccaacggacccct

SEQ ID NO: 133932 - DNA, 566 bp, Zea mays
  Clone ID: MRT4577_53632C.1
ttttttttttttttttataaggacgataatcaataattcaaggaagttatgcagcaagggtttaaccattcaactcctactacctaatgcaacatataagtgataaaagatttaaaacaataaggaggtggcaaatgcactggggcttgccttgatgaggaggagagccagactcttctactaggatattgcaattgcagtaaaccctgctagggcaccttctgaaagaccttccggagcacgttcagttggagaaacctcagattgaggagctgactcctcttccacttccacttcaacttcttcttctaagtgctctgtgcacgatggccgacccctgcaggtgttcctagggtcttcgtcgaggggcttcacgacgcgcatcatggggaagctctgggggacgaccgtcgagcggttgtgcagagcaacactcgtgcatcgcagggtgtgctcgcacgggttgcagtggccgcgcggccatggctagttgtgcgtgtagggagagagatgttggagtatgcttggaactgtcatctccataagcaggggaaggatcgtagtgg

SEQ ID NO: 133933 - DNA, 366 bp, Zea mays
  Clone ID: MRT4577_53633C.1
cggacgcgtgggcatccgcggcggggacgacgacgacgcgcttgctgatgcctgcagcgtcgtcgccggcgcgccggccgtgccacgcccgcggagctacgtcgacgacctcgccgggctccggctggactgaccgaccgtgttccacttcctcccagccttaattattctgcttctgtatcagctggcgcgtgttaacgtgttttagaattcagggattgctggtcttagtgaattcatggccggcgagcgattattgcaagtgtgtatagattgtttaatttacgtctcaccggcgatcgactagtttgttcactgtatctgtaccaataattgttgttggctttgcgcgagatgaagcgctgt

SEQ ID NO: 133934 - DNA, 278 bp, Zea mays
  Clone ID: MRT4577_53634C.1
ggctgcaaagggaacacgatgcattaatttgaacgagtacggcatcttaccatggactcataaaacatcgcagatataatcgcattactcgattgcagcacatatggcaatttaggacagagctcaacttctgctctgctgctgctgggccacgcgctgactgcttaagatcaaccgctcacgcgattggaacaatggacctgaccttcgtcacatccgctatagcttaacgccgaaaccatgcacgggccgccttaattgcttacacacaccacgat

SEQ ID NO: 133935 - DNA, 265 bp, Zea mays
  Clone ID: MRT4577_53635C.1
gggagtaaaggccttttgatttccatacaacaaattagggtttgaaaaaacaaaatttaggaccagggccccaaaaaacaaactgggacaagaaaaaggtccctttacaacaaaaaaaacacgggatgggcacaaaattgattcagcggatggggccccaagaaaccaccagaagggtgggaccatgtagcgaaacctggacttggggccataaacccagttaagcccaaaagaggggcaaaaataacaagatcctggcccacca

SEQ ID NO: 133936 - DNA, 822 bp, Zea mays
  Clone ID: MRT4577_53636C.1
ccaaaccctactattcggagctctccctacgggggcgcccggggcgaaccaaacaaccctaccatcacctctgagaccaggggggctactccccaaggccactgactcagcaccaggggacgactcattcgaggaccgcctcaccatcctcacgactactatcaagcccaaaccaacgatatcccaaacccgcggggaccgcacccacctcctccttacccatcccccgccagacccccaaccccccaactacctgaccggcgagctccccatccaccacgagcaagacaccctcgccctctgcacgctacccagatactctccccaacaaccaccacccgctggggagccactcgccctaggctactctcgccgacctccggacctgcttccctgacctcccatcccgcaacaccaacaatttcggccaggccgcgcgcgcaaagacccgcccccaaaccttcaccgaggggcggccccactaccctggcaacccgacccttacccccccccccagcatcccgtgcactcgagcaaccccccggagggctcatcgcgccccaccccaggggaaccaccccccccggggccccctccccaaagcgtatcaacccatccccccactcccccaccccacacctcgccccggcgccccccaccaccgtaagcgggcccccccccggcacccccaaccccaacccccaacccccccccccacccccccacccctcagccaaaacccccccccaccccccccccacaacaccccccccccccccccacccccgatccccccccccccctaacgcccccccccctccc

SEQ ID NO: 133937 - DNA, 190 bp, Zea mays
  Clone ID: MRT4577_53637C.1
ccttcataccatgagaacatttctgttttggatgggcgatgacacccttgcggttcaacaaaaattgattcttggaactgtaaagattacaacccaaagtctcccaggaagctgtggggagaccagaggatcaagctgaagtgaagccagtgaagagcccacctgtggaaggacatggcggggcaaggca

SEQ ID NO: 133938 - DNA, 346 bp, Zea mays
  Clone ID: MRT4577_53638C.1
agaccaactagcatcatacaaagcacaattgtgtgccaccaatggcagccaaaacatgaagcttccatatgctcctaggactatctgcaagcgctgctaccgtagccatattgccacaatgctcacaagctcctatagatagatttgttgctgcatacctgtgaccagccgagtctccagtctgtgaaaacccaattcttcaaccctacaggatccaacaggccatcgcagcaggcatcttacctttatgacgcttgttcctccaacacccgagagtcctattacagcacttacctttggcgcattcgttggcgcaatagcataaagcacaacaactacagcaact

SEQ ID NO: 133939 - DNA, 483 bp, Zea mays
  unsure (1)..(483): unsure at all n locations
  Clone ID: MRT4577_53639C.1
cgcgtgcgtgtgctgggctggtcttgcggggtcgacctttgcgtttggtgttttttggccattggtggtgtcttttttgtttgtgtttaatcgtcgttccgtgggggttgcttgttgctgtcgctcttgtggctgtgggtgcgattgttacttactcgtctccgatcggtggctgcggttgctagctagcgccggggtttcctttaccgcctcgggtgtttttggggggtcacggtcagctgccgcctccggggcttggtgtcaggtgcgtgccagctgcacgtcgcccggtccgttgtgtgcgctatcgtgtccatgtcgccggcgccgggtcatgtgccgtttgccgctgctgctgccctattgactggnggaggcctccgcctattgcctggtcccggtgctgcgggtgcccctggcctgattgatggccgtgctggttgcggggcgcctggggctttggcgggcccttggtcgtgggcc

SEQ ID NO: 133940 - DNA, 717 bp, Zea mays
  Clone ID: MRT4577_5363C.1
aaattctggatggaccgagtggcatgctagtatcctaaccaagcgtaacgcggtagaaaatgtttaccaatgggcttgtggccgacctacatcgatgcaggatcgaggtagggacagtgacgacgaagacttccgagatagggactatgatgtggctgcacttgctagcaatctgagccaggcattcaaatatggtatttaccctagtgaagatgttgacgaggctcaagcatcacaagagcgggatgatgaggatgtgtattttgatgatgaagctgctgaagtagttattaactctcttcgtcttggtgacgctcctgatagtggctccctgtttacaaactccaactggttcgcgtttgatgaggataaagcactgaacgatggcccagaagcttccctttcagcaaatttggagtcgccttcaccaaatgtggatgacgacgatatggatgaagtcattcttggtgaccctatagatgacacaaaaggctcggattcacttttagcaacctcagacagggacttaaatgaagggtctggtcaaacagtactgtcaaatggccccgttgataaattggaaaatgacatcagaccatcaactcctgatgtaaaagagagtccagctgagtgtgttgaatggacggaggaagatgctgaacctggcgaggcatcagagaatactgctgttcccagtacacaggttggtacttgata

SEQ ID NO: 133941 - DNA, 208 bp, Zea mays
  Clone ID: MRT4577_53640C.1
gtgggggacaaaaaaaagaataaccacttctatttccaccactacgatatcgaccacaggaacagcatcatcgggagcgattgatatttagtgtcgcagcccatttacaacacatttattcttgctggatcaaagaatcataccaacttatgctaatgtagtgtttcaccaatactcacgcatttaatacatctattaatcatcaaaa

SEQ ID NO: 133942 - DNA, 392 bp, Zea mays
  Clone ID: MRT4577_53641C.1
tcccccgatgggtcatcgcgttctcctcctcctctctctcgcgtctggcgtcgttgttgccgccgacgtcgacgaggaggacccgctgatccggtaggtggctcccggcggagatgacatacgatctggagctgaacgaggagtcctcacttcctgagcttcgtgcagcgtctcggaaagtcctacaaggacgccgacgagcacgcgtaccggatgtccgttttcaaggccaacctgcgccgcgcgcgccggaaccagctgctggacccgctgccgcgacatcgagtccctaagttctcagacctcgagcctgcagacgtccgccgaaacgacctcggactccgcaagcctcgtcgcgctctcctcaaagaaatatgctatgcaacttgaga

SEQ ID NO: 133943 - DNA, 243 bp, Zea mays
  Clone ID: MRT4577_53642C.1
gtcataattttataaacacgtccgagcatgtctccacaagcccaaacccacacgagcacaggctctatccactatgcaccgacctaacttatcgtcaccaacgaaagggtcactgctgctcagaaagactcccacttgtcatagctctagctactagctaatactttgaggccggcggcatcctgaacagctgaacgctttagtcacttttgccatcaacagcgacgaccgatcgatcatcta

SEQ ID NO: 133944 - DNA, 339 bp, Zea mays
  unsure (1)..(339): unsure at all n locations
  Clone ID: MRT4577_53643C.1
ctgtctctttggtaatttacaactttctatccaatttcagaacactgttgattcaggactagtccaggagttcttagagnccnccatcanctttnanatactactttattgtactctataattgaaactacacagtcacacttcaattttcatagtttttctttcaagattcacacacttccatgattctttttataaactttttctatatctatttccattcctatcctaatgagaacaacttttacatatataaaacatcatacatataaatcttacacttctttccaaaatcaatatatctatcactttcacttaaaaactttctttacaaatcat

SEQ ID NO: 133945 - DNA, 190 bp, Zea mays
  unsure (1)..(190): unsure at all n locations
  Clone ID: MRT4577_53644C.1
gaggggggagccacgcgnncgggagaagacgcggggggaccngagagcagacgcaccaggcaccagaagggngaacggggggaacngcgaggcggcgagaacacaaaaagccgaacaaagcggaggcgcacgaaacaagcancagcagnggcgacgcaaacgacccggacaggaagacccaccgcagaag

SEQ ID NO: 133946 - DNA, 305 bp, Zea mays
  Clone ID: MRT4577_53645C.1
cacaaataattcccctgctaaaccccaaacaatacacggcgtttttttaaggaaattcggggtttgcccccgggcaccattgcttaggacatctgaaagggcagctacaagatggcacctccaacgatgggttgctgcacggcacggatcatcaaaaagaactggtcgcatggcaacaattgttgttgctgctgcaggaaggtaacgaccaatgggttagccactgccaatggattaagtaactggtggcgctgctgtacgtacccatcagaaattgacacaatcagttggttgaatggaagcaa

SEQ ID NO: 133947 - DNA, 477 bp, Zea mays
  Clone ID: MRT4577_53646C.1
tattcggcacgagggcgctctccttctctctctgtctcggggcgcacctgggtggccggcgccctacgccaggcgtctttgccggtctttgtcgggccgggtgccgtctactagcacccaccacgtatgcgctacgcacggcgcatgccttctcgtgccttgttgctgtgcgagtgcgaagccgatcaccacgaaccctaattattacagattgtgagctattaggatgaacatgtgtacaccaatgccgacttggttggggcgggtgcgctctcaccacgcgacccctgagaggtttcccaataggaggtccccttcccagaccacgaacccggaggagaaagaggagcttcatacatggaacaagcatactggccgcaagatgaccgcgagaggtcgacacgctggatctgctgggcacgagcccacggcgctattacctgggtcttcgagcttggctggaagagactatgagca

SEQ ID NO: 133948 - DNA, 139 bp, Zea mays
  Clone ID: MRT4577_53647C.1
acgcttgctcgacattgacctcttactgctggaaatattcttgtggagaagctgctatgcacctgacctacatagcaccttagcgaggaggactggaaaagatggcggaaggccttgctagctcaaggctctgtcgcat

SEQ ID NO: 133949 - DNA, 259 bp, Zea mays
  unsure (1)..(259): unsure at all n locations
  Clone ID: MRT4577_53648C.1
caatattgattcccattttggtagggacaccattaacaagaagattaccaccacaatatccaccnattctaacatagcaacnttgttgccattccngcccgcgcccagcactgtctgttcaactacaccgacacgccccttataacagtctacatcttctacgagaacaacaacatctaccacctctagccttccataataaaatactttctggctggtggcttcatcaaaaagcagccccacttctccgacaacatct

SEQ ID NO: 133950 - DNA, 610 bp, Zea mays
  Clone ID: MRT4577_53649C.1
tagctcctccatccagtcagcaacttttgaggtttccagaggcgaccgatcatgccgccgctttgctagatgagatcaagcagcaccccgtctcttctccaaccccacacccaaatcacaatcttcctttccccctctcgcattacttggaaaggctaatcttttccgttttgctttgatccgtccctctgctctgctcgctgccgctgccagctttggcaaagccccattattgccctctgccgccctcgcctactcgcacctcgccgtcaatgcccgcacttggctcgccatcactgggaatctcccatcgcggtcgagcgtaggtggggttcgccagggcttcatttattgtcaccccaaaagattccagctccagctcgtgggtggagctctggtagctcggggatttgagagcgttcttctcgagttcttggggcctctggtgcctgcggctcccctctctttccggtgagggtttcagctccgagcttcgatttcagtgtgttcttggaggttcccgactagatcccctcttgtattggctcgccggattggttcatcccagatctgagctcggagcaagcgaggagcccaagatttcatctgg

SEQ ID NO: 133951 - DNA, 478 bp, Zea mays
  Clone ID: MRT4577_5364C.1
ggacacaatacttttttttttttatttaaatgggtcatttaggtaattgttcacactgacactgaaacccagggggatgcttgacccgggattacccaacaatcgacaaaaaatgacttaagggacaagctagccagcggaaattactacagggcacaccccctttagggggggacaccgacaacagcagcggaggggcaagaaaccgggtgatgaaggccacacatccccgtaaggggagagggtatatgagccgccaacagccccgggaccagaacgctttgcggcggttgttgcaaaaaggactggaggaccaaccccaaaaccgccgggaaccggagcggcggttccacctgccaaaacgggtggaaacactgctgccccaacgactggaaatagaagaaaccatgggggagtagccgggggccggcaccgaagcctaaaaaactcgacccacaggcccaagaacggggggctg

SEQ ID NO: 133952 - DNA, 1062 bp, Zea mays
  Clone ID: MRT4577_53650C.1
cacaggaacaccagaagctacgaaaaagactgacacgcggtactaactaagttaaaatagtatatcagctaatataaatatcataaacacagatcataataatggaacagcaaccgattcccataacttgtcttagacaactgcgatattctggataaattaacttattgtcccaacgggctgtgacgcccccaagtcattagctctatcaattacgccatccccgttagatagcaaagcctaagcccgcggtaccaggtacacggtcgctttcctacctcccccaccggtgtgggccgcagtcgctttctatccctactatggcttattccataccgtctctacccaatacctattctttccacttctcgttatttgtcgcaatccttccggtcgaactgtcgcttcaaggttgctactttcccccagttatgacggtgacactccttcttattctccgccactgttactggggcggtttgggacgcacccggaagggtcactggcctcgaagtagccgtagactgcgggttgcgcgcaaaggcggagttctgtataaggttatataatagatcacttccaactagaaacgcgaaacttgccccgcttgaagcacgcactgaatgtataggaaggctcggctctgtatgctttctgggttacgtcccaaattgcgtcgcttactgctaggaagcaagtccttaatctctccccacacctccgggctcgaggccctctgtggttctggttgtctgtatgcatgtctgctctgtccgtcggtcctgctcctcactccgagtactgtatgtaaacctccgaagatccggagttatacaagtaccccagaatctaccaaacaatagcgcactaaaaccttactaaaaccttaccaattcgaaaaaccttctcggctgcctcgggggttagacctgttcttttttgcatcactagtataaaaagtcatctgtaacgtacaccgcctcaaatttcataccatgagaaacagattacctcgggtttttgccaactgtttgtcgctctgtgtgcggtcatttgcttctg

SEQ ID NO: 133953 - DNA, 382 bp, Zea mays
  unsure (1)..(382): unsure at all n locations
  Clone ID: MRT4577_53651C.1
gcgaccannnnncccacaagcgcacaagccccnanagcnncccnncngcccccgnaccccncaccaacgnnncngcggggggggggggcccaanncnncaacccnacanganccaacaggcaaacaaaaaaagcaccccacccnnancacccngggnccnccaacaagcancagcccgangacagcagnnacccccggggcagggangggcacaaaacancagggcacaacaacgacaacaaccggggccagcaaaccgngcggccgacgcccagcaacagcaggnncggccagncaaccaaccagccgcagggaaccccgcggccnangggcaacaacaacaaccaccaggcagccagccancggccgcccacccccagca

SEQ ID NO: 133954 - DNA, 424 bp, Zea mays
  Clone ID: MRT4577_53652C.1
agcttgtatgcctctatgatgcagccgccctttttttttttaatttctcctctttttttatctttttagaagcaacccgggaggttttatttagaagattggggggaatccagagcataccatattgaacacaacttggatcattccaacctaaatgaatcaagttaaagctcactaaattagccgcgcctttaattgtatttacaagtcattcgttttagcccacttgacaaactttgaagaagacaaatcttgtcgcataaaacagttaataagctccaacaaggttcttccttgcagggacccaactttggtcctcggacccattagcctccctttcctcggcagccgttgccataaactcataaaacttctccgtcttgcccagcaatattttaatcttggccttttggataggccgggt

SEQ ID NO: 133955 - DNA, 613 bp, Zea mays
  unsure (1)..(613): unsure at all n locations
  Clone ID: MRT4577_53653C.1
ngaaaaaaaataagtcattggcatgacttgagagtttagaggcacctgcaaatgagatattcaactgtttgtcattgctctttctggcattatcggcaggtggtgtgcaacaacctatcgtgtttctgccactcctatagggtgctaagtctgaaatcagacacatttagtttgtcgagctcatcgacgaggatgttttgcggcttgaggttatggtagtaggcgtcgtgcctatgggagtactcaaatgagtcgaccaactagtggaattacatcctggtgacgtcctacttgagtcagcccctagcgactgaaagagacgtcagtgttcaggatcctcatgcaatgccaacgagtaggaggacgtaatctatcgcattatgtgctttgagttgtctctcagtgagctgaggatttgttcttcctcttggattggttggctcactagtagtagtcgactactaataggctagcttggtatttgtgttcgatttttggttctaattaagtgctatttctagtgactgtcgagtagtgcaacatgtatcaatactatggcctaaccacataccacacaattattgtttttggtatggaaaccgggtgatcaatt

SEQ ID NO: 133956 - DNA, 244 bp, Zea mays
  Clone ID: MRT4577_53654C.1
gtgagggcggcgaagatgacgctcggagggaaggcgaagaggacagtagatacgacattgttatagccaacgagagacataaggcaaagaaaactaggagaacgacatttcgagaagaatcaagaggtcacaaggcagagagagcaaggaggaggacgtctgcgagagaatgtagaagtgcaacacgcgagtcccgcgggtgtgaagaaatgaaccgatgatccacgatcggacgaccacgttt

SEQ ID NO: 133957 - DNA, 1752 bp, Zea mays
  Clone ID: MRT4577_53655C.1
ggcatcaacagtcaggatcgacggggattggactcagccttacaacatctttgtgcgacaaaacgagcacatactcgctcctacaacacaacagttgtgcgatctgattcaccaccgtagtagacttcatgaaacctgctagagtgctaggcgtggtagaatgttaagccacacggttgcccgctctggcctccacagctccacctacaaccctttgtaattggtagtacagagaaaaaaaatcaaatagattccacgagctttcctctcaaaaaaggcggaatacatgggcaatgttgtgcatttcttatctacagagctaagttccgaggtataaacactgagctgctttgcttaagcatcggcaccttcaatttatgcacttctgccagcaacaatttgattttgcgttgcgatgtgagtgtagctggccgccgagtccacagaagtcaatgccgccagtattgagcactacgacaccaagctttgaacccaaactctcagccttgacaaaattcctttttattcaacgctgaaaacatcagtgtcatcatgatttaagtttgttccaaagataggctgctcttctgatgattggatttactgaggaaccttctgcatatgcttccaatgctcgtaagagttttatgaatttctctccatcatcctgtggcttcttaaatacaaggtcggctgtcttgaaaggaaccatataatgaggaagatcagaacgcagcgtggccaggtttttgcaaaggattgcctgttccgagtgagaaatcaaagcctgtttaattcgttcatcctcaacttcgtccacggatttcagtagattatccaaggaaccaaacttagatatcagctttactgcattaatatctccaatcccctcaactccaggtatattgtcagctttgtctcctgaaagtgcaacaacatccacaaactgcgagggtttcaatggtccatatcgcttgacgaagtcttcaactccaaatgaaaccatccctgatccacgtggagcaatcctgagcagacgcaaagaaggtgataaaatttggaagaagtctttatcaggagagacaatccgtaccttgtaaccagccgaaacactgtttatggccagggtgccaataacatcatcagcttcaacgcctggaacctcaattacttttattgacattgccttaatggatgccttcaagtattgcatgccctgaacaacggtgtcaggtgttggagtgcggttgctcttgtaagcagggtacaacatatgacgaaaggtcattcctaaaggggagaaaaaatggtaatgtttctttataggattcaaaagatgagagtaacatgatacaacagctgaaaacaatcaattggtacccaaccctccataagcaaaggtatcttctaagaagtggctaatgaaaacctaaatgaataagtgttggtatgctctctttccaatgtgtaagcaaagtatctctaagacctcccaagttggagcatcgaagatgcccttgatgactcgtatgtttgttgcttccaatatactacacatttttaagtaaagtatagctaggaagataataagaaccaagaaactaagtgacataaaattcttagaaaataaaagtaggcagtgctaaagggcctctagccgagttggctaggtggtttgagtagcactcctcaggtcctgggttcgactccccgtgggagcgaatttcccggctgtggttaaataaatcacct

SEQ ID NO: 133958 - DNA, 642 bp, Zea mays
  Clone ID: MRT4577_53656C.1
caatcacttcggattggcggcgggcacgcgccggacgaaatggaagcggcaccatccgcccgcgccttctccccgtcctcgtctccctccgcgggggctagacccagccttcccctcgcgggcctggcctcgcgctcgcggcgcgcccgggtgctcgcggcgccgcccccgccccgcgccgtcgcctcctcccgcgcgccgctggtggtctccagcccgccaccgccggaggactccggcacgcacaaccccgcgcacgccaaggtcgaccgctccggccgcttctgcagcccccgcgccgcacgggaactcgcgctgatgatttcctacgccgcgtgtctggagggaaccgatgtcgtccggctcttcgatcgcaggatcagcgcaagacgaggtcaggattcttacccccagcgcctcttcttcgtgcatttgtttcaaggatcagctcgtcgatttgcttggttgaatacctccttgcatcagtgaaaactcatgggttcctggcgttccacggatacattttacttgctgtttatcctcctatttcggtttctacacgcttgctcagaacccgggtttgttttcaacaaggcatgcctattgagttacaaccatatgagctttggcgggggaccgctc

SEQ ID NO: 133959 - DNA, 245 bp, Zea mays
  unsure (1)..(245): unsure at all n locations
  Clone ID: MRT4577_53657C.1
ncnnacccctnnnnctctttcctntgaccccttgctccccacactattctccatagccnaggggacgaggctctctctcccctgcccgcttgggaccaattaatgcctttgcgcctacaggtactatgtcatgctcaatccagccatttgtgacggtggggtgggtttcctgttctctctcacatggtcctcccttggagattcgagaccctcgctctcttcatgattgccactgccctttgtgc

SEQ ID NO: 133960 - DNA, 782 bp, Zea mays
  Clone ID: MRT4577_53658C.1
atgctgtttgtaaatttggacatatctccatttttctctcccacgattttaagatggaactctatatatccagaagcttttcaaagcgcacaagttcaacgcttaattaggtatagtggccaatgcctaggtaccacctagtcaggctaggtcgtcaattgtcacttttaagaataggcgtataatgagttgggcctaaaaaattcaacatcttaagtctgttgtgaaatcaactgagtaacgcacgcatctttttgtgtaaatatgttccaataatgtttgattattcttctgcaaagaatttgacatgtttcccttccatattcagaagcagatgtactttcagctcctccaaaacttgtttacaacaactatgtattacggtataccttccttcttgccccattccactaaaggcattaggtattgacacactgttctgatatatgatagaatttaattttctgtttaatatttagtcctgctgctcttacatttctgattagatgtttttcaagtataggctgtccagggaacttttagtggctgttgccagtggatgggataagcatgtggttatcatcgacaaaataattccccaggcttggaaggatgaacctgtggcaaggattcttgagctctgcattctacatattgctatggctgagatgacatcaaaaggaacaccccacaaagttgtcattaatgaggcagtagatctggcaaagcgatttgtgaaggttggtgcccctcggggtatcaacggatgccttcgaacattt

SEQ ID NO: 133961 - DNA, 476 bp, Zea mays
  unsure (1)..(476): unsure at all n locations
  Clone ID: MRT4577_53659C.1
tgaccagtcagaacgagnaggattcggccaacgaagcagatgtactttcagctcctccaaaactggtttacaacaactttgtcttacggtatacttttcttctcgccccattccactaaaggcatcaggtatcgacacactgttctggtatatgataaaatttcatttcctgtttaatatttaggcactactcttattcactacaggttgtccagggaacttttagtggctgttgccagtggatgggataagcatgtagagatcatcgacaaaataatcccccaggcttggaaggatgagcctgtggcaaggatactcgagctctgcattctacatattgctatggcagagatgacatcaaaaggaacacctcacaaagttgtgattaatgaggcagtagatctggcaaagcgattttgtgatggtggtgcccctccgggtaatcaatgggatgcctttcgaacatttggtaaagg

SEQ ID NO: 133962 - DNA, 453 bp, Zea mays
  Clone ID: MRT4577_5365C.1
gtcttaacaatactagacaggacatgaaaaccgagcgctagcgagaagcagtagcagatgactaggcagcaccgatgatccatgtcctaacacaagcgcttcagccggacacatggcagacgaactgcagccgtacgtctatcgtttacgccaggcgcccttgtgacagatagctcgaagacaggctgaagacaggcaagagtcagagagcgagagcatccgagcaagccacgtggtgacagtctgctacctgaatagctgtacactgggccgcggtgtaccggtacgccccaagacctaccatgactgggcgaggactcgcggacgactacaagggggcacaccgtataggctgtcggtggagacacgacacgatggccaaaaaccggaagctgtaagtcatccactcacgctgagccatgctggacgcgttgggctagcctgttcccagag

SEQ ID NO: 133963 - DNA, 104 bp, Zea mays
  Clone ID: MRT4577_53660C.1
aggacaacctcgttgttcatgtataaacctagctatattctgctttatgagcatatatgtgtgtgtaactaaatgaatcctccacacgtgctgtgctgctggat

SEQ ID NO: 133964 - DNA, 1231 bp, Zea mays
  unsure (1)..(1231): unsure at all n locations
  Clone ID: MRT4577_53661C.1
tttttaatactaaaacgagtgtatagtctcgcattaatttattaaactagaattatccagctcccagtgcaataagcctatgataagcagaacattttacatatacatcaagcttttacagaacttgtgatctttatctgatcatttaacgatctgtgggttatcagaagcgataaccctcagttgtttcagatggaggatggatgtgcaccaccagtttacagccctgtatacttcacccaataaccgatcactctgaaagaatgaactatctgtggctccttgatgagcccagcatgtttgttgtttaggttcccttaggttaaacgctaaatcttcatgatggaatgtggttgctggaactccaagacagcaatgttttctacatagttctttacctcagccaccattctgttgtacgattcagggtatttgcaaaggttcacaattttgattcagctccctggctagtgcctgcaacgtcaacatgatcctttacaaatgttcgaaggcatccattgattacccgaggggcaccaccatcacaaaatcgctttgccaaatctactgcctcattaatcacaactttgtgaggtgttccttttgatgtcatctctgccatagcaatatgtagaatgcagagctcgagtatccttgccacaggctcatccttccaagcttgggggattattttgtcgatgatctctacatgcttatcccatccactggcaacagccactaaaagttccctggacaaccgtaagacaaagttgttgtaaaccagtttggaggagctgaaagtacatctgcttcgttggctgaatccttctcgttctgactggtcagcttctcagcctcctcctccgttccaacntcgagcggtcccccgccaaagctcatatggttgtaactcagtaggcatgccttgtcgaaaacaaacccgggctctcgtcttgcgctaatctgcggtcgaagagccnaacgacgtcggttccctccagacacgcggcgtaggaaatcagcagcgctagctcccgggcggngcgagggctgcagaagcggccggngnggncaaccttggcgtgcgcgggtgcggtcgtccccgaggccgcgggcggtggcgggctnnnnnncaccagcggcgcgcnngtggaggcgacggcgcggggnaggggcggcgccgggngcgcccgggcgcgcngcgaggccgggccngcgagcagaaggcagc

SEQ ID NO: 133965 - DNA, 165 bp, Zea mays
  Clone ID: MRT4577_53662C.1
cgccgtctctgctgtgccctgcccctgtccctgctcacccagctgcgatctctctccctctcgctgaatccctgaatttctctctctccgcctccgccccacctcggatcgggtccaagccgcggagcccactccgctgacccagcccccagaaccccaatcgag

SEQ ID NO: 133966 - DNA, 310 bp, Zea mays
  Clone ID: MRT4577_53663C.1
aaaaacaggccgaaccccacttttagggttggtcctacggggaggtaaagaagggccccccttttgtaacggggggttaataagggattattttaaaacctgggcacagggttttttaaaataccccacttctatacctccccccaaattattttagccaatgggccaaacagggctccctgggggggtttttttttaattcaacccggaatggaaaagggaaaaaacctcccaaggaagtcacttttgaacatatggatctaccccttggagcaacaaactgtatttttttgcccaactggagaacttg

SEQ ID NO: 133967 - DNA, 1405 bp, Zea mays
  Clone ID: MRT4577_53664C.1
cccacatctcgttccttgtcctccccatttcgagctcaagctcaatcacttcggattggcggcgggcacgcgccggacgaaatggaagcggcaccatccgcccgcgccttctccccgtcctcgtctccctccgcgggggctagacccagccttcccctcgcgggcctggcctcgcgctcgcggcgcgcccgggtgctcgcggcgccgcccccgccccgcgccgtcgcctcctcccgcgcgccgctggtggtctccagcccgccaccgccggaggactccggcacgcacaaccccgcgcacgccaaggtcgaccgctccggccgcttctgcagcccccgcgccgcacgggaactcgcgctgatgatttcctacgccgcgtgtctggagggaaccgatgtcgtccggctcttcgatcgcaggatcagcgcaagacgaggccgggtttcaagcatgcctactgagttacaaccatatgagctttggcgggggaccgctcgaggttggaacggaggaggaggctgagaagctggccagtcagaacgataaggattcagccaacgaagcagatgtactttcagctcctccaaaactggtttacaacaactatgtattacggttgtccagggaacttttagtggctgttgccagtggatgggataagcatgtggttatcatcgacaaaataattccccaggcttggaaggatgaacctgtggcaaggattcttgagctctgcattctacatattgctatggctgagatggcatcaaaaggaacaccccacaaagttgtcattaatgaggcagtagatctggcaaagcgattttgtgatggtggtgcccctcgggtaatcaacggatgccttcgaacatttgtgaaggatcatgttgatgttgcaggcacgagccaggaagctaaatcaaaatcatgattttttgcaaatactcatacaacaaaatggtggctgaagtaaagaagtacggagaaaaccttgctgtcttgagttcaggcgaataccttctgtctccaaggtttagccttcaacctaagggaatctaaaaggtaaacatgatggactcatcaaggagccacaacacgttcattcttttagaatgttcggttattaggtgaagtatacagagctgtaaactggtgatgcacattcatgcttcatctaaaacaaccgaaggttatggcttctgatagcgatctactcgacgcagatcgttaaatgatcagatattaagatgaccaggagttgtgtaaaagcttgatgcacatgtaaaatgttatatatacttggcattggctcattgcaatgggagaaggatattctagtttcataagttgatgtaagacatgtacgctcattttaggattattaatcgcatattgtgtttgcttc

SEQ ID NO: 133968 - DNA, 390 bp, Zea mays
  Clone ID: MRT4577_53665C.1
ccttacgaacatggtctataattttttgagaatgaactcatactggttctggctccattttctaccaaacctaaatgggaacgaccgaacccaaagaacagcgaagacgggggaggggccgcaataacggggggagcgcctgagcgcggaaaccggcgggggaaaagccaccccaccgacccccttaacattgaaccggtgccaaaaggtttggatgggaccaagctaaagcccctccagaaacagggcgccgccttaaacgaacacaaacgcaaccgggagggcccggagggccacggtcttgctcatcaaaccaacaaggactgggagcaccgcggccacccacaagaaccccggggggtaccctgctaggacggctactatgaaccc

SEQ ID NO: 133969 - DNA, 614 bp, Zea mays
  Clone ID: MRT4577_53666C.1
cgggccgggattcccggggcagcccccactacccccagcctcggaaggaaccttccagaagcgcagcactctaaaggccgacgcgcttcccattcttcctcgccgcgggggtcgcctgcagacacataaacaatggtgaaggctgttgcatgtgcttgagtagcagctgatgcgtgtcgaagcggcacacatactgttcttcacaccaagcagggtatgatgagctccctacgcgcgtgtacactccgggaagatgtactactcgagccatcaagcacgtggcactaccataggggtatcgcatgatgacaatgacgacgttagggctgaccactctacacaagtagggagtggcagtgtgcatatcctggaacacaccacctaccaatcactagcgaagcaagtgagcatggcggcaccatgaagatgagaaccgccatgctggtgatcttggaaacgtgacagctggagcagatggcgttgctaatatcaatggcaccgacagccaaatcccactgactgggccaaactcaatcattggcaagactgttggtgttcacgctgatcctgctgatcttgcaaagggtgggcacaagctcaagcaagagcactgg

SEQ ID NO: 133970 - DNA, 1007 bp, Zea mays
  Clone ID: MRT4577_53667C.1
ggaagtatgaacgttatcggtggttggaaaccaggggagtagacgaagaaactttggttcaaactcttccaaaagatcttaggagggatatcaagcggcatctttgtttgggcttagtgaaaagggtgcctttgtttgaaaatatggatgaacgattgttggatgcaatatgtgagcggttaagacctgcactctacacagaaaatgagttcattttgagggaaggtgacccggtggatgagatgcactttattcttcatggttgtttggagagtgtaaccactgatggtggacggagtgggttctttaacaaggttcagctaaaggaagggtcgttctgtggcgatgagttgctcacttgggcattggatcccaagtcagctgctaattttccagtttcgagcaggactgtccaggcactcaccgaggttgaggcgtttgccctatgtgcagaagagctgaaattcgtggccagtcagtttaggaggctgcacagcaggcaagtgcagcacacattccgattctattcccagcagtggaggacctgggcagcctgcttcatccaagcagcatggcgccgctactacaagaggaagatggcggagcagcggcgcaaagaagaagaggcggcaagccggccaagtagtagccaccctagccttggggcgactatctatgcatctcgtttcgctgccaacgccatgcgaggggttcacaggctaagaagcaaggctgtccctaccattgtcaggctaccgaaacccccagaaccagattttggtgtcgatgatgctgactaacgagacaatcacactgtactcgcttgtaattgtactttacctcatctgtagattctgtacaagattcaacgacagctgaagaagatagtgtttgtaaaggtttgtaaccacgcacagacagaccataacggaggtatatcctgcttgacgtctatggaaatgcaaatgtattaaatttttgccaaaaaaaaaaaaaaaaaagcggcc

SEQ ID NO: 133971 - DNA, 615 bp, Zea mays
  Clone ID: MRT4577_53668C.1
gagatttctatttgattgtgaggatgagtttgtgacagcatgtaaggaaatgttagaaaagtatgacatagaagataatcaatagctagcatatttgttctcaagaaaggagaaatgggcactgacatatggtcgtgatgcattttatgttgatatgaaaagcgtgcaacaaaaggaaagtttgacaagtgagctgaagaaacatctatccttggaatgtgaccttttgaacttcttcgagcagtttgaaagactgttatgtgatcgtcagtctacagagatggaggctgaaccaagagaccactttgttaaatttgattcactcaattccacgatggactgtacttgtaagacgtttgaacttattggcatcccatgtcgccatatgctggaggtacttgacatgaggaatatcaaggaccttcctactcagtcaccgtgaaaaggtggaggaaggatgccaaatcaggatcctcaaatggtggctattctttctcattgatggtgaacctgactcctctcacataaaacattataattttttgtgtcgtatcttcaatatagcagcggctagggctgcaactttggtgaatcattgcatatatggaaacagtc

SEQ ID NO: 133972 - DNA, 450 bp, Zea mays
  Clone ID: MRT4577_53669C.1
gtgcctacccacatctacctccgatacaggggggccatggtggacaccccgaacatacactgaagaactctcggacccgtacacttatatggtgatcataccggggctgggcacggcctacatgatggtgcacatgctatacaagcccatctctggaatcaggggttagcgaaggcggggggggggggaggacctcaatacctacgcatgaatcatgggatggtcaagttcatgcgcaaggcaagaccttcggtacaatatcatacatgatacaaaatctccggagtttacacacgacagcgtactcactccgaccttttagaatctgccccaatctcgacacatgactttcataaccataaaggtaaatgtcgcttgtggaggaactatgtcagatcaatcaatgctctcaaaatacattatcagcgtcagatagatgctatgacatat

SEQ ID NO: 133973 - DNA, 204 bp, Zea mays
  Clone ID: MRT4577_5366C.1
ctaaagataaagtctaataaattttttgattatttttaggaaacacatgccggaatgagggcaccattgttgagtacttctcatatgtaatcaaaaggatggaccctcaaactatgggtggttgcaaggcaggtttcatcaaagagatctgattgtatggcaacaattgtttgatggttaggaatgtcgctcccaatgagttag

SEQ ID NO: 133974 - DNA, 2101 bp, Zea mays
  Clone ID: MRT4577_53670C.1
atgctgtaaaatctgatgatgatgggaactttcatattttttatgggcacattcaaaatctattatggactttttccattttggtgatgtagtatgttttgattcaggatatgcattgcaaggctatgatatgccattggctttgagtgtgaatcatcatcataagcagacaattatctttggtgctgcaattattcatgatgaaagtaaagaagctttccaatggttattagatactttcaagatggcaatgaatggaacacatcccaagacattgttaattgatagatctgttgccttaaatgaagctgttacagcccatcgttattgtgtgtggcaaatttatcaaaatgctctacaacagttgagtcaagctttccatggttcaaaaactttagattgcaacttcaagagatgtctatttgattgtgaggatgagtttgtaacagcatgtaaggaaatgttagaaaagtatgacctagaagataatcaatagctagcatatttgttctcaagaaaggagaaatgggcactggcatatggccgcgatgcattttatgctgatatgaaaagcgtccagcaaaaggaaagtttgacaagtgagctgaagaaacatctatcattggaatgtgaccttttgaacttctttgagcagtttgaaagactgttatgtgatcgtcggtctgcagagatggaggctgatgtgaatgctaatcagagtacaaagaagccaccttctatgcgaatgttaaggcaagctgccaatgcatatacaccttctgcctttaaaatgtttgagagggaatttgaattgtacatggattgcatgctctacatctgtggtgagatgagcacaattttcgagtatagaataagtgttgaggacaaatcaagagatcactttgttaaatttgattcactcaattccatgatgaattgtacttgtaagacatttgaatttattggcatcccatgtcgccatatgctgaaggtacttgacatgaggaatatcaaggaccttcctgcccagtacatcatgaaaaggtggaggaaggatgccaaatcaggatcctcaaatggtggttgtgctttcttgtttgatggtgatcctgacttttctcacataaaacgttataattttttgtgtcgtatgttcagtgtagcagcggctagagctgcaacttctgatgaatcatttgcatatatggaaaaccagtcaaacatactgatggatcaaatagagcaagttattcaaaccaggccccctgacatagctgatcttattggtgctaattgtgatcgaacacagaatccagttgacaatattgtcgctgaaggcattcaaagtcatactaattttcttaatggctccactgatggctctctaacatttccattcacattgggtgctggcacattggattaccgctgactggtacctactgttaggatggtactgcagtacagaacaaagtatttctgtctcgccatgaacaacaatatgtgtcgtttttaatgttttacaatgaaaccatggttgtatggctgcatcatttactcattactcacctgaccttttgccacaagctatttagtttattttttcatttgctgaccaagtctttttaggcatgcagaatgacataatggatgttctactaatgtgtctgtggcttcacattggctgcagagctgcaaataacaatggtacacctactgcacaggtagttggcaggcctgatattgtctgccttaacttctcacccaaagaaaggaaggatttttcccccttcgccagcactcattgtatgtacttcatgggaaaggatgtttcatgaggtagcacccgaaatatcacctggttttccagcctggtgattgtgcacagggtgttcccggtaatttgagggactccgcctgctgtgttgccagtttacaaggtgatgatgctgagcttaaccaacgcgagcccatctgatttttaaccagtgctgtacgcctgtagcgtaatgctgttgcgatagccttgtcatgacagttgtgcaatgtacagtttttttaacccattacgtaaatatattaacatgtggtcaccggtttc

SEQ ID NO: 133975 - DNA, 559 bp, Zea mays
  Clone ID: MRT4577_53671C.1
tgactcgctgccacaagccgtccgccttgccccttggaagcttgctcctccttgtgtatcgaccttctccgcctcatgcccgaaagccaggtaggaggcatatcaactatgctgccttcgttagcacccggaccaagggtgtacaagatgatgattactacacgaagctcatcagcctgctcctttagtgcatcaatgtgctcaacgtcctggacaacacccttgccttcagcgagctcctataatgctgccctggctctctgcagtacttgatggggctgaatcctattaacagacacattatgccataaaaccaaggatagcaagcctattacctgataccataaatgagggaggcttattgacttgcttgaaggctaacaagggcatcatttaagctaaggagacttataaggagaccaccaggagggccataactacacttgtgaagcgttgtgccaaggtactaccaggcaggtgctctttatgttaagtggcccgctggtaacaatattgtggatacttagcaatcatattttttcatcgagctgaacatctc

SEQ ID NO: 133976 - DNA, 231 bp, Zea mays
  Clone ID: MRT4577_53672C.1
gggaagggagcttcgaggcggcccgccgcggcgcgtcggccgggcgggctgagccaatggcacgggcccttggggcgcgaacgccctaacgtgggttggggccggccgccaacaaaagcccccgttgctaacttggattcttacttaaaggcgttcaatcataattccgcacaccgtaactttgcgccacttgctttttaacccaagcgcgatgaccaattgtgtgaataa

SEQ ID NO: 133977 - DNA, 766 bp, Zea mays
  unsure (1)..(766): unsure at all n locations
  Clone ID: MRT4577_53673C.1
gggaggggaacaacttgtaggcacgcagcttctctctgtttcttctctgcggcagtgtgcttgtcaagatctccctcggctcttgagatctggttaagcggacaagatggtgaagatctgctgcatcggagctggctatgtcggcggcccaacaatggctgtcattgccgtcaagtgcccagcaattgaggttgttgttgttgacatctccaagcctcgcattgacgcttggaacagcgacaaactcccgatctacgagcctggccttgacgaggttgtcaaggcgtgcaggggcaagaacctcttcttcagcactgatgtcgagaagcacgttgctgaggccgacatcatctttgtctcagtgaacacccccaccaagacccgtggtctgggagccggcaaggctgccgacctcacctactgggagagcgctgcccgtatgatcgccgacgtgtccaagtctgacaagatcgtcgttgagaagtccactgtccctgtcaagaccgcagaggccatcgagaagatcttgacccacaacagcaagggcatcaactaccagatcctctccaacccggagttcctggccgagggcacagctatcgaggacctgttcaagcctgacagagtgcttatcggtggccggaagaccccgagggcaggaaggcggttcaggctctcaaggagtgtacgcccactgngtttcctgagagaacatcatcaccaccaacctgtggtctgctgagctctccaagctcgctgcccacgc

SEQ ID NO: 133978 - DNA, 387 bp, Zea mays
  Clone ID: MRT4577_53674C.1
atactctagagtgagtcgtattagagcccgagacgccgccggagtctgcaaccttcagtgtgcactctttgatctccacatatggagttcatctcgcttcaatgcggccactggatgagggtgccgcactgatggcgacatgtcggacgctgaggctaaatccgattcagtatggcttatcgaagtcaccatcggagagcactatgatgttttctggacgattctctcagggctgatacgtgtacattctaagggatttcgtgtatgtagtcgggtactacattacagacgcgtaaggtcaagttcgtttatgtcgagtacctgttgcagaggatcaatatgtacatgaccacctagcacgatatgcagctggctcttgatagctcg

SEQ ID NO: 133979 - DNA, 422 bp, Zea mays
  Clone ID: MRT4577_53675C.1
aattagctcatcgactccagattggagaactcgaccacatgaaggggctgatcggagcccttgctctcctggcgctcgctgccagcgccggctccagtacaagccgcggatgaggctgccagacaccatcgcttcatataccgtcttcgcactatatgccgcctccgttatatctgtcgccgcagcacaagccgcatgcatggcaataccccactcaaccaccgaatgtaagcccgggccaacagcatccgatcctgcagcggcagcagcgacggtagccccatcctgcgccacagcgcatgagttcctgacgcaccactgcagcccgtaccgggactcgatacagctagccacagtgacccgcgctgcataattacagctgccaccagatcaagcaagcggagccgctgtaccagtaccag

SEQ ID NO: 133980 - DNA, 143 bp, Zea mays
  Clone ID: MRT4577_53676C.1
tcgctgatgtctaggacaataagcagaaggctttatgcattgagaattacagaaagaaatatggggatttgctgtacaccttatctgatattgatgtttaaaaggaaaaagaatgtgggattttcattgaaatgaacaacaaa

SEQ ID NO: 133981 - DNA, 149 bp, Zea mays
  unsure (1)..(149): unsure at all n locations
  Clone ID: MRT4577_53677C.1
gttgcagttgcagatcaaaacactacccctttccgcgaaccttctttctgcatncatcaacnctccnnctttgtcctgtntntcttcctcccacgcacnnagnnacatcncanagctggaaagcaggtgcttcnctcanacacnnctcg

SEQ ID NO: 133982 - DNA, 196 bp, Zea mays
  Clone ID: MRT4577_53678C.1
tcctcactccacttatgtacgtatatcctttctttaagcctttccgcgtctgtctcctacgggggggggggcctcccggtaggggaaccctatttgcttcaaggtccaagcttgcccatgatggagcgcaagaagaacgtcgccatcgacgacgacgagtacttgtttccggaggacgacgcgggcaacccagccc

SEQ ID NO: 133983 - DNA, 527 bp, Zea mays
  Clone ID: MRT4577_53679C.1
ggggggttttttttttttttttttttttttttttttttttttttttttttttttttttttttttttttttttttttttttttttttttttttttttttttttttttctttttttttttttttttttttttgtgggttttttttttttggggggggggggggggatttttttttttaaaaaacaaaaataaaaaaaagctgaacgaaaagaaacccaaagaaaggcaacccccgctctgtcccagaagcaacccaagccaggtccaaaccaaaaaaaaaagcccccacaaaaaaaaaaacaactaatgattgcttatggaggccaataaaaaagaagccccctttcttgatggcaggcaaaaaaaaaacccacctagcctcaggggaggtccccccaaaaacgccaagggacccgtggaaccacccaggaattcccgaaagaaacccgcattcctactaagtttacatataaagaagcgcaacacaaccaggggtaatgtttgtaaaaaatcccccctgagggaaatg

SEQ ID NO: 133984 - DNA, 253 bp, Zea mays
  Clone ID: MRT4577_5367C.1
cattatccttacatagcatttgctactagcccgaccggtgttgttttttttttttttttctctccttctccttgctcgttttcgggggctcgcgaccctgctgcaaacaccgcggaggcagataaacttcacaagaagccattaattgctgaaaacgggaggacatcctttacatacaatgcaatgcgtgcgagcacatcgcgcgcgagatcttcgggcaggaaaccaataagcaccccactgtgccgccctt

SEQ ID NO: 133985 - DNA, 274 bp, Zea mays
  Clone ID: MRT4577_53680C.1
aaatggtggttcggttttttttttttttttttttttttagacaccctacacaacagtgcttacggggcatattaacctttgaaggtttttttcctttgaaaaggccccattttggttcgcatttttgccgggtacccccttaaccaaaaaatgcttccaaataaaaggtttagggtgcctaaggcttttgcaaaagtccaccggggcataaacctggaggaatcccgccttttgctccatcatcttggcaataaacttgccccccggggaggct

SEQ ID NO: 133986 - DNA, 829 bp, Zea mays
  Clone ID: MRT4577_53681C.1
caaccataagaatttgtgattctgatgttatatgtttgacaaacgcaaaatagaacgactcgtttctcaaaaactacaataaagacacacccacttgcacattgcttcatgcagtgacaaaacgagcagacggatcgtgttacatttcactttcgacgtagtatatatatcacgatcacccacttgcacattgcttcatgcagtgacacaaatcgtcatctgtgtactacggatgacaagtagaacagctagtgagctaaattagtagggcagaaaaggactagctagtagtggcaccgactggcataattaaccacactcgatttctagtaacacattttgacattttactagaagccaaaactatgcagcgcggcatcgagcagggggccatcgtgcgccagcttctgctcgccggcgccggcgtcctccagcagccacgactcgatcgccgacagcggcacctctccctgctgcacggccgacgccgtataattattctcctcggacgcgagcagctggtggtcggccaccggcgcggcgcctggatcggaggcgctggagatggaggcagaacactccgccgtcgttagctccgacgacgacctcgacgcgctctcggccgcgccgggcgtcgtcgccggggccgggatgacgacggtgccaccgacgacgcagctcctcctccctgccgctggagccgccgccgcccacccgtccagcatcatcctgtcgacgctgcgcgcggtgagagcgtacgcttgttgtggcgctgctgggccggcggrcggcgcsgsggcgccgagcccgcgacggccatccctggcgg

SEQ ID NO: 133987 - DNA, 228 bp, Zea mays
  Clone ID: MRT4577_53682C.1
tttgtcttaccgacactcccgcagaccatttcccgcccggcgccgaccgtccacggcaagctccgcgtcccatccagcgcacgtgtacagccgccggaggttcagcgagagcgagagagggaacgatacattcgcccgagatctctgggacgcctttgaggggttccccttcggctcccgcaacacacagcattctgttcccctaggtcccgcagaaccacctcggag

SEQ ID NO: 133988 - DNA, 602 bp, Zea mays
  Clone ID: MRT4577_53683C.1
aaacacccaggagagctgggtttcttttctttaaaaaaggggtggtttttacaaggcccagtttaaaagactggggctaaaactttttataaatcctccccaaaaaaaggaaggggtgggaatccccaaaaaatccagttccaaaaaaaaacaatgaacaaattttaaataaaatcaaaatttttagatgttgcaaaaaaaaggagtttttccctgaatgttcctaaaagaaaggcatgcttttaacaattttgtaaaaacaacctgttcgtccttgttttgaccactttaagtttgtttgctggggatgaccactggaggcaaccactggtttggaacaacaaaaaagtaggccgacatggttttcctaaaccgttttttgtattgttttgggaaaattactgtgggcaacacattttttggcccacctagtatccctgaagttttcacccatgtttttaggggtttgccccacgtatattgccttataaaatttataatacccattacaagttcatgccttttttcttcaaccccaccaggtaaagagtaatcctttacatcgatggaagcaaaaaaggacgtgtatttccaaacagttt

SEQ ID NO: 133989 - DNA, 340 bp, Zea mays
  Clone ID: MRT4577_53684C.1
cccacgcgtccgtccacacgttcgcacacagaaagtttatgtagccatcctgtgataacatatactttctttttgaggcaataaattggttattgagctgccgtcatacagaaaaaaagcaactcagaaggaactactatatacagaaaaagaccatgctagttagagcacagggacacctgtccatgaaaacatgcaacaatagaaaggaaaaagggtcggtgccctttagaaatcaattttacgaccgcgtataaataagaacaaagcttttttatgcgcacccaaaatttataccactgaaagtggttataaaacataaggtgtggaaaaaccctgt

SEQ ID NO: 133990 - DNA, 178 bp, Zea mays
  Clone ID: MRT4577_53685C.1
gcgcacatttttgttttctacagtctgaaagatgacccaaaaaagggccatatgatgagcgataggatagccagcgttcatgtgagaccaccacagcgaactacaggctataccagatgcgagaaacaggttcactcctgttgcatgcactaaaatctaggattcgtgcagcaagagc

SEQ ID NO: 133991 - DNA, 171 bp, Zea mays
  Clone ID: MRT4577_53686C.1
cctctacacgttcatcgacagtaaccccatcgagtagggtcggtacgagtagaaaacgacgagccggctagaccaccatgagggagcgtcgaggacccatcagttgcgtcgccccctgcgtcctacctccccctcactccttcctgggctttacgctggccacactgccga

SEQ ID NO: 133992 - DNA, 701 bp, Zea mays
  Clone ID: MRT4577_53687C.1
gccggccgggtttcaacaaagggagtggtaactcactcgtttccctgcttcgttcctcgtatcctgtgctcctctcctgaactcgactctgcgttctgccaggcctccgaccgacgtctccagcgacctcaccgtcgaggtcggcacctccagcttcgcactccacaaggtgagagctgagagctccttgcccttccacaagaaaacgaaaaaaaaagattaaaacgatgtgctaacgccggcggcatagctgttcgcgcagttcccgctggtctcccggagcggcaagatccggcgcctggtcgcggaggccaaggacgccaagctggcgcggctcagcctgcacggcaccccggggggcgcgccggcgttcgagctcgccgccaagttctgctacggcgtccacgtggacgtcacggtcgccaacgtcgccatgctgcgctgcgccgcgcactacctgcagatcaccgacgacttctccgacaagagcctggagctccgcgccgaggccttcctccgcgacgcggtgctccccagcatcgccagctccgtcgccgtgctccgcagctgcgaggcgctgctcccggccgccgaggacgtcggcctcgtgccccgcctcatcgccgccgtcgccaccaacgtgtgcaaggagcagctcacctcggggctgtcccagctgggacagtgcgcgcagctcaagc

SEQ ID NO: 133993 - DNA, 579 bp, Zea mays
  Clone ID: MRT4577_53688C.1
aaaaaaaaaaaaactttttttttcacttttgggagggccccttggggggggccccccccaaaaaggccggttaaaaaaaggatttccccaaaagggcaaaaaaatttggccaaaaaaggggaacccttaaaccaggtttaaaaattggaaccgaaaaaaattcaattttgcaaaaattttggggggaccttcaaaaaaaagccctaattttcggcaccccatgcggccaggggttaaaggccttttttccttttttggggcccggttttaaaaaaattccccctttggtgaaaacctcccccacccccttggaatattttgagggggggggtggtccttttgccaaatttttgggggggcctgcttttttttgccccctggaattttttgggggcccaactcccgtttttttaaaggggggttgcccccccggaaaaatgggaaaaaacccaaccttcactttgccaacaacaaatttggttgtttccccaaccctaccccgaagcttgggaaataattttatcccccaattttgggtaaagggggggcaaaaagggtttgggacaaacctcaaacccc

SEQ ID NO: 133994 - DNA, 445 bp, Zea mays
  Clone ID: MRT4577_53689C.1
gggctaaaaattttaaaccaacccttgggagttgccctaaggggggtagagcggccccttccattttggtacgggggggaataaggaagaactttaataacccaccaggaaactaaaacatttcattggggatattgactgccaaactacccccactgacttgagtcattgcatcaaacgcttgaaggggcaaacaaacaaaatggaaaaccagaccgcaccaggaccaaatcgggactcgaggagcaactcaccaaaggctactgcccaaggggagcggcacccaccccggggggggttgccggcttcaaaacccgcggctgtggctggggggaaacaacaagcgggggtttgggcccccccatttccgccttggcctgcttccgcgcgttgaacatttccttggtctcaacggggaccaggcgcttcacctgggggagcaacc

SEQ ID NO: 133995 - DNA, 1497 bp, Zea mays
  Clone ID: MRT4577_5368C.1
ccgggtcgacctagcgtccgcttcgccctccggacttcttttcctgccctttgcatcttccagcacgttctccaatccccaccggcccatcctctacggaaacaagaacagggacaaaagactgaaacaatcatcaacaaatcagcatcctccaggagtccaggtccaggtccaggtccaatccaatacagttgcttcttctctgacgcaacgcaacgcaacgcaaccccaactccccaagctcgcggcaaccgcgagtacctcactctgtgcaaccgccgccacgcgcaggtgttgactgttgacttgatggatcagattatggattttcctgttgacccaatcatggcagctaaggcctataagtacaaagcagaaatacttattaatgaatacttgctagcagattcatatgttctatacacttctgtgctcgcggggctcctgatgtgcaagttgtcgtatgacttcacacacataatcagttctgtctacttcaaaggttatgcctctcttgcaaagatgaaaaaaattgaatggaacaacagaggaatgtccactgtccatgcaatattcattacaatgatgtcagtatacctagtcttcttatcagacttgttctctgatcagctggaaggtccagtaacatttcgcagttcacacctctccaatttaacattgggggtctctgttgggtacttcattgcggatcttgcaatgatattttggttctacccttctcttggtggtatggagtatgttttccaccacatcctgtgccttgtttgtgctgtatattctatgctttctggggaaggacagctatacgcatacatgtttctcatctctgagactaccaccccgggaatcaacctacgatggttcctcgacgttgctggaaagaaaaattccaaagcatacattgccaacggggttgcaatgtttgttacttggctgatggtccggatagttctgttcgtctacttgttttatcacatccttacaaattatgatcaggttaagcagatggacacttttgcttgtgttctgatatctgtcgcccccaccatactgttcactatgaatataatatggttttccaagatcgtaaaaggtctcaagaagacgcttgccaaaaggcacactgaataggggaatgcgcgtacatgtacatccatcccatctgtacattcacttacagctatgcacatattagctaatgcagacatgctgttaattcagctttttcgttgtgactgctcagcttgttttctggatgttatatggttttgtgtgtatgttaggtctaactgcgtgtgcttaatgtaatagttcatcgatttgtaaaatttaggtctatgcgatagcttcagaaatttcacattcggtttctgagactgggtttacccttgttccagtcccgcttttgccctttgccattaattttgaccatggtggacaaagaagctaattaaggaaggcgatgaagtttaaccc

SEQ ID NO: 133996 - DNA, 484 bp, Zea mays
  Clone ID: MRT4577_53690C.1
aacaacaaaccacacccccaaccttagggggggattttttttttaccagctttttccaaataaaaaaaacccccgagagcctaaaaaaagctcccaccggcgggggcccaaacccggggccccccaaaaaacccgagggcccccccccccttttttttatagaaaaatcccccccaagcccgcgggggccccccaacaaaaaaattagggggggaaaaaaaatagggaaggcccgggggcattctccgggaaggacttggagggcaacacgggcccaaaattctttaaggatttggatttcgcaaacccctgtttggggaaaaagccccccccatttttttaaatccctgggccgccctttgggcggggccaccaggccggggcccctcggggggggagttcccaccaaggccccaagggggccaaccaaaaaacccccgattataacttccccgccctccttccggaaaggaaacccctcccg

SEQ ID NO: 133997 - DNA, 640 bp, Zea mays
  Clone ID: MRT4577_53691C.1
aattcggcacgaggtgtgtttcagaggtgctcacagctgattagtctattcaaggataccatttcacctctgacctcaagatattggatctcccaacctatgatatgattgtggggatggattggttgtctacacatagtcctatggtcgtgcattgggcagataagtggctatctctatcaactagtggcatttcagttaagctttttggcgtgcaggcatcacaaacacacggtgctctggtgtagctatgtagcctggataccttgcccgcatctgaacaagaactagtcaaagagcttcccacagatcttcaactgttattggacaagtactcatcagtgttttagttacctactagtcttcctcctgtcagggactgtgatcaccagatccctctgctacccggagctaatcctatgcaaatgtgtccgtatagatatgctccttctttcaaatctgagattgagaaataggtgaatgagatgttggattctgacataatccagcatagcaaaagtcccttcgcatcatcggtaattgtggtgaaaaagaaggatgggactcatcggttttgtgtggattatcatcatctaaatgccctcatggctaaagccaagttcatgtgcccataattgat

SEQ ID NO: 133998 - DNA, 228 bp, Zea mays
  Clone ID: MRT4577_53692C.1
gaaaaccgatgattaatctccattaataagaccataaataccacacaaactcataatttatcttaacaaaatactcttgtgttttactattaatcgtccaaacacaaataaagacctagattctttcacgtacggtcgtccctcagtacaagcaggaagcgaatccaccactctagccacccttcatcaaacaaacaccaagcaaatggaaagaagaagaagaagaag

SEQ ID NO: 133999 - DNA, 1803 bp, Zea mays
  Clone ID: MRT4577_53693C.1
cattgggaccctcgaggccggccggggtcaacaacgccaagcgcgcctcccgtgaacccagcggcccgtcaagtcaaagcatggacgtgccgctcccgctgctgctcggctcccgctgccgcccggtccccggggctggccggtgctgggcaacctgccgcaggtcggcgccaagccgcaccacaccatgtgtgctatggcgcgggagtacggcccgctgttccggctccggttcggcagcgccgaggtggtggtggccgcgtcggcgcgggtggcggcccagttcctgcgcgcccacgacgccaacttcagcaaccgcccgcccaactccggggccgagcacgtggcgtacaactaccaggacctggtgttcgccccgtacggctcccggtggcgcgcgctacggaagctgtgcgcgctccacctcttctccgccaaggccctggacgacctgcgcggcgtcagagagggcgaggtagcgctcatggtgagggagctcgcccggcagggagagcgaggacgggccgccgtggcgctgggccaggtggccaacgtctgcgcgaccaacacgctggcccgggcgaccgtgggccggcgcgtgttcgccgtcgacggaggggagggcgccagggagttcaaggagatggtggtggagctgatgcagctcgccggggtcttcaacgtcggggacttcgtgccggcgctcgcgtggctcgacccgcagggcgtggtcggcaggatgaagcggctgcaccgcaggtacgacgacatgatgaacgggatcatcagggagaggaaggccgccgaggaaggcaaggacctgctcagcgtgctgctggccaggatgcgggagcagcagccgctagcggagggcgacgacactaggttcaacgagactgacatcaaggcacttctcctgaacctcttcacggctgggacggacacgacatccagcacggtggagtgggcgctggccgagctgatccggcatccggacgtgctcaggaaggcccagcaggagctcgacgccgtcgtcggccgcgaccgcctcgtctccgagtcggacctcccgcgcctcacgtacctcacggcggtgatcaaggagacgttccgtctgcacccgtccacgccgctgtcgctgccccgcgtcgccgccgaggagtgcgaggtggacgggttccgcatccccgccggcaccacgctgctggtgaacgtgtgggcgatcgcccgagacccggaggcgtggcccgagcctctcgagttccggcccgcccgcttcctcccgggcggctcgcacgcgggagtcgatgtcaaagggagcgacttcgagctcatcccgttcggcgccggccggagaatctgcgcgggcctcagctggggtctgcggatggtcacgctcatgacggccacgctggtgcacgccctggactgggacctcgccgacggcatgaccgcggacaagctggacatggaggaggcctacgggctcaccctgcagcgcgccgtgccgttaatggtccgcccagcacccagactgctgccgtctgcttacgcagagtagaaatcgatgctcgccggccatccatgccgtccgtatgcatggatgcatggtcaaataaataagcgttgtacgtgggtatcagtgtcacaaactcacaatgtgtatcatgtattgcttcgtcagtggcgtgtgtaagcgtccgatttttttttgtattttattctttttccagaaaaaaatcgccgttgaaatcgcataacaaaaaaaaaaaaaaaaatttctttaccgctgtgaaaaaaaaa

SEQ ID NO: 134000 - DNA, 860 bp, Zea mays
  Clone ID: MRT4577_53694C.1
tgggtacccctcgggctcggccgggccgtctgcacccgtccacgccgctgtcgctgccccgcgtcgccgccgaggagtgcgaggtggacgggttccgcatccccgccggcaccacgctgctggtgaacgtgtgggcgatcgcccgagacccggaggcgtggcccgagcctctcgagttccggcccgcccgcttcctcccgggcggctcgcacgcgggagtcgatgtcaaaggcagcgacttcgagctcatcccattcggcgccggccggagaatctgcgcgggcctcagctggggcctgcggatggtcacgctcatgacggccacgctggtgcacgccctggactgggacctcgccgacggcatgaccgcggacaagctggacatggaggaggcctacgggctcaccctgcagcgcgccgtgccgttaatggtccgcccagcacccagactgctgccgtctgcttacgcagaggagtagaaatcgatgctcgccgaccattcatgccgtccgtatgcatggatgcatggtccaataaataagcgttgtacgtggcctgggtatcagtttcacaaactcgcaatgtgtatcatgtattgcttcgtcagttgcgtgtgtaagcgtccgattttttttgtattttattctttttccagaaaaaaaacaccgttgaaatctcataacaaaactaccgtttcttatttttttttaccaaactataaccgttttaaagttttaaggtcggtatcatagcctatagtgtcgctccagtattaaaagagttctaagtctttggtggaatctcctttttataactgtttcggttatagcttgtcagtgataataaactagaactactag

SEQ ID NO: 134001 - DNA, 714 bp, Zea mays
  unsure (1)..(714): unsure at all n locations
  Clone ID: MRT4577_53695C.1
cggacctgtcaaacaacgccaagcgcgcctcccgtgaacccagcggcccgtcaagtcaaagcatggacgtgccgctcccgctgctgctcggctccgtggccgtttccctcgtcgtgtggtgccttctgctccgccgcggcggggccgggaaggggaagctgccgctgccgcccggtccccggggctggccggtgctgggcaacctgccgcaggtcggcgccaagccgcaccacaccatgtgtgctatggcgcgggagtacggcccgctgttccggctccggttcggcagcgccgaggtggtggtggccgccgtggcgcgggtggcggcccagttcctgcgcgcccacgacgccaacttcagcaaccgcccgcccaactccggggccgagcacgtggcgtacaactaccaggacctggtgttcgccccgacngnctctccgcggtggcgcgcgctacggaagctgtgcgcgctccacctcttctccgccaaggccctggacgacctgcgcggcgtcagagagggcgaggtagcgctcatggtgagggagctcgcccggcagggagagcgaggacgggccgccgtggcgctgggccaggtggccaacgtctgcgcgaccaacacgctgggccgggcgaccgtgggccggcgcgtgttccgcgtcgacggaggggagggcgccagggagttcagggagaaggtggtggagctgatgc

SEQ ID NO: 134002 - DNA, 477 bp, Zea mays
  Clone ID: MRT4577_53696C.1
atggctgctacccccaacctgaggtccaccaatcttgcgtttcatgtcctccatctcccgacgcttcctttctatcatgattactctatctatcagatgttggaaggtaggaagggcgagaaactcctccttcctcactatcatcagtccctcgggcacatggtagcgacggaagttgtccctgaattcttcccaagtgatggcttcagggttggcatgggtggcgaggcatctgaacttgcacctaaggctgaggtggtggtggctgctgctgcacttgttgcatcgctgctagaatctgaccaattgcctggactgcttgagtctgcatcaggaacatttgctcaatggtcatcgggggtggcggtggcaaatgctgctgcggggctgcctcctcttggggtgcctgctgttctggctgaggcctcgcacctctgcgcctattctcatacatctgtagaaatcacacacatataa

SEQ ID NO: 134003 - DNA, 313 bp, Zea mays
  Clone ID: MRT4577_53697C.1
actctgattctcctccatcccatactatttttcttaaattggcaaataccttacccaagtagtttattaaataccatctacctccttcacaaaacttccttctctaatatctattacaaaaccccctatctacagatactcaacttatacaaacaatctattcacattacatagaaaatacatccttaaaattacacacctcctaaaacacttctcttcatccatcccccactcaaacacatatattacaagaattcaatgtctaatcccttcttacccccatcacaaacaacttgctttattatcatatttt

SEQ ID NO: 134004 - DNA, 370 bp, Zea mays
  Clone ID: MRT4577_53698C.1
cagcagccccgtactactatccccgctaccgctagccgcctcactgcttatttggtggcagccagccaacctccccacaaacaccgccggcggctcctcctttagctccctccttacccccaactttaacctcccgctacctgcctacctatccgtagaaagagagagagagagctgaaaacgaactgacactcggaacacaactctaagaacaacccgcaaactccccacaactacccaacgatctcgcacgcatcacgccatagacgaccgagcaacaccacccttccccgggcaccacggcctgcaccggaaccggaacctgatgatactcccgctaccctgaccatggacccttccgtgcaccaaa

SEQ ID NO: 134005 - DNA, 160 bp, Zea mays
  Clone ID: MRT4577_53699C.1
cacgtaagctcggaattcggctcgagccggttcacccggacgacatgaagcacgacgctgcctgccccgaggcatggacagtccatacattgcacaggaagctttacactggcggacctgcggaggcatagcccgaccactcattccacacgacgatgca

SEQ ID NO: 134006 - DNA, 433 bp, Zea mays
  Clone ID: MRT4577_5369C.1
cacccaaagggacaaaaaggggatttaccactttaggaaaaggggggcggccccccacaacgggggagggggggggcccccccccccccacggcccttgttttttttaaaaacccaccccgggcggggggctttatggcttaatggaaaaaaaaaaaaaaccctcccacaaacaggggggaagccagcagcccccactttattccttagttagagacccccccgtttccgggcggggggacccccccccggcccccccgaaaaaaaaggggggccccaagcgggggttgttgccgttctgcccgtgaaaaaagtgggccggtccgggaagggggcccaccccccccttggcccccccggggttgtggttgtggcccaccactggcccccctttgaagaagttcgcctggccaaacctttcttggggaaagggc

SEQ ID NO: 134007 - DNA, 361 bp, Zea mays
  Clone ID: MRT4577_536C.1
gtccaaactataaaaacgtgtcaaacctgtggctctcaaaaagtgcgaagaagctcgtacaatgtgcatacaaaattgcagcagttactcataagtctaaataccgaggagccgactgatgcctgacacgcgacgcagcctaaaggacttataagcggtagcaaaataggccttgaaaacatctcacagcactgagcattcttaggcccaggtggcggaataagccttgtggacggcagaaagcttatacctcctcttggccaccatctgactgtggcggggcctctgttctttaagactctggacaggaagcttgtggtactcagcactctaaaactccttgttagcgaacctattgttg

SEQ ID NO: 134008 - DNA, 1020 bp, Zea mays
  Clone ID: MRT4577_53700C.1
atgcaagatgcagcacgatgggcactttctcagtattgctcgttgttcagcagggtagctgatggcctcgacctaaagtactaccctcgccattcgaccgacagtgttggaggtgtgattgtctcgccagttggtgagggcaatcccaagctgaacagcatggtcaacttggccgccgtgctcaacacagagttggaccatgtctttgacgagttgggcaagatgtttgagaacaggcgcagaggtgcgaggcgtgctcagccagaacagcaggtaccccaagaggaggcagccccacaacagcatttgccactgccaccactgatgaccattgagcaaatgttcttaatgcagacccaagcagtccaggcaattggtcataccttagcagctatgcagcaggtgcagcagcagccaccaccacctcagcctcaggtgcaagttcagatgcctcaagtgcccagagacaagcgggcagaattcatgaggggccatcccccagactttgcccattctactgatcccatggacgctgaagattggctgcgtaccatggagcgtgagttgcacactgcccagtgcaatgatcacgagaaggtattgaacggtccccgacagctgaggggagcagcccagtcttggtgggagtcttacctcgccacccatgccaaccttgaagccatcacttgggaagaattcaggaacaacttccgtcgctaccatgtgcccgagggactgatgatagtgaggaagaaggagtttctcgctctgaagcaaggtcccctatctaccagtgagtatagggacaagtttctgcagctatcacgttacgccccagaagatgtcaacacagatgccaagaggcagtaccgcttcttgagaggattagttgatcccctccattaccagctgatgaaccacaccttccctaccttccagcatctaattgacagagcaatcctgactgaaaggaagcgtcgggagatggaggacaggaaacacaagattggtggaccttag

SEQ ID NO: 134009 - DNA, 268 bp, Zea mays
  unsure (1)..(268): unsure at all n locations
  Clone ID: MRT4577_53701C.1
ggtttttccaacataagggaaccgtggttccaaacagttgatgcagactatcacggaccgcgcgactgacggaggcgatggaagcgccgagaccttggagagagctatagttctacagcaggatcggaggactgaggtactcattgatagcgtcctccgttctggcggaggcgacgaaagccttangaattaacgacagacgcatgtgttggatttagacatactgaggttaatgaacgtggcagaggaacattagcacgcttagtgg

SEQ ID NO: 134010 - DNA, 212 bp, Zea mays
  unsure (1)..(212): unsure at all n locations
  Clone ID: MRT4577_53702C.1
gcacgaggtcagcagcttcctgtcgctctgcccgnccggacggacgcacagggacagacaggcctagtagagaggctagctaggcggtcctcgagcgaagatgccggcggtgttcagccgccaggtggtggaggcgccggcaccgctgtggcggcgggcagccggacgccgtcgcccaagacgaaggcgtcgcagctggtggcgcgcttcct

SEQ ID NO: 134011 - DNA, 212 bp, Zea mays
  Clone ID: MRT4577_53703C.1
ggggggggaagggaaaacatatatacattttcaactatcaattgcagcaaggatagaaacaaacatactactagtttacaattatgaaaagacaacaaagacaacaactgataacgacaacattaacagacaaacaaactggactttatagacagggacgagggggggggtttaagaaaacgcaaacacagatacaggcgcggcatacttat

SEQ ID NO: 134012 - DNA, 754 bp, Zea mays
  Clone ID: MRT4577_53704C.1
cggacgcgtgggggctcgtctgcctctgccctgcccttgccctgcccccatatatgcatgccattgccacccccaaagtgtaagcacaaccaacagcaaagaagagacgacgtcgatcgatcgatctcagcaaccaagcaggtcgtaggtaggcatggcggccgagaaggagggcgcggtggtgaccaagggccacgacgaggggatgaaggcggcggcggcgctgctggaggagttcgggctcccgccggggctgctgccgctggaggacgtgacggaggtggggttcgtgcgggccaccggctacttctggctcgcgcagcgcaagaaggtggagcaccggttccgcaagatcggcaagcaggtgagctacgacgtcgagatcgccggatacgtccggcccaggggcatcaggaggctcaagggggtcaaggccaaggagctcatgctctggccgcccgtcaacgagatggccgtcgacgacgacccgcccaccgccggcaagatccacttcaagagcctcgccggcgtcaccaagaccttccccgttgacgccttcgccgccggccagtagccacccacgcgtaccatcttatattatatcactataataatacatacaccattatatatggcgcatatatatagtattaattaatctcttgtgttactaccttatatatatgtatgtgtgtacttgctaattgctaaaaaaaaaaaaaatgaagcaaaaaaaaaaaaaaaatttgcggcc

SEQ ID NO: 134013 - DNA, 290 bp, Zea mays
  Clone ID: MRT4577_53705C.1
atggggggtctcttttcacagtcaggtttctgtccctggggttcatgtatgtgattgcgcattaattatagtaatattacatccactactcttggcttgtatttttacaaagcggacacgggcacgggctatacatatatatatggggtaagccaaagcaaaggggtctggaaataatcctaatggtcctggcgactacttgcatgcggcgacattattattcgtttcaacaaaagcataaacaggtcgcctaaatgttgagccggggggggattctttatgcataaaag

SEQ ID NO: 134014 - DNA, 372 bp, Zea mays
  unsure (1)..(372): unsure at all n locations
  Clone ID: MRT4577_53706C.1
tccgacgccgtccggcanaagggannntcagcacgccgtcccgttggggaaggggaggcttcgagggcgggcccgccgcgggggcgtgcggctcgggccgggcttggagcgcaatnnngcacgggccctttggnnggcgcgaacgcccnnntaacgtgggnntcggggcgggcgaaacgagcagaggggcgccggttggcttagcttgggattctnnggacttagagnngcgttcagtcatttaatccggcacaacggtanngcttcgcgcccactggcttttttcaaccaagcccgcgatgaccaattggtgtgaatcannacggttcctctcgtactaggggttgaattaccttatcgcggcgcggtcat

SEQ ID NO: 134015 - DNA, 238 bp, Zea mays
  unsure (1)..(238): unsure at all n locations
  Clone ID: MRT4577_53707C.1
gggtggtggtttttttttttttttttttttttttttttttttttttggaacctgaaaccagtatgcagtattcaccattcctcaaatttcaacaggggaatgggacacatgaagagcagggagagggaggcagcnggaagcgggggggggggtgaggcccaggatggaggacccctcgggcccgtcagaggtggggggggacggggggcaactcnaactcggacgcgacctcctgggt

SEQ ID NO: 134016 - DNA, 676 bp, Zea mays
  unsure (1)..(676): unsure at all n locations
  Clone ID: MRT4577_53708C.1
gtggacgcctgaggttccggtccggaattcccgggtcgacccacgcgtccgggaaactactgtgttcttcagatggaccagtcctacaaaccagatgaaaatgaagttcgaacactctttggtcttcgtttaagccagaagagaaataatggtgtcgttgacaagtcattatttagcaatattgtcaccaagaataaagatctgccggagtctgcactcagagacctcattgtncgccaccgtcgctgtcaagtatactcagtctaattcggtgtgctatgccaaggatgggcaggttattggcatcggagcaggacagcagtctcggatacactgcactcgccttgcaggtgataaggcaaactcttggtggcttcggcaccacccacgagtgctgtccatgaagtttaaagccggggtgaagagagcagagatctccaatgcgattgatcagtatgtgaccggcactatcggtgagggcgaagacctggtgaaatgggaagcactgttcgaagaggttcctgagttactcacggaggcggagaagaaggaatgggtggacaagctgagcggcgtgtctgtcagctccgacgccttctttcctttcagggataatgtggaccgagctaaaaggagnggngtggcctacattgtcgctccatctggatctactgct

SEQ ID NO: 134017 - DNA, 288 bp, Zea mays
  Clone ID: MRT4577_53709C.1
aattcggcacgaggattgcataacccaagtatgcctgtgtttcatctagctatcttttaactatcctgtacaactggtactgatagtacttgaggacttctggttactggaaatgcttctgttttcatactagatagactatatagattactgctgtgcctgatgttatctactagggctaagatggggaaatttatgaaaaatataggcttttcgggaaggggacttatggatgcgaggacgactgtgctcggggtcatggggggggcggacaatggggtcggatgg

SEQ ID NO: 134018 - DNA, 176 bp, Zea mays
  Clone ID: MRT4577_53710C.1
gcttgaaaggaagaggtgttatgagggtcaactcaatccatgcatgttctcattctctctaacatcagcggcttctaacaaggagaagggcggaagtctgggaaccaaaacaaacgcggaaaaaactacaaccaacaggccgaaaggcatgacaaaaaacctataatactccgggg

SEQ ID NO: 134019 - DNA, 251 bp, Zea mays
  Clone ID: MRT4577_53711C.1
cttcaggatcggaggatcatttattattctaaaaatgaccacctaaataaaactgctttatatattaaaccatgtacactgtatggcgctaggacaagacatccatatcacctagagctcagaattcttcacacatacaatcctacatttctaaaaatcaatattatgcctcctcattacataatcacaggaaattccaccccaacgttctccaacccaccgaaataataaaaattattattataatatta

SEQ ID NO: 134020 - DNA, 444 bp, Zea mays
  Clone ID: MRT4577_53712C.1
agattttggtgtctaattgagtagtttgttttgagatataggagcacaccaaattcgatggaatcaagaaaacgagttacatcagatatattctcttcattattaaagaagaacagaaatggaaagaaaccacacataattgataacttcaattgtgtaaaagatagtaaaaggagtgagaggatcgtatgtttgtaaatgtcaaactttcatttatcgagtttgagtttgttcttactcgagttgatttcgtaatttttggttggattttgtttcattcaacaaagtaacagaacctaactcggctcgctctcttgatcagaagggatatatattgtatatggatcgatctacttggaagttgtagcaatatatatgatgtgtacatggcatgtgctctcgttatccgttgtacattcctccatcttcgctaatgcgatcaca

SEQ ID NO: 134021 - DNA, 238 bp, Zea mays
  unsure (1)..(238): unsure at all n locations
  Clone ID: MRT4577_53713C.1
aacatgctagagctttttcacggagaggtgagattcaaatcagngcacggctncatgcgcaacggcgagcagtcaaaaggacagngacagcggagcagcgnatgcgctcctgccaaataatgcaatgacaaatctgaaggtcatgcgatctagtccagacgatcgcagagttttttttagnggggggtggggagagggagggccggagaccgggagaaccccgcggacagcaaccgga

SEQ ID NO: 134022 - DNA, 1773 bp, Zea mays
  Clone ID: MRT4577_53714C.1
cattgggtacctcgaggccggccgggccgcccttcacgcagaggggtccggtccgccgccctctcggcccatccgccgccggttcccgtccagccgcacgcgccttcttcctcccccggcgccttctcggtgaaccagacccgtccctcacccgtgcgactcccgcagcgcccgcccctccgtcacctccgcatcctccccgtccttgcggccatatccgtcgtctccgcatcctccttcctacgctctgtcggcgtggcctccccatcccggtgttctccgattttggggggcgtccctttgcccgctccggtctgctcctccagagtccggtccagcggagcgcactacgacacagatcggcagccgtccatccctttccagctctccagagcctccgccggcgcatccggcgactgatttgcagggcgtatgtgttggaaatgctcagctgctagtttttcctggtagatcatcaagtcttgagagcagttaaaacaaaccaatttttcctgcaagagctctacgtgctatggagacagcaaatacattttcctttggttcacttcaattttgacggagtgcttgaagatggctttgttgccgtcaagaagttatactcgtatattgcaattgaagacgaaccatttcatcgaaagtagaaaagggcaagcgacgagcacagcacagcacagcacaagcacgccttccgttttgggaaggcgaggagaggggaaccccggcccagggagagttgtggggaggggatcggcggcggaggagatggaggagcgggagaagctcgtgtgcctggccaagcttgccgagcaggcggagcggtacgacgatatggtggaattcatgaagaatcttgctaggatggacgtggatatgagtgctgaagaaaggcatttgttctcagttggtttcaagaacactattggagcaaagagggcatcatggagaatcatttgttcacatgagcaaaaggtcgcagctgatcgtcagactggtgtgatgatagatgcctataagaagaaagtagaagaggaactaaggaaggaaaggtgactactaccgttacttggctgaatttagcactggaactgaaaagaaagctgcctctgatcagtcacttatggcctatcagcatgccatggttgtcgcctccagtgagctctcacctgctcaccaaatccggcttggccttgccctcaatttgtcggtcttcttttatgagataatgaactctcatgagagagcttgccaagtggcaaaacaagcatttgatgaggctcttactgagataaattctggtgagggaggttacaaggatagcacacttatgatgcagcttctgaaggacaacttagcattgtggacatcagaactaactggaggtgaagcatccaagggtaacgacgatgtcgacatggagggttgatacattctccatgttttaaggaaacacagaaagcacgcaaaaatatccaggctgtgatgctagcgaacctgggtcctcaagttttttctgcatcggaactcagaggagccttgtgtatttttctgaagtttctgtccgtctcgggttttttttttgaggtctgtttgttcctctcttttggccatcgtttggtcctggagtcagtcactcactaccaagtgtttcagaggtctgaactggtgagcatctagatctgttgttgctttttttttcttcttctgtgcttcagaggcatctttgtacaccgatggaaaactgtttctcttatc

SEQ ID NO: 134023 - DNA, 1248 bp, Zea mays
  Clone ID: MRT4577_53715C.1
gcgacgagttctccatccgcccctctctctatcctcttcttcctctcctcgccctcaccttggccgcgtcgtctcgtttttagaaaaggaacccgtgcgctggcccccgttcgccgctctccccgccgtggggtccggtccgccgccctcccggtccatccgccgcccaaaccgccgccggttccagtccagcagcacgcgccttcttcctcccccggcgccttctcggtgaaccagacccgtccggccgtccctcacccgtgcgactcccgcagcgccggcccctccgtcacctccgcatcctccccgtccttgcggccatatccgtcgtctccgcatcctccttcctacgctctgtcggcgtggcctccccatcccggtgttctccgattttggggggcgtccctttgcccgctccggtctgctcctccagagtccggtccagcggagcgcactacgacacagatcggcagctgtccatcccttccagctctccagagcctccgccggcgcatccggcgactgatttgcagcatttgatgaggctcttactgagataaattctggtgagggagtttacaaggatagcacacttatgatgcagcttctgaaggacaacttggcactgtggacatcacaacaaactggaggtgatgcatccaagggtaacgatgtcgacatggagatgggcgatcgaggctgatacattctccatgtttgggcacgaacctaggtcctcaagttttttctgcatcggaactcagaagagccttggtgtattttttttctgaagtttctgtccctctcgggttttttttgggtgttttgttcctctcttttccgcatcatttggtaggctgtacagtcactgactaccggtcttctggtttttttgaactgggaactatctagtagccttgtgtattttttttttcgtttctgcccgtcggggggtttttttttatgaggtctgtttgttcctctcttttgaccatcgtttggtcctggagtcagtcactcactaccaagtgttacagaggtctgaactggtgagcatccatatatgttgatgctttttttgtaagaagtgttttctcttatcaacgcacccactgtcagtgctgttactaatcatgttcggtgactgaagcgtctctgtaatgtagagatcgtgcataaacttctcgccgaaattatgtccctgctgagtgtcggtatgatcttccaatgctgatgctgacatgtgtt

SEQ ID NO: 134024 - DNA, 991 bp, Zea mays
  Clone ID: MRT4577_53716C.1
ccggccgggcgccctttcgccgtggggtccggtccgccgccctccggcccatccgccgccggttcccgtccagccgcacgcgccttcttcctcccccggcgccttctcggtgaaccagacccgtcccctcacccgtgcgactcccgcagcgcccgcccctccgtcacctccgcatcctccccgtccttgcggccatatccgtcgtctccgcatcctccttcctacgctctgtcggcgtggcctccccatcccggtgttctccgattttggggggcgtccctttgcccgctccggtctgctcctccagagtccggtccagcggagcgcactacgacacagatcggcagccgtccatccctttccagctctccagagcctccgccggcgcatccggcgactgatttgcagatgatgttgttatcttcctcaagccggctactagtgatatgctttcatcatggatgtgcttcacttgtttgggggaggcttctggtcttaaaaacaatgtgcaaaaaactagtgattttcctataaggtgtgaagattaatacttgatggtcattcaaggccttctgccatgcaacatcttgagcttgataggattgccaattagctacagaggtggaaggctaacttaataacaagggctagcaggagggtttgagtttagtttgtgctcataggaatgttgatctactttgctatgactactgacatttcctccttgggttttcaaagcaatttgataaaatcagacaaaaatttctatggaggagaaggaaggatgccaaaggcgggcactgcctcgtggcgtgggaaagggtttgtcacccccttgagcttggcggccttggtatttcaagtcttctaaagctatcttgggcactccgcatgagatggctttggctctaaaaactgagtcaaataaaccatgggctgatttacctatccaagttctagccaaagctagtgcttttttttctattgtctg

SEQ ID NO: 134025 - DNA, 1806 bp, Zea mays
  Clone ID: MRT4577_53717C.1
ccctccgaatttttatttttttattagcaagccccggtctttcttgctgccaaattgaagtttgtttgtggcatttttaaaatgggcgatgaggcttatacattcccatgttgggcaggatcagtcactatggccttcagcatatggtgtcgcctccaggagctctcacctgctcaccaaatccggctaattcggcacgaggagaaactgagccatccggtcccaaaagtagaaaagggcaagcgacgagcacagcacagcacagcacaagcacgccttccgttttgggaaggcgaggagaggggaaccccggcccagggagagttgtggggaggggatcggcggcggaggagatggaggagcgggagaagctcgtgtgcctggccaagcttgccgagcaggcggagcggtacgacgatatggtggaattcatgaagaatcttgctaggatggacgtggatatgagtgctgaagaaaggcatttgttctcagttggtttcaagaacactattggagcaaagagagcatcatggagaatcatttgttcacatgagcaaaaggtcgcagctgatcgtcagactggtgtgatgatagatgcctataagaagaaagtagaagaggaactaaggaaggtttgcaatgaagtattgtcagtcattgctattcactgccttcccttggccagtacgggtgaaaatatcgtattcttttataagatgaaaggtgactactaccgttacttggctgaatttagcactggaactgaaaagaaagctgcctctgatcagtcacttatggcctatcagcatgccatggttgtcgcctccagtgagctctcacctgctcaccaaatccggcttggccttgccctcaatttgtcggtcttcttttatgagataatgaactctcatgagagagcttgccaagtggcaaaacaagcatttgatgaggctcttactgagataaattctggtgagggagtttacaaggatagcacacttatgatgcagcttctgaaggacaacttagcattgtggacatcagaactaactggaggtgaagcatccaagggtaacgacgatgtcgacatggagggttgatacattctccatgttttaaggaaacacagaaagcacgcaaaaatatccaggctgtgatgctagcgaacctgggtcctcaagttttttctgcatcggaactcagaggagccttgtgtatttttctgaagtttctgtccgtctcgggttttttttttgaggtctgtttgttcctctcttttggccatcgtttggtcctggagtcagtcactcactaccaagtgtttcagaggtctgaactggtgagcatccagatctgttgttgctttttttttcttcttctgtgcttcagaggcatctttgtacaccgatggaaaactgtttctcttatcaaacgcatagactgtcagtgctgttactaatcatgttcggtgactgaagcgtctctgtaatgttgagatcgagcataaacttctccacgaaattatgtaactggtcggaagatgcttcgtcgatgcagcagttgcttccactaaaaaaaatattccccccccagcaccgtcgtaaaaataacttggccgtacgtgtattggctgctgcttctttcactttaccgtgactccgtgagtccgtgacccgcagcttcagcttctgagtaaaagataaaaaaaaaaaaaggtgacgacgctacaaaccgccccatctacaagcggccagggaggcgacgctaagccgacggcaacagcgacgccgcatgctctcgcgaccc

SEQ ID NO: 134026 - DNA, 1118 bp, Zea mays
  unsure (1)..(1118): unsure at all n locations
  Clone ID: MRT4577_53718C.1
cttaatcgtgctgggcagctgacagnagcttacaacttcataaatgaaatgcctatcacaccagatgctgctgtttggggagccttgctaaatggatgccgaatacaccggcatgttgaacttggggagcttgctgcaaaatatgtccttgcattggagcctaatgatgccggatatcatgtcctattgtgtgatctgtatgctgatgcttgtttatgggataaattggctagggtgaggaaaaccatgcgggagaaaggactggatcatgattctggatgtagctgggttgaggttaaaggagtgatccatgcatttcttacagatgatgagtcgcatccacaaatcagagaaataaatgctgttcttgaaggaatatatgagcggatgaaagcatctggttgtgctcctgttgaatctcattgtcctgaagatgaagtattgaaggatgacatcttttgtggtcatagcgaaagacttgctgttgcttttggtttgatcaataccacacctggcacctcaatttctgtcaccaaaaaccaggacacatgtcagagttgtcacaggatattgaagatgatttctaatatagttcgaagagatataattgttagggacagtaagcaactccaccattttaaggatgggagttgttcgtgtcgagatgaaggttttggatgaagttcttgcagagggggggggggcttaattatgttgcatatacggatatacccttgtgctattattcatcttgtacacgttcatcctgtcaatacaatgccatggtgatacaatgctgtcaatactaagcagaacacattgcgttctgtatagcagtttgtgcagatactcaacctgttacatggcagtagggaaagttatactcaagtaatgggacctaagattctcacacatgtcatgaaagtctctttaagaattgattcttggagctgatctttgcttgcaacaacttgccaaaaaagaaataaccaaccacttagggggcatttacatctggcatggcacaaaaacagaaaactcgaatggaaaatgaagtggcattttgtggaataacatgatatgctgaactacacgatgctcttttagagtgacattat

SEQ ID NO: 134027 - DNA, 207 bp, Zea mays
  Clone ID: MRT4577_53719C.1
ggggggagggcaaaagaacccttcgtagcattcaaggggggtatcattcttgggccccctgaaggaaccctgggtacatctccatttttttcgggtgggattgcccccttgaaggtaacaccgtggaaggcccatcttttcttgctaataggcgggagggttttttttcatttttggacaggaccttttggcctttttccttcttac

SEQ ID NO: 134028 - DNA, 788 bp, Zea mays
  unsure (1)..(788): unsure at all n locations
  Clone ID: MRT4577_5371C.1
gattcacccgcttccgagaaagaattaatagcactcgatcgatcgggctcaccacgtccagctctcggtcctcgtctttgctgctagcagctagctagcttcgcgatcgtgctcaagatcaacgacgatccatggcgtatggcaagaggtcacgccagaaggccgaggagatggtctggctgcccgacggcgccgatgtcgcgcgcttcctgctgctcttctcgggccaccagcactaccacggcgacggcatggcggcctcggcgcccgagcgggtgttcgagtgcaagacctgcaaccggcagttcccgtccttccaggcgctgggtggccaccgggccagccacaagaagccccgtctctcggacggcgtcgatgccgcagcggccgagccgcccaagcccaaggtgcacggctgctccatttgcggcctcgagttcgccatcggccaggcgctcggcgggcacatgcgccgccaccgggctgccgatcagacagacggcggcagcctcggcaccgggctcaccccgaaatacgacagcggcaagacggccgcatcgccggccgagctggttctggaccttaacgccgtgccggagctggaggaagagcaggatcacgccaagctggagctctccatcgaatntcccgtagcagtagttgactttcacgcacgctaagaaataacgtggnaatagattgaatccttctcggtttcatttttccattattatttacataaattacaaaaatacacattaatcaaaaaaaaaaaaaaaaaggcccct

SEQ ID NO: 134029 - DNA, 338 bp, Zea mays
  Clone ID: MRT4577_53720C.1
gtggttaaaccttgaaatttggggatttataagaaacaagttaccaacaaaaatcgggggtgggcgaccgtaaaacaaatataaccggttcctctggggcaacctaaacaccgggggcacaagagcgctttattactcccaacactgctttattggccagggggggaggccaaaaactgaccccaaatgttccacaagggatggctgaccatacaaggttttacagtttttttttaaaaagaccccacccatttctgttttttgggtgaggaaactaggccccattttttggtggacaaccacccccgcacggtcacaaaaacattcttattgccagg

SEQ ID NO: 134030 - DNA, 527 bp, Zea mays
  unsure (1)..(527): unsure at all n locations
  Clone ID: MRT4577_53721C.1
tcccggggtcctgnagagcctttgttgcatggctgccaagtaccgggcgcaccggcgcacgactcactaacaagctcatcggcttgctctcggaagctataagcaagcctctctcaagtcagcaccgaagcagnaaagtcgaaaaacgtacagaccagtggattgacttgtgtcctgctcgtctctcatcaaggtgttgtagatggtgtcttgcgnaaagtgttgtgaaagtccttactcgcgatgcgtgctgtaatagtacctggatatgcgctatgccaagggcagcgcgtattgcgtgggtgctaccatcgttgcatatgctgtgacgtaggaaaacatattcttgttgttgttagcttgaagaagggtcataacaaaataacaaataataacaaaaaacaaaaaaacaaaaaggggtcgggccgcatctagaagggatccaagtcttaccgtacggcgtgacatggcaacgatcatagactcttactatatgtgtcacacataaattcaatatcactaggcac

SEQ ID NO: 134031 - DNA, 532 bp, Zea mays
  Clone ID: MRT4577_53722C.1
gccggccggtccgggccctctctattaataagtttttactatgcaaatctttgtaaagactttgactggaaagaccatcaccttggaggtcgagagttccgacaccattgacaatgtcaagcaaaagattcaagacaaggaaggtattcctcctgaccaacaacgtcttatctttgctggtaagcaattggaagatggtcgtactttgagcgactacaacattcaaaaggaatccactcttcacttggttctccgtcttcgtggtggtatcatcgaaccttctcttaaggctttggcctccaagtacaactgtgaaaagatgatttgccgcaagtgttatgctcgtcttcctccccgtgccaccaactgccgtaagagaaagtgtggccacaccaaccaacttcgtcccaagaagaagctcaaataaactatccgttgtatatgtttgtatcctttcgagcaaaacaacaatttttatatattaaaatctatttctgatttaaaagaaaaaaaaaaaaaaaaaaggccccta

SEQ ID NO: 134032 - DNA, 207 bp, Zea mays
  Clone ID: MRT4577_53723C.1
gggaagaatgaccaaccatttaatttttccttacattgaaagaaaagggtacaggaggacagtttctattaaaacactttttggggggggattacaactggggggggggggggcaaaaacacaacaagcaacggggggggggagaggggaacaaaatttttttcctagcgcggacacggattattaacttgccttgttcaaacccac

SEQ ID NO: 134033 - DNA, 362 bp, Zea mays
  Clone ID: MRT4577_53724C.1
tctaggtcagaagtcctcatttggtttaggtgtggtcggtgccattcagaagaaccaattgtgacaacagcgagtactttttgattgttaagcatttcttgacctaactcgtggaagtttttgtaggcgcaatgacatatttgagtagagaaacttgtctttgatcaatgcgcaaggcaagacagtttccggcactaaaaaaaaaaaataaaaaaaaaaaaaaaaaaaaaataaaaaaaaaaaactaaaattaaaagaataaaaaaaatgaaaagaacacaacaatgaaaacaagatataaaaacaaataatacaggggcgggccgttttgaaaggttcaagacttttcgtaacccgtgctt

SEQ ID NO: 134034 - DNA, 638 bp, Zea mays
  Clone ID: MRT4577_53725C.1
tagggtgagtcctttgtctttttgtgacctacaccagttttctttagtagtacgattcaagagaggttccatgtactaattatgttacaaaataatacgatatataacgcgtagatatatatccaatatatacaagctctcaagtaatcagctatcagggatgaagcctgcaacggtggcactgctcattttgatgaacatgatgtgcactatcggatactttgatcatgcaagttttcttggaactaaggcccaagaaaccaccttgctggcaaattcatacggaaacaacgaagaaactggttctacgaagggcacaaatcttagaaggaaactggtggtgacggagcaccaatggtctccaagagatatctgctgcaatacaatgtcctccaattcttgcaaacagcaatataattgttagagatatatatgcttgcattcctatgcatatggaggacacggtatatatatgttgcgtcagcagtttctcaagtcccttgtattatctaggtggtgacctatctaaataatctctggggccgtgaaatgccgtgtagtattgtactgagcgtacgctcaatattaatcaataaattaaaacaagacctgtgtgtgataataattcactcagatat

SEQ ID NO: 134035 - DNA, 619 bp, Zea mays
  unsure (1)..(619): unsure at all n locations
  Clone ID: MRT4577_53726C.1
cttcttttgcatagcacgcgtcaccagagcattcgttcctcctccgcctccgcctcgccgccaccacgcccccgccgccctatcccaccctccccccctctctcctcgcatggcgacagccccttgccggtagncatagatccagaaatccctcgcccatgaaaaaacagacctcctccctaccacctatataaatgatcctggaagcggggaatgcctgcagcgccccggtgttggtggcgcgcgcccatcccacccccgcctccgcgcgacttggagcctcccctccccctcccgcccgcgcctgcccgcactccccaccccccccccccctcccttctccccccctccccccccccgcccccctccccccccgccacccccacacccacccccaccacccaccacccatcatctacccccccactgatacccccccctcaccccagagtcccccaaccctcgcccccaaaactcaccctccaccacccacgccccccccccccgcccaccctgcccccacaccgccccccgccccccccccccccgccctcccccccaccaccaccccccccccccagcctacacccccgcccccccccccccccgcagccccccc

SEQ ID NO: 134036 - DNA, 251 bp, Zea mays
  unsure (1)..(251): unsure at all n locations
  Clone ID: MRT4577_53727C.1
cccacgcgtacgcggacncctgggcggacgcgtggtaaaaatttaaaaggggggggggaaataatggggtgcgatcatatttattatacaacatctaatgctatagtatttaatatactttattatataataaaaactgggactttttaaaaaaaataaactatttcacaatttttatttgttcaaaaacttttttatgtggcaccaatattaaaattaatggggaatttaaaaaaaacaacgtatttatg

SEQ ID NO: 134037 - DNA, 257 bp, Zea mays
  Clone ID: MRT4577_53728C.1
ggttcatttttagaaagtgttgactatacttgcagggagggtgataccaaccatcacctgtgctggaatcctactcgatatgcgggacaaaagcatcctgcatactgtagctggatgatttagggaggctctcctgactaaaggggaatgatatcaccaccctggagccgtggtaagcaagaaataggagccaaaggcgactcatgagcccaactatggggtgtgagaccaaacacatctggggaagcatggattgc

SEQ ID NO: 134038 - DNA, 947 bp, Zea mays
  unsure (1)..(947): unsure at all n locations
  Clone ID: MRT4577_53729C.1
aaaaatattatagttagagcgagggtgaatattaatttttacccagtaaaaccccccccccaggtaatatattttatatttttttataattattttattttttatttttaattttttttttttttttttttttttttttttttttttttttttttttttttttttttttttttttttttttttttttttttttttttttttttttttttttttttttttttttttttttttgcaagtagcctcatcaggcatctcattaaaattgaataggtcgaacatgtgtccaaaatgacaagtgagaagcattaggtagcaacaatagacattacagtcttgatgaataggagaaagcggctgccgacagaccggcagaaaactttgttcatgctaatgaagaaacagcaacaaaaggagaaagaaacggggcgggaggctggcgataatggctcctctcggcttgcatctcttgggcccaaagaattagaagcatttcctgtgcacgatggacgggccagactcgtcgtactcagccttggcaatccacatctgctggaagctgctggtatccacgagaccacctacaactccatcatgaagtgcgacgtggatattaggaaggatctgtatggcaacatcgtcctctccggtggtaccactatgttccctggcattgctgacaggatgagcaaggaaatcaccgccctggctcctagcagcatgaagatcaaggtggttgctcctccagaaaggaagtcaccgccctggctcctagcagcatgaagatcaaggtggttgctcctccagaaaggaagtacagtgtctggattggaggatccatcctggcatcgctcagcaccttccagcagatgtggattgccaaggctgagtacgacgagtctggcccgtccatcgtgcacangaaatgcttctaattctttgggcccaag

SEQ ID NO: 134039 - DNA, 300 bp, Zea mays
  Clone ID: MRT4577_5372C.1
ggctcttgcgctaggtttgataactacaatgccttgcacattaacatcgaccgctactgggtggatgacaaggacacttggtatggcgcgcaaaccggcgctgttccctatgactacggctgggctggaggttctaagaatgtgaacctacctcctttgttgggcatgaaatagcgcgcgaaccacgccctaggaaaggatcgcacgagctgccattggtgctaacagatacttgttgtcaaccaccctgtatgctatgagcacctggcgactgtgatgattaccgacatgaattactac

SEQ ID NO: 134040 - DNA, 395 bp, Zea mays
  unsure (1)..(395): unsure at all n locations
  Clone ID: MRT4577_53730C.1
aaactgcatgtataaccattctttctcctataatcatttccatgagatgagttgttaaacttgcgtcggcttnattaaaataagctgtaagacctcataaatatataaattgcttgtacttgtttgcatccaataaaaaaaaaaaaaaaaaaaaaaataaaaaaaaaaaaaaaaaaattttttttataaattaataaaaaaaaaaaaaaaaaattaaataaaaaataaaaaaaataaaaataaaaaggtcctccctttttaaataaaccaattttacttaccctttctttaaaaataatattttttttatattccccccaaaataaaattaactttcccctctttttaaaatctccaaactttaaaaaccttatactccccaaattaattcttct

SEQ ID NO: 134041 - DNA, 491 bp, Zea mays
  Clone ID: MRT4577_53731C.1
tttttatctccttaccacaccgcaccaattacgtgaaaaaaacgtgactggtcgttcattggagaaacacagaaaaatctcttgatgatataatgcgcacacattcattctcggtacattattggccaaaaatagaacatgtaaagatagaatacgcgtgaaatacaaggcttccgaagcaactggataacatatagaatgcttaatctgagcggattctagtgacaatcctttaacagcctgaatcagatagaatacgattgaaaactatgttgagccgtctagcatcttcagatattgttggacttggtctcgcttggtctattgtagaacggaggactatggctgactcgtgggtacgcctgggtatacccgaccattacatacaggcgtaccaacgcgccctatattgagctatattgaaacttgtcatagttaggggcatagatggccactgtgggaaactgagataaattgacatctgcgcacaa

SEQ ID NO: 134042 - DNA, 462 bp, Zea mays
  Clone ID: MRT4577_53732C.1
cccaagaacaacaaaaaaggatcgaggaagataggctcaaaagagcataagttggattgttctcggcctcaccggaccaggtccgtagaggcctggcgcaccagaccggagccttgtgcaccgggctaccagtatggtcgaacctcgtagtcttgggaattttattataaaattcaccggattgtctacagtaaccggtcggtggtgcaccggaccctctccaacggctatcttccaatgggcgcgcactggccaacggctagctaacgtggcatccagtccgaaggtgcaccagactggtccagtgcccgtcagctatggaaaccgcccaatcatatcacaaactcagggcatgtggatctggttcagtggcgcatcgaatcagtccggtgcccccacaggcaaccagtttttaacatctttttagaaggggcaataaatatggggcctttgggtctacaa

SEQ ID NO: 134043 - DNA, 605 bp, Zea mays
  Clone ID: MRT4577_53733C.1
ccgggctacacgatacgcacccaccatagtaaagggcaaaagccaaaaggctcaccggcgcgacgacgatggcagcctcactccaagccggggccaccctgaagcaggcggccaaggatcggcgcccgggcgccctttgcctcgctgacgacccgcccgtcatctcaactcgcctgcagggcgttcggcgtcgacgccggggccgccaagatcacgtgctgcctgcaggacgtcgtcagcaggtgcatggacgccgggaagctcgccggcttcgcgctcgccacctcgacgctcctcgtctgaggcgcaagcgcggaggacacgcccaagatgctgacctacgacgagatccagagcagaaacgtacatggaggtgaagggcacggacgcgagaaaccagtgcccgaccatcgacggaggtgaggagtcgttgacgagcaaggccggaaagtgccaaacgaggaagctacgcctgcaaccgactggcttcaccgtcaagggggatggcaccagcaagaacgcccagcaagagttgcagagtaccaaactcaagacccgccttacttacacgctgaacgagaacgaaggcacggtcgagggtgatt

SEQ ID NO: 134044 - DNA, 684 bp, Zea mays
  Clone ID: MRT4577_53734C.1
gtcatttgagctctgcttgattgcctttgcttctcactgtcttgagattcacaatccatgtaatcaaggaagaggcaccaattgtgtggtggcttgcggggaagttttgttcccggctttgattagagaagagaagctcactcggtctgagggaccgtttgagagagggaagggttgaaagagacccggcctttttttttttttttggggggagtaggtttgcaagaaccgaacctcggtaaaacaaatctgcgtgtcacacacttcattattcgcttgtgatttgttttgcgccctctcttgcggactcgtttatatttctaacgctaacccggcttgtagttgtgtttatatttgtaaatttcagtttcgccctattcacccccctctaggcgactatcagcagttctctctccccgcaggtacagagccgagcggtggctattatagcccccgcccatggcggaggatgttaggaggacgccattggtagctacggctgcacatcttgcccggccgagcaagatggcgttcgcgaaggtcatggcaaagatcatgacggcccggcggcgacggcggccctcacgacgctgccgttgaggacctcgccttggccggcggaaaccagcacagcgaggccgaacgtctctggcggggccggggcggtagcacggtcccggccgg

SEQ ID NO: 134045 - DNA, 175 bp, Zea mays
  Clone ID: MRT4577_53735C.1
cccggggccccaccacctacactgcgcggtcccgctcaggcgcttcgtttcctccgagtccgccgtaaccgggcggcggtccaatcctgacgttgaggctcctccatcgcccctccttaaccccgccttgcccgcgccagacaaaccctgttctgacaaaaccgtggcgcgcccc

SEQ ID NO: 134046 - DNA, 530 bp, Zea mays
  Clone ID: MRT4577_53736C.1
cagagcgcccgccaagaagaagaagccgtcgtcttcctccaaggacaagacgaagaagaagaagggcgcttctgcccctgctccggcccccgtcgcgaagaagcccaagaccgccgacgcgcccacgtccgcggccgaggcccccggacccagtggcgacgccgccgccgctgccgacaccgcgggagccgcagggaggacacaggcgcccgtgatggtgtcgccgcacgtcgcggaggagctgagtgaggcggctctgctcgcctagatctcgaatggctctgacgaatgcgctctttctgtgtagaacgctcatcacctaccatcgattctctcgggcatatgcatacttcttaggtctatgcctgaaatgacatggctgtgacaacagctgcaagatttgccctaaaatgcaagatttgaggctactcagattgacctactatgaagagacactcatgttgcgggactggagaacacgtacctgagaactttttcgccaaaatcttcttcccatgaactatgcttcc

SEQ ID NO: 134047 - DNA, 981 bp, Zea mays
  Clone ID: MRT4577_53737C.1
gctacctaaagcgcatttattgcgcgccagcgcgcgcagaggtcaggcacgcccatgctgtcgccccggacatcctacagtacatgtccggtgcgccaccggacatcaaggcgggcccagaagtcagaactccaacggtcaatttccaacggcactggtgacgtggctggggcaccggactgtccggtgtgcaccggactgtccggtgtgccatcgaacagacggcctccaccaacggtcatgtttggtggttggagctataaataccccaaccaccccaccattcattgcatccaagttttccacttctcaaccacctacaagagctaggcattcaattctagacacacccaaagagatcaaatcctctccaattccacacaaagccctagtgactagagagagtgatttgccttgtgttcttttgagctcttgcgcttggatcgctttctttctttctcattttttcttgtgatcaaactcaattgtaaccgaggcaagaggcaccaattgtgtggtggcccttgcgggggaagttttgttcccggttgatttgagaagagaaagctcactcggtccgagggaccgtttgagagagggaagggttgaaagagacccggcctttgtggcctcctcaacggggagtaggtttgcaagaaccgaacctcggtaaaacaaatccgcgtgtctcacttctttatttgcttgggatttgttttgcaccctctctcgcggactcgtttttatttctaacgctaacccggcttgtagttgtgtttatatttgtaaatttcagtttcgccctattcacccccccctagctctgcgttgttaccactgctgcgactatcacaaggtatcacccaccaagagtgcagttgggatcaacaagctagcccctcgttacattaccatgataggcatgtggaccgtggcatataagctgactatcaccagccgcgggcgcgcactgcacggacg

SEQ ID NO: 134048 - DNA, 501 bp, Zea mays
  unsure (1)..(501): unsure at all n locations
  Clone ID: MRT4577_53738C.1
tatattcggcacgaggaccctgcctctgcaagacctagattccggaattgaactgtgggggaggctcacgtacaatgctgacttgaccggccggggaaggtacagtggcataatgcataccctctgatatttatgtggaataaaggagctcgggacaactgcacaatgctgttactcagcgctcatggcgtactagcttcctttttattttaatgccccaagaagccgaaactccacctacaggatacatcccactcattttgttattgcaaattcatgctgcatttgcggaagcctttcctttttttcttcctgccgtggctttctgctctctctaaatgaccatagaggtgagcacaggagggaccttagttttggcagaaccaaagttctcagccttcctcttacaggaactaaactatttctaataaactgtgtaccgcagtcttaaaagntactttgcgaggctgcttcagctggatgtgcaaaccaaattgtgca

SEQ ID NO: 134049 - DNA, 200 bp, Zea mays
  unsure (1)..(200): unsure at all n locations
  Clone ID: MRT4577_53739C.1
tttttatcncnntgcgtcaatacaaactctgggggggatatattgaaacaaacgtctgagctgcttctattatcaaacagggagatggattatagtactgttaactgcctcaactaggatacaaggcctaaactgcaaccccgatgaacgggcttctacctaaagccacgaagaaagtataaatcaaaccctaaccatgc

SEQ ID NO: 134050 - DNA, 303 bp, Zea mays
  Clone ID: MRT4577_5373C.1
aattcggcacgaggcgagcatttcctcccccggccgggacggggctcatccacgctcggggacgggatggatgtcttcttcctctaaccgtacccacggcctcttgccagagaatcatcccatatcttcgtcccgtccgtccatatgcatgatccatcgtctcctaggctagggccggtgatgtttacacgagaggagggggagaggaattctagccagctgcgcatgtgatcgttgtcatgccaaccgtaccgcaagattctccgtccagccgccagaaccaagaaacccttttaaagccaa

SEQ ID NO: 134051 - DNA, 763 bp, Zea mays
  Clone ID: MRT4577_53740C.1
cccactcgtccggctgtgcgaacgatgagagagaaaagagagacggaggcaagtaatggcaggaggaaccttcttttcctgactccctgtggctgcagagtgcccatcatttgtccctgatccttgtgcttcgttcctgttgcgctttccttgggccatcggtagactgagccgtcgcgaagccttcccgttcccacaaggggtgtggcgtggagcgagcctcgccaccactgggctcctccggcgacctcctccctccagtcacaggttgagcaatccaagctgagatggaaggccatgtagcaatggggtggaaggatcctaatccaggccaagaatcttccatggtcttccaatccagagctgttcggccagacaccgtagaggggcacagcaacgaggacgttgaagccggatttgagaagcatggcttgtcagccgccttaaactcggctcagcacgaaagccgatcactgccactgaccccacagtttggccagaacttcaattctggaagcagccttgcccggaggatgcaggcaagagccggattcaaggtgccggaactgaacatgcctttcaacacggtagctggagaagataggttaagggcacggagcttcattggcctaccttaagacccccccctggcttgagcccaacaacgctgctggaggcaccttgtctttatttcgaaaggcctgggacaagcctcaccaacccaccgggaagcttttttttgtttgggagcacaaatgacaac

SEQ ID NO: 134052 - DNA, 761 bp, Zea mays
  unsure (1)..(761): unsure at all n locations
  Clone ID: MRT4577_53741C.1
ggtacccatcggggcctgccgggactcgacaccgcacggcctcaagcagaggaagctttccgcccgggaacgccatggggtcgcttcctctccttgctgcctgctgctccctcctgctcacggtcgcagctcctgcccgggacagcactaccagcgtctgcccttcgcaaatcagcgtcccttgcattttacggcgttcgcaaagactacggtcttcttcaggcaatcaaaagagtcaagtgtcagttgacgatatatcgcaaattaagaaccaaccaacagactggtctcaaagcagattcagattctaaagttaaaggtggagctcaaccaaaacaaacacttacttataagggtgcagggcgacggcggtgcggttactgctgccagatttgcgcaatgattttccacatggatatcatattgtgtcctgcgttcatgtgagcgcagttgttcccacacctgcagttcagctgccacggaaccacagcaaaggtgcttgtaccatcgatccagtgctagcttggatagcgagaaggggcgtgtggattgtggaaggctggcagtagtagatggcgtgtcaaattaatgtcgctcgatcgtgggtccattnttttttcttgtttaaggctggctaattaaaaattatgatgttgtgtgtactcctaacgaaccactctttgtccttcgtcttgtcctgcacgataaggtncgggaagagacccggcccgtgcattagtttcatatattttatttttcag

SEQ ID NO: 134053 - DNA, 2349 bp, Zea mays
  Clone ID: MRT4577_53742C.1
cacacacgcaaacatcatagaagaacagaacctttctctttctcttatataacattgggttcctcgaggccgggccgggactcgacaccgcacggcctcaagcagaggaagctttccgcccgggaacgccatggggtcgcttcctctccttgctgcctgctgctccctcctgctcacggtcgcagctcctgcccgggacagcactaccagcgtctgcgcttcgcaaatcggcgatttcccgcaccggaacagttcgggcctccacctgacgctgcaccacccgcagagcccctgctcgccggcgccgctcccgtccgacctccccttctccacagtcctcacccacgacgatgcgcgcgtcgcccacctcgcgtcgcgactcgccgccagtgatccgccgtcccgccgtccgacatcactccgcaagcagaagaaggccgccggtggtgcttccggcggccaccacctcgacgacgactccctggcctccgtgcctctctcgcccggaacgtcagtgggcgtggggaactacgttacccagctcggcctcggcacgccgtccacctcctacgccatggtagtcgacacgggctcctcgctcacctggctgcagtgctcgccttgcgtcgtgtcgtgccaccgccaggtggggccgctcttcgaccccagggcctccagcacctacacctctgtgcggctgctcgggcgtcgcagtgcgacgagctccaggccgccacgctcaacccgtccgcctgctccgcctcaaacgtctgcatctaccaggccagctacggcgacaggctccttctccgtcggctacctcagcacggacaccgtctccttcggctccaccagctacccgagcttctactacggctgcggccaggacaatgaggggctcttcggccgctcggcggggctcatcggcctcgcgcgcaacaagctctcgctgctctaccagctcgcgcccagcctcggctactccttctcctattgcctcccgacggctgcgtcaacggggtatctctccatcgggccctacaacacggggcactactactcgtacacgcccatggcctcgagctctctcgacgcctcgctctacttcatcaccctgtccgggatgtcggtcggcgggagcccactcgcggtctcgccgtcggagtacagaagcctgcccacgatcatagactcgggcacggtgatcacgcgcctgccgacggctgtgcacacggcgctcagcaaggcggtggcccaggccatggcaggggcgcagcgcgcaccggccttctccatcctggacacgtgcttcgagggccaggcgtcgcagctgcgcgtgcccaccgtggccatggcgttcgcgggcggcgcctccatgaagctgacgacgcggaacgtcctcatagacgtcgacgactccacgacgtgcttggcgtttgcgcccaccgacagcacggccatcatcggcaacacgcagcagcagacgttcagcgtcatctacgacgtcgcgcaatccaggatcggcttctcggccggaggatgcagctgaatagctgatgggtgaaaagtgaaaactgattattgagctctatggagtgggcagctcaagcttggtaatagaaaatgcgtacaaaacacaagtaaattcgctgaagtttatgaaatggtaatgttacaagctattgtattgttgattttacactcctggcaaattgtacatccttttacaggtaaattggagtgtctagatttttacatgtgtacggtcaaaaacagaaatctattttggatgatttggtctaaaaaaaaaaaaaaaaaagcggccttatcattatgataataacaagtgatatattgccgttgcccgagacccaacccataaattaaaaccttattcccggcgtagggtatttattgtattgttcaggccagaaaaatatgtggaaagtgggtctttaacttaattcggaagaagcatatagcactccaaaaaaaaaaaaaaagattcatattcatcccatagcccacagatagcatgtagtagctgttcatgcatgttattcttttggcaagtcctggtcaggaagtactatttactgtgtgtaggacgaataaactgaagtgatgtgtatgtttctgatttctttcgtacttgcaaccccgggcccacgtggtttttttactcccttctatatatactgtggaaaatattgtaacccacgcacaagacacacactcctatgctatatatgttctatgcacaagacacactttgttaacgaacaaagagatcgatgatgcaaatatttatcactatataaaaagaaaaaaaaaaaaaaaaaagcggcc

SEQ ID NO: 134054 - DNA, 532 bp, Zea mays
  Clone ID: MRT4577_53743C.1
gggaacaccccaggatggggggaaacttttccggccattttcaggggggggcccacggggggggtccaatttacataaggcccccggggattggagttaaaacttccaaatgggccccaatcacataaatagggggggggggcccatttccttttttcaataaaaacaaggaaaggtgccccccgggttttgggaaaggggttcaaaatgggggaaacaactttattggggttacttgaaaaaaccgccctgaaacgataacagggcctacagcagccccttttttgggggtttgcaaactaaaaaggggtggcaagctaaaactgggggtcaggtttcggccacaacccgggggatggcatttcttccctaggagcccccgccttaaaaggggaaggcccttttttttaacccccaacattttttgccttgagggggtggaaaaaaacccccccaggagggggattttgaaaaaccacccttgtttgggctattacttggggcaaattttgttgaagggaagggggaacct

SEQ ID NO: 134055 - DNA, 189 bp, Zea mays
  Clone ID: MRT4577_53744C.1
agcgatccgggcagacgatactgcagcaggctgatgtgctgcgggtgacctggaacgagcctatgcgtttgagccggcatcacgctttgacgatccgtatcactaagtgcgcagcgtgtattgcatctgatccgatggctcacgtactaccctcatatcagacgctatcagtataacaacgtgagtggt

SEQ ID NO: 134056 - DNA, 235 bp, Zea mays
  unsure (1)..(235): unsure at all n locations
  Clone ID: MRT4577_53745C.1
attgcacccacatgaagtattctaatggtggcatttagaatggtggtggtggtgctggacngaagaatctctttgtagcgtccttaatctttgntagggatgctgaggctggatttattaacgccaatacacctgtagctaaggttaaaccatcggacttacgnaaagctgaagagcacacatacacattgagcgtgnagaacgccgaggccacctatccctggtgtacagaaga

SEQ ID NO: 134057 - DNA, 349 bp, Zea mays
  Clone ID: MRT4577_53746C.1
gggggaggataggggccctttagtttcttaatatgggggcaagaaaacccggggcttaattggtccctggtggtgctttggggggggggaatttgctttgaacccatatccctccttgttttgacgcaaaaggggggaacatgttttttccattttcaacaacaacaaaaaaccgcctttggatcgcaccctcccaccaagaatgctcctttttccggaggcaagggatccatggggggaagatgtttatttatttccgcttgggctggggataactttggtttaaaaacatccccggggcccaactccaggaaggaaaaaagcctggaaatggctttgggggtggggg

SEQ ID NO: 134058 - DNA, 294 bp, Zea mays
  Clone ID: MRT4577_53747C.1
ataatctaacataatgtttggctgatcacccatgctggctaaaggctggttttggattactaatcaaagaaaaatgcagtgccgcttcacattttaacaatgatcttagatgcttgcggcgcctagcatgagatttatcctgtctaccttcgcgagtctgatgtggatgacgtggtggcctataattgtcgacctatctgagaaaggtctgacatctgattattgcacactcatagcatagggatctctaaaactacaataaaaacagatggcctcattgggacagcttagcta

SEQ ID NO: 134059 - DNA, 386 bp, Zea mays
  Clone ID: MRT4577_53748C.1
tagtaaatcttctaggcaaacaactgctagagactttgtgaaacactataatgggcgtgtagagaagttaattgaggtctttaaaactggggtatcctctgttgcccttacctctgacatttggtctggaaaggctaaagaggattacatttctgttgttgctcactttgtgaaccctaattgggagttagagaaaaggttgcttggtctaaggccaattgaagacgaccatactggtaagaacattgctgaacgtgtttccttggtggtagatgagtatggcttaactgataagatctttgcaattactcttgacaatgcttcatctaacaaaactgccatgtcatatcttatacctttgttctctagttaccttggcatacctg

SEQ ID NO: 134060 - DNA, 1105 bp, Zea mays
  Clone ID: MRT4577_53749C.1
ggtaccccccgggtcggccgggaactatgtagctagcagctgcatccgttcccctcacatcaggtgagactagtaaagatagactaaacacggcggccgggccgcgctaccatgcttgccgccggcggcctccgccgtcatcaatcttgctcatgctcggcaggcagccacatatctgagtttgtcctgagcagacagatatctgagttactaagatatatacaagcgtgtgttattcctatttctatcgcccgtacgtacgtgttcgcacgcacgcggtacgttgcgacagtgaccaagggggcttctgtcatgaaaacggcgggaaataagcaatgatgaagtacaagtccttctgtcgtcgtcctcagctaatagcctgcaggcgatacgccgcccacgagcccagcagggcaatattgtctggatcggaggatatatggtccttttgctgcagagcgtgctatatattcatatttctatggcccgaggagtttgccgtggaacgtcgcgacagtgatcgaccaagagatcgaccttctgtgtgccatgcatgaaaacggcggaaaagcaatgaaaaagggaaggagaagaaggaggaggacatgacggagaaggaagcaccacggtcctttctcgctcgccttcctcctctagatcggtcagcggacattggaaatgaggagaagaagcgcagctgcgtcacgcatcagatccagtcctcacagtccctgctgatccagtacgaaatccgccttccccctctccccagtcttttgtttcatactgtgccttctaatttatttctggtggagcttatgggtggagagaaacaacagaatcttcaagggtcaacagagaacgacagagcaagttgtgcagatggtgaaagattttgtgggtagaggtatggcctgttagtagtgtccgggggactggtcagggggttagttttttccccccttttctggtgccagtgtcatagctaggtcttgcttggctagttgttttttgtgctggcgccagctttggtgccagtttttgtacagtgtttgctcttttcgtctaatatattggaagggcaattcttgtgcctttccctttc

SEQ ID NO: 134061 - DNA, 521 bp, Zea mays
  Clone ID: MRT4577_5374C.1
aaaaggcatagacccacctggacccaaaacccacagacgcaacaaaaacaagaacaagaagaaaggacaaaaaaaaaaaaaaatccaaaaagggcaaaaggccaaggcccagactgaaacaagaaacaggaaaaaaaaaaaaacgaaagcggaaaggcccgaaaacaaaaaggaaaaggaaagaaccccgaggccaaagccccaaaaggcaaaagcccgaaagggacgaaaggggggaaggggagggggaagaaaaagaaacgagcggaagctggagccggcgccaacgggacaagcacaagaacaactggcaaaaacgtggaggggccacaggctgatttgggggggcaagggcaaagggaaaaaaaagaacctggaaatgtcactgccaggggggggggggaaagggcaaaagggaaaaaggggaagggggaaatgtgggcccgggggccggggtgcccggaaccgggggggaggccgttaaccggggtcccggggtcggccgggggaaagggggaaaa

SEQ ID NO: 134062 - DNA, 273 bp, Zea mays
  Clone ID: MRT4577_53750C.1
agccttcggccaccccttctatttgaaaatttgtatttttgcccacttcaaccctattgggtgggttaaagagattgtggcatggatcttgctagcctgggagcggattctcaatcatgtgttgatgtccattcttaccattggacatctgtcaacattagtggccgtgatgaaattttaacctcttcctaaattggatttaagaaaaagagcaaatcttgataccgaatataagatttagatgccttcctttgtggaattccaaaccaaata

SEQ ID NO: 134063 - DNA, 776 bp, Zea mays
  unsure (1)..(776): unsure at all n locations
  Clone ID: MRT4577_53751C.1
atgttttctttctatatatgacctccttccatgcatgcatgatgaactcatttcctccattaattttggtcagatctgagtttgtcctgagcagacagatatctgagttactaagatatatacaaggtagaccagctgtttcttaacgtacgagttattattaacaacgatgagttctactagtaatctgtagtatgtattaaaactgacagagacctttttgtgcagcgtgtgttattcctatttctatcgcccgtacgtacgtgttcgcacgcacgcggtacgttgcgacagtgaccaagggggcttctgtcatgaaaacggcgggaaataagcaatgatgaactacaagtccttctgtcgtcgtcctcagctagctagcctgcaggcgatacgccgcccacgagccagcagggcaatattgtctctggatcggaggatatatggtccttttgctgcagagcgtgctatatattcatatttctatggcccgaggatcggagcttgccgtggaacgtcgcgacagtgaccaagagatcgaccttctgtgtgccatgcatgaaaacggcggaaaagcaatgaaaaagggaaggagaagaaggaggaggacatgacggagaaggaagcaccacggtcctttctcgctcgccttcctcctctagatcggtcagcggacattggaaatgangagaagaagcgcagctgcgtcacgcatcagatccagtcctcacagtcccctgctgatccagtacgaaatccgccttccccctcttccc

SEQ ID NO: 134064 - DNA, 316 bp, Zea mays
  Clone ID: MRT4577_53752C.1
gtccgtaaagctgaaatgtgctttgaaccactgctttggcatttgacttgcttgggaagcccactggctaaggctccagtgtatttttcttctggttattttcctttgctgcttttcattttgtagcatgtgtccttaaggagggagaaaaaatgattcttctgaaaatactcgtgtgttgacaatgtaatgaatgtgtcataagcacagtgcctgggacaccaactcaacaaaggttaattcttgccacccatgactcagacatttttgtccctttaacatcaaagttgaaagaagtaaattattcttttgaaac

SEQ ID NO: 134065 - DNA, 488 bp, Zea mays
  Clone ID: MRT4577_53753C.1
aaaaactccacaggaaaaccaggagggttaaaataggcaaccaaggacccacaagttacaacaggcccacgggggcccccacccaaaaaacaaacgcgggacccggggggaaacgggacaaaaaaaaaaggggggggggcaggcaaagcaccaaaaaaggggccgggttcccccacccaaacctggggacgggaaacccaggacccggtggggggtggggaaaaaaaaggcccggcaagggggggaaccccggccggaaccccgcgagggacaactcccaaaacacggggggggggaccaagggcacccaaccgggggcccaaactgggggaaccaagggggaaaccagccccgggggaaaaatggtaaagggtgaacactgccacacaagggaccccccgaaagaaaaaacggaaaagccgggggggccaaaaaagggggccaccccggggtcccgggggggggatcactgcccgtttaaaaggggg

SEQ ID NO: 134066 - DNA, 229 bp, Zea mays
  Clone ID: MRT4577_53754C.1
tggcacggggggagagggacaccttcgtctgctgctgccgctccccctgctgcggcgccccctaatttgattgtgatgaagacgagtggtctccgcccgcgacgagcggagattcctatgcgggctctctccgctcctggtcgccgatcccagagttctctaagcgtgagttcatcggggatggctcctgtgactgacctttctgctggaggaggggatctatctcgat

SEQ ID NO: 134067 - DNA, 1050 bp, Zea mays
  Clone ID: MRT4577_53755C.1
agcatagtagcaattgaagctacggcatcattcttgttcagattaacaagtatggacatcaaaccaaccgaaccatgaattctttaggacatcaccactctttcctcttgaagcaatagacccaaaaaaaatttactggcaatgtgggtagagatcaggtgatctaacataaaatagaatcctcactcgggaccttcagacagaatttgaaatggaatagaagcccaaatacacagtgaaaacgagtaaagagcaacgctaatactgacaatatacaattcttaactgctgaaaagcaataactaaatcacactagagttatccacatgtgaaatgaaaacaatcacatgatagatttatttaacacagataaccaaattatccaatgcaaggatgggtctaacaaacaaacagagcccgagacatgtggcacaagatccccattgtaaagcctaaatagcaacagaacaagatgcagatacaacttagatgcctgcctccagggttaaatatcagtataaaactatatgcatgatacataatcaagtttacaaattacaacacaacaactttaacaatctatgaacaaacaagtactacacccaaacaccacaagattctttttacagccatgctaagcagctagcgcaactatcaactgaacagagacaggcttctgcatctatcagattggttaattatagggaaaattagaactatcattatagtcgttcaaaattccaaatctaataattcagtagtccatataaataaactctacagtgtgccccagccaaactgggcagacctcatgacaccgttcttccatagcaaatggaagctaagtagagatttttcccccatttgtccttcacatgctggctggggaaagcagacgttcttagagtttcctgggtttcatcagcatgtttccttttggggatgctcaagataaacgctgcctgatcccatgtagctgcagtagccgtgatgcgaaatccattatcccatcgtcgatggataccctcacttggatacacgaagtcaagc

SEQ ID NO: 134068 - DNA, 1184 bp, Zea mays
  Clone ID: MRT4577_53756C.1
ccggccgggaacggcacaacctcagtcctcagcccggcgagccgccgcccgcatcgttcaacccccgtgcccggccgccgtttacctaccgctcgcacgcgcgcgtcgctccttttatcacctctcaagtcccagcaggatcggcccccgcgcagcttcgcccccacatctatcgacccgaattctccactcaatggacccacccaagccgccgtcctcggtcgcctcgtcgtcggggccggagacgccgaacccgcacgccttcacctgcgagctcccgcactcgatctacgcgctcgccttctcccccgtcgcgcccgtcctcgcctccggcagcttcctcgaggacctccacaaccgcgtctccctgctctccttcgaccccgtccgcccctccgccgcctccttccgcgccctcccggcgctctccttcgaccacccttacccacccaccaagctccagttcaacccccgcgccgccgcgccgtccctcctcgcctcctccgccgacacgctccgcatctggcacaccccgctcgacgacctctccgacaccgcccccgcgcccgagctccgctccgttctcgacaaccgcaaggcctcctccgagttctgcgcacccctcacctccttcgattggaacgaggtcgagccccgccgtatcgggaccgcctccatcgacaccacctgcaccgtctgggacatcgatcgcggggtcgtggagacgcagctcatcgcgcacgacaaggccgtgcacgacatcgcctggggggaggccggggtcttcgcctccgtatcggccgacggctccgtccgcgtcttcgaccttcgggacaaggagcactccaccatcgtctacgagagcccccgccccgacacgccgctactaaggctggcgtggaaccgctctgacctccgctatatggccgcgctgctcatggacagcagcgccgtcgtcgtgctcgacatacgtgcgcccggggtgccggtggccgagctgcaccggcaccgggcgtgcgccaacgcagtcgcgtgggcgccgcaagccactaggcacctctgttcggctggggacgacgggcaagcattgatctgggaactgcctgagacggcggcggctgtacccgccgaggggattgatcctgtgctagtgtacgatgcaggcgccgaaataaaccaacttc

SEQ ID NO: 134069 - DNA, 330 bp, Zea mays
  Clone ID: MRT4577_53757C.1
gagctcactagttggcggccgccctcttttatgtttgggcggacatatacaaaaccctgtgggtctaaatacggctaatgaatatacagcacttcacactttgatgacacaaatacaccatgctggttctcataatccgatacaagaggcgtgcaagaggctaaggcctatctctatatcgatgctctatgcaatgtggccgctaggatacaagcaccgaacaggaacaccttaccagagactgtaaaaatcacttagacgtacatgacccttacgctcttgggtgatcctgaacacctcaccggccgtcacccctccgggcacactcta

SEQ ID NO: 134070 - DNA, 417 bp, Zea mays
  Clone ID: MRT4577_53758C.1
tcgtacagatattttgggtagcgaaaagtgctgctgtactgcagggaaaaaaaatctgcgcgtgtgcaaactactttacggttccttccaaaaaaaaaaaaaaaaaaaaaaaaaaaaaaaaaaaaaaaaaaaaaaaaaaaaaaaaaaaaaaaaaaaaaaaaaaaaaggacgaaaaaaaaaaaaaaaaaaaaatgggggggccgttttaaagaacccaagtttacttccccgggcttgcaaaaaaaaaatttttttataggggcaccaaaattaaattaatgggccaacctttaaaaaccccaaaattggaaaaaccctggccttccccaattaaatcgcttgggaaaaaatccacttttccccacctggcgaaataacaaaaaggcccgcaccaataacctttaaaaaaaattgccc

SEQ ID NO: 134071 - DNA, 194 bp, Zea mays
  Clone ID: MRT4577_53759C.1
gggtcaaacccaaatttaaggtcttaaattttttttttaacgggattcaaccgaattcaaggaatgggaggcaggaggcttttccttcgattcttctttaattttactggaagttgtaggcgaagaaagggagcacggaggggccccaaacggggccgacaggcgggaacacggccccagaggcgctcgtgggg

SEQ ID NO: 134072 - DNA, 376 bp, Zea mays
  Clone ID: MRT4577_5375C.1
gagaaagaaaagtactattgaggttctagatagataacgatgtcaaatcatattccagaaatattatttattacaaaaagtaacaattatgtgctatagtgctggcgcatctaaactggacgagaacaagctttatagatatctcgtgagttctacatgcacttgttcctgatcaaagcaaattcactgtatgtcgcatgcacttgttcctgatcaaagcaaattcactggatgtcgctgaccacttttcttgaatcgactgaagctacaaatcttgggtccaatcaacaaataaataagtgcttcaagcaaggtcatctactccatgtgcgctggaagaatttgatgccaaaatctacaaccgtgggtacatgga

SEQ ID NO: 134073 - DNA, 280 bp, Zea mays
  Clone ID: MRT4577_53760C.1
gctcggaattcggctcgagatgtactgatgcgtttctctgccgcattgggtactatgggaagtcaatggaagacttgaccctcgctcggctccctgctgtgggcgagaggggattatgaactgatggcccaggcaccacagccttctaatcaggcgcaagtgacattcccacttctaggcgcgacttacggatggagccattcattatgtggccaatatcaggccaagctacaagactgtgagccttaagatgagcatcaaggcctgagtcggatgcatt

SEQ ID NO: 134074 - DNA, 280 bp, Zea mays
  Clone ID: MRT4577_53761C.1
aaggggaagggttctttggtgaagggggaccaggcaacgtgaccttggttcacaaacccctatgaaaagcaactaagggggggggcaaaaatcaaaacaggccaaaaggccaggtaaaagggatgcgggggaggttcttcattggtaggggacaccttaaggaaggccgaagggggggaacgtgcaaaaggaagaacaagcacatgtaatagaaaagacggggggagggaaggaaacttttcctgcaaacaacgctcgtggagaactcccctgataaaaa

SEQ ID NO: 134075 - DNA, 818 bp, Zea mays
  unsure (1)..(818): unsure at all n locations
  Clone ID: MRT4577_53762C.1
ccggccgggaattcaattgtattagcaagatacatcatcaggcccaatttcccctcaaccatcacgtcatttgttttttggttcaaaccttgttattgatatctacttggaggtagattccattttctcctccattgatcatctgcaatcatgcatctttatcaaattgctttcttttcggtccttctggacatttgcgctggcgtcccagtccaagacagtcctcgtgagcgactgctcaagggccttgggatcccagacaattaccgtggcgtgactggtggcaagaagatccccttcactcctggtgacagagatccctacgactcacccgtcgactctgtcggggacaagcttgaccctcttccctggcgtaatggtcttggagcttctgttcttggaccttggaatgaggcgcgatcgcgtcagaacccagatctcgtcagaccacctagcactgaccatggcaatcttgccaacatgcgatggagttttgccgactcccatatccgaattgaggaaggcggatggactcgtcaaacaaccattcgcgagcttccaacaagtattgagcttgctggtgtgaacatgcgtcttggcgaaggtgtctaccgtgagcttcactggcacaaggaggctgagtgggcttatgtccttgacggagaggttcgagtgacagctctggactacgagggtggcaacttcattgacgacctcaagaagggagatctatggtactttcccagcggagtccctcactcccntcagggtctcangccaaacggtactgagtttctcctcatcttttgatgatggac

SEQ ID NO: 134076 - DNA, 348 bp, Zea mays
  Clone ID: MRT4577_53763C.1
gacccacgcgtacgctccctcttcaatagggtatcatcatacacttcttaagagaccttattacatccagggcggggtcctatttgctatcaatggactgaaccaccgcggatactatagctagcacgactatgcatacctggagcaaggacagctcgcttccattgcacgtgccggcaggttcatgttcttggaagccacgagcctgctatacctgtgccctcctcctgcgctcgcgggacaccctggcccgcatgtggcgtaactacctcccttgactggcaaactatcctgaaaccactacagcccgtaccaaacaattgctggccatcagcaactagagaaaca

SEQ ID NO: 134077 - DNA, 362 bp, Zea mays
  Clone ID: MRT4577_53764C.1
gacgacgatcccttgggcttgggcaggacgacggagagctgggccctctcggtgtccagcctggcccggatggtgccggcgtcgcagctcctgggcaccgggaccaccttgaggaagcgcgcccaccggccgccgtcggcccggcgctccccggtgaccttcagcctgggcgcgccgtcgggctggcgcccgccggtggccttcagcttcttccgccgggcgctgtacacgaccttcagaaacataaggcgcatgcagccgcgcaggcgacgcgctctctggtgcgacgtgcggtctcgccgtctcggcagtgttgccttacctgacacgtcgacgacgagggtgtccggctgcttcgtgct

SEQ ID NO: 134078 - DNA, 514 bp, Zea mays
  unsure (1)..(514): unsure at all n locations
  Clone ID: MRT4577_53765C.1
ttttagacaacagtaacaccattcacattaaataacatccaaccaaagacatatcatccaatcctctttaagtattagtccatagtcatacatcaattacgatacacacaacacaaacccataaaagtagtaagtagggcacaactcagaacacaaatatctgtttcccacatgcgtcctacactacactgctgtaactatcccggtggaaacttgtgaacgagtgtgcccgagccaaccgcaccaagttacctcgatctctcacagccagtgaaaaaaatttcttcattttctctctaacatgactaggatacaaaaagaggaagcaagtttgggccccatatcagcgtgcactcgtttttgggacccttatctggaataaccaaccacacccttctcattaaaatggttcactcaccatgctatggtgtgagtgctactttctctttagtctaagacacggactaatgaataatgattcatagntcctttattgcgctggatacactgaaca

SEQ ID NO: 134079 - DNA, 351 bp, Zea mays
  Clone ID: MRT4577_53766C.1
ctgcttctggaatcaggaaaggagatcaccacttcactcaagaaggcaccctccctggccacgccttttccttgagatgacgacgacgatgaagaagaagcagcagcagcagctcctcctcctcctttctctcatgtttctcgttgctgtcacagcagccgctgttgctgccgatccacatccacagcaggtggtactacgcctactctcctcttctcctcggcatcatccaaactgaatcagattgaagaatcatcaggtcattaacatgttcagtgtgtgtccagcaggtgcaagtgcagcagcagcagcaagcacagatgaggattaacagggccaccagatcccttc

SEQ ID NO: 134080 - DNA, 392 bp, Zea mays
  Clone ID: MRT4577_53767C.1
gggtggacctcacgcgtccgcggactcgtggggtaaatttcttctgagtctgctgccactattggtccatgttgctgcacagcttgttaacttggggacccttctaaggatggaatgcgttgattattccctgcacacccacaagacagctggacatatataccattgtgaagatgctccctcttgaaagtacgcacttctaagaggagtacaacctgttcttggagggtgactcttacgaatgctatgctgaacccatctacctcttgctggtatctaccaaaagtgggatctgggggcccggtgtcaaacagaacatttttaaattcttggttgacacagaagaacggcgttgccgaggcgccatgaattaaacatcttttgcgctgagc

SEQ ID NO: 134081 - DNA, 393 bp, Zea mays
  unsure (1)..(393): unsure at all n locations
  Clone ID: MRT4577_53768C.1
gttcttcccttgggtcccgcagctgcaatccctttccttcctcgggggacctagaaactcgtttttcaaaacccccatgccaactggccctggtctgtgtgtgctttagttgcgtccatgaccatgaatgagaatgaacctgtggctggttggttggctggttggctggcatggcatgcangggagttcgcggcgttcctgacgggggcgaacctgatcatggagtacgtcttatccaatgccgctgtggtgcgcagcttcacggcgtacctcggcaaggcggtgggcgtggacgcgcccagcaagtggaggatccccgtgccgggcctgccccaggggttcaaccaggtgggaccttgtgtattataatgtatctgccaacatctgatgctc

SEQ ID NO: 134082 - DNA, 306 bp, Zea mays
  Clone ID: MRT4577_53769C.1
gggggaaaacttttaaaaacatttagggagataaaaaaaatgacatgaaacatttattgagagacttgtcattttgatactatatgagagaccatttctccatgctggacaaaaagggaagttacaagaaaattatttaaacctggtgtggatattaacgggcttatttacacgctttttaaaaaaaaacttgataatgccggggccagacctgtggtctgggggaaattccggttttttgggcccgcctttaactcctggtcaatgccggcctagtcctccttaatgaaccaaatttttttaaag

SEQ ID NO: 134083 - DNA, 437 bp, Zea mays
  Clone ID: MRT4577_5376C.1
acgcggacgcgtggggtggccgctcgcgatctagaactagagcgcctgtgtggaaggagagcaggtgcccggcctcaaccccccgttcgatctcgcctgctgcttgttcccgagtgcctgttcccgtcctagtttacatagggccgctctcttccctggattgactgccgccgccggtggcggccggtcttagcgtcatcagagatcccgtctccagcagcagccatctgggctgcccaccatcaccacgtcgtcgtcaaacatcctccctctttagaccatattgccaatgtcgtcggatgctgttgcaaggagcaagtcagcgaggagctaagctttgccttcggctcccgtccttctcgaagcaaccgtccgggtctccgagctttcaagactgacgaggtcatccacatatttctcattcatcacctgcgaag

SEQ ID NO: 134084 - DNA, 574 bp, Zea mays
  Clone ID: MRT4577_53770C.1
aaaaacaccataaatccattatttgctgtttccggataaacatggttcttcagttacagaacaaattccatgcctttgctatttacaggtgcttgtatgtgtattgaaatgctacatgtaagattccaatgcagaagtgcgactctttggactaaaaagctcatcacaactagcatggggggtttgtggccactacattatagttctcatgagtacattcccatccaccattacttgtttggaaaataaatacatctacgccgttgtctcgaacattatatacctaatggcatattgttgaatccaatatacaacacatcatcactgagaaatgggaatcacctgtgccttcacagcatcatttccagtacaccagttttgaaaatctggtgacagttgaagaagaagctgcttgtgtgttagtcttaggattgtcaccaaaacttgaggtttgctagtcttgagaaacatatgttcttgtagaaattatccgtgtattcgtgcgaggtatcacttgcagattctagacattctcctgtatttctgatggcagacacctgtgcataatcatctt

SEQ ID NO: 134085 - DNA, 1224 bp, Zea mays
  Clone ID: MRT4577_53771C.1
ggcaacgataccaccaccgcggccgctagtgctctcctcctcggctcttcacgggcagggccctctttctcgctagacctcaacgataccaccaccgctagcgctagtgctctactgctctgctctttagggagagagagacgggagtgagagagcagagatggcagctgagagctagactgagcacgcacgtaacgtaacaggctcttctcccatctccgtctctctctctctctctccgctgctcacagaatcacacaggcaagagagagagagcgcagaagatgatgtggtcgcacgagccggcagcggagcagaaggcggcggcctcggcgccgcctacccggcagaggagctccgtagccaagctgacgacggcctcctcgtccttggccaacctcctctccgccttcgtcagcgcgaacaactcctccccagacccgaggccgccgccgccgaggcggagcttcgacgagcgcggcgccgtcgggctcggcatcgtcgcggccatgggccacggggccgagccgatcgccatcggcgccgcggccaggcggcgcgcgcgcgaggacgacgagagctacacgtgcgtcatcaagcacgtggccggcgccgggcggcgccagcgtccgcaagcgggtgtactttgggttccgcgacggcggcggtggatggctcgtggaggccgacgacgcggcgccgacgccggcgcccgacttcctcagccggtgctgcctctgtgacaagaggcttgatgggctcgatatctacatgtacagaggggagaaagccttctgcagctcagagtgccgatgccagcagatgctactggacgaccgtgctgccaaatgtggatcatccgaagccctcatcaggtccggcgactactccgtgtcgccgcactccgccccgatggccttctccccgagcgtcgcagcagcctagtagtctactcgccctcgatcgagctgctccgatccgctatgactctgtgagcaataatgcaaaggagtctagctagaagaggctataatctaaacgggtctcgtttaataaacaaacggatcatatatatgtataccgagtaacgtataagatgcttcttaattttaactatgacatgaataagagcgaggaagacagttttgtgtgactatgcagtaacagcaagatgttaaacactttaatcgtgcttgaattttatttatttttattcttgttgca

SEQ ID NO: 134086 - DNA, 2252 bp, Zea mays
  Clone ID: MRT4577_53772C.1
gctgaaggttcctagttcaatgttggtttcggagatgaatgacagtgctgtcgaagctgcgcctatagaagaggatcatgctcaagacatgtctgaaggtgaggacggtgagtttgcagaagagatttctgaagacgaggatggtgagtttgcagcctctgatttgaatgatgaagatggtgatgaaatggataacacccaaagacaaccgtctcacatgcatgttcatgcatctgaatctatcgaggaacctgtccatagacagtcccagctcagcaatgctgaagagggaatggaaactggcattgcacacgtggatgcatatatggtagagccattggcagagaacaatgttttctctgaaacaaggtatgaaatggaggctccacaaaatggagctgaaactcctgttgttgatctttacagagatgcagaagagcaaccattggcagagaataatgattgctccgaagcagagaatgagatgaacaagagtgagtttgaaactggtgttggcaatcttgatagagatgaacaagagcaactattggcagagaataataatggctctgaagtaaggtatgacatggaggctccacaaagtgaggttgaaactggtgttggcagtcttaatagagatggcgaagagcagctgttgacagtgactgatggttactctgaattaagacatgaaacagggactccacaaactgaagttgaaactgttattgatgatatcagtagggatgagcaagagctgccagcttggtacaaaatttttgatctcaacgtcattgaaactccactgggctgtgaggtttctgagatttcttgtggtcatccagcagatggtctttgtgattctgtgcctgatttagttggtctggtgaaccaacaagcaaacaatgatacctctgaaattcaaggtcaagatggtcatgcaggggccaatcaagtgttagaagatgagtctgatttgaatagctatgatctgaacaatgaagctgatgaagatgcacaggatgatactttagaaaatcaagttcaagacgagaatgtagaggataatcacttactggaggatgggcatgatttgacgaggtatgttgtgaacaatgaggctggtgagcatgcacatgataatcacctgatgaaaaatgcggaaatacttctaaatcatagtatggttgcacgtatttcagaaaattgccatatgaacaatgagaaaatgcttctaaagcaaaatgtggatgagcaacagatggagaacgagcagatgcttatagatcaggtcactagtgttcaagttttggatattcaccatgtgcacgatgaacagttactggtaggtcatgctgcagatgatcatcaccaaatggaaccaaatcccatggctttttctttgggtgttcatgatctggataactactatctgagcagcaagcaaatacttctgtataatgatgtaggaggtatacaccatttgaaggatgtgcaaattattttagatgaggctgcagatggacaagctagagttcacaatatgggccatgggcgaacgattcctggaattgatctggaagatgattatgcacaggtgtctgccatcagaaatacaggagaatgtctagaatctgcaagtgatacctcgcacgaatacacggataatgttctacaagaacatatgtgttctcaagactagcaaacctcaagttttggtgacaatcctaagactaacacacaagcagcttcttcttcaactgtcaccagattttcaaaactggtgtactggaaatgatgctgtgaaggcacaggtgattcccatttctcagtgatgatgtgttgtatattggattcaacaatatgccattagaacttgtgaatgtctgggacctgccatcctctgagcttgggaaatccttgtgagctctggcaccctgttgtccgtgcattcagatcctaacacaccggaccatgggaggtctgcaccggaccggtcgctggagctagttagtcgactggtcgttgttatgtacggagtatgttgtgcaatagtagtttcttttggattcctagtgctcactctcttttttttttccagagcttttcattgacaagtcggtttagtgacacttctgccttcccgagatatagctgcgatgtcagtatgtctcagtagctgaatatgtcatatatttttttaactagaaatgatttgatgggcgttttgtgctgcgcctgcttcagagctc

SEQ ID NO: 134087 - DNA, 1507 bp, Zea mays
  Clone ID: MRT4577_53773C.1
tgaagatgcacaggatgatactttagaaaatcaagttcaagacgagaatgtagaggataatcacttactggaggatgggcatgatttgacgaggtatgatgtgaacaatgaggctggtgagcatgcacatgataaccacctggtgaaaaatgcggaaatacttctaaatcatattatggttgcatgtatatcagataattgccatatgaacaatgagaaaatgcttctaaagcaaaatgtggatgagcaacagatggagaacgagcagatgcttatagatcaggtcactagtgttcaagttttggatagtcaccatgtgcacgatgaacagttgctggtaggtcatgctgcagatgatcatcaccaaatggaaccaaatcccatggctttttctttgggcgttcatgatctggataactactatttgagtagcaagcaaatacttctgtataatgatgcaggaggtatacaccatttgaaggatgggcaaattttttagatgaggctgcagatggacaagctagagttcacaatatgggccatggacgaacgattcctggaattgatctggaagatgattatgcacaggtgtctgccatcagaaatacaggagaatgtctagaatctgcgtaagtttcttttagattcttttctatggtagtttcgagggggagaggaaaatccatgacacctggacatgtttgctgtactgtacagaagtgatacctcgcacgaatacacggataatgttctacaagaacatatgtgttctcaagactagcaaacctcaagttttggtgacaatcctaagactaacacacaagcagcttcttcttcaactgtcaccagattttcaaaactggtgtactggaaatgatgctgtgaaggcacaggtgattcccatttctcagtgatgatgtgttgtatattggattcaacaatatgccattaggtgtgtactccccactcctttttgagttttcttttctcagcatgcatactcattgtgcttgccatacttcgtgtatattcacatctattttgcctggcggatgaaaaagatatcaccgctcccactgtttttgtggttgcaccacaccagcaggtatataatgttcgagacaatggagtagatctgtatttatttttccaaacaagtaatagtggatgggaatgtagtcatgagaactataatgtagtggccacaaacccccatgctagttgtgatgagctttttagtccaaagagtcgcacttctgcattggaatcttacatgtagcgtttcaatacacatacaagcacttgtaaatagcaaaggcatggaatttgttctctaactgaagaaccatgttaatccggaaacagcaaataatggatttatgatgtttttagatgtctgaactccgcatgcatcgacaatcgacacacagcatttgactgtgcagtgaaccctgggctatatatctaagtgatgaaaaaaatgctgttcattactggatgaagatac

SEQ ID NO: 134088 - DNA, 483 bp, Zea mays
  unsure (1)..(483): unsure at all n locations
  Clone ID: MRT4577_53774C.1
gaactttgggctggtttatgtgcttgtttatgtgcttgtttatgtgcttgtttatgtgcttgggcgttccgattaatccaggaacccggcgcctcgctctcgtcgatacgctaaattccttagtacgcctgcccggggcgtgtacaaagatacgaatcgcgaggaacgacataagcatagcatggaaacctgatagcactcgtccgcggcctaagttgggccgaataccgaagacagtagagcccgggtacgtaccagacgcactgcggcatcggagaaacacctggcgcagtcgccggccctcgcccttgccctccttagtagccattcgcgcctatcattctaaccgcgcttttctacgagctacgattgcaccctagagcccacgccggttaccttcgtatctcaggcagttgtaatcggtattacncgcgagagccaaatcacggccgccggccgtaccactctcgcggttcgcgacac

SEQ ID NO: 134089 - DNA, 279 bp, Zea mays
  unsure (1)..(279): unsure at all n locations
  Clone ID: MRT4577_53775C.1
ggaaatcaatacaatacaatgggtccaagatttactgntgtgaatccaactgaaagctttgatccacaaaagatgatacatcaagctgcatattcatctgatcagaggcttgcactttcaagaactggctttcctaattctcctacatccagaagaggagggactgctccaaattatcaaggcatatcattctatgttggagggccgataacttatcctacatgtgcagtgtttcagggacaaaccttgcctggagtattgcctactgataggagaaat

SEQ ID NO: 134090 - DNA, 365 bp, Zea mays
  Clone ID: MRT4577_53776C.1
atattctcatatcatacccaacaagccatcttgaaaatttttaacaccgtaccccccccaaccccccaaaaaataaaaccccacacacaaaaacccttcttaaacacaaccaccgcctttttaaacaactgtcctggcaacctactaattttaccatacttttaaacctaaatcacacaacccaaaacaacaagagctccacactaaaacaagaggacaaagctcccccacccacctatccatccattgtaaccctccccaacccaaccgtatcgcataacacttacacctgaatccaaccataaatatcttacccctacctctaagcaaaccaccttttcctataaaaaatcaaattaaaactt

SEQ ID NO: 134091 - DNA, 232 bp, Zea mays
  unsure (1)..(232): unsure at all n locations
  Clone ID: MRT4577_53777C.1
nctggagctgcttttattcgatggacacataatcagcggtggtcgggccgacggcgacattgagcggccgtatgttccttactaccgctgaattcggggcgctgattggctcagccgccacatcctggacgcccactccaactcctgtttgtactagcccatctgctgcaggggacctaaccgtgagctgacacccggacttgggccggtacatggagacgatcgcgcgggc

SEQ ID NO: 134092 - DNA, 180 bp, Zea mays
  Clone ID: MRT4577_53778C.1
ctccatcaacaattcggtttcttgggtgggttttaaatacaagcaagctcgaaatattgtggggcaggccgtgaaccggcgaggcagaagcgcgggcaaactcaaagcaacacagtgaagttcatgcagaaaagctcgactttatcgcggaacccacataataataataacgtcccgttg

SEQ ID NO: 134093 - DNA, 300 bp, Zea mays
  Clone ID: MRT4577_5377C.1
cccacgcctcgccacacttactagaagcgacgctggtatcaccatggttatgaacctgctcgggggttgggatctgtttcgataccaccttatataaaccgctttattgcccaaatttttcacaaaaactttcgaattactttggagattcaatgcactctcaaatgtctcctgaaaaagtaccataccgtctgactcacttgttctctaaaactattgaaaaaaatgttatatgaaatccattcttaacaactctgtgaaaatattaggcaagatcttattccatacatagacacaatc

SEQ ID NO: 134094 - DNA, 841 bp, Zea mays
  unsure (1)..(841): unsure at all n locations
  Clone ID: MRT4577_53780C.1
agtgcgacggaattgccataagcgcatacggtatcgatgtttgtgtgaaccaggccttggnccctatttatttncatgacccagacaccgtagaaaatcgaagtgccatatcatgcatacatgatgagtgtgaaagaccctaaagattcatcgctcatttgactccaaaccgtgcccatgccttgaccgttttcttcgccgcaacatcaccactcttatttactctattcctcagaggcggtgatggccttgcggacagcacggccacgctgcctggagttcaagcggcgctcgagagtctggggacccttctggacgacctcggcaccttcggtaaggataagctcgatgtgggaggggttggacatgtatgggttgatacgaccgtgagcacggtaagtgcgccttcgctgcttgggagcctggttgacctggatgtgcttgatgatcaggttgctggtgtcgaggcccttggtgtcggcgttggcctcagcgttcttgaggagaccgatgaggatctcagcggacttgacgggccagcgggccttggaaacaccgaaagccttgccctgagcagtgcgtccagtgctgccagcgtaccgcctcatgggaacggcctccttgtgctccaggacatttccgaggtaggtaagggcgcgctcgagcttccagccgttgacggcctgagcggtctcgcgggtgttcttgaaggaaacgcggaggtagctgccgcgggcgcgggcagactttgcgccgtcaatggaggttgctccgtagcgaaccattttgtcgatttgtgctgtgggtgttagtggaggttgacgaccccgtgccgcacagg

SEQ ID NO: 134095 - DNA, 359 bp, Zea mays
  Clone ID: MRT4577_53781C.1
acctgagcaggcgctgctggcgacgacgctggagctggaggcggcgagggaggagctgaggcgcaaggagcagagcatcgccaagctggccggcctggtccgcgaggtggccagggagcgcgacgacgcgcgggaccagctgcagagcctccgcctcctggccgcgcaggcggcggcggcggcgccgccgctcgtggcggggagggtcaccgactccgacggcagcctcgcctcgtcccccgccgaccccttcttcgaccccgtcacctccgccgaccggcgctgcaagctcagccccgccacgccccccgcgccgccgcccaagccggtgcagcagcgccactgccagcccggagcct

SEQ ID NO: 134096 - DNA, 236 bp, Zea mays
  unsure (1)..(236): unsure at all n locations
  Clone ID: MRT4577_53782C.1
ctcatcaatcatcggtagggttccggcgattctccatggccggccgccaccgatacccgctgccaccttcctttcnccgcgncgccgctgccgccgccggcagtcgtctgttttctncgctnctttcncanctcncgccacaccatcgcctcgacgactaccgctactcgctgcgcctcttcccgcaccatcatatcgacgacttccgcgatccgtctcgcctgctgcctggccac

SEQ ID NO: 134097 - DNA, 370 bp, Zea mays
  unsure (1)..(370): unsure at all n locations
  Clone ID: MRT4577_53783C.1
gagggggggcctggagcttttttcattgtttaaaagcattacaacataagcagcaaaaccagaaacaggcctgataagcaccacttattagggcagtacaacacaagcgataggcgcggggccgatcaaaaaggaaccacagcgggggaaanccatttcgaagcatgattaaccccaacaaaccaccaaaagcttgttactgaaaaaaaggccgccttaggcaaaagggttgtgcgacttgagggggtgcaccacctcccaacggaaggcaggggcgtcccttccaaagtggccccaggccgccggcttgaaggagcgcccgtggccgcctttcttgacgccaaggctgcggatgatcatgccgggccgg

SEQ ID NO: 134098 - DNA, 676 bp, Zea mays
  Clone ID: MRT4577_53784C.1
gggtgacgccacgcgtgactttggcaccaagggaatgaattggaggatttgtcaacggatcaggtcgagatcgacgcagatccttctagtacaaacgctgaagagtcaactgtcaaacagggagacgagatttccgagcttccaggtaagggtgccagtgtgctctactgtgttcttcctgagaggtgttctggttctgttgcaagtacatctagtaggcaagaccaagattcagtggatctgccatctgaaggggctggggagctatattgcttattgccacccaggaatggccattcagtcaggagcattggtgattctaagcgttcaaatgcgagccaaaaggatgataaaccagccaatccatcactggaaggagatggcgatctgtactgccggctgccgaggactggacgaccgggtaggaattctgggggatccaatcgttctgccggtataagaagtgcagttaggcgtagcagtagtttctccagcgatatccatctgagctcagagacatcacctattaagaaggatggctcggttagcatgactgccaccgaaaggagttcttctgctgtatccacagaagctgaggactcaccgaaatacaccgcacgaactgctgaaacaccctcgagctccccaatggcgctgagacggatggtagagggga

SEQ ID NO: 134099 - DNA, 170 bp, Zea mays
  Clone ID: MRT4577_53785C.1
gtaatcaagagtgcatacatttttttggtccttgtaccaagatcatacacaaattattgttttatgtttaaagggactttctaatccattttaccactttattcgtgattacacgagcgcatacatacgtacgcgcgcacaacacggggggcgcttgttttactcttaca

SEQ ID NO: 134100 - DNA, 207 bp, Zea mays
  Clone ID: MRT4577_53786C.1
tatggacaacttacaagatctactataatacactacatgcagaaatttatgtattgaatccacaactgaactttaagtgacatgctgatactgtccgaaagtaagcaaaaccttctagaccagcgtgtgaaactcgtgttagggaactggaccttaataggccccctaattcaatgaatctggtctacgaacggtcctgctacaccc

SEQ ID NO: 134101 - DNA, 325 bp, Zea mays
  unsure (1)..(325): unsure at all n locations
  Clone ID: MRT4577_53787C.1
ccgggaaccaaaaccaggaccaaaggagcagacaagagccggggggacgacgggaaccaaccaacaggggnnncnacagcggggggggggggcanancncgacaaggggggcnaancaaccacnagnacaaaggcgggcgcacgnnggcnngcgccccagaaggccgaaggcagcgacgacggcggcaggggcnggangggccncccgggccgaggcccncgccccgcgggagcggggggcgagcnggangnccnngggcanganggggacgcgcnnggcgngganggcgcacaggggggcgnccnggaggagacccaccaggag

SEQ ID NO: 134102 - DNA, 1185 bp, Zea mays
  unsure (1)..(1185): unsure at all n locations
  Clone ID: MRT4577_53788C.1
ggcacagcagcaccgactagccaatctctacttgcctacacagcagaaggaaccagacagggaagtagggagagagcatagcaatggtgcggaagccgatccacgctgacgacgccggcgctaagagcacggaggcgagcaaggagaggaaggggttgtggtcgccggaggaggacgagcggctcttcacccacatcacctaccacggcgtctccacctggagctccgtcgcgcagctagcaggcaagattcagttcttgcaaaccgatcgggactctcggtaccggattctatttcagctatcgatcggacagcacaacgcggtatgattaatctcttcttaaatgttcaatgcacaggcctgcggaggagcggcaagagctgccggctgcggtggctgaactacctgcgcccggacctcaagaaggaacccatctccaagcgcgaggaggagaccatcatctccctgcagcagtcgctcggcaaccggtggtcgacgatcgcggcgaggatgccaggcaggacggacaacgagatcaagaactactggaactcccgcatcaggaagcgcctcaacgccgccgcctccagagctgcaggctgcgacggcggtgacagcgcggccgagccatcgggggccgtggcagcgggaggaaaggaggattcggccaacgctgcgacggcggtgacagcacagcctacgcccatcccggcgcggttcccggtcttcgggtgccagctgcccgacggagccggcggcggcatttcgtctcccggcagcggcagcggcaagagtccccagtcgtcgactactgcgagtatgccgcagaacgagggtgacgagagcgaggcgagcgacggtggcggtggcgacagcgacatggtccatttcctctcgttcgatgatctggattatcccggggatttgctcattgatgtgccgggagccatggacgcgtgggagagccaactgtgctatgcgaatccgatgatgagctcgctctgttgatccacactaccaataattgcatagcacagccattgtcttgttcccgctaatcatatataggctgtctgaattatttatgtgaaatttcactgggttttttggacaaggaatgcatgatgacgtgtgggtattcctattaaaaagaaattttgatcaatcgaaattttgnnatcaca

SEQ ID NO: 134103 - DNA, 317 bp, Zea mays
  Clone ID: MRT4577_53789C.1
actcaaacaacccgggaggggatttttaaatatgcaataccccaaacagccacattggccgcaaaaacccatgataacgaaacacacaccgacacaaactcaaaagggtcaggctaccgcaacaccagtactgacaaaacaatgccgagctcgcgcaccataaatacgacgaaaactcacgaactcccacaacccccacaggggggcaaacattcctactttgccggcgacagcgtgcacggctcaagggaagagacaatccacaacgatggccaacagcctgggcctgtccgaaaatcctatctaatgcacaagtc

SEQ ID NO: 134104 - DNA, 784 bp, Zea mays
  unsure (1)..(784): unsure at all n locations
  Clone ID: MRT4577_5378C.1
tgtcaattccgtcctcctctatccagcagagaaaaccttacttttggttggtttggtttttaatggagggcacaaggagtaaacctttctggttttccatggtaacatatgtgctctggctaattgaaatgccatggttttggggccatgcaacgtctgaaaatggagaaatcgctcaaatgtacttatctggatggagcgtgccaattcatgatgggggcttgacgggcaacaaactgagcaacccagatgtgcttgtcatcacactaccgttcctctatctggtgcttgtcccagtaatagtccttacatatggtctgtttgcagaaaaggctactgtgtttttgcagcacagaagaagagtagtatactctcttgactcaacaaatgtgcatgccgagtcaccaagattgctgccagttgctccaagggcttcactaatgaaattcgccgacaagatggtgtccatggtgatccaattttgtggtagctggacaagaagggctcttctacttgcatgcttgatcaccgcagcaatacatttgaagctctgttccaaactaatgtcagcatatggaactgtaccagtagcattgtcacccccattgacatggataccattgttgctattaggtggtgctgcctattgtacagttctccatgcagattagcgctcagtactctgcaatcctgaagtgtagtacttatttgcattggaggattagggctcataactgtgaattcctgatgtgaacgtagttgcgtttttnttttttnttttttt

SEQ ID NO: 134105 - DNA, 139 bp, Zea mays
  unsure (1)..(139): unsure at all n locations
  Clone ID: MRT4577_53790C.1
aaagtnctattgcatcaattgtgggaaaagtcactactgtgtttgtagaactgaactctttggacaaaggacacgaaactgacgtcagatgacatctttaacttatccattaactactggtggaatatccaatctaaaa

SEQ ID NO: 134106 - DNA, 360 bp, Zea mays
  Clone ID: MRT4577_53791C.1
attcggctcgaggaaccttgggaaagatttatctggaaactccggattgacaagggcaatgcagggtgggtaagcacaggtttttcaaggtccctcaaacatcatgaacccggagatgtatggcgaaaactacagcgagttcgaggatatctacttgtacggaatatgcatgcttgagatggacattggcgagtgccattacagaggctgtgagagatctgctgaaacttgcgagaatatacctgaaggtgatagacaattagctatctttaaggcaaatgttgcgaaaaaatggagtggaatacaaagatgcctagctgcaatttctgatgaaaggttaggaggagacctctggccgag

SEQ ID NO: 134107 - DNA, 216 bp, Zea mays
  Clone ID: MRT4577_53792C.1
tcgcctgaatgaaggacaggttcccccttcagatgttgtggaggtcgttgtcagccctccttatgtcttccttcctgtggtcaagagccagctgcgccaagagttccatgttgcggctcataactgctgggttaaaaagggaggtgcttttacctgttaattcatagctatatgctttccaacctatttgattcttggttatttttattacactct

SEQ ID NO: 134108 - DNA, 292 bp, Zea mays
  unsure (1)..(292): unsure at all n locations
  Clone ID: MRT4577_53793C.1
ccggttcggaaaaaccgggcggacgcacgcgaccgangacccnacacacgcagacgcagactgcgccgagaaccggggatcgacagagaagggggggagctacgagagcgcgggggaaagaccgactcaagatgaagctgagaaggccacgccacaaggacaagacgcccaagaaggcaggaggacagcagcccgatggggtcgatcagcacaccgaacgagcacggggccgagacccccgccaccgagaagcaaaaggcaccaaggacgacagggcgtaaagacaagcgga

SEQ ID NO: 134109 - DNA, 178 bp, Zea mays
  Clone ID: MRT4577_53794C.1
ggcttctatcgcattttcagaagtttggtcaagtaatagatatttatattccatctaacagtgaaaaagcttttgttcagtctcgagaagggacgatgctgaagctgccctaaaagctaccagatgctgttatgggaaaccgatttataaagactatggtgggaccaacagagataga

SEQ ID NO: 134110 - DNA, 300 bp, Zea mays
  Clone ID: MRT4577_53795C.1
acgcttttctctttggttcgaccactcttgcagttccacccgggatttaatcttaggctcttagctctagggtctaagctaggcccgcccactctttgtggagccatcaaccctctaatcgccaccaatggccactgccgaggtccagaccccgaccgtcgtggcggcccagaaaaccccctcgtggaaaaccccgccgccggccgatgtgcccgaggagactgcccccgcccaggccgaggcccaggccgaggctgaggctgctgctcctgctgatcccgaggagcttcccgcggccga

SEQ ID NO: 134111 - DNA, 368 bp, Zea mays
  Clone ID: MRT4577_53796C.1
ccggttcgtggtgcgcagaaaatctgctctcgatcttatatatatcaacgaggctggggatcattgacgtccaagtagcatacatcattgcaccattatcgtggcggccaagcaggctacgaatacgaccgataaagctgccgtttattgtcctccaacgtaatttgatccaagctgacggcgagcgaagaacaatttcatagggaacaagaacttgtctagctagctagaggttaaatgcatgcctaacttaatagggctacttaggtgttcttcacatgattgacgccagagtcacgcccctttctgtcgacgaccggattgttttgtctcactcaccttacaggcaagcaccgcttgggcacagg

SEQ ID NO: 134112 - DNA, 454 bp, Zea mays
  unsure (1)..(454): unsure at all n locations
  Clone ID: MRT4577_53797C.1
agaaacccaaacgggaaangaaaaaccaacagcccggaagggcaggaagagggacanacacgangccnccgccgcgcccaaaagggcncgcagacgggccgacgccncnaacagnnaaaacgaancacgggaggggggggggccagacccccgggagcnggacanccgagggcgccncagccccgagggcggggcccgacggcggcacgcncccgaacacgccaaggaccncgccgggggccggggggcccggggggacgcccagcgggangnngcccggggacgaggcggcgcncnccgaggggcccccccggagcgccgccgcgncgccccggccgccggcggggagcgcgacggcgnngccgcanccgggggagccgccgcggccccgggggcccaggaaggaggagccggggcagcngggcacgaggaagggcccgccgaagcggcccgg

SEQ ID NO: 134113 - DNA, 597 bp, Zea mays
  unsure (1)..(597): unsure at all n locations
  Clone ID: MRT4577_53798C.1
aatcttgtatactgtacaccgttctttttttttttttntnnnnntttttttttttttntttttttttttttttttttttttttttttttttttggcacgaaggatcttatttttcccattggctttaaaaatcaataattcaattcaaacccttcccttagtcctttgaaagaggaaaaagatttacaaaaaaagaggggtaaaaaaatgcagnctttacttttgttcatctcctaggtttttacccctgcatcctgcatttgcatggaccccaagaagcaaagctttggggctcttccctcctttgttctgttccagtttcaggaagcaaaaccaaagggctcggtcacatactaccccacattggttgttacaacccgcgggtcacccaaaaaacctcgcgatgtcgtctaaatctatttcaatgagcaggtcttcaaggctttcaacagcgggcggcggctctatggcggccacaaacccggacaccactttctggtgctcggcctgcccccgccacttgggggccttaaaccgcccgaaggaggccacttgggtggagccctaggtcccgggccacaccccccaatttttcca

SEQ ID NO: 134114 - DNA, 812 bp, Zea mays
  Clone ID: MRT4577_53799C.1
gaccctcgaggccttccgggatcgccctattattgagagcaactagcaatatagaaagtggaatatagtagcaatagcaatggcggctaagatattttccctccttatgttccttgctctttctgcatgtgctactactgcaaccattttcccgcaatgctcacaagctcctatagctgcccttcttcccccatacctcccaccggtatcagcttcagtatgtgaaaatccaattcttcaaccctacaggctccaacaggcaattgcatccagcatcttacctttatcacccttgttccaacaaccgtcggccttattgaatgagctatctttggtgtagtccttggtacaaagcattagggcacaacaactggagcaacttgtgctacatgtgatcaaccaagtagctctggcaaaccttgctccctactctcagcaacagcagtttcttccattcaaccaactggctgcattgaaccctgttgcttatttgcagcagcaacaactactaccattcagccagctagttgctgcctacactcagcaacatcaagttcttccattcaaccaactggctgcactgaaccccgctgcttatttgcagcaacaactactaccaccattcggtccgctagctaatgcaagtcctgctaccttcttgacacagcaacagttgctaccattctacccacaggttgtggctaatgctgccaccctcttacaactacaacacttgttgccattgatccaacttgctctaacaaacccagcacctcctaccaacaacacattattggtgggtgccctctttt

SEQ ID NO: 134115 - DNA, 478 bp, Zea mays
  Clone ID: MRT4577_5379C.1
ataaaattacccaataaacgaacgcggtgaatggaagaatttatttgcacatgtcaccctactagctatagacactgggccatcaaggccacactgactgacgcgctgaatgcacgaactaatcacggcagacaaggcgttcagtagggctagacatgactaatgaatagactgatccctcctaaagcatcttgggtggccccaatacatgactctcgtgcacaaaagtctatgccttgatgctgtgaccctgattgattggaaggttcacgcctgccctcaccttgaccatatggtaatagcatttggctgcctaacatgagcacgcattacatatgccacacaacacataagccgccataatagagcgctaatgcaatctcgctctaatgattgagctataaaacaaaacaaatattggatttacaaacgcgctatagctagttctctacgcttcgtacgcgttggctgacacaat

SEQ ID NO: 134116 - DNA, 462 bp, Zea mays
  Clone ID: MRT4577_537C.1
atgaagaaatttcagttatataaagaaataactctatgctcctctcctcttctttctgtggaggctacaggtctgcgcaagatagtggcttccctggaagagaagatcaatgcagagataactctctctatgcagcacaaaggccacgcaatgggaaaggggcaacctcacctggtgtccttggctcatgtcaggcgatggagttcgcgagtgcaaaagccacgcgaggcgggcggtgggtccttaccacgaaggggacgaactgaggagagggaggcgctagagccacgagcatcggagcatgggagccggcgtgggagcagtgaagggagaaaaggggccagcgtgagcacgggaaggaaaagggaggcggcggattcatccaagttaatgcacgatgacgaagctccccacgacaacagtgggatggaagagcggaggaattttgctagagaggaatga

SEQ ID NO: 134117 - DNA, 593 bp, Zea mays
  unsure (1)..(593): unsure at all n locations
  Clone ID: MRT4577_53800C.1
ggtccctatgcatttattttcatggntatgcttaatttcatgggcatgcctaacaatgaactatgttctaactggagcttaggacttattttagatattggagtgtagctttattacagatggattttatctttaaacattgcattttgatcaactttgtatattcacgtgtattaaaatatcgtgcactaaatgttttgccctcatttgctattatatggtcaaggcatttattagcactattgtgattaactcatgtaaatggcatgggtcagggaaaattatttcctacttttctgcctaattaaatttctgttttccagtattacgttaatttattttttggcctccatttctttgtaaccaaaatagttactgtatttgtgtggcattcatttgattttgttgctgaaaaagtttagtttttatttaagaataatctgtaccttaatttttttaatgtaaccaattcaagcactttaagcaataacgtcaatcttgtgaaatttcaatcagtttaacaccccgcctctaaaattgtttgcaaaaagataataataataataaataaataaaataggaattctcttcct

SEQ ID NO: 134118 - DNA, 1989 bp, Zea mays
  Clone ID: MRT4577_53801C.1
atggcccaagggcacatttccctttcacttctgctatacctccatgtcgttcggcctaaaaaacgttggagcgacttaccagagggctatccagacatgtttagccgaccactgggcaagcgtgtggaagcttatgtggatgttgtggtgatcaagacagaaaactcagaaaatttcattgaagatttacaactggtcttcaacagtctacggcgatatcgatggaaacttaatcacgaaaaatgcgtcttcggagtaccagcaggaaaattgcttgggtttattgtcagccaccggggaattgaggccaacccagaaaagatcgaggctatcatgagaatggaagcaccacgatcacagaagaaagtacaaagacttacgggatgcatggtagctctaagcagatccatatcaagactgggagaaaaaggcctaccgttctataagttgctcaagaaggtagacaaattccagtggacttcagaggctcaggaagctctagacacactgaaaaaattcctgacaacaccaccagtgctaaaaccgccgcgccaagccacgccaactcaaccggctgaagatctgttgttatacatctcttgcacgactcacgtggtgagcaccgcgttagtagtcgagcgagcggaagagggacacgcatacccagtgcaacatcctgtctatatcatcagtgaagtcctgggtccctcaaagaagaaataccctcaagttcagaaactattgtatgcagtacttctaactgcacgcaagctccgtcactacttcgacgatcacaaagtcatagtagtcaccggatttccaataggggatattctccacaataaagaagccttcggaagaatagccaagtgggtctgtgaactgggagctcacgacattgagtttcgacctcacaccgcaattaagactcaagcactagttgactttgtatcagagtggaccgagcaacaagtgcctgataacccggaaaccatagaagtatggtacataaagaatgaggaagagccagatgacagaaatgcagcagagcgcattgctagacagtcagctcattacactctcattggggaaacactatacagaaggggcgcatcaggagtcctcatgaaatgcattctttcagctacagggaagcaactactagatgagaaagctcaaggaggatacactcatgtactggttgctatcgacaaattcactaagtggatagagttcaagctcattgcttctctaacttcagctaaggcagtggaattcatacaagacataatattcaggttcgggatgccaaatagtatcataaccgacctgggatccaatttcacaagttcagagttcttcgatttctgcgaacgaaaaagcattcagatcaaatatgcctcggtggcacacccaagagccaacgggcaagtagaaagagccaacgggatgatattggaagcgctcagaaagaaagtcttcgacaagaatgagaagttcgcaggaaagtggatcagagagttgctgtatgtggtctggagcctaagaactcaatccagccgagctttgcatggaaacactcccttcttcatggtctatggttcggaggcagtgctacctgctgatcttaagtttggggcaccaagattgatcttcgaaaacatagctgaagctgaagctactaggttggaggatgttgatatactagaagaggaacgattgaatacgatgattcagttagcccggtatcagcaaactctgaggcgctatcatgataaggccatacggcatcgatccttcgcagtgggagatctcgtcctccgccgaattctaacgggggaggggcggcacaaattgtcaccactatgggaagggccattcataatagcggaagtcactaggcctggctcatatcgtcttactcaaatggacggtacggaaattgggaactcatggaatatagaacatctcaggaagttttacccctag

SEQ ID NO: 134119 - DNA, 731 bp, Zea mays
  Clone ID: MRT4577_53802C.1
acaaaarctacctatccaaatccctattcataataassarattcavcaasaacarctacaacacarsactcttctcaaarcartcccataacaaaaataaaaaartacatgacccatartaatraamgaaactcatccacaacctaaaarcaatcataaaaracaagaccataagcataatartacccaaaatactccccatcaastasttccccatmtacctcaccctctacaacacctccaacaccaccarctacagccacagcaastacctccacarctacaacaacctctcctcctaccacaacacactactacaasaaracctatccarcctacaaaaagcatacccacacacccaaatcatatacaccarcttctacacccaaatcacccacataatccaarcccctcacaacttcaarctcaaatacaacctcaaaatctastacaacaccarsaarsaaraccaatacarctacaacaacaaarcacartacarcatarccaaarccaacacctacaccagcccaagcaactacctcatctarrgcagsatccacctcaccararcrarcctaccastccattaccagcarstarstcaaaagcccctactacaaccctcccatccaacactaatcarastaastaarccararrgctagataactaattaaastaacaacatattattcatarakagcatcatcatastttatttatttaca

SEQ ID NO: 134120 - DNA, 388 bp, Zea mays
  unsure (1)..(388): unsure at all n locations
  Clone ID: MRT4577_53803C.1
cccgaaaccaccacacggggcagacccccggcgagcacggnaacacgaccccccagccacgggcaaggagaaaacgcacagcaacacnagaggccagngaaacacgagcgacccgggcaagnncgaccaccaccgcccaccggggggggaagcccanaggnntcgccgaccgngaaacggacaagcccgagaaagaagacgcggggaggaacaaacagccaaacaacnaggcccgggngccgcacaagcccaaggcccagcgggccagagggagcacannngagaccgcacgccccaacggcaaaaccaccagggactacagcacccccaacgaagccccaggacaacgcccccgcagcaagaacacgaggacgggcaaccagccaag

SEQ ID NO: 134121 - DNA, 378 bp, Zea mays
  unsure (1)..(378): unsure at all n locations
  Clone ID: MRT4577_53804C.1
gccctgncctttttttttttttttttttttttttttttttttttttggttttttttttttgggagggcatgctggccccaaaataagggttggcttaggatttttcccccacaaaaggaccgcgatttacttaaatcctaatattttttacaggaaaattactcccatttgggccgaaaacacacaaatttgcccaacattgggaacccagatgcttccactggccagaccagaagaattattttcctcattaggccaatttgaacatgggttggttccagatttgtttcagcggcggcgccttttgagttcagaccgacgggaagaacttgttcaaattgaacggcagcgagtagaactcttggctcctcgcgtctt

SEQ ID NO: 134122 - DNA, 584 bp, Zea mays
  Clone ID: MRT4577_53805C.1
tttttcaagacatggatgagtcataaacaaaaatcagctgagcgaacgaacgaagagagcacaagtggttctcagggcacaactgacaattcactacatggaggacagatgataccctgtatgtgaagaatctacaatggagggatagggcatcaaatacattatggggtaaaagattaaagaaatgactaaacaaaatactgcatgtgttagttcagccttcttccaaatgtagctccttgataaggcaaattgtccgattgttacgtccttgttaagtatgattgtccatccatgatctagatatggtacaaaatacaacaggaccacgggtggtaagcagatggcagaaaatcaggcagcaagaagatcatcttggcataaaacagggggctccctgcacatttcgacagcacttcaatggtaccgatttcacattttgttagcaagatagatgtctatgtgcaggagttggaatgtgatcagcccactctaactagcattacaaattacctcactgctttgtccatggaattaaatgtcaagcagttttccaatttactaacagattgcttggaacgaat

SEQ ID NO: 134123 - DNA, 222 bp, Zea mays
  unsure (1)..(222): unsure at all n locations
  Clone ID: MRT4577_53806C.1
gcctctcctgcgcacgcccaaccacacgttcacggtagcgagagcttatcgtcgtcggcggcgaagatggtgtcgctgaagctgcggaagcggctcgccgctcgcgtcctcgagtgtgggaaaggctgcgtctggcttgccccccttgccggctcccggctccccgtgggtgtctcccgcccgcncgtccggccccccccccggtccccccccggggctgcc

SEQ ID NO: 134124 - DNA, 574 bp, Zea mays
  Clone ID: MRT4577_53807C.1
cccgggggccattcctttttttgccgtacagacctcgctctccttctctatggcctcctttggtccatagaccacagtgtggttaccttgctaaacattacgcggttatgattacgaccgaaatttgactgaattatcacctcctgcttttcatgctcctgcgggtgcgcaccagacacatgacgaccttcatctttttggcgatcaatctaccctacatacgaatgaacctaatcaacgggctgccggtcgcaaagccatataatataactattgaccgaggcccactcctggcgttcttatgactttctaaccatggcaccatgagactcatatcaactagctaaatgataatccccttacctttcagatgacgcgcctgacttggctatcatccaagcttgcccctgtcgtatacagtctctaaaacatgactctaatgccgacaacatggcaaccatcttgctgtcatggccactataatctgagaccaatttacgctactaccactaaaatattacccgcagagctgtcacatcggggttttcaacaagatctagaggtcagtctctgt

SEQ ID NO: 134125 - DNA, 436 bp, Zea mays
  Clone ID: MRT4577_53808C.1
aggagatcctcgtcccctcccgcccccgtacgtctcccctccatcttccattcttccacatatgcccacacaattgccgtctcgctccacattcccttcgcaccacctttcccctctctctccctctctctccctctctcactcgctctttctccggggccgccattcctgctccgtccactcccaccacatgcggcggcgcgggcgcctccccgcggcgctgtggctcgttgtcgtgacgttggcggcgctggtggcgcgacctgcgtgtgcggcgtggtgcatcgcgcggagcgaggcctcggacaaggcgctgcagtcggcgctggactatgcgtgcggccccgcgaggggtgccgactgcgcgcccatccaggccagcggcctctgctacctgcccaacaccctcgccgcgcatgcctcttacgccttcaac

SEQ ID NO: 134126 - DNA, 588 bp, Zea mays
  Clone ID: MRT4577_53809C.1
agatcagtcgtcgaccaccgtctacgacgacgacaacagcgtaatgtactgtaattccggagagtgttgtggagatgagctgtgatccacaatggctacggaggacgctgctgtggctctatgtcctcttgactctacgggccagctgcatgttctcggcgtcccatacgcaccatgtgcccatggacatcaaggcgcccacggactataaggttgctaatgagaagaatctttccacggagaagatatcatccccgctccctctctactgttagatgattgtggaaggaatcgttgccctctatgagaggaatgagccgagctcaacggacattcacaggtacactcatgagaagtatggcgactgactccccaccatatcgttccgccatgatctcactgagcagatgatcaatctcgctgccgccagcatagctgacaaaggattacaactccttctctctgtcgctcactcgactacatgcccaaggacaacatgacataggatcttgaggttgcgttcaagatccaagcctccacaaaggaaaacgtcatgatcgctgtgatgtccaacgcccctgctctcaa

SEQ ID NO: 134127 - DNA, 415 bp, Zea mays
  Clone ID: MRT4577_5380C.1
gcggccgtccttttttttttttggggggttttttttattgtttttttgcgttgaacaaaactgcaaccttaccacaagtagcaaaaagctaatttcaggtttcttatttgcgagcgggttctgcacagatggttgccggaagggaagtaaaagtgcaaaacatgttcagacttatgatgaacctggcggcccataggcacgcgccattcacatttatttttggcttacacaagcagtaaccattcattgagaagcagggggaaaaaacccctttactgggtcttgaacatgtggcggatcaggtcgtctacccggttgctgtagccccacttgttgtcgttccacgagacgagcttgaccaagtggtcgtttagagtgatcccggccttggcgtctaaaatgctcgacctgttgt

SEQ ID NO: 134128 - DNA, 409 bp, Zea mays
  Clone ID: MRT4577_53810C.1
attggatacaggtctcgtatgtccttgacactgaagacttctcgtcccggcttcctaagagaaggaaaatacttcggagtggaactgtgtctgacagtctctcagatttcaacagtatatgctgcaaaagtgcaccgcttcaatatgttcctatccaaagcataagatcattagtcctacaaactgtcatcatcattgtatctaaacctggagatattgctgagaccccagctgctttgcttcttcaaccataatattcagcagttggcagatggtgactccatcgacattcagtctcataacgccctttttgaataacaaatggagagatctatagggtaaatacagcacaacgaatcgagcatgtaagccacaacactcatctctgatgtgcggatagatgtgtata

SEQ ID NO: 134129 - DNA, 571 bp, Zea mays
  Clone ID: MRT4577_53811C.1
ggggaaaccccctttttttatcataaaataaaccaaccccctgggtcctgggggacaaaaaaaacaaaaaacccttgttgggtttttcccaaaccccagggtttaaaggggatgggaaaaaataaagtttaattggggggggattaaaactcatccaatctccctcaatccacagggatggggagctaaccgaacgacccctaatttgttaaaagccccgggatcctggccaaacaccctgccttgggttggaagcagggacccctgcctttaaaacccgggctttccataaaaaagctccccggggaccccccaacccctgggggtactgccaacgggccaaaccttaattttttttttttggacattttccacgggggggagtaaaaaatccccccaaagctgttgggcaacaaaaaagcaaaacagtttaagcctgccgtttccatggacaaaaataaggtccaggctgccgtcgtcggcccgcccttttggggcaaaaacaggaaaaagtaacccctgggcaggcttgcaaaagtgtttgcaaacaaaaatgccaaaaaactccccg

SEQ ID NO: 134130 - DNA, 1351 bp, Zea mays
  Clone ID: MRT4577_53812C.1
gggaccctcgaggccggccgggcctaatgtcacctgtaacatgtttgttactccgcattgtactgtatagtgcaggaagtttttagtttcacctgtagcttatctggtctcctcaatgtaccatttttttagtcattccaaattctgttgcggtgcagaaaatatttttttttgttcaactttccactgttgtgcctgcacttcctctggtttattattccatgctgcagattcaattttctttttatttctcattagttttccctgaatgcactttgtagttatgcatttttgtttgttgcccacatattctgcttatctgagtttgggtttggtagttggtatggcttagcaacactgtaaagtttgatttcttatttgaaatattttatcaacagttgatgactcagaataagattaaaaaatcgaaatagttgaactaatatgttctacttcatgcccgtgttagtgcatgaggatatttccaggttgtgattaatacacacagttgctgctacatagtttttgtcatttaaagatactgggtattgtgtagataatctaagtttatctactgacagtttgactatagtaaaatttcttctgttgcagctaagcagtacatgcagtgaacaactaattgaagcaaggatttcttgtattcttcctctgacctcattggaatgctaaccatttctttatttgttttatttacttacattattgcaaatgctgttgactattttggatccttactagaaatatgttaagctattacttttgctggccagaatatgggtgtccagtgttccgttgctattattttgggggtctgaattcccagccaatttgccaactttgttgctgatggtttgtcttgccattgcaggagcataccagagctctaaaggaaattcttcagagaatgatcccaacaatacaacagtcatgtgctgaggaagccatccgaatgctgaatgggagtcaggttggtgggcagaaagttcggctttcatggggccgtagtcctcaaaacagacaggcttctcagcatgatgccaacaaccagtataatgggaacagctattatggataccaacagccgggttatgaaggttatggctatggtgcttccagtgcacaagacccaagcatgcaaaactactacggatactctggttgtggtaactatgagcagcagcagccaacacaggaacagcagctgcagcagcctccaccaccacagcagtgacgattgcttgcacacctctggagtgctatcggattagagtgacggtgggagtcacggggcgctgcaatgagacattctatatagatattgaaggtcata

SEQ ID NO: 134131 - DNA, 876 bp, Zea mays
  unsure (1)..(876): unsure at all n locations
  Clone ID: MRT4577_53813C.1
cggncgcgtgggttttcttgctgngagatagtgtttccataacagttttctttctagtcattccatcgcagcgtagctggcatagcttctttctgtaaacagacatttccttccagctctttccgttccaagtctaagattggaataacttaacacaacaaagtaataaaaccactgaacaaaattcgtgtttctcaaagcaggatgccatgccatctgcatttagggcctggaaatgtcttcagatgtctcctgtaacctgtgactcggttaggtgcataccagagttctcaaggcaattgttcagagaatgatcccaacaatacaacagtctttgtgggtgggttagattccaatgtagacgaggagtatctaagggaaatttttactccgtacggagaaatttcctatgtgaagattcctgtaggcaagcattgtggatttgttcaatttaccagcaggtcatgtgctgaggaagccatccaaatgctgaatgggagtcagattggtggacagaaagttcggctttcatggggccgtagtactcaaaacagacaggcttctcagcatgatgccaacagccagtataatgggaacagctattatggataccaacagccgggttatgaaggttatggctatggtgcttccagtgcacaagacccaagcatgcaaaactactacggatactctggttgtggtaactatgagcagcagcagccaacacaggaacagcagctgcagcagcctccaccaccacagcacgtagggcacggacaatccccattgcttaaatcttactatctttccatagttcaaatttaggaaatcgactgttaaaaatcttactatcctgaaccaaccaattgctccctt

SEQ ID NO: 134132 - DNA, 2034 bp, Zea mays
  Clone ID: MRT4577_53814C.1
tatgcaggaagcttttagtttcacctgtagcttatctggtctcctcaatgtaccatttttttagtcatcccaaattctgttgcggtgcagaaaatattcttttttgttcaactttccactgttgtgcctgcacttcctctggtttattattccatgctgcagattcaattttcttttatttctcattagttttccctcaatgcactttgtagttatgcatttttgtttgttgcccacatattctgcttatctgagacttgtaaagtttgatttcttatttgaaatattttatcaacagctgatgactcagaataagattaaaaaatcgaaatagttgaactaatatgttctacttcatgcccgtgttagcgcatgtggatatttccaggttgtgattaatacacgcagttgctgctacatagttttggtcacttaaagatactgggtattgtgtagataatctgagtttatctactgacagtttgtgactatagtaaaatttcttctgttgcagctaagcactacatgcagtgaacaactaattgaagcaaggatttcttgtattcttcctctgacctcattggaatgctaaccatttctttatttgttttatttacttacattactgcaaatgttgttgactattttggatccttactagaaatatgttaagctattaattttgctggccagaatatgggtgtccagtgttcctttgctattattttgggggtctgaattcccagccaatttgccaactttgttgctgatggtttgtcttgccattgcaggagcataccagagctctcaaggaaattcttcagagaatgatcccaacaatacaacagtctttgtaggtgggttagattccaatgtaaatgaggagtatctaaggcaaatttttgctctgtatggagaaatttcttatgtgaagattcctgtaggcaagcattgtggatttgttcaatttaccagcaggtcatgtgctgaggaagccatccgaatgctgaatgggagtcaggttggtgggcagaaagttcggctttcatggggccgtagtcctcaaaacagacaggcttctcagcatgatgccaacaaccagtataatgggaacagctattatggataccaacagccgggttatgaaggttatggctatggtgcttccagtgcacaagacccaagcatacaaaactactacggatactctggttgtggtaactatgagcagcagcagccaacacaggaacagcagctgcagcagcctccaccaccacaacagcagtgacgattgcttgcacacctttggagtgctatcggattagagtgacggtggagtcacggggcgctgcaatgagacatcctatatagatatgaaggtcatatagtcgcataggagttgttggactttcttggggaccagtgttaatcgatgatggcactccggatgtttcttctgtttgtcgttgagatcttgactgttgaagtgtgctctgttgatattaatgtcttcgtcagattgttaatttgcttgtttcagatgtcccagaaccatttgtacttagggagtgtttgaatgcactagacctaacagatagttggctaaaaaatttgctagtgaaattagctaaataataaattgctatttatgtgttagctaatttgctaacagacaggttttttagcattattccaacaaccagtataatgggaacagcttttttggatccccacaaccgggttattaaggttatggctatggtgcttccagtgcccaaaacccaagcatgcaaaacttcttgggatactctggtggtggtaactattagcagcagcacccaacccagggacagcagttgcaacagcctccccccccccaggacgtaggggccggccaatcccccttgctttaattttactatctttccatagttcaaatttaggaaaccccccctttaaaatcttactatcctgaaccagcccattgcttattttttgaaaataattttagccatgcagtataaaagggcttgg

SEQ ID NO: 134133 - DNA, 237 bp, Zea mays
  unsure (1)..(237): unsure at all n locations
  Clone ID: MRT4577_53815C.1
gcagcattgaactctcctgcctatgtacagcagcaacaactactaccattcagccagctagctgctgtgagccctgctgccttcttgacacagcaacaatttgatggtcgttctaccttgcacgctgccccctaacggttggcacccctcgtgacaggctgcaacaaatngctgccatttcaaccaatcttgctgttgacaaaccccagcaggggttctaccaacaaccccataatt

SEQ ID NO: 134134 - DNA, 458 bp, Zea mays
  unsure (1)..(458): unsure at all n locations
  Clone ID: MRT4577_53817C.1
gggacgcagcagcctttgcaattgatgcccatcgccgacaagagtcacaatttcctctcaccattacatgacgggggaattttggtttcaaccaagcgttgcagcgatgggggggggtagtacacgtaagcattaatctcaaattgggcttacccttttcaatttactccatggaaaatcccatcaccgcacgacggggctaccctgtgctcgctgagggcgggtgtccgcgcgacaccgggggtgtaccctcgcaggagctgcgtccgtgccgccgaggccaccctgtggccgggctggggggactgcgcgacgacgggaccgcaccgggccaccgtgctttgggtccccttgcgccgttggggctgggcaccggcgaaccttgcgcccacctgcgcaaggaggcctcccccgctcgccccatgggggccggggtcgctgcacccncgccgtagcca

SEQ ID NO: 134135 - DNA, 292 bp, Zea mays
  Clone ID: MRT4577_53818C.1
tcgaggccggccgggaatgatccctgcgcatagtgcctgctctcttctacaccagacggcgcgctgagaagccacgagctggccgcgtaggctaggataggatacgcgtccgagcacttatcacgagtgctcgatagtcgaatactagaggttctcggccgacgacgcgcttccacaggcacatccagctccgcctcttatccatcctcattgctattcttgccgctggttcggcgggggcgatgtgacttggggctgatgcccatgcgcgccagcatcggccactcataca

SEQ ID NO: 134136 - DNA, 443 bp, Zea mays
  Clone ID: MRT4577_53819C.1
ccgaactcggccttaacgtaaagcaaaaaacaaaaaacagaacaaaaaaaaaaaatagaaaaaaaaaaaaaaaaaaaaaaaaaaaaaaaaaaaaaaaaaaaaaaaaaaaaaaaaaaaaaaaaaaaaaaaaaaataaatataaaaaattaataatattttcttcttcttgaaaaaaagaataaaaaaaacaatattttttttctttacgccctccccccttggggggctttttgcaaaataaactgtaaactcggccggcgaataccatttatttatggggccaaattcccttttttaaaccagctgtaacaaacatatgagtgtttttttacactcctgatcctaaaaaaaccaagtcctatcctaggacttgctgctctgcaagacatgccatttcaaattgctgcagataatggaactactgcctataatagggattacct

SEQ ID NO: 134137 - DNA, 332 bp, Zea mays
  Clone ID: MRT4577_5381C.1
aaaaaaaggcccttcttatttcggggaagccacaaacctcagataaaaaactttttttttgaaccataccccaaaaaaaatctaaaagagagggccccccccatgagggggtgggggaaaaacaccgctgggtttgccaaaacaaggtggttgaatggcaacaattgttgcagttgaaaaagggggcccccgttaggcccaaccggctggtaaaacggcaacaactggggttgggtcaaaaagggaacagggacctggctgaaagggaattgttgttggtgcaaaaaaaaagcaaagttcaatgaaccccgacccctgggcggacccctggg

SEQ ID NO: 134138 - DNA, 234 bp, Zea mays
  Clone ID: MRT4577_53820C.1
gaactacccactcgacccactcatccactcctcatttcatatacaacatttcaaaataggagatcatctccaaaactacgatacttgtgtgcttcatatgctcaccatcctgtccaactattacatctaaatccaaccacctgatctcactcatattcatttaacatcatgaccatcatccactacctcaacaactactacaatcctcttttctacttcaatcacaattatact

SEQ ID NO: 134139 - DNA, 451 bp, Zea mays
  unsure (1)..(451): unsure at all n locations
  Clone ID: MRT4577_53821C.1
ccatgacatctctaatgttccaacatccttttgggtttaggcacaccgttgtcttgcccatacgtattttacattccaattcattgtgttgtttttttttttcccaatcttttgtttgtaagggtgaacatttctacatntttttttctcagcggggggggggatgaatccancatttgaatacacnnanttntangatcacatgtttacatgcaccattcttttcttattggggatgttgatttttaaaataagattttgacacaattcactgagatgtgtgccggatcggcttacgattttttttttctgaagagagatttttgtaatttattccgagtctcatagggtattacagatttccaattgcgtgggtcggggtgttggaaacagtaaactcaatgggatattgatgggtgggggagtgttattgggaattgtgggatggaaa

SEQ ID NO: 134140 - DNA, 737 bp, Zea mays
  Clone ID: MRT4577_53822C.1
ttttttttttttttttttttttttttttttttttttttttttttttttttttttttaacccaacccaaacgggtcgactcacattttggacatgcccttgaccaaaacaaggtataaaaaagggtgagtttataaacagcagcagcagctttattattattttcccaccaaacacatgttcccagccttcgtacaaaattaaacacaaagcaggcccccaagcaaatccccgccccatcccttccccttcctttaaaaaatttccttcctttcatccctttcctcaacagaagaatgatttgatgccgcattttccttttcctgagggggactttgggtttctaccgccttttgaaccttgaggtgccttttgggctcctcgacctgttcttggatcctttggaaaccaaaaaccacctcgccgtaacggttttggagggtcctttttagggcctttggttaactaactttttaaaacaaattttggattcgatttaaacaaaggaaatgttcctgtttctgcaacttttggaaacattcaagctctgtggggggggggcccatttggttaaatgtattttggacctgggacccacatttttcccccccgtatttgaaatcccttggggaaaaaagtttaatttttttgtcccaagccccaaaaaacccttttataggctttaataaaacccattgcgctttttttcaacaggttttaaaaacctcattttttgggc

SEQ ID NO: 134141 - DNA, 265 bp, Zea mays
  Clone ID: MRT4577_53823C.1
gtggtttaacagttgcagcaacctgtggccattacttttctggcaacgcatatgcaaggcgcgtgggggagttcctgaagaataacaagaatgttgttgtgcaaactagacatatgaagatcaattctacaccaccagtgtctgagctagtgcatctcacgcctgccagagctccatctcctgatgaaagacatgtgcatcttttgatataatgatattcatttaaacactcgtctctcttgtagtatgtataaaattaacttat

SEQ ID NO: 134142 - DNA, 383 bp, Zea mays
  unsure (1)..(383): unsure at all n locations
  Clone ID: MRT4577_53824C.1
gaagaacnggggcgaccgcacgcgtcctctcgacttctactctactattagcccctattatcaccccgccatcctccctataacccgagggctctttcatggtgtatcctactccccaggccatccttaaaaatccccacgtgatcctcatctcaaataaatctggcacgggtaagtaatgccaggcatattgggctttcaataatgcaagagcattttccttactttcaatacatcccactgattcacttgaagggacctacattgacaagaaatgttcattcactggaacacgttctatcagaggcagaattattgctcgtacatgctccagcgctaatatgaacagaaccatcattgttcgcaagaactaatttcacttt

SEQ ID NO: 134143 - DNA, 742 bp, Zea mays
  Clone ID: MRT4577_53825C.1
gtctttgcgccggtgttttctcttccttcctgccgcggcgatggcgtcgggtgacaacagcaagcagaggagcgaggaggagtggcgcgccgtgctctcccccgagcagttccgcatcatccgccagaagggcaccgagttacctgggacaggagagtacaacaaattctatggcgacggggtttataactgtgctggctgcgggactcccctgtacaagtccaccacaaaatttgattctggctgcggctggcctgcattctttgaggggcttccaggagccataaaccgaacaccggatcctgatggtaggaggacagagattacatgtgcagcttgtggtgggcatctgggccatgtgttcaagggagaaggcttcaagacacctactgatgagcgccactgcgtgaacagtgtttctatcaagttcagtcctagctcctagctagatcatcttccccctggatgagattctcgtgcctggaactgtgggggagcacagcgaaacgatgaataagatctattcagcacatgtgttatctgattgagagatggatctattaccataatcagttgttactctaaaaaaaatgtcatttacatcagccagtaatgttttcatgaaagttatcctgaagttgctttgtccatttgttttcccagaatgttcagtcagtcggatacatgtaaagttgtgatcattactcgtcaaatgaactcgtctccactgagggcttgtttg

SEQ ID NO: 134144 - DNA, 821 bp, Zea mays
  Clone ID: MRT4577_53826C.1
gcatcaatagtcattcgtactcgtacatatccctcctctgctgtccccctctggcgtttgcgggcccggtgctttctcttccttccggccgcggcaatggcgtcggggagcaacaacaaacagaggagcgaggaggagtggcgcgtcgtactctcccctgagcagttccgcatcctccgcctcaagggcaccgagctcacattgatgtccaggttacccgggacaggagagtacaacaaattctacggcgacggggtttataactgcgctggctgcgggactcccctgtacaagtccgccacaaaatttgattctggctgcggctggcctgcattctttgaggggcttccaggagccataaaccgaacaccagatcctgatggtaggagggtagagatcacatgtgcagcctgcggtggccatctgggccatgtgttcaagggtgaaggcttcaagacacctactgatgagcgccactgcgtgaatagcgtctcgatcaagttcagtcctggctcctcctagatcatcttgagattctcgtgtcatggaactgcgggaagtacgacgaataagatttattgagcatgtgtgcgtgcctgcattctgctactctggctgtgagatgaatctattatcataagcagctgttactctacgtgattcgtcattcacatcagctgttactctggcgtgattacacgaattttttgttcagacggtgtgggactgttgttgaataattagacaatttccaaattaaattccgaatataaatcatgaccaaaaaaaaaaaaaaaaaaaaaaaaaaaaaaaaagcggcc

SEQ ID NO: 134145 - DNA, 981 bp, Zea mays
  Clone ID: MRT4577_53827C.1
aaaaaaaaaaaaaaaaaaaaaaaaaaaaaaaaaaaaaaaaaaaaaaaaacgtttgcattgggtacctcgaggccggccggggttgcctggggcctgcatcatagtcattcgtactcgtacatatcctcctctgctgtccccctctggcgtttgcggggccggtgctttctcttccttccggccgcggcaatggcgtcggggaacaacaacaagcagaggagcgaggaggagtggcgcgtcgtactctcccctgagcagttccgcatcctccgcctcaagggcaccgagttacccgggacaggagagtacaacaaattctacggcgacggggtttataactgcgctggctgcgggactcccctgtacaagtccgccacaaaatttgattctggctgcggctggcctgcattctttgaggggcttccaggagccataaaccgaacaccagatcctgatggtaggagggtagagatcacatgtgcagcctgcggtggccatctgggccatgtgttcaagggtgaaggcttcaagacacctactgatgagcgccactgcgtgaatagcgtctcgatcaagttcagtcctggctcctcctagatcatcttgagattctcgtgtcctggaactgtgggaagtacaccaaagcgacgaataagatttattgagcatgtgtgcgtgcgtgcattctgctactctggctgtgagatgaatctattatcataagcagctgttactctacgtgattcgtcatttacatcagctgttactctggcgtgattacacgaattttttgttcagacggtgtgggactgtgagctccaagttaagacgccttttccacgtgttttgtatcttattgcaaatcgggagcttattagaaaaaaaaaaaaaaaaaagcggccggatgcccgtgcaattattcggctagtatatggttcaaccctaataaaagttaacacgtaccttgttggtggcagcccc

SEQ ID NO: 134146 - DNA, 391 bp, Zea mays
  unsure (1)..(391): unsure at all n locations
  Clone ID: MRT4577_53828C.1
aaaaaaaattttgattaataattttttttattctctttaaacggggatataaatattttctaaaaaaaaaagtgaagtttttgtgttttatcatactttaaaaaatcaagttcccctaaattttacttgtcccgccgtatccggggggtttaaagatttcttttttncctctgggcaaattttctttctaaaatgctagggtctcaactcctcttttttatgttngtttttctcgtttcttcccttttttgaaaatttttaagactctcttctccttaatttcttaattttttttttcactcttttttgtggctccctttccgttttattgttttggattttgtttaaccgcgattgctggccctgattttgtctcttgtcgttttctgct

SEQ ID NO: 134147 - DNA, 324 bp, Zea mays
  Clone ID: MRT4577_53829C.1
ggggaaaaaaccgggggctttttttttattaaaaaataaaggggggggtaaggacatatacgggggctactggggggggaaaactaccctaaagggggaaaaaatgggggggggggaaaatggtaatgttttaagccgaattggggggttccccgccaaggggcggggaaaagttccccaggttgggagttaatgacgggggggtgggccccagcattcttgtggacccccgggcggggggttagggccaccatccagggggggttttttttggggctggaaaaaacggccggccccggggtgtttacccgggaatttgggacg

SEQ ID NO: 134148 - DNA, 481 bp, Zea mays
  Clone ID: MRT4577_5382C.1
ggggccccaaacccccaaccatatataatgggtctggggggttcctttggcgggcttcgggggggggggggggggcttttaaaacttttggggcctttacttgacagggggaaagaaacaaatctggggatccaggggaacgtatttttaaacaatttgcacacgtgggcctcccaccaacaggtagggtacatacgggggcacatgctgaaaacactcgctttatgtctaactggcccttatgctggtgctgctgccccccccaaaagtaaaatgcaggccgttttttccaaaggatcggagggcccctgtacggcaccccgaacatgggcagttccttgggcttgggcgtttccaggagccaccccaaacgcgggttttggtcctaaaccccgggggcctaatttgttatcgccaatataaccgcggtatggcaagccctggtagtaggggcaccccccgtccccggaatagggggggc

SEQ ID NO: 134149 - DNA, 327 bp, Zea mays
  Clone ID: MRT4577_53830C.1
aggcaaaacatttccgggcccccggggttataacgggcctcacgatcgaagatttcacagggtaataatgggggaagacaaatttggtgaaaacaacagcttccgcccctgggtaatgccccctggggtgaacaagtaaaattagactttggggggaacaaaaaaaaaaaggttcatccactggattttatttgaagccttctgatttgggggaaaaagggaaaaaacttgggaccattttttttcaacaccctagggaagggtcctctgggataggggaaggggtcccaaggactgaagcttggggctttcctttttcaccaaccc

SEQ ID NO: 134150 - DNA, 453 bp, Zea mays
  Clone ID: MRT4577_53831C.1
gccggccggttccggatccacttgttattatttgctaataaaaaatatgaatccagctcaagcaaataaggttgatgtcagtaaattaactgaagaagaacgaaagttatttcgcatgtatggcaaacttcctgatcgtaaagatcttttaggccacagactcaaggaacgtaaatattttgattctggtgattatgaattaaccaaagctggtaaagaacctttagcaacaataggttcagaacatccttcacctgataccattcctcactcaaatcctgtttctcaacctggcgcaagtcctgtgaaagaaagtcctttggctgagaccggaagtgatgaaaaagcaaaagaataaaagaggaatttttttttttttatttctttgttataccaataaacattataaaaattgtcctgcccatgcaaaaaaaaaaaaaaaaaaggccccta

SEQ ID NO: 134151 - DNA, 358 bp, Zea mays
  Clone ID: MRT4577_53832C.1
aacaaaatcataccgctttggaaaacttaattccggtggaacttaaattgggtggggggcctaaaccagcttttacaaattttgacttgtaacccaactttttcctacaatacttttttttttcactggtacattttaaaacttttggtttttttttacattttaacccaaacaggccggtttgaatcaaacttttttccacgaattaacccgtcccctcatgccttttttaggccctattcgggttttctcattccatgttgataaaatggccttgggagaaatttaaaagaattttggttcggtttgggtttaaacccccttaatcccggtgaatcccttttggtttagatttaaa

SEQ ID NO: 134152 - DNA, 2248 bp, Zea mays
  Clone ID: MRT4577_53833C.1
gctgaggattccaagcagcagcacacaaaagcaccatctttttggaggcttgcagagcttagttttgcggaatatttttatgctctgttaggaagtgctggggctgcttgtttcggttcatttaatcctcttcttgcttatacaatatctcttatagtagtggcctactacaaaataggggtccgtgatgtacatgccgaagtgaataagtactgctcattcattgttggcatgggtataattactgtactagccaacttcttgcagcacttctactttggtataatgggagagaaaatgaccgagcgtgtcagaaggatgatgttttctgcaattctgcgcaatgaagttggttggtttgacgacgaagaaaatagcgcagacatattatcaatgagacttgcaaatgatgcaacatttgtccgcgctgctttcagtaacagactttctatattcattcaggatacatcggccattcttgttgcacttcttcttggtatgttactacaatggcgtgttgctcttgttgcattggcaacgttacccatccttatcatttctgcggttgcacagaaaatgtggctttctggcttttccagaggaattcaggagatgcacaggaaggcttctttggttcttgaagacgctgtgaggaatatctatactgtggtggctttttgtgctggtaacaagataatggaactttatagattgcagcttggcaatattctcaagaaaagctttatacatgggatgggcattggttttgcctttggcttctctcagttccttcttttcgcatgcaatgcacttctgttgtggtatacagccgctgctgtgaaggacggacatctcagtctcgtaacagctgtcaaggagtacattgtcttctcttttgcgactttcgcactggtggaaccatttggccttgccccttatatactgaaacgccggaaatccctgacctcagtatttgaaattattgatcgtgtacccaagattgatccagatgatgccagcggcctgaaaccacctaacgtgtatgggagcattgaattcaggagtgttgaattttgctaccctacacgccctgagatgatggttctgagtaattttagcctcagagtgagtggaggacagactgttgctgtagtaggtgtatcaggatccgggaagagcacaataatttctttgatcgagaggttctacgatccaactgctgggcaagttttgttggatgggcgtgatttgaagttgttcaacttgagatggctgcggagccacatggggttggttcctcaggatcctgttatattttcaacaaccataagagagaacataatatatgcaaggcacaatgcaactgaatctgagatgaaggaagctgccaggatcgcgaatgcccatcacttcatcagtagtctgcctcatggttatgatacacatgtgggaatgcgcggggtggatttgactcccgggcagaagcagcgcattgccattgctcgtgtggtgttgaagaatgcgcccattttgctgcttgatgaggccagctccgctatcgaatctgagtcgagtagggtggtccaggaagcccttgacacattgatcatgggaaacaaaacaacgattctgatcgcacacagggcagcgatgatgaagcatgtggatagcatcgttgtgctaaatggtggtaggatcgtcgagcagggaagtcatgattcgctggtgcagttgaatggtttgtacgtgaagctgatgcagcctcattttagcaaagggtttcgccagcgtagactaatatagcggctctggttgtagatggtgtacattagcccgcccgtggagctaagctaatcagctctgcttcactgaccagatgccctgtggccattcctttttttttctttcctttttggtaatcgctaattcttttttcagtgtgtgtttggtgatcacgaggctgggaagggtgttaccctgttcggtgtagtttttgttagcttattttttcttttgtggtagcctttagaatttggtcttgctgatgctgggtttgggtgtagtttggaactggaattgtaattgtaatcagagcagtggtgggaggaggaagcgcgcactattgtttcgccagtaactgtctagtctaagcaagcatgatgatgctaggagatggttttgtggtagtcagcatcattgtaacctcttgtgattgttatttgcagaaaattaaactacattttcagtc

SEQ ID NO: 134153 - DNA, 518 bp, Zea mays
  Clone ID: MRT4577_53834C.1
atcagtatgtctgcactctgcactgcagtctctagttcttgccttcttggtcatagtctgctctagtcaatagtcagtcttacaccacttaccagcaccaatgttctattgttcttacttcttaccacttgtctgcactctgcaccaatgtttatatttcttagctccttagcagcacgccagcaccaatgttcttaccagttaccaccagtccagcacatatctagttatctactgcctagtagtgacttgacctctatctgttgacatgttcagagtttgatggtggctgtggacaaagaggtgctggtgttgaggtcatattccctgggtccaatgtggttggcagtagatgcagaacaacaacaagaacaaccaccaaaagcaactacagatatggaccaagatgaatctgaatctggaggaggggaagctgctgctgctttttgcttggatgctaatctgctctaggtagcagactagcaggcaccgctactgcattaccattactacaatac

SEQ ID NO: 134154 - DNA, 544 bp, Zea mays
  unsure (1)..(544): unsure at all n locations
  Clone ID: MRT4577_53835C.1
cccacgcgtccgaggaaacagcgtctcctcgcaaacccatcgatgaagcaggccatgctgttcccccagcctgctcaggcgggtgatgcattccaccagatcctgaatgggctcgcacgcaagctccctcatggtgacaacgtcttcttgaagcccggggagagggtcctgaactggaccgccgggccgccaggcgacctgaagccttggtagcatctgcctgccatattactagaactttttggggaaaaaaaaggaagattgaggacatggtgatatatatacgtgcgcctttaagttaccatggctgcatagttctgaccacaagccaaatgtacatttttgtatgttctttctccttttccctatagctgctatacctgtataccatatatcttcatttctctctctttttgcccctttcactaggtgatgagaatgtcagccttgtcaatcatgtggataccatagtcgaaatctacaacattttactcaannaaaaaaaaacaacacagggcgggccgctnnctagaggattnccaag

SEQ ID NO: 134155 - DNA, 243 bp, Zea mays
  Clone ID: MRT4577_53836C.1
ggcatcttgacgaagatccacgaggttgcattatgcaaagacaagagggggaggtgcgcagcaccaccccacagggagattgccgtgcaagcaccttgtacccatactgacctgaatcatccccctgggctggttgcagcacaaattcctgtccctgtttggccgtatctcgctgcccatcacagccgactcaggcatgtatgtaccacgcagccgctccgtgtggcctttcagcaatatcta

SEQ ID NO: 134156 - DNA, 226 bp, Zea mays
  Clone ID: MRT4577_53837C.1
taaaaccacggtattgcttaaaatcgagatgtctttggtttcattagaaaactgaagtattgatagagtatttcttttttttactgatgtcctgagtggagtttccaaaactcctaaaataccaagtttccaaacagtgtcatatgacaactgactttgctttttagcgtttttcaagattaaagttttccattcttttctatttaccttttacatgcggttattt

SEQ ID NO: 134157 - DNA, 130 bp, Zea mays
  Clone ID: MRT4577_53838C.1
aaaaataccagaatgaagaaattttagatagagttaacttatgatatacatcatacgaacaccacaggtactggtacttatgacctccatacataggttcagagaatacaccaccagtagatccaacata

SEQ ID NO: 134158 - DNA, 674 bp, Zea mays
  Clone ID: MRT4577_53839C.1
tgggtacctcgaggccggcccgggccggggtattccactcatctcgctaacactatagaaaaatccactgacaattctgctgcgagacattcatcacaccaattaagcactgagagcatctctgaactaaatcactacttgagcaattgcttcctctgctgctgtctctgttgctctctcccccccgttcttcacagcgtccatcacctgaccatgctgcccgaccccaccacttccaccccatctttctgcgacgtctcctgatgttaccccacctgctatgtctcctcaccggaagagaccgctcaacggcgtcacactgcggtgccatgaaagtgcaatcgtgctctccactgcgaaacaacaatatctaacttgctgactcatggacgtacaccgtcaccgattccattacaaaatgtagactccgctaccatccctgctatacacgcataccgggaaactctgctcggtctcagacttcaatgtccctattcaggctccatgaccatccttcactacatgagaaccccctcaagccaaactgtacactcgtgaaaatgatacgcgcactgaaagacatgctataacgcagacgagacaccatgtaaggatgcaccctatgattcggatgacgacacatgcattgccctgtcagatgatctcaactgact

SEQ ID NO: 134159 - DNA, 2185 bp, Zea mays
  Clone ID: MRT4577_5383C.1
ctcactaaacccttttgccctaaaccctaaacaagaagctacccgccttccccaccccaacccccaatcctgccgcggtgccgccatgtcgtccacgccgccggccgtcgcgtcccccgcctccgagcaaacaaaatccaagaagaagaagcacaagtccaaggatctccccgccactgacccgccatcgctcgccgaggctgaggagaagactgatggctacctaatcaagccccagtccctggtgccgtccctggacacctcgacctggccgctcctcctcaagaactacgaccgcctcaacgtccggactggacactacaccccgctcccctccggccactcgccgctgaagcgccccctcgccgagcatctccgctacggcgtcatcaacctcgacaagccgtcgaacccgtcctcccacgaggtggtcgcctggatcaagcgtatcctccgcgccgagaagaccggtcacagcggcacgctcgaccccaaggtcaccggcaacctcatcgtctgcatcgaccgcgccacgcgcctggtcaagtcgcagcagggcgccggcaaggagtacgtgtgcgtcgcccgcttccacgccgccgtgccggacaccgcgcgagtggcccgcgcgctagaggcgctcactggcgccgtgttccagcgcccgccgcttatctccgcagtcaagcgccagctcagggtgcggacaatctacgagagcaagctcctggagcacgatcccgagcgccaccttgccgtgttctggatctcctgcgaggcaggtacctatgtccggactctgtgtgtgcaccttgggctgctccttggcgttggtgcgcatatgcaggaactgcgccgtgtcaggtcggggatcctcggggagcaggacaacatggtgaccatgcacgacgtgatggacgccatgtggtcgctcgacaactacaaggacgagtcctacttgaggcgcgtcgtcatgccgctggaggtgctgcttacaagctacaagaggcttgtcgtgaaggattctgccgtgaatgctatctgctatggcgctaagcttatgatccctggcttgctccggtttgagaatgatatcgagaccggggaggaggttgtcctgatgacaacgaagggggaggcgattgccattggtattgccgagatgaccactgctgttatggcaacctgcgaccatggcgcggtggcaaagatcaagagggtcgtgatggacagggacacgtacccgaggaagtgggggcttggtccagtggcactcaagaagaagaagatggtcgccgagggcctccttgataagcatgggaagccaaacgagaagaccccagctgagtggctccgcaatgtggtgcttcccactggcggcgatgtatcgatcgctagcatcgcagctgctcctgagccagagaaggtgaaggtggaacaggatgcagttgccggtgaaaaggtcaaggagaagaagaagaagaggcagaaggatgaaaacaatggcgacgatgcttccgttccggctaagaagatcaaggtcgaggaagatgccgaggtagtggaagtggaaggggacaagagcgagaagaagaagaagaagaagaaagaaaaggtagaatcagaatcagctgatgccgccgaagcgaaggaggtggagaaggctgatgatgcagctggcgagacgggcagcgaaaagaagaagaaaaagaagagcaaggaaggaagcgccgcggcggcggatgcagagagtgctgagcatgtagacggggcgggggtggagaagagcaagaagaaaagggagaagaaaaaggagagtgtggagacagagcaggcatagtaattagaacttacaatggacggggttgtctaatctgttttgggttgcaggggtaaggggcggtatttccaattttccggctgtatttttgtttctgtgagtacgagacaatgcgatgagttttggcctcttgcaacaaaaaaaaaaaaaaaaaagcggccattgagctggtaactttcgagctttgagaatgggtggcgagtctgctgtgctgaagagctcgagcagcacttgcttatgcctgcccctggtgccttggtttttggggtccaaggtgggcccccgccggaggtgccggggggggttgcctggggtgggcctttttttggccttgggttgatggat

SEQ ID NO: 134160 - DNA, 580 bp, Zea mays
  unsure (1)..(580): unsure at all n locations
  Clone ID: MRT4577_53840C.1
cggnaaccagccgatcaggatatcttatcgctatcgggtaacctgtgtcccagttgctagcctgactacggattctcctatcatatgttgctccagatcttagaatcgaacaaaacattgtaggcgccttaaacttgacagagatagtaagttgacgaatcagagatgaatgattttgactgtctttgacatactagtgcatgtctcttgctaatggcccacaagtaacgaagcctttgcttgaaacatctataagaggctttcttgcggaaatttctgcatccaattactcctatgttggattgtttcagcactgtccttactataatgaatgccggagtgttaccatctttataacatacattcgtatatcataaggcacgattcctgagtattgtggtgggattatttctgttaaagcatctctttagagtgatacacgggagcttgcataccaatctgtactaaaaggtaaaatcagagttaacaccatatcactatgatcctcttgagtaccgatctgctaaggcaattgcatttattgtacaatatgatagagtactcatatgttaatgcacca

SEQ ID NO: 134161 - DNA, 785 bp, Zea mays
  Clone ID: MRT4577_53841C.1
ctggggtaccctcgggctcgccgggatccacctaccccgccacaaccccacttcatcatggaagccatcaaggataccgtaaacagcgcgcttgagaagcttcacatcggtggagctgcccaaggcactcctgcaaaggagccatcagaggctgagttcaatgagctcaaggccaagtaccagaaggctggccaagatcaagtttttgctttctacgacaagctgtctaccgccgagaaggcctctctctatgagcagctaaagaacttcaaccccgaatacatcaacgagatcaccgagcgtgccctccaccctgcacagaccgaagcaaccgagaacaagctcgagcctctccccgaaaatgccacatcttcagtcctcgactcatcgcagggcgacctcgaccaatggtacaacagcggcttggaattcattgccaacaaccaggtcgcagttgtgctgatggctggtggccaaggcacccgcctgggaagctcagctcccaagggatgcttcgacattggactcccaagccagaagagcctgttccagttgcagggtgagcgcatcaggaaggctgagatgcctgctgcaaagaagcacggcaaggaaaacgtcaccatcccatggtacgttatgactagcggacctacccgagggcctaccgccgagttcttcgagaagcacaactactttggcttgaaaaaggagaatgtcgtcatcttcgagcagggtgtcttgccatgcatctcaaacgagggcaagattctcttggaaagcaagtc

SEQ ID NO: 134162 - DNA, 562 bp, Zea mays
  Clone ID: MRT4577_53842C.1
ctggccggggttttcgccccattcgctagggctagggtttcaggccccttcccctcaccgagtcgccgccgccgtgatcgccatccttggacctcggctccccgaacactagccccaccgttctcccaccaagcttcccctccttaacaggccaacgggtcccaggtgtctcttcgttgagatatgttgtctactatgggccacaccatagccgtcaatcaccatcgctcgaccgcacggagtaccttaggtcgatagagtgcatccgcgagtccgatgattcgctcgagttcgacgatggaaggagtcgttcgtcggtggtgaacaatcattgctcacctaggtgaggccttcagcgagcgaggttagacgcactttatttttccaaaggagaaaaatggaaggaagaaggcggtagagctgcctgcagcccaacaccacgctgcgtgagtgtgagtttggatggcctagtagcgctaagactgggcccaaacaagcatagaggagattattatccgtcttccttgaggggcctgtcaaaaaaaaaaaaaaaaaagcggcc

SEQ ID NO: 134163 - DNA, 730 bp, Zea mays
  Clone ID: MRT4577_53843C.1
gtcgcagctcaggcgttggacgatgacgtagcgaccggacatgtacagcttcatgacgtagcactccttgccttgcaccgtgtccatggaggtcggcgtgtcaccatcccaacagttgaggtggcactcgtcccagtagatggggcagtagtgaatgagtgaatcaatgtctcgagacttacatcgcaagttgaacaaatttggctgttgaacaaatcggaacaagacttggataacatctgcccacatcgcaaatcctagatcgtgagttccttcatgtgagtgctaacactcctgctaactaatggtggaggagagccttgacctgctgtgtgccgcacagctcgaaaggcagagcgttcccctggagctggaccgcgctcgccgacgccgtggttcccatggcaccggcagcaactttgtcggccagctccccgccgccgcaggtgaggaagcagtagtacatctcaaggttttcggcaccatggggagacgccgacgcagcagagtcatgcatggtgaacgccgtcgtgttcacgtccaccgcggccgggacagcggcggcaggtgtcgtgctcgtcatgtcgccgaggagaagggtgagggagaccagggcatggaggaggaggaggatggaagaagctgccgagagaggcatcgtgtcgtcgtcggccgggacgccgcgcagagcggaaacagagctagctgctagtctcgtggatgggcctcc

SEQ ID NO: 134164 - DNA, 604 bp, Zea mays
  Clone ID: MRT4577_53844C.1
ccggccgactccctccgatcccgcccatgccagaagaaggactgccgctccgatgcgaagatggacttgcttcctactaggtcttgctatctgccaccaggccgtgccccatacccctataacgaccccggatcctcgcctgcggaaccccgtcccccgccctagcggcggcctatcgacatcatgatcctggcggcctcagctgacgtgcttacctacctcttccggctagacaggaggcatgtccatctcatcctcactaagagttcgaactccatcatccctcctatccgaggaagacttctttgcaggacgaatcgacttacacaggctcgcattgctgaatgatgacatgaaccatcgctaagagatgcaaatcaggtgattgccattgatccaactctggacactgagcatgcctctcgtgaacacatcctgcccgagcatcttctggtaatcgccgctgatggagacctagtggtacacggaccagcctttggacctgaatatctcctgtgctgaggaagacgactgatatatcgttcccctgtcgatgttgatgaacttcgagaacaacacataggaggacggagaaaagatgctc

SEQ ID NO: 134165 - DNA, 198 bp, Zea mays
  unsure (1)..(198): unsure at all n locations
  Clone ID: MRT4577_53845C.1
cccacgcgttcgcccacgcgtncgcggacgcgtggggtcacttgcattntgtcaataccttaagcaagggccaatgtctcaagccccacccccttctttccaaacccaatgggaaccacgtaaatttcaaggtaacccaacttatgccattaaaggaccaagaacccgtgggttttggttttggaccaaaaatggcca

SEQ ID NO: 134166 - DNA, 241 bp, Zea mays
  Clone ID: MRT4577_53846C.1
gccggccgggtcgcatctcaagaactatcactctgctactctatccctccttagtctctcgctacagttccgcgcgagccggctatgtctcatacacgacatacgacacctctagctgagagtcgcatatacacatgcgaggtaagggagatggtgccggcaatgcgtatcgcatctcggcacgacgtactgcttgcgtcggcgtctggtagcacgaccgtgtcgagatcgtcgccaacga

SEQ ID NO: 134167 - DNA, 289 bp, Zea mays
  unsure (1)..(289): unsure at all n locations
  Clone ID: MRT4577_53847C.1
ggggggaaaaaaacaacaacgtgtttcgaggaacaattcacatccagcggtgttttgtttcttgataaagagttgggagggcttattcccttccacgcctttacttggggggggggggggggaaaaannnnnnaaccccaaattcttggaaaacccccggggttttttttatttttgggccccctttttttggtctacaaaatcttttttttgggccaaaggcttgggccaatttttcccccggaatttccggcccggtccctttggggttcccacttttccttttttg

SEQ ID NO: 134168 - DNA, 396 bp, Zea mays
  Clone ID: MRT4577_53848C.1
gcgacaagggggtgggtaatttacatgcaaatggggtagcctcacgccctgcacaacacatatggagcgcgacacatggatagcatcgcacgtaacaagaactacatcaaaaagtcagaacaaaatcgcttattagatgatccagccttagcatattttcgcccttgtccgatgatccagcttttagggggggccgatatgtcacttgcacgcggctggggaaggaagcctacacggcggaggcgccggccttgccgccgccgccacggccgtgctggggctaggcggccccgtcggcaggctcagtgaagctggaaaacagcgcggaactggctaggaacgagggccccctgtgcccggccatcaccacgagcacctcaagcatggcatcctccc

SEQ ID NO: 134169 - DNA, 563 bp, Zea mays
  unsure (1)..(563): unsure at all n locations
  Clone ID: MRT4577_53849C.1
aatggcaaatctccaacggaacttttatttttgaaaatgagcttattgaactcgtaagttcattcattaactagtaatgaccagaagcttatgctgtgtagtacaggtgtccctcggttggttagccgcagcgacggcgctataggagatccgatcgtcttcaaatcctcttaagaagggccctgagatgtggctgtaggctagttgtgattgttgccatctgaacgacgtacgagagctccccatctgccacttgaaaagttctcgtgatctgcttcacctttgatgcatttccaactagttcactttggagtgtcactgttttcttcttttttgatgaagttggttgcgaagctttcttctccaatggagaagcaatgtcttttgtgttgctgaaagcggcagcctctatatgtttgattggatcagcagcatacgcctccttttcagcagagacattgactgatagaacttcttgaagatccttaatggggatttgttgcccaggctcacttttcacagacggagtctgtgttgcctgcttgntctttctcttctgtttc

SEQ ID NO: 134170 - DNA, 180 bp, Zea mays
  unsure (1)..(180): unsure at all n locations
  Clone ID: MRT4577_5384C.1
ggaacaatacttttttttttttatttcaatagancattcaagggaggggctcacacttacactgccagccatgtttatacttgacacattattactcaatcattgtctcttaattactcaactagctagctagccagcgactattctacagcacataattttttttagtggttgacaccc

SEQ ID NO: 134171 - DNA, 159 bp, Zea mays
  Clone ID: MRT4577_53850C.1
ttataacgtacacacgaacgtgagctcagaatacagcacaagcaaccatctaagattttacctcgcccaagactatcccaagctgaataaaatacattacctggagttgtccagagggacctaactggacactgagaggtagatctaaatgggaatgta

SEQ ID NO: 134172 - DNA, 761 bp, Zea mays
  Clone ID: MRT4577_53851C.1
tgacgccgccgccgctcctccccgatcccgccgccgccgccgtcgccgccgcgccctcaccaggcaccaccgcaagcatggctgccgtcctcacccgcccgacgccgggcacggtccagtgcttcgggcgcaagaagacggcggtggccgtcgcgtacaccaagccagggcgcgggctcatcaaggtgaacggcgcccccatcgagctgatccgcccggagatgctccgcctcaaggccttcgagcccatcatgctcgccggccgctcccgcttcaaggacatcgacatgaggatccgcgttcgcggcggcgggaagacctcccagatctacgccatccgtcaggccgtcgccaaggcgctcgtcgcctactaccagaagtatgtcgacgaggctgccaagaaggaggtcaaggacatcttcgcccgctacgaccgtaccctcctcgtcgccgacccccgtcgctgcgagcccaagaagttcggtggtcgcggcgcccgcgcgaggttccagaagtcttaccgttgattggcctgcaggatcgtcgactattgggtggttttctctgctttacctcccaagttttagactccgtatgattagttccgtaccttggcaagatattgtggtatgatttgctgtgagatgttttaagactactactgggtagttgctcgattgtgttttttacttgttatgttgaggaattttgatatggttgcgtacttgcactgtattttatgcctatgtccggttttatgc

SEQ ID NO: 134173 - DNA, 144 bp, Zea mays
  Clone ID: MRT4577_53852C.1
cgtccccacgcgtcgccccttctaccatcagcgtttcccattcgggccctaaccttctttccatactcgcggaaccaccacaccggcaggggaagcggaggggagcacctcgggccaggcaagaggtgcttgcgcagctgggcg

SEQ ID NO: 134174 - DNA, 248 bp, Zea mays
  Clone ID: MRT4577_53853C.1
gccgccggcttcgcgcgcctccggtcgacgccgcgtttctcgagcgccggcctgtcgaataagggaagcaggtccggattctcccgacgtacaatccaatagtcttccacacatggtttctgtttgctgaggtatacacaatgggactttgtgtgttaacctaaagcttggggttgccatgcagagagcattttattcttgcgatacattgagcgattgctgctgatgatgctgataagaagggccat

SEQ ID NO: 134175 - DNA, 263 bp, Zea mays
  unsure (1)..(263): unsure at all n locations
  Clone ID: MRT4577_53854C.1
gggggaaaagggggttttagggggacggaaacatttggagggcccatagggggggggggggaaccatcgggggcggggggacattaaaaaggggacagggacccccttgtaaagggccataaaaaaaatacgagttggggggggatcacaagggaatgttaaaagggtttttaaaaggggagttttttaaatcccatggaagggccttataangggtagggggggtaaattttgacaaaaaaccctgcccggggggggggggt

SEQ ID NO: 134176 - DNA, 689 bp, Zea mays
  Clone ID: MRT4577_53855C.1
ggactgttatattttctccctgagagtcagagttgctggagtggattcaagcaatgagcaacgcgctcttgaaggtccacggatggatcaccagaactcttccagttctattgatcctcttattcaggcgaacactggatccaatgctagttcatcactgtcttttatgagagcttctacaggtgcagctttgaccaagcgaatggagggcagatgttgcagagggaacatttccggtttctcaagtccgacagcccacctttcaggactgcagccgcttgacctgcagcacgaggatcatccatcccaccatgtaaatgtcgaaggtccactgttacatatcgccttctcgccggcgaagttataggcagccggaataaggagagctggctgttggatcgaagcctacaggattccaacgttcggatcggcgccccgtccagattgcaggcatttctttgccgtccctcttctttgttcaaacgagaacacacacccattgctggtacagaacatgacataaaagattcagtgacgtgatttgaccgtgtggctttgtggtgcctgcaaggccgtgtagcgaatctcagacctgttcttgccggtggcttgttgatgctgatgactgttacgcactacctcaatgttcttctgcaatgggtgtgtgttctcgtttgttctagtcgcga

SEQ ID NO: 134177 - DNA, 629 bp, Zea mays
  Clone ID: MRT4577_53856C.1
cacgtcactgaatcttttatgtcatgttctgtaccagcaatgggtgtgtgttctcgtttgaacaaagaagagggacggcaaagaaatgcctgcaatctggacggggcgccgatccgaacgttggaatcctgtaggcttcgatccaacagccagctctccttattccggctgcctataacttcgccggcgagaaggcgatatgtaacagtggaccttcgacatttacatggtgggatggatgatcctcgtgctgcaggtcaagcggctgcagtcctgaaaggtgggctgtcggacttgagaaaccggaaatgttccctctgcaacatctgccctccattcgcttggtcaaagctgcacctgtagaagctgccatccaggccaaccatcatcacagtattctgggcaccaaaggctactatgtaacgagtgacttctggtaaatggaactgagcaaatgaccactctgaactgaaatacttcggcaggatccctctcataaaagacagtgatgaactagcattggatccagtgttcgcctgaataagaggatcaatagaactggaagagttctggtgatccatccgtggaccttcaagagcgcgttgctcattgcttgaatccactccagc

SEQ ID NO: 134178 - DNA, 2032 bp, Zea mays
  Clone ID: MRT4577_53857C.1
cattgggtacctcgaggccggccgggacgctgtcacgcatccggcggagggagcgcttcccgagcccccctctctgcccttccgggtccgggcgcccggccttcgcttgcgccactcccgtggcgcccacggccgcgcacgcgtggtcgcctcccctcggcctcgcctgcaaccgttcccgccggcctcccgcgtcgcggcgcaagaggataccctggatttcgtccgtggcgagtggctaccgcttctgctccttttgtgacagctgaatctttgtggttcgaaggcgattgacttgggttcactgacgcggtgacgcccaatgagctcccacgtctccacatcgcggggtcttcatcccccaggcaagcttgggacgttggactcacccggtgcgtggcagccgccagcacctatggctcagcccgaagcaggccgcggtgatgaccaggaggtcaggctgttgtcggttgcttggaatcaggattgtggatgcttcgctgccggtaccagtaacggattcaggatctttaactgtgagcctttcaaggagactttcaggagggatctcaagagcggcgggttcgcgattgtcgagatgctgttccgttgcaacgtccttgctcttgtaggtggcggctccaatgtgctgtacccgccgaacaaggtgatgatctgggacgatctcctgagccgttgcattggggagttcgccctttcgctctgatgtccgagctgtaaaattagcaaaggactacatcgtgattgtcctcgagcgcaagatatttgtctacaacttcaccgatctgaagctgctctaccagattgacaccctgtcaaatcccaatggactttgctgcctctctcatcattccaatacttcagtgttggcctgccctgggttgcaccaggggcatgttcgtgtggagcatttcgggctgcagatggtgaagacaatcccagctcacgattcacacatctcttgcatgtcactgacaatggatggtctcctgctggcaacagcgagcacgaagggcactttgattagaatattcaacacaatggatggcactcgtctacaagaggtacgcagaggacttgacaaagcagaaatatacagcattgcattgtcgcccaatgtgcagtggttggcagtgtccagcgacaaagggactgttcatattttctccctgagagtcagagttgctggagtggattcaagcaatgagcaacgcactcttgaaggtccacggatggatcaccagaactcttccagttctattgatcctcttattcaagcgaacactggatccaacgctagttcatcactgtcttttatgagagggatcctgccgaagtatttcagttcagagtggtcatttgctcagttccatttaccagaagtcactcgttacatagtagcctttggtgcccagaatactgtgatgatggttggcctggatggcagcttctacaggtgcagctttgaccaagcgaatggagggcagatgttgcagagggaacatttccggtttctcaagtccgacagcccacctttcaggactgcagccgcttgacctgcagcacgaggatcatccatcccaccatgtaaatgtcgaaggtccactgtacatatcgccttctcgccggcgaagttataggcagccggaataaggagagctggctgttgttggatcgaagcctacaggattccaacgttcggatcggcgccccgtccaaattgcaggcatttctttgccgttccctcttctatcttcaaacgagaacacacacccattgctggtacagaacatgacataaaagattcagtaacgtgatatttgaccgtgtggctttgtggtgcctgcaaggccgtgtagcgaatctcagacctgttcttgccggtggcttgttgatgctgatgactgttacgcactacctcaaatgtctttctgcatgttgtgcgactgcgttgctggtagccgttggaatgccagacctgctcgaatgattgttcgatgtgcgttgcccc

SEQ ID NO: 134179 - DNA, 765 bp, Zea mays
  Clone ID: MRT4577_53858C.1
cctgtgcggcgctcaggcggcggttcgaaacctctcctccactggtctctcgatcttgccaatcaagttctttcaccctgcccatgagcttgcactgctgagctgctgcgagagcatcccccgcatctgctggatcacgtcgatgcagacgaccatgaatatcactattatcgatctacttcgtattggtgtgtgaacttaagtaccacagaacgacctggctgccatacattctgatatgtgtgccccagatccctcgacacaaaatcaaagtgcttctgcttgctatctctctctgcgtgttatgacgtcagacaatatggctcatgtactacacgtgatgtctacctgtctcgataaaatgtccaatagcatcagctgtgaccatatattagtcgagacacaccatgcttacttgataccatatgtcttcctcaagcagattccccgtctgcccctgtcctccgtctcaccatctaaaactagttccccaccctggctactcgcattcaatcccttgattcccaagaccaccaaactcaagcaaccgtccagttccacctctcgaccgatctttgcatgtattgcgcccgctcctactcggcgatttacgacaatcagatccagcaaaacatccacatgacccacatctttcttgtttcccttctgaacaataactgccacaatgtgagatgcctgtacgtccagagcaccatcccttagccatacatggcgatccaagaatgctcatgtgagaagtcagct

SEQ ID NO: 134180 - DNA, 454 bp, Zea mays
  unsure (1)..(454): unsure at all n locations
  Clone ID: MRT4577_53859C.1
cacatttattccagatacacaaggcctacggaagcaccaaccatctgccttcagctcatacttgctttaaccaactagaccttcctgagtacacatcgaaagagcagctccaggagagattgctactggctattcatgaggcgaatgaaggtttcggatttggttaatcagtcactcctgcacctgtgtgcaagaaatttcagggagtaatgtacagataccgtcggagttgcaataggcgaggggaatgtgcacggactcttacataacctgctactagattcatttgttgcctgcatcaaccatcggcgtgggtccctgaagactgatgagatttgttgacaaagtaccggcctgcccacgatgctttataggactggtgctgcgaaggatgtgcacggaggtgtagcangaagtgctagaagacagcaactatttggggttcataaatatt

SEQ ID NO: 134181 - DNA, 2179 bp, Zea mays
  Clone ID: MRT4577_5385C.1
aatttacctaccactaaaccctaagcccttgcattaaaacggactttctccgttgccgccacgcgctcactccgccactcccactcccccctccgccgctccacttctcctccgtcgcgaaaaccctagaaactaccgaccccctcggcccgccgtcatgtcgtccccgccgccggctgtcgcgtcccctgcctctgagcaagccaaatcgaagaagaagaagcataaatcgaagaacgacacctgttgccgctgacccgccgtcgcttgctgaggccgaggagaaaactgatggctacctcatcaagccgcagtcccttgtaccttccctcgacacctccacctggccgctcctcctcaaaaactacgaccgccttaacgtccgcaccggccactacaccccgctaccctccggccactcgccgctcaagcgccccctcgccgagcatctccgttacggcatcatcaacctcgacaagccgtcgaacccgtcctcccacgaggtggtcgcctggatcaagcgcatcctccgcgtcgagaagaccggtcacagcggcacgctcgaccccaaggtcacaggcaatctcatcgtctgcatcgaccgcgcaacgcgcctcgtcaagtcgcagcagggcgctggcaaggagtacgtctgcgtcgcccgcttccacgccgccgtgccggacaccgcgcgagtggcccgcgcgcttgaggcgctcactggcgcggtgttccagcgcccaccgcttatctctgcagtcaagcgccagctcagggtgcgaacaatctacgagagcaagctcctggagcacgatcccgagcgtcaccttgccgtgttctggatctcatgcgaggcaggtacctacgtccggactctctgtgtgcaccttgggctgctccttgggtgtggtgcgcatatgcaggaactgcgccgtgtcaggtcggggatcctcggggagcaggacaacatggtcaccatgcacgatgtgatggacgcgatgtggtctctcgacaactacaaggatgagtcatacttgaggcgtgtcgtgatgccgactagaggtactgctcactagctacaagaggcttgttgtgaaggactccgctgtaaatgctatctgctatggtgctaagcttatgattcctgggttactccgatttgagaatgatattgagaccggggaggaagtggttctcatgacgacgaaaggggaggctatcgcgattggtatagctgaaatgactactgctgtgatggcgacctgtgaccatggtgcagtttcaaagatcaagagggtagtgatggacagagatacatacccaaggaaatggggacttggcccggtggcactcaagaagaaaaaactggttgctgagggtctacttgacaagcatgggaagccaaatgagaagacaccaactgagtggcttcggaatgtggtgcttcccactggtggtgatgtttcaattgccagcattgcagctgctcctgagccagagaaggtgaaggtggagccggacacagctgtgactgaagaggtcaaggagaagaaaaaaaagaggcagaaggatgatgctgaggatactgatgcttctgttcctgcgaagaagatcaaagttgaggaagccactgaagcagtggaaggggagaagagtgagaagaagaagaagaaaaagaaagacaagggcgagtcagagccagctgaggtcgttgagggcaaggaggaggttgctacaggtgacgagaaggggagtgagaagaaaaagaagaaaaagaagagcaaggaagcaagtgatgctgcaaaaccagagagtgctcagattggagatggcacaggcaccgagaagagtgagaagaaaaaagagaagaagaagaagagccgagatacagaggaggcacaataggtgtagtttatgttggctagctacccttgtttagagatgctgggaagtttgagatgcagatgcctttcagatgctggggaagtttgagatgcctttcttggttgccttgtatctgttgcaactgctatgcctgatgtaccatccttaggttattgctattctactgcttaaaactgatatgccaagtggtggcattttcattgaaactcttgaacagcgatggttgtattgttgtttcacttaccagataatgcaatgagttttgttttgctct

SEQ ID NO: 134182 - DNA, 545 bp, Zea mays
  unsure (1)..(545): unsure at all n locations
  Clone ID: MRT4577_53860C.1
ggtcaactctgtattgccaagggtgagttgcaaatggcgtctgactcgttcaagattgtgttggatgaagatgagaacaattttccagctctacttggtcaggcctctgtttactttttgatgggcgaagcagagcagcaacacaaaaaatcattggagcattacaggaactcattagatctctacaagaaagctcttcgggtctattgcaattgtcctgctgctgtaaggcttggtatagccttttgccgatacaaacttggacaagtggaaaaagctcgtcaagcttttcagcgagttttaaagttggacccttaaaatggtgatgccccggtagcactggccatcatcgaacgatttagattggtttaaggcagaaccaggggaggcagcctaccccttatagccttaataggtagtgtatatatatatatataaccctagcaactcaacttaaattcgctggaagattgtatttatatgtgcaactattaaaacggtgtatgctaatgtccaattntattgtattntatttttttccaccc

SEQ ID NO: 134183 - DNA, 604 bp, Zea mays
  Clone ID: MRT4577_53861C.1
ccggccggggggctctcgctggctgccgccgttgcgagacgggcggcctccgcgtcgggaggaggccacgggcgcgtcgtcgttcgctcaaccgacggcggctgtctgtggttccgcgacgagggcgccgatggtgaaagtcgcggcaagcggctctactgccactccactctgcggcggtgccagcgttgatgaccacctctcggcctactgctacttcttctctcggcctactgctacttcttctccagcatgtgtctagtccatgtcgcgatacggggtttggatatttttgggctaggttccttcccaactctgcagtgtagcctctccgcagcgtggtctagctacgctcctttcccttggttctgatggcgtggctggctgttgccctttgaaggttgttcagcatgggtctggtgaatgaaggcatcgacatggaggagggaaacccggagatcggcatagcaattcttttgcatgacagttagttttattttattaatctgtgctagatcttcaaatacacacaatccaatcttgaatatttggttaaataagtatgctgcttgtactaaaaaaaaaaaaaaaaaaaggggcggcc

SEQ ID NO: 134184 - DNA, 831 bp, Zea mays
  Clone ID: MRT4577_53862C.1
ctcctcgagagacattagcttatatctaggatcaccgcgtattaattgaacttgagtaggattacgaaatacgagtgatctaaggataactttgaccatctcatggtcatcccatttggtgctcctgaggttgcgcacttggttcaccaaggtcttgagctggttgtatatggcttgtggctcctctccttggttgaggacgaatcgaccgagctccccctcgatcgtctctcttttggtgatctttgtcacctcgtccccttcatgcgcagttttgaggacgcccttattatactcctctcgacacaagagggcgaggagtatagttgtggcttgggagttaaagtgccgaatttggtcgacctcgtccgagtcgtagtccttgtcccctaccttcggtacctgcgctccatactcaacaatatcccatatgcttttgtggagtgaggttagatgatgcctcattttatcactccacatagaataatcctcaccatcaaaatatggtggtttgcctaagggaacggaaagtaatggagtgcgcttagaaatgcgaggatagcggaggggcatcttactatacttcttgcactcatggtgcttggaagtagtggacgacgagtcggagccggaggtggagggcgatgaagagtcggtctggtagtagaccaccttcttcatcttcttcttcttgttgcctctccgatgggacttgattgaggaagaggattcctccttgtgcttgtggctggactcccttgagtgggttctctccgggcttgcgggcttgtcgccggtcacgatctccctcttggcgtgatctcccgacat

SEQ ID NO: 134185 - DNA, 226 bp, Zea mays
  Clone ID: MRT4577_53863C.1
atttgttttttttttagccgatgcacggcagctaagcaaatgagaactagataccacccatgcagagagggttttggttcgcaccacagcttgccagcttcaccgaccttaatcagctggaccaaaaaaaagaccaacagctattcatagctcttaggcgacactgaaaaccagcggggagagcgcaagaaagccacgggtgtgcctgtgacgattaatgaggaca

SEQ ID NO: 134186 - DNA, 2013 bp, Zea mays
  Clone ID: MRT4577_53864C.1
ctattggaaaccaatgccatccttaaagaccaggcgtcccccagtatagcgcacgcttcgagcatattttaatctctcatcctccattccatgcccattgatcttcccacttagatttctcacctgatcaagttagcattttcttatacctcgctcgtgatcaataggttcccagtaaaactaccacaagctagttgaagttggtatctattacaaattagtttgagtgggatgctaggatcataaaacgtagaaagcgatccctaaactagacttcttactaacagcacccaatcacgatggctagctaatatggctgtttctggctttacaagtcaaattcttctctttcgttttacgagaagttaacgattgatacggtgtacgaaggtttgcatgtagaatagcttgcgtagtgctgaggctggctagtatactactagaactattgccacttacaagacgaggacgtagcctggcagccggaggtcgaaggttgcaaagtgccggccgggcaatacaagacatatcagaccggctatcaatcttgtctccgagccgacgcgtggcaagagttattcttgtgacttctgtgcctgctttaatatggaatggcgcgccggtatcgcagcgtcgagcatccctacgactggcaccggattgtccgcttaatcctccttgtcggggcgcgctgaggttagcaaacagcgtgagcgcgccatcgtcaccatcactaggattaccatcatcacaggctgtagtatatttgggggtggttctagtttgtaccgtcttcgttttgccgtcctttgtcatgaagcacgtgtggccgacgttggggaagaggaggcccatgttgccggcgatctttggggcattctcatcagaggaggagtcggtggagctctcgtgggattcccattcgcaacacacatgggtaacgcctccttgccttttgtattacttcttcttttccttcattcccctcttgtcgtaattcctgtctctaaaactagatataatagtaattaaattaaaattaccgggcttaccacatttgtagcacacccttttggtgcggggcttgtagtccttccccctcctttgcttgaggatttggcgaaaactcttgatgatgagtgtcatttcctcattgtcgagcttggaggcgtcgatgggaattctacttggtgtagattccttcttctcttcttctgtcgccttgaatgcgacgagttgcacctcgggtgtggaggtggcgccttgctccaagttgacaatgtgtttggagcctttgaccattagttcaaagctcacaaacttcccaattacctcctcgggagacattagcttatatctaggatcaccacgtattaattgaacttgagtaggattacaaaatacgagggatctaagaataaccttgaccatttcatggtcatcccattttgtgctccccgaggttgcgcacttattatactcctctcgacacaaggaggcgaggagtatagttgtggcttgggagttaaagttctgaatttggtcggcctcgtccgagtcgtagtccttgtcccccttctttggtacctgcgctccatactcaacaatatcccaaatacttttgtggagtgaggttagatgatgcctcattttatcaatccacatagaataatcctcaccatcaaaatatggtggtttgcttaagggaacaaaaagtaatggagtgcgcttagaaatgcgaggatagcggaggggcatcttactatacttcttgcgctcatggcgcttagaagtagtggacgatgagtcggagccggatgtggagggcgatgaagagtcagtctcatagtagaccactttcttcatcttcttcttgtcgcctctccgatgggtcttgtttgaggaataggattcctccttttgcttgtggccggactcccttgagagggttctccccgagcttgtgggcttgtcgccggtcacgatctccctcttggcgtgatctcccgacat

SEQ ID NO: 134187 - DNA, 252 bp, Zea mays
  unsure (1)..(252): unsure at all n locations
  Clone ID: MRT4577_53865C.1
tacctcgaggccggccggggtctcgcacggtcgctcccacctttccgcccgccgaaaccctagcccgccccgcctcgccgacggcgatgggcgctgcatgatcggtgcgtccccttggaaccgcctggctttctggcatcgcctagcccgctgccgcgggtgccgtcgtcgtagcggcgctcgcgtcctcccttctcgccctcccgcggtctnccgccggccccgcccccgcggggatccggggcccccctg

SEQ ID NO: 134188 - DNA, 360 bp, Zea mays
  Clone ID: MRT4577_53866C.1
agtcctagtcaactgtgtagtaacgctgagtatatagtatgagtttgataaggagtgtactgaggttagtgttgatatctgcatcataatacaatataaaaaaaaaaaaaaaaaaaaaaaaaaaaaaaaaaaaaaaaaaaaaaaaaaaaaaaaaaaaaaaaaaaaaaaaaaaaaaaaaaaaaaaaaaaaaaaaaaaaaaaaaaaaaaaaaaggggcgcccccccctttgtgacccccccaccccggaatttaattccgaaccggtcctggaagggtaccaatttttccctattggaggcggtttaaaaccttggcgtattaatggcaatagcttttccctgtgaaaaattgtatcccgtt

SEQ ID NO: 134189 - DNA, 720 bp, Zea mays
  unsure (1)..(720): unsure at all n locations
  Clone ID: MRT4577_53867C.1
gacgcctgcggttccggtccggaattcccgggtcgacccacgcgtccgtgtattctgtaatgggatataaggttgtgagctatgtagttggtattacagattattctatttgctgtggtgggcttgctcaggaacccgtccttaaagaaagaagagactcaccatttccaccaggcatctctcccttttaggggtttataactcagtcttacattcctagtgacatttaggcttttcttaggttatgtttcatgaaaagttgtgggtagggtctctttcaactttaagcctcaattttttaacaatctctttaataatctgcactaacatctctgattttatctacctataattgagaaataatactatcttctacgttacttgtgtaaaaggtgtgtctgattggacttgtttagaattccttttaaaactaactcattagattgaaggtatattttctaattacagttcagttgggttaatggtgtctcaaatgagcacacaggctttaagtgacctttgttttcacttttttttttagtggtttataacactctggtcttcccttcaaatcgtgtatgcaaacaggaacacatttaatgtgactcaactggaaaccggtgctcagcagtttaggtgtaacaatgatatgaaggggtgtgccccctcagttcataatgactggncccttggcacctctatggctgactctccttcctc

SEQ ID NO: 134190 - DNA, 489 bp, Zea mays
  Clone ID: MRT4577_53868C.1
gtccgcccacgcgtccgcaccacacacacgcacacacactatcgtccattaagctcgctgttgcttgccacccaccgcctgagctcgatcgcaacgcgcttggcatggcgtccgaggtgtggctatcgccggcgtctcgcctcccatccctctccaacgcaccacctcgcttacgctccaagcctgccaccacaaccgcctctttgctctctccctgtccccgccctgcccgcgccctgcctgtgctgcgtgtccgtcgccgccgccgacttcgcgccaccgagcagcaaggccaggttcaggagcaagatgacgaggtggtggacaggaacatcctcccctactgcagcgtcgtcatgctaaacgaagatgagcaaaagcttttggaagcttccttggcctatacctccggcaacccaatcatgtctgatgctgagttcgacgaactgaaacttagattaaagacagacggcagtgtcattgtgaagg

SEQ ID NO: 134191 - DNA, 345 bp, Zea mays
  Clone ID: MRT4577_53869C.1
cattacaggccagactcagctagactgtgagacccatgcgtgcctacctggacacaccaacaggaggagacgttctaccagcacgctatgcctaacgctgtcaccgtcttacaactgagacaatctgctgacatacaaccaacttgctttgacaaacgcaacagtgttctaccaacaacccaacataggaggagccctcttttagatagggtgtgagtaataaggcaataaagcagttatttgcacgatggttgtggctgcccagaaataacaaaggtcatctctagagacacaacaatatggagcccgtaaacaaggaggcagaagacggtggaaaaaaggtca

SEQ ID NO: 134192 - DNA, 391 bp, Zea mays
  Clone ID: MRT4577_5386C.1
ggaaaaaccgcgacgaccgacgcgtccgttgacctgcaaacttcaaatgctcaatactccattttctcgagtactcgttcttccgagaggaaatgataacaggtgggatgcccaaaatgacgaaacttttgttataacacatagcacttaatacgcgtatttgaaaaactcatatgagacgactaactacacacgattggcttatcaccaacgagaatactctgctattagaatgacatagaccttaactctggtcctgtggaacaagaaaaatctcataaaatatttaagaatgccaaagatgctcttacaaacccatgcatctaagaaactctaaaaaggggggttttttttactatcgaacaaacaacacttcctcaatagatatttg

SEQ ID NO: 134193 - DNA, 349 bp, Zea mays
  Clone ID: MRT4577_53870C.1
cgcctgcactgcacctatctccttggcttcttcccgttacccgtctcggcagatgcctggcttcgtgcaccttcaacttcagggtgcctgtccacttactcagtactgcggcggcgaaatctgaaggtccgactaatgtgatgtcaatcacatgctgcttgcctgtcgtcgagtgcgtgtactgcctggcgtgtgcgcggtgggtgtggcagcgctgcctccactccggaggctacgacagtgagacctggggtgttgcatcggctgaagagcttgagcctgtgccgcgcttgtgctggatcattctctcgatctatgaggatgaccttgagaacccccaatgggcgcc

SEQ ID NO: 134194 - DNA, 759 bp, Zea mays
  Clone ID: MRT4577_53871C.1
agtaagcccaccccaaacccatcatatctccatcccgcggttccgcccagctgctccacatctgaattctcaccacacacacgcacacactatcgccacccaccgcctcagctcgatcgcaacgcgcttggcatggcgtccgagcctccgaggtgtggctatcgccggcgtctcgcctcccatccctctccaacgcaccacctcgcttccgctccaagcctgccactacaaccgcctccttgctctctccctgcccccgcccccgccctgcccgcgccctgcctgtgttgcgcgtccgccgccgccgccgacttcgtgccaccgagcagcaaggttcaggagcaagatgacgaggtggtggacaggaacatcctcccctactgcagcatcgacaggaagcagaagaagacgctgggagagatggagcaggagttcctgcaagccctccaggccttctactatgaccagaaggccatcatgtccaacgaggagtttgacaacctcaaggaggagctcatgtgggaggggagcagcgtcgtcatgctaaacgaagatgagcaaaagcttttggaagcttccatggcctatgcctccggcaacccgatcatgtctgatgctgagttcgacgagttgaaactcaaattaaagacagacggcattgtcattgtgaaggagggtcccaggtgcagtctaaggagtcataaggtgtacagtgacttgaatgttgactacataaagatgtttctgctaaatgttcca

SEQ ID NO: 134195 - DNA, 141 bp, Zea mays
  Clone ID: MRT4577_53872C.1
gatgaaagcaaattgaaactacatcaagtgggttacagagttctctggagcgacctcataatagccagttcacacgcggatatgtccgatcacaaccaggaaaaaagaatattgatcctgcccgcagagcaagaccaacca

SEQ ID NO: 134196 - DNA, 301 bp, Zea mays
  unsure (1)..(301): unsure at all n locations
  Clone ID: MRT4577_53873C.1
ctattcgtgttttttcagggttctttttttgttgttttactttttcaatataacaacctttttattccacaaacttgtcacaccatacgccaaataaaaaattacactacggtctgccacctttttatgacctgaaagaacggagcacgccccaaaaaggnntnaaagttcccaaaagcaaaggggcagcacaaggtaagccaaccaaagacagggctgcccctagccacattttcgaccaggcacggaccaaacatgaacacctacccgccttggagagggccccgatggcacctacccc

SEQ ID NO: 134197 - DNA, 285 bp, Zea mays
  Clone ID: MRT4577_53874C.1
caacgatgtacattccgatcaacccgtgtggagtttatgctggctttgcgccctactactggttcatgatattagggaaaattgctgtatgcatgcgtgattatgtatctatgtcataatgcatacacgacgacacacatcagaaggagagggtggaccgcctatggaggcataataagaaaggttggtgagtttagatgactgagcgctcaccactccgatagtccctgctgggacctgccgtgaaaagtccataaaggaataggagagcgggcggcgagaggc

SEQ ID NO: 134198 - DNA, 1030 bp, Zea mays
  Clone ID: MRT4577_53875C.1
tataattgcgtgtgtctttgattacgatgttttgctcacaaagttgctactgctttccaataattcttgacagcgtcaacgagtttgtcagtgcaaagaccgacccaatgataccagtgtatgaattcttaacttgattctctcatgccaggccagcagaaccatggcccatggttccccttatcagtgtctctctctctctctctatttttttttggctgactttgctgcttgcagaagcaaaaggagacatggatcttgcagcttctcgcggtggatcagatcaaaattgcgcacatgcttttcatgcctgtgctgctggtgccactgcttgccgaagcccaatgcgccaagctgcttcagctgttcttgttgcacctgccgcgacacgcagtgctgtactccgatctgccgctgttcaaagaccccttcgtgcagccccggctgctgcacctgcagccttcccagctgcagctgcaagacgccaccaggctgcggccattgccgaccccagtgcagcagctgctgctctagtggttgcagctgcgcggactgcccgtgctcctgctcctgccccccgtgctgcagctgccccggctgcttctcctgtgaggggtgctcggctggctgcctcggcgctctcaaccggtgtctcggcggcctgtcgtcgtgctgcagtgggatgcgaccttcctgctgcaagtgtcagtcgtcgtgctgcgaggggggttcgtcctgccgcgacaccggcacgggagcgtgctgccgcggttcgtgcctcggtgccccggcgtcgtcgtgcccggagtgctcctgcggctgcgtgtgctcctgctccaggtgcaaaggaggatgccgctgcccgtcctgtggtagtaatccctgctgtcctggtggatgcttgtgctagatcagagtattatattactactagctagtgtgtctgttgctcttcttttcctgttgtggatgatttggcgtttgatttggatggaacctcgctagtgcataatattcactgtcatgaatt

SEQ ID NO: 134199 - DNA, 683 bp, Zea mays
  Clone ID: MRT4577_53876C.1
gccggccgggttgcgataaatctcatggctcactcgaccttctagtctcgctacgtttcaccgccatacaaagagcggacgcaatgcggataaggaccatgctcctctcctcgacggccttcgccggcaaggccgtgaatgtgtctccatcatccgccttcggatacgaccgcgtgacgatgcacaagatggcttttatagccaaagcagcgaaggcgctagctagcctgtgctacggacccgaccgagtgctgtacctgctactcgtggacgtcgagtcaccgagttacctgattctgcgagtgctcgggcgactacggctgcagacaccgacgctgatagacgtggtactccgagactctcgacaagaatatcgacttgtacgtgatccactcccggtgtttcatgctgacatagttcggttgcaacttcctcgagctgatcgtccgcaacccttctagctgggcagaggtcgtgtgatataggccgtttgccacatcttgagttagtgcgggctgtgctacctcgcctattcgagactcttcctcttgcagagcttccttgctatctggacctggcaatacacgatcatgggaggccgtctcgtctatcgcatcgtcgggaatacgctcttggaggtggtctagccatatctaccccggtgtgacgttataacctttcgg

SEQ ID NO: 134200 - DNA, 751 bp, Zea mays
  unsure (1)..(751): unsure at all n locations
  Clone ID: MRT4577_53877C.1
agggttacaccaacaagatgttgttcgaggcgttcccctcctccacgcaaccttctcccctccagatccaggattgccgggctccctgactcgttaccttgcgcgccctcggtgagctactttgtttcgatttagcgacaaatcagtttgcttcatgttgcgcgggcttagatctgaatgccggattcttcgtcttacggcttgaatcgagctgggaggccgtggatctgagcacgggagatacaacaaatccgcgtgtatgacgagttggatcggcaccggttctagagctagcgaaatcgcaaggctattagggttccgttcggagcgcgtctgaagcgatgatggctgaagacggcggcgggatcgggatgatgaatctgctgcgctgataattattggatgaatttcgataattattagatctaagagatgcgccgacttgaagaggcgaggtaaggtgcaacatgtataagacgtgacatgctatagaggcctttgccatggtgggtgcgctcgcatggcaggccacggtaataaaagaagatatttttgtgtcctgggggtggagatcgcacgggggattgtttttttggccccgggttctcctccctcgtggtgttccgtgtccctgtgtgcattggtcttttgcgtgggtttgcgatctcagctcacctacacngcttcgggatttttgcatctaaacacggagatctacaacaaaaacaaacatggagctacagcgagattc

SEQ ID NO: 134201 - DNA, 754 bp, Zea mays
  unsure (1)..(754): unsure at all n locations
  Clone ID: MRT4577_53878C.1
gggnnattcgttaaaccacaaaatgtagttcgacgcgttcccctcctcccgcaaccttctcccctccagatccaggattgccgggctccttgactcgttacctcgcgcgccctcggtgagctactttgtttcgatttagcgacaaatcagtttgcttcatgttgcgcaggcttagatctgttcttcgtcttacggcttgaatcgagctgggaggccgtggatctgagcaagcacgggaggtacaacaaatccgcgtgttctagagctagcgaaatcgcaaggctattagggttccgttcggagcgcgtctgaagcgatgatggctgaagacggcggcgggatcgggatgatgaatctgctgcgctgataattattggatgaatttcgataattattagatctaagagatgcgccgacttgaagaggcgaggtaaggtgcaacatgtataagacgtgacatgctatagaggcctttgccatggtgggtgcgctcgcatggcaggccacggtaataaaagaagatatttttgtgtcctgggggtggagatcgcacggnggattgtttttttggccccgggttctcctccctcgtggtgttccgtgtccctgtgtgcattggtctttgcgtggtttgcgatctcagctcacctacacgcttcggatttttgcatctaacacggagatctacaacannaacaaacatggagctacagcgagattcttaggtacaatcgttaatttagtgtaacaatta

SEQ ID NO: 134202 - DNA, 1874 bp, Zea mays
  Clone ID: MRT4577_53879C.1
tgttcggggctcgtcgaggccggccggggttaaacccccaagatgttgttcgaggcgttcccctcctccacgcaaccttctcccctccagatccaggattgccgggctccttgactcgttacctcgcgcgccctcggtgagctactttgtttcgatttagcgacaaatcagtttgcttcatgttgcgcaggcttagatctgaatgccggattcttcgtcttacggcttgaatcgagctgggaggctgtggatctgagcacgggaggtacaacaaatccgcgtgtatgacgagttggatcggcaccggttagtctctgaccgcaagattttgttgttgtgttgggctgatctgccgcgttgttttgcttcaggttctagagctagcgaaatcgcaaggctattagggttcctttcggagcgcgtctgaagcgatgatggctgaagtcggcggtgggatcgggatcttctctgccctgctccactcgggatgatgaatctgctgcgctgataattattggatgaatttcgataattattagatctaagagatgcgccgacttgaagaggcgaggtaaggtgcaacatgtataagacgtgacatgctatagaggcctttgccatggtgggtgcgctcgcatggcaggccacggtaataaaagaagatatttttgtgtcctgggggtggagatcgcacgggggattgttttttggccccgggttctcctccctcgtggtgttccgtgtccctatgtgcattggtctttgcgtggtttgcgatctcagctcacctacacgcttcggatttctgcatctaacacggagatctacaacaaaaacaaacatggagctacaacgagattcttaaggtacaatcgttaatttactgtaacaattaagtttcttttctcatctctgacgccacacttgtatccttatgttctctctctgcacattcaaagaaaccgttaaacccccatgaataatgacattcgacgtccactttgcccagctgtgttgaatttaatagttcaacaatttcagactcccatgaactcagtgaaacaagcgttactgatgtcctaagtgaaattttatgtcgcacttaagatggcgctgcgtctttatttcgttgtatattttattttcaacaactccaatctgattatgtcgtggcatttcatttgtatttatcatgtcaattgggatatttggtccttgtaagcttttggcatgtttgttagttaagccattgcaattgttggacttgtggagggttgcaaaatcgcagtgattctactattcatcatgtcatcatgtgaaatcttctaccacggagcacgtcaatcgtggctgggctgatggacgactgtgctgatggaactgattcgttacgtgggttgaagattttgtgccaaatatgcgatctggttggttactccgccctgctgacgttgttttagcccaggtgtttctgctgctcattccttgcattttttatggcactgtacatacaattggacaacctaatttttggcagttcaactcatttagaagttagaagggtttgagaaacattctcccctagaaatacatggaggtgtatctgatgattgttttttttgttacaaagtttcctagtttaatttgtatgatattctggaaattcattgtgctgttgggaggattttccgcgcaagatttatattggtcggtagaacgtccctacttccagtctttactggcttgcggtaccgacacctggttgttcgtagtagggttacaagctagagagagggggaagagttccaagtcttattctactaaaggatctatgatcaagtgttgttctcgggttcgaaaaaaaaaaaaaaaaa

SEQ ID NO: 134203 - DNA, 195 bp, Zea mays
  Clone ID: MRT4577_5387C.1
gaaaaaaaggatcgacccgcgcgtgcgcaacagcgaatgacaaagctcaccaacctatttatccattgagaaagacgccaaaatgcagcgtagagtgtcaacatgaatttcgttgtctcttacaacatcgcctttcctctagttcgcgctatgcagaacctcatatcaatgtccttcaattccgggactatctcc

SEQ ID NO: 134204 - DNA, 871 bp, Zea mays
  unsure (1)..(871): unsure at all n locations
  Clone ID: MRT4577_53880C.1
ctcgaggccggccgggccggggttaaaccaacaagatgttgttcgaggcgttcccctcctccacgcaaccttctcccctccagatccaggattgccgggctccctgactcgttaccttgcgcgccctcggtgagctactttgtttcgatttagcgacaaatcagtttgcttcatgttgcgcaggcttagatctgaatgccggattcttcgtcttacggcttgaatcgagctgggaggccgtggatctgagcacgggagatacaacaaatccgcgtgtatgacgagttggatcggcaccggttagtctctgaccgcaagattttgttgttgtgttgggctgatctgccgcgttgttttgcttcaggttctagagctagcgaaatcgcaaggctattagggttccgttcggagcgcgtctgaagcgatgatggctgaagacggcggcgggatcgggatgatgaatctgctgcgctgataattattggatgaatttcgataattattagatctaagagatgcgccgacttgaagaggcgaggtaaggtgcaacatgtataagacgtgacatgctatagaggcctttgccatggtgggtgcgctcgcatggcaggccacggtaataaaagaagatatttttgtgtcctggggggtggagatcgcacgggggattgtttttttggccccgggttctcctccctcgtggtgttccgtgtccctgtgtgcattggtctttgcgtggtttgcgatctcagctcacctacacgcttcggatttttgcatctaacacggagatctacaacaaaaacaaacatggagctacagcgagattcttaaggtancatcgttaatttagtgtaacaattaagtttct

SEQ ID NO: 134205 - DNA, 705 bp, Zea mays
  Clone ID: MRT4577_53881C.1
ttgggaccctcgaggccggccgggggggtcttttcctacgagctgagccgctggccactctatctgctccgtgtactctctcaaccacctcactacttcatccctcggacatgccccgctgacgcgacgaccaaatgggggatacgatcgtgacgagcttcttgaggattgttttgcataaatgcaatgacagactgcacgtattgctactctcaagcattcgcactctgactctcccacgcactgccacccggagctaacgtctcaattgaaccccgcgatgcgctccacctccttcctgcaatgcgcggaggcgcacacgtggccgcagcggcctacatcactcttcgctgatgagcggctcgactccctactctataggctatggccacactcaccaagcatcgtgatgctgttcgtgaggcgccacatgcgggatcaccgcactctgccgctacgaacgcgtgatgtatgaccacgtgtggtgctgcgggctcgcgctgctccacttcgtcgaccagaacgctgagtcataagaactggatgccgggcagaacatgtgtgtttgtgtcgctggatgaggcatagacgttatggttcactgacgattcctttcaattataagacccctgtaccttgctactgtacataggaccagttacgtcggattaaacaggagtaatacatgcgcttctcttgcgtgag

SEQ ID NO: 134206 - DNA, 1597 bp, Zea mays
  unsure (1)..(1597): unsure at all n locations
  Clone ID: MRT4577_53882C.1
ccgggtaaaccaaaagatgttgttcgaggcgttcccctcctccacgcaaccttctcccctccagatccaggattgccgggctccttgactcgttacctcgcgcgccctcggtgagctactttgtttcgatttagcgacaaatcagtttgcttcatgttgcgcaggcttagatctgaatgccggattcttcgtcttacggcttgaatcgagctgggaggctgtggatctgagcacgggaggtacaacaaatccgcgtgtatgacgagttggatcggcaccggttctagagctagcgaaatcgcaaggctattagggttcctttcggagcgcgtctgaagcgatgatggctgaagtcggcggtgggatcgggatcttctctgccctgctccactcgggatgatgaatctgctgcgctgataattattggatgaatttcgataattattagatctaagagatgcgccgacttgaagaggcgaggtaaggtgcaacatgtataagacgtgacatgctatagaggcctttgccatggtgggtgcgctcgcatggcaggccacggtaataaaagaagatatttttgtgtcctgggggtggagatcgcacgggggattgttttttggccccgggttctcctccctcgtggtgttccgtgtccctatgtgcattggtctttgcgtggtttgcgatctcagctcacctacacgcttcggatttctgcatctaacccggagcagggaccggggtttcaggaattccccacgaggagattcttaaggtacaatcgttaatttactnnnnnnnnnnnntttcttttctcatctctgacgcgacgcttgtatccttatgtactctctctgcacattcaaagaaaccgttaaaaccccatgaataatgacattcgacgtccactttgcccagctgtgttgaagttaatagttcaacaatttcagactcccataaactcagtgaaacaagcgttactgatgtcctaagtgaaattttatgtcgcacttaagatggcgctgcgtgctttatttcgttgtatattctattttaacaactccaatctgattatgtcgtggcatttcatttgtatttatcatgtcaattgggatatttggtccttgtaagcttttggcatgtttgttagttaagccattgcaattgttggacttgtggagggttgcaaaattgcagtgattctactattcatcatgtgaaatctcttctaccacggagcacgtcaatcgtggctgggctgatggatgactgctgatggaactgactataatgttttatcatagctatgctgatggaactgattcgttacgtgggttgaagattttgtgccaaatatgcgatctggttggttactccgccctgctgacgttgttttagcccaggtgtttctgctgctcattccttgcannnnnnatggcactgtacatacaattggacaacctaattttaggcagttcaactcatttagaagttagaagggtatgagaaacattctcccctagaaatacatggannnnnnnnnnnnnnnnnnnnnnnnnnnnnnnnnnnnnnnntagggtaatttgtataatagtct

SEQ ID NO: 134207 - DNA, 242 bp, Zea mays
  Clone ID: MRT4577_53883C.1
caaagggggcaggggatgcccttaaataggaacccgcctgagcctggaaaacccctatccccggtttccacctttatattccccggtccccggccataacccccttattttatcccccggtcattgggccatacaaccttattaatccttggcgccaaagaatggcttcctactaaaaaaccccaggctcacaaggcttgggtgccttttttattccaagcccaccaacctcaggggggggg

SEQ ID NO: 134208 - DNA, 687 bp, Zea mays
  Clone ID: MRT4577_53884C.1
aaaccctcgaatgttgttcgaggcgttcccctcctcccgcaaccttctcccctccagatccaggattgccgggctccttgactcgttacctcgcgcgccctcggtgagctactttgtttcgatttagcgacaaatcagtttgcttcatgttgcgcaggcttagatctgaatgccggattcttcgtcttacggcttgaatcgagctgggaggctgtggatctgagcacgggaggtacaacaaatccgcgtgttctagagctagcgaaatcgcaaggctattagggttcctttcggagcgcgtctgaagcgatgatggctgaagtcggcggtgggatcgggatcttctctgccctgctccactcgggatgatgaatctgctgcgctgataattattggatgaatttcgataattattagatctaagagatgcgccgacttgaagaggcgaggtaaggtgcaacatgtataagacgtgacatgctatagaggcctttgccatggtgggtgcgctcgcatggcaggccacggtaataaaagaagatatttttgtgtcctgggggtggagatcgcacgggggattgttttttggccccgggttctcctccctcgtggtgttccgagtccctatgtgcattggtcttttgctggtttgcgatctccgctcccctaccgacttcggattttctg

SEQ ID NO: 134209 - DNA, 299 bp, Zea mays
  Clone ID: MRT4577_53885C.1
agcagaggcaccccgaagcgcggcagagtatcatgcggcgcggggatgcagactgagaggaggacgacgaccgtgaccgcaaggctgcgccggcctgacctcgcaccaccaccacacggacccagagcccgagccagagcctgaatcccgggaagagcaggatgtggacgccgctgaggctgagcgcccgtgccagcgcaagaaggaggaggacacgaaggccgcacacaagcgccattacaacaagatggagcgccagcgccggcgcgttaaggagtcgccggagaagcgccccgagc

SEQ ID NO: 134210 - DNA, 227 bp, Zea mays
  unsure (1)..(227): unsure at all n locations
  Clone ID: MRT4577_53886C.1
cccggtcgcccagcttcggcttggttgcccacggctgcttgaactaaggatactctcataagtttacggcatgtcccttatgttagacttacttcttcaacgttagctcctgggacgggctcttggtttctcaagaggtgggtgacatcgacatcgactctttgtgggggggtgcgcggcntcttcttccccccccttccggtgctgtggcgtcgtccttctgcgct

SEQ ID NO: 134211 - DNA, 679 bp, Zea mays
  Clone ID: MRT4577_53887C.1
cattgggtacctcgaggccggccgggcaacttaataaaagcacactctggtttgcctataaaaaaaaaaaaaaaaaaaaaaaaaaaaaaaaaaaaaaaaaaaaaaaaaaaaaaaaaaaaaaaaaaaaaaaaaaaaaaaaaaaaaaaaaaaaaaagaaaaaaaaacccgcacccgggtccgggggttctttgccccctgcccccctccaatttgggccgccctcctcatccaccgcccgtcccgccgccgccagcccaaggccaggaatccgccagcctctcgaaccacgggtatcgggggcccgcccaaccggttcggggcgatggggtaccggggggacgacgactacgactacctattcaagggggggctcatcggggactccggggtcggaaagtccaacctgttctcgggtttcacgcgaaacgagttcagcctcgagtccaagtccaccatcggggtcgagttcgccacccgaagaatccacgtcaacaacaaggtcgtcaaggcccaaatctgggacaccgccggtcaggaaaggaaccgggttatcacgagcgcgaactaccgcggagaagtaggggcgctcgtcgtctacaacgtcacgcggaacgtcaccttcaaaaacgtggaaaggtggatgagggaactcagggaccacacggacgccaacatcggg

SEQ ID NO: 134212 - DNA, 1369 bp, Zea mays
  Clone ID: MRT4577_53888C.1
gggaggaaaactaagtcgcaccgtccaggcgtcaagttcggcagaaagcaaagagtgtgtgctgtgtgttatccatttcttctcctctctgctctgttcacttcgttctagtggggagcgccgccgctgcagttgccgccgccaccagagcagtccacctcggtctgatatggcgaccgggagtgcaagtgccatcgcgtccttctccgtggcggcggcagcggctgctgctctgcgcgtcaggcggccatgcgctcgcgcttgcgcttgggccccctcgcagcgaccgcagcaaggggcactcgtcagcctcaagccttgcgcctcactggcaccacaagctcctctgtggcgcgcggagtcggatgccgcggggggtggtgccggcgccggcgatgtcatgggcctcctcctccgggagcgcatagtcttcctcggcaacgagatcgaggacttcctcgcggacgccgtcgtcagccagctcctcctccttgacgccatcgacccggactctgacatccgcctcttcgtcaactcaccagggggatcccttagcgcaacaatggccatctatgatgtaatgcagcttgtgagggcagacgtgtccactattggaatgggcatagctggatcaacagcttctataatccttggtggtggcacgaagggcaagcgatttgccatgcccaacaccaggattatgatccatcagcctgtcggaggtgcaagcgagcacgccctaagatgtagaggtccaagcgaaggagatattgaccaacaagaggaatgtcattcggatcgtatcatgcttcacaggccgcactcctgagcaggtagagaaagacattgacagagatcgttacatgggccctctcgaggctgtcgattatggactcattgatggcgtgatcgatggagacagtattatcccacttgagcctgtcccggagagggtgaagcctaagtacaactacgaagagctgtacaaggatccacagaagtttcttacaccagatgtcccagatgatgagatatactagtcgaaaagttgtattttgtgcgaatgttaagtctgttcttcagcaagcagatgtttttcgtcgcttgtagctgtcaaaccaaccatagcactagtagcttattgatcttgtttactgactggatggtgattcgagcaggcaactagaacctgttggttgtgtttctggtgttaaaaaaaaaaaaaaaaaaggtccggctgtttcgttttgaaaaaaaaaaaaaaaaaaaaaaaaaaaaaaaaaaaaaaaaaaaaaaaaaaaaaaaaaaaaaaaaaaaaaaaaaaaaaaaaaaaaaaaaaaaaaaaaaaaaaaaaaaaaaaaaaaaaaaa

SEQ ID NO: 134213 - DNA, 631 bp, Zea mays
  Clone ID: MRT4577_53889C.1
ccgtccgcaaaaaaaaaaaaaaaaaaaaaaaaaaaaaaaaaaaaaaaaaaaaaaaaaaaaaaaaaaaaaaaaaaaaaagaaggcaaaacataaaaaaaaaaaaaattaatttaatagagaaaaccaaaaaaaaaaaatctaggtcctgaagaaacacaacataaaatacagggggggcccttttttaacggacctactttgccttgccctgccgttcccctttcttcttttttttgtggggcacccaagtttcgttccgtgggccctgttttaacaaagggccggcccctgggatgaccctctgggccgccccctttaatggcttttgaagggcaccccctttggtgggttggcttaatttgggcggggcccttgccaacgccctttccccagctttttccactctgttccgctacttggcccccccctttgtcggttttttccttcctggtgtggggggggggctccccccggggggccgtttttttggggggcgctttagggcccccatttaactgttttacggctgctttttcccccaaatgttccatttttttccctggaggctttaagggcggggacccttgtgggcacctttttaatgtttgacggtagcttccacccgaaaaat

SEQ ID NO: 134214 - DNA, 664 bp, Zea mays
  unsure (1)..(664): unsure at all n locations
  Clone ID: MRT4577_5388C.1
nctctttcgcgtttgcactggtcatcctgtagataaatatacctctgcatatcactcattgggtacctcgaggccggccgggatccatcgccacccagcagagaaactaaacttgcatcgatcgctcgctcgtcagttctttctgatcatcggtcgcctctctagctagctagctacctgatcggccatggctgaggagaagaagcaccaccacctgttccaccgccacaaggacggcggcgaggaggaggcgagcgccggcggcgaggtggactacgacaagaaggagaagcaccacaagcacctggggcagctcggcgggctcggcgccatcgccgccggtgcatacgcaattcacgagaagcacaaggcgaagaaggaccccgagaacgcgcacggccacaaggtgaaggaggaggtggcggcggtggcggctctgggcgcggccgggttcgcgttccacgagcaccaccagaagaaggacgccaagaagcagggccagagctgatcgagcctctctctgtgtgtgtgccgcttattattgtggcgtttatagatacttactacttaataaatcgcctcgtccatgttgcctgccaaaaaaaaaaaaaaaaaaggcccctagggccaaaaaaaaaaaaaaaaaaaaaaaaaaaaccagggc

SEQ ID NO: 134215 - DNA, 443 bp, Zea mays
  Clone ID: MRT4577_53890C.1
ggaattcccgcagccagccacacatccgacaacatacaatgttgaattcagcattttcaatatagcaacaatgaccgcgaaaatgttctccatcctaatgctgctggctctttctacatctgttgctaacccgaccatttttcctcaatactcacattctcctatatctgtcctacttcccccataccttccatcaatgacctctacagatttcgaaaacccatccctacaaccctacattctccaacaatcaatcgcaacatgcatcttacctttatcacccctgatatctcaacatttcacaaccctatctttaatgcaatcattggtacaaaccatcacggcacatcagcttcaacaacttgatctaccattgatcagccaacttatctatacaaacctttctccctactctcaacaacatcaatttacttcattcaacc

SEQ ID NO: 134216 - DNA, 198 bp, Zea mays
  unsure (1)..(198): unsure at all n locations
  Clone ID: MRT4577_53891C.1
gctgctcgacctcctaacggggagggaggccggttgcggccaccacggtttgccggctcgcccccnccgtgggtcctacgctcggcgaaggaagaatagcggaagcagtggacccggagctcggaaacgagtacgacacgcacgaagcggccaccgtggcggcgcttgcgctgcggggcatcggcgacggccccggga

SEQ ID NO: 134217 - DNA, 450 bp, Zea mays
  Clone ID: MRT4577_53892C.1
ccgcatctagggaggaattgcccattgatttaccactgtgcaatacagtttccggtcttaataagaccacatactagtttggctgctacaggcagcaggctggccatgcatgagtcatgaccgatgcaacgcttaaggttccttcacaacacgcatgcatttagctttcccagcaaccaactggcgggggcggaatgcgtagacagtatgctgttgcaccacattctattggaacttgaagctggccagcacgtttttttcgaccgagtaggagacgggtcactgctggttctggaacggccctactccggagcctagcccctgactgaagtaaccgaggatggctagcatccctagcctgccgtgcttgatctgcctgaggttgagcttattcatcaccttccaggaacaaccggatcctacctgatgactaacgcatccatcgggtta

SEQ ID NO: 134218 - DNA, 253 bp, Zea mays
  Clone ID: MRT4577_53893C.1
gagcgccaaaaccctttacggaaaacgcatttaccatatatacatgtacaattcttgacgcccaacgggaaacaaaaaaaactgggggccggtcaagtcttgggcggacaaccagctagcaggagttttttggacatgccatgggcagctaaactttactgggaaggacccaacacgcccgatgctacaagtagctcctgagcttttttttcgagggttcaaggcaaccacaaagacggggacgttgtcctcg

SEQ ID NO: 134219 - DNA, 394 bp, Zea mays
  Clone ID: MRT4577_53894C.1
ttttattccaagagctacgcaaacgcacaggggggggctatcatgagataccaggcgccatgcgccgggccagcgcgcggggcaggaggcgcggctgtacgagcgcgcggagacgaagctgacgtcggccagcggcaccgtggagcctgacgtctatagcacgccctgcccggtcgcggagcggactcattgcggaggtgatgcagactaagcagatggcgaacccgacgacggccgcgggcctgctccgcgccttgtaccacgactgctcgtgcagcgaccgcgacgcggaggtgctgatcgagtgcacccaggacaagaagtcggaccacgacgccgagatcaaccactccctccacggggacgccttcgaagcacgggtgcgcgccaagat

SEQ ID NO: 134220 - DNA, 123 bp, Zea mays
  Clone ID: MRT4577_53895C.1
gctggctctgatgggacacatcagggcaggaagactatgatcgactgcggcctctctcctacccggacactgatgtcatcctcatgtgcttgtccatcgacagccctgacagcctggaaaaca

SEQ ID NO: 134221 - DNA, 333 bp, Zea mays
  unsure (1)..(333): unsure at all n locations
  Clone ID: MRT4577_53896C.1
cgggncggaaatcccggggcggaccacacgcgtccgttattatgaaagccacccaacgccattttattttttgtttgtttgccaaaaagtccgcgaatggcggaatggcaaatttggcagagattttaaacaccttaccaccaagtttgggggttgttccttgccgattgcgacggatcgaccggggtttgcagtccaaagcaagctacttaaccatgcaaatggaaaagctgggcttaaattttgccggccgggcccggtttggggggtttctggggtccctttttgatcggcaggaggtccggtgacccccacccccttccctaggccaaa

SEQ ID NO: 134222 - DNA, 807 bp, Zea mays
  Clone ID: MRT4577_53897C.1
gagatcgttcccacttcccatcgctcatataatcctgctgcgccgccgttttcgtcctcttcatctcgatccgttgctcgcctcgggtcaaaccctaagcacgtagttgatttatccgctgcggacatgagtaaggtgcagtgtgagtctgccaaggatgccatctcccgcattgttaactgatgccttcgacaagaatacgaagatcactgagactgggtaacttcggattgggctgaagatattatgatccacagaaggacaagcggttcggcgcctctgttaagttgccccatatccctcgtcccaacatgatggagtgcatgcttggtgatgcccaccatgttgaggatgccgagaagatgggacttgactacatggatgttgaggctctcgataaagtgaacaagaaccagaagcttgttgagaggcttgtcaagaagtaccatgctttcttggcatcagaggccatcctcgagcagattccccgtctccttggtactggtctcaacaaggcaggaaatgttccctgaccctgtctactcatcatgaatccctccagttgaaagtgaacgtaactaacggatccgtcaagttccagctcaagaaggttctttgcatgtgtggtgccgttggtcacttggagatggaggagaatcacatacagcagaacatccagatgagcgtcaacttccttagttccctgctgaacaagaagtgttagaatgcgagatgcctctacgtctgagagaccatgcggtattcatacagggcgttctaaggatgctcttttgtgtaggctgctag

SEQ ID NO: 134223 - DNA, 206 bp, Zea mays
  Clone ID: MRT4577_53898C.1
atatgagcagcgtttctataattattcatcaaataaggccatcaacacaggacactttgctctacacaggatattggtacactcacaaaaccgctatctccctgatccagccacccagctttgtttcctaaagataaaacacaatgaggatgaactacgcacatcgaaggagcaacacaacatgatctcaaatgatgaactcaaat

SEQ ID NO: 134224 - DNA, 1214 bp, Zea mays
  Clone ID: MRT4577_53899C.1
acctcatctcactcttcttcctcttccttcctggcctgccttctcttctcccgccttctcctcctcccagcacagcagcagctgtgaccacatcaccacacacacacacatatatacttggtcatcatccagcttccagcagccagctgcccgccgatcaacgtgtaggcggttcaaagggaaatctgctgatggacatggcgcacgagagatcagacgccagcagcgaggaggaggtgatggccggcgagctgcggcgcgggccttggacggtggaggaggacctccagctggtcaactacgtcgacgcgcacggcgagggccgctggaactcgctcgcccgatcagcaggtctgaagcgcactggcaagagctgccgcctccggtggctgaactacctccgtcccgacctccggcgcggcaacatcacgccgcaggagcagctgctgatcctggagctgcactcgcgctggggcaaccgctggtccaagatcgcgcagcacctccccgggcgcaccgacaacgagatcaagaactactggcgcacgcgcgtgcagaagcacgccaagcagctcaaatgcgacgtcaacagccagcagttcaaggacgtgatgcgctacctctggatgccccgcctcgtcgagcgcatccaggccgccgcagccaacaataacgccagcggcgccggggttccgccagctggcgccgccgcggacgacacgccgctctcgtcgtcgtggcagcacggcggcggcgccgacgacgacggcggcctctacgcgtcgccggagctgcccacggacgcctgctggcctcccgcagactgctactactacccagccgccgctgaccaccagctactgaacaaccccgccgccgccgccgtcttcccggacctgtcaagcaccacggccgggtcgtcctctccgtcctcggattccggcgcggggacagcacagccctggcccgcgccgctgggtggaggcgcagagtggttgaccaccggcgcctgctgcgacgcctccagcgccgccgccgccgccgtcgtcctgggcgggcagcagcaacaatcgtgcttggtcggggagacgtcgtgggcgtcatccgagctccccgagctgggcgtcgcggacttcgagatcggcagcttcgacgtggagagcatctggagcatggacgacagcctgtggttcacgcaggcgcagggcgtgtga

SEQ ID NO: 134225 - DNA, 164 bp, Zea mays
  unsure (1)..(164): unsure at all n locations
  Clone ID: MRT4577_5389C.1
cgggncgggaannccggggcggaccacacgcgtccgaaggcgggggttcaggaactacggaaggtttggccggttttgcggggccaacggcttgcggaacttatatggaagcggcgaccagcggaactgggccaagttcgtaacccggggcctgtttttctttt

SEQ ID NO: 134226 - DNA, 469 bp, Zea mays
  Clone ID: MRT4577_538C.1
cacccaaaaagggttaaaaggtaaaaggggggaagcttggaaaaaaaaaatggggggggacaaaaaaaaaaaattcccccaacccaccaaaggggattttcctggggaaaaaaaaattcccaaccaaaccgggtcggggggggcccgccaaaaaataaaacccaaggggggtttaaaaaaaaggggaaacaaaccggccggccggcaaaaaggggggggaaaaaacccaacccgtcttaaaaagggggggaaaaataatccgggggccaatccaaaccaagggggaaccgtggatttctttaaccgggggcccattggcaaggctttaaatcccaaaaacatttcccccgccccaaatttggaaaaagattctcaaccccggaagggggggggcggggtccttttgcccaaggtaaacaagggaatgggccgttttctttccaagggggttttcccaaggggcctggaa

SEQ ID NO: 134227 - DNA, 315 bp, Zea mays
  Clone ID: MRT4577_53900C.1
gatggttgggggaagaatagttgtttttccatgttcctgacacagaacagaaacatcagtaccatgaaaacgaaatgtttcacagttagggttgttatcaaaaaaaaaaaaaaaaaaaaaaaaaaaaaaaaaaaaaaaaaaaaaaaaaaaaaaaaaaaaaaaaaaaaaaaaaaaaaaaaaaaaaaaaaaaaaaaaaaaaaaaaaaaaaaaaaaaaaaaaaaaaaaaaaaaaaaaaaaaaaaaaaaaatcacaacatcaaaaatactactagacgttgtaataaaaacaatttaattgcccaaaggtacactccct

SEQ ID NO: 134228 - DNA, 1637 bp, Zea mays
  Clone ID: MRT4577_53901C.1
cagtaacttcacttgttcatatgtattgcgcttaattactcaacagctacgtacaaacacttgacgctactagtatatatgtactactacaacagctacgttttcccccttttttctggaattttcttggcgtatataccctacacaagccgctagggaatcaagactaggaaacggagtagaactggagcggaagaaaagtcctggaggcaagaacagcaagcatcttgaaccgagcaaagagtagccgtcccgcgtcgtcttcggttcctccaaataatctctctccttcttctaacccgtgtctcagctagctctctcggcaccttcgctaggcgtccccgacgtgcggggtgtccgatccaccaccggtatttgacgccgtaacgtggatcgatttccgtgcccgcgcgccgcgtgtgttggtggcttggattcacacgccctgcgcctgcgtgaaccacaggctgtcgtccatgctccagatgctctccacgtcgaagctgccgatctcgaagtccgcgacgcccagctcggggagctcggatgacgcccacgacgtctccccgaccaggcacgattgttgctgctgcccgcccaggaggacggcggcggcggcgctggaggcgtcgcaggcggcggtggtcaaccactctgcgccacccatcggcgcgggccagggttgtgctgtccccgcgccggaatccgaggacggggaggccgacccggccgtggtgctcgacaggtccggcacgacggcggcggcggcggggttgttcagtagctgatggtcagcggcggctgggtagtagtagcagtctgcgggaggccagcacgcgtccgtggggaggtccggcgacgcgtagaggccgccgccaccgccgggctgccacgacgacggcgacgagagcggcgtgtccgcggcgccggccttgtgctgctgcggagtccccgccatggctgcggcgttctggatgcgctcgacgaggcggggcatccagaggtagcgcatcacgtccttgaactgctggctgttgacgtcgcacttgagctgcttggcgtgcttctgcacgcgcgtgcgccagtagttcttgatctcgttgtcggtgcgcccggggaggtgctgcgcgatcttggaccagcggttgccccagcgcgagtgcagctccaggatcagcagctgctcctgcggcgtgatgttgccgcgccggaggtcgggccggaggtagttcagccaccggaggcggcagctcttgccagtgcgcttcagacctgctgatcgggcgagcgagttccagcggccctcgccgtgcgcgtcgacgtagttgaccagctggaggtcctcctccaccgtccaaggcccgcgccgcagctcgccggccatcacctcctcctcgctgctggcgtctgatctctcgtgcgccatgtccatcagcagatttccctttgaaccgcctacacgttgatcggcgggcagctggctgctggaagctggatgatgaccaagtatatatgtgtgtgtgtgtggtgatgtggtcacagctgctgctgtgctgggaggaggagaaggcgggagaagagaaggcaggccaggaaggcagaggaagaagagtgagatgaggctcgcgggccaccac

SEQ ID NO: 134229 - DNA, 782 bp, Zea mays
  Clone ID: MRT4577_53902C.1
acttccggtggcgacgtcaactgaagacacacactgcatccgttccactggaaggcaatgagtgcaatggttgagacgcatcctccaactccaaccgccgctgccgacgtggtctccatcctccgcggagctgaccccgcccgcctcctcgccacttccggcatcgccccgacgcccgagctgctccagcacctccgccccgcgctcccgaccctcccggactccgcgattccggccctcgcccgctgggccggcgccgccaccgccgtctccctcctcgcctcccgccgcctcttcgccgccgcctggcgcttcctcctgttccagcccgccgccgcctccccgccgcccccgctcgccgcgttcgcaccgctccttcgccgctacgctcgcatcggccgcaccgactccgcggtccgcacgttccggtttctccaacgccacccgggccgctacgccgtcgaaagcgatgtcacgccgtctgccgaggcgctctccccgttgatcctgaccatcgacgcgctttgcaaggagggccaccctcgcgccgccgcgctgctcgtcgcgcagatccggcgcgaggacgacgggtgggcgcccgacgtgcggatctacaacatcctgctcaacgggtggtcccgcgcgcgccgactcgacaaggcggagaagctctgggcggcgatgcgcgatgaaggcgtgcggccgacggtggtcacctacgggaccttcatcgacgcgcactgcgtcatgcgcaggcctgaccacgcgatggcgctccttga

SEQ ID NO: 134230 - DNA, 1261 bp, Zea mays
  Clone ID: MRT4577_53903C.1
cattgggacctcgaggccggccggggcgtggtcactgccgccgctcggtcttgtgcttgtccaggtccaaccgtccaaggataaaaaatgagcacgaacctgggaggagcctcttgcttcggcttcggcttgactcagctgcagcccgccgccgttaggctccggttgccgcctgctcgcgccgcggacacttcgtcctcccagtcgccggcgcgcctgacggcggtgctggagcaggtggaccagttgctaagccaggggaacgacatggccgcgctctccctcgtgcgcagtacgcaggggggtgacggcgggctccgggcctttggcgccgccaggcaggtatattttggtggtggggtgagaaacttggttcttgatacaattggtcactatctcagccagaagtatcacaacagagttatccagcatgaagctggtcacttcttgatagcttacttgcttggagtgcttccaaaaggatacacaatcacaagcttagatacacttatgaatcaaggatcgcttaatgtgcaagctggagcagcttttgtggactatgagttccttgaagagatcaatacaggcaagctatctgccacgatggttaacaagttctcgtgtatagcactagccggagttgcagcagagtatcttctgtatggacgtgcagaaggaggattagccgacatcaataagcttgatggattgctcaagggtttgggtttcacccaaaagaaagctgattcacaggtgagatgggctgtgctgaatactgttctcatactgcgtcgccatgaaaaagctagatcgcagcttgcagaggcaatgtctacagggaagtcggtgggctcttgcatccaagtcatagaagagtgtataagcactgacgatatttaacgtggatatgttgctgaccctacgttgtctcaatggcatgttatcaacaacaaatcaaggcttgtcaatccaaaagaggatttgagtattaaatccactcttaaggctagtttgagaaccttatttttttaagagattttctttttttttaagataaattagtttattttctcttgagaaaatagaaatctcttggaaaattggagttgctaaactagcccttagtcaaaaatgactagtagagaatttaatcttcaattgccttctggatttacgtaaccgaacaagctctattctatgttagggctggtttgatggacagtgaattggattcccttgctattcccaatcctgtctaccg

SEQ ID NO: 134231 - DNA, 386 bp, Zea mays
  Clone ID: MRT4577_53904C.1
gcccagcacccagcaaatagtgccagccattggcgaccaccgtgagccttgaccctgaggcggcgctcgccggcgtgaaagagccgagggcgccaaggtcgctgcttgcgcgcgcgcgcgccaacctggcgttccagtcggtgtgggcggagctgaacggcgccatgggcgacctgggcacctacatccccatcgtgctgtcgctggcgctggcgcgccacctggacctgggcaccaccctcgtgttcaccggcatctacaacgccgtcacggagctcatctacggggtgccgatgcccgtgcagccgatgaaggcgatcgccgacacggagctgtccgactcgtcagtcggagtcccccagatcatggccagcaatatcctgacc

SEQ ID NO: 134232 - DNA, 529 bp, Zea mays
  Clone ID: MRT4577_53905C.1
aaattaaaaggggcaccctttttttaaaaccgtaaaaaaaaaccgggaaaaaaagcccccaaaacggggaaaatcaacggaaaccccaaatgggaaagggaaccggaaaaaaaaaaaattgggaaaacggcgccaccccaaaaatgtcccccaaacaaagccctttttaattaaaaaggggggggcccaaggaaaaaaaaagggcaaaaaaaaaaaaacggttaaaaagcccccccaaaaaaacccccaaaccttgggaaggaattaaaaaggttaaagggggcccccacccttaatcggacccaaaaaaaaaaagggaaaaaaaacccccccgggtaaaaaaaaggcccccccggaaatttaaaaaacccgaaaaaaaaaagggaagggccttgggtaattttccaaaactgaagggtccaaacgaaggaaccctaaatcttgggggaaaagaaaaaaagccaaacatggcaaaaaaccttgccccgggggaaaaaccctttggcccaccaaaaaatggaggaaaaac

SEQ ID NO: 134233 - DNA, 133 bp, Zea mays
  Clone ID: MRT4577_53906C.1
gttgaattaaacgaacatcatacattgtgcagaagagtacaaacaatatgaggggaatggtggtctttggtttttagctccctgtgctagctacaatctcagggtcccaggataaatacgtcctaatgggcag

SEQ ID NO: 134234 - DNA, 371 bp, Zea mays
  Clone ID: MRT4577_53907C.1
gtccgactttttacgccgatgactgctcggccggtcgactccgatgagttacttgctgtgggcggtgggcagggtgctatagcaccctacagcgtgaagggcggtctgggatatggcactcttagcggagcccttatgggcggaggatatactaggcctgctgctcggatggacctgccgcccgcactggacagactgccttgtcgtcgctcggctacgcgcaccgttggagaccgccttgcatgcatacggaacgcgacagggacgctctatcgacagagctcgtcgaacggtggtgcttggcaggtcaaccttagacggctactgctaaagcgagctaggagcccgtggcggtagggatggactacctg

SEQ ID NO: 134235 - DNA, 4995 bp, Zea mays
  Clone ID: MRT4577_53908C.1
atggatcctaagggaaaggggatggtggtcaacaacaacgagaaggagtctatcttcaacgagccgaaggatgacaagcctaccgactcgggctcgggccacaagcgcaaagacgggaagaagaagaagacgaggcgcatcaaggagatcgtctactacgacagcgacgaatcttcctcttcccaaaaggatgacgacgactacgagaaaaagaaaacggtcaattcaaacttttcttttgattactctcgtattcctcaaagtacaaatgctcatttattatctattccacttggtaaacctcctcattttgatggagaggactacagattttggagtcacaaaatgcgtagtcacttgttctctctccatcctagtatatgggagattgtagagagtggaatgcactttgatagtacggatagtcccatgtttattaatgagcaaattcataaaaatgcacaagctactactgttcttctagcttcattgtgcagggatgaataccacaaagtgagcggcttggataacgccaagcaaatttgggacaccctcaagatctctcatgaggggaatgatgtcacaatgctcaccaagatggagttggtggaaggcgaactcgggagattcgctatgataaggggagaagagccaactcaaacgtacaccaagatgacgcccgaggagatacttggaaaattcgtgagcgggcgaatgatgatcaaggaagcaagatacgtggacgacgcattgaatggtccaatcaatgagcctcaacctcttgctctcaaggcaacaagaagcaaggagacgctacctagcaaggtggcacaaatagaggcggccggacttaatgatgaagagatggctctcatcatcaaaagattcaagacgacgctaaaaggtcgcaaggggcagccaagcaagaccaagacaaaggggaagcgctcatgcttcaaatgtggtaagcttggtcattttattgttaactgtcccgacaatgatagtgatcaggatcaagggaacaagagggagaagaagaagaactataagaaggcaaagggcgaggcacatcttggaaaggagtgggattcggattgctcctcttccgactccgacaatgaaggactcgtcgccaccgccttcaacaagtcatccctcttccccaacgagcgtcacacatgccttatggcaagggagaagaaggtatgtactcgaaacactacttatgcttcttcaagtgaggacgaatctagtgatgaggatgaaatagattattcatgtttatttaagggcctagatagaaccaaggtagataaaattaatgaactaattgatgccttgaatgacaagaataagcttttagaaaagcaagaggatttgttgtatgaagaacatgacaaatttatagaagcacaaaaatctcatgctctagaagttaaaagaaatgaaatgctttcttgtgaattatcttcttgccatgagacaatttctaacttaaggagcattaatgatgatttgaatgctaagttagaaatagctagtaaatcaacatcttgtgtagaaaatgatgttatttgcaataggtgtaaagattttgacattgatgcttgtagtgaacacatagcctctattgcaaaattaaatgatgaaattgctagtcttaatgcccaacttaagactagcaaaagtgaatttgacaaattaaaatttgcaagggatgcctacacaattggtagacacccctcaattaaggatggtcttggcttcaaaagggaagtcaagaacttaacaagccataaggcttccatctccacaaaggagaaagggaaggcccctatggcgagaaatgctaaaaagaaccatgccttcatgtaccatgatagaaaattttctagaaatgttcatgatgataggagttgtaatgcttataatgcttttgactctcatgccatgtttgcttctagttcttcctatatgcatggtagaaatgtgtttagaagaaatgttgttcatcatatgcataggagaaatgttcctaggaaagttaatgaaccttctacaatttatcatgcctgtgatgcttcatttgcaatttgtagaaaggatagaaaggacccaacaagagatgggtacctaagtcccaagcctaaatttgccttgcaggtttatgcatccgggggttcaagctggattatcgacagcggatgcacaaaccatatgacgggggagaagaagatgttcacctcctacgtcaagaacaagaactcccaagattcaataatattcggtgatgggaaccaaggcaagttgagtcccttggatataatttactatctaagaagtgatggttcactagcttttaagggtgtattagacggcaaactttacttagttgattttgcaaaagaggaggccggtctagatgcatgcttaatagctaagactagcatgggctggctgtggcatcgccgcttagcacatgtggggatgaagaaccttcacaagcttttaaagggagaacatgtgataggtttaactaacgtgcaattcgaaaaagatagaccttgtgcagcatgtcaagcaggtaaacaggtgggaggagcacatcacaacaagaatgtgatgaccacatcaaggcccctggagctgctacatatggacctcttcgaacccgtcgcttatctaagcatagggggaagtaagtatggtttagttattgtggatgacttttcccgcttcacttgggtattctttttgcaggataagtctgagacccaaggaaccctcaagcgcttcctaaggagagctcaaaacgagtttgagctcaaggtgaagaagataaggagcgacaacgggtccgagttcaagaaccttcaagtggaggagtaccttgaggaggaagggatcaagcacgagttctccgctccctacacaccacagcaaaatggtgtggtagagaggaagaacaggacactaatcgatatggcgaggatgatgcttggagaattcaagacccccgagcgtttttggtcgaaagctgtgaacacggcttgccacgccatcaacagggtctaccttcaccgcctcctcaagaagacgtcatatgagcttctaaccggtaacaaacccaatgtatcttactttcgtgtatttgggagcaaatgctacattctagtgaagaagggtagaaattctaagtttgctcccaaagctgtagaagggtttttgttaggttatgattcaaatacaaaggcgtatagggtcttcaacaaatcatcgggtttggttgaagtctctagcgatgttgtatttgatgagactaatggctctccaagagagcaagttgttgatcttgatgatgtagatgaagaagatgttccgacggccactatacgaaccatggcgattggtgaagtacgaccacaggaacaaaaggagcaagatcaaccttcttcctcaactatggtgcatcccccaactcaagacgatgaacagattcatcaacaggaggtgtgtgatcaagggggagcacaagatgatcatgtgatggaggaagaagcgcaacctgcacctccaacccaagttcgagcgatgattcaaagggatcatcccgtcgatcaaattctaggtgatattagcaagggagtaactactcgatctcgattagttaatttttgtgagcattactcctttgtctcttctattgagcctttcagggtagaagaggccttgctagatccggactgggtgttggccatgcaagaggagctcaacaacttcaagaggaatgaagtttggacgctggtgcctcgtcctaagcaaaatgttgtgggaaccaagtgggtgttccgcaacaaacaagacgagcacggagtggtgacaaggaacaaggctcgacttgtggcaaaaggttatgcccaagtcgcaggtttggactttgaggagacttttgctcctgtggctaggctagagtccattcgtattttgctagcatatgccgctcaccattctttcaggttgttccaaatggatgtgaagagcgctttccttaacgggccaatcaaggaggaggtgtacgtagagcaaccccctggcttcgaggatgaacggtaccccgaccatgtgtgtaagctctctaaggcgctctatggacttaagcaagtgaagcaactaaaggatggcaccttcatctctcaaatgaagtacacgcaagacttgctgaagcggtttgggatgaaggatgccaagcccgcaaatactccgatgggtaccgacggacacactgatctcaacaaaggaggtaagtccgttgatcaaaaggcataccggtcaatgataccgttggcataccgaccatgtgctagtagaccggatattatgcttagcgtatgcatgtgtgctagatttcaatctgatcctaaggagtgtcacttagtggcagtgaagcgaatccttagatatttagttgctacgccttgcttcgggctctggtatccaaaggggtctacctttgacctaattggatattcagattccgactatgctggatgtaaggtcgataggaagagtacatcggggacgtgccaattcttaggaaggtccttggtgtcatggaattctaagaaacaaacctctgttgccctatccaccgctgaggccgagtatgttgccgcaggacagtgttgcgcgcaactactttggatgaggcaaaccctcagggactttggctacaatctgagcaaagtcccactcctatgtgataatgagagtgctatccgcatggcggaaaatcctgttgaacacagccgcacaaagcacatagacatccggcatcactttttgagagaccaccagcaaaagggagatatcgaagtgtttcatgttagcaccgagaaccagctagccgatatctttaccaagcctctagatgagaagaccttttgcaggttgcgtagtgagctaaatgtcttagattcgcagaacttggattga

SEQ ID NO: 134236 - DNA, 4854 bp, Zea mays
  Clone ID: MRT4577_53909C.1
atggatcctaagggaaaggggatggtggtcaacaacaacgagaaggagtctatcttcaacgagtcgaaggatgacaagcctaccgactcgggctcaggccacaagcgcaaagacaggaagaagaagaagacgaggcgcatcaaggagatcgtcgactacgacagcgacgaatcttcctcttcccaaaaggatgacgacgactacgagaaaaagaaaacggtcaattcgaacttttcttttgattactctcgtattcctcaaagtacaaatgctcatttagtatctattccacttggtaaacctcctcattttgatggagaggactacggattttggagtcacaaaatgcgtagtcacttgttctctctccatcctagtatatgggagattgtagagagtggaatgcactttgatagtacggatagtcccatgtttattaatgagcaaattcataaaaatgcacaagctactactgttcttctagcttcattgtgcagggatgaataccacaaagtgagcggcttggataacgccaagcaaatttgggacaccctcaagatctctcatgaggggaatgatgtcacaatgctcaccaagatggagttggtggaaggcgaactcgggagattcgctacgataaggggagaagagccaactcaaacgtacaaccggctaaagacccttgtcaacaagataagaagctatggaagcacgcgatggacagaccacgacgtcgtccgcctaatgctaaggtattttactgtccttgatcctcatcttgtaaacaacattcgtgagaatcctaggtacaccaagatgacgcccgaggagatacttggaaaattcgtgagcgggcgaatgatgatcaaggaagcaagatacgtggacgacacattgaatggtccaatcaatgagcctcaacctcttgctctcaaggcaacaagaagcaaggatacgctacctagcaaggtggcacaaatagaggcggccggacttaatgatgaagagatggctctcatcatcaaaagattcaagacggcgctaaaaggtcgcaaggggcagccaagcaagaccaagacaaaggggaagcgctcatgcttcaaatgtggtaaacttggtcattttattgctaactgtcccgacaatgatagtgatcaggatcaagggaacaagagggagaagaagaagaattataagaaggcaaagggcgaggcacatcttggaaaggagtgggattcggattgctcctcttccgactccgacaatgaaggactcgccgccaccgccttcaacaagtcatccctcttccccaacgagcgtcacacatgccttatggcaagggagaagaaggtatgtactcgaaacactacttatgcttcttcaagtgaggacgaatctagtgatgaggatgaaatagattattcatgtttatttaagggcctagatagaaccaaggtagataaaattaatgaactgattgatgccttgaatgataagaataggcttttagaaaagcaagaggatatgttgtatgaagaacatgacaaatttgtagaagcacaaaaatctcatgctctagaagttaaaagaaatgaaatgctttcttgtgaattatcttcttgccatgagacaatttctaacttaaggagcattaatgatgatttgaatgctaagttagaaatagctagtaaatcaacatcttgtgtagaaaatgatgttatttgcaataggtgtaaagattttgacattgatgcttgtagtgaacacatagcctctattgcaaaattaaatgatgaaattgctagtcttaatgcccaacttaagactagcaaaagtaaatttgacaaattaaaatttgcaagggatgcctacacaattggtagacacccctcaattaaggatggtcttggcttcaagagggaagtcaagaacttaacaagccataaggcttccatctccacaaaggagaaagggaaggcccctatggcgagtaatgcaaaaaagaaccatgccttcatgtaccatgatagaaaattttctagaaatgttcatgatgataggagttgtaatgcttataatgcttttgactctcatgccatgtttgcttctagttcttcctatatgcatggtagaaatgtgtttagaagaaatgttgttcatcatatgcctaggagaaatgttggtagtactcctaggaaagttaatgaaccttctacaatttatcatgcctgtgatgcttcatttgcaatttgtagaaaggatagaaaggtttatgcatccgggggttcaagctggattatcgacagcggatgcacaaaccacatgacgggggagaagaagatgttcacctcctacgtcaagaacaaggacacccaagattcaataatattcggtgatgggaaccaaggcaagttgagtcccttggatataatttactatctaagaagtgatggttcactagcttttaagggtgtattagacggcaaactttacttagttgattttgcaaaagaggaggccggtctagatgcatgcttaatagctaagactagcatgggctggatgtggcatcgccgcttagcacatgtggggatgaagaaccttcacaagcttttaaagggagaacatgtgataggtttaactaacgtgcaattcgaaaaagatagaccttgtgcagcatgtcaagcaggtaaacaggtgggaggagcacatcacagcaagaatgtgatgaccacatcaaggcccctggagctgctacatatggacctcttcggacccgtcgcttatctaagcatagggggaagtaagtatggtttagttattgtggatgacttttcccgcttcacttgggtattctttttgcaggataagtctgagacccaaggaaccctcaagcgcttcctaaggagagctcaaaacgagtttgagctcaaggtgaagaagataaggagcgacaacgggtcagagttcaagaaccttcaagtggaggagttctttgaggaggaagggatcaagcacgagttctccactccctacacaccacagcaaaatggtgtggtagagaggaagaacaggacgctaatcgatatggcgaggatgatgcttgaagaattcaagacccccgagcgtttttggtcggaagctgtgaacacggcttgccacgccatcaacagggtctaccttcaccgcctcctcaagaagacgtcatatgagcttctaaccggtaacaaacccaatgtatcttactttcgtgtatttgggagcaaatgttacattctagtgaagaagggtagaaattctaagtttgctccaaaagctgtagaagggtttttgttaggttatgattcaaatacaaaggcgtatagggtcttcaacaaatcatcgggtttggttgaagtctctagcgacgttgtatttgatgagactaatggctctccaagagagcaagttgttgatcttgatgatgtagatgaagaagatgttccgacggccgctatacgaaccatggcgattggtgaagtacgaccacaggaacaaaaggagcaagatcaaccttcttcctcaactatggtgcatcccccaactcaagacgatgaacagattcatcaacaggaggcgtgtgatcaagggggagcacaagatgatcatgtgatggaggaagaagcgcaaccggcacctccaacccaagttcgagcgatgattcaaagggatcatcccgtcgagcaaattttgggtgatattagcaagggagtaactactcgatctcgattagttaatttttgtgagcattactcctttgtctcttctattgagcctttcagggtagaagaggccttgctagatccggactgggtgttggccatgcaagaggagctcaacaacttcaagaggaatgaagtttggacgctggtgcctcgtcctaagcaaaatgttgtgggaaccaagttgttccaaatggatgtgaagagcgctttcctcaacgggccaatcaaggaggaggtgtacgtggagcaaccccctggcttcgaggatgaacggtaccccgaccacgtgtgtaagctctctaaggcgctctatggacttaagcaagccccaagagcatggtatgaatgccttagagatttcttaattgctaatgccttcaaggttgggaaagccgatccaactcttttcactaagacttgtgacggtgatctgtttgtgtgccaaatttatgtcgatgacataatatttggttctactaataaaaagtcgtgtgaagagtttagcagggtgatgacgcagaaattcgagatgtcaatgatgggcgagttgaactacttccttgggttccaagtgaagcaactcaaggacggcaccttcatctctcaaacaaagtacacgcaagtcttgctgaagcggtttgggatgaaggatgccaagcccgcaaagactccgatggggaccgacggacacaccgatctcaacaaaggaggtaagtccgttgatcaaaaagcataccggtctatgatagggtcgttactttatttatgtgctagtagaccggatattgtgcttagcgtatgcatgtgtgctagatttcaatctgatcctaaggagtgtcacttagtggcagtgaagcgaatccttagatatttagttgctacgccttgcttcgggctctggtatccaaatgggtctacctttgatctaattggatattcagattccgactatgctggatgtaaggtcgataggaagagtacatcggggacgtgccaattcttaggaaggtccctggtgtcatggaattctaagaaacaaacctctgttgccctattcaccgctgaggccgagtacgttgccgcaggatag

SEQ ID NO: 134237 - DNA, 379 bp, Zea mays
  Clone ID: MRT4577_5390C.1
gtggaggatggtctcccaagataacagcagcaaaggctcaatatacgttcctcgatctatgttgtcaactcacaaagaagaacctgaggatgataaatctccaagattggattcaagttcagtggaggatgcccagattgtctccagtgcatccaactttcagagccaggattttatgctggagaggtttcaacagagtgttgcttcttcgcctgatagttcatcttctaatccttcaaatagcaacactggtgattctatgcctgtatattctgacataaatttgttaaagagtttgtcatttgatgctttgaagcaatcggatttgaactcttggacaccaaaaagcccactgaaaagtaatgttaacaatgacctt

SEQ ID NO: 134238 - DNA, 491 bp, Zea mays
  Clone ID: MRT4577_53910C.1
cacctacggaccttgagtcgtctcacccccacctgatcccttcgcgccgacgccgacatgttctactccttgtacgagagtcgcgacccaatcgagcactatgtgctcttaaaggcccgtcaggaggcggagacctaggacgccgtagaggaaatggtctactcgctggaagcgctggccacgctcgaaccggacctgatctacatgcacacaggaccggtgctgcgactacaatacccggcacgaagaggcatctgaggcccatatgcaaactgctccacacacgctacaccaccaaggaggagatgccgttctacacggctcacccagcatcacgtggacaccgtgcaggagcacgtacttgccaatgcgctcgacatgatcgcagacgactggataaacgacgggccggtcgagttatccgagggcctaggaagtgacgagcgcctgactcttgccaaagtgaaagaaggtgtggaggtcacacatat

SEQ ID NO: 134239 - DNA, 5016 bp, Zea mays
  Clone ID: MRT4577_53911C.1
tcaatccaagttccgcgaatctaagacatttagctcactacgcatcctgcaaaaggtcttctcatctagaggcttggtaaagatatcggctagttggttctcggtgctaacatgaaacacttcgatatctcccttttgctggtggtctctcaaaaagtgatgccggatgtctatgtgctttgtgcggctgtgctcaacaggattttccgccatgcggatagcactctcattatcacataggagtgggactttgctcagattgtagccaaagtccctgagggtttgcctcatccaaagtagttgcgcgcaacactgtcctgcggcaacatactcggcctcagcggtggatagggcaacggaagtttgtttcttagagttccatgacaccaggaaccttcctaagaattggcacgtccccgatgtactcttcctatcgaccttacatccagcatagtcggaatctcctttgttgaggtcggtgtgtccgtcagttcccatcggcgtttttgcgggcttggcatccttcatcccaaacctctttagcaagtcttgcgtgtactttgtttgggagatgaaagtgtcgtccttgagttgcttcacttggaacccaaggaagtagttcaactcgcccatcatcgacatctcgaatttctgtgtcatcaccctgctaaactcctcacaagactttttattagtagaaccaaatattatgtcatcgacataaatttggcacacaaacaaatcaccatcacatgtattagtgaaaagagttggatcggctttcccaaccttgaaagcattagcaattaagaaatctctaaggcattcataccatgctcttggggcttgcttaagtccatagagcgccttagagagcttacacacgtggtcggggtaccgttcatcctcgaagctagggggttgctctacgtacacctcctccttgattggcccgttgaggaaagcgcttttcacatccatttggaacaacctgaaagaatggtgagcggcatatgctagcaaaatacgaatggactctagcctagccacaggagcaaaggtctcctcaaagtccaaacctgcgacttgggcataaccttttgccacaagtcgagccttgttccttgtcaccacttcgtgctcgtcttgtttgttgcggaacacccacttggttcccacaacattttgcttaggacgaggcaccagcgtccaaacttcattcctcttgaagttgttgagctcctcttgcatggccaacactttaccaatcgccatggttcgtatagcggccgtaggaacatcttcttcatctacatcatcaagatcaacaacttgctctcttggagagccattagtctcatcaaatacaacgtcgctagagacttcaactaaacccgatgatttgttgaagaccctatacgcctttgtatttgaatcataacctaacaaaaacccttctacagctttgggagcaaacttagaatttctacccttctttactagaatgtagcatttactcccaaatacacgaaagtacgatacattgggtttgttaccggttagtagctcatacgacgtcttcttgaggaggcaatgaaggtagaccctgttgatggcgtggcaagccgtattcacggcttccgaccaaaagcactcgggggtcttgaactctcctagcatcgtcctcgccatatcgatgagcgtcctattcttcctttctaccacaccattttgttgtggtgtgtagggagcggagaactcgtgcttaatcccttctttctcaaggaactcctccacttgaaggttcttgaattcggacccattgtcgctccttatcttcttcaccttgagctcaaactcgttttgagctctccttaggaagcgcttgagggttccttgggtctcagacttatcctgtaaaaagaatacccaagtgaagcgggaaaaatcatccacaatgactaaaccatacttacttccccctatgcttagataagcgacgggtccgaagaggtccatatgcagcagctccagaggtcttgaggtggtcatcacattcttgctgtgatgtgctcctcccacttgtttacctgcttgacaagctgcacaaggtctatctttttcgaattgcacgttagtcaaacctatcacgtgttctccctttagaagcttgtgaaggttcttcatccccacatgtgctaagcggcgatgccacagccagcccatgctagtcttagcgattaagcatgcatctagaccggcctcctcttttgcaaaatcaactaaataaagtttgccgtctagtacacccttaaaagctagtgaaccatcacatcttctaaagacagacacatctacattagtgaatagacaattatatcccatattgcataattgactaacagatagtaaattatatccaagagactcaactaaaaacacattagagatagagtgctcattggatattgcaatcttgcctaaacctttcaccttgccttggttcccatcaccgaatatgattgaatcttgggaatccttattcttgacgtaggaggtgaacatctccttctcccctgtcatatggtttgtgcatccgctgtcgataatccagcttgagcccccggatgcataaacccaactcttgttgggtcctacaaggttagtcacaatttccttagggacccaaatgcaagttttatcacccttgcattttgcccctaattttctagcaattatcttcctatcctttctacaaatagcaaaggaagcatttaagacatgataaattgtagaaggttcattaactttcctaggagtattgacaacatttctcctaggcatatgatgaacaacatttcttctaaacacatttctaccatgcatataggaagaactagaagcaaacatggcatgagagtcaaaagcattataagcattacaactcctatcatcatgaacatttctagaaaattttctatcatggtacatgaaggcatggttctttttagcattacttgccataggggccttccctttctcctttgtggagatggaagccttatggcttgttaagttcttgacttccctcttgaagccaagaccatccttaattgaggggtgtctaccaattgtgtaggcatctcttgcaaattttaatttgtcaaattcactttttctaatcttaagttgggcattaagactagcaatttcatcatttaattttgcaatagaggctatgtgttcactacaagcattaatatcaaaatctttacacctattgcaaataacatcattttctacacaagatgttgatttactagctatttctaacttggcattcaaatcatcattaatgcttcttaagttagaaattgtctcatggcaagaagataattcacatgaaagcatttcatttcttttaacttctaaagcatgagatttttgtgcttctataaatttgtcatgttcttcatacaacaaatcttcttgtttttctagaagcctattcttatcattcaaggcatcaattaattcattaactttatctaccttggttctatctaggcccttaaatagacatgaataatctatttcatcctcatcactagattcatcctcacttgaagaagcataagtagagtctcgagtacataccttcttctcccttgccataaggcatgtgtgacgttcgttggggaagagggataacttgttgaaggcggtggcggcgagtccttcattgtcggagtcggacgaggagcaatccgaatcccactccttgccaagatgagcctcgccctttgccttcttatagtttttcttcttctccctcttgttcccttgatcctgatcactatcattgtcgggacagttagcaataaaatgaccaagcttaccgcatttgaagcatgagcgcttctccttggctttggtcttgcttggctgtcccttgcgacctttaagcgccgtcttgaatctcttgatgatgagggccatctcttcatcattaagtccagccgcctcgatttgtgccaccttgctaggtagcgcctccttgcttcttgttgcctttagagcaaggggttgcggctcgttgatcggaccattcaaagcgtcgtccacgtaccttgcctccttgatcatcattcgcccgctcacgaattttccaaggacttcttcgggcgacattttggtgtacctaggattctcacgaatattattcaccaaatgaggatcaagaacggtaaaggaccttagcatcagtcggacgacatcgtggtccgtccatcgcatgctttcgtagctccttattttgttgataagggtcttgagccggttgtatgtttgtgttggctcctcgccccttatcatcgcgaaccgtccaagctcgccctccaccaactccatcttggtgagcaaggtgacgtcgttcccctcatgagaaatcttgagggtgtcccagatctgcttggcgttatccaagccgctcactttgtggtattcatccctgcacaatgaagctagaagaacagtagtagcttgtgcattcttatgaatttgttcattaatgaacatgggactatccgaactatcaaagtgcattccactctctacaatctcccatatactaggatggagagagaacaaatgactacgcattttgtgactccaaaatccgtagtcctctccatcaaaatgaggaggtttaccaagtggaatagataataaatgagcatttgcactttgaggaatacgtgaataatcgaaagaaaagttcgagttaaccgtctttcgtttgtcgtagtcgttgttgtcgttttccttgtgggaagaagtggactcatcactgtcgtcgtagtagacgatctccttaatgcgtcttgtcttcttcttcttcccatctttgcgtctgtgacccgagcccgagtcggtagtcttgtcatccttcagatcgttgacgaaggactccttctctttgtcgttgatcacgattcccttccccttaggatccat

SEQ ID NO: 134240 - DNA, 327 bp, Zea mays
  Clone ID: MRT4577_53912C.1
ccggtccgaataactccggtcgacccactgcgtcgcccagtttatttggcagacagacgagagcaggaccagtgtgtcgactcctaaatcgagcgccgctgatctaagtcctcctacaacaccacacgtcgcttgatattcccataccactatggcccgccacatttgggccgccccctgccccacttccaatggcatgaaagaggagcagaagtatctcaggttctcaccaacattcagaaaactgttggttcgccgacaagtccaactgggtatcattaggactacagaccaagcgagctcgaaggcgtatgcgcaagagatgac

SEQ ID NO: 134241 - DNA, 4509 bp, Zea mays
  Clone ID: MRT4577_53913C.1
atggatcctaaggggaagggaatcgtgatcaatgacaaggagaaggagtcccttgtcaacgagccgaaggatgacaagcctaccgactcgggctcgggccacaagcgcaaagacgggaagaagaagaagacaaggcgcatcaaggagatcgtctactatgacagcgacgaatcttcctcttcccaaaaggacgacgacgactacgagaaaaagaaaacggtcaattcgaatttttcttttgattactctcgtattcctcaaagtacaaatgctcatttattatctattccacttggtaaacctcctcactttgatggagaggactacggattttggagtcacaaaatgcgtagtcatttgttctctctccatccaagcatatgggagatagttgagaatggaatgcattttgatagtagtgatagtcccatgtttatcaatgagcaaattcataaaaatgcacaagctactactgttcttctagcttccttgtgcagggatgaataccacaaagtgagcggcttgggtaacgccaagcaaatttgggacaccctcaagatctctcatgaagggaatgatgtcacaatgctcaccaagatggagttggtggaaggcgaactcgggagattcgctatgataaggggagaagagccaactcaaacgtacaaccggctcaagacccttgtcaacaagataagaagctatggaagcacgcgatggacggaccacgacgttgtccgcctaatgctaaggtcttttactgttcttgatcctcatcttgtgaacaatattcgtgagaatcctaggtacaccaagatgacgcccgaggagatacttggaaagttcgttagcgggcgaatgatgatcaaggaagcaagatacgtggacgacgccttgaatggtcctatcaacgagccgcaaccccttgctctcaaggcaacaagaagcaaggaggcgctacctatcaaggtggcacaaattgaggcggccggacttaatgatgaagaaatggcccttatcatcaaaagattcaagacggcgctaaaaggtcgcaagggacaaccaagcaagatcaagacaaaggggaagcgctcatgcttcaaatgtggtaagcttggtcattttattgctaactgtcccgacaatgatagtgatcaggatcaagggatcaagagggagaaaaagaagaactataagaaggcaaagggcgaggcacatcttggcaaggagtgggattcggattgctcttcgtccgacttcgacaatgaaggactcgccgccaccgccttcaacaagtcatccctcttccccaacgagcgtcacacatgccttatggcaagagagaagaaggtatgtactcaaaactctacttatgcttcttcaagtgaggacgaatctagtgatgaggatgaaatagattattcatgcttatttaagggactagatagaaccaaggtagataaaattaatgaattgattgatgccttgaatgataagaacaggcttttagaaaaacaagaggacttgttgtatgaagaacatgacaaatttgtagaagcacaaaaatctcatgctctagaagttaaaagaaatgaaatgctttcttgtgaattatcttcttgccatgagacaatttctagcttaaggagcattaatgatgatttgaatgctaagttagaaacagctagtaaatcaacatcttgtgtaaaaattgttgaaacttgcaataggtgtaaagatattgatattgatgcttgtagtgaacacatagcctctattgcaaaattaaatgatgaagttgctagtcttaatgcccaacttaagactagcaaaagtgaatttgacaaattaaaatttgcaagggatgcctacacaattggtagacacccctcaattaaggatggtcttggcttcaagagagaagtcaagaacttaacaagccataaggcttccatctccataaaggagaaagggaaggcccctatggtgagtaatgctaaaaagaaccatgccttcatgtaccatgatagaaaattttctagaaatgttcatgatgataggagttgtaatgcttataatgcttttgactttcatgccatgtttgcttctagttcttcctatatgcatgcatccggaggttcaagctggattatcgacagcggatgcacaaaccatatgacgggggagaagaagatgttcacctcctacgtcaagaataaggattcccaagattcaataattttcggtgatgggaaccaaggcaaggataagtctgaaacccaagggaccctcaagcgcttcctaaggagagctcaaaatgagtttgagctcaagaggaagaacaggacgcttatcgatatggcgaggacgatgcttggagagttcaagaccccagagtgcttttggtcggaagccgtaaacacggcttgccacgccatcaacagggtctaccttcatcgcctcctcaagaagacgtcgtatgagctgctaaccggtaacaaacccaatgtatcttactttcgtgtatttgggagcaaatgctacattctagtgaagaagggtagaaattctaagtttgctcccaaagttgtagaagggtttttgttaggttatgattcaaatacaaaggcgtatagggtcttcaacaaatcatcgggtttggttgaagcctctagcgacgttgtatttgatgagactaatggctctccaagagagcaagttgttgatcttgatgatgtagatgaagaagatgttccgacggccgctatacgcaccatggagattggagaggtgcgaccacgggaacaaaatgagcgagatcaaccttcttcctcaactatggtgcatcccccaactcaagacgatgaacaggttcatcaacaggaggcgtgtgaccaagggggagcacaagatgatcatgtgatggaggaagaagcacaaccggcacctccaacccaagttcgagcgatgattcaaaggaatcaccccgtcgatcaaattctgggtgatattagcaagggagtaactactcgatctcgattagttaatttttgtgagcattactcctttgtctcttctattgagcctttcagggtagaagaggccttgctagatccggactgggtgttggccatgcaagaggaactcaataacttcaagaggaatgaagtttggacactggtgcctcgtcctaagcagaatgttgtgggaaccaagtgggtgttccgcaacaaacaagacgagcacggagtggtgacaaggaacaaggctcgacttgtggcaaaaggttatgcccaagtcgcaggtttggactttgaggagacttttgctcctgtggctaggctagagtccattcgtatcttgctagcatatgccgctcaccattctttcaggttgtaccaaatggatgtggagagcgctttcctcaatgggccgatcaaggaggaggtgtacgtggagcaaccccctggcttcgaggatgaacggtaccctgaccacgtgtgtaagctctctaaggcgctctatggactcaagcaagccccaagagcatggtatgaatgccttagagatttcttaattgctaatgctttcaaggttgggaaagccgatccaactcttttcactaagacttgtaacggtgatctttttgtgtgtcaaatttatgtcgacgacataatatttggttctactaataaaaagtcttgtgaagagtttagcagggtgatgacgcagaaattcgagatgtcgatgatgggcgagttgaactacttccttgggttccaagtgaagcaactcaaggatggcaccttcatctctcaaacgaagtacacgcaagacttgctgaagcggtttgggatgaaagacgccaagcccgcaaagactccgatggggaccgacggacacacagacctcaacaaaggaggtaagtccgttgatcaaaaggcataccggtcaatgatagggtctttactttatttatgtgctagtagaccggatattatgctaagcgtatgcatgtgtgctagatttcaatccgatcctaaggagtgtcacttagtggcagtgaagcgaatccttagatatttagttgctacgccttacttcggactctggtatccaaaggggtctacctttgacctaattggatatttagattccgactatgctggatgtaaggccgagtatgttgccgcaggacagtgttgcgcgcaactactttggatgaggcaaaccctcagggactttggctacaatctgagcaaagtcccactcctatgtgataatgagagtgctatccgcatggcggaaaatcctgttgagcacagccgcaccaagcacatagacatccgacatcactttttgagagaccaccagcaaaagggtgatatcgaagtgtttcatgttagctccgagaaccagctagccgatatctttaccaagcctctagatgagaagaccttttgcaggttgcgtagtgagctaaatgtagcacccaaaatcctattttag

SEQ ID NO: 134242 - DNA, 2089 bp, Zea mays
  Clone ID: MRT4577_53914C.1
gtatccctcgaatggacattggagaaggttcttgtccataagccacttattgatgcctcgttagtccaatttgagggatactggtggctatttgcatctgattttacacggtatggtgttgagaagaatgcggaccttgagatgtgggtacagcaattctcctcttggtccttggactgagcacaagaaaaatcctatctacaaatcagacaaaagtttgggagctcgaaatggtgggaggctcttcatttttgaagggtcgttatatcgccccggccaggattgcagtggtacttatggccggagggttaagttgcacaaggttgaaaagctaagcaaggaggaatacaaagaggtccctgtaaatcttgggatagatgagccaaagaaagggagaaatgcatggaatggcatgaggtaccatcacatggatgcacaacaactcgcatctggtggatggattgctgtaatggatggtgatcgagtcccttcaggtgattcaaccagacgctctctcattggttacttagctttcctgttggccagtgcccttgtcgtttttgtgggttttatgaaaggtgcaatcagttgttacgttcctcccagtttatgggttcctctcacaaggagaacagaattatcccgtatcttctacgtgcaccgcttcaaccagaaagtccgcagatattctagcagcatcagcagatatatctctgctgctaaaaccaagctcagtgaaaagacttggtccaacgtgcttttcttctgtgtagttgctctatttggtgccataaatgtctgcattgccgtgcatttcttatgtggcggcaatggcgctgaagaggcgtacacatatcaagggcaacactcccagtttacgatgatcacaatgacatatgaagcccgtctctggaatttgaaagtgttcatcgaacactactctagatgtgaatcggttagggagatagttgttgtttggaacaaaggtaaccctccaagcagtgacgcgtttgactccactgtgcctgtgaggatacgggtcgaggagaccaattctcttaacaacagatttagggtggatcctctgataaagaccagagctgttcttgaactggacgatgatatcatgatgacttgcaccgacttagagaaaggatttagggtctggagagaacaccctgagcggatggtgggcttctacccccggatgatagatggcaaccctatgcagtacaggaatgagaggtacgctaggggtaagaatggatacaatctgatactcacaggtgctgccttcatggacagggagtttgctttcaagacttactggagcgagaaagctcgcgaagggagggactatgtgcacaagaacttcaactgtgaggacttgctcatgaattttctgtatgcgaacgcaagctccacaaggactgtggagtatgtccaccctgcgtgggctatcgatacatccaagctttcttctgtggccattagccgggacacccagaaacactacgatatcagaacagattgcttggcaaagttctcctccatctatggccccctccctcagaaatgggagttcggcatgcgtgaagatcattgggacaaataggatcgcgacggtggtacacgacggacaaacacatgatggtgaaaccttcttttttttttgtcaatcccctggaaagttttgtagcttcgggcgaaggtataggtccttcgggcagaagtgcccctggtttgtgatgtgcctattagatctggctagaagcttagacctgatcaggatagaccattgttcaaaagttgaggatagaccaaaggcagtgcagtgtatgtgtatgtgaattgtggaaggcaaagagggaatttgagaattgcatagtgggtggaaagtttagactgttgggttcccttctctgtagtttgtgtacatctcttcctttctaagattcagctagcatgttgtgtgattatttaccgtaaggattctttttacagctcgtagtgtttattatttcagtctaatgaggactttctgaatcattctttcccaaaaaaaaaaaaaaaaaaaaaaaacaaaaat

SEQ ID NO: 134243 - DNA, 4095 bp, Zea mays
  Clone ID: MRT4577_53915C.1
atggatcctaaggggaagggaatcgtgatcaacgacaaggagaaggagtccttcgtcaacgagccgaagaatgacaagcctactgactcgggctcgggccacaagcgcaaagatgggaagaagaagaagacaaggcgcatcaaggagatcgtctactacgacgatagcgatgagtctacttcttcccaaaaggacgacgacaacgactacaggaagacggtcaattcaaacttttcatttgattattctcgtattccacatagttcgaattcgcatttgctttccattcctcttggtaaacctccacactttgatggggaggactacagattttggagtcacaaaatgcgtagtcacttattctctctccatccgagcatatgggagattgtagagaatggaatgaaatttgatagctcggatagccctatgcttataaatgaacaaatccatagaaatgcacaagctactactgttctattagcatctttgtgcagggaagagtacaataaggtgagcggcttggacaatgccaagcagatatgggacaccctcaagatctctcacgaggggaacgacatcaccatgcttactaaaatggagttggtggagggcgagcttggacgattcgcaatgataaggggagaggagccaacccagacttacaaccgactcaagacccttatcaacaaaataaggagctacggaagcacgcgatggacggaccacgatgccgtccgcctaatgctaaggtcctttaccgttcttgatcctcatctcgtaaacaatattcgtgagaatcccaggtacacgacgatgacgcccgaggaggtactcggaaaattcgtaagcgggcggatgatgatcaaggaggcgagatacgtcgacgacgctctaaacggtccaatcaatgagcctcaacctcttgctctcaaggcaacaagaagcaaggagatgctacctagcaaggtggcacaaattgaggcggccggacttaatgatgaagagatggctctcatcatcaagagattcaagacggcgctaaaaggccgcaaggggcagccaagcaagaccaagacaaaggggaagcgctcatgcttcaaatgtggtaagcttggtcattttattgctaactgtcccgacaatgatagtgatcaggatcaagggaacaagagggagaagaagaagaactataagaaggcaaagggtgaggcgcatctaggcaaggagtgggactcggactgctcctcttccgactccgacaatgaaggactcgccgccaccgccttcaacaagtcatcccttttccccaacgagcgtcacacatgccttatggcaagggagaagaaggtttatgcatccgggggctcaagctggattatcgacagcggatgcacaaaccatatgacgggggagaagaagatgttcacctcctacgtcaagaataaggattcccaagattcaataatattcggtgatgggaaccaaggcaaggtaaaagggttagttgagtctctgggatataatttactatctgttagtcaattatgcaatatgggatataactgtttattcacaaacatagatgtgtctgtctttagaagaagtgatggttcactagcttttaagggtgtattagatggcaagctttacttagttgaatttgcaaaagaagagaccggtctagatgcatgcttaattgctaagactagcatgggctggctgtggcatcgccgcttagcacatgtgggaatgaagaaccttcacaagcttctaaagggagaacacgtgataggattaactaatgtgcaattcgaaaaagatagaccttgtgcagcttgtcaggcaggtaaacaagtgggaggagcacatcacagcaagaatgtgatgaccacatcaagacccttggagttgctacatatggacctcttcggacccgtcacctatctaagcataggaggaagtaagtatggtctagttattgttgatgacttttcccgcttcacttgggtgttctttttgcaggataagtctgaaacccaagggaccctcaagcgcttcctaaggagagcacaaaatgagtttgaactcaaagtgaagaagataagaagcgacaacgggtccgagttcaagaaccttcaagtggaggagttccttgaggaggaagggatcaagcacgagttctccgctccctacacaccacaacaaaatggtgtggtagagaggaagaacaggacgctcatcgatatggcgaggacgatgctaggagagttcaagacccccgagtgcttttggtcggaagctgtgaacacggcttgccacaccatcaacagggtctaccttcatcgcctcctcaagaagacgttgtatgagcttctaaccggtaacaaacccaatgtatcttactttcgtgtatttgggagcaaatgctacattctagtgaagaagggtagaaagtctaagtttgctcccaaagctgtagaagggtttttgttaggttatgactcaaatacaaaggcgtatagggtcttcaacaaatcatcgggtttggttgaagtctctagcgacgttgtatttgatgagactaatggctctccaagagagcaagttgttgattgtgatgatgtagatgaagaagatgttccgacggccgctatacacaccatggcgattggagatgtgcggccacaggaacaaaaggagcaagatcagccttattcctcaactatggtgcttcccccaactcaagacgatgaacaggttcatcaacaagaggcgtgtgatcaagggggagcacaagatgatcatgtgatggaggaagaagcgcaaccggcacctccaacccaagttcgagcgatgattcaaagggatcatcccgtcgaccaaattctgggtgatattagcaagggagtaactactcgatctcgattagttaatttttgtgagcattactcatttgtctcttctattgagcctttcagggtagaggaggccttgctagatccggactgggtgttggccatgcaagaggagctcaacaacttcaagtgcaatgaagtttggacactggtgcctcgtcccaagcaaaatgttgtgggaaccaagttgttccaaatggatgtgaagaacgctttcctcaacgggccaatcaaggaggaggtgtacgtggagcaactccctggcttcgaggatgaacggtaccccgaccacgtgtgtaagctctctaaggcgctctatggacttaagcaagccccaagagcatggtatgaatgccttagagatttcttaattgctaatgctttcaaggttgggaaagccgatccaactcttttcactaagacttgtgacggtgatctttttgtgtgccaaatttatgtcgatgacataatatttggttctactaataaaaagtcttgtgaagaatttagcagggtgatgacgcagaaattcgagatgtcgatgatgggcgagttgaactacttccttgggttccaagtgaagcaactcaaggacggcaccttcatctctcaaacaaagtacacgcaagacttgctgaagcagtttgggatgaaggatgccaagcccgcaaagactccgatggggaccgacggacacaccgacctcaacaaaggagattccgattatgctggatgtaaggtcgataggaagagtacatcggggacgtgccaattcttaggaaggtccctggtgtcatggaattctaagaaacaaacctccgttgccctatccaccgctgaggccgagtatgttgccgcaggacagtgttgcgcgcaactactttggatgaggcaaaccctcagggactttggctacaatctgagcaaagtcccactcctatgtgataatgagagtgctatccgcatggcggaaaatcctgttgagcacagccgcacaaagcacatagacatccggcatcactttttgagagaccaccagcaaaagggagatatcgaagtgtttcatgttagcaccgagaaccagctagccgatatctttaccaagcctctagatgagaagaccttttgcaggctgcgtagtgagctaaatgtcttagattcgcggaacttggattga

SEQ ID NO: 134244 - DNA, 849 bp, Zea mays
  Clone ID: MRT4577_53916C.1
gttgttccaaatgaacgtgaaaagcgctttcctcaatgggccaatcaaggaggaggtgtacgtagagcacaccccctggcttcgaggatgaacggaaccccgaccacgtgtgttgggaaagccgatccaactctgttcactaagacttgtgacggtgatctttttgtatgccaaatttatgtcgatgacataatatttggttctactaataaaaagtcttgtgaagagtttagcagggtaatgacgcagaaattcgagatgtcgatgatgggcaagttgaactacttccttgggttccaagtgaagcaactcaaggatggcaccttcatctctcaaacgaagtacacgcaagactcgctgaagcggtttaggatgaaggatgccaagcccgcaaagactccgatggggaccgacggacacaccgacctcaacaaaggagattccgactatgctggatgtaaggtcgataggaagagtacatcggggacgtgccaattcttaggaaggtccctggccgagtatgttgccgcaggaaagtgttgcgcacaactactttggatgaggcaaatcctcagggactttggctacaatctgagcaaagtcccactcctatgtgataatgagagtgctatccgcatggcggaaaatcctgttgagcacagccgcacaaagcacatagacatccgacatcactttttgagagaccaccaacaaaagggagatatcgaagtgtttcatgttagcaccgagaaccagctagccgatatctttaccaagcctctagatgagaagaccttttgcaggttgcgtagtgaactaaatgtcttagattcgcggaacttggattga

SEQ ID NO: 134245 - DNA, 2514 bp, Zea mays
  Clone ID: MRT4577_53917C.1
atggatcctaagggaaaggggatggtggtcaacaacaacgagaaggagtctatcttcaacgagccgaaggatgacaagcctatcgactcgggctcaagccacaagcgcaaagacgggaagaagaagaagacaaggcgcatcaaggagattaaggatgacgacgactacgagaaaaagaaaacgatcaattcaaacttttcttttgactactctcgtattccgcatagtacaaatgctcatttattatctattccacttggtaaacctcctcactttgatagagaggactacggattttggagtcacaaaatgcgtagtcatttgttctctctccatccaagcatatgggagatagttgagaatggaatgcattttgatagtagtgatagtcccatgtttatcaatgagcaaattcataaaaatgcacaagctactactgttcttctagcttccttgtgcagggatgaataccacaaagtgagcggcttggataacgccaagcaaatttgggacaccctcaagatctctcatgaggggaatgatgtcacaatgctcaccaagatggagttggtggaaggcgaactcaggagattcgctatgataaggggagaagagccaactcaaacgtacaaccggctaaagacccttgtcaacaagataagaagctatggaagcacgcgatggacggaccacgacgtcgtccgcctaatgctaaggtcttttactgtccttgatcctcatcttgtaaacaatattcgtgagaatcctaggtacaccaagatgacgcctgaggagatacttggaaagttcgtgagcgggcgaatgatgatcaaggaagcaagatacgtggacgacgcattgaatggtccaatcaatgagcctcaacctcttgctctcaaggcaacaagaagcaaggagacgctacctagcaaggtggcacaaattgaggcggccggacttaatgatgaagagatggctctcatcatcaagagattcaagacggcgctaaaaggtcgcaaggggcagccaagcaagaccaagacaaaggggaagcgctcatgcttcaaatgtggtaagcttggtcattttattgctaactgtcccgacaatgatagtgatcaggatcaagggaacaagagggagaagaagaagaattataagaaggcaaagggcgaggcacatctaggcaaggagtgggattcggattgctcctcatccgactccgacaatgaaggactcgccgccaccgccttcaacaagtcatccttcttccccaacgagcatcacacttgccttatggcaagggagaagaaggtttatgcatctgggggttcaaactggattatcgacagccgatgcacaaaccatatgacgggggagaagaaaatgttcacctcctacgtcaaaaacaaggattcccaagattcaataatattcggcgatgggaatcaaggcaaggataagtctgagacccaagaaaccctcaagcacttcctaaggagagctcaaaacgagtttgagctcaaggtgaagaagataaggagcgacaacgggtccgagttcaagaaccttcaagtggaggagtaccttgaggaggaagggatcaagcacgagttctccgctccctacacaccacagcaaaatggtgtggtagagaggaagaataggacgctaatcgatatggcgaggacgaagcttggagaattcaagacccccgagcgtttttggtcggaagctgtgaacacggcttgccacgccatcaacagggtctaccttcaccgcctcctcaagaagacgtcgtatgagcttctaaccggttatgattcaaatacaaaggcgtatagggtcttcaacaaatcatcgggtttggttgaagtctctagcgacgttgtatttgatgagactaatggctctccaagagagcaagttgttgatcttgatgatgtagatgaagaagatgttccgacggccgctatacgaaccatggcgattggtgaagtacgaccacaggaacaaaaggagcaagatcaaccttcttcctcaactatggtgcatcccccaactcaagacgatgaacaggttcatcaacaggaggcgtgtgatcaagggggatcacaagatgatcatgtgatggaggaagaaactcatcctgcacctccaacccaagttcgagcgatgattcaaagggatcatcccgtcgatcaaattcttggtgatattagcaagggagtaactactcaatctcgattagttaatttttgtgagcattactcctttgtctcttctattgagcctttcagggtagaggaggccttgctagatccggactgggtgttggccatgcaagaggagctcaacaacttcaagaggaatgaggtttggacactggtgcctcgtcctaagcaaaatgttgtgggaaccaagtgggtgtttgtcggtgttttgggtccgaccgcacacccggggttgcccctcaaggtgtttttaggagtaggacggtgtcgacaactgtag

SEQ ID NO: 134246 - DNA, 480 bp, Zea mays
  Clone ID: MRT4577_53918C.1
atgccaactaatggcccgggatttacgaagctccacgaccgggcctcagactccaattatgctggatgtaaggtcgataggaagagtacatcggggacgtgccaattcttaggaaggtccctggtgtcgtggagttctaagaaacaaacttccggtgccgcaggacagtgttgcgcgcaactactttggatgaggcaaaccctcaaggactttggctacaatctgagcaaagtcccactcctatgtgataatgagagtgctatccgcatggcggataatcctgttgaacacagccgcacaaagcacatagacatccagcatcactttttgagagaccaccagcaaaagggagatatcgaagtgttttatgttagcaccgagaaccagctagccgatatctttaccaagcctctagatgagtcgaccttttgcaggctgcgtagtgagctaaatgtcttagattcgcggaacttggattga

SEQ ID NO: 134247 - DNA, 355 bp, Zea mays
  Clone ID: MRT4577_53919C.1
ttttgttttttttttttttttttgtgtctcttttttttcgtcttcttttcccttctagagagaccccttccccccatcccctgggcgaccttttcgaaaaaaaatctggcaaaaggtcttggggggcccacctgactagactgggggccctgtccgttttgggctgctcccgccccagctttctggaaccctgggttggggctgaccttcagtttcactcccttgccggcgggagggactcaccctggttcatagggctcagggcccagaagggggcggtttcctactgtgtcaccgactcacccgtttgtgggtttgtgccggctgcggggggtttttgccccacccttttttt

SEQ ID NO: 134248 - DNA, 259 bp, Zea mays
  unsure (1)..(259): unsure at all n locations
  Clone ID: MRT4577_5391C.1
aaatttttaaatcaatattcatattgtttttggaaaactcgctgaaccataatcaggtaatacaagggngccacntgggccagtgggggaaaaaacaaacggtcataaatgtgcgagtgcagcaacacaaataggtttcgcctaagctcatggcatgaaattctgcgtgcgcggtgcataaatctaccatgaacccacagtgccctgggctgggtttttaaagagagagaagccccaattggcctttaaggaatatggt

SEQ ID NO: 134249 - DNA, 484 bp, Zea mays
  unsure (1)..(484): unsure at all n locations
  Clone ID: MRT4577_53920C.1
ccgggtcgacccagcgttttcctcagctcgcccaggcgctcgggcggatgtgcatctcccagcaagcgccctgccgaaccccctgtgtcgcgctcctgggctctcccatggctgccgagcgtccctgtccctgctcgccgtcccgagcttggccccgcggtgagctccccactggccttctcgggtggtcggggcgcagggccntcnnntcttcttctgcgcgcccattccgttctccctgcgctcgcccatggcgtcaaccactcatccccttccgttgtcccctgccgtgctatgctcgatctccagccgagctccactgtcaacgcagcaagctgccgtcctcgcgcaccggatgcgatctctgcgttcagctccataagtcgcacgccctttagctctagatgccgagcagcaggccgcgcgccggacccgcacccttcctttgcgtgtgttcatcgcgcccagcctgcttgtgctcagg

SEQ ID NO: 134250 - DNA, 2277 bp, Zea mays
  Clone ID: MRT4577_53921C.1
gcgactatcagcttcctcaggagagctcaaaatgagtttgagctcaaggtgaagaagataaggagcgacaacgggtccgagttcaagaaccttcaagtggaggagttccttgaggaggaagggatcaagcacgagttctccgctccctacacaccacagcaaaatggtgtggtagagaggaagaacaggacgctaatcgatatggcgaggacgatgcttggagaattcaagacccccgagcgtttttggtcggaagccgtgaacacggcttgccacgccatcaacatggtctaccttcatcgcctcctcaagaagacttcgtatgagctactaaccggtaacaaacccaatgtatcttactttcgtgtatttgggagcaggtgctacattctagtgaagaagggtagaaattctaaatttgctcccaaagctgtagaagggtttttgttaggttatgactcaaatacaaaggcgtatagagtcttcaacaaatcatcgggtttggttgaagtctctagcgacgttgtatttgatgaaactaatggctctccaagagagcaagttgttgatcttgatgatgtagacgaagatgttccgacggtcgctatacgaaccatggcgattggtgatgtgcgaccacaggaacaagatgagcaagatcaaccctcttcctcaactatggtgcatcccccaactcaagacgatgaacaggttcatcaacaggaggcgtgtgatcaagggggagcacaagatgatcatgtgatggaggaagaaacgcaaccgacacctccaacccaagttcgagcggtgattcaaagggatcatcccgtcgaccaaattttgggtgacattagcaagggagtaactactcggtctcgattagttaatttttgtgaacattactcctttgtctcttctattgagcctttcagagtagaagatgccttgctagatccggactgggtgttggccatgcaagaggagctcaacaacttcaagcgcaatgaagtgtggacactggtgcctcgtcccaagcaaaatgttgtgggaaccaagttattccaaatggatgtgaagagcgctttcctcaacgggccaatcaaggaggaggtgtacgtggagcaaccccctggcttcgaggatgaacggtaccccgaccacgtgtgtaagctctctaaggcgctctatggacttaagcaagccccaagagcatggtatgaatgccttagagatttcttaattgctaatgctttcaaggttgggaaagccgatccaactcttttcactaagacttgtgacggtgatctttttgtgtgccaaatttatgtcgatgacataatatttggttctactaataaaaagtattgtgaagaatttagcagggtgatgacgcagaaattcgagatgtcgatgatgggcgagttgaactacttccttgggttccaagtgaagcaactcaaggacggcaccttcatctcccaaacgaagtacacgcaagacttgctaaagcggtttgggatgaaggacgccaagcccgcaaagactccgatgggaaccgacggacacaccgacctcaacaaaggaggtaagtccgttgatcaaaaagcataccggtcaatgatagggtcattactttacttatgtgctagtagaccggatattatgcttagcgtatgcatgtgtgctagatttcaatccgatcctaaggagtgtcacttagtagcagtgaagcgaatccttagatatttagttgctacgccttgcttcgggctctggtatccaaaggggtctacctttgacttaattggatattcagactccgactatgctggatgtaaggtcgataggaagagtacatcggggacgtgccaattcttaggaaggtccctggtgtcatggaattctaagaaacaaacctccgttgccctatccaccgctgaggccgagtatgttgccgcaggacagtgttgcgcgcaactactttggatgaggcaaaccctcagggactttggctacaatctgagcaaagtcccactcctatgtgataatgagagtgctatccgcatggcggaaaatcctgttgaacacagccgcacaaagcacattgacatccggcatcactttttgagagaccaccagcaaaagggagatatcgaagtgtttcatgttagcaccgagaaccagctagccgatatctttaccaagcctctagatgagaagaccttttgcaggctgcgtagtgagctaaatgtcttagattcgcgaaacttggattga

SEQ ID NO: 134251 - DNA, 403 bp, Zea mays
  Clone ID: MRT4577_53922C.1
gatagttagattgaatggtaaatgatatatatgggatacttactcaaacaagttctaaacctttacaatatgctaatcatgaagataaatcacatgtattttatttagtataacacttgaacatcagagagcatacaaactttttacatcgaacatgagttggtttacaaaataagacataaatgaaacatataaagccatgatcaaatttccattaggacatacttaggcttgctacttctccttaaacctgcatttcaatcaccttagaatacatgctggtatgctcaaatttccatcaggatgtgcctaggcttactaatttttcttaaacatacatcatagtctcctcgatttaaccgggtactaccataatttttttttaaaatctacttaatcgggt

SEQ ID NO: 134252 - DNA, 475 bp, Zea mays
  Clone ID: MRT4577_53923C.1
gacgcgttctgcccacatgctagccggtggctcgtcgtatctagcgactatgagccaccggagcttctaccgcagtcgccgctccctctccccccatcctcctgaagtcctgccacgacgatggaccctggccctgctagcgccgtcgtcatcaaggagtcataccggtcctactattgtgtgtcggaggggctcgcgttggcgttgctcatcgacgacgagaagaagcttggtgactgccaattcgacctctagaagcagtcctacgtgtccgcatgcgccgctgtgttcgacaagctccggcgcagccgccgcttggacgtggtccagagcggttgttccgcgctgcccatcttcaaatagggggacctcatggtcgtccccaacgctggcgactctcgggttgttctaggcaccacatccgacgacgtcgctgtcacgccgcttagctcctcatccatctgaagctcaacct

SEQ ID NO: 134253 - DNA, 245 bp, Zea mays
  unsure (1)..(245): unsure at all n locations
  Clone ID: MRT4577_53924C.1
ccgggaaaaaaaaaaaaaaaaaaaaaaacctctcttccccacaacnnggcgagtttgagcctgggagctcacgcttcgtcatctaacttcttccccccatttcgcaattcacaaaaagctttgcgactgctactccacttgggtccatttacttatacgcagttcatgttcaagcgatgtgatgcacttggagcatngccatgggtagcaattttcaattgtgcaaggtttgcaaccccgcgacg

SEQ ID NO: 134254 - DNA, 791 bp, Zea mays
  unsure (1)..(791): unsure at all n locations
  Clone ID: MRT4577_53925C.1
tggtaccgcctgcaggttccggtccggaattcccgggtcgacccacgcgtccgggctctctataaagccctggctgtcctcaagaacctgtggggaccaggttggcctcaaacttaacaatccacctgcctcttacttcccaagtgctgggattaaaggtgtgcaccgccatgccttgttctggtttttaagtagaacaaaatctgctgctgctcacatcatatgtaaatagtgtacagaagagagggcatgatgcctttactgttttctagaacttttttccctgttgttgtatgtaggagcttactctgtagggcaagatgaagtatcattgttggaaatcaaaagtgcagtagtatactttctcgtcttagtgtttaataggaagcttgtttctagaccctattgtgtgtgagcagcacaagctacaaaggtgtctgattagaatgcgcatcttttatagcccacattacccttttagtaagctgggattactacctctgatcacatacggggcgaatagagagatcgataaagaggaccagtgctcagaacctgtagcttaaagaaaggcataactttctttgaaggagcccgctccttcctaatgaatgaaattgtgatcccacagatattgatcttgacttctgttcaagaatataatgagtctatttgaaaggctgtaacccttagtcacttgttgtcactcctagagcacaagtcaataggacctgcaggacaatgccattaccttgcaaaatgttacaatanaatgcctgatagctgaaaaa

SEQ ID NO: 134255 - DNA, 497 bp, Zea mays
  Clone ID: MRT4577_53926C.1
acctcgacgtgtctccgcgaggtttaatccggggaaagcaaagctctgcacatcagccacattcacgcacagaggtactagagctcgggcagcagcaaaagacatgacgccaccagcagcgccaaccatggccgccggcgacgccgtccacgtcgggcgacgccggcacgtgctcttgttcccgctcccgtaccagggccacatcaaccccatgttccggctcgccggcctcctccacgcccgcggattcgccgtcaccgtgttccacacccagttaaacgccccggacccggcgcgccacccggagtaccgcttcgtccccgtccccaacggcagccccgtgccggtcgccatcgaggacgtcgtcgctcatatcctggagctgggccgcgcgtgcgaggccgccttccgcgaccgcctggcctctgtcctggaggagtactccagggacaccgtcgcgtgcctcgtcgccgacgcccacctgctgccgattttcg

SEQ ID NO: 134256 - DNA, 364 bp, Zea mays
  Clone ID: MRT4577_53927C.1
taatttattctaatgggttttatttattttttaggattatttttttttttttttgtattttttttttatatttttttaattttttttttgggaaaaaaaaaaaaaaataaaattggaattaaaacaagtgtggttaaatttgttaggtcctttgaccatgttttttaaaagatatgacataaccacaccttttcataacaaagaataccttgccacccttattttgggattaaaaaaaggtttaaaaaatttccgaccaaaaaaatgtggggagcttttatataattttataacccaaccttataaaatggggggggaccactatccggggggataaattctgcgaaaagatgggtgttttttt

SEQ ID NO: 134257 - DNA, 551 bp, Zea mays
  Clone ID: MRT4577_53928C.1
ccatccgcatctgaggagaatgagtgaagagcaatcgggaaataaaaagagagtgttcaagaagttcacctaccgtggtgtggacctcgagaacctccttgacctcaacactgagcagttcgcccagttggtgcacgctcgtgcccgcaggaggttcaccaagcgtgggttgaagaagaagcacactaacctcctcaggaagttgagggctgccaagaaggaggctcccgctggtgacaaacccgaagtgattaagactcatttgcgtgatatgatcattgtgcccgagatgatcggaagccagattggtgtgtacaatggcaagaccttcaacggtgtggaagttaagcctgaaatgatcggacactacctcggcgaattctccatcacctacaagcccgtgaagcacggaaggcccggtattggtgccacccactcctcccgtttcattcccctcaagtaaactttttgttcttatttttgcctctgttcgtgaatgatgtggctggactctgctccctgtacaagacccgaataaaactgttaaatag

SEQ ID NO: 134258 - DNA, 399 bp, Zea mays
  Clone ID: MRT4577_53929C.1
gatccttcttttcaaattggaacaaatttgacattttttcaaagggtactatgtcatggagcatagtgcttgagaagcgtgcaaaaaaaataatccatggcaaatatgttgcttgtgaaggatgatacaattgtgcaaatcaacaatgtttgactgagttctaaaaactgtaattggcatggcaccccctcacttggaacttgggctagaaattgcatatctcatggttcggggacctttttgttaaaccaggccatccatccttttttgatgaaagatgggcctgctttctgcatcagggaatgttagagccctctgcggttttctacggcagaaaactttaacctttgccacgtagactggagccacaggcggtgatcaaaaaggggaagctccccc

SEQ ID NO: 134259 - DNA, 289 bp, Zea mays
  unsure (1)..(289): unsure at all n locations
  Clone ID: MRT4577_5392C.1
aaaaacccccaaaaaattaaccccctttattcccaaccatttaactttacctccatatttttaaaaataacatactaaacccccttccaattttctcaaaaatcattaaaccccataacncattcatcatttctattaaaacccacccccaaaatttttttttttttccaaaacttaatttcatcctttaaacccccaaatattatttcacccatataattccccctttccccccaatttaaaaccccatcttaaaaattccccataaaacctcccccataaaaatttt

SEQ ID NO: 134260 - DNA, 312 bp, Zea mays
  unsure (1)..(312): unsure at all n locations
  Clone ID: MRT4577_53930C.1
acaagctttctttgtctatgtacaagctctttttttttttttttatactttttaatctggaattgtaactttttatttctggttggccgcttacatcatccaaaaaactttattattggaattccccctaataagcaatctggaggggggcgcccccactgatgtgttgttggtcggaggctgctgggtttgtcaaagcaaggtggccaaagggcaacaattggtgtggttgtgcgagggttgcgggggtggccgcaaactgctggtggtttggcggcgccctgttgctgtgccgggggggangcccggctt

SEQ ID NO: 134261 - DNA, 294 bp, Zea mays
  Clone ID: MRT4577_53931C.1
gggggttaacatttttttcctttgtttctcatttttttttcctaaggggtaaccaaaatgcttttgggggccacacttccattgggaaggggaaaaacccacattcttggcgcttcaagtgtttttagaaagaacaaaatgccgccgggcacggaacaaaacaattttttccgcaggctaacttggggaataaaattggcttcatcgccacccctttgagggcctttggggtttttacaaagcccaaacaaacggggttccctttttcgaagccccaaaaaaacggggttttta

SEQ ID NO: 134262 - DNA, 813 bp, Zea mays
  unsure (1)..(813): unsure at all n locations
  Clone ID: MRT4577_53932C.1
ataaacaaatagtattagaagcatagaagataatctatcagttataaaatgagcgttgtattatcggtgcatcttgtcctccctatgcaggcagaagatattgaaggagtagagctgtgtggaactctgaaaaatatcgtggctattgcagcaggtttttaatggatcaagtgtttcgtgtgtttacatccattcttttgctttaaacccattaatggctcatgtggcagaattgtcttgtttgtaggccttgtggatggcttggatatgggaaacaatacaaaggttgcaattcaagacatttcgaataaaagacatggttttgatggcaccgtgtgatcttatggcctcttttcttttgtttttttttgttaggctgcaataatgaggattggtttgcgagaaatgcgtgctttctctaagcttctgttcccttcagtcagagacaacacgttcttcgagagctgtggtgtcgccgacctaataaccacgtgccgtacgtatcttcaccattgccaattaaccatccaacagatggatactgaaaagtgagtgctccatgacagttggtgggaggaacagaagagtggctgaggcctttgcacgaaatggtggcaaaaaggtttgttttgctttaaactacacgaaatgggtggctgcggttgcatagtgataccatcttatattgctgatacaggtcttttgatgaactgnaggcagagatgttgcgtggccaaaaactccaggtaaagcaaatatatatgatgccatgcaatgcatagagaaatactctgctgngtgcatctgatctct

SEQ ID NO: 134263 - DNA, 276 bp, Zea mays
  Clone ID: MRT4577_53933C.1
aaaaaaaaaaaataatatacaaacaatacattatcataaaaataataaaaaaaaaaaaccctggtggagaaccaaaaaaaacttaataactaaaaccctcttaaaataaaaatccaacctttcaaaagccaataatcgggattatcattcacacattcaaattcctaaattacctaacttatccgaccatgctcaccttcttctaccacaaatcaatgatccttccccaattttataaatttactgacatgctaatattcacactttcccaaatta

SEQ ID NO: 134264 - DNA, 518 bp, Zea mays
  Clone ID: MRT4577_53934C.1
cccggtcgcccaccgtcccccgcgtccgccacgcgtccgggacgcgtgggcggagcgtgggctggccctgcaatcctggtgcggggccggtccgtgggccatcgagtcgtaacctccatgatcccaatcccacaagtttcctactatgtttatgactacacctctctatgttgtggggtggtgcacgactgggcttctgtctcccattttcccctgccgatgaactcaacctgcctgctggggcttgttggtgggcctccctaagatttctcccggacgccctgtctctgacctttagacgatctctttctggtcatgtcgatcacgagcccctcacctttttcctcgcctggccgctgccctcagctcttcatggtcggagtttatcttcctttcccgcgggctgctgcctgttgcttgtcctggcacctgtggggccctactaagtttagggtctgcttatgttgttttcttgtggacttctactgtctccctgctgtcttttgtttccttgtttt

SEQ ID NO: 134265 - DNA, 313 bp, Zea mays
  Clone ID: MRT4577_53935C.1
aaagaaggcaccaaagcgggcgataaatgagacactttatcacgtgcattattttaacaaaaaacactgtattacacacattaaattggacctgcacctcaaaccgctctcatttcagaaagtgtaaaactttaaacagtggagctacaagccaaaacagaccataaatttagcggccgactatgcatacgataaacctacacaccactccaacatttgttattctctgcaaaccaccgtagctttcccaatgaactgtgagagaacatataacacttggtgcagactagcctcatcgaccaactgctgaaag

SEQ ID NO: 134266 - DNA, 534 bp, Zea mays
  Clone ID: MRT4577_53936C.1
attagaattggattatgaatgtacattatgcggccagtgttgtgaacagaatggcattttacctggccccaccatatcatgtgcgatttattgatatgaattatatatttattgatatgaattatatcgttgtgatgaggttgttttgccgagtcagctgagtagggcttagcaacattagtaagatctaagatgttatgtgcagtttttcctagctctgttagctagcatcctggaagctgttaatctatgatgagtctctggagttttggtttccattcaactggctacatctgtggcttatctgctatctttttggctgttgacctgttgtgaaattcattcccttgcataagcgatcatcttctgcatcaaacatgtaaggccttcttcgggtattcccatcctatgtggattggatgggattagacaaaattaggaaggattttaactggtttgggatttaatcccacacaatccactccaatccacgtggattgggtataaaacgaacaagccctaaaagggttgaca

SEQ ID NO: 134267 - DNA, 373 bp, Zea mays
  Clone ID: MRT4577_53937C.1
gctccacgcactccgacctcctccaggtacgcccgccaggccccatcctcctaacccgatcgctactctcctgaaccctgtgtcgtcacaagagcgcgaggaggtcgtggcggagcgcgctctacactgtgtgtatgcggaggcggtggccatggcagaggagaaccatgttgttgccggcgccggccagaagctctactggtcccggcaaaccagagccactgcggttcaacgcctgcgtttcgcggctcattgctgcctgcacgctctgacatgtaccctcccaaaaaagagggatgaaaacaaccacacactgtgggactcctgaagacgacatttgggttgatggtgaattcagttgtatgagccagag

SEQ ID NO: 134268 - DNA, 376 bp, Zea mays
  Clone ID: MRT4577_53938C.1
aggaagaactgttctctctgtattgctttattgatgtgtcgagtacaaatatatatatatatagattacaaccaaggaccatgcaagtctgatcctgaaaagatggccacgaagtctcctgtgatcctaaaataatgggctacgaagtggccggaagactcggatagaaacaagaaaataggatctactaacagacgctttacattatctaacagcccccctcaacctgtagaatctgtagctggcttgatttgcaggttggaccgaaactccttgaacaatgatgatgagagacctttggtaaaaatatcagcaaactgaagagatgaaggaacatgtatcaccttcacctctcctaaagatacgcgctcgcgta

SEQ ID NO: 134269 - DNA, 144 bp, Zea mays
  Clone ID: MRT4577_53939C.1
cttgcctttgagctccttggttgacgtgcgatgtttctcctgacctgtgcctgcaggcgtactcgcgttcccgataggtgatcagatgagagccattcgagcacggatccatctcgggagcccaggcgatctgatcgtccgtgg

SEQ ID NO: 134270 - DNA, 478 bp, Zea mays
  Clone ID: MRT4577_5393C.1
ggcgaccaaaacatactgaacacatagcctgtccacaaattatcgttcctaaacactacgcgagctctcaaacgcacacaacgactactacataaaacagcctgccgggtttattcatacacatcccgtccatcatatttacagaactgaagcatgcctctcatgaagcttcctcgttcgagaagtgcctcttaccaacatactcgcgcaagaagctgtttccacagttggcttcctgactacccatgctgtattccatgatcccatcctcattgttacctgacatcgtctgcttgagactgaccaccattggtgctaacccctttctgcccgatccacaaacctgtcttgcagatggattctgggcagaactctgttgttggatcttcttcgacttccccttctgaactattcttctgtcagctcttttccttcctgcggcgctttgaccagctctgttagctgctgttcactgaat

SEQ ID NO: 134271 - DNA, 129 bp, Zea mays
  Clone ID: MRT4577_53940C.1
gccggccgggtctcgatagagcgctgatacttaacaccttctctcctatctactgcacaattcataaaagcacgtgcgacaacatgattccggagtgcaaagcgctcagtgtgctgactctcattgtga

SEQ ID NO: 134272 - DNA, 234 bp, Zea mays
  Clone ID: MRT4577_53941C.1
gtaggggaccaaaactgtatgttgcaaacgaatgttatttaagggtttgggggctcagaggccctggcgcactgtatgattacttcatcgccttataacaaagggctgcggtgggctaatgaaaaatgctggggacaccacgtccagcctttagtttataggttgttgggagtggggaagatcgatcatggtcagcacctgatccattcttctctgtgggggtaagggggttct

SEQ ID NO: 134273 - DNA, 854 bp, Zea mays
  Clone ID: MRT4577_53942C.1
gtacatattcgtcttctcccccagctgatctccccctcccccagcagcaacaaaccgccgcgcgattcgccgccggcgttgagctctcggccctcggctctcggatctcccagccgcgcgcgcgtccccgatgggctccctgttgagcagcctgttgggcaagccggagcccccgccgcccatggtgctcgtgccgccgctcttcgactacccgcccatcgccgcccgcaccaggatgtcggtgccggcgtatgagctcatgttcgggaagctcccgctgggcaatctgtttgaggactacttcgataacgcggggaccgtatcctccaggatcatgctcaagccgctggaagatcctcacgtcgatctggtcgccaacgtatctgcagctggagataaagctagtggaacagaagtaaaaggagacgctctatttcgctggcagaaatatttgtatgatccccatacctttgtggatgttcaagtgtcgacttcagaacccatgctgaagctgaggtcatgtgcttacttccctgagtatcgtcttggtgcatttgggacaatccctttgctaatgggaaacagactgtcttctgaggactatgctgtcctgggtgtgagatatggttcagagaatctatcaattggagcgtcctttgtgccattgcctgaatctgctgaggtgccttatggagcatggttggttgggagaaaagggagtttatgtgcaggagcacaatataagccacttagtggaaacaaacatcctatgccatacacggaccccgaagaactggaattatgcaatcagttatggtgtgggcctcacaagccctctcagcccttcattcatt

SEQ ID NO: 134274 - DNA, 234 bp, Zea mays
  Clone ID: MRT4577_53943C.1
acgatactgacttggtcgagactataaaatcattctggatgcggagacccatagggccgcgtagagaaagcttaagagcttattctacagagacgcgatacccagccccatggacggcatgaactgtacagagctagacgggcggaacattatcgcctacgatgcccagatccgcggcttgcggagaggcagcggtggcgcatacagtggcccgcgccctgatagaggcggcta

SEQ ID NO: 134275 - DNA, 635 bp, Zea mays
  Clone ID: MRT4577_53944C.1
aggaaaaaaggctgaggcacaggccccgttcttcttattctgtaaagcttccaatgcgtatccattgattgtttggttcattcccagcagcagctgaggctgagaggccttttttgggttctgggtatccgtgtttttggagttttgggtcgtcaatgagtgcttcgaggttcataaaatgcgtgacggtcggcgatggagccgtcgggaagacttgcatgctcatctcctacaccagcaacaccttccccacggactatgtgccgactgtgtttgacaatttcagtgcaaatgtagttgttgatggcagcactgtgaatttggggttatgggacactgctgggcaggaagattacaatcggttgaggcctctgagctatcgtggagctgatgttttccttcttgctttctccctcatcagcaaggccagctatgagaatgtggcgaaaaagtggattccggaactgcggcattatgcacctggtgttccaattattcttgttgggacaaagcttgatcttcgtgatgataaacagtttttctcagaccatccaggggctgttccaatcaccactgctcagggagaggaactgaagaagcttattggagcagctgcttatatagaatgcagctca

SEQ ID NO: 134276 - DNA, 143 bp, Zea mays
  Clone ID: MRT4577_53945C.1
cgtacagcaactaggaagcgggccgaccccttttgtggggtgttggaactaccgataccctaactgtggagaatgcacctaatatggtgtatgggatgcagagcccccgatttaggaaagcgcctcctctcctgcttcacaaa

SEQ ID NO: 134277 - DNA, 570 bp, Zea mays
  Clone ID: MRT4577_53946C.1
gttgtgcgtaagccatgacctcgcagcagtcaccgccgccgccggcggcgaagtcacagcgaccacccgctcccaccaccgtaaccgctctcgacgatgatctcctccgcgagatcttcctccgcctcccctccctaccgacccttgtctgtgcggccctcagctgccgcacctttttccacgccgtccggtcgtcccccgccttccgccgcagcttccgggaggcccgtccaccacctctcctcggcctcttcttcgaccccgacggcccctccatccccgccttcgcacccctccgccgccgctccgaccctgacctcgccgccgtcgtccgcggcgccgatttcttcctcacccgcctccccgacgacgacgacgacgacgacgccttaccggagtgggtcatacaagactgccgcgacggctacgtcctcctcgaacacggaagcctggagcagtacgccgtctacaaccccctcacacgggcccctggatctcatcccccagccgcccgacaagatcttcgacgacgggaacggcgtcgcctccctctcttgggggctaaatcct

SEQ ID NO: 134278 - DNA, 390 bp, Zea mays
  Clone ID: MRT4577_53947C.1
ggcgctacaaagaggccgacgcacgagatcgacagtgatcaaaccaaacaactgtcatatatatcctaacggcgcctatgtgttgggaccggtaccccattcgttgctgtgggcacgcgtaccgcttgcgtggtgactgccgatggcactacgaaagaccaaccatgtgccctccgtgacgcggagacgcttctatagactcagcatggttgcctagccgctgccatatgctttatctcacagccccgtgtgagagcgcatctagacgagattgcgtgtacgcagcctcatcatgcagtcaatagtcagtctcctactgctatcgtggcagagtcacttcatagcatcgccagatcctgcagccaacacactgctgatcgtgccattagc

SEQ ID NO: 134279 - DNA, 1502 bp, Zea mays
  Clone ID: MRT4577_53948C.1
aattcggcacgaggaccaagagttgatccacccaggccaggcacccgcccgtcccccggcggcggagatggcgaggaacgagacggcggccgcggccgcgccgggcgtcgacttccaccttcccgacgagatcctggccgtgatccccaccgacccgtacgagcagctggacgtggcgcgcaagatcacctccatggccatcgcctcccgcgtctcccgcctcgaggccgacgctgcgcgcctccgccgtgacctcgccgaccgtgaccgcgccgaggccgacctccgcgcctgcctcgccgactccgacgcgcgcctggccaccgctctcgacgagaacgcgaagctggcgaaggaaagggactcgctcgcggcgacggtcaaaaagctgaccaggaatttggcgaagttggaggcttttaagaaacaattgatgaaatcattaagtgaagataatctattgcaactgtctgaaaccagtcaagatcacaacgcagaagatttgacagctcgagtcccattttggaaagatgaagtttcgagcagtaacacttcttcagatgcctccagcagatctacaattactgaatccgtccatgacggaggataccagttctcgatcacaccatatatgcctccaaaattaactcctggctcaacaactatgatttcgtcctctagtggttctccccgagcttattcaactggcccaccctctcccaagttcttatctggtccgacttcacctgcaaaagctcgatctgagggccaattggcattttcatcatggcaaggatcatcaagtcatcagtattcagcacctacctctcctccccaacgccgctcattcacagggcgaccacgtatagatgggaaggaattcttccgacaagcacggacaagactttcgtatgagcaatttggagcatttttggccaatatcaaggagttcaatgctcagaaacaatcacgggaggacaccctgtcaaaagcagaagagatttttggaacagaacacaatgatctgtacatttctttccagaatatgcttaaccgaaactaatcatgaaaatttgtcagaagtagtattttctctcaaaatcaagcagggtagattctgttggaataaacgatgcccttccgtaggttctcaagatcacattgtagagatatgtatataggccaccttaattcgaggtgttccttctcaataatttggagctgtgacttaaaagcggaaatcgcatagcatacattcactcattccctgaaattcaaggcttcctgcttgtctttctgctgtaaatccggatgcagatctcttgagctattaaggtgccttccctagttccctttgtagaaagctgtataaaactgccctttgccgttcttctaactgccaagggtacacggaatggatatatgatcacggtgcattcgttgtattgagatgttcgataaactgtgattgtgattttttattgagctttttcttccaaaaa

SEQ ID NO: 134280 - DNA, 1033 bp, Zea mays
  unsure (1)..(1033): unsure at all n locations
  Clone ID: MRT4577_53949C.1
aagagctatgacgtcgcatgcacgcgtacgtaagctcggaattcggctcgagcacaacgcanaagatttgacagctcgagtcccattttggaaagatgaagttcgagcagtaacacttcttcagatgcctccagcagatctacaattactgaatccgtgcattacggaggataccagttcttgatcacaccatatatgcctccaaaattaactcctggctcaacaactatgatttcgtcttctagtggttctccccgagcttattcaactggcccaccctctcccaacttcttctctggtccgacttctcctacaaaagctcgatctgagggccaattgacattttcgtcatggcaaggatcatcaagtcatcagtgttcagcacctacctctcctcaacgccactcattcacagggcggccacgtatagatgggaaggaattcttccgacaagcacgggcaagactttcttatgagcaatttggagcgtttttggccaacatcaaggagttcaatgctcaaaaacaatcacgggaggacaccctgtcaaaagcagaagagatttttggaacagaacacagagacttgtacatttctttccagaatatgcttagtcgcaaccagtcatgaaaaatctgtcagaagcggtattttctgtctctaaatcaagcagggaagaatttgttgcaataaacgacgcccttccatagtttttttttaaaatgctttcataggttctcaagatcacattgtagagatctgtatgttggcaatcttaatccaaggcgtccgttctcaatgatttggagccgtgacttgagaatgaaattctcataactgccggaaaattagcccgtttgatttagcatacatccaatcattccctggcattcaagacttcttgtttgtctttctgctgtaaaggtattcattgaaaaactgaaaaggggttcagcgtacattgtgcaaagcagtaccaggtgcttagctgaggaggcaccggctaaataaaaaaatgttgggttattatctc

SEQ ID NO: 134281 - DNA, 370 bp, Zea mays
  Clone ID: MRT4577_5394C.1
gcaccttttagttcgctaaggctataagcggggctgactacggtgctgtgtcgtaccgaagcaagtgtcataatttcccccaacttctcaaggacagctgccactcccgattctactcagtcgagaacgccgacatccctgacttaaccttcgagcatgtccaaggcctcaatgctttccttgacatcagtgacatacaagcgtaaccacgactccagcatccctgccttgaagggcgattccttggacagccagccccaagacttcaacttccctaaaaaaaacaccttcgctgcttgtggcggtcaaccccaaaaaaccaaaggattctctccctatttgcccaaaaaatatcaacaaaaacttcctt

SEQ ID NO: 134282 - DNA, 325 bp, Zea mays
  unsure (1)..(325): unsure at all n locations
  Clone ID: MRT4577_53950C.1
ccggaccggaaaacccggggggacgggggcgtcgggaaggataacgcaagtgtcctaagatgagctcaacgagaacagaaatctcgtgtcccagcaaaggtnaaaagctcgtttcattctcatccccagtacnaataccaaccgtgaaagcgtggcctatcgatcctttagaccttcgggttgattaaaaaaataatttataaatattaatagttaaataatataatatttttatttattttagggtggactttttaatggttttcaagtttcttttttctttcattctctcttccttttcttctttattttttgttgttaatct

SEQ ID NO: 134283 - DNA, 809 bp, Zea mays
  Clone ID: MRT4577_53951C.1
ggggttgccaattctcggaagccggccgatgtcgagtccaaaattgcaaaaatctctgccgtgcctctcgtctctcttctcaggcgccacgcaaaacgttctccgttttccctctccggatccggcccgcgggggccaggagctaccgatgatccggaccgcaacggtgcgagcgcgtctcctcctatcgcgctcctacgtagcacaggcacaggcagcttctcgctggcctctcgtccgctggaaggcttcgcatcttggatctgtacgctctttctatcagatggacattacaaggcaatacaaaaataaaagtttgactgcaagagggtgccatagctcccctgagagtcaagaattagcaatgaaaagctgtgttccatgcaactctaaggatttaggtcccatgtcagaagattctgctaaaaagttgcttgaacaggtgaatggttgggaactgatcactgaaggtggtgttctgaaattacatagaacatggaaggtgaagaactttgttaaaggacttgagttctttcagcttgttgctgctattgctgaggaagaaggtcaccatccagatcttcatcttgttggttggaataatgtgaaaattgatgtttggactcattctgtcgcgatggagaagccaaatgttgaggacacctcgccctgagtgagattaacttgctgaaatgtagtgccttactcagtagctcattttaccttggcattaattagtaatttgcatgagtagacgttgaatccatcattgtacttggttacctacttaccttgccctgtcagttttg

SEQ ID NO: 134284 - DNA, 1145 bp, Zea mays
  Clone ID: MRT4577_53952C.1
cctcgaggccggccggggtggctcccacccccgactccggctcccgctccttaaaactatccccaattccccgtccgctatcccgatcgatccatccatcgatcgcccacgcttccgtccatccagactccagagagataaaatctaattcctggacctggagtgcagaccgatcgccgccgccgccgcgttgtttcttgtgtgcgcagctgtggtgatggtgcggtaaaagaaggctgctccatcgctccaacaaaaaaaaaaggtcgagatcgcacgcggcaggcgacaagcagtttccaaagagaagggaagcctagaggaagggagctagagatgggggagggcagagcaggagacggcctcatcaagctgttcgggaagaccatccccgtgccggagacggccgccgtcggcgaggctgccaaggttcgtctcgtttctcttctccctccgcctaacatctctctttcccaagcccaacccacgtttgaattggagcgaacggtaggggtgagtgcttgcttggacatagccagtgatcagggcaaccagaattttttttcgcacctactcggtttaggttccatcgtacgtggcagctggtttttctgttgcccagttgctccctcaggatttatgtaaacatagatggtgattttctgttcttcctgttttaatttttttgtatgtagtaggctagtagctatgtgatatggtgccatgtttgacacttttgccttccattagcatgcgaattttaccgggtgttttttttggtacccctcctctctctctctaacactctaacagcagtgttcttgctgtttgcggccaaaaacctatggctatggttttattatgtcagccgaaaagaaacatttagcagtttattcagaggtggtgcaggattcagctgtacccttccggttgttccctttgcccttgctttcaaggatttcgccaccaaatatattttcttacactggtactgggctccagaagctgctatatcaaccactacagcatgcgccgtgtggtacgggatcagttacatcaccatgttttaattagtgttaaagtcacacgatcaacagctgttttattagcgatcaagagtgaaaaaaaaaataaaaaccaccggc

SEQ ID NO: 134285 - DNA, 992 bp, Zea mays
  Clone ID: MRT4577_53954C.1
actcgaccatgtggctttccaaaactgacaggcaaggtaagtaggtaaccaagtacaatgatggattcaacgtctactcatgcaaattactaattaataacaaggtaaaatgagctactgaataaggcactacatttcagcaagttaatctcactcagggcgaggtgtcctcaacatttggcttctccatcgctgcgcatacaaaattccaaacaaatataagttgcatatttgagttgcttctgagacattggctatttagctttcttccttataatgccgtctaaagtgagatgattgatcttcgcagcaaggatgaaatcattacttgttaaacctctgacagaatgagtccaaacatcaattttcacattattccaaccaacaagatgaagatctggatggtgaccttcttcctcagcaatagcagcaacaagctgaaagaactcaagtcctttaacaaagttcttcaccttccatgttctatgtaatttcagaacaccaccttcagtgatcagttcccaaccattcacctgttcaagcaactttttagcagaatcttctgacatgggacctaaatccttagagttgcatggaacacagcttttcattgctaattcttgactctcaggggagctatggcaccctcttgcagtcaaacttttatttttgtattgccttgtaatgtccatctgatagaaagagcgtacagatccaagatgcgaagccttccagcggacgagaggccagcgagaagctgcctgtgcctgtgctacgtaggagcgcgataggaggagacgcgctcgcaccgttgcggtccggatcatcggtagctcctggcccccgcgggccggatccggagagggaaaacggagaacgttttgcgtggcgcctgagaagagagacgagaggcacggcagagatttttgcaattttggactcgacatcggccggcttccgagaattcccgaccggcctcgagggtcccaatg

SEQ ID NO: 134286 - DNA, 205 bp, Zea mays
  Clone ID: MRT4577_53955C.1
aattcgaaagacttctcaattacattacaaaaaaacatcaacttttatcctcatgatatcatgttttaccacaaattaatgacattacgacatgccacagttctttctcatagcttcttacaatctttaaatcctacacacctcaataccctattactctatatcttatatagtagatatatttactcaaattgtcatcctttat

SEQ ID NO: 134287 - DNA, 1412 bp, Zea mays
  Clone ID: MRT4577_53956C.1
gagtatacgttacgtttcgcttggtttttttttcacggaacgatccagacgcgctagccgtaggccgcgcgtagctgggcggtgtgcgctgcgccatgaagaccacttcgtcgcacgggctccacgccgcgtcggcgtcgctctgcacgccgtacctactcctcctaccgctcggcctcctcgccgtgctgctggcgctcccgagcctcggctcctcttacgcgcgctcccaaggcctcggcgtgctctgccgcagcgcggcggcaggcaccgacggcggcggcggcggtgactactcctcctccgtcgcgtcgggcgccggcgacgagaagaaggccgcggtcgccgagacaccgccgccgccgcggccggagctcagcctgctggtgggcgtgctgaccgtgccgggccggcgggagcggcgggacatcctgcggacggcctacgcgctgcagccggcggcgcccgcggcgcgcgtggacgtgcgcttcgtcttctgcagcgtgacggacccggtggaggcggcgctggtggcggtggaggcgcggcgccacggcgacgtgctggtgctggactgcgcggagaacatgaacgacgggaagacgcacgcgtacctgtcctccgtgccgcgcctcttcgcgtccgcgccctacgactacgtcatgaagaccgacgacgacacgtacctgcgcgtggcggcgctggtggcggagctgcgccccaggcccccgcgacgacgtctacctgggctacggcttccccgtcggcgacgaccccatgccgttcatgcacggcatgggctacgtcgtgtcctgggacgtggcgcgctgggtgtccgccaacggggacatcctgcgccacaacgacacgcacgggcccgaggacctgctcgtcggcaagtggctcaacatcggcggcaggggcaggaaccgctacgacctcaagcccaggatgtacgacctcaactggttcatggacaacttccgcccggacaccatcgccgtgcacatgctcaaggacaaccgccgatgggcggccacgttcacctacttcaacgtcaccgccgggatccacaccaacagcctgccgtgatcaaccagttatttcagttcgatttttttttccctgaggttgacgttggctgattgtgccaaggtggcgtgcgtaagccacattcttttcttgtatttattatattacatatcgttagtcttctgattggtcatcgtcaacgatcaacgtgccatactgacatgaaactttgctcggccccaccttgagtatttaagccacaatctgtgcttaaatacctcatacctgacagtactccaaactgcatagttctctgttaaactgtttttagcaatgttatttatatctatcacaaaaaaaaaaaaaaaaaacccgcggcc

SEQ ID NO: 134288 - DNA, 744 bp, Zea mays
  Clone ID: MRT4577_53957C.1
aatttcaaaatgaggcagacgcttgcctacctgctcgcccgtccccacgcccaagcgaaattgacggcggccgccgcaccgctcgccaccgccgctgatgccaacctcccgcaagtcgttgctatatccgcctatagcgcgccgctcccgaccgatccggcgaggcctgcgcaccacctcccggctcttcccttccccgatctggagcacaagcctcctttccctccaccccgatctggcagtagtggcaggagctaggccaccggaacgaggctaatttgtccggctgctgcagcggcaggccgggacgatgctaatttggctcgctgttgttattccgcaaccaattatactgctactccatcccatggactggcctgtccatggctggtgcctggtaggagggagggaggcgtgcgatcatgaccctgcatggttccaaaggcagcgcacaggctgggccggggtctaactgggcgggcgtgtgttgtcgctgccaggccactatacgggcatcgcagggcgtgttgcagcttcaggattctgctaggacctcctgggatgtgctcatgcatgcttggttggaaccttttctttttggtcaatagatgaatcaatggcgtgtcaggactaactaggtcatacgtgtacctcactatctacggaaaactctctcgtcgtatctgcacaacaggagaacaaattgatcaatgaatatggggttcctttcctaccggggccatt

SEQ ID NO: 134289 - DNA, 765 bp, Zea mays
  Clone ID: MRT4577_53958C.1
cattggtacctcgagccggcgggctcttctcgtctggtatggacgtgtgcctactcagatattcggtagtactagatccctcttcaataccatctgcagttacgagggcatgattctctctcccattgtggccacaacccttggggccaaacgcccatgacctatcccttgcttatgacccgacttcactgaccaaacttgacccccccttggttcctcccgaatctgcaaaccatggcggcgtcctggtcaacgaggacatcgatggcgatgaaataagggttgcacgtcgattttcactccgaaatgatgatgtaggccagctagctaacaatgttggaacatctcagatgccgatggtatcttgtgccgcaagcatcgcttatgaggcacatcttgctgctctggttgctgaacttcctccaacaccagtgcttgagatcttgtcacgagagatgcgccaacgtagctgaggtcattagactagttcatcgatcgaatatgattactgtaacaatgaattacgctaaatcgagttctatgtcatagctcatgatactactcttcgctgctgacggctcaatgccttgtatactgagcacgttattcaccggacttcctgcctgagcctggctccacaaagagtacaagcagactgaccaagccatagctctgataagctcaggtcgaacggcgataagcgaggagactactcggtggagcatggatatgtctatcatccacgttgctggcgtacagatgtac

SEQ ID NO: 134290 - DNA, 363 bp, Zea mays
  Clone ID: MRT4577_53959C.1
ggggccaaaaaaaaagggaccatttttttgtttgccccgtaaaaattacactggggatacaagggggcgccaaccttttccaacgggagggaaatgtcagttggaaccaaatgatggggaattttacagaacaacaagttgattttggaccggcatttgtttttttggaaattgacggggccagggggttgcccattttccacaaccttttgttgaccgatgacccccatttgggacaccccccaacgtaaaatgaaacttgcccggtcaaggtaattcctttttctttgggccccccttatttaattgaagggaaggcctttttttggaccaatggaacggttttgattggcggggaaaatt

SEQ ID NO: 134291 - DNA, 332 bp, Zea mays
  Clone ID: MRT4577_5395C.1
gggggaaggcactttattatcgcacacccgacaaatttaaaaaattggggggttactattgggcatagctcagtacaaaaaccccccattttttaaaagcccccccccttatttagaaggggttccactcatactacacaagggacttgatctgaaaacctggggaaatgcaacaaataaaatggggctatatatagaacgggtaccagcatatgaggggggggaggctatatatgtatgcctgaactttagggaatgcaacccggagctaattttgggggttgcttgagaggggtgcttgagcaaccaggagctaagcggacgcgtggggt

SEQ ID NO: 134292 - DNA, 122 bp, Zea mays
  Clone ID: MRT4577_53960C.1
agtattatataggaggacagatatagttgacccaaagcagggattggaaatacaaaggttcataaaaagggttgctgaaacttctagggaagctaataacagtaaatactagcggcccaaat

SEQ ID NO: 134293 - DNA, 312 bp, Zea mays
  Clone ID: MRT4577_53961C.1
aaactgctgaggctgcagaagctgctgcttctgcagctcatacaatggatggaccggggcagcttttttttttcgagatttaacgactaaaacaaggcttggaaagacaaattgaacaatccgtggtttaactttaacaattccaagagaaaggtattaacctctgcaaaaagaaagagcacgtgattaaagaaagagatgctgcatttcaagaggctcatatgtggcgcattgaactagtaaaatccacggagcaatcactttttcacgaaacaacatttttccccgccgaggagaaagctataatttctt

SEQ ID NO: 134294 - DNA, 397 bp, Zea mays
  Clone ID: MRT4577_53962C.1
ccgaaaaatccatgttgaaaacaattttattcaccaattggcccaaataacaatggtgggttctgactggactaatcacgtttgccgataaagctgcgggggataataactgtaactggagcaggaaatcatggttacaatcttgcatattattgctaaccactctaagtgtcgacaaaaataattggatcatgggggcaagtggggaagcggtgttatgaaacaagactgctcatgccctgacgtgcgggaactaccagactactatatagctgacatccgtgtaaataactggacggctcccctgctagaggggcattgttcaccagcaaaagtacctgatacaccttcctattttgtccagcccataacgctcatttatttgacataacagtga

SEQ ID NO: 134295 - DNA, 197 bp, Zea mays
  Clone ID: MRT4577_53963C.1
aacacacaagatactcaacacctacccatgtatttccatggctaatatatataagctcacatgtcttcacttccatttccatttccattagctgcatacttactaagtaatatttaaaggcccatatctgaataatttacccatccaacaaaacatccttcaaattctcatctatccatctttacctttctcattat

SEQ ID NO: 134296 - DNA, 208 bp, Zea mays
  Clone ID: MRT4577_53964C.1
tacacatcaaagcaatgagtactgttcagtaaggaatgcctcacaagtgttaccatggcaaaactggaagagtctacaatgttactcagcatgctgatggcattgctgtaaactactcaacttaagtgcaagattcttgccacgataattaatgtgcgcattgagcacattacacagtctaagagtcgtgatagcttcatgtcacgtg

SEQ ID NO: 134297 - DNA, 563 bp, Zea mays
  Clone ID: MRT4577_53965C.1
tatcgatcagctttgcttcaccaccacaaaatccacactccactgctatcaagcttcaagcatcagagagttcaggcagaccattgagcggcatcatctcctccaacgcggcgagaagaacagagttgcagagagatcatggcgggtgcggcgaaggcgtcatggatggttgcgatgagcgtgggcgccgtggaggcgctcaaggatcaggccgggctctgccgctggaactacgcgctccggtccatccaccggactgccaaggccagggccaacgtccgtggcggcgtctcgcagggcgcaaggcagcttccggcttccgcagcggtggcggagaagcgacgagcagagaagaccgaagaggggctgaggaccgtgatgtacctcagctgctggggtcccaattagtactactagctaccaagaggtgttttctcctagctccagcatctgttagaaacttctagcaacaaccacgccgtgtgacttggctggttaattccctgccgattataaatacgtatcacgatgatgatgatgaaacctttccccacttcgagtac

SEQ ID NO: 134298 - DNA, 746 bp, Zea mays
  Clone ID: MRT4577_53966C.1
cttcttggggtactcgaggccggccgccgggatccaaccgcacaagaattgcatcatcatcgttagctgccacagatggagatcttccaagtgacgacgatgatcctgcagcatccgttactcacatacttcttctctgcactcctgctcacacagctgctgacggcgcctactgcggcggcggagacaacggtgaaagtgagcaccacccctatcttccccgagatcccacaaggccaggcgagaaaagacttccaagtgctggtgcgcgtcgaggcgccggcgcgtccagaggcgcgtatccccatcgacgtcgtcgccgtcctcgatgtcagcggcagcatgaacgacccggcggcagcgccgacggagagaacgagaacgacgtcgaggctggacctgctgaagacggccgccaagttcatggtcgcgaaactcgaggacggagaccgcctctccatcgtcgcgttcagcgatcggccagtcagagaactgagctccggcttgctgtacatgactgccgacggccggaggaacgccattaggagcttggaccagctggaggcccgcggcggcactgcgctcgtgccggccttcgaggaggcggtgaaggtcctggacgggcggcagggagacggcggggaccgcctgggcttcatcgtcctcctcacggacggcgccgaggacgcgagcgggtcgttcacgctgagcgagcgccccgcgaggtgatccgaggcgccctcggc

SEQ ID NO: 134299 - DNA, 262 bp, Zea mays
  Clone ID: MRT4577_53967C.1
cttctagaacatgatgaggtttgagtgcaaggaaaccttaattgatgtacataataaatttctccctcagtacttgtcccaaaaaaaaggacacctaactaattctgggcaaaattacattatttccaattacaactgaaaccttcctgggacagggcaaaatattccggggaaccattttttatacctgacccactcttctgtggcgtattattataaatatatggcagtttcccctatttaaataaactactgactcccc

SEQ ID NO: 134300 - DNA, 197 bp, Zea mays
  Clone ID: MRT4577_53968C.1
ctttttcactccatccagatctccacggggcgggggttatatcggcttctatgcggtcaacgctgtctcgtaagccatcgcgtacgacgagcaccccgagatgctgcattagtcctaggaacatgccccctttgttccaacctacaatataattaagaagaattttaacatctaagtgcccaatcatgaagggtaca

SEQ ID NO: 134301 - DNA, 417 bp, Zea mays
  Clone ID: MRT4577_53969C.1
atggcgagtggtcattgttatcggtcctcctctgctcacctccggcgccgagatgacgccacaatccttgatatagtagtcgtcgaacgcgcgcgacatgcgcggtgcagccgctctggaccacgtccaaccggcggctgcgctggagcttgccgtacacagcggcgcatgggtcacgtaggactgcttccagaggtcgaactgacaatcgccaagtttcttctcgtcatcgatgagcgacgccaacctatgcctaggatgtacgtgggaatggtaatgatctttgtggggaggggagtcggaaaggcagaacagggaatggtgagaatggggaaagacagaacaggaagccgggtaacaattaatcaatctttgccaaagtggaaatggagaacgaatcaaattcaattgacttga

SEQ ID NO: 134302 - DNA, 485 bp, Zea mays
  Clone ID: MRT4577_5396C.1
aaaaaaaaaaaaattttatttaagggaaaacaaaggaacgggcccagggggccggcccggaaacccacgggggccatctaaaagaaacgctggacatccccccaggcaggtgggtcctgggggggacaaaaacgggcagagcgccccacgggaaacggaggggccgggcctattcaaaggaaaattaaacgggaagggggcgaatcacaggtgggggcccgggtctaaattccaagggccccaaaaaaggaagggattgggcttaaaaaaaaaacccccccatccaaaacccaggaaaaaaaaatggggggtggaaaactacggcccaaagctttgaaaaaaaaacggggcaaacagggccagggggaaccgaaggggtttttgagctggtggcgggggcaaaaatgcaaaaacggggacttctttggtctcggttttcttggaaactaaaaaaaagcgctggatctcttgcagggggggaggaa

SEQ ID NO: 134303 - DNA, 170 bp, Zea mays
  Clone ID: MRT4577_53970C.1
agctaggatcctctagattggccgcccgtggatagcgttttttaaaaaattttacttaaatcatcagtgcacctataaatgataagcagcggtgcaagatagcaagctggactgcctcttttcctgcatagtaagaagtaccaaccaaaactggcgaacaccactagcgc

SEQ ID NO: 134304 - DNA, 303 bp, Zea mays
  Clone ID: MRT4577_53971C.1
tgccgcaccacccggccttaattcctgcgtcgacgcactcgttcgaagcaacatatattgtggtatccagttgctgctacggagcatcttatgcaaccaaaatggggtccctgcatatgctagtgggtccttctgcatgtgttgcgaacgcgacaattttccctcactgctcacatgcttctatagctggccctcttacctcataccttctatcaaggatagcttcagtgtgagaaaacccaacagtttacatctattggcttcttcaagaaaactgagctagcatcatacctttattaccct

SEQ ID NO: 134305 - DNA, 476 bp, Zea mays
  Clone ID: MRT4577_53972C.1
cggcgattctgcggcgacggcggagaatcggcgcgcgaccagcttccgctcccctgcgcgccccgtgctttagattctgcacctaagcggttatggctggtacagaggattcatctgatgggccgagcacaccaagttctcatgataaacaaagtcctcctgctggaacacctaatatcatagtcgctgcaaagggcaaagggaaagttgctgtggaggcgaaggggaaaggtgctgccaatgtcaagggcaaagcacctatgcaacattcttcttcttctgaacatgaagatggtgacgacgacgatgatgatttcataaggcctcggaaacggaagaaggatcagggtcactcaatttcagatgcggaggacaaagggcacttttctaccatgaggtgctctccctcggctgtgtacgacttaatagagcctatgtccgagaattacaagcagaggttgaccaatatgggggtt

SEQ ID NO: 134306 - DNA, 305 bp, Zea mays
  Clone ID: MRT4577_53973C.1
tggtggatgtgtgggacagtcactccacgtgttaacatcgcatcagctgcgggacgagaggtctgcgctcgtgtgcagcagctgttcccagtgctgagaggccttgaagactcatatgaatgctgcttcgctgacacaagaggcagtgggtcacgtttggaacattagtcgacacatcatgggcttattgaaggtggatacattaatgagctggtcgaagacctcgttaagacattgcttctacgctagactatcgacgaactcctgtacgtggtctgtttggatgcgcatagaatgccaacact

SEQ ID NO: 134307 - DNA, 770 bp, Zea mays
  unsure (1)..(770): unsure at all n locations
  Clone ID: MRT4577_53974C.1
cctcgaggccggccgggatagactccggcggttgcttcagttattctcgtgacgccggcgattctgcggcgacggcggagaatcggcgcgcgaccagcttccgctcccctgcgcgccccgtgctttagattctgcacctaagcggtggcgtccgtgctttagattctgcgcccgagcggtggcgacgactctactttgaaccggtaaaccataacttgctccccccgtgcaggttatggctggtacagaggattcatctgatgggccgagcacaccaagttctcatgataaacaaagtcctcctgctggaacacctaatatcatagtcgctgcaaagggcaaagggaaagttgctgtggaggcgaaggggaaaggtgctgccaatgtcaagggcaaagcacctatgcaacattcttcttcttctgaacatgaagatggtgacgacgacgatgatgatttcataaggcctcggaaacgggagaaggatcagggtcactcaatttcagatgcggaggacaaagggcacttttctaccatgaggtgctctccctcggctgtgtacgacttaatagagcctatgtccgagaattacaagcagaggttgaccaatatggggtttggtgagtttttacggttttataataggagccttgaagacagatctttagggatgtttttgatgaagaatgtcaagaatgacccactccgtatcgaatttttctgggaaggttttacncatcactccagaagtagtgcaccggatctttggc

SEQ ID NO: 134308 - DNA, 354 bp, Zea mays
  Clone ID: MRT4577_53975C.1
aaaaagccggaaacgggaatttcagttctcaaagcattatcatgaatcccaaaacaaaacaggggaaacacgaatcaagcagaggcccccgggggttcacagacccccccctaaaccggtaaattaaacggggagcgatccctgataaactaagaccccccctcagatccccccccttttattcaaacccaaaggaacggcccccgggggagtccaccatgacggggggggggcggcccaacagaccagatcagagagatctaggagagctgtccgcagtcagcgaccttgaccaccttggagggggaacccttgcggcggacccgtgggcggacccgtgggcggacccctggg

SEQ ID NO: 134309 - DNA, 266 bp, Zea mays
  Clone ID: MRT4577_53976C.1
agcggtcctctgcttttggaccgccctagaggcttcggcctggcggcgcagcaggagggccctggacgccgtcatcgacgcgcgggcgtcgtctgaggcggagaccgcccaggcgggcggaggctgcggctgtgcgcaagaggagcaatctgactaggtgcacaaccataaaaagggtgagccgcactatgtatagtgtaatacggcacttgcttgtgactaaaagtcttcgataaaacgatctataatgcactacctaaatacac

SEQ ID NO: 134310 - DNA, 388 bp, Zea mays
  Clone ID: MRT4577_53977C.1
gcttaaagatacaagaacaaggaaagtctgccttcttgtctgcaagcttaatcttctacgaactaggacccatgccccagaaggtccaagctcccaaatgcgcctgatgggaaatcagactggcgggaaaccagaattcacctgtcccctttggccatgggcattacggtacacatactttacgctgcccactgctaataaagtaaagtgtgaaaagaccaaggtgaccgatggacctcttaactgatggaccaggaaagatcttccagaatgaatagcagccttcatcaagaacctagttcttctcctaacttggacttctcaatggtctatgataaaaacgacccctgaatttttcccttccaccagagttatgttttatcttttc

SEQ ID NO: 134311 - DNA, 476 bp, Zea mays
  unsure (1)..(476): unsure at all n locations
  Clone ID: MRT4577_53978C.1
cgccancccacccggaccancancggccncaacgccancgcacgcaagcgcngggncgccgccagganggccaacacggagaagaacggcgngcncgcggngcagacgcngcggaacaacancanggcgncgacggggcgggcgaccacggccancacgcnggncnccgncancagcgncnncancggcgncacgncnccggcccccnccncnnccncgccgncccccaaggcgccgcggcngggggacgggagcaaggccggggaggngnncgcggccaagnaccnggccgngncgcncngcnncaggcncgccnncgncggcaacgggcaggccanccgccgggacgcgcacgccagcnnccnccggggcggccngccgcccgggcccggcgacgaggcgcgcgaggagnncgcgncgnacgnggcgcggacggngaaccgcggcagcnacgccgggncgcncggcccgcgcgc

SEQ ID NO: 134312 - DNA, 907 bp, Zea mays
  Clone ID: MRT4577_53979C.1
cgggccggggccaccccattaactcttgttgttgggaaccctgcctggtctaggtgtacctcgcagtagcgattacccatttaccctgccttttctgcttcttgatgatttttcctcttttttttcttggatcttttttccattatcagttcgattactgctttccttttgtgtggcaacgaaattcctgattccagagatcgtaatgtgattaattgagattttgtttttatccggatcttacctgagacttaggatcgatccgaattttgaaaggactaatcgtgccttctatccaccagatcgatctttaaattcgtcaagttttttttttctcttttcaccacttttgccagacccattcgctttgccgattctcgaaaaaaagctagaaagtctgtttggtggttgtattgttccaatcctcaaactttccttctttcttattcttccgtctttttcctccgtgccattggtggttgtattgttcgaatccacaactttgcttcattcttttttttctttccgtgccaatgatgatttactttcaaggtgaattctttgagtggtttatgatgttcttgaggcgttcaactgaggcacggctgaatccaaattaaatcattgctttggcatttcgtaatgcatttaactcctggatttaattcagtacgtgaaaattagacttgggtattggtctcggtttttttctgactagattctagattactttatatggtattgcctctgttctgtttacaaatatataacgtagttgatttttttctcaaaactttgaccactcatcttattcaaaacattttttaaaaaactaaattttaaagtccactcaaaccaccgaaccgaaaattgttaaccaatcccaaaaaaaaaaaaaaaggcccct

SEQ ID NO: 134313 - DNA, 377 bp, Zea mays
  Clone ID: MRT4577_5397C.1
gtgaaggtccggtactgtgatggtggatctttcactggtgagggctctgatgcggttagtgaatttctgtctcatgtcgccacattttgtttccttattagttcaggacacaaactaaatgtgcgtgccatgggatgcaactccaaaaatctatccttgctttgttttgtttactgaaccacaacaattcactgtctgatttccttctttttctttaggctgcaggcctttatttccgaggtcagcgcatttggcaggccgctatggatgacctaatggcccaaggaatgcgttatgctaatcaggtatttacacttaatttcccctactcttctggtactcatttttctttagcttttcagaggtcattttcatgt

SEQ ID NO: 134314 - DNA, 482 bp, Zea mays
  unsure (1)..(482): unsure at all n locations
  Clone ID: MRT4577_53980C.1
ccggccgnggaagcaacgcaatccaaaccagacaagcaaggaatcccccgatggctcatggggttgtcctcctcctgtctctcgcgtcagtcgccgaggttgtcgtcgacggcgacatgaatgagccgctgatccgtgaggtggttcccggtgtgagatgtactactatctggagttgaacgatggagtaccacttcctgagcttcaagcagcgaatcgtggagttctacaaggacgcagacgagcacgagtaccggctgtgcgttttcaaggacatcctgcgacgcgaggcgcggcagcaaatgttgcattcgacgacggagcagcaagatcactaatctttccgacctcacgaaggacagagttccaccgatcctacgtcgacctccggaagtcccgaacgagctctccttagagaactgccgagagtcttggcaccaggcgaccgtgctccccaccgatgagactcatcgacgattatc

SEQ ID NO: 134315 - DNA, 444 bp, Zea mays
  unsure (1)..(444): unsure at all n locations
  Clone ID: MRT4577_53981C.1
ggggaaccgggggggagaaaacaaacacggggggaagggaaaataaactggccaaattaaaaaccacgggaataaaaaaaaacgggacagattaaaaaaaaacctgcaaaggaaaagggcacggatctgaaaagggcaaaaaacccccaacgggttctgaaggcccccaggcaaacccaaaaaaagggggggccaaacccggacaaaaaaaggggggagccctcactcttttaaatgggaaaaccaaaaggaggggaggttttaaaggttcccttcccttggggccattaaaagaaaattgggcccgggactgccttgaaccccttgnaggccccaaaagaaaagaaagggggggccccgaaaaggaacttgggggggggccccaaaaagaaaggcccaaaaacaaaggggccgtccccttgggcgcctggaaaaataacttta

SEQ ID NO: 134316 - DNA, 478 bp, Zea mays
  Clone ID: MRT4577_53982C.1
cgcgaatccgtcttcgtccgtacagaagagttgcctgtgaatctgtgattgaggacaaaccatgcgtcgtccatcgatcatgaggcggcgtctccaacggagctaaggagatcggtcggtgagcggtggattgaagaatcgggagctagcgaggagggaggaggatggaggaggtggagcagcagctgaccaagaaacagatcgaggagttccgggaggcgttcagcctcttcgacaaagatggcgacgggacgatcacgaccaaggagctgggcacggtgatgcggtcgctggggcagagcccgacggaggaggagctgcaggagatggtggacgaggtggacgcggacggcagcggcgccatcgacctgcaggagttcctgaccctgctggcgcgccagatgcgggaggcgagcggcgccgacgaggacgagctccgggaggccttccacgtcttcgaccaggaccagaacggctt

SEQ ID NO: 134317 - DNA, 488 bp, Zea mays
  Clone ID: MRT4577_53983C.1
ggagcggggcgcggcttacattgacatttttactatcggatgggatttgactgaaaaaccaaaaaaaaaaaaaaatacagatcgaacgcccgaggcagcagtctggagtgatcccccctgagtccctggccccgtttttccgccgccgcctgcaaccgcttcacgtgcccctcgcaggtccccttttcgaccccaaagggagccgagaaaatactccgtccagcgccagccccacgccatggagcccaacaggccctctccatgcggggccacagccaccgcccccgccgccaccaccgaagacgagtccccgttgtgcagattgatctactacgccggcgccggggcggcacgtgcaaaaggggaaagaaccgcccttgcacagcattctacatacggggcatagggcacatggccaagaccgaggcatagatgggctacagcaggggggtctttcaaaaatctgtcccgcacgtgcgaatgacggg

SEQ ID NO: 134318 - DNA, 696 bp, Zea mays
  unsure (1)..(696): unsure at all n locations
  Clone ID: MRT4577_53984C.1
gtctccaattcggcactaggcactaccaggcgccgttctcctctctctctctttccccgtctcaagcttgcattttctctctctctctctttccccggtggtgcggtgcggtgcgggtgctggactgctggcctctgcgtccgcatccggcgggcaagtgcgaaagctgccaactctttccctgctcggttttcccttctccaggccagccacaccacttcttcgccaagctcgcatccatttccaaactcttacctccatcccccacctgccctcctttatctcccaaatcggtcttcttgcgctggtggaattcctcgtcggcggtggcgagtgaggcgctgctggtggtatgcaggagctaggaggtaggcaacaaccatacgaaggcaagggcgagcggagccgaggcacaccgcgcgttctgcgccgaccagcactgcccgatctcgcgcgggggaggggggattcgtgagcgccggcggcagccatgccggagtcctggagacccgccgaggcggatgccctgcagccggcggcaggcacggcgtccgcgtccggcccctcggctcggagcccgggcaatggcgccaaggggcgcggngcggnggagccccccggcgctgcggcgacgcgggtgccgttccacagctnttcgcgttcgcgactcgnncgacgtgcgctcatgctgctggg

SEQ ID NO: 134319 - DNA, 800 bp, Zea mays
  Clone ID: MRT4577_53985C.1
ccggccgggccccgccccaccaaacactcccacagacccacagccccgcccctccccatccgtccacagccatctccgcctccgatccagcgcccgtccacagccaccgcagttccagtgagatcgagcgaggtaagcttagatctgagcgatttctctcgcgcgtcgcaggtaaagttcactcgacttcgactctctcatcctcttctgttcttcctcgttccgtcttcttcctcgagcagacagcgagagacccgtggccttttagatcccgggcttcagatctgctgtttcttcttcggtttggttctagttctagcagtgtactactagtcgttaggttggtagccaagagaggttctttttccacacctcccttgcgcaagtgagtcctgtcctgagcggatctacccaccactgccatctgtttttactgtggctgttgggttccgccagtttcttcgtttgttcttggtttgctagagagagagagaaaaaaaaacaaaaacaaaaaaaacagtctagatggctgctgctatagatctgtcaggggaggagctgatgagagcactcgagccttttatccgggatgcctctgctcacggatccagtccgctcctccacccgcaccagccacttagcccctcgtcgccgttctccttccaccaagcagccgccgtcgccgccgccgcctcctcctacggaggaaactacccgttcgccgcggccgacgaggcgggccagctgagcccttcacagatgcagtacatccaggcccgtctccacctgcagcgtcgcca

SEQ ID NO: 134320 - DNA, 390 bp, Zea mays
  Clone ID: MRT4577_53986C.1
aaaaaaaataaaaaaaaaaaaataaaaataaaaattaaaggccggaactccagctggtccagggttgatggcgcctaaagtcgacatgatacccatggcatagaatccgctagatgaggagcccgcggcctagaatgcacacgtcgtgaataagacaacgcggagaatcggatcccaaatggcatgtccgctgacaaggatgtcgccaagggcaatatgggcaagaagaacgtcaagaagagcgtgtagacctaaaagatctacattttcagggtgctgaaccaggtcctgccggacattgttatgtcctccaaggccatgtggatcatgaactcttacattaacgatttctacgagaagttcgctcctgaggccgccaagttttcgcgc

SEQ ID NO: 134321 - DNA, 849 bp, Zea mays
  Clone ID: MRT4577_53987C.1
cactcccgcagaccccagccccgcccgtccccgtccgtccacagccagctccgcctcccatccagcgcccgtccacagccaccgcagttccagtgagattgagcgaggtaagcttagatctgagcgatttctctcgcgcgtcgcaggtaaagttcactcgacttcgactctctcatcctcttctgttcttcctggttccgtcttcttcctcgagcagacagcgagagacccgtggccttttagatcccgggcttcagatctgctgtttcttcttcggtttggttctagttctagcagtgtactagtagtcgttaggttggtagccaagagaggttctttttccacacctcccttgcgcaagtgagtcctgtcctgagcggatctacccaccactgccatctgtttttactgtggctgttgggttccgccagtttcttcgtttgttcttggtttgctagagagatagagagaaaaaaaaaacaaaaaacaaaaaaaaacagtctagatggctgctactatagatctgtcaggggaggagctgatgagagcactcgagccttttatccgggatgcctctgctcacggatccagtccgctcctccacccgcaccagccacttagcccctcgtcgccgttctccttccaccaagccgtcgccgccgcctcctcctacggaggaaactacccgttcgccgcggccgacgaggcgggccagctgagcccttcccagatgcagtacatccaggcccgcctccacctgcagcgtcgccaggcgcagacctccgtgctgggcccgcgtgcccagcccatgaaggcgtcggcgtccgcggcccccgccccggcgcggcc

SEQ ID NO: 134322 - DNA, 772 bp, Zea mays
  unsure (1)..(772): unsure at all n locations
  Clone ID: MRT4577_53988C.1
ccccgccccaccaacactcccgcagacccacccgtccccgtccgtcccagccagctccgcctcccatccagcgcccgtccacagccaccacagttccagtgagatcgagcgaggtaagcttagatctgagcgatttctctcgcgcgtcgcaggtaaagttcactcgacttcgactctctcatcctcttctgttcttcctggttccgtcttcttcctcgagcagacagcgagagacccgtggccttttagatcccgggcttcagatctgctgtttcttcttcggtttggttctagttctagcagtgtactactactagtcgttaggttggtagccaagagaggttctttttccacacctcccttgcgcaagtgagtcctgtcctgagcggatctacccaccactgccatctgttttttactgtggctgttgggttccgccagtttcttcgtttgttcttggtttgctagagagaggaaaaacaaaaaaacaaaaaaaacagtctagatggctgctgctatagatctgtcaggggaggagctgatgagagcactcgagccttttatccgggatgcctctgctcacggatccagtccgctcctccacccgcaccagccacttagcccctcgtcgccgttctccttccaccaagctgtcgccgtcgccgccgcctcctcctacggaggaaactacccgttcgccgcgcccgacgaggcgggccagctgagcccttccagatgcagtacatccaggcccgcctncacctgcagcgtc

SEQ ID NO: 134323 - DNA, 592 bp, Zea mays
  Clone ID: MRT4577_53989C.1
gcggccgcccccctttttttttttttttttttttttttttttttttttttttttttttttttgaacgggattagcactaataatccactagtgcccgcgcaggatgtctaaaataccattctgcgcgacggccgttaaccttaaccctttgctgcagcctgcagtagtagtagcagtcggaaggagccaagaaggaaagaacaatgtcggtcggtggttaattggcggcgaggagggagtcccagtcgatctcgtacgacgggtacttggtgagcgcgaagccggcggcctcgtcccacggcgcctcgctgaagtccagctgctgcatctccggcaccgtcgacgactcgggggaggcggacggggacggggacgggcacgaggactcggcggcggactcgaggcagcaggacgaggacgcgtcgtcggaggacggcgaggaggagcagttgctggtgggggcggacgacgacgtggcggcagcagctgcggcggaggcggaggcgtgcttcttggcgcccttcttggacgcggcgatgttctggcagagcgtctggagcttggcgtcgacggaggcgtggagcgggccgcg

SEQ ID NO: 134324 - DNA, 405 bp, Zea mays
  Clone ID: MRT4577_5398C.1
ggaaccaaccttagtattagtaagagtaagagtattagtaagagtaaccacttctggctcgttaatgtttcgcttctttgtccttaaagaactttgcatacatcggaacatgtaagacagcatcaaggatggggatggtaatctgcgcatcttgaatcatctcaagaaacttagcaaactgcttgtcttcacttgacttctaccaaaaaaaaataaaaactacatgatccaaccctcctcgtcgccactgctaaaggattccatcatatcactctcatcaccttccccttcgtcatcacccaaaatatccatcaaccccctcccccttcaaaatcaccaccaccatcaatgtactctgggtcatcttcaatgtcatccgaactggggatatcatcgtcaccacca

SEQ ID NO: 134325 - DNA, 380 bp, Zea mays
  Clone ID: MRT4577_53990C.1
ccacacacacactgacacacacaaagccattagccatgtcgttcaacaaaaacctagcagtggtcgttggcttaacctaggctctggtcatcgtgtcgaacggtgaagaaacttactcgtatggcggatcagcgcttgtgcgattcaacgacgggggtcgcctgcgcatccgacgcggtctgcgtgaccatctgcatgcgaagggctggacagaactacgtctacggccactgctacaaggagcctagcggcggccgttcgtgcttgagcaccgtacggtgtgatccactgtcggtggcggcgccgttgtaagagccgaccacggcggcggctccgtcgccggcaccaacttgtggctgaagcctaatgcacgaactcta

SEQ ID NO: 134326 - DNA, 362 bp, Zea mays
  Clone ID: MRT4577_53991C.1
gtgtggtgttttcactggacagacacagcggctccgagtcctaatgggaaaaaaccgagacgggggaaacccagcggggggggcaaaccccgggagcgacactggtggtcccgccccgggtaggaaaagaggggggaaaaaaaaaggcgggcgaggaaggggatggggggggccccactgcccggggggggggggccaacctttggaacaaaaccacgggggggggggaccacggcccaccttgagcttggtttaggaaaaaaaagaaggcaggcctcccggagggccccagaaggactggggacagtggccccccatggagcccgctggggacttcaacgatttcttcctttccggggccc

SEQ ID NO: 134327 - DNA, 1565 bp, Zea mays
  unsure (1)..(1565): unsure at all n locations
  Clone ID: MRT4577_53992C.1
ccgggctggccgcttttttttttttttttttttggggaacagccgaacacagattgtttatacaacaataaaccatacaatagtagcaccaacagtagcagttcatcaaattacaactcctggacacagctagctagctgattttacaacatacatcatacggagcactactgcttgacaagcatctcctcacatcacaccgtgctgctctttacaacctgtagagcacagcacaccatctagcacaacaaaaacagctaccaggacaacggacacctgaacggccgggggggtggggtcactgaccagtgtgacacgtaccggccaccaccggagaacgccggacacaaaaacgccggcttcccgtcggttgtggttctctcctcctccggagaaccaaaccctaaataacccgagatctacaactgactcaccagtgacaaggaccaaacgaatcggacggacatctacacagaaccaaccaacgaacggacggacggggattagcactaatgatccaactagtgcccgcgcaggatgtctaaaatcccatctgcgcgacggccgttaaccttctttaaccctcctcctgctgcacgacggcagtgtgggtaggatgggagccagccagccagccagccaacaaggggcgacgattaattggcgaggagggagtcccagtcgatctcgtacgacgggtacttggtgagcgcgaagccggcggcctcgtcccacggcgcctcgctgaagtccagctgctgcatctccggcaccgtcggcccgggcgaggcggacggcgacggggaccgggacgggcacgaggactcggtggcggactcgaggcaggacgaggtcgcgtcgtcggacgacggcgaggagcagcagttgctggtgggggcggacgacgacgcagcagctgcggcggaggctggcttcttggcgcccttcttggacgcggcgatgctctggcacaggctctggagcttggcgtcgacggaggcgtggagcgggccgcgggaggcggcgttgtcggggaagttgaggcgcgccgcgtcgccgcggaggcggtaggcggcctggtcgtaggccagcgccgcctcctcggcggtgtcgaaggtgccgagccagagccgggtgcggttgcgcgggagccggatctccgccacccacttgccccagtgccgctgccgcacgccgcggtacagcttctggccggcctcgaggtaccccatctgggaagggctcagctggcccgcctcgtcggccgcggcgaacgggtagttccctccgtaggaggaggcggcggcgacggcttggtggaaggagaacggcgacgaggggctaagtggctggtgcgggtggaggagcggactggatccgtgagcagaggcatcccggataaaaggctcgacgtgctctcatcagctcctcccctgacagatctatagtagcagccatctagactgtttttttttgttttttttgttttttttcctctctctctagcaaaccaagaacaaacgaaganactggcggaacccnacagccacagtaaaaaacagatc

SEQ ID NO: 134328 - DNA, 312 bp, Zea mays
  Clone ID: MRT4577_53993C.1
cgacactgagatgcggaggctgacggacgccgtcgaggggccaaggtctttgatggctcgccacttcgaggtcgaggtggttccgcctcccccatcgtcgactgctgtcgtaccccctgctggtcctcctccgaccgcataggcctggtcgtcaccctgcaggttttttgagatttgtgtaaactatgccaagaacttatttgtttcgaattttaagctctagttgtttgtcgtgttatttttcctgctgttttgtgcctattgccttaatcttactataggggccccggtagaacctgagttaccctttag

SEQ ID NO: 134329 - DNA, 354 bp, Zea mays
  Clone ID: MRT4577_53994C.1
gaaaaagaagaatcatctctctctgaaacacaaatgcttcagtggtcaaagcgagtctgaaattaccattgtgcagcatccaggtaggtactcctgtgatgtagtaagaaacacacaagacccccacaacagtaaacagacccttggacaacggccccattattttcttcatcagaaggctaatagttatacttcaacattaatttctcagtaggcaccgcaccaccaccaaccaaatatacagcatggatatccatatcccactatccatgaccgtcgaaccaaacgcatgccactgtcagagggggggaaaagcttcagatcataggaaggcttctacagtacagttgggga

SEQ ID NO: 134330 - DNA, 224 bp, Zea mays
  unsure (1)..(224): unsure at all n locations
  Clone ID: MRT4577_53995C.1
aagctgcgtttttttttttattttttttttttgtcattccgtcctactactgattcatgatatcagggaaatattatttgatcaataccacatataaatatatgtagtgtcagtatattgacctgcataacttacactactattatataatgagagaggatggaccagaagaaaattcctggtcataataaagatttggttttaatgaatggnagaggaaacaa

SEQ ID NO: 134331 - DNA, 259 bp, Zea mays
  Clone ID: MRT4577_53996C.1
tctttttggtcataaagttgaagggtattggccatggcatatcgaaagctgaggtggatgctcaggatattgcaactaagaggattgccgaacaaatgggttgtgcttgctatattgggtatctccgccacctggattcttgcatatatcaagatggtgagcacatatcatcttcactcgggggaatgacaaaataagtcttttgcacgaatgggtagcttatcaaactaactagtgacccgaaaaatcttgaaaaatc

SEQ ID NO: 134332 - DNA, 683 bp, Zea mays
  Clone ID: MRT4577_53997C.1
cctgccgggactcggcactgcaggcagaggcagaatagcaacagccagctccatccatcctctttcctctcctcgtttcgcttcctcggcggattcctcctccctagaccgtacgcgtaccagaccccttacggcgcgcaagcctcgaccgagatgagcaaacgctagatcgggaggcgctgtgactgacgagagcatgctcaagttctgggagctgcaggcaaaaaggcttgaccggtatctaactatgcagagggacgacaagttcaaggggatcgttgtggaccaaggcagggatcgcgctaccagctacaaggacttcacaaacagcctccccgaaaatgactgacgatatgcgacctatgacttcgactctgtcactggaaaaaatgtccagaagagcaggatcttctatatcctatggtccccatgctacgccaaggcgaagagcaagatgctctatgcacgctcaaaccaagaaatcgagagtgggctcaatgggattcaggtggaactgcaggctactgatgcaagtgaaatcagccttgatgagatcaaggatcgggctcgctaggcatcatgatcatgcatcatggacctcgcctactactgcggatttgtatgccattataaactttggtgctgagaaagactgcttggagacttgcgggtttgttgctgag

SEQ ID NO: 134333 - DNA, 103 bp, Zea mays
  unsure (1)..(103): unsure at all n locations
  Clone ID: MRT4577_53998C.1
gaaagattttaacttgtttgagattgaaatccatccaatcccaccgaatccacgggaattaataggagtactgagatnccctaaattgattaattcggttgct

SEQ ID NO: 134334 - DNA, 372 bp, Zea mays
  Clone ID: MRT4577_53999C.1
ggggggggtaaatttcatggtctcattattccccgcctgtggccatgaaaaaaaaaaccttttccttcaataaacaaggagcccggtcccatgacgaaaaaaatacccacgtgatgaaaccagggggtttgcccggggaaaaaaacccccggagcaccaatttattggttacaagatccacctaggcttggattgccggctcaagcaccttgtcacggggcgcgcgggcaccaacccttcacaagcggggggggggaaccccacagggctgggggagggggctttggagggtccaccctctaccggaatggcgaggccccacaaaacctccggggcgccggggccacccattgatgcaccaaagacttcgtc

SEQ ID NO: 134335 - DNA, 432 bp, Zea mays
  Clone ID: MRT4577_5399C.1
caacccagggcaccgaaccttgacctttggcttccctggggcttaaaaaaaaaacatcccaaaaacatttttaggggccggggaatcccaggctggaacccttggaaaaaaccccttgcaaacaatccacaggtaaacatttggggacaaaaaataatcgcccaaatttttccctcccccaatcataaaaggtttgtcccctttttttaacctttccggggggcaaactaaaactaacccttttttttaaggggcttttttttttttaaaaaaaaaacctcattggggcccggggagaacttttaagggttaatccccccataaccccggtgggtcctgcccccttttttttaaccctggttcacttaaatggccaacacataaggggtttcaacataaaaaccttttccctaaacattgctttaaaatttt

SEQ ID NO: 134336 - DNA, 139 bp, Zea mays
  Clone ID: MRT4577_539C.1
ggaaacatcttttttccttatctgtatccctttccattccacgggttcttcagcgtattggggcccttgggccccttgccttcctggttgtgcgccgcgcctgcgatcgctcttccgcggggggggcgctgtcttcgcg

SEQ ID NO: 134337 - DNA, 447 bp, Zea mays
  Clone ID: MRT4577_53C.1
ctcgcgggtcgacacaagcctctagaatgactcttcctactgctgaagaaatgcctgtgactgaatttgttgatgctgacccccatgggtgtacccaatccgctgctgatcccaatgtgggtgctccatctgttgctgatcccaatgggggtgctgcttgtgttgccaatgtagacgaggaggaggaggaagatgaagttcctttgactcggaaaaacagtcggcagttcatcgccagcggtgaaagtagtggagttccctctcctgctttgtctgctctcattggtctgcaagaactgtccctggccaactttgatcagactcttgaggacatggttccagaggacttgttacctgagccagtggatgatggtgtgatggacgtttgcgctgatgtgcttgatgctgggttgatgtcatcacgtccctcgtcgaccttagaacgcg

SEQ ID NO: 134338 - DNA, 119 bp, Zea mays
  unsure (1)..(119): unsure at all n locations
  Clone ID: MRT4577_54000C.1
cggacgctgggcaggacgcgtgggctcatcagcagaggcttgcagagatgcccatggatcaggacctgtcgtcggagctggatccgncgctggtcatgtcgacgtcgacgtcctcctcg

SEQ ID NO: 134339 - DNA, 678 bp, Zea mays
  Clone ID: MRT4577_54001C.1
atgccgccaaagaagataacagcgccaggggctgcattgcagccaatggacacaaaccaggagactctctatctcagagaggccagaagccaaaagagaaaggccaccagtccaacacttcaggaggaggagttggaccaggagatcagggacatggagatcattcatcagcaggtgcaaaggaaaaaggagaagatggctcggttggccgatcttcaaaggaagatcgatgaatctactgaggaaaagctcaaggacatgctggttaccagttttccaggctttcagacaaagccagtcacagctcaggccttgttccagtgcacacaagaccatgaggaataccttcaggcgtatgtccgaaggttcttgcgactgagagcacaagcgcccatagtgcccaaggaaattgtcattgaggccatgatcaagggtattcggccaggacctacatctcaatactttgccaggaagcccccccaaactctggagaagctgcttcagaaaatggatgagtacatccgggctgacaacgacttccgccaaagaagggaggaagcttatagattctctgagatgactaggggttttggaggaagaatccaccctaggcatgttagatcaatccacagctccagtcagaatgatgacaaaggaagccagcttcagaggccataa

SEQ ID NO: 134340 - DNA, 211 bp, Zea mays
  Clone ID: MRT4577_54002C.1
atacggttgtccagacctaatcgccaacacgttgctgctgctgtatagtgatccacgtgcaccgtttcagctgcgacggcgggcgtttgcagctgccatgattgcagctgcagagtttggtggagcatcctccgtagtcgtgtagcagcacacataggggctagttaaatacgttcgtttcgcaaccgacatgctgtgctctctgttccag

SEQ ID NO: 134341 - DNA, 190 bp, Zea mays
  Clone ID: MRT4577_54003C.1
gttgagaagtgcctgttttatgccaagatggacaagagcaccgtgcatgacgcggggggggctggtgggaccactaagatcccgagggcgcagcatcaggtccaggacttcttcaacggcaaggagctgtgcaagaacatcaaccctgaagaggctgacacctatggtgctggctgccaggctgccgtac

SEQ ID NO: 134342 - DNA, 754 bp, Zea mays
  Clone ID: MRT4577_54004C.1
attccccaatccccagttcccccactcctcgagccccgccatgccgaccggcgcagctacctcgctgctcggcctcaaccccccgcatcccagctgctccagcctccgcgtccttcccccgaccgccgccgccaccgcatctttcgctccgccgttcctcagacgcagcagacccagcgccgccgccgccatccatgcctccacactcgtttctgattccgcattccccacctctccgactccgcccccgcgcgcgcccgctccgccggagcctccctccaccgtggtccacgcgggccgcagcaaaaagaagaagaacccccagggcggcggcggacgcatcgagggaagcggggacgtgcggcgcgaggccaaggccaaggcgcgcatccgcagccgccgcatgggcgagaacgccttcttccgccgcaaacgccgcgccgcggccacgggccaggccgacgccttcacggacgcggagctcgagatgatcgggatggggtacgaccgcgccgtccggttcatggacgggcccgacgacccgcggctccggcacccgcacgactggtacaagtacggccgctacgggccctacaactggcgcggcatcgtcgtcggcccgcccatccgcggccgcttctccgacgaccgcgtctcgctcatggaacaggtccacgaccacgaggagtgggaccgcatcgagcagttcgacatgtgcaaccagttcacgcaccgcctcaacgagctcagcgac

SEQ ID NO: 134343 - DNA, 792 bp, Zea mays
  unsure (1)..(792): unsure at all n locations
  Clone ID: MRT4577_54005C.1
cattgggtacctcgaggccggccgggagcgcaagcagaagctacagtcctaaaaccatctgcttcagctagccccaagtttagtcggccgatcattcactgaagtagtaatggcctccgtcaacagctggaccctcgagatcgcgtcgccggtggctccgcagcgcctgttccgcgccgccgtgatggactggcacaccctggcgcccaaggtcgcctcccacgtcgtcgccagcgcgcagcccgtggagggcgacggcggcgttggcagcgtcaggcagttcaacttcacctcagtcatgccgttcagcttcatgaaggagcgtctcgagttcctcgacgcggacaagtgcgagtgcaagaacacgctcatcgagggcggcggcatcggcgtcgccatcgaaacggcgacgtcgcacatcaaggtggagcccgcggccggcggcgggagtgtggtgaaggtcaagtccacgtacaagctgctgccgggcgtggaggtgaaggacgagatcgccaaggccaaggggtccgtcaccgccatcttcaagggtgccgaggcctacctcgtcgccatccccgacgcctacaactaaaccattnggactgggatgagcttcatttcccttccgtcttgtttggatatagaagggtattggtgtacgggagattgggttttctctccccttttttttgttttcatacaaaataaaataaagctgctctaaagcagcggtgcggtttttggactaaaaaaagcaaaaaaaaaaaaaaaaaagcggccctcgagctccag

SEQ ID NO: 134344 - DNA, 501 bp, Zea mays
  Clone ID: MRT4577_54006C.1
aaaaaacgggaaactgggtggtacatattttttatttaatttccagaaggggcttctaacccctcatgttttttcaaaaaaaaaaggaataatacctttggcccttgcctcaagggaagggaatacatatgtgagacatgccgctttttacttataaaacaaaaacaaggacacggtttttggatacaaaatctactgcatggtttcctacttttaaaataagcaagcttacacagaaccccattggaaggggtttttttggcccttgcctaagaaagggaccaaaggtttttccattatatacagccgcccccacagggccctaaaacaaatcaaaacaaaacgggggcaccgatgtgtatgtattctacaccaacaacaaccatcctaaagccaagggccagggtgggtttccacctttcactccagggccaacaggggagactaattccctccacaattccccaaaataatcatacacacgtaaggggtcatcgttta

SEQ ID NO: 134345 - DNA, 674 bp, Zea mays
  Clone ID: MRT4577_54007C.1
tgatacataactgtgctatcagttaaggctgtcagtgttgcctctcaatggctggagcttctacagcaggacatacgagggcggcttgctgctttgaagcgcagtaggaagagagtgaggaatgctcttcaaactgaactgccgcacctgatatcaacagaattctcatctagtcaagagaatgaaccatccattgcacattcttctgaagctgggcccactggaaaaacagtttcagaagaacatgctgcacggtggaggtctctattccttcagatggaaagaacactgcaggaggagggaaggcacttggaaattcggttgaaggaagtgcaaggaatgttgcagaattgtgataaaggcctgcaacaagtgacctgtgaggctccactgctaggcccaatggctgaattatggaagctgaagaacccggagatttccgagagcgagtgggcagtgcaagctgccgcggcgtccatctactcgacgtgcaacctggtcatgaagaccgagaacgtcccgtgcttctgatcttctcgcacatgtggatcttgtatcttgttccttacacagttttctctcttcatttttttactgattggttaggttctgtttcttacacatatagcctagacagtcattgttgtggtttgtgctgctcctttgtaacgtga

SEQ ID NO: 134346 - DNA, 877 bp, Zea mays
  Clone ID: MRT4577_54008C.1
gcccttcctcgagtttttttttttttttttttttttttttttttttttttttttttttttttttttttttttttaagcccaaaaaccgcccgctgttttaaagcggtttttttttattttgtatgaaaaaaaaagaaggggaaagaaaacccaatttccgtacacaatacccttttttttccaaacaagccgcaagggaaatgaagctcatcccagtccactggtttagttgtaggcgtcggggttggcgacgaggtaggcctcggcacccttgaagatgggggtgacggactccttggccttggcgatctcgtccttcacctccacgcccggcagcagcttgtaaggggattcgaccttcaccacgctcccgccgccggccgcgggctccaccttgatgtgcgacgtcgccgtttcgatggcgacgccgatgccgcctccctcgatgagcgtgttcttgcactcgcacttgtccgcgtcgaggaactcgagacgctccttcatgaagctgaacggcatgactgcaagagcgaccgcacgacgtcgtgcgcttagctgtttgatcgatcaggcgagagagagagcatgctggtctgggctgggcacttacctgaggtgaagttgaactgcctgacgctgccaacgccgccgtcgccctccacgggctgcgcgctggcgacgacgtgggaggcgaccttgggcgccagggtgtgccagtccatcacggcggcgcggaacaggcgctgcggggccaccggcgacgcgatctcgagggtccagctgttgacggaggccattactacttcagtgaacgatcggccgactaaacttggggctagctgaagcagatggttttatcgtgccgaattgtagcttc

SEQ ID NO: 134347 - DNA, 1060 bp, Zea mays
  Clone ID: MRT4577_54009C.1
aaaaaaaaaaaaaaaaaaaaaaaaaaaccccgctggctgtcgcttgctccactagtccactccacattgccatgtcgtcgaccacctcgccagcgtccggtgtctccggcgaggctcctcctccgcgcatcgtggaggactgcctcgggctcgtccagctcatgagcgacggcaccgtcaagcgcgcgccggcctgcttggcctctgccgacgatgcggcaccggtcggatgcaaggacgtcgtctacgacgaggctcgcaacctgagcctccgcatgtacgtgccatcgtcctccagggcggggaacggcggcgccgagaagctcccggtgctggtctacttccacggcggcggcttcatcgtcggcagcttcgcgtcgccggagttccacgccgcgtgcgcccgcctcgccgccgcgctcccggccgtggtgctctccgccgactaccgcctggccccggagcaccggctccccgcggcgctccaggacgccgacgccctcttctcctggctcggcgcgcaggagcagcaggcagacccgtggctcgccgacgcggcggacctgggccgcgtgttcgtgtcgggcgactcggccggcgccaacatcgcgcaccacgccgccgcggcgccggggcgccgcctcgccgggtgcgtgctgctgtggcccttcttcggcggcgagcggaggacgcggtcggaggcggcctgcccgggcgacgcgttcctgacgctcccgctgtacgaccagatgtggcgtctggcgctgccggcgggggcgacgcgtgaccacccggccgcgaacccggaggcgggcgagctcccgccgctgctcgtcgcggccggcgaccgcgacatgctgatcgaccgcatcagggagtacgtggcgcgggcgcgggcccgggccgccgccgcgggcaacaggcgcgtcgacctcgtcgagttcccgggcgcggggcacgggttcgccatcctcgagcccgatggcgaggatgcgggtgagctagtccgcgtcgtgcggcggttcgtgcatggcggggatgccgccggcccgccgccgct

SEQ ID NO: 134348 - DNA, 346 bp, Zea mays
  Clone ID: MRT4577_5400C.1
attatcaacgtcttttgggttttaacttacagatgctcaccgacgatagcttataattccaccatggtgcctggttggttgagtcagcttgccagcatcagacgtgcggttcctgaggaaaggcgtgccatagcatactctcacccgaggccagagatggctgcccgaacttgtgctctgaaatcttactggacagccgagcccggaccagcccccggacagaaaaccgacgcccactcgcaaatccacacagagtggccgccctctaacatctgcaggagctcgcgcaactacggtaaacaacattgctagccttacggcgccaaagccggagactccacctgag

SEQ ID NO: 134349 - DNA, 285 bp, Zea mays
  Clone ID: MRT4577_54010C.1
attaactaatgcatgagctagcatggctgggaatgtcagaaccatgtggagttcaatgcgatcacatgttgcgagggctgccgcacatggtgtgaggtggtgagcgccgcatgatgctgaccatcccactgtccttcatacgctaggatgccagtcacactatgagctggactgtttgtgagctgtaccgacatggtatcatatgcctacgtgtgcatgttatgacacgagatttgccactaggaactacatgacctagagcctgtggggctccaataacgtgtg

SEQ ID NO: 134350 - DNA, 449 bp, Zea mays
  Clone ID: MRT4577_54011C.1
atggcacgagccatggcataacaagaggaggaacaggggataacctcttgacagacaccaacataccctaccgtggccaaccatgatgcttgctgacaaaggatgccacggacttgcagagcgggaccatgaatggagataaacgatcaaaaggttactgaccgccttaccccgggccgactacctgacaacagttggattataacactatctcagtcacagccagtctctgggccctctactacaccaaaccagtacgataataacctaagtggaactacctactcacacacaataacaacaaatccctactgaaccatcctattcacgtacacgtcgggagcgcagggctgatagcggcacaactctaccctagagcatgcagtgcactgtaggctgatccatgcacaagagcacaatgtcagcctgcacacatgcggccttgtcta

SEQ ID NO: 134351 - DNA, 206 bp, Zea mays
  Clone ID: MRT4577_54012C.1
atattttcttcacacagaacctatcaagcgacgagggtcattctgcgctcctgagggtgttgaccggtaaaataattcttctcactttgtacaggccattcctggagcatcccacaagctgcagtttggaatcgacctaactttcaaggaagcatgtctcgccaactcgataatcaacctcttgtgtaatgatacactttcatctt

SEQ ID NO: 134352 - DNA, 582 bp, Zea mays
  Clone ID: MRT4577_54013C.1
ggggaaagggtaccttttttttttaaaaaacggggttaaaaaaccaaaaccactttttggccccctttggttaccttttaaagggcaaccctcccccggggagtttttttttaaaaaaaagggccccccaaaagattttaacattggtttaaaagcccggccaaaaagccctttaacaaattgggttttgggaaacccaagtttgggcaaaaccaaccaaaaattttcccgggtttggcaaccctttctgccaaaattggccggtttttttttttacccaaacccagggggaatgaaaaaaagggccactttttttggaaaaagggttggaaaccggaacctgggggtcccaaataaaacaaagggggggggggaccaccctagggggaaaaatttgggctacgggaacctttggcccccccccttaccccgggggggaaaatttcaaaactccccttggcttaaagggggggaaccccttggcaaaaaaaaaatttaacgggggcccccctttccgttttttttggggggaaacacccaaaagggcccgggttttttcccacccgggggggttaaaacccc

SEQ ID NO: 134353 - DNA, 493 bp, Zea mays
  Clone ID: MRT4577_54014C.1
gagatcattaatgatgattcattatatgtaccatgtacattaagctttcacgtgcacgggataggacctcctaccctggtacgatttcaggtcctagacaccagctgacgggagcctcggctagccggcgccggatcgaccaccgtggtgccgtagcataaacaatagcgagggtaccagctggatccacagaccacaccgaacttatatatgcgctgaataaaaccggggagaccgattgatacagctaccaacggcggaggcggagactggagcttgatgacacggccacgaggtggtagatctcaaaccaatggcggggtgagctctggcgacctaacaaggatacggtgtgctcgtgattccgaccgaggacgatcctggtgaacggggcgactcctatgctgtccgcagggccagttcacggagtcgctgctctgttgcaggcgtcacactatagtagagctagatcaggctactctgttagcttact

SEQ ID NO: 134354 - DNA, 473 bp, Zea mays
  Clone ID: MRT4577_54015C.1
ggctaagaacaccataccttaccgttctttaaggaggcacaatacgttctgcttatatacagcaaattgtgcaggcatggggagctgcgcataaagcctgatccaaaacatagagaacgctgtttctgcaggaatgcgctagcgtgcatcataccgaagcattcaacgctctaaatgcaaaattagagcatcgacccatcgaacacaagcataccacccatgcctgcaagcattccattcatgttcctgcatcccatgtggttcattacccacttgggacgcgaacgatcccacccagtggtttaccaccacccaccagatgggcctagctaatctgctgaacattgatggcgcggcacatggcactacaagacctctttctttctggacttgagaccctgcatctgtcccacattttagcaagcgggttcgcctcttccagcatgcgcatgacatccatgacaggccggcca

SEQ ID NO: 134355 - DNA, 449 bp, Zea mays
  unsure (1)..(449): unsure at all n locations
  Clone ID: MRT4577_54016C.1
tcagcgttcgtggatcctgcggcgcaagcagcgtttgtagtccgtttctgggccttgctttgagtggctgatgcacgatgtcgcccggactggacgccctacggatgggcgcaactccaggcgctgtagcagctgagctggcaccatatcaagctgggggagtcgctgcaccgttaccagcctacttactgcgtggccctgctgtccttcctgcagaaacagccggaaggtgagctcgcggggctggtggcctggcctaggtgagagctagcagctggacacgatgatgcgcgagcctgctagctgtacctgggcacgtccttagnccttgcaagctagctgtgggggtggtgttctactgaggaatctatgaactgaccgaatgatgtcatggacccgctgactagctacctatgtctgtagttgactcatttatggtgcttgagtaa

SEQ ID NO: 134356 - DNA, 410 bp, Zea mays
  Clone ID: MRT4577_54017C.1
actccgccaacccatcacaccttctcatccttttccccctaccccaacctcaacccaacgccgatcttttacaacgatgcggcggacatcctttcacattcatccgactcataaccatcaacaccagcacctttcccatagaaggtatcctccactactacggactcattccccactttttccgcacttcagcacattatccactctatccatacctttaccccgctaaactagttcgtgtccatcacccttacaacatttattatcaccatcgccacactcccgttcatcttcaaccacttgaacaccaccaccaatctaatagcaataaattcaaacatcgaaatcattaaagaccagatcaatactatctatccaaaatcaattcaatatgcacaagctaaaattaa

SEQ ID NO: 134357 - DNA, 584 bp, Zea mays
  Clone ID: MRT4577_54018C.1
gataacaaaaacaaacatcatatctttcataaagagatcagagtttttggttttattctcttgctaagtaagcgcaagaagagaagcagcacaaggccttagttttgacaagttaaacaacgaaacaacacaaaacatcaaacacaacaacaacaacaataacaacgaggactgcatatttacactgatctggaagcttttcagattcagcagcacaagaccagacgacacaacagggaactcttttctttccattattcaagatctagtaacctccctgaatatacgcatttaggcgttgaagctcctctctatgctcatgaaccactgcacggacaacatctcctatggacaccattccaatcatgcccttgtctttgattaccggaatatgcctgattcggttatctgtcatcagttgcatagcacgcaagaccttggtctccggtgtcacagtgataagcttattctcttcagtcataatgtctccaacttttgttgatttggatgatctcccttgcacaatgatcttccgtagataatctctctctgtaatgataccagcaagagcttgttgctcacca

SEQ ID NO: 134358 - DNA, 214 bp, Zea mays
  Clone ID: MRT4577_54019C.1
tcgaactgtatgaactcttctgcatgtacgattgttcattgctagatataaatcctctgtcggagactgttgacaacaatcttgaggctgctaatgcaaagttgaactttgatgataatgctgcatttatacagaaagatatattttcacttggtgatacaactcacgattaccctagtgaggccgctgctgtcaaagcaaatttgtactatat

SEQ ID NO: 134359 - DNA, 898 bp, Zea mays
  Clone ID: MRT4577_5401C.1
aaccgaacaagccctgaatcggcaggtttttccatcccaagcaaatacaatgaagttctgcagcagtataatgatagtgtgtgtacataccagctgaccaggaacacctgcagctcaagataatgaatgtatagcgctggccacaagtgaagtaatttccagtacacggatagatcaccacactctcctttagttgaggtgtaggcacgatataggtgtatcaatgtggacgagcctcgaccgacacaaggttaagcagatctcttgtaggggtccttgccatggctgccaccattgtggcgatggaattctcctgtgttgccccctttgctgttccgcccagttccaaaggccttctgctcagcttccctcgctttgttgttcttctcacggtacccagccgtagcccaagtatcctctgccttcttcgctcgagatggcggtgctccgtgtggtccaagatatatgttctctgtatctttgctgggctttggaggtggttgaggatcggtagcccgtgaagcttcccagtcaccgatatcagattcttcaacactaaaacttgggatcacaaagtcatcattatcccagtcatcggcatcgtcggcgtcggacgcggcggggccggtcagccggtgcggatccatcaggcgcaaacggacatcgaactcctgacgcggatgggcgcgagagcccgggtccgctacttcaagggctccggcggcgtcggtgggggtgagggggctgaggttaggcggccgccggccacggaatcaggatgaggaaggcgggtgcgctgtgtctggaggagcagatgcggcgaggcaaggtcggaagaacaaaacaaagcaagagatgatgagaaggaactcccgcccctgcgcgccgcgaggtaccc

SEQ ID NO: 134360 - DNA, 392 bp, Zea mays
  Clone ID: MRT4577_54020C.1
tgaagaggaagactatcacccagggacaagggagcagtagcatctgccgtcgctatgttccaccccagggtacaccagctcgtcctggaggagggcaactgtcctaccaacgacctgctctgcatataccacaggcgactccgcatactcgccaggctgcccccactggcaccccaacgagacctactggccagggtactactacagtcaccacttgcttcaagtgtggtgaggttgggcactacgccaatgcttgtccgaagaggaatcccaacacacccgctcgaagcaatgtttaaagcaagcaacagactctggctaccggccaggggtccaataatgctagagtcaaccaaattagtgctgatgctactgttgacgatgatgatatt

SEQ ID NO: 134361 - DNA, 1229 bp, Zea mays
  Clone ID: MRT4577_54021C.1
taccctcgaggccggccgggatctacgtcgcctcaaaaaaaactcctgggagttcgagctgccaccgtctctccttcctccgtcccctcttccctgctctgctccatcagggcaggggcttgcatcagagaaggtagtagagaggatcaggtgcgcgagacagacgctgcaatgatggagtccaaggcagcaattattcttgccgcggctgtactggccgtcctcttcgccccggcattgggtcagaagagcagccccgccggcgccggcgcccatgtcgctgccgccgaccccggcaccggcgccggcgccgcactacgtggacctcgcggagctcctgagcgtggcgggcccgttccacacgttcctcaactacctggagaagagcaacgtgatcgagaccttccaggggcaggccaacaacaccaaggtgggcatcaccgtgttcgtgcccaaggactcggcgttctcggcgctgaagcagtccaccttctccaacctcaccgccgaccagctgaagacgctgctgctgtaccacgcgttgcccaagttctactccctggccgagttcaagaacctgagctcgctcaacccggtgaacaccttcgccgggtcgccctacacgctcaacctcaccgacgacatgggcagcatctacgtgcagtccatgtggtccaggcccaagatcgccagcagcgtgtacgccaccaggcccgtcgccgtctacgcgctcaacaaggtgctcctgcccatgcagctcttcagcaaggacccgccgctggcgccggtgcccgcgcccgccccggagcccggcgcgtccgacgcccccggcccggcggccggcaaggccggcgggctgacgggcggcaagggtgactccaccagcgccgcgcgcgacacgggcgccgtcggcgttgccagttccttgctgctcgccgccgcagcaggctgcttgattctccagtggtgaggagacttgtggttgtgggtccgttcttgccatgtgtggtgttcgtgcttcccctgccccccacacttgatttcgtcttgaatgggttgctggagtcattcttttggacataatgtaggcataccgttaggatcgagctggagtactttttttacgtcacgttacattactgtcataatttccatcattttttgatggacggatgattgaacgaatgaatacgagaagaagttttcactgcttaagggagaaagaagaa

SEQ ID NO: 134362 - DNA, 2300 bp, Zea mays
  Clone ID: MRT4577_54022C.1
ttgggtacctcgaggccggccgggacagcaaacgttcctctcctcttccatcgtcgtcctcgctcccggccccgcctgtctagtcccctcttctcgcgtgcaccccctgtactgtacgtgctaggcacacagctagctgcagccacagcagggcacagcaaatggtttccggtgcgggtcatggtgggtacggcggcggcgacgacgggcaggccgtggacttccggggcaacccggcggacaagtcgaggaccggaggctggctgggcgccgggctgatcctgggcacggagctggcggagcgtgtgtgcgtgatgggcatctcgatgaacctggtgacgtacctcgtcggcgagctgcacctctccaactccaagtccgccaccgtggtgaccaacttcatgggcacgctcaacctgctcgccctcgtcggcggcttcctcgccgacgccaagctcggccgctacctcaccatcgccatctccgccacaatcgccgccacgggcgtgagcttgctgacggtggacacgacggtgccgagcatgcgtccaccggcgtgcctggacgcccgcgggccgcgcgcgcacgagtgcgtgccggcgcgcggcgggcagctggcgcttctgtacgcggcgctgtacacggtggcggcgggggccggcgggctcaaggcgaacgtgtccgggttcgggtcggaccagttcgacgggcgcgacccgcgggaggagcgcgccatggtgttcttcttcaaccgcttctacttctgcgtcagcctggggtcgctgttcgcggtcaccgtgctggtgtacgtgcaggacaacgtggggcggggctggggctacggcgtgtccgcagtcgccatggcgctcgccgtcgccgtgctcgtggccggcacgccccggtacaggtaccgccgcccgcagggcagcccgctgacggcggtcggccgggtgctcgccgcggcgtggaggaagcgccggctgccgctgcccgccgacgccgccgagctccacgggttcgccgcggccaaggtcgcccacactgacaggctcaggtggcttgacaaggccgcgatcgtggaggccgagctggcggggaagcagcgggcgagcgcggcggcagcgtcgacggtgacggaggtcgaggaggtgaagatggtggcgaagctgctgcccatctggttcacgtgcatcctcttctggacggtctactcccagatgaccaccttctcggtggagcaggccacgcgcatggaccgccacctccgcccgggctccggcgccggcgccggcggcttcgccgtcccggccggctccttctccgtcttcctattcctctccatcctgctcttcacctcgctcaacgagcgcctcctcgtgccgctggccgcccgcctcacgggccgcccgcaggggctcacctcgctgcagcgcgtcggggccgggctcgcgctctccgtcgccgccatggccgtctccgcgctcgtagagaggaagcggcgcgacgcggccaacgggccggaccacgtcgccgtcagcgccttctggctcgtcccgcagtacttcctcgtcggcgccggcgaggccttcgcctacgtgggccagctggagttcttcatccgcgaggcgcccgagcggatgaagtccatgagcaccggcctcttcctcgtcacgctctccatgggcttcttcctcagcagcttcctcgtcttcgccgtcgacgccgccaccgcgggcgcgtggatccggaacaacctcgaccgcggcaggctcgacctcttctactggatgctggccctgctcggcgtcgccaacttcgccgtcttcgtcgtcttcgccaggcggcaccagtacaaggccaccagcttgccggcgtcggtggcgcccgacggcaccgggcacaaggagatggacgacttcgtcgcagtcacggaggccgtggaaggagtggacgtgtagggcgcgcatgtcaggctcacacttcatcggtgggtggcctctgctgtttaattttgcctttgggtagtgtgtatgtgtatggcgaagttttctttctcttgccagtttccagtttgctgctacttcggcctgctctcctgtaaataacataggagacatgctaattgaggccaagtctttatccagttagatcaacaagatattgaattgggcatgaaggctgaacaccatgtgtgtgcattacagtacccaacccaaactctaacatagcatcgttataatggctgcgttgtaatgtggcgttaggccatgttcactctaatactacctcaatcccaaaat

SEQ ID NO: 134363 - DNA, 251 bp, Zea mays
  Clone ID: MRT4577_54023C.1
ggggggggttgttttttttttttttttttttttgttttttttaatattgacatttgcgaatttattactttcaaaattaataaatacaatttttacgtatcatttatgtagcgttaaatggggaagaaacatagaaaaatgaaaaagaatggggggggggaatttgttaacactgttgttttaggggacggaatttagaggacgctgttggggacggggaatatttagaggacagaattttttagaggggt

SEQ ID NO: 134364 - DNA, 537 bp, Zea mays
  Clone ID: MRT4577_54024C.1
ccctcagatttttttttttttttttttttttttttttttttttttttttaatttttatttatgtgggggtctttggttcttatactattgggaaccaaatgggggcaccgacaaagggcagccacggggcagcccggcaccggaaaggcaaagaaccaaaaaagccccgccgagacacaggaggcggccaaaacaagaggacaaacacagggcaggcacccggggggaaacaacggggccaaaaccggagaaaaaccggagcacaaaacggcacagacagcagaagggctgcacgcaaaaagcaccccaaacaatggccacccggagggcaccacaagggggccagagggggccagcacaaaaccccccctgacaacacgcggccgggagccggaggggggccgccaaaaaaatcccgaaaaacccccgaacccacggggaccaaacacccgccaaaaccgggccgccagggcacggggaggacaaggccgggaggggccgaaaaaccgcggaaacccgggggaccccccccccccg

SEQ ID NO: 134365 - DNA, 172 bp, Zea mays
  Clone ID: MRT4577_54025C.1
gaccacgcgcccgcgacccgtgtggtcgtccaacttgaagacaaccatttttcacaagcgtgagcttactggggactgcccatttcttagcaaacagccacattctccatgctgtcgcagaactccacaaatattgtggggggcttatggaaaccacacgtagagatgcttc

SEQ ID NO: 134366 - DNA, 839 bp, Zea mays
  Clone ID: MRT4577_54026C.1
ccggcccggaagtctccattttccttacgcaccttatcttccttatcctctccagccgcgcgtgcccaggtgcactcgtttctctctgcctctcgcgctgggctcccggtcttgccggcggccaagttctccagccaagctcctccctgcggcagccaccacatgggcgctcatctccctactccatggcggcacctcctactccgtggtagcgagctcgcccctgtattcctgctcgcccagccctcctctgctgatagccggtggccgccgacgtcgatttcagctccctggacgtgcgcccctgatccccatgtcccagctcctccccacctcctagatggtcggcgccatccccagcgctccctgctccagcacgtctccatggccgtcaagtccctcccatggtcgagcacgtccctgcgttccgatgttggacaccggactgcgctgctcgtcctcaacctcgctgatgctattttcctggtgcatgtcctcgccctaggccattgaacaacaacagccatgaagcccttcgtgtcgcgccctcgacgtgttcgacagaatattacagtgtgctacacccgatctgtgcagccctatcgcgacctcgtcgaaccccgatgaggacccgttttccctatgttcattcctcgccagtactaatacccaaaatcaagttattagatgctaatgtatgtatatgtgtgtgtgcaatgtgcgagatgtgaggaatttcatattggtgaggccaggcaagccgtgcgacaagtgctagatgttcgatgaaatgattgaatcggagagtgtcactgtttgtgtggattatcaagttaggc

SEQ ID NO: 134367 - DNA, 305 bp, Zea mays
  Clone ID: MRT4577_54027C.1
aggaatccgtcccttttttttttcaggaaaggggcacaggttttaattttaaacaacaaacttattcatgatttggcatagttttggggaggacccacacacaaaaaaaccggttcttttttaaaccaacattgacccgatttatgacacgaacaggaaattctttgacaacctccatatggggggggccccaaacgacccaggcccattgggggtttatacgacccatgatttactgacccccccggggaccgagcccaagggggggggggctttccttttggaagttgaaaactgctaggggg

SEQ ID NO: 134368 - DNA, 338 bp, Zea mays
  Clone ID: MRT4577_54028C.1
ccacgcattcgtccagaagctgcaagcaacatagaaagtagtatccattagcaacaatagatcatcaagggggaacattaatatgcacgtgcggataacccgatactgttaccatattgccacaatgctcacatgctcctatagcttcccttcttcccccgtacctatcaccagcggtgtcttcggtatgtgaaaacccaattctttaaccctataagatccaacaggcaatcgcagcttgcatcttaccttcatcacccttgatccttcaacaatcatcagccctattacagcatttacctttggtgcatttattggcacaaaacattcaggcacaa

SEQ ID NO: 134369 - DNA, 182 bp, Zea mays
  Clone ID: MRT4577_5402C.1
ctcccgtctcgaccgcacgcgtccgatccgccacatgttcaagacccagtacgcttgttgagagatagatttcctcgtaaatagcggtggttatatcgcacggccagtgctatcatactatctacactgcatcatctattctgagaataactgcaatctttacccctgatactctacattca

SEQ ID NO: 134370 - DNA, 273 bp, Zea mays
  Clone ID: MRT4577_54030C.1
gacgcgcatgccagtcctggcaacatgctagtgagctgataatagcaaccacgaccaacacggccagaggtccacaggcagagaacgacggaacgctacgcgcgcgacgcaaaggccagcaggacgcgaactggcagagtcgagctagggagcttcgacgtgggcgccgcgagcagaggaacatggatgcgactgggaactggactcaatccgagcagaggaaatgacgcttggtgaagggagcggcgagggcacggcgagcggacccgtggg

SEQ ID NO: 134371 - DNA, 340 bp, Zea mays
  Clone ID: MRT4577_54031C.1
aaaaaaccatggtttggtttttttatttttaaaaaaacactttggggctttttggttcaaaaaaatgtaaggggttttttttacaacagtaactttttactttggagcgtttttttttaaaccaaaaaatattttttttccttgaaccaaaaaatccaagtaatagttttttttttaaaatttacagggttttgggataacgtttacattaccttttaaaatttaaaaaccaaacggttcctagggttaaatccctaaggctctttataaagggtccaggtattttggggccattttaaattccagggggatttcgggttcaataaaaaacttttttttt

SEQ ID NO: 134372 - DNA, 337 bp, Zea mays
  Clone ID: MRT4577_54032C.1
tacgtgtactggatcactgtggtttgttaggtttgcgacatcgcgtttttagcagcacttcgtgtcggatgtgttggctacgtggattaagcagctgcggcttaattttgatggtttagctgctgtcttagtggagctgtatcgtcatattttgagctgtgaatgctggttgcattagaatggttatatacaagcaccattgttgagctgtgagggctggttgcattagaatggttatgtgcaagcacaattgttaccatggattgtggtattttggtgatctttcttcaacaaagaaaaaattggtgtcaaaaaaaaaaaaaaaaaagcggccctg

SEQ ID NO: 134373 - DNA, 284 bp, Zea mays
  Clone ID: MRT4577_54033C.1
agctcggaattcggctcgagccactttccaccaaatttctttgcacccaaagccctctgacacacgagtgggttttttaaaaatcagaggtgtttaacaacccactcccgcacatacaatacatccaaagtacgagaatccagaaactgacaccactacaacaccagccacgcctcgaaacatatacactaatacaacatggccctggtgcacttcatcacgacctacaccaacacatacatagacacctacggccattaaacggacgaccccctgctagccta

SEQ ID NO: 134374 - DNA, 480 bp, Zea mays
  unsure (1)..(480): unsure at all n locations
  Clone ID: MRT4577_54034C.1
acgcctnntccgcggttccgccggagccgcccatagtaatcatcgccgccacctcctctcccggcgtggagtggaagagaacccgtccgcactcataggctggttttgttcggtgggagggcaacttgagtctaagatattcaggtattgctagagatgttgggtcatggtctagcaaccgatccctctagtactttgcgtacggtcctcaagggtatgaagtgcaccgttgttgtttttttgttcgttgagttttgacaggggattcaaggaaaagaacaatatnttcatccccgcccctagatgcatgaagtacagtactttctgttatgcaccaataaatcccaataacaaaaaaaaagaaactgcatcgtttggggacatggctgattcttcaatttttacctttcccagaatccatgtgagggagccgtattagcgcctcggaatcagcagggaagcattggaagaagaaattcc

SEQ ID NO: 134375 - DNA, 298 bp, Zea mays
  Clone ID: MRT4577_54035C.1
ttttaacaatttttcatttgtacaatactatgacaaaaacggcgcccggttagccaccaacgtccgcgcggcgggtaatggtggcgatacaagaccgacctctctccatggtcatccttcttcgtatccaaataaaactccatatccaaagaaatacagcttcactaattacactcctccgttaacaatacatcaatctgatacatcaaccaactcatgccaaccatattgcaatgagtatgaccttagtccatctccccttaacggggttgctgtcgctctaagacggacgcgtggg

SEQ ID NO: 134376 - DNA, 898 bp, Zea mays
  Clone ID: MRT4577_54036C.1
tgggctgaactgccagcaggtgccaccgccatttctgctctgctctcgcacgcaagcacacgcccggccgcctgccacagttcccatggcgaccatagccacgatggcgctgctgaagcccgcccccaccgggtgagcgagatctctgaaattccagtgatttaggagttattgatttcgggcttccagcacattattctatcatatatggacatatttgattgcacagacaggttcactgacaaacatgtacagatcttaactattcaaccggttaatctgaattcagaaacaaggaaggatgctagttttacccctgatctggccatagccaacttcagaatatttcacaattcgttcttcgatcattgaatttaaattgtaccttgcgctcttgcagggaattttagcatgtattgaatcttttgttaataggatagcgttgtgcaacttgatggtacgttttgctaacgttctatgaacacgtacatctgcatgcatacaaaacaggttatattttttcttgttttgtactgtcctgagtcatgacatgactcatggaccaagtgtacatccatccaccaaatagtattttaagtttccattttggcaggtttccgggaccattcactctacaaggggcaccaggttttcctgtacaagagagcccagatctttgttgctgatttgtggggcgccttcaagggacaaaactatggcgagttccacgatatcaattccatcaccatatttgctgactacattgttccagcggtcctgagggagcttggagtacttaaatatggctcgaatctatcttgctccatcgactcgaacagtgagatagtgcctggaagcgaggaggaagtggagatacgcgcgtgctccatctatgcag

SEQ ID NO: 134377 - DNA, 165 bp, Zea mays
  Clone ID: MRT4577_54037C.1
ggataataaccggataaggggcatgcaatgcacgcccaggtggccgtgctcctcgccgccgggcccctccgccaccgtggccgcctcacccctcgtggcaccatcgccagatcccttgccgtcggcctttcaagccgccccactctctgcgcaaaggcggcggcg

SEQ ID NO: 134378 - DNA, 563 bp, Zea mays
  Clone ID: MRT4577_54038C.1
cattgggtacctcgaggccggccgggacatcgttttactacccctgatctcgaatcgttgttcccgtgtcggaggccagttggcctcttcggcctgtcgcgggcatagctcgtctctgcgtcgctacagctatcccgtcaacaatgcaccccacgtacgacggcgaaaccatctggcgcccctcctgggggggccaaagaacgacataactcacatcagctgcctcgggatcgctgcccacttgcaccaagtgaccacctgtcctgcaagatcaccttaatgagtgaggacgctctgctggcagacacgtgccgagaagttaccgctcatctccaagatgtgtaactcactcactctgctcgtgcaattgagcttcgacaactgatgtcgactcactcatgcgtacaaattccctctcacacagaatcacgcgataccgcagcaaagaacatacgaccagtaggacacccaagggtccggcatcgtgatactcccgctttggctcccactttcaataatgtccctgcccctgactagaatcacgaacaccgaccctcaatctg

SEQ ID NO: 134379 - DNA, 207 bp, Zea mays
  Clone ID: MRT4577_54039C.1
cttttattgtatatgtttgctgttaggttatttctctacgggataggatattgtgtttcgcttatttaatcacgttcggtacgtagacttgttaggtgttcgaggaattgtcggaattagaaatcgttgctgttaacgggtgttgagtgaaatatggtcgcaatgagccgtgtcgtttttgctgctattagaattgatgaatggatg

SEQ ID NO: 134380 - DNA, 204 bp, Zea mays
  Clone ID: MRT4577_5403C.1
tctttgaccttgtttattgatcgccccaatgcttctgtcacgctgagagcctgatagagagggcatgaacacaccgtgaatgcggtcggtgccagcatgtctgtgcgaatcaaggcgtctgtagacctattcgcgaaagaactgcatgaggcgctggacgctgacattatagaccttgttatgtaagaactcgagatgcatatc

SEQ ID NO: 134381 - DNA, 384 bp, Zea mays
  Clone ID: MRT4577_54040C.1
aaaaaaaaccgttataaggaaacctttaaacacaaacatgcaagggacgttgaaaaggtccaaagcatgccgttacacccttaaggggggggccctaaaaggggggggggggtacataaagggatgggccttactttcagagtttgggcagggacatgtttttttccgggttttttttaataaccttggccactgccattttgaagtccttctgggtaacgggcaccctttttttaggggggggaaacattccagcctttgtacaaacgggcttgggcttagtttctggggccccattaattttttttgggatctttttcagatcgataccacccatcaagttcattttccttgaaggggtctttaaaatattgaaacgggggt

SEQ ID NO: 134382 - DNA, 401 bp, Zea mays
  Clone ID: MRT4577_54041C.1
catccatcattttagctggtggatccaagagaagggaatggcccgagataaccctagaagcccgatgaacttatggggccaaccaaccaaagaattatgcccaaggtcaatggaatttttcccggggagggagccaattttccttaccagggctttattgggttgggcccgaaagaagttattcaacccttgccccaccattaagggatttttcaacccggtgctgccaccgaaaaaaaaggtcccgaactttgggttttacaaagagctaaaacttaggaccagttcattaaccttcgcattccccatggccaacttgtccttgtgggcctcaagaaccccggccggggttggttggaagttcgccagggacgggaaccccaacttcttggggaacaacc

SEQ ID NO: 134383 - DNA, 176 bp, Zea mays
  Clone ID: MRT4577_54042C.1
aatgctgggggcccaccacattctcatggcatggcaggttttaccgaagcatctgaatgagggttaaattatgcctaatacatcatcataggagtccttcatcatcttaaaacaaaaaatacacggtaaaaatatttgtcggaccaaaaaaaaatcctcgaatagattatagggtc

SEQ ID NO: 134384 - DNA, 546 bp, Zea mays
  Clone ID: MRT4577_54043C.1
ccggccgggattgaactttcttactttcgatacgctcaccgcacatctccccacaaaatcgacagttctcttttcacctgtaaatcccatattcaacttccctgacgatctatcggatgcacacctctgctaggcaccacatggctctcaatgaggccaagcgacataatccaagacctccccggctcgacctatctctcctaaaggacaaggataccgctctctcccaccccggcctctgatacagcataacttactgtcctctctgcacccgagtgaaacgactggtaccacagatgcaagaaagataccagggtaatgatccgcatgagcaaagagaagaagctcgacctgctaccacaatctcgatgaatggaatgttgacaaaactgatcgcaacgtcttggtgaaaggtgagcgcaatgacgctggtgacaaaaacaagcctatgaacgacgatactgaggtgtggaatctgcacaacgacggtgaactcattgttgctggcaacgatactgcaactacgaccagtccgtgtctgaagac

SEQ ID NO: 134385 - DNA, 511 bp, Zea mays
  Clone ID: MRT4577_54044C.1
ggggggtgtgggtgttttttatatattttttttttgtttttttttttttttttttttttttttttttttttttttttttttggccgcaaccgcgcaaattattgggttttaaaggacaataagacagtaaagtttccatcgggtcacacaggggggcgaggggggggccaacacacgggttcaagcctttaacaggggggttggggaatctaccaaacctgggggggggtctacagcacaagggggcattgggggtcaacaggataagcatgaattgcatttgataaagcctgaaacacccttttagccgggggccttaagctcggcgagggggggaaaaagggcatcctcggcgactttttccttatccttggcggcagggatggcttgcgcggtttcctggggcaaaccgacggaaaccttaagcccgtaatcgtccccaacctggtgaatgaggctgttgacctctttctccgccctggaaagggagggggagccggccatggccccc

SEQ ID NO: 134386 - DNA, 307 bp, Zea mays
  unsure (1)..(307): unsure at all n locations
  Clone ID: MRT4577_54045C.1
gacccagcggccgaagaaancgcggaccncaagacacaggcggggggggaagaacnggaaagagaaaacaagagaccggccacgcaaaagagnngaagggagcnaanaannaagacnggaagcnnggcaannnccaagccaagagaagaacgaagggcnnagngcagcnaacgacgangggnagacaggnaacagaggaggaaggaggcaggcnaaacaaaaaaaagaaaaaaaaagcaaaaaagaaagaaagaaagaagagaaagaaaaaaaaaaaagaaaaaaggaggagggacaaggaaagaaa

SEQ ID NO: 134387 - DNA, 292 bp, Zea mays
  Clone ID: MRT4577_54046C.1
ggaagaagcatgggggcattcacatggtcttgcatatgattgaagcggatctgtgtgaaacatcctctctctctctctctctctctctgatcccatccagagagacatggtatggtagtaggtaggtagccttgtttcctgcttcaggcttttctttcttctttgtctgttcctagtgaaaggaaacttagggcatgtttctgcactccagccgcatgagaagaaggtcgttgtggttggttctcttttagcttatatattttaatcatgagatgaaggatgtactgttatt

SEQ ID NO: 134388 - DNA, 410 bp, Zea mays
  Clone ID: MRT4577_54047C.1
cacgtcctcgcctaaatccacacgcacctgatgggatctatagctgccctggcgcagtccaagtctcgcccatggaaggaatcgtcgctggaagaaatcctcgccaaaatccacgctggatgggatctgtgtgggcaccgtgggtcgcctaaatcgatgccgcaccattggcaccttccatcctcgacgccttccatccatggatggaaatcgtcctttccatcggcggcgcccttcttctccccacacagcgccctgcctccccatccttctctgcatcccatctgcggtgcagccatacgcgctcacggtagagcaccgacgggggatccgacgcctgctcctgcatccctgcagagaggcctcctcgtcctcgcccttggcggcaccgtgaggtatggctacattcg

SEQ ID NO: 134389 - DNA, 314 bp, Zea mays
  Clone ID: MRT4577_54048C.1
gggacttgtaaatgttgggcgattgattaagctgggctttcaaggtatcatttgcgggcgctatttgagttcagggaacaactcatttttcttcaggagaggcaggtgcacacatctacttttttttttcaaatgaaacatatgaccttaaatttgaaggattatctactatctagtgaaacataaactctcatgaatgtaaatgaaaagggataacctcacatttgtcacacacacatacgtaggcataaaatattgctaaacttagaagacatatggatgattgaattcattactttattttttacaagaca

SEQ ID NO: 134390 - DNA, 435 bp, Zea mays
  unsure (1)..(435): unsure at all n locations
  Clone ID: MRT4577_54049C.1
aatcaataaaatatgagtatagcaaaatatagacatagtgggtactacatacttttgctagaaacgtagacaactcaacatgaaagatacataatggttccttacagttttaaggtcctcagacctaaacgagatacaatcacaggcaaccaccatctgaatgcttcaaaggttgacggataaagcataattgggcaagcaatcacgccttctggtatgtagacataggtgaggacgcacttgccgcagtagtggtgtgcgacgtgctcgggcatgaagacgcccgagccgcactctgtgtggggacactccttggggaggcgggtcacctttccagcggcgnctttcacnntatagagcggaagtaggtagaggcttcaccttcttgggcttgggcttgatcttcttgggctttggggaacgtcttttcccggg

SEQ ID NO: 134391 - DNA, 878 bp, Zea mays
  unsure (1)..(878): unsure at all n locations
  Clone ID: MRT4577_5404C.1
ggccggccgggccgnacgcaatcgcgtcccaccgccgctgcacaagacgaggaagaggttcccggtaccggcgccgccactatgtcgtcgatgatgaacgcgctgtcaaactggctggtgaacccgcgccgcaacccgctcgcgcgcctccacatgaacgccgtctcctcgcgcctcaggaaatacgggctgaggtacgatgacctgtacgacccctatttcgacctggacatcaaggaggcgctcgggaggctgcctagggaggtggtcgacgcccgcatccagcgcctcaagcgcgccatggacctctccatgaagcatcagtacctccccgaggacctccaggcacagcaggtcccattcagaggatatttgagtgacatgttggctctggtgaaaaaggaaagcgctgagcgtgaagcactgggagcccttccactttaccagagaacgcttccctaaattgctggctaaacatggctgcaagtcttctctttacgccaaatcagaatgcatgcaataaaatgcagtgggtattttgttccaaccaaagttccattttacttgtccaccagtggtgcatggaccatgcgctctagctgttttttttccttccgattaatgggagcaaatttgtgtaacactatacttgtgaatcttcagctgcgggtggctgacgtagtgttctttgatcgtgaattttttttgtatccattgatctttttttcgaggttgacaccggctctacggccttgtattaagaactagctcagttgaatgacgagatgctgcagctagtgcaacatttttttaaagtttgagaacgtatccgcacaaaaaaaaaaaaaaaaggcccctaggncctcgagctcagcttt

SEQ ID NO: 134392 - DNA, 645 bp, Zea mays
  Clone ID: MRT4577_54050C.1
aaaaatgcaggtttcattcacatctagggcaccatgcaagctactctttctctagctattgtaccacacacatgaatcacacacagatacagtagttactctaatactatgcctttgatgaataatgcctgtcgatagtgtgaatgtggtggttcccctttgctagctagctagctactttccccctttgctggggttgatttatgccttaaggtgtcaaatcaaatcttgcagcaggatagcccatatatatgcacgcacgcacgcacgatgtatctatcctcctgaaaaacgcaaatcttatgattcgccaaagagattcccctattttgtactgcgagttgcttgcttcaaatgtagttcgtagatacgctggtagatagatatgctttgcctggcctataaactgatcctttgccatgttgctgcgtgtgtgctgcatgcagatgtacaggaccgtgaagaacaccgaaaggccggcagcttcgtcagatctagctgatgggttcgagaacgggtcagcaggcgagatctgcgacgacaactcgctcgatctgcacggcgccggcaggccggagtcggcggcggctcggcatggaaggttagctgcctgtaacgatcatgggagcagcaccggtgctcatg

SEQ ID NO: 134393 - DNA, 713 bp, Zea mays
  unsure (1)..(713): unsure at all n locations
  Clone ID: MRT4577_54051C.1
agcgcgcagccgcgctcctgtgtccggccgcttgcgccccagcccttaacgccggcgctcggtccctgcaacagctcctgctcgccatggctgactcgtcgtatctcgcgcgtccctgcgtcctctccatctcccctgcaagcaaccgagttccactctgcccacccatggctcctggccgtcactgcctctgcttccctgcgcgacctggggaggtccctcccatggcacggcagtctccctcttccctggccgcacgagctccctctcccatgtgctcagcttcaacaagacacggattcccggatggatggccgcgttctgtcttccccagccacgcctgctccctgcccagcgctcggcttcgagctcgcccatagctgcgcgcggcgttcttgtcgatactgtaccgttgccgttgctgtggagctcgccttactcttcgcgtcgccgttcgtcgagctcatccaacactcgcttcgtcgtggctgttagacggctgtttatcttgctatcgcagcttctctgtcacggctgatcttggtttcctccattcctccgtgccgccgaccgtcgaccttgtcgttgcctcacatcgctcggcagctcggccgctcgttcctctccgctgctcgccggccgaagctcccttagctcgctcctctagccgngccctcccgcgcccagccccagtgccgcggttgtccaactcg

SEQ ID NO: 134394 - DNA, 423 bp, Zea mays
  Clone ID: MRT4577_54052C.1
cccttacacttcgatcgcgccgtcttctacgccgccggtactacacacacatgggtttatttcttgtcggcaagatgacgaaactcacttagaaggcatgaatcgttggcaaatatggaaccaggtatggtgctagcttgcgtaagcaaatcaagaagatggagggatatcactattccaagtacttcctcgagttctggggcaagtttactatgaagaggaaagcagttggaatttgggggttgcatggactggagggaaggtgaagagctgggggtgcttacaccatgaacactgctagtgcggtcaccggaaggagcactatccgtcggcctaaggagcagactgaagcatgatatagccctttatattattgagggtttcgggaggtgctcttggaagggaagtgggggaaccttatct

SEQ ID NO: 134395 - DNA, 621 bp, Zea mays
  Clone ID: MRT4577_54053C.1
catttggagagagtttgttcccgttaggaaacaagaagaagttttttccccggggataggaagtctagagcttgaggaggttggttcggaagaagaacaccggccggatgtacttggaaggcaaggaccaccacatgtaggtctccaccagggctgtcacgaagtcggcggagactatcggtgtcgatgatgaagctcgacaggtacagtgccgtccaagatgtgctgctctagatccgcaagtactacaacaatgcgaagttgctgattcggaagctgcccttacagcgcttgtttgtttcgagctcgcatctggacttgaagaaagaccttcgggtccagagtgcacgccgatgtgtggcgctcgaggaggtgcgcggaggcctacctctgtctgtatcttcgaggacacctacctctgcgtcttccatggtgctgtgcgtcgctatcatgccccatgacatccagctcgcccgccgaatccgtggcgagcgagcttatccttcatctccggggatctgctgaatgtctagttaccaaacaaatacgctgcattactgtccttgttctttaatcgatatttgggattatggtgcagtgaaaaacggtttttctaatcat

SEQ ID NO: 134396 - DNA, 726 bp, Zea mays
  unsure (1)..(726): unsure at all n locations
  Clone ID: MRT4577_54054C.1
agtagcgcgcagccgcgctcctctgtccggccgctctcgccccagcccttaacgccggcgctcggtccctgcaacagctcctgctcgccatggctgactcgtcgtatctcgcgcgtccctgcgtcctctccatctcccctgcaagcaaccgagttccactctgcccacccatggcgcctggccgtcactgcctctgcttccctgcgcgacctgccgaagtccctcacatggcacggcagtctccctcttccctggccgcacgagctcaatgccctccctggccgtgccgagctccctcagtccctctcccatgtgctcagcttcaacaagacacggattcccggatggatggccgcgttctgtcttccccagccacgcctgctccctgcccagcgctcggcttcgagctcgcccatagctgcgcgcggcgttcttgtcgatactgtaccgttgccgttgctgtggagctcgccttactcttcgcgtcgccgttcgtcgagctcatccaacactcgcttcgtcgtggctgttagacggctgtttatcttgctatcgcagcttctctgtcacggctgaccttggtttcctccattcctccgtgccgccgaccgtcgaccttgtcgttgcctctcatcgctcggcagctcggccgctcgttcctctccgctgctcgccggncgaagctcccttagctcgctcctctagncgcgtcctcccgcgcccagc

SEQ ID NO: 134397 - DNA, 326 bp, Zea mays
  Clone ID: MRT4577_54055C.1
aaaatataatgatttgtgatttccatttatggtagatcagaccgccggcaatttaaatatatggcaagcacatgtacattgttgggccgccttcattgcattgccttacaaagtattaataatacctccctacaatgagttagttggagatttatttatagaataaatatagtagcgacaaccacagtgtttgatataacgccatggggaagttgagttgtacatactaagggttaacacgaagatgaaatctaattatacaacattcactcactcggggagcttgaatatatggcaagtgtagatttgcaatcaattaaataaac

SEQ ID NO: 134398 - DNA, 1473 bp, Zea mays
  Clone ID: MRT4577_54056C.1
ggcccccacccgagttcgtcggggctcgcggccctgcaaacgcacaggtcctctacgcatgacccagccttcgggtagaacaaacatctgcatcgccgaaccaagacgtttcggcccactccgcgcacccacacgggtccacaagccccgagccacatcacgtcgcccctggctggtccacatgtcagtgaaacttgactgctccagcgtctcgccggcaggagcgagtgccctgctgccagactgcccagatggattttccggatgcgcaagcacatgtattcacagtcacaggcagcacagtctcgccacgtgggaccagtctgtgagcgagcagtgatgggacttggaagaggctaaggctttgttcgtttgtatcagattgcacccggaattgttccacctaatcaaagtttatataaattagagaagcaatccggttaagaatcgttccgacccaccaatccggcgcaaacgaacaagccctaatcaaagtttatataaattagagaagcaatccggttaagaatcgttccaacccaccaatcccaaacaaccgaacggcacctaaaagaaatacggacttgtcacgactcacgacaattgtgtcagcaatacgaaattacatagagaagagcgagggtgagtcagaatcattaccagctagggtgtgcacatcccatctactaggtcacttcctcctagaaggcaatgttcccacaggatttggtatatcttttttggcgaaaattacaggcccagttacatcggaaagcatttctccatcctctgattcgctctcagactcggactcttcactaatccatccatagcagggagtccttgcacaaggaggtcccttggctggtggcactggcagtaaaggtgaactgctgggggaagcttgcagttcaagggttgacggaggctcattcggtgcctcaccattcactcgtgagacttccataccgttttgtggtaatgcctcttctgcagcagctgcttcttgtgtctgatcctgctgcgcctgttcttccaggactttaagcacgatactgtatgatccctcctccaggaacacccatccatctctcccgtacagctgaaggaggtcgttgatgaccttgcggatttggggctttgcgaagccgtactgggcgaggtggtcaatggcggcgtcgatccgccgttctcctctctcgggcctcggccgccgcatcgtctcgaccttctgcggtcccatcttccagtgatggcggagggagtgacccttgaatgctccaagctccacgattgaatccagagtcaaaggagtctctggaggcggatcgcacggcaaggagggaagcaggcgaagtgctcaacagatgagtaaaaaggcggtggcgcattgagctctgggcctatgcatcgcgaaaatggtgaaaaccgggtgccggcctggcgcagtgctgcgggccgaataataagata

SEQ ID NO: 134399 - DNA, 340 bp, Zea mays
  unsure (1)..(340): unsure at all n locations
  Clone ID: MRT4577_54057C.1
atggcgccgncctcctgcctcgcctcgccgnctggcgccacgctctgccgcccgcggcggccgaggtgccgcgtggcgtgctcggcggccgacgcctgcgggagcaccttnccgggggggggggggggggcaattcctcntttttgcnncnnncnnncaacangggccgagcggggcgcgnccaancccgccaccgccgcgagccanaganngccnccacncncaacggagccaaaccgaggcgagcgcgcanacgnggggaacacaannggccaggcaaacgggggggacgacaagccccnngagcnccggggcngngagnacacgaacgagaaaacca

SEQ ID NO: 134400 - DNA, 328 bp, Zea mays
  Clone ID: MRT4577_54058C.1
ggcgacccacacgtgcgaacgtgaacaccactactgttaccaaccagttggacgtttacacaactatcatcttcctaggtgcgcgggtagactttgatatggccttagctagaacgatcctcaacaatgccataaatgcacgagcgcagactctggataacccggtgctcgccgcaaccctgaagacagatcccaaacttcactcgatgatctcaacctttgcagccgactctgccgtctcatgcgagtcaaaccgcctagatgttgcctagtttgatcgctacgcccgcaatatactctaatcatggcaagacctccacgactttaa

SEQ ID NO: 134401 - DNA, 1672 bp, Zea mays
  unsure (1)..(1672): unsure at all n locations
  Clone ID: MRT4577_54059C.1
cggccgcgtggggccgccgcggtttcgtcgttgctgtgcgcaccgtgggtccgcgccgcggccggccgggagcgtcctcccctccccgttacaggtcctccccctcctcctcccgggctgctgctgccgcccggccagctgattcaagatgccgaccatcgtctcggtggacctggaatgcagccgctgccgtgccaagatcgagaaggtgctcaacaggatccaagagaagggtgagttctgcatcgacgacatcgacctggacgagaagagcaacaaggtgaaggtgacggggcccttcgacccggacaagctcgccgacaagctgtgctgcaaggcgtgcaagatcatcaagcagatcgagatcgtggagccgccgccgccgccgccggagaagcccaagaaggaggaacccgccccgccgccgccgaagaagaaggaggagccggccccgccgccgccggcgaaggtcgagccgccaccgaaggagaagcccccgccaccagcaccgaaggaggagccaaagcccgccccggcgccggcgccgccgcccaaggtggtggaggtcccctacccgtggccgtacccgtgcccgtacccgtacccggcgtggccgtccgactgctgctgccaccacgggcacggcggctgccactgctgctcctgcggcaaggcccccgaggccccggcgccgcccccgatgccgcagtacgtgccccagccgtacccctgcggcggcggcggcggctaccggatcgtctgcgaggaagacccctcctacgcctgcgccatcatgtgattcattgtcccgttacgcgcccacaacccaccagtgtcagtcatctcgtcatgccgtgccgtgcagtgccatgccgtgcctcccgtataatcgcagtacagattcatcatatacacacacacaacacagcagagagattactacgatccaacagttctagagcaagagagaggaagacacaccgcagagttagcaggctaataacttgcaggagcagcaggaatggcggcgacgcgtcgcctctcttgctttctcctcgccgtgcttctggcaggagtggccgctgccaccgccttcggacgaagcgcgctgctgccggcttcgggcttggccccggcgcgcgtttcgcgcgcaagcatggacgtgctgccgctgatatgccccggccggtgccacaacctaaaactaagccggagccccgtgtgctgccgctgccccggccggttccttggccgtgncctgtgccgcttgcggggccgcggcctgcgcctgaacccgggcccgcccctgggcctcggcccgtgcccgggcctcaaccggggtcccggccggggcctttgcctgctccggggtctgtcctttgcccgggccttggcccgagccttagccccgccctcccgttggccccagcccttgcctgggcgctgtccggggcctgcgcccgcccctccccctgtgccctggggcggggcctgtgcgcgggcccggtgccccggggccccgggcggggcgcggcccccgggttccgggccggcncccccgggccgcggtccgcgggccggtgcccggccgcccgcccgctggcggcccccccccccccgcggggcccccgcccgtgggcccgtccccccgcgcgcgggccccccccccccc

SEQ ID NO: 134402 - DNA, 2784 bp, Zea mays
  unsure (1)..(2784): unsure at all n locations
  Clone ID: MRT4577_5405C.1
actcctaagggcgattgggttcctcgaggccggccgggaatctcaaataactcccccccagaacgagaaccgagaaggacaatcgcgtcccaccgccgctgcacaagacgaggaagaggttcccggtcccggcgccgccactatgtcgtcgatgatgaacgcgctgtcaaactggctggtgaacccgcgccgcaacccgctcgcgcgcctccacatgcacgccgtctcctcgcgcctcaggaaatacgggctgaggtacgatgacctgtacgacccctacttcgacctggacatcaaggaggcgctcgggaggctgcctagggaggtggtcgacgcccgcatccagcgcctcaagcgcgccatggacctctccatgaagcatcagtacctccccgaggacctccaggcacagcaggtcccattcagaggatatttgagtgacatgttggctctggtaagaatctttttacttcattccattggcatttcatatgcctttgaattagagtcactccattcccctttttttaatgcgtgcaagggacctaatctacatgatatgaattatgcttaggagtgtactgcctatcaatcgttgctagatttaatatgggtacaacggacaagtttacagcattgttagttagcatttaagtagggatagacatggaagagtcagggaaaatgtgcattgctgtatattttggactgagtattaagccattgtatcaggtaggtcattaatcactattaccatatcatgtggcatctaattatgaagtttgtctcagcctatatatcatgccttgttcttgtgttgctccatggacttcacttctctcttactgttatttctctagggtttcacttcttttcatgttcactatcatattgatgccttttttacttttgcaaaccaatattcagtgaaagacagagatcgtagcttctaaaaatgcttagacaacttatatatggtgtgcttctaatattatttgtaaataacattgcaacttaacatgatttatttttgtgattctagtagtagaattttaactgcagacatgtgattggatggagataattggatttttgccactcacaatgttgtcttcttgttataattatcactgtgtctatgaattgtgggttcagctgggtctatgaaatgtgggtctgatgacaattttataaacatgtttattgctgatggcaaatatcaaaatctctcgattggatgtgtcactccttaaggaactccttagctcaagctgctgattagcactagagatggcaatagagatggcaacggataaataccttatgggtattgtcatcccatactggtatccaagaataaaacttgtgcttgcagttgggtacaaaatcatgttcgtattcgtgtccatgatgcagataacaggtactcttgggttgcccgtgcccgacatttcataatagattctttattactagacacatacgattctaattattcaatatctaattattcaatagattaaaccaggaataagacaatagataagcaaattatatatggccacaatacaagtaagttgaagttaaaactccatagttcactagcatatcacaatcacaagttcactgcctaatcatattactagcaagttaggatttaagaggcacacaatataattgagccgggtatattttacccacgggtttgcgagttcttggtagcataagaacgtatccgtacccgcaaacccgacgagtacgactttgttcccattaataaaccaatgggtaagcaaattaacctttatccaagccctggtagagtaaaactcgtcgggtttcaggcaacgggtacttattgccatctctaattagcactatgctgcaaagttctttcccatttttattttgcctgaattcatatgagaagtggcttttgtttgacacctggcatttcttgcaggtgaaaaaggaaaacgctgagcgtgaagcactgggagcccttccactctaccagagaacgcttccctaaatcgctggctaaacatggttgcaagtcttctctttacggcaaatcagaatgcatgcaataaaatgcagtgggtgtttttttttggttccaaccaaagttacattttacttgtccacgcagtggtgcattgaccatgcgctctacctgtttttttttcttccgattaatgggagcaaattattgtaacactataattaacttgtgaatcttcagctgcgggtggctgacgtagtgttctttgatcgtgattttttgtatccattgagctttttttcgaggttgacactggctctacggccttgtattaagaactagctcagttgaatgacgagatgctgcagctagtgcaacattttttttccattggtaccgatgctagagttgctgaatgctgaccaacaagaccccaatggcagtggtacaaatgctgtagattcttgaagtcgtccattcgacaggagatctttcgattctgaagcctgaagccctgaaccctgagctgggacagctgattagccactgggtcctgtctctcctgaaaccgtcactgttccaaccttcttgtccgtcggaaatggtagactagtgatgctgtggatcggaggctgctgttgtttgaacttacaattttgataattcgttgtaaattcctgtttgggcagaaacgcaaatagcaggagcatggcagattcatttcctatcagaattgtagtccgtaatggagaagcagtnagatgaataatataaagata

SEQ ID NO: 134403 - DNA, 300 bp, Zea mays
  unsure (1)..(300): unsure at all n locations
  Clone ID: MRT4577_54060C.1
atatataanatcaaaacatgtcatcctggaccaattaatatattgtttcaacaaacaccatctgatcaaccaacatgcatgtgtacacaccttcatttgcacaaaaactgtcgcccaacattcgcagagagatatcaaactgaagaaatctgtttgtttctctcttacacacacaccacacaatacctatgtttggcagccagctcggcctcccttattattgttcaaccaccaccacaagctggatagataataatcatattcatggtcgtcgatcgatgtgatcagcaattgcagggg

SEQ ID NO: 134404 - DNA, 1076 bp, Zea mays
  unsure (1)..(1076): unsure at all n locations
  Clone ID: MRT4577_54061C.1
ccacgcgtccggcaaatttggtgatatctttgacgaagatcacttcattgagtcacttagaaaatatgtaagggttgtaaaagatcttcctgaagatgtttttctgcgattcaaccataataatattactacttttctcaagttgtgatgagttatatgtctaggacatggtagctttttcatgctgtaattatgatggtggctcgacggagaataatgcaatggaaaatgctcgcgaaaggagctggagagggaaattccaccgacctggtcgagtgataaatcctgaggctaaccgaaggaatggtagatgccctttgacacctttggaggttgcaatatttgttcccttgcaatcttgcttttttcctgaattgctgggaattgtgatgagttatatgtctaggacatggtagctttttcatgctgtaattatgatggtggctcgacggagaataatgcaatggaaaatgctcgcgaaaggagctggagagggaaattccaccgacctggtcgagtgataaatcctgaggctaaccgaagaatgggagatgccctttgacacctttggaggtcggaatgatgctgcgaggaatgggatttgacaacactacttccctttatgttgcatccggtaaaatatataacgctgaaaagtacatgactcctcttcgacggttgtttccatttctacaaacaaaacacgctctagttacacctgaggagcttgcacagttcaaggnacctttttccttgattattccagtcctcaaacaaattttagaaagngngcctcccttaatccnggttggaatgcatcaagaaatggnggccaggtatcnaanggntaagttggccttcttanacactctgnagggncattcatcaagacttgcagcacttggactatactanccggcttcanagnngagtgttttgtgatgncacaagggagcaatttcccnnacntttcngatggggcananacgttatatgtatgggnggncatgcaaagccaataaaccngataagcggaanctagttcaactctttgacaatccaaatatcaggtaaca

SEQ ID NO: 134405 - DNA, 579 bp, Zea mays
  unsure (1)..(579): unsure at all n locations
  Clone ID: MRT4577_54062C.1
atttcngcacgagggcatgggggacggaagagagacctatagaggggtcaaaggggcgcgcgcgaaacgcggagcgaagagaagccaagggagggtgttcttcatgatgggcgcatatgcaaccacgtgatacgtcgcagctcaagcgctggggagctctttgcanccgcaggggggggggcggcggttcttcacgtgtggcgcgtgcacgggagcgctcnccgtcctcctgggctcnctgcggctgcggccgccgtggtggggggcgtgtgcggtgtgcgaggcgtacntgacggcgtcntggacagccgagttcnacaacctctgcgactgggacgcgcacctcctgagccgcgcgcccgggcggaccgtgcacgtgcacgtgctgggcaacgtgctcaccgccaacccggccaccgtggaccacatgcgtggcgggcgcttcnacaactaccgcaagggcgcccccttctcgggcatcctcgccgacttcctcgggcgggggatattcaacgtgggcggcgactcctggctcttccancgcaagctcgccgccggcgagctcgcctccccggggct

SEQ ID NO: 134406 - DNA, 158 bp, Zea mays
  Clone ID: MRT4577_54063C.1
gatctgaacgaagggctgagtgaccctatcaaccattacagagcattggcttgactacatacagaggatcagtatatctcgatacacgaaaaagtgtttaagcgggtacaccagacaacggttgctgatagaccctacacttgttctacttaggagtt

SEQ ID NO: 134407 - DNA, 434 bp, Zea mays
  unsure (1)..(434): unsure at all n locations
  Clone ID: MRT4577_54064C.1
gacaaagggcgtccattggagtccagctcaggctgacccgggcgccgtacaggcgcacagggccctgcgctgcgctgcgcctccctccaccgcacacgtnggacgcgcggcgccggagccggcggttcggcttcccctttcagccacattcctcccgccccccacgtcgcgctcgccgacatcaagatccgcgcgcacaagggtccgcgtccgcccggccggccgtacgtgcgtgcgtgcagtccggcgattcgtcttcgcgctgcgggtggtccgtggtcgcggggccggcgctgcgctcggctccaaggccagctagcaaggacgacgacgcgtcggaaacagggaccaaacaatctccggcggcattgacggtttgcccgccatctgtcttgcagcactgtagctagtatttcaattcaatgggtaccatg

SEQ ID NO: 134408 - DNA, 490 bp, Zea mays
  Clone ID: MRT4577_54065C.1
aaaacacggcgcggttgtttataattaaaaaaacccagtacaaaaattccaggcggggggggttttttggttgggaaccaaaaaaaaaccgggacgtaccaggttttaaaaaaggggaaacttttttggggggggcggggatcccctttaaaaagcacagggcctttgaccgggggacccactttgaaaaaaattttggggaaaagcaaaccaaaaccgaccccacatgccaaggtttgtttctttttgatcccccaggggccggccagggaaaaaaccccccttgggaggggaactttaggggggggccctgggctccccgggggggcccccctggggggttgtttcctaaagagaactttgggggaggccgggatttttggcaatgattttgcccaaaaggccttttttttttttgccatggggggtgataaagtttcccccctggggccccggccccggcggggggacggggggaccccgggcggaa

SEQ ID NO: 134409 - DNA, 170 bp, Zea mays
  Clone ID: MRT4577_54066C.1
gcccggggggaattttggttttttaagatgtcgggccggggcaacaaaatgacttctggggcccctagttaaaccaggcatatctaagggattggaaatgcggactttaaattaagaccccaatccactgtaccaatggagaggagggccaaaaaaccataaccgggaca

SEQ ID NO: 134410 - DNA, 314 bp, Zea mays
  Clone ID: MRT4577_54067C.1
gtcaacagggtcaagaaacttgtgctccataaaaagtacacaacagggtgctgcagtcttaatatggccggcgcccaggcaattatatgcatatgctaacccaacgtgctgacaactctcatgcatgacctcaccatattatggccgactaaaagcttcaggtataacgtcaataccaagaggggttaacactgaaacgatactgctggcgacatggttactgctgactgctggcgacactaatccttggggggaatagaagtccaagtgggatacactagggcgcagttgtccacaggatgattttggtaacg

SEQ ID NO: 134411 - DNA, 359 bp, Zea mays
  Clone ID: MRT4577_54068C.1
gcacgcccacgtaagctcggaaatcggctcgaggcgtgtaccagccagctttagctacccagccacgggagacactccaggaaagtcagtctgaacaggaaagcaggatatggaagaaagtccgaactataagcagacacgcgcgtagcgcggaggcagcacacgctgccagggagcgcccgcaatccattcccaaagaaggaaggaaaatcatgacaaaggacaagaccagcacagcagatgcgagaaatagaaagatgacaggacaagaaaaggcggtaaatacccaaaggccagagacacaggcgatgtgactgcactgtgcacgagcaggcacacatgcaacaggaaggcacatc

SEQ ID NO: 134412 - DNA, 1068 bp, Zea mays
  Clone ID: MRT4577_54069C.1
aaagcaatccagccgccaccatcactgctcctccctccttcagtccccactactcttccccgcacgtcccacgcagctggggacgcccaagtactacccgcatcccctcccatttactgagcctctgaaccaggaggaggaggaggaggaggagaagaattgattgctgatccggcgcaaaccaataaattcctcctgccccgccgcgcgcgcgcgagatcatcatggctgctgctgctgctggcgccacgaggagggccgcctcctcgctcgcctcccgctgcctgctctccaggcccgcagcgtcgcccgctgctgtcccctccgcgctccgcagggcagatggagcacgtggattgttgccaggactccttcagaggttcggcactgccgcagcagcagaggagcccatttcgccttctgtccaagtgggcgagacgcagctccttatcaacggcaaattcgttgatgctgcatctggcaagaccttcccgactctggatcctcgcactggggaggtgattgcccgtgtgtctgaaggagatgccgaagaatgttgaccgtgcagttgttgcggcgcgcaaggcattcgatgaagggccatggccaaagatgactgcctatgagagatcccggattcttctgcgatttgctgatttgatagagaagcacaatgacgaaattgctgcactggagacgtgggacaacgggaagccctatgagcaactgccccacatcgaagtgccaatgcttgctcggcttatgcggtactatgcaggctggactgacaagatacatggcctcatcgtaccggctgatggcagttatctctaataagtcttatggttggggcctatatattgtgcaatttggttgcccccttttattttgtttctttttgataagactgttctagcaacggatatgcagagttcattatgaaaatgcatttgttagtgtctttgatggttaagtccctaattgtcatcagtgttgattccctagatttggcgaagaatgtaagggaagagaaagattagagaaaaaaaatttacgagggttttcccc

SEQ ID NO: 134413 - DNA, 445 bp, Zea mays
  unsure (1)..(445): unsure at all n locations
  Clone ID: MRT4577_5406C.1
gggtaccgggccccccctcngagtcgacccagcgtccgctcttcaggcacctccaatactcacctcgcgtggcctgccgatatgccttgccgatccctccttctgaactgactaaaggcaaagctcgcgtctacccacatgcaaggggaggaagctcaatgaggctacttgcacgcctcctatgcagacgccgggtacggataggccttatatattaaacaccccaccaagatccaatccagatccccgtcaactagggcacacgacagccaaacataaggacgccactcgatatatcctgatcataagggtaccaggcgggcatagggctacccaccagtgctctgcggataaggaggataacggtactcacgctccttatccgcaagtatcgttaggagcaagcacaataggaaggaccatgtctaaggacttgtacatgacc

SEQ ID NO: 134414 - DNA, 392 bp, Zea mays
  Clone ID: MRT4577_54070C.1
gaaagttttagtggcctcagcgtgatgttggtccaattgcaaatttttttattcggtgctgattcagtgggaaccagggagtctaatgggtctgggagcattcgagtctgtttggtttaattcagtggaaaccagggagtctaatgggtctgggagcactcgagtctgtctttcttgttcgtttggttttaatcggtaacggcttctactatttctatagtgtttctgtctctttgaattgcagctacagcagtctaaacagtaagtcggctttaatccgaagcgattatagcatgtatcaacttctgaacatttttattccctttttgttttccctctccaatccatataaatgtacgtattggctagtgcaggtagttacagctgctgtt

SEQ ID NO: 134415 - DNA, 343 bp, Zea mays
  Clone ID: MRT4577_54071C.1
gttgttgcaatcttctgacattattgggcacactgacacatacttctaatgcaatacatggcaatttcataaaatcaggcacagcctatgtgtatagtacacagttacaattgtgcatatttatccaacatttggtggaggaggtataccgccaactggcattcaacataagacagcactgcctcactaccaaagtggtcagatagagccctcattctctggagggcgggcctggtcaaaggcattgttccgtgctaattggcacgaagacaaccgaacgcctatacagggagctgcacacttgagctctcaccgaacacgctgatcccgaaggctgtagccg

SEQ ID NO: 134416 - DNA, 237 bp, Zea mays
  Clone ID: MRT4577_54072C.1
cccggaccaaaccaatcggggctaatcgggctcggcagcgacacaggtcaattaatccaaacattggggggaccggggctcaacaccaaccgttgatcgcgtgcggagggggacaaacgtctgcctcatgtcccgcgacagcggggaatatggcgacagcgtctgcagctgggatctgtttctgcggctttacaaagcggctacagcagctgctctggagggaagcggcaccatatc

SEQ ID NO: 134417 - DNA, 466 bp, Zea mays
  Clone ID: MRT4577_54073C.1
caaacccatatcctcgacatcctgacccagcaccctccactcccacaacccactcttataaaacacctttacaacatggactcttcaatcgagaacaagatcaaccgcgcccctgccgccaaagtcggaggcatgagagtcgccgcaccagaccaccccgtccccgttgtccgcaaggagcacgaacgcaagaaggccgactccgaggaggaaagcaacgaggatgagcgtgagctcgagaagacggatcggttcgagcacgagcaacagacccgcatggccgccgctgaacgccaggcaaagatgcagcagaaccagcccaagcacgagcccatcaacaacttccgtcaaaaccagaacatccaggtcaaccagcccatcctgcatacccacagcaagtccggtgccgctgcccagaactaagcaagtataatcactggaacgacgagcgcatgaacctgtattc

SEQ ID NO: 134418 - DNA, 386 bp, Zea mays
  Clone ID: MRT4577_54074C.1
gtgttgctttttttttattttttttttgttttttttccccaaaaaaaaatagcatattattttagtaagattctaattccttaaaaggaagggaaccaaacgggaccttagaaaaaggggaattctatgaaaaaaatgttgcccctaatcaagcggggggaaaaaacccggaaggcttccccctatggtttagggatattcctttttggcgagagggaaatcctactataggtcggtatatcggttatgaccaaaggaaatggagggcgggaatattttgcacgtcggggaatgggaactgtttacccccttgacaattgaaagaaaccctgaaaaaaaaggttgagctcctgagttaatttcccaacctccgcttgccgccttgg

SEQ ID NO: 134419 - DNA, 434 bp, Zea mays
  Clone ID: MRT4577_54075C.1
cccacgcgtccgatcccccgctctcccgcctaccgtcaggcccaggcgccagcctccaaagtgcaaacccagctagaggtgaggggtagcatggagtccgccgccccgtgcccgcgcgcgcacgcgcaccccgtggacctccgctggctgctctccgtcgccgccggcggcctcttcgcgctgctgctggtgctgctggccacctccccgtcgttccggctcgcctccacctcgccctcaccccgcctattcctcggccccgcgtccggctcctcccgggcgcgcccaccactcttcgtcgagcccgccctgtcccgcccggcggcgccgtccccgcccgcgtacgcctcgctcccgcgcttcgcgtacctcatctccggctcggccggggacgccggcatgatgcgccgctgcctgctggcgctctaccaccc

SEQ ID NO: 134420 - DNA, 171 bp, Zea mays
  Clone ID: MRT4577_54076C.1
cccggtcgccccgcgtccgcgacgacacgtacgtgtctccgaaagaaactgcggggcttactgacagagtagcactgtgtataaagaaggagccgagcaactttatgggtgtacatgcaggtgggcttcctgcaactggcggttcatgactctgcgactacgggccggagt

SEQ ID NO: 134421 - DNA, 235 bp, Zea mays
  Clone ID: MRT4577_54077C.1
ttccaccacccttgtagtagtgcgcgctgttcgcttgcactagctagccagcagcgtgcgcaccacctctcgccgcggcacgacgacgacgggaggcttgttgagagctagctagctagctcagcgagttcgagagcctgtgtgctagagagacagacagagagagagaaaacatactcctcctctgcacacaggggagctagaagctagcgttaattatagcacagctggccgc

SEQ ID NO: 134422 - DNA, 420 bp, Zea mays
  Clone ID: MRT4577_54078C.1
gtacaagcttttttttttttttttttttttttttttttatttttttttatctttttttttttttttttttttttttttttttttttttttttttttttttttttttttttttttttttttttttttccccccgcccccccccccccggggggcattttcccccccttgggggccgttctttgtggctcccggctcgggccccccctggggggatcgaagggtaaaggcgattcccgagggaaattgtttttccgtcccaattcccccccaatatcccccccggaccctaaaagggaaaccccggggcgccctatgggggccccaaccctcatttattgggttggccttactgcccctttttctagccggaaacccgtcggcccccctgtttttataatttcgccaccccgcggggagggg

SEQ ID NO: 134423 - DNA, 182 bp, Zea mays
  Clone ID: MRT4577_54079C.1
acgtgtggtctctatccaacttcataacttagcatctgactcctagtctccacataaccggaggggtacacatatatgaggggtaaagctttctcaacgcaagtcatggtggaagacttgctgatgataaccgcaggcacggatgagaccatgatggacgaaatatatatgcgaataggtca

SEQ ID NO: 134424 - DNA, 336 bp, Zea mays
  Clone ID: MRT4577_5407C.1
gaccacctttccttcgtaccataccattcttcacacccaatagccagctgcaccccacgtggcgcacccttgccgggggggccctacctgaatccgacaacccgacgtccaagggctccctcttccaggtcaacgaccaaagcagatgcgggagctgttgctctttatcaacaataccaactgtcgaaagcatcaaccacattgtcacaccgccaacttgatctccttatctgagcaagaccttgtctactgtgatacttcatacaatcaggggtgcaatggaggtctgatggactatgcgtttgaatccatcatcaacaatggcggaatctacac

SEQ ID NO: 134425 - DNA, 163 bp, Zea mays
  Clone ID: MRT4577_54080C.1
ccctatccacacaaccacactatctactcttacatcccaccttagaatttctctaaaccactacacaacaatgacaggcttccaatcaccacaccaactcactctacctaatccacatccacctccaccaaatcatccaccatcaccaccgaatccacccatc

SEQ ID NO: 134426 - DNA, 111 bp, Zea mays
  Clone ID: MRT4577_54081C.1
agatccaccatgggaacgatggcgaaatcacgtcactactatccaccgacggacaaagtggccagaagggatgggacactgtcctcgattccctccagttgtcccattcca

SEQ ID NO: 134427 - DNA, 666 bp, Zea mays
  Clone ID: MRT4577_54082C.1
tacctcgaggccggccgggactcgtcacctctccgctttgcctccctccctcgcgtccgcgttccctcccgcctccagatctcgatgcggcagcggctcccctgacagcggaggcgacgccggcaccatgtcctcctgcgacgacgaccacgcctcgctcctcagatcccacgctggggcctcgtcgccgtcctgcccctcgccgcgcggttcggcgggacatcagcaccacgccgacgtcgaggcggacgaggccaccgtcaccgcctccccgaggctcgccagcggcggcgggggagtgcgcggcctcctgcgcaacctcgagcgccgcatgtccgcacgcggatctgggcctgggcgtcgccagcaccagcaccagcactatcagcagctcgatcgctccgtggcgatcgagtcgccgtctcagcggcagcgggagagagcggcggcgggggatgacgacgagctcggggacggggcgccgcccgagtgggcgctgctgctcatcggctgcctcctcgggctcgccaccgggatctgcgtcgccgcgtttaaccgcgggggtcatgtcatccatgaatgggcatgggcagggactcccaacgaaggtgcagcatggctccgcctgcagaagctagctgatacttggcacaggatactgctgat

SEQ ID NO: 134428 - DNA, 747 bp, Zea mays
  unsure (1)..(747): unsure at all n locations
  Clone ID: MRT4577_54083C.1
gtaccctccaggctctgccggggtaaacgggttcgaaggcggtcccagaaggggctgggtcagagtggaggcggtggggcttgggggcggaacgaaggaagatcgaagtgaagcgggcggcgagtttcgggcaggaaggaagtgtcgatgcgaggggcgttggtttccccgtcaccgacagcgatcggggcccacgaagaggacgtctgaccggtcggaaggcttgacagccgcagcgaagcgggatcgaactggaaatgaacgggagtagggaccggaggcggggagatgagaggaaggttggggaggtcaggcagcaggaggtggggaaggttcaacgggggcgagggcgccggtgcggcggtagtggctacggtgctggtggcggcgggggccttggtggtggaagtggacatggcatgggtgccggattcggcaagggtggtggtcttggcggcggcgatggccttggcggtggaagtgggcatggcatgggtgccggattcggcaagggntggtggtcttggtggcggcggcggcggaggtggtggcggcggcggcggtgggtttggcaaaggatttggctttgggtttggcaaaggcagcgggttcggtggtggtggcggcggtgggggcggcggcggcattcgtgatcaccattgatacgttagcatgcagcatacgtctcctatggttctatcacttacttttgtattcgttcatgcttcgtaccttgtcatgcctatg

SEQ ID NO: 134429 - DNA, 340 bp, Zea mays
  unsure (1)..(340): unsure at all n locations
  Clone ID: MRT4577_54084C.1
gtaagctcggaattcggctcgaggccacccccatggccgcgcttttttaggacgcgttgaggcgcgcgctcgaggctgtcaaggctgctgtggacgcgcaagccgaggtcgggcgcgcgcttaaggccggtggtggggcttccaaggccgacgtggactctgcggacgaggcgctgaaggcgcttaaggttgaggccggcgccgccgcgcgcaggttgaagcaggcggtcggggcggtcgcggttggcgccgctaggtaggagatgcggcaggcggtggtgaacactctggaacggaagctgatctacataccttccttaaagatctaccgnggtgtcgc

SEQ ID NO: 134430 - DNA, 427 bp, Zea mays
  Clone ID: MRT4577_54085C.1
gagctcatctagtcggcggccgcccttactgttttctcttgcaggaacagagagtgacggctgatgtgtactataccaggacctgtccggagcccagctccacgagcagcaccgcagtgagccccagagcggacagcgcgccgctgagccgatcggtgcacgcggtggaaaccggctcgacgggcgcgccgagcgccgaccggggctccctcataggcacgggcgggagcgtcacggcgctgactgacacggacgcccaggcctatttattgcgcgcgccgcgcttcttgggcccgacgctggacttgatccgtagcacgcgctcctcgaagtctatagtgcgcggtggccgtcttggaggccgccggggccggctcctggggggctgctgcggcggtgtcctcgcccaacgaggtcgcactgggag

SEQ ID NO: 134431 - DNA, 636 bp, Zea mays
  unsure (1)..(636): unsure at all n locations
  Clone ID: MRT4577_54086C.1
gnggatctttaaaaccctttgtttttaggttgagtgtgcttcatgcacattacaaagaatagacgaagttaaccttcgaccaaagcgtctagagaagagcttcgcttgaacacatacgtggcgaaggaacataccgagaacactagcttcggtgtcgaaaggctttatgcacaatgcaaggaatagggaaatgttgaagacttgtgcaataagaaagaaagagaaaaggcaatgttgcccctgtagtacttaagattcatatgtgcaagcttcatgggcattcttgtaatttcatacaaagttatatctcgcccctataaatagagaaacagtactatgcataaattcaccttttccagggttaacaacttcatttaactcagtattcgaagtaccttcgcgctgtttcttgtgtcaagacgaaggcaagtttgtcattacatgttatattgatatacgtagagtatatcgagataacatgtcttaatctatactgttccttacttacattatgtctcatatttatcccactcctatatcttctccctttaattatctttcgaagaatgagtgattaaagagagaatgttgcaatcttttaacttatgttgccttgtttttttttatttgtcgccc

SEQ ID NO: 134432 - DNA, 169 bp, Zea mays
  Clone ID: MRT4577_54087C.1
aatacccgttccgacgccactcgtccgccagagctgacagacatttagatagatgaattcgaggagactactattcatgatgttaagatcatctaagaagagattcgcaggaagcaagctcacgctgcccacgaggcatacgagcaggacgactacatccaaaccacca

SEQ ID NO: 134433 - DNA, 327 bp, Zea mays
  unsure (1)..(327): unsure at all n locations
  Clone ID: MRT4577_54088C.1
agcaacgatgccatgggacagcaagagacacaggccgccggcggcggcggcggccagacgacgaaaggaacggtgtcagtacgggcgcaggccgacgtagttgcccggcgggtcgtagttgcaggtgatgaaggtgcccctgccgccgtagcaagcgaccatggcgcatccgacgcgtcgggtgctccgccacatgatctgggtgtagtggccgcacatggagccgccgtagcagctgttggtccagtagtcgtagcgggggcgctcggagagccaggcggngacggcctgcgcgggcgcccagccggtgccgctgccccagaagag

SEQ ID NO: 134434 - DNA, 589 bp, Zea mays
  unsure (1)..(589): unsure at all n locations
  Clone ID: MRT4577_54089C.1
ccccgcgtccngaggaactgagnactcgcgcggggtttcgttcatgggatcggggaattcccctgcttgatccgctgctcgagctgagtggttgtggctctcttctgacggccctaattagtaattctgcgtagcaaccagtgccactggggagttctgctccgctctgctcagaccttgtttcttcaccttgattttggatttgtctcggcgttttttttttacccaacgtcagatcatgctgagccgagtttggcgggctcagcctgcttggcttattcgttactgagggactacgctgattttagcttctgatgcaacaaccatgctgatcagtttttttttattcttttggcaggaaccagaagacattccgccccaagaagagcgctccatcaggcagcaagggagcacagctccgtaagcacatagatgccactctcggcagtggaaaccttagggaagctgtgaggttgcctcctggagaggatatcaatgaatggcttgctgtcaataccgtggatttctttaaccaagttaatatgctgtatggcacgctcacagaattctgcacacctgagagctgccc

SEQ ID NO: 134435 - DNA, 315 bp, Zea mays
  Clone ID: MRT4577_5408C.1
attcggctcgagaggggggactgatccgtgatctatggcctgcggtatactgtgaagaagcaaggggattcgtgcgtgctgttcatgctgctgcacctgcggccgatagaagcgcgattgaatagtctatgatgcaaattccagtactcggccaatggtagcaattgatacatatgcttcagatatagactaatacgggctaaaacgagctcaatgaggcccatagtgtgttatggctgctggtgtaggagatggctatactcacatcaagactgacgttgttttaacggcacgggactgctggtggaattgaga

SEQ ID NO: 134436 - DNA, 327 bp, Zea mays
  Clone ID: MRT4577_54090C.1
gtagttatctcaacgggcacaatcatactttatttaaagaggtgaatattgcagccctagagctatgactatggtgtgccagtgtttttttgcccaaggtgttcccaataacttgtttaatggataattcgcgtccctaggcttgtcattatgcggatcctcacattactggtgagggaaccgagtctcccctatggtcgaagcactcgatgggctttctgcttaggattagagccgggagatgccccccagattgcaggcccagagggcgggggagcctcttctcggagtatacggagacagcccgggcagctgcagctcggagag

SEQ ID NO: 134437 - DNA, 1204 bp, Zea mays
  Clone ID: MRT4577_54091C.1
cgggatagcaggccagcccccctcggtcccttcgtcctctactcctctcggctcctcgagtcctcgcagtcgctcactgcgtgcgccaaaagcagcagcagctccagccgtcgccgtctccactctccagtctccaccactgctccgcgcgcgccggatcgagggagggcaggcggacgaggaggagggatgagtctcttcgggcttggacgaaaccagaagacattccgccccaagaagagcgctccatcaggtagcaagggagcacagctccgaaagcacatagatgccactctcggcagtggaaaccttagggaagctgtgaggttgcctcctggagaggatatcaatgaatggcttgcggtgaatactgtggatttctttaaccaagttaatatgctgtatggcacactcacagaattttgcacacctgagagctgtccgacaatgacagctggcccaaagtacgagtacagatgggctgatggtgtgcagataaagaaacccatagaggtatcagcaccaaaatatgtggagtatctgatggattggattgaaggccagcttgacgatgaatccatatttcctcaaaaacttggcacgccatttccaccgaacttcaaggaagtagtaaagacaatattcaagcgcttgtttcgggtctatgcccatacttaccactcccatttccagaagattgttagccttaaagaggaggcccatctcaatacctgtttcaagcacttcattctgtttacaaatgagtttggcctgattgacaagaaggagctggctccacttcaggagctcatcgaatccatcatcgttccttactgagaacacggtttgctaaacatggatacagagctcttaatgctgatgctgtgaaatttagtctgtttatgacagcactttactgcatagagcttattgttcccgttattagacacaaggacatgtcacatatgcgtgtatctgtgttgtttcttcctgatcatgctgaccatgtaagtactgtcatatcagctatagaacggcgatgataatgtactgcagaaagaaaaaaacacgagaaagctgagttggggctatccattgcatattggcactcatcgagtatagaacagatctgcttctctttcttcttacaaacagaattaacttgttatttttaatggaatggaataaatattcacgctttctg

SEQ ID NO: 134438 - DNA, 1774 bp, Zea mays
  Clone ID: MRT4577_54092C.1
atggaactgagatctcgcgcggggtttcgttcatgggatcggggaattcccctgcttgatccgctgctcgagctgagtggttgtggctctcttctgacggccctaattagtaattctgcgtagcaaccagtgccactggggagttctgctccgctctgctcagaccttgtttcttcaccttgattttggatttgtctcggcgttttttttttacccaacgtcagatcatgctgagccgagtttggcgggctcagcctgcttggcttattcgttactgagggactacgctgattttagcttctgatgcaacaaccatgctgatcagtttttttttattcttcgcttggggtcctctatcacagcgccaagagcagcccagccccagacccacctcgtccgcttcgtcctctcgtctcctcgcactcgctagctgacgctgcgtgcgccaaaagcagcactgcagcagcaggtccagccgtcgccgttcccacttcccaccactgccacgcgcgccccggatcgagggagggcacgcagacgcggaggagggaggatgagtctcttcgggcttggacggaaccagaagacattccgccccaagaagagcgctccatcaggcagcaagggagcacagctccgtaagcacatagatgccactctcggcagtggaaaccttagggaagctgtgaggttgcctcctggagaggatatcaatgaatggcttgctgtgaataccgtggatttctttaaccaagttaatatgctgtatggcacgctcacagaattctgcacacctgagagctgcccaacaatgacagctggcccaaagtatgagtacagatgggctgatggtgtgcagataaagaaacccatagaggtatcagcaccaaaatatatggagtatctgatggattggattgaaggccagcttgacgatgaatccatatttcctcaaaaacttggcacaccattcccaccaaacttcaaggaagtagtgaagacgatattcaagcgcttgtttcgtgtttatgcccacatataccactcgcatttccagaagattgttagccttaaagaggaggcccatctcaatacctgtttcaagcacttcattctgtttacaaatgagtttggcctgattgacaagaaggagctggctccactccaggagctcattgaatccatcatcgttccttactgagactacggtgtagtaaacgtggatatagagctctcagtgcagatggctgtgaagtgtccatccgtgacagaacttcactgcatagagctatatgtgcatgtacctgtgtgtttctaaatgatcatgtattggccatgtaagtgtgcctgttatcagttatagaagggtgatgatgatcatgtactgcaaaaagaaaaagcacaagaatgtgttggattgatgtatgcagtgtttattttcctcctggttgtggaaccgtcagtttgtctgcttattgctagacattctctccgttctataaattgtaggtcgttttaattttgctccaactttgatcaagtttacatgcaaatatttcgacatgcaaaaccaaataaatgtattgtcaatgctcaaacgatttaatgtaactactctcatgtactaaaaaaaaaaaaaaaaaattcgagactagttctctcctcgtgcttgtcaatgctcaaacgatttaatgtaactcctctcatgtattaaaacccctggtatgtccccaaaaaaaccaccaaaaaaaaaaaaaaaaaaaaaaatttaagt

SEQ ID NO: 134439 - DNA, 636 bp, Zea mays
  Clone ID: MRT4577_54093C.1
ccgggtaagcaaacacggagtacatacatagctaggcagccaggctattcatgggagcctatcgtgatgatggccatggtcggccaccgccgggtgtccgttccaggggctcaagttcaccgacagactgacaattgaccgtcgttcctacataagcctaggcaacgttagcaacggaggaaggatccgggacatgcaggtgtggccggactacagtaacaagaagttacagacgctggatgacctgacatcgttggggacggacgacctgttgaatcatgtggactacctgcttgtcaacgggtggataccgtgcctcgagttcagcaaggacggattctagtaccggaagaactcaagcttcacgtgctactactacagacgttactggaccatgtgaaagctgcccatgatcgattgtaacagacgccacacaggtgtacaaggctgctgcaggaggccatcaaatcctacccggacgccttccaccgcgtcatcggcttcgacaacatcaagcagacgcagtgcgtcagtttaatagtctacaagcccccgggcagcgactagaccgagcccgtctgacgacccccgccggatagctatagctgctgcgtgagctagaacctagctagtgcc

SEQ ID NO: 134440 - DNA, 493 bp, Zea mays
  Clone ID: MRT4577_54094C.1
accccatggtatgtggcccgaacacgaaggccgaaagaggtccgtcgctaattgccacctgctgaggccttccctccttcctgagactaagtcttcctactctagacgaatgcgatgtccacgacatgactctagcccccacccttcatgaagtgctttgatgtagtgccatgagccctaactacgaggagatggccaaggatggtactgcctactgacggctcaacggcatattacgcacataacaaagcacaaacctgctgcctgctatgggactggatgtgttccataatacgcagaagtacgacataccgcctgaaaaatcacatgtttaaataagaacccctatgaatgatatgctccttctcctcttccgctccaaagtcgaagactgcaagaatacgtctcacagtcaagcgatcgcgctcccatatagagaggacgttcatggccataggcagagatgttacaatccgctgtacgtcggaatgca

SEQ ID NO: 134441 - DNA, 538 bp, Zea mays
  Clone ID: MRT4577_54095C.1
cgagagtgctggaagcactcgcagcccagccgcaggcggaggcggaggccgaggccgagcaatgggaggaggatggccgcgtcccggcggggctttggcggcgccgcgctttctcctccgagcgctgctgctctgctccctcctcgcgcagccgcatccgtcgcgcgccttcttcttcttcggcggcgtgcgcaccagcgcgcacgtcccccagcaccgcggtggtggacgcgaggagaaggtgcccatgaccgtcgtcgtcccggactactcgccgcggccggcgccgctcggcctctcgccctcagccgcgcccgcgcccgcgcccgcgccggtgctcggctcggacggcgacgaagacggcacgccgaggctgccgtcagagcggcggggcacgggcgcgccctcgtcgaccggtcacagcgcgaccgcacaggagccggccgcggcgaccagcgccgacttcatcagcagcagccccgccgtgccgctcccggccggcgttacggaatccgccaccgccctgcccatgaccact

SEQ ID NO: 134442 - DNA, 234 bp, Zea mays
  Clone ID: MRT4577_54096C.1
tcgaggaattccaattgctttggtcttgaaataaggaggcaaaaatgtgcatatatgaattggaattattagacgtcttattaggcctatcctgaagccaaaggaaatgagatcggaattcctcggtgcatgccaattccacatttgcaagagatcatgaagccataacgtgcatatatggattggaattatagtgtttcttattaggcctatcctgaagccaaaggaaatgag

SEQ ID NO: 134443 - DNA, 283 bp, Zea mays
  unsure (1)..(283): unsure at all n locations
  Clone ID: MRT4577_54097C.1
atttcagaagagtcaaaattcaagcacgatacattttgaaggctttgcaaactcctaaacccctgatgagtctgttcantctggaagtgggaatttgagtagatactgatttgtcccgtagtatggcagatgacagggaggtcttttccaagcaggcactcagaacacaggtcaccgtatgtgctcatgcagtaacaatcatactgaggacgaaggactctccgtttgatgcagacacaattgtaatggagatgtaaaacttcttagcaatcagatggataaa

SEQ ID NO: 134444 - DNA, 749 bp, Zea mays
  Clone ID: MRT4577_54098C.1
ccggccgggccggccgggcccgtccccggccactattattattttaccatcacctacccgctgccttcctccttcttttccctttcccatcgtcgaatcctcgccccttctcccgtcggctgttgcttttgcttcgaattcccgatttgcttgccggaaccctagcgacgccgtggtgacgcgacgccgacgcgtatggagatctccttcgaggcgtgggagggcgtgcagcggcatggtcaggacctcgcggaccgcctcgcgcagggtttcacgggcctgctccaggtgccgccgcagttcccgtggccgccgtcgccgcacaagcggatgcccttcgacatcgacctccccgtcgtccccttcggcgccggcggccccctcggcgtcccggggaaggacttccccttccccgccgcggccgtctcctcggtcatcgacatcggcggcaggctgggccaggccggcgctgagctcggggcgtccgtgggcggggccgtgcagcacgccgtgcggcgtctgcccgtgccgttccggaacggacagatccggcgccgcaagctaccgccgccgcttcctcagccgcccgcggattcggtgggcgagggcgcggtagggctcttcgtcgaaagggctgctgtagataggtgccccctcgaggcggcggccgccgccgccgccgcgacgactgggagcgctgccgcatctagcgtcagcggccctgttagcggagaagatttggacgagga

SEQ ID NO: 134445 - DNA, 238 bp, Zea mays
  Clone ID: MRT4577_54099C.1
cctcgcagctgctccattcgtggctgacatccgccggcctgccagtcagccgtatccccctcttcgtcttcaaaactatgagatgagtgcatcaggagatctccacaggaggcctgacagggctgtttttatctggtcagggcacgcggcagcagcagctactcctcctgccgacgtagacgcggccgctgcaacatcaatcagggatactgcaaccacgacacgacagctgccacca

SEQ ID NO: 134446 - DNA, 452 bp, Zea mays
  Clone ID: MRT4577_5409C.1
ttcactcgtacgcccacgcgtccgcccacggggcggaccacgcgtacgaaccggagcaaatcttcttcgggaccggcagcgcccaaatccgggaatccgctgctccgaatggactcaggttacaatccccggacggtggaggaggtggtccggctcttgatgactcgttatgctctgttatacctgagctgctttttatatgatgctgctgttttattctactacctgttctatttgtcaattgtaaaacgcgtgaaccaacgtgttcattcgacggctgcggacgactgtgcgcgggcaaattcccgtcgtgcggtggggcggtgctgacggagcttcatggtcgctgacccctgttcccggcttggcgtgggctgactgggccccatccccggcctgcctgggcggcgctgtccaacctgcagttcctgaccgtctcccacaccaacgtg

SEQ ID NO: 134447 - DNA, 646 bp, Zea mays
  Clone ID: MRT4577_540C.1
cggacgcgtgggttcaagtttgtcagatgaagaatacgaagaggtatgatttactgtgactttgtgtgttccagcagctatagatgggcaggctgtgttagggaacagaggtatacctacacttttttgggaaaaaatgtttattttttatgaaaagtaaatatatatcctatcaaactgcattttttgttattctcattcagaataatagtttccttcatgtattacttaatattttcccttgcattcataatgttgagcaaaacattctattgtttattataataggaagaatgtcaagaccttcggctgctggccaagaatgaatcctttaaaaggcctactgttgtaagttacccttgctttttgtttcctttaacaaaaatgtttgtggcccagtagcagatgataatgcaagccactgaagttctaatttcaattggcattctttgtgataacaggagaggagtttccaccaataacaataaacaaaaccctttgagtttagtcctaaacaagttggggtgggcgtcactacacatgaaacctaataagaagaaaaaaaactctgtcggtaggggaaaagaacccccccgtcgtctgaaccgcgccacgcccacgcgacgcgacgctgtcagcccacact

SEQ ID NO: 134448 - DNA, 205 bp, Zea mays
  Clone ID: MRT4577_54100C.1
accaacacgggggcgctgatcactgcgctcttcaacaacggtctcagctgcggcgcatgcttcaaggtgcgctgcgactcggtggggggcggtagccactcgtgcctgccgtgctccttcgtggtgacagccaccaacttctgcccgcccaacaacgcgctttccttcgactacagctgttggtgcaacccgtcgttcgcccact

SEQ ID NO: 134449 - DNA, 436 bp, Zea mays
  unsure (1)..(436): unsure at all n locations
  Clone ID: MRT4577_54101C.1
ngcccgaggtaaaaaaaaaaaaaaaaaaaaaaaaaaaaaaaaaaaaaaaaaaaaaaaaaaaaaaaaaaaaaaaaaaaaaaaaaaaaaaaaaaaaaagaaaaaaaaaaaaaaaaaaaaaaaaaaaaccccccccggccgcccccccaaaagggccaattcccccaaattccccccccccggggggccccccgaccatccttttaggggccccaatcccccctttggggggccgtttaccattccccggcccgccgtttaccaccgccggcccgggaaaaccccgggcgtcccccacctaaacccccttgcaacccacccccctttccccagtgggggaaaaaccaaaaagcccccccccgaaccccccttcccaacattggccccaccctgaaaggcgcaaagggccccccccctcctttaagggtcccaattaagg

SEQ ID NO: 134450 - DNA, 186 bp, Zea mays
  Clone ID: MRT4577_54102C.1
ttttttttttttcaaatcaaaaacgctttgttgtgtatgcctttttcaggcaccgcgtatcaaaaggggcggttgttctttgtccaaaccgcggcaggacaggtaaatactgtccttcggaaacgtaccaacattaggcaaaaatcttgctggggggccctgccatatatttacaacccaccctgc

SEQ ID NO: 134451 - DNA, 176 bp, Zea mays
  Clone ID: MRT4577_54103C.1
tccgccaagcgttcggccaagggttcgcccagggttcggcccagggttcgaagaaaaaaggggggattaagggcttactccagttcactaatttgaaaaccaggaaaaaggttccgtttaagggatatccgaaccccttgagattagcaagcaattgcgcgtcggcatatgaaaag

SEQ ID NO: 134452 - DNA, 496 bp, Zea mays
  Clone ID: MRT4577_54104C.1
ggaaccctgtctcctactcggaacagcatttgattgaatccaatcgacttgttgtgctatgcatagtagcagacccaccaccacctcccatgcagcaggttatatgatggctaacccaactagtcatggtcgatccaagccaccgacctacaacagactacaactgcttatatacaggccctacagctgcggccaatgaacctgcttgcctgcgacagcagctgctgcctcatagttgcaccaacagtggctgagcgtagctaccagcacactgtgctgaatacttgcaacagtttacaacatgcaacacaagtgactgtgtcaaactctggtgcggacctaccacagcgactactgccaacaaatccactatgggggggtaacccattagatgctgtattactactagagcaacaatagatgccatacaaccatgtctgtgggatgaaccctgtcttaaagtgcaatcataccttctttggaggtgccatctttt

SEQ ID NO: 134453 - DNA, 371 bp, Zea mays
  Clone ID: MRT4577_54105C.1
cggacgcgtgcgcggacgcgtgcgtccatatgcattgacaaggaccgccatagcgatttgagaagcaagggacgggagaggaacccgatgaatgcgaaaatgatctaccgaaactggtcgcttgtctcgctcacagccgtgatttggggctgcttcgccatcgcccggctcgactgtatcttcctgttgggcgggaaggagaaattcaatggttatatgtgccacgaatgcgagaggcttaagctgcaagacaaagacgaggtgggccaaagctaaacgttagcttatttggtatatgaagggagcaataacacttagaaatttcacatgattactgcgtgcctaccagaacaagtccctatctaaggact

SEQ ID NO: 134454 - DNA, 401 bp, Zea mays
  Clone ID: MRT4577_54106C.1
tggataccgggtgcgccggacgcgttcggtattagtggatgggaaaaaatggttccaaatcctactaccatttagccagctagctacagcaggccgcgcttccttcttgacacaacaacagttgctgccgttctaccagcaggttgcggctaaccccgcgaccttgttacaactacagcaggtgttgccctttgtgcaacttgcttggacaaacccagcagcctcctaccaacaacacatgagttgggggggccttctttgaaatagctaataaaatgtatttcaataataaagttttttggatgatgtctgcggccaaccataaataaaaagttacatttgcacgattttataccaaaaaaatatcacccaaaatcttggggggcggcccgttctaaagg

SEQ ID NO: 134455 - DNA, 919 bp, Zea mays
  Clone ID: MRT4577_54107C.1
ggccggccgggaagcagcaaagctgaccaacccagcgcagcgcgcaacacctcgccaattgcgacgccgccgccgtcactgtcgccgcgggagtgcgaaccacgccgccgcccgctcccgccgcccaaacagctttatccgagccccgattcgccggatcacatgctgcggccacctctcaaatgacctctcaactccagagcactttgctcctgctcccgctcttcgccgccgctgctttgggccgcggcggcgacgcctcgactgcgccgtcgctggagttccaccatcggttctccgcaccgctgcggcggtgggtggaggcccgagggcgcgcgctccctggcgggtggccggctcccggcagcgccgcgtacgtcgccgcccttgccgggcacgatcgccaccgggcggtgtcggcagcagggggtagtagcagcgacgcaccaccgctcactttcgccgagggaaatgccaccctcaaggtcagcaacctcggatttttgcactatgctcttgtgaccgttggcacaccgggccagacgttcatggtggcgctggacacaggcagcgatctcttctggctgccttgccagtgtgacggctgcacgcctccagccactgctgcctctggatcagctacattttacatccctggtatgtcgtcaactagtaaagcagttccgtgcaacagcaacttctgcgatcttcaaaaagaatgctccacagcattgcaatgtccatacaagatggtgtatgtctctgcgggtacatcatcttctggatttttagttgaagatgtgctttatctctcaacggagaatgcccaccctcaaattctcaaggcacaaataagcttgtttgtggacagactcaacagggtcatttctggatgctgctgctcctaatggtctttttg

SEQ ID NO: 134456 - DNA, 341 bp, Zea mays
  Clone ID: MRT4577_54108C.1
gccacgcgtgcgcgtgcttctacgccgtctaggccgcgtgccagtgcgaagagaccactactcaaatgggcaggcggtgggtgcggaccgaggtgtacccgctgttcgcgggaactgacgtggacgcctgcatgtgccgatgtcagatcttccggaacatcgccggctacccggaagacatgatggacacagcagggagggccactagggtgcttgagaaccatgaggaggggagacgttacgccatgcatggcctaagaatctttatgcacgacaagacttcatgtatcatgcccgaaggtaacaggttctgaactgaccctaactgaagcatgctgatt

SEQ ID NO: 134457 - DNA, 550 bp, Zea mays
  Clone ID: MRT4577_54109C.1
agcggcggcgccccggcgtgcttcatgggctgcgcctgcgggccgaggaacgccgccgccagctggtccctctgctgctgctgccgccgctgtgccaagagctgcgaatggatctggtggatttgcgccgggtccaggtggttcagcgccagccccgacgcggcgtccaccgacgacgtcgggcacgacgacgacgccggagaggagtacgacgacgaggactgagggagaggcgggagctgcgagaaggaggtggcggtgggagcaagaggtggtggcgggagcgcggtgtaagaggatgtggcggggaggtagtacgaatcttgaggcagaacagaggagtaggggtatgaatatgatgagtacgagaaaggagaggtggtggagaaggtaggtgaagaagcactccggataaaaggttcgagtgctttcatgagctcctggtccgaggaggacgacgaggagaagctcagctggcctgtgtacaaatctgttgttgccattgggaaaatacgaaaaggatttgcaagagtaaaaatgggggggaaaa

SEQ ID NO: 134458 - DNA, 217 bp, Zea mays
  unsure (1)..(217): unsure at all n locations
  Clone ID: MRT4577_5410C.1
aatcatagtcacctgccatcccatgtctaggttctggaatccagggtcggataatcccagcaccatgactcntcgactacgaggaggagggantcntcttcctgccctcctccanctccgtctcctcctccggctttggttaccccagtctaaagagacagcggcaactgctgcccgtgtacaagtaccgcaaagccattctctacctggtggagcg

SEQ ID NO: 134459 - DNA, 165 bp, Zea mays
  Clone ID: MRT4577_54110C.1
atggtgaggcagcacggagaagcttggtccaccatgttcgaagaagtaggagacgatagagttcagagcgagaatagtcccttgaagcttagcaatggtgatggcgatactagtggcattgtctcagggcttctggtggctgagggttcgggatgtggtgggtag

SEQ ID NO: 134460 - DNA, 793 bp, Zea mays
  unsure (1)..(793): unsure at all n locations
  Clone ID: MRT4577_54111C.1
ccggccgggatcattgtccaacatggatacaccacaaactgagaatcttcagtcagaaacacctgagttagtaggggcagcaaaagaagaggaacatggtaatcacactgtgagtgatgatggctccatcctaccagtcataaatggtgttgttaatggtagtgaagctgtgaccaaagaatctcaaaaaactttgacatctaaagaaccagaggctagtggaataaagaatatgttaccaggggaccttaatatactcgttcaatcttcagaatgtactcccaattgtcagtctcatgaatcctttgctactagtgacccccagcctgctgttcctactcttgttgaaggtggtaaagaaaacaatagagaacagttcgatgcacaaattcatggccaatctaatgatactgaggttgcttgtgactcgacgactgcaacctgtgaagctgttccaggtcatgctaaaacagaactggatgtgaaaagtgattctttagaaaattctgagcctctacctttaagcattcaggaatatgaaccaatataccaaggtgaagagcacatacttggcaccacaaatatggtgtatgaaaatcaagaaccagtgtatgaggggggaggtggntcttgctaagcagcttgacaagatggaggaaagcagtccttccgtggatgacaaggncacagaacatcattgnggagtgatcgataattttctgtgggtcactgctaaccagctgactgtctatggtctcttctgcttacaagaggaacttaaggaaatgagctt

SEQ ID NO: 134461 - DNA, 299 bp, Zea mays
  Clone ID: MRT4577_54112C.1
ccttggtttagggcatgctcttggataccaccgcgccattacagcaagggggcggactgtccgagttctccggcctcaggagcatgacgttagatgaccatgcgctggaaagccacctccgacgacttcatgtccgcagacatcatcaggacctacgctgttggtacgagcggagcaccgcgtcgttcagccgacggaggctaagctgacggcggccatgaacggcatcggccgcatcgggcgcatctagctccggtgctggcacgggcgcgaagacgccttgcccgtaggcgacattg

SEQ ID NO: 134462 - DNA, 815 bp, Zea mays
  Clone ID: MRT4577_54113C.1
gatggagccaatgagactgcccacctcacatatgcatatgctcccacctccctgtataagatcacagaaagatctggcaaagactctttccaacgccaccacgccattgctgcaattctcgcaacctttctacctctccactcaatcatagcatagcacctggaacaatttcatgtgcaaatctagattgattagtggttgcaatctcgttgggtgattcgatcgaggctaccagtgtgctactactagcacttggatttgccggtgcaagtttttctctctctttttgaaagccatggaggcggtggaggaagccaaccgggccgccgtggagagctgcaagaagctcgtcgccgtgctctcgctatccggcggcgacgcgttccggcctatgcctgtggccgcggagaccgacgaggcggtcgcccggttcggcaaggtggtagccgtcctgagcggcaggctcggccacgccagagcaagggttggcaagaggagcccggcgcctcccgtcgtcgatgcaagctgcctcttggatcacccgtccttggcagtggcaccgcgccacactcccaacggcggccacctgctgctcagtgcaactactcctcctctgccacctctgccaccgcatctgctgcctccagctagtatggcgatgcgaagcgctgcggtaccgatgacgatgagaagccaagaagcggcaccggcgccggcggtgctgctggtgccgccttgtgccagcaacgttacactgacgccggccaagaaagtcgaccggagcatgttcctagagacgccgctgctggagctga

SEQ ID NO: 134463 - DNA, 344 bp, Zea mays
  Clone ID: MRT4577_54114C.1
ccaattaatccaggggccttctctcaaaaaaagaattaaaaaaccaacattaaacctaacaggccaggagggggaaggcggcctggggccaagggccggccaggccagaaccttcagcccagaaaaaaccccccccctccgttggaaaaaacaaataaaacccgggggagccctttaattttccttcccagtttgacggaaaccaagggggatcccgcccccccccgggcggcccctcaaaagggcaaaccccaccccacggggggccggtccaaggggaccccggcccgcccccaaactgggggaaaccagggcaaaacccgctcccggggggaaagtgggcc

SEQ ID NO: 134464 - DNA, 590 bp, Zea mays
  Clone ID: MRT4577_54115C.1
tcccgtactattcacgctgacttgtatctgctcgtgcatcacgcttgtacttttaccttccatcaagcacgaaggtacatttgtaatctgatctcatttctatttttccatgataataaaatagaaatgagttgataatgttgtataattgttcatgttatctcttacattccatatgattctccttttattaacatatactgcaatcatgaaggtatgtccttcatgaccttcgtctgaagatcattatatcctaagggaaataatgctctgaaggatgaagggaattaacatttaatattttttgtgttgcgttgttcttaactcaaagcacttgagaacaagtccccaacagcaggctatcaaaaaatagagaacgaaggtgtatgaatggaaaagctactaaatttaaagagtcatttatgagacgtttttattctaataatagctaaactaggtgtgtgcccctgtgttgcaatgggaatacgctgggatgaacatcgacacatatatcttatatttcctttaggggtctagacaaaatttgctcggaagccaaacatgttaagacatgagcgttgtagcacgta

SEQ ID NO: 134465 - DNA, 276 bp, Zea mays
  Clone ID: MRT4577_54116C.1
tgagcagagctgccaaaataccatgcatatgccccatgacctatccactgctctacgatctagactacacagagctgatgtgaccagcgctctctgataaagcgctgaggcaaatgacatgactcaccaactgtcaccttgctcctaatggctcacatacatataggcgacagaacctgatatccacctgctctaggcatggatgccagcgctgatatcccagatatccttggcgtacctgcccgagcggacgataatcaagtatcctatctcctc

SEQ ID NO: 134466 - DNA, 330 bp, Zea mays
  Clone ID: MRT4577_54117C.1
cttgtatgcatgctcggagtggttgagaacgccgtgatacaccgctgcagccttgatcgtaataaattgactggggctaccaatgtgtacaccttctatttggcatggcgctcacctggcctgcttttggccttgggcccttcggtgggcggccctgactacatatgctgcctgaggctcacgctgcataccctggttggcagggtcgactcgcacgccgtgagcccacggtctgaagtgaccatgaaggcgttgagaaccgagcactcctaaatcaaaatactgctagggtgcatatttaaaagggaccgctcatgagatgagactgca

SEQ ID NO: 134467 - DNA, 1217 bp, Zea mays
  Clone ID: MRT4577_54118C.1
atattattgaagtgtttacaaattcttcaacaaggatactttactgaataaatgttgcaacaccttcaccgttgaatttacaatccatactagtcctgaagtacaagggaatgagaatgccccatgccatagatcacgggttttgttttctaggagtacgagctggcctcttattaacttacaagcacataattacggagtattgcctaaccactatacatgatacattggattttgatggtacatcctactatatacatacaccctactataaccaatataaatggctgcatcttatcgaccaaatgtagaagctgaaagcagcatcaccagattgttttactgctcatggaagtcctcgtaagatgacctggaggagtcactttgatatggagttgtttcccgcggactagatgggagtgaatcttgcatcgacagacctgggttcttttgcacccttggacggaacttccttcgtatgagcttcttggcctttgtaattgtaagctgcctcgcaaaagggtattcaccatcgctctcgctccattcgtcttgatattcgtcattatgcccttcaccgcgcattgtccgaatcacaaaggccttcgctttacggcgctgtgtattgaaaagccccctaattgacgtgacaaatccatcacctgcaccatcgcctggccggacgcgtggggaagctgttaattgatcatgtcttccaggttgaccaacatcactgtcactcaagttaagatcattttcaggaatagaaccctcaagtgtttccctatggttgctaaacttcttcccctgctcaaaattgacaccattagttaccctttctgaagtaattattggggaagggttttccctaaaaacctgaagaacgctggtatgaacaaaaccaccagacagtttggaataatataaccaaaaatagtagttatgttgtctagatttttcaaacagagaaggtaccatgtgatttcagtaactcttaagactactgagtatcgactaaaataacatgaaacagcagagatttagatgttagcacaagaagcattacacagttaagaggcaaggataatttttcagagacaggcccagtaaagttgcagaaagagaaaacccacatggaaattaccacttaggttgtcgaaccaacaatcttaacagaagtacagaacaagtgcttttgacatatataaaggtataat

SEQ ID NO: 134468 - DNA, 276 bp, Zea mays
  Clone ID: MRT4577_54119C.1
tttggggacttttaatatgttgcttcgctctttattcactaagacattgctagcatttagagaatggttggatgaagttacaagtcatgcagcgacacacaggcaaatgctggaatgttgtgtggggctggacaatacagacagttaccacagatgacaggatcgaggttccccctttaaattataaccaaatgggttaaaccagaaccttaacaagaaatccggggcctgcatggcacagaacttccattattatggggggggctgcttatgaac

SEQ ID NO: 134469 - DNA, 232 bp, Zea mays
  Clone ID: MRT4577_5411C.1
ctgggtttttttttttttgactactgtgtcctttattgatttattataggctgcccacattgcgatagactaataacatgagttcttaagcatttagagtagatggcattggtcccggccagtgtctgaacaatttaatggatgtgattcgaacatggtattttaaatgacgggatcctttccaaagaaacgttccgagtatgttacctttcgccaatggtgaggctgctaa

SEQ ID NO: 134470 - DNA, 190 bp, Zea mays
  Clone ID: MRT4577_54120C.1
aactattcagctttttggtttatttgttcaatgtgcgaggggccgaactaaatatgcttttttgcttaaagcactaggacgatgttacagttaagggttttcatgggtcagaaataaaccagccccaaaccccaaaaacccttaatctggccgggatggaactccggaaagaggggggctttggagggac

SEQ ID NO: 134471 - DNA, 294 bp, Zea mays
  unsure (1)..(294): unsure at all n locations
  Clone ID: MRT4577_54121C.1
gggataaatctcagccgatgtgttgattatttctagggaacacatgccggtntgggggcgcccttctcgggtgcatctcgtgtgtgatctaaacgatggcacctccaacgatgggttgctgcctcgtcgtggcggggggggtgctagagaaccggttgtgtggcggcgattgttgctgctgttggaaggccgcgacctntgggtttgccactgccaatgggttaagtgactgttgtcgctgttgtgggttcgcntcagagttcgaccttgttagttggttgattggaagcggct

SEQ ID NO: 134472 - DNA, 1933 bp, Zea mays
  unsure (1)..(1933): unsure at all n locations
  Clone ID: MRT4577_54122C.1
nnnnnnnnnnnnnnnnnnnnnnnnnnnnnnnnnnnnnnntttaacaacctaccaattgggtacctcgaggccggccgggagagaggcgcctcaactcaaccccacccccccacaagaacaacaagccacatcccatcccaactccacggtgaggtttgagcgatccgagcaaaaaaaatcaaccgaggcgcagcaacgcaggttcgttctctgaactctctggttcttttagcagcagggacgcgcagcacaagaaaggtccggttcaagaggctcttcttttgggtttattagaatcctcaaaggaagcgtgttcttgggttaggattttttttttctcacctcatcacacctctcctaggaggagcagagatccagagaaccttttttctcttctggattctcaccgcttcttttttttttctctgcacaaacacaccctcgtttctctacttttattgaggaacagggctgatttccaaactttttcctacccctgttttcataaacaagctccttttatttcttcccgttttaagttctgcccagcctcttcttctagctccatccaagctttctccatctagtagttccaatggccgcagccatagacatgtacaagtactgcaataccagcgcacaccttatcgcctcctcgtccccctcggatcaggagctcgcgaaagcactcgagccttttataacgagtgcttcctccccctaccatcgctactcgttggccccagattcttacatgcctacaccctcctcctacaccacctcgcctcttcccacccccacctcctcgcctttctcgcagcttccgccactctactcgtcgccttacgcggcttcgacggcgtcgggcgtggctgggccgatgggcctgaaccagctcggcccggcccagatccagcagatccaggcccagctcatgttccagcaccagcagcagaggggcctgcacgcggcgttcctgggcccgcgggcgcagccgatgaagcagtccgggtcgccgccggcgcagtcgaagctgtaccgcggcgtgcgccagcgccactggggcaagtgggtggcggagatccgcctccccaagaaccgcacgcggctgtggctcggcaccttcgacaccgccgagggcgcggcgctggcctacgacgaggcggccttccgcctccgcggcgacacggcgcgcctcaacttcccgtccctccgccgcggcggcggcgcgcgcctcgccggcccgctccacgcctccgtggacgccaagctcaccgccatctgccagtccctggcggggtccaagaacagctcgtccagcgacgagtcggccgcgtccctgccggactcccccaagtgctcagcgtcgacggagggggatgaggactcggcctccgccggctcccctccttccccgacgcaggcgccgcccgtgccggagatggcgaagctggacttcaccgaggcgccgtgggacgaaacggaggccttccacctgcgcaagtacccgtcctgggagatcgactgggattccatcctctcatgaacgatcaactacaactagtattttagtagtagtagcagcagcagcagcaaggttcagtcagtgatagctctgtgtaattttcgatttggggtttgcagctgcggtggatcgatggcattttagacatcggccatggcggctgtgttgtgatgcagaagtaaacgtacgtgctaatctcctggttgagctgccggttgttttttctcacggcacggccagtcgagaaagtcagtgtaatcccctgtcatgatctctctgttgcaacttaattaactcttctggcgtatgtatgtaaccatgtgtgttcatcttgaacgtatcgtgatgatgtgcgtctttttggtcaaaaaaaaaaaaaaaagtgtgcgcacttgtgatttgtgatct

SEQ ID NO: 134473 - DNA, 512 bp, Zea mays
  Clone ID: MRT4577_54123C.1
ggaggaggagtcgggctccgccggctcccctcctcctcctcctcccccgacgctggcgccgcccgtgccggtgccggagatggcgaagctggacttcacggaggcgccgtgggacgagacggaggccttccacctgcgcaagtacccgtcctgggagatcgactgggattccatcctgtcatgagcaataatagctccgtgtactttttctactgtttgggttttgcggctgcggtggcccgatggcattttagacgtcggccatggcggctgcaagtagcaagtgagtaactagctagctgtcgtccagtgttgtgaagcagcgtcaagtacatgcgtgctaatctcctggttgagctgccggttgtttttttctcacggcacggccagtcgagaagagtcagtagtgtaatctcgtggtgttatgatcatctgttgcagcttatgtatggaactttgtctatctagtactatttattggtcttcaacgtgtcgtgatgatgatgttcgtc

SEQ ID NO: 134474 - DNA, 613 bp, Zea mays
  unsure (1)..(613): unsure at all n locations
  Clone ID: MRT4577_54124C.1
gtcgacccagcgtccggcatctagtagtcctcatggccgcagctatcgacatgtacaagtactacaacgcacaccagatcgcctcctcctccccctcggatgaggagctcgcgaaagcactcgagccttttataacgagtgcttcctcctcctctccctaccatcgctactcgtcttctccatccatgtcccaagattcttacatgcctacaccctcctacaccagcttcgccacctcgcctcttcccacccccgccgccaccacctcctcctccacgcctttctcgcagcttccgccactctactcgtcgccttacgcggcgccgagcatggttgggcagatgggcctgaaccagctcggcccggcccagatccagcagatccaggcccagttcatgttccagcagcagcagcagcagcagcagaggggtctgcacgcggcgttcctgggcccgcgggcgcagccgatgaagcagtccggatcgccgccgctggcgccggcgcagtcgaagctgtaccgcggcgtccgccagcgccactggggcaagtgggtggcagagatccgcctncccaagaaccgcacccggctgtggctcggcaccttcgacaccgc

SEQ ID NO: 134475 - DNA, 1989 bp, Zea mays
  Clone ID: MRT4577_54125C.1
aagtgggcacctcgagcggccaaacagacacgcctcacccccaccacaagaacaccaaagccacatcccatccatctccacggtgaggcttgagcgacccgagcaaaaaaaaatcatccgcgacgcagcgacgcaggtttgttctctgatctctctggttcttcttttagcagcagggacgcacagcacaagaaaaggtccggttcaagaggctcttctgttgggtttttttagaatcctcaagagaagcgtgttcttgggttaggatttttttctcacctcatcacacctctcctaggaggaacagagatccagagaaccttttttctcttctggatccttgccgccttttggccttcgaaagggggttgttttgcaataccctctctctgtttttttttttcttcgcacaaacccacctcgtttctctacttttattgaggaacagagctggttttccaaaaaaaaaaaaatctactttgattttccataaagaaaacctctcagcctctttcttctagctccatccaagctttagtcctaatggccgcagccatcgacatgtacaagtactacaataccagcgcacaccagatcgcctcctcctcctccccctcggatcaggagctcgcgaaagcactcgagccttttataacgagtgcttcctcctcttcgtcctcctccccctaccatggctactcgtcctctccatccatgtcccaagattcttacatgcctacaccttcttacaccagctacgccacctcgcctcttcccactcccgccgctgcctcctcgcagcttccgccactctactcgtcgccttatgcggcgccgtgcatgaccggccagatgggcctgaaccagctcggcccggcccagatccagcagatccaggcccagttcatgttccagcagcagcagcagcagaggggcctgcacgcggcgttcctgggcccgcgggcgcagccgatgaagcagtccgggtcgccgccgccgctggcgccggcgccggcgcagtcgaagctgtaccgcggcgtgcggcagcgccactggggcaagtgggtggcggagatccgtctcccgaagaaccgcacgcggctgtggctcggcaccttcgacaccgccgaggacgcggcgctcgcctacgacaaggcggccttccgcctccgcggcgacacggcgcgcctcaacttcccggccctccggcgcggcggcgcgcacctcgccggcccgctccacgcgtccgtggacgccaagctgaccgccatctgccagtccctgtcggagtccaagtccaagagcggctcgtcgggcgacgagtcggccgcgtccccgccggactcccccaagtgctcggcgtcgacgacggagggggagggggaggaggagtcgggctccgccggctcccctcctcctcctcctcccccgacgctggcgccgcccgtgccggtgccggagatggcgaagctggacttcacggaggcgccgtgggacgagacggaggccttccacctgcgcaagtacccgtcctgggagatcgactgggattccatcctgtcatgagcaataatagctccgtgtaatttttttctactgtttggtttttgcggctgcgttggcccgatggcattttagacgtcggccatggcggctgcaagtagcaagtgagtaactagctagctagtacatcgtcgtcgactcgtcgtgtccagtgttgtgaagcagcgttaagtacatgcgtgctaatctcctggttgagctgccggttgttttttttctcacggcacggccagtcgagaagagtcagtagtgtaatctcgtggttttatgatcatctgttgcagcttatgtatggaactttgtctagttttattggtctagtactatttattggtctaaaaaaaaaaaaaaaaaaaaaaaaaaaaaaaaaaaaaaaaaaaaaaaaaaaaaaacttattatttttaatattttattaattttatatt

SEQ ID NO: 134476 - DNA, 2751 bp, Zea mays
  Clone ID: MRT4577_54126C.1
ggcaggaatagcgagccgagctcgtccaccagatttagcggacaagagtgcactgtatagcatagcgaacgttttagcgtagagaaccgtttacgggtccttgttggagagggtctaacttgcagctcaatatacttgtaaacctattacccatttctactatacaccagggcaatgtatcagcaaaagctttcggcctacaaattgctacgaagtgaagacaaaagagcaagccaaaaaaaattgagaccgggaggtagggcgaaggaataatacaggactaaacaatctcagctgcactgcattatgagacggcactaatatctgttggagatactctgcttgtctcggtcccaagaggccctcaaggcactgtaggagcgtttcccctcgcctgccctttgcgactcttgttgagccgggctactgtactcctggcaatgttgctgttcgttcagcatcctccagcttctgctcccagaatcactactgccagtaacagaaccaccagattccacgaccatgtcaccctcaagaatgcgaagaacatgggacatgcgaggccttgaatgtgggtcgcgtcttatgcacaagtttgccgcgtgcagcatgcagtacacctcattttcagagtagcgctctccgagtcgtgggtctatgagctcgtcaattgcatactcctccaagaatgggcgtgcccattcagttagtaactgctgaccctttggtcggttaatgtcaacagccttccgcccagtgacaagttccactaacacaaccccgaaagagtatacatcagccttctctgttatttgcccactctgtgcatattcaggagccagatagccgaatgtgccgataactcttgtttcaacgcccatgtctccatcaggttgccatcgcgccaggccgaaatctccaaccagtggttcgaaatcatgtgtgacaaggatgttgtttggtctcatgtcacgatggattatgcagccaaccctacattcctcgtgaaggtaccgcagcccacgagcagcaccaactgcaatcttttgtcgtgcagtccactccaatgtttctcgattatgaccatagagatgtgaatccaaagatctattgcagatgtactcgtaaaccaataaacgccttctgtcctcaacgcaaaaacctatcagcattacaacatttcgatgttgtgcacaactaagaacttccacctctgagcagaactcaacatcaccctgggaactagcaagcttgtgttgcttaacagcaatagcctggccatcaggaaggacacctcgatgaacagacccaaatccaccttcagctaagaagtttgcttgtgagaaaccaccagttgcaagttccagttcagcataactaaaccagcgaggaggctttccaaaaacaggtgccttgtgctgacatattgaacaaagcggaggtggtccaggaggtgcattccttgccaacaaaacaacatccctgacatctcctcggaagtttaagtctgacctgcttctcatagcattaatttcattcaggagatccagcttggaaaacttttccaacaaaacatctgcagttgcagtgcggttttttcgtggaacttttccaagtgatcttgacgatgctgatccctgtagaatatcagacatccatggctgaagtgagaaatttgctggagggctcaatgtttcactgtctgaatcagaaatattagcatctgaatgctgaattttatcctttgtttgttgcacctctttcttcagagaaccatttgtttcagaagcagaaaacggagatgtcccagggtctgaactcgagacagaggaagttcccgcttcagtacttccgaaaggtgtctccaggtctgggctgctatttggggttacaacaggtcctcgaattgaactccgtgcctccttaacatcagttgcaattttactggtagaaccatctagcacaggtggaactacacatgttgctttagactctttatcaggagatcccacaagattaagtcgaaggactttaggctgagatcgcttcataacaaaaatgttgcactgaagctcctccacacaacgcttctcctcatgcttcaaatccttgtctagcacaacccagcttgcctgtgcttgcttgcactcagcagctacaacaccagaaggagagccggaaacaagcttatacctcacatttatcttgtctatgtcatacacatcaattttcttcaacatttgagaacacaactctgataaatcacatttctgatccaacatagacttatggccacttgcacagtctccagcgaacagcggaaagccccagaactttctgccagagctgtgtgccgggatgacgacaagaagtatgatgcttccgcctggctgcaccacatgcgtgagcgcccagatgatggccgtcttggagatctccctcgtggctgccctcaccgcgaccaccaccttctctgccgccacagtggtggcggcggcggcgcccttgtcagccacggacttccccttcctctgcagcagctggtggcgggaagagcccaccatcatcttcttcttcaagacaaccagcaatgccggggaagcgacagcgacgaacgagctccagcctccaaccgccaccgacggcagcagcagtgcagcaccctctccaccttgcagagcgacggcgacggcgacgggacgcggggaaacccagccctcctgcgaacgcgtggaagccgcgacagcaacg

SEQ ID NO: 134477 - DNA, 224 bp, Zea mays
  Clone ID: MRT4577_54127C.1
cggacgcgtgggggcccggaagattaggttccctaccacaggcaccgaggggctgctcatgggcattcttgatgaaggaactattgactcaccataactattgcgtgctaatgtaaccacgctactcaaattgcgagaggagtcatctaatgttcttgggaaattacaaatgctctactatattcccatgcatgcaccatttacagaatcatctcaacgagccc

SEQ ID NO: 134478 - DNA, 1524 bp, Zea mays
  Clone ID: MRT4577_54128C.1
aaaaggtccggttcaagaggctcttctgttgggtttttttattatccttaagagaagcttgttcttgggttagggagtttgggttctcacctcataacacctctcctaggaggaacagagatccagagaaccttttttctcttctggatccttgccgccttttggccttcgaaagggttgttttgcaataccctctctctgtttttttcttcttcgcacaaacccacctcgtttctctacttttattgaggaacagagctggttttccaaaacaaattctgctttgattttctataaagaaaacctctcagcctctttcttctagctccatccaagctttagtcctaatggccgcagccatcgacatgcacaagaacaccaataccaccgcacatccatctccacggtgaggcttgagcgatccgagcaaaaaaaatcatgcgcgacgcagcgacgcagctacgccacctcgcctcttcccactcccgccgccgcctcctcctcgcagcttccgccgctctactcgtcgccttatgcggcgccgtgcatggccggtcagatgggcctgaaccagctcggcccggcccagatccagcagatccaggcccagttcatgttccagcagcagcagcagcagcagaggggcctgcacgcggcgttcctgggcccgcgggcgcagccgatgaagcagtcagggtcgccgtcgccgccgccgccgctggcgccggcgcagtcgaagctgtaccgcggcgtgcggcagcgccactggggcaagtgggtggcggagatccggctcccgaagaaccgcacgcggctgtggctcggcaccttcgacaccgtggaggacgcggcgctcgcctacgacaaggcggtcttccgtctccgcggcgacacggtgcgcctcaacttcccggtcctccggcgcggcggcgcgcacctcgccggcccgttgcacgcctccgtggacgccaagctgaccggcatctgccagtccctggcggagtccaagtaacggcggctcctccggcgacgagtcggccgggtcccccccggactcccccaagtgctcggcgtcggcgtcgacggagggggaggaggagtcgggctccgccggctcccctccttccccgacgctggcgccgcccgtgccggagatggcgaagctggacttcaccgaggcgccgtgggacgagacggagaccttccacctgcgcaagtacccgtcctgggagatcgactgggattccatcctctcgtgaacgatcaactacaactgctatagtagtagcagcagcaagattcagtcagtgtcagctcaatggtagctctgtgtaattttcgatttggggtttgcagtggcggtggctcgatggcattttagacatcggccatggcggctgcgagtagcaatgagtaaactagtagctagtacatcgtcgtccagtgttgtgatgcagcagtaagtatgtgctaatctcctggttgagctgccggttgttttttctcacggcacggccagtcgag

SEQ ID NO: 134479 - DNA, 3812 bp, Zea mays
  Clone ID: MRT4577_54129C.1
ccacaaacactatcctttgagcattacatatctttttgaactaatttagttgtacattactattttatttaatattttgtatgccgtcgcaacgcacgggcacctacctaatgactttagaatatgtttagtccctagaaccaaacatgtagggactaaagtttagtcctaggactaaaatttagtcctaggactaattgaaaccaaacatggcatcagtagtacaaaaaatcgttggtactatgatcagcggcctcatccaatagaggagacttggtcagtcctacttctacggttctaccttcttgcattgcgttgcgtcgtcttatcagttatcacagccacagcagtagcacatccccaccacgggcgaggagccggggacgtacgggtggaccacggtccggccagttgtggctttgcgagcacagtgtcaacagacagccctggtatggtaaaccctgctcctccgtgaaccgggaaaacgatgattgcccttgcttgcctgcctgcctgcgccaccgtgaacggaccaccatgccgcagcacagtggcatcttgctcgcagtcgcagccttgccagtcgccagccacagtagctggccggagaactccacgagttgctagttgctacaagccggcgtacgtacggtggcccccgggccattgtacgcacgcacaggaacgcatgcaatgatgagcgctgctctggcagccgctgacatgcatcaggacgtgtccacgcgacgcggacgccgggctggacgtgtcgcgcgagggcttgcggcggggcgagcgctctagcagaaacagccggccggagcagcagccgtcgccgtcgccgtcccgtcgtccatcgggctctcggaccgggcccaacgcaagcgccagcatcttctcgccgtttgcagcagcaggtgcacagacagaggccctctgcctgggcctgcctgccgcctgtcagccagacgcgcttcaggcctgctgtttttattacagcgcggaacttgggtagagcgccatgcctgaaaggattgcagtgcaccgtttcagggggcacagcacactatggaattggatggtagtaataaaccacatgtggcattattgcatgattatattataccagctacgtttgcctgtagcgcaacgaatgcaaacaccacgactgccaagaacagcgtggagatgccaccaggatgtctgcactacttttccagaaacatccatacgttgcaggtcaatatacttgtaatcctattaacatttctatatacaccaggacaaccatgtatcagcaaaagcttttccagcctacaaattgctagggctaggaagtgagcataaaatgatcccaaaaagaaataaagaaatgcgacagggaggtaggggcgagggaataatacaggatttgagcgatctcttgcattatgcgacagcactaatatctgttggagatactctgcttgtcccggtccgctgtaggagcgtttcccctcgcctgcccttcgcgattcttgttgagccgggctactctgtactcctggcaataatgctgttgctcgctcagcaacctccagcttctgctcccagaatcactactgccgttaacagaaccagactccacgaccatgtcgccctcaagaatgcgaagaacatgggacatgcgaggccttgaatgtgggtcgcgtcttatacacaggtttgccgcgtgcagcatgcagtggacctcattttcggagtagcgcgcgcccagtcgtgggtctatgagctcatcaattgcatactcctccaagaatggccgtgcccattcagttagcaactgctgaccctttggtcggttgatgtcaacagccttccgcccagtcacaagctccactaacacaaccccaaaagagtacacatcagccttctctgttatttgcccactctgcgcatattcaggtgccagataaccaaatgtgccaataactcttgtttcaacacccatgtctccatcaggttgccatcgtgccaggccgaaatctccaaccagtggctcgaaatcatgtgtgacaaggatgttgtttggtctcatgtcgcgatggattatgcagccaaccctacattcctcgtggaggtaccgcagcccacgagcagcaccaactgcaatcttatgccgtgcagtccactccaatgtttctctattacgaccatagagatgtgagtccaaagatctattgcagatgtactcgtaaaccaataaacgccttctgtcctcaacacaaaaaccaatcagcattacaacatttcgatgttgtgcacaactaagaacttccacctctgagcagaattcaacatcaccctgagaactagcaagcttgtgttgcttaacagcgatagcctgcccatcaggaaggacaccttgatgaacagaaccaaatccaccttcagctaagaaatttgcttgggagaaaccaccagttgcaagctccagttcagcataactaaaccaccgaggtggctttccgaaaacaggtgccttgtgctgacatattgaacaaagtggaggtggtccaggaggtgcattccttgccaatgagacagcatccctgacatctccgcggaagtttaagtctgacctgcttctcatagcactaatttcattcaggagatccagcttggaaatcttttccaacaaaacatctgcagttgcagtacgagttttccgtggaacttttccaagcgaccttgaggatgctgatccctgtagaatatcagacatccatggctgaaaagagaaatttgctggagggctcaatgtttcactgtccgaatcagaaatattgacatctgaatgctgaattttatcctttgttgctagtacctctttcttcagagaaccatttatttcagaagcagaaaatggagatgccccagggtctgaacttgagacagaggaagttcccgcttcagtacttctgaaaggtgtatccaggtctgggctgctatttggggttacagcaggtcctcgaattgaacttcgtgcctccttaacatcagttgcagttttaccactagaacaatctaacacaggtggaactgcacatgttgctttagactctttatcaggagatcccacaagattaagtcgaaggactttaggctgagaacgcttcataacaacaatgttgcactgaagctcctccacacaacgcttctcctcgtgcttcaaatccttgtctagcacaacccagcttgcttgtgcttgcttacactcagcagcaacaacaccagaaggagagccggaaacaagcttatacattacatttatcatgtcaatatcatacacatccaatttcttcaacatttgagaacacaactctgataaatcacatttctgatccaccatagacttatggccacttgcacagtctccggcaaacagtggaaaaccccagaattttctgccagagctctgtgccgggatgacgacgaggagtatgatgcttccgccgggctgcacgacatgcgtgagcgcccagatgacggctgtcttggagatctccctcgtggctgcccttaccgcgaccaccaccttctctgccttcacggtcatggaggccgctcccttgccagccacgggcttccccttcctctgcagcagctgctgctgggaagagcccaccatcatcttcttcctctagacaaccagcgatgccactggtagttgccactagagttggacgccgaacctgcttggcaggcggagttgaaccaaaaaggcgagcaacacgacaggtaaagatcccggccggcctcgaggtacccaa

SEQ ID NO: 134480 - DNA, 466 bp, Zea mays
  Clone ID: MRT4577_5412C.1
gcggcgccacaccgcgtgcgtcggctgcttgctgccccgtgttccttggctcccgccgacaccgagcgccgtcaccgagcgccgccaccgccatggctgccccgccccgcgccaccgcggtcctcgcgtggggttccggggaggacgggcagcttggcatgggcgggaacgcgctcgggcacccgccgtagaccaaggagaaggactgggcacactgcgtggaggcactcggttcctacgccgtcaccgccgtcgtagccggtagccgtaactccctcgccatctgcgaagacggccgcctcttcacttgggggtggaaccagcgcggcacaaacggagagctcccctggccccgtccacgccctcacggggtttgaagatcgtccaggcggcggattggttgggtgtgcatctgcccttgcagttgaacgacaatgtggctacgcctacttcctggggggggaaa

SEQ ID NO: 134481 - DNA, 568 bp, Zea mays
  Clone ID: MRT4577_54130C.1
tttttcgagagagatagaaatacacttagatgagctagggaggcgcccacgatcctactcctagttctctctccatcctgaatgtgccgctgccaagcgcaggatgtgtatcacaaggacagagaacgcaccgtggggagaacacctattctccggaggggctgctgttccaggtccttgacgccatctaggccatcaattaggaatacactgcaatcgcatacgaagacaaaggatggtgctcatctactgcgagggaaacgagcgcacctcaccactggtggaaccaagcatgaagaaaaaatctgcaaattgatgagcacatagcctagcccatgactggacttatctatgatgctacaacactagtgatacatgctcttgtctaaactacaaataataggttctaatactgagagtcaatgacttacgaatcttcgcacacaagctttctcgcacttagctctcgaaagaaggcaacgtgacgatacatcaatgacacggtcatttacagtctctctgctaatttctgcacatgatgataatggacctagcctgtcactacact

SEQ ID NO: 134482 - DNA, 179 bp, Zea mays
  Clone ID: MRT4577_54132C.1
tcggtctgatcggccacccacggaggaggcgcataacgatttgcacccagccacaacgcctgtctgccgtgaataaacacgcaaacggcgcacctccggtggatagtccaaggcctggacgcactcacgcaagtttcagactatttcacttccaccctacatcaaattctcaagccatt

SEQ ID NO: 134483 - DNA, 390 bp, Zea mays
  unsure (1)..(390): unsure at all n locations
  Clone ID: MRT4577_54133C.1
ttttttttttttnnnnnnnnnnnnnnnnnnnnnnntctacagttctaccgtaccaccaaacacgaaacaccgaactctttaacctctccgacgggatagcctccgcccgtcgaaaaagagcacgagccaacgtccgccgaggccttatctcccccacgcctccgatcagacgcaccaaatcctcaactgccctaacaagaacggcctggaattccggcgagggacggggacttcgttggaccgacgtctactggaccaatttaccccgcttcaccaagcccgcacggatttgtcgggcgagaagtttgggatttgttgattaacagatggaaccgacctccgagaggcgggaagcaatccaccgatcacgaatgggtttgattcggtctc

SEQ ID NO: 134484 - DNA, 440 bp, Zea mays
  Clone ID: MRT4577_54134C.1
aaaacgcacacttacagaaaccttagcgggcaaagccacttgttcacaccagaaccctttccgcaatcaaccagtgtcgctcccgcctacacccagtggcgaatcttcctaaccgtgagccgccataaatggtctgaatgtacccatcagggctgtaacaagcacactgcatgctcagcttctgagcaaaggacttagcaacggcttaccgagggacggagtttctatgttgatctactctaagtgcactcttgctactgactgctgggtgcttactggcagataactcgggcaatggatatgcgaaccccatagcacataagccgaggattttgcttatagcgagccatagagacggaaacgtgaacgtgtgcctcctttaggcacactcacaggtggagtcagcacgaatacctgctgaccccaagagttccaccatg

SEQ ID NO: 134485 - DNA, 542 bp, Zea mays
  Clone ID: MRT4577_54135C.1
ttcggccggggtccttccctgccgcctccgcctacgcccccgcccccgcccacgcgccactccttgctgccccactcctgtacatctcttcgcgtgctgactcagccggcaagaaccccgttggcacctgggggctaaccccaggtcgcgggcgccgaccaggaaatttacgaccatcctaggagcgggagaagcggggccagcgacgagcgatcgagcatattggctaacgacaacttgaactccttcaccgtcatggtatgcgctcgtttaccgagctcactaacaagtactgcgagggcttgcacgacgcccgctactacggacgcaaccacaccgtcgacgaaatcgagaacctgtgccggtcacagcgcgctcgctgccttccaccttgacgccgtgaactgatgcgcgaacaagcacatctactgggcttccgacaagaacttgattgtctacacctacctggtcaaccagaaccaccgcattatggaggacaacctttccttgggccgaaacatgactaacgagaactacgaagc

SEQ ID NO: 134486 - DNA, 422 bp, Zea mays
  Clone ID: MRT4577_54136C.1
gctctacgaggccgactcgcgcagctttcacgacctcgccgagcacgacgtgagcgtgttcttcgccaacatcaccgcggggtccatgagcgcgccattgttcaacacccgttcgttcaagatcgcctacgtgcctaacggcaagggctacgccgagatcgtgtgctcgcaccgtcagtctcaagacggcgagagcgagcgcgagcgctacaagcgcaggtggagcgatgtagaacatgtagaatcggctgtcgagcactatatggcctcgctgctgatcgcacatctatcgagcgcggctgatcgaccgcacggcgtacgtggcgatcatgcgcaaatctgttgacaagatcattgatacatgctcagaatgagagatatcaatgactactcttgagtttcttggtgataaaaggaaaatt

SEQ ID NO: 134487 - DNA, 375 bp, Zea mays
  Clone ID: MRT4577_54137C.1
ccccctgccccccgtccatgagctagggagcgccctttgagcgggccccgctccggccaacggggagcgagctagcgtctgcgtgaagcgccggccgacctgggatgggatggtatgggagggcgggcgtcactgcccactgccaacatgctaatgatgggcgctacgcctgcccgctgccttacacctggacaccatcacaagcattactacagctccccatgatatgcttatgaggaccgactcgatttacacccactccgaggtgcacagatgttgcggctcctagacatgatcagtgccgcaaccagtctatccgaagactgcgcaagctcacttcgcacatgcctacgcctcagccgaatgtgagctaca

SEQ ID NO: 134488 - DNA, 212 bp, Zea mays
  Clone ID: MRT4577_54138C.1
ccgcaggccccgcccctgaatccccgggtcttacccacgcgcccgtacgaccgcgccctcttgtcagattgctcatgagtcattgttcaacaatgacgccgcctgccccacgctccgtggcatccctgcaagcgctgctaccgcgaccatactcccgccatgctcaccaagctcccatagctcccctccttcccccgtacccctcaccagcg

SEQ ID NO: 134489 - DNA, 314 bp, Zea mays
  Clone ID: MRT4577_54139C.1
ctcgagccgcagcatgcacacttaaagtgcgaccagtaactaacattgagcatcactgagcggtcactgatattacccatacttatgctccttgcactatctgcatgggatgctaacgcgaccatctgagctcagtactcacaagctactatagctgcccttgttaaccaatacattccatcaatgaccgattcagtatgtgaaaactaagtccttcaaacatagacgatccaactagtcatcacaacacgcagcttacctatatcacacttgtgcttgaaacactagtcagacctatctttgatgcaatcatt

SEQ ID NO: 134490 - DNA, 300 bp, Zea mays
  Clone ID: MRT4577_5413C.1
ctccaactcgctgcctggaagctagggagctttgtataactggggcgaaccaaagcacgacacaataagatgctattaggggctctgtgggaaattgttcaactgtcacaggtccacacaactttttccacccgaggcaaactttatttagcctgcggtgcgttgagactgttctcattacttttactcgacaggcactgatagccacctaccgggctacgaaacattgcacacccacccgcagtgagagacccccgtactaaccgcaaggggctgaacagcaaaatcccgcgagatact

SEQ ID NO: 134491 - DNA, 268 bp, Zea mays
  unsure (1)..(268): unsure at all n locations
  Clone ID: MRT4577_54140C.1
agaaaggctggactggctggctgagaagtaaggctggactatnnagagaagggctggctggctggctggctgtgagaaggaagaagggcctgactaagggtaaaaggggctggctgtgagtagtaagtaaaggctcctgactaagggagtaaggggtctggctggctgagtaaagaagggctctgactaaggagaaaggggttgcctgactaagctcctaagnngaggagannnagaagaagctctcaaggnnnaggagactttgtga

SEQ ID NO: 134492 - DNA, 228 bp, Zea mays
  Clone ID: MRT4577_54141C.1
tcgtacacgcgtacggcccacgcgggccctggagcattgctttgcccatttggcgcatatctccctgctgcatatgcatgacggcgctgctggagacggccgtggagctcgtacaggcgacactccatgccatgaccaggcttacatgcaaaaacccctgctggctaggccctgctcactgaggagcacatcatacatacatgtcgctttagcccgagagggtgcggt

SEQ ID NO: 134493 - DNA, 382 bp, Zea mays
  Clone ID: MRT4577_54142C.1
agaaaacccaataaactaggatctcccttttttctggggaaaaaaaactgaactgggacccttacaatggacaggtggcaaaaaaaaaattttaaaaaagaatagggcaatcgaacccggatgaagctttacattggaaacaaccaggactcacactaacaagacagggtttcagcaaatacattggtcttgggaaccgcttttaggacaggtggccttattatccacaggaccccagggttgtcagcttttgcacgaaccctttttttgggaacaggttctaggaccactggcactggcattccaaccaaatacccagcaacgggcccataagagacacaaattgggcactcctgccagggcctttcccaatcaaggggga

SEQ ID NO: 134494 - DNA, 484 bp, Zea mays
  Clone ID: MRT4577_54143C.1
tcgagcggccgctcgggcaggtacaagcttttttttttttttttttttttttttttttttgtttttttttttacaaaaaaacgattttttcttgtaaactttaccaacatgcccaacaaaaagggagcaccttccgccactacaaaggaaaggcggatccacagcaagaagcaaccagcccaaattctacaatctaaaacagacgacacaacaaaaggagagaagaagctatacgccggggaacaaacccgtttgaaactggggatgcagcaaacaaagacccatgtgaaccccaccactgaggcggcggaactcaaaccgtttaggcaggggatgaaaaaaccgtccgcaaggcaccataaacacgttcggtaggaccccaacaaccgtgcgccttctggaaacaaatgactatgcaagatgaacctcatccttcccccgcatatttttaacaaaatggacgggtattaccaccccagtggac

SEQ ID NO: 134495 - DNA, 844 bp, Zea mays
  Clone ID: MRT4577_54144C.1
ctcgaggccggccgggagctgttgcttggacgggaataccggggcaactaaaaaccatttgctatctttcccgctgcgcagccgccaccatgcacacctgacctgacctgcccattgtcacgacttttgcggcaattgcacttctccatcctccccccaactttccgatatgccactatccaatgaggagcttggcgaacacgtagcgtccttagagcgcctactccaagggaaccctgcaggccagaccgctgctctcacggactacgtgcataagctcgctgcgtttgcaacaagtgggaaccgtgtacccatagagaagacgctacaactctttggaaccgccgttggaggccgcaagagatggcaggctccgttcagggacagcggccttcttgcatttgcgctgcggggtttgaccgctgcccgcgacgatgagcttatagcaaagcaatgcttgagagtcatcggtaattctgtggccgataatgataccaacagagagctcgcggtgagagacatacaggccatcattagctatctccagtcagcagaactacgcttgactacactggccgtacttttcaatctttgcaacgactttgatcctgccaaagccgcagcggctacactgagactggatgccacgataaccaccttccttgttctcgacaggataccagaggcagcactcgactacgctacagatctactcagctggactacgagtaacctgaacgacgctcagttcaaggatgaagtatccctcgagacgttcaagagcttactaaatgtagcactccagtttgatgaagatcattaccttgagtacatcgccattcta

SEQ ID NO: 134496 - DNA, 424 bp, Zea mays
  Clone ID: MRT4577_54145C.1
aaaaaaactctctccactcgtcattcattacgggggggcaaaaatcgtcatcaaacagcttttacaaaagcacccccaaataaattccctggccccggctagtaaaacacctatataaccttatgtttagctttttgcataaactacatgattcagggaaaagggtccttgagggggggcccataagtccccccccttcctgatcttgccaatccagctggcccccaccggggtaagggcccccgtgggggggaacctgatcgggaacccggccttgtgcccggggtaggccaacccaaagggcccgaccttccctccggtttcccctgtcacaatccccacctttggaagcaggtcctgcactttaaccccggccctgacaaggaggttccttaaagggaaggaaaccatggaaacccaaatg

SEQ ID NO: 134497 - DNA, 494 bp, Zea mays
  Clone ID: MRT4577_54146C.1
aaaaaaaaccacgggagggctctttcccaacacattaagggtttggtaccaggcaggctggcccccccaagggccctaatttttggtaaaaaaaaacccttcctggaccaggcaaccaccccaaaacaaattgggttttttccttccccggatggacggggcacccgtttaaggcaaagggtttattaggggcaggaccttttggaaaagagggcctttcattaaaaccaaaccaccggcctttaaaaggggggagggggtaaaccccaaagccgaggggggtaccaaccgggcaaagggggccaacccctgggttaaggccgggggggctgagaaatcccccagaagggacctggccttgggaagggggccctggaaccccttaagcccttttttaagttttaaagggttctaacccacaatttttggggggggggtccccccaaccataggactgaggaggccctgaaaaaggagggaattcagggcagggg

SEQ ID NO: 134498 - DNA, 323 bp, Zea mays
  unsure (1)..(323): unsure at all n locations
  Clone ID: MRT4577_54147C.1
aatnctcgggttgacgagctttttctttcagaccgccgcccaaaattaattgggggaggcaatttaaagaccccttgggtctttccccgcaaacaaataaactcggaacaatctacacacgttcaccttatccaaacagtttgaccccattgcacgcacacacccccgcaaaaaccctacctgcgcgcgaaggtcttgagacctgtccaccacaccgtcaatcttttgggaggggaaaaacctcttggccgacaacccgtggagctactttagatttctaccatagccgtcctgatgcttatcgacgacgtcattaccggcat

SEQ ID NO: 134499 - DNA, 520 bp, Zea mays
  Clone ID: MRT4577_54148C.1
gagcagaaccgaaaaaaaaatcaaaacccgcgggcaaaaaaaggcaaggggaaaaagaagggacaatcccacacaaaccaacaagcaacccaataatataaaacaggagggacaggcactataagaggcaccccaaaacaaagggcaaagaaaacggcggggacaaccaggcaaaaagaacaacaagacccaaacacaggaatatataaacgggggagagcccaatgctagagcgccggagccgttaccagagccggagggcaaacagcacaggccgtcttcagctgtacatcctaattatatcgcgcgtgatgttcctaagcagaaagacatcagtccaacacaagagaaaactatccaggaaccggcactcggagcatacaaaacaccagccaaggccccagagaaagagaaagaagacagggagaaaagggaggacgagaagacgaaggagaaagacaaggatcacaagatgaagaaggagaaggaccaccaagagaagccggagaaggataaagag

SEQ ID NO: 134500 - DNA, 591 bp, Zea mays
  Clone ID: MRT4577_54149C.1
gcgaaaaaattatacacgagactgccggtggctagctgcctccctatgccgcccgcgacgctacttccgcaccggcacggcgctgtctcctcgcacgagggcccgcggcgagtatgggttcgcccgttcaccctcgacatggtgggagcgtgacgccgaatcacacaaccgccaggccaccacttccgactcgttgcagttggcagttgctggtgcagcaggccgcatcgtctttcccttccatttcgcctttgctccgcctccgtgttagttagtttcagagtttagttaagtctgcatctttcatttcagtgtctgtaaaataatagttggctgagtcagggagctgtcctgatcgccacggagtggaggtccgcgcaaagcgtgctcacgtgagagttcatgccggtcttctcgcccactgatggtgtgcccggcgtggtagtcatggcgccaaatacggaagacgccagaagactggactgcatgtgttgcatcttataaatgaaaaaaaccaaaaaggcggcggctggtgcgagttgttctggccgtccaaaaaaaaacatcgtctgagtactctctgtttttcca

SEQ ID NO: 134501 - DNA, 377 bp, Zea mays
  Clone ID: MRT4577_5414C.1
cgaacttctaatctgaagactccttctgacagacgatagacgacagacgacagactggtttcttttacgtcttccagtctcttcattccgttccgacttcactccgacttttcttctttccttcttctcttctttcttctccacatccacacctcacatccttcacgatgggtgacaccgccaacgagatcaagctgctgtcgggcaacagccaccccatgcttactaggctggtggctgatcgcctcggcattgagcctgcaaagactttgagcttgaactactcaaaccaggagactagcgtcaccattggtgaatccgtcagagacgaggatgtcttcattctgcagtccaccgcacctggcgacatcaacgac

SEQ ID NO: 134502 - DNA, 503 bp, Zea mays
  Clone ID: MRT4577_54150C.1
ctgcgaaaacgggagaggggatgggggccgatcggttcccgagcgcagcggagggcggcctcggcggcgaggcgctctactgcgcggtcatcctgtggctgtccgtgacgtcgtggatcatcttcacctgggccggcgacggcgggaggaggcggcggggcggcggccgcagccgcgggagcccagcgttcgtcgccgcgccggggctctgcgacggcaccgggcccgaatgcagcggcggctacggcatctgcggcacctgcctcgactagctagccgcgcgcctgctctgctactagtaagtttgtgtgagcgtgtttgtagcatctacatgtcgtcgtcgtcgtcgtggtcgatccgtggcctcaatcgaaccggagcagctccgctgtgttatgaacctagtcagtctacttcgatcttgcatcggttgcgcaaactgacagttgctgtaaattaagctggaagcctgctaaaagtatcagatacatgccttcaacagt

SEQ ID NO: 134503 - DNA, 542 bp, Zea mays
  unsure (1)..(542): unsure at all n locations
  Clone ID: MRT4577_54151C.1
cggcggcggccggcgtgccgatgctgacgtggccgctggtgttcgaccagttcatcgaggaaaggctggtgacgnacgtgctcgggatcggggagcgggtctggagtggggcgcggagcacgaggtacgaggagagggagctcgtgccggcggaggcggtggctcgggcggtggcgaggttcttggagccaggcgggccgggggaggcggcgaggggcagggcgcgggatctcgcagtgaaggcccacgctgccgtagcggagggcggctcgtcgtcccgtgatctgcatcgcctcatcgacgacctggtcgaagccagagcggcaacgagcagctgcaacgctgacagcgagtaagaggaggaattgctggagatgtctcgatctggcgagcaactggaagaaggtctcgaacagccttcacggacaagtacgccatctgcaacgtacgtacgttctcggagtcgaagaaaacacttatggaaataatatggtactgcaccacctcgatttctgtcacgctgaanngacaggacacagatg

SEQ ID NO: 134504 - DNA, 265 bp, Zea mays
  Clone ID: MRT4577_54152C.1
gcatggagaaggacctgaacgagctgcagattctgatcgaggctcacttcgagaacaggaagaatgcggtatagtagctcatttctctcatagacaggatcgaaaagcgtcgggcatagcgggctgaacagcagcgtatacgcaatgaacgagagaaggataggcgtaaccgcctggctgaagatagggcccggcgtgaggagtatgataacaggaggatcgctgatgatgaggcccggaagaagaaggctctgtccaacatgat

SEQ ID NO: 134505 - DNA, 338 bp, Zea mays
  Clone ID: MRT4577_54153C.1
ccggaattgaagggtcgagtcaagcgacgcgttagatcacgagtgcgagcacgtgtttcgaaagaagaagggcatagcaatgtacaacggaatgggcaccatacctgtcatacctgcgacgatgctcttaagaggtcttctagacgatgtctgcttccgcaccaccgacggcagatacagacacgcccgtcacacgacatcgactaatcgaatatgattcccaagagctttggcccttgtggtccaccgttgaaatgcttgtacttccctattaaagacaccttccttccgggatggcgcttcaacgacctggtggacaagggcttcgccgactggca

SEQ ID NO: 134506 - DNA, 1563 bp, Zea mays
  Clone ID: MRT4577_54154C.1
aattcggggccagcggacgcacaaggacagcagagtgcaggaccggagcggagcgaccgagagtgtgtgggagagagatggcgtccagcgcctcgtctaccctgccgctgccaacgctctcgctcgccgtgatcctgctcgcgctgtgcgcccgcggcggcgaggccaggccgccaccgccgctccacggcgtgcgcccgctcgccttcgacgaggggtacacccagatcttcggcagcgccaacctcgcgctcctccgcgacggtaggcgcgtccgcctcacgctcgacgagtccaccggagccgggttcgcgtcgcaggacgtcttcctccacggtttcttcagcgccgccatcaagctgcccgccgactacgcggcgggcgtcgtcgtcgcgttctacctgtcgaacggcgacgtgtacgagaagacgcacgacgagctggacttcgagttcctgggcaacgtgcggggccgcgagtggcgggtgcagaccaacgtgtacggcaacggcagcaccgacgccggccgggaggagcgctacgacctcccattcgaccccaccgacgacttccaccactactccatcctctggaccagcgaccgcatcattttctacgtcgacgagaccccgatccgggaggtggtgcggacggcggccatgggcgcggcgttcccgtccaagcccatgtccctgtacgccacgatctgggacggctccgcgtgggccacgctgggcggccggtaccgcgtcaactacaagtacgcgccgttcgtggccgagttcgccgacctcgccatccagggctgcgccgtcgaccccgccgccgaccacgccgtggcgtcgtgcggcgcgggcctgggcctgggcctgggcccgggcccgctcgccgtgtccgcggagcagcgctcggccatggcggcgttccggcgcgcccacacctcctactcctactgccacgaccggcggcggtaccccgtcgcgctgtcggagtgcggggccggcgcggggctcctccccggccgcatgtttggccccgacgggatgaagcagcaccggcgccaccggggcgcggcgcgcggccaccgcggcggcgcccaggacgacgacgtcatgtgatcgccggtccctggcccctcgccacgtcgcggcggcggggcggggatggttgcacgctgtggattggattggattggattgggttgggggggttgggcggggattgtccgggatggaaaagctcgcctcattgtaccattcgcgccatggaagtaggtcgtgtttattgcctgtggtgggacccatgtccgtgccaacgccaattgccagccgcgtagccgttgatgaagaaaaagccattcgcttggccgctctttaccttgtagcgttaaagggtaaggtggtgtttgggaacaaagtttttctgcggttttggaagaatactgcagtattctcaaatactgcagtattatataaaaaaaaaaaaaaaaaaaaaaaaaaaaaaatggagaatttaaaacaaaaaggaaaacaaaaaaagggggcggccgccgactagggagct

SEQ ID NO: 134507 - DNA, 552 bp, Zea mays
  Clone ID: MRT4577_54155C.1
cgggattctattcctccacaccgatcactcgctgctcccctctctcgccggagctccggggcggatggcggcggaagcagcagctcctcccgcctgcgtgatcgcgtgatggacgcacacaccggcgcgctccagccgatggacgacgccggaaggccaccaccacacgctcccagtggcggtgaccgcctccgcctccagccaccgccgcgcccggaagggggggagccacacacactgctgccgattacaagttcatgtactaacggaacgtaatgtaggaaaagaggatagcagtaacagatggcatagaggaatgaagcgccactatgctacaggattgatgacctgagacctgccgggagcctgaataacttacgattgatgattctacaactgcgctaagaaaccatcctgatatccattcaggcttcctcatggtagcaggctatgatctctgtcataacactgtgataatgaccaagactgtatgggatagtgatagctgataaatgatcagatgaccagaacaggtaattgcgctcctacatg

SEQ ID NO: 134508 - DNA, 185 bp, Zea mays
  Clone ID: MRT4577_54156C.1
taaggtcccaaacaaaatccaaaccgctttacctttccccaaatagaatttaccgtttttatccccatggatttgccccacctacctcccacattttacatttccctaccccaggagatctgtaaaaaattaccccacgtgccttccctcaaaacccgttaacctcaccttgataaccttacctc

SEQ ID NO: 134509 - DNA, 520 bp, Zea mays
  Clone ID: MRT4577_54157C.1
agagcaaactagttagtccaattatttgtgttgggcaattcaaccaccaaaataatttaggaactaggtgcaagcctaattccctttcactatcacatataagtaagcaactttgagattattgaagctggtctagagattgattaggacgatgtagagcatgtcctttgctacaaaagctcatgaacacatctgtacacgcatgtctatccgatgtgccatcggacacatccactgcactctgtgcagcctgttttcttcatgacttctcatttcttttcttgccttcctgggcttctattgtctcatgttttatactcccatttgctttcgtccaaatccacgccgcatcctttacactataaacataaacactagagaaatatattagttcaaataattatgttgatcatcaaacactagaacctttaattaaatagaccgactccatttttttattacgcagattaatcaaaccttggtggttttcttaacaaaaccacacgtgcctgtaaataaa

SEQ ID NO: 134510 - DNA, 629 bp, Zea mays
  Clone ID: MRT4577_54158C.1
gttatattattctataatagtacatacatatttcataatccatcgtgcatattcatgtcagggtgactgatatttcatagagctcagaactattcgtgaaaatggacatcgaatttttaagaactgccgatataaatatttatttacaggcacgtgtggttttgttaagaaaaccaccaaggtttgattaatctgcgtaataaaaaaatggagtcggtctatttaattaaaggttctagtgtttgatgatcaacataattatttgaactaatatatttctctagtgtttatgtttatagtgtaaaggatgcggcgtggatttggacgaaagcaaatgggtgagcatgaagattaacacctcaaagaaatacattagaaaacttattgaagatctgtcaagatcatgcaggagtataaaacatgagacaatagaagcccaggaaggcaagaaaagaaatgagaagtcatgaagaaaacaggctgcacagagtgcagtggatgtgtccgatggcacatcggatagacatgcgtgtacagatgtgttcatgagcttttgtagcaaaggacatgctctacatcgtcctaatcaatctctagaccagcttcaataatctcaaagttgcttactt

SEQ ID NO: 134511 - DNA, 239 bp, Zea mays
  Clone ID: MRT4577_54159C.1
ctaatgggggttaccagttgagatttaggggccttgagggtaccccctaattatggttcccgacactaccctagagttgtaggtgaacctttgcttttgtctgatgatcactggtatgttgctgaaaaaatcctggtattccttgaactattttatgactcaacttgtgttctatctggtgtctactatccaacatcttcattgatgatgcatcatataattcatattgctaaacatct

SEQ ID NO: 134512 - DNA, 463 bp, Zea mays
  Clone ID: MRT4577_5415C.1
caagtacaagagagcttaccatgtatccttaatcaaacacacatgtgcctacaagagtgcacattatgtgatagactggcacacattttacataatcactgtgctacacactactagggtaggctcatatgcatgctggcgccatgcctaatgatggaggggcaaagacactgcatggctgcaattgcaccacccattgctagcttacatagagcaacgatactcacgcaggttgttgttttgggcaagcactactagaggcgttccttactgtgagcaaaccgcagacctctcgtacaagcccctccgcaactacgacgatcgggggctctgcgtgaaccggcgctacgcgctctttagaacactcctgatgatctagccggtcagggcggatcgcgcgagcctgcccgtggccacctcccgggcgataggcttccattcaccggcttcatggtgaggtacg

SEQ ID NO: 134513 - DNA, 908 bp, Zea mays
  Clone ID: MRT4577_54160C.1
ctggagtcttgtgttttatttcgggggtcttgtaccaaaatagcggggagtttatctacttgacccctgacccattctctctctctctctctctctctctctcccttttcaatttcgggggctttatttctctcctcccacgccttgcatcttcttgatgcgttgcgtcccgagtcgaggcagacatcggaggcgcgccactgacttagctcgcgatttctagatccgcaaccctgcgctgctcaactccgattcttttagttcggattcgggtagcagcagggcttcggcggcgatgactcgattgatacgaattggggatttcttactgtttgcgctctcttcgtatcggcgctgaagggctcagttcgagattaaaacaatttgggtgttggggtcctttcttcttcttcttctactactgctggtcaagttcacagaaatcgctggctccgtggtccaatggacgagtccggggaagcgagcgtcggctccttcaggatcgggccgtcgacgctgctgggccgcggggtggcgttccgcgtgctcctcttcagctcgctgtggcgcctgcgggcgcgcgcgtacgcggccatctcgcgcgtgcgcagcgcggcgctgccggtggcggcgtcctggctacacctcaggaacagccacggcgtcctcctcatggccgtgctcctcgccctcttcctgaggaaactctcggccgcgcggtcgcgggcggcgctcgcgcgccggcgcaggcagcacgagaaggccatgctgcatgccgggacgtacgaggtctgggcgcgcgccgccaaggtgctcgacaagatgtctgagcaggtccacgaggcggatttctacgacgtagagctcatcaggaatcgccttgactgactcgctagacggagggagga

SEQ ID NO: 134514 - DNA, 1207 bp, Zea mays
  Clone ID: MRT4577_54161C.1
gaccttatcgtcacctactaacttcatattcttacattcagctttgcaaaatttacttgactggattttttagcttaacatataactcagggagacatgcgattttgggacgatcaaactgttggtaagtaaatacttgttggcctgttgctcttcttttagctatagctgaccataatttttcttggttgaggaaactgtagttagtgatagctcaatattttgtgtgtagaaacctgtataaagtattggacatgtatttcatagtttttgtaacttataaggctatgtaagtcacagattaactcttcaaagaattatacaacaaagaaattagcgctcagaaatgggatctttgcatttttagtcttgctcattttttattattcatgtatgactcatggttttctagagaaaaatattggaccgttacaataatgctaatatggtgttaatctaggattgctcattttgagtattcttgtacgactcatggttttctagagaaaagatcttggactgtagcactacctccacttgtgagatctggacttctgtagttatatgccatagcaacactgaaagtgacaatgtttgaatggtatagttcttttccttggtcggtgatatatattcacttgatggtatagctctgccaaaagcacaacagctcgtgcttgatccacaaaaaataggatgctcatgtgattgtattttgattttttagttttatttttgttgcatgtataatccaatcgccgagatcgacctctaccgtctcgagccataggacctcccctccctcttcaacatccgcagtcacaacgccaaggggtagttcttcgcccgtgcggtcgaggcggtcccagcaacaggaccaaccacgcacacgccgatggggtactggagatccggacggagtagcattcttgctggccaacgatcgagctcttgtagtcgatgatcttattgccacccgtgtgcagctgtcaaacttatcggagatggacgatgaagcgttggatcaaggagatggaggttggatcaaggagatggaagaggtggccgccacggccaccacttccaggtcgattatgccctttagggccatccagaagggcaagccgttgtcggtgtccttggcatcgagaagaagtccacccctaagctctagaactccaggtgctcgccgtggccacaagcgtgt

SEQ ID NO: 134515 - DNA, 457 bp, Zea mays
  Clone ID: MRT4577_54162C.1
ttttaagggtcctcctgaattcaattcttcggaggagagttgtctaatttcctgtgctttctccagaagagtgaggatgatctgaatgatagccatccgcactttgaagttgccaactgtattgcgtctccaagtccgaagagccctggccgtgcgagtcatcttcacgtgaaggcgaaggattgcatcatcagtgttaactgtagaattccatgcttgatgaactacctcattgaacccctccaactgtggccagaacgattcgaatctgaacccccgatagaaattaaccggggagtggccttgcattaacagtgggcaatgggccgacgttcggtgttcatgcccccacctcagccgaggggtacaggtcatgccattcggttgtcgcgaagaatctgacaatcctagtcatggcaggggcaagcttgactatttgaccaggatcctatactag

SEQ ID NO: 134516 - DNA, 308 bp, Zea mays
  Clone ID: MRT4577_54163C.1
cccacgcgtccggtagattaatgattcctttctagcctgaccacaggcacattgcttggtctgctggtccagtgtgtcgcagacccacccggaagtgaaacaaagtgaactagtaaaaaatcagagtacaaatgcacatgtccagtgttgctcagatacagtagtataaggcccatttggtacattactgaagggggaaaaaagaagctgacttaacaggtttcaccggcgctgtgaaaagagtgagaaaaagaacctctataaacaacaaatgaacagtgtgtaaactgtagctgtgtctgaagctg

SEQ ID NO: 134517 - DNA, 145 bp, Zea mays
  Clone ID: MRT4577_54164C.1
ttttgaatgcgtaaatggtacgcgccctgttgcgcatcattaaccacacccgctgtggtggttactcacatataaaccggtacacttgccatttccataccccccaatccttaagatttatttcctccctttattaacacgttcg

SEQ ID NO: 134518 - DNA, 800 bp, Zea mays
  unsure (1)..(800): unsure at all n locations
  Clone ID: MRT4577_54165C.1
aagtcaatctgccactggccgcgaggccgacccacgccacgctcctcctcagctacagtccctcctccaccgctgctgcgctcacgctcctcgacctcccacactcactgtcagtgtaaagctcacgccggaggccggagctagctgccccctgcccgtgcgtgttcatcctggctgctcatctatctctcttgctccgatccaagatccaacaacgagagcacaggtgacagggtggtgggcggcgggattgcggttgcggcagtagggttcaggctcagataccagcctcctccgtctccgtttccagcgggggcgagcgctaccggggagctcgacagacgccgcgccgcaatgcccaagatgttcggtttctctcggcgccggatgaagctgggcaggttgaagggccatctgcacgaccatttccatggccctcgaagcccgtctcggaccaccaagcgttccagccatcccaacgcagaggatccattggctacctcagtgagtgggcgcgccgacgacctcgcctggcgctgctcgtccgacactttcgatctcaatgggcgcgatttcgagagctcggagaactgggcggtcctgtccaccgagggtgacaagccagctcctcgtttcgatcatgcagcagccatggtggggagcaaaatggtggtggttggntggcgactccgggtcatctttgctagatgatactaagatattgagcttagacaagcttaccntggggatctgttgctcctaaangtcgaccaccattgaaacggcgttctctgaagctg

SEQ ID NO: 134519 - DNA, 2686 bp, Zea mays
  Clone ID: MRT4577_54166C.1
ggggggccgcgaggccgacccacgccacgctcctcctcagctacagtccctcctccaccgctgctgcgctcacgctcctcgacctcccacactcactgtcagtgtaaagctcacgccggaggccggagctagctgccccctgcccgtgcgtgttcatcctggctgctcatctatctctcttgctaccatccgacaaggttgaagtactagtggtgctgcaaaacgagcactgtttcagctggcggtctgcgcccgaggtggaacccttactgtacgacgagtctccctccgtttccagcgaggccgcacgctaccggggagctcgacagacgccgcgccgcaatgcccaagatgttcggtttctctcggcgccggatgaagctgggcaggttgaagggccatctgcacgaccatttccatggccctcgaagcccgtctcggaccaccaagcgttccagcagtcatcacaacgcagaggatccattggctacctcagtgagtgggcgcgccgacgacctcgcctggcgctgctcgtccgacactttcgatctcaatgggcgcgatttcgagagctccgagaactgggcggtcctgtccaccgagggtgacaagccagctcctcgtttcgatcatgcagcagccatggttgggagcaaaatggtggtgtttggtggcgactccggtcaatctttgctagatgatactaagatattgagcttagacaagcttacctgggattctgttgctcctaaagttcgaccaccattgaacgggcgttctctgaagctgaggccatgcagaggtcattgcctggtttcgtggggaaagaatgttattcttgtgggagggaaaagtgatcaaccttatgacaagatatcagtatggaccttcaatacagagagtgagctctggtctcatatggaagcgaagggtgacattccggtgtctcgaagtgggcatacggtgattagagccggtcctgttttaattctctttggaggtgaagatgccaaagggaagaaactacatgaccttcatatgtttgatctgaagtcattaacatggcttcctctgaactataagggtgctggaccttctccaagatcaaatcatgtagccgccctttacgatgatagagtcctattgatttttggaggtcagtcgaagtccaagaccctgaatgatattcatgctctagattttgaaacaatggtatggtcaagggtcaaaacccatgggcatcatccatcacctcgagcaggttgctgcggagctctttgtggaactaaatggtatattgcagggggtggaagcaagaaaaaacggcaccctgaaacatgggttttcgatgtccttgagtccagatggtctgtttgtgtagtgcctcctagttcctcaatcactacaaagaaaggtttcagtatggttccattgtactacagggacaagatcgtgcttgttgcttttggagggaacaaaaaggaaccatccgacaaggttgaagtactagtggtgctgcaaaacgagcactgtttcagctggcggtctgcgcccgaggtggaacccttactgtacgacgagtctcctccaggctcaagggaactcgccgaccatctcagcagctgcgctccaccgtatcctactagctccgcggcgaggagcggtctcgccgccacagcggagaactcctgcgggaggaaacccctcccggactcactgctacggacctcgaacctcgggggctcgtcgctccgcaggcagttccgtcaggaagaggagtgcagcagcctggcgcaaaagctgcagaaaccgatcgacgacgacaggtacaaggacgccgccgacgagtgctccgagcatcaaccgccctcggccacgaaccctaaaccgcggaacgacgcgcgccggtcgtccccggaggtcgtcgtcgacgctaaagcgaggaggctgctgggcaggagctcgtcggacatgaacaaccaccaggacgcaagggtggccgccctggtcaggaggaacgtggcgctggaagagcagctgtcggcggcgctggcgagcaaggacgaggcggagaagaacctgtccctggtcatcgacagcaaagacggcctggagaagaggctggccgagaaggacagggaggtcgaggcgctgagggagaaggcgacggggttggagctggcgcaggaggaggccaacagcctctccaacaccgtccacgccgacaacgtgcggctggagcgcgaggtggcgttcctgaaggccgtcatggacgagacccagaaggaactgcactcgactcgcggagttcttgcaggagaacgcgcacgggcattccagcttcaggttgaagtctttcatctgaagcagcgcctgcagacgatggaagggaggtcacccgcagcaccaagaaagcctcagaatacgtagggtagggtgcaggcgtgtagagtttttgagcgatagatctgctgtagattcattcagtgttgtactgtaactgtagtaggtgccggagctactgtcatttgtaatattattcgacgcgatgcgatgcaaacgtatttcgcaactgggacgtacgtaattgtgtagaatgagttgcggtcgactatatatgcaagatgtcttttatctaagagttctgagttattggtcaaaaaaaaaaaaaaaactcgaggcccgg

SEQ ID NO: 134520 - DNA, 369 bp, Zea mays
  Clone ID: MRT4577_54167C.1
cccacgcgtccgcggacgcgtgggaaaaaaaaaaaaatataaattaaaaaaaaaaaaaaaaaaaaaaaggagatggtaaaaaaaaaaaaaaaaataaaaattacaattttatatattggggcggccgttttaagggatccaatctttctcccccgtgcttgccattcaattttctttttattgtgccccctaaatcctattttctgggccgtagttttactacctttggattggaaaacccctggctttaccccccttaatttcctggcagttcttcccctttttcccagttggtttataggtaaaaaggccctcacttatcgcccttcccaccattagtctcccctgattggcacatgggcccccccc

SEQ ID NO: 134521 - DNA, 854 bp, Zea mays
  Clone ID: MRT4577_54168C.1
gggctgcccattccctagtcctccctccaccagagaacccgcagcgcccgccatggccgtctccgattccctcgcgcatccagggctggcgatcgtggtcatgggagtcagcggctgcggcaaatcaaccgtcgcggcaatgctcgccgaagccctgggctgcagcttcatcgaagcagacgactaccattccgaggcaaacaaagccaagatgagcgcgggcgtgccgctctccgacgccgaccgcgcgccgtggctggagtcggtgcgggacgccatccgggggcggctggacggcggcgaggacgtggccgtcagctgctcggcgctgcggctcgggtaccgggatgtgctccgcgcggccgaccgcgcatacgagccggggcgctacgccgcctgcagggtgaggttcgtgtgcctgagggcgccggcggaggtgctcgcggagagggtgctgcggaggtcggtggaaggggagcacttcatgccggcgagcctgctgcggagccagctcgacctgctgcgggtcgaccccgcggagggggtcgccgaggccgacgcgacggcgcgccccgacgacatcgtccgcgacaccgtcgccctgttcagggacgagctagcggtgtcgtccggcgtccctgcttgacttgtttctggatgcgaacgcggtgcagtttcatggtttcatcccatgatgcagtcagtattcattcatccaccattaaagaacctccgtgcagtcggttcgaattaaagccggttatagactcgtgcagctgcaacctgtatagataaaaacactataaaaacagtagaaatttatacgaattaaagccaaaaaaaaaaaaaaaaaa

SEQ ID NO: 134522 - DNA, 479 bp, Zea mays
  Clone ID: MRT4577_54169C.1
cccccgaggtcggccgggaaaaaaaagaccatcctaccaactcttaacccataaactctaaactttacaatggctgaaccttccaggctaacggaaacacaactcggtcgccggtaccgtcaaggagaccatcggcaacgtgctcggctctgctgactggcagaaggccggcaaggagcagcacgccaagggtgaggccgagatcaagtcggccgagaccaagggctacgctgagggcaccaaggaccaggtctctggcaagtttgacaacgttgtcggctcgatcaccggtgacaagtccaaggagatgtcgggcaaggcccaggaggagaagggcaaggcccagaaggagatcaactcttaaacattgatcgattgctcgatagctgtttccttgttccatcctttcgctcgtctgttctgacgtagcatcctcaatacaagataccaatccgaaaaaaaaaaaaaaaaaagcggcc

SEQ ID NO: 134523 - DNA, 385 bp, Zea mays
  unsure (1)..(385): unsure at all n locations
  Clone ID: MRT4577_5416C.1
caccgcggcgccacaccgcgtgcgttggctgcttgctgccccgtgttccttggctcccgccgacaccgagcgccgccactctcaccggccaccgccgtcatggctgccccgccccgcgccaccgcggtcctcgcgtggggttccggggaggacgggcagcttggcatgggcgggaacgaggagaaggactgggcacactgcgtggaggcactcggttcctacgccgtcaccgtcgtcgtagccggtagccgcaactccctcgacaaaaaanaagacggccgcctcttcacttgggggtggaaccagcgcggtacgctcgggcacccgtcgaagacctagactgagagcttcctctgccccgtccacgctcttgtggggttgaaga

SEQ ID NO: 134524 - DNA, 166 bp, Zea mays
  Clone ID: MRT4577_54170C.1
aaaactggcactccaccggggtggcggccgccctttttttttttttttttaagagacctaaatgtttgtattctgtcagtacaaagtatgagtcatgagaacaagagtgaccaataactatctctatgcacaacaccatgccatctacaaatgtaagaaatacaca

SEQ ID NO: 134525 - DNA, 247 bp, Zea mays
  Clone ID: MRT4577_54171C.1
ataaatccaaacagacataacagagcgtgaatgtcccggactgcatacctcactgtcgctcctgctggaatcgtctgctgttgcctgctagggtggatctctgcattgaacccagccgttcccttctgtctctcatctactgcagcccggagatccactcgttcactctcacgctgatgcctagtgccatactgacgcatgcgcactgggtaggctgggagtcgtgctgccatcaattctcgtctgc

SEQ ID NO: 134526 - DNA, 972 bp, Zea mays
  Clone ID: MRT4577_54172C.1
atgtctcgagatcacgccaagagagagatcatgaccggcgacaagcccgcgagctcggggaagactctctcaagagagtccgacaacaagtataaggaggaatcatcttcctccatcaagtcacatcagaggggtgacaagaagaagaggaagaacaaagtggtctactacgagaccgactctttgtcaccctccacatccggtaccgactcgtccactacttctaagcgccatgagcacaagaagtataaggtgtataacaaggtgcaaggattaaaaaatgccaaagaaatttgggatgtcctcaaaacggcgcacgaaggggacaaggtgaccaagatcaccaagagagagacaatcgaggcagagtttggtcgattcgtcctaaacaaaggggaagagccgcaagtcatgtacaatcggctcaagacaatggtgaaccaagtgcgcaacctcgggagcaccaaatgggatgaccatgaaatggtcaaggttattctaagatcccttgttttttgtaatcctactcaattacaattaatacgtggggatcctagatacaaacagatgtctcccgaggaggtaattggcaagtttgtgagctttgaactaatgatcaaagactccaaacacattgtcaacttggagcaaggcgccacctccacacccgaggtgcaacccgttgcattcaaagcaactgaagaaaagaaggaggagtctacactaagtagacttccaatcgacacctccaagctcgacaacgaagaaatggcgctcatcatcaagagcttccgccaaatcctcaagcaaaggagggggaaggactacaagccccactccaaaagggtgtgctaccggtgtggtaagtccggtcactttattgctaaatgtccatattctagtgaaagtgatagggatgaagacaaaaaggggaagaagaagtactacaagaagaagggcggcgaggcgtga

SEQ ID NO: 134527 - DNA, 389 bp, Zea mays
  Clone ID: MRT4577_54173C.1
gccgtttatagagaaggaaaatttcactaacatcgtagcttctgttaaagatgggggacccccgcccgttcttctacatgtccgtctgcggtgcccaaggccaatcgttctgaagtggaaatggcggaccacggtaaccaaccgacctggcttaataagctcgcggtgcagatgcacctgaactcgatcatctctgaaggtgagcgggtccagtaacatatgcccatctgtctaatgttaagaaaggagattaggcacaaggaactacatgacacacagcctttcgggaccttcaatgagtgtatgcactggcataaatgtcccagcgaggcagacccccgtatgtgctaatgctcctggtgagaaaggatgcaagaacttgatgattg

SEQ ID NO: 134528 - DNA, 305 bp, Zea mays
  Clone ID: MRT4577_54174C.1
tctgtttgttattgttttgttaattacaccataatgctaatttaaagagactccaaatctcaatgaagccagctcacagtgctgtgtgccccggtcacctagcaagctgccgaaccaaaagaatttgcaccccgctgcgggcccacgtggttggggccctgccctggcagggtcatcctgtgctcggaggccatctcgggcacaggcccaccccgccccacccctccagaacacggctcacgcttacctcaaccatcctggctgcggcgtctgtctgaaccacgcgggggccttgagggacgctt

SEQ ID NO: 134529 - DNA, 434 bp, Zea mays
  Clone ID: MRT4577_54175C.1
aaaaaacaattaatccaaatggtttaaggcaataacgcaccgatcggtacatacttactgacacagctatacgagactcctagtttgttcatccacaacatgtgactagcactgccaatgttcagacctctacaggcgacgcactcgtctacgaggtcccttttggaaaggcacagcccagattctactgcaacaggggcacgacgcgtagactgcgtgtgctcatcttgccgtgtttacttgattgaagcccatgcttcattgacttggagccggagaatgcggagatctgctgctgctacaaatgcagaacagtctcaatgtcataggtggctaccatttgaaagctcctgagcgagctgatccctttgaacccttctcagcagatggcttgaacccgttctgaggaactcagcaacgactttgacatagct

SEQ ID NO: 134530 - DNA, 471 bp, Zea mays
  Clone ID: MRT4577_54176C.1
ccggccgggatagtctcattcactacttctaagacaaaacatgagtgtgaatgcgacaatcatcgtgcccttccatgcgttcacaggctgatatgtgtgtgctgttgtcgttcttgatgagcgcatgatggtagctactcctcccaaagtccccccaggcaagaacatcacaggcacctatggtaaggactgtgtggacgctaaagatacatggtgatggctaaggcgacaggctgcctgctcgccgatgacaacggttgcttcactgcacgatacaattgcacgtgaacaagccccccttcaatagaatgggcgcatgctgcaacatccccatcttctaggatgccctgtcctgtggatcctgcttcgagattcagtgcaataatactggggattgctccggaaagaccgtggcggtgcacataactaacatgaactatgagcctatcgcggctcaccacttcgatttag

SEQ ID NO: 134531 - DNA, 313 bp, Zea mays
  Clone ID: MRT4577_54177C.1
actcgtactccagcgtcgtatgcggctctagggataggaggaatgcttcagcggttcaggagcagtggcctaagaagagaatgattactgatcattcaaacatgtgccatcagtgccacaggaacgatagcgtaagacctgtacgtagccaagactgtgtcggccgaaacagacaatacagatattgtgtgaagtgcatcagacgctgtgatccacatttatcagaagatgatttagcgaacaattgcccagtttgacaaaataattgcaacagtaaggcttgtctgcggtaagacataacctgagccaactc

SEQ ID NO: 134532 - DNA, 700 bp, Zea mays
  Clone ID: MRT4577_54178C.1
atcctcccattttcccattcgttgggagtcaggacgagggagggaagagcccctgacgatgtcggtgccggaggcggggcaatcggcggggagggacgagcaggagatggacaattacgagcagcaccagaccagagtgctcatggcgctgatgcagggcttgtgcgccgcgaggtaccgcaaggccgacaacaccccctgcctcgtcgaccagggcctctacctgggttctgttggagcagcactgaacaacgaggctctgaagagcttgaacatcacccacatcttggttgttgccagatcactgaatcccgcctttccagcagaatttacatacaagaagatcgaggtacttgacagcccagacactgatttgggaaagcatttcggtgaatgctttactttcatagatgagggtatctgcactggtggcaatgtgctggttcactgctttgcaggtcggtcacggagtgtcacagttgttcttgcatatcttatgaagaagcatcagatgagcctgcaaagtgccatgtcactagttagaagcaaacgacctcaaatagcacccaatgcgggctttatatcccagctggtgaactttgagaagtctctgcaagtggagcagggacaaagaacgttgcaatctaactaactacaggtgtaaatatcaagaacccgctgtgaatagcttccttactgc

SEQ ID NO: 134533 - DNA, 335 bp, Zea mays
  Clone ID: MRT4577_54179C.1
ggggtagggagttatttgtattgggttttgttttttcattttttttttaaattttaaattttttttttttttggaagagaggcaaagggattggataatgcaggggaaaagaccttctaaaacctaaaatttttaagggaaattcaaaaactatacattaaaaactcatttacaggggggatatcttttccaaaactaagggttgtttgggctttaccaaaacaatttatgaaagatgactaaaactcccccaaatccatgaaaaaaaccaacctcgcttagggttaaccaaacaaaatttaaagggggaaccaaaagccggcaaaaccttaata

SEQ ID NO: 134534 - DNA, 291 bp, Zea mays
  Clone ID: MRT4577_5417C.1
gtaatctattgattgtttaattagagggtttagcgtttttaacattgaccaggtttggggagttaggtttccctgtgagaaaagaaacctggccaggggtcttatgtgggtaacccagggagccactagggccttattatacaaatctctcacggggatattgcttacggagggggcgccacttaaacttggtggtgaaaccaggggttttaatacccaagagtgatgtgccaaaggggccatagagccctactgcattctctgaaccatggttgcgcgatgagagaagtt

SEQ ID NO: 134535 - DNA, 303 bp, Zea mays
  Clone ID: MRT4577_54180C.1
atgtacactgccccatcaagtccagatgcaaatatcctaggaaagaaaactggattcagagtagagcgaggagaatttcgattttcctttatgcaaaacctgaaatgctacataaccaagccgctgctggagatgttgtcgtttgaccatcggccctgcccgtatgccgggctgggtggcgtcgagatcttcgagaagaggaagacggtgctcggcccgtctctcttccactactaccaggagtcggctgtcacaaacctgtatgaggctctggacaaccgtgatggtattctaagcaggtag

SEQ ID NO: 134536 - DNA, 417 bp, Zea mays
  Clone ID: MRT4577_54181C.1
accttccgggttatccaggccaaaagggttcacacttacctaataaaaagaccaaaagttgggttcaacacaagagcaaaggagcaacagaaggcttctttggtctggcgcaccggactgtccggtgtgccaccggacatgtccggtgcaccaggggactccaacttcgaactgctcggcttcgggaatttctagagggcactccgctaaaattcaccggacagtgtccggtgctccaagggaggtcgtcctcaggaactcgccagcctcgggttttcactccagccgctccgctataattcaccggactgtccggtgtgcaccggactgtccggtgtgcaccggactgtccggtgcatctgcggagcaacggctacttcaggcgccaacagctacctgcagcgcatttattgcgcg

SEQ ID NO: 134537 - DNA, 352 bp, Zea mays
  Clone ID: MRT4577_54182C.1
gccacacttgcggactgcttcccgacgcaggggggccccacaacgatccaggtctcggccccgcactggtcacagccagcgcgaacatggaggagcggaggctatcaccacgactactggcaactctgttactcttgctgctgctagccacgctcttagcagacgaaacttccgacgcagatgcgacatgcctcacgcaaggagcgtctaaagcggctgcaccaagagcagcctcggacgctcaggaacagcttctgctgtcgcggacgctagtcataagctcctagcgtctgggccaaggacgaggaccagcctggtgccgacgccagagccgtctgacgtgcgctgagcc

SEQ ID NO: 134538 - DNA, 884 bp, Zea mays
  Clone ID: MRT4577_54183C.1
gggtacctcgaggccggccgggccgggcttgtgcttcggcattatccccagctttttctgcggcgtccgttcaggaagctgtccggcaacgagccgctcggcactgggcggtggccgtgcaagagcgatcgggaccgcatcgctcgtctgctcctccaggcctccgcctccctcatcatcactgcagcggcgagaagaacaaggggcggtccggcggtggtctccactgacatcgcctaccatggctaccatgctgcgccggtgcatgcgggatctgcgcccgctgcggtctctcgcgagggtccccagaccgatcttcggcgagagtccaacatttcttaaatgtagaagcaactcaacaaaggcatctccaaagagttctacacagaatgctgccccaggtcctcaaggacaaccttctcagtcgggaagtaatgtttcaaagcttgctcttggaactcttgtggtcggtgcagcagctataggtgcacatcaacttggttatatagatcttcaatttaaggacaagacattgccttttagcttaaagaaggaagatgtcggaaaggtggtatatgaagatctgaagattccttctgaacagaaggttgaccagacacaaaacatgtcaggaccaaacactgagattgttcaagagaacaataatgagactcatacttcaaaggactttcgaaatggtggggtgggggcaccagagcttcaatcaatggggatcagcttgttcctgcagaagaaaagaaatcagaaaccctagcccatgagacaattccagttccagatgaacctggatctgatactgaaatgccatctgaagattctccagctgttgatataaggacagttgccatcgatgctactgaatc

SEQ ID NO: 134539 - DNA, 279 bp, Zea mays
  Clone ID: MRT4577_54184C.1
gagctggagacggccactgagcgctacctgcacgtacgcccccagcctttggctggagaggatccccctgcttaccaggcccgcttgttacagaagctgacagaagaggtacccttgggacagagtatcccccgcaggcggaagtagctgagggcaagggtcccgatgagggtcccatggcctgctccctcaggaacagctccagcaccaataaagaggcatcttaccaaaaaaaaaaaaaaaaaaaaaaaaaaaaaaagggaaaaaaaaaaagggggg

SEQ ID NO: 134540 - DNA, 314 bp, Zea mays
  Clone ID: MRT4577_54185C.1
cgaacttcaaacagtcaaaaaggtgtgaaacaatcaggatatggcacgtgcaacatgtggtcggtactcaccggtaagggtcggtaccaactgattctccagtgcatggatcagtactggccggtcgaaccgaccgacatctgagctaaaccgatcgggactgattgctatctattgctattttataagctgctcaaactagagttgtgcagttcttctagttaggctatctccagcagctcttatatctcattacctatcccaccacctatttcaactccactctgcaaatagtgctatctacagtgcaaaac

SEQ ID NO: 134541 - DNA, 263 bp, Zea mays
  Clone ID: MRT4577_54186C.1
ccagactaataaccatcgccaatatcctgtgttcttgcgtgcgcgttgacctgtgctggcgactctgcgctggtccctctcttcttctgtgagaagccaccagagtacgtacgtacaatggaggaggaggagggcggcgtcacttcgccgttgctgctgcggcaggggcaggagaaggtgtaccacccaggctgcccgggctgtgccaacgaccggaggaaggagctccaggagggactgccgtacaaggagttcttgtacgt

SEQ ID NO: 134542 - DNA, 1556 bp, Zea mays
  unsure (1)..(1556): unsure at all n locations
  Clone ID: MRT4577_54187C.1
acgcggtctctagaggccggacgggaactgaggatgactgtaacccgatggataccatctcaacaaactgacaagaggaatgcctgaatacactgttgagattcctcagggtactattgtaaacgatagagttgacaaaattgcatctcttgtgttacttggcatggcctcatcaaaagcaaatgcttgggcaggacctgagcactggaaatatcggaaagctaaagatttggaggctgctccaacttcatcaggtgattcagaaataacaaataagataaagaaaagaaccaaggataaacctgacattggtttcacaaaagcattggacaatgagcttccaaatatcttcgcggctcccaaaaatccaaagacattactgtttcctgcaaacagggctatttgcagcaataaacttccagaagattgccattaccggcctgaaagccttgttaaattatttcttctcccagatgttttgtgtcttgctaagagaagaaaatcacttgatgctccagtggataataatgatgactttatcccatctgaaccttgggaagatgacaacttttgcaatgaccacattgatgaaggacatgtgtgtagtgatgtagaagagccagtaaatcttatcaataaaccgagacaggtcaacaagattgatatacagtatgacaaggtatcaaaacaagtggatgttcatgctttaaaagaagtgctttggaatcacatccatgcatctgctgagactggtcaggaaagagaggaacctggaccaccgctgcgcctatctcaggtgttacatgaccttccaagcagcagcccagatgctgtagcaactgatatttcgccacacctgtatttcatctgccttctgcatctggcaaatgagcacaacttgaagctctgtgatcgccccatgttggatgaaatagacatatacatgccgccgacttcaccgcttgtgaagtgaaccatgctgtaccggagatgctagtcttttttattttgtttattgttgaccggcctaaaccaacgccatgattattgggtagtgatctctgattgttgctaaggtgcccgtcgtgacatgctcagctcactgatgtaacttgaaaaatgaaacttcatatattttttaaagtagtgatgctcggaacgatactgcattgactttttttttaaaaaaaaaaaaaaaaaaggggaaaaaaaaaaaaaaaaaaaaaaaaaaagaggaggaaaaaaagaaaaaaaaaaaaaaaaaaaaaaaaaaaaaaaangaaaaaaaaaaaaaaaaaaaaagaaaaaaaaaaccnangccccccggggggggcccccccgccaaggggggaaanggggaaaaaacaaaaccacggggggcggggggggagagacaaaaagggcccccaagcgccccaaggggggggggaaacaaaaacagggcggcgcggcaaaaaaaagagaaggcggaaaacccggcggagacccacaaaaaagcagcgggggaacgcgccccacccgcagaggcgggaaaacgaagagggaggcggcagcgg

SEQ ID NO: 134543 - DNA, 553 bp, Zea mays
  Clone ID: MRT4577_54188C.1
ccggccgggatctccttgatagctagcacaagcatagagttggggcttggtatcccacggctgagagacatgcggtacgagggcggcctcttcttggctctcaacctcctgtacttcacggtggacaacgcctgcggcaggtgcccgacccccacgcccccggaggagccaccgcccccgactcctgctacccccccaccttcgacgagggcgacgtggccgttgaacccgcttggggtgggcacgggcgccgatgcgctccgcctccccaaaggataggctggccaggtgcctgaccagccatgctgcatcctcctcaaaggacttgcggattttgaggccgccgtcttgctctgtcacgggatcaagggcaactggttcggacggtcctcatctagggccccatcaagttcagggacctctgcaagtactgggtgaactgcgtgcccaggggctacttgtcgcactccaatagcttccggcagttcacacactcgtctggtgttcacgctcgagatttcatatgcacgccccctgcatgtcacgaatgcat

SEQ ID NO: 134544 - DNA, 347 bp, Zea mays
  unsure (1)..(347): unsure at all n locations
  Clone ID: MRT4577_54189C.1
nctancttccgcccacacatccaccgacgggagggctttttaaagttaacagggtggctactaaacctgccgccagaactccggccctctgtccgcctcgacgcactttaccacgtctcaagatgacatcgctcacttgaccacgacactcggttctaatctaactattcatccacggcgcgttagacaccagacggctactgtacagagaaccacacacctggccaattctgtaaccatcgctcgaacaacatccactggcacatgcaggatacccatctgggcctggacacatcattctacctgtgggaggagcacctccccttgcatactatggagagcttaac

SEQ ID NO: 134545 - DNA, 411 bp, Zea mays
  Clone ID: MRT4577_5418C.1
ctattatctcttattgtagttttttctatatccttgtgttgatagcttattcatttttatattaatctctacttataggggctagctttttgttacatacaagggaaacattgcgttttttgggtgtaaaacataaaaaccatacctggtccaggggattaaacaatccgccgaacatgggggggagtaccctattggcagcggagctctaaaagatagatagctgttagcataatatacggggagagccgaagttattgtttggttaaacgccaatcgaaacctgcgcctctccgggtgcgccccctgaggtaaaacccgcctgtcgggttggagtgaccagggggatgaggcccttctcctggcttgttcggctggcggttctcaacacgcactacagggtgttgtgcc

SEQ ID NO: 134546 - DNA, 780 bp, Zea mays
  Clone ID: MRT4577_54190C.1
gagagtccgtgtccgagctcctgttcacgcggtgtccgtgttcgtgtccgagtccgagctcctgttccaagcggtttttggccgttgagcagagcactcgccgctgggtcctggcgcgttgtgcagttcagtcttgtggttttggggaacagtatttgtcggaggcccatcctcgcgcggtgctcccgtgcaagggcaggttctctcctgcgggctgcggtgctgtgcggcggtcgccaaactcgtcgtgctgcggcggtcgccatcctcgtcatgctgcggcggtcgccaaattcgtcgtgcctgcagtcggatttggctccacgggtacgactacgtctcgcccctcacccatctgctccctgcggccatgtggaatcccctcctcttccctctccaaaaaatctgcgaccggtcttctcaccgttgagcactcgcacagcgccgtcgtcctgctgctgctgttccaggtcatcgtgtaggtaccgccaaccacctatatctggccttcgacagcggatttcatttcccctctctcgattctatagggcctagctgcgagggctcctgttccctctggaatccatcgccgagcaacctctagccaacgtatagtttctctgctccgatctgctcaccgattgttcacctgctcggcagcgcctaccgatccgccgtctattttttgtgtgtgtcctttgtagggctcttctgctgcggatccggccaaagcgcggtagtctggaacctgtgttgcttttttcgtaggtgagctgccgg

SEQ ID NO: 134547 - DNA, 801 bp, Zea mays
  unsure (1)..(801): unsure at all n locations
  Clone ID: MRT4577_54191C.1
cattgggtacctcgaggccggccgggcctcttcctctccaaaaatctgcgaccggtcttctcaccgttgagcactcgcacagcgccgtcgtcctgctgctgctgttccagttcatcgtgtaggtaccgccaaccacctatatctggccttcgacagcggatttcatttcccctctctcggttctatagggcctagctgcgaggggctcctgttccctctggaatccatcgccaagcccccagtgtatagggctagccaacgtatagtttctctgctccgatctgctctccgattgttcgccaattttttttagtttctctgctccgatctgctcaccgattgttcgccaatttttttttgtgtgtcctttgtagggctcttctgctgcggatccggccaaagcgcggtagtctggaacctgtgttgcttttttcgtgtgcaacgttcgtaggtgagcttcccgttcgagcgtcgtggttctgggtgttccatgtcgtcaatgctctgctccgtgctctggctatgttatgtgcagattcttagaaaacagtgaagttggaaatattggggagagttatgttgccaatagcagatgcctaaactcggcgcaggntggcggtgggcaccaacggcggcagtccaaagaggccgacgaagcgggtgccctgaagttggaaaacagagagggcggttgctttttctcaaacgtggagaaggcgatgcctaggttctagaaatatatagtaacatatagggaccgagtcgntcattcctgttatagggaaagaaatgtgaagcatc

SEQ ID NO: 134548 - DNA, 252 bp, Zea mays
  Clone ID: MRT4577_54192C.1
cttgtttttttttttaattaatttgttaaaaccccccgatccagatcctttaagttggtcgtcactgggtgaaagcctccatagctgcaaagaagagaggaaccttttccctattgggggtttgaattgcacacttaacaccaggaacaccacccccggttgtaacctctttagggaaggggatcccccggggcttttccgcggggagatccacaacacccatgtccgaattttgcccctcggctataaaaa

SEQ ID NO: 134549 - DNA, 558 bp, Zea mays
  Clone ID: MRT4577_54193C.1
gagagaaaaaataaccaatgtatttcttcttgcatatttttccaaatacaaaacagaatcaagaaaaatcaaattatggtttgagcttctctttgtctttccatgactgtatttgcttttatgtccttccatggacaaaaatctctctttctctccttctggttatggttccttctgtttcagtttctttcttcagtcttgagatcatcagacatagcagaaggtatgcaatgtgtggtcagaatatctaatgttgcttcctttgctgtcttagtgtccagaacaacaatctgatcataatccagattaaacttcatatattcatcctcacaattctccaccatcccagctaaacctttcaagtttttcacaggtttgccattaaaggcgacaacctgggtgttgacaatctcttcataaccaatgttaatgtcagaaacaagaacctgtgaaactacaacaagctgctcgtccacggattgagccattgcatgaagatgtttctccaatagcttgacaggggcggcaaattcatattcttttccatactcagatcga

SEQ ID NO: 134550 - DNA, 374 bp, Zea mays
  Clone ID: MRT4577_54194C.1
tttttttttttttttttttgttctttcctcttttttttttgtgcttgtggttctttctttctgcacaatttacatatacaatacaggttgtatcgatacaataaaaagtgtatacatctttctacatggttgccaaaatttcgccggtggggacaatgggggcggctgtccaagaacaactgctatgttacacaacgcaagaccagatgcaggaacccagacccagctgcatctaagttacattcttcttagcggtaattctatcaccatctatacaagcccatctctcttttttttattttggaatgaacaaatccccctccattctataatgtgcatttaccaactaaatccacccccacccaccctcgtgc

SEQ ID NO: 134551 - DNA, 331 bp, Zea mays
  Clone ID: MRT4577_54195C.1
acattatattggggcaaactttttattttttttgcgacctaattcgcactgaatcatattcagcccctcccaaacccacaaaataggggttgtttcaaaccacccaaatagcctaaggaattgcgtctcaaaaggccgagggaatagccaaaaagccactaaaaaaaaaaggaaaaaaacccaataaaaagggtcctcaaggggggcccccaaaaaaaaaaccatcccctaaggcccctgtaaaaacaaaagcccctcttataaaaatctcacaaaaattcagaaaaaaggtgaaaataatcacaaaatgcccacacccccccccgaaaaa

SEQ ID NO: 134552 - DNA, 567 bp, Zea mays
  Clone ID: MRT4577_54196C.1
ccggccgggataccctactactatccaccctcccgcgaactccaccgtactcgacgaatgactgactatgaggacatagatgccgacaactacaccatctaccacgcgcttatgaactacggtgacatcgactgtgcctacgccgacctcttccatcagcgacgactacgatcgccgtcgccgccgacaataccctgaccgtctatatatccctgcaaaatccacgtctagtcctcctgaccggtgctcttcattacactcctggataaccgcagggcaaatgatctattactctccgagtgatctgctgtcggatgtgctccagtcgctgcttccgacacaagttcatgtgtggccgaagtggctgccactgctgcaaaataatacaacttataacccaccaaaaacccatacgacgacatgtgctacacaccgttcgatggagaccctcgctaacacatccattagaatagtctcttatgctgccgaacaattatcatacgttaaggccgcacctctccgccaatacaagcactctatctctcacctcatcacaggtgcctatga

SEQ ID NO: 134553 - DNA, 499 bp, Zea mays
  Clone ID: MRT4577_54197C.1
ctcgagccggcgatttcaaaatatagacattaccacaacttttgcaaatgccacgcggcttctggaagattccttcccttgccttgccttccctctcaacccaaatcgccacgactcctccgcccgcagcgccctcggcacgaccgacggattcgcctctgggtggggttggctttgtctcccccaccaccctaccccgccgctccataacctcgaaccgcgagatcccccaaatgaaagcagcacagtctgccgcccacacctccgatgaagctccccatcatcgggcacctccacctcatcgactcccacccgcacgactccttccacgacctccacaccaagaacagccacaacgagctgaagctgaagcatggcgtcaccgagcacaccatctggctgtccaccccgaaagacgccgacgacgcgctccgtacacacaaacacatgatgacgaccaacccaaaaaaacccatcgtcgacaacatacgaaacaaca

SEQ ID NO: 134554 - DNA, 914 bp, Zea mays
  Clone ID: MRT4577_54198C.1
ggtcgacgaacgcgtccgtcgaggcggccgcgcacgaggaacccactctcggcggcccccgatcaccaaaaacaccaccaagcgacggcgcttgcacaagatgaaccagctctctctcctccaccacctacatcggctgtctcccggacgcggccatggcctcaccgccgcctcccccaccgtcgtccgagctgggctctcctcctgtgaaccaccaaccccgcagcagcacgcaaaacgcctccttgccatagcgcctcacgaaagcatcgcagcagctagggaggaggagagccacttgcgtcaagagctcgctgcagcgggcaataataacgaggccggcggcggcaggacgaggacgtgcgcgctgccgacgtgggcgctcatcggcggcatcacggtgggcgtgaccgtggcgctggccctgtccgcggggccaggccccgccctggcgctggggccagagggccccctggtggaggagttctgggacaacatgcggcggtacgcgctatacgttgtgacggtgagcacaggggtggcgtacacggtgctgcagcccatagtggagctgctcaagaaccccgtcacggcgctgctcatcgtggccgtcatcgccggcagcggcttcctcgtctcgcaggtgctcaatgccatggtcggcaactccgacttcatctacaggtacgagtaggtggatggcgagcgtgtggtggcgctgaggtctctgcgtgaccgagaatggagagaggtgaacgtgtgctttagtgtgtcaacgaaccaggagctagaacaggaatgtctgaaattgaagtttgctgtctggatgtattttactctgtctgatatttactttgaccaacaggctatgctatgcatgagtgaaagaacgtggacgtcttctagtacctcta

SEQ ID NO: 134555 - DNA, 157 bp, Zea mays
  Clone ID: MRT4577_54199C.1
gtttgtaaaagagaattagttgattcattcagagtttttttaatactaaggttatctcccgttccacataatttcttaaatttttgcttaaaaaaataaagccacgggccacaaccccaattttcaacacaccatggggggaccccccttttttttt

SEQ ID NO: 134556 - DNA, 202 bp, Zea mays
  Clone ID: MRT4577_5419C.1
cgatgctccacgatcagtagtaggctagatcagaggtttcagtctagacgggcagtgtctagcagctgttggatgtcttagcagagcacatgttggaacacttggaactcgcgcgaaactggaatccgattcatgacgtgtgccttagtagtatcgactctgagggcatctcgaagaactatataaattgcgcctgtgttgt

SEQ ID NO: 134557 - DNA, 299 bp, Zea mays
  Clone ID: MRT4577_541C.1
ggcgcgtccggtaaaagaggatctcgggccgacgccagtacagctgacatctcggaccaccttctaaagccagacgccctgatcgacagtcgacttgctctcgcaccctaacaactgccggcggccactaaaggcatcgcggtataagcttgctgatgagtgagcgatggccccaccagggacaccggcgaggggcttcaaacgccgtgatggccggcaccatcctaagcagcgtacttggattctaccccatgcaccgggacgagacctccaacaaggcgacaatggaagataggata

SEQ ID NO: 134558 - DNA, 310 bp, Zea mays
  Clone ID: MRT4577_54200C.1
tgtcagttcagcatcgttgtttgatactttgttttgtatttttgccctcactcatttgtatgtatatgtaattgatccataaataattagttcaaggtttagctcatgtggccattgtattgttgccgacgtgcctgaatatttttttaacaaagagaagattccgtttactttttttttctgttacttttacatgagtgatttgaaatgatatgtgcctagaatcttatgttatcatctgagagggcatccatttccagaaaaatattactatatatcttgttttgattggattagtcctagtgtcctg

SEQ ID NO: 134559 - DNA, 813 bp, Zea mays
  Clone ID: MRT4577_54201C.1
tggcgttctccactctcctctccctctcccgagcacctctccttcctccactttctccccaactccggtgagcgagagtgtggtcacgacacaatcatggcgctgcccgtggggccaatcgtcggtgcgcgagctccccttcggggtgagcatgtcaccgtcgagcgacctcttggcggtgccctagtgtcctgtgcgtggcgttatgtaccggtggctgcgttgtttctacccagtcgtctgcaaacaagattagcaggaatggacgaaatggtttgagttggttctctgagcaggttgacaagtgaggacctctatgaagctgatgctaacatttacagagcaaaaggatctatattagagcagtatagaagggtggatgtgaggcttacattggttgtgagcttgaaagggaatttgttgtttggctggtgaggttcttttgacttctgatgcaacgaggatagctgaaatagcaatcttcttcaatgtcttattatgcgggagcttgaaaatacttcaatttataagtttataggttttcatgttggagcatctttgtcatggtagcatgtaggttgctaaaatagtcagtggaataatgagacaatgtctaagaacacttgtcttttttttaggacagtataataagaactgacgtttccctgtccatatggacgttccacaaaaaaaaaaaaaaaaaaaaaaaaaaaaaaaaaaaaaaaaaaaaaaaaaaaaaaaaaaaaaaaaaaaaaaaaaaaaaaaaaaaaaaaaaaaaaaaaaaaaaaaaaaaaggggcggccgttttaaagg

SEQ ID NO: 134560 - DNA, 221 bp, Zea mays
  Clone ID: MRT4577_54202C.1
tcgaggcttcatctcttataatctcatcacctcaccagcgtggtttgtgacgctatctaaggtgttcgtgcggccacatcataccccatctcccctccaaacaaaaaaataaattcataccagcagctccttccaccctatcccccgaatattatttctgtccattccatccactcgtaacaaccttcgccctactccctttaccatccaccgcacctatc

SEQ ID NO: 134561 - DNA, 526 bp, Zea mays
  Clone ID: MRT4577_54203C.1
attgtggagcaaatctcttcattgctccacattgccgatgtgtcgctacacaaaaccaacgagcattacaaatattcaacctggagcacagaatactatccaaacagaaacatctcgccatccaccactctactggcatctggtttggacgtggatggcttgatgctatctgtgatgcttggcgtaagtgtgattggtgacagaaatgcatttttgtactcattattattattgctaaatgagagacctgatggcaagggtgagccgacgaggagatcccaaagcgtttgctgattgctaaggcaatggatgtaacgccgccttgctggttcccagacggggtcggcgctcctggtaggatggctttgtgccacgccgcgagcctgttgcgcccctaggcccttgtggtggctagggggtgttttgcttcccgatattttttgtggcttgtgggccggccgctcgcgcctctggaagcaggcccgggccgccagggtttcgaccccgcggcattccctggcccggg

SEQ ID NO: 134562 - DNA, 684 bp, Zea mays
  Clone ID: MRT4577_54204C.1
cggcatcttactatacatggatctcgtctcgtgtgaactgctgcgcgagggtcgggggccataagacccttgcgcgctgcgcagcggtgggcggtggccggtggcaatggcgcccacgacttgcctccggatccccttcctccccgcccgaggccgctccgctaacgtcaacgcccctccgtcctggctcccccgccgcctttctctcaaatccagcgcgaccaacgggccgttcactagcgcggacgtcatgggggcggattggaaggggctcaaggttgcttaccagggttgcgctggggcgtacagcgaagcggcagcaaagaaggcatacccaaattgtgaggctgtgccctgtgagcactttgacactgcatttcaggctgttcaaaactgggtagttgatagggcagtgctgccacttgagaattcattgggaggtagcatacatcggaactatgatctattggttcagcatagtttgcacattgtcggagaagttcgccttgaggttcaccattgcttgttagccaatcctggtgtgaagattgaaaatctgaaaagtgttatgagccatccccaggctcttgcgcaatgtgaacacacattaacaggactagggattgaacatagagaggctgttgacgacactgctggtgcagcaaagattggtgcagaacatat

SEQ ID NO: 134563 - DNA, 2205 bp, Zea mays
  Clone ID: MRT4577_54205C.1
ggcgttctccactctcctctccctggcccgagcacctcttcttcggtcactgtctccccaactccggtgagcgagagtgtggtcacgacacaatcatggcgctgcccgtggggccaatcgtcggtgcgcgagctccccttcggggtgagcatgtcaccgtcgagcgacctcttggcggtgccctagtgtcctgtgcgtggcgttatgtaccggtggctgcgttgtttctacccagtcgtctgcaaacaataccctcggcttcgggcttcagtcccactttacttatccctgcatctcctcgcgtgcgatctgctgcgtaccagtcgggggccataagacccttgcgcgctgcgcagcggtgggcggtggccggtggcaatggcgcccacgacttgcctccggatccccttcctccccgcccgaggccgctccgctaacgtcaacgcccctccgtcctggctcccccgccgcctttctctcaaatccagcgcgaccaacggtgacaattccctccccaatcccatctccacctctcccacctcgccgccttggttaacggtggcggacggcgtcgagtctgtggacgttaacgggttgcgtcgcccgcccgcgcctgtttccgcccctaccatccccggcgaccgcggtccccggtggctgcctcggccgttcactagcgcggacgtcatgggggcggattggaaggggctcaaggttgcttaccagggttgcgctggggcgtacagcgaagcggcagcaaagaaggcatacccaaattgtgaggctgtgccctgtgagcactttgacactgcatttcaggctgttcaaaactgggtagttgatagggcagtgctgccacttgagaattcattgggaggtagcatacatcggaactatgatctattggttcagcatagtttgcacattgtcggagaagtttgcgttgaggttcatcattgcttgttagccaatcctggtgtgaagattgaaaatctgaaaagggttatgagccatccccaggctcttgcgcaatgtgaacacacattaacaggactaggaattgaacatagagaggctgttgacgacactgctggtgcagcaaagattgttgcagaacatatggtccaggatactggtgctattgctagttcattggctgctaaactctatggattggatgttcttgctgagaatattcaggatggcaaaaataatgtcacccgttttatgatgctagctcgaaaacccaacattcttcgcaatgatagaccatttaagacaagcatagtcttttcactagaagaaggacatggacaactctttagggcgcttggtgtattcgcacagaggaaaatcaacctcacaaagatcgaaagtcgtccacacaaggagaggcctcttcgagtatctgatgactgttcctcactcttaaagaattttgattacctcttttacgttgaccttgaagcatcaatggctgatccaaagattcagaatgctcttggaaatctgaaggagtttgcaacctttttaagagtcctcggaagctatcctacaaatgtgaatgaaccttagaaaacactgcagattacatgatggattagcaggaatggacgaaatggtttgagttggttctctgagcaggttgacaagtgaggacctctatgaagctgatgctaacatttacagagcaaaaggatctatattagagcagtatagaagggtggatgtgaggcttacattggttgtgagcttgaaagggaatttgttgtttggctggtgaggttcttttgacttctgatgcaacgaggatagctgaaatagcaatcttcttcaatgtcttattatgcgggagcttgaaaatacttcaatttataagtttataggttttcatgttggagcatctttgtcatggtagcatgtaggttgctaaaatagtcagtggaataatgagacaatgtctaagaacacttgtcttttttttaggacagtataataagaactgacgtttccctgtccatatggacgttccacaaaaatcttatttgctgtcatgatgggctctattcatctggtggtggccaaacctctgccaaactttacttctgtaggagaaaataatttgttgctccttgtacttttctattgatgaaacggaatttggtgcccaaaaaaaaaaaaaaaaaaaaaaaaaaaaaaaaaaaa

SEQ ID NO: 134564 - DNA, 440 bp, Zea mays
  Clone ID: MRT4577_54206C.1
ctatcataatggagcagagcactgaggagctcggcaactgataaagctgttgcggaccgacaaagagcatgagggtcttgcatacctcctacggctacaccatcacgccattgaccggcaggaccactgacatgcccaggtcgcgcaggactgcaaggtggcacgcggggaaggggttgacccacatgaaggtggtcatggacgtcgcgacgcaaacgggcttgctgaaggcccaggcacgcacgacgcaggtgaggaggttgtcgcacagcccgccggctacctgtcaacatgcagagtagtcagcggctaccggaccttgtcgacgacccgatgtcagctagaccactcctggtagtgagagtatagagggacatggcctgggaaggaggccacatcgttgaattgcagcgcggacgcagacgccaccgactggacat

SEQ ID NO: 134565 - DNA, 731 bp, Zea mays
  Clone ID: MRT4577_54207C.1
gccggccgggtcgggaccacctccggcgggcactctaatacattgagacgacgctggctcaaagtaatggcgtcatgctcttcttctgggtgatgctatacaaaaagcatcgtgggcgacaagcgccaccacagtagatggaacgtctcttcctcaatgcatagaccaagatagtggactgcaatgaatactaacctgtgctctcctctgtgctagatagatcttgtgtgtcagctgctatgcgtctcgtgacatagacacacatacctccgcttcctccgaaagagtgtgtacacctcgccgtaccacgatgccatccacttccacgactccgtcaagatactgtggggcaccatcccctagacgattccggacaagcagaatcaggaaatcaggagaatctaggcggatgcatcaagacgaacaatgtgggcccagttcgtcgcatgacaagagcgatggtatgtgcatccctgaccctcttaatgatcggagggtacagactgtacacatgcactgcctcctctcagagctctcctaggacgtggtatggaactaccttgacaccatcttataactatgatgataagaggaaggagaacgccaaggttgcctacgagaggaccctgcggttcgccaagctgctagactagggcgacaacgcagccgaggagaattcgatatctcagttacagattcttgcccctatcaagtactgaccagctgcgctt

SEQ ID NO: 134566 - DNA, 218 bp, Zea mays
  Clone ID: MRT4577_54208C.1
cgcatcgcagtaccgatccgcaattcgaggcacgcctcacgcgtccacaacacacggcgatggcgaaggtcggcttttggaagggctacgcgtcatgtccgttttgtttctgctcctctgtgggaacatcccatccatgactcgctgcccttcgcattgctctgcgattccatgcagtacatcgatccttctcctaatattcaaaggctctataaaga

SEQ ID NO: 134567 - DNA, 506 bp, Zea mays
  Clone ID: MRT4577_54209C.1
tgttcatacaccaagctcgcgtccttgtggtggaggtcggcaggaagccgaacagcgagaggtcgagaagatgaagagcaggactctggtggcgagcctagttgtccaggcccttactggactatacggcgtgggcaaaggacctgcaggggcgaagaagcagtgctggtgcagccagtgcaccaactggtacggcgtgtggacctgcgacgacatgctaaccaagtgcgccagcacctgcaagaactgcgtacgcgactccacggacaagggcgccaccaagtacagatgccagaactacctgctcgaaaactgcggctgcaagatccactagactcattcacagcggcacaggcgatggaacattccatgctcctgcgtacggacgacttgctacaagcaggcagacaccagaaagctagctctcgatgcacgtgtgcatgaccgagtgcgtgagccataccagccgagatggaataatgtcaggcgcacgtacagacgtgtta

SEQ ID NO: 134568 - DNA, 334 bp, Zea mays
  Clone ID: MRT4577_5420C.1
catacctgggcaccttgctcacttacacggggccacagaaccatctcatccatcccccattcttgttcggctatccctacaagtacaagacttctccgaacaacgtggctaacacatcgaacttctatgacctaacgctataattacacagctccctggcgccctactacctgtacggatccctgttccgcaactacatcttcgacccgttcggtctctcgaagcccgtcgagtacctgcacttcgagttggactccctggaccacaacctgtccaagaatgatgccagactcatcatcagcacccggttctaatcctccaaaatcaagtccac

SEQ ID NO: 134569 - DNA, 388 bp, Zea mays
  Clone ID: MRT4577_54210C.1
aagaacggggactgtcttattatttcctgtgatagaaaccaaccaactgtagcggttagcagtaccattctaccctttcaaccgaaggctgaaaccagtgatgcaaggatcacaacccttgaagtgattatatttgctattacaatacctggggacgaaccaaacgctcagatgagtgaatctctgcagcagttccaatttctatttgcgatagagctcggagatcgatggggcacgtatggctcaaagagtgttacgctggggttatggatctaactggaatatattagctgctcgcttgaattgctccctgagtatttggatggtgaacttgcctactacccaaccgtgatcatgggagatcttaaacggatcacaggtgcatatg

SEQ ID NO: 134570 - DNA, 346 bp, Zea mays
  Clone ID: MRT4577_54211C.1
ggttgacgcatgtgcggacgcgtgggctgagagtgaacattcaggtgataacagccatttcacacctgcgttcatagggttgcatgtactatgcatgctcaggagcgatcatcgatgggcggtctaggctagctagctcgaacttgcactgattaagatagagaacgcagctagtcgaccaggttgatatgcacagaaacgtccttcagccaggccagatcatcgagctagatgggacggactggaggaacgacgacgatcaccatccagagctctgggcctgatgaatctattgcttcatggcgcctgatgttcatgcttctgcttgatgaagactgccaccagg

SEQ ID NO: 134571 - DNA, 506 bp, Zea mays
  Clone ID: MRT4577_54212C.1
aggggaacccttttcgcggggattcttcccgggggggaccccccaaacccaaagcaacccaatattttcgggtgggaagctgaaccgggccgggacaaaaaaaccaaaccaaacaccacttaaggggacatgccttaccggggaacacccaacgttgagggggggggggcaaacccgggggggggttccccccccggggggaatccaaaccttttcaaccaccaaccgaccctaaaaaagttaccagcttttttttggaaacccaatcaacgaagtttccccacccctcaccaaaggggcagggacaacccaacattggtttgccggggggggggtctcgggggaaaagggggctggccccttttgggggggccatccccccaccggtttgatggatcgagtaaccaccagggcggggggggggcggtatatatataaaataagcagcggggagaggataacggaccccgctaaaaaacccttgtgccgaattcctgcggcccggg

SEQ ID NO: 134572 - DNA, 358 bp, Zea mays
  Clone ID: MRT4577_54213C.1
cttcttcctccctttctccctcctgctctgctggtcgggcgcataggtccctgccggtgctcaactccagttcgaccggtcgcgcggctcccatggtgtgcctggtccctggctcgccgcatgcccaagctccctgctcctccctcctccagccgcgcccgctgcttgcccagtctgcgcaccgcggcttccttctctgctcggcgccgtccctggctccaactcggccatggccgctgcattgcgcccctgcgctcgccgctggagctctctgtaccgcacgcgccctggagctttcacgcccttgggcggccaactttctgtgccgcaactttttttccgagctcccttggcatgg

SEQ ID NO: 134573 - DNA, 362 bp, Zea mays
  Clone ID: MRT4577_54214C.1
cttcggcaagcattaaccaataccaaacttccggattttcatgggttaatccgggccaaataacatttggaatggaataaatgcttattcacaagaatattagtaatgtgtcaagactcaaggctataattataaatttctagaactttgtcgttttcagttatgtagtgctctacttactgcacctattgagatatttaatagagaaattaaataaaggatactgctactcatatgatagttatgctatcatgaataggttcaaggatactgcgttcgtctcatggtggggaaattgttcgtagttgaaaacgccgctgtgggcagcgaggtggaacaagaagagccaaaaaaagaagcga

SEQ ID NO: 134574 - DNA, 568 bp, Zea mays
  Clone ID: MRT4577_54215C.1
tgaagaagatttacctaaaatggagttaagtctgctcgtctgaggcaaaccagaccgatccactgatgcactagaccaagtacacagagagcactgtaaatgtgcattggttggttggcgcaccagataatttggtggtacgccgaaccgattacgcggagaagccgttttagaggtttgaaggcgctagcgcactggaccagtcagagttcaatggtcgaagttccagacccgatggctaggtgatgtggtggctgacgtggcgatgctcggtggtgcactagataggttcgatgactctgataagactgctccccatcagtttgacaaaggcctggtgacacaccagactgacaatattcaaggtctagtgcacacacagaaattgtagattttagcatttaatgccaacgactattttggttgttggagactataaatacatccaacatccaatcgacccattgaatcacaagagctgagcatttaagtccttacaatagagcaacacctccattgttccaaagtctcccaattgccacattctagtgatttgagcaaaatatag

SEQ ID NO: 134575 - DNA, 238 bp, Zea mays
  Clone ID: MRT4577_54216C.1
tcaaacagtttgctgacgaggttatctctggcccagtcatgggggagctggggaccgatgcatttgaggtgcttaatccggtagcggcattggctggcatcgcttttccggtgttcttgaatgatttacaaagcacagtacctaaagactctgacccgcatcgaggactggaatgttttcggatttaaaacaaccaactggtggatcattgtcctatgggttcgagaagaaaaaatat

SEQ ID NO: 134576 - DNA, 410 bp, Zea mays
  Clone ID: MRT4577_54217C.1
aaacttgaaattagtttttgttagcctgcaaactaaacacaaagcaattggttacactggcagacaaacatccgggcaaaaattcaagcaacaaaagtatgaagcatatcgaaatgggatgggatgcgatgcgatgcaatgcaatgcacagcaggggcccatggtgattgaaatatggcgccccaaatttactacgggaacacatgtctatctctgtcttgaggatgctgaatttgatcccctcgcgcgggatcacaacgccgaacagtggtgttgatctcgtcgaatagtctacaggctggaagaagatggccatgttccccacaagcgctaatttgccgacggaggaatgccagccgatatccctgctggaaacgaaagcgagctgctagacgcgccccgagggcatg

SEQ ID NO: 134577 - DNA, 316 bp, Zea mays
  Clone ID: MRT4577_54218C.1
tcacctcggggacgtggtggaaaacccggggcgctccccaaaataatcgcggggcggatcatccttttttcaccggggggtgtcttagggaggaggcccccaactttcgttcttcccaactgttgggccttttgtggggcgaaaggcccccccctgcagcggcttataaaccgcggccgttgggggggctacgcgcggtgacgcttttgttgttgtcgcccttcttccccccccttcttggggttccccgccttcctttcgcgccttgttcgccttttttcccctggggggctttaaaggggggccccccttgggg

SEQ ID NO: 134578 - DNA, 258 bp, Zea mays
  Clone ID: MRT4577_54219C.1
ggaacaaagcgagtcactgatctgagactcacagtagacagagatcatggcaaatgagcacgcaccagaccacgcttcaccatgttacatactaattacatgtgtgaccagctcccttcaacttaaaagcatgttaaaagacccaagattaagctaatgcaggcctcttgattcagcaaaaaagactctccaccattggcagggataaatctagcaccacaaggtggtgtttctatctgcaaatcaaccatgagtggt

SEQ ID NO: 134579 - DNA, 246 bp, Zea mays
  Clone ID: MRT4577_5421C.1
agactatctatgtttttttatatgttctttttggttgtgctagtaaaagggaacacaagcaacaccacactgaacagcaccagcgctagccaagccaaaccgagaccaaaacaaatacagaaacaaaaaccaccaccaacatacagacacaagaacaaccactgacgaacgcacaaaaccaacacccaaaaggccaagcccaacattacaggaacgtgagcacaatcacaaccggaaggacacata

SEQ ID NO: 134580 - DNA, 385 bp, Zea mays
  Clone ID: MRT4577_54220C.1
agcagctcaggcaggcggagccgaaggaccggtaccaggcgatcttgggcttggtcctgcagtcgatcctgcagcaggagccgtaaagcggacagatcgcggtgctgatggcggcgcagatcgcgcaccagctgaccgccgattgcggcctgcagcagccgactctatgcccctacgctgctgccggctgtgtcccccactgaagaaactatgtgctgtagtatagccgctgcatagctagctagttgagtcatttagcggcgatgactgagttatcatgtggcacgcatcaccatgggtggcagtgtcagtgcgagctgagaccctaatgaacaatggaactgaaacgcagcaagtcacgacacacaacatagtcgctatgaga

SEQ ID NO: 134581 - DNA, 241 bp, Zea mays
  Clone ID: MRT4577_54221C.1
tttttttttttttttttttttttttttttttggttgggtttttttttttttttttttttttttttgagaaagaaagacttatgggatagggtaaagccgctcaacgggttttttttcctgttttaagctactcttggcattacaaatttgttgagggttataagtgggattaaataaggccctttcaccaaagtgcttttaatatacgctggtacaaggtaactctggggaaagatgcctt

SEQ ID NO: 134582 - DNA, 703 bp, Zea mays
  Clone ID: MRT4577_54222C.1
ccctcgggtcctgccgggcactgagcaccgcacagacagacgtcttataactggagtatttgcgtaaacaaaactcgttctccgttagtcacattgttctgttattgatgaccagacgacagacgatcccggtcatgacagacactctgtgagagggcaaccacaagcagatccgcctggccaagaccatgtccttgcgccagctggaagctggactgcctcaagcatgacattgacggtgatggctagatgcactgcgacaagaccattgagggaggcgacgacagctttcaacaccttattgatcgagactggggctgagtagcaccagctgcgtactaggacaggtgaccctgacaccactgtcataggagctgcgaggactggcacgtatgaacgaatcttccatactgagaatgctactaaaggctaagacgatcagctgacaccagagataaatgtgacgtacagcatcagagacagtatatcgaactgatagggctagtgcgaacaacactatgtgccacaagaggtgctggaagtgctggcatgctgggtgcacaatctgccgttgtaactacattgctcacgacttgaatctgtactgctggcacgactacatgcagactatcaaagaaagtgcaaacttgagtcaactggagactgatcacgagaagacatcacatgctgggtcactgcatgc

SEQ ID NO: 134583 - DNA, 376 bp, Zea mays
  Clone ID: MRT4577_54223C.1
gagggatgcatacaatgatcataagcttgtgcgtgataccaacctctatgttagcagggcctaaacatgcatggctcatcaatacgaaccttgagctcataggaagtacgatatgctcctgtgtatagctaggcatgaatctaaagatggccactgggagtacaaccaagcatttgtgcggcttttactggagaggctgctgctggtctacgcaagagtgtacaaagagcgctccactgaggcggtgcatggcgagcgatcatactgaggacaataactttgccatggactatgcttcttgctgattcagagtgattgacgtgagagcgctggctgacgactcagacctgtatatagagcacattgatggaggagg

SEQ ID NO: 134584 - DNA, 2480 bp, Zea mays
  Clone ID: MRT4577_54224C.1
acgcccacgcgtccggtttatgccatatatttgggtcatgctggtttcgtttggtcaaacatggaccaaaataaatgactccatgtattctctctccgaaaatcacgccataaagactctcctctccgacgactgaccgttccccgactctctctccacatcagttttggtcccaaattcagcctgagagctgcagcagcgaagagccgaagaaagccagcctcgccttccccctctccccatactaatcatcatcaagggcctgcgattccaagttgcgtttcctgtctggggattcagggtggaaggagatgaaatcgccattgcgcaggttccggggcttcgcccttcatcaccaccaccaccacagggagaggaaggaccaccgcccgccgtccgccaagctcgacgagctcgtctacgccgcccaggaaatggaagatatgaggaactgttacgatagcttgctttcagctgcagccgcaacgacaaatagtgtatatgagtttgcggaagccatgggtgaaatgggaacttgcttgcttgaaaaagctgcattgaattatgatgatgatgaaagtggtaaagtgctgatgaagctagggaaggcccaatttgaactacaaaagtttgtggatgactatcgtacaaatattataaatacaatcacaaatccatcagagtcccttctgaaagagctacaagtcgtagaggaaatgaaagaccaatgtgatcaaaaaagagtggaatatgaagccatgcgagcagcctatggggagaaaggagggcgattgaggcacctaaaaaaatgaatcattctcattgggacaactgcaaacttcatttcttgagtaccaagaggaggcggcattgtttatttttcgcttgaaatcactaaagcaaggtcaatttttaagtattttgacacaggctgctcgtcatcatgcttctcagttgagttttttcaggaaagggctgaagcatctagaggctttggagccttgtgtcaaagcagttgctgagaagcagcacattgactaccacttcagtggactggataataacagtgatattgatgattacagctcttaccaggataatcatagtgatggcagtgagttaagttttaactatgagataaatgacagggacaaggacctccccactttcagaagtccaatggatatggatcaagctcatccagtgagttccccaagacctctgaaggaacagcaggaaaatgctgaagaaataaaggcgactttaggagttcctcatatgaagcctgagattggtacccaatcagcaccaatttttgctgagaatgttcctgatccatctatgagattccggaaaatgaacttgttaaccagaactgttcactcctacaaactcccaacgccagctgatgacaagaaccctgcttcagtaattgccaacaaatcgcctcattcagatcaacccgagagtaaatctcacgtggcagtaaatttgtggcattcctctccactggctaaagattttatgccgaattccatgcacagtggacctgttaagatgccatcaagtaacgaaggggtatcactagcttattcctactccacgacagattttaagaaagtgaagagggaagctttttctggcccaatcccaagcaaggtaggattgagcacccccctgatttctgcgactgatcgcaaaccgtcagggaagcggccttcctatgtgttgccaacaaggcctcctggcccaggttggcagtcatctgtgcctccaaaagctacgcccagggtgacctcgctcccaacaacgactcccaggataagcgagctgcatgagctgccccggcctccagcaaatgctggtttggttggatattctggccctctggtttcaaggcggccgatgcctactgctgtatccaccacccgtgtctcacccccatcacatacggcgtcgccactcccacgaccacctgctgccatgactcgtagctactccataccttcaaacagtcaacggactcctattattaccgtgaacaaattgttggaggctaggcatagcagggagagtagcgaagtttcctcccccccagtaacacctatatcactggcagacgtttcccgcagaccaacaacagaagcagctgtttgacaagaaaaggataaaggaatccttgtgagcagttgcgcaactgaacatgttgataatcttaggaaattttgtatgtggttgactgtattctatgattccctccataatctctcgtgttccctgcgaaaggaaaaaaatgtaaataaggttccattatgttatcgccttgatatgcttgtccgaactacctcttggatatagtgtaatagtctacaagagagagtttagatatggacgctgttgattcagtggtcatctgagctaattttttggactctggtgtgtagctctaccccataatcccgccctgcccgaattgaaaa

SEQ ID NO: 134585 - DNA, 691 bp, Zea mays
  Clone ID: MRT4577_54225C.1
ccgctggtggacaaaaagaccgaagggaccgaccgtcggctgctctctcgtggccatggccgtggcggcggcgttcctctccagctccctcctccccactactcccggctcccacctcaccccattcactctgcgctcccgtctccgcctcttcacacggcgcgccgtcgtggtcaacgccgccgccgccacactccgcgaggtctgctccggccgcgtcccggaccacgtcctgcagagggctgaggagattggctatgtcgtgcccaccgagatgcaggagcaatccctgccgcttctgctgtccggccaggattgcattctccacgcgcaggctccgggaagacgctggcctacctcttgtccatcttctccaccatcgacttcagcaggtcctcggtgcaagcgctggttgtcgtccccacgagggagctcggcatgcaggttaccaaggtcgctagactactcgcagccaaggcgtgcaccgtcatggctttgcttgatggcggtacgctcaagaggcaaaagagctgggtcaaggcagagccccccgcgataattgtagctactgtggcaagcttgtgtcaaatggtcgagaggcgcgcattcagtcttcaatccatgagagtgttagttattgatgaggtcgattttattttcgggtcatcaaagcaagtcagctctcttcgca

SEQ ID NO: 134586 - DNA, 426 bp, Zea mays
  Clone ID: MRT4577_54226C.1
ggggcggtgggcaacaccaaaaaatcttttaccaaaatacgcttcgggaccaaacggcctacacgaaccaccccacaaaaaaaactttaaagccggttttacactaattcttcaccaccccccctaaaagcgaacaaacagcataagggtacaaaatgccctcctccaaccctccccccccactggggcccggcccaaaaaacccctaccccccctccccccggatgccgggggcaaactggaagtctttgggcaaaaaggggacccccttggcggggatggcccaaaggttggggtcctcaaacaagcccaccagggaggcctcggggggttcctgggagggccaagacggggtggctttggaaccccaaaacccccttgaaatcctgagcgaactcacggaccacgccctggaagggcaacttc

SEQ ID NO: 134587 - DNA, 364 bp, Zea mays
  Clone ID: MRT4577_54227C.1
aagaagtcattttttgtggcagcattctgttctattgctatccaacaagccatgccagtataatgttctattgctattcaacaagtagtcatgttagctgtagcagtcatcttagctgaagcatgaagcagacatttttttgttcattttactttattgggagacaatagatagctcgctgtttttttggtttgtttaattttaagaacatcctcttcaagactatgcaatattacaatgaccagttagtactctgcatgttaagctgatagatgtatcttgctttcttcaagtatcaccagtttttgaatcatatacaaattgaactaagcctgactgagcagtttggatacagatattggat

SEQ ID NO: 134588 - DNA, 698 bp, Zea mays
  Clone ID: MRT4577_54228C.1
taggggcctttttttttttttttttttctttttttttttttctttttttttttttttttttttttttttttttttttttttttttttttttttttttgggttttttttttttttttttgggggcaaaggcccgggccggggttggcaaaccaaaaaaacccaaaaaccccccaaaggggttttccccagggattccccccaaaacccaaaaaggcccaaaccggagggccccaacatagggggggaaaaaacaaaaactagttcccaaagggaaaaaaactttttccaaaggggaaggccccggccaaaaaaagggaacccttctgggaaaccaattgggggcaaaaaggcccaggaagggggacaacctaggacgcccctggaaaaaaaaaagggcatctgggacccaaaaagggggggacttgggaaacccaggccggtaaaggaaccgggggccctgggccccgacaaaagggggaaggccaaaaaaaaaaccggccccaaaaaagggccgccccaaaggggggggtccttcccggggtgggcttaggggcaccccctggaaccccaaagccccccaaaccaagggaaaagaaagggggaagggcccaaaaccccccaaaaacccggatttgcttggaaccgccagggcccaacaaaaaaagggcagggtatggccttgaaaaaaaacccgggga

SEQ ID NO: 134589 - DNA, 730 bp, Zea mays
  unsure (1)..(730): unsure at all n locations
  Clone ID: MRT4577_54229C.1
aatgttagtcaacttttcgttttgcaacaatactcnttgatgacaaatgttatactcattgcatatattttcaattgttcaggcctggtttagggaactgccgagtggggtgctggattctatcccacctgaacaggtgatgcaatgccaatctgaagaggactgtgctcgggttgccaaatgccttccaccaactgaagcagccttacttgactgggctgttaatttgatggctgatgttgtccaagaagaacagataaacaagatgagcgatcgcaatgttgctatggtgttcgcaccaaatatgacccagatggcagaccctttgactgcactgatgtacgcggtgcaagtgatgaatttcctcaagatgctaatacagaagaccctcgaggatagagaagagtccaatctggaagatgcctctttgccacagaaggacccatctgatgaaaatggccatcagaaccccagtctccccgttaatcctcaacctgaagaaacatctgggcgcccctcttttgtcagcgaggagcctattgtgtacagtcctacacacagtgctgaagacaagcctcctgtggaaggcgattccatagcttccgttgtccatacaagtgatgtccggtcgagcgtggaagggtccgctagttgctcgcagcctgctcttgtcgcttcgtctgccattgctgatgcttcctgtgctacagctgccaacttacttccgagc

SEQ ID NO: 134590 - DNA, 251 bp, Zea mays
  Clone ID: MRT4577_5422C.1
ttgttcaacgcgctctttaagatggtctaggtggaaataatctacccgccccacccttcggtggctcaaattcgggactccttcgttttctgttctctgtcatccttctccatcctttttccctattcgtgcttcgggctctcaagagtgaccacaaggtggcggcgatgctggagtgctgcgttgggttcattaattaattaccggcggggatttgcctaacccattgattgagctgagactgattttct

SEQ ID NO: 134591 - DNA, 356 bp, Zea mays
  Clone ID: MRT4577_54230C.1
ctgttcagtttgggtatttattaacagtttatcacaacacactatgtcttgattatgggggcacacatttttaacctttttttttaaaaaaaaccccccggtatttttataaaaaaaaaaaaaattacgaaataccaccccttttttaaaaaaaaatcctccttcctcaaaagttgaaaaaaaatttacacgcaagctacaaacccttttttttttaaatccttaaagaatgaactgaagatccccttaaacaattcaaattttttttaaggaatattttagtcaaacaaatacttgccccccggcccaaaaaaaaatccaaccccctttaataaaaaagaccccccccataatta

SEQ ID NO: 134592 - DNA, 752 bp, Zea mays
  Clone ID: MRT4577_54231C.1
ccggccgggccggattcgcgccggcctttttgcacgacgtgcatcctcggttgcagccggagttcttgacgacggtgcccaacgaggaatagaaaggaggaaagaaaaaaacgcgtctctgaattccacacggccggcgaagacacttgaacagtcttgctggcaatgggaaacaagggaccagtgccaacacaggaatcgacgaatgatgacgccgaggcaccgtcgtctacgtctgctgcgagcaatactaagagcaagacagacgtggagcgagagcagctgttcgaaggatcaagcgacgacgacgccgcacacgccacggaagagaagcacccaggagatcctcaccaaatacaagttcaaaggggacgccgcggctgccgcggctcacgcgaagcagaagctcatggagcggcaggagaaactcgcgagaatcacggagcagtccgcggagctggagagcgaggccgagaacttcgccgcgctcgcgcagcagatcaggaagaacacggagacctggtggtggaagcggtgatcaacaacgtaagccatcgcctgcttacgtagctcatgcgtcgtcagcagactgggacgccacgggatcatatgcatggctgtaaacccggccacgctgctcggttcctctctgcacaagagtcagcagactgtggcgctagtacgtgccgctctctctgcatctgcatcacatcactacgaaaagcaatgcgattgtgacggttcagccaaaa

SEQ ID NO: 134593 - DNA, 684 bp, Zea mays
  Clone ID: MRT4577_54232C.1
ctgcggaccacgctcaccagagtagagaaactctcacggacgcgctctcttccccccctcctgccctctctccaacgtggcacgagaatctagcaaagctgcgcagcgcatgcagcgagaaagcttgcgacggatagacaacatatagatgccagccacacagcagctaacgcaagcatgtcgacgcccgtggactgcgacttcttcttccaagcgcagccgctgcgcgagcctgggcggaacgaggtggacgtgtgttcgctctgcgactagccgttcatgcgcgacagagacatcttcatgtacaagggcgacactcccggttctgcagtgcaggactgtgcgctatgagcagcatgcaccacgacgacagcgtacgcaataggggtgtgctatacctctactacaacagcagcatgcgacatcgcacataggaggtctcgtaccgatgcggtccatgcaggccctgccctttatctgaacgcgcgtatatgcaaccatgcagaaatgtgcgccgaggatgtatggcttagagacttatatgaataagtgcatgtgcggtctctgcgtgtgtgagagatgactatgtccatgcatgcatctgtttaatttgcagtgcgtgtgcatgctgctgatggtggatctgtgtcctcaaaaaatatattagtatacttattatacgaa

SEQ ID NO: 134594 - DNA, 841 bp, Zea mays
  unsure (1)..(841): unsure at all n locations
  Clone ID: MRT4577_54233C.1
ccggccggtccggattcgcgccggcctttttgcacgacgtggatgttgcagccggagttcttgacgacggtgcccaacgaggaatagaaagggggaaaaaaagaaacgcgtatctgaattccacacggccggcgaagacacttgaacagtcttgctggcaatgggaaacaagggaccagtgccaacacaggaatcgacgaatggttctgttctgtctccctcactctctgatctctcttgtcatcccatccctgtttacgcccctggcgcatacttgagacgcaatccataatccaccgcagatgacgccgaggcaccgtcgtctacgtctgctgcgagcaatactaagagcaagacagtgataatagtgtccgctgctacccgctagacgtggagcgagagcagctgttcgaaggatcaagcgacgacgacgccgcccacacgccacggaagagaagcacccaggagatcctcaccaaatacaagttcaaaggggacgccgcggctgccgcggctcacgcgaagcagaagctcatggagcggcaggagaaactcgcgagaatcacggagcagtccgcggagctggagagcgaggccgagaacttcgccgcgctcgcgcagcagatcaggaagaacacggagacctggtggtggaagcggtgatcaacaacgtaagccatcgcctgcttacgtagctcatgcgtcgtcagcagactggcatgggacgccacgggatcatatgcatggctgtaacccgccacgctgctcggntctctctgcacagcgtcagagactgtggcgctagtacgtgcgctctctctgcatctgcatcacatcacta

SEQ ID NO: 134595 - DNA, 777 bp, Zea mays
  unsure (1)..(777): unsure at all n locations
  Clone ID: MRT4577_54234C.1
gggaacacacacacacacaaacagaaaactgagtcagagaggtgcagatcaatgcggcggtggtggtgcgccgccggcggcctcgcccgctgcgtcctctcgtcctccacctccgccatagcatcccatgcccgcccgctgccggcacccctgatgcccaaatctccctcctttaccgtccctttctccttgtcctgtcgcaggcaccactaaatccaaagtcaagaaatacaagatgaaggccccctcgtccatgaagttcagattcagaaccatgaaagacggacaggtccgcaggtggagggccggcaagcgccacaatgcacacctcaagtctaaggaggccaaacggagacttcggaagcctgctttggtgcatttggcctacgcaaaggttataaagaagctcaacttctgtgggtagcaaatcaataaagacatagcggagtttggcatgggaaactagttaactgatactgaccgccaaccgctgcatctcagttgtaaacgctggagcctctccttggaccaaatacttgctttttgtcacatgatgcattatctcgtctgttcagacactggtgaggagccttttgttttctgcaaatgtagctggtataattttcgctgcattctgttatgcacancaatcgagagattcatcngtgagtagtttggaaatagctgccagcanataaaaaagctctgtaacatccaatggctacagntccttgntgtggttatgatttggaaatttatggatgggttccagtattc

SEQ ID NO: 134596 - DNA, 226 bp, Zea mays
  Clone ID: MRT4577_54235C.1
aactagcaacccaaaagcctttaacgtctaacacaggaaaccaaaagagcttacgggcttattctccttggccattcctcaaatggtgacaccgcaaccatattgctactatgctcacaaacctctaattcttcccttgttcctccaaaccacttaccatcggtgtcttcaaagcccgaaaatccaattgttcaagcccccacgagccaacaggcgaagcgcaaca

SEQ ID NO: 134597 - DNA, 496 bp, Zea mays
  unsure (1)..(496): unsure at all n locations
  Clone ID: MRT4577_54236C.1
ggggtgggtttttttaaaanctcctgcggctaaccacaaaattgctggacctcaattctcagtggggggggcacgaaaaaatacttcaatacccccggcccgtcatgctgggacaatcaaacttttgggggacaaaaaaaacccggcccaggggatgaccccggaaaatccgccgggcgcccgagaggatcccaaattgtccttaagggggggatataaggactgggggcaatacaggcaaaaatgggtccctggaggaaactatgttcggatgcaaaatcccaagaaaaatttgggccggaagtttaaagtgaaaaaccccggggggcctcaggggggaacatagccccaaaatgttgggggcggctacaatggcccctattacaaaagaagaaaacacgctcgtgcgccgctccataaaagaaaaacacgccccacccccggggggaaggggggggttttctattttatcgggcccccgcgaggggggtttttt

SEQ ID NO: 134598 - DNA, 967 bp, Zea mays
  Clone ID: MRT4577_54237C.1
aaaagaccgggagggccgtcgaccggacgaaacacacacacaaacagaaaactgagtcagagaggtgcagatcaatgcggcggtggtggtgcgccgccggcggcctcgcccgctgcgtcctctcgtcctccacctccgccatagcatcccatgcccgcccgctgccggcacccctgatgcccaaatctccctcctttaccgtccctttctccttgtcctgtcgcaggcaccactctctccagggattcttccacctggtcatcgcttcttccttccgccctccgtcggcgcatcatcagcaagtgcggcactacgccaagaaggagaggtcgcgcgctccgctcacgcccactaaatccaaagtcaagaaatacaagatgaaggccccctcgtccatgaagttcagattcagaaccatgaaagacggacaggtccgcaggtggagggccggcaagcgccacaatgcacacctcaagtctaaggaggccaaacggagacttcggaagcctgctttggtgcatttggcctacgcaaaggttataaagaagctcaacttctgtgggtagcaaatcaataaagacatagcggagtttggcatgggaaactagttaactgatactgaccgccaaccgctgcatctcagttgtaaacgctggagcctctccttggaccaaatacttgctttttgtcacatgatgcattatctcgtctgttcagacactggtgaggagccttttgttttctgcaaatgtagctggtataattttcgctgcattctgttatgcacacaatcggagagattcatcgtgagtagtttggaaatagctgccagcaaataaaaaagctctgtaacatccaatggctacagttctttgttgtggttatgatttgggaatttatgtatggtttccagtaaaaaaaaaaaaaaaaaaaaaaagaaaaaaaaaaaaaaaaaagcggcccggtg

SEQ ID NO: 134599 - DNA, 303 bp, Zea mays
  Clone ID: MRT4577_54238C.1
ccgaagtcggcagtattagtcatggctatacagctaagagtcttctatctcgttccacttcttctagccagctatgtgcagacaacccccaggctggaaaagatgaagatggactgctacaaagatgtgaaaggcaccatctacaactacgaggctctgtctcttaatgggaaggaacgcattccattcaagcagtatgcaggaaagcatgtcctctttgtcaatgtggctacctattgtggtctgacaattcagtatcctgaactgaatgcactccaggatgatctgaagcaatttggcttg

SEQ ID NO: 134600 - DNA, 325 bp, Zea mays
  Clone ID: MRT4577_54239C.1
atctgggcttttttccattggtttttggtgttattttcctctagggggtttttttttttttttttcaggccaaaacccgggcccaaaggtgcccaaggggcaacaccgggggctagcaacaagtttcttccgaccttcttaaaacaaaatgggggggggcaggggccaaaaaacctttggtccaaaattctaaccctatggaaaatggccccggagggttccccaagaaacccctttaattgaaaaccccccttaaacacacacccaaacccggggggggccccccccctaaaggttaaaagcctgccccaaattacaggggggg

SEQ ID NO: 134601 - DNA, 278 bp, Zea mays
  Clone ID: MRT4577_5423C.1
aacatagacagagaatgtggacatctgttgaaggtacaatgatgcatccttgcacaaacaacgaataatgactgtcttgtgacgcgttacggggtcaaagctaatgagcatactgggccgactcttatgtgcacactaggggtccctaatgcaatctataaacaaagcgaaggtgagtttgctgaggaatatgagattgcttgaattattcgattgcttacagtacatcaactgaatgctcaacaatttggcaagattatgctatttgtaaaggacat

SEQ ID NO: 134602 - DNA, 415 bp, Zea mays
  unsure (1)..(415): unsure at all n locations
  Clone ID: MRT4577_54240C.1
tgggaccctcgaggccggccggngagaaccacgtgctcgatctccatctcgaccgtcgctcagccgggagctacgctacgactgagcatggcgtccgtcaccgcccgcgccccggtcgcggccctgcgcccgtcggcgtctctcaagtcgtcgtcgtcgtcggtggtggtcttccttggccactctagacgcttcgggcgcactgctaccgcgacggcgaggaggcgcagattatcggcgtcggcgaaggcggattgtctctcggcacttacctcaccctcatacgtcgacctcagggtgccctgtgacgaagacttcgagtatctgagccacgttctagccccgcataacgagtttttttttttttcccccccccccccgaccaagtggttgttgatgtgaattgtttcgtcct

SEQ ID NO: 134603 - DNA, 798 bp, Zea mays
  unsure (1)..(798): unsure at all n locations
  Clone ID: MRT4577_54241C.1
gtacgcctgcaggttccggtccggaattcccgggtcgaccacgcgtccggacactatgacagatcaaaatctttgaaacagaacatcaatctgtcagcgcccatcatgtcccgctttgatctcttcttcattctggtggatgagtgcaatgaggtgacagattatgctattgccaggcgcatagtagacttgcattcaagaattgaagaatcgatcgatcgcgtttattcccttgatgatataagaaggtaccttctctttgcccgacagtttaaacccaagatttccaaagagtcagaagacttcattgtggagcagtacaaacgtctccgccagagggatggctctggggtcaccaagtcctcgtggagaatcaccgtgcgacagcttgagagcatgatccgactctcagaatcaatggcccgcatgcactgctgtgacgaggttcagcctaaacatgtgaaggaagcttttcgattactgaataaatcaatcatccgtgtagagacgcctgatgtcaatctagatcaagaggaagagatccagatggagacggatgagggacaaggaggtgtcaatggtcatgccgacagccctgcccctgtgaataggttcaacggctccagtgaagatgccagccaggagactgtttccaagccctccctgaggctgggctttgctgaatactgccgaatctcgaacctcatcgtgctccacctcaggaaaatggaagaagaggaggacgagtncgcactaaagagaagcgagcttgtcaactggtacctgaaggnaatcgaa

SEQ ID NO: 134604 - DNA, 461 bp, Zea mays
  Clone ID: MRT4577_54242C.1
agcagctagctagctagcaagggcaaggcacgtcgtcctcgatcgacaagctacgtcggcgctaggaacaatcgatggctgcggcggctgctgctggtgctggtggtgttgcggcgggagtggcggggtcgccgtgcggggcgtgcaagttcctgcggcggcggtgcgtggcggagtgcgtcttcgcgccctacttcagctccgaccagggcgcggcgcgcttcgcggccatccacaaggtcttcggcgccagcaacgccgccaagctgctcgcgcacctgcccctggccgaccgctgcgaggccgtcgtcaccatcacctacgaggcccagtcccgcctccgcgaccccgtctacggctgcgtcgcccagatcttcgccctccagcagcaggtccgtcgtctcgtcccattcttcttcttcttcttcttcttccatcttcctccttgccgatcactcctt

SEQ ID NO: 134605 - DNA, 433 bp, Zea mays
  unsure (1)..(433): unsure at all n locations
  Clone ID: MRT4577_54243C.1
acgcgtccgataaaaccaaaaaaggtcatgggagaagacaaacatggaattataaagaatagttgattttggacttgctagaatatatggggcttgattttggacttgctataatatatcaagctcccctgaaaccattatgtgagaatggggacgtatgtgttctctattctctctggtgtagttggagcatcaggtcaatagttcccttcaacaattaaactaaacggcggagtggagcttcatgttgggatgatacatgaacctttcaacttttagaacgtcgtgctcaactacaacttgtggctgttgaatccatacttttagaacgtcgagctcaactccaacttgcggctgttgaatccattgaacttgcttttggatttatgttataagatatttaaatgttggataaannaaagaaaaacagata

SEQ ID NO: 134606 - DNA, 302 bp, Zea mays
  unsure (1)..(302): unsure at all n locations
  Clone ID: MRT4577_54244C.1
ccccttttattatttttttttttttttttttcaaaangggggaggaaacaaaagccccaaggacgaaacccaatagcgcatatttgcagaggtagggcgaagtgccctctctttaacttgtactttagacggacaggtctaagtcccccagctcatccccgggtgacacgatcggggaaattgattttaggggagcgcacctcttggccacccatctagggccttagtggatatggaacgaacacccacccatgtccctgatgaaaactctctaccaagccacctcttggacgaggcccccc

SEQ ID NO: 134607 - DNA, 459 bp, Zea mays
  unsure (1)..(459): unsure at all n locations
  Clone ID: MRT4577_54245C.1
ttatctcttaaatctactttttaccttttaagacncanctcctttggggcactggtcaatataaaacttttagccacatctaaaccctcacaaattggtacacacagtataatctaaacagtgcaaaaactaagacaatgtttgagttcttactagcttaaagcctttaaagcaaccattctttagaaactaccatcctgtcaactaaagtctggagctttactgctcgaaaactgctacatttacgcataacaagctgcacactgcatcaaaacatgtcacacatacttacttgaatgatgagtaaccaccttggcttgtttgcgtcacctttttacaacaatctcctattggtcttacgaatttggtggccactcctaaaccaattaaccctcaaaatctccaaaatcaagacaaataaaccaaaatggattaatcaaaagttgagtacattcacac

SEQ ID NO: 134608 - DNA, 1261 bp, Zea mays
  unsure (1)..(1261): unsure at all n locations
  Clone ID: MRT4577_54246C.1
ggggaacaggcatggttgatgaagctcanaagctttggaagagcagagctctgaaaaactggcgcgacgtccggagccaccttcagacccttctaaaatactgccgctgatgtttggattgtgagattccatataaccaataattatttcgaattaagttgtcattgtttggtagcgttagtttgcatagtattgtcgtctatcttttctgtagcatcatttgatgatagcttttgtggcttattatgacgtaaccctggtacaaaggcctgttcaaatctgtgtcttatatgctgccgacaatatgacataattcttggattactttttttaatagattgtcagattcaatgtatatgtttctgtagcctagtggtctaacggggaaactgattttaaacataagtcaatcgtgtgttgaaagtaaattaacttgcctagttcatatttcttgaatgttctgatcagatattgttgtagaatcctttctctgtcagtttagcttttaagtgcacagttcaatctttgtacactgggaaaattgttcctgtcatgtatgtaccagcacatttactcgacaaaatgattttctttacagcgcgtgaattacacatctagggtttcaatgtttgtaaggcacttattcagcatcaaccctttgtgcctcatgttttcaaatgaccctgttgttatgtgcctcatgtttacatcatacattgatatggatttcttggtaggaatggtttgcacatgtaattgaatttactctttagaggttcttgtggtctacactgcctttttatggtttaatggaataatggttggcactattttgttacagatttttcatcttattatctgtgtctattcatcatgatgcaatgctagatacatactgatgattctttgtttaatttgtagaccgatcaaaagttgcgcctctgtgatatatgtggagcatttcaaagtgctatgacaatgatcgacgtcttgctgaccattttggagggaaataacacctaggctacatgctgattcgtgagaaacagggagaacttcaggtaaattgcctgcatgctcaagcccgaaatacaagtaaggtactggagatttatgacacagattaatagttccagggtttccaaactgtatataccttaatggaaacaaattttacattctgtgtgcccatcattcagaatatgaaaatcttgattttgttccttatcctcaatcttaaatctttcaagggtgcatttta

SEQ ID NO: 134609 - DNA, 260 bp, Zea mays
  unsure (1)..(260): unsure at all n locations
  Clone ID: MRT4577_54247C.1
ttgaccattagatcttgatctagtggatatgagatgtgtgtgttttgtgtttgcaaaacacacagattttcctttaaaagaaatctgcgtgttttttcagctaaaaacacacgtgtgttttttgggcaaaaattgcccatgtgctgtatagacagtccctataagttttactttgtgttcttgcaagatctcatgcgcttattcaaactactaattaaggtccggcaaaaaaaaaaaaaaaaaaaaaaacaatanaatng

SEQ ID NO: 134610 - DNA, 391 bp, Zea mays
  unsure (1)..(391): unsure at all n locations
  Clone ID: MRT4577_54248C.1
aaatnccggggccgaccgagccgtccaaaaaaataattcgtttaaaataaaatatatattaattatttaacgaataaacatanttaacgtagtggttatattaataaccaggggggtcaaatatggataaaattaaaaggcctaaaaggaaaaaaaaaaaaaaaaaaaaaaaaaaaaaaaaaaaaaaaaaaaaaaaaaaaaaaaaataaaaaaaaaaaaaaaaaaaggccgccccttttaaagaatcaaagttaacttccccttcattccaaattaaaaactttttaatagggcaaccaaaatcaaattaattgcccgctttttaaaacactcggaactggaaaaaccctgccttacccaaattaaattcctttgacaaaaatcccctttt

SEQ ID NO: 134611 - DNA, 249 bp, Zea mays
  Clone ID: MRT4577_54249C.1
ggggggcttcacgggtttatagggtttaaaatggaaaacgttcataacaaatttccctaggaacggacttatttcctgcaggtagacctagtctactcacattttttgtttcatttcctttgagagcaatacacccctaaaccgttttgctaaggtgttgaccatgaaacctatttggaaaaattaggcgatcctgaagaggggttacattttttttttcttgaaaaggtttcattccttcacggggcc

SEQ ID NO: 134612 - DNA, 221 bp, Zea mays
  Clone ID: MRT4577_5424C.1
ttcccctggcttgcaacgtcttagtttttttttggggtaacttaatttaatttaattggccgtggtttaccaacgtcgggccgtggaaaaaccttggggttccccaatttaatggcttggcagaaaatccccttttggccggttggcgtattaccaaaaaggcccgaaccgatggcctttccaaacagtggcccagcctgattggcaaagggaacccccct

SEQ ID NO: 134613 - DNA, 303 bp, Zea mays
  unsure (1)..(303): unsure at all n locations
  Clone ID: MRT4577_54250C.1
ccgcttcctaacatgcaacagggacaacaagaacaaggagaacgctgcggaccaggncggcgaacgccgctaccagcaacgaggactaaacaaacagcctccccgagaatgactgccgatactccatctatgatatctactttgtcactgcagaagaagtccaaaagagcatgatcttctatatcctaaggtccccatgctacgccaaggtgaagacccacatgccttatgcatgctcaaaccaaaaattcaagagtgggctcaatggcattcaagtggaactgcaagctactgatgcaagtg

SEQ ID NO: 134614 - DNA, 375 bp, Zea mays
  unsure (1)..(375): unsure at all n locations
  Clone ID: MRT4577_54251C.1
gacccacgcgtncgaataccttaagcaagagaccaatgtctcaagcccagttttctcttttccaagcccagaggaaacacgttgtattggaggataaccaagcttatgccatgaaggaaccaggaaccggagggtatggctatgggacgaaaaatgacaagaataaggattggatacaatagcttcggacttcatcaagctgaagcacaaagctagggcactccagaagagcacaaccatgtaccaaccttctacctaaagagagtcaatagttcaagaaggtgatactatatacttatgcttgactctgtataggctattagcgcttattctaataacaggagctggttgcagccttggatatttgcggatgcg

SEQ ID NO: 134615 - DNA, 382 bp, Zea mays
  Clone ID: MRT4577_54252C.1
ggaaatcctgaacctgctacaaccgtctgggggctgtgggattctgatgtggaaggacctggcatgaactccagaaaccatattatgttcggcacggttagcgcttggctttataaatcctatttgggattaacgcctgctcctgcagacaaggccagaggcctaactggaggttttgatcacttctatattggtccagacgcaagtatcgttaatgttctgaacatgacatctgcctctgggtcaactacgactcctcgcggagtcgtcagtattgattggtcagttggaggaggttcaatgtgcgatgtacaatctgaaggatctgttcttaccttatcttgcggtgctgacaccattacgggtttctcgctcttgtctt

SEQ ID NO: 134616 - DNA, 374 bp, Zea mays
  Clone ID: MRT4577_54253C.1
aaagcccgccttaacaatcccggtaatggttatggcccgaatgggcaacttgttgaaggccaaaatcctgaaggccctgggcgtcaactacttggacaaaagcaaggtgttaaccccggccgacaacccgaacaaaataaacaagaacaacttccggttccctttggtttgcggttgccggaacctcggcaaggccctcccaaggttgcccaagggcccccccataatccgaacaaagggggaggccggaacgggcaacttcttcaaggccgtccgcaacttgcgctccgtaatgggcaacttccggccgctccgaatattggacaacaacaaggtttttgcttacgcaaagcgcatggccgggccctacaacc

SEQ ID NO: 134617 - DNA, 415 bp, Zea mays
  Clone ID: MRT4577_54254C.1
ttttttttattttctttttttcttttttttatttttgggggggtttttttagtttcttgggggtttttttattttttttttttttttcaagggggccacaattattattaaaacaaggggggagaaaatctcacccaacgaggcccccccggggtcctttttgggccactttttcccctcaaaaatataaaaggggggtcccaacccaagggtggggggaaaccccccaaaaacttccctgggaaggggggggtttggcggcatcccaattaaaccccaaaaaaaacgtttttttttcttgggggccggggaaaccaaatttcgggggggaaaaaagggcctcaatcttcttgggcaagtaaattcaaaggggaaaagacaacccctaatctcacacgttggggaccggccggtt

SEQ ID NO: 134618 - DNA, 1473 bp, Zea mays
  Clone ID: MRT4577_54255C.1
cttgcatctggttcttgtgatggtacaattcgtgtctgggaggttgaaactggtcgctgtcttaaagtttgggatgttggaggtgatgtccgtcatattgcctggaatccttcacctgacaggcctattcttgctgctgtcgttggacatgacctactacttattaatgctgaggtggggagtgaagaaatgcaaacgatggtaaaagatctgctcaaggttgatgaaatggctcttcaagatgacactgatgacaagaaaccagctgtgaggtggttgaagcatgaaaaacttgatgggatcaccttagttcatcaaaaggccgtgtcaaatgtggagtggcattacaagggagattacttcaccacagttgtgccaactggtgatacgagagctgtattgttgcatcagctcacgaaaaagcactcgcaccatcctttccgtaaaatgccaggccttcctgttgctgcaacattccatccaagtcagaagatgttctttgttgctactaagaaatttgttcagatttatgatctccaaaaagcgcagttggtaaagaagctggagtcaggtcttcgcgagatttcctccatctcgattcatcctggtggtgataatgttattgtcggaagcagagatggaaaattatgctggtttgatactgatctatctaccagaccatacaagactctaaagatccattctaaagatgttaccagtgttgcctttcaccgaaagtaccctctttttgcctcatcctccgaggattgtactgcctatgtatgtcatggaatggtctattctgatcttaaccagaacccacttattgtaccattggaaattcttcgtggccattctagttcggatggaagaggggttttggactgcaagttccaccctaaacaaccatggttgttcactgctggcgctgactctgtgattagattatactgcgactaagcattcctccaaggattcatgattttgccaagcaatatgacgtgtagccttttgttgggcctcagtatggtgatgattgctatattctggtatgaagttggattggtacacatgtatgaagccaagagtggtggatcttttgttatggggtcatggctgctctggaaaggaacattcaaacagcgggtagggtgtttaatcaatgtcaacggtttgccagcaagtgaaaattttcaaatgttcagtacagccacagaggccttagagtagtggttatgttcttcagatgtgagactttagacgcttattttggtgattttgtaatgtcacctatcttgtaccatgaatcttgtaatactaaatacttttcgccaagctcatccaaggctgaggttcacagccgttcatcgcatggtactagtgcaaggatcgaatggtcaagatgggtggttgaattgggctctaaaactttatgcgataatcttagccaatgcaaattaaaccttctcgtgc

SEQ ID NO: 134619 - DNA, 321 bp, Zea mays
  Clone ID: MRT4577_54256C.1
acgcataggtgttctcctccccagccgccagatttgtatccaaccgccgaggaacatgaacgacggcgcccttagcatcctttgtgtgatactgttcttgcactgccaggccgtgcccgttcccactggtgatggcgagtatctcaactagaccttaccgacaacagagtgcgaaagcaagtgagggtgcgcgcacgtcagaaaagagccaaggagaaatcaaatggcccaaaaaagaacaagaatatatctgccatcgccttttgaaccttgccctacgaccaaaacctgacgcctactctctctgttcatgctctttct

SEQ ID NO: 134620 - DNA, 324 bp, Zea mays
  Clone ID: MRT4577_54257C.1
ttttttttttatttatttatcgggggcgggggatcaggggattttttgttattgactttttcacatataaacaattttcttagagggccacctttactccaatatatgcacacttactcatgattgttagacaacctataaggggttaaaaccgaacaatggtgaactgacacccctgctctattgtggtcatgcaaggtttgatcacataaacaaatgaaaaatccctcttgggtgcgggggcacaaacatgggggtttaataattgtcaaaaaatattaatgaaagccaccgctggtttttgtgcgatattgttatccgttg

SEQ ID NO: 134621 - DNA, 226 bp, Zea mays
  Clone ID: MRT4577_54258C.1
tcggtgccggacagcacctgcactgaaggagtcggatggtccaggactcgtgacaacaaaaaatgctggggatgcaataacccgtttgcagcctgtatctggacccactagagacagcagccagatagtggtaacaggtggcataggacatcgagctgatggtgaagcaagagtgcaagaacggagacatacaacacgggccatactaggatctgctcaagggaac

SEQ ID NO: 134622 - DNA, 442 bp, Zea mays
  unsure (1)..(442): unsure at all n locations
  Clone ID: MRT4577_54259C.1
tcgttggacccaacacggaagaggngagngaaagttgcaggtctaggggaaccagcccgcgagacagcaaggatgaacgatgcaggaatgggagccatcatcaaagagcccatcgacgacaacacatggaccccctccgtgacaacaatccagtcacgaatcctcttcaaacaagccgaaagacgaggcctggagaacaccctcatccccgcagggaacaaggcgaatcagcagacttgaaaggccccgacgcaaccaatgtaaaaatccgccgaataaccagggaataacagagagctgcttagccagttcgaacaattaaatgagcccgattagaatgacaaccttccacataaatgcccccgaaaaacgcacaccaaaaatgcggagagggcagcaccgcaggagagaagagccgaagcaagccgatttgaccccaacc

SEQ ID NO: 134623 - DNA, 472 bp, Zea mays
  Clone ID: MRT4577_5425C.1
caccgattcgctgtatccatgaatctccggcactctgcgtctgtcacggatcccatctgccactccgccgctgacactactgctaagagtaggactctcactgagaccgatgaactgaacactgttctgcggacttatgatgcacctaatgacatgcgtctgagcgtctatgttaagtggccgcatatgcctagttctacgatgaatgtgggcctgctcgtcgatgcccagcgtgactacgagggcaaaaagatgactacttgactacacgaatggcgtgggtctccagaacccatacaagattctgaggctcgttgagaggctcgccaataggtaccatgctacacttggcgttaaaggccataatgaaccccatgccgcgatttcttggaactggtctcaacatggtacgaggggtgccgaccctgcatactcaccaggagtccctcaactacatggtgaacgaaactaa

SEQ ID NO: 134624 - DNA, 382 bp, Zea mays
  Clone ID: MRT4577_54260C.1
gggcaaccacaaacagatctttcatttttttcaggttagagggggcccccctgccactaaaatcaggtccatccattttcttacaacccgaaatagcgggggggcaattcagggtccgggttttttgcacctaaccgcccccaaaacacactaacggcacgggtcattctcgcaacaaaaaacggggtttggcacaccattttgggcaacgaaaacacgaggaatgctcccccccccacaaagaatagacagactcacccatggttcccatgggctggagaggggggatgacccaaagctggcacaagaagggggggatctgaagatcccccctgccctaggcaatgccattggctgggggaacctaggcaggatgggcatg

SEQ ID NO: 134625 - DNA, 120 bp, Zea mays
  Clone ID: MRT4577_54261C.1
ataaaactcatgtccaaatcaaaaccggtgcctagcagagccaacatggccccgtttgatatcgaagatccacgctgaatggcttggggacaaaggttgaacaccacaatctggcggcca

SEQ ID NO: 134626 - DNA, 210 bp, Zea mays
  unsure (1)..(210): unsure at all n locations
  Clone ID: MRT4577_54262C.1
cagaaacaacgcattgccatagctcgtgcgcttgttagacagcctcatattttgcttttggatgaagccacgtcagctctggatacagaaagtgaaaaggctgtccaagaagccctggacaaagccagagaaggccgcacctgcattgtgattgctcaccgcctgtccancatccagnatgcagacttaatagtgggtgttcagaatggc

SEQ ID NO: 134627 - DNA, 2000 bp, Zea mays
  unsure (1)..(2000): unsure at all n locations
  Clone ID: MRT4577_54263C.1
cccgggctaaggcgcgcggctcccccgcgtcgccactcctcgggtcaacctcggggctgccgagcgtcgccacgcttaaagccctaaacccatcttgctcccccctcgtctccactgctctgctgctcctcgcgccgccgccgccgccgccgccgccgcagcgacgtaatggcttccgccgcggtgctccggaacgccggctcccggcgcctcttctcctaccctactctccgcgccgctgcgatatatgtaccttctgcgctacccgatgcgcccgcggcggcggcagcgccggcccagccgccaccgatggccgggaccatctgggcgaggtccatggccaccttcacgcgcacgaagccccatgtgaacgtcggcaccattgggcacgtcgatcacggcaaaaccactctcactgctgccattaccaaggtcctggccgaggcagggaaggccaaagccgttgctttcgacgagatcgacaaggctccggaggagaaagccagaggaatcaccattgcgacagctcacgtcgagtatgagacggctaaaaggcattatgctcacgttgattgtccaggtcacgcagattatgtcaagaacatgatcactggagctgctcaaatggatggtggtattcttgtcgtgtcagctcctgatggcccgatgccacaaactaaggagcatattcttcttgcccgtcaggttggtgtaccttcccttgtgtgcttcttaaacaaagttgatgctgttgatgatccagagcttctggaacttgtagagatggagcttcgggagctcctcagtttctacaagttccccggtgatgagattccgatcatccgtgggtctgcgttgtctgctttgcaagggaacaatgatgagataggaaagaatgcaattttgaaattaatggacgcagttgatgagtacatccctgatcctgtgaggcagcttgataagcctttcttgatgccgatagaagatgtgttttctattcagggtcgtggaactgttgttactgggcgtgttgaacagggaacaatcaaaactggtgaagatgttgagatcttgggtttggcacagactggtcccttgaagactacagttactggtgttgagatgttcaaaaagatactggaccatggagaggctggtgacaacgttggccttcttctccgtggtcttaagcgtggtgatgttgagcgtggccaggtggtgtgcaaacctggtagtctgaagacatgcaaaaagttcgaggcggaaatatatgtcctgacaaaggatgaaggtggccggcacactgcctttgtcacaaattacagcccccaattctacttcaggacagctgatgtcactggaagggttgagctgcttggggagatgaagatggttttgcccggtgacaatgtaactgcgaattttgagttgatatcacctgttcctcttgaacctgggcaaagatttgcgattagggaaggaggaagaacggtcggtgctggagtcgtctccaaagttcttagctgatcagtttccactttcttctccgtagcaattcagtgaacaaacgagtgttgatatgtccgaccgggttagaaacgagcgcaaagcaccgggttttcttttgcatttttcttggaatgcctgagcaaaggcagagctggcctggccagtggccaccattttattgttgaggcgtggtgctgtgtaacaccacggttagtttggttgacacgcaagttgggcataactttgattgaataatactagtctcatcataaacatattttctagcaattttgtcatgtcggtcttggaggcgctttgtcaagtccgcaaaaaaaaaaaaaaaaaaaaaaaaaaaaaaaaaaaaaaaaaaaaagccaactgctggttggactatatatgtgtatgtatttgtgatgtttaccgtcgctcaacnnnnnnnnaatccaaaaaaaaaaaaaaaaccccccccgcttggggcggcggctggttgc

SEQ ID NO: 134628 - DNA, 1899 bp, Zea mays
  Clone ID: MRT4577_54264C.1
tcagatgagttaagccctaaacccatttccccctcgtctccactactctggtcgtcctcgcgccgccgccgccgccgccgccgccgcagcagcagcagcagcagcgacgcgaccgccggtaatggcttccaccgttgtgctccggaacgcctgctcccgccgactcttctgctactccactctccgcgccgccgcaatattgggacccgccgcgccacctgatgcgcccgcggcggcgtcggcccagccgccaccgatggcaggaaccctctgggcgaggtccatggccactttcacgcgcacgaagccacatgtgaacgtcggcaccattgggcacgtcgatcacggcaaaaccacactcactgctgccattaccaaggttctggcagaggcagggaaggccaaagcagttgcttttgacgagatcgacaaggccccggaagagagagccagaggaatcaccattgcaacagctcatgtcgagtatgagactgctaaaaggcattatgctcatgttgattgtccaggtcacgcagattatgtcaagaacatgatcactggagctgctcaaatggatggtggtattcttgtcgtgtcagctcctgatggcccaatgccacaaacaaaggagcacattcttcttgccctgctggtgcggctgcttactactgttggccttcttctccgtggtcttaagcgtggcgatgttgagcatgttcatgcggtgtgaccacctgatagtctgaagacatgcaaaaagttcgaggcggaaatatatgtcctgacaaaggatgaaggtggccggcacactgcctttgtcacaaattacagcccccaattctacttcaggacagctgatgtcactggaagggttgacctgcttggggagatgaatatggttttgcccggtgacaatgtaactgccaattttgagttgatatcacctgttcctcttgaacctggtaacgattacattctcaatttctttcaacagtatagaactatagaccaagtcttctgacaacatgctgttcttcgtgatgccattgcacgctccaagctacttcttttcattgaatactaaagaaattcatattggatcgtcaactcgtgcctttgatgcagggcaaagatttgcgattagggaaggaggaagaacggtcggtgctggagtcgtctccaaagttcttagctgatcagtttccactttcttctccgtagcaattcagtgaacaaacgagtgttgatatgtccgaccgggttagaaacgagcgcaaagcaccgggttttcttttgcatttttcttggaatgcctgagcaaaggcagagctggcctggccagtggccaccattttattgttgaggcgtggtgctgtgtaacaccacggttagtttggttgacacgcaagttgggcataactttgattgaataatactagtctcatcataaacatattttctagcaattttgtcatgtcggtcttggaggcgctttgtcaagtccgcagaaaaaaaatgctggttggactatatatgtgtatgtatttgtgatgtttaccgtcgctagcttctgatctggtgatgcgaaattttaatggcatggatattatctatttgtattcgaatttgattcgactacaaggactaaacccgatccttatctgagtccatgttctttagtatctgatatgtatttgatatttatccgtattcataaagtcataaagttggatatgtattatgttgatactgttttaaatattatctgacataatttaataacatttgtattcgatgtgaatccgaaaagaaaaaaaaaatgtaaaaataaatacggaacgactgtttgtatcggtgctggatagatttttgtgggatgaattagtacattatcttttt

SEQ ID NO: 134629 - DNA, 3197 bp, Zea mays
  unsure (1)..(3197): unsure at all n locations
  Clone ID: MRT4577_54265C.1
ttgggtaccacgcgtccggcgggaatttcgccatccggtttggttgtgttggattttccttctattaaaccaaaccttctgggctcctgactccgctgctctggtctctcccaccaccgcgaacacctggcaatggcggcctccgccccgtcggccacctcccagatgtcctcaagcggcctcctttcttactgagctcacccaccacccgccacgcccccgactcccacgaactcctccgcctacccacccctaccctacttctctcgcccgccggacgcatctcggggctctgctccccggttctcggggccggtggatgcgaccgcgtccccgcccccgaaatcagctgcccggcgtcctcatagcgttcccgggatctaggccctgagcaatggcagcggcggtggcgccgccgctctgcacctggctcgtcgccgcctgtctctccgcggcctgcggcgatggcgagaaggagaatgaacgcaggcaccgcggtggcggcgtagggggtttcttcggctcgcgccgccgcctcggctcagggcgccgcggcgtggggcgctctggaatggccatgtctgttgccttgcatcctgaaaggacagctgtggaaaataagaaacctgatatgaaacagaggagagtggttgtcactggcatgggtgtagtgacgccactagggcatgatcctgatgaattctacaataaccttttaaggggtatcagtggaataagcgagatagaggcatttgattgttctcactatcccacgagaatcgcgggagaaatcaaatcattttcgacagatggttgggttgcaccaaagctagctaagcgaatggacaagtttatgcaatatttgataacagctggaaagaaagcattggagaatgctggaatcactgaagaagtcatgaatgagttggaaaaatcaagatgtggagtcctcattgggtctgctatgggtggcatgaaggttttcagtgatgcaattgaagctttgagggtttcatacaagaagatgaacccattctgtgtaccttttgcaactacaaacatgggttctgcgattcttgctatggatctgggttggatgggcccaaattactctatctctactgcttgtgctactagcaacttctgcattctgaatgcagctaatcatatcagaaaaggggaagctgatgttatgctttgtggtggttctgatgcaccaatcatccctattggattgggaggttttgtggcctgcagagctctttcacagagaaacagtgatccagcaaaagcttctcgaccttgggatgtggatcgtgatggatttgttatgggagaagggtctggtgtgcttgttttggaagaacttgagcatgcaaagcaaagaggtgcagaaatatatgctgaatttctaggaggaagtttcacatgcgatgcataccatatgacagaacctcatcctgaagggaaaggggttattctttgtattgaaaacgcattagcagattcaggagtaacaaaggaggacattaactatataaatgcccatgcaacatctacacagatgggtgatttgaaagaatttgaagctctcaaccgttgttttggccagaatcctcagctacgagtgaactcaacaaagtcgatgacaggccatctgctaggagctgctggtggaatagaggctgttgctgctatacaagctataaggacaggttgggtgcatccaaatctcaatttggacaatccagagaaaaccgtggatgtcaggatgctggtgggcccgcagaaggagagatgtgatgtgaaggtggcgctgtcgaactcgtttggatttggcgggcacaactcatcgattttgtttgcaccattcaagtgatagccgttgacaaatttcttgtggtgggctacacaccgtcgaactgagaccttgtataagaaagtatttaccggacgcagcaatatctcctgtactgcaagattaggaagagatccaaaaggcttagtaggatgtgtattgccccacaaccggacgaaagatggaaactggtccgaaattatgtcgaccgagaagggcatccgttcagatgcccccccccccaaaaaaaaaaaaaaaaaaaaaaaaaaaaaaaaaaaaaaaaaaaaaaaaaaaaacccgaggaagggctgtggtacccaccaagaatttcctgaccctgtttttgcccccccgccatcaaactggggtgcagcagaaccaagagaggtttggatttgaacctgtacctgatttcacacttcatacatttaataagtatgcagatgatttccgtgaacaatattttaagaaagaagtgtccgcggactcaccaccatcagtagaagacattgcaggcgagtattggcgtatagtcgaaaagcctactgaagagatagaggtagtatatggtgctgatttggagactggaacttttggtagcggtttcccaaagtcttctcccgaagtaaaatctgatgttgagcataagtacttagagtctggttggaacctaaacaacttgcctagactacaaggttcagtactatcttttgaaggcggtgacatctctggtgttttggtcccttggctttatgtcggaatgtgcttttcatcattctgctggcatgttgaagaccatcatttgtactcactgaactacatgcattggggtgctccaaagatgtggtatggagttccagggaaggatgctgtgaatttggaggctgcaatgaggaaacatcttcctgagttatttgaggagcaacctgatttgcttcacaacttagttactcagttctcaccatcattgcttaaatctgaaggagtaccagtctaccgatgtgttcagcatgagggagagtttgtcctgacgttcccacgggcataccatgctggttttaattgtggcttcaattgtgcagaagctgttaatgtggcacccattgattggttgccggttggacaaaatgctgttgatctttatcgtgaacaagctcggaaaataactatctcccatgataagctgttgcttggggctgcaagagaagcaataagagctcagtgggacatcctatttctcaagaggaattcttctgttaacttgaggtggaaaagcatatgtggacctgatagcacaatatgcaagtcactganagcacgaattgaaatggagttggta

SEQ ID NO: 134630 - DNA, 174 bp, Zea mays
  Clone ID: MRT4577_54266C.1
cattttcaatgtaaagctcttttagtttttgacatagacatgcattaatatgatgagatgcatgcctcacctgttcaattccatctgggtggaaatgaagtacttaaaattaccgttatccatgaactttgcggactgtaagacttgttatatatgtacaaatgccttttagct

SEQ ID NO: 134631 - DNA, 650 bp, Zea mays
  Clone ID: MRT4577_54267C.1
agaggagtatagagaggtggcgtgtgacttgctgagctcgcaggtgtgaggtctcctgcacattcccgtacccacaagagcaaaagcgacccaccagcttcaccctaaaaatgcgcacccctgttccgccgccctgatatccctttaacccgatccccaagacccgccgctgttccctcgaatgaaggtacgcaccgcatcttcctttatctgatcccgatggccggtgcaccgctgctgaaacgatctctgtgctgatgcaactgctcatgtgttgcatcttgaagcgattagggacagcacagacgcgtggattgctactgggatgaacttcaatgctggtagctccctcgaatcaggagcgaagaatgcggaccagcatggcagaacagcatgtggaaaggaccaagggcacaaaaaagggcaccattggctgaatccactggacttgcagacaatgcatgcagctgccctctcactactggaaactcttcgccttcctaatatatgatgcatatgacccactgcaccttcaagatccagtgttagaggattaccggaaacgcctccacaacatggtgtcgatgttgatgatctttctgaagatgtatcctgatgacactgagagaatcgatgcctaaaaaatacat

SEQ ID NO: 134632 - DNA, 698 bp, Zea mays
  unsure (1)..(698): unsure at all n locations
  Clone ID: MRT4577_54268C.1
cctcgaggccggccggggttggtttacttcctgcggaaccgatcagctaccctactcgagagtatacccccaccttccacttcatccagcaacaatgggcaagaagcgtgtactcatctcgtatgggattgatgtcgatgctgtctgtggttggctggggtcctatggcggacaggacagtaccagtgacatcagtcgtgggctctttgcgggaactgttggcacccagcgtctactgaagttgttcaagaagtacgacatcaagactacatggttcattccggggcacagtctagagacgttccctgaggacatggcggctgtacgcgatgctggccacgaaattggcctccatggatacagccatgagaaccctgttgacatgagcattgagcagcaaagagatgttcttgacaagacatatcgcatgctgaccgagtttgctggaaagccccctcgaggcagcgtagctccatggtgggagacaagccgtgaaggttgcgagctgctgctctcatatggcattgagtatgaccatggcatgagccaccatgattgccagccctactatctaagaactggcgactcatggaccaagattgactacaagaaaaaagctcaggactggaatgagccattggttgcaggtcaggacactggccttcgagaaattccggcanttggtaccttgatgactt

SEQ ID NO: 134633 - DNA, 349 bp, Zea mays
  Clone ID: MRT4577_54269C.1
cccacgcgtccgcgatccatcaattgcaagatgagcaagataccatcaccgtagcaccacaggcgaggtactaacaaggcgaccaacatctcaaggctgacctacgtagcatcggtagttctgaccctactgctaacgacaggtcctacaagtgccatcatcgccgacgtgatcgcgtcatctgacaatttgatcagctgcaaggtactgcgcaacttcgacaagtactattgccccgaggccatctccccagggaaacccttcaactactacacccgcggcttctacccgatcatcagctgtcaccgctgatcatatatctcttgtcaatgtgcgctcaaatgtaatg

SEQ ID NO: 134634 - DNA, 316 bp, Zea mays
  Clone ID: MRT4577_5426C.1
gttttctgttcgaccaccaaccgacagatcgcagcgatctacggcgacgacctttgagggataccgtgcgacacagtcaggcgcacaggctccagtaggaggacggtggctcgacctgtcgtatgggggagatgttactctgcaactggaactactgggcgctggtctgcatgcgcctgtggcagagggcggcctggagccccttgctagccattgacaaccccggcacgaccacactgctcgacctgctcatggacgggcgaccggtgcaggaccggccttcgcagcacccaaggtgagcggagcttagcctggg

SEQ ID NO: 134635 - DNA, 298 bp, Zea mays
  unsure (1)..(298): unsure at all n locations
  Clone ID: MRT4577_54270C.1
ctcaccttccgcagcagctagccgccagccaagaagccgtccaacgaagtaaggcggagcgagcgagtnaagcgtccaatggtagcgatggcggccgtgcagcanaagcagcagcagcagcgccgcgacgcggaagctgagctcaacctgcccccaggcttccggttccacccgacagacgaagagctggtggcgcactacctctgcgcgcgcgccgcggagcgccgtccgccggtgtccatcatcgccgaagtcgacctgtaccgcttcgacccctgtgacctgccggagcgcgccc

SEQ ID NO: 134636 - DNA, 1462 bp, Zea mays
  Clone ID: MRT4577_54271C.1
gccggccgtccggccataattgccatctcctgcgtccggccatatcctcgatcacaagagcagctactagctgcctctagctcgatcggttagtttgtcgtgttgcttacgtacgtcagcagaggccatcgtcgagtgtatccagtggtcgagaagagggaagaaatgtctgcgaacgacggcgccggcgacacgaagatgagggcgatcgtcgtcgtagaggaagggggagatgagcgcgccggcggcgacgccgaagcagggcaagtgctgcgagtacacgctggacggctccgtcgacatgaagggccggccggcggtcaaggggaaatcaggagggtggcttgccggtgctctaatcctcgtgaaccagggcctggcgacgctggctttcttcggcgtgaacgtgaacctggtgctgttcctgacccgggtgctggggcagagcaatggcgacgccgccaacaacgtcagcaagtggacgggcaccgtgtacatgttctccctcatcggcgccttcctcagcgactcctactggggacgctacaagacctgcgccatcttccaggccatctttgtcctcggcctcgcgctgctgtcggtgtcgtcgcacctctacctaatcaggccggacgggtgcggcatggagcacgcgccctgcggcccgcactccggcaaggagctggggatcttctacatcgcgctgtacatgatcgccttcggcaacggcgggtaccagcccaacatcgccaccctgggcgccgaccagttcgacgaggaggaccccgccgaggcgcactccaaggtctccttcttcagctacttctacctcgccctcaacctcggctcgctcttctccaacaccttcctcagctacctcgaggacaagggcagctgggcgctcggcttctgggcctccaccgccgccgccgccacagcgctcctgcttttcctcagcggcacgctccggtaccgctatttccagcccggagggaacccgatcggaaggattggccaggtcgccatcgccgcgtgcaggaactggaaggcgggcgtgtcgaccgaagtggtaagcctgtacgagggcgacgagaaggcggatgccggtggcaggaagcttctgcacacgcaagggttcagtttcttggaccgcgcggcgcacgcggacactgactccaagctcggcgcgcgcgatccctggaagctgtgctcggtgacgcaggtggaggaggtcaagagcatcctgaggctcctccccatctggctctgcaccatcctctactccgttgtcttcacccagatggcctcgctctttgtcgtgcagggcgccgcgatgcgccgcaccaccccgttctccggcttctccgtcccgccctccagcatgtcggccttcgacattctcacagtcgccgccacgattttcctgtaccgccgcactatctgcccgttcctagcgcggctc

SEQ ID NO: 134637 - DNA, 156 bp, Zea mays
  Clone ID: MRT4577_54272C.1
ataatgaagattttatgtcttaggcagaccctgtcgaaccaggacccggggagatggcccttatcatggagctcgatctgcagaccaagagcaaggcgtacatgctagcgcatgttaataagaataagaaccagctctccctgttacacgtagcca

SEQ ID NO: 134638 - DNA, 640 bp, Zea mays
  Clone ID: MRT4577_54273C.1
cattgggtacctcgaggccggccggggtcctctcccgcgttcgcatctgtcaccggttgtatccatgttgtgctgccgtcggcgcctcctccagattcgccgtcgcctccccacccgcaggacccatgtacgaaaggcttgcagccgccgcgtctcgctcctccctgtccttctccacaggttgtatagaacccaagtccgtgtcactctcgacctctggaacttgtaacaacaacggtgatcaaacagagaatgaaccaccagcactagggccttattctccagacatcagattcattaatcatgtgctggttgctggatgtctagtgtactattctgagatcacgaagcctatctcttaacaagatcaggatttctcgtgaacacggtatcagaaacatgcttcgacatattgtataactaacgacgctaaatattcttcatgtgagaaaacaaccatcactcgttcgccgtgatctgcaggatttcaataacacgtacacgagaccaatgattattatgtgcctaagccagcacctgttacgatcaaactacaatgatgaaagctgctgtacactgaatgaccggatatgaaatcgcatgcatcgatgctctctagatgcagatcatccaaccactc

SEQ ID NO: 134639 - DNA, 634 bp, Zea mays
  unsure (1)..(634): unsure at all n locations
  Clone ID: MRT4577_54274C.1
gactcctaagggcgattggggtcancagggggccgggacagcatcttcccacatccgtcagggtcagccttgggcggaacaccgcggtgtctcgattcttgcgctcctccttcagcagatgacgcatatcgagataaaaaggaacctgctgacttccgcttccctaaacttatcaaacgagggattgctttactcgctatgtccagtaccaaaggcggtcgaatgtcaaagggaaggaggctagagtatgagaaaaatttgccaagaactacaggatcctcatgccctgaaaaatgatatgatagaggtaacgaccggagggagtatgttacgtctccagaacctcactgaaagcaccgaccgagacctccagctgaatgagtcaacatatgagaaacagtgagccctactgtgacattcagcgttgctacttacacaatcgtaagtgactacttggaccttgctcttctgacatgcaccactacactgatagagatgactctcatatgcagatctaacaatttgcatacagtggaccaacatgctaccataggtttgtgcgtgcactgagtgcctcatattgagaacgagctgaatgcagttgctttaatctcatcatccaaccactcattgc

SEQ ID NO: 134640 - DNA, 220 bp, Zea mays
  Clone ID: MRT4577_54275C.1
ctctcttccttatatccactatccccatcccctctctgtggggggcttccctgctgcagcgagcggcggcggccagctggcaaggcgcggactcctccctccccttgctacggtgagcggtggcgggcggccgcccagcacagcgtggcagtggtgtttccgcggtgccctggttcggacgctgctcgggcggctgctcaatgcctaggaggaggaggag

SEQ ID NO: 134641 - DNA, 505 bp, Zea mays
  Clone ID: MRT4577_54276C.1
ataaaaaaaaaaaaaaaaaaaaaaaaaaaaaaaaaaaaaaaaagagttgaacataggggtgtgaacaaactaaaggaacaattaacaaaggttttgttccccctgggggcccctcctggggggcgttttttgcggttttccttccccttggggggggttcgtgcctccttttggggggcccatttccccctttgggggtgggttttccatttcattgcccgtctttttcccctttcgggtttgggaaatccctggggttcccctgtttaatagccttgcggcacatcccctttttcccagctggtgtcttgcctgaagggcccttgcccatggtctttccccccgttttcccatcgggattggcgtttggtccccccttgttggggggttttttggccggtgggtttggggtttccccttcagttgtcttgtttttttttccggcccttttcgcccgtttctttcgtttttttcccttcctttctggccctttttggggggtttt

SEQ ID NO: 134642 - DNA, 488 bp, Zea mays
  Clone ID: MRT4577_54277C.1
tttagcggttcttcctttcaggtacagcttttttttttttttttttttttttttttttttatttttttttttttttttttttttttttttttgtttttttttttttttttttttttttttttttttttaatttttttttttttttttttttttttttttttttttttttttttttttttttttttttttttttttttttttatttttgttttttactaaattttttaattatttttttataaattttgttttaaaatttttttgtaaaaaattttttttttaattttttttccccacaaatttttaacccaaaattcctttgcgtattttgtggggccactggttgggaaattttaattggggtattttgggggttatttttttggaaattttattggtaatattttttttgttatttttcataaccccacaaaataacctttaggttgatggggggttcgtggagtgtttagttagggggttttttt

SEQ ID NO: 134643 - DNA, 492 bp, Zea mays
  Clone ID: MRT4577_54278C.1
ctcgaggccggcctggccatcgctgctttctccgcctccgctcgcgggcctcctcccgggctgcccctcctccggccccggatcgccttaccccgcgtcttctacgcgaattgattctatcatcctcaggattttccccgtttgtttggtggtgttcctatcttcttcaatcgtagtgataaggcttgggggcgctcggagaccaggatactccaaggtcatcgatagatagacggaggtaggtgctttctccccgacctgaagggaaaggaatccaaacaaaggaaaataacaaggtggcgatcccactgatgtgccacgtgcactcgcgcacgtggatggatctcttctacagacccgtcacacccgatgtgtactacctcatgaatgtccggaatgacatcaatccaatgcttggcaatgatgagactggagactgatttggtacttctcacggacatacaggacatgcttgaaactgttggcttgaca

SEQ ID NO: 134644 - DNA, 496 bp, Zea mays
  Clone ID: MRT4577_54279C.1
aaaaaaaaacaggggttttttttttcctttttaaatagcaaaggacaattgggggggggacacatccccttccaagccctttggtccaatttggagcctacgcataaccgttttcgggaaaaagggtcctgttaaaaataaaatcactccggacaggaagtttttgcctttttaggggacttgggggcttttttgggcaattttgcctttttgttcccgccattggaccctttttccgccgtttttttgggaaaaaaaaaagggttttttttggggagcacacccccgggagcgatggtaacccccccaaaaagtttccaaagttttttgtttttccggatcgccaaaagcacgtggggcggaataatgcgagtttttttgttgtccctggaagatttaccggggagctccaaaacctaaggggggaggttttcaaggacagcggcaaggtaaacgggggccccggtcccaacacccttggcgtaggggccctttt

SEQ ID NO: 134645 - DNA, 341 bp, Zea mays
  Clone ID: MRT4577_5427C.1
ataaaaaaatttttttttcttttttttaatataaatgtattttttattaaacttttttatttaataattaatttataccaagagtttataataaactaaactccgaacacttttttgtaaaagactaaaacgggtaactgtcattccatcacaaaaaaaaaaagctggccctgtcgttgacaaaaaatagaaactgaacaaaagatctcgccggagcctcaccaaagtgcctcactgacttacggacattcttggggcccctcaagaggaccgtgttttcgacaagtggagcactaagagcaagctggtcaaatgtgaaggactcgccaccagcattgaca

SEQ ID NO: 134646 - DNA, 373 bp, Zea mays
  Clone ID: MRT4577_54280C.1
cttatatataatctacggcaatacacactcatacaacatgaacttgtacaatagaactgtaatctcatactagatttattggagggaaccaccaatgatgctttgtctggtagaatgctgttgggtttgtcaaagcaagttggttgaatggcagcaattgttgcagtagcaagaggtgtgccatcgttaggcgcaacgtgctggtagaacggcaacaattgtggatgtgtcaagaaggtagcagggctcacaccagctagctggctgaatggtagtagctgttgctgctgtaaataagcaggacagttcaaagctgacagttggctgaatggaagaaatagctgtaggtaggcaacagatagctggctgaatg

SEQ ID NO: 134647 - DNA, 683 bp, Zea mays
  Clone ID: MRT4577_54281C.1
cccaactccccctaggaacgccgctgctgccgccgggattctctcctccacgcatctcccgcacacccgcaccacctccgcacgccagcggattccgcgctccaccggcggccgccagcgctccagcttcgacagccactatcggcccctttttctggtttttcagatcagattggctccgtcactcctcccgctcgaggccgccgtcgcagctcgagcctcgagcaccgccgtcgctgcacccccccttcacctccaaatcagacacgggtcggtctcgcgcgcgagcaggcgccgcccacggcccgcagcccctgagcaacatgtcaacgcccacggcccaccgcgctgtcgagcgtctccggcaaagtcgcgccgtcgcagatagagaggaccatggccgcctgaagcccgagcgccgccggcgtccagacccctccacgccatccccatctcgccgaagacctgcatcaagtctcccatccagcgcccgcgccacccttcggcccccgcaccgcagctctacaccacgagtgcttcggtcgcctcgcgacccgccggtgtccagaccccctccacgtcatccccatctcgcggaagacctgcataaagtcccgtccagcgcccgcgccacccatcgccctcgccccgctgctctgctattcgagcgcttcaaccgcctc

SEQ ID NO: 134648 - DNA, 891 bp, Zea mays
  Clone ID: MRT4577_54282C.1
agccttgacactattctttttgaccccgaggaaaaaatacgactagattggaggaaacggttcaacataataggaggagttgctagaggattaccaatatctccatgaggaatctcaaaagaagattatacatcgtgacatgaaagcgagcaatgttttgttggatgaagacatgaaccctaagattggagactttggcctagctagactctttgggcaagatcagactcgagatgtcacaaaacacattgttgggacatttggctacatgtctcctgagtatgtgatgcgtggacagttttccacaaaatcagacgtgttcagttttgggatccttgttatagagatcataacagggcggagaaacattgggcactacttctttgatgagcaaaatgaagatattataagcctcgtatggagacactggactgagggaacaattgtagagatgatagatgattctcttgggagaaattactcggagagcgaggtgctaaaatgcgttaacattggtttgttgtgccttcaacatagtccaatggatcgacctacgatgtccgatgtcatggtgatgcttaatggtgatgatactagttctataccgtctgctgcgaggcccacatttttcttggatagaagcactccttactcctataattcatgtactattacacatatgtctcctaggtagcacaaacaattgttgatagtagcatattgttacttgttcgcatcttgatgtatagtagtttagatcaactagtttgatttatcacaaagtgtgatttgtagttgccatttgtaattgtggatttgaaagttgcctagagaggggtgaatatgtgaaacctaaaatttatcaaataaagaataaaattgatcgcaatt

SEQ ID NO: 134649 - DNA, 142 bp, Zea mays
  Clone ID: MRT4577_54284C.1
cactatagggtatagctaggtatcgccctgcagggtatccaggtctcggatattaatttctccggtgtcgacgatgctcactatgttctggcggtcccgcccgtcttatcgtatcgctgttgcagtgctgacgttcatatgt

SEQ ID NO: 134650 - DNA, 324 bp, Zea mays
  Clone ID: MRT4577_54285C.1
cccacgcgtccgggctctctacacgtctatgacgctgcatcacgtagcgttcggcatcgcggcgttgatgaggtcctgtgacaagcgattggagttcatataggtgtggaggctcctgctcagcgacctgcactgctacctgtcgctggaccacaaggtgcgcgagtacaacatgttcaccgcgcacacacagctcatggtcatcacgatctcgaccgacacggccgacgttacactacactcacctgcagactcaccgctccgacatacgtatctcctgtatctgatcactgacgattcgcctcgaactatcaggattgcgct

SEQ ID NO: 134651 - DNA, 1865 bp, Zea mays
  Clone ID: MRT4577_54286C.1
gagagagactgagagagggagctagcaacaatggtggcacctactctgctcgccttccttccgcttccgcttctgcttctcgcagccttctcatcagcatcagcctcagcgcaccccaactttttccggccaatcgttcccctgcgtctccaggctcttcggcagcagcagcagcggcggcgagcgagctcggacgccaagctcgtcgccgcggccgccgacggcaccaacagcacggcgcagccgttcacgacgcactactttccccaggagctggaccacttcaccttcacgcccaacgcgtcgatgctcttccgccagaagtacctcgtcaacgacaccttctggcggaggccccgccgcggcggcggcgccgggccgctgttcgtgtacacgggcaacgagggcgacatcgagtggttcgccaccaacaccgggttcatgttcgacatcgcgcccaagttcggtgccctcctcgtctttatcgagcatcggttctacggcgagtcactgccgtttggggacgactcctacagctcagcggagacggagggttacttgacgtcgacgcaggcgctcgccgacttcgccatcctcatcaccagtcttaagcggaacctctcagcggagaccgcgcctgtagtcgtcttcggcggctcctatggcggcatgctggcttcttggttcaggctcaagtacccccatgtcgccataggggccctggcatcctctgcgccaatcctgcagttcgaccgcataacgccatggaacagcttcagtgatgccgtctcacaggactacaagtccgagagcttgaactgcttcagtgtgatcaaggcagcctgggacgtgctcgatgagaggggatccactgacgcagggctcctggagctcagtagactgtttagagcctgcaagagcgtcaagcacgctgattcgattgcaggctggctacagacggcattcacctacactgccatggtggactatccaacaccggccaacttcctgatggatttgcctgcctaccccgtcaaggagatgtgcaagatcatcgacgggttcccggcaggcgccgacatcctggaaaaggtgttcgcggcggcgaacctgtactacaactacacaggagaccagagctgcaaccagatcgagtctgattctgacgacagctccagttctcttgggctcagtggctgggggtggcaggcttgcacagagatgatcatgccgatgtcgacctcaaacgccagcatgttcccgccatccagcttcagctacgaggacacgtccaatgcctgcttccagtcgaccggggtccggcccaggccgcactggatcaccactgaatacggcggatacagaatcgataaggtgctcaagaggtttgggagcaacatcatcttctccaacggaatgcgagacccgtggagccgaggcggggtcctcaagaacatctcgtccagcatcgtcgcccttgtcacggagaaaggggcgcatcatctggacctcagattcgcgaccgatgaggatccggactgggttacagaacagaggaggcaagaagtcgagatcatagagggatggatagaccagtatcatcgagacatggcgcaagtatcctgaaggtgctgtgttacagacttacagttacagtcaagacaagttcacgtctggtctatgaaaaagaaaacataaaaaggaaaagttcctttatagcgcacaggacaatcacaggggacattaagatgataaaaggtgaaaagccagtccaattgtttcacttatcaacataagctgtaaaacttgaacactcttggacgaatcatgaatgaattgttacacgatgttcagtgtttttcccc

SEQ ID NO: 134652 - DNA, 555 bp, Zea mays
  Clone ID: MRT4577_54287C.1
catagaccagacgtgaacttgtcttgactgtaactgtaaatctgcaacacagcacctttactcctttaggatacttgcgccatgtctcgatgatactggtctatccatccctctatgatctcaacttcttgcctcctctgttctgtaacccagtccggatcctcatcggtcgcgaatctgaggtccagatgatgcgcccctttctccgtgacaagggcgacgatgctggacgagatgttcttgaggaccccgcctcggctccacgggtctcgcattccgttggagaagatgatgttgctcccgaacctcttgagcaccttgtcgattctctgcaggaagtttccagtgaagggcttgtacgtacactactgaaactctgaaaacgacgcttacatatccgccgtattcagtggtgatccagtgcggcctgggccggaccccggtcgactggaagcaggcattggacgtgtcctcgtagctgaagctggatggcgggaacatgctggcgtttgaggtcgacatcggcatgatcatctctgtgcaagcctgccaccc

SEQ ID NO: 134653 - DNA, 385 bp, Zea mays
  Clone ID: MRT4577_54288C.1
aaaaaaaaacgtttaattgggagaattaatcgggcataaacacaaagggggggacccacaccccgcgtcgggggggggatccaaaaagggagggcctggattcaaaacagggcagggattcactcaggcagggaagccccattacactcaaaacgtactggacgtaattttttggccccccccgcctgttggctgctttaaaccttcctttgggtttccgggggcttttgctaagccttttaaaccccgccgtttttcgggggtgacggtttcgtcgcccttttgctaagctggggccccggttctttgccctgggccaaaactccgttgggcttcggggccttaagggaagccattgtggtgggggggctactaactagctaac

SEQ ID NO: 134654 - DNA, 393 bp, Zea mays
  Clone ID: MRT4577_54289C.1
gctggcgagcacgtcggattccgtgatcctgttcatgggactaagccaggagcaggagagcgaagggaaagacaggacgacacttctccttccgggtaaccagcagagcttgatcaccgccgtggccaacgccgcgaagcggcctgtcatcttggtactcctcactggcggcccggtagacatcacgttcgcccaggcgaatcccaagatcggcgccatcctgtgggccggctaccctggccaggctggcggccttgccattgccaaagtcctcttcggtgagaagaaccccagtgggaggctgccggtgacgtggtacccggaggagttcaccaaggtccccatgacggacatgcggatgcgcagcgcgggcagctaccccggccggagcta

SEQ ID NO: 134655 - DNA, 128 bp, Zea mays
  Clone ID: MRT4577_5428C.1
tctgtgtgtttttggtatggatccgatgggtcttgtgtattaaaaggatgtttacgtactatatatagatggaaaatcgtttattctaaaaatcggggcaaaattaatataacttggatttgaacggc

SEQ ID NO: 134656 - DNA, 512 bp, Zea mays
  Clone ID: MRT4577_54290C.1
gctggcacgcctgcaggagccgggactgcgtatagtgcggggtcgacgagctgacttgtcggaggccgcccttgtgggctggtgtgccttccgcggacggagtgcttcacggtgtacctcggcgtcgagggaccaaatgctgacgcagcctgtcggggcgagagaacggccatcctactcatgagacgggacggaaagatgcaacgcgggccgaagcatagcatgaggggttgggacaagatgcctttatacagtatcaccctggagacattggtgctcactgactttgatgcagctttaacaacaagaacctttgcggaggttacttatggcagaagattggtcgaaaagggaacttgtatcgaagttagtacacccatgttaataaacaaaatggtcgatcatgaggttgttcacgtaatctccataggagatcaagaaatatgatttgacctgagtggggctctgagcgaaaatcctgagatgactgtgatcgatgctgacatctaccc

SEQ ID NO: 134657 - DNA, 266 bp, Zea mays
  Clone ID: MRT4577_54291C.1
ttccgccacgcgtccgcgccaacctcctgcttctgggcctcttccagtctctgcggtcatggagcgtctcgtcggggtgcctgggttcacgcccggggtaccctatcgtctattcagtaaccggtatcgtacccggaggaacacaaaatacgtggcggcctctccgtgctcagtacctgcaacgcactagcactgcgtctttggcgccgacgtgtgatcaccgtctactcgctcgctgcagggcatacattccacgatcttttcta

SEQ ID NO: 134658 - DNA, 430 bp, Zea mays
  Clone ID: MRT4577_54292C.1
caagatccactaatgggatagtttaaaccttttggtgggcaaatgattctaaattcctttttcccacgttcctattatttacacccacttaaaaaacaaacccttcccacatttgagcccacttttaacatttcacctttcacccccaaaactcttaataacacaaacaccatcaatcaacacttgctcacaaaaataaagttaacctacacatcccgtttcaaatcctgcgccatacgcctagaggccccatatccagatgtgaccatcttaaaccatacttcccaggttattgacaccccaaacaatgtagcctgccaactacattagcccaccccatacacaatctcctgaaaacggacccacttgagcctattgactgatttcggaaacatatttcatgtgagtgcccacccaacatacacgccac

SEQ ID NO: 134659 - DNA, 388 bp, Zea mays
  unsure (1)..(388): unsure at all n locations
  Clone ID: MRT4577_54293C.1
cacccagccggcgccggcggcgaaggagaagagggnccggccgggggccngccccgnaggcgnccgagaagaagcagcccaacccgcagcgggagaacaaggagcagaagcgggnccccaacacanccgnacgggagagcggcgaccgccncacccgcgccggcgagggggggagcagcncancggccagacccccgncnncnccaaggcgaggnacacggngcgcccgnncggcacccggcgcaacgagaagaacgccngcnacgncacggccaggggcgacaaggccacgcagccgcncgagagcggccccaangncaaggagcacgagcggcncaagaggaacnccancgacaccggcngccncgggggcggcnnccaagagcac

SEQ ID NO: 134660 - DNA, 921 bp, Zea mays
  unsure (1)..(921): unsure at all n locations
  Clone ID: MRT4577_54294C.1
ttaggtgacactatangaagnngccggccgggcccgggaaaaaaaaaaaaaaaaaaaaaaaaaaaaaaaaaaaaaaaaaaaaaaaaaaaaaaaaaaaaaaaaaaaaaaaaaaaaaaaaaaaaaaaaaagcaatcagctcatctgtcagcgccacaggggaccggaaaaccacggccggggttcctgcttctctacccggtccaaattgctgaccggatcaactcgagaccttgcaggattatcgatctgattgcggaatgatccgcttcatcctgctgcaaaatcggcaggggaaaactcgactggccaagaattacgtcccgctcgaggactcggaaaagcacaaggttgaatacgaggtacaccggctcggggtcaatcgggaccctaagttcaccaacttcgtcgagtttgccggccgggccgtgatctataggagatatgctggactgtttttttcaatatgtgtggacataactgataatgaattggcatacttggaatgcattcacttgtttgtcgagatattggaccatttctttagcaatgtttgtgagctcgatttagtgtttaattttcacaaggtttacctgatactagatgaatttattcttgctggggagctgcaagaaacaagcaaaaaggcaataattgagcgaatgggtgaactggagaagctggaatgacgaagaccaggaagatgctgccgcgtgtgttgtattccaatttgtattattcgtttcaggtgttttacatttgctctcctggttcgttccggctgacagcgtgatgcccatgctgtcactcgaaagaatggtagtagtagctagcatgagtttggtgcccagttacattataaacgtaccttcgaaaaataataatttcccagcaatggaaaaaaaaaaaaaaaaaaggccccta

SEQ ID NO: 134661 - DNA, 1115 bp, Zea mays
  Clone ID: MRT4577_54295C.1
cggacgcgtgggcggacgcgtgggcggacgcgtgggcggacgcgtgggtgggaccctcgggccggccggagacccttaacaatgcatagctccggccggaagtcccgcggggacccataatgtgccatgttgaagatgagagaaaagagaaccacattccataaacccaaaatagcaatcagctcatctgtcagcgccacaggtgaccggaaaaccacggccggcgttcctgcttctctacccggtccgaattgctgaccggatcaacccgagaccttgcaggattatcgatctgattgcggcatgatccgcttcatcctgctgcagaaccggcaggggaagactcgactggccaagtattacgtcccgctcgaggactcggaaaagcacaaggttgaatacgaggtacaccggctcgtggtcaatcgggaccctaagttcaccaacttcgtcgagtttcgcacacacaaagttatctacaggagatatgctggactgtttttttcaatatgtgtggacataactgataatgaattggcatacttggaatgcattcacttgtttgtcgagatattggaccatttctttagcaatgtttgtgagctcgatttagtgtttaattttcacaaggtttacctgatactagatgaatttattcttgctggggagctgcaagaaacaagcaaaaaggcaataattgagcgaatgggtgaactggagaagctggaatgacgaagaccaggaagatgctgccgcgtgtgttgtattccaatttgtattattcgtttcaggtgttttacatttgctctcctggttcgttccggctgacagcgtgatgcccatgctgtcactcgaaagaatggtagtagtagctagcatgagtttggtgcccagttacattataaacgtaccttcgaaaacataataatttcccagcaattgtttcgttcccctctgcagtgaaaaaaaaaaaaacaaaacagcaggttattcgttcgactgcccagttacattatcgtccccccttcgaaaaataaaaaaaaaaaaaaaacaagaggggggggggggggggggaaacccagggggggggggggggggggggggggggggaggaa

SEQ ID NO: 134662 - DNA, 772 bp, Zea mays
  unsure (1)..(772): unsure at all n locations
  Clone ID: MRT4577_54296C.1
atggtctcacgggtctccgttgacacctccagccatccctcaccgctctccttttctttcccagcgcaagttttgccttccttccgggtctccagttcttcccctccgccccgccgcatcctttgcttgcaggagtatccactcccgttgagaagagtccatcgggaaagctcagttcggttctcgcacgaacccagttcctcgcgaacaaggaaagtcaaactttgtggtcggagttgagaagggcaggattcatcttcggcggtcagctctgtggccatgacgacgtaggcgaggcaggtggttgtggttgacaagcaaagcagccagggcaggtagacgaagggaggagagagatcagagatggcggaggcgcacgcggaggccatggatgggagcacctgggaggacatgatgcggaggatccttcccccgggcactcccatccccgaggcgccgcccaacctcgactactccatcgccctcgagtacgacggcccgccggtgccctacgaactccccagggtagaccccgtggagatccctgcaatccccacggcggagccggtgtccggttcccaggtgctcggagggctcccggtggcgcctgttgttcagcccatccgcctcccagtctctaggatcgcccgctgcgcagatccggtggccgcgcaggctgctggcagctcagagtcagtcttgcnacaccaggagttcagtgacgacgacgaagaaggcgatgattcccgctcacagtcgcacggatcagcgc

SEQ ID NO: 134663 - DNA, 537 bp, Zea mays
  unsure (1)..(537): unsure at all n locations
  Clone ID: MRT4577_54297C.1
aattcggcacgagggttgacacctccagccatccctcaccgctctccttttctttcccagcgcaagttttgccttccttccgggtctccagttcttcccctccgccccgccgcatcctttgcttgcaggagtatccactcccgttgagaagagtccatcgggaaagctcagttcggttctcgcacgaaccccagttcctcgcggtagagatctctgcttccggttctggggctgctaccgcctagtggttgtgtgaacaggattcttaattggggttggtttgtttctacagaacaaggaaagtcaaactttgtggtcggagttgagaagggcaggattcatcttcggcggtcagctctgtggccatgacgacgtaggcgaggcaggtggttgtggttgacaagcaaagcagccagggcaggtagacgaagggaggagagagatcagagatggcggaggcgcacgcggaggccatggatgggagcacctgggaggacatgatgcggaggatccttncnccgggcactcccatccccg

SEQ ID NO: 134664 - DNA, 817 bp, Zea mays
  Clone ID: MRT4577_54298C.1
atctctgacttcccctaaaaaaaatctctgacttccacagtcccactctcaaatcctcgggcaggtcggctccgcctctgccatttcttcagcaaccttccgccgccgccgggacccttccattcccactaccactagcccccccgtcgacggaagtggcttcgtacccagccacccaggtcccccggtgtcggccccttccccattcattgtctacggctccgtgaccactcaccagtctggtctcgctctcgccggagaggcacatcgatctgcttctgtgcgctgcgcggcgctgcactgctcagactggtgaagaagtgaagaggctgggcctggggtggagatgggagaggccatccgcggcatcctcctacgcggcagtgtggcttcagaagctcgtgctctctgtctccgcgcaggccaaggttgtggccggatctgatgcgccggcgacgcggccggagttggggagctgggctgggagtggcatagctcctatcctacgacggacggcgtccctgtcacagctcccgctcgtcctcatctgcggcatcgccgtctgaacgggaggggaggaatcacggctgttggtccacttctctattccttccttccacaagcacaagacggcgcttcagttggattggatccctttgcttcgcgggcctaaaaactcgtcattaaccactggagtacggcattcgccagcggccgagtgatggcagcaaccttctcctttgcccgtgtggttgctctcttcttcctggccgctgcccatccccatggatgcttgcggctgcggttatctgcctga

SEQ ID NO: 134665 - DNA, 547 bp, Zea mays
  Clone ID: MRT4577_54299C.1
gttactcccaagtatcatcgaagacagagagcctgctaggaacctacaatgacagccgccgactcagtctcatggtgctcgtcgtggacctcgccatcgtccttgctagcgcggctgtttgcaaggatcacgacaccctgatcggccggtggaagcaaatccatgaccagagctagtactacatcgataatctaaaccggtaggcacaggggaaggcgatagcagcagaagttgctcataaagctggtgcgctaccgtcgagtggatcgccgcagacgacagcaggatgagaacctctatgaactacaagtctaaacgtcaaggcactacgacccacatcagaggcgctacacgtgtctctacgtaacaaaggtaagcactaacaagtctgctaacatacaggaaatcttaccaggtatacacaactgctttgctcccagtattgccgtcttgcaagacagggcagacagacacgatctgggagactgaacctggaaactactgggatgactatatctattattagtactaggcaaccagatatgct

SEQ ID NO: 134666 - DNA, 486 bp, Zea mays
  Clone ID: MRT4577_5429C.1
cggtcccggatatcccgggctaaaaaaaacgaccgtttttctgccacccaatgagtgtgcaggaccgcgaacacgaggcaggccgccgtagcagcatccacaaccacaagccatggcggggcaggactaacatccccactaacaactaggtcctaatggaaatcatcaacgaccaggacaccgtcactgccttctctatatgccgtcggtggccatgtgggactattcaggaaacaccaattacctgctggagtacaaccatacgattgttaaacaactccacatctcgtatgaagaatgtactacaaatgcgggatatacgatgttcagctcacgacctactatattgccaacatgtataacattttttggggataactacaaacaaaaccaaaacatactataaagggaaaacaaggccaagggccatacatgtatacacacctcccgactcggggctgtcacgagtgaagtatttcttctctg

SEQ ID NO: 134667 - DNA, 650 bp, Zea mays
  unsure (1)..(650): unsure at all n locations
  Clone ID: MRT4577_542C.1
cgagttctaggttagctgaaatctcccttattgtaatctgttcatctcctggcgtgagtctgtggcgctagtgtgatgccttctcctagctcatgggcttccggtctggaaatttgcttaccctcttcgacttattgttcttttctctttattccgcaactgttgggtccgaaattatggtgatttgttcggtatccccccctgcgaaatccggacaaaagtggggatctgcagcttctgtgctttattggctttaaacctaccttttcttggaccttttaccatttcttttatctcccatttccgccagtaatttgcttttcttttcgtttctacttatttccaccttccatttcttcgagaaattttcatgtaccgtaaaactgtgtgctcgtcgcgtgaaagatctcgtacttagcggtttatggggttttcgcaggttcgcaatccctaatcctgatctcacttaagcgctcgtgagctctctccagtggctaaagattgcagatttgagttatagtccaagaaacgggtggtggtccgccatggaggtgaggtccgagcaagggctgatggcngggagggatctattcggtatgccaaagagcccgccggcgccggnttcccgggccgccggcgtccgccgccat

SEQ ID NO: 134668 - DNA, 662 bp, Zea mays
  Clone ID: MRT4577_54300C.1
gattgcccactatagtcttgtactcgctggggagatgtgctcctcgctggatagttctcacgcattatctattcgctcgccgccagtgcatctcctcatcgccctgtcatctcccacaaatctatctactgtcctcacgcaatcacctaaaatggaaatgatgaatcatggtttaacgacccgcgaaagtgaataggatggctctcgatcaccctatcgatggactgactgctacaccacatgagcaaacacaaacactgatctccccatcacaatcagatacgctggtaggcaacaggagctcaatccaacgctaagaatttagataacaatgatcatatgaacttggaaaatacgtgaggagagaaggaattcgcaaggacactattcgattattgtcacacaatagattgtaacactacaattttcattcaccggacatcctagatgatgttgcaacattcacctgtgactatacaaccctagaatagtcactatctcacaacatcacatatcgatgtgtgtgctgatactgaaatagatcgcaactatctgaactcactcactaccactactgatgtatgagataagcttaaattccgataaatggacaaagctgatacattcgctctcatacgagaagcagatgaccaaacatacat

SEQ ID NO: 134669 - DNA, 571 bp, Zea mays
  unsure (1)..(571): unsure at all n locations
  Clone ID: MRT4577_54301C.1
gttagtatgagaagttcattagggttctggttagnagaaagattagccatcttgcttaggagtcaagtaagtctctagctatataaggagaggtacattatgtcagtctctagctatgttatgagaggtgatttagacctagggctggaggctcccacatgagtggggtttggggaaggttgcttccaacccgtgacctggtgactcagtgatacgctttcaccactacactaggcctacccttctgcatcaaccaaatcaagcaagaaaaaaacatccataatgttcatgtgatgttttttttcagctgtagcacatcaattcgattaggacttctcctgttggagcacaaatcaaacatgtcatcgaactgctttacaatatattatcttatcttcattaatgtacattggaatttgattggtttaatcctaggtcagttatatgttggtctatggacaaaaacactatcaatctatcatatcttggcttatgttttttgttcttttcttgtagatgctttgttctcctaacttcaccataggggtgttttcagctgctctctgtgctc

SEQ ID NO: 134670 - DNA, 742 bp, Zea mays
  unsure (1)..(742): unsure at all n locations
  Clone ID: MRT4577_54303C.1
ngattcagcagctctgcctttgctgctttcgctctgctcttccgtccccttcccccctttctcccccctccacccggctcgctgccggtggccgccgcttccgccgcccgctttattccctgctgatttacacatcggctgctcagctcgagctgcgtaggaagattgtggaggtcccagcgcctcacatcacccgtgcagccgaacaaagaaccactactcccggaggagatgaagtcccggagctctgcgaggggcgagccgaggaggttcgggaatgtggctctcctggccctcatgctctgctccctcgtcgcgctctcgctcatcagggccaggttctccccaatcgggaatacagccgttgcagagaccatcaaagtggaggatccgaagcccgtggtggtgagcaagccggctgtcgcggcggaggccggcgatggcaccgacgaggccaccgcagtagctgtggaggaagacaaggatgaggaagctcagcccaaggatgaggaagttcagcccaagaccgagcacgccgtggacgccactgtgcggcccgccaaagccgcagtggacgttgacgccagcaagccggtgtgctacgagacgagccggcgctccgacacctgcgaggcggccggcgacgtccgcctggtgtggagaaccagaccatctacgtcgacacgctggagcgtgagtggaagaccagaacctactgccggaagcacgacacctacgcgct

SEQ ID NO: 134671 - DNA, 556 bp, Zea mays
  unsure (1)..(556): unsure at all n locations
  Clone ID: MRT4577_54304C.1
caggagggaagctaccggccctatttcaccttccgtctccccccacggtgaggaggaggaagcaaacgtcggagcacgagcacgcgttcttcgcctctcaccccacgggagggacgggaggcgagggcgcggcgagccggcgggcgcaatcggatttggggaggcaaaaggaaaattccggagagcagttcctttccgcctccccatttcctccggatagatttgggtttgtcctgcgtcgattagtccggcgcccgaacccgcaccaatccattcgccgagggatcgagcaagcgaggcgtggatcgcaggcggtattccctgcctgcctcttcttctcctccgcctgttcttgccgcggtctccccctccggccgatctggactcgacagatcattatttttttgttggcatacattcccaaccttgatataaagacctccttcattcagaagcctgtgttttggaagggtatttcacaatgaagcccaatcagnagattctatcctatgttgatatacatagggnataccgatacgagatcctaccagagttt

SEQ ID NO: 134672 - DNA, 302 bp, Zea mays
  Clone ID: MRT4577_54305C.1
ttatttttttagcgcgctttttttttttttttttttgttcttttaaatgaatacttgcacaaaatacagggggtttttttgggccaacccaccacgggcttataagctcacacacgcccaaaaaacagggagttatattgggccaaacaaacacgggataaatatgttccacatgcccaaaataccgtgagcttttttgggccaaaaaaacacggcatttttaaatttcacaggcccaaaattctgggacttggaacatgaaccgaacaagacaggcataagtatttgatggaaacccttta

SEQ ID NO: 134673 - DNA, 267 bp, Zea mays
  Clone ID: MRT4577_54306C.1
ggcaaacaaaaacgcccttgtttattgggctttttgggaaccccggggaatgttcccccccctgccaaatttttaaaattcctttgtttgggtcccctttgaacatacaggcctgacaaaaccaaacacattctccccccctacaaagggggcgggggcaaaccaacccccaaaaaagtcccaaagctaaaatcccacccccaagtcagagttcccccgctgcggctgatttggggggcttttttacccaacaccttgggtgggttt

SEQ ID NO: 134674 - DNA, 406 bp, Zea mays
  Clone ID: MRT4577_54307C.1
attcccgacccgaccgcacgcgtccgcccgctcgtcctcacaaactacctactcttatcatcttgcactagatatctatatactgcaactcagaaaggttttatttcgacaatggcgacatacctcttcctactaatccgtccatcaaaatcatcatctgctactccgttctttatgtctctcaaaccagtactgatcactctcccttgcgctcctgctgacaataagcaacctctatccatctcttactctgtttattccaatgctaacgaccatgccttcaacatctctcccattccccttgtacattccaacattcacccaacttctactcctctatgggagatcaatgaatatggcaatgaaatcatgcttacattcttcaacttgtctgactctactacaa

SEQ ID NO: 134675 - DNA, 432 bp, Zea mays
  unsure (1)..(432): unsure at all n locations
  Clone ID: MRT4577_54308C.1
cgccaacgcggcgccgtctctagtatgcctgacttgcgatacacttcacacgcccgggcgtctgctctaaccttgtgctgctcgcgatccagtcccgtgcgcagatctggtggcgccttcgacgatcgagcgcccgccctcagcgtagaagtgcacgcgttcgttcggctcggcaggcggtcgatgggatctgtcaaacnacaagcgggcgcggacatgtctgtgcagcatgcgcgctctgcgtacctatgggggaggagagccggaacctcagacgcagaaaggggctctaatacttccgggcgctctttatatcatttggtgtggggacgcacctatgccactactcccgattgcgttgcttgccgcacctgagatcctttgtactcacggcgcaccctgggtccacgcccgactcctgctggacaggct

SEQ ID NO: 134676 - DNA, 403 bp, Zea mays
  Clone ID: MRT4577_54309C.1
gaaaaaagaagcgaaggaatacatgtgtgcaagcaaaagtatcaatttacccacaaacattcactattcaatacaacaaaaactaactctaccaactggcgcacaagctaacattgattcaaaacaaataatgggctacctagcacaacccatcggcgcatagatgtcaaaaatctcaacaccatacatggtctatgggggtgattataatcatctaacataaactattgaacctctaaccacagatctagatgataatctgcatcttcctgggcctccagctatacgatcactaaactcaaggatcggactttcagaccatattccatatggagccgtgggcgggctcatcagacttacgcgcgggctcaacaaattatagggccgtttttatctaatgggc

SEQ ID NO: 134677 - DNA, 325 bp, Zea mays
  Clone ID: MRT4577_5430C.1
gccttcgagacacaccaatcttgtatctctgctcagcaggtatctggcgaggggggccggctagatagggctcccgtgcctgaagaacgacttgatgatttatctgccattcatgcttccgataccgtatatgatcatctggtttgttataccatttgtgagtacatcctatgccaatcacagcatcaacaacacgctttacatgatcttgctgatccagtacataccaagagtgtatctcataatatacttgaacttcaagatcttaaatgcacgattagtgttgacgacatctgcctggttgaaagcggaatacaacctgttt

SEQ ID NO: 134678 - DNA, 180 bp, Zea mays
  Clone ID: MRT4577_54310C.1
gcggcgccgacgccgcgcagtgggtcgagctgctgcacctgctggccgcgcggcccgagggcccgccgcacctccgccttaccgccgtgcacgagcaccgggacgtgctgacgcagacggccgtggcgctgaccaaggaggcggagcggctggacgtgccgttccagttcaaccccgtgg

SEQ ID NO: 134679 - DNA, 600 bp, Zea mays
  unsure (1)..(600): unsure at all n locations
  Clone ID: MRT4577_54311C.1
ttttttttttttttttttttttttttttttttttttttttttttttttttttggggcncttaccactttactttttttccaggaaaatnacacacacaaaggggggtaacgggggataacataaattaaacggacacattcgggggggggggggaagaccactttacagggctggggtgagggggcagctgggctcgtnggagttggtgttatactagggcatcggtggtcagcaggctcgcctttacaggggtttattcaggcatgcatcgggggggattggggggttggattgggaaactggaaaaagagggagggagctagctctgggcggggggctggtctcacggcctgaagaaggccggggggggacgggcggtgccctggaagggggggttcttggggggctcaggggcttggtcgcacgaggggggccttgcccggggcagggtcttttgggggggggggggggggggggcgtcccggcccccgtggggtcggtgagcggccgggcggggggggggtggtggcggggggccctggcggttgcgctctctgcccgggtggggctcgggggggttgggcgcaccgctggggcag

SEQ ID NO: 134680 - DNA, 308 bp, Zea mays
  unsure (1)..(308): unsure at all n locations
  Clone ID: MRT4577_54312C.1
ctaccttccccatccctacccatcatcaccctcaccagtcaccactcgccaccctcgcccgcccccatggtctcgctcgctggctcccagatcatcaccacattctacctcatgttcgtcatctccggcgncgccacggacaacagagcaatcggggagctggctgggctggccgtgggcgcaaccatcctgcttanacggctatttgccgngcccgcctncgtcgcgtnnatnaacccnncccgncncgtggncccccgcctcgcgagcggggagtacacgnncctggcgacctctncatccccacc

SEQ ID NO: 134681 - DNA, 306 bp, Zea mays
  Clone ID: MRT4577_54313C.1
accctcgagctcggccgggcattgtaaacccccatcgctttctctccctctctctgcccccttcttgcggccatgtgaggatcggagccggctttgtatataaagcaccacccacccgtgctcttcagtctctgcttcctccatcttcagcacctcagagcgctccctctgggcctcttgcatcgcaggcctctccctccctccctccctccctcccacagtcccatctacacctcagttcatggcgagctctagacggagtagctgcacctggccaataatgtgcgccgacaagagagaaaacgt

SEQ ID NO: 134682 - DNA, 309 bp, Zea mays
  unsure (1)..(309): unsure at all n locations
  Clone ID: MRT4577_54314C.1
ctnccgcctttccccaactacttttgcgggttttggcagccaatctaaggtttccgtccccgccttcttatccccccccccccgccatgttgaaacaaggagggaaaggcaaaccccttaaagcgcccaaaggccacaagaaagagtaccaccagaccgatctttcattttttcagaagaagaaagatgaggaaaaagcacttgaagagcttaaaggcaaagcacaaaaaggcgccattgggggctcgggtcttaaaaaaaatggaaagaaatgaaactggtcacccctcttcaatacctaaaagatga

SEQ ID NO: 134683 - DNA, 1280 bp, Zea mays
  unsure (1)..(1280): unsure at all n locations
  Clone ID: MRT4577_54315C.1
tatctcagcccntatttcaaacttcactttgcaaacagtgtcaaacaatgtcatctccagttccgcgtccccctatttttcactacccgctgggaggcaatcttaacccctttaaatgatgtagcattttagtttttagaaccacctattttgagggcaccttaatgaaggatgcttctaagtattacattcttttacctggtgtcntttgccaagtgaatggttcattcactcaagatggccaatcgatggaaaaggtacattaaggttccatgtgtgcagtttgctttttctgatgacattgtactatccgagtctattgagagagcagtgaatgtgatagctgactctgtctgctcagtgcttttagatacaattattaaaggtgatcctcgaattcaagcggcaaaagttatctgggttgaatcagatgcagcatcttgggtaaaacacacacggaaggtatcaaagggcgagtcagcattagaaatcattgttgaaaaagatgatgctgtaagcaatggtgatgcctggagaacagcaattgatgcctgcttacctgtacttaacctcattgacacacggaggtctattccatatggcattcaacaagtgagggaacttattggcatctcatgtgccttcgatcaagtggtgcagcggctttcaacgactgtaaaaatggttaataaaggagttcttaaagaccatttgatacttgtggcaaacagcatgacatgcactggaaatttgattgggttcaacattgctggctacaaggcaactttccgttcattaaaagttcaagtgcctttcaccgagtccactttgtttacccctatgaaatgctttgagaaggctgcagaaaaatgtgattctgattcattgggatgtgtggtctcatcgtccggacgcgtggggcatgcagcagttggtactgggtcatcttttcaaattctctggaatgaaaatcagctgaaaagcaacaaggagtatggggatgggttgtacgatttcttagcgttggtcaggaccgaccaagaaaagacagactacatgttcttggacgatgttgactatcttgtagaggagaatgcagcagatgacacgtgcttatctcccgagccagatgggacccttggtaagcctacctttgaggataattttgaagagcaaaatattcagaaaggcagctcatgggaaattggcataacaacgaactcaagttgggaacagaatgctagtgctgtgaatgattctggtgactggggaggctggag

SEQ ID NO: 134684 - DNA, 398 bp, Zea mays
  Clone ID: MRT4577_54316C.1
aaaaaaaaccctatcacttaaggtttgccagtacccccgataacattgaacccacccactatcaccaggtccaaaaaaaaaccgcggggggggggccatcctttctcaaataaagtttaagcggacacaccccaccaactgacaataactttcggcaacaactgggccaaccagcaactgcagcacactcaaaactgacaacaaaccccttaatccacctcctcaatcttggggccagggcccccccttccgggaggggcgtcctcgtccattcccccaacgccgcccattttttaacccccgccctggtacatcttggcgataatggggttgcaaaggctctccaactccttaatcttgtcctaaaaaaacaccccctcggcaaactggttggcgtc

SEQ ID NO: 134685 - DNA, 246 bp, Zea mays
  Clone ID: MRT4577_54317C.1
taagcaggagttacgccgtaataccgtatatggagggacaacaaagagaaccaatcaatactacaaatgctatttgcttaataccacactttgtctatgcatgatatcaatgtaattagatataaaaaggaaataaaatagggactttctgttgaaatggaacgacatagatgcagcataaaaaaaagggtctaaaacaaatgcaagttgtgtataaataattaaggggtgtactcgttcgtcgtt

SEQ ID NO: 134686 - DNA, 436 bp, Zea mays
  Clone ID: MRT4577_54318C.1
gtatagggtgggggtgcattgttgaagggggtggttcaaaaaaatggggggggggggacagaaaaaattcctatgggggccggaaaaaagggggggaaagggagggaacaaacgagggagattgggaaggggaaccaggggggacatgaggggggggagcgagggaaagcaagtcaaaacaaaaagcgttgcaaaccgagcaaaaaagaatggaagaaaggggtgggaagaatgaataaagaggcagggactaaaaaaaacatccccaaggaggacaaaaaggctggcttggacggaaacagggactgacttccgcccgttcttcaaaaagttcaggcttcaaaggtagacgggctggggggaagcatgcaaagacctggaaggattcaggcaccagtggggaagcataaattgtcgaggggagaggcagcggggg

SEQ ID NO: 134687 - DNA, 432 bp, Zea mays
  Clone ID: MRT4577_54319C.1
gggggacaggtttttaattatttttcaccacaatgtttttttgtacaatttgggagaggatacatagcctgtccttggggggaccaaacgtttgatgggctccagggcatgggcaacactggcaggagagaagggacaccgggtacaaaggacacattaacatccgaatcaagcctagggttttacaggcttacaggcagtttacaatcatatagcatgggttttatggcgaaaagaaccggttggtaaaatatagtaacattccttatatgaaggattttccaaattttagggtgaaattggttaacgcaggttggtggtgccctaaaatgggaccaaggtggcattagtttaaaagagtgccttccaggcacccgggcaaataaaaccatttgggggacttttttggtttttgggaaaagggggcatttt

SEQ ID NO: 134688 - DNA, 228 bp, Zea mays
  Clone ID: MRT4577_5431C.1
gcttacacagcggtcaacacttaatacgacattgtcaattaacacgtggatcacacacgagataggctccggaataatgacggcatgttccacaagtccagaacaactaaagctttatcctcataacagtacccctgggcgtccctgctaatctagctttgccaggcgacggatctcatccttaagagcgtggatgcagtatgttacgttattgcttgacccgaaatg

SEQ ID NO: 134689 - DNA, 264 bp, Zea mays
  unsure (1)..(264): unsure at all n locations
  Clone ID: MRT4577_54320C.1
ggagtctttgctgaaaatgtttggntgcagattacgactttgcacacttaaatgttgtgttccctctcccacaactttcccgtttgggtgctttccagaaaaaaaaaactgttgccattttgtttggaagtatcagtttgcacgcattgtttggatgtgaagtatcttaatggttttgactggggtttttcagcaagtcacaccttggaatatctttcacagccgtgcttttttagaaagggagaaaaagaaaaaaaaaatcag

SEQ ID NO: 134690 - DNA, 365 bp, Zea mays
  Clone ID: MRT4577_54321C.1
tgatccggcgccctccagcatggcgggggcggggctgagagcgaaggcggcgggagccctggctctggcgctcgtgctcgcgctcgcgggggccaactccgagggcgacgcgctctcggagctgcaccgtagtctcaaggaccgtgtatgagactctgagttcctagcttacctacatgtcaagcacagcacttgtgatctactcaacttgttctatgttacatctcagaaacccacaatgctctttaattatttaaatattggaatgaacagatttcataaacagagacctggttatgggagctgggaacctacaccttggattggagcatacaggcccccaccccaaaagggtctacttaggc

SEQ ID NO: 134691 - DNA, 412 bp, Zea mays
  Clone ID: MRT4577_54322C.1
ctaaaggctcagagacctggtgaaactgcatgcactggactacttcacaatgctggggcgcatcactttgacgactgtgcccgcttcatggcctaccaccttacagagtacaggcggtactgtaacatcaataacatattactgacgctgaacttgcagcacgccatgaacaccctactaatgccaccaaacactcaatctagcttacatgatttaatagaccattacatgtacaacgacacagctcctcctctaaacgtcttctacacatatttctagtatcattatatcaaccaaattgatcaacaacaatatctgaagatgttagagccgacaaattttatccatgaattcttgacctgaatttcaatttccccaatgtaaaacatagtgttaaatttactgtcaattt

SEQ ID NO: 134692 - DNA, 220 bp, Zea mays
  Clone ID: MRT4577_54323C.1
gtaaagcttgtacaagagacaagagcataaataaagtaggtgtgtgtcacaactctcaccttgtatacggcgccaggcacggccatgctgccgcaggcttccaagaagagcctgtgctcgtcctcggtccatttctccctctgcttggatatcgtgtatggcttgcgtgcctaaacggcaagtggccaaaagtgtgaccttgggtgagaggaaaagaaaa

SEQ ID NO: 134693 - DNA, 742 bp, Zea mays
  unsure (1)..(742): unsure at all n locations
  Clone ID: MRT4577_54324C.1
aattcggcacgaggccaagacggcaagacggccactcccatccaacactgttccagacttccagtccagcgcccggctaatagccaagcagagcttctccctagcctttgcttgctcttccacagcgcaaagctccgagatgatgatcaggcgcggcagcagcaagatctcctcacccctcgccctcctctgcctcctcctcctcctcctcctcctccaagtcatcgtctgctcctcctccaactgcgcggcagctgctcgcctcctgcctggcgccggtcctctccctcctctccgtgccgccgcccccagtggcggcgacgagcattccgcgggctccgagacgacgaagggagcggcggaggcgtgcgaggaggggaacgacgacaaggacgagtgcgtgcagaggcggctgctcctcgacgcgcacctcgactacatctacacgcagcacaagggcaataagccgtgaccgtcagccagcgaggaggatgccgcagctgcagtggagcgaggagcttgcagctagctatgcaggccaccgtctcggctcggctgctagtgctacgtatacggcccctacggaaaanagtggtttgtggaggggcggagggaactatttataatcactttgcattgctagaatgctacgtagtcacgtagatgaacgctgctgcggctagttaattacatccgnacggacgttgtcatccgtagngngngnatatatatatatatatat

SEQ ID NO: 134694 - DNA, 710 bp, Zea mays
  Clone ID: MRT4577_54325C.1
gggtaccatttgtccctccagcaccaccaagacggccactcccacccaacactgttccagacttcggccgggcagtccagcgcccggctaatagccaagcagagcttctccctagcctttgcttgctcttccacagcgcaaagctccgagatgatgatcaggcgcggcagcagcaagatctcctcacccctcgccctcctctgcctcctcctcctcctcctcctcctcgtcatcgtctgctcctcctccaactgcgcggcagctgctcgcctcctgcctggcgccggtcctctccctcctctccgtgccgccgcccccagtggcggcgacgagcattccgcggcctccgaggtgacaacacaagacacgacgaagggagcggcggaggcgtgcgaggaggggaacgagaacgacgagtgcgtgcagaggcggctgctcctcgacgcgcacctcgactacatctacacgcagcacaagggcaagccgtgacggtcagcgaggagaacggtgctttgcgcatggtggagtacgtagatgaacgctgctgcggctagttaattaacatccggacggacgttgtcatccgtctagtagtagtagttagtatatatctatataatggctgtgtacgtctccaagtcttatctaatatatgcatgcacatggtacgtggtggacaaatcaaaaaaaaaaaaaaaaaaaaagcggcc

SEQ ID NO: 134695 - DNA, 1253 bp, Zea mays
  Clone ID: MRT4577_54326C.1
gcacgaggtcgtcactgctgaccataggtggccggccggccgaacaaaccctcggcacgatcgcctgcctccataaatctccctcttcacttcaggcgaaaaggatcaaccaaaccctctaatccatttcggcatttccaacgccttcgccctaccagccacgtcgcttcgaggccgatcgaccgagcagctggtggcaatggcggcggcggcggaggtcgtgctgctggacttctgggtgagccccttcgggcagcgctgccggatcgcgctggcggagaagggcgtggcctacgagtaccgcgagcaggacctcctggacaagggcgagctgctcctccgctccaaccccatccacaagaagatccccgtcctgctccacgccggcaggcccgtctgcgagtcgctcgtcatcctccagtacatcgacgaggcctggccggacgtcgcgccgctcctccccaaggacgacccctacgcccgcgcgcaggcgcgtttctgggccgattacatcgacaagaagatctatgacagccagactcggctgtggaagttcgagggcgaggcgcgggagcaggcgaagaaggacctggtggaggtcctggagaccctggagggggagctcgccgacaagcctttcttcggcggcggcgccctcggcttcgtggacgtggctctggtgcccttcacgtcctggttcctcgcctacgagaagctgggcgggttcagcgtccaggagcactgccccaggatcgtggcctgggccgcgcgctgcagggagcgggagagcgtggccaaggccatgtccgaccctgccaaggtgctcgagttcgtccagttcctccagagcaagttcggggccaagtgatcggaagcattgcgtgtgctgctagcctgctatgccctatgcaggccaggctggtgctttgatctgctcgatcagctctatgcccatgctagcgttgcatagcgcagttgatgtgtgatgtgtctggttggttgtagctgctctttgcctggtttcgtacgtcagtgtaaggtttcaggttttcagtgtctggggtagctctgcgttgcccttgcccctgccccctacctagcggctcttgagctcttcggctcgccagcaataaagttgcagaggctttagctaaaagtttctgtattttttagttgacgattattggatcgttcctgtcgcttggtgtaaaaatctctagaaattccttggttttcttaaaaaaaaaaaaaaa

SEQ ID NO: 134696 - DNA, 384 bp, Zea mays
  Clone ID: MRT4577_54327C.1
aaaaaaattatggctgacttattacatgggtgttaataacataacaaattataaccaaaaccacaactaaaaaattaccattttattgaatatattgtaatacaaggaaaaaaaaaatccaaacaaaaaataaacatcaaagacaaccctaacaaagaaaaaaaaaattccacctgcctataaaaaaccaacttacatttagaaaaagcggaaaatacacctaatttctgtgcacctacaaacctaccaactccctatcaaatgaaaacacacctactaccatccgggccacttacccaggtggctaaccaaaaccaacgaaaccacagaaagcagaaaatccaccccagcattatcgcccaaacaaccacaattttttgccca

SEQ ID NO: 134697 - DNA, 1203 bp, Zea mays
  Clone ID: MRT4577_54328C.1
cattgggtacctcgaggccggccgggtaccaatcttgtaggcgtccctaggatcaaccaaaccctctaatccatttcggcatttccaacgccttcgccctaccagccacgtcgcttcgaggccgatcgaccgagcagctggtggcaatggcggcggcggcggaggtcgtgctgctggacttctgggtgagccccttcgggcagcgctgccggatcgcgctggcggagaagggcgtggcctacgagtaccgcgagcaggacctcctggacaagggcgagctgctcctccgctccaaccccatccacaagaagatccccgtcctgctccacgccggcaggcccgtctgcgagtcgctcgtcatcctccagtacatcgacgaggcctggccggacgtcgcgccgctcctccccaaggacgacccctacgcccgcgcgcaggcgcgtttctgggccgattacatcgacaagaagatctatgacagccagactcggctgtggaagttcgagggcgaggcgcgggagcaggcgaagaaggacctggtggaggtcctggagaccctggagggggagctcgccgacaagcccttcttcggcggcggcgccctcggcttcgtggacgtggctctggtgcccttcacgtcctggttcctcgcctacgagaagctgggcgggttcagcatccaggagcactgccccaggatcgtggcctgggcggcgcgttgcagggagcgggagagcgtggccaaggcgctgtccgaccctgccaaggtgctcgagttcgtccagttcctccagagcaagttcggggccaagtgatcgatcggaagcactgtgtgtgctgctatgcaggcggcaggccatgctggtgctttgatctgctcgatcagctctatgcccatgctagcgttgcatagcgcagttgatgtgtgatgtgtctggttggttgtagctgctctttgcctggttgcgtcagtgtaaggtttcaggttttcagcgtctgggcctctggggtagctctgcctctgcgttgcccttgcccttgcccttgcccctgccccctacctagcggctcttgagctcttcggctcgccagcaataaagttgcagaggctttagctaaaagtttctgcattttttagttgacgattattggatcgttcctgtcgcttggtgtaagaatctctagaaattccttggttttcta

SEQ ID NO: 134698 - DNA, 636 bp, Zea mays
  Clone ID: MRT4577_54329C.1
tttttttttttttttttcggaaaacgttgtattttgtgatggcaacctgtctaacccttcagtagagaattgcagggtaaagagcagcatttcctaacgtaccctaaataaagaatgactagaatagtccatgactagaatgcatttacaaatgcatctaaaagggataaatgaaaagaaaaagaaatgcagcatgggaccgggtgaacccaagaacatgttatctttgtatgattcctggggcaggcgaatgcatcaagtaatccactttgaggtgacttgagcacgctgcctgggtttcatgggagtttgggacaggttcctcttcttcatgttcgacgagacggtcgggctgaaataatcttggctcttctgtgaaatggatgcggcctgcaggtgcggtttccttaacggaatgaaggtctgtgacttcgagggaaaccctctcgaagattcaacgcttttaggcgagtcccatttgctacggttcacaagactctgtgatctaccaactatcccggttttcttttcctttggacttggaatgttccggctttcccttgtttcagcagagtacattgtctcctcaccgctgctaaaaccgtccctcccatctcctatttccgatatcacaac

SEQ ID NO: 134699 - DNA, 957 bp, Zea mays
  Clone ID: MRT4577_5432C.1
gtgagatctccactcagtgcaactcttccacaagtcggcggaaggatcttagttacctggtacatcgtgtggagtttccctgagacacagtctcatgtcctcgttgcttccttggtcctaagctggtccatcactgaggtcatcagatattctttctttggtttgaaggaggcatttgggatcacacctttctggctcctatggctcaggtactccacgttcactttactctaccctattgggctcatcagtgaggtgggcttaatctttgttgccatgcctcacatgaagggaagatccttctacatctgcgcggcattgaccagtctctacatcccaggattcccatacttgtaccgttacatgctcgcccagaggaagaaggtcctgtccaaggcgaaaaccgcgtaatgctccatacgagccctcactgtcacagagtaattaatcagtgtggttgtagactcgtactgtaccatggctcttatcaggtggagataacagtgtggttgtactgtagtaacagggaatactgaatatatagctcttccatgggtgaaataaaataaaatcaaatataaaaaaataaaaaaaaaaaagaacaataaatagaaaaaaaaacaaaaatacacaaacaaaaaaacggactgacatcttttatggggtcaagctaacttaaattcacctggcctggcgcttaacatctcaaatgactggagaaaaacataactttaccgaacttaatttcctagcctcacatcccctttaccccagctggcgcaatacttaataggcccgcaccgaacgccctttccaacagttgggcagcctgaataggaactggaacgcaccctctttcgcagcattacatcaaccgggtgtggtgttgagcccccccctgaccggtccacttgccagccccctagcgtccgctcccttccttttcttcctttcctt

SEQ ID NO: 134700 - DNA, 1320 bp, Zea mays
  Clone ID: MRT4577_54330C.1
ccgaacaaccctcggcacgatcgcctgcctccataaatctccctcttcacttcaggcgaaaaggatcaaccaaaccctctaatccatttcggcatttccaacgccttcgccctaccagccacgtcgcttcgaggccgatcgaccgagcagctggtggcaatggcggcggcggcggaggtcgtgctgctggacttctgggtgagccccttcgggcagcgctgccggatcgcgctggcggagaagggcgtggcctacgagtaccgcgagcaggacctcctggacaagggcgagctgctcctccgctccaaccccatccacaagaagatccccgtcctgctccacgccggcaggcccgtctgcgagtcgctcgtcatcctccagtacatcgacgaggcctgggccggacgtcgcgccgctcctccccaaggacgacccctacgcccgcgcgcaggcgcgtttctgggccgattacatcgacaagaagatctatgacagccagactcggcttcgtggacgtggctctggtgcccttcacgtcctggttcctcgcctacgagaagctgggcgggttcagcatccaggagcactgccccaggatcgtggcctgggcggcgcgctgcagggagcgggagagcgtggccaaggcgctgtccgaccctgccaaggtgctcgagttcgtccagttcctccagagcaagttcggggccaagtgatcggaaacgctgtgtgtgctgctatgcaggccaggctggtgctttgatctctgctcgatcagctccatgcccatgctagcgttgcatagcgcagttgatgtgtgaatgtgtgatgtgtctggttggttgtagctgctctttgcctggttgcgttgcgtcagtgtaaggtttcaggttttcagtgtctggggtagctctgcgttgcccttgcccctgccccctgttgcatactcctagctctcgccgagtttgacaatttcgtcagttaattcagattattcagttagtgcagttcagtcagttagtgttcgtcagtctgttagctaattcagtttcattcagagttagcagtgagcgcacgccggaaatagctggacgtgtgcgcgtctttcggagctcacctgacgcacgctgcgttcgtgcggggtggagcgcgtcgtgtgcggcaagaacgtggtcgtgggatggcacggctgtagaagcgttcgtgccgtgcgtttcgaccttctttgtttttgatcagataagtccttcgatatatgaataaacgagtaacagaaaagtgcggccagttgggcagcccccaaaaaaaaaaaacaaaacaaaa

SEQ ID NO: 134701 - DNA, 446 bp, Zea mays
  Clone ID: MRT4577_54331C.1
gggaaaaggtgggttcttcgtaaaaaatatggcaggacaaaaaatagcacatttggggggggggggaaacagaaacccaggaggaaaacataaaacccatttccggccaggctttgagaaaaccccaaagcccccaaggggggacctacgtaccggaccccacttcggggacccaggaacccaccccaaaccctaccttgtttgaaggcgaaatttccggtggacccacactactggggggggcaccccccgacaaaacgggggggcaatttatgtatgaaaaagtatagggaccccccatacagggaggcggcgaaaggggcccccccgtttagggaacgaacacagtcgacggggaaccccggccggtccggtcaattggggagcgcaaagggggcctcttccacaaagggctggggggggtgcccaaaccccttggcctcccg

SEQ ID NO: 134702 - DNA, 454 bp, Zea mays
  Clone ID: MRT4577_54332C.1
ggaaaaacccccaaccgaggggggaaaaaagatgcttttttgcccaccttaacttttacaacggggaaaacgaaaggggggagcacctgggacatacatttttttttacacaatggaaatggaaaccatgatttttggacaatggtacattttcaaaaaaaatactactacctaccaccttttttttttcctttttttttaaaaaaaaacaacagcgatgccctttttacccccctggggagcaagctccaatcaatgaacaaaatggtccacttccctaaacaagttttttaacaatgtgtgcgaatttaaaccccgtcattatatttggccccaagaaaaatgcttatggttgacaaacaaattttgtgcacctcgatggggccctccttttttgcaatggtctttgaaagttatgatgcttttggaaccaattttgggttgcaagggcaac

SEQ ID NO: 134703 - DNA, 423 bp, Zea mays
  Clone ID: MRT4577_54333C.1
agactgtatcccccatcccgtctcatcctccaaatatctagccgccggcgcaggcggccctccatcgccgccaagatgcaaatctttgtgaacactctgaccgggtaagatcatcactttggaggcggagtcctccgacaccattgacaatgtgaaggagcaagatccagcataagggagggcatccccccgtcacacagaagcggttcatcttcgccggcaagctagctcgatgacggacgcaccctccacgattacaacgttcagaaggagtctcatctccacctggagctccaactcctgcgaggcatacataagggaaaaaacaaaaactgcaccacgcccaacaagatcacatagtcgtacaacatagcgaagctctgcatgctgcagttctataccgtgctcgatttcatatgctag

SEQ ID NO: 134704 - DNA, 718 bp, Zea mays
  Clone ID: MRT4577_54334C.1
gattaatggcattaatgtgtttgaccatattgaagtatttggtggtagcaacaatttgtctggggatacactgcgtgtgatgcctctggacatttttggtacaagaaggcaaggccgaagtacctccatatacaatcttcttggtagggctagtgatcatggtgttcttgatcatccacttctcgaagagccttcttcgacaacgaatttttcacaccaagggcatccagagaatcttgttgagatggctttctctgatcgaaaccatgaaagtagctcctctcgtttggatgctatattccgcagcttgcgaagtggacgtattggacaccgctttaatatgtggctagatgacggtccacaacgtattggatctgctgcccctgcagtacctgaaggcattgaagaattgctgatctctcatctgagacggcccactcctcaacctgatggccagagaacacctgttggtggtgctcaagaaaatgaccagcccaaccatggatcagatgctgaggcaagggaagtagcaccagctcagcaaaatgagaacagtgaaagtacactgaatcctctagatctgtcagaatgtgctggccctgcacctcctgatagtgatgcacttcaaagagatgtgtccaatgcaagtgagcttgctacagagatgcagtgtgaacgtagtgatgctataacacgtgacgttgaagcagtgggccca

SEQ ID NO: 134705 - DNA, 265 bp, Zea mays
  Clone ID: MRT4577_54335C.1
ataatggcgggcgctgcagaagatgcgcgagcccttttccgggctggggtctgcgcggccctggaggcctggccggccttgccgatcgctgtggagaatggcttcgggggtgtgcacagccacgagaaggccaagtggctggggggtgcagtggaggattccttcatgcgcaatgctgacttggagctagatgaggtggaagacttccttggagagctgttgaccaacgagtttgatacagttgtggaagacgggagtctgcccc

SEQ ID NO: 134706 - DNA, 285 bp, Zea mays
  unsure (1)..(285): unsure at all n locations
  Clone ID: MRT4577_54336C.1
acttatattttcctgcagccatagaacccaagagaagtcagcttactattattaacacccacacatccncccacaagcacaatagcaaaaccattcaaccttgatacattccaccccaaactacaccaactcgtccttccaaatacaccgactagctcactactcaacacacctactcgtggtaatgctcaagacaaacagacataaaccccaaaaagcaactgtggttacaaccataccacaaacaatcaaaacaaaggcaaagctacccaaaattatcccaac

SEQ ID NO: 134707 - DNA, 265 bp, Zea mays
  Clone ID: MRT4577_54337C.1
ctcgaaccccattctactggagcccgtctcgagatgttccgcaccatcagcgtgcgcgatcacctagatcgcccccttctaaacgcagatctccttcgtttgcacaccttagactacgcgcgcgacttgctgacccactgctcgcggctgatcgaacttgactaccaatgcaatcgccaatacatctgcatcgagtactacggcctcaacgtcatggtcaagattctacggatcgggatcgacataggccacctcagatacatca

SEQ ID NO: 134708 - DNA, 932 bp, Zea mays
  Clone ID: MRT4577_54338C.1
tgaggcatctagctgcgcagggtgctttgggcgacgacgccatgctttgctctctttatttttaaaacaaaattaaatttcgccatgacaaattccgtcgtcccgccatcatcacttaacttgctgtattggtcagaggtgcaaactaactccatcgatgccgcggattaatgaaccggccgtctttctgcaggttacctgaacgaccccgagtcgacgaagaacaccatcgacaaggacggctggctgcacaccggcgacatcggctacgtggacgacgacgacgagatcttcatcgtcgacaggctcaaggagatcatcaagtacaagggcgcgattgtgccgctcgaggccggccgggcgctcctcatcacgcacccggagatcaaggacgccgccgtcgtctcaatgaacgatgaccttgctggtgaaatcccggtcgccttcatcgtgcggaccgaaggttctcaagtcaccgaggatgagatcaagcaattcgtcgccaaggaggtggttttctacaagaagatccacaaggtcttcttcaccgaatccatccccaagaacccgtcgggcaagatcctgaggaaggacttgagagccaggctcgccgccggtgttcactgaggcccgtatgcagcttcttctcagacggccaccacgctgctgcgaaaaaaaaggcgatgtaatggcggtaacactactattcatgaacaggcaacagaagggacacgtattcctgtggaacacatgttgccagaaagaggttttagtttgtctgtttgttggccctgtgtgtaatgttcataaacgatatagacgtcgtctctatgttgtttttgacccaaagaacaagcctgattacggcaacacagctatggagtaccgtgtttcatatgcatagatgtttgtcataaaaaaaaaaaaaaaaa

SEQ ID NO: 134709 - DNA, 1009 bp, Zea mays
  Clone ID: MRT4577_54339C.1
cctcgaggccggccgggccggctgttgaaatgggaatgtgatgtttacgaataacctctgttcgtttccaccaggggtacgggatgaccgaggcggggcccgtgctggccatgtgcctggccttcgccaaggagccgttcgaggtgaagtccggctcctgcggcaccgtcgtcaggaacgcggagctgaagatcgtcgacccagacaccagcgcgtcgctgggacggaaccagccaggcgagatatgcatccgcggcgaacaaatcatgaaaggttatctgaatgatccagaggcgacaaagaacaccattgataaggacggatggctgcacaccggggacattggttatgtggacgatgacgacgagatcttcatcgttgacaggctgaaggagataatcaaatacaagggcttccaagtacctcctgcggagcttgaagcccttctcatcacacatcctgaaatcaaggatgccgctgttgtctcgatgaaagatgaccttgctggcgaaatcccggtcgcattcatcatacgcagtgaaggttctgaggtccccgaggatgagatcaagcaattcgtcgccaaggaggtggttttctacaagaagatccccaaggtcttcttcaccgaatccatccccaagaacccgtcgggcaagatcctgaggaaggacttgagagccaggctcgccgccggtgttcactgaggcccgtatgcagcttcttctcggacggccaccacgctgctgcgaaaaaaaaggcgatgtaatggcggtaacactactattcatgaactggcaacagaagggacacgtattcctgtggaacacatgttgccagaaagaggttttagtttgtctgtttgttggccctgtgtgtaatgttcataaacgatatagacgtcgtctctatgttgtttttgacccaaagaacaagcccgattacggcaataaaaaaaaaaaaaaaaaaaaaaaaaaaaaaaaagaaaaaaaaaaaaaaaaaagcggcc

SEQ ID NO: 134710 - DNA, 3843 bp, Zea mays
  unsure (1)..(3843): unsure at all n locations
  Clone ID: MRT4577_5433C.1
aatgangatatgcgatatagccggtggcggtggtgttgccatctctatctcggaattcggcacgagggtcacagactccagcgagcgagggacgaccctagctgaaccctccccgcccgcgcagcagctgcgtccatggaggtggacccctcgccgtcgtcgcgctcgcccaggccgccgcctccgccgctggcggcgatgccgagctacttcgacccggagtcgtccggccgtcgggaggagtaccgccgctacaggaagaggttgtcttcttcaaatgtctctcctctgctgggaagatcactctccaagacctctggaccaaggctgttatatgatggagaaagcatcccaagacagcctaatgccggtttactccttgaagacataaagcaggaagctgccgattattccaacatagaaagcttggatggattgagactgttcggttcaccgaaaaggacatctctcgatggcggttctgcatcagacgcagcttacagttcgggcaggcaagcagtgaggcagacgctgaagccagtcaaactggaggacgatatgtatgtgccgcatgaaggagaaacaccttctacaatgtttgcaactctccttgattctgggatccaaggtttgatgcacttccctgatgtaattcaacaatttgagaggacatgtcgaaatgcttcggagtcaatcagatctgctgcaactggaaagcttcgtgttggtgtaatagaaacttatgcagcaaaatgctctacttttacttgactaagctgcttcctggtcacttctttggcacatatatggcaaagaacatgaggagctttctggagagctgttggtgccgccaattacatctcatctcggttcttgccgctttgttgcagcgcaatttacagcacaactgtgtctgcttctgatactttggcttgaaggtcttgcttctgaagctcttgatttggagaagaaggtgagaggacgtcatgttggttcgtacctaccaagttctggtgtttggcaccgtacacagaggtacctaaaaaggaacaatgctgattctactatagtgaagcatgtggattttgatgctccaactcgtgaaggggcccaacttcttcctgatgacaagaagcaagatgaattgcttctagaagatatatggactcttttaagagcaggaagattagaagaggcatctgacttgtgccgttctgctggccaggcatggagagttgccactctttgtccttttggcggcataaatatgttcccttccctgaatgcattgcacaaaaatggaaagtacagaacactacaagccatggaattagaaagtggtgttgggcggcagtggcgtctttggaaatgggcatcatattgtgcttcagagaaaatcgctgagcaagatggaggccgttatgagatggctgtatatgctttacaatgcagtaacttaaagcgtgtcttgccaatctgtactgactgggagtcagcttgttgggcaatggcaagatcctggctagatgttcaagtggatctagaattatctcagtaccaaacaagtagaccagaaaagcaacttgatgacgacatgaatggagcccaaagttcagttggtccagaaagttggccataccatgttcttgatcagcaacctcatgatttaactgctcttctgcagaaactccactcaagtgaccttgttcatgaaactgtctctcgagcatgccgagagcagcatcgacaagttcagatgaatctgatgagtggaaatatatctcatcttcttgaccttctatggtcatggttatcacctgctgaagagaaccataataatactgcaaggccccttgatgaccctgagatgatacggttcggggcacatattgttcttgtgctgaggcaccttttcagtgatgggatggatgatgagttagatgaaaaactggttactgtcggtgatctcatcatcaacatgtacgtgaggtatttgttctcagaggatcaagaggagttggttggaatatatgcctcacagcttcaacatgacctttgcattactttgtttgtagaaatgatggaactaaggttaaatagcagtttgcatactatgtacaagctcttcctttctgctgtggagtatctgccattctcatctgataatgtatccaaggcttgttttgaagagatcatcgagagggtgctttcaagatctcggcaaacaaaacccactaagtatgatggggatttctctgatgttgcgcatcaacatcacctgcaatcacttcaaaaggctatggttattcagtggctttgcttcacaccaccatcctcgattccagactttcaaatgatcagtgggaagcttctgatacgggcattgacacatagcaatacactgttcagggagttttctctgatatcaatgaggagagtccctgagctaccagcagggccacacaagttgcttgccattttagctgaaccgttaaagcaaaaagaaaatttaatttcacgggaagatccggaggtatctgataacttgccggagtttgaagattggcatgaatattactcccttgacgcgacttaccgcagttggcttaaaattgagatgatgaatgccgctgtttctcctgagatgctttcggcagaggaaaagggtcaagctgttgctgcagctaaagaaacactgaacttggcatgttcgttactacgcagggatggaagaccatggctgtatgctgtcgagagcagtccatttgaatcccccgatgttattttccttgagctgcatgcttctgcaatgctctgcctaccttctggagaatgtatgttaccagatgcaacatcatgcacagctttgacaagtgcactatattcaactgtcagtgaagatgatgtgctgcatcgcctgttgaaggtggatgtccaggtctcttctagagacccctgctgtattgaagttgctcttcgctgcttagcagcagaaggtgatggatatgggcttcatgaagccaacgatggaggtcttcttgctgcagtcatggctgctggctttaaaggtgaactcagtcggttccaacctggagtttcgatggcaatttcacggcttgatgcttggtattctgaccggagtggttccgtggagagcaccgctgcttacataattcgagggctgtgtcggaggtgctgccttcctgaaacaattctaagatctatgcaggcatgtatcgcactctccgcggctggtgatgatctagattactctctagataaatgtgacgaacttgttgagttagttggttcagccgagtctggaatgatgcatttgttcagccagcagcagttgcaggagttcctgattttcgagagggaatatctcatatgtacaatggagtttgaggaggaccggttgccttgtgatggctaagctttttccccacttgctgactaatccatgagacatgaccggcatgtgcattttgtggcgccgtgacccaagaacctgctgtgatgtatcgctacaccatttcaaagcgaaaagatggaatttagtgcgtaacgtggttctgcccgtttgtgcacgagaattggcccgttttggaaagtcaatataagattattcaagtcgaaatccaagatttttgttcatgataaaaacaatgttcggcgcggaaaaaaaaaaaaaaaaaaaaaaaaaaaaaaaaaaaaaaaaaaaaaagggcggtcggcggcctccggaaatttttgaccgggcactcgctaactaattacctcctggacccttaaaaaattccccctatagggtcttggaagtaaaccttgttgcttttttgg

SEQ ID NO: 134711 - DNA, 336 bp, Zea mays
  Clone ID: MRT4577_54340C.1
ggcggtggccagtgtggtcgtcaccgaggcctgcgccgtcgacaaggtgcgcgggttcgccgccgagcgcggcgtgccggtggtcgccgtcgacggcgccttcgacgggtgcctggagctccgggccctggtggacgccgccgagccgctcgccgccgacgaggaggtcggccccgacgacgtcgtcgcgctgccctactcctccggcaccaccgggatgcccaagggcgtcatgctcacgcacagcaccacgtcatccttgctgaagtacaggttcgggttctcgccgtacacctgctgcgcgacgctggtgacgaggctgcgcggacgcgtggg

SEQ ID NO: 134712 - DNA, 3007 bp, Zea mays
  unsure (1)..(3007): unsure at all n locations
  Clone ID: MRT4577_54341C.1
agccccggcgaggtcgcaccgcaccagccatcgtctccttccttccttcctatactaccatccaaccagctgcccagcgcaaggttacctgcccgacatccgacaagccagtccatccggctgcgagcaaaggtctgagatgggttccgtagacgcggcgatcgcggtgccagtgccggcggcggaggagaaggcggtggaggagaaggcggtggtgttccgttccaagctccccgacatcgagatcgacagcagcatggcactgcacacctactgcttcgggaagatgggcgaggtggcggagcgggcgtgcctgatcgacgggctgacgggcgcgtcgtnacacgtacgcggaggtggagtccctggtcccggcgncgccgcgtcggggctgcgcgccatgggggtggncanaggggcgacgtnggtgatgagcctgctccgcaactgccccgagttcgccttcacctttcctgggcgccgcccgcctgggcgccgccaccaccacggccaacccgttctacaccccgcacgaggtgcaccgccaggcgggatctgcgcaggctttggggatgctttcctttatttttaaaacaaaattaaacgccatgacaaattccgtcccgccatcatcacttaacttgctgtattggtcaggtgcaaactaactccatcgatgccgattaatgaaccggcctttctgccctccggccacgcgtccggccccggcgaggtcgcaccgcaccagccatcgtctccttccttccttcctatactaccatccaaccagctgcccagcgcaacgttacctgcccgacatccgacaagccagtccatccggcagcgagcaaaggtctgagatgggttccgtagacgcggcgatcgcggtgccggtgccggcggcggaggagaaggcggtggaggagaaggcggtggtgttccggtccaagcttcccgacatcgagatcgacagcagcatggcgctgcacacctactgcttcgggaagatgggtgaggtggcggagcgggcgtgcctggtcgacgggctgacgggcgcgtcgtacacgtacgcggaggtggagtccctgtcccggcgcgccgcgtcggggctgcgcgccatgggggtgggcaagggcgacgtggtgatgagcctgctccgcaactgccccgagttcgccttcaccttcctgggcgccgcccgcctgggcgccgccaccaccacggccaacccgttctacaccccgcacgaggtgcaccgccaggcggaggcggccggcgcccggctcatcgtgaccgaggcctgcgccgtggagaaggtgcgggagttcgcggcggagcggggcatccccgtggtcaccgtcgacgggcgcttcgacggctgcgtggagttcgccgagctgatcgcggccgaggagctggaggccgacgccgacatccaccccgacgacgtcgtcgcgctggccctactcctccggcaccaccgggctgcccaagggcgtcatgctcacccaccgcagcctcatcaccagcgtcgcgcagcaggttgatggcgagaacccgaacctgtacttccgcaaggacgacgtggtgctgtgcctgctgccgctgttccacatctactcgctgaactcggtgctgctggccggcctgcgcgcgggctccaccatcgtgatcatgcgcaagttcgacctgggcgcgctggtggacctggtgcgcaggtacgtgatcaccatcgcgcccttcgtgccgcccatcgtggtggagatcgccaagagcccccgcgtgaccgccggcgacctcgcgtccatccgcatggtcatgtccggcgccgcgcccatgggcaaggagctccaggacgccttcatggccaagatccccaatgccgtgctcgggcaggggtacgggatgacggaggcaggccccgtgctggcgatgtgcctggccttcgccaaggagccgtacccggtcaagtccgggtcgtgcggcaccgtggtgcggaacgcggagctgaagatcgtcgaccccgacaccggcgccgccctcggccggaaccagcccggcgagatctgcatccgcggggagcagatcatgaaaggttacctgaacgaccccgagtcgacgaagaacaccatcgacaaggacggctggctgcacaccggagacatcggctacgtggacgacgacgacgagatcttcatcgtcgacaggctcaaggagatcatcaagtacaagggcttccaggtgccgccggcggagctggaggcgctcctcatcacgcacccggagatcaaggacgccgccgtcgtatcaatgaacgatgaccttgctggtgaaatcccggtcgccttcatcgtgcggaccgaaggttctcaagtcaccgaggatgagatcaagcaattcgtcgccaaggaggtggttttctacaagaagatccacaaggtcttcttcaccgaatccatccccaagaacccgtcgggcaagatcctgaggaaggacttgagagccaggctcgccgccggtgttcactgaggcccgtatgcagcttcttctcggacggccaccacgctgctgcgaaaaaaaaggcgatgtaatggcggtaacactactattcatgaactggcaacagaagggacacgtattcctgtggaacacatgttgccagaaagaggttttagtttgtctgtttgttggccctgtgtgtaatgttcataaacgatatagacgtcgtctctatgttgtttttgacccaaagaacaagcctgattacggcaatacagctacggagtaccgtgtttcataaaaaaaaaaaaaaaaaaagaagacgagcccgaaaaacagtcccatccccccgaagcggcttcaacttcagcaccagcacctgcagcaagcggtgtgatgtacctggctcaatgagaagcgttggagttgccaagctagtgtacatcatatttgggggtggctgtagatgctccgtgtttttggtctagtgtggggggacggggggggt

SEQ ID NO: 134713 - DNA, 175 bp, Zea mays
  unsure (1)..(175): unsure at all n locations
  Clone ID: MRT4577_54342C.1
ggctttggcaactgactagttcccctaataatcggtgcccccgatatggcgtttccccgcataaacaacataagcttctgactctttacctcccctctntcctactnctgctcgcatctggctatagtggaagncggagcaggaanaggttgaacagtctancctcccttagcag

SEQ ID NO: 134714 - DNA, 2119 bp, Zea mays
  Clone ID: MRT4577_54343C.1
ctgtgcggcgctcgacggccccggtgggactcctcagctcaggcgagcagcggagccgagcagagcctcgagatcccgcccaccatttgccctccggccgacgcggagccgatcgcttcaccggcagcgaggacgatgggttccgtcgcggaggactccaccgcggcagcggcagcagcggcgtcggtagtgttccgctccaagctacccgacatcgagatcccgcggaacctctcgctgcaggcctactgcttcgagcggctccccgaggtgtcctcccgcccctgcctcatcgacgggcagacgggcgccgtgcacacctacgccgaggtggaccgcctgtcgcgctccgcggcggcggcgctgcgcgggctcggggtgggcaggggcgacgtggtgatggcgctgctccgcaactgccccgagttcgccttggtcttcctcggcgcggcgcggctgggcgccgccaccaccacggccaacccgttctacaccccgcacgagatccaccgccaggcggccgcggcgggggccagggtggtcgtcaccgaggcctgcgccgtcgacaaggtgcgcgggttcgccgccgagcgcggcgtgccggtggtcgccgtcgacggcgccttcgacgggtgcctggagctccgggccctggtggacgccgccgagccgctcgccgccgacgaggaggtcggccccgacgacgtcgtcgcgctgccctactcctccggcaccaccgggatgcccaagggcgtcatgctcacgcatcgcagcctcgtcaccagcgtcgcgcagcaggtggacggcgagaacccgaacctgtacttcagcaaggatgacgtggtgctgtgcgtgctgccgctgttccacatctactcgctgaactcggtgctcctggcggggctgcgcgccggctgcgccatcgtgatcatgcgcaagttcgagatcggcgcgctggtggagctggtgcgcgcgcacggcgtgaccgtggcgcccttcgtgccgcccatcgtggtggagatcgccaagagcccccgcgtgggcgccgccgacctcgcctccatccgcatggtcatgtccggcgccgcgcccatggggaaggacctccaggacgcgttcatggccaagatccccaacgccgtgctcggccaggggtacgggatgaccgaggcggggcccgtgctggccatgtgcctggccttcgccaaggagccgttcgaggtcaagtccggctcctgtggcaccgtcgtcaggaacgcggagctgaagatcgtcgacccagacaccagcgcgtcgctgggacggaaccagccaggcgagatatgcatccgcggcgaacaaatcatgaaaggttatctgaatgatccagaggcgacaaagaacaccattgataaggacggatggctgcacaccggggacattggttatgtggacgatgacgacgagatcttcatcgttgacaggctgaaggagataatcaaatacaagggcttccaagtacctcctgcggagcttgaagcccttctcatcacacatcctgaaatcaaggatgccgctgttgtctcgatgaaagatgaagtcgccggcgaagtcccggtggcattcattatacgcagtgaaggctctgagatcagtgagaacgagatcaagcagtttgttgcaaaggaggtcgtgttctacaagaggatcaacagagttttcttcacggattctatcccgaagaatccctccggcaagattcttaggaaggacctgagagcgcggcttgccgcgggcatcccaagcagtgacaacacacagtccaaaagttgatacgtactttcgtactattcttttctagctgtgccaaaaatcatgctgtgctctattcatgagatggcaatggtatacacaaaaaacgccaagcggtcgttatcgattcttctagatgggcaagggtaaggtatacttcgtttgtgtccgacatattatgtatttgtatcatgtatagatacgttttgttgacaacaagtgctaattataatgtataccatgtttgggaacctattgttcttgttaataaagagtcgacccctgtcctgaaaaaaaaaaaaaaaaaaaaaaaaaaaaaaaaaaaccc

SEQ ID NO: 134715 - DNA, 360 bp, Zea mays
  Clone ID: MRT4577_54344C.1
cggccgccctttttttttttttttttttttttttttttttttgtgggtttttttttttttttttttttttttttttaaaaaaaaaaaccaccatttttggccaaacatggttcattttaggggacaacgccaacttttttttttaaattgcctttgcaatggaaggggaaaaaaaaaaaaaaaatgcttttggggggtttaattatttcaggtgggtcccccctttcggatccgaaaaaaaatgaagttgcataccatacccggtgggcttttttgcccgggacaaagttgggggggcaagcccatgcctttttttttactggagcaacaattgggtcaaagaggtttttgggggggccc

SEQ ID NO: 134716 - DNA, 518 bp, Zea mays
  Clone ID: MRT4577_54345C.1
aaatatagaatttcaggaagttgaagacaacctttcctgaaaatttccaaactgaacttctagagattttacatgaaaatcagatcaaacatgtaaaggaattttctaaatgttataacaaaagcatccacattttgttttcaagatcagaccataaacagtatcctgagtcagtggtctttaaggtagagaggccatgctgccagagggtgcacaagacagtgccctgggccaagaagaaaagacagaacttccagtcaagatttcctttttatatcattcttaattcctatttctgtgtatgtcttataatgtatgaaggactttcacacatggtttacaacttaatttatacatgtatgattttacaataggaaactggtgctgaaaaacttctactgagtaaggtgtgtgttcagaaaggctggagactgcttttctaaaatgccagtgggtgcttccaggtgcttatgctccctaggaacacacaacattgcctttagaacttcatagtcctg

SEQ ID NO: 134717 - DNA, 219 bp, Zea mays
  Clone ID: MRT4577_54346C.1
cgtcgctccataacgattgacggaccagggggctgcatgatcgtcgtgctacactgggatcaaactactaggtgtaggcagcctttgtccgtactttcagcaacaacgctttcttccattaaagcaactatctacattgggccgtgctgttcttttgcaacgacgactattacaattcacgcacttagctcctgcctaatgtgaacaccaacaacttct

SEQ ID NO: 134718 - DNA, 360 bp, Zea mays
  Clone ID: MRT4577_54347C.1
ctgctgaagcctgctttaccagcagctccgccgcatccacggaggtctcaacactatggaagcggccgacgaggagaacactctgcttcttcgtctccatcccactccgaaggtcgtaggttggaagtacgcaagcgctggttcggttgatatcaacaaacaagctgttctcaagaacacaacggggagatggagggcatgcaaacccgtcttaggtgctggattctgagcacgaatgaggttctctgccttctacgagaagcgagggaacaatctccccactgtgctccacgagaagaaggtggatgcaaagaacaaaatctccgtttggaccggagagtgattcctaacgacacttct

SEQ ID NO: 134719 - DNA, 376 bp, Zea mays
  Clone ID: MRT4577_54348C.1
aaagctagcacggatgttgatacaactggaacagatgtccagcacgggagcattgaaggtttgcttgcaatgagtttctgaatggatggtcttttattatgggttttttaaatatctttcctctttctgctggtaattttttttccgacgtataccatgttgagctatctgacccttttcattgttcctacttcacaaagctactaaagccaacgctgctggtgatgcacctggagcattttttcaaaagcagtgtgctaaagctgctgatgttattaccattgacgacgatgacgaggacaacagtcatcgttgttataaagaagaacaaacagcagtagttgatcttgaagctgattatgctggggataaccat

SEQ ID NO: 134720 - DNA, 373 bp, Zea mays
  Clone ID: MRT4577_54349C.1
gtaacgggtccagcccccgcctctataaatatagaggattacggccgattataaatcaatcgacaccctcaatcaatacaatttacattcattcttaggagtagttctagtctagttctaggtttgtcttccaatccccaaattcttcgcttctcttcgactctacgtcgattagagaaatctaggtcggcatgccgagactagacatctcctaggatctttcctcaccgacggggtccctccagggagcgagatccaggtgccgccggcaacttccgccgcccctgcgcacgcgtggaccgtccggctccagggcgcggaccgtccggccgtcaggcaggaaaccctagcctcgcgccaggccgcggaccgt

SEQ ID NO: 134721 - DNA, 192 bp, Zea mays
  Clone ID: MRT4577_5434C.1
ccgggcttttctttttctttttcttttgcagaaaaacatttccacacacgtgcgcatgcaaattgtattgactaagttctatcactaaacaaacacactttagctagctttaaggcgcgctttcacgcatcgatatacttcacgatggtaggggcaagaacacctcaagggctcacctagagcgcccgagcc

SEQ ID NO: 134722 - DNA, 311 bp, Zea mays
  Clone ID: MRT4577_54350C.1
agcatgtgaaaaagcaaaaccaatgaacatccaggcatatcttgactcccatcgaagaaaaattcaagttctaactgtggcagccggcatggttggatctgtcacacccctgaaagcgaaaggttcaagcaatgtggaatttgtggaagcaatgaacaggaaccggctagaaaatgttgtggaagcagtcaaagatgtgtctcgaaatgccagtaaagcaaaagacataatcgatcaatgcgataattccgtgagttggatattactttttcctcagatctccttcaccaccctcttaactcaataactca

SEQ ID NO: 134723 - DNA, 212 bp, Zea mays
  Clone ID: MRT4577_54351C.1
acatagaccagatattctggagggttagttacaggagcatcaggttaccgggaatgcgaccatgcacggcaaaaggcgcccgacgccgtatcaaaatttttagccaaaaacaaacaacaagctaaagaaacatacttttcactttggggggcaaaaaacgtgatgctatactagatacgcaacctctttcaggaagccctggtactgagttc

SEQ ID NO: 134724 - DNA, 413 bp, Zea mays
  Clone ID: MRT4577_54352C.1
cctcgaggccggccgggtttaatgaggactcgacgatccgcgacggcgcacttttgcaatggctgtggcgcaacactttggtcctgtcctatgtgctagcctgaggccaggctctcatgtcgcctgccatgtcctgcaccacggccaggagtggatgcgggttccttcacttcctgctggcgcgtatggatctcatccagaagaaatccctatgctccttcggggaataaactccactctgatcgtcgtgccatcacattgacatggagctggaacactacaccgcttatatcccatacagcatgtggactgaaccatgttgtggatgatgctagcagaggatagtggagatcagtcatcttgataccaatgagatcatcttgcttcaagagttgtctaccgtgccagaattc

SEQ ID NO: 134725 - DNA, 324 bp, Zea mays
  Clone ID: MRT4577_54353C.1
aggccgcgggacctcgccggctacgtcgcggcaccggaggacgcaccgcagctgggagcctttgtgatctcgaccacaactgcagcagctgcataagccttgcatgttcccgcgcacattggctcgggcttcttcctgctgaacttttttctgctatgtgatgtgcctctgcatgcaaagtcgtatcgttttctctgcacccccttcattagactgttaggtttgtggctacctggcgttttatggttgtaactgtgtatttttgtgtggatggatgtggtggtggatttaggataaaggatgaatcatacgaaattattacat

SEQ ID NO: 134726 - DNA, 938 bp, Zea mays
  unsure (1)..(938): unsure at all n locations
  Clone ID: MRT4577_54354C.1
gggtacctcgaggccggccgggtcgtcgtgccgttcccatctttcctttcctcttcccttccccgtcgatctcgtcggcgacgccactacctctcgccgtccggtgccaccatccgcctccgactcctgcgacccagccacggatcccgaggatacgggccgagtccggcgatgggggtggtggtagagcgggaggagtgggcactcagctccttcgcctacccgctcctctccgccgccgccctcgccgcggtgctcctcctcccttacctttccccgaggactgcgccgcacgccaccggaccctcgtcccccttcgacgtgggcgccgcacccttcctccggttccgccgcgccttcctcgtcctcttctccctcgcgtccgtggttgaaggtatccattccgtgtttggggaggatgagttcgtgcggtgtaggcttggcagagagcagacgaccgcgcgccttgcctctaccactgcagctgcgctgttccccggttccatttctggcgtcatctccgacaaaataggaccacgaagggcttgcatattgtactgggtacttcagcttgcagtaggtgttgtgaagagtttcagtgcgcttcgctgttcatggatcaacaatttcattctggcttttgcctcttcagtgttctatttctgttttgagacgtggcttgtgctggagcatgagaagcaagaccagaagcaagatgtgctgtttgataccttctggctgatgacattctttgaatcggtgtcccttgtcggaagtcaagaaatcacaaatgtattggttagtgatgatgacagtagattcttgcttccctatgcatttgcagccacactatcggtagtgggcattctgtatatcagaaatgcatncagtacatgtcagcatgcatctggcattgngagctacaaaaatcattttct

SEQ ID NO: 134727 - DNA, 1990 bp, Zea mays
  Clone ID: MRT4577_54355C.1
gggtacctcgaggccggccgggctcttggaacttcgccgtgccgttcccatctttcctttcctcttcccttccccgtcgatctcgtcggcgacgccactacctctcgccgtccggtgccaccatccgcctccgactcctgcgacccagccacggatcccgaggatacgggccgagtccggcgatgggggtggtggtagagcgggaggagtgggcactcagctccttcgcctacccgctcctctccgccgccgccctcgccgcggtgctcctcctcccttacctttccccgaggactgcgccgcacgccaccggaccctcgtcccccttcgacgtgggcgccgcacccttcctccggttccgccgcgccttcctcgtcctcttctccctcgcgtccgttggtcagtggttgaaggtatccattccgtgtttggggaggatgagttcgtgcggtgtgggcttggcagagagcagacgaccgcgcgccttgcctctaccactgcagctgcgctgttccccggtgccatttctggcgtcatctccgacaaaataggaccacgaagggcttgcatattgtactgggtacttcagcttgcagtaggtgttgtgaagagtttcagtgcgcttcgctgttcatggatcaacaatttcattctggcttttgcctcttcagtgttctctttctgttttgagacgtggcttgtgctggagcatgagaaggtttctgtatttcttgaaacacatatgtgctattactgtgttgtctatgttgtatgaatcatttagcgcttgatcctgaattttcagcaagaccagaagcaagatctgctgtttgataccttctggctgatgacattctttgaatcggtgtcccttgtcggaagtcaagaaatcacaaatgtattggttagtgatgatgacagtagattcttgcttccctatgcatttgcagccacactatcggtagtgggcattctgtatatcagaaatgcatcaagtacatgtcagcatgcatctgccattgggagctaccaaaaatcatttcttgcccatgttctcagagacaaaagagtactgatcctggtcttagctcaagcaagcatccattttgctgtctcagccttttggtttctctgggcaccaaccatagtggctgacggaaggtatgctcaactgtcagtaatctacccctgtttcttggcatcaaggatgcttggaagtgctggttttccatggttttacggagccatagcccccttccggaacgaggacagcttgacaatagcttacgttggtgctggactcgctttgtcgattgcggcttatgattaccaggagattgcaccactggtgatagtgttctgcatcttccatgcctgtgtgggcttcattttgccgtcactggccagattgcgaacaatgtacctgccaaatgagctgcgagggggcatgatgagcttttcaatgtcactggcaaatgccgccaccttcgttttcttgatacagggcagcgcccaccatcgacgcgttgcaaactcaaccatcctgagccttgcgtcctatggcctgttaggagctgggggctgcgtccatatgttgaggaggtggaggaagcacactcggctgaatgcccgtagtctgtaggagctggaggcacccaatgaatgctatacacactgcagggtgaacttgagagcggtttctgtagcatgctagtatctcacgttttgtttatctgactttttctggaaatatcaggaggtaggtgtaggatactacttttgttgttgttcaaagaaattgttgaaattgaaggttgacaaaaaatctgtgtacatgcgtcggggccatcaaactaacgtctgactttgatttttagcaattaaactcgaaagccaggaatctgtgtatgtatgtttaaaatgtagttttttttttcaagtgttcgtttcatacattgtcttgatagtataaaaatcgctcgtaccatac

SEQ ID NO: 134728 - DNA, 639 bp, Zea mays
  Clone ID: MRT4577_54356C.1
gactcctccagccaacagcccaagcgaagcgagggcccttgagctcccctcccgcatgacgtccccatggtgcctctcggcaccgcccgccgccctcggcttctccgcgtctgcctccaccctcgcgcgtgtgccggttcccggaagtaggcggcgcaggtggaacgcgctcgtggtctgcgcggcccccgatgaggagaagattacgaagcggtcgcccctggatttccccatcgtaattctcgtgcccttcaacttaccttcacttcatttgattttagcagcttgtcctggtaggattggaggaggcttttcttttgggtccggtaaactgaccaagaaccggtttagggactggtgtagacaaaatcagtaggaatggtacataagttgtgtggacaggttcttccggttgggtaggattatgcttatgctttagcttccagacgtggattcagccttcatctattttttttaaggttttgccatttcgtatctctctggcgaaggtacccctacgaaatgataattcctaaccttctgctctattatgaatgtaatacattcatctgtccaaacataaatctttattgccatagactcttgaggttgttttgcagctagtagctcgttgtgctg

SEQ ID NO: 134729 - DNA, 808 bp, Zea mays
  unsure (1)..(808): unsure at all n locations
  Clone ID: MRT4577_54357C.1
cgggataaantccgatcannggtgagaatttggcagcaccaaaaatgttgtttagttttgccggttaatattgtactgtagctgcttagctcttgttaacttcaatggggtcataattacttctgctaatgaagaaatgtttaatgaacccactgtgcagtaaatccttggggtcttagattgttctagcttctttgggtttctgttattgcagtttagtaagtggaataaaaaaagtttagttaagcttacccttgattttagtgatgacagactaggaccagaatgatttagatggtgtcccatgtgcttgcagactttggggtatgtatcacatattggtttttctttaaaataaaaaatgggtgtttatttgtgtgaggtaatcagtgattatgatgatcacttccctcatgttagactcaagcattctggttccctcttcatgtatgttggtcaccatggtggttcatatgcgaagaacagcttcgggaatgtgtatgttgcattaatctctgctgattattgtatgataagtatttgctatgcctgaagcttcatgttttcttatgatgctctttgttctaggcagtctacaggctgtcgttaagaaaattctatgctagatatatgtttttaggagtagaaaggctaggtcagttgcttcaaacatgagttagttgcaactattgaccacttacagttatggtgaaccatgttttttttntttatcggatttctttgacngacatctgatgtgattcaaaagctataacctcttttctcccaggtggtctttttcatcgac

SEQ ID NO: 134730 - DNA, 295 bp, Zea mays
  Clone ID: MRT4577_54358C.1
ttgagatataccgctggattgtttttatataaaagtggtttccggccatccacgggacacaaatacaaacctggggtccataaattgatacctggccacgggtgcgccttgaacctggcgccttccataaacatcctacgggttgaattattaaccagaggcgcattttcactggcgtggccaactgaaaacattttatgggccgcaagcctttcataaaattgaaaccttgggatcccagattgaatttttaaacagaggcgcattctgtccactgtttaccggacccgtgggt

SEQ ID NO: 134731 - DNA, 271 bp, Zea mays
  Clone ID: MRT4577_54359C.1
tcgtccacgcgtccgctcatgattccttatcccgttcgcgagcgctacacacgctatgagctggtggctgaccaaagcgagttacgaccaactccagctccatcttgattctcgatgcctagcccctgtgcttaagaacctgccatgtccagctataatactgtcttagtattctagcaagtaccacagcacaacgttacttattactgctcaatcattattggcgatacggaacatcaagtaacttcgtaaactgatgagcatcctgacc

SEQ ID NO: 134732 - DNA, 435 bp, Zea mays
  unsure (1)..(435): unsure at all n locations
  Clone ID: MRT4577_5435C.1
agcagtggtaacaacgcagagtacggggggctatggttattcagtggctttgcttcacaccaccatcctcgattccagactttcaaatgatcagtgggaagcttctgatacgggcattgacacataggtaattagttcttgtgcaagagaaacatagattcatatttttttcatgccatcactataattattgttgcaaatttatttgtgggacagttttattttcttttccaaaaaatatattatcatgaaacttatatattatttctttatcaatcagcaatacactgttcagggagttttctctgatatcaatgaggagagtccctgagctaccagcagggccacacaagttgcttgccattttagctgaaccgttaaagcaaaaaaaaaaaaaaaaaaaaaaaanaagtactctgcgttgttaccactgct

SEQ ID NO: 134733 - DNA, 619 bp, Zea mays
  unsure (1)..(619): unsure at all n locations
  Clone ID: MRT4577_54360C.1
gattatttttatattgttatttttttttttttttttttttttttttttttttttttttttttttttttttttttttttttttttaaaaaaagggttttaaccggaaaaataaaattttttttgagggggctttttttgggcaaaaaaaaataaaaaccctccaaaaaaaattctacgggcctttgcctcctaatttgggggggggggaaaaaaaatttcaggggggaaactttaaaataaaaaaggtttttttatgcccccccccaaaaacaactgggggcaaaactgtgtggaagggttttaaaaccccagggaaaaaaactttccaaagggggtgaggaaataccgggtttaaatcaaccctttttgaattgggagaaaaaatttgttttactttatccatcctttgccaataaaaggcctttggctaaaatacccttcctacctttttttaaccttcccccttttttaaaaaacaaaaccccccccccaagtggaaaaaaanaaattcctaaataaatttttttttataaagaaaaacctccttgaggaaaaaatttttattcacccttccccccttttttcccccccttccatttggggtttttttttttttttt

SEQ ID NO: 134734 - DNA, 694 bp, Zea mays
  Clone ID: MRT4577_54361C.1
agcagtggtaacaacgcagagtacgcggggggttatttggcaaagaactgctgccctgaatgagaggacaaagattgtagtagtacatggtttggtggtgaggtgttagtgctaggctgctagctgttagccatagcatcatttgcagtaatagcattggttttattaatgataccaccgaatgtgacatgcagaataaaaataatgttcaataagttcaaaaaaaaaaaaaaaaaaaaaaaaaaaaaaaaaaaaaaaaaaaaaaaaaaaaaaaaaaaaaaaaaaaaaaaaaaaaaaaaaaaaaaaaaaaaaaaaaaaaaaggggaaaaaaaaaaaaaaaaaaaagggcctccggcccgcccccccttagggggaattccaaaccaatggggggcgttttttggggatcccaatccggtcccaattttgggcaaaataagggaaaaagctttccgggggaaaaatggtttccccttaaaattacccaaaaaaaattaaaccggaaaaaaaaaggggaaaccctggggggcccaaagggggggccaacccaactttattggggaagcgcccaaggccctttttcaggcgggaaaacctttgggcccccttccttttattaattcaccaaccccctgggaaagggcgtttggcttttgggacctttttcacttccctcaaaagtggaattgcgggt

SEQ ID NO: 134735 - DNA, 323 bp, Zea mays
  unsure (1)..(323): unsure at all n locations
  Clone ID: MRT4577_54362C.1
gnnnnnnnatttaatttttttttattttttaaaacggaagcagcaaattttcacaaaaggctatggcgggcccgaccagcaatcaaaactagtccaggtccatatgaagctggccctagctggctaaaaaagcgcccaaaatcactaatcaaaccggaaactttgccctgaaaaaacccactggtgacgctaatttaccccccatttgattaatcccaacaaaaatcaggccactggtaaggacacaatcagagtggggccctatgtacagggaccaaaacaaggaacctaggagggggggccccacccgtccgcggaccccg

SEQ ID NO: 134736 - DNA, 385 bp, Zea mays
  Clone ID: MRT4577_54363C.1
ggagaaacggggctttgttttgttaaacttggccaggaaaagggggaaaaaaaaaaaaaagggggggcaaaatttgggggttggtttttagcatttggcccaaagaaaaactttgccccatcactggggggggggaattaaagctttacacaggcaggggggggggaggggtttcccatagggaaaagggggggagggggggttcagggggggcggccccggtttgagggggtataaccacgtcctccaaaaacgttgcccccgggttgtaagggtgaccgaaaaacttggacatgaaacccttgcccggtttgattgacttgagcctgggggggcccatgtggggacgggggccaatgatcaatttggggaaattcccccgggg

SEQ ID NO: 134737 - DNA, 374 bp, Zea mays
  Clone ID: MRT4577_54364C.1
acttcagtcgacgcatcggctaactcttcgtcccatatttctggtcatgaacgcacacacaaccatgcgagacttttcacacgtgcactggttcaactaatctctccatctattcatacctatactacatatttaacaccataacttaccacatcaaattgcaaacctgacacaaatcactcgtcacgaatgtctcacagtgaccgtcgacacactcacgcttaatattcacccttaaccataatccataccatgcacacattgatcgaaatcctactagacattattagcattgatattacatagacatacaaacacagaacgattgccataccatgcataatactacgacagaagctactacatcaactcct

SEQ ID NO: 134738 - DNA, 280 bp, Zea mays
  Clone ID: MRT4577_54365C.1
ggaatcgtgagaagactggagagagtaattgttgtgtaatcctgtaaacactgtctgcctagtgtgatgtgatatagtctttgtctttcatgctgctgggacagaaaagacccgacattgcttcagaaaccgttcagaacagtctgcctgtaaacacatggaactgaattaccacatgaacactgtcatcttttctcatgaaagtaaaaagaaccaagaacatttttcactctgattttgttatttcttgtattttttgttgagctgttttaacacatat

SEQ ID NO: 134739 - DNA, 570 bp, Zea mays
  unsure (1)..(570): unsure at all n locations
  Clone ID: MRT4577_54366C.1
ccgacctnaataccacgaatagagaagnggacanaggaggccaccctngaggaggaaagaaaggaaaaggcagaggggacaccaaaaaaaacgacagccagaggagcacggcatnaaaaggcaaaaaccgaaaagggcaagaagaaggaggagaaagaaataataggaacgaggtcccgggcaacaagcaacctacccgcaaaggaaggccatacaagcgcgaagcataacggaaaagaacaaatacctagtgacagaacaaatcctatggaaggacgcaaactgggggaaaacgcgcctactcggacaaccacgagcaaagagaagacaagaaaggatactaaagcccgccgctaaaagaaaccagaagagaaagatccaggaaaaacaaaaatcataggagccaaataagcaaataaagcaaaggcaggcggggaagaaccctacctaagacaagactcaaagtggaaacagaaacccccaggataaagaagaagaaggggctgagaaaactcgcaagaaaagagccaaccgaaacggcaacaaaagccgaacggggggccaaagcac

SEQ ID NO: 134740 - DNA, 1054 bp, Zea mays
  Clone ID: MRT4577_54367C.1
tcggccggggaggactcccccgccggcattctggagcgctccgacggccaaatccccgtggaggacgactcccagccggagcccgactacgacgcaaacgtccctgggggctcggcccagacgcgagattactacatggacacctcaagccggaggcgccggagccttgacaggtcgagctctgtgcggaggtcctttgaagtcaccgacccaaagccagtgccagtgccagtaccagtacctgttccagtgaccgcaccggccgccattgtcaacggcaaggaatcccctgcaatgggcagctcggagttctaccacttccaccacgccgaagacctgttcgaccaccgcttcagcaccaactcactcgtcgaggacttctccgccagcctggacgctgccttccacggccccgcgaagaagccgccgcggtggcgcaaggcgtggagcctctggggcctgatccaccgccgcgccgcggggcgcagggacggcgcgtccgacgccgccgaccgcgcgttctcggagccatggccggacctgcgcgtccgcgggtacaacggcaggatgcagcggtgcaacagcaacgccagcgcgcggagctcgttcagcagcaacagcggcggtctgggcagctccaggcgcagctacctggacgcccacgggaagcggaggcgcgaggagtgcgcggcgctggagcggaaccgtagcgcgcggcactcgccgggcaacgcggacaacggcctgctgcggttctacctcacgccgatccggagcgccagcggccgccggactggcgtcctcccggtgaaaggcggtcggcagctgaggtcgcagtcgttcgcgcggacgatgctggggctgtactagagtattgatgacggccacctgatttctggtcaagctgcttcatttcagtaggcagtagctgatggcttatatgttgagtagtttgggtgggtggtataaccaaaatcgtttacatctttgtgtagtgcagtgatccttttgttcattcggagggctggataaaatgaagtttaatctcgtaatc

SEQ ID NO: 134741 - DNA, 173 bp, Zea mays
  Clone ID: MRT4577_54368C.1
atagcggtcacgcaagcggacttgatatgcgagctggttcttgtggttgtgcatccacgggttgagcacctgccgcttgacgccaatctcgtcgtataatcggtcgagggcgccgtcttcgttgcgctggatgctccagccctgcttatccgcgaactcacgcatccgctcct

SEQ ID NO: 134742 - DNA, 958 bp, Zea mays
  Clone ID: MRT4577_54369C.1
cactcctatgggcgaatgggaccctcgaggccggccgggaccttccccgcacaccggttgcgatccgccgccatcgcttcaagcagcgaaccctagccgccctcagcgacggattgcagatctcccagccatgacgttcaagcggaggaacggcggacgcaacaagcacgggcgcggccacgtcaagtacatacgctgctccaactgcgccaagtgctgtccaaaggataaggctatcaagcggttcttggtgaggaacattgttgagcaggctgctgtgagggacgtgcaggaggcttgtgtgcatgatggatatgttcttcccaaattgtacgcaaaggttcatcactgtgtctcatgcgcaatccatgcgcacattgttcgggtccgctctcgtgagaacaggaggaaccgtgagcccccgcagcgcttcaggcgccgggatgatggcccaaggccaggtcagggcccaccgcgcccaggtgctgctgccacagcagctccccctgctgccgctcctcgtgcctaagttcaggaatgcgattcggggcttagttctctcacctatgggataatggacttttcctgttttgaaaaccaatgtactgtacccccttgatgttaaatttttagtacaatttgtggttcgttcttactcctgtcatccagtcagtgctgtgaaatcgttgtctgacttaattaatgttgctatgctaagctacgaagattttggttgcctgttgcaattgcatgtagctagcattaggtggtgtttgatttgatttgcaaaggatgtgcggtaggcacgatatcggagttccgtttgcaagggacgattgactgctgtgtgtagcattttgtagttactactacgcaaatttataaataaagttatgattagagaaaaaaagcgaagcgtaaaatcgcgaactccggcgtgccctcgagggggggcccg

SEQ ID NO: 134743 - DNA, 647 bp, Zea mays
  unsure (1)..(647): unsure at all n locations
  Clone ID: MRT4577_5436C.1
cccacgcgtccgcgggaagatccggaggtatctgataacttgccggagtttgaagattggcatgaatattactcccttgacgcgacttaccgcagttggcttaaaattgagatgatgaatgccgctgtttctcctgagatgctttcggcagaggaaaagggtcaagctgttgctgcagctaaagaaacactgaacttggcatgttcgttactacgcagtaagtcataaatgttttatttgatgcacctagggctggtaatgggctataaattttacactataaagtttaaggatcgaatcggattaggatcgagctctatttgtattcatttttgaactaaaattaattaagggctcaaacaaattatgaagaaccatttggatcgagatccattaccacccctagattcacctgtgtgaaaatatgctcctcactgctgctatttttttgatattatattgtaagcaaaatcaggggatggaagaccatggctgtatgctgtcgagagcagtccatttgaatccnccgatgttattttccttgagctgcatgcttctgcaatgctctgcctaccttctggagaatgattgttaccagatgcaacatcatgcacagctttgacaagtgcactatattcaactgtcag

SEQ ID NO: 134744 - DNA, 1018 bp, Zea mays
  unsure (1)..(1018): unsure at all n locations
  Clone ID: MRT4577_54370C.1
cattgggtacctcgaggccggccggaccttccccgcacaccggttgcgatccgccgccatcgcttcaagcagcgaaccctagccgccctcagcgacggattgcagatctcccagccatgttgccgcagacgttcaagcggaggaacggcggacgcaacaagcacgggcgcggccacgtcaagtacatacgctgctccaactgcgccaagtgctgtccaaaggataaggctatcaagcggttcttggtgaggaacattgttgagcaggctgctgtgagggacgtgcaggaggcctgtgtgcatgatggtatcatagtcgcccttattagttgcataatttagtcggatgatctatttataggttatctagagaaaccgnccttaatatcttcatttgcacaggatatgttcttcccaaattgtacgcaaaggttcatcactgtgtctcatgcgcaatccatgcacacattgttcgtgtccgctctcgtgagaacaggaagaaccgtgagcccccgcagcgcttcaggcgccgggatgatggcccaaggccaggtcagggcccaccgcgcccaggtgctgctgccacagcagctccccctgctgccgctcctcgtgcctaagttcaggaatgcgattcggggcttagttctctcacctatgggataatggacttttcctgttttgaaaaccaatgtactgtacccccttgatgttaaatttttagtacaatttgtggttcgttcttactcctgtcatccagtcagtgctgtgaaatcgttgtctgacttaattaatgttgctatgctaagctacgaagattttggttgcctgttgcaattgcctgtagctagcattaggtgggtgtttgatttgatttgcaaaggatgtgcggtaagcacgatatcggagttccgtttgcaagggacgattgactgtcctgtactcctgtctgtagcattttgtagttactacgcaaatttataaataaagttatgatcgacagcaacggaattcgagct

SEQ ID NO: 134745 - DNA, 783 bp, Zea mays
  Clone ID: MRT4577_54371C.1
ctcgaggccggccggggtgtttatcaaatacaggggagtgatcaattgtatggaacggtgactcggttggcgaccctatggagatgaggtctcgctcccggagcaactggcgactcggctggcgacccctgccgcccccgtcgtccgcgccgccgccgccgccaccaccgccgctaccgctccctcccctcgtctcttgaccacgccgcactcgataggtcagccaagctcccgcgccaaccaccacaatcgccccccacccccgcccccactgcgcgtctccgccggcttcgcccgcctacaagccaccacttaccactcaggtgtcgacaatctaatcacgctcaagccaggttattgggaacaagtgggatgtctacctcgacctcctccaggccgactactcagaaggggatgctctggatgctttggaattgttccgctactgctgcaggcgaatgctcatgacacatgttgacctcattgagaagttgctcaactacaacaccctagagaagaccgagacaagttaagcgagcacatcatgctccaaaaacactactgtttggcagtatcatagagcttaggtagtatgttgtctcttctctatcagtagaaatgggttgtgagtgtgaacatgcttttgctcatgagcattcaaggacttttcatgcgacagtgcttgttgccacctatgcaacgatgttggatattttaagtgatataattgctaaaagaaagctaatgtatttgtgtgaattgggtcgataatatttcgttgac

SEQ ID NO: 134746 - DNA, 469 bp, Zea mays
  Clone ID: MRT4577_54372C.1
ataatttttttttttttttttttttctcttgctcgggccgggaaatcctgaccggttcctgaaagcgtaccaactatccctatcgtgagtcgaataaaaaccgggcggggtcatgggcactgctgatccctgccagaaaatgtgatccgctcacaagggcacacaacataccaaggcggaaacacgaacgcgcaaagtgcagcccgggactaacgaggccagctaactgcacagcgaaccgaccttgtccctaacatggccgcttgctcaagacctgaggcgctctcatgccacattgcatttaatgctgtgggaacaacgcgctgtcgcgaagaagtccccacaacgatacgcacccggaagcattaatttgcacaaccgggacgggcaaacaagtgatcgcccttcaccccctggccctgagcataactgccccatgcgccccacgcaaacttgtcccagcacgcga

SEQ ID NO: 134747 - DNA, 340 bp, Zea mays
  Clone ID: MRT4577_54373C.1
tcgtctacgcgtccgaggtaactttgctggggaggggtttatcaaggcctttgtggaggcctacccacacataaaatgcactgtgctggcccctcccaagaacattgtcgacaaaccggctgatggagtgaagataaactatgtacaaggtgacatgttaagtttcattccacctgctcaaactggcctgcataaagcttgggctgcaccacctgaccgatgaggagcgcgtcaaggtcctggctcaatgccccgaaggcgatttacttaaccgaaggatggtccggaaagttaatcattggagacattctaattgaccactttgggcctatgctggaaa

SEQ ID NO: 134748 - DNA, 257 bp, Zea mays
  unsure (1)..(257): unsure at all n locations
  Clone ID: MRT4577_54374C.1
gcaacagggaaagcacaannttttaccaacatttgncaccaaaaaaaaccgcgccattattcgcgaattaagaccgcgccacggccgcaacaacaaccatctcccccaaaacctcgccggcacccataacacaccgccttccctcgaacctctcaccagcggtgctcctggagcatgaaaacccaacccggcaacccccccaatccaccacccaaccacagccggcagagcacctacaccaccccagctcccccaac

SEQ ID NO: 134749 - DNA, 488 bp, Zea mays
  unsure (1)..(488): unsure at all n locations
  Clone ID: MRT4577_54375C.1
ctgcttcctgcacccgctccggggggggggggggggactacaaaacacccaccgggggggccgccgccgcccgcgccgctccccgtccccgcaccccgccgcgccgccgtcaccgtcgctcctcgcgggcatcctctccgacctctcctagatcggcngctccttccggggttcgtcgggggctctttttcncncccnaccaccccncccccnacncgctcaantcacancangccncctcntccccntccccccntccccctcctcctnctnctnccnaccanatcncanatnatntcntnnaaacancncttnccctcnccnccccccccnanncntnnatcnacttccccttcctcnccctanatnannnttctntaatttcttttctccaaananatcatatnnaatccattnaaaaacttntcccanatttancatctctaccccntannctctntccttcttacatnnatnaanacatattc

SEQ ID NO: 134750 - DNA, 366 bp, Zea mays
  unsure (1)..(366): unsure at all n locations
  Clone ID: MRT4577_54376C.1
cgtttggtcggttcaacgatcatcagtacatgttgcacagcacacacgcacagacgatagttggatgtacatgttgatccgtcataatgtgatatcgtgtatatatatgtnaaaaaaaaaaaaaaaaaaaaaaaaaaaaaaaaaacaaaaaaaaactaaataaaaaaaaaaaaaaaaaaaaaaaaaaaaaaaaaaaaataaaaatataaaaaaaaaataaaaaaaaaaaaaaatggggggggccgttttaaaggaacaaagcttaataccccgggaatgcaagataaaagcttttttatgggggccccaaaattaaatacacgggccgcggtttaaaaacgtggaaccgggaaaaaccatggggat

SEQ ID NO: 134751 - DNA, 441 bp, Zea mays
  Clone ID: MRT4577_54377C.1
attcacgcacctaggtactgactagtatacgtcctcatctccttctcaagcgagaaatgccgacacacacgagctcacgcaccaagaagaacctacttcagaagatgctccagaaccggcccatcccctactaggatccgcatcgcgcactcgacaataccatcaggcacagacgccaagagcatgaactgataacgcaccaagctccgattgtgagcgtcggcatcggacgtaatgctgggacagaaggctacggtctaagagctatcttccattctggtttatccatgcgccagttttgcttgatacctagcaagagctgctatgacgccttcattataatgctggtgaacggagatgtcaatagaaacatgctactactgagcggtaccccaagattccttgcagaattgctatgctaagtaaagaaccgctttatcc

SEQ ID NO: 134752 - DNA, 305 bp, Zea mays
  unsure (1)..(305): unsure at all n locations
  Clone ID: MRT4577_54378C.1
tagcactctccctccgccacatacaaagctacaggtgcaataacatttttttcggtctctncacccaaccnacactttactcctactgcttccaccaacccttagccaaacagaaacacacgaccccagcttatactaagaaccaacaatagcctcgcgccacctgctcctcctcctactcaccgcgctactaccaacggcggccactgcggaccctgacccacagcaaaactactgcgtgccatacacacacctctgtctccgacggtccgtgaatctatctctactccctttccacccatgca

SEQ ID NO: 134753 - DNA, 308 bp, Zea mays
  Clone ID: MRT4577_54379C.1
cacgcgtacgcaggagcagcggtcatgtcctggccattttcgtttatcttcgagcgtaacccgaccaccgtcaggaactatcgcatctgggtgcgctaccagagcagaaccggctaccacaacatgtacaaggagtaccgcgacacaaccctgaacggcgctataaagcagatgtacaatgagatggattctcgccaccgcgtgaagtccccctgcatacagatcatctcgaccgtcacagtacactttaagctgtgcaagagggacaacaccaagcagtttcacaacacttagatcaagtttccact

SEQ ID NO: 134754 - DNA, 304 bp, Zea mays
  Clone ID: MRT4577_5437C.1
ttcctcgcgtccggggcggtaaaggtagctggaccgtgcgccagagcagaagagctagtccgctcggagccgaggccggacctcttcagcgcggcaaaggtagctcgaccgcgcgccggagctagtacgctcggcgccgtggccggaccttgccctctcggcagcggtgcgcgcagctgcctgcgcggcggcagcggcggagctttcccacgcagccacgtttggtgtgcttgttcctcctctacgcccgcctactctttttcatagagcgtgtcgtggggcgaccccgtccgtgaaaaatggc

SEQ ID NO: 134755 - DNA, 224 bp, Zea mays
  Clone ID: MRT4577_54380C.1
acgcggtccaagcacatcaacttacattagcacagaagagaaacgggcacacgcaagtgatcaaggcataggaatattgaccgtcggcactgggcgacttgatccctgggctgccggatgaaatgaccagcgagtgccgttagctggtagtcttacgaccaactggcggaggatcactccatatcacgccagctgaagtccaatgtctattcaaccagactacc

SEQ ID NO: 134756 - DNA, 2634 bp, Zea mays
  unsure (1)..(2634): unsure at all n locations
  Clone ID: MRT4577_54381C.1
accgttgtaaggcttggagtagagccgttaaaaaacagttgtcctgtcccaagccaccaatattgccagtgaattgaaccccttctgtagtccattgttacctctttaactgcctggtaggctggtaccactagcttgagaatctatgggttgatggttgggctgcaatggagacaaaagcaattttctgcaacctgcaaaatggtgaactagattttccaggcgaaaacacatggaatcaataggtgctgtgtggtcttctcttcttcatcagaaggggcaagcagctgggtgggaagtcctcttttagtgatccggtccgcatttcaagaacggttctttactgcaagccaaatggagagcttgcagcaaagaggagcccaggacttccaaattcgtttccatggagcaaagcggatggaactaaggaaaaaggtattgtaggccgactttgctagagtaagaatcggtcctagtaagcctccaaacaagctgatcagcatcattctgcttcagcgagaaaccttccatcaagtctcataagcggagatattatgtaagaacctggacagagagctcctcttatgtcagctacccaacgatgggggtacatcacttgatgatcctcttgaattccctagttgatcatttttcagtttattgccaaatctagctgtgttcttgtggctgtgaaattatatctcccatgctgatacttgattcccttatctttgcttcattactacaccacagtaatttggatctgccattatgttactatgtaactctcatttgatatcaatcacagctgccacatacaaaatacaagtatgtttatctagataagatcttgattcatcaatcaccactgatctgagttttcgccactgcgatgcgaggaaaagacagatatctaataacatcttggtgaagatgttcttaggtcctttgctttctcttcaagtcagcttcctttgatttcattcctcaaactatcaatcacaggctgcagcacgtgtaatccgcatcggttcaagaacagatttcatgcttggtgatattttgcatcctgcgataaattgggctgataaagagtctcatctggatcctgatgaaatggccaagatgaagtctgcttttattggtaacctgccagaagatgttaatgaggagtacttgagaaagctttttggacagttcggtgaggtagtacgggttgctatctcaagaaaaggacaatgtccagttgcttttgttcacttcgccaaacgttcagagcttgagaatgctatagaagaaatggatggtaaaacggtgagaggacctggccgaggaccgtctttcaagatccaggtgtcagttgctcgacctacggcagacaacgacaagaagcgatctcgtgaagaagtgagaactagaagatcaaatgcatcaggagataggcgagattattctcatggaagatatggacacgattcacttgatcgtcaagtgaaagctccaagattatctaattatgtggccgatgctgctgacccctatgaatcagctgttaattcattaccttcagctgtcaaggaagtcttgcttcgaattctacgtctaagaattggtactcgatatgatattgatatccattgtgttaaaagccttgatgagcttcctgagtcatctgctcttgctgtccttaatcagtttttgatatcaggtggagacaaacacaacaaaggagattattttgcatcgttggttgctaagcaccaggctgagacctttggcttaacacatgcattacacggtaccacttatttgtcaagaaatccggaaatgcatagcaagcgatacccacatgaagattatgattttgtgacacccaggagcagtaggtacgattcgtcagcccatcatccttcaacatactacgaagacgatccaccagtgtctgagtcaagggttagaagatatgctgaagaaaggtccaccattgtaagaagcccagaaccacgtccgcgatatgacgaaacagacataagaataaacccagaaccaagattaccatatgaatcaagacacaacgccgaaaagcatctcgatcgaagatacatacaagagcatagttcaaatattgaaagaccagctgaagaagctctcctttctagggaaaggagatttctgcctgctgcagggtacatgccgaacccaggcggctcggatttccgctccaggtcgcccgccgaatattcagcacaacgccaacaaatgaggtttgatccattcacaggtgaaccttacaagtttgaacccttcacaggggagcccatcaggccagatccgaacccagcgccgctcaggaagcctgtaattgantcagaataagtttggaagccgataatgccagattaagaaccctgaaacaaagctaagactggataactcttcttcttgtctgccaagtgtctctgtgattttgcttgtgggctacagatcatgtaccccgagcaccatgtgtgatccagtcggactaatcatttcggcattgaaaagtcggactaactttttgtgtaacgctacgtattgtttggtaaaacattcaggagtacccttttggtagattaattaaaaattcatccggtg

SEQ ID NO: 134757 - DNA, 719 bp, Zea mays
  Clone ID: MRT4577_54382C.1
cctttttcatctatgttagcagtggggaagggaatccagaggatagcagggggaagagaggtacacaacaaagacgaagagaggcagtagaacggaggtagttcagagtttcagagatttgttcatttgttcgataatcccctttcacaagacacagactcttatttataccatcacgccaccctgacaagctagaccctatatcacagccacacacaacactaggtcccacagccagcgacacacttacaccactctggccttctggtacaaacgttggcacgacgctcgcgatgaggctgcttcccattctcctgtgtatggtccgacagcataagatgtgtgacattgtgccttgtccggcaacataggatgtgtgacattcccctccccttaagcttcggcttgcccccaagccgatgtagaacctttgaagcaccaggattccaagggaaagtggtgaacttgttcttgattgcatcgtgactcaccaaaggatcctgattatatatgttatattttccatagaatacaatttccagctgacaaaaaatatcacatagctgccggtgtactgccccttgatttggagtctgccatggaagcttcttgaacaggttacaatacaaaactgaagtaattataacactgatggcgaaagaaggacatggcatagtccagagaatagcattcccacttgtttgtgctagatgtacaag

SEQ ID NO: 134758 - DNA, 744 bp, Zea mays
  Clone ID: MRT4577_54383C.1
tcgtacgcaacgggcgcgtgcttccaccccgtctcgcccccgggcatctcccacgtcacggccccggcgcacctcgtcaaccccagggcgcgccccgcccccgacaccaacgtcgtccaggtcctcttcggcaacgtcggcgccgccagcggcgacggccacctcctcctcagctaccacgacctccgggcggagggcccctgcaccacctgggacctgtccgcgccccccgaaatccagcgctttgtctgcaacccgctcaccggccagatgctccgcctgccggacatcggcggctccaggaggaccctcgtcttccaccacatgggcctactcacccaggccgacggctggctcgggcgcgggccgcccgacagattcgccgtcgccgagctcgccttccatgtcgccggcgccggcctcgagcggtttctctcggagaaaggggagtgggagacggtgatgggcgtgccgtgcggaccgccgcccccgcgcgggatggaggtgaaccaggagacggttgccttcggcggccgcctctggtgggtcgacctgacctcgggcgccgtctccgtcgaccccttcgccgaccggccggagatccgcttcgtcgagctgcccagcggcagcgtgctgcctgcgcgtgctcgtagtacagaagaggatggagatctcaggagggtcgaggaccggtggctcttcttgcgggaggtggccaagcaccggcgcatcggcgtgagcaag

SEQ ID NO: 134759 - DNA, 270 bp, Zea mays
  Clone ID: MRT4577_54384C.1
agataaattaaatcaattatcgtaattacaacagttcatacgaacaagaacgcgggtgtgaggacagagaagaaaagggaagaaaaaacaaaacaaaacaaaagcgggagtaaggaacaacgaagtgacgaagaaggtgggggtggatcaggaccactggataatctagaaggagtagacagccgcggcaacggcaaatacggcgaaggcgacggtggggcggaggccggcggcggcgccggccggggtggtggacgccgtgggctcggc

SEQ ID NO: 134760 - DNA, 768 bp, Zea mays
  unsure (1)..(768): unsure at all n locations
  Clone ID: MRT4577_54385C.1
ccggccgggaagcacccgccggtaattccttcacttcatttattcattctctcttttaacttatatacacccctctttcaaatacattcatttcaaaccaagcaatcttttgccaccatgcgttctttcgctctcctcgccctggtcggccctctcgccgtgagtgctgcttctggaagtggtcactctactcgatactgggactgctgcaagccttcttgctcttggagtggcaaggccaaagtcagcgcccctgctttgacttgtgacaaaaaagacaaccccatcactaacctgaacgccgtcaacggttgtgagagtggtggttctgcctttgcttgtactaactactccccttgggctgtcaacgacgaccttgcttacggtttcactgctaccaagcttgctggtggcactgaggccagctggtgctgtgcttgctatgctctcactttcacgaccggtcccgtaaagggaaagaagatgattgtccagtccaccaacactggtggtgatctcggtgataaccactttgaccttatgatgccccgcggtggtgtcggtatattcgatggatgcacctctgagttcggcaagcccctcggtggtgctcagtacggcggcatctcttcccgaacccaatgtgacagtttccccgagctgctccaaggatggttgccactgnncgatttgactggttcaagaacgccgacnacccagacttcaactttcgagcaggtccagtgccccaaggagctcctcgccatc

SEQ ID NO: 134761 - DNA, 266 bp, Zea mays
  unsure (1)..(266): unsure at all n locations
  Clone ID: MRT4577_54386C.1
atacctacggccgcgggctccatatcgcatcttctcatctccttcctccctcccccatccatccccacaccgcaggggccacgccgctgccaacctacgacccagactcgccacccatcccgcaacgtcggaggagacaaatcaccagacaagactctcgccgattcctaaaccggcgccaggatttcgttcccatccctcctcgcccatttccgtccccgcccggccgatccaccccaccccgcccccgcccgccggnccccgcg

SEQ ID NO: 134762 - DNA, 391 bp, Zea mays
  Clone ID: MRT4577_54387C.1
ggggatgtgtttttttttttttttttttttttgaggccaaccggtaaaatttcccccccgatttggggaaacaaaaaaacttttccccccccctttggggggggctattaaaccccccaaaaatgcttcccttggaaaaaaaaaaaaaaaatttgcccgccccccccaccgggttatttgaggggcctccaaaaacccaaggggcctttcccaaaatttttgggggggggggggaaaaaaatttttcatcccccctttgaaaaatgccgcccacagcaggggtttagtcccctaaaaaaaaaattttgtttcaagccccttttgggccccagttttcttgttaaggaactattgggccaagttttctgtttttgacccaagcccctttttt

SEQ ID NO: 134763 - DNA, 383 bp, Zea mays
  Clone ID: MRT4577_54388C.1
ggggaaaaaatgggcaccccctggatgggtcaaaaaaaactttttttgtatactcacccggcaaccccaacttttaacaaagagttacggtggacccaggttccctataataagtgtggaaaaaaattgggcttttacgggtaaaggaaaaaacggggggggtgtccaaagaacccttttgtgggcggcttttttcggttgtggttccgggaaaattcacccaaatgccttctgaggggggggggagtcccctcacttttcgggcctgagcccaaggggactacaccaacagaaccccccttttttgtgtccttctccgggggcgtggataaaattttggcccggcaactttttttttttttggggaataaagaaaggggggg

SEQ ID NO: 134764 - DNA, 209 bp, Zea mays
  Clone ID: MRT4577_54389C.1
agctcggaattcggctcgagggaaattattaccccccctgactcctccaccgcaccgagaaaccaaaacagggggatatctaaccacagaggcgtgtatctacgcacgcgcacaactagccaatccaactgacgccagaccaaacaaccagagaaccgaggaaacatgaacagctgatcgcgcggccaccactacaatgatgccgagca

SEQ ID NO: 134765 - DNA, 806 bp, Zea mays
  Clone ID: MRT4577_5438C.1
tccgggctattcccgcggcgggcagtcaccgactccagcgagcgagggaccaagaccctagctgaaccctcccggcccgcgcagcagctgcgtccatggaggtggacccctcgccgtcgtcgcgctcgcccaggcctccgcctccgccgctggcggcgatgccgagctacttcgacccggagtcgtccggccgtcgggaggagtaccgccgctacaggaagaggttgtcttcttcaaatgtatctcctctgctgggaagatcactctccaagacctctggaccaaggctgttatatgatggagaaagcatcccaagacagcctaatgccggtttactccttgaagacataaagcaggaagctgccgattattccaacatagaaagcttggatggattgagactgttcggttcaccgaaaaggacatctctcgatggcggttctgcatcagacgcagcttacagttcgggcaggcaagcagtgaggcagacactgaagccagtcaaactggaggacgatatgtatgtgccgcatgaaggagaaacgccttctacaatgtttgcaactctccttgattctgggatccaaggttagaggattaaagtggtctggttattgagctgcttgtagtagtagtagtagttactatggcatgtgctattgttttttctctctccaatttttgggatggtttcttttgttaaggtgatgaagcattctgctacaaagtttattttggatgttggtttttcgtcaaaaaaaaaaaaaaagaaaaaaaaaaaaaaaaagcggccctcgagctccagc

SEQ ID NO: 134766 - DNA, 235 bp, Zea mays
  Clone ID: MRT4577_54390C.1
cccacgcgtccgttaacttgcttctgttgcactttagttttctacctgcatatggactgcatttttttttttaacacagtcagtatgtagaatgggatgtattcttctgctgctgcttattaaataaagatagcctgagtgttcttagatggggttattctgagatgacggtcttagcctacagttctttttgaaatgaaaggtgctttgttttttaattatattcatcttttca

SEQ ID NO: 134767 - DNA, 389 bp, Zea mays
  Clone ID: MRT4577_54391C.1
ccggaatttctgggttgacttacgcgccctttgttgacgcccgggcaaaacccgcccagctcaggctcatttgaagcaggttctggtacgccaccataccaaacgcactctcctccgacgccggccgaggcaagatggttctccagaacgacatcgaccttatcaacccgccggcagagctcgagaagctcaagcacaagatgaagcgcctagaacagacccccaactccttcttcagggatgtcaagtgccagggatgcttcagcataaccacgggtttgagccactcccagactgatgtagggtgcccaggctgccaaacaggtctttgccagcccactgtaggaaaggcgaggctcacagagggctgctcttttcgccggaaggga

SEQ ID NO: 134768 - DNA, 513 bp, Zea mays
  Clone ID: MRT4577_54392C.1
aacctcgcgtgcgtttggagcggcactcactctaccagattttccgcattcctgtcgagggcccgtgcgctagatgatgcaccctgtgtgggccatcctgctgtgggattatcccctcaccgtggtgaaggctgtcatccttgacaacggtgaggccaggatacactgcctggatgggcctacatgcagaccagaagcgcatcattttcgactgggctcagatcgaggacggtcgcactctcgctgactacaacatccagaacgagatctccattctgcttgtgctctgcattactggacgcatgcaggatcttgaggatgaccctgaccttctagactatagcactttggggggagctcttctatgccgttgacaatgtgaaggcctagatccaccacaacgactgcatacatgcggacctgattcaggttatcttatctgatactgatattgaggactgtcgcacgctggccgactacaacatccagaatgagagcaccctccacttggtg

SEQ ID NO: 134769 - DNA, 920 bp, Zea mays
  Clone ID: MRT4577_54393C.1
tttccactatagtcccatgattactctgtctgttaaccttccgcccccagtgctagatttcaatactcatgctacacaagattgggtgaaaagagaggctgttgaggtatttcacacaatggacttgctgcacactgaggtatatgatgcacttaataatcttgagaagagtatcattactgatgatgattcaaccaagacaagcatacataggcaaatagttgagatgaaagatttgcttaatgtcgaaagaaatgagtatgaggttttgcttcttccagttataatggggagttctcattcattcaaaccaaatattgatattttggagcttaatcgtgttagacgtagtctcctcctagatgctcacacttgggaccgcaggttgtgcggcatagattcactcgaagcagatagccatatttccagaactgatccatttaatctagagaaaacccaaggaatcaatgaagggagatctgatttgcttcagactgttaggaaacacggaggaacatatgaagaaccatgtcctcaacactcttcagaaagcccaaggaaatctctcttgtctacagagggccatctgaatgataaaaaatatgtcatggttgagacagatttgccggttgggctagtggatggtgatgcaggtcttgatttgatcttcaacaaattgaatacatgtgaagaaggacgttgtctatcaaaatatcctagcaagacaggaccagtagagaggttaccttcacttgcatctattttagctgacaaaatagatatggcatggtctggatttggtgaattagactacaatcttccacatggtttgagcaaagcaaatgaaaatacatctttgaacttgtttggcaatccaagttacaagaaggctactggtccagtccgaatccattcatttg

SEQ ID NO: 134770 - DNA, 582 bp, Zea mays
  unsure (1)..(582): unsure at all n locations
  Clone ID: MRT4577_54394C.1
gttgtattaacaatgaatcatattgtgaataagaaaaatgaagtttgtacatggagctccctaccacttatgggacgacgagagcaacctctgtccttgttagttcatttactctaatgccattctctagtaggagctgcaaaatccttgctgagggttcagatccagactgccccctcttctctacagctcgcaggcatgcacaacacaccctagctcccctctgtaggtgagtgtgtcgtccatcacgtcgagctcccagtagggccattgcatgacctcggcggagcagccaataagccctgaaacataaattgataggtgtgctgcatgtggatttccagcacctagtttattggacactaatattatttgattgataaaattgaagtttcaagttttggatctaaaagaaatcatggtttgtaaagcttgtaccatcatgngtggtggcagcangcaatgaagtgttattgataaactccgccatgatgcatttgaaaccatggtttgcaatagactcaatagagttaataaacttcaatgaaaaatatatctataaattaanggatagctgcattt

SEQ ID NO: 134771 - DNA, 327 bp, Zea mays
  unsure (1)..(327): unsure at all n locations
  Clone ID: MRT4577_54395C.1
ccccccccccccctcccctctctcctncntccctttctgttttccatgtgcggacgctccagggcggccgcggtcccgataaacccgtctgctcctcttgcagacacgacaatacctaccatacgcatggccaaccaaagcaggacgaatgcatggttgcaccgacactgcccatagtgatgctgacggcaggtccaaggcggccttcggaatcattgagaagccacgggagccatatgtcggcaaacccacattgggatcacacctgaaggaaaccttcattctttccaggatgaacatactacgacaagccctgctgggctgaca

SEQ ID NO: 134772 - DNA, 1232 bp, Zea mays
  Clone ID: MRT4577_54396C.1
aaaataaaattaaaaaaaaaaagcaatataaaagagcagaagtagcagtacatctgcatgcatgcagatttaggcccatcaaaagaagcggatcgaacgtttgcttacgaggccaggcccattatcgctgccctcgaatgcagtgcatagacatacacaatacaaaaaacgagctccgccgctccctcatctatctatctataaagggcgcatggccgggaccggccggcgggagttcacgaacgatcctctccctctccctctccgtcccccaagcaaagaaaagaagctagctagctaggcgtagaacgaatgacgacgcagggcggcaacaggtcgacgacgacgctggtcgccgccgtggccgtagttctggccgtggcggcggcgtcgtccctggccggcgtggcgtccgcggagaaggcgggcgggttcgtggtgacggggcgcgtgtactgcgacccctgccgcgccgggttcgagacgaacgtgtccaggagcgtggccggcgcgacggtggaggtggtgtgccggcacttcggcgcgtccaaggagacgctcaaggcggaggcgacgacggacgacagcgggtggtacaagctggagatcgaccaggaccaccaggaggagatctgcgaggtggtgctggcccggagccccgacccggggtgcgcggagatcgaggagttccgcgaccgcgcccgcgtcccgctcacctccaacaacggcatcaagcagcagggcgtccgctacgccaaccccatcgccttcttccgcaaggacccgctcaaggagtgcggcgccctcctcgagaagtacgatctcaaggacgcctccgagacgccatgatcgtcctccgtcctgtgcatgcctgcatccattgctgccctgcccgctcgcccaagaattgaagatggtagctgccttccgcgttttttgtattgtgtatgtctatgcactgcattcgagggcagcgataatgggcctggcctcgtaagcaaacgttcgatccgcttcttttgatgggcctaaatctgcatgcatgcagatgtactgctacttctgctcttttatattgcttttttttttaattttattaacttctcgttttctccctcatccctcgtcgaggaggaagggtatccgttttgtttttatgatgcaaaggtatccgttttgtttgtatagtacagtatctcatctaaaaaaaaaaaaaaaaaaaaagcctttta

SEQ ID NO: 134773 - DNA, 282 bp, Zea mays
  Clone ID: MRT4577_54397C.1
gtagaatcgctggcttttcattacatttaacggttcgtccatttaacaagccccaggggaaatcgtgcccaaaacagaacacccctaaaaaaatagggggacaaatgggggcaaaagaagcatccccccaaaaaaaaaggggccccctttttcaagcgaggggcattcaactcactaaaaaaaacccccttgtgcggggccagcaaaagccagccgactgatttaaacggggggaagccggctttcccgaacaagatggagtacggtttaggggtgggaacc

SEQ ID NO: 134774 - DNA, 425 bp, Zea mays
  Clone ID: MRT4577_54398C.1
ggacagacttcactctcactatcagcagcctgcagcctgttgctcttgcttcctgccagcgtcgacacacctgccctcccccgatcactttcggccaagggaccaaggtggagatcaaacgaactgtggctgcaccatctgtcttcatcttcccgccatctgatgagcagttgaaatctggaactgcctctgttgtgtgcctgctgaataacttctatcccagagaggccaaagtacagtggaaggtggataacgccctccaatcgggtaactcccaggagagtgtcacagagcaggacagcaaggacagcacctacagcctcagcagcaccctgacgctgagcaaagcagactacgagaaacacagactctacgcctgcagagtcacccatcagggcctgagctcgcccgtcacaaagagcttc

SEQ ID NO: 134775 - DNA, 491 bp, Zea mays
  Clone ID: MRT4577_54399C.1
atttctagattcaaaaaaaaaaaaacaaaaaaaaaaaaaaaaaaaaaaaaaaaaaaaaaaaaaaaaaaaaaaaaaaaaaaaaaaaattttttgttttctccccgggcgggcttatcagggggggaggatttgtttttttctccccccgcgggggggtcggtggggccttttttgggggccccctcccccttttggggggggttgttttacttttggggggccggttttcctcttttggggtgggtgaaacccccctgggcccccctttttttatcgtcggggcgggcaccccttttccgctgcccggttttttcccaggggggcccgccccgtttttttttcctttcgtgcccccttattggccggtgtgtgccccccctctcgcggggtgttttccccgcggggggtgtggttttccctcaaagggtcccctattctttggcgggctctctcgcccccccccctggctctttccccctttttctccccca

SEQ ID NO: 134776 - DNA, 156 bp, Zea mays
  Clone ID: MRT4577_5439C.1
caagagatggaatgccctcctgttgcgcaatgatattgccctcatcaagcttacagagcatgtggagctgagtgacaccatccaggtgacctgcctaccagagaaggactccctgctctccaaggactacccctgctatgtcaccggttggggccg

SEQ ID NO: 134777 - DNA, 155 bp, Zea mays
  Clone ID: MRT4577_543C.1
ggtcgaccttggcatttttggaccggcacctggaggggcgccggggttcccctaggggagtccggtctgggtctgggggggtcaccggcatttcttttttgtgggggaaatagagattcgcttacaaatgcacacaacatgtcaactcgggaaaa

SEQ ID NO: 134778 - DNA, 321 bp, Zea mays
  Clone ID: MRT4577_54400C.1
acaacaactgttttattgtttaaaggggacccaacacccccattcaaatgacactggaatgggaaaatatacgggggggagaaggaaaaaaatgctggctagggaactgggtgggaaattgcaacactcgttaaaatccccatattttttttcttcaaagcatttcctgaaatttggggacacattgccttaccttttttttgaactaatcccgtttttttttccaaaccttgggagctttaattttcgctggaaactcctaatttggactaaaaagcattaaaatgatgctaaaaactattctttaaaccgggggcactg

SEQ ID NO: 134779 - DNA, 529 bp, Zea mays
  Clone ID: MRT4577_54401C.1
ccggcgtgcgagaaaaaaaaaaaaaaaaaaaaaaaaaaaaaaaaaaaaaaaaaaaaaaaaaaaaaaaaaaaaaaaaaaaaaaaaaaaaaaaaaaaaaaaaaaaaaaaaaatataaaaaaaaaaaaagggggggccggttttataaggatccaatttttttgttcgtggggggtggcgatattttaattttttttttggggggcctttaaatccatttaattgggcgtactttttacattgtccgaaattggaaaacttttgggttttcccattttattggctttgggtaatttccctttttccccgggtggggtattttcaaaaaggccccccccgtttacttttccaaaggtttcccctttttaattgggatttggcaccccccttttagcgggtatttatccggggggggtgtggtttttcccccccctgtacccgtttctttttcctgggccctatgcccttttcttttcgtttttttcctttccttttttgcctctttttgggggtttccctttaaagttttaaa

SEQ ID NO: 134780 - DNA, 922 bp, Zea mays
  Clone ID: MRT4577_54402C.1
ttcggcacgaggttctcattatataatcatgaacacaaataatctgatggtttaatgtgattaacatgttcttttctatgtttcatatgtttctgctttcattattacatactgaaattatgaaggtatgtccttcataaccttcgtctgaagatcattatatccgcagggagataatgcttcgaaagacgaaggtctttaaccattaacatttgtgttgccttgttcttaactcagcatttgagaacaagtccccaacaaaaataatttgccacaagtcttcagggtgatgaccagcctccaagaaattactccagtaggcgattgatccatcgataacgtgatcttctctaccacacgactagcggatggagtgaaaggaacatgcgaatctgcacggaggaaaacacgccgagcacgatggccagttgggcgtgagaatcggtggggtagacgatgaggacgaagatagtgaacgatgacaacgaagcgaggcgagcagggagttgacggcgtgcaagcttgggactccaccaaactcgaggacgggtctgacaacttggcgagacgttggcgaggcaaggtttgtcgagcgcttcgatgaggagcacgcgtgcaggtccttgtggtgtttggggtcagggtcagagaagcgcggcgctgttgggaacagtggtcgatggctcggggctgaacacagtcgcaaagcggcccagcgaggttgctgtaggcgaaaggaaacggatggagcacccacagggatccctgcaggcgccggacggcttgcccgcacaagggagaaacatccaggtaagggcgttgacgaaggatttcccagggagccgagcttcatcagatgaatataggaggcgaccatggtaccaggaaccgtgtcgagtggattctggaaaaccccggccgg

SEQ ID NO: 134781 - DNA, 288 bp, Zea mays
  Clone ID: MRT4577_54403C.1
gccacctgccaactagcccataacgcgcttatgggggccctatcgagtcgagcccgaatgtgggtcgatcgagagcgagcgcatacgcgcgccggtgagagctttgcttgctttgggggttctgtaacgacttaacgaacgacggctggcggtagatcaaggcgcgcgacgctctatgcggcgcagatgtacaactacgtaccggagcgggcgggggtccgacaagccaatgtaatgagcgacgcggcggtttgagagggcatacccttctgttcttattactctact

SEQ ID NO: 134782 - DNA, 142 bp, Zea mays
  Clone ID: MRT4577_54404C.1
acgggccgagcccgtattcagtaaggccgcggcggaatccggcgaggccaaccacgcctgcggatgcggtaacaagtgcaagtgcaacccctgcaactagagatcacatgattcgactaccatgaatataatcataatgtat

SEQ ID NO: 134783 - DNA, 957 bp, Zea mays
  Clone ID: MRT4577_54405C.1
gcatcagaattgcttttattacaaaagttacaagttacaacaaatttacattatgtttatcggagtgattacaaaagtgattcaaagaaataaactttgaaatgttataaattatttataagtttgaaatatacgctagcttaagtgaccatcctcaataagaagtatagaagagttacttagacttataagaaggtcgtgcctactggcacttaacaccatccacaacagcacaactctagtacctttgttgcagtgaagagccaatgactaagaaaataatttgccacaaatcttcagggtgacgaccagcctccaagaaattactccacaaggcgattgatccaccgataacgtgatcttctctaccacgcgactagcggatggagtgaaaggtacatgcgaatctgcacggaggaaaacacgtcgagcacgatggccagttgggcgcgagaaccggcgaggtagacgacgaggacgaagatagtgaacgatgacaacgaagcgaggcgagcagggagtcgacggcgtgcaagcttgggactccaccaaactcgaggacgggtctgacaacttggcgagacgttggcgaggcaaggtttgtcgagcacttcgatgaggagcacgtgcgcaggtctttgtgatgtttggggtcagggtcagggaagcgcggcgctgttggggtcggtggtcgatggctcggggctgaacacagtcgacaacgcggcacgacgatgttgttgtaggcgaaaggaaacggatggagcacccacagggatccctgcaggcgccagcacaagggagaaacctccaggtaagggtgttggcgaaggatttcccagggagccaagcttcatcagatgaaaataggaggcgaccatggtaccaggaaccgtgtcgagtggattctggagacaggaaagagtaacgtgagaggatttttttttccccggccgg

SEQ ID NO: 134784 - DNA, 495 bp, Zea mays
  Clone ID: MRT4577_54406C.1
ggccgcttttttttttttttttttcttggggtgggattttttttattattttttttttattttttttttttttgggaaggcctggaatcaaaaaacaaaattccaaagaattaaccaaggggaagggatacaaaccaaagaaaatggattgaaaagcgaacatcggggaaaaaaaaaaaaaggggggggggaagaaaaatggggcccggggcaaaagccgaaaggggcaggccaacgaacccaactgggactcctgaagggggggctcaaaccggagaagaaaaaacccaaaggggacgccaaaaagcaagaggccgttaaaggggggggggaacctaaaaataaaagggggggggtaaaatggggcgcaaaacgcgccgccgggccgttaccagcccggggggctgagcaacgccaaaaccttggaaaaagagaagtggggggtcttgcgcacccggagaagagaaaccttggaaaacccctagaggccgctga

SEQ ID NO: 134785 - DNA, 268 bp, Zea mays
  Clone ID: MRT4577_54407C.1
gttggcgtgcgccatcccggccacgcccagcgccgacgacgcgccgcgccgcaggctgtcgggcgtgatggcgccccgctcccggaccgccagcagcctgaaccccacgcgcagctccgacagcagacccgccacacccagccgatcgaacatcaccggcaggaggtcctcgaactccttgccagaaccaccggctccggcagcagccccaggtcgaggacacgggcatgcgctcgcactaggccgtgcaagcgtgctcctaccctgc

SEQ ID NO: 134786 - DNA, 710 bp, Zea mays
  unsure (1)..(710): unsure at all n locations
  Clone ID: MRT4577_54408C.1
aattcggcacgaggcgctcacgcgcccctccccccgccgccaacgcccacgctgcgagcgcgaatccactcttctctacctcctcgtccacttcctagggttcctcctctgccgaatcgcggggaactctgcgggcccaatttggtagggtaatctcctaccaggaggtcaaattccagtcaacgccgcttggttttgtagccgaccggtcgatttgaatccaggggcaccgattggctgggtgagaagggcaggctcgatttgaacccgcctctgcccttttcgtggaagttttgggtcttattaggcgcggattactggggtctagggatgtggtagttactagctgcttgggttaggcggcgcgccgaggtgcttccgtgcttggctgactagtgtcaatggcgggatctgtcggcaaggccagggcggcgcttgcggtcgtccccaaagcggtacagcggcacggaccccaccgttgtctctggcgggcncgacgttgggcggatctgcagaggacggccgactggnaagaagttcttggttgaagcgggcctctatgagggtaaaaaaggagtccgcgaagcggnaaagatgtgctatccgagattggtctgatagtcaaggaatgggtgaaagcagttgactcgtaagaaagatatgctgagcaattggttgaacaagcaatgcaatcttttaatttttggtct

SEQ ID NO: 134787 - DNA, 388 bp, Zea mays
  Clone ID: MRT4577_54409C.1
gaatggtggtagggtagcacccacttggaatctattgaaattctgaagatacatggagaatatcttaaggattcatttttggacgaagggtacatatttatagaaaaaataccactatattcttttgaccacacagcactgggttgcatacaaattctctcacctagcgccaaattctcctttctgtcaatcagtccaacctaagagcccaatgcaatcaatttctgtttttatcaacaccctaaccaattagaattagcgctacattttctaaaagatcaattgcccatttactagctaaataaagtaggaattagcactacattttcctatttgtttccattgctctgagcatttgggctttgtttcccttcatattcatgtgcgg

SEQ ID NO: 134788 - DNA, 1210 bp, Zea mays
  Clone ID: MRT4577_5440C.1
gccggccgggtctcggcccgactggagactgctgttcccctcgaccctcgtccgtccgtccgtccgtcacctgacggctcccaaaccctaccccgcagatccctccccttcctctacccccgcctcgccgccggtcttcgtcacccgtcgccgtgcccgtcggcgcggtgttaagggtccgctacgctgcacctcgcggggagaaaggggtgggcctcggggacctccgccctccgcgcaaggtcattgaatgaccttctatacgaatatggatttgaatgcatcaccggtgcctgacgatgatgagcaacagccttatgatgattcagttgaggttgggtatgctcagacggaacatgttgaatctgctgttgcaacattgcgccgggagcgtgaagagagacgcaagagactaaagagagagcagcaggatgatgggtcaaggctacattcccagcagattaggaatgattatgctcctcaacccaaaagacatagtcgcattaaagaggcacctcagggctggctggactgccctgcatttggggaaccaatagataaaatcataccatctaaagttcctcttgacgaaacattcaatgagtcagtgcctcctgggaagcggtactcctcaaagcaactagttaacaaacaaagaaaagctggccgcgaaataggtctggtgattgatttgacaaataccacccgatattattcaccagcagaatggacgaagcaaggtactaagtatgcgaagattgcatgcaaggggagagatgctgtacctgacaatgaatctgttaataagtttgtctatgaggcaatgatgttccttgatcgacaaaaacaatcaaagaatcctaaatatattctggttcactgtacccatggtcataatcgtacgggtttcatgattattcattaccttatgcgcacacacgtctcttgtgttgctgaggcgattagtatatttgctcaaaggcggccacctggcatatacaagagggactatattgaagcattgtattcattttaccatgaggttcctgacaatatgatgatagcatgccctccaacaccagaatggaagagaccagatgatctcgatttaaatggcgaagctaagcaggatgacgatgatgacaatggtgatcctggaccactgcataatgaatcagaggataaagtcatcaccaatgacgatgtgtta

SEQ ID NO: 134789 - DNA, 360 bp, Zea mays
  Clone ID: MRT4577_54410C.1
cctttccatgtcatcgtatctccagccaaacaccgcacgggttcagagagagagtgaggcgggggcagaaattgtccgccagcgccgctgtcaacttcgcctgacagccgggcactcgcggggtgtctcgtgaggttttcgtggccgtccggggaggggacgaccgcggtagtgtctggaattcgacgccggactttggtctccgccgtgcaccgtgggcagccaggtctacgctttgggtcgcgtgcggtcacgaggatccgaagaatcaccctagtaactggaatctcaagtgccaggagaagaacaggtggttcaagtggagccacaacgaggagtttgattcgatctatgtagcgt

SEQ ID NO: 134790 - DNA, 130 bp, Zea mays
  unsure (1)..(130): unsure at all n locations
  Clone ID: MRT4577_54411C.1
cacccagctttcggaggcgggcaaacagnacaacncacgacaaggaccccgccacagagaaacaagggccccgaagggccaagaccacgccagcggcacggacacgaacacaccagggtttgccagtttt

SEQ ID NO: 134791 - DNA, 192 bp, Zea mays
  Clone ID: MRT4577_54412C.1
gctaatagttagtgtttaaaattagttggagacatacaaacaacctaactaatagtttaactattaactatttttagtaaattagttaatagtttgctagttaattccattagtaattttttagataactaaataaaggtgagacaataaaaacaccagtaatggggaattaaccactaatgcagtatcatg

SEQ ID NO: 134792 - DNA, 1427 bp, Zea mays
  unsure (1)..(1427): unsure at all n locations
  Clone ID: MRT4577_54413C.1
cattgggtacctcgaggccggccgggggccgcctcttgtcctcctcacctcccaaattgaaatcctcctccctccccgcctagggttccgcttcctcccccgtccgagcaccactcaagcggcggcagcagcggtggcagcctggaagcagtcccatctcgtcgccctagacttccctgccgccgcacgtctcagtttcttgttcgcccgctctcctgccggtccgcccatcgcctgaggttcttacggtgccacggagttggcaactgcaaggagtgatattgtggtacaacactagttctaattgaagtaataaggcgggggtgaaactgtctgctaccattgcttccatggcaactaatgagaacctcccgccaaatgtcatcaagcaattggctaaagaactgaagaaccttgatgagtcacctccagaagggattaatgtgattgtcaatgatgatgacttcactactatttttgctgacattgaaggccctgctggaactccatatgagaacggagtattcaggatgaagctattattgtcacgcgatttccctcaatctcccccaaaagctactagtggtgagatatgtgtaaacacactgaagaaggattggaatcctggccttggattaagacatgttcttctggttgtgagatgccttctgattgaaccatttcctgaatctgcacttaatgaacaangctgngaagatgttacttgaaaattatgaggaatatgcacgacatgcaaggttatacactggcatccatgccctgaaacctaagaatacgtccaagaccggagctatatctgagtcaaccacagctctgaatgtcgacaagtcaagtactgcttctagcaagaacacaccatcgatgccaccggcggtatctagctccactgcatccagagcatttggtacgagtttgcaggatcagaaccccactgtttctgatcctgctgtaggagctgcggcggcgcgaaagaaggatggcccaatggcttccaaagttcctgtggataagaaaaagctggatgcgcggaagaagagcttgaagagattataggcggaacgtcctgtgaagaagagatttagatgcttatttattaagctgggagagaaacaattaggggaggagaggcatctgatgacctggctttcggtagaaggggtccggggcggggccaaaggtgaataatgtaaagtgtgaactgggtccttcgggacaactgtatgtgcaatgcccaatcatttgaaagaacacttgcctttnnnnnnnnnnnnnnnnnnnnnnnnnnnnnnnnnnnnnnnnnnnnnnnnnnnnnnnnatcgttcttcaagtgcccagagatagggttgtttagactcttttcaagttgtccaagctatgaattgaaagtggccttcaatgcgcagagt

SEQ ID NO: 134793 - DNA, 1551 bp, Zea mays
  Clone ID: MRT4577_54414C.1
gattggggcctcgagccggccgggaaaaaaattaaaaaaaaaaaaaaaaaaaagttggttctcatcagggacgagcaaagctcgcaactacttcctcccctccccttccttcccttccggccgcctcttgtcctcctcacctcccaaattgaaatcctcctccctccccgcctagggttccgcttcctcccccgtccgagcaccactcaggcggcggcagcagcggtggcagcctggaagcagtcccatctcgtcgccctagacttccctgccgccgcacgtctcagtttcttgttcggccgctctcctgccggtccgcccatcgcctgaggttcttacggtgccacggagttggcaactgcaaggagtgatattgtggtacaacactagttctaattgaagtaataaggcggggttgaaactgtctgctaccattgcttccatggcaactaatgagaacctcccgccaaatgtcatcaagcaattggctaaagaactgaagaaccttgatgagtcacctccagaagggattaatgtgattgtcaatgatgatgacttcactactatttttgctgacattgaaggccctgctggaactccatatgagaacggagtattcaggatgaagctattattgtcacgcgatttccctcaatctcccccaaaagggttcttcttgactaaaattttccatcctaacatagctactagtggtgagatatgtgtaaacacactgaagaaggattggaatcctggccttggattaagacatgttcttctggttgtgagatgccttctgattgaaccatttcctgaatctgcacttaatgaacaagctgggaagatgttacttgaaaattatgaggaatatgcacgacatgcaaggttatacactggcatccatgcccttaaacctaagaatacgtccaagaccggagctatatctgagtcaaccacagctctgaatgtcgacaagtcaagtactgcctctagcaagaacacaccatcgatgccaccggcggtatctacctccagtgcatccagagcatttggtacgagtttgcaggatcagaaccccactgtttctgatcctgctgtaggagctgcggcggcacgaaagaaggatggcccaatggcttccaaagttcctgtggataagaaaaggctggatgcgcggaagaagagcttgaagagattataggcggaacgtcctgggaagaagagagagggtttagagttcagaatttttatcggaaactcagcagatgcttatttaagctgggagacaaacaattaggggaggagaggcatctgatgacctggctttcgggagaagggggtccggggcggggccaaaggtgaataatgtgaagcaactgagtccttcgggacaactgtatgtgcaatgcccaatcatttggaagaacacttgcctatttctttttgttgtcaaaaaaacaatcgttcttcaagtgcgccgggatagggctgtttagactcttttcaagttgtccaagctatgaattgaaagtggccttcaatgcgcagagt

SEQ ID NO: 134794 - DNA, 1588 bp, Zea mays
  unsure (1)..(1588): unsure at all n locations
  Clone ID: MRT4577_54415C.1
ccggccgggatcttgtccagggactcaatagatcagtaggcgattacaagggtggaagaaacatctagccttaacgttccaggctactgcctaacccctctaatggatagcagcagtggtagccaggacaagaaattcagagacaatgatcgccctgaagcaaaaggttcaccattttcttgctttgctttgttttgctttacctttgctcgctgcctcttctgaagtctgaacttgtagctttttagttagtaccattgtgttcaagataatagctcatatgactttgttatttcaagagatctcacaccaacatatattctaaacctccgtgctttattttctctccgtcccaaaaagaatacaattctagcacagtgttatgtcatagtatcgtaaatttgattaattatagataaaaaaagtaccaatatctatgataacaaataaatacgattagattattataagatgtgttttcataataaatttatttggagccataaatctaaatactattcactaaaaacgtgatcaaacatgaaccaatttaaccggcatgtaactcatagttgcattctttttgggacagagtgaatacatgaaaactaaaacagatggtaaacagtgaccatttaggatacactataactgacaaaaactgtggggacaaacaggacgccatgtgatttaccatctgaccagcctaatgaagtgcagaggatttagccccttcgaaatagggggaaattattcctaggaaaattgcaaattctcttggcgaacataggattggcaaaccataatatatttctatatggtttgttaatgtttttttttttcttactctcgtgatcaactatatcctttcacaattattgcagaagctaatagcaccgcacagcatcttgttgacttcacggaagcagaggaagatcttgtttccagaatgcacaggcttgtggggaacaggtgggagattatagcaggaagaatcccaggaaggacagcagaagaggtagagatgttctggtccaaaaaataccaggaaagatgaaaccgaggccttagatttatatagatgatatatgcaagcatgtgctgataaataatgttaaactgggcctacgatgttaccggtttttcagcctgtgcacatcttgttatgacatgatgctaattttgcaaaagcacagtaagaaaatttacagaacgtcagaaaatatcaatcatgttttagaagatgtgtaacagtatagtatgccttaagaaaagatgaattttgcctcttgcaacttaacttgtgtaccggcagaaaacttcagtaacgcagcttctcatggaggatgtgagctgttaccagcgaactttaaaaaactccccagtgtgtatggaaaagaaagattcagcatcagaaacaaattcttaactagtcaactaccagcgaaagttgtccacaagtaatttgaggagcatggcgctcacaatggctagcgccctggacatccaggncattaacctatactggtcaggttcgttctttctgaggctttgaccacccggatcgtatatgacatgtgttttgcat

SEQ ID NO: 134795 - DNA, 249 bp, Zea mays
  Clone ID: MRT4577_54416C.1
gcagcttgttggcgggcctagtgcacgccacaccgcgcatgagatttcgctcagcgagtcccatacggcctcggactcacagatccgaatagagaacttagtgttcctagacaggcattcaggcaaaatgttcatcaaaagctggggcgccgagagcccgaatgacagccccgcccgaatggagatcgagtcggagtaccggtacgacacgacggaccccgtgcacgacgccaaggacggcgccccccg

SEQ ID NO: 134796 - DNA, 327 bp, Zea mays
  Clone ID: MRT4577_54417C.1
ggatgtcccaagtatgcatctcggacctccgattagcgacaagacattgttttatggttgtgaaagataagagagcattattctagggcaaccggagactggttccatccataataatttcgtctaggatatcaaccgggatattcgtcaaatacaaagtcagcagttcagatatctgtttccgggcgttgtagacgtcagtctctttgaggcttttagggccactagtatcttcgttgtagcccattagagggtgcgttccagggtttgcataacccctagtgtctttattaatagccgccacatcctctgtagaggcgggttttg

SEQ ID NO: 134797 - DNA, 407 bp, Zea mays
  Clone ID: MRT4577_54418C.1
cttcagcgatggctccgatcctatctctatcggggcactgggtcgtcccatgcaggaggaagtccacgacgcacacatgctatcacacgctaggtgagtcaggaacagaccacagcatgaccgctaggctcgacctgcagcctgcttgctcgatccgtcatctgcctacatcattcacgccagtcgacatctctcggctgaaggtatgccgacggccatcgacagtgccatggcacacagagcattactacgctaccacgctcgacgaccctgatacccacgacatcggcgattgtgcagctggtactactgccaaccatggttcagcgatcaagcctactgacgttattatccatcgtcagacgatgctggatcgcggtcagacctatggctactccatgtgcact

SEQ ID NO: 134798 - DNA, 508 bp, Zea mays
  Clone ID: MRT4577_54419C.1
aattcggcacgaggatttcggtctctgtcccttgcaagttcaatctcaccttcaaccatgggtgacagagaagtccgacatcaacattgtggttgttggccatgtcgactctcgcaagtgctccaccacatgacaccttatatacaagcttggacgctttgacaagcgtgtgatcagaaaggtttgagaacgatgctgctgaaatgaataatcggaccttcaatgcacgtggttgcttgcaagctcaaggctgtatcttgagagacgtatcaccattgatatagctctggggtagtttgagaccaccacctactactgcacggatcattgatgcccctgaacaccgtgacttcattaagatcatgatcactggtaccttccaggctgactgtgctgggcttatcattgactccaccactggtggttgtgaggctgggctctccaaggatggtcctacccgtgaacatgctctccttgcgttcactcttggaatgaagcagatgatttg

SEQ ID NO: 134799 - DNA, 379 bp, Zea mays
  Clone ID: MRT4577_5441C.1
ggctcccaaaccctaccccgcagatccctccccttgctctacccccgcctcgccgccggtcttcgtcacccgtcgccgtgcccgtcggcgcggtgttaagggtccgctacgctgcacctcgcggggagaaaggggtgggcctcggggacctccgccctccgcgcaaggtgcaagtccaaaagaactgactacatcatatatgtaggtcattgaatgaccttctatacgaatatggatttgaatgcatcaccggtgcctgacgatgatgagcaacagccttatgatgattcagttgaggttgggtatgctcagacggaacatgttgaatctgctgttgcaacattgcgccgggagcgtgaagagagacgcaagagactaa

SEQ ID NO: 134800 - DNA, 224 bp, Zea mays
  Clone ID: MRT4577_54420C.1
ttgcgtacgtggtgtgcaattgcaacaaagtttctgttgtgcaacaacagcagctcagagacactagctccagagtcaggactaactactagccaaagccaagatcacacaacttccattccaagaccacgagcgcttccaaattgcgtgcttctcctcgcggtgcagcagtgtgtatgctctgcccgctactctgatcttagggggcaagcgcgactgccact

SEQ ID NO: 134801 - DNA, 516 bp, Zea mays
  unsure (1)..(516): unsure at all n locations
  Clone ID: MRT4577_54421C.1
cgcgccgcttttttttttttttttttttttttaaagcctnaaagaagagggaggagacggggccaaaaaacgaaaatttgatccaacaaaacaatgcgctgagaagacaaaaaaaagagcgagaataaaaaaaaataaacacaagaaaaaacaaaacaccggtgggcgtggagatgcgggcaccaggaacctatgcgattgagatcaggccaaaaacatttaccccgctaggtgcgtgntcacggggtcngggggggggggagggtgccccccaaccggtcctcctccgagggggggcgcacgcgctctctctcctccgtggtgggccggccgccgtgggcggggccaatctcctcaaccatccttaccacntgnaggggcgtccggcgcgcgtcnnggaccgtgggcacncaccccatgggcacctgcgggagcgccaccatctcctcctcggggctggggcgccagggcaccatcttgacgtcaaacacctcggggggccactcctcccggggg

SEQ ID NO: 134802 - DNA, 814 bp, Zea mays
  unsure (1)..(814): unsure at all n locations
  Clone ID: MRT4577_54422C.1
tgatcgatgaatagtaacggtgaatagtaacggtaaaaagtaacggtaaaaagtaacggtaaaaattaacggtaaaaagtaacggtaaacggtaaaaagtaacggtaaatagtaacggtaaaaagtaacggtaaaaagtaacggtaaatagtaacggtaaaaagtaacggtaaaaagtaatggtaaacggtaaaaagtaacggtaaaaagtaacggtaaacggtaaaaagtaacggtaanaaagtaacggtanaatagtaacggtaaaaagtaacggtaaanntagtaacggtaanaaagtaacggtaaacggtaaaaaangtaacggtaaaaaaagtaatggtaaacggtannaaaagtaacggtaaatagtgacggtaaatagtcgctcctcgcatagttcggtatgaacgaatgatgaacacgtgcgaaaggaactaagcaacgaagcaggaaaacgatcgatttgaatcgaacgcggacaaacgatcgaacgatctggcgaacggtaacgggaaccataaacgatcggacgaacgatcaaacgatcggacgaacgaacgatcggaatttcggcagcataacggcaggaaaaagattatttggacgaacgaacggacgaacgatcgaacgatcggacgaacggacgaacgaaccatgaacgatcggacgaacgatcgaacgatcggacgaacgaacgaacaaactaagaacaggggggcgaacgatcgaagaacgatcgaacgatccttgtgctagtgtgtgcttgtgtggaacatggagtgggtgtgtggggggggggaagagagttgcc

SEQ ID NO: 134803 - DNA, 269 bp, Zea mays
  Clone ID: MRT4577_54423C.1
aaaaaatgcagaaacttttagctaaagcctttgcaacttttttggtggcgagccgaaaagctcaagagccctttggtagggggcaggggcaagggcaagggccagggccacccaaaggcagagcttccccagaggcccagaccctgaaaacctgaaaccttacactgtcgcaaccaggcaaaggggagtttcaaccaaccagacccattacacattaactgggctatgcaacgctagcatgggcataaagctgatcgagcagatcaaag

SEQ ID NO: 134804 - DNA, 315 bp, Zea mays
  unsure (1)..(315): unsure at all n locations
  Clone ID: MRT4577_54424C.1
cccncactcagataacccagccgccgccgcatcggcctcccaggtaagcagtagcgtccaccccatccgccgccatgaagcgcaacccccgcgtcacgagctcccggcggaagtgtcgtaagggcacttacggccccgtcctcgccgcgcggctatgtcggggcttcgacgactcgccagtcaagggtcatcgtcagcacaggangggggacaagcggggagggggcgggtgaagaggacagagagagaggtactagagcagaggaggagcagggggtagaggtgatcttgggtgttataacatgttttttatat

SEQ ID NO: 134805 - DNA, 396 bp, Zea mays
  Clone ID: MRT4577_54425C.1
ctcgggaacaaaccaaccaactttctttgtctcctaacgacgcaacacgaacaagggcttccggtaccatttaaaacttgaccccaaactgcataatttgcatattgaatggaatgcaagctcctatactatagatgaaattctttcttccatacaacaacctcaagaagcatcattaaatcgttacctaaccatcgcttaccccttcaaccatcattctatatcaacgtctgccacaattttatgaaactttatctatcacctccctatccattcctttctctcaaactctatatacccctacatctctacaccaccatgggagccgccatccattgtccacccttagaaccctaaaaaagcacactctaaccatgaaaacaccacaaacccatc

SEQ ID NO: 134806 - DNA, 1085 bp, Zea mays
  Clone ID: MRT4577_54426C.1
atggcgttccacagaacaatggcacgctgcctatgggcaggcaagaacgcggccgctagaggcgccggcgcggccattcccaagcctccggctccccaccccccggcaccgcggtctctgccggccgtggacgactgcccgacgctcgcattcctgcggccgaggccgaccgcggtcgggtacgccaccgcgaccgtcccgctcccggcgcactgcttccccgccctccccgtcggcgaccacctcttccgccgcctccagctcgacgggcttatacctcccgtgagcacggcggcgcggccgccggagcttgtcggcgtgacggtggagcaggcgaggaaggtggcgagggcggccgagatggaggtggcgcgggcgaggctgaggtccaacgcccagagcgtcgtgtccgggtcggagttcgccgcgctctgcgtcgacattgccggcggcgtcgagggcggccgccggctggcccgtgcgctcgacgagtccggcggcgtcatcgtcctcggcgaggccgtcttcctctgccccgacatggtagcgaaggccatcgggagcatcctccccgtgaaacagcagcgctgcaggcgccgcgagccggagacgggagcgaggcgcgcaagcgcgagctggaggcgatggaggcgcagagggcggcgatcgacgcggccgcggccgcgcaggtgcgccgcgagctgtggtgcgggctgggcctgctggcgacgcagacgctgggcttcatgcggctcaccttctgggagctgtcgtgggacgtgatggagcccgtgtgcttctacgccacgtcgctctacttcatgtccggctacgccttcttcatgcgcacggccacggagccgtccttcgagggcttcttccggagccgcttcgcgtccaggcagcgccgcctcatgcgggcgcgcggcttcgacgtcgaccgctacaacgccctgcggaagggccaggggctggggctcgttccctcgccgaccccgacgcgtgtaggcacgtcagccatgcacaatagcgcgtcgctccgcccggacgaggccgcttggcttgtgccaggggggcacacatga

SEQ ID NO: 134807 - DNA, 134 bp, Zea mays
  Clone ID: MRT4577_54427C.1
aaataatattgctgaatacgaagccttggtcctgggtcttgggaaactaaaggccgatggggatcctgagggcaacccttacactgattctcagattgctttagcccatattgtcgaaagttgaccggctaaag

SEQ ID NO: 134808 - DNA, 502 bp, Zea mays
  Clone ID: MRT4577_54428C.1
caaagactgcaccaaagatacgactggcgattggtgcaacaacaaggagtgataaaggaatgatgcctgctgcgattgctcgctgtagcctatatggccgtatatctgagttttcacagtactgaaactatcattgctggatgggatggaggaagaaagctttctttatgaactggctatcttagtcggaagatcgtatcggattcctctcatgcagagagatgccggagcataaagagggaaagaatcttagagtccccagtccgtgctgtgctgttgctacgtggattccactctctctgtcggttcgtgctctcaatatcctggctgatcaccacgctcgctggccgtccggccgttacctagggtcctgtgtccaactcgctagtccgctcgctactcctcgctccgtactagccgccagccttggcggaatcgtcggcgttgccgattgctggggctaactgccattagttgccatgtgctcactgcctcctttccg

SEQ ID NO: 134809 - DNA, 431 bp, Zea mays
  Clone ID: MRT4577_54429C.1
gtcaacgtgatccatggcgaacccgacgcaagcccaagcaatggacatggacatggaccccgtccttcgcttcgctgtgaatactgcctgccctggctttcgtcttggactcgcattgcttgcggttaggtctagtttaaaggctgctgctctctagtctgtacataggtcttttgcttgtagttgtagaatagactcccaagatctgcatgcggtctagtttggacagcgccctcctcaattgccttgcctgtgccaatatgttggccggccaaactttggctgcccaagaaacgtccaactttggcagggaaaatgaactagcaagttgttcccgatgccaaactttggcaggcagccaaccatccaaacatacaggatgccaatagtcaacgcccttttttttaaaaaaaaaaatattataaaaaata

SEQ ID NO: 134810 - DNA, 5318 bp, Zea mays
  Clone ID: MRT4577_5442C.1
aagtagcctatagtggttgtttccacttaaataaagggcgggtaggctagggagggaatgtttacttttcttatttgcggggaaaagagttgatgccgctagcagctcagcttaggccgtacctacatgggctccagatcctccctgtcttcctgcagattctgattccagcttgccttgaatcccaaacataacgactacttgattcgcgccgggcgattccagttccagagtgatttagcccgcgcctgggacaagtggtttagtggactcttgagaagtagcttttcggatctctgggtacgtgttccacctttgtttgggcgttgcagaaagataacctgctgccagaagaaataatgcagaattgagtgaataaagcctttaaaccggtaccggtaaagtactctcgcgcttatctatttataggcccaacctatgaaacaaggttctctacctgtgtagatacggcaaacaaactctaccaataccaatccaccggaagaagcctgaacaatcacccagcaagagctttataggatgtttcctttcttagtcttagtcgaggttcttacaacgtggcttgatgcagtgtatatgtttttggtagtccagttcagagatatgacagggaaaaactccccactagagacaagaacatagaagagaataaaggcaagggtgtgcttcttctttctggagagactgacaataagagtagattagatcgtgtgcttctcggtgcgccgactacttcactgttacctacctatcattcactagaccgagtatgagtacggactgacattcactagaccaagtcagagtagggggttccattcttcactacacccaatctgtaccgactcccattaattacaggttacgagtgtggaaagacttcttactttattccattcactactggttaagtaagcatgaacgtagataagagaggagtcaatggaactcttggcttgtgaacaagtgacttctttcttttcatagactacactacagactatcaagcactagaaaacaacaggcccagttacgtacgagtcaggcaattgtctaccctcacgaagcaatgagaaaaggtaggtgctgatgtgctagtatagaacataagtaagaaagcatctatttccctataatcaccgacgttggtatttgcctacaccccattctatgaaaaactccgcaactccaaatattcgatataataggaaggccattcactttaagaggcgggggagctgcatagcgttgccttcagactggtattagcaaatgctttgttgatctgaaccgaacaaagacacatctttggtgcagttttcctaaaggcggctcacagggaagagatccgttttgtcaatcagcaaaaccagttttcgtagtgatgaaagaaatttccctcgatcatgtgttctcggccctgtgactggtaagtcagttcaggcaagagatgatggcgggtcgatcacgatttagtcttattgataattgagtatacgtccgcctaaggtaaggtctggttagaaatccttaggaacaagaaagggcacacaatcaaagccagaggtcttcgaaccttggtatttcgaatcagattgatagctttttgaatggcagcggttccgggactctaatctttcgtttacaggttctacattaggttcacgaaacctatctacacagcaagcttcttcaacaggtcattggacatcaccctcacttcttctagcaggaaagcgcgttaagaggtaagatcgtgcctcaagtcaaagggcctcgttatagttggaggcaacacacgctgaacaaacctcaacttgcctattttgtgtaactggaattcggctcgaggttcccgtcgaccggattcggttcggaccgcagctccccacactcgtccgtccgcccgtcgaatggcggctcccaaaccctaagccacagatcccttcccctgcctcagcttcgaacgccctcgcctcgccgccggtctttgtgtactgccgctgtgtccgtcggcgcggatcaagggtccgctccgctgcaccccgcggggagaaaggggcgggcctcggcgtcctccgctcgtcgcccgagtgtctgagtactatcaggtgcaagtccagccgaactgattgcatgacatatgaaatagcgagcgtcgaatgaccttctctatggatatggatttgaacgcatcaccggtgcctgacgatgatgagcagcagccttacaatgaaccagtggaggctgagtatgctcaggaggaacatgttgaatctgctgtcgcaacattgcgccgggaacgtgaagaaagacgcaagagactaaagagagagcagcaggatgatgggtcaaggctacattcccagcagattagggttgattatgctcctcaacccaaaaggcatagtcgcatcaaagaggcacctcagggctggttggactgtcctgcatttggggagccaatagataaaatcataccatctaaagttcctctcgatgaaacattcaatgagtcagtgcctcctgggaagcgatactcctcaaagcaactagttaacaaacaaagaaaagctggtcgtgaaataggtctggtgattgatttgacaaataccaccaggtattattcaccagctgaatggacgaagcaaggtactaagtatgcgaagattgcatgcaaggggagagatgcggtacctgacaatgaatctgttaataagtttgtctatgaggcaatgatattccttgatcgacaaaaacattcaaagaatcctaatattctggttcactgtacccatggtcataatcgtaccggtttcatgattattcattaccttatgcgcacacacgtatcttgtgttgctgaggcgattaatatgtttgctcaaaggcggccacctggcatatacaagagggactatattgaagcactatattcattttaccatgaggtccctgagaatatgatgatagcatgccctccaacaccagaatggaagagaccagatgatctcgatttaaatggcgaagctaagcaggatgatgacgacgacaatggtgatccagaaccaccgcgtaatgaatcagaggataaaatcatcaccaacgacgatgtgttaggggacgaagtgccatatgaccagcaagaagctttgcgtgtgctatgttataagttgcttgaaatgccccttataaggggacattcacaatttcctggatcacatccagtttctcttaacagtgaaaatctgcaactacttagacagcgatactactatgctacatggaaagctgacggaacacgatatatgatgcttataatgagagatggttgtttcttgattgatcgaaatttttgctttagaagggttcagatgcgctttccccataagagccttgaaggtctgcatgatatgaccttgattgatggagagatgattatagacacggtaccagattcaggcttgaagagaaggtacttggcatatgatcttatggcgcttggtgcagtgtccaaaactaagttgccattttctgaaaggtggaaaatgctggaagatgaaataatacgaccacgttattatgagaaaaataaatttgagagtggttctaagagcaatccgttgtacaaatatgacatggaattattttcggttagaagaaaagatttttggctgctctcaacagtaaaaaaggttcttaaggtgttcattccatccctttgccatgatgctgatggccttatatttcagggctgggacgatccatatgtaactcgtactcatgaaggtctcctgaagtggaaataccctgagatgaattctgtggactttctgttcgagcttacgaatgataatcgtcaactggttttcctttatgagagaggaaaaaagaaactcatggatggtgcccggatagcatttactgacgatgtagatccatcctctatcgccgggaggattgttgaatgctcctggaataaggaagaacagtgttggtcctgtatgcgtattagatctgataaatctactccaaacgacatcaacacataccggaaggtgatgaggagtatcacagataacattaccgaggaaaagcttctcgaagagattgatgagataagtcttctcccgatgtatgctgataggatgcagcaggctcatacaaagatggcacaacaacagcggcggagattgccaccacagtgctagccagtgctggggcgctctcctaccgccctagccagctgctggcttccgtagctgtgtaattagtagaggtttcagtagccccatatgatgatggctggctgggtctggcctgccaactaattctttgcacctcatttgtgtcttctccctgccctcccacccacctgtataggcgtcgccgcagagtagtttccctgtaaattgtgtactctatgttctcccatattctcccctatggttttatttttcatgggtgtagaatagcgtttaacaagagggtggtgttctaggtacattagtgtacgcgttactatctctcggtgttgcggttgccttgtgctagaataaatatggttaccatctgttgctgatgggtcatgtggttcccccggcggatatcatgtggttgcgtggtatgggttatcgtcttctgttttgttcgcacctgacgggatcatcatctatactagttcattcatatgagtcgcagatgatgacaatggtgatcaccactgcataatgaatcaagtcatccctgatgtgttaggggatgaagtgataacagctgaatcggttgctgaggcatgcacacttttctggatcacaatcccggataagaaaagcttctccacgcggacgccaaaataaaagtaagagccccttgaaaaagaatttgaagtggaagtggaaggggagcttgttcctccatcggaaccttctccaactgaggttgtcactgaaggtcctccaaaaggtgtcccatttggatttgctgctaactgcaatatcctggtcgaagaacccgactttcctcctcaccaaggagaaactatcaacacatatgagttttgttaaactcataatggtgacttttacttgtgtacattatgtgggtgctgcgggaaaatggtttcttcccagttgatgtaataagttagccctttaactctacctcgggcatgtaataataaatactttgtggtttgtaaacttataagcttgttaatgtatattatcttattgtaaaaacttccgctctactcctgtttttaaaagtttatgttcttgactggttaccgccctttt

SEQ ID NO: 134811 - DNA, 448 bp, Zea mays
  Clone ID: MRT4577_54430C.1
ctagatcgcgagcgggccctttttttttttttttttttttttttttttttttgtctgtttttggtttttatgattgtttcatctctgaagaaagcggattttgttttttgctgaccacgatgcacctgatgcagcctttattaaaacagaaccaaaatttggggattgggaacttttaacgacaaaacaggggcaaaaacaccccattcaaaaaatgggggaatgaaaaatttctggatcaaagcaaaatccgtaaaaaagcactgtttatttgggtccatggaaaaaaaaacttaaaattgatcccctttttattgaacgatggttttaaaaattttttttgccaaatataaaaaaattttggctatatccaaggatattccattgtcattaaaaatacctgtcccttggacaaaaggggggcttttcaaccgaaaaaaaaaaggaa

SEQ ID NO: 134812 - DNA, 114 bp, Zea mays
  Clone ID: MRT4577_54431C.1
tcaagaaccagcagccaaaggacaagacaagagacacaacgttaggaaaggacccaagagaaagatcgagaagagaggagccttcgctttttgacttgcaccgtcgtgatctgt

SEQ ID NO: 134813 - DNA, 535 bp, Zea mays
  Clone ID: MRT4577_54432C.1
aggatggtttcttacaggtggataggcttctcctcaccctctcgggtatgtctcggcttcgtgaggttctccggggtcctcacctcggcaggaatggataaaaatgagagcgtaatcatgggagtaccgatgattcgtaggctcgcgcgcactgggccacgctgcgaacactcccatgacaaggtcttcagcacctacgacgacgtcctcaagagcaatatcatgaccaattgggagacgaagaggccgcgcgcgttcagtgtcatcaccttctcctcggacgaggggacgccaaaaggcttctattcgatgaaaggccaggaactggacgcgcgatacatcaccgccaacgaatcccagtcccgcgaggctgcgtgctagagcatgtccgggagtccacacggtggctgcactggcaaggacaaggctacctggacgtctgaaggctggaggcaagaaggctgctatctctgccccaaggaataatgcgccgatgtttgctgctactgtgaaggaggacaagtactactccgat

SEQ ID NO: 134814 - DNA, 206 bp, Zea mays
  Clone ID: MRT4577_54433C.1
gctgtacgtcgtgggacctgcccgggtgcggtactgcagagtgcacatgcggctaatataaagtggtgcgtgcgactgggtctcgtggtcgagtagtggggacacgctgccccatgtgtgccgcttcagcttgcgtctctggtatgcttcatgttctctgtctatctactctcatgcgtggcacacaaaaaaaaaaaaaaagaacg

SEQ ID NO: 134815 - DNA, 590 bp, Zea mays
  Clone ID: MRT4577_54434C.1
gatgaggtattgagggatatcgtgtcgacgccgacgtcgccgccgcaaccgcaacaatgccggcgcacaagaccttccggatcaagaataagctggcgaagaagatgcgccagaaccggtccatcccctactggatccgcatgcgcactgactataccatcgagtacacgccaagcgcaggcgctgagcgccgcaccaagctcggcttctgaacgccggaattgttcgtctgctgcctcaccaaggctatgatctaatgagctatcttccttctgtttgatcgatgtggcatcttctctgcaaactaccaagtgtggcgatggcgctcttattaagattcagtctgcattgaagttgactggatacaattggcactactgctggcgtaccccaagattcctctgcatattgctatgctaaaataggagccctttatcccagccatacctctgtaagtgccctacgcacctcgatatccttctttcgataccggaaaacaaggctagaagggcgctcgcaggagtcctgcacctacctgaaggctgtgatcagatgttatacgatactcatcccgcacacaggatcattgc

SEQ ID NO: 134816 - DNA, 321 bp, Zea mays
  Clone ID: MRT4577_54435C.1
ggaaacgagaaacgaagcgctttttgtcccctccatgccatgtcacaaaagatcccggtcccttttttacaacccacccaggtgggctgggcttgccccctctttacttttaggggggaattacgtaacaacacacaccattgccgggggggagtgcttccgtttccattttaacaccagggggtccgcccgtccccggtgtgcccttttaggctgaacgtaacgcacaaatattgggcgccttttgatggggcaccggttcttcggagcccttactactagtggggttaacgggggggggggtggagtggaccgtttttg

SEQ ID NO: 134817 - DNA, 450 bp, Zea mays
  Clone ID: MRT4577_54436C.1
ggccgcttttttttttttttttttgtcataaaaatcagagtattactacatagcggaagtcttattacaaaataaaagaataaatataaaacgaactaaggatcgtcggcgccaatgtcaactgagaaacgccacctagatcagatcgaactcctcgccttgaggctcctcctgaaccacctgatcttcaccagagatccctcgcgccggccactgcctgacgtggaagccccaagtccgtgcggaggcactgcggttcttccgaccaacggtgcacccaggcgaacgcgcccgaccacccagcagcactcaaactacggcggcaataggggcagccgtgcaccagaggtcagaggaggtgcggtgccgggtcatggcggcagacccattctccctctctctcctatctctcgcgttccccggcagctgcacgcactttttcccggccgg

SEQ ID NO: 134818 - DNA, 220 bp, Zea mays
  Clone ID: MRT4577_54437C.1
gtggcggcacgagtctccattaccccccgctcccaactagtcaggactcaagaggctcccctcctccctcgccgcggaacacgcgcgccgtcgtcgccagcccgggttcatttctccgttccttggtgcggcggggggggggttttttttttcttggcgctctatcggggcctcaccgcagtctcgatactgcgatcacgcatggtgcaggaggccacca

SEQ ID NO: 134819 - DNA, 1495 bp, Zea mays
  Clone ID: MRT4577_54438C.1
cccgccccccatcgcctcgcgccccatccgcgcccccgggcgccgctgttgcccacgcgtccgcaggcctgccagccagccgcctttcgaaaccgagcaccagggagcagacgcggtctctggaacccaggttccagcgagcaaaccatctaaccaggcgctgagaattctgtgcggaggaggcggatggcaatggtggcggcggcggaggggagcgggcgcagggacgccgaggcggagctcaacctgccgccagggttccggttccacccaacggatgaggagctcgtggtgtactatctctgcaggaaggtagcgcggcagcaggtgcccgtgcccatcatcgcggaagtggatctttacaagttcgatccgtgggatctgcccgagaaggcgttgtttggtcgcaaggagtggtacttctttacgccgcgggaccgcaagtacccaaacggctcgcgccccaaccgcactgccggaaaggggtactggaaggcgactggggccgacaagtcgatcgtgcccatgggcagcaccagggcggcggggatcaagaaggcgctggtgttctactctggcaaggcgcccaggggcgtcaagacggactggattatgcatgagtaccgcgtcgctcaagcggaccacaccctggggaagaagggctcacataagctggacgagtgggtgttgtgccggctgtataacaagagaaacaattgggacaaggtgaaggtcgaggagcaggagttggaggcggcgccgcgccgacagcatcacttgcagagcgcggaggattccatgtctaacagtttccagacgcacgactcggacatcgacaacgtcttcgagctacaaaattgctacggtaacaacatggtgcaagggcaggccatgacccccaggaacgacattggcgtcgtgacggtgaaggaggacaacgactggttcaccgacatgaatctggatgatttgcaggcatcctacaacatggcccatacggtgaatccgaacccggcccaaaccgcgaacctggtggcagggcaaggccatggctacttgcaaggctatggctacttgcagtacatgaactcaccgtcgatgaagatgtggcagacaatcttgcctccgttctgagtgtccacgatgaagatgagtgtccacgatgaagagatgctcttgtacataaggggacataggagtgactagactggaatagaaacaacagggtatgattctgtatctataggcttgtaacgtttattcattcgttagataatacgtatgtggttggtaataccaaaaaaatgcatctccctttgcactacttgaagaaagcacaaagttgtagttctcgtatctcatatggtcggtctaaatcgattctgatcttcatgtgatgtgatatatattatatgttcgcacatttatttaaagatgatgaaatggtaggggtaacattcagtggacggatataaataaaaccatgtgattctac

SEQ ID NO: 134820 - DNA, 883 bp, Zea mays
  Clone ID: MRT4577_54439C.1
caagtacccaaacggctcgcgccctaaccgcaccgccgggaaggggtactggaaggcgactggggccgacaagtcgatcgtgcccatgggcagcaccagggcggcagggatcaagaaggcgctggtgttctactctggcaaggcgtccaggggcgtcaagacggactggattatgcatgagtaccgcgtcgctcaagcggaccacaccctggggaagaagggctcacataagctggacgagtgggtgttgtgccggctgtataacaagagaaacaattgggacaaggtgaaggtcgaggagcaggagttggaggcggcgccgcgccgacaacatcaccgacaaagtgcggaggattccatgtctgacagtttccagacacacgacttagacatcgacaacgcctccgagctacataattgctacggtaacaacatggtgcaagggcaggccatgaccgccagaaacgacattggcgtcgtgacggtgaaggaggacaacgactggttcaccgacatgaatctggatgatctgcaggcgtcctacaacatggcccatacggtgaatccgatcccggcccaaaccgcgaacctggtgacggggcaaggccatggctacttgcaaggctatggctacttgcagtacatgaactcaccgtcgatgaagatgtggcagacaatcctgcctccgttctgagtgtccacgatgaagagatgctcttgtacataagggggcatagaagtgactagactggaatagaaacaacatggtataggcttgtaacgtttattcatttgttagataatacgtatgtggttggtaataccaaaaaaatgcatctccctttgcactacttgaagaaagcacaaagttgtagttctcgtt

SEQ ID NO: 134821 - DNA, 123 bp, Zea mays
  unsure (1)..(123): unsure at all n locations
  Clone ID: MRT4577_5443C.1
cgctactgcatctgaggctcatcaatccgtgcagtcacagagcacttcgtcttcccgctactcncgcaagggggctcgnacgttccttctccggggagtgatgtgcacttctggtagagcgag

SEQ ID NO: 134822 - DNA, 221 bp, Zea mays
  Clone ID: MRT4577_54440C.1
aatgctagaagcgcccctcttcctctctctctctctcttcgccgtccgaagatccggaccccaatctaatctacacctcgccgagatggcccgaaagttcttatgcgtaggcaactggaaatgcattggaaccacagatcctgtcgagaagatagccaaaaccctgaatgaaggacaggtgcccccttcacatgtcgcggaggccgtcgtcagccctcctt

SEQ ID NO: 134823 - DNA, 2903 bp, Zea mays
  Clone ID: MRT4577_54441C.1
gtttttccttctctttccgcttccgccgaggccactctctttctctctctgcgcctgcgcctttctcttctccttctccttctccctcctctcaaccccaacaatctctgtctctccatctcctctcgacaaggcggcctcaacaaagtcccaccgcacctttctttaatggagcgagggtgagcctaacaagcactctcgacacacaggaggaggtgctgcccgcttctcccctccctcagtctcactcgctccgctctcctccccgagaccaggaggccaagccaagaaccgcaaaccctcaggccgtggccatggcgcaaggagcaggacgggacccggaggagctcttcgaggagctgtggcgcgcctgcgcggggccgctcgtggagttgccccagaccaacgagagggtcttctacttcctccagggtcacctagaacagctgcaagagccgacggacccggcgctgctggctgagcagatcaagatgttccaggtgcccaacaagatcctctgcaaggtcgtcaacgtcgagctcaaggccgagacagaaacggacgagatgtacgcccagatcactctgcagccggaaccagatcaagtggatctaccccaattacctgaaccgcccctgcaggagacgtcaaggcccgtggtgcactccttctgcaagatcctcacaccatccgacaccagtactcatggcggtttctccgttcttcggcgtcatgcaaacgaatgcctcccagcactggatatgtcgatgccgaccccgacccaagagctcatcacaaaggacctacatggatctgaatggaggttcaagcacatatacaggggccaaccccgtcggcaccttctgactactggatggagcacgtttgtcacatcaaagaagctgattgctggtgacgcgtttgtctacctgaggagcgagaccggacagcagcgtgtgggagtgaggcgcctcgtgcagaagcaaagcacaatgccagcatctgttatatcaagccaaagcatgcatcttggggtgcttgcaagtgcatcacacgctattaggactcattccattttcctagtgtattatagaccaaggttaagccaaagccaatacatcgtcaggctgaacaagtacctggaatctagtaaaattggattcgatgtgggcatgaggtttaagatgagttttgaaggggatgacgtccctataaagaagttttctggaacagttgtcgataaaggagatctttctccacaatggcaaggttctgaatggaagacattgaaggtcaaatgggacgaagccacaaacttaaatggccctgagagggtttcctcctgggaaattgaaccattcgatgcatccgcacctgccatcaccatgcccgtgcaaccatcaatgaaaaacaaaaggcctagggagacagctgaaggcctggatattcatgcactggaacctgctcaagaattctggctctctggaaggcctgaacagcatgagaagacaagcgtaagctccagcgaacccaaacatcaagtcgcttggacaagtgaacgcgcaggatacagtgccatgagcagttcaatctgtcagaattctgcagtaactgggagctggttcaagggcttcaattcctccggctcacacccttccctgccagagatctcccagaaactgtttcaggtcaccagcaacgacgcgagggttcctccttggcctgggctctccgcttatcatgctgacgagccctcttccaagctgtcctgcaacactgctctgtgcagctaccagaccgaggaggtggctccaagattttccaatgccgtcgaagaggaaaagaaggagcccggcatgttccgtctgtttggcgtcaatttgattaaccatgctaggagtagtgctaccgctgacaaggcgagtgtgggagcaggggaagcatcggcgcgagctgctggttcttttgaagactctgctcagctatcaagagtgacgaaggatcatacgcacatggtgaacggaagcccccgagaaatccaaagccatcagagttgcagtggaaggagtcgtatcaaggttcaaatgcatggaaatgacgtgtgcagagctgtggatttgggaaatctggatgggtacgagcagctgatgggtgaggttggagtgatgtttgagatcaaagaccttggctccaaagagaaagaggaatggaaggttactttcactaacgacgagaatgagacaatggaagtcggagctgttccttggcaggagttttgccagatggtgaggaagatcgtgatccattccattggagacaggggccatatggaggcttgcccttgcctggggcaggatgggaagagggactattagaagaagggattttttttttggctggggcaggcaggagatggttgctgctgaaacatgatggcgtagcttgtcgatgacgaagaaggcaacagattggttgctggcgtcagttcttccttgagaaaaaaattcagtggaaggaagaagtgatgtaacataggatttgcagaaaagatttgataatgcgtcttttagaagtttggtttggtttaaagatgacaagttaatgtgtgtctagtgatctgcctaaagccttagcgacgggcaacaagcaataacaaggatggatgatgaccttaccttgggtatgttagctgtgtaaatattatgtatgtatgtatgggacattaaattggttggcatacttgactcctgatttatattgtacgtagtgtgttgcagtgctcaggattcagttgtgatgtaccactattacaagtagtagaaggaatctggtttttagtccaagaatcaacatcatatatgtcaatcacaggcacactagtgcgtaattttagtctttttctg

SEQ ID NO: 134824 - DNA, 170 bp, Zea mays
  Clone ID: MRT4577_54442C.1
aaactatccagctacacgacctgccgctgcagggggctacctgggattatacccccctactactggctaatgttattcggtactatcagctatatccatccctttcattctatccactatatacacgtgaacccacgcacgctcactcggattcgcgggccgtctccatt

SEQ ID NO: 134825 - DNA, 246 bp, Zea mays
  Clone ID: MRT4577_54443C.1
gcatgaaccaacagctgccctatcttatgtggctaaggcaaacgggttgccacaggctgaggtcataacggatacacacactagcttgcagcctcgagatactactacatgtgcatacaaggtaaagctggtatgcgcaccttgttcatagactagttgaccacattagcgataactgccaaatgaactgctttatgcgccagctgtatcagcatgacctagagactgctttaggaacaaggctgc

SEQ ID NO: 134826 - DNA, 145 bp, Zea mays
  Clone ID: MRT4577_54444C.1
atgatagagctctagctcataagcacgtcctgtggtgggcgccgtcgatgattgcttgctggctgaacgctcttgggtttgtcatagcatgtggcttgcacggcggggtttggtgtagtcgtactatcgtggctgtgccaggcgc

SEQ ID NO: 134827 - DNA, 814 bp, Zea mays
  Clone ID: MRT4577_54445C.1
cgtcctcagcttcagcgccttggcctcgcacgccgcggccgagcccgcctcctccgactccgactccgactcctgactctgactgggagttcgcgttcgcgccgccgccgctgtcgccgcgcgacgccccggcggcgttccccaagtccgcctccacggggacggaggcccgccgctcctggcgcctgcgcgacctcgtggcggcaagcgaccgctcccgcagcgacggcaaggaaaagttcgccttcctgcaacccggctccagcgccagccccgccgcaacgccgaagccgtccggcggcaagcgcgccgacgccaaggccgcggcggccctgcagaagcaggcgggcaagaagaagaagaaggccggcgccaccgagatggacatggccaccgcgcacaggctcttctacggcaagcccggcgccgccgcgctcgccggggacaggacgaggcagccgcagcagcagtcgtacctcccctaccgccccggcatcgtcggcttcttcgccaccgcgcacgcgctcggccgctcgcacaacccctactagcttattaccttcattaattagtttagcttcccgccggcggcgcggcgatcacctccggagataagggcatgtacagtgggtgtcttaagttgtgtcttagagtgtgtctaggggggtgaatgtaaaaaatctcaagacacgtatcttgacgaagacacagtgtcttagctctatattcgagaaaggagactatctgattggtcactttaatttattgaatgttttgattggtacaatgaatatgataagacatgttttagaca

SEQ ID NO: 134828 - DNA, 294 bp, Zea mays
  Clone ID: MRT4577_54446C.1
gccggccgtcttcggagcgtcttttccagtcatcctcttcctctatcctcctcgcattattcacacgcagacacgcctaatgtctgggcagtctgcggcacgcgctaagaacgcaaatccagtagctctacgctcggagccgagagccaccgagaggtgctgctgtgacgacgtctactgaattgcccacaccgccatcccgcactatctacacgtagaagggcttgactgacacactgtccgctagtcatctacaaagctgaccctgatgcttgatcgagatctatactctcc

SEQ ID NO: 134829 - DNA, 283 bp, Zea mays
  Clone ID: MRT4577_54447C.1
cccgtggcttgcgcatgccacattgggctgtttctgctccaaatacatgaacccaccctggcattcacactggacatggacacgagcccagcagaccgccggaacatgaaaacgggggtcacagtacgcggtatagacaaggaatggttaacgaaatgcggggtgtccaaaaaacttcgaccgccggcgactggcatgtttatcgggcaatgcaaccatggggtgaataacaaacggacccggaggacacgggagcgctgttctttttcataaccttaaatcc

SEQ ID NO: 134830 - DNA, 594 bp, Zea mays
  Clone ID: MRT4577_54448C.1
atggactatcacctgcacacagtttcagccccgtcgtcgcatcagttccaagaaacaaaagggaaacatggaaaaagtcaagaaataacttcaagaaaagcttgttatctatgtggacgtgaaggtcattacttccgtaactatcttgagaagagttcactaccggatacctctgagataaagctatcccagtctctagacatggaatatgaacaaaaatgcgtagaaacttttatcaacatagtgaagaacaacaaaaggtatagaaaaacatttggatatatgagtagtccacctcaaccacaagcaaaagccccgaaaaacatggatacccaaacagaagaatcaagccagactcagctatatgagatacagacccccaatcatccctcattcccgattggtcaagcaaagttgactcgcaaagaactcaatgcaagaggtgcttgcttctactgcaagaatgaagaacatattattcatgaatgccccaagaagcgtctagaccgactaaagaagaagacggtgaagcaagacccaaacaataatccagaagaccaaccagttataagtacgatgatgaagattggttga

SEQ ID NO: 134831 - DNA, 463 bp, Zea mays
  Clone ID: MRT4577_54449C.1
gaagggagaaggctgtagggaaaacccctacatcacgaattttattaataataaataagaacagaggggaacaaaaagagaaccgaaagggaggttgcctccggtttttttgctcgacctccaaaacaatcttgatccaacacccaactccgattttttgcccgacctccaaaacaattcagaccacgaggaagagggttcgcctcatgtcatcattgccgagccacatctcctaacatggcaacttcgacttcacgttgcaaaccccacctccacccgcaatccagacgccgagaagcaaaagcatcaaccggaggcaacgtcgaggccaagacaaactcaaacgtgacaccttcagggagtgacgtctaggacaccaccgtcacatgtccaatatgaaccaggctttcgcccatggaagacatagcaatgcaacaccttttccaggggaagtgggccccac

SEQ ID NO: 134832 - DNA, 417 bp, Zea mays
  Clone ID: MRT4577_5444C.1
gtttggcattactggactgatgatggtcttggatactatgaatttcttcagcttgcggaggacctggtgtctgtaccaatctggatattcaacaatgtagtcagccacaatgatgaaattgatactgttgctattgctctttttgtaaagaatgtattggtcagtatatattttgcaaggggtagtgcaaattcaacatgtggctttgttagggtttgaatggtccatactgaaccattctcagtgaaatatgttgcaataggaaatgaagattgtgggacttccagttactgtatgcagacactttattgggagtatagaggtgctatgttacattcaacgacaattagtttcagctactcatgattacttgcagctgttgcgattacctggcttgactacgagaacagctttcta

SEQ ID NO: 134833 - DNA, 367 bp, Zea mays
  Clone ID: MRT4577_54450C.1
ccggccaaaaaaaaaaaaaaaaaaaatcctcttacattaaaaaaaaaaaaaacaggtcatagctaagcaggtctgacaggatgtcgtggcagacatacgtcgctcagctgcgtgtcctccagctgctcctttgctggccggttgcgcccgaccagggcgctagagaggcttgcccctgtcaggtctgttggaggtggtctacgaggggagggcccgcagctctgcggtgtcttgactgggagggcggcgtctgcgagcgcgtctctgctggagcagttcgttgggagagagcggttcatggtgagtaaactggtcgggctggtgaaggcgcaggggtccaagcatggtcggtaggggccgcttgtga

SEQ ID NO: 134834 - DNA, 795 bp, Zea mays
  unsure (1)..(795): unsure at all n locations
  Clone ID: MRT4577_54451C.1
acgttctggcggaggagtgctgcagcgcggacctgctggagtggatcggccctgacgtctcagcatgcgtcttcggccgccttgaccaccccgccgacctcgtccgcgccgccgctgtctccagaacctggcgcagatgcgtggtcgagagcggcttgagcaagagcctttgcctgcggctgtgccccgaggtcgccaccgtcgccgcggcggcagaggtggccagatcgccgccttcaaccgccgcccatgaatcaggccacgagagggactacaggatatactccaacctcgccggcgcctacgtctccgactccgccgccaagccctccgcggaatgcatcttggactgcatcggggcctccagcaccgacgacttcccagcagagaccatggaaaacaccctcgacgaggaggagattatcaatttccgcccgtcctattggtcgagcggcggggcggacgacccggaggcgccggagagccttacctacaggctcaactctgacatctgcattgtcgatgagattcgggtgcggccgtaccaagccttttttcaggatggtgaccctatatactcttcaaaggtggtgcgatttcggatgggccattacaagcttccgcgaggatcagagacgtttgtaatggatgattatgagaataagatggtaaatgctgatgaaaaatacatgtggacttacacttcgccagagttccctatgttacaganaaacgaactacaatccttcaagctcccacgccccgtcctttgcattggtggtgtggtgatgattg

SEQ ID NO: 134835 - DNA, 481 bp, Zea mays
  Clone ID: MRT4577_54452C.1
gtcgataactaggtcatgccggctcagatgtggaacaccgcctgtgaggagaggtgccgggctatcacgagcgcggtctaccgatgtgcagtatgagcgctaggcgactaccacgtctcgctgcacgtgaccttttagaacttatagaggtggatgaggtagctcacggaccacacatgacgcctacatgatgatcatgctggctgggaacaaggtgaacatacgctacactgatggctgaaccgagacgaagacgtcaaggcctttgtgcagagggagaacgccttcttcatggagacgtagaacctgtaagcaatgaacgtgcatggcgctttcatcaaagagctcacccaaatctaccaattcgtgagctagaaagcactcaacatcggtgatgacctggctgcgcttacaagaggccatactgtatgtggcggctgcaaggacgatgtgtccgcagtggagaagcctgcctgatgat

SEQ ID NO: 134836 - DNA, 235 bp, Zea mays
  Clone ID: MRT4577_54453C.1
cttcgcttgactatccctaagtgtacgaagtaggctttttatgtggacgaggtcttaaatcgcgctggctttctactgaaccgcgtgtgctttgtccacgcggagctactcgacagttgccgcggtagctacccgggactccccccgtccgcgcttccgtctacggcacgatcgctctcggtttctctcctacgtcatgtcctttatcccgtttctagtgtgctcagttcttgct

SEQ ID NO: 134837 - DNA, 1252 bp, Zea mays
  Clone ID: MRT4577_54454C.1
cctcgaggccggccggtttgacactgagactagagagtggcatgggttgccccctttaccacttcctaggtatgcaccagctactcagctttggcgtgggcggctccatgtgatgggtggaggcaaagaggaccgccatgaacctggattggagcattggagccttgctgtcaaggatggcaaggcactggagaacgagtggcgagctgaagtacccataccacgtggtggacctcatagggcgtgtattgtagctaatgataaactatttgtgattggtggacaagagggagactttatggctaaaccaggatcacctatttttaaatgtgtacggaggcatgaggttgtgtatggcgatgtgtatatgctagatgatggagcgaagtggaaggaactgtctccaatgccaaagccagattcccacattgaatttgcatgggttgtcgttaacaactccatagtaattgttggtggaactacagagaagcatcctatcaccaaaaagatgattcttgttggtgaagtcttccgttttgatttggaagcactgacctggtcagtcattgggcgcatgcctttccgaatcaagacatccttatctaggtactgactactgagaggggaggggggctctgttttacttctgggcagcgagatcatgggcctgacaatccagctccaaagaaagttgttgggagtctgggactatgtggagaacgaggctgcacttgtgatggcagaagttgtgacagtttatttcccctaaaaattgtagatttgcatctgatttcctgttcaacagctaggttcctttcagagaagagagttgcttgttttgattcccacatccggaatctgaagttcagagatgtctccaaacaaccagaagatatgtacgtaagcaactaccaaagatcattcttattggagatattcagcgcaaagcccacccaccaaataatcatgatgttcttctttccctagctgttgcagagaggtcggaactgtttgggctttcactagccaattaaaatattaagtagcaagctgagtaccatgtcagtattaaatctgtctctgtaattgcctccgaaattggtgcgtgtttctcatcttgttggtttcttagtatatgtaatctgcacttagaggtacaatataggtgcacaggggcaggacctgtacttaaatgttagaatacctgttcagggtttggagtttttcccgtgtaattactatttcacccctt

SEQ ID NO: 134838 - DNA, 125 bp, Zea mays
  Clone ID: MRT4577_54455C.1
gtgggaaagcgggaatatctatcccattccattaaacacaacacagtaatccggcttgtaagaagaaagagaaccctatatgttctatactcgaacagtgcccatatcaaatggggacccccacc

SEQ ID NO: 134839 - DNA, 437 bp, Zea mays
  Clone ID: MRT4577_54456C.1
gaccggggcgggacccaccgcgtccggcaaagcggcatggctgtaaagagggatctttctaactagacacagcttgtaagtatggtcatcggttcttctgtcgtgtgccctggctcatgtcagcatgcacagcgcctctgcaatgcattatgccctgcccctgtcgcggggcatgcagggactcgtacggtcgctggctgccggccctgacgacgatgatgtggcgccggcggtgctgtaccccctaccgcggagtaccttgaggcatgccgcagttgcatgcccgcttggcgggcggcgcctctactactgccgggttgtgtggcagacgatgcgccatgtaccatgccgctccggcaaccagtgctgtcagcaggcagatgaggatgatggacgtgcagtccgtcgcgcagcagctgcagatgatgatgcagctt

SEQ ID NO: 134840 - DNA, 107 bp, Zea mays
  Clone ID: MRT4577_54457C.1
aactggtcgcgctcacggtgcgcgccgcggcccagcaagtgcctacgtgtagccgcagctccctgtacacggactactacagccagtcatgggagcgcgccgacagg

SEQ ID NO: 134841 - DNA, 532 bp, Zea mays
  unsure (1)..(532): unsure at all n locations
  Clone ID: MRT4577_54458C.1
cacatatcaccgtatctaaacatgactccagcatgacggagttcgggtacatatacactncacacgtagtataaggtacaagatataatcagacagagagggggggggccaacgttgctagctgcagttgataataattctcctcatagtacagaagttttagaatcactaattacacgacgattaccaaattattatgcagaaatttaaggatgcctaagacatattaatcgaaggttaaataataattgttgtaatttcatcactttgttcgcacgagtaatagttaacaaagtcaatgctaatgcgaaagagaagttaattagtacttttgctgctgctaaaaaagtgaagaagaagaagaagaagaaagtattattattagtagtagtaataaaaacgttaacaactaagggagaattattattacgttaagaagatgctaaaagtcaacgtagaattcgttattatactattacagatattagacatgaagttctagtagttactacaatacgaattctaaattgta

SEQ ID NO: 134842 - DNA, 264 bp, Zea mays
  Clone ID: MRT4577_54459C.1
aacaaaacctctctattttaacaccacactaacacacataggggatgagttatacttaattatatccctacctaaccctttcacaacacactaatcacccctcataattaattctaacttcccccacatttaacaatactttcaaacacattcacagttccttcaccaaactaacatcaccacaaaccccaagaccccactcaagcaacacttccaacaaacccaaaccttctaataatcccttatacaacaaccacacacacc

SEQ ID NO: 134843 - DNA, 352 bp, Zea mays
  unsure (1)..(352): unsure at all n locations
  Clone ID: MRT4577_5445C.1
ccgactaaccaacgccggagaagaggggcgcgngaaccgcgcgcagcgnaagggggcggggnccgngnncaagnccaacccaccacggagggccccgcccnggnccgttccctcgacttcngcaagcgcatggggtcgtngggggcgtnntnaccgacgtnatncacgaccccggacgtggaacgccgatcgccaaggtcactttnnnggcacccattcaggtacaagcaccagaaggagctntttgtngaaggcgagggcatgtacacgggccagtttgtttactgcgngggnngngcgaacctgtggatggggaacgtggtggccttgcgggggatccctgagggtgccg

SEQ ID NO: 134844 - DNA, 193 bp, Zea mays
  Clone ID: MRT4577_54460C.1
aattcggcacgagggggaaagggggactgctcctggctcggctggccccgccctcctttctttgcacgatagagggcgagcccaggcaccgtattgagtcctcactgcgcggagtctcccaccaagaattcctggcgaagaacgctccgtctatgttgcacccgtacctcgaggtgaacaacgtgctaaacct

SEQ ID NO: 134845 - DNA, 274 bp, Zea mays
  Clone ID: MRT4577_54461C.1
tttcacgggacctgagacgtgcttctgttagattacacactcgtgtttctgacagctgcccgacactgtcatgagcgaattacatggaatgtcatcctttgtagtttacacaccattgcatgcacttcactaagcctcattgacataccgggcatatactaccgtaatgaggtttaactctatagccaaatatgatgatcgacacaatccacttaatattatatttacctacttttacattgtcacgtggataagtcccttgatcctgtaaaaa

SEQ ID NO: 134846 - DNA, 341 bp, Zea mays
  Clone ID: MRT4577_54462C.1
taaaaacattgccactatttcattatccattacgtattcttattcttcaaataacttcatcatatacgggttatttggaaattttgatcactctaagaacactcattaactcataatattctatttttgattcataattcttacctttcaccctcatttcacaaatcttaacatttattcaatcattaattcttattaactttcaaaaatcaattctatatttctctattattattgaactctttttccccaaactttcctcaacactgaacctatttcacacttttttatcattatcaataccctattctcatataatacaaacatcgttttttcttttc

SEQ ID NO: 134847 - DNA, 535 bp, Zea mays
  Clone ID: MRT4577_54463C.1
cctcgaggccggccgggattgtgtcgtattcgtatccaccgcattctcgtcccgagtacgcaatcatggctcgactgttagccaccgccgcgctcctcctcctcgtcctctccctcctcgccgtcgctgcactgcggtgtcctctcagtcgcagtatatgatgacaccgagcccgaatcagccgccgccgtggccgtcagtagacgactacgtgctatccgaccccacggtacacgctgagggggtcaccgccatggccactgaagaggaggtcatcccggtggagcagcatcagcatgggtatcgaactcctccgtctgtctgtctcatcggctccaccaccaccatcacctctggttgaaacgccaccacgggatctaccgcgacgcgatcgcgcaagttcccttgttctggccactgcgcgaggctgcgaggcgctgagacaccttgtcatcttgtccgcgtccgcacaggtgctcatggaggatctcggatgagatgcccgtggacgaagcgaacccgcatcgctccctcc

SEQ ID NO: 134848 - DNA, 422 bp, Zea mays
  unsure (1)..(422): unsure at all n locations
  Clone ID: MRT4577_54464C.1
gcggtcgccaccccnnaataaaaacnanagaaaagnaagacgacaaaatgtaacaataaaaacgacggggggaaaccgcccacaccagcagcaaaggcgcggccgaacccacagagaaaaagacggaaacaaccccagcgcacaaagaacaagcgcccgggagggaagcaaggacgcggcgagcctagcacaagcctaaccaaacacaagcagacttggactgctggtgaaccagcagctaaagcacacaagggagaagcccaaaagcatgcaaaagccagcagacaacaccagaacgctacaaaacatggcaaagcagtcaacggccatctggaaccagccgcagcaacatcttcatcagaaccggccaggaacgaacgcagctcaaagtcgaggctggaaacaaccaacgcaaggagccg

SEQ ID NO: 134849 - DNA, 225 bp, Zea mays
  unsure (1)..(225): unsure at all n locations
  Clone ID: MRT4577_54465C.1
gccgaccaggctccctcgcttctgttcgcggccgtcctcgcgttcctctgtggcgcttatcgncagcgccatatccgtcaccttcacactgggctacatcccttcctacctgtatgcgacgactgggtggactacccacaccctatcttacgcgggcgaagagcgctcaccagtttgcttggatctttaagcttcggaagatgacgaggtggacagagaattctg

SEQ ID NO: 134850 - DNA, 1320 bp, Zea mays
  Clone ID: MRT4577_54466C.1
tctagttctagatcgcgagcctagactagtcgctagtcctgtcaacccccttctcttcctgacctcgccttcaagttcatgtccccatcgtcgcccatgggcctgctccactggctcgcctcgccctcgaccatggcctccaaccatcgccccatttccccgccgaccgcacggcctgccggtcgccggctcctgccctcccctaacttggtcgacaccaactttgcaacttctaggtgaattgtccaaggagatagatttactaagcaatggtacatattttgaagaggctgtcaagccagggaagtggcttaatccaacagattggaggaggagagcccagtgtcgttcgagatcgaggcctcatgaggcaaattcgaaagcaaggatggcgacgacggtggcgatgatgacctcgacgacatcgtccccatggacacccaaggcacgtttcccattcaaggattggtgagttgtccctgcaaaggttgcatttgatcagaccatctggtctgtctgcaataagcacttctcattcagcatctccaagattgtatcccgagtcgacgatgagacgagcaaagactggagacttaatttttgtaccgtactgtatattagatctacattgctaatgtttcctctggtgtttttcacaggatctaaagtgttttatgttttcgctattcagtctccacttcaaggtcaagcctgttcagacatgagctccattcccttgcctatggttattacagtaatgcaagtgagtgtcaggaaaccatgtatcatgtgagtttatcatgagcagtttgtatactttgtattccaatctccacttcaaggtcaagactattcggatatgagctccattcccttgcctatggttgttacggtaatgcaagtgagtgccaggaaaccatgtatcatgtgagatcatggtaggtgaggattcatcgtcatcttgtccacctgatcaggataatgaagtgcaggaaaaggtcatagttgctcgtactcttgcaagcttgaatcaagcaaatagttgcaaggttcttaaatctccgtggatgatacctgattaccatgtgttgctacaatttttatagaaatcgtagttacccaaccatttcaattctcgagaaaggagtccctggatgataactgactaccatgcaatgttgtgtgaatgtatgtacacagtgcacacttagttgtgattgaaagccggaagggagatttgtgttacagtagttggctaagattttctggtataaccagcacaaattaataaatatagcgttgttctttcacatttaaggg

SEQ ID NO: 134851 - DNA, 412 bp, Zea mays
  Clone ID: MRT4577_54467C.1
aaaacccccgggggggaattttaaaacccgggcccttgggttaaattatcaaccccaaaacttggaccaggacaaataccccttttaacaaaaaattatttcaaggggggcgggaaagggacaatccccaaggctaaggaccaaaaagggccacagccagccaaaggaaaccgggaaatgccaacgggatggaaaacctgggggggaaacccctggcctaaaaagggcacccccgggaagtttatggcaacggcccaccgaatgggcggttaaaacccccgatttggcggtttcccgaagaaaccccaggccttaaggcaaaaaaagtctcctcccaggttaaccaaaaaaaataacggggttgggaataaaacaatgggggggccaaatcttgggaaaggggaaaaggggg

SEQ ID NO: 134852 - DNA, 182 bp, Zea mays
  Clone ID: MRT4577_54468C.1
accttcacctccatcgagtggctgtacccccttcggcctaccgcacctgcgacggcctgcagaattgattcccaccttgagcagacccggctgtcgctagggctgttctaaccttcgaccaactgaggcacctgtgcttcagagtgatgctgagtgctaacgcgcaacagtgcgccctacca

SEQ ID NO: 134853 - DNA, 426 bp, Zea mays
  unsure (1)..(426): unsure at all n locations
  Clone ID: MRT4577_54469C.1
agcagtggtaacaacgcagagtacttttttttttttttttttttttttttttttgtttttttgttttttttttttttttttttttttttttttttttttttttttttttttntaanaaaataaagctccataaaaataggttaacaaaacaactgtttgatttattttaatgggaaaccccggtttcaaatccaaccaaaaccattaaaagggccccaccgaagtgcacgcaaaaccttcaactgatggccgcccccccccccatggcaggttgacatctttccacaggccccccaacccntccnaaaaaatgtttttccccccccntgtcatcncgtccccantccatctcgttccgcctacctggncccccgccccatttttcctccctttcccttgnccctcctcntgcccctctttttcccc

SEQ ID NO: 134854 - DNA, 367 bp, Zea mays
  Clone ID: MRT4577_5446C.1
gcgattggaccggaacggactaacggcccggcggtctggtgttgatcattgtgaggacatgcccactccaatccatctgcccatggtgcgagtgagcgcatcttcctcgagagatgctgtcaatctgacagagcagagcgagaatgatgaatgaccaacctgacagggcgatgcaacatataagatccaaagtttggcccaagatcctcaacgcaccatatgtgtgtgggatgaccacttggaccgctatagctgtgctagctcctgacatggagactcatagcacatgctggcagttgctgcctgtggaagccgtttcctgaatcatcaggtgtgcgagcatgaaactgatagtggatcaagctct

SEQ ID NO: 134855 - DNA, 373 bp, Zea mays
  Clone ID: MRT4577_54470C.1
ttgtaggggagttttctagcacattcaagatggggcgctcgggactgcgagacaagctctacgctatagggacaattaaaggctacaaaatgtccaagtggaaacaacgcgagagactgtgaaatctttagatcgacggggttgacaccaatgttggacacatcgtggtacgatgagttgcgcatagagaacatatacacggttaagacgaatagcagaacgactcggtacaggtgcatctgaagtaagggcactctgtagcacggtaacttagaccgtggatcgtcgaagttcaagtctaaactaccgcctgagtacatggggcgcatagggagagtgcttatgtacttcagcaggatttaaaggtaagttt

SEQ ID NO: 134856 - DNA, 727 bp, Zea mays
  unsure (1)..(727): unsure at all n locations
  Clone ID: MRT4577_54471C.1
ccggccgggactcaataccatcgttttcatggcttctcctctgctctcgtgcattttcttgtgcttctacctttccactgttcatggcgctggtgaagacagctttgtgacggtgccatccagctcttttgagccagagtcagtttgctccggagagtttgtcaaaccggagcaaaacggctccaccgtgtatgtcccactagtacaccggcacggtccgtgcgcgccggcgccgtcgctatccacagacacgcggtccttcgctgacatcttccgcagaagccgtgctcgcccgagctacatcgtcaggggaaagaaggtgagcgtccccgcccacctaggcacctccgtcatgtcgctagagtacgttgtcagggtgagcttcggcacgccggcagtgccacaggtcgtcgtcatcgacaccggcagcgacgtgtcgtggctgcagtgcaaaccgtgcagctccggccagtgcttcccgcagaaggaccccttgtatgacccgagccactcgtcgacgtatagtgccgtcccttgcgcctccgacgtgtgcaagaagctcgccgccgatgcgtacggcagcggctgtacgagtgggaaacagtgcgggtttgccatctcgtatgcggacggaacaagcacggtgggtgcgtacagncaggacaagctaacgctggcgcctggggccatcgtacaaatttctacttccggtgtggcatggcaagca

SEQ ID NO: 134857 - DNA, 533 bp, Zea mays
  Clone ID: MRT4577_54472C.1
gccggccgggatgcggacgcgtcgaccggacggtctctcttacgtctctcccgacgcgcctccacggccggccccgccccgccccgcctcgctagactcctcccactcccagtaccagcccccgcccctccagcaccaccagcagctcgcctgcgaaccatgagacgggtacgcaggagacctgcagggcgacggaacgacgcctcggcccgcaatggcggggcaggccatgagggaggttcaggccaacggggcgaccgacgccgggggcgccatggtgggggaaatcagcccgctcaacgaggccctgaggcgggacagcaaggtgctcccgcagcgtttcttttttgccgcccccacccccgacgtgtccggcaagatcacgtgaaaggacctctgcgtcaacgaggaactggaacccggtaagacgcagaccgtgctggacgatgtcaccggaaacgcggaggccgagtcgctgaccgcgctcaagggggcctcggaaggcggcgagtccacccggctcgacgaccaca

SEQ ID NO: 134858 - DNA, 299 bp, Zea mays
  Clone ID: MRT4577_54473C.1
gccactgcgtaggtaataccagtgaatgtatcagcggctgacctatcaccctgaacaagaaggggggcttccatcaggatatgaacaaagcccttaaggacgcttccgagaggacactcagagacacgctcggagcctctcttcgaggagctgggccttacccacttccttggccacaatgtgtcgaacatcgtctacgacaaggccgataacatgcagatctaccactgcaccaaggtcgacacctgtaacgacagccagaaggaccacatcaacggcatgattgacctccacaccac

SEQ ID NO: 134859 - DNA, 335 bp, Zea mays
  unsure (1)..(335): unsure at all n locations
  Clone ID: MRT4577_54474C.1
gaccagaaagnnnaaacctggcggggtacctggctgttcattctgctactagctacgtgaccacacaggagctcactattgatagtggcctgtccatttgaggcttttatgatcctgccaacagaactacagagtcaagcacaacgacaacaaaaaaaggacatcagacgctacagaacgcatcaaaagactactcgaatttgaaaacaaactgcatcgataactaaactgaaaaatcattgttaaaaagaagctattcatgggagagataaataaagctaatcgtcttgcttcggaaaaaaaaaaaaacaaggaaacctttacacataaaaata

SEQ ID NO: 134860 - DNA, 269 bp, Zea mays
  Clone ID: MRT4577_54475C.1
catcacattatacaaccttcctaacaacatccttaacaacttaccacttctcactctatctcttaaccacacatccgtctcctagttccaatccctacaccattacctattcttcaacatctacattcaacttctcctatttcctttcaactcctccctcaccatcaccctctactacctttcatttcaattccacactcactactaaatctacttccaattccttatcaacatatccctctatccctacactcttcacaccaacattt

SEQ ID NO: 134861 - DNA, 731 bp, Zea mays
  unsure (1)..(731): unsure at all n locations
  Clone ID: MRT4577_54476C.1
ggtggtacgcctgcaggttccggtccggaattcccgggtcgacccacgcgtccgggcactcagaacaaaggttttggctttggtactggttttggcacaacgacgggaactggcactggtttaggcactggcttgggaaccggacttggatttggaggatttaatacccagcagcagcagcagcagcagcagacttctttaggtggtctcttcagtcagccgacccaggctcctgcacagtctacccagctcatcaacactgccagcgcactttctgctccaacgctactgggggatgagagagacgccatcttggcaaagtggaaccagttgcaggccttctggggaacaggaaaaggatatttcaataataacattcctccagtggagtttacccaggagaatcccttttgccggtttaaggctgtaggctatagttgtatgcccaataataaagatgaagatggactagtagttttaattttcaacaaaaaagaaacagatattagaagccagcaacagcaattggtagaatcattgcataaagttttgggaggaaaccagacccttacggtcaatgtggagggcattaagacgttgccggatgatcagacggaagttgtcatttatgttgttgagcgttctccanatggcacctcgagaagagttcccagcgacacactgtatgcccactttgagcaagccaacattaaagcccagctgcagcagct

SEQ ID NO: 134862 - DNA, 674 bp, Zea mays
  unsure (1)..(674): unsure at all n locations
  Clone ID: MRT4577_54477C.1
gtaccgggcccctttctcggtttttttttttttttttttttttttttttttttttttttttttttttttttttttttttttttttttttttttttaaaaaaaacccgggaaaattttttttggccggggaaaaaaaggaaccctaaatggttttaaaaacccccgggaaatgggttttaattaacattgggccccggggtttttttccaaacccccaaattttttttaaaaaaacccaaaaccctgggggaagttccttttcccggccaggatttggggggtccccgaaaaccccctgggccccctaaaagtttcccccccctgttcttcccaaaaaaaaaaaaaattttcctggaagggggccaaaagtggcaaaaaacccgggccctttttttttaaagggggtcctttgattcgggggggggccggtttttggggttaacccctttataaacactgggggcccccccaccatggattttggaaaaaccgggtttttttccccggggggttttaaccccaactggggaaatttccccgggtttttggaaaaaaagcccttaaaacggttcccccccctttttttgggctcccggtcccttgggctaaanttaaaggggggcacttgaaccccccttttttaaaaacttgaaaagggaaaaaatttttcaaaa

SEQ ID NO: 134863 - DNA, 237 bp, Zea mays
  Clone ID: MRT4577_54478C.1
gttccagaccgtgtctgacttagtgtaacctaggagattttatagttttattttaatgaaaccctgattgacgcacagcagtggggagaacagcgtcttttacctgtcaccgaagccaggaagccccgtttgtaagcgtgtgttgtggtgctttattgtacatcctccagtggcgttctttttactctaatgttcttttggtttcccccctcagaagaatcatgaatttgcaacaga

SEQ ID NO: 134864 - DNA, 556 bp, Zea mays
  Clone ID: MRT4577_54479C.1
tttttttttttttttttttttttttttttttttttttttttttttttttttttttttttttttttttttttttttttttttttttgggaccaagggccaaccaatttcccgaattgaaaaaaaacggggcgggggggggggaaaaacaaatggttaacgggccggggacttgcccccggccaagggaaaaaccccaaaggtcccaacctacttttaggctaggcgggccctttaggaaattaaccccccccccttccttccttccttgggcaagggggaaaaacctttttgccccgatttttttccccttggggaaaccggacttacttccccccccagccaatgggggggccaggggcttgggccccctaactaaaaagggaaaaactcttttagtaacaaaaccaccacccggcccttaagggaaaaaaaccctgggttttttttgcaaaggcagggggggaaaaaaggggcgggggtttaatgggggcacccaaatccctgggggggagccaaatccagggggcggggggacccttgggtctttaacccctgc

SEQ ID NO: 134865 - DNA, 332 bp, Zea mays
  Clone ID: MRT4577_5447C.1
ccggccgggatccggcgctcgtagggctatgtacctgaatctttgccagcgctcgcagggaggcggcggcgcagcgctcgtagggaggcgcgacattcgcatggaggtagccccgtggagacgctgccctggcttgccatagaggataaggtcatcctaatttttctgaattgcatgaacgatctaaaaggtcacgtgatgtaatcggttacatgcagtttagcatttctgtgagctatgcagtgatggaacgcactgcatcttcataaatttccttctcaacttgcagcctgactggaagttgacctaaaaaaaaaaaaaaaaaagcggcc

SEQ ID NO: 134866 - DNA, 457 bp, Zea mays
  Clone ID: MRT4577_54480C.1
tttgttgcaacgtgtggctgtggcgccatttggagggccttagttgcggacttgggatgatggggctggactccgtgcggattaggtaaaggtttggttatgatgaaggggattaaaggatcatttgctgatgctgcgtcatctgctaaggaatcaatgcaagagtcgcaagctgttgcactggccttgctctgagctttccaggtgcaccacaaactctgattcagagctgcttgacctttgggactttctcttacattattgagaagctaaacaagcaacaacctgcgcttggcgctcctgcctgcgacaggtgatggatccgaaggctggacaaagctgtcttcctcccttcacacttcctcctttggataccatggacgaatttactaagtttcaaaactttttgctatccaaattttcgggaaactgagttatcctggtggagtgacgccta

SEQ ID NO: 134867 - DNA, 1190 bp, Zea mays
  Clone ID: MRT4577_54481C.1
accgaacagcctcgcctgtggcgccaccccgcagctgtgcagacgacgcgatcagaaggcacgaagatgcgcatggcggtgcggcctgctcgcgatagaagcagcactcaagacacacacgcgcgcgaacacgaacagggacacgaggccgcggcggccatggcgagaggcggcggcgatcggagtcgggaggatgaccccttctccgacggcggcaccaccgaaaccgactcggacgagtcctctccgcgtggggtgggggcccgcggtcccggctccacctccaacccgatcctgacacgcctcgcggtgtcgcggaacccgagcccgctggccgcggccaccgcggccccaggggtctgcctcctccgcttcgcctgggagtccgccgcgggctccctcgtcggcgccgtcgttggctacggtaaaggtttggttatgatgaaggggattaaaggctcatttgctgatgctgcgtcatctgctaagatatttgctgttcttgctggtgttcaaagtttagtagcctgctctttgagaaaactacgtggaaaagatgatggtgtttattttatttctaggaatcaatgcaggagtcgcaggctgttgcactggccttgctctgagctttccaggtgcaccacaaactctgattcagagctgcttgacctttgggactttctcttacatcattgagaagctaaacaagcagcaacctgcgctggcgctcctgcctgcgacaggtgtgatggatccgaaggctggacaaagcgttcttcctcccttcacacttcctcctctggataccatggacgaattttctaagttccaaaactttttgtcatccaaatttcggggaaactgagttatcctggtggagtgacgcctagttatctactctggaacgtgtccttgtaaatgcgtcaatggtcaatctgagttttttttccccttgtttattcttcgccaatgtatgtttccaaattccaaggtagtgttttggtagtgttgatgattctaccttgacatatcgaacacaatttgtaaataaggcgagcagcttgtcctttgttcaactgattggatcttcggagttttacccacagaccgtgccccgtaagaaggaagaacatgcaccttgattcttacgagtgtgtgtggcagaacattgtttcttaactgtcttttgc

SEQ ID NO: 134868 - DNA, 995 bp, Zea mays
  Clone ID: MRT4577_54482C.1
accggctcctcactctcctcacagcgcgtcgtcgcccggtcgccgtccgtcccaccaccggatcccgcccacccgccagatccaggtgtccagatccccgaagggcgaaggcctgaacccctgcgcatatccccatggagccctcgccggcgcaagcgggcgcgtcggaccgcgaccgctcgccgcctccgcccccgccaccgccgtcccagtcgtctaccgcagcgacgatctcatcgccgctcgccgtcgtctgcagtttctggaaagattttgatttggagaaggaaagaagtggattggatgagcaaggtttaaagattgcggagaatcaagaaactagtcaaaagaacaggcgtaagcttgctgagaacacacgggatttcaaaaaggcatcatcagatgagaaactcagtttactcaattctttgctgaagagttatcaagaggaagttgataacctcacaaagagagcaaagtttggagaaaatgcatttctcaacatctatcagaagctctatgaagctcctgatccatatccagctcttgcttcaatgactgatcaagaccagaaattgtctgaactggagactgagaaccgtaagatgaaactagagcttgaagaataccgtgctgaagctgcacacttgaagaaccagcaggcaacaattaggcgacttgaagagcgtaatcgccaactggaacagcagatggaggagaaagtaagggagatggttgaaatgaagcagcgaagcatggctgaggatagtcagaaaactctagaagccctgaaagatagggaacggtcattgcaggaccaactaaggcaagctacagaaagtgtaaagaatatgcaaaagctacatgaatcggcgcaaagccaattgtttgagcttcgcactcaatcagaggaggatcgagctgcaaaggaggttgaagtcagccttctgatggatgaagttgaaagggctcaagcacgattagtcagtcttgag

SEQ ID NO: 134869 - DNA, 1988 bp, Zea mays
  Clone ID: MRT4577_54483C.1
cgcgagcagcggggcgatcgacctcctcgaggacgacggaaacgtgcgtaccataccatggcgccgagcaagctgcgccaggcgctgggcgcggtgaaggaccagacgagcatcgggctggccaaggtcggcagcggcggctccctggaggcggacctggacgtggccatcgtcaaggccaccaggcacagcgagtcgttccccgccgacgagcgccacatccgggagatcgtcacgctcacccgcctctcccgggtgtacgtcggctcctgcgtgtcctcgctgtcgcgccgcctcgggcgcacccggagctgggcggtcgcgctcaagaccctcgtcatcgtgcaccgcctcctcgccgaaggggacccggcgttcgagcaggaggtgttctacgccacgcgccgcgggacgcggatgctcaacatgtccgacttctgcgacagctcccgcgccgacgcctgggacttctccgcgttcgtccgcaccttcgccgcgtacctcgacgactgcctcgagtgccggatgcagggcaagcagcagggcggtggtggtgccgccccgcgcggcggtggcaggccgctccacgaggagatgtacgcatcccccgggaaccgcttcgcctgcggcatcgccgccttcaacgggagacaagaggacgcggcggacgccgaggcacagaggacggtggctctcgtggccagggacccgcccacgagagagatgacggtggatcagctgctcgtcaaggccaaccagctgcatcatctcctcgaccggttcatcgcctgccgccctgtaggcgcggccaaggcgaaccgagtggtgggggtctctctgtacccgctgatcaaggagagcgtgcagctctactgcgagctcacggaggtgacggccacgctcatcgagcagttcgcggagatggagaccgcggactgcgagcgcgtgcacgccctcttctgcggtctcgccaagcagatggaggagctcgagacgttctacgcgtggtgcaaggtcgcctgcgtgtgccgccagtccgacgtgccggaggtggtggaggccgtcacgcagaagaagctggaactcatggacgagttcatccgcgacaggcacgccgcggactcgcagcagaggctctcgccgccggatccggagccgatggcaagcccagagccagcccccgtcgaagaggacaacgacgacatgaacgcgaccaaggcccttccagcgcccgaggagccggcggcggctgcggcgcaagaggaaagcacagccgggaaagccgagccagatgcctccctcatcgtggccgacgacccggtcgaggaggaggccgacttcctgaacctcagcgcggacgccatgtccggccaagagcacgggcggcagctggagctggcgctgttcgacggcaacgcagcgccggaaggcagcgtgttccaaggctcctcggcggactgggagacggagctggtgcattccgcgagcgcgctcgcgaatcagcgcgcccaactcggcggcggcctcagcatgttggtgctggacgggatgtacaaccacgcggcggcggcgaccaacgcgcagacgacgttctccggcagcgccagcagcgtggctctgcggccaccaccagggccgcacatgctcgccttgccggcgcctccaggaggcggcagcgccgtagcgggtgcggaccctttcgcggcgtcggcgctggtgcctccgccgacgtatgttcagatgtccgacatgcagacgaagcgccagcttctgacgcaggagcagcagatgtggcgacagtacggcaagaacggaatgcagcagggggcattggcaatgccaaaccagaatcaacagttgctaccacacgtggggcacaattacgcagggtatcggactacatagattaatgacctgcagatgtaattcctcctgcgaccacatttcctccagtgttcgaagaaaaggcttcggagtatcagatagtc

SEQ ID NO: 134870 - DNA, 392 bp, Zea mays
  Clone ID: MRT4577_54484C.1
aaaagggggacatttcggaaagggtttaaaaaaggggggcccaaattggccaaaaaaggggaaaacttccaaaaaaaaaatgggggacttcttcccaaaaattttaaaaaacggttggttttccaaaatttaaaaaaagcccttaaacccttggaggaaaaatatggaaaactttcttaaacccttttttaaaacaacttcaaaaagactttttagaaacaccggcccaaaaagcaaaatttccctcccccctgggggtttcaaaacctttaaaaaaaaattccttttttttaggccccttttaaaagtgaagcctaaaaaaaaaaaatttttttcagggaaaaatacccccaaaaaccccccggggggggggggttttccaaaaggggggg

SEQ ID NO: 134871 - DNA, 584 bp, Zea mays
  Clone ID: MRT4577_54485C.1
gggccacaaaaaaatcagttttttttcttattgcagtggaaaactgttttgacaaaaatgggtgtataacacaaaaattcggaagcacatacaagtgtaaaactaactgtcgcctactaaagtgcgcacatacaaataccacaggtgtgcagttcagcaaaccaagtcaactgtggaccaaaaaattgctggagcctaaaagcgttcgttaacacgtcgatgggcacgggcatattttgcaccaactatgttaacctactatctcccgatccgtgtgtttttttcttctcgggtctctgtattcagaatttcagatcatatgaacggccgtcctgtacagtttaccgtcagcgagctacagcaggcaccgctacgtctttacctgccttcctcgtggtccgtgagggtgatgttgctgatcatcctgcaggacgactcggcgaacgagtccgaagacacggcgaggctgctgatccggacgttgtagtaggccggctggcggggctccggcatggtgaccccctcgctccccagcatggccaccacctccgacatgctgggccggtcgtcggcgctgtcctgca

SEQ ID NO: 134872 - DNA, 280 bp, Zea mays
  Clone ID: MRT4577_54486C.1
cctcattatttttattttttttttttttccgctcttttttttatctcggggtggtttttatcttttttttcccgcaaaaaaaaaaattttgtctcatatagtcagggtccaagaatcctaatactaattcttttccaaaacaattttcactcacaaagggggaccatcttcccctttcttccaagggttaaaggaaatcttttctcttcttccccccacaaaaccaaaggagtaggctgttcttttaaaaacccgggcccctggggaaccccccggggaa

SEQ ID NO: 134873 - DNA, 327 bp, Zea mays
  unsure (1)..(327): unsure at all n locations
  Clone ID: MRT4577_54487C.1
nttttnaacctttcgcttccgcagtcgcagtgcctccgcatcgtcgccatggctctcctcaagactccctcatgctccaggggcggttgcgccatgcggcggcggcgctcactgcgcggcgccacgcggcgacgtcgacggaagagtacgcgcgccggaactacgccgataacaactccgagtacaacacgtgtgatctgatcgatacggcgctcagagtaaagaactattcttatagagtgatgtttattgatgacatagatgtttgatgcggtgtagtctgtgaagagttaccagtaccacaattataagcccaatgatgtagct

SEQ ID NO: 134874 - DNA, 460 bp, Zea mays
  unsure (1)..(460): unsure at all n locations
  Clone ID: MRT4577_54488C.1
ccgggttgattttggctgtggatctgnnagccttctttattggntgcnagagccgccacggacgcacagggagcgggcagcactctgcgacaaacgaagagagggggccaggggcaaaaactcgagcaagggcgcaccgacagacccgcatacggcatgggtgacgagcggcaacaatgttattcactgtcttgccctacatgactctctgtgtgtggtgggcgatcttgtttttttattcctgcgattatggctggaggcacacatgggcgcatagtggggccttttcttggcatcgtatctggttttgggactggcctttgtgcggtactaggctcgcgcgtatccacctggngcatcagtgagaatgctagcgttagtctgtgggaatcttctagaggtcaccatcaatatttggcatgcgggggtttagacatgctctttgttgtgatgtcctcaa

SEQ ID NO: 134875 - DNA, 4040 bp, Zea mays
  Clone ID: MRT4577_54489C.1
ttggtaaaggcctagttgttgaggaggagcagcaatgacaggaccaaagaatcaaatggacaaggacaaggggcctaaacttaacgacgatgagtgtgtctcgtctatagtaaaattgacgcccaagatgcatacggactccgattgcgacggacttgatatggttggaacgacatcctgtgagcagctcgatcgacgatttgctgaacttattacacacatggaggtactggaggctcttgaaccaccaccaacgttagccttatgtctttgtcctgcgacaccgactgatgggccctttggccgtgtatcgcgtcggcgacgattaggaggtaatcgacggggtatgggagccctaatacactatttattcagcagccgccgccacattaggtttgggttttgcttagatcaattcagtcatcgaacagtaaaaagaattgcagggtcgtcaacaacagaggagcagcactttcgctccacgccagccaccggcgccagccaaggcgtcatcatcttcgggggtacggacgtccacatcttccactgtaccttcgggtgttgcagcaaaacctgctacaaccacctcttccacaggccgctcctccgacatcaagtgccaccgctgccagggacttggtcatattcaacgagattgccccagcaaacgggcatacattgctactggtgatggtgggtatgttagtgcttctgatgttgaagatgaagatactgttggagctaacattgcagagacttatgatggtgatgaagaggttcttggtacaacagcgaccgagacctataaggccttgattatgcaacgagctttgagtaccacggctagtgacgacgacaacagacagctccgcaaccttttcaacatgttcctcatcgtcaaggactgccgtgtacataccatcattgacggtggtagctgcaacaacttggtgaacgttgagggaaagaaaattgtgttgcttcctatgactcccactgagattgtccactttgaacatgagaaaaagactaatgctaagcaaaaaggtgttttgaactctgaaaatcagcaacctattaagttaaaaactcctactttgctagccactaaatctgatcttgatgagttacatgcctctcttggactttgctatgccttagtgtgcaaaaatgctttctattccattgatgatacatctattgtcttgccacctgctattgctaaccttttgcaagagtatatggatgtgtttccctccgagataccccctggattgccacctgtgcgaggcattgagcacaagattgatttaattccaggggcgagcttgcccaaccgtgctgcctacaggaccaaccccgaggagactaaggagattcagcgccaggtccaagaccttctcgaccgcgggtatattcgtgagagccttagtccttgttctgttcctattcttttggttcctaagaaagatggcacttggcgcatgtgtgttgattgtagagccattaataacatcacaattcggtacagatatcctattcctagattggatgacatgcttgatgaattaagtggttctattgttttctctataattgacttgcgtagtggataccaccagattcgtatgtctttaggtgatgaatggaaaactgcatttaaaactaagttcagtctttatgagtggttagtcatgtcttttgggttaactaatgcgcctagcacttccatgagattgatgaacgaggttttacgtgctttcatcggtaaatttgtggtgggcattgagatggatgaggcaaaaattgttgccatcacgagctggccacttccaaccacggtcacgcaggttcaaagttttcttggtcttgcaggattctacaggcgatttgtgcgggatttcagcaccattgcagcacctctccacgagttgactaagaatggagtgtcgtttcgttggggaccatcacaacagcaagcctttgatgccctcaagtcgaagctcacacaagcaccactgctgcaacttcctgattttgacaagacattcgagctcggagaagcacatggagatggcttgatgggacattttggtgttaagaagaccgaggatgtgttgtttactcatttctattggcctcggatgcggcgtgatgttgagcgctacgtctctcgttgcaccacgtgcaacaaagctaagtcccgacttaacccccatggtctttatttgcctcttcctgttcctcgtgcaccttgggaggatatttctatggattttgttttgggattgcctagaacaaagagggggagtgatagtgtttttgtcattgtcgatcgtttttcaaagatgacacattttataccctgtcagaaaactgataatgcttcacatattgctgatttgttcttcactgagattgtgcgtttgcatggtgtgccaaatactattgtttctgatagggatgctaaatttttaagtcatttttggagaactttgtggtttaaattgggaacaaagttgttgttttctactacttgtcatccccaaactgacgggcaaacagaggttgttaatcacactttatctaccatgttgcgggctattttgaaggataatttgaggttgtgggaggaatgtttgccacatattgagtttgcttataacagatcgattcattccacaaccaagcttagtccatttatggtagtatatggttttaatcctcgtgccctaattgatttgctacctttaccaccttctgaaatagtgaacttggatgctacacaacgttctgaatttattcttgagttacatgaaacaactaagttgcaaattgaaaagatgaatgaaaagtattgtattgctgctaataaaggtaggaaggaaatgaaattggaacctggtgacttggtgtgggttcatttgagaaaggataggtttcctgatttgagaaagtctaaacttatgccacgagctgcaggtccttataaagttcttgcaaaaattaatgataatgcatatacacttgagttgccgccagattttggggttagttccacctttaacatttcagatttgaagccatatatgggtgacgaggatgaggccgagtcgaggaagactccaattcaagaggaggaggatgatgaggacatcacttctatatatacaatgaatggaccgataacacgatctcctgcacgacagctaaatctccaggtaccttggagaggaccaacaaggacatgggaaagggataagccttcgtggcgaggtcattcgtgtgtcacgggtgataaccaacggagccgtggtgtagtgattgcgaggaaccgttcgctcggagccttggatcatcaacgtcgagatctccactcaatcaaattatcgtatctcacggaagatcgggccgcgtctactatcagtgtcccccgctggggcgccagcgtcgtcgactcgctcgacagccaacgaggtgccacctcctgcttggccatggttgccccgcctccttctcctgcggcgaggaaggcgacgggacaaacccagatgttgttcttccgccatggggggaaaacgtcgtcgattccgccaccgtcgggcgggctgatggccaccattatcgctgtcgcgcggtggaggaaggagtaccatgtcgtagttgccgtcaagggacatgaacttgagactcccgaaacggagcagcgtcccgggttgaagaggttgctggagactacccatctggagcttgatgggaagctgttcgtcaacacgcagcagtcccctacctggcgcgccaactatcggcgtttcgaccccggggggtccctggaccgacgacgtggtcggtccgagcccaaggtcgggcgaggcggagactcctccgaggtcgagattgaggccgagccctgggctcaggcgaggcggagaccgtcttccgaggtcgaggttgaggccgagccctggggtcgagtgaggcggagaccgtcttccgaggtcgaggcgggggccgagccctggggtcgggcgaggcggtga

SEQ ID NO: 134876 - DNA, 1016 bp, Zea mays
  Clone ID: MRT4577_5448C.1
ccggccgggacgcaccaactagtactcaagagattcagctgagcatcgttgtgctagctgagagcgtactgtagtctccccacccataaacctgagcgtcagaaacggtgctcacaatcacagcgcagggtgtgcaccgattcgaacgctttctctcctccgccgctgatcccctctcgatttgttgtgcctccagcccccgattcctaccgttgtagtccagtgatccaatcgacggtcgacgactccgcagccaccgctcctctcctctcgtcgcttcttccgtctctcggcgtcgaatctcatccggccagtgaccacactctactagccgcccggaaggagttcttccgggtttcgagccgttgctgccctcacctctgcaggcccggcgtcgagcggagatccaatcggaaattcaactgacttcgtcatttgtcggtactgcagcacatcgcagctcgcacatccccgtcaggagaagcaatgtcaggagtgatcacaaaattcgcggttacatccatggtgatgtggatggcccctgttgcgatcatgtatgggttttactaccaggtgtttccaggtgtgagtcagatgtcatcctcagcgcagacacttgccagtgggttcctggctgtcatatcggttaatctagtgatcggcttttacatattcatggcgatgaaggagactccacaccaagagccacagccagatcccaccttcctggagaaagccaaagcaagtatcaaccagccaacatcctttcaagtgagtgatgattccaaggggaagggaaaggtcgagtaagctgtagcatgttggctttctcgtgtatgttaagtgcatgttatttaatgtatgcacaccatcaacctttttgattttgctcttgagcatagcataagatctccgattcgaacgctttatcctccgccgctgatcccctctcgatttgttgtgcctccagcccccgatttcttctcattcgtcggcgatcgaacgcagccagccag

SEQ ID NO: 134877 - DNA, 5252 bp, Zea mays
  Clone ID: MRT4577_54490C.1
gcgttcgtgcgcccacgcgtccgcttttcgctcggtgctccgtttgagctcaaatttttacagcagattcctgactccatggatgttttgatgattaggtaccttggagaggaccagcaaggacttgggaaaggccaaggtgttgaggaggagcagcaagggcgtccacaacagaacaggtactcttttgcaatcacacccacgctcgttggacagtcacactggtcaccgtttgccacctgcagtgctggaccaaagaatcaaatggacaaggacaaggggcctaaacttaacgacgatgagtgtgtctctcaaatggaattgaaggagatgatgcgcgcgatgactgaaggttttaaaaaataccaggactctgcctcgacatcctatgagcagcttgatcgacgagttgctgaacttgttacacgcatggacgtactggaggctcgtcccccaccaccaactccagccccagctcactctcctgtggacgacgacgacgatgacgacgatgtttatgcaccgctgcgacaacgcctcgcacgtaatcgacaaggtatgggaggtaatggtagacgtcgtcatcataatcctgaaccagaccatgatccatttgctaagattaagttttctattccaccgttcatgggttcttatgatgctgaagcttacttagactgggagatgacggtagaacaaaaatttaattcccatcttgttcctgagcagcataggggagacatgtcggtacaggaatactaccaagaacttcagaaagaaaaagaattgcagggtcgtcaacaacggaggagcagcactttcgctccacgccagccaccggcgccagccaaggcgtcatcatcttcgggcgtacggacgtccacatcttccactgtaccttcgggtgttgcagcaaaacctgctacaaccacctcttccacaggccgctcctccgacatcaagtgccaccgctgccagggacttggtcatattcagcgagattgccccagcaaacgggcatacattgctactggtgatggtgggtatgttagtgcttatgatgttgaagatgaagatactgttggagctaacattgcagagacttatgatggtgatgaagaggttcttggtacaacagcgaccgagacctataaggccttgattgtgcaacgagctttgagtaccacagctagtgacgacgacaacagacagcgccacaaccttttcaacatgttcctcatcgtcaaggactgccgtgtacataccatcattgacggtggtagttgcaacaacttggtgaacgttgaggtggtcaagaagcttggcttgaccacacgagagcatccccaccattatcacattcaatggtttaacaacaacggtaagttcaaggtaacaaaaacaacaagggtgcatttttctattggctcttaccatgactttgctgattttgatgtggtgactatggatgcttgctctcttttactgggacgtccttgggagtttgatactgatgctattcaccatggtagatctaataaatatacttttatgcacaagggaaagaaaattgtgttgcttcctatgactcccactgagattgtccactttgaacatgagaaaaagactaatcctaagcaaaaaggtgttttgaactctgaaaatcagcaacctattaagttaaaaactcctactttgctagccactaaatctgatcttgatgagttacatgcctctcttggactttgctatgccttagtgtgcaaaaatgctttctattccattgatgatacatctattgtcttgccacctgctattgctaaccttttgcaagagtatatggatgtgtttccctccgagataccccctggattgccacctgtgcgaggcattgagcacaagattgatttaattccaggggcgagcttgcccaaccgtgctgcctacaggaccaaccccgaggagactaaggagattcagcgccaggtccaagaccttctggaccgcgggtacattcgtgagagccttagtccttgttctgttcctgttcttttggttcctaagaaagatggcacttggcgcatgtgtgttgattgtagagccattaataacatcacaattcggtacagatatcctattcctagattggatgacatgcttgatgaattaagtggttctattgttttctctaaaattgacttgcatagtggataccaccagattcgtatgtctttaggtgatgaatggaaaactgcatttaaaactaagttcggtctttatgagtggttagtcatgccttttgggttaactaatgcgcctagcactttcatgagattgatgaacgaggttttacgtgctttcatcggtaaatttgtggtggtatattttgatgatattcttatctatagtaagtctcatgatgatcatattgaacatttacgtgctgtttttgatgttttgcgtgatgcacgtttatttggtaaccttgagaagtgcaccttcagcaccgatcgtgtgtcttttcttggatatgttgtgacatcgcagggcattgagatggatgaggcaaaaattgttgccatcacgagctggccacttccaaccacggtcacgcaggttcaaagttttcttggtcttgcaggattctacatgcgatttgtgcgggatttcagcaccattgcagcacctctccacgagttgactaagaatggagtgtcgtttcattggggaccatcacaacagcaagcctttgatgccctcaagtcgaagctcacacaagcaccactgctgcaacttcctgattttgacaagacattcgagctcgagtgtgatgcgagcggcattgggattggaggagtgctcattcaaggaggtaaacctgttgctttctttagtgaaaaattgaatggtccaactctgaattattctacatatgacaaagaattatatgctttagtacgagttttacaaacttggcaacattatctatggtctaaagaatttgtcatacattcggatcatgaatctttgaagtatcttaagggacaatctaatctaaacaaacgacatgctaaatggattgaattcatagaatcatttccttacattattaagcataaaaaaggaaaggataatgtaattgctgatgctttatctagacgttatactatgctgtcccaacttaatcataaaatatttggtttggagactataaaggaattatatgctgctgatttggacttcaaagatgcttttgaaaattgcagagagggaagaacgtggcaaaaatttatgctgcgtgaaggccttctctaccgtgctaacaagttgtgtgttccagctagctccgttcgtcttctactcttgcaggaagcacatggaggtggcttgatgggacattttggtgttaagaagaccgaggatgtgttatttactcatttctattggcctcggatgcggcgtgatgttgagcgctacgtctctcgttgcaccacgtgcaacaaagctaagtcccgacttaacccccatggtctttatttgcctcttcctgttcctcgtgcaccttgggaggatatttctatggattttgttttgagattgcctagaacaaagagggggagtgatagtgtttttgtcattgtcgatcgtttttcaaagatggcacattttataccctgtcacaaaactgataatgcttcacatattgctgatttgttcttcactgagattgtgcgtttgcatggtgtgccaaatactattgtttctgatagggatgctaaatttttaagtcatttttggagaactttgtggtgtaaattgggaacaaagttgttgttttctactacttgccatccccaaactgacgggaaaacagaggttgttaatcacactttatctaccatgttgcgggctattttgaaggataatttgaggttgtgggaggaatgtttgccacatattgagtttgcttataacagatcgattcattccacaaccaagcttagtccatttatggtagtatatggttttaatcctcgtgccccaattgatttgctacctttaccaccttctgaaatagtgaacttggatgctacacaacgttctgaatttattcttaagttacatgaaacaactaagttgcaaattgaaaagatgaatgaaaagtatcgtattgcttctaataaaggtaggaaggaaatgaaattggaacctggtgacttggtgtgggttcatttgagaaaggataggtttcctgatttgagaaagtctaaacttatgccacgagctacaggtccttataaagttcttgcaaaaattaatgataatgcatatacacttgagttgccgccagatattggggttagtcccacctttaacatttcagatttgaagccatatatgggtgatgaagatgagaccgagtcgaggacgactccaattcaagaggaggaggaggatgaggacatcacttctatacatacaatgaatggaccgataacacgatcacgtgcatgacagctcaatctctaggtacgttctaccctagtcaattgtgtttcagagcttacgcttggggccatggatgttttgatgattaggaaccttggagagaaccagcaaggacttgggaaaggccaaggtgttgaggaggagcagcaagggcacccacaacaggaaggagatcaagtccgactcggctgcgactccatctcgggttccaggaccagtctgcactaaaatggacgcccaagatgcatccggactccgattgcgacggacttgatatggttggaaagataaggagattatctaaccaacccaactggttccaccctaaaattcatccggagtcaacgggaatcgtcgaaacaagtcagcgttcagattctgttttggtgctgcgacaccgtctgttgggccgttgggccgtgtatcgcgtcggagcccattaggggcgagtccaggggtcacgcacgccctaatactctatttattcagccgccgccgccacatttaggtttgggttttgcttagattaattctgtcatcgaacagtgtcgccgtcatcggtttgtgagaccccatctcgtaatcaatacaattttggttgcgtttctttcatccccaaaaaactctttaagtggagtggtcctcgactcaagctcaaaaaaaaaaaaaaaaaaaaaaaaggaaaaaaaaaaaaaaaaaaaaaaaaaaaaaaaaaaaaaaaaaaaaagagaataatccgaggg

SEQ ID NO: 134878 - DNA, 1848 bp, Zea mays
  Clone ID: MRT4577_54491C.1
atgacaggaccaaagaatcaaatggacaaggacaaggggcttaagcttaacgacgatgagtgtgtctctcagctggaattgaaggagatgatgcacgcgatgactgaagcttttaaaaaataccaggactctgcggcgacattttatgagcagcttgatcgacgagttgctgaacttgttacacacatggacgtactggaggctcataccccaccaccaactctagccccagctcactctcctatggacgacgacgatgatgacgacgatgtttatgcaccgctgcgacaacgcctcacacgtaatagacaaggtatgggagggagacatgtcggtacaggaatactaccaagagcttcagaaagaaaaagaattgcagggtcgtcaacagcggaggagcagcactttcgcgccacaccagccaccggcgccagccaaggcgtcatcctcttcgagcgtacggacgtccacatcttcctccaccagcaccacacgcagcaccgcaccttcggcatcacagggacacgacaacagcaagtccttggtgccttcggtgcttctgatgtggaagatgaagatactgttggagctaacattgcagagacttatgatggtgatgaagaggttcttggtacaacagtgaccgagacctataaggccttgattgtgcaacgagctttgagtgccacggctagtgacgacgacaacagacagtgctacaacctcttcaacatgttcctcatcgtcaaggactgccgtgtacataccatcattgacggtggtagctgcaacaacttggtgaacgttgaggtggtcaagaagcttagcttgaccacacgacagcatccccacccttatcacattcaatggtttaacaacaacggtaagttcaaggtaacaaaaacagcaagagtgcatttttctattggctcttaccatgactttgctgatttcgatgtgtgggttaaagtctgtgtagataaattaaagaccattagaaggggattaaatgttcttaagaagtatgggcttgatcctgtgccaaaaatcgagaaaaaggatgctcaagttcggttgtcaggttcatgggtcctcatcaggcaactctgttctgaatatctgtctgtctgctccactttgagggtgatgcttcagtgggtgggaatgttttcaaaaataaaacttgatggtggatctgtcaaaggccttgatgggttcaacatcggaaaagatgtacctctgccaggtgcatgtgggcccaataacttgggaggttctgccacaatatggatgcttgctctgttttactgggacgtccttgggagtttgatactgatgctattcatcatgggaaagaaaattgtgttgcttcctatgactcccactgaaatggtccactttgaacatgagaaaaagactaatgctaagcaaaaaggtgttttgaactctgaaaatcagcaacctattaagttaaaaactcctactttgctagccactaaatctgatcttgatgagttacatgcctctgttggactttgctatgccttagtgtgcaaaaatgttttctattccattgatgatacgtctatcgctttgccaccggctattgctaaccttttgcaagagtatatggatgtgtttccctctgagatacctcctggattaccacctgagttgcctccagattttcggctaaatctcctggtacgttctaccctagtcaattgtgtttcagagcttacgcttgaggccatggatgttttgatgattaggtaccttggagaggaccagcaaggacttgggaaaggccaaggtgttgaggaggagcagcaagggcggccacaatag

SEQ ID NO: 134879 - DNA, 2022 bp, Zea mays
  Clone ID: MRT4577_54492C.1
atgctcgttggacagtcacaccggtcactgtttgccacctgcagtgctggaccaaagaatcaaatggacaaggacaaggggcttaagcttaacaacactgagtgtgtctctcagctggaattgaaggagatgatgcgcgcgatgactgaagcttttaaaaaataccaggactctgcggcgacatcctatgaggaccttgatcgacgagttgctgaacttgttacacgcatggacgtactggaggctcatcccccaccaccaactccagccccagctcactctcctgtggacgacgacgacgatgacgacgatgtttatgcaccgctacgacaacgcctcgcacgtaatcgacaaggtatgggaggtaatggtagacgtcgtcatcataatcctaaactagaccatgatccatttgctaagattaagttctctattccaccgttcatgggttcttatgatgctgaagcttacttagactgggagatgacggtagaacaaaaatttaattcccatcttgttcctgagcagcatagggttagacaagccactagtgaatttagagattttgctatcatttggtggaatgaacttgttaacacacgtgctgcaccacaaacatggaatgcgttaaaagaggagatgcgatctcgctttgttccccttcttatagatgtgatattcaaaaaaattgcaacgcttagatcagggagacatgtcggtacaggagtactaccaagagcttcagaaagaaaaagaattctagggtcgtcaacagcggaggagcagcactttcgcgccacaccagccaccggcgccagccaaggcgtcatcctcttcaggcatacggacgtccacatcttcctccaccagcggcacacgcagcaccgcaccttcggcatcatagggacacgacaacagcaagtccttggtgccttcgggtgttgcagcaaaacctgctacaaccacctcttccacaggccgctcctccgacatcaagtgccaccgctgctaggacttggccatattcagcaagattgccccagcaaacgggcatacattactactggtgatggtgggtatgttagtgctcctgatgtggaagatgaagatactgttggagctaacattgcagagacttatgatggtgatgaagaggttcttggtacaatagcgatcgagacctataaggccttgattgtgcaacgagctttgagtgccacagctagtgatgacgacaacagacagcaccacaacctcttcaacatgttcctcatcatcaaggactgccgtgtacataccatcattgacggtggtagctgcaacaacttagtgaacgttgaggtaacaaaaacagcaagggtgcatttttctattggctcttaccatgactttgctgatttcgatgtggtgagtatggatgcttgctctcttttactgggacgtccttgggagtttgatactgatgctattcaccatggtagatctaataaatatactttcatgcataagggaatgaaaattgtgttgcttcctatgactcccactaaaatggtccactttgaacatgagaaaaagactaatgctaagcaaaaaggtgttttgaactctaaaaatcagcaacctattaagttaaaaactcctactttgctagccattaaatctgatcttgatgagttacatgcctctattggactttgctatgcctcagtgtgcaaaaatgttttctattccattgatgatacgtctattgctttgccaccggctattgctaaccttttgcaagagtatatggatgtgtttccctctaagataccccctagattaccacctgagttgccttcagatttttgggttagttccacctttaacatttcagatttgaagccatatatgggtgacgaagatgagatcgagtcgaggatgactccaattcaagaggagaaggatgatgaggacatcacttctatacatacaatgaatggaccgataacacgatctcgtgcacgacagctaaatctctag

SEQ ID NO: 134880 - DNA, 601 bp, Zea mays
  unsure (1)..(601): unsure at all n locations
  Clone ID: MRT4577_54493C.1
gtacagnactcagccatcatggnaggttgtcgatcctcagttaagagaagagctgaagatttccatctccgagaggttcttccagcataccgttcatttgttggaagatttcatggccaactagagggagggaggggttctgcaaggtatataaagtacaaccctgatgatttggagaaccaggtctcggagttttttgaagggagaaagccaaatgcttgatggtcaagggatgttcatatcaactatgcaacctcaagacatgcaaatttgatgatgctagttccaagtttccttccaaatttcttgaactaccgtacatggaacttctagcctaccctaacttggttggaacttaaaggtctgtacagagaacttgaccttccaacatcttttgaatgtctgaagacaactgacaaaaactgtgtgaacttcaaagcaacctgaactgaatactttagcctgtcatccttgatcctgtcatggtgtgtggtcacatcattgaggcttgcacatgggattatgacaactgcatctgccataagctgtataattgtaattaatacatattatctttttttttaaaaaaaaaaaaaaaaaa

SEQ ID NO: 134881 - DNA, 599 bp, Zea mays
  Clone ID: MRT4577_54494C.1
cccacgcgttcgcttttcgctcggtgctccgtttgagctcaaatttttacagcagattcctgactccattctggggtgacccaaacttgattaggtaccttggagaggaccatcaaggacttgggaaaggccaaggtgttgaggaggagcagcaagggcgtccacaacaggaaggagatcaagtccgagtcgcctgcgactctatctcgggttccaggaccagtctgcactaaaatagacgtccaagatgcatcctgactccgattgcaacggacttgatatggttggaaagataacgagattatctaaccaacccaaatggttccaccctaatatgcatctggagtcaatgggaatcgtcgaaacaagtcagtgttcagattctgtttggtgctgcgacaccgtctgttgggccgtgtatcgcgtcgagagcccattaggggcgagtccaggggtcacgcacgccctaatactctatttattcagcagccaccaccacattaggtttgggtttttcttaagtttagatctgtcaagaacagtcgtcgtagatcggtttgtgagaccccaacttgtgagcttaatcattcatccgcaat

SEQ ID NO: 134882 - DNA, 387 bp, Zea mays
  Clone ID: MRT4577_54495C.1
acgctccgtgcggcgacgacggactgggcactcttcatcgccctccttttcctgcgctaggtacggctgaccaaccgctgggtcgcttcgtcacctcttctcctgcggcaacgatcacccaccatcttgatgctgattctttggttgacaatttcaacattactaccttttatgaccctgaggccaagaattattaatcctcccaggctcaaaggcattccaaaatctatcatccattattcaataatgccatcctcaacctatcgactagaacatgaatcagaacttggactcaatggacactgtgatcggcatgatattcaacaacatatcctctttaaaatccccctacattcaacttcatgaagccctcaccccatatgaccc

SEQ ID NO: 134883 - DNA, 498 bp, Zea mays
  Clone ID: MRT4577_54496C.1
atgaccaactcttccacaggccgctcctccaacatcaagtgccaccgctgccagggacttggccatattcagcgagattgccccagcaaacgggcatacattgctactggtgatggtgggtatgttagtgcttcttatgttgaagatgaagatactgttggagctaacattgcagagacttatgatggtgatgaagaggttcttggtacaacagcgaccgagacctataaggccttgattgtgcaacgagctttgagtgccacggctagtgacgacgacaacagacagtgccacaacctcttcaacatgttcctcatcgtcaaggactgccgtgtacataccatcattgacggtggtagttgcaacaacttggtgaacattgaggtggtcaagaagcttggcttgaccacacgacagcatccccacccttatcacattcaatggtttaacaacaatggaaccttggagaggaccatcaaggacttgggaaaggcctag

SEQ ID NO: 134884 - DNA, 521 bp, Zea mays
  Clone ID: MRT4577_54497C.1
ctctgtcgtatgcggagcattataaagctctcttcctacccctttgatctacaacgctatcaaagcatgtaggttggctatggactccatctcaggcgcaacctggggcatggccaatagagggacgcggtcgggcgcaggttccgggccacgagggaagaagtcagggacaaggtctgtgaaggcccggctgaaacttaccatatggcgcatggggcggtacctgaataaggatcgggacacccagtgcgttcacacgggacgagatcatctacctgggcgtccacctggagtacatggccctcgaggcgcttgcgctagacgagctcgctacactagacaacaagaacatcattgtaaatgctcgccaagtgctcctttgcatacggagcgacgaggtagctctttaggatgttgaccagaataaccatgtatcagagaggtgtgcttcataacatgaactgtgagctcactgattaagaagaccgtgcaaagcggaggacaatgaggccaattcttcc

SEQ ID NO: 134885 - DNA, 5622 bp, Zea mays
  Clone ID: MRT4577_54498C.1
atggctagccaaggtgaaaggcgatcaatagtgcatgacacctccaatcatgctcgcgcctgtgatttagtgcccataactaatcagggtcatagacagagaataatgcacgagacttctacatccacaatgtcattcacaatgcctacctctaaccttggagtaccaatacacgatgtgccgtcacatagaaatgctaacttagcacgacagtatcgccctccacgtaatattggagttcctgtgcaatgtagatttttctctgatgaatatgttgcagccttgaaagcttcgtatcctatgaggtcaaaccacggaactccagattacacttgccaaatgtgtggtgcattattttggtatggggaaagaacacgtggcaatgtgagaaatagggccatccaatactacaattgctgtaaaggaggcaaagtgtacctccctccatatgaggaaagaccagagccgttgaaatcactcgctagatttgatggtgatgcaagaacaaaaaaatttatagcaaatataaggcaatacaattgtttgtttgctttcacatccatgggtgctaatattgataatgctgtaaatgatggtagtggtccacccctcttcaaaatatgtggccaggtgcatcatcgaattggctccctcttacctcaagaaggatctactcctcaatttctccaactttacatatatgatactgttaatgaagttgaaaacaggttgagatgtctaaatcctacaaaagagactatccaaaatattgatcctctaattgttcaagaattaattaaaatgcttgacgaacacaacccattcgcaaagaaatttcgaatggcaagggacaaattatctgattatgaagatgaagacttcattataaggattgtaggagcacgtgaaggtgatccagttcagtacaatcttccaactactgatgaacttgccatgttagtatgtggagacatatctcttgaaacgtttaaaagagacattatcattcaaaaacataacagagatctcaaacgtatttcttctctacatccagcttatatggccctacaatatccattgctatttccttttggtgagcgtggattccaaattggtgttccatatgttggaatggaaaatgcagaaagaagtgcaaggtctcacatgactatgcaggatttcttttcctatcgtttccattataagaaaaatgaaccaaatccttttctatgctacgaactactatcaagtcaagcaaaggtggatgctcgagcagcaatagatgaaagcagattgcagtatatactccaaaatcagaataatctgtggactgagagtattcaagggatatcagacgctgtaggtcgtggctgcattgatggcgaggaaatgggcctgcgagttgtactgcctgcatctcatattggcggacgacgatacatgttccagaattatcatgatgggctagcaatttgccgagtctacggtccaccagatttcttcgtgacgtttgcgtgcaacccaaactggccagaaatactagagagcctctttgagcctggccaaaaagcttcagatagatcggacatcattgctagagtcttccatttaaaactcgatgaccttttaggtgatattcgatctggagatatctttggtcggcaggtggcagttctgtatactattgagttccaaaagcgtgggctgcctcatgtccacgtcatcttttgggtatccactgatacttcgcagccaacgcccgcacttattgactccgttataaccgcagaaattccggatccacaacaggaccctttaggctacgcattggtcgccgagcacatgatccatggtccatgtggtcctaaccatatgaatgctccatgtatgaagaatggaatatgctcaaaaggttatccaaaagattttcgagaagaaacaacaattgatgcgaatggcttcacagtttatagaagaagaaacaatggtcgtttcattgccaaaggaggtgttaggttcgataacagatcagttgtaccaactaaccttttgctgctgaaaagattccaggctcatataaatgttgaatggtgcaacaaaagcattttcataaaatatcttttcaaatatgtcacaaagggactagatcgtagcaaaatatttcttagaagggtacaagctggtgaagatgttccatataatgaacaaacagatgcaaaggatgaagtcaaagagtatcttgatagtagatacatttgtgacaaggatgcttgctggcgagtgtttggttttgaaatccataggcattatcctgctatggaaagaatgcatgttcacttacctaaccaaaatcacattacatataactctacatcaaatatggcacaaatattgtcaaaacctttccttcgtcgaacaatgttgactgaatggtttgcctgcaactcaaataattcaaatgctagggacctaacttattgtgagtttccatcgaaatggagatgggatgaaaaaacacggagttggaggccaagactagcaagagagagcaaaatagggcgcttatattatgtccatccatcagcaggcgagagatattatctaaggatgttgttacttacagttaaaggtgcatgtagctacgaatctcttcgaacttttaacaatactgtgtatccaagttttaaagaggcatgtcaagcacgtggccttcttggtgatgacaatgaatggttacaagcttttgaagaagcagcaacttgggccacagctccgcagctacgccaactatttgttacaatgcttctatattgtcaaatcagcaacgagcattcattctttgaaaagatttggaagctaatggctgatgatattggatataacatacaaagagcacttagttgccctaaatttcaaatggcagataatgaacttagagatgaattactagagcgattgactattctctttaacaaaagtggtgggaatatacatgagtttaacctacctcaaaaggtacatggaacacaacagcaagaattcaatcgtttaattgaagaggaaacttcttatgatcgtgaaaatcttcacaatgaatcccaaagtctcttctcacagcttaatgctgatcaattaagtgccttcaatacaattgttgaatctgtcctttctggtcgacctgttgcttcccttctacttcctgatggccgcacagcacactcacgtttcaaaattccatgtgatctagattctaacagcacttgcaatatcaagaaaggaacaatgcttgctgacttaattaaacgtacctcattggtcatttgggatgaagcttttatggctcataggatgacatttgaagcgttggatagaagcttcagtgatatattgtcgtctgaatcatctaatagtgaaaatatgccttttggtggtaaagtaattgttttaggaggtgatgcaagacaaattctacctgtgattgaaggcggcactagatcacaggttgttggtgcagctataactaattcatatttatggcactctatcaccgtgttatacttaacacaaaatatgagattatcttcaactgcccttagcattgatgctaaaaaagaggtcgagtcattcagtaaatggattttagcaattggtgaaggaaaagtaccagcaaaagcaagagagaatgaaacagaaaaatgttggataaaattacccccggaaatacttcttatgcccatcaaagacaatctatcatgcattgtccaaactgcatatccaaatatagaaacaatgtataataatgttgaatatctaaaggaacgtgccatattagctccaacaaatgaagttgtcgacgttgtcaataactatatggtttcaaccctacctggtgacacaaaggaatacctaagctgtgatagcattgcaaaaggacccaatatgcatgcatcctatgatatgctatatccaatagagtttttaaactccatcaacggtaacaactttccttcacatagtctgattttgaagaaaggaacaccaattatgctgctacgcaacattaatcaatctcagggtctttgcaatggtacaagattgattataacaactttgggagatttagttatagaagcggagattatgaccggaaagcataaaggaaacagcgttgtcatacctcgaattagcttaactttgaaaaatccaagaaatatgtttgttttagagagaagacaatatcctataaaagtatgctatgcaatgacaattaataagagtcaagggcaatctctatcagaagtggttgtatatttgaaaaatccagtgttcacacatggtcagctgatggtagttaaaacacttactgaattgtctcttcaagacaaagatgtaaccgttcaggttgaagtcaacaggagatgggaatttagaggaattggcgatgatggtcctgttttacatgttgacatgattctaacagatgcaacaggaaatgcaatctatgctgaagtacctgccaaattattggaacaaaaaggttcattgttacagttgaacaaagtgtactacatccgacgctttcgagttgcaaatgcaaagtcacaatacaaagttatcgatgcccctctcatgatctacttcactgtttattcgataattgaagtttgtcgtgatcccccatctacatttccactgtacgtgtataatcttattccatatgaggctattgatgcaaatggaccaaagagtaaagacttccatggatctgtatatctaagtggtggtgcagcttgccactggtatttcaatccatccattaacggagctcaaccatactatcaaaggattcataatgaaaatgtaacaatcaagctccctccactaacgaacgaacaagcggcgtttgttaaccctcctgaaacacaacacaaagatttgaaagagctattagagtctgaaccattgacactaccagaggaaggttttaaatgcactgtaaccattacaagagtgcttgatgatcagccatggtggtacaaagcatgtaatacatgtccaaacaaaccatccatgcggtcatcagtgtcatcatgtcctacatgtggctcgacagatgctattctaagaaaaagaactcctaatcaagtcagtcatagcttcacatggaagagacctatctttgccatcaaccaaattgagcattccaatgcatccgtcaactccaacaaaacttccatcgagaacaagacaggcaatttcaccctctacgacattgtccaacctatctacatccatttctctagaggatctattgtccatggaaacaaaatgatggggctgtgtgatgatgagtcgagtgttgaaggacaacaattcaacaagcgaatggcggaccactggggcagagcaggcaggcaggcagccaacgcgcgctgtcttgtccggactgcgattgcgggcgccgccggtgaggaccatgcgcaggcacagccgcacaggcaggaccgcgaccgtcccgttgaacaacccaatcgctgccgcacgccaactcatgagcaggaggaggaggaggacgacgaatcatcatctgccgcagcatcactgcttgctgagtgctgctga

SEQ ID NO: 134886 - DNA, 410 bp, Zea mays
  unsure (1)..(410): unsure at all n locations
  Clone ID: MRT4577_54499C.1
cgtagatagcaaatatactgcaaccaaaccaacagggaggaacgtatgtacaaggcccaaataacatggaattggaaactcataagctacaagtgaaaaccttatggaaggagttcacaggaaccaccagccaattaagatgctgggacactttcttcggaggccaaaagatgcggagggagctgggggcggatgctcaaatcaaagacctttgcggaggtgacggaccggaaacgctgaacaatggaccgaccgatggaattaacccactccgcctaggccttctaggcttcccgaatgaaatagggccgngtanaggaaattaaaggcctttataaatgatggaactgcattggatgaatcgaccaatgttccaatggtgatggcttttgtcacacgaactggctctt

SEQ ID NO: 134887 - DNA, 289 bp, Zea mays
  Clone ID: MRT4577_5449C.1
taagttaaatactgataaaatcataatgtcacacaacttaatagccttacgcctaatgcgtcaatcctctggtgccttatgtagcgagcagctcacactaattcgcccttgcaaactgtccgctttccattggggaaatcttccccccctgctgcattgcataatacgccaacattcgcggaagagacgctttgcgtgttctgcactcttccgctgtctctctctctgactaacttagtttgtgtcgctatctttggaccgcgggatcaagtcacttcctttcgcgtct

SEQ ID NO: 134888 - DNA, 442 bp, Zea mays
  unsure (1)..(442): unsure at all n locations
  Clone ID: MRT4577_544C.1
tcatggaacacacnataaccacagtattngtttatttagaacgaaacgacactccattataggatggtaccaccaggagnnggcaccatgaacgatcgcagtataccccatggtaccagcnatgcagcttaaaatggaacccatggnnncttactgacnncaccgcggnagnngcggagnncaccaggtggnagaagtgggctctccttcnntggatgttnnngtagtctggcttagggtnggcggcccactcctccagctttgtcttgccagcgaagaatcagacgctgtctggtctgggggagatagccctctttagtcctggatcttcgccttcacgttgtcgatggtgtcgngagctctcaacctccagggttatggtcttgccagtcaaggtcttcacaaagatctgcataccacctcgcanagcggagcaccaggt

SEQ ID NO: 134889 - DNA, 249 bp, Zea mays
  Clone ID: MRT4577_54500C.1
ctggcggaggcccgcccttgtaacagacgccccgctcatcgtagtttacacacgccctcaaaccgtgtgcaaacgggctcaccgatggggaggggcgcatccgactaaccccgatcctctcagccactgccagtcacttcgcttccttgccgctacacggctcgcccatcattcatttacgcgctcttctccacgcatccacatatccggaccaacatcatctcgagatcgtgttgatcctgccactgg

SEQ ID NO: 134890 - DNA, 441 bp, Zea mays
  Clone ID: MRT4577_54501C.1
caatacaggacagtgaacccctcgagggtggcttgtttggctctactatccacatgagccctcttttggatggggtggaatttagttcaattaccatcgtaattaaaatccaacctaatcaactccaacacaagtagattgcattcaaacaatatgtgattagccaaaagagcaatagtttggcctacctgacgtgcttaaggtctgatggtggagatggctaagacttttggtccagcagtttcaagcccaaataatcaacaagagataaatcaatgctacaacgaaatcacaatgaatgattttaaaacctatgtcagtaaaggcctgggtgccttttatttagcagaatttctggtgccatttattctttatgtaccagctagcgcttccttatgtgccctttgcagaagtcccattgtcattttgcaaccatgtgtg

SEQ ID NO: 134891 - DNA, 972 bp, Zea mays
  Clone ID: MRT4577_54502C.1
gccacactgcggccccgcctcctcgccgtctctgcaacaatgacgacaccggcggcggaggccgtgtcgcgccgcctgggagcggccgtgcgtggcctctccggcgcgtggtacgggcgccacatggcctcggccgagcgcgccatccgcgcgcgcctccccctcgtcgacctcgtcctcgaggtccgcgacgcacgcgcgcccgcctcctcatcgttcgagcctctcctccgccgccgcgggcctctggagccagaccgccgcgcggtcgtccttcttaacaaggcggacctggcggacccgtccgaaaccgaggggtgggtggcgtacatcaagaggcagaggagatgctcttgcgtcgcggtaaactcgcacagcagggaaagcatcaaggaggtgctgaaagtcgtgcaagcaagaatgagggagatcaagcatggcgacagcaattgcacgggaactgccctcctggtcgggatcccaaacgttgggaaatcggccatcgttaatgcgatgcatcaaattggggaggattgcggcagcagagaaggggaagctcaagcatgcgattgtgagcagccatcctggagaaaccagggacatacgtggatacaaggttgctagtcatccgaatatatacgtgttggacactcctggtgtgctttcgccgagatttgcagatgatggttctggccccaggctagccttgacaggagctatcaaggactccttgttggaggattacgatactgtacagttccttcttgcgattgtgaactcagggaaggaatataggaagtgggagaagctgaataaagcaggagataccttttcttgtggcaacacagtcacgtccaggggccacaacagtaaagagcaatatgcttcagatcacactcaggattccgtcgtgaaagcagtccgccaggtgctttttgagaccatatctagttttaacggggatctagggca

SEQ ID NO: 134892 - DNA, 305 bp, Zea mays
  Clone ID: MRT4577_54503C.1
cccctctagcgctttcttttttacgtgggcaacaactgcacggaggggccactaaaggtttggctggccaaccacacagacaatgacccatggaggactctaatcgctaatgcatacttttaactattcatggacctgggaaacatacattaaaatgccacactagcatacactggatcgaattaaatatcttctttcactgttacagagtcctgctgaattaccatgaccaaccttaagactgccttttttcttaacattattgtccacaacatcacaacgtacactactgtaacattctagca

SEQ ID NO: 134893 - DNA, 1354 bp, Zea mays
  Clone ID: MRT4577_54504C.1
caagaatgagggagatcaagcatggcgacagcaattgcacgggaactgccctcctggtcgggatcccaaacgttgggaaatcggccatcgttaatgcgatacatcaaattgggaggattgcggcagcagagaaggggaagctcaagcatgcgattgtgagcagccatcctggagaaaccagggacatacgtggatacaagattgctagtcatccgaatatatacgtgttggacactcctggtgtgctttcgccgagatttgcagatgatggttctggccccaggctagccttgacaggtatcagttactttacttcaaagtttatggcttcacttaactacatgcttttgcaggagccatcaaggattccttgttagaggattacgatactgcacagctccttcttgcgatagtgaactcagggaaggaatataggaagtgggagaagctgaataaagcaggagattccttttcttgtggcaacacaatcacgcccaggggccacaacagtaaagagcaatatgcttcagatcacactcaggattccgtcgtgaaagcagtccgccaggtgctttttgagaccatatctagttttaacggggatctagggcaggtggatgagctaaggagattgatcggccaccaacttgtaaacttgcagcaggttttcaaagtcttgactgaaccaagtgagaatatctgtaaacctatagctactaaactggtcaatctatatcggacaggaaggcttggccgatataccttagaacatgtcccagatgttaggcaggaagttgtcgcagaattacctaccgcctaaagcatgccctgttttttttaccttaaaacaaggattatgcattggtttggccaggatacagtacagcccctcctagctgtaggttgcccatggagcatgaagcgcctccggtgttccattagaggccaaaaactgaatcaaccacagtgtactatgtaagtcttgcggattgactactcgggtgcattagtttggcagataatcttaaagaaggctatcatgtgggtgcaagaaacattcacattcatatacatcagctgcggattaccgcgtaccgcgatgggttcaggactcagggagaatgctcattgtgaccaatctccagcaacgtcatatatatccgttctttacagttttctctaaaagtttttgtcctctatatctcttctctcttcaacaatgttctctatctcgttctctatacataaatacatatgttctatatacataaatgcatatgttagagatatattttgctttaatttttttgtacgtgtgtatttgtcactctctcaaatatattatatatatttt

SEQ ID NO: 134894 - DNA, 283 bp, Zea mays
  Clone ID: MRT4577_54505C.1
gggttggagaaacatgataaccgcccgcagctcaaagaacctcacaaacaacagcaaaaaacaaacggaccccaggggggccaacgcgggggccgccccgtgggccgccccgagggaccccccaagaaccccccgccgcccccaggaggaccaccatttcctacagtgaggggaccaattgcacggcgcaataaagatgggcactgagggctgatagaaaaaggcgtccgctgaaaactgtccaacacaaaatacgcaccagcatcaattggccaccccccgg

SEQ ID NO: 134895 - DNA, 243 bp, Zea mays
  unsure (1)..(243): unsure at all n locations
  Clone ID: MRT4577_54506C.1
ctattgtctcccctttcgagtggcattggccacactgacttctaagtattccttgttctcgggaattctagacgggccttcgatccgttctcctgactgtaccattccgcgactctcattggtcttgcgctgtccgctgagttgcatgaagatctcctcgccgacacagatctgattgcaggccagcttgtccttgtcgtgcaactanaaatacaaacgtctctgtcgaaacaagaattacac

SEQ ID NO: 134896 - DNA, 533 bp, Zea mays
  Clone ID: MRT4577_54507C.1
cgaacggcccacatggctcgcacgcaatgtgccgtagcggtcgcccaggaggacggggtgctgctgctggcaacggaggggaccacctcgtggccgccatcacctgcaggcaggtctagctccgacatcgcgccctggctctcctacacccgcgggacggggtccgtgccctcctcgtcctgttgtagaggatttatgaacctaaaaagcgccgcacaggaccgctctcaacaggcgcgccgcctgaagctgctctaaagaacgcccccagaggcgctagaggactcaacgccgggaacatcggctacatgcgcttcaagtgcagaaggaccataccctacatcatcagcacctccaccaactggttcagagcgaactaaaacctaaaccacacgcgacgacaggcttctgtatcgatcgaccaaacattccgcctgtcgacacctgtccgatcatcgatctgaagtgatgaatatatctatcaatctacacgtgatgagcgaaggctactaatctactgctacggactacta

SEQ ID NO: 134897 - DNA, 226 bp, Zea mays
  Clone ID: MRT4577_54508C.1
aaaccagggggttttttactaaaaactgggggtaatcattttaccatttcttccgtacccaccgaaatcacggccctcacacaaaacgcaaactgcggcccctccccaaaaacccaatctgttccacaccaaaaatcccgaaaaaaaaaaaaactaaaaaacaatccaaacagaggcaaaaaaaaccaaaacgccttaaaattctcccacccccccatggggcaga

SEQ ID NO: 134898 - DNA, 306 bp, Zea mays
  Clone ID: MRT4577_54509C.1
tcattcgaagaaggtcccccaccaaatgctgcacttaataaggtgcctcctacccgtgccaaatcgccaatttttacaagttcaaggggaaagaacttcagtgatacaccattaacacctgtctgagaaaattccaatgcaacatttactcctccacatcgtcacattattcttagtcctaaagactctaacagagttcaacaattctctccaaataatcttttgtcaaccaaaacatgatttgtcaaagcttatcttaaagccctttgaatagcatttattattctatctctttattcttttttc

SEQ ID NO: 134899 - DNA, 370 bp, Zea mays
  Clone ID: MRT4577_5450C.1
catgatttcactatctttcacttaagtgaattactatacacattatgcaagaggagcattaaatcacgggcatgatgtttactcagatgagcatttgtcgtcatttactgttccaaattataagacggtttcgactttctagatacatagctattgctatgcactgtctagatacatagtaaacgcaacacatctgaaaaagccaaaatgtcttatagtttataatggaggtagtactgatcttctgtacattcagattaaatcctcaaggaacaaatgtatgtactttgctataggtaccttgctatggtttagtaccatgctggtgatacagccggtgcaattgtgcaacagcataaggaactcatca

SEQ ID NO: 134900 - DNA, 233 bp, Zea mays
  Clone ID: MRT4577_54511C.1
cagttatcacatattcacatatgtggtgtagatccttatttgttgaatctatacaaacttccaagtcaaacgtaatccctgacatggaacttgctaacctgctatgttcagctctgtgctcttcattccatgttcaattgttccttgttacaactttctgttttgaaatccataggttgtattcagactgtaagccagacttatttcttagcaagtagctagttctagatcgc

SEQ ID NO: 134901 - DNA, 431 bp, Zea mays
  Clone ID: MRT4577_54512C.1
cacgcctgcgtgtaccgggctcgctaatacacggtcgacctcagcgttcggtccaactagaaaaataacaagccaattttgggccaaccacggacatcaacaaaaaagctatcttatgcactcttgctcattatgcaagtgaagcaggggccacctatgatggcattgctgacaaacacctatagggtttcgtaatacaagcatacctgaatagcagcgaattgttgcaatgtgtgaaaaggcgcctatggttaacgcctacacgtgcccaacagaacagtaacaacaggcgttgtaccaatataacactagggcttacaacaaccagctggcttattacaacaagtacctgctgttcataataaggcacaaaacataagggtgacaacaacgtacgacaacaagaaatagctgaaggttggtgaatacta

SEQ ID NO: 134902 - DNA, 153 bp, Zea mays
  Clone ID: MRT4577_54513C.1
gcggaagccaccaccaccgacctgtgaagcgctatgggagcacctgaggccaagccagatggtgcttgctcatgttggttaccatatctgctgcgctctgtcgcacatacctactctgcgacttgtagcctgacaggtggctaagacctgcat

SEQ ID NO: 134903 - DNA, 364 bp, Zea mays
  Clone ID: MRT4577_54514C.1
ggggggggggttttttttttctcttttttgggcgcgtggtcttttgtccgtggtgagaggtatcgctccggacgtgaggagcggttgaaagaggttgaggaacccctaagacgcccgtcctttttttttttagccaggtgccggcgggggggggggggggggttacctttcgcatgtgacgccgcctttctcgccgggacgagctcgatgcttcactaggccggcgcccgacctacctgccttcttttcatgagcctgaggggcgaccttgggcgtgtgtgtctttacctctgtgggggttccctttgcgcgtctgtggtgggcagctcagtaagtgtggctctgtggtctctacgtgcgcctt

SEQ ID NO: 134904 - DNA, 263 bp, Zea mays
  Clone ID: MRT4577_54515C.1
cgcactgacgttatgatcggccaaaagggagcggaggaatggtgatacttggactgaagaaaaacaccggctgttgtagttaagattacataatgctccgtaaatgggatacccagagaaatcctagctgttttgtgcactcaataacagatgagttagaggcaagtcattctcaaaagtattttattcaccaatcaaatatgagcagaaggaatagaaggtctagtcttattaacatggataatgttgagtccatgtacctt

SEQ ID NO: 134905 - DNA, 685 bp, Zea mays
  unsure (1)..(685): unsure at all n locations
  Clone ID: MRT4577_54516C.1
ggccgggctcctaagctttgtgttaccaagtatcntgagttacaatgtaatcacattaaaactagatgtacctgtgtcccattgcctaccaacttgcttttcccatgtttttgcagcaatttctgctttcctggcatggaagtactctcatgcttacttcttggtaactcttctaacctgtaaagaacatatagtactccctccgtcatatatttaagaacgcagtacaatcactgtcttaatatagcgttaatctttacttctgtgtgcagacaaatagactccttccttggggcttctacgcgtcactgaggtcattttctttgtaccgtccatctccatccaaagctttttttttcctttggacaaaggtctgatgttctctcctgcttgaaaatcatgcagcactgcaatgggttgtttctacgcctatgtgctacttgcgggaggaaatcccccgcctaagaagttggcagccattccaccgcagtaggaagagccgaagagggattcggtttaggatcagcgtgcgttgacccttcgctccatagtaaaattttgattgtcttcctaagtatattctgcagcctttgtacactgctggctgngcctttgttttttcgatcctggtagcctgaaattntgagcaaatanagatccagaggacaatagccctgcttccagt

SEQ ID NO: 134906 - DNA, 373 bp, Zea mays
  Clone ID: MRT4577_54517C.1
gcgcttggcccactccctccagacggtcgggggtgccgacaccgtcaccgcggggatgccgctcaagaggtgcgtggatatcgggcgcgtggccctgttgaactacggggtggactatcgccgtctcgttgtcatcgtctatgtcgtcgatcagaacaggccacttgtggatgcccgtgatatgggcaggtgccaggagaactagaacctgatctcacttactgacatcaagattgacatcaaacgtgtctccaagaagacagccctgatcaacgcgatggacgaagctgatgtgaagaccaagtgggagaacagcttatggggcacgaacctgattgtccacacgaggaaagcatcgatcaatgactttgat

SEQ ID NO: 134907 - DNA, 474 bp, Zea mays
  Clone ID: MRT4577_54518C.1
gcgacacacgtgcatcgtggacagaatgtcttgcactcgttttgcggttacctgtgctaaccgagacatgcatcggcagcataatggctggctggactgttcctgctagggatggcagcaggatctatgctcttctgagagaaaggtacgcgatcacagtggtcagagtgaagggtttagactgacgactggagaatgaattactgaaagcactccattagtcgcatagcagtctatgaattatggatgcagtcactgagctgtaggtgtgcaaatcactcgtgtactcagactgaaggatccagaccgtgacatgttgcggaaagaaaagagtagacctatggaggtggtctggagataagctgattcaggggaagtacgtcaataagttagatgctgtccaaggaaatgaaatgttggattaagcctttctttctgaactgagcaacttgatgcattagtggtgtatttaat

SEQ ID NO: 134908 - DNA, 189 bp, Zea mays
  Clone ID: MRT4577_54519C.1
agtaccggccgccaggaggctggaattctccctcatcgcggccgcgcccgcgggaccccagttaatgtgctattgcgcgtacctgagagactcaattctagtatgacattagtctatagatacagagctgtctctccttccctcccaggagcaggcaaactgatcttgctctcctccaaaggcacagga

SEQ ID NO: 134909 - DNA, 929 bp, Zea mays
  Clone ID: MRT4577_5451C.1
gcaccggatcctctcctctcatgactgcctgaatgagcgaggtaccgctggtagaaattttggcccattcgagacggcctactgttgtggtccagtgatccagtctgcgtctctttccccgtcgtggtgggttccgatccaatcgacgtcgacgactccgcagccaccgctcctctcctctcgtcgcttcttccgtctctcggcgtcgaatctcatccggccagtgaccacactctactagccgcccggaaggagttcttccgggattcgagccgttgctgccctcacctctgcaggcccagcgtcgagcggagatccaatcggaaattgaactgacttcatcttttgtcgcatccccgtcaggagaagcaatgtcaggagtgatcacaaagttcgcggttacatccatggtgatgtggatggcccctgttgcgatcatgtatgggttttactaccaggtgtttccaggtgtgagtcagatgtcatcctcggcgcagacacttgccagtgggttcctggctgtcatatcagttaatctagtgatcggcttttacatattcatggcgatgaaggagactccacaccaagagccacagccagatcccaccttcctggagaaagccaaagcgagtatcaaccagccaacatcctctcgagtgagtgatgattccaaggggaagggaaaggtcgagtaagctgtagcatgttggcttaggtctcgtgtatgttaagtgcatgttatttaggaggaatagttatgccacaccatcacaaggaccgcaacctttcacaatttatgattttgctgtaaatcttgacagttatggctatggagcaatatgaagttgaaccttttgtacctatttgatttggaaactctgttcaatgttgttttagtcaggatactcatcagaacctcgtgcggttgc

SEQ ID NO: 134910 - DNA, 655 bp, Zea mays
  Clone ID: MRT4577_54520C.1
tcactcgcctgcctgtgtccgtctgtccatccatccatccatcccgctgccagtcctcgcgccggcctccccgaaataatcggaaattgcaacccggtccacgggtcggatcccccaaaccgaaccctcccgagctcgcccggcgatggggatctcgagcatgccggagccgcgggacagcctgctggggtacctggtgtacaacgcggtggtgtcgatcgcggcgctggcggggctggtgcgggcggcgctggtgttcctggacctgcaggccgcgcagctgcccggtgctccgctacccggagctcgagtgatcctgtttctcggccgtcgcgcgcctcggctgtgtgctgcaagctccgtgtggacttccgtgtgcgcgtagcaaaagaaaaaaaggagtataggagcggtagtagtagagttgctgttgctttccctttctcgttttgtgttttgcggttgccctgcccccatgctcttgttgtttccgcgctgtcgctgtagcgtgtaaatactccggctcgcccttggcagcagagagtagtagagtgctcacgtggctgggccgatggtgtagcaccttttacgagctcagctcgtgtgtgtacatttgcatgctttcaattccaatttcccgagaccaaatatcgag

SEQ ID NO: 134911 - DNA, 261 bp, Zea mays
  Clone ID: MRT4577_54521C.1
ggtttatttctcatcctaatagggagctcttggttgcacaccggattttcgcaaccaccctcttccatgcactgctgttttgcaccccccacagcaacacacgtttttacatacgtcctccattccatcaaaatcgactcccgtgacattgtcaccatccattgagttgttatgacaccctccaatctccacgtactcactacatgccattaatcaattaccccacgacgtaaacctactactcttttttgcacattctac

SEQ ID NO: 134912 - DNA, 260 bp, Zea mays
  Clone ID: MRT4577_54522C.1
ggggatgggcggcagcaccagcctgggaccggcggacaacaccctggacgccgccgcggggggcctgctccccagcgccgtatccctcgccgccgccgccgccagcctctacttgctcgccctgctgcagcattgattacgtgctctagctgctagctatgcggtccgtgaaaaagaaagggggcacagcggatagtactggagaatgtgaatcggttcggttggctgcaggacggatccgatttcacttcacccatctt

SEQ ID NO: 134913 - DNA, 880 bp, Zea mays
  Clone ID: MRT4577_54523C.1
acctcgaggccggccggggcgctaccccggccgggccgctccccctcctccccctgcctgtgtctgtctgtccatccatccatccatcccgctgccagtcctcgcgccggcctccccgaaataatcggaaattgcaacccggtccacgggtcggatcccccaaaccgaaccctcccgagctcgcccggcgatggggatctcgagcatgccggagccgcgggacagcctgctggggtacctggtgtacaacgcggtggtgtcgatcgcggcgctggcggggctggtgcgggcggcgctggtgttcctggacctgcaggccgcgcagctgcccgggggcgcgggagcgggcgcggacgacgacggcggggaccgtctcgcggcgtcgggccccggcccgggcccgggcctgggcctggcggagcggttcctgagggccttccggccggcgctgtacggggtgctggtgcccacgtgcccctccccgccgacgagacgccggtgctccgctacccggagctcgagtgatccgggcctcggcgccgtcgcgcgcctcggctgtgtgctgcaagctccgtgtggccttccgtgtgcgcgtagcaaaagaaaaaaaggagtataggagcggtagtagtagagttgctgttgctttccctttctcgttttgtgttttgcggttgccctgcccccatgctcttgttgtttccgcgctgtcgctgtagcgtgtaaatactccggttcgcccttggcagcagagagtagtagagtgctcacgtggctgggccgatggtgtagcaccttttacgagctcagctcgtgtgtgtacatttgcatgctttcaattccaatttcccgagacaaaataacgaggacaatcgcccta

SEQ ID NO: 134914 - DNA, 831 bp, Zea mays
  unsure (1)..(831): unsure at all n locations
  Clone ID: MRT4577_54524C.1
ccggccgggccccctcctcacncgcctgtgtgtgtctgtctgtccatccatccatccatcccgctgccagtcctcgcgccggccaccccgaaataatcggaaattgcaacccggtccacgggtcggatcccccaaaccgacgaaccctcccgagctcgcccggcgatggggatctcgagcatgccggagccgcgggacagcctgctggggtacctggtgtacaacgcggtggtgtcgatcgcggcgctggcggggctggtgcgggcggcgctggtgttcctggacctgcaggccgcgcagctgcccgggggcgcgggcgcgggcgcggacgacgaccgtctcgcggcgtcgggccccggcctgggcctggcggagcggttcctgagggccttccggccggcgctgtacggggtgctggtgtccacggcgtgcggcgcggcgcccacgtgcccctccccgccgacgagacgccggtgctccgctacccggagctcgagtgatccgggcctcggcggccgtcgcgcgcctcggctgtgtgctgcaagctccgtgtggccttccgtgtgcgcgtagcaaaaggaaaaaaggagtataggagcggtagtagtagagttgctgttgctttccctttctcgttttgtgttttgcggttgccctgcccccatgctcttgttgtttccgcgctgtcgctgtagcgtgtaaatactccggttcgcccttggcagcagagagtagtagagtgctcccgtggctgggccgatggtgtagcaccttttacgagctcagctcgtgtgtgtacatttgcatgctttcaattcagtttcccgagcc

SEQ ID NO: 134915 - DNA, 2430 bp, Zea mays
  Clone ID: MRT4577_54525C.1
atggagcccgcggtggctacagcgggtgaagggcagcggttcaagcggattccgcggcaggcgtggtcggggaacctcgaactgggtcctctgaatcacccaaccgtttcaaaagttacttggcattatgcattgtgcttgcacatgtgttggaccaggatcatcaagcttaatgaaagcttagatcactggccacatctaaatgagctggtacagtgctacaaggctgattttgtgaaggatgactgcaaatatggacactatgagagtgttgcatcaccgtctttccaaaatcaaatttttgagggacctgatactgacatagaaacagaattgcagctttgcaatgcaaggcattccaagtctgaggatgctactgaagatgatacaccaagcacctcagggaggcaaatatatgaaactgaatcatctggttcgtcttcaaaagtgcactgtagtttgtcaccattgccagcatatgaggctgcatttgattgggagaatgagaggtctttgatatttggccaaagggtgccagaaagtatacctgcaataagcaacagtggcttgaagataactgtcaaggtactatctttgtcattccaagctggattagtcgaacctttcagtggaacgatttgcttgtataacagagatagaagagagaggctgtcagaggacttctatttccatatgcttccaacagatatgcaggttgaccagggttccttggatcgtcgaggtgttttttcattggacgcaccttctccatcggtctgccttttgattcaattggaaaaggctgctactgaagaagggggagtaacaccttctgtttattctcgtaaagagcctggtgccctccaggaaatttggtggagttggtggagcaggtcattaggtgctccagaaaatcgtggagctagatctgaagccctgtccaaggtctactggagccggttttttgaagccacagccaacgcattcggagggcccatccaagctctgggaggcttgatattcccaggcctccaagctgaagaggacgacacaccttgccccaagccaccaaacagtgcccccctttggcgtcctttcttcctctccaaagaaagccctttcttattttatcaatcgcatcaagggcccaacggggtatatcaattgccattgcaagatacacagtcttaccttgacacctccttgatcgcaatgttgtccatcacatttaatgtgatggacgggagccttattcagaatgatagtactgcgaggccgtctggagtagagatgaagatgatacggggttgtcctgtcccaagggcaggaccgaacatttaccttagtttgcaggtgcacttagctgagaaagagaagcaaaagctgcaagtatggtctcgaatcatgccttataaagagtcatttgcatgggccatgattcctctgtttgaaagtaaccgtgcgggtggtcttagtgatgctgcttctcctagcagtcctctagcaccgagtttatcaggatcaagttctcaagatagtattgtggaccctatttcgaagcttgctttagatggaaaagtcaaccattactcaagtggaagctcagttattgtagagatatcaaacctaaacaaagtgaaggaaagctatatagaggactccctccaagacccaaaacggaaagtacataaaccagtgaaaggtgttttgagattagaagtggaaaaacttcatgatgaccataatgatgtggataacgcttctgaaggtggaagcatggccaatgatttgaatgatgctggtgacatcaataatggcagaagcaacagaagtagctttgatgggattcacagttctgtgaattctattgccattgccaaaaaagatgctcatcacaatggacacacttctaatgctgagaatgttgacaattttcaagcttttgactttcgggtgctgacccgaagtgagccattttcgcaactttttcattgcctctatgtgtacccattgactgttagcttgagccgcaaaagaaacctctttgttagagtggaactgagaaaggacgattctgacatcaggaagcctccattagaggtgatcattggatattctgtacttccactgtcgacacatattcagttactttcagatgtgtccttgccgattttgagagagctcgttccacattacctgcaggaaagtggaaaggagagaatggactatctggaagatgggaaaactgttttcaggttacgtttaaggctctgctcttcattgttcccaattaatgaaaggataagggacttttttgttgagtatgatcgccatactctacatacaagtcccccatggggttctgagcttcttgaggttgctgcatttcgagccatggttaacattttaacccggttagagatcagatag

SEQ ID NO: 134916 - DNA, 179 bp, Zea mays
  unsure (1)..(179): unsure at all n locations
  Clone ID: MRT4577_54526C.1
tcgtaccggttccggaattcccgggntctacccacgcgtctcggattttctgccctccttggccctccttggctctttcagncaaacnngttgctaccgcgactatgtgattccacgaatggctctnacaacaatnnacctctcnntccggtgaccagcnncgcgagaatnnttgaata

SEQ ID NO: 134917 - DNA, 302 bp, Zea mays
  Clone ID: MRT4577_54527C.1
ccgccggcggaccggaccggaaaacccgggacgacccacgttcctgtgacacccgaacaacagcgggcgggggggatttatagaaaggacggccgaagcccccccggccgagaacaaggaaggcggacgccagggcaaccaccacgaaacggacaagaaccaagccgaggaccacgggggagagaaacagaacggcacaaggaaccaaaacgcaaacaagaagaccaagcacgaccaggggcggcaacggagacacaacggacgggcccgggccgccgaaaacggggaggcggaaaaacaga

SEQ ID NO: 134918 - DNA, 536 bp, Zea mays
  unsure (1)..(536): unsure at all n locations
  Clone ID: MRT4577_54528C.1
gtactgtgcagatcgtagtggggagcttcgacgccggtggaaagaagcagccgaagcagcttgctccgtcaccggcgccactaaatctcgcgccgacgggcgtggcggcagggccgagcagcccgccgtccagaggcacattgagcctaagcgagtcgtccagtggcgccccgccgagcccgccgcacgcaggagccagcggcggccatgggcagcagcagcagccaggtggcttctccggtctgttctggaaatgacgagacccctggacaccgtctgaccgtggtagaactggcagaaaggactaaggcgcgtgaggcactcggtgagaagcagcggtagcttgtaggtggtgtcaagactgtgtagctcttgctgttgctgtaggtgtaaatcgtgcgttgtgattgtgaggtggttgcttattgtctgtcgtctggaatggatgccgtgtactgaacctgtgcccccaatgcagcatgtcggaagttcttggtttcttcaaaaaaaaaatncagtggcgggcgggcggggag

SEQ ID NO: 134919 - DNA, 809 bp, Zea mays
  unsure (1)..(809): unsure at all n locations
  Clone ID: MRT4577_54529C.1
gccggccgggttccgctctcgatccggaaactctcaaccctagccgcctcctgcaagtttcagagctcaggaatctgcgccatggcgagtgagacggagaccttcgcatttcaggctgagatcaaccagctgctctcactcatcatcaacaccttctactccaacaaggagatcttcctccgcgagcttatctccaactcatccaccttgtcccagacaaggccacgaacacgctctccatcatcgacagcggcatcggcatgaccaagtccgaccttgtcaacaacctcggtaccatcgccaggtccgggacgaaggagttcatggaagcccttgctgccggcgctgatgtgtccatgattggccagttcggcgtcggtttctactctgcctacctcgtcgccgatagagttgtcgtgaccaccaagcacaacgatgacgagcagtacgtgtgggagtcccaagcgggcgggtcgttcactgttactcgtgacacgtcaggggagcagcttggcaggggcactaagatcacactgttccttaaggacgatcagctggagtaccttgaggagcgtcgcctcaaggatctggtcaagaagcactctgagttcatcagctaccccatctccctgtggactgaaaagacaacagagaaggaaatttctgacgacgaagacgaggaagagaagaaagatgctgaggaaggaaaggttgaggatgttgatgagaaggggagagaagannagaagaaaaagaagatcagggaggtttctcatgagtggtcattggtcaacaagcagaagcccata

SEQ ID NO: 134920 - DNA, 485 bp, Zea mays
  Clone ID: MRT4577_5452C.1
ggccgcgtatttagtatttacatattacgagagaattaaatgtatttacatatttagtatttacataaatatacgagccgccgtcgggccgatccatttatcgggccgggccgggccaaagcacgcgggctgccgtatctgcccatacccagcccgctaaacgggccgtgccggcccgggcccgtaaccgaccgtgccgggccgtgtttggaccgggctaaattcgtgccgtgacacgggccaaacaggcggcccgcactgtttggacatctatagctaggccgacgtgctggtgcatgcacatccagcctattggcaaccaaccgaatgccagcgctttggtagtagtcgaatgtttccaccgagacgaacgcatccaccaccttgttcccttgaagcaccgaggccagttccgatggatctaccctttcggaaacaagccttggaacgacaccgtcgcactcctttaggtatacatgtgtcca

SEQ ID NO: 134921 - DNA, 1317 bp, Zea mays
  Clone ID: MRT4577_54530C.1
tggcgcgcccgtgcactcgggtggcgcgggtgagccggggaccaagaaaaagcgtggccggccaagaaagtacggccccgacggctccatgtcgctggcattggtgcccgcatccatggctggggagccggcgccggcggctcttggagcttccggtcctttctcgcgcctcggcccgaaggcgccgaacactgcgccgtcagcgtcgccggacggcgcgaagaagcggggccggccccagggctccaccaacaagaagcacgtggctgcgctcgctgcgctcgggccagcgggggcaggttttacgcctcatcttatttttgtaaaagccggagaggacgtatcggcaaagatcatgtcgttctcgcagcacgggacacgcgcggtctgcatcctttcagcaaacggcgccatatcaaatgtgacgcttcggcaatctgccacttcgggtggaacggtgacatacgagggtcgtttcgagatactgtctctgtccgggtcgtttcttctgtcagagaacggtggccagcgcagtcgaactggtgggctcagcgtttcgctagcaggccccgacggccgtgtcctgggtggctgtgttgccggactcctgacggctgcttcaccggtacaggtctgctgtcgtcctctggatcctgctggctgaaaaatcactaccttcctggttccattcatttcgtcgtggtagcgtaaattacagagcgttgtcggtcgtcgactgtatctccagatttcctcgtcgacgccactcaattgccttcctccgactgcactgtgatcagtgaccaccattgttatctgtactgtgcagatcgtagtggggagcttcgacgccggtggaaagaagcagccgaagcagcagcagcagcagcttgctccgtcaccggcgccactaaatctcgcgccgacgggcgtggcggcagggccgagcagcccgccgtccagaggcacattgagcctaagcgagtcgtccagtggcgccccgccgagcccgccgcacgcaggagccagcggcggcggtggcggccatgggcagcagcagcagccaggtggcttctccggtctgttctggaaatgacgagacccctggacaccgtctgaccgtggtagaactggcactcggtgagaactgagaagcagcggtagcttgtaggtggtgtcaagactgtgtagctcttgctgttgctgtaggtgtcaatcgtgcgttgtgattgtgaggtggttgcttattgtcgtctggaatggatgccgtgtactgaacctgtgcccccaatgcagcatgtcggaagttcttggttt

SEQ ID NO: 134922 - DNA, 776 bp, Zea mays
  unsure (1)..(776): unsure at all n locations
  Clone ID: MRT4577_54531C.1
ctctcgattcggaaacctccagccctagccgcgatccgacaacgcctccatccctagccgactgctgcaagcttcagagttcaagagtcagggcgccatggcgacagagacggagaccttcgcctttcaggctgagatcaaccagctgctctcactcatcatcaacaccttctattccaacaaggagatcttcctccgggagctcatttccaactcttccgatgtaagtccgccccgttaagtcgaagtctgggtgcatcttagtgtgttagtgtttgggcggtaacttgtgctatggtgtgattacacactgcggttaatactgtttctgacgcttgatttggcgctcctacttggtgctgttttttgtgcgacttctgcaggcgttggacaaaatcaggttcgagagcctcactgacaagagcaagctcgatgcgcagccggagctgttcatccacattgtaccagacaaggcttcgaacacgctctccatcatcgacagcggcatcggcatgaccaagtccgaccttgtcaacaacctcggtaccatcgccaggtccgggaccaaggagttcatggaagcccttgctgctggcgctgatgtgtctatgattgggcagttcggtgtcggtttctactctgcctacctcgtcgccgagagggtcgtcgtgaccaccaagcataacgatgacgagcagtacgtgtgggaatcccagcgngcgggtcgttcactgttactcgtgacacgtctggggagcagcttgccaggggtacta

SEQ ID NO: 134923 - DNA, 331 bp, Zea mays
  Clone ID: MRT4577_54532C.1
accaaggactatctttcattagtaccaattttgttttgaaaaccctattttggtggttaagaaattgatattgatttggggttttttgggcaggaacatcgatagatcaggggatagcgtatgttctaatgatggtggctttggcgttgacttatttcattcattgacgtgatggatccgatctatttgctcttcctccataatagtttctgtattcgtagagacgttgcgatacaatgcttttcttctggggtttgtaacgagagattcgtagaaaatcatattaaagccttggtcctcatgctgtgctctgttttagttggttgcatta

SEQ ID NO: 134924 - DNA, 818 bp, Zea mays
  Clone ID: MRT4577_54534C.1
gccggccgggccgggatcccagatcgaatcgaaacttacacagcggcctctagcatcgagtctcatcgacaatcaatcagaccaaaatggcgaccccagtttggttcattaccggaagctccaacggccttggcctgcttctcagtctgagagtcttgaaggcaggacacagagtcattgcaactgttcgggacactacaagatcagccgatgctgtccgccaaatcgaagaagctggcggaaagatcgtcaccattgacctgactgaatccaaggccagcattaccaagaaagtccaagatgcagagaaggtttatgggaggatcgacttcttggtgaataacgccgggtactccgtcttgggaggcatcgagttttttacggaggccgaagccgaacatcagattcagacaaacttatttggtcctctatacaccattcaagctgccctccccggaatgaggggccagggttccggtaccatcatcaacattagcagtatcgctggccaagatgcccaacccagctgcggaatctacagtgccagcaagtttgctctcgaaggtctgagcgagagtctatctaaggaggtcaaagagtttggtatcaatgttttgctggttgagcccggtgcgttccgtacaaatttcctcgaggcctgcgtcaagagcaatatttctggcgaaaaagcatatcaaggaacggtgttggaagcaacactccagaagtttgacaaggctgctgggaagcaggccggagatcccagtaagggcgtggacatcatcttcgaagtggccacgggcgagggagcagcaggt

SEQ ID NO: 134925 - DNA, 440 bp, Zea mays
  Clone ID: MRT4577_54535C.1
ggtacacctgctgctgcctgctccaccatgcaaccgtccgcctcagcgcgtcaccgctcctggccatcgcccctccgcgcatcgcccagctgctcgtgtgcaaagcccagaagcaggacgccgccgcggaccagagagacgtatggcgccgcgccgagctcgcgctcctcgacggagtcaccgtcgtcgccggcgccaatgtggatcccgccagcgcagcatacggaaaagcagacaacgtgttaaccgagcccaaggagagcacggagtacatcgcgtacatgggcgacagcttcaagctgctgatcccgttcaagtgtaacctcaacaaggagcgggagttcccccgccatgtgctccgctacgatgacaacttggacgccaacagcaacgtgtccgtcatcattcagcccacgttcaataagatcatcgccgactac

SEQ ID NO: 134926 - DNA, 357 bp, Zea mays
  Clone ID: MRT4577_54536C.1
gcccaggacgacacacgacgctaaacttagtcctagcaggagacagagagccgggaaacccgcgacaggctgccgtgctatggactacggaccgtcgagtccgccatagcgaacgacggagaaggggatggccgggatccggccgatcatacacgactgggagccggtggttgtgccaaagactgcagccaccgccgctgccaacaacgatgacaacgccgtcaacgccgcgcgccgctccggcgcggccatcgagaccatgaacaagtacaacgctggtccgaacaccgcggcctccatcggcacctccctcaacaccaagcaccccgaccatcagacagagagcttcgcccatcg

SEQ ID NO: 134927 - DNA, 268 bp, Zea mays
  Clone ID: MRT4577_54537C.1
attaccacacgttatgatgcaactttggaagagagtactgctggttccagaacttcacaaacagacatttgttaacgcagacgaccttctgaatggccatcctgttaccacagcgccacaaggctccagagataccgacaagcacatccattggctagtgagaaaattagcgatagagcagaagacgccatcaacaaaagttctctgaaaatttcgacaacttagtgaagagagcctaggcactaatggctcccatcagaatggtttc

SEQ ID NO: 134928 - DNA, 376 bp, Zea mays
  Clone ID: MRT4577_54538C.1
aaactaattaccctcggtgccctccctctcggcggcggcggcgcaagtcaccttcatctccggcgcggcacatggcaggcggcacggttgcacatgctaccctcaatggccccatcgtggtgaaggagatcttcaatggtctgaccctgggtctgatcgctggaggtatctcaaaaatccaccactgttaccaacatatgaaagctatatgcttctacgacatgcttgataagggccagatcgtcgtcggccaggagtaattcccacgtgtcacctcacaagtttatttttccagttgtttttgacaactcactctggacaatacgacaccttgaatactattgagatttggcatgaaactcatcataaccatttg

SEQ ID NO: 134929 - DNA, 378 bp, Zea mays
  Clone ID: MRT4577_54539C.1
ctattcctcacgagcgattgcggttttggttgttagaggcgatggggcactccagcgtgtgggactcgcaccccaagaactacggacccttatcccttgtttgcctggtctgtgcgaacccttatggactgatcaggaagtacgggctgatgtgctgcatgcagtgctttcgcagcaactccaaggacattgtctttatcaagtaccgctgaaggtagcttggctggctatctgtatgccatcacttgctcaaggttttatatgccatgccacaattttatatacctgtctttaaatgtttcctttaaaaccttcagtatttaagttccctcaattttttttactggtgaaacttaaatcttttgcttttctcattta

SEQ ID NO: 134930 - DNA, 365 bp, Zea mays
  Clone ID: MRT4577_5453C.1
tcttctgcgatgacctagtggagctgagctgctaccttggagtattgtgccgaaaggtgcggagtcgaggagaggatagagcgcgttcgaacagcgaaatacggaggcagtgctagacacggccggtaggcaaatgagccacggtgagctagctaaggtgcttgtggcggtggttgttaaaaaggttctcggccgactgcttgcggtggaaatggatgactgaaaacaagcccgggccaaggcccacgctgaccttattgaggccatccatacatgttaatcgagcgacctacaagaagtcctgttagaggagtctgctcggctatgtggacaaatcatgatgctgcaggcccgcactgctatca

SEQ ID NO: 134931 - DNA, 453 bp, Zea mays
  unsure (1)..(453): unsure at all n locations
  Clone ID: MRT4577_54540C.1
tgttgactgtaacgtggcgtgctcannatccaccacgttgaagaaacangnngccaagacnnatttttggagaaaagtttaacgtcgatgaagctccgaagacgcnttgtcttaatcanannagttcaacttttgcttctnnttggaattatttaacacncnnaatattacgcgatnnngagaattgtccgaaaagatggaatggaagntncagagccaaattggtcttgccttttaaatgaagaaaacagtcccggatgggccgaaaacttactcacgtcgaagaaattcagaatctcacactcaagcgtcaattgaaggcccttcagcataacgggacctcagcgctctcggcagagaaaagcaaacgattgaacacgattctaaataaaatgagcaccatctacagtactgggaaagttttggacccaaatacacaagagtgcttaacac

SEQ ID NO: 134932 - DNA, 674 bp, Zea mays
  Clone ID: MRT4577_54541C.1
ctctgcgccgtcgccgccgtctccttccccatctccgcctccgtctccatccccatcccgcctcgtgccgcagcttctggtcgccctcctccagcgccgccgcttcgacgccacgctccgggtctccccgaccttccccggcttctccccgcactcaatcgccgccgcgctcgccgccatcccgcgcttccttctcccgggctccccgcgccacctctgcccgcaacggccgttcccctccgcctcgcacccttccaaccgtcgcctcgccgctgctctcactctcgccttcctctcctggtcgcacgcccacgcccacccccaccccgtcccgctctccgaagccccgctccgcgccgcggcgctcgcgctgacccgcgcccacgcgctctcgccgctcttccgcctcctccgtgcgcacgcttcggtcgtctccactgctgcgctcaccgacgtaatccgcgtgctcggtgaggaagggctcccgcgccacgcgctcgccgcgttccaccgcatgcgccagctccactgcgcccctgacgcgcagtgctacaacactttgatcgctgcgctgtgccagaacgggcggtttagtgatgccctgttcctgctcgaccagatggagcgacccggtgcgcgctgcaagccggacacctacacgtacacggtgctca

SEQ ID NO: 134933 - DNA, 596 bp, Zea mays
  Clone ID: MRT4577_54542C.1
tgctacccaacgtccgattcgggaaatagctccagcaattagatacgttccagtccttctgagactagtaatcatgctttatctgctgactttaactcttcagttgggggactgctatgaggtcacagattttcttgctaagcacagaatttttgaggatttacctcctgatttctccaagaagattgtacctactctgaaatttagaaatggtacagtagcacacttcacaagagtatttggtgatgcacttgctgcaattggagacaccatggtcattcttggtttgcccaaaggcccgctaattagctcaggcttaaaagcttatagatttagctatactgatttgagtgatattagcaaagtaatggcattactttgtccagaagagcagaaattttccatgcaaaaagatacaaaagcttggaatgatacttgtggaaatttgtctattgctagaatacaagataatgagatggtcagtagaattgaaacgcatttgagtgatgagagtattaccttttgggaggagtttgagtcgtttcaagtctttatgcatgaccagaaagactcaagggttattattctattccttg

SEQ ID NO: 134934 - DNA, 252 bp, Zea mays
  Clone ID: MRT4577_54543C.1
accgagagaaaggggaaacaaaaaatggataatttaaagaaaacactttccggtaggagggccccataatgggggggaggccaaacctttttttttaaaaggcccccccgacaatgggttgccgccaccacaggggagggttaaacacacccaacggggcggatggaaccaattgttgctgggggagaaaggcaggccccaaggggaaaagcacggacaggggaaaaaaaaacgggaggggctggtgtaaga

SEQ ID NO: 134935 - DNA, 381 bp, Zea mays
  Clone ID: MRT4577_54544C.1
aaagaagaaacgaaaaagggggggcgggtgcaaaaaaagaaaaagaacgggcccccccccaagcccaggcaacaaacaacacacagaaaacgaaactaacagcagggcgacaagcaccggatacccgggcggcaagcaagagacaagcgcgcagacaccgtcagacacacgcaaagagcggggggggatacgacggacgagcgcacacacaggaggagcaagcacggctaaaggcacaggaagcccgagaggacgccctggccggacaaacagaggaccaggccgagggagaaggagaaaccgaggcccacccccaccacggtggccaggagggccgagcaaaggcacacgggagcttcaagctccacgagcccggggagc

SEQ ID NO: 134936 - DNA, 206 bp, Zea mays
  Clone ID: MRT4577_54545C.1
gcagtaggttggcgcattcataatacaaaatggacagctgcacgctaagagagaagccatgcatctgtttgtatcctgcatcatcataacaatgcgctacaagtcttgcatgttcgtgttgtttgagcattatcgcgagaacatattatttttatattccaacccgttgtctgaactgtagagaaaaaagaaggctaacctacaag

SEQ ID NO: 134937 - DNA, 333 bp, Zea mays
  Clone ID: MRT4577_54546C.1
attcggctcgagctctatccacccactttgtttaacccgcccgcactgtcctttacagggggggttgaagacgaccagagggtgggacagccagaaagacacgccgcgaccagaaccctgctaacccttccatcggggtctactaccaatgggcgtgacctgatcacggaaatgcgagacgagaattattgatgcaaaacgcaaccagtgtccagccatctacagaattatctccacggaaaggggaagcgcttgccggatgctgaacacgtttcggcttttatagatgggagaggaaatgctcctcaaattagggtatgctccagatatatg

SEQ ID NO: 134938 - DNA, 355 bp, Zea mays
  Clone ID: MRT4577_54547C.1
tgtgtgtccattcctggtccctggaggaccacacaatagtgtatgaacagaaaacaatttgtaaatttctactgattcaagttgcatatcattccagagcttctcagcagacaatctcagccccctagtttaagtctacgtcctcaggggcgccctttacttggttgagatctaaccaatacaaaactgtgatatttgaatctgaatttaggcagtttccgagtcattgagcacgtaatatgttatgtgtacttttgcttgcaggtatattcgtcgcacttgccttgcgctttgatgtctcaagaggtaccaagaagcgttacttcaacagtgcatttttgggatacgctgtggg

SEQ ID NO: 134939 - DNA, 267 bp, Zea mays
  unsure (1)..(267): unsure at all n locations
  Clone ID: MRT4577_54548C.1
ttttttttttttttttttttatggntaagttagctgtggggaggaatgttgaatagcatgtttagtgtccacaaaattacatttacaaactcacgtgcctgaaaggatcattgcctatgctggccaaacgacttttcacaataaaagctgggcgatgtcaacataatttggatgcctatacctaacctccggggcaaattacaccttcctttacgactgtttcccaaaaaagagtctggccttaaaaaactgttgggccagaggaac

SEQ ID NO: 134940 - DNA, 323 bp, Zea mays
  Clone ID: MRT4577_54549C.1
ggaaggcggcggcgaaggttggttcttatagcgggcgccctctttttttttatttttttttttatgaataacttcagggggacttttggaacagatgggggtgttccacaatcaagccaaagaatttcaatgtgcgggaaaaaaaaactcgtacgactaataacgcgatcaaccccttgttggaacattctaaccaatccaaagcaaaaaaaaaaaaccagggtgtgataatattaagggaagaatgccttggcaggaaatcccaagttgaaaagatcttcaacaatttgtacatccagcattgcctactgttttacaggaag

SEQ ID NO: 134941 - DNA, 460 bp, Zea mays
  Clone ID: MRT4577_5454C.1
aacaaagggaaaggcccccggtcaaaatttaccggcccccaaaaatcccacgtcggcaaaaaaaaagcttttttttggctaaacagggggaaaaaccaacccccccccccccccccccaaaaaaaaaaaaaaaaaagggaaaatttattaataaccaaaacgcccccaaaaacaagggcccgggtagttttttccaaccacaaaaaattaacccccccccccccaggggaggaacccaaaaacggtttaatggaagggggaaaaacacccactggggcaaaatacccttttgggaaaaaaacccacccaaggctggggggaccaaaggaggcaatgggccctggcccaataaaaaaaaaaaaagggggccacccaaaaaatacctttgccccaacaataccacccaaggctttgccccaaactaacatttaaaaacttttcccgaagggaaaggacaaaa

SEQ ID NO: 134942 - DNA, 288 bp, Zea mays
  Clone ID: MRT4577_54550C.1
ggccagtgaattccgttgctgtcggccacgagcaggacagggagctttccagcttggttcttagctctaactgagttgttgcctcactgctcgctgtcctcccgcgttgctgtatcactgctcgctgtcctccagcgttgctgccctccacaatgctgctattgccagccatagatcctcaaaaaaccatggcatcgaagagcactatcaccaacaaggatgagcagtgatgatctttcttttttctatttgttactcattaacagttgtagcaaggcgacagcaacg

SEQ ID NO: 134943 - DNA, 233 bp, Zea mays
  unsure (1)..(233): unsure at all n locations
  Clone ID: MRT4577_54551C.1
actgtccgttgtctcgatcttcgagcgccgaccccctagtccgatccaagatgcagatcttcggcaagactatcactgngaaagactatcaccctagaggtggagcgctctgagagcattgacaacgagaagggccagatgcaagacaaggatgggattccgccggaccagcagcggttcatctggggggggaggtagatcgaggacggatgtacaataggagaggacagcat

SEQ ID NO: 134944 - DNA, 163 bp, Zea mays
  Clone ID: MRT4577_54552C.1
ggacataaaaaggggaatccaatagcaacaatagagccacaatggagacccaaatattttgccttcctatgcctcctggtctttttacaaggggtggtaaacccaccatttttccttaaaggctaccaagctctattggtttccttttttccccaaaactttc

SEQ ID NO: 134945 - DNA, 300 bp, Zea mays
  Clone ID: MRT4577_54553C.1
agttccagccacgacccacgcatgcataagaagcctctgcacgtcaacctaccaacactcccatgccgaggctcaccataggcgactccgtgcccaacctggagctggactccacccacggtaagatccgcatccactactactatggcgacggctacaccatcattttctctcacccagccgactgttcgctcgtgtgcacgacggagatggcggctatggcggggcacgccaaggagttccagactcgtgctgtgaagctgctgtgcatattgtgcgacgacgtggaatcgcacaggc

SEQ ID NO: 134946 - DNA, 1351 bp, Zea mays
  Clone ID: MRT4577_54554C.1
gctctttgtcctactgaatctctgtggcgatcgccgggaagagctactacgacgtgctgcaagtgcccaaggcgcgtccgaggatcagattaagaggtcgtaccgcaagctcgcgctgaagtaccaccccgacaagaaccccgacaacgaggagggcaccaggcgcttcgctgagatcaacaacgcgtatgaggtgttgacggaccaggagaagaagaagatctatgaccggtatggcgaggaggggttgaagcagttccaaggcgggagaggaagtggcggtggaatgaacattcaggacatctttagcagtttttttggtggtggtggtggtgggatggaagaggaggaacaacaaattttaaaaggtgatgaggtgattgttgaactggatgcttcattagaggacttgtacatgggcggttcattaaaggtttggagagagaaaaatgtcataaagccagcaccaggaaagaggcgctgcaactgtaggaacgaagtttaccatcgacaaataggtcctggaatgtatcaacagatgactgagcaggtctgcgaccaatgtccaaatgtgaaatttgtacgagaaggtgaattcttgactgttgatattgagaagggaatgaaagatggacaggaggttttgtttttcgaggaaggcgagcctaagattgatggcgaaccaggcgatttgaagttcaggatccgaacagcattacacagccacttcaaacgagaaggcaatgacctgcatgcaacagttacaatatccctgctgcaagctctggttggtttcgagaagacaatcaagcatcttgacaaccatctggtagaaattggcaccaagggcatcaccaaacccaaggagatcaggaagttcaaaggtgaaggcatgccactataccaaagcaacaagaaaggtgacctgtatgtgacattcgaggtgttattcccaaaaaccctaaccgctgaccagaaggccaagcttaaggatgttctcgtgtagaccattgttttccacttgtatgctactgagtttgaggcagagcgccttgaggaaaattttcggagtagcttgcataggaagcagcagctgcttcctttttatgtgattttccattgcaaatcctagcagcatggtcttctttttctttcccttgcgttttgttatgcgcccttaacagctcggtgtaggtttagaaggcacaacaaaactgtaccagaatatttgtacctttggaattctgaatacatagattgaacacctcgggtgcttgcttaattgtaccagaatatttgtacatacggaattctgaatacatagattgtagaacaaaaaaaaaaaaaaaaa

SEQ ID NO: 134947 - DNA, 431 bp, Zea mays
  unsure (1)..(431): unsure at all n locations
  Clone ID: MRT4577_54555C.1
cccctagccgccggggagctcgtctgggccaagccctccaagccccgccggcactgctggtggcccgcgcgcatgctcgccgcgtgccccgcctccgccacccgcggcgcccaagnctcctacttcagtgaccccgccgcccccggcgcgccgtccgcccctcccgcgcaggtcttttttttttncgacgccgacgccggcgccgacatgatggcccgcggcagcaccgcgcgcggattctccggggccgtcgcggaggcagaggcgcgcgccgtcgcggcgctgcgcgcccagctcgcctgcgcttgcgtcccgcccacgccgccgtccggagaggatagcagcgtcaccggcgtcgccaacctggcgcccgcggagttcctggccgcgctccgtgaggccgcattggacgtcttctctgccggcctgtt

SEQ ID NO: 134948 - DNA, 1460 bp, Zea mays
  Clone ID: MRT4577_54556C.1
gccaccaccgtcccactcgctcctgcgagctccagatccggtgtggcggcacggctcagggtggcaacgcgccgcaaccgccgtcgcgcccacacatgccatatccaaccaccatggagctcttcctcatcaagcccatgacatgagctctcgtcgaggtgggctccaggtccgttaccggcgcgggccgctctgtacatgacgccaccgccctcggggccacctccatggcgccctccatcagcaaccctaccagctccccaagtcccatctccatggcgcactctatcagcggtggcgacaccgacctgctcccacctccctgaagtgctccggtcaaactgcacgtgccaaggcagatgcgacgccgatccgctcccatctccatggcgcgctccggcagcggcggcaatgccgacccactcccacctccctggtatactcacagacgtagaaatgatgttaacactatcttcttctgtagggcaaattggacccagtcgttggtagacaagatcagattgagcgtgttactcagattttgggcaagcggacaaagaacaacccctgcctaatggagagcctggtgttggaaagactcctattgctgaggggcttgctcagcgtattgccaattgggatgttcctaaaacaattgaaggaaaaagaagttaggttattactcttgacatggggctccttgttgctggaactaaataccgaggagagtttgaagagagactaaagaaacttatggatgaaattaagcaaaatgaagacattattctctttattgatgaagtgcacacactgattggagcaggtgcagcagaagtgcattggtgccacaacactggatgagtataggaagcatatagagaaagatccttccttggaaagaaggtttcaaccagttaaggttccagagcctactgtggatgaaacaatacagatcttaagaggacttcgtgagagatatgaacttcatcacaaactaagatacacagatgatgctttaattgctgctgcacagttgtcttatcagtatatcagcgatcgttttctgcctgacaaagccattgacttgattgatgaagctggatctcgtgttaggctgaggcatgcgcagctccctgatgaagccaaagagctggacaaagagctgcggcagataaccaagcagaaaaatgaggctgtatgtggccaagattttgagaaggtatactgttatttggtacagcggcggcaacgccgatctgctcccacctccctggcaacgccgatctggttaataccaagcattatgttgtttccttttgagataaatattttgttaccaattttaccttttgtctcctcttcttgttttttgttctataatctgtagcaaatggctaacgatgaggatatccatcactttgtctatgacaatagaactgatatgttcaagattccgtagc

SEQ ID NO: 134949 - DNA, 140 bp, Zea mays
  unsure (1)..(140): unsure at all n locations
  Clone ID: MRT4577_54557C.1
ccggccggggccgcatcgcgatacggtgctcaatgccccaggctcggacgcctcgacgcccagctccgtgctcgcatggctagcggcgncctccatcgatccgcctcactatgtctacgcacgggagacggtacgcatgg

SEQ ID NO: 134950 - DNA, 676 bp, Zea mays
  Clone ID: MRT4577_54558C.1
gtgcatttgtgtgtttgcgtctactgtgcggctacaggcaaggaaacaggatctgtcacggaaggcgattcccatttctcagtgatgtcgatgtcctgtactcctgtatatttggattcaacaatatgccattagtgcattggtgccacaacactggatgagtataggaagcatatagagaaagatcctgccttggaaagaaggtttcaaccagttaaggttccagagcctactatggatgaaacaatacagatcttaagaggacttcgtgagagatatgaacttcatcacaaactgagatacacagatgatgctttaattgctgctgcacagctgtcttatcagtatatcagcgatcgttttctgcctgacaaagccattgacttgattgatgaagctggatctcgtgttaggctgaggcatgcgcagctccctgatgaagccaaagagctggacaaagagctgcggcagataagcaagcagaaaaatgaggctgtacgtggccaagattttgagaaggtatactgttgtttggcacagcggtgacaaagccgatccgctcccacctctctagcaacgtcgatatggttaataccaagcattatgttgtttccttttgagataaatattttgttactgattttaccttttgtctcctcttcttgttttttgttct

SEQ ID NO: 134951 - DNA, 975 bp, Zea mays
  unsure (1)..(975): unsure at all n locations
  Clone ID: MRT4577_54559C.1
gtcgtggntgccctcgtgaggttctacgccgacgccttcaggagggattcacagaggccatggtgaggatggccagcttgagtcggctcaccgggagcagcgcgagatccgctacaactaaatgataggaggcgattcccatttctcagtgatgtcgatgtcctgtactcctgtatatttggattcaacaatatgccattagtatgctgtcaagcgtcctatttgcaagagataaatggcttacgcccgaggggcttattcttccttatcatggtcggtcgtgactttggttantccactgaaaagatatgcttggtggtgctttcttgtgttgaagaacaagtatcccacggaaccacaaccgtttgtattatctggtgatttcctacattattagctggcctaactaaaccatgcgctcagaccctaaaccagctgtaagtctgtaacttaaaagcacagtgcactagcggaatggggttccttgctttttggagcgtttccccagtcggatcggcggcagagcaggtcacgtggacggggctccttgttgctggaactaaataccgtggagagtttgaatgcactggtgccacaacactggatgggtataggaagcatatagagaaagatcctgccttggaaagaaggtttcaaccagttaaggttccagagcctactgtggatgaaacaatacagatcttaagaggacttcatgagagatatgaacttcatcacaaactgagatacacagatgatgctttaattgctgctgcacaactgtcttatcagtatatcagcgatcgttttctgcctgacaaagccattgacttgattgatgaagctggatctcgtgttaggctgaggcatgcgcagctccctgatgaagccaaagagctggacaaagagctgcggcagataagcaagcagaaaaataaggctgtacgtggccaagattttgagaagaatctgtag

SEQ ID NO: 134952 - DNA, 277 bp, Zea mays
  Clone ID: MRT4577_5455C.1
gttttgcggcatcatggctgcccttcggcctctggtgaagcccaagatcgtcaaaaagaggaccaagaagttcatcaggcaccagtcggaccgatatgtgaaaattaagcgaaactggcggaaacccagaggcatcgacaacagggtgcggagaagattcaagggccagatcctgatgcccaatattggatacgggagtaacaagaaaaccaagcacatgctgcctagcggcttccggaagtttctggtccacaatgtcaaggagcttgaagtgctg

SEQ ID NO: 134953 - DNA, 379 bp, Zea mays
  Clone ID: MRT4577_54560C.1
ggacaaaagttccacatgctgaaaatggccaacactctttttaactaaaaaggccattaccccatggttaaacccccaaaatcatcggggctttttgcttcaaaggcttactgcaaaaaaagggaccccattcttttcttggcatccaaatattagttcttggatttcagggcctctttctcaaacccaattggggggaattgttttgcaaattcctctacatcatggggaagctttgcaatctcaacttggaggctatcaaattgcaaaggggcaacaaagcccttcagctttgttccccccgtcggtgcagccttattcttcaaggccaaattccctggtgctttgaaaaagtcaccaactttagcgaaaatttttt

SEQ ID NO: 134954 - DNA, 1334 bp, Zea mays
  Clone ID: MRT4577_54561C.1
gtcgtggatgccctcgtgaggttctacgccgacgccttcaggagggattcacagaggccatggtgaggatggccagcttgagtcggctcaccgggagcagcgcgagatccgctacaactaaatgataggaggtttcgctgccatttgcagcgactgtgttccagttcgaccgtttggggaaaaggcaaggaaacaggatctgtcacggaagtgtgttgttctgaaacagtcacaaagagggcctaagaagctgatggaatcctcattcaccgccgctaaggagtttgagcgggatcggagaggagacgcgattcccatttctcagtgatgtcgatgtcctgtactcctgtatatttggattcaacaatatgccattagtatgctgtcaagcgtcctatttgcaagagataaatggcttacgcccgaggggcttattcttccttatcatgcgttttcaggtcggtcgtgactttggttatttctcagtgatgtcgatgtcctgtactcctgtatatttggattcaacaatatgccattagtatgctgtcaagcgtcctatttgcaagagataaatggcttacgcccgaggggcttattcttccttatcatgtgcattggtgccacaacactggatgagtataggaagcatatagagaaagatcctgccttggaaagaaggtttcaaccagttaaggttccagagcctactatggatgaaacaatacagatcttaagaggacttcgtgagagatatgaacttcatcacaaactgagatacacagatgatgctttaattgctgctgcacagctgtcttatcagtatatcagcgatcgttttctgcctgacaaagccattgacttgattgatgaagctggatctcgtgttaggctgaggcatgcgcagctccctgatgaagccaaagagctggacaaagagctgcggcagataagcaagcagaaaaatgaggctgtacgtggccaagattttgagaaggtatactgttgtttggcacagcggtgacaaagccgatccgctcccacctctctagcaacgtcgatatggttaataccaagcattatgttgtttccttttgagataaatattttgttactgattttaccttttgtctcctcttcttgttttttgttctagaatctgtagcaaatggctaacgatgaggatatccattactttgtttatgacaataaaactgatatgttcaagattccgtagcaacgcacgggcatccacctagacagaataatgatgttgggttctcttgcaaaaaaagattttatatgatttatttattgtttggtatggtttggcccgt

SEQ ID NO: 134955 - DNA, 115 bp, Zea mays
  Clone ID: MRT4577_54562C.1
acccacgcgtccgggcgcccgagtacctccatacgtttcttcgccacccagtgcacccccgtggttaatttcggcgttgtggcccttgaaggggagttctgtcggggggcgatcg

SEQ ID NO: 134956 - DNA, 1318 bp, Zea mays
  Clone ID: MRT4577_54563C.1
acaattcatcttactactgctttgacaaacattggtctgctctgctttggtctgtgctttaggattctgtttcattgggagaaacaaatgcccttgcttactttcattataactgtgctatttttttgatccaatgttgttctaagatcaagaagtggaatacttgttctaagggtcccaagttgggtggtggtggtgggaagcgttttcaggtcggtcgtgactttggttatccactgaaaagatatgcttggtggtgctttcttgtgttgaagaacaagtatcccacggaaccacaaccgtttgtattatctggtgatttcctacattattagctggcctaactaaaccatgcgctcagaccctaaaccagctgtaagtctgtaacttaaaagcacagtgcactagcggaatggggttccttgctttttggagcgtttccccagtcagatcggcggcagggcaggtcacgtggacggggctccttgttgctggaactaaataccgtggagagtttgaagtgagactaaagaaacttatggaggaaattaagcaaaatgaagacattattctctttattgattaagtgcacacactgattggagcaggtgcagcagaaggtgtaattgatgctgctaatattttgaagccagcattttgtaattttcccaaaataaccacattgctggtgattttatctgtgtagtgcattggtgccacaacactggatgagtataggaagcatatagagaaagatcctgccttggaaagaaggtttcaaccagttaaggttccagagcctactatggatgaaacaatacagatcttaagaggacttcgtgagagatatgaacttcatcacaaactgagatacacagatgatgctttaattgctgctgcacagctgtcttatcagtatatcagcgatcgttttctgcctgacaaagccattgacttgattgatgaagctggatctcgtgttaggctgaggcatgcgcagctccctgatgaagccaaagagctggacaaagagctgcggcagataagcaagcagaaaaatgaggctgtacgtggccaagattttgagaaggtatactgttgtttggcacagcggtgacaaagccgatccgctcccacctctctagcaacgtcgatatggttaataccaagcattatgttgtttccttttgagataaatattttgttactgattttaccttttgtctcctcttcttgttttttgttctagaatctgtagcaaatggctaacgatgaggatatccattactttgtttatgacaataaaactgatatgttc

SEQ ID NO: 134957 - DNA, 782 bp, Zea mays
  Clone ID: MRT4577_54564C.1
acccacgcgtccgcccacgcgtccggaaggttattactcttgtcttggggctccttgttgctggaactaaataccgaggagagtttgaagagagactaaagaaacttatggaggaaattaagcaaaatgaagacattattctctttattgatgaagtgcacacactgattggagcaggtgcagcagaaggtgcgattgatgctgctaatattttgaagccagctcttgctagaggtgaacttcagtgcattggtgccacaacactggatgagtataggaagcatatagagaaagatcctgccttggaaagaaggtttcaaccagttaaggttccagagcctactgtggatgaaacaatacagatcttaagaggacttcgtgagagatatgaacttcatcacaaactgagatacacagatgatgctttaattgctgctgcacagctgtcttatcagtatatcagcgatcgtttcctgcctgacaaagccattgacttgattgatgaagctggatctcgtgttaggctgaggcatgcgcagttccctgatgaagccaaagagctggacaaagagctgcggcagataaccaagcagaaaaatgaggctgtacgtggccaagatttcgagaaggctggcgaattaagggaccgagaaatggagcttaaggctcaaattacagccattattgacaagagcaaggaaatgattaaagcagagactgaatctggtgaagtcggtccgcttgttactgaggcagacattcaacatattgtctcctcttgg

SEQ ID NO: 134958 - DNA, 3026 bp, Zea mays
  unsure (1)..(3026): unsure at all n locations
  Clone ID: MRT4577_54565C.1
tgccctcgtgaggttctacgccgacgccttcaggagggattcacagaggccatggtgaggatggccagcttgagtcggctcaccgggagcagcgcgagatccgctacaactaaatgataggaggtttcgctgccatttgcagcgactgtgttccagttcgaccgtttgggngaaaaggcaaggaaacaggatctgtcacggaagtgtgttgttctgaaacagtcacaaagagggcctaagaagctgatggaatcctcattcaccgccgctaaggagtttgagcgggatcggagaggagacgtcagttcttcctcctctgctcaatgcggccattcgccctgtcccccaaccctgaactccacactgccactccgtgctcattttttctgaaggggaaatattcatctccttgttgttttgtaccatggatactttagcatcattctcatactactaggagtgtaggcgattcccatttctcagtgatgtcgatgtcctgtactcctgtatatttggattcaacaatatgccattagtatgctgtcaagcgtcctatttgcaagagataaatggcttacgcccgaggggcttattcttccttatcatgcgttttcaggtcggtcgtgactttggttatccactgaaaagatatgcttggtggtgctttcttgtgttgaagaacaagtatcccacggaaccacaaccgtttgtattatctggtgatttcctacattattagctggcctaactaaaccatgcgctcagaccctaaaccagctgtaagtctgtaacttaaaagcacagtgcactagcggaatggggttccttgctttttggagcgtttccccagtcagatcggcggcagggcaggtcacgtggacggggctccttgttgctggaactaaataccgtggagagtttgaagtgagactaaagaaacttatggaggaaattaagcaaaatgaagacattattctctttattgattaagtgcacacactgattggagcaggtgcagcagaaggtgtaattgatgctgctaatattttgaagccagcattttgtaattttcccaaaataaccacattgctggtgattttatctgtgtagtgcattggtgccacaacactggatgagtataggaagcatatagagaaagatcctgccttggaaagaaggtttcaaccagttaaggttcctgagcctactatggatgaaacaatacagatcttaagagggctccgtgagagatatgaacttcatcacaaactgagatacacagatgatgctttaattgctgctgcacagctgtcttatcagtatatcagcgatcgttttctgcctgacaaagccattgacttgattgatgaagctggatctcgtgttaggctgaggcatgcccagctccctgatgaagccaaagagctggacaaagagctgcggcagataagcaagcagaaaaatgaggctgtacgtggccaagatttcgagaaggctggcgaattaagggaccgagaaatggagcttaaggctcaaattacagccattattgacaagagcaaggaaatgattaaagcagagactgaatctggtgaagtcggtccgcttgttactgaggcagacattcaacatattgtctcctcttggactggaattcctgtggagaaagtgtcatcggatgagtctgaccgcctcctaaagatggaagagacgctgcatacacgtatcattggacaggatgaggctgtcaaagctattagccgtgctatccgccgtgctcgtgttggcctcaagaatccaaataggccaattgccagcttcatattctctggaccgactggagttggcaaatcagagcttgcaaaggccctggcggcctactactttggctcggaggaggctatgatcaggcttgacatgagtgagttcatggagcggcatactgtctccaaactcattggatcacctccaggttatgttgggtacactgagggaggccaactaactgaagcagtccgtcgccgcccgtacacagttgttctctttgatgagattgagaaggcacatccagatgttttcaacatgatgcttcagatcttagaagatgggcggttaactgatagcaaggggcgcactgttgatttcaagaacacactattgatcatgacatctaatgtcgggagcagtgtcattgagaagggaggtcgcaagattgggttcgaccttgattatgatgagaaagacacaagctataacaggatcaagagccttgtgactgaggagttgaagcagtacttccggccagagttcttgaacagattggatgagatgattgtattccggcagctgactaaattggaggtgaaagagattgcagacattatgctgaaagaagtgtttgacaggctgaaggccaaggacattaatctccaggtgacggagaagttccgagatagagttgttgacgaaggttataacccgagctatggtgccagacctttgcggcgtgctatcatgaggcttctggaggatagtctggcagagaagatgctggctggtgaggtgaaagaaggtgactctgccatcgttgatgtggattcagatggcaaggtaatagtcctgaatggtggtagcggtgttgctgagccactggaacctgctctcagtacctaaccgaggttaaaatctttgggccgaaatggccttctttacaagtcagctgggctcttcgtgatggtaaagtagactgttattacttggccgctccattagttgctttatctttcattgattttttttttgttggaagtgaggcagtagggtcactatggaaacgaatagacggagaggcattagccgaaatgaatgtttttcagtttgatgcacttgtattattaggccttgctagcaacaaggtgcagatgcctctccgtttgctgttgtactttagtgtaacttaccttccgaatgtattattaggcgttgctagcaacaagatacggaggttatacatttgattttcagtt

SEQ ID NO: 134959 - DNA, 518 bp, Zea mays
  Clone ID: MRT4577_54566C.1
tccgacacccgggcaatctacctaaaagcgccggtccccgaggacgaggtactgacccccatcctactatcaggactcctccgacccgctccgagacgccagcggacggcgggggcgggggaggaactgacaagcaaaagtaaccgagattgaagctacagcgcaagtggtcagaagccgacgagctaagaatgctgaacagactcctcgggtgaggcacgcaaagggcaagagtacccaagcgacctcaacgggctcaatacagacgaggtacagcaagtgcatgcccgaacggtacaccccatgcatagagtgaatgaaaaccatggtaggaataaaaacaatgtcctttcatgaatctcgcatgcgacgcggagggcgcataccctgatgggcgatgatgccagaagaatactacaaataaggctgtggttgagactgtgggccaaaaaaaaaaaaaaacagggggccctttagcggcaagtgccggaacgtttaggggacgagtagatggcgcg

SEQ ID NO: 134960 - DNA, 321 bp, Zea mays
  Clone ID: MRT4577_54567C.1
gggtgggttctctagcagttgaaagatggccacaacacaaaagggaacactgaactcatcgaggtccgcttgccctagggaccacaaggctttaaacgataccccccctcccataaaaagaaaccggcctgcacctactccttgttctagtactccacctcgcagaaggggggttctgcccctgctggacctcccacactaaggccccccatgtggctcctcggccttggtaaactacatttgggccatgccctcatccgggggcccccgccagaaagtttttctcctgaaacatggaagcgaactggtcgctcaccctct

SEQ ID NO: 134961 - DNA, 388 bp, Zea mays
  Clone ID: MRT4577_54568C.1
catcaatggaaggtgtgctgccaaaatattttcactctgaatggtcagtagcccaattcaggctgcaggagggtgaacactatattgttgcatttggacatgagaagaatactgcggcagtcggtggcatggatggaaggtgataacatggaacataacattcgctctctacaacaataagcgctgtagctaaatctaaatatttcttctttccccccaatgggttttgagcttttacagatgccggtttgatccaatcaacggaggagaaatgctgcagctggattgctacaggttcctgaaaccggtggatcaaccgcggttactagttcgtaggaacgcaacatactgtgaggattaccctcaatctattcatgcccacttaccg

SEQ ID NO: 134962 - DNA, 811 bp, Zea mays
  Clone ID: MRT4577_54569C.1
ccccgcgtccgcccagcgtccgcggccgcgtgggctggcatgcacgagaggaaggcggagatggcccggtttgctgacgccttcatagcgctacctggcggctacggaactctggaagaggtgcttgaggtcatcacctgggcgcaactaggaatccataagaagccggttgggcttgtgaacgtggatgggttctacgacccgttgctgtccttcatcgacatggccgtgaaggaagggttcatcaaggaggacgctcggcgcatcgtcgtctcagctcccacggcgaaggagcttgttctcaagcttgaggagtatgttccggaatacgaggtcggtttggtgtgggaggatcagatgccggcggcggagctggagagcccgggatcgcctcctcctcgtctctggacgtcggctgcccttctctgaccagtttctgcggccggatctcgaagtagtaggcatctatgctgatatatatactaagctagctctagactcagcctgttggtttgttcttttgggatgggtgacagtgtttaccttagcatctatcgttagccgcggtgcagtgcgtttctctgtcattgctgctcttttgggcttttgctcctatagaagcaggaaggaaggcatggtatgtctgtatgtatattccgggtacgtggtgacggacctgatcggctgttcttgttcgctcgcagcctcgcactcgcactgtgtgatggaatgggatgatgatgtactgtgtccggaacaaacaaacaaaaaaaagactaattatgcaatgtaatcgattcgtttctaatct

SEQ ID NO: 134963 - DNA, 299 bp, Zea mays
  Clone ID: MRT4577_5456C.1
ttgctacctcttctgagggttggctttctgctgcctcgcatggtgctgccgtctaggctgagtgacctattctatgtatgcgacgattaagatttaacttgtggagctgcatgcagtcgccctgctgctgttattgcgatactcttgtcacttgagaggtggtgttgtatggttagctgactccccgtgcttacattgatacgcttcgcgcttaatgttacttgcgatactctaggtactggatgatgacaaagtcacgggctgcgattggtgtggcagatgataacaaacattaattg

SEQ ID NO: 134964 - DNA, 863 bp, Zea mays
  Clone ID: MRT4577_54570C.1
gtcataccgaggtccttgatgcccagagaggtaactggcgaacctgttggagaagtgagggcggtctctggcatgcacgagaggaaggcggagatggcccgttttgctgacgccttcatagcgctacctggcggctacggaactctggaagaggtgcttgaggtcatcacctgggcgcaactaggaatccataggaagccggttgggcttgtgaacgtggatgggttctacgacccgttgctgtccttcatcgacatggccgtgaacgaagggttcatcaaggaggacgctcggcgcatcgtcgtctcagctcccacggcgaaggagcttgttctcaagcttgaggagtatgttccggaatacgaggtcggtttggtgtgggaggatcagatgccggcggcggagctggagagcccgggatcgcctcctcctcgtctctggacgtcggctgcccttctctgaccagttgctgaccgacagcggccggatctcaaagtagtaggcatctatgctgatatatatatactaatctaattaaccaacaagaacgggacgtcgtcgtctacctctagctctagactcagcctgttgatttgttcttttgggatgggtgacagtgtttaccttagcatcgttagccgcagtgcagtgcgtctctctgtcatcgctgatcttttgggcttttgctcctataggagcaggaaggaaggcatggtatgtatgtatattccgggtacgtggcgacggacctgatcggctgttcttgttcgctcgcagcctcgcactcgcactgtgtgatggaatgggatgatgatgtactgtgtccggaacaaacaaacaaaaaaagactaattatgcaatgt

SEQ ID NO: 134965 - DNA, 246 bp, Zea mays
  unsure (1)..(246): unsure at all n locations
  Clone ID: MRT4577_54571C.1
cactatatcccaactttacatttaaaacttacctcataatactacttaggctagtttcaaatacaacattagcattcccaaatcaatacaacacttataaantctacaattcaacacaatacccttaactcacacaaattttcataccaatcatcattactattccatacaacaacttacctttcattacataaatcttttaaacaaacttccttataaactcattcatatcattccaaaattcat

SEQ ID NO: 134966 - DNA, 311 bp, Zea mays
  Clone ID: MRT4577_54572C.1
agttatacagcggccgccaccgcggtgaacaatttccatgtttgtggtgccattgagtgtccttgtagcatggatcatgggagtcctgatggatcttgatttcaacttgctggagactggttgtttgtttcttgcaatattagtaacggccttcacgctccaggatggatcatcacattatctgacgggactgctgctggtgcttggctgcattggcatctacttatgctctctcgactacagacaccatggaaatgtaagcaacgatgatcagctgggtgtcgcatgcgatccatggaggatttagggcg

SEQ ID NO: 134967 - DNA, 185 bp, Zea mays
  Clone ID: MRT4577_54573C.1
ggccagactgagtgccctgctttgacgcgatcttaccaccgccgtgctaccactgttgctgctagattggatgatcaagagaaaaagctcaacctttctgaccttcccaccaccacaagtggttcattccctcaaactgtggaactcaggatggctcgccgtgaataccaggcaaagaagatcac

SEQ ID NO: 134968 - DNA, 329 bp, Zea mays
  unsure (1)..(329): unsure at all n locations
  Clone ID: MRT4577_54574C.1
nntaccgtatttcgaccttgctttttttcatgctacacctccaccaaaanngaacggccatcggcatccattcaactaaccagtgggccaacacaagaaacctttcctcctgaacataccacctaactactcgttcacacgtcaacacatatcatttattaacatttaatagccaattaacctggaatccatatacacaccacgcagccgaatatcacataacactcagactccacattcttgcgcatccactccaccaaataagacgacttctccttctcgacattcatcatttgctcatccaccttcttggtgctcatctttccacg

SEQ ID NO: 134969 - DNA, 596 bp, Zea mays
  Clone ID: MRT4577_54575C.1
gctgtcaatgcaacagacgaagttcccccacgcgtccgcccacgcgtccgcagtgactcgtagtacaggagtttggattggtcccttctgctttattgcagtctgaaccgattgaatggggaattttcctatttgaaactgaagtacaacttcaatcaaatgatacatgatggctgttctttcatctaaggtttggcatcttacagcagcttcaaccaagtgaaccttaacttaccacatctcgtttgagtgagcttgtaattgctggcccctgtccaagctgagcttttactatcggggacatgcctgcttgcacaatacggcattattatatttattaaagctggtgtgtatttttgcgtttgtgttgtgtgtgatatatgaacttcgaatcttagctgtctggtatctttagttgaatcacaagatacatatggtttccgtcaaggtaatttttttttacggtcacgagccgtaacgtaaatgacactcgagtgctaagtgctaacagtagtaagtttgaataggtcagactttgtcatttgttacctgtcacgttacaaatatgtaaattaaataaaaaggtgcatgtaaaa

SEQ ID NO: 134970 - DNA, 234 bp, Zea mays
  Clone ID: MRT4577_54576C.1
tcgttttcgcgcggggcgagcgaggactatttgtttttgtggtgacgaccgagcggccgtcgttgcttacgtgcccagtcctgttcgtcccttcgccggcgacggccacgacctggaaataggcaaagattgccctgaactgcatatcatggaggaaggctgggtataccctgcattgacagtggtgattctagcgttcaccacaccttgccagtaattctacttgccagggag

SEQ ID NO: 134971 - DNA, 258 bp, Zea mays
  Clone ID: MRT4577_54577C.1
cccatgcttcctattgtcactcgctttcctttcaacaagctaattaagcccggtgataccgcttctatctcggttgattatccataacacatgataaccaccaccaccaccacctcttgtaccacaagaaggacgaggaacagctctcccccggtgtatacctctagtacaccctgtacactgatgccaccgtgactgacgttgtttccaccaactataacgagcaccacgagttcatgaacgacgagaaggagcaca

SEQ ID NO: 134972 - DNA, 286 bp, Zea mays
  Clone ID: MRT4577_54578C.1
cttaggtgagaggttggcaagctgtctcagaatggagccggtggagcctcagcagcaagtggagctcaaccgcctgaatgccagctccaggccaggcaccaatggcgggagtgcaagaacagagagagaagaggaagtagacgactgccccatcgaggaggtccggctgacggtgccgatcaccgactacccggcattgcccgctctcacgttccggacatggttcctggggctcctctcctgcgcgctgctggccttctccaaccagttcttcggctaccgccag

SEQ ID NO: 134973 - DNA, 703 bp, Zea mays
  Clone ID: MRT4577_54579C.1
ggccgctttttttttttttttttagctcgaggcacgtcatcctataattaaatagctaatatgcctatacaaccgaagaggaaaaacatcatatagatacacgtggagaagtgagtgtaactatatatataacaaatatagaggtatctctgaaaaacttctctagcacaactgaaaagttatagaacaggttgaaaattggaaatagtaacataacaccagcatttatgttgagtgtatgacgatagtaccttttctttgtggagagtcatcctctgttcttttcaaaagatttgtactctgtttctagaacaatatgtccttttccgaatatatcaagtgaccaaacaattttacgacaccactttctgagagtaaggtagaccgtgattatgaaaagtgggtaatgataaggtttagtaaatagttaatttacaaaaccgcatgagggccatgtgttgttagttgcgaaaacgtcatggtctgtatctatatcatacgatatgaattaacgattttaaagaagggcctacgatatatctattttgttcctgtgcaatactggtaaaacttttaattaaaataaatattatttgaactactgaagcactgcacaacttcttgaaaattatcgatagaaggaacacattacctttctatgtaacatatgacacatttatgaaagattaagatgaagcacgta

SEQ ID NO: 134974 - DNA, 405 bp, Zea mays
  Clone ID: MRT4577_5457C.1
tatttacataaacgtcatgtggagtccggtcaaagacagaccctggtgactcgttaaaatgagaaatttcattgtagctcattagaaacaaacattggctactgcaactagggatcgagtgaggcagaatgatgaggatactgaagaaggatcagtcagactgtttcagagatcgacatctatgaaagaacgccacctatgaccatgccctcacactgagagtaacagtatcactgaaggagcagacattgggatacagcaccaggcagaccctactgtcactaccaatgaggatgatgacaatagcattctttttgaagatgactaagactaacgatacctattcgctgtgcaagaatcacgagttctaaccactagaacgaaacttgagcaatgctgaagacc

SEQ ID NO: 134975 - DNA, 194 bp, Zea mays
  Clone ID: MRT4577_54580C.1
acctatggagatgccgtcttagcgcctgcctaattttttgtgttggtacaacttgagcgacaaactgacaatcgtgtatatacctggcttgggcctgagacaagtattcagatcttgcctatctgaaaggtctaagctttgttagcactgaagcaatctccgacgacgttatcattcaccagtgtgctgtcgtc

SEQ ID NO: 134976 - DNA, 783 bp, Zea mays
  Clone ID: MRT4577_54581C.1
gccaggctctcagcgacgacgagaaggggtcgccgaggagcactctggtggtggtggggcacaccgatgccgcggagagcccgcgcgcgacgacggagaaggcgaagggcaggaggccgccgccggctcgtggccatggtggctcagcagctccccacttcatgtcctccacggtgtgcagccggcagagacggtgcgcgggaggctaccattctgtcggtaacggtaagccgaggctgacggcggtgtcggtgaacaggtacccgccgccggctgctgagctgagtgggagccagaacgcggcggccagggctagcaggtcggcgtcagtggcactctcgtccggtgtgcacaagttgaggtgcttgcgtgtcaacaagtccgatcaggtcaacgtaataagcaacagcagcgtcgactcgaccgctgcgtcggcaccgccgccgcggcggagggaaagctgcttcggctccaggccggttctacaaagagcggcagcgcccctgcatctgcacaggaggaggatgtctagcctgacatgaacaccgattgcacagttatgatttttcttaacttaattgtttttattagtggtgaaagggttctgaaagatgtttgtgtatgtatggttgttagcttcgtagttcttgactgctgtaactattggttggaggccccttgggcttttgttttttttttgggtttggcttggaaggggcaaaatgatgcgaggaataattgttgatacatggaataatggaatttacctgtggttctggttgc

SEQ ID NO: 134977 - DNA, 342 bp, Zea mays
  Clone ID: MRT4577_54582C.1
tgttttggttttttttttttttttttttttttgcgggggggggcacttttccattcattaatacactacacttgctgtttcagtttcactgtgcaaaactcacagttaaatcatgcaaaaatgcgtaatagtacagtttttttttttaaaaaaaaccaactggtaataacaccctgttttgacataggccctgtgccataaaaagagtagtacttgcctttatgcccacttatttttcccccaactccattttttttttggaacaccccaaggggctggggtgataaaaagtttttatttcccccttttttccccaccaggagtgaatacactttttttttt

SEQ ID NO: 134978 - DNA, 294 bp, Zea mays
  unsure (1)..(294): unsure at all n locations
  Clone ID: MRT4577_54583C.1
gggcccggaannccggggcggacccacccgtccgagagaatgttaaattcgccaaaacctaggatttttttttttaaacaccatccctggggccggttctgccatattaccagaccaccccaccgggaatggggaagggctaaacttgatgtttccgatgcgcaccggcaaagaaggcaccggtgcctggattaacttgttggcctgggaccgggaaaattaacctgttggtttttgtttggccctgaaccggggggggctgtggccaaaaagactctgtccaaattttgattt

SEQ ID NO: 134979 - DNA, 433 bp, Zea mays
  unsure (1)..(433): unsure at all n locations
  Clone ID: MRT4577_54584C.1
gcaacctcgtcgtgccgccgggcatcatcaccaggccgcggctgccgctgccgccgtgggcgtcgccgcccgcgccgaggatgacgcatatggcggtcgcgccgagccctccgccgacgttaacttcgccgcggcaatctccgtcgacgttgttaccggcctcagtgggcgataccgcggaggctccggacactgctgaagcgccggtgccgtcgcatggccatgtggcgcaagtggcgagttggtggactgctgcngcccccnngatggcaatggcatgcatactgatcgggtacttgtaggtcactgcatttgcaaattgcaactggttcggtcgggtgggaattggatcgtcccttgcattttataagagtagttcattttgcgcgccatatatataggtaactcttatggctcattttcttttgtcgat

SEQ ID NO: 134980 - DNA, 1509 bp, Zea mays
  Clone ID: MRT4577_54585C.1
cctcgagccggtcgggacaggaggggctgatttagtatacatgaaagccggcagccacgccacacgccagcaattcaccggcggcttccgctccaagcttcagccaagccggagatggcggggagcctgcaccttcccgtggtggacctcgcgttgccggacctccgcgccgccgctgaatccatccgacaggcgtgcgtggagcacgggttcttctacgtgaccaaccacggagtggaccgcggcctgctcgaggcggtgttcgcggagagcaagaggttcttcgacctgcctatggaggataagatggcgctgctcaggggcgcaaaccaccggggttacacgccgccctacgccgagaagctcgacgcctcttcccagttcgtaggagaccttaaggagagtttttacattgggcctcttgatgatggtgatatgcataacgatgtaaaccagtggccttctgaagagcgcttgccatcttggaaggagacaatgaagctatactttgcagctgttctggatactggcacaaggatactctctctagttgctttgggtttggatttggatgctgatttctttcataaaattggtgcattgaaatgcccgtcaacatttcttcggttattgcattaccctggtgaagtacatgagtctgatagtggaaactatggtgcgtcagctcactcggactatggtatgataactcttttagtgacagatggcactcctggcctgcagatatgcagggagaaggataggaatccccaactatgggaagatgttcatcatattgatggggcccttattattaatattggtgatttgctagagaggtggacgaattgtgctttcagatcaactttgcatcgtgttgttgcaatcggtaaagagcggtattcggtggctttctttcttgatccaaatcctgacacactggtgcagtgtttggaaagttgttgcagtgaagcatgtccaccaaggtttccacctatcaagagttgggactacatagccgggcgactaaattcaacttacaaataatcaccaccacgtttgtaatgctatgctcgtttacaacagcttgacaccacagtaatgtttgaacccaggattaaagatagttttcaagaaaggcggagctatgtatgtgagctggatctccatgtctcccctccccctagtgtctggaggagtgcactttctggatcacgcgtcgtcaggaagcaagcaagcaagcatacgcgcaattcccgctgcgcaattcccgatcgtaccctgctccaaatctttgtgcaagtctctgctcccttgaatgcaactgatgccaatcccatcaatctctttctttgaaaggagacatactgcttcctctagtttcatacctgctgaacacgatcaatggtttgcatgtactctaagatatacatgacccgcatgattgctatagtaaagactattaaaaatgaatttagctgacttcatttccctggtcctagttagctt

SEQ ID NO: 134981 - DNA, 1179 bp, Zea mays
  Clone ID: MRT4577_54586C.1
ctgcaggaccggtttgtaattgctggtgtttacccacgcgggtcataagctagctgtgtcggacggcatggatctgagggtactcatcgcctaccgctaccttttcggatcagccttcctcggcccgctcgcctacttcgtcgagaggaaaaaccgaacgaaactgacatggagggtggtgttcttgtctttcgcgtgtggcctctcagggggcacgatggcgcagaacctgtacatcgccggcatgaagttcacctcggccactttcgcctccgcgacaaccaacctcctcccggcgtgtaccttcgtcatcgccctcgtcttccgctacgagaagttcgccatccgcagcctgtccagccaggccaaggtcgccgggaccctgctgggcgtcggcggggccatgctgctcaccttctacaagggcgtcgacatcacgccctggcacagcaacctcaacctcgtcgccacgctcacccagcaccaccaccaccacaccaccaccaccaccaccaactacgccatggggtcgctgctctgcgtctgcagctgcttcttctacgcgctttggatcgtcgtgcaggccaagctgagcaacgagtacccgttccactactccagcaccgccctcatgtgcatcatgaccacgctgcagtcctccatcttcgcgctctgcttcgacagggacgcctcgcaatggcgactcaagttcgacatcaggctgctctcctgcgcctactcgggcatctttgcgtcgggcgtcgcgctggtgataatggcgtggtgcgtgcagcagcgcgggccactgttcgtctccgtgtttagcccgctgatgctgctcattgtggccgtgctgagctcgctgctgctgggtgagaagctgcacctcggcacggcaatgggcgcggtgctcatcgtcatgggactctacgccgtgctctggggcaagggacgcgaggcagcggctgaggcggccagggtcagcgtcaacgaccaccccaccaccagcaacagcaacagcagcgaggaggacgacgacaagaagcggcacgttagcgtcccaatgcctcccgcaccaaactccgtctgatgttaagctacaaacggggccggggttggggcgaaaataaatacggagtactagctagtatatataattatatatacgactatggtgat

SEQ ID NO: 134982 - DNA, 431 bp, Zea mays
  Clone ID: MRT4577_54587C.1
gtgcggcgctcaggcggcgtcaccaaagatcgcgcactcacttttctttgcattatcacacgctctcctatcatcagctattatcaccactgcgcctgtagccgacttcttcctcctcttcagcgctcgctgccgattcctctcttaatacggctatgaggttgtctacccagcgcacgccaataacccctcagcccatatgcgagaccactgctcggtcatgtccaccaatgtcaaaggaatccgggcgctgcctgctcttactggcggactggcatgtcacatgacccagcttacggataccgactcactgatccatcccaaatggctacagatactaacaaggccgctaacggaagacactctgactcgccttcaaatgacaccacaacagagaggcgtaaaataatgctgctgagcccaacaccaag

SEQ ID NO: 134983 - DNA, 893 bp, Zea mays
  Clone ID: MRT4577_54588C.1
gcacgccgcattggcggttgtggcagcaggcaacggaggaggcggcacctcggccggccaagacagctgcgtcaccgcggcgccagctggccgcggcgcgcgtagcaagcggtcctcccgcgcgcccgcggcggcggcgtggcactccctcgtgtcgcgcccaccgtcgcagccgtcgccatcctcgtcgtcctgctcgtcttcggacttcccgtcgtcgtccaacaggccagcgcgcggcaggaagagcccggggcccggcggggacgcggtggcgggctcggacggcggcgtgcggcggtgcacgcactgcgcgtcggagaagacgccgcagtggaggacggggccgctgggccccaagaccctgtgcaacgcgtgcggcgtgcgcttcaagtccgggcggctcgtgcccgagtaccgccctgcggccagccccaccttcgtgctcacgcagcactccaactcgcaccgcaaggtcatggagctgcgccgccagaaggagctcatcctcatccgcggaagccaccgcgacgccgccgcggctgcaggagcaggatccgccgggccgaggccggagctcatgttccgcgactacggcgtgtgttagttagctgcggcactgaggaagctcgatcgcgtcgtgcttgtgcattgcatgcgtgggagcttctttagatccgcctcttgcgaaattctgccgcgtttcttttcctcctttctttcccttccgatccctgcgtattccagacattttcgttttttcttttgttaattattacattgttggtacgacctacctcctccctgcttcttctaagttctaatgagagagcaatgaattctgttggtacaaattgtggtcgttttgtgagtaatcatgctcctaaacccat

SEQ ID NO: 134984 - DNA, 1489 bp, Zea mays
  Clone ID: MRT4577_54589C.1
tctcaaattcggctcgaggtttttttgttgtgctaaatactgaacataatttgggtgtgttaatattttatttattgtctgcacatggtttgcgttcttctgatgatggctcatggatcctgtaaaatatgtgttaggatttggatatccatgcgggcactaccacagtccacagggtgctcatctcttgtgttcttggctcttgcaagcattaggtcgtttctaaaaccacattggcaaaatgaactctatggtgtttgaggttgctgaattggatggagcaacaatgatttgtcgcactaacaataaaagaaaaggttacttgttggttttaaatgttagtaattactacgaagtacaataatttgtatggagcgcatccagtttagcaactattccatattttaatctatcttttttataagtttgagttcatgtgacttaatttagaaacttgaactcacaaacttcctcttatttggtctctatatggtggaattatgtcattctataatctctgttcatttattcagtcgttgtgaactctcttctaattgctcccttcattggttgtgttgtactaatacatattggatgaagtaaacagcaatatcagttagtcaaataaaaaaatattatgtggagagcgaagacaatcaataaaaaaccttgagatctttttggtggatagtttacgtgggtattgttgtgagccgtcgcaacgcacgggcaaccgactagtaaatatataagccatgtgtttcattagtaaaaataaggataattatttgtttaattatctttccacataaaatccgtttaggctattatctcagtttttcataaataaacatttaatagtgtgtcttataaccttattattccatagtcttaaatattccacatatatcctttctaaaaaggtttaaatggttcaccaaatgtttatatatttatagttaagatattttcacgcttatatcttgttttataaaatacagaacaaacctttttgttgggggccttcctctttctaaggtcctcaaaaacatgactaaccatttgtttctagcataatagtgactattacagggagcttcggttcgcgatggaagtcttcctctctgtagaaggtcttcaagacgaagacatagctcgagggtgataacaatgaacgccgaagctatagccaaagaattacagcttcggcttaaaatggtgacgaaggccaaaatgatgctgagctcaagaggaaaagactagctagtccctaatgatttatattacagttatgaacaaatgttatggtcataaatgtatttttactcgggctgcgtctcgtgcctataaatagatgaacagtaccactgtactgttcatgctgaattgtaatcgctctcgcatcaacacctttgaacaagccgaaggtatcaatataatataaattctgctaaaaaaaaaaaaaaaaaactcgagggggggcccggta

SEQ ID NO: 134985 - DNA, 489 bp, Zea mays
  Clone ID: MRT4577_5458C.1
gccggccggttccggaaagatatctcatcacatgcatatgttgccttacaatttttaccctaccagagctcctgatatatttgtcgagcagagacgctgatgattgatagatcgacgctcccacagctagttaagctaagtaggggatagaaaagaccgatgtgcggatcgcacgagcgttctgattcgacataatcctcgatattatcctggcgcctgtctctcccttcttcaatccccattgttggggtgagctctggatctgccttatcctcagcttcttcagctatctgcccacgattatctactccgcatggaccatctccgaggaccctcccggtgcgaccgcttgccctgatcccacaccgagctctcgcgggattcgacccagtgcgcgcgaaggcttgagatgtgattactaccttcctatgaggaccttctgctgctgcctgactgacgataacatccgtccgaatccatctcatatca

SEQ ID NO: 134986 - DNA, 236 bp, Zea mays
  Clone ID: MRT4577_54590C.1
aattcctggtcgacgagccataagccggcggccgccctttgatgtgcggggggggttgaaggaaaatgacgggctgaaacccacaacgggggcccacgcgcccaactaaagggccacacaaacagcacagtgggcccacagggcaaacgaaccagccagccagaacccagggcccacatatgggatgcacaaaaggccggagaggcaacccaaacccacactgcagacggacatac

SEQ ID NO: 134987 - DNA, 445 bp, Zea mays
  Clone ID: MRT4577_54591C.1
ccccaacgggaggtttactgcttttgcaagccccagcgggacgggggggaggggcgacaatcacagcacaggcacccccggcagacgtacctggatcagcagcctatgggcgagagcgagggccatcacctgagctctgccagcataaggccgcacgagggggccgcatgggcccagagcagcgggttcccacagttgacgccctacgagatgaccaacatcattaaggacctccacgagcacgaggtcgtggccacgagcggccattagctcggcgccaccaaggccatggtcatccaacgggagcccggtgctgccattcgcgggaagaagggatctggaggcctacctgggaatacaacccgacaggcgctggcgatcggaaacgacaatgagcccatgacccctggacagagcaacatggcggctgagaggctcagcgact

SEQ ID NO: 134988 - DNA, 256 bp, Zea mays
  Clone ID: MRT4577_54592C.1
tcgcgatctagtgataagtcagctttggcttttcggtcatctaactgtgacaactcatgtgctgaattttttgggaagactttcatattggagcagtgacatcaagtatattcatacaattatcttatggttgccgatactcatagaaaccattaccagtttattatctgagaaggaaattgggttgaatatatggtctagaaggagaaacttctacaaatttactctttacccccaagaagaattatcacaccca

SEQ ID NO: 134989 - DNA, 622 bp, Zea mays
  Clone ID: MRT4577_54593C.1
ggccgcgggttttttttttttttttttgttatcacaattcatgaaatgtgcaaccttattcatgacctcatggtgacaattattcattgtgccaggtttagaaacatgtcttgtgagcttttcaaatctcatagaaagaaagcaacaaatcagcaccgaaccaacagaattgaaaataaattatactaaccacggcagaaaagctctattagccgaaactcttgataggaagaaatgatgtcttgcctcgtgtatagaaaccagaatatgcaaagtgtcagcctaagtgatgccggaacagagaggccatctcaatctgcaggggaacttgggcttctcacatgctaatgcatctatgtttgtttgaaatcaggatttccgactggaagggtaacttacggaagtaagagcagcttcagcacccttgtttccagccttgccaccagcgcggttcagcgccagttatggtgacaaacaacatcagagcaaatgtgtttaggagaaaactgcggaagtagtcgtagacccaacctctgcctttgtcgcctcaggtttgccaaaaagaatattctcaagaattgtagttgcaaaaagagtaggttcctgattcaccaatccgatc

SEQ ID NO: 134990 - DNA, 460 bp, Zea mays
  unsure (1)..(460): unsure at all n locations
  Clone ID: MRT4577_54594C.1
aggaagaacaacnccngccnngggaaccagnnccgcaacggcaaggccaaggagcagcccaccaaggagccgaacaaccgcaacaacaaccacgccgggggggggcgccgctttttttttaanaaaacngngacnacccanccancngcaaaagactcggctggggncctctctacctaccaagaccaagaagcataacgcacctgcgaagctcagccacaagtctgtgatacacaatgagttctcgatgatggccaaggctgtgtaaaaaccaggttagtgacaactactacaggcctgatctgaccaagccagttcttgctaggctaagctcggagtgccgcaatctccagggtctcgagtccggggtgaagatgagcaacaggcaaacctaaacgctaagtttgaggaataaaagtgtgcatgaatgctgcttatacagccagcttatatttatgta

SEQ ID NO: 134991 - DNA, 235 bp, Zea mays
  unsure (1)..(235): unsure at all n locations
  Clone ID: MRT4577_54595C.1
ggcttgccagtactggnaaaaggcgatggcctgatcggtgttttccagcacgcagtccggttccatctccaggcagagcacgattttcttgccggtttcctggtgcagcctggccagggaccgggtcagttggcgcaactgccgctcagcgccgtgctgcagcgccgcactccaatgcgcggcgtagcccaacggtacgctggaaattaccccctgggcacagtccggcggcagt

SEQ ID NO: 134992 - DNA, 353 bp, Zea mays
  Clone ID: MRT4577_54596C.1
cccccccccaaaaattccccccctgtaaaatggggcctaggcctaaatctttttaaaaaaccggggcccaaatggggtggaaaaatggggataacccttttgacttgggcccccccccccaaaagggggtccctttggggccccctttttgggggggggacattcttgggaagggttttaagttccggggttttggccttttttctttgggggtttttttgggaaaaattaaggttttttcccctggggggggccccctttggttgggcccctttttcaaggaggggaaaaattgtttgccaaaacccgcccctggcaaattggcccctaaaggggggggaaaggggcccccc

SEQ ID NO: 134993 - DNA, 356 bp, Zea mays
  Clone ID: MRT4577_54597C.1
cggacgcgtgggtggcagggcagcagcaagcagatcgcgagttcaagacaatggcagcagcggggagcgtccagggccacggcgcgcggttcgcggcggcgtgcggcgtgctcagccggtacgtaaaagcagcagcggtggcgactacgacgacggtggagctgcggccggcgggcacggtaggggtactccctctgatgcctggtgcggacctgtccacgcaagaggagcgcgaggcgggggcggggccggggccgtcgccgtcgccgagcgcgcagctgaccatctcgtacggcgggcgggtggtggtgctggacgacgtcccggcggacaaggccgccgaggtggtccggctc

SEQ ID NO: 134994 - DNA, 601 bp, Zea mays
  Clone ID: MRT4577_54598C.1
agctcctttcttgagtgataatgcacaaggttcattgatgtggattgtggaatgtcaatgaagatggtgttgaaaaagacgcaaatttggaagagggcaatgcagaaagtttggcaatttttgaacatttttctgattctggtaatgatatgcaatctgaatatactgaagttgtcgctcattagggtggtgcctcgttagaaaaaaacagatgactttcatcataaggccttattctgagcatagccaacataaatcaaaatgggcataatttttcttacatgtatttctgcatgtggttgttcaacttatatggttcttaagaccctaacactgagtaaataagtcggaagtgcttatttgttcaacttatgtaagtgtttgttcagtttgaggatacgggcagtgtctggctattggctaaagccagaccatgttacattcattagtgtactcaccgcgtactcacacacgcaggggaagttgagatcaaactatgatacctcaatgcaacgaacaaaagctgcaggttggagcctaaaaatgagtactacagttgtgttgttgatttgttgggcagaaatgttaagttttccggtgc

SEQ ID NO: 134995 - DNA, 266 bp, Zea mays
  Clone ID: MRT4577_54599C.1
gaagatggtcatcgttctcgtcgtgtgcctggctctgtcagctgccagcgccttttgcaatgcatatgccctgcccctgcgcggggctaaaagaattgtacggctctgtgcgccgggctgatacgatgatgggcgcaaagcagactgtacccttactctgagtacgtgaagcaaatgcaaagcaccccgctggtggcggtgccataatacccttgaagtggccagaccagtgcatgtaccaggcggtttggcaacaaccctgacat

SEQ ID NO: 134996 - DNA, 424 bp, Zea mays
  Clone ID: MRT4577_5459C.1
gtttttggggggcccagaggcgtaaaacagttgttttttttccaggcgaccactgggggtccttaatactgaacattttaacgttaatgggtttggttttaaccttaaaaccgtttttggttgggggcagggccaagcactgaaccatggttgaagcggccgacgccccatgggtttcctatccaggggcaatcgattttagattttttgggggcggggccaagggcggtgccaggcctgtcccagtccgacgcctaaggccagaccacacggggtttggtttggtccacagaagggccgggtggtggctgaaggtttggaaattccggttccctttttttgggtttcgaagaatgcagttgcgtgttttgatggaggaccactttgttactgggcttgtggggcggtttcaacgcgtgtaagt

SEQ ID NO: 134997 - DNA, 343 bp, Zea mays
  unsure (1)..(343): unsure at all n locations
  Clone ID: MRT4577_545C.1
actaactcacttaccaacttcttcaataataaaaccatctgtaaaggcacctccctctaccattactaaattctaacgcccaacaacaagaatgcctacaccaatcacatcttcatctacaactcttacaatcacctccatcaataaatggaagagttcattcacaacctcatgtctagcctactcaccaactcgcccatcaacatcatcaaggccaatgccatgtctcaaacgactctccacaaccagatctgttgctcgaccatttcctcgatatctaagaacacaanaaacacgtcctttcgcctggttggttatgaggaagatattatccctaaattaa

SEQ ID NO: 134998 - DNA, 282 bp, Zea mays
  Clone ID: MRT4577_54600C.1
aaaaaaaaaaaaaaaaaaaaaaaaaaaatttaaaaaaaaaaaaaaaaaaaaaaaaaaagggagaaaattttaaaagatcaaaagctcacaccaaaataaaatacaaaaaaaatacctgtgctatagtttcactgaatcgaagttcattgccccgagtttcccaactctttctactggaaaaaccctgactcaaccaaattcaatggccttgcattacattcctacatcctcggataccctagtagcgaccaggccctaacagttcgccctatatgacctttt

SEQ ID NO: 134999 - DNA, 300 bp, Zea mays
  Clone ID: MRT4577_54601C.1
acctatgcgttcgggttacaaatacagtaccggcagtgagagaaactgttgagcaatattgctacaactccaaccaaccaggtgacaaatatgtgtgacagttctccaactgtgtttgatttgaaactatgtcaatgttgatgtcaaagaccatttacatgtcgaattacgacgatattatgtgaatgtcgaactatgaaaatactatgtgtaacggatgttggaactatttgttgatgttaaagacttgttgtaatgtgtttgtgaatgtgagttcatgtttgagaaagcaacaaaaca

SEQ ID NO: 135000 - DNA, 463 bp, Zea mays
  Clone ID: MRT4577_54602C.1
agcctaatgctgaaaaccgacatcttggaattcccaataagaaataaggtacaagatacctatgtacttttcttatactttgtaccctgttcctataataagtcagatagtatagcaaagtacaatagaaataataaggtctactatacaaacaatagatcaaggagaataaaagattaaaaaccaaagtaatttgcaagtctagtggaaaaaataaatactctaatcaagacaaaataggccatacataaatcatagaatccctggcaacttttttatcctactaatgactgatgatgtaacaatcaactttatgtacctagttcaatcggaataattcctagatgaggtaagcaagtacagcaaaatcatggatgctagaagagtgcatcagaaaaaatgattgaccaattatttgatataacatggggaaaaaaacacgcagaaagtatttatatgcaaa

SEQ ID NO: 135001 - DNA, 654 bp, Zea mays
  Clone ID: MRT4577_54603C.1
ctcgtttcctttccccggaacccctcaactcgggcgctcgattcctggcttcccctggcgccgatctcatccgttgctcagacatgactgcttgcaagcagaccgcatccacgggcgccgccgccacgtacgaggccgacagcaagtcggcagcgaagagcgatggagcggaggagcggaagccctcgaccaagtgcaggaaggggaagaaggccaagggcaagttggcggtgaagagcaatgttgcggagaagcccaagacccatgacctttccgatgttacacgcgggttggcggtaatgagcattgcaacagagaagccgttggatgaacagctcgcccagcacgccctgttcacctaccagaactacttctggatggacaacttcaaaggcgtctatgacaagccgtccgtagatgctattaaaaggaaagctgctgaaaactggaaatcctttagcgattcggacaaagccccttatgtggccattgcacgtgtgaacagaatactcattgccgaggcatatgagttcaagaagacactgaagttgacactcgtgatgacggacaagatgatgaatctgaaaatgtgaacagccaagatctctaagatgtgtttgaatagaaatgtcttggtagatggcggaattactg

SEQ ID NO: 135002 - DNA, 1559 bp, Zea mays
  Clone ID: MRT4577_54604C.1
gcccccctaataaaaataaaatttttaactattttaaaagaaaaaaaaaaaaaaaagtcttctcttccacctttgtccgcgggcgggcgggaagtctacacccgccggtctcctgctcttcagatctgcccatcctccatggcacctccaccgcaccgccacctgctgctgctcctccttctactccctctggtcctcctcgccggcacacccgccagcgccgatgaccttgtatcggagctccaatctctccgcgcgcggtccccgtccggcgtgatccacctcaccgacacctccgtcacccgtttcctctccgccccctccgcgcgccgcccctactccgtgctcgtattcttcgacgccgcttcgctccactcaaagcctgacctccacctgccccagctccgcaccgagttcgcgctcctctccgcctccttcctcgctcacaaccccgattccggcgacctcttcttcgccgacatcgagttcgccgagtcgcagcactcctttcaccagtttggtgtcaactcgctgccccatatccgcctcatccgttccgatcacgccaccctgtcgggatccgagcagatggaccagtcccacttcgcgcgcctcgccgactccatggccgagtttatcgagtcccgcacgggcctcgaggtcgggcccatcgtacgcccgccgctcctctcccgcaaccagatcatcctgctcggcatcctcttccttatctccatccccttcatgatcaagaggattatcgatggggagaccctgctgcatgacccccgggtctggatggctggggcgctcttcgtctatttcttcagcgtctcggggggcatgtatgggattatcaggcacacgcccatgttcctcaccgaccgcgcggatcccaacaagctcgtgttcttctaccaggggtcagggatgcagttgggggctgaggggtttactgtcgggttcttgtacacactcgtgggtctcatgatcgctgtggtgacacacttgttggtgaaggtggagagcctgcagacacagcgccttgcgatgctcgctgtcatggtggtcgggtggtgggctgttaggaaggtgatctacttagataactggaagactggctatagcattcataccttcttcccgagcagctggaggtgaaattcttgctgggtggggtggatgcttctctcctttggtctcagaggggatcaagtccgcccaaatttgcattgctggaatagagcatcgcgttgtgatggcatgccgaaagtttaaggttgcagtttctcagctgctgctctagtatgaaatagagagagaactcgaagttattttagctgaatttgcaattctgttactcaacaagaaagagtcccaattttgaacttctatatgtgatggtactgctaattggttcaacgacaatggtagtaaattttagttgatcactgtgttatggacttgtttgtatccagggaaattttgcccgtattgtgatatctgatttgcgaggctgtcgcatgcagtcgctatcttttataaaaacccaaacatga

SEQ ID NO: 135003 - DNA, 210 bp, Zea mays
  unsure (1)..(210): unsure at all n locations
  Clone ID: MRT4577_54605C.1
nnnnnnnnnnnnnnnaggggnnttatttttggggtttgggtttttttttttngggggccaactccctagtaagataggatcttttaaaacatttgaatacaagatttaaaacatttgttgacgccctgaaaaggccaagggattctattaaccgaactggcactggagaatccaaatgcatttatttccacattggcgttatcagggggg

SEQ ID NO: 135004 - DNA, 399 bp, Zea mays
  Clone ID: MRT4577_54606C.1
ggggcaaaccttcttgcactgatattttatagttttacttattactggattacaaaagtttgtcaacatgacaaaaattttttttcaactggaccttaagttttgtttcaagggtacccgggacaaccattaaacaattacaggaaccgggaaatgccatttcttattaaatacaagaaattggttttaaaacccaaacattaaggttaaatttgtggggaaggggaccgattttattggaaattccaacgcgacaccgaaaataccgtgcgagataaaaaaaataacgcttaactgtgggttttttaaaagaagatggggcgacagcgggcggtttgcttcaccagataacagggggcagctcttatgcaggagtcgattttcaggtgtagacatctt

SEQ ID NO: 135005 - DNA, 351 bp, Zea mays
  Clone ID: MRT4577_54607C.1
cttcttactcacaagaaatttctcatgcagaagagaacaactccactgcagttgaagcagcactgtcttccgaaagacacttggaaattgaggaggatgacaatcatttcaacgacgggttattgcagaaactcaagcgcttaccaggctcaagtgcattcctatgttgatattgaagtggggatttccaatggtgatgcagaatcagcttaaatgaacttccagcatttaagcctgcataaatgaagatttagctgaaaccaagtttgcttaggataacccctgcgtttatactccctgttcatctacaagctgaaaatgcaaattgcgatcatttgacctttgtaagtt

SEQ ID NO: 135006 - DNA, 237 bp, Zea mays
  Clone ID: MRT4577_54608C.1
attcggctcgaggttcagggacatggtcctgctagttttattatagtggttgactggcagacggactctggatatatgaaagcaactgttgacatgtcttccatcgtggcatgggatcttgacaaggaacaatttctgagcacgatcgagtcaagtgctgatactggcatcttttccttgcctacattttaggtgccatcccgacactttgctgctgctatagctgattcttctgcc

SEQ ID NO: 135007 - DNA, 282 bp, Zea mays
  Clone ID: MRT4577_54609C.1
tcgagcggccgcccgggcaggtttttttttttttttttttttttttttattttttttttttttttttttttttttttttttttttttttttttttttttttttttcccaaccaactttttcccttaaatattatccctttccattaaaaggggccattcggggggggggccacccggccccccagggggaggggggaccccacgttacccatggccgctaaaggagaaaaccagcgggctagggagctagccaggggctccattacattattacagaacccg

SEQ ID NO: 135008 - DNA, 445 bp, Zea mays
  Clone ID: MRT4577_5460C.1
gcgtggtaggacacagggcgcccacccacaagagaggctggcggccacatcgtgccctgcaagagcagccttctcctgccgtctaccatctacgacttcaggggcgcagtcgcaggcgtctacatctcactgcagaagaggagatcacggtgggcgagggtgcaggtctcaacgggtgcggactgcatgaacattctggtcatgggggggactaggatcattggggtcttactgtacaggctccttgacaaggagggccaccaggtcacatcgttcaccaggggtaaaggtacccataactcatgctctgccacgggggttctacgcggggtactcagacttttcctccaaggttctgcacttgaaaggcgacagggatgacttctgattcgagaagacaagcttggctgacaatggatacaatgcgggttacgacatctatgga

SEQ ID NO: 135009 - DNA, 727 bp, Zea mays
  Clone ID: MRT4577_54610C.1
cctcgaggtcctgtgccgggacgggaaaaaaaatatttgtttggtgagccacgctcccatccggatccgcgggggaggacggcgatttcgtccccagcctcatgaggtcgggaaggggttcccgcacccacatttgtgaacctcgccggcgcccatcccctgccttcacgaacccgccgccgcccgtcccctactcttcctcgtgcacccaccgtcgctcgtcccctcgtcttccttgcgcactcgccgtcgcctcctcctcaccctcacgcacttgaggccagctgcagaacgaggtcggacggcggagacgaggtcgaggtctacgacctcctcaacttgcgcaagactgccgagactgcagggacaagctctttgctgcctcgtcagctgctagctgacttctcgtttgtagtatgtgaatatcttatttgacaaagtgatacacaagggtttttcatcaacaagtggtcgccagaagaactgaaacatcaagatggcgtttgcttttaggtcatgccattcaggagatgatgctaagctaaataatcacatctatgtgtacactgagactgttttattatgagactatgttttattatgatgcactgagactatgtttgtgtacactgagactgttttattatgatgcactgagactgttttattaagcagtgtggagttctcggctgctgttcacaaaaaaaaaaaaaaaaaacccgcggcc

SEQ ID NO: 135010 - DNA, 360 bp, Zea mays
  Clone ID: MRT4577_54611C.1
gaggaaaaagcatataatattagcttgggagggcttgagccccctaaaaataatagttaggtgaggacatttatgacttttaaacagggtagctaatagtttagcttttatttttttttaacaaattagctaatagttagaaaaatttttggtagctagctaatttcacttaggcaactaacttttagctttaggacgttaaaacaccctttagtttattagctagctaacttttaagagctaatggatcccagggcctaagctgcaacatttgaatgcgagggacccctttttacaaaaagacgccttattcaacaggaacggttgtttccaaatttttctacacaaaagctagaaaat

SEQ ID NO: 135011 - DNA, 826 bp, Zea mays
  Clone ID: MRT4577_54612C.1
cctgccgggcggatccgcgggggaggacggcgatttcgtccccagcctcatgaggtcgggaaggggttcccgcacccacatttgtgaacctcgccggcgcccatcccctgccttcacgaacccgccgccgcccgtcccctactcttcctcgtgcacccaccgtcgctcgtcccctcgtcttccttgcgcactcgccgtcgcctcctcctcaccctcacgcacttgaggccagctgcagaacgaggtcggacggcggagacgaggtcgaggtctacgacctcctcaacttgcgcaagactgccgagactgcagggacaagctctttgctgcctcgtcagctgctagctgacttctcgtgatacacaagggtttttcatcaacaagtggtcgccagaagaactgaaacatcaagatggcgtttgcttttaggtcatgccattcaggagatgatgctaagctaaataatcacatctatgtgtacactgagactgttttattatgagactatgttttattatgatgcactgagactatgtttgtgtacactgagactgttttattatgatgcactgagactgttttattaagcagtgtggagttctcggctgctgttctcatttttaatgcaagtgtgttcaatgagcagtgttcaatgaccaaaaataaactcagctgctcctcatttttatgcataaaaaaacacaaaaaagcaaaaaaaaatagaagaaaaagataaacagggtcgccccccagattggcatctcaactccccggaatttatgtccgtacctgttccctgtgggaaaccggtattcctttacagact

SEQ ID NO: 135012 - DNA, 604 bp, Zea mays
  unsure (1)..(604): unsure at all n locations
  Clone ID: MRT4577_54613C.1
ccaaaacacagaaaagctaaacccgnnnnnnnnnnnnnnnnnnnnnnnnggatggcttcgtcggcggcgtaccctgatgcggacgagaacctggaggccatcatcacccgcatagagcagaagtcccgaaagatcgagacccttctcaagcagtcgaagccggtggaggccctaaagacggcgctcgaggggtcaccgctcaagacccgcgacgagcgatgcaaggttcggccttgatatgtcggcgaactggatcgtggtgcaccgcgcgttgatggcgattagggacgtagacggcatgttcaactccctggatcccgagtactacgacatcctcatgaagtaagagatacacctcgctttccatcacttgcttcttcccagatccatgtttactggtcagggaaggtgagttgtttccaattcgagtcctggcaatcaacgcttcctagttgagatcccataactagatatctatcactgcattttaagcttattggattgatccatggtgattgtgtaacggtattgctacaaaactttagnnnnnnatgacatcagttttgtgcggtgggatgacagttgattattgagaacagctatg

SEQ ID NO: 135013 - DNA, 737 bp, Zea mays
  unsure (1)..(737): unsure at all n locations
  Clone ID: MRT4577_54614C.1
ccggccggggnnaaaatatttgtttggtgagccacgctcccgtccggatccgcgggggaggacggcgatttcgtccccagcctcacgaggtcgggaaggggttcccgcacccacatttgtgaacctcgccgccgcccgtcccctgccttcacgaacccgtcgccgcccgtcccctactcttcctcgtgcacccaccgtcgctcgtcccctcgtcttccttgcgctctcgccgtcgccgcctcctcaccctcacgcacttgaggccagctgcggaacgaggtcggacggcggagacgaggtcgaggtctgtgacctcctcaacttgcgcaagactgccgagactgcagggacaagctctttgctgcctcgtcagctgcttctcggatactaacaaatgggttctataattgagttgataaggaaacatttgaagcaggtgatacacaagggattttcatcaacaagtggccgccagaagaactgaaacatcaagatggcgtttgcttttaggtcatgccattcaggagtacactgagactgttttattatgagactatgttttattatgatgcactgagactatgtttgtgtacactgagactatgttttattatgatgcactgagactgttttattaagcagtgtggagttctcagctgctgttctcatttttaatgcaagtgtgttcaatgagcagtgttcaatgacaaacagtgctctcagctgctgctcatttt

SEQ ID NO: 135014 - DNA, 613 bp, Zea mays
  Clone ID: MRT4577_54615C.1
ggtaccctccaggccggccgggatttgtttggtgagcccgctcccgtccggatccgcgggggaggacggcgatttcgtccccagcctcacgaggtcgggaaggggttcccgcacccacatttgtgaacctcgccgccgcccgtcccctgccttcacgaacccgtcgccgcccgtcccctactcttcctcgtgcacccaccgtcgctcgtcccctcgtcttccttgcgctctcgccgtcgccgcctcctcaccctcacgcacttgaggccagctgcggaacgaggtcggacggcggagacgaggtcgaggtctgtgacctcctcaacttgcgcaagactgccgagactgcagggacaagctctttgctgcctcgtcagctgcttctcgtgatacacaagggattttcatcaacaagtggccgccagaagaactgaaacatcaagatggcgtttgcttttaggtcatgccattcaggagtacactgagactgttttattatgagactatgttttattatgatgcactgagactatgtttgtgtacactgaggctatgttttattatgatgcactgagactgttttactaaaaaaaaaaaaaaaaaagcggccctt

SEQ ID NO: 135015 - DNA, 315 bp, Zea mays
  Clone ID: MRT4577_54616C.1
cccacgcgtccgcgcagatcggtaacccggagttcaagaataggttctagcagctgcggaccgtgggttcgctgcacaccacagacatgcccgacgtgatcccgctgtacccgagcggcctcctgggctacgcaaacgccctcgaccttctggccgtggactccaaaaagtcaccgtacgtgaagcacgactttagctacggcagagactaccacaacctgcagggcatcctgcacacggtggcgggctggaacgggaaggacggcgagttcaagctgcaggtgcaccgcaacgtggcgctggtcaacaagtcct

SEQ ID NO: 135016 - DNA, 774 bp, Zea mays
  unsure (1)..(774): unsure at all n locations
  Clone ID: MRT4577_54617C.1
ccacgcgtccgaacccacagacacaacccaccacgtcgccaccaccaactaacccattaatccatcaacgccggtcctccacggtcacgcggaagtcaccgccgctctgccgcgctctcccgtagtcccgtaccgcatcgcgttcttcgctggcctcgctgtcgtctcatcgccattggcgtttcgcctgcagctgctcgtccgccagaaccaagcaggtgtaaacatgcttcatcattcaaatagccggaaccaaaggaacaggggatcaagaatcaaaactctactccaagcgaccttgctttcaggtgttgtcttttggctcctgtatcaggcgaggaaacaaaaggcaggtagttacagtgatagcaacgtccaaatggttgtcgacaattctgatgtaacaactaaaccagaggaaggtgatgtagatcatcattctgatacttttgatcataacgagaagactgtagaaactgtgttcgataaagatagtactaacctgcatgaagatgacaagagaaacactgagagttcagaagcggaaggacaagtcaacagtggagatagtaatacagaagctaataataataagaatgaagatgaaaccaccagtcttgtagaaggacgcaagcatgatactgaatccaactctgctgctgagagtaaaaagtgaagtcaattcaactggagatgaatngtcccaaaacaatcatgcacaagaggaaaacactanggaggcaagtggaatgtctcatgatgaagtagcgcatg

SEQ ID NO: 135017 - DNA, 2122 bp, Zea mays
  Clone ID: MRT4577_54618C.1
ggacctcagcggcgggaaagttctccccctctccatcttgcttgtgcgctgcaatcgccatcgcctccttgcccattctccgcgccgccgcctcctcctccgctcccctccttcttctagggtttctactccatgcgatctcgcggccttggtggcgcgggacagtagggacgccccctctccatcacgccaacacagcgccccctccccacgacgctgaagtcccagatctaaccacacagacacaacccaccacgtcgccaccaccaactaacccattaatccatcaacgccggtcctccacggtcacgcggaagtcaccgccgctctgccgcgctctcccgtagtcccgtaccgcatcgcgttcttcgctggcctcgctgtcgtctcatcgccattggcgtttcgcctgcagctgctcgtccgccagaaccaagcaggtgtaaacatgcttcatcattcaaatagccggaaccaaaggaacaggggatcaagaatcaaaactctactccaagcgaccttgctttcaggtgttgtcttttggctcctgtatcaggtgaagcattcctatgataagaaaaacgagtacttggatgatgctgaggaccagcttacccataatgatagaagcatattccaggcgaggaaacaaaaggcaggtagttacagtgatagcaacgtccaaatggttgtcgacaattctgatgtaacaactaaaccagaggaaggtgatgtagatcatcattctgatacttttgatcataacgagaagactgtagaaactgtgttcgataaagatagtactaacctgcatgaagatgacaagagaaacactgagagttcagaagcggaaggacaagtcaacagtggagatagtaatacagaagctaataataataagaatgaagatgaaaccaccagtcttgtagaaggacgcaagcatgatactgaatccaactctgctgctgagagtaaaagtgaagtcaattcaactggagatgaattgtcccaaaacaatcatgcacaagaggaaaacactagggaggcaagtggaatgtctcatgatgaagtagcgcatggtgacgaatcaaccagtgcaagtggaacttggaatggatcagatggagaaggtgagaaaaaggaggcagttgatactcaaactggttctgaaacccttcctgacgatgccaagaccgaagcaactgatgaccgtggtactaacagcctttctgacgaaacagggaacataccatcagttcatactgataattcacaaaatgatgccagtgaaaaccaaggagatgcaacatccactacctcagattcatctgagcatggcatcagtgaggctgtccatattgaaactggattggaacatggaagtgcaacaacatcatctgttactggatctggtgatgacagggataactcatctgatagctcctctgcaggaaaaaatacggagactctatctggtgatgataagggcatggaaacaggtacaaccactgaagcgtcatattccaaagaagagaactctgagaacagcagtgtctcaactgaagcagagaactcccgaggagattcttccattggagtgaatggttcttcagaaacgtctaccaatggtgagcaggtggatcccaagactgaaactagcacatccaccagtaacgtgcacaatgaatctcaaggggctgatggcagttctggatcaaataactcaattggtaacggccctgaacaaaccggtaaaactgaaaggcagtgataccactatctagacacgaacattgttttagtataaagatttgtttcctggagattgaagaggctagtactgaaccaagaaaaactgttcacattgtggcttatggtgattttagttgatactgctgaagtacaattgtgcacatcgcaagatcggttgtctgctatgcttattgcttatgccatgatttctcgtcaagttgtatcagaacgagtcattatagctgtacggttattaatctctactagtacaatgcccgtcccttctgttgcaatgcaaggacacacaaattattcaaatataatattagtcaaattatcaaaaaaaaaaaaaaaaaaggcccctagggcc

SEQ ID NO: 135018 - DNA, 657 bp, Zea mays
  unsure (1)..(657): unsure at all n locations
  Clone ID: MRT4577_54619C.1
tgatgttgntcgtacagtggttttctaatttagtttgtagtatatgttttttctaattaagtactccttccattcttttttgaaaaaaaaaaaaaaaaaaaaaaaaaaaaaaaaaaaaaaaaaaaaaaaaaaaaaaaaaaaaaaaaaaaaccccctttttttggggccccccttgccaccttaaagggccaattggggccccaccggggggggtaaaaattttggccccctttagccccttgggtttttgggaaggggtggtagggggacctttttccccaaagggccaaaagccccttttggttccctttttcccccggccctttaaccaaggggggtttggggttgggaaaacccaattttttaacccctccgggccccacggggaatcgggggggggattttaccttttacccccttggtcccccaaaaattaatagcccttttaccgggggtcccttgggggccttttttggccaaaaaatttgggggccaaccacctccaaaactgggggtaggaaaccttgggggcttctttaaaaaaaaggggttttttccttttaacccaatagcgggatgggacctcggtttttttttggaacaaccaccatttccttttagcccggtttttggtgccctcccccaagaatttttttc

SEQ ID NO: 135019 - DNA, 740 bp, Zea mays
  Clone ID: MRT4577_5461C.1
gccggccgggtcggggcattcgcctcatcggacttccacgtgccaccacctctcgtcgtagctcgcgtccattacccacgacagggtcgccgctcaccggaggaacggagcgccgcgtcaccgacaccgccgcggccaggaagcactcccgctcggcgctcgacgttgccttccatgcgctcgaggcggaggccagggacgccaggatggaggcgtgtatccgcctcgtgagagaacggagagccgctccactaccggcactgtcctcgaggggcagaggtgttctgcggcctccaatccgctcgcaaggagagccgctccgtcgggcgcgtatccgcctcgtgagagaacggagagccgctccactgccggcactgtcctcgaggagcagagatgttctgcggcctccaatccgctcgcaaggagagccgctccgtcggcgctagcgtcctcgaggatcagatgctacagcaacgcctacttcgccagggtcggcggcatcagcctggcggagatgaacgacctcgctggagctgacggcaccgaatgaaccgcactattgatttttttgccaatgtgctcagtgaggctcaggatgggattctagatttgaacagcacaacatataggcccggtttgctgttgggtgtggtgaagatgatgcaagtatctcagagcttgaaaatcttgatatgataaactggtcatgtggaaattagcaaccttaaaatctaagggat

SEQ ID NO: 135020 - DNA, 616 bp, Zea mays
  unsure (1)..(616): unsure at all n locations
  Clone ID: MRT4577_54620C.1
aattcggcacgaggcaggagtccaacgccgccgccgccgtctctgcagagccgccttcccttgctccgcagtccgagatcactgaagaagaggtccatgggccaccggaagccggagaccgggacccctccgccgccacagccgcggcggccgaacggaagggcgacgagaccatgtctcttttccgacggggctccgaaggtggcaagccccctcttcctccacgccctccctccatctcgagaaccagaggtccgagctccgcaggcggcaagccccctcttcctccacgccctccctccgcctcgagaaccagagttccgagctcctcgggcggcaagccccccagcccgccctctccgccccgcagcatattccacgaggtgtgggggagcagcatggcgatgagagatggtgacagagagagtcgcttcgatttgaaggacgtgttcgatgaactgatggtggagtgccggcggaacggggaaacggaccagaaagccgaggctgaggtgaaagacaagaaaccgctctggagaaaggtacantatgacctgaatatttcttcatctttggttgtgattggtaactggtgtgagcactcttgtgccatttt

SEQ ID NO: 135021 - DNA, 110 bp, Zea mays
  Clone ID: MRT4577_54621C.1
ctgttgtcgtcttttacttccggcccaaccggtgccccttctcgttcacaaaatatcttcgccggctcgactccatccataacaaaccttcgcactttatttgggggcac

SEQ ID NO: 135022 - DNA, 670 bp, Zea mays
  unsure (1)..(670): unsure at all n locations
  Clone ID: MRT4577_54622C.1
aattcggcacgaggctctaactcccagcccgtcgccggcgctgccttcctctaccgtctctctcatccatccctctctgccctcctcctatgcccccctccccaatgcctccgcggcggagctccgccaagcgacaagatttgtcccccctcccctgccaacgcctccgttgagcatcggacgcgaatctcctcaccgtccgcagcttgttcggccgtcgactacgtcccctcccgggactcatactagtggggaaatcatgatgtccgaactactagtcggtggctaaatgttgtgtgatcatcttgttttgtattgatcaggtgagcattagtaccagttaattgttaaatgatgcagaagttgaatttgtactaacttaactaccatattttcgtttaccatataaactgagttcgcttaatggtttccatgctacagaaattgctatcctgngcttacagttctgttttgaaaatgaaatgagaatgggtgatctgaatggttaatagttntgctgtgggacanctcctttttttggcggaattttctcaagaacactgttatagtgtaaattggccatcanacacangtacattcgatcagtgtcatacaacanataaaatagatntttgggaagntntactataggacaccaataatattctga

SEQ ID NO: 135023 - DNA, 221 bp, Zea mays
  Clone ID: MRT4577_54623C.1
ctttcaaaagaagtacaacattgggtcatttgaaatgatgcgcttgtaatcagcagtcgaggcgagttcaatcattatactgggccgcttaggtggccactagctatgtgcacggggcaggttcgactatcccatattgggacgggcaactgtcgtcatccagcgggccagctgaactgccgtgttctgctacatgagtcaatgcctctgcattggctgga

SEQ ID NO: 135024 - DNA, 369 bp, Zea mays
  Clone ID: MRT4577_54624C.1
gggcccgttagtacgttacattacaacggcatggggggtaccgcagcagcagcaaatgaacttgcaaaaccttccttgcctttcctcaataaagcccaagaccttgggccctaaattcatgcaactatgcaaaaagcagctgggggggcggggacccccgataatagcggcaatcccggcctcgcgggagctgcttttgccttcccgttaatgggaaaaaggacctttttttctgggggggggggggcgcgccccctaaacccaaacctaggggttcacacaggatgcaaggggccgtgcagggcggggcgccgccggccgggttattgaaaggggagcctcctgcccggctgcccctgccctgcctaa

SEQ ID NO: 135025 - DNA, 155 bp, Zea mays
  Clone ID: MRT4577_54625C.1
accggcgagaccggcggccctttttataattttttttttttgaagttttgaaaacagggggataaaccatcaccgggataggggaaaaactgtataagtcttgttatactagaagcgtggacctggagaaaaagtcgaggacacaaccgggaagg

SEQ ID NO: 135026 - DNA, 545 bp, Zea mays
  Clone ID: MRT4577_54626C.1
gccgggtgccgtcagtcggccccgccagtgccgtcccgggacgaacggcggttcgtgggcacggacagcgtggtccacatgctccggccggcgcccgaccccgccgaggccctggaactcttcacggcctcggcgcggcattccacgggggggggggggggggcgtcctgcagctacatgctggagctgatgcacgccgcccgtccgtgcggggacatggtgcatgtgttcgacctattgcataatcaggtcgtcaagaccaacgtctgctccttcgccaccatatgcgggggggttcgcgtggagggggggctgcggagcccgccggtcgccctgcctgcgatgagggaggcggagatgtccctgaacgcctacacgtacaacgggttgatttacttgccctttaagtgcggcttcgatgcggaggccatggctgattacaaggcgatggttgacgacgtgctcttagcgggcgtgatgacctacttcgtgctgatggtggcgtttgggaagaagagggttgtccatactgctctctggctgct

SEQ ID NO: 135027 - DNA, 247 bp, Zea mays
  Clone ID: MRT4577_54627C.1
aggaaagaagacgaggtacaaaactaaaataaattatttataataaaatgataattttatcctactactgattaatgataatttgaaagttgtcctttgggcgggcctccctttggggctatttctgcatgcagccggggggggggggggggcttgggcggtctgtccgggggcctatgcggcctaatagggggttggttttcaagacactggccggggttttacaacggggggactgggaaaactt

SEQ ID NO: 135028 - DNA, 826 bp, Zea mays
  unsure (1)..(826): unsure at all n locations
  Clone ID: MRT4577_54628C.1
gcatgcatgcctagatagaaaggccctttggaagtcacagcagaaaccggcaacagcagcactcggggtcgggggggctaaaagccgccaccgcccgcaccccgaaagctcgcccgccgtcgcgtccaggatgattaccgcacggctgcgccccagagaagaagaaagaaggggaaaaaaaaaagagctcgctccggtgctttcacgtcaggtggtgagggatggatcatggatgcctgccagtggcacggttcgtttcgtgacgccgatggatggtgccgtcgtgccgagcccttggtagtgctctttcttctggatccttctggctaacaagtaaaggcacagaagcagtggatattgcagcctttgtttttcagacgatttctttcacgctctgaccttgcatatgatatgccgtgcccgcccgatcaccaacaggcagctggagggatgacaggaacaacagcgagtggagtacgtaaataaagctacacgagacccgctctgtgatcaccgtacgtagcacatcgctcgggcctcggggtcagaaacgtgcgctgggagggatgacggcggcggtgagatgggcatagctgcggctggcccacgccgtgcacgacgctatgtgccgccatgccccgcaggccacgcgcgacgcatcctgcgtcgcttccggcgcgcttgcgctaataacgccgcccgtctgttcggtcgtcgtttgcgagcggcggcacgttgcgaacgggaactcgagatccgttcgttcgagtccacagnaacggncggcgttcagtgagacnatggnncaagcaggagcaggaacccg

SEQ ID NO: 135029 - DNA, 807 bp, Zea mays
  Clone ID: MRT4577_54629C.1
atggcgggagaagaacggacgtcgcgatgcttcggtgtccttgggcgtcggtcggtcttcgggcttgcagcgcaccgtcgggcatggtgcacggctgcctggcgcgtcggttggcgtgggcgggtctctggacaggggcgctggtgcggtcgggcgctgcgcgcgggtggcgtcggccttagggcagagcgcggcaggggccggcggctcggtgtcttggcgtccagcggctcgggtcgggtggggctcctgtcgtgggtgctgctcggggcggggctgctcggccaggtcggggtgcaggggctcggcacgcgcattgcgcgggatgcgcgaggcggtgcgcggccaggcggctgctgggagcgcggtcgcgggcgtcaggcagggaaaagggcagggagcggcgtcctgcttcggtgcttgggcttctggtccggctctgcgcgcggctgctcggcatcgcggccgtccctgtcgcgggtagcgcacggcgctggtctggggcacgatcctggcgcgcggacgcagagtcaggcgcctgggcggtgtcgggtcctcggtcgatggagctgcgcgcgggtggccgggatggcgcgtggtgcaggggctcggctggtgttgcgcggacagagagagcaagggaaaggagagttgggtggggcccacgcgcagaaatggaaagaagaagagaagatggcggcggctaggggaggaagaaggcagggcgcggcagtagctgatagatgggccaaatgggcttttagggattttcatttaagaagaaatgatgttcaatatcaactatga

SEQ ID NO: 135030 - DNA, 360 bp, Zea mays
  unsure (1)..(360): unsure at all n locations
  Clone ID: MRT4577_5462C.1
gagagacctgcgcgccggctgttcccaagctcaccggagagggggaagagggcgaccgaaggcggtgatgggtttcatcatggacttcgcggtgaatctgttcctccgtctgttggtggtcccggtcaagcgcgtccaggttcggcgggtgcctgtctgcggggtgaaggagcggtgcgagcgctctaaggcggcgtggagccttcctcctggcccctaccgtttctggaccttagtccgtttgtacttgtngttctcctgggtttccctnctcattctggccttccgcccgtcgttccccttcgactaccccctctccgccctctctggccttttcctcctcttctcttccccctttcc

SEQ ID NO: 135031 - DNA, 1957 bp, Zea mays
  Clone ID: MRT4577_54630C.1
tctgcgcgcggtcttcttctcccccgcgcatctccttctccctcctcggccttatcttctccctggtgctatcgctcttcacctggagagcataccgctgcccagaccctctgctcaagcgtcatctccctcaccggatcgtttctgctctctctagtcgcgctcatctgctcgagctctcttacttcttctccacgcgccgatagctccctgctcctctctccctagccaacgctcccttcaactcctctgctcagcctctacagctcacctgctccagcttcctggcagccgcgccctgtgtcacgtgctccctactgaccgagtccctctccatccccatggcgcccagcttggcctgtgtgccgctgctctcacccatggtggccgtgcagtcgagcttctccctggatacacacctagctcggcttctattcctctgcgcgccgatctccctcggctccctcccaacttctctccctcagcgctcgcggctctctctccccaggtccctgcgcacagccgccaccggccgagctcgcccccggcacttcgctcctccatagtcgcgccctggagctcgcccagcgttcttccacgctgatggtcggtggtctccttacagcgacaccgattcctgctcccgtggatgacggcggcaggagatgcttctcccccgcgctcgcccatggacgccagccgcgcccccttctcgtcgtggagcttgccgcgcccttccagttccctctgcccggccatggagctcgcccctggcttggattccagcgccccgctccctgtttgcccctgctcgcctggccactacgcagccccctcggcttctcctccccagcacgccacgcccagctccctgcgcgcgtccctctgttggccggagtaccctggcccgaccccgtgctgcgctggcccagccgtggtctccagctcgccggccgcgagtccctacccatggccgctgtgccgagttcttctccagcgtcgtgaagcccctgctcctcgctcgcctccatggtgttgccgtagaatttcctcgccgcgcccttgccaagctctggcgcgcgtagtcctgtttcaatgatggccgctcattccttctctggtgctcgccgatggcgcgcagtcgcgtcttctcattcgacctgctccggatccgaagctggtcgccctatgtgctcgactttgtcttatcgcagaaaccccaacgtcgtcgaccttgccgattgtcgtcattcgtcgtcgcgtcgtgcgtgcagcagccccagatctgtgcagctctgctcttgttgtcgacatcgctcgccgtggctcagcttgctagcttgtcgttgtttcgtcgtctcgtcttgatgtcagtccctacgtggcatctccgacatatattcacgccgacaaaagaatcccaagaagatatagagaagcaagtcaatcatcgccatttatacggagttctagttaatatggagagattccaagaattgcggatggaagagaaagtaaagctccgttctatactcatcaactgtttgatcgaagattttattcggaggctgtcgacgttctcgcaagctttgagtcggacttgctttggatgagaaatccctgatgttcgagagaggcctgtaagcgctcttttgggactcgaccaaatgactaaattggaaaaccatcatcgccctcgcggatatcgaatccattcggtcttggtaagccaatttattatttcggttaatcgaattggattaactagactcattagttgtaataattcttgtgtttagcagatgcgtcgtatttgtgttagatgcttgctaaaatatctcagcccctctggtaatgtaattgtgtgaaataaatgcgtgatatggtgcaccttaggtgtaaaatgcaggataaataaaatatttaatttagtgagaacttagaatagtaattctag

SEQ ID NO: 135032 - DNA, 835 bp, Zea mays
  Clone ID: MRT4577_54631C.1
acacaccaagagcaggaggatcactcccagaatcaccggctaagcttaagctccctcgtgatctcaaaaaccatctttttttcctctttccacctcgtgcttaccgacggggtccctccctgccatggagtccgtcggcgtcgcccctgcccccgcggcggtggcggtggcggagcagaagatgaagcttctcgagccgaggaaggagcccctcgcctccgccgccgccgccgccgccaaggcgccgtgcaagtgggcgatgaagaagaagctcgtgggcggcgacgccggctacgtgctcgaggacgtgccccacctcaccgactacatgcccgagctcccgacgtacccgaatcccctccaggacaaccctgcctactcggtcgtcaagcagtacttcgtcaacacggacgacaccgtcacgcaaaagattgttgttcgtaagaacagtgcgagaggcacccacttccggcgcgccgggccgcggcagagggtgtacttccagcccgacgacgtgaacgcggccatcgtcacctgcggcggcctttgccccgggctcaacacggtcatccgcgagcttgtgtgcgggttgtacgacatgtacggtgtcaccagtgttgttggcatagagggtggatacaagggtttctattctcgaaacaccgttacattgacacccaaatcagtgaacgacatccacaagagaggggggaccattcttggaacttcaaggggtgggcatgacactgccaaaattgtggatagtcttcaggaccgtggcattaaccaggtctacatcatttggaggtgatggtactcagcaaggcgcttccgt

SEQ ID NO: 135033 - DNA, 800 bp, Zea mays
  Clone ID: MRT4577_54632C.1
aaggccatcaatagctagtccacgaaaggatccctcgggcttcggttcggctgtggaagtcactcactcactcatcgtctcctgctcttctcctaggctcctatgctacacggctacacttttggcttcgtctggaacggtcatgtctgaggctgatcgatgcggcctccctgtcccgccgttgcactgccgacgctcctctcccgcctccgcgcgtgcaggtccgcctcccacgcgctccagtgccacgccctcctcctcacctcgggccacctcgccgcgtccccgctgcgcctctccaacctccttctcctcgccctcgcgtccgtccccagcgccgccgcgctcgcggacgtcgtcttcgcgcgactcccgccgcccgccgcccgcgacccattcgcctggaacacagccatccgcctccatgccccggcgcgcccccgcgccgcgctgctctacttcgcgcggatgcgccgttgcggcgtgcagcccgacgcctacacgttccccgcggtcctcaaggcctgcggctgcgcgcctggctgcagggccggactcctagttcacgccgaggccgtgaggagggggctggctgcggacctcttcacggtgaacgcgctcatcagcttctactgtaggatcctggacttccgctcgggcaggaaggtgttcgacgaggcaggcggcgtttcgcgggatctcgtctcgtggaactccatggtcgctgggtacgtcgggtgcggagagatggggctcgcgcaggagatgttcgacgaaatgccgcagaaggacgcgttctc

SEQ ID NO: 135034 - DNA, 289 bp, Zea mays
  Clone ID: MRT4577_54633C.1
tctttttgtaagcattcctcaaggcgaaccatcatcctttattgtacaacagcctacgaccagatgattgtccaatcgatcggatctaccgcgctcaccacgccaggcaaagtttcaagagcacgaacacttaagatcccaagaacatcaccggcacgtgagccgtgcacgacatctacggtgagaagagctacttcggatgttagtgtgcaacaccgagcagtcgagctaaagagctcacagtgacggcagtagatactaatggcttaggtctgagtgcaccgaagct

SEQ ID NO: 135035 - DNA, 1076 bp, Zea mays
  Clone ID: MRT4577_54634C.1
ggtagtgagatggactgccgtaacagcgactgcggatcggctaaatcacactccgatagcaaaattccgaagttgaaaggattataatactaaaattccaattccggtgttcgggatacctattttcagaagcccagtcttggtgataccttggttccaaaaagctccagctgcagtacggtggccagggctccttcgtattgccgccaccgtcgcaatcgtacgttcatatcaacatttggtatgagtcaaagccgattactttcattgcgagttttggatgaatcatcatcggaagatgacgatgaggtcataattgccgcgtctcaaatcgtacaaagtgcctcacaaagaaagccgggtgggtccgtactaggccgtgtatacatatatcgggatagagaagctgggcacgcaagactgtatcaagattattttgcagaacatcccacgtatggtccaagagtttttcgacgaaggtttaggatgcatcgaccactatttcttcgtatagtgaatgctgtggaacaacatgatgattactttcagctgaagagaaatgcagctcaccaaaaagggctaagttgtttgcaaaaggcaactgcagtctttcgtatgctaacttatggagtaccagcggatgctacggatgagtacgtacgtattggagagagcacaactcttaaaagtctgagaaggtttgttaaagctgttattgacgtttttgagatgagtatttgaggacacccaatgataatgatacagctcggttacttgcacttggggaagaaagaggttttcctggtatgcttgggtcacttgactgcatgcattggaggtggaagaattgcccgtcagcttaccaaggacaatactctggttagcctttgatgatggattgctatcatttatgggcattgtctgctggatttcagtgtctatttcattatgtaatccatcctgaagaagattagtgaaataaccctctccttccatatcttgctatcctacaaaataaattcatgacctcaatattcttgtcaatctgtcgccagtaccatgctgttacaaatctt

SEQ ID NO: 135036 - DNA, 149 bp, Zea mays
  Clone ID: MRT4577_54635C.1
ctagatcgcgagcggccgcccttttaccattatttcgcgaaaaaattatatggctcactatcaaaaaggccccgaaaagtgcactcacgaccatgttattcccaccccaaacgacaaactaacatagtcgacggacgaaataggggggg

SEQ ID NO: 135037 - DNA, 319 bp, Zea mays
  Clone ID: MRT4577_54636C.1
ataggggggaaaaagcaaaaataggggggaagaggtttttttttttctaaaaagtgttttgggtgcataaaagggtccaaccgcccatctatttgtacaaaccgtgcttaagatttttgcacccctaaaaggggggggggggtcaaaacttgaaagggaaaaaagtaccccaaagacttttttttatgggaaaaaagggtttaggggggacctggaacttacacaccttaaaacctttttaaaagggttttaaaatttttggaaaaaaaaaaaacatttttatgaaacgaaaaactttttaaaacttttggggaacctt

SEQ ID NO: 135038 - DNA, 993 bp, Zea mays
  Clone ID: MRT4577_54637C.1
gctcgaggccggccggggagaggcaagcggaaagcaagggtaggagtatatatttagctccccgtctaaccacgggcaaacgcgaagccacaaagccatggatgctccgctgagaggcaagagcacggcaagggcagcatggcggcgaccagccgtctcctgcctcctgttcgtttttgttttggtgctattgatctctacgacggcgacagcgacggctacgacagttcagtcgcggcaggcggggctcacctctcgccaaagaggctctggattccgggcgtggcggagggatgtgctgaggccggacaggacggccggcgaagcttgggcgccgccggcgcccaaggccaacagcaacgtcccaggagggcccttcggtcgtcgttgactcatccagatccagtcgcacccgcccaatcgccatcgtttcatgacacatcgaccagaagatagctagcaattcccatctcactggtgtgtgttattttagcttcttttaacgatgaagaactagtggcgatgattgaaataatacaacttattgcatcgaaaattaagaacgatgtgcgttgaggattgagtttcgtatgtaccatttcgcatggcttttattcttgcttcatacctgcgaggatttatgtgttatgcttgcagcaatgcaaactacatgcagcttgcttgctcgcaaaaggacaatgcactatatatggattgaaattaagaaaaaaaaaaaaaaaaacagcggggccgaagccagaagctcttggggggccttcagagcccctgccagctcaggggccccttccatctcgcttaagctgcaggaggaggagcgcgagcgccgcatggacttcgtgacggagaagtacgcgctcgaggtcgaagagatccgcgtcgaccatgagaccatggagatgctcgctgtcctcggtatggtcgacctgcccggcgttgagcgacaggctgaggtctccaacgaccccgcctacg

SEQ ID NO: 135039 - DNA, 580 bp, Zea mays
  Clone ID: MRT4577_54638C.1
gagccaaagccatcttatcattcgagggatgaaaatggtcacacaggcctaaccgacaacagcacgacacaacctagagtttgatgagaataaacaacacgatacagaaacagcagaatggatttgcacagatgaaacctaccattggagcaaaagaaaacatcaagcacacaaactagcacctaggcaacagcagaggaaagtagaatcattttttaattggactggatcataatcactctatctaccactctattagtgccttactacttaagcttccaccatgaaacatgacaaatgaaggagtacttgtgtttttatattgctactcacccactactagagtgttccctgtgtatcttaacattcatcagaccattagtatccattatctatgttaattcaaaacacataccgtacaaattcactactagtagctcatctgaaacttaactgtttcaataataataattagtatctaaaccagaatgcacagttggactgattcaacaaccaaccccaatgatatatgatgtggtgcgcaacaaattgctctatttattacaatgaaatacacaat

SEQ ID NO: 135040 - DNA, 602 bp, Zea mays
  Clone ID: MRT4577_54639C.1
aacggcgttttcccagcacggcagccggaggacgagcagcagcgggggcgaaggcggccccgggacccggccagacgagcggcgcgaggggaggaaacagccgcccccaccgcgaggcgacccagaaagccccacagccgcacaccaaggcagagggcacaagacaaagcagaggaggacgacagagaggagaacaggaaaggaacaaaggcggaggcgcggggaccggagagagagcagcaggcggaggcaacaggaagcgccacagcagcaagaacgcagcagagcagagggccgcgaagacgtttttttttttataccccccccccgcccgaagactgagaaggacgcactaaatgatgcccagggaactatgaaggaggaccaaacatctatccagaacttgatagaaagaatcaaaagacacgcgctgaccaaggagcttccgggggaaagggatgggcaacctggggtggaaatgatctgagatcgactggcgaagcagatacagtgtcttataggatccctttacaaagcagaatctacagctgcaagccagatggatatactaagaagcattccagccattgaatctctcgagt

SEQ ID NO: 135041 - DNA, 1755 bp, Zea mays
  Clone ID: MRT4577_5463C.1
gattgaggtcctcgtctccggcccgggaagtcggaacatccggccagcggatgcaacaaacaacccatctggtttttttacccctggtgcagggctctctgggctcgagtgtagtcatctcctctgcaggctgtttcaacacaatgatcatggcatcagccttttacaagtttgggtacctgtcgtgtaaactgagtgctgctggtgcatgcaaacaacctacagccaccgccgctgctagcggcggcaacggtgtccatgccctagcgacaatcacgcgcagcaactggaggtgccggaatatggctaccacagcaagtggaacgacgactatggccgtggccggacgccggcgagagaagaaggacgacgtggtcgagggggaggacgaatggcgcagctacctggctccggagaggctggaaatgctgagacagatggagccgtgggtggaagagcacgtgctaccgttgctcaagccggtggaggcgtcgtggcagccgtccgacctgctaccggacccggcgactctgggcagcgacggcttccacgccgcgtgcctcgagctccgagcggcggcggcgggggtgccggacgacctcctcgtctgcctcgtcgccaacatgatcacggaggaggcgctgccctcgtacccgagcgggttgaaccgcctcgaggtcgtgcgggacgccacgggagccgacgccacggcgtgggcgcgctggatccgcggctggtccgccgaggagaaccgccacggcgacgtgctcaaccgctacatgcacctctcgggccgcttccacatgcgcgaggtggagcgcaccgtgcagcgcctcatccgcgacggggtcatagtgcacgcgccggcgagcccgttccacggcttcgtctacgtcgccttccaggagcgcgccaccgccatcgcgcacggcaacacggcgcgcctcgtgggcgcgcgcggggccggggacgccgctctcgcgcgcatctgcggcaccgtcgccgccgacgagaagcggcacgaggcggcgtacacccgcgtcgtgggcaagttcttcgaggccgacccggacgccgccgtgcgcgccatggcgtacatgatgcggcgccggatcgacatgcccactgtgctcatcaacgacggccgccacagcagcggcgacttctacgctcgcttcgtcgccatcgcgcagcaggccggcacgtacacggtttccgactaccgcgccattctcgagcacttcatacggcagtggggcgtcgaggaacttgcggcggggctcaccggcgaggggaggcgcgcgcgggactacctgtgcgcgctgccgcacaagataaagaggatggaagagaaggcccacgatagagcggtcaaagcacaaaagaaacccacacccatccccatcaactggatcttcgataggaccattcctgtcattctaccttagtgtttatctttttcgatctttgtttgggtatctatgctgttattgtaagctaattccatggaccttgatagcgtcgttcatgcctacgtgtcgatagcatcattagtgtcgttctacccttaatcctgttatgccacgttaggtaccatttttttccataagagaatatttacaaatttataatttgttggatcgaggtgatacagggaacttaaaatgctctcagcctctgcattacggtcttacgagctttttacatggttgagacacactaataatatttaatttatagacaaaatctttatta

SEQ ID NO: 135042 - DNA, 328 bp, Zea mays
  Clone ID: MRT4577_54640C.1
cgttttcgtgggtcgcccacacgtgcaaccaattgcaccttgctttgtggtgcaaggcgcgagcgagcgagagggatataatactcctatttattagcgccccctatatgtagccatgtctggagtttcgatcctggactggcaaggagcccagatcgatgcatgatccagagatagattcatccggttgcatgagcatggcttgatgacaggcactatgttacacccaccacccatgtacaaagtggtgtattgtcctatcggctccatctgaagatgatcgctcagtgaagacgcgtccggacagaagacccttacaccaccttga

SEQ ID NO: 135043 - DNA, 2795 bp, Zea mays
  Clone ID: MRT4577_54641C.1
aacttggacgcgtgggcccgagtcccgactttttgcgcccttcgccttctccgctggtcgactgggccggctggctcgacccctcggcggggcactcgcacctcccaagcgtgcctgaatctcagactgaagtcggctgcagccgcgactcctgaatcccgacagctccagcgcctccgctggtccccactgcttcggccatggcggtgcgagccacggtctcccgcttcccggccacgccggaggcgctggagtcgtgcgccgtccagtggggcgtcgccgtgacgcccttcgccgccgcggacgagcacggccaacccccgaccaccggcgccggcggggaccgcgtcccacgctgcgagcactgctgggcgtacttgagcagccactgcgatctggagcgctggggctggacctgcgcgctctgtggcacgctcaacggattcgacgacgaggccgagcgacggttccagcgtcccgacgtgtgccccgagctcaagtcctctttcgtagacctcgaaatcctagtggatgaggcagagggcggaggagacggtgtgcaggcgctgcctgtctatgtggccgcagtggatctcgcatgttctgaagagttcctggaactcgtcaagagtgcgcttcttgcggccctagaagctcttgttccgggctccctatttgggcttatgacattcagccacaagattgggttgtatgatgtccaaggcccgattccactcgtgaagaatgtttttattcctccggacttagaagaagatggtctgtggggcctgttgcccttgaagatgccatgcccctactttgttttttggctccagttgtcacatgcaaggatcaaattgctgctgtcctggagacactgcgacctacatcttcatgggagagaggggttgcttctgggcaggaagaggatactgttttgcttggcggacgtggttttgggacagccatgtctgctttaattgggtacctaagttcagaatatggttctacttttgctttagctcgggtatttgcttttctgtctggtgctcctgattatggagctggtgtgctagataccaggaggtatggggagcaatatgctagtaaaggggtagatgctgatcttgcattgctccctgaacagatacctttctacagagacctagcagctgttgctgttcagtcaggagtatgcatagacatatttgctgtaactgatgaatacactgatttggcttcactgaagtttttaagtatcgaaagtggtggatctttatttctttatgcaagtacagatgattcaacagttccccaagacatataccgattgctaagtcgaccctatgcatttggttgtgttctaaggctgagaacatcttcagattttgagccgggcaattcttatgggcatttcttccctgaccctcaatatgaaaatgtgcaacacatcatctgctgtgattcatttgccacttatgcatatgactttgagtttgcccataacgacggtttctccaggcacacagatcctgctgttgtacagattgcttttcagtacagcgtgattgaacctgtcaaggaaacatcaggcgatggatcacaaccatctgcaagttacaagttctctctgaagaggcggctgagaataagaacattgcagtaccgtccaactaataatatcagcgaaatttatgacagtgtagatccagaggttgtcctgcatatccttgttcataaggttattttagaatccttggataaaggggttagagaaggcaggcatcaagtgcatgcttggctatccctccttgcagcccggtataatcaggccctgagttctgatgtgcgaccgctgtcgagcatagacattgacttctcacagtgcccacagcttcaaacgatacctcagcttgtttttgcattgttgagaagtcctcttcttcgcttgcatgaggaaggcgtgcacccagattacaggatatatctacaatgccttttcagtgcactggagccatcatctgtagctaaagccatatatccggttttaatctcgtattcctcgcctgacaagcaagcattcccacggcacactctgagccatgctgctctaatcatgagcgagagcccaatatttcttctcgacacatttaccaaccttattgtttactattcctcaactgctgatccttcagttccttttcctccaccccatgactgccttttgagaaaaacaataaatggactgaagcaggacagatgtataacccccaagcttacattcatccatggagggaaagatgattcaacattgtttgagagctatctcattgaagagcaagatgttgatggatcgggcttaacaactggttcaggttttgtagccttccgtgagagcgtgaggaacgttgcaggagagatcatacaggaagaaattggaagttagttccagctcgattacctttttggttctgctgcagagggtatcgactaggatgttttagccttaattaatgccgtagcagttaactgaaacgtagatagccaaaatggagagacaattcaatgaataataaaaggaggccacttgatgtatagttgcttctgtcaacaactgctttaggcttgactaggcagagcagcctttctggtacagcggcactgtctgtctctatgctaaaacagacgagttttactacacaataatacaccgtcggaacctggcagactgaaatttgagagactggtttatgaaaattaagttggttccaaaatatgggtttatgccttagttt

SEQ ID NO: 135044 - DNA, 4384 bp, Zea mays
  Clone ID: MRT4577_54642C.1
ctgagagcccgcgattgctcccaaacccagaaactgaagactgttgcagccgcgactcctgaatcccgacaactccagcgcctccgctggtccccactgcttcggccatggcggtgcgagccacggtctcccgcttcccggccacgccggaggcgctggagtcgtgcgccgtcaagtggggcgtcgccgtgacgcccttcgccgccgcggacgagcacggccaacccccgaccaccggcgccggcggggaccgcgtcccacgctgcgagcactgctgggcgtacttgagcagccactgcgatctggagcgctggggctggacctgcgcgctctgtggcacgctcaacggattcgacgacgaggccgagcgacggttccagcgtcccgacgtgtgccccgagctcaagtcctctttcgtagacctcgaaatcctagtggatgaggcagagggcggaggagacggtgtgcaggcgctgcctgtctatgtggccgcagtggatctcgcatgttctgaagagttcctggaactcgtcaagagtgcgcttcttgcggccctagaagctcttgttccgggctccctatttgggcttatgacattcagccacaagattgggttgtatgatgtccaaggcccgattccactcgtgaagaatgtttttattcctccggacttagaagaagatggtctgcctgttgcccttgaagatgccatgcccctactttgttttttggctccagttgacacatgcaaggatcaaattgctgctgtcctggagacactgcgacctacatcttcatgggagagaggggttgcttctgggcaggaagaggatactgttttgcttggcggacgtggttttgggacagccatgtctgctttaattgagtacctaagttcagaatatggttctacttttgctttaggtaggtgaacacactttccatatctcatgagatatctggtgccattcaggcaattagcttcataactcgtaagatgctgtatctttgcaaacaacctagtaaccagtatctctatgcgtaattttttaatgttccttgtcatatggagagcagctcgggtatttgcttttctgtctggtgctcctgattatggagctggtgtgctagataccaggagatatggggagcaatatgctagtaaaggggtagacgctgatcttgcgttgctccctgaacagatacctttctacagagacctagcagctgttgctgttcagtcaggagtatgcatagacatatttgctgtaactgatgaatacactgatttggcttcactgaagtttttaagtatcgaaagtggtggatctttatttctttatgcaagtacagatgattcaacagttccccaagacatgtatgcttgcttgaatgaatattttatgtgctctattcagaaaattataacagccaaatttcctaataagtatgaatggtcttttcttcctttcctgcaactcccactgacagataccgattgctaagtcgaccctatgcatttggttgtgttctaaggctgagaacatcttcagattttgagccgggcaattcttatgggcatttcttccctgaccctcaatatgaaaatgtgcaagacatcatctgctgtgattcatttggcactttagtttatgactttgagtttgcccataacgacggtttctccaggtatattatttaacttgaccctgtaatcagttacttgttactaaatgctgtatttgttaaaggaatcccttaaaaggaagataatgccagaatcaggattttctcgctgctcttaatctagtttgcgctagtgcgctactaatgaagccacatgcacaagcagttcgaagaagcaaatttcatggttcaaatgtgcagtttagaaatttacccgtagaaaaccttcacaaggaatagcaactcttttaaaaaagcagccctagttttccacaaatgtatatatatgaagtcatgtgttggggaaaagatcctcgggcacctgggcccaccggtcagaagagagcattcgaaaaagacctccggactaccagggactaccggtcagtagaagggtaagggaaccgtctactctggaaagcgctcgccccggataaacctcgagccagcgagcccagggtcgggtgaacagaatggaagccactcaagtggattcctcgcctggcccaagactgacccgccataagtggccgaccacattaactatgcctaacacagagtcgcagtagagaaccggtctgcctcccactcatgacctgcaagcccctcggtctgcagcacactcatgacctacgagcccctcgaactgcggcacactcatgacctattgagactaggcttgagtgcgcagactatctatagggcccacaacacgacgagccacgccgagacccaggctacaaaggccaggggtcggcgtggcgcaaaggcagtaatgatggcgtcagggctttgcgttgccaacgccgtccgtcataatgagcacgagctgagacgaccgagtgactaaggcacattcggacaaaaaccgaacacagcgtagtggctcctcgaggaagccaccggcgatcgacccccacctcggcctataaaaggaggaggtcggtcacgaacgtgggtctcagggggagaactctgagagaactctaggacaacaaaccagaggaaggacactcggcggaagataatgacacacgctcgacgagacctaaagacttggaggccagagccaaggcttagtgtaggactccggttccatagtctttaggtccacccacgcataagagacttgggagctctccttccctctctcgctcgcttgtaacccatactacgagtattgagcaacaaaggtgctggtatcgtgagccgtcgaagactggatgtagggacgttttgcctgaaccagtaaaaactttgcgcccaccgagcacaccgtccagagcccagaacgcgcacatagaaattcaattgttgaaaatcggaggttcgaaacaccgacaatatggtaaccttgttttctggatcctattaattgatgagattgtgtcatacttgttaatggtggttaactaccgtgatttatatttacaggcacacagatcctgctgttgtacagattgcttttcagtacagcgtgattgaacctgtcaaggaaacatcaggcaatggatcacaaccatctgcaagttacaagttctgtctgaagagacggttgagaataagaacattgcagtaccgtccaactaataatatcagcgaaatttatgacagtgtagatccagaggttgtcctgcatatccttgttcataaggttattttagaatccttggataaaggggttagagaaggcaggcatcaagtgcatgcttggctatccctccttgcagcccggtataatcaggccctgagttctgatgtgcgaccgctgtcgagcatagacattgacttctcacagtgcccacagcttcaaacgatacctcagcttgtttttgcattgttgagaagtcctcttcttcgcttgcatgaggaaggcgtgcacccagattacaggatatatctacaatgccttttcagtgcactggagccatcatctgtagctaaagccatatatccggttttaatctcgtattcctcgcctgacaagcaagcattcccacggcacactctgagccatgctgctctaatcatgagcgagagcccaatatttcttctcgacacatttaccaaccttattgtttactattcctcaactgctgatccttcagttccttttcctccaccccatgactgccttttgagaaaaacaataaatggactgaagcaggacagatgtataacccccaagcttacattcatccatggagggaaagatgattcaacattgtttgagagctatctcattgaagagcaagatgttgatggatcgggcttaacaactggttcaggttttgtagccttccgtgagagcgtgaggaacgttgcaggagagatcatacaggaagaaattggaagttagttccagctcgattacctttttggttctgctgcagagggtatcgactaggatgttttagccttaattaatgccgtagcagttaactgaaacgtagatagccaaaatggagagacaattcaatgaataataaacggaggccacttgatgtatagttgcttctgtcaacaactgctttaggcttgactaggcagagcagcctttctggtacagcggcactgtctgtctctatgctaaaacagacgagttttactacacaataatacaccgtcggaacctggcagactgaaatttgagagaattcaatcccttaatgctcggttttgatattggagggtaagg

SEQ ID NO: 135045 - DNA, 722 bp, Zea mays
  Clone ID: MRT4577_54643C.1
tttaatatcgtattcctcgcctgacaagcaagcattcccacgacacactctcagccgtgctgctctaatcatgagcgagagcccaatatttcttcttgacacatttaccaaccttattgtttactattcctcaactgctgatccttcatttccttttcctccaccccgtgactgtcttttgagaacaaccaatcaataaactgaagcaggacagatgtataaccccaaagcttacattcatccatggaggggaagatgattcaacattgtttgagagctatctcattgaagagcaagatgtcgatggatcaggttttacaactggttcaggttttgtagccttccgtgagagcgtgaggaatgttgcaggagagatcatacaggaagaaattggaagctagtttcagctagaagacccttttggtcccgctgcagagcgtatcaactcggatgcttttaaccctaattaatatcatattagttaacttagatagccaaaatggagaaacaatgtcaaaataataagaggggccacatgatttgtagttgcttctggcaataactgctttaggcttgattaatcagagaagcctttctggcacagtggtaagggacgagtacaccaatacaccgtgtgatcctggctgtctgattttttttttgagaaactggtttatgaaaaaaaaaaaaaaaaaaaaaaaaatgggtttatgccttagttt

SEQ ID NO: 135046 - DNA, 252 bp, Zea mays
  Clone ID: MRT4577_54644C.1
ggatgaatgactatcatgatcagaaatttactcgatatgtaccaacaaataaaattcttgaatctgtgagggatatttggttatgtgtggatgaaatggaagacttgtgcattatctttaagccctttcgctatacagaaggttgctcatctcgagtgcaaggtagcttgaatcaaacatgctttactgggagaagtggtgactaaaggaaacgtaaatattttgcatctttcatcccttagccattagaat

SEQ ID NO: 135047 - DNA, 345 bp, Zea mays
  Clone ID: MRT4577_54645C.1
acctagaccaagagctggtgaaaagcgtgaaggagagcttagattcctggtccgggatgaggcgggccaatgtcaatccgaagaagggagggagccggtgcattaagactcccgattacggacattcagggccgagaggacagcagggttcacctgcgaggagttgaagcccctcaagctagacaaggcatcaggattaaggttgggagtgttcagtgtggacatgaggactaccttgctctgagtatgctggtacctagaagcattgctgctgctggatgtgtctgctggatcagtgactagcttggtgctccatagaaaatgaacgctgagaaggacgatgaa

SEQ ID NO: 135048 - DNA, 312 bp, Zea mays
  Clone ID: MRT4577_54646C.1
gcaaacccggggggaaaaaaatgaataaaatttggcccaccaggtttaagttcgccggcagctgtacccggggggctacaaatgaattaataatttgtttttttaataaacaaaaaaaaaggttgggggccggagcggttagctgatctgcaaaacgggtcagggcgtcgtttaccctgtaagagtacttccagctcggttgcccggggaaatagagtccaaaccccgcaaaggaaactttaagcaaacatttgttttgggcgctcggcagcggacaagaggctccacctcgatttatcccgcattaccttt

SEQ ID NO: 135049 - DNA, 995 bp, Zea mays
  Clone ID: MRT4577_54647C.1
aaattgtgtacgagttgttgtgccacacacctccgctacctcgttgcagcttctcctaaccagctagtcagctctgcaaagtgcaaggtatctctctctctttctctctatccacctctctctctcacacacacacgcgcgtatgagcagagcagatgacgatgagctcctccagtattaataagcaagaagggccgaagctattcagctcgaggatcctgtcaagggatcgctcgagcgtggccaacgcgtccttcagggtatactacagcctcggcgccggcaccgtgccgttcctgtgggagtccaagccaggcacgcccaagagctcctccacccctgcctcgggagccagcacagtgccgccgatctcgccgccgccgtcctaccagcagaagccggtgtcccagtccaatgccaataaggcgaagttcaggaggggaggaggccagcagcctcttcttggcctcccggaggttgttgatcatcggctgcctgaacctgaacgtcaggagacggtcgccgcagccgtcgccaacggatcaccagcagcgacgttgccttggcgtcgtcgacggcgacgagcggcggtcgcggcgttccaccatgtgcttctgaattctgatgtgtgtgctgcccggccgggacggacacggggattagctgttgcactacgtcggtgttaattatagttgttaagtattaggtttctttttgaagagtggtacgcgtgtttgtgcaattggatttcattgtttatgttctataggtcgttggactcgttccctttccagtgttcagctttatttgcatataggcatggcatatatatcatgtttggttgttttaggtattaataaggtcatttttggtagggctctttccaactctggctctagttcttaaaaaaacagcttcttcccttatttttagaaagcactacagaaaaatatcatgtttggttgggatacaactcctcttgcagcttacgatgt

SEQ ID NO: 135050 - DNA, 377 bp, Zea mays
  Clone ID: MRT4577_54648C.1
ctttgcttttcgtgggctgctcctagacacctcaaggcattatcttccagttgatgttattaagcaagtgatcgactctatgtcatttgctaagttgtagaacgtttttcattggcatatcatcgatgagcaatcctttccattggaggtgccaacatatccaaacctttggaaaggttcatactccaaatgggagcgctacaccgcggaagatgcacatgatattgtcaaaaattgacgtgcctggtcatgcagaatcatggggaaatggatacccaaagctttggccttcttccaattgtacagagccattagatgtctctagtgatctcacatttgaggtatttttggaatcttgtccgatatgaggaaaatct

SEQ ID NO: 135051 - DNA, 335 bp, Zea mays
  Clone ID: MRT4577_54649C.1
ccggctcagttctacgggggatacccccctcactccccacctggcacccccacaaaataagttctgcgggggatggcgctctcctcctcccggcgagcacctctgcgccccatcctgcggggtttcacgcctacgcgggccctggcgcggtgggccttcgagtttccaagcccacgagggggggggggctggagcccgggcggagcctggaggcggggcgcggctggccgcctggcaggggtcgcgagcgaggtgcgggagctgggcggggacgcctacgagggctctgttgcggccgagcggggccggggccgcgcctgtgcgtgccgccgcgc

SEQ ID NO: 135052 - DNA, 495 bp, Zea mays
  Clone ID: MRT4577_5464C.1
aaatggcaattgaccctccgacccaaaatgttttttgacaattggaagctttttttgaacaacaggggacagagctttctttttttttttggaaaggggaaggaaaatttcccaaaaaaaaaaaaccccaaaaaaaaagggggggggggaaaccaaagggaatttttttaccccttttttacatcccgttttattggagaattaaccccagcgggggccagagagagagattgagagggtttttccccccccaggcaacggggggggggggagcaccaaacccctggcccatggtttttttgtttttttcccctccctcctcctcctttgggtcctaattttttaaacttccaccgggcaataggggggggttttgaaccctaaacccaaaaccccgggggccccttttcccccgggggtgaaaaagaacccggggcaggggaaaaaaaaggggttttggccggaaatccagttggggacctttcaccggagggg

SEQ ID NO: 135053 - DNA, 804 bp, Zea mays
  unsure (1)..(804): unsure at all n locations
  Clone ID: MRT4577_54650C.1
cggggctgtcatccctggaaacggtaacccttgccgtcgctgggcgttctcgctctcggcctccagccggcgcgccgcgtctcccagcgctcctccctccccaatccccattcctcggccaccgcacgaacctcaaaactatggcttcgtgccctctgttcctccttgtcccgcggccccctcctccccttgtcggcgccgaccgctgcccaggctccgcgggctgctcagatctcccaactagctgccgtcctcatcctggacgccggcatggttacccatttcgttgcaactcgtcttcttcctcgtccgcgcctcgcgagcgcccgcccaggcagcgccccggtggccgtggcgacgccatcgaccccgtaggcttcctcaccaagctcggcgtctcggaccgcgccttcgcccagttcctccgcgaccggcacaaggccttgaaggaccgtagatgggagctgtgttctcggtttattgatctgaaagaggcatcttctgggtttgagttattgggcatgcaccgacatcgacaacaccgcatcgatttcatggaatgggctccaggtgctcggtattgttctttgattggtgattttaatcagtggtccccaactgaaaactgtgccagggaaggtcatttaggacatgatgattttggatattggtttatcatacttgacgattagctcaaaagagggcaagaacaagatgaatatttcttccaggaatacaattatgtggatgactatgantaaggtgacaatggcattgatgctgatgaaatatgcgtaagatgaa

SEQ ID NO: 135054 - DNA, 725 bp, Zea mays
  Clone ID: MRT4577_54651C.1
ggaaggacagtgacctctctctctatattggaagtatagaacaaggtgccaaacccattgtcgtcactccaaaccacccaagcacaacaggtggtcgcaaattacacgcgccattaatgcgcagcttggaccagcgggtttcaggtcaaggccaaactgaggaaaagatggcgtccggtccccgacagcgacgcaccccgccgccagaaaacaaatgcagtactgcccgagctcgaaggaggtttgaacggtgcggttttatttcgacttcctgcttggctgcttgctttactgaacgaagcacgaacccgggccgaccggcggcctccgagcgtagtagttcgtgacaggagccgcggcgaccccacggtggttcagcaggcacctgaagcggtgtagccgtgacagcacggtcgtctcgacgtcctgggcggatatggcctccagctggctccacagacgctctgccgctgcggcggctcggggccagattgtctgcaggacgtcggacgtgtcggccgtctcgccccacatgcagacctccccgccgagcaccagcttctgctgctctctgtcgctgatcccggcgagcggctcgccgctgtagacgtcctcccagggacgtcgaggtggtccaggtaccagacgccttggttgctcattatgcatctgaaacccttggccacaacctttgggcagactccgggccccagccagttgtgcac

SEQ ID NO: 135055 - DNA, 793 bp, Zea mays
  Clone ID: MRT4577_54652C.1
ctaattttgatctgcttgtgctcccgtattgagcttaccaatgtcctgtttacaattacttctattatttactccgaatgaaatgttttcaaccaaatatgatatttctattatctatctttattgactctttcatcactagtttatttatcataattcgttagtatttgactttttgctttttttttcttgaactagtttagaaagccaaatgatgttgcatgttataagttaccaatgtaagttatatgaatcagccatgaaactagctctcatgtatgttatatatccttctacagtcaattgtccttttaaatgtcaggatgcccttttgaattagcatacctaagacgtgctcatatatttaaatgcagggtacaagtatattaattgaacctgctgttatgtcacttcatattgttttttacaaagcgtcgttcatgatagctgggtactaaatccttttgttttcagttttacatgtgccaatacactaataaatcaaatcccaacaagggaatcttcgattgcttattcaggtccaaagcaaaagtcaactagcaaacaatataacgaggatttggtaaagtttcatttctccaagtgtattatgtgatgtattcattagagatggtattttgtgagcattcatcacagtgttctttatgcaggagtttaatacaggagattggatgagaaaactaaaagatgacaagtacgttccaaattgaacacaataaaattcgatgtcatgtaaataagtgtactttgtatgtctcccaatgttgtttcc

SEQ ID NO: 135056 - DNA, 2142 bp, Zea mays
  Clone ID: MRT4577_54653C.1
catgaatagatagagcaaaaggccaaagacttacatgggcaatgaagaaggtggcatgggaaggacagtgacctctctctctatattggaagtatagaacaaggtgccaaacccattgtcgtcactccaaaccacccaagcacaacaggtggtcgcaaattacacgcgccattaatgcgcagcttggaccagcgggtttcaggtcaaggccaaactgaggaaaagatggcgtccggtccccgacagcgacgcaccccgccgccagaaaacaaatgcagtactgcccgagctcgaaggaggtttgaacggtgcggttttatttcgactttgggaaatcgaaaacggagacagattattatacagattgtttccgtggattacacacagatatggtacacgaaggcagagcacctcgtggcgtgggtaggagggtaccttcctgcttggctgcttgctttactgaacgaagcacgaacccgggccgaccggcggcctccgagcgtagtagttcgtgacaggagccgcggcgaccccacggtggttcagcaggcacctgaagcggtgtagccgtgacagcacggtcgtctcgacgtcctgggcggatatggcctccagctggctccacagacgctctgccgctgcggcggctcggggccagattgtctgcaggacgtcggacgtgtcggccgtctcgccccacatgcagacctccccgccgagcaccagcttctgctgctctctgtcgctgatcccggcgagcggctcgccgctgtagacgtcctcccaggggacgtcgaggtggtccaggtaccagacgccttggttgctcattatgcatctgaaacccttggccacaacctttgggcagactccgggccccagccagttgtgcacaaccgtcagtggattgaggttttcttcgaacgagttgaaggtttcttcccagttcacgggagtccagttcagcttgatcgccagctcctgggccttcagaacgaagtatttgtaagcgtccttcgtggtcattttgcgctcgtccatccactgccgcacgtgaggcgttgtgttccagcaccctgtgtatacttcatcaccacccaagtgaaacagcccgaatggaaagattttcctcatatcagacaaaattccaaaaattacttcaaatgtgaaatcactagagacatctaatggctctgtacaaatgggagaaggccagagctttgggtatccatttccccatgattctgcatgaccaggcacgtcaatttctgccatcacattgatacctcttttcttagcgtagttgacaatatcatgtgcatctcacacggtgtagccctcccatttggagtatgaaccgttccaaaggtttggatatgttggcacctccaatggaaaggattgctcatggatgatatgccaatgaagaacgttcagcttagcaaatgacatagagtcgatcacttgcttaataacatcaactggaagataatgccttgaggtgtctaggagcagcccacgaaaagcaaagcggggctcatcttggatatgccatggagcattgtgcacttcaacatttttggtgtcatagttgaaaacacaaagttgactgaatgtctccagtcctcgaatagctccatatattgtgtttgcctcaatgattgctcctccgacgatggaatcgacgcccccggccgccgccacgtagatggcgtagctctcgtccacccccagcgccagcgtgtcgttggcggaggcgacgacgacggtgagcctggtgacgtcgtaccgcgcgcggcccgcgcgcgccgcgtgcgcccacggcgcgaacacgaggccccggtaccgctggaacgcctcggccacggccggggagcggccgccggggccctgcgggtcgagcgcgaggtccgggtccaccgtcagcgtccgggacccggacgagacgctcttgggcagcggccagaggtagacgggctctccggcgaaggtagcgttcgcggccggcgacgcgtggcgacgcgcgccgacggccgcggcggcggcggcggcgaggaggagggcggagagcaggtaagcggggcggttggggggcattttgggaaggttgggaagaattttaatgtgccctcgtgccgaatt

SEQ ID NO: 135057 - DNA, 268 bp, Zea mays
  Clone ID: MRT4577_54654C.1
tacgttttgctttacagtgtccgaagacactactgctgcccacgaggacaaagactggcactggtatcacttgtcactgcaaattatgcattaagaagaaatgacctaaacggacaggatcattgtggacctttttcataggtgcacaagttacataatggactgacagcaacagcatctaatttgccagccaaattctggagaaagagcggaatttaaacaagctgaacagatcgtgtgcaaccatgggctggctggctggatcgtt

SEQ ID NO: 135058 - DNA, 543 bp, Zea mays
  Clone ID: MRT4577_54655C.1
ccagggaatatatgcttttgtgactttggtggatggtgttccctacagcgatgatctacggaaaagcctcgttacgacggtccgcagtcagattggtgcgtttgctgctcctgacaagatccattgggcacctgggctccctaagacacgaagtgggaagatcatgcgaagaatcttaagaaaaatcgcatccaggcaactagatgagctcggcgacacgagcacgcttgctgaccctggtgttgtggaccagctgattgcactcagtgacagctaatctatcggctatgtgggagggggtgagacatgatcactgcctgcactatacttatgcaaaattcagctttatgatgcgaggtctgttgggcccagcgttctcttaattgcttcggtgtcatggggatgccaacaaaagagagatgctgcgaacttggggagatgcggacatatgcggggtgcgtctgtaaattgttggatcgcagtcactgatagttattgtacattggtaaataaggagatgaagtgtatatgcgagttttggct

SEQ ID NO: 135059 - DNA, 1045 bp, Zea mays
  Clone ID: MRT4577_54656C.1
gcacgaggctccttcggtccagcttcgactggctggcaggtaggcacacgcgaagcgataaggtcggctaagccgcgatgtcgccgcggccgccgtccctcgtggtgctcccgctcctcctccccctcctcctcgccgctgtatcccacgctacggctaatgcggccggtgccagcgcccctcccccagtgccgacgccgtggccggagcagttccacgcggtggtcttcaccaatctcaccgagagcggcggccggctgcagctgatcgacctgtactacgactggcccaggggccgcaacctcaacctcatccgggaccagctctccagcgacccgctctacgacgtcgagtggaccaacggcacctcctacttcttcgactccgggtcctgccgcaccatgcgtttccccgtggggatcctgccgcctgactggctcgccgccggcgccgtctatctcggccgcgagcacgtcgacggcttcgactgccacctgtggaccaaggtcgacttcgtctggtactacgaggaagtcgccaccggtcgccccgtccgctggaatttcttcaatgggatgcagcagcatgtgatgagctttgaggtgggaggagtgctggaagactccaagtggcaggcgccccctcgctgcttcaatggcggcaatgccgtggacggagttcatggcgaggaagccggtagtgttgatgtgatggacagcatgatcaggttcgccggggctccggctgcagcagtagctgcatcatttgaccagtgagagtctgtgccaacggtgatccacgccctgttggttctgcacgctctgttgatcacattgtgctttgtataaccctggctgatttgtggtaaccctggctgatgttcctgctgtcatggaacaggaggggcacaaatagacttgcatttttttttgttgcatttctgaacgctcatgctaacttgtaccatcagtgatgaactgatgaatctatcgtgagttgtagatagaacatccatgctttggcgcaaaaaaaaaaaaaaaaaaaa

SEQ ID NO: 135060 - DNA, 624 bp, Zea mays
  Clone ID: MRT4577_54657C.1
ccatgatcaagacctggctacggaacaaccaggtggcccagccccagccgccagctccacatcagccgcagcctgaggaaatgagcaccgacgccagcggcagcagctttggatgctcggattcgatgggaaggaacagcatggtggcggctggtgggagctcgcagagcctggcgctctcgatgagcacgggctcgcacctgcccatggttgtgcccagcggcgccgccagcggagcggcctcggagagcacatcgtcggagaacaagcgagcgagcggtgccatggattcgcccggcagcgcggtagaagccgtaccgaggaagtccatcgacacgttcgggcaaaggacctctatatatcgaggtgtaacaaggcatagatggacagggcggtatgaggctcatctatgggataatagttgtagaagggaagggcagagtcgcaagggtaggcaaggtaatgaaacatatatccataacaaccactgcttatatcgtcatagaaaaaacatatatggtttgtacaacttgagctactgataaagtattgtgtcttttggttccattgcacacacccctggcttcaaacattgcctaccggaatgacaccaacaatatgcag

SEQ ID NO: 135061 - DNA, 961 bp, Zea mays
  Clone ID: MRT4577_54658C.1
ccggccgggagcttcgactggctcgcagtggcaactggcaggtaggcacacgcgaagtgataaggtcggctaagccgcgatgtcgccgccgccgccgccgtccctcgtggtgctcccgctcttcctcctcctcgccgctgtatcccacgctacggctaatgcggccggtgccggcgcccctcccccagtgccgacgccgtggccggagcagttccacgcggtggtcttcaccaatctcaccgagagcggcggccggctgcagctgaccgacctgtactacgactggcccaggggccgcaacctcaacctcatccgggaccagctctccagcgacccgctctacgacgtcgagtggaccaacggcacctcctacttcttcgactccgggtcctgccgcaccatgcgtttccccgtggggatcctgccgcctgactggctcgccgccggcgccgtctatctcggccgcgagcacgtcgacggcttcgactgccacctgtggaccaaggtcgacttcgtctggtactacgaggaagtcgccaccggccgccccgtccgctggaatttcttcaatgggatgcagcagcatgtgatgagctttgaggtgggaggagtgctggaagactccaagtggcaggcgcccgctcgctgcttcagtggcggcaatgccgacaccgtcaacgtggctgctgatggagttcatggcgaggaagccggtagtgttgatgtgatggacagcatgatcaggttcgccggggctccggctgcagcagtagctgcatcatttgaccagtgagatttttgttttcctgatgtttggctgatgagagtctctgccaacggggatccacgcgtcctggtgattctgctacgctctgttgatcacattgtgcctggctgatttgtggtaacaccgacagtcactgtacatttcctgcgacagcaacggaattcgagctggccc

SEQ ID NO: 135062 - DNA, 398 bp, Zea mays
  Clone ID: MRT4577_54659C.1
tggaacctttgggctgatttatgtgcttgttctgctgctgctctatctattttgttcctatgttctttctattaaacaaggcttggtgtccccttgatacctataggggggataggaaactagtggttacggttctgaccttggtgatgattcctgttgctactccacttgcttctcctcgcgttgtggtcggtattgttgctgataatgattcttttgatcatgctacttagggttgtgctcatcgtgatattcgttgtgttgggcctgcgattaacgctattgagcatactgtgggtgttaaggcgaggtcggagcgtaagtatcctggtattggtaagtctgagtgtcttactgatggggcgattgatgtgaatggtatgcatatgactgagtct

SEQ ID NO: 135063 - DNA, 214 bp, Zea mays
  Clone ID: MRT4577_5465C.1
agatcgatctaggcggaggcacactattcgtcggtaggagccaacaacgttttacgaacacattcgacttggacatcctctgatgactctagacaaccgacatgactaccacgcgaccgatgcatctatgatgaattaatccaatgtatttacataatggtcgatttactaaactaggatttgaaagcttgcgcgtactatactattgctatac

SEQ ID NO: 135064 - DNA, 973 bp, Zea mays
  unsure (1)..(973): unsure at all n locations
  Clone ID: MRT4577_54660C.1
cctcgaggccggccgggccgggatctccttcggtccagcttcgactggctggtaggtaggcacacgcgaagcgataaggtcggctaagccgcgatgtcgccgcggccgccgtccctcgtggtgctcccgctcctcctccccctcctcctcgccgctgtatcccacgctacggctaatgcggccggtgccagcgcccctcccccagtgccgacgccgtggccggagcagttccacgcggtggtcttcaccaatctcaccgagagcggcggccggctgcagctgatcgacctgtactacgactggcccaggggccgcaacctcaacctcatccgggaccagctctccagcgacccgctctacgacgtcgagtggaccaacggcacctcctacttcttcgactccgggtcctgccgcaccatgcgtttccccgtggggatcctgccgcctgactggctcgccgccggcgccgtctatctcggccgcgagcacgtcgacggcttcgactgccacctgtggaccaaggtcgacttcgtctggtactacgaggaagtcgccaccggccgccccgtccgctggaatttcttcaatgggatgcagcagcatgtgatgagctttgaggtgggaggagtgctggaagactccaagtggcaggcgcccgctcgctgcttcagtggcggcaatgccgacgccgtcaacgtggctgctgatggagttcatggcgaggaagccggtagtgttgatgtgatggacagcatgatcaggttcgccggggctccggctgcagcagtagctgcatcatttgaccagtgagatttttgttttcctgatgtttggctgatgagagtctctgccaacggagatccacgcgtcctggtgattctgctacgctctgttgatcacattgtgctttgtataaccctggctgattngtggtaacaccgacagtcactgtaaaaaaaaaaaaaaaaaaaaa

SEQ ID NO: 135065 - DNA, 1642 bp, Zea mays
  Clone ID: MRT4577_54661C.1
gggagcttcgactggctcgcagtggcaactggcaggtaggcacacgcgaagcgataaggtcggctaagccgcaacagtcgttgatgtcgccgccgccgccgtccctcgtggtgctcccgctcctcctccccctcttcctcgccgctgtatcccacgctacggctaatgcggccggtgccggcgcccctcccccagtgccgacgccgtggccggagcagttccacgcggtggtcttcaccaatctcaccgagagcggcggccggctgcagctgatcgacctgtactacgactggcccaggggccgcaacctcaacctcatccgggaccagctctccagcgacccgctctacgacgtcgagtggaccaacggcacctcctacttcttcgactccgggtcctgccgcaccatgcgtttccccgtggggatcctgccgcctgactggctcgccgccggcgccgtctatctcggccgcgagcacgtcgacggcttcgactgccacctgtggaccaaggtcgacttcgtctggtactacgaggaagtcgccaccggccgccccgtccgctggaatttcttcaatggtagtatacattcaatctatactttctttagactcatgatggagcatcgtggatttttggcgattcgcacccgtctcgggtgttttgatctaaccaatgcgtgcgattttgttctgcagtttgtagggatgcagtctaaatttctaggaacgcttcccagttttgtgcttttgatgcaacactataatggttaatggcgattctacaatttcggtgtgcgggacgggagtgctgtatgaattactctgaatagtttagctcacttctcctaatttttcttgcaataatagtcgtttgaaaaagaaaactaaaattcaggagcaaacctcactctttttttatcctgacacttggaactctgcttgtttttttttgcagtcttaacatttctgcatttctccagtatacaattacgcgattttcttgtgcacagatgcagtccggaattctccaattgctaagttcttagctggggaaatatctgtcctgctgcagtctcctttttctgaaacgcgaaaaatcttattccagtctcagtgtctgcagggtagaagcgctcggttgatgcaacagggtgattactgatgacctgtgtgttcttgtacctcagggatgcagcagcatgtgatgagctttgaggtgggaggagtgctggaagactccaagtggcaggcgcccgctcgctgcttcagtggcggcaatgccgacaccgccaaggcggctgcggatggagttcatggcgaggaagccggtagtgttgatgtgatggacagcatgatcaggttcgccggggctccggctgcagcagtagctgcatcatttgaccaacggtgatccacgcgtcctggtgattctgctacgctctgttgatcacattgtgctttgtataaccctggctgatttgtggtaacactgaaagtaactgtacatttactggaactggaaatttgatgagtcagtgtcgatcgtagctgctactattttcctggagaatgcaggctcggtactgatccactgaaccatggaacatgaggggcacaaatagacttgcatttttggttgt

SEQ ID NO: 135066 - DNA, 216 bp, Zea mays
  Clone ID: MRT4577_54662C.1
atgcccttcaactccacatttctgacagaaagcaggacgaacaagatcgacatctttcttcagagattggcactataccgagcttttgggcatatcatttccaatgctccagtaccagcagttataactgaagcacacaaggcaaagagtgcattctggacaacatccaaatcacaatcagcgttcttagtgaacttgtttcctatcctcacatga

SEQ ID NO: 135067 - DNA, 429 bp, Zea mays
  Clone ID: MRT4577_54663C.1
aatccattttatataccaggaaaaaaaaaaaaaaaaaaaggtggccctttttgagggttttcggcgggttctaacaccggaacataaatttttttaaaaaacccccccctccaaaaccaaaatccaggggaattttaacaaattcccattttttttaaaggggggggggcccaaaccccttttacccacacgggacacccccttcgggccgggatcaacaaaaaaaaaacccccaatttaacaaataaaaaaaaagggggggcccgggatctacaaaagattcaccccagttcgggcccccaaaatacctgggggagaccggttcatccaagctttaaacataagcttcggaccaccccgggaggaccccggtttaatgcatggcacaacactcaaggctgggccctcaactcaagggaaggggggggc

SEQ ID NO: 135068 - DNA, 508 bp, Zea mays
  Clone ID: MRT4577_54664C.1
ggaaacaaaaaaagggcccctggattccacatgggggggtgggttttttaacacaacaataccaaacgggggggtggttgaattgatcatatcccggttgcaaagggtactaaagatacccatatgtgtttaatcctcgatgcctgcctgcctggcatgcccataaaccacccatgtacttttcaatgaggggggggagcggggactttgggaccgggcccaaaaccctctcctttttttccccccccttaaaaaaaaacaccggggggatgcttcggatcccccaaggggacccccccttggggctgtcgtccctgttcaccttgcaacacctgatcttgccggcgtagtccttggccaactcgtggatcaccggggcgaaaattcgggacgggccgcaccacggggcccaaaacccaccaacaccgggggttttgaccccataaccaaccccgcccaattttttttttccgccaccacaactttttccccctgggttttttggact

SEQ ID NO: 135069 - DNA, 709 bp, Zea mays
  unsure (1)..(709): unsure at all n locations
  Clone ID: MRT4577_54665C.1
gccggccgttccccgacaaacccacttgatctccctccctctctgtctgaccagatacgatgcatgcggaagcagcacatggcgatggctggcgtcgagcggagctgaagagctggatcgtcgaggtggcgaccagcctgctggcgacggcgtcccgatcgagccgtatggagccgttatgcgccaacgacaccacctctggccgcggcaccatggccgcgacagcgaatgcccggacagccacgacctgcccacctcaacacactcctctcccggagacttcaaaattgtatccgctggacctcgccatgcgtggccggataacatcaagcgggtgaaggtaacatagatgtaccaactgacggtgaaacatgctagccgaccccggaatcctgaggtgcggtgactatgtacctggtgaacagagcgaaggagaaagagagaaaggacgtacccgacgtgcaatcgaactcagtggcctgcacgcnggcgtggtgctcatgtgacgaccatccggtacatgcatgtcgagtgaaccgactgcatctggtgcaaccgtaaatatgtagaaccacccacgataagaataaatactacatatatgctatacaacccaatcaaaattctacaaaaaccccctacagtcccaggcgtactagaactaggagaacccccaacctgcgcgacttcatgatgaagcttatcgata

SEQ ID NO: 135070 - DNA, 355 bp, Zea mays
  Clone ID: MRT4577_54666C.1
ccactcttcctcttactctttttccgactcgtggttttactcttgggccgacgcgtgggaaaaaaaaaaggagaaaatttaaaaaaaaaaaaaccaaaaacaaaaaaaaataaaaacttacaaaaatcggcatcctacataaacaacacacaattataagttcccttttattcaacaacatactcctttaataaatcccccttaactcaattgtctgtcctctttaaaaaaaacaaactccctggaaatacccttcctttacccatctttctttctttccaacacttttcccttttatgccccttccttttaacctataatccccgaaaatacctttttttcccccattttctcc

SEQ ID NO: 135071 - DNA, 167 bp, Zea mays
  Clone ID: MRT4577_54667C.1
gcaaaatccaagattgagacagcaatcaagaacaagatgcaacaggaatcacagaagaaagcagaacttcttgataatgaaaaaccagctgctgtagttgctcccattacaacgggctatacggtgagaatcagtaattatggatgggatcagtcagataagtttgt

SEQ ID NO: 135072 - DNA, 175 bp, Zea mays
  Clone ID: MRT4577_54668C.1
aaaggagaatggtgcatgcaagggttgctctcatcaaccgtagcagtggaaggaaggaagccaccgtcgggcttggcttatgctaggcagtgtttctttggtattgctcctcatagtctttcccaatctgaaagtgattctcttttaaaaattccatctgatgatgattccaacc

SEQ ID NO: 135073 - DNA, 947 bp, Zea mays
  Clone ID: MRT4577_54669C.1
ggcgcaacgactgggctgggtgtcgccacgctctacctcgccgccaccttccccgtcaacgtctactgcggcctctcgtggcactccgagcagttcgtaagacgaaccctcggctgccctcccccccatccctgtcgatttggctcccgccctctaattcattgcgccggattcgaccacgccggcgcaatcaccgatgggccattgaacactgcctccccgatttgtcttctggacggacgcgaagcgattgtattatcgtttttgcgaagtgttcacacgataattcaggcaaacctatttgcttgtacgttagtggagttgcttaggatgaatatgtttgttgttcagatcagatgttttgtgtaaacatcaagatcagattacttctcaatattctttgtaatgtgagaaccaaatatctgctttgattagtgacccatctgctacttattgtgaagaattcgaccatagtcttgcaaataattaggaatgaatgaagtggctttgtgggtgcattcgcgtgattgtttgttgtaagcgtggcgtgattcattccatggtaggcttagataaaaactgccactttggttcatgttataaaaggatggaatgtatctgtattgctgtgtacttctgtaccgcagctctgcaagcgttaacatgatgatccggcatatgtaggggtggtaatgggctccaaattttacactgtaaaatttaaggattggatcatatttggatattgctctatttctattcatttttgaactaaaattaattaaaggctcaaatgaattgtgaagaaacatttggatcgtgatccattaccaccatccctaagcttttctggtattactgctccagttgtgcaagcttcagcttactgctctccagctgctgcacatatgccttcaccaaaaaaatgcttactgccgacagcaacg

SEQ ID NO: 135074 - DNA, 320 bp, Zea mays
  Clone ID: MRT4577_5466C.1
ttcgcacgcactgggagtgtgtgagatgcgctagagtgactggtaccctacgtggctagagactgagaggtggagtgctgttctctcggaaacttggcggtcaccatggccagagtaacgcgtaccaccagtgctacagctggaacgtgtggtgctgcactctgacaaacatgtgggacgccttgtgtggagtaccgcagtccaccttggcccactgctgaacggaggagtactgggctctctgacatggacgccccgcgacggcctggtgcaacccagttgtgaatggacatatgctagggctaaatgcttcatatgtt

SEQ ID NO: 135075 - DNA, 225 bp, Zea mays
  unsure (1)..(225): unsure at all n locations
  Clone ID: MRT4577_54670C.1
cccttgaaacctgnnatgtagatcgttggtggtcggcacactcccattcaatctatattcgatcacggttaagaaattcactaactgcgtcgcattggaggtttctcgctcagaatgtcgtgggattggaaaaaggagggagcctacactcggagaagatcagtgcaagaacacactggtggacatctggctgtcaaatgggttatttcttggacacttctgagc

SEQ ID NO: 135076 - DNA, 651 bp, Zea mays
  Clone ID: MRT4577_54671C.1
ccggccggaaaagattcgattcaaaatccacgtatccaaatcgcaaggccacacccacacctccctcctcccctccacccagagcgagcccgcccgcccgcatcggatcacatcgcgccggagcctgacgccgtgccgtcaacgaatccatgggacccacgccgccgcacacggacgacactagggttgcgcagctcccgctccccggcggcgccgaagattacgtgcgcgactccatccacgcctccctgggcctccccgtctccgatcgctccctccgcctcaagctcctcgcctccgaggagcagcgccaccgcctccaggaccacgtcttctcgctcgaggaagacctccgcgcagcccagcgccgcatcgacctcctcaaggccgaggccgccatgaacgccgccggcctccgccgctgcgtcgaggaaaaggaggccgtggccgccgcatacgccgacctctccgacaagagcagcaaggagtgtcggctctacgagcgggacctcgagcgcgccatggagtcctgtgacgacctcgccagggagaacgacgacctccgcgcacgcctaacccagaacacagatttggcagcattgctgctgcacgggcaagaattacataaggaaaaggagattcttgaagatg

SEQ ID NO: 135077 - DNA, 1790 bp, Zea mays
  Clone ID: MRT4577_54672C.1
ttgggtacctcgaggccggtccgtttcttcgtttgattccctcccgccgccgccgccgctggagacgccgaaccacgacagcgccccagggttcgtcctcccgctggaatagtaagtgaccggagaaaagcagcacaagagagatgtggtacctatgcgtcttctaccacaggctcctggactaccggcgaccggaggtggagtccctcgccgagctctttgccggcccaggcgcccgtgaatccgtcgagtggcgcatgccggagaaccaccacgtagactcccccttccacctcgttcgcctccctggagacgagcgcctcgccgctcaggtcgccaaccgcagcttgttggtgaagggggtctacgagctctggggctatggcactacctacgaggagctggagaagtcggtcagggagtaccccgacgagaggaagcttccgttcctggtcccggaaagcagcttcaagatcgttatcgacagcttcggcaaggtgatcagctcccaagagcagaacgagatcatacagagcctcacttacataccattcaagggacgtgttaatttgaagaagcctgatcacagattctttgtcatggagaccgatgactatgggtcgaacaatggtctcccaccggttgtcaagaggtcgatattctttggccgggaggttggagcagctgataggcatctcctgccaacataccagctcaagagtaggaagtacattggccccactgcaatggatgctgaaatggctttcctcatggccaatcagggtctggcctcgcctgggaagcttgtctatgacccttttgttgggaccgggagcattttggttgcagctgcacattttggagctatgacgatgggtgcagatatcgatataagggttgtacgggatggtcgtggccccgattgcaacgtttggagcaactttgagcagtataagttaccagagcctttgtgtttgctaagggcagacaacaatctcccaccctggcgtcctggattgaaggagatgttcgatgcaataatttgtgacccaccatatggagtccgggccggtggccggaagtctggtggtcggaagctcataaaaggcgtcaaaggcccttacacagtgcctgatgagaaacgggacaatcacatcccatcaaccgccccatatagcctcgcagagtgcgtccatgacctcctccaccttgccgcaaggatggtagtcatgggtggcaggctcgtcttcttctaccctgtactgcgaggtgaagatggcactgcgaacccgcagttccctgagcacccctgcttcaagttaatcacctcctctgagcagatcctgagctttcggtacagccgggttctgctgaccatggtgaaggttgcaccttacaccgaggagatcgagaagttggccgcagagcggcaccgggagttcagggagaaccaccagaagtggatggaggagggcaacctccattccgccgtgttcgagccagcccaggatgggaagcctgatagagactccaagcccaaatacagaggcaagtatgtgtagcagcgcagatactaacttgttgaatttagtggaaacacatttttggtggtttcctgttctgcatcctgtaccaaattttatgagctagtgtgttggcaggcgctgcgagatgtaccactgttccagagtaccattcaaatcttgtcagtccatttgatggatgaggaagtgtaattgcagcttaattgactgaacttatttttttggtaaaaaaaaaaaaaagcggcc

SEQ ID NO: 135078 - DNA, 142 bp, Zea mays
  Clone ID: MRT4577_54673C.1
acacactctctatagggagagctggcacccgtgtagccccggcccaaaattccggggtagcccccgcgccccagcaccgagctttgatctgaaggatcgcgacatcatcccagagccatctgaccgtatccacacggagagc

SEQ ID NO: 135079 - DNA, 1434 bp, Zea mays
  Clone ID: MRT4577_54674C.1
ggccgctcctctatcagattaaaactgcatcgaaaaaaattcaattcaatatataaataatatttgattcaataaataatcatctaactgtgagtggttgctttacaggtgtactgaagatctattgacatggcagcataaatttgctctcctgttcctatttgcgagggaagtacagcatatacacaagcatgcatagctagaacactatacgtatatacgagtaaatttacatcagtgatcggcttcagtcccctttattgcggctccacttgcggcatcattcggctttccttctgcctgttcttgaaactatgatggtgtcttggggttagaatcaccgctctgggaattgcgtgatgaatctgctctatcatatcgtgaaaccggtgagctcagcatgttagggcttcttcatcagaatgcccagagcagatgatgctgatgctcggacaattgcgtgtggtgttgggctcattatactaaccatcatagcaagttccttgctggcatatgaggatgcttgattctgtgagaatacacaaaagctagtcttaatataatcgaccaaagctggttggcactaatgtcgttttcatctgcattaagttccattactgcctgttaatgatggcttaatatatttgattagaaaaagtctgcgtaattaacttgttaaacccctaaagaaggacttaaagttatatggaacatcagaagcaaaaaactgcttgcggaggagcacagacaagccctctacttccatcaatgtcgcaaggagctggaatgtgttccgacaggcaagacgaacacttaggtcatcatcgtgaagatggaggatcagacggggaagggtagcatgtatctgctcaataaaagcagtgcgctgcaaaccaacaccatatgcacttaaagcaccataagctgcaaacgcattggacctcattttcgtattcattgagacctgaagatttcgcagccttactaagagatttattaagattggaccaacagcatcttgttctgacaaattaaggacatttaacaagcattggacagcagttaattgaacagactcgttggggtcttcaagaagtgctaatattactcctaacacttgctggatgtatttaagcatgtggctctcaggagcctgcacaagtccacgcaaacagaggctcctgacagttggtgaatcatcagaaacatgttgacacatttcctcaaccatttgttcaagcaatgtaggttctttttcaatgtggtggataaattctgatagtgcagcagcagcagcctccctttcagccctctgatttcggttgagagcattacacaagataacacaagttggcagaacatcttttggtcgttttactgaggaactgcatgcgatttcctgaacaagctcgatccatttgtccttctcagatt

SEQ ID NO: 135080 - DNA, 446 bp, Zea mays
  Clone ID: MRT4577_54675C.1
ttgtgttttgttgtgttgtttttttttttgctaaaccaagaagctggtaatattgaatttaacaggatggtgtgtttttgtcacaagagcaaagttccggtttatttttttgttgccaacatgagagggaaacaatgaccctttgggaactaaaacgtgcccgataaagcaggaaaaaaaaatgtttagaaaaaatgctaaaaaagccttttaaagccttccgggccagcctcccaaagttattccgttccatttaacctccggtgggggactaaggatagattattcgccttggccaagcaggcttaacaaaaatgctagcaaggcctttttatttatggaaaaaaaacaggggggggttgcttgaagctggggctgaaaccccctgttttatttgacgatgttaacattttatccttagcaggggcattgcctacaacctgttc

SEQ ID NO: 135081 - DNA, 334 bp, Zea mays
  unsure (1)..(334): unsure at all n locations
  Clone ID: MRT4577_54676C.1
cgatgaatttgcattaatcacttcagcctagaagcttatgcttttttttacaattattactgttgggcacagagttaacagtaccatatgctatggttatctatttgtgtttctgccaatatatagctaacaattctctgctgcatttagaggaagagcgagtggtaatgtggtataagcaagggcctagtctaggatttggtctttttctatgaagaacanaccaacaaatgaaaaatggtagaaatcaagccgtacattttgggatttaatctacaatgaccttgacggaaaacaatggttaaggttaataatggagggattggtttaattt

SEQ ID NO: 135082 - DNA, 380 bp, Zea mays
  Clone ID: MRT4577_54677C.1
ctagtaatcttcagatttggcacattttatactgtttcatcacatttttggaccccccaaaagaaacacaaacgtttacccgggcgttaaaatttacacatttaaaaaatgtggcgtacaaatggattttttaaaacccatgcctgaaaaaaattatttaaaggaggaccctgctccagtcagaatctttgaggttttcgtgagaggtaccaaagctggttcaagataggtttaaacaaacatttttttccattttttttgtcgcacaaaacccaaatgaaggggagagccccgttttttaattcgcctgggccccaaggacttaccctcaatccgttaacaaggggggggcgggcccttaaaaaatggctacgaacccc

SEQ ID NO: 135083 - DNA, 380 bp, Zea mays
  unsure (1)..(380): unsure at all n locations
  Clone ID: MRT4577_54678C.1
tggtcaaaagcccacaacttcttctccctgctccttctattccttcgtcagccgcttctctctcttccntcctcaccttacaaaaagctagctccttcctttaccgccccttcattgctattctatcccccgccattcttttctcttctcctctccttcttctttctttctctaaacttattatcttatatttctctttttttttttttttttttttctttttttctttattcttacctcatttttatctttttttttttatcttttattttatttttcttctatttttatttttctttcttctcattatttattttctttttatcttttttatctttcaattttctttatttttctttttttattaattttcttttttt

SEQ ID NO: 135084 - DNA, 418 bp, Zea mays
  Clone ID: MRT4577_54679C.1
atagaatcaggcactttatgcctatgcttgtattcctttatcagattttagctcgagctatggcgctttccttgtacagcagtacactatagtttagtggcagctgtatgggcttcagatcaaacatggtgctggttagtagtcttcattactggatatcgatgcctgaatcttctctttaacaactaccaccgtttttttttactgcagggccttcatggaggcacatcttccagcctttaaggaaaagaatccacacttagaggtggtgacagagcttgtccgcggtcaacatcctaacttgaagggaatttacaactcattcaattggctttaatattctcggtgtcaacgtccgttgaaagggcattttcagcgatgaaaattattaagatctatttacgaaacaagatggctg

SEQ ID NO: 135085 - DNA, 580 bp, Zea mays
  unsure (1)..(580): unsure at all n locations
  Clone ID: MRT4577_5467C.1
ccgtcttcaaggtaacaatcctcactcactcaatgaccacaggnactagcgtaccaccggaagtcatacaccgccgcaaacatgaaatatcttgcgtggatctgctttaatcacatagccactgcgcccgtagcgcactacactctctgcacgatccaagcaatcataggtgcattcatgcatacaccaccacactaatgtgctgatgtgacgggacggccattcagggctcgctgatccccacggccacggtggagccggcggcggcggaccccaacatgcagccgaagcacgcatgaggccggccagccgactgtgaacatggtcttgccggcgacgctgacgatggtagctgccaagaacaacgcaggaggacatgctgctccatttcctggacttcatgctcaacctctggaatggatgacgccgcacagcgacgggcacaggcaggcacacccgacgccagggactctcctccgccgaggcgaccaagaggggctataggctcggggtcaacgagcgagttgatcgtgttatgactcctcctccaaaggatgttcatagagatacatgactaaaa

SEQ ID NO: 135086 - DNA, 436 bp, Zea mays
  unsure (1)..(436): unsure at all n locations
  Clone ID: MRT4577_54680C.1
gccacggttcctggagtggtaccagctggcgttctagcgtgtcgtattatgagtcgtcttaaccagaggagtcgtgcgatccgcccaaagaagggagccaagataggttgaccggaccccaagcagttcgcggaggaggccaagggggggggggagctgtgccaccgncccctgcccaacttgatcggctactgttgctgaggagatgagcgtctgctttttttcgagttaatgctaaacgaccatctgtccaagcacctgtttctctgggaaaaccatacattgaatgggatatggtcttgatagtttggtggtgattgctgataggctggatttttgtagaagcaaaggaaggcctttgtattatgatctaattgtatttagaggcctcttcggggaggaggggaatcatcaccttttctgcttgtggactgat

SEQ ID NO: 135087 - DNA, 1317 bp, Zea mays
  Clone ID: MRT4577_54681C.1
atggcattctcacctcctataaaacgtcttgcagaactggtagcgctcggcgccggccgggccggaaatcaacacggtcaccaagtcctctccggatggcaaggccttgtgaccttccgccggtgcggcaagcagcggctcttctcctggcatgcgcgcttgctctgctcgcggtgcagctgcggccgtgcagagcccagcagcagcagcagcctccgtcgccgggatactaccccagcggcatgttcaggccgctgggcttctccgaggcctaccgcaccctgtggggcgcgcagcaccagacgctgtcgccggacggcaagtccctgacgctctggatggacagcagctcgggcagcgggttcaagtctgcgcgggcgtaccggaacggctacttcggcgcgtccgtcagggtgcagccggggtacaccgccggcgtcaacaccgccttctacctgtcgaacagcgaggagtacccggggcaccacgacgagatcgacatggagctgctggggacggtgccgggggagccgtacacgctgcagaccaacgtgtacgtgcgcggcagcggcgacggcaccatcgtcggccgggagatgaggttccacctctggttcgaccccaccgccgacttccaccactacgccatcatctggaaccccgaccagatcctgttcctggtggacgacgtgcccgtcaggcggtacgagaggaaggcggaggccacgttccctgaccgggagatgtgggcgtacggctccatctgggacgcctccgactgggccaccgacggcggccgctaccgcgccgactaccggtaccagccgttcgtgtcgcggttcgccggcctcagggtcggcgggtgcgccgcggacgcgtccgcggactgccagccagtgccggcgtctccggcggcgccggggacggcggcgatcagcgcgcagcaggaggccgccatgcggtgggcgcagcggaactccatggtgtattactactgcctcgactccaccagggaccgcgcgctctaccccgagtgctgagacgctgcgctgcgctatacctatacctacagtgacgagctgagggtgtcggagctatatggaaccgcgagcagcgagcattcgcaacacaaacgtatatttgaatattacaacttggaagaagaaaaacgaatcaatctgatatagaattatcattgtcaggttgtgttctgaaaacaaatttgaaattataattccatcgagagaatgtcgaggtaaaaaaaaaaaaaaaaaaaaaaaaaaaaaaaaaaaaactcgaggagggggccgcggtacc

SEQ ID NO: 135088 - DNA, 314 bp, Zea mays
  Clone ID: MRT4577_54682C.1
ccttggggtgggttttttgggaaatccggcccttcccaacccgggcatgcatattacaaaatcctctaattaggacccaaagctgaacccccaattgcttgggctgttggactattcggcaacaacagatgctaacatgcccccggacgagttaccattgcgcaacgcctctgtatctggtggctatccctctacccataccagaacccatgaatccttccgctaacgcctcgtcgcccttatggcaacccgacgggcaaggcccgatgtcgtcaaacagcaataccgcctcattgttggagcagctggcaccc

SEQ ID NO: 135089 - DNA, 896 bp, Zea mays
  Clone ID: MRT4577_54683C.1
ccttgctgatatttttaaaaaaaaaaaaaaaaataaaaaaaaaaaaaaaaaaaaatatcaacacggtcaccaagtcctctccggatggcaaggccttgtgaccttccgccggtgcggcaagcagcggctcttctcctggcatgcgcgcttgctctgctcgcggtgcagctgcggccgtgcagagcccagcagcagcagcagcctccgtcgccgggatactaccccagcggcatgttcaggccgctgggcttctccgaggcctaccgcacgctgtggggcgcgcagcaccagacgctgtcgccggacggcaagtccctgacgctctggatggacagcagctcgggcagcgggttcaagtctgcgcgggcgtaccggaacggctacttcggcgcgtccgtcagggtgcagccggggtacaccgccggcgtcaacaccgccttctacctgtcgaacagcgaggagtacccggggcaccacgacgagatcgacatggagctgctggggacggtgccgggggagccgtacacgctgcagaccaacgtgtacgtgcgcggcagcggcgacggcaccatcgtcggccgggagatgcggttccacctctggttcgaccccaccgccgacttccaccactacgccatcatctggaaccccgaccagatcctgtgagctagtctccgtgtcccttcccccggccccctgcgcgccattagctggctgcctgcctgcccggtcactcacatcacatgccatgagctgcgcctgcgtgcaggttcctggtggacgacgtgcccgtcaggcggtacgagaggaaggcggaggccacgttccctgaccgggagatgtgggcgtacggctccatctgggacgcctccgactgggccaccgacggcggccgc

SEQ ID NO: 135090 - DNA, 297 bp, Zea mays
  Clone ID: MRT4577_54684C.1
tcgtgaagctcagtatcccggaagatgcagaggaattgcatgagcatggctccagtggcctggctgcacagcaggagcttgaggtgcggttcatcttgaagtgactgtggaacggggccgagtgctccgacgcctcggcgggggctggatcagacatggaggcactgctggagttataccgagggacacggggagacccgtcctgacatcaggccattccctggaacctcaccagggcgcaggactgggacgactgccccaggggttggcacggtacgcagtgcattcggaggacag

SEQ ID NO: 135091 - DNA, 2162 bp, Zea mays
  Clone ID: MRT4577_54685C.1
gggaccctcgaggccggccgggattctgatgctatagtgtcagtatactatgtcattttagggaaagtaagtccaaaattcctgcagaacaaacacctctcggctctcgcgcccgcctgccctagccgctcgcccggtcccactcccgcataggcgccgccgccgctacccgctacccccggcatccggcgctcggcagtcggcaggttcttcccctggcatccggcactcggcttcttcttgccccggttctcggcgcggcggcgcccgctcctcctccccccggtcgcccgctgcaggtcctccccccgcagcacgcgcccgctgctgcagcctgcagctcctccggtcctccccctgccggcgcccgctgcgagctgcagctcctcccccctggctggcacagctgcagcttcaactctcttgaaggcaaaagaattgaatcgcgctctgttgatgggcagcttgcatgctctgcgggcgccgacgccgctcgttgggagcactaggattggcttcagttcggggctccgcttttgctccgacagagtcctcagagggttaactcccattggcgcgatgaagtcgtataggctatcggagctcagcgacaccgaagttagcagcctcaaagctcgtccccgcatcaatttctcgtctatttttggcacggtgaatccaatcgttgaagatgtccgtgtgggaggtgatgcagcagtgaagcactacacagaaaagtttgacaaggtcatgcttgatgatgttgtcgtctgtgttagcgatcttccagatgcagagcttgatccagctgtgaaggaagccttcgatgttgcatatgacaatatatatgccttccatgtttcacaaaaaatacctgagaagacagttgaaaatatgaaaggcgtaagatgtaagagaataactagatgcattggttctgttgggctgtatgtcccaggtggcactgcagtcttgccttcaactgcattgatgcttgctgtgcctgcacagattgctggatgcaaaactattgttcttgccacaccacctagccgtgatggcagcatatgcaaggaggttctttactgtgcaaagaaagctggtgtgacacacatattgaaagctggaggagctcaggcaatctcagcaatggcatggggaactgcatcgtgcccaaaggctgagaagatttttggacctggtaaccagtatgtaacagctgccaaaatgattcttcagaacagtgaagctatggtatctatagacatgcctgctggcccttctgaagttttagtcattgctgataaatacgcgaacccagttcatgttgctgctgatctgctatcccaggcagaacatggtccagatagtcaggttgttctagttgttgctggagatggtgttgatctgggtgccattgaggcagaagttagcaagcagtgcaacgcgcttccaagaggtgaattcgcttcaaaagcacttagccacagcttcactgtgttcgcgaaagatatggttgaggcgatatcattctcaaatctgtatgcccctgagcatttgatcatcaacgtaaaggatgctgagcagtgggaggagttcatcgaaaacgcagggtcagttttcttgggccaatggaccccagagagcgtgggcgattatgcgagcgggacgaaccatgtccttccgacctatggttacgcaaggatgtacagcggtgtatcgctgaactctttcctcaaatacatcactgtccaatccctaacagaggaagggctgagaaagctggggccgtacgtcgcgaagatggccgaagtggaggggctagaggcgcacaagagagccgttacccttaggctgcaagaggttgaggccaatgtaactgtctagctgctgtccatggtctattgcaacgttcagactcgatgtgggatgctggagttcttccctaggaacctaggggaactggactattgatgtcttccaaacatgctctggaatgttagaaagaggcgtttcaactggtgcagctaataatgttcattggaccctgatttgtttcacgaataaacttgagcagaacttactgtgtatatatgcagtgttctcgtattcgttatttctgagtttatttaggggggggcggcagcacggaggatccaagc

SEQ ID NO: 135092 - DNA, 258 bp, Zea mays
  Clone ID: MRT4577_54686C.1
ggggaaacccgcccctttttttgtaaaccggtaaaagcaaaggggcccccgctttggtcgggcaggggggcctcaaagcccaacaagcaaaaagttgggggtccccctctagcagaaacccctaaggggggggaactttggggcttacaaaaaacccaaaacacttttgcccttacaaaaaaagaccctacaaagatcccaaaacactgaactattttaaacaaaggggggagaaaaaaaccttgggggggggagaaa

SEQ ID NO: 135093 - DNA, 2116 bp, Zea mays
  Clone ID: MRT4577_54687C.1
gctcagctgctctcggctctcgcgcctgcctgccctagccgctcgcccggtcccactcccgcataggcgccgccgccgctacccgctacccccgcagccggcactcggcaggttcttcccctggcatccggcactcggcttcttcttgccccggctcccggcgcggcggcgcccgctcctcctccccccgctcgcccgctgcaggtcctcccccgcggcacgcgcccgctgctgcagcctgcagttcccaccccaactggcgattgcagctcctccggtcctccccctgccggcgccgcctgcgagctgcacagctgcagctccccccctggctggcagagctgcagcttcaactctcttgaaggcaaaagaattgaatcgcactctgttgatgggcagcttgcatgctctgcgggcgccgacgccgctcgttgggagcactaggattggcttcagttcggggctccgcttttgctccaacagagtcctcagagggttaactcccattggcgcgatgaagtcgtataggctatcggagctcagcgacaccgaagttagcggcctcaaagctcgtccccgcctccatttctcatctatttttggcacggtgaatccaatcgttgaagatggcccggggtgaggaggggaagcagcaatttaagcccctccaccaaaaaagtttgacaaaggccttccttggatgatgttgtcgtctgtgttagcgatcttccagatgcagagcttgatccagctgtgaaggaagcctttgatgttgcatatgacaatatatatgccttccatgtttcacaaaaaatacctgagaagacagttgaaaatatgaaaggcgtaagatgtaagagaataactagatgcattggttctgttgggctgtatgtcccaggtggcactgcagtcttgccttcaactgcattgatgcttgctgtgcctgcacagattgctggatgcaaaactattgttcttgccacaccacctagccgtgatggtagcatatgcaaggaggttctttactgtgcaaagaaagctggtgtgacacacatattgaaagctggaggagctcaggcaatctcagcaatggcatggggaactgcatcttgcccaaaggctgagaagatttttggacctggtaaccagtatgtaacagctgccaaaatgattcttcagaacagtgaagctatggtatctatagacatgcctgctggcccttctgaagttttagtcattgctgataaatacgcgaacccagttcatgttgctgctgatctgctatcccaggcagaacatggcccagatagtcaggttgttctagttgttgctggagatggtgttgatctgggtgccattgaggcagaagttagcaagcagtgcaacgcgcttccaagaggtgaattcgcttcaaaagcacttagccacagcttcactgtgttcgcgaaagatatggttgaggcgatatcattctcaaatctgtatgcccctgagcatttgatcatcaacgtaaaggatgctgagcagtgggaggagttcatcgaaaacgcagggtcagttttcttgggccaatggaccccagagagcgtgggcgattatgcgagcgggacgaaccatgtccttccgacctatggttacgcaaggatgtacagcggtgtatcgctgaactctttcctcaaatacatcactgtccaatccctaacagaggaagggctgagaaagctggggccgtacgtcgcgaagatggccgaagtggaggggctagaggcgcacaagagagccgttacccttaggctgcaagaggttgaggccaatgtaactgtctagccgctgtccatggtctattgcaacgttcagactcgatgtgggatgctggagttcttccctaggaacctaggggaactggactattgatgtcttccaaacaggctctggaatgttagaaagaggcgtttcaactggtgcagctaataatgttcattggaccctgatttgtttcacgaataaacttgagcagaacttactgtgtatatatgcagtgttctcgtattagttatttccctagttgcttcaaaaaaaaaaaaaaaaaaaaaaaaaaaaaaaaaaaaaaaaa

SEQ ID NO: 135094 - DNA, 533 bp, Zea mays
  Clone ID: MRT4577_54688C.1
ccgccgagcccgccccctctccctctccaccatgagtctgcgcgagcgagtcccgccgcagtacccaatggcgagcccgcccgccgcgcccccgacgacgactcggacgtcgaggaggaggccatggccaacgactaccgcgagcaggtccagtacgatggcatggaggatctcgaccgcatgccttgcatgaccggcaaccacgacatccacgcccagctgcaggccgccgccacgcccctcgagttccaggccacgctcgagaccaagtttgccagctacgacagctactgcaacctcttccactacatcctcaactccgagggccccgtcgacctcgaggttcccaactattactgggcctgggacgtcattgacgagttcatctaccagttcaacagcttctgcagctaccgtcagcgcgtggcccagaagagcgacattgaggaggagattgccctgctgcgcgagaacccaaacacctgggtgctgctacagcttcctcaacgtctgtactaggtcatatagtgctt

SEQ ID NO: 135095 - DNA, 282 bp, Zea mays
  Clone ID: MRT4577_54689C.1
gggggggcctcccacttttgcctatggtgagccggattttaattcggggccgtcacgggcagggctgccacctgtgcgaattgggagtccgttaacaattggccacaacataggagctcggatgcttcctgtgtgaaagcctggggcgcctacagtgtgacctaacttacattccttgcgtttaactcactgcccctttggcacttaggaagcgtgctatgccacatgaattgatgaatcctccatcccccgtttagaggcggttaacctgttgggccccct

SEQ ID NO: 135096 - DNA, 307 bp, Zea mays
  Clone ID: MRT4577_5468C.1
ctccattgtttttgaccacgcgaggaaagctcttgccaagcagaaggccgtgggccaacaggacattcttgcctaaaggaggacacacgttggaaggcccccaagggggacccttatttgaggtgtatggcactaaacatacacttctgcctgctattactccaaggaaggcctgactagcgactaggggggcgatcttgttgttgccactcacaaattgctgcttagctagcctgtgtactgcccttctgtgatgaaatatgctgcccaaaccaagttctgcttctgtgactccatagaggcctac

SEQ ID NO: 135097 - DNA, 463 bp, Zea mays
  Clone ID: MRT4577_54690C.1
cagacttctgctgcagcgcctttcgtcgtcgtcgtcgtatctaacgcagttccctccgccgtagcccgaggcaagaatggctttacagaacgacattgatctgctaaacccgtcggcagatctcgagaagctcaagcacaagaataagagactcgaacagacgcccaggtacttcttaatggatggtaagtgccaagggtgcttcagcataaccactgttttcagccactcccatactgttgttgtgtgctctgtgtgccaaactgtcctctgacaacccacaggacgaaaggcatggctcactgagggctgctgtttcgcaggaagggagactaaaccggttggggtcttcaagttttgctctatgccagatactagcgccatgaactgactttagctaaaattttacatgagctgctgtcgagcacctatgtgtttgatgttggctacttccagacttata

SEQ ID NO: 135098 - DNA, 1550 bp, Zea mays
  Clone ID: MRT4577_54691C.1
caagggaaccctcgaggccggccgggacacagctctcaggccacgagaccgtccagcgcgcgggcaggcgcgccgctaaactaaacccgaccaaatgccgccgctcctcacctcctcctccgtaccggcgctgccgctggccgcgtggtccaggtaccgcctcagggttgcggcttccaacgccgcctccgccccggacggggccggcgccactgccagatgcaccagcaccggcgggttcccgtccttccttcccggggcggtggagcgcatccgcgacggcgctgccatccgcctggccaagcgaatcgagcgcgtgcccgtccagaccagtttctcgggtagcgcgatatcgagcagctgtgtgaggccgctcaagcagcaacaggacggtgatccggtcgtgctgctgcatggattcgacagttctgttctagaatggagatacacctacccattgctcgaggaggccggattggaggcttgggctgtggacatccttgggtggggcttctctgatttggaaacacggccgccatgtgatgttgcatccaaacgcgagcatttttaccagttctggaaatcatacatcaaaaggcctatggtgttagtcgggcccagccttggtgctgctgttgccattgatttttcagtcaactacccccgaagcggtctcgaaattgatcttcattggtgcaagtgtatactctgagggcccaaaagatatgaccaggatgcctaaatttgtttcatatgctggggtgtttatattgaagagtcttccactgcgatttttagcaacaagattggcatttaaaaaactccaaatgaattctttgattgggtgcaagtgaagcataaatgcctgatcctgtggggagaggatgatggaataataagcagcaaactagcatataggttgcatcaggaactcccagacgcgattctgaggcaggtccggcagtgtggccatatccctcacgtggagaagccgagggaggccgcaaaacatgttcttgaattcctcgcaagaaacacgtcaaacaagtcagaccagtctccttccgagccgtcagtagtcgtgaaccgctgagcagatcacagatccttgaagggtaagcttcacatgattactattctgctggatgcttcactgttcgtgcattcagtcgtgaacaccgttgtaccgatttaatcgctcaatgttcatgcccggaaacggtacaggaaccgctgagcagatcacagatccttgaagggtaggctgtacaaagtggaatgtttggccatggatgatggatacagtcgctaactcgctatgctcagccaagctgctgctgcggaaggctgaagctgaactcggcgatggttctcagcgacactagaagataggttgttggtcagttaggactaactgtactgtacggtagcactgcaatgcaagggacgcagtggatgggagcatgacaatttcggctgttgccagtactgtaaattatgcaatgtaaaattatttggagtttgcaagggcattgcccttttccctcaaa

SEQ ID NO: 135099 - DNA, 1146 bp, Zea mays
  Clone ID: MRT4577_54692C.1
ggagatacacctacccattgctcgaggaggccggattggaggcttgggctgtggacatccttgggtggggcttctctgatttgggtacgccccatcctgcacaccatgtgatctgaaacacggccgccatgtgatgttgcatccaaacgcgagcatttttaccagttctggaaatcatacatcaaaaggcctatggtgttagtcgggcccagccttggtgctgctgttgccattgatttttcagtcaactaccccgaagcggtctcgaaattgatcttcattggtgcaagtgtatactctgagggcccaaaagatatgaccaggatgcctaaatttgtttcatatgctggggtgtttatattgaagagtcttccactgcgatttttagcaacaagagtggcatttaaaaaaactccaaatgaattctttgattgggtgcaaattggccgtctgcattgcctacttccctggtgggaggatgctacagtagattttatgattagagggggttataatgtcataaaccaaataaaacaggtgaagcataaatgcctgatcctgtggggagaggatgatggaataataagcagcaaactagcatataggttgcatcaggaactcccagacgcgattctgaggcaggtccggcagtgtggccatatcccccacgtggagaagccaagggaggccgcaaaacatgttcttgaattcctcgcaagaaacacgtcaaacaagtcagaacagtctccttccgagtcgtcagacaagtcagaccagtctccttccgagccgtcagtagtcgtgaaccgctgagcagatcacagatccttgaagggtaggctgtacaaagtggaatgtttggccatggatgatggatacagtcgctaactcgctatgctcagccaagctgctgctgcggaaggctgaagctgaactcggcgatggttctcagcgacactagaagataggttgttggtcagttaggactaactgtactgtacggtagcactgcaatgcaagggacgcagtggatgggagcatgacaatttcggctgttgccagtactgtaaattatgcaatgtaaaattatttggagtttagtctctaaattgataaattcagaaactaaaatatgtcgcatttagc

SEQ ID NO: 135100 - DNA, 453 bp, Zea mays
  Clone ID: MRT4577_54693C.1
gcgcccaagggggggggccttcccggccctttagggagaaaactttccaaggcgtttccctttaaaaacctttaatttttggaccccccccctcggggccaaggttttcccccctccttcaccagggggggcctaaaaacccggcaaactggtttttttgtggggggggcagggctcccatttcctttggtggggggctaaggctctctttcccaaaaaatttgtcggggggccggaaaccccaagggttgctgaaacctttgaggcggttttatccccccccaagggaaagaaacccccccccatcctgccgaggggccagaaaccggcccatacgaggcaacgcggggggcctaaaatggccgcccttatgaaaaaaattttcgggggtggcaatcttttcaagggcaacggctattatgtccttttttgggggggggggggccccctttt

SEQ ID NO: 135101 - DNA, 397 bp, Zea mays
  Clone ID: MRT4577_54694C.1
ccggccggggattcagctcgccgacctgaccatcggccgagtgaactctgccctcacgcagacagagcttcgaatacccctttcgtcctgcgatcgactgacacggcacacacgggctctattgaaggcatcatgagccgttgtttgagaagagactacgaccacgagggcagtgaatctcgggcacagatcagacatgtcttgatccaagtcactaaggcgagctcggctctttactgttcctacaccgccatgcggactgatgcatcaactgcccgtggataggacagggtctgatcacgatgaagccttcactacacctgttcacacagacattggctgcgacagacgcctgccgtgtgatcctgggtgcatctcgaggccactgtgatggaag

SEQ ID NO: 135102 - DNA, 428 bp, Zea mays
  Clone ID: MRT4577_54695C.1
ccggcaccggcccgtacttaattcactttgttgaccagctttcttttccgccgccgccctcccttttttttgggggggtttattaacggtttggctcggaatcaacagcatgctcctgagacactacaactgccccgtgaacccacagagaataacaatgacaagttaagaaatcatgagaaccgcacctaccaccaggtacatgcctacctttgcggtgaaatgtgcaaggcacccaatatatgacactcttctttgactaaaaagaataaacaacttggagcgttgctacaagaccatatgcccaaggcacggaagcttcaaacttatgcctgaccatcaaaggaaagcccaaacctacatgaaggcctggacagaccctgatggtggtttagacatccatacacacgggccacaggtacttttag

SEQ ID NO: 135103 - DNA, 880 bp, Zea mays
  Clone ID: MRT4577_54696C.1
gcggcgcagctgcggtacatgatgagccattattttggtaccccacctagcaaggaggtgatccaagatctgtactacgccttgaggacaaagggaggtttgacccccaaggaggaggagacgctcctggcttgcaatttacttcctggtgtttatttcatcgtgggttcagtactgggcactttcgcgatgttgttgggttcccacaaaggactcaaattgcttgggcgtccacctaattctccattaagatctttgactgtttatggctacggttttattgtcggaaaggcctgtgctaatgaaacctggcatcaattgcctgaactgcttttagacagggaagaaggacgcatgaagacagagctagctaaaatgtggcgcctacgacatacgtatgttgacagcacctttgtagaaagaacgaaggaagttgaagccagcaactctgatgatgtggctagatcaatttcaagagagacaattacaaacactacaccatttggagaaatgatggaggattcactggcttgtatactgggttctcccggatgcaacatggaaagcaacaatcccccagaaaagacagctaatgtcctgacgcgaagtgatctgcgagctcgcagaagaggtcgcaggcatcatcggcatgctgatgactagtttcctattgtgaatgttgtgtagaagtgctgtggaataccctagaccattaccattttatttgggcctcatgccccacagttaatctgctgtgcctggtcaaaatttctaggctggacaagagctgcttttgtaagctgggcaatcctgtatcgtgatgtatcccatggcccctgcattcttcacaaagcaaccaataagacggtatagacaagcg

SEQ ID NO: 135104 - DNA, 435 bp, Zea mays
  Clone ID: MRT4577_54697C.1
agggaagaaaggtccacacaggacactcctccttcgtctttctccttcctcggcgctcgctgctgcattcgcgaacacgcatcgaccctacgactacgagtagcgagagaggattgatggcggcgcagctgcggtacatgatgagccattattttggtaccccacctagcaaggttcgcgggatcgctcccagaaacgtccgagttgcagttcccaatttttttctctttctttccaaaatcattttctgaagaattctccccaaatcctgttcacttctttggttcggggttgacggggttctttgttgctaacgaggcaggaggtgatccaagatctgtactacgccttgaggacaaagggaggtttgacccccaaggaggaggagacgctcctggcttgcaatttacttcctggtgtttatttcatcgtggg

SEQ ID NO: 135105 - DNA, 1316 bp, Zea mays
  unsure (1)..(1316): unsure at all n locations
  Clone ID: MRT4577_54698C.1
gcaggtaccggtccggaattcccgggtcgattcaaacggtccgagcctccgagggaagaaaggcccacacaggacactcctccttcgtctttctccttcctcgccgctctctgctgcattcgcgaacacgcatcgaccctacgactacgagtagcgagagaggattgatggcggcgcagctgcggtacatgataagccattattttggtaccccacctagcaaggaggtgatccaagatctgtactacgccttgaggacaaagggaggtttgacccccaaggaggaggagacgctcctggcttgcaatttacttcctggtgtttatttcatcgtgggttcagtactgggcactttcgcgatgttgttgggttcccacaaaggactcaaattgcttgggcgtccacctaattctccattaagatctttgactgtttatggctacggttttattgtcggaaaggcctgtgctaatgaaacctggcatcaattgcctgaactgcttttagacagggaagaaggacgcatgaagacagagctagctaaaataatactcaataagcatagtgatgacatatacctggttgaagttgtgagaagacacttttttgtcgagcatctgttcgatgatctgcatcaaggtcaaccacttttcaggtggcgcctacgacatacgtatgttgacagcacctttgtagaaagaacgaaggaagttgaagccagcaactctgatgatgtggctagatcaatttcaagagagacaattacaaacactacaccatttggagaaatgatggaggattcactggcttgtatactgggttctcccggatgcaacatggaaagcaacaatcccccagaaaagacagctaatgtcctgacgcgaagtgatctgcgagctcgcagaagaggtcgcaggcatcatcggcatgctgatgactagtttcctattgtgaatgttgggtagaagtgctgtggaataccctagaccattaccattttatttgggcctcatgccccacagttaatctgctgtgcctggtcaaaatttctaggctggacaagagctgcttttgtaagctgggcaatcctgtatcgtgatgtatcccatggcccctgcattcttcacaaagcaaccaataagacggtatagacaagcgaaacgacgctgggtggtgtgatgtttgcagttcgtggtccacaggctgccggagcatacagcagttcattttcaattcttattatcatatattatggaaaaaaaaaaaaagggcggcgcttcgcgttctagaactagaccggacgctgggncgaccgg

SEQ ID NO: 135106 - DNA, 312 bp, Zea mays
  Clone ID: MRT4577_54699C.1
agcagagcaagctatggcgcgcgcgcgtgacgccgcccttcaccttcttcttctggcagcgggcgggcttctacttctagccgtggtgtctcaggccaccgtggtgccgccgagcgttccggcgggcgcccccgaggacccgcggtgccgcgcgctggcgccccggcgtggcgcgctggcggtgtaccccagcgacatggagcaactgcagtttcttttcaacgccaagttcgtggaggcggagtggttcctgcacgcggcgcttggacgtggcgtggactttctggaccgcaacctgttccggggggggcc

SEQ ID NO: 135107 - DNA, 406 bp, Zea mays
  Clone ID: MRT4577_5469C.1
gtcgccatctaccagtccaaggtctccctatttaggaagtctggacccgacgtgccgccggggtacgatccggcgcaagtggccgatgccaaacccaagacgaaggcggccaagcggaacgagcgacggaaagagaaacggcagcaggtagcggttctctgtctggtgcttgtgctcgtatcgccatggattgcgagggaaaccgtcagatttagttggattggattggtcatcataggagtttgtttactaagtgtccattggagaaccaacaatggagttgtgcttgtgatggaaggaggaattgtaccttttgtttctcgtgcattagtcagccatactcaatagtctgtataggaaaaagtcgacccttttacaatgcttccaccattaccatgataccttt

SEQ ID NO: 135108 - DNA, 376 bp, Zea mays
  Clone ID: MRT4577_546C.1
cggacgcgtgggtgaatgatggtccccaattttttcccttcccatccatgtttgcaaatggtacacaattttgtttgtcacttttgtgaaccgttggagcagatatcttcaaaacaggctgcagtctggaaatattgacacaggaaactattttaacagtcaaaaaaaaaaaaaaaaaaaaaaaaaaaaaaaaaaaaaaaaaaaaaaaaaaaaaaaaaaaaaaaaaaaaaaaaaaaaaaaaaaaaaaaaaaaaaaaaaaaaaaaaaagaaaaaaaatttaaaaaatccaaaaataaaaaaaaaagggggggccctttttaaaggtccaattttttcaccccgtttctataaacttataacttttttttaagggccc

SEQ ID NO: 135109 - DNA, 314 bp, Zea mays
  Clone ID: MRT4577_54700C.1
attatttaatatgatcttcatctatccttagtgtatcagtgcatcttaggaaccaaggaggatgactctagaaaggctttatgtgctacgtaatacatgacatagattgaaaactatgaagagactgccggatatgtcaactagggaattctacagacagaattgtaagtgagtgatgaagacagacctgactggaactaattagaggatgaagatggtgtcacgtattacataccaattatctatggttgatatggtgagaagtttgacagtgtaatgataaagatacatctgattttgaatgctaggatgta

SEQ ID NO: 135110 - DNA, 270 bp, Zea mays
  Clone ID: MRT4577_54701C.1
ctttcgtggcataggccacaactgggagccaatcgtattacacgacctgttggaactcacatcacaaagctttgatttgtttacattaaatgtcgactccggcgatcaatagaggtgcttgaaatggcgccggccttgttctgtgatggctccgaaattctatgcgatgtctgagaacaaccttcatgttgtgttcctggagctctcatgcacacagcccaacacgctgcttgtcacggacctgggcataaatggtgtgccaacgttcaa

SEQ ID NO: 135111 - DNA, 598 bp, Zea mays
  Clone ID: MRT4577_54702C.1
cctgcatcttcaattcgcattttacatagcttgatcattcttcaagtctaaccaaccaacaccacaaaccccccatcccatcaacaatgtctcgtcgttttgctacatacggtggtgtcgctgctcttggtggtgtgacctactacctctacaatgctggaggtgacccgaagcttgccgagaagaaggctgagcacgatgctgcgactgccgcacgcaagctaagaggcgactaccctggccaggacaaggaagcaaagaaggctggcgaggagggctacgaggcagtccgcgccagcgcacagcaatacgccgaccaagccaaggcggaagcaaagaaggctgagcaaaagttcgatgcctacagcgccgatgcgaagaagcagtatgaagaggcaaaggcccgcgccgagcgtgagctacacgcagcaggcaagcaggtcaacgctgctgccaacaagttcgatgccgttgtcgaggacaaggccgcgaagacgtcgtcatggttcggcggactgtttggtggaaagtaagctcgaagtgtacaggaccagtaatgcaatgataatgtaacaagatgagccgaagcttgttgtcc

SEQ ID NO: 135112 - DNA, 258 bp, Zea mays
  Clone ID: MRT4577_54703C.1
tagctcgtgagtgggcgacctgattcgacacatgaacattacgaactaaatgaacaaactgattaaagcatgcatagtgtgatgaaagcatgcaaagagagttgtgtttattgaccggaagtgtttgtgagaataaatttgtcttatctgatagtctaaaacctattatctaatgaatccgactggtggacatcaacaaaattttaacgcacatgctatttttacagttttggatttggtaataaaaaaaaaggatac

SEQ ID NO: 135113 - DNA, 521 bp, Zea mays
  Clone ID: MRT4577_54704C.1
acgcctgcggttccggtccggaattcccgggtcgacccacgcgtccggattccaaaaatctcataaagaattaaatatgctttggtctggggtctgtctgtgaaacataatcctcagaaagtgggtaaagaccacacattggaagatgaagacgtcattcagattgtgaagaagtgaagtcctcttgccatctgctggctggccacagcagtgttccttatgactaagtaccttcctcagcccctctgtctttggcagcctctggattgggatacagggattgatatggagacttatcaaactgaaacaccacaatttttttctttccggagatagggtgttatgtatttcaggctggctttgaactcttgcagctgaggctggcctagaatccctttcatcagcctccatctcctcagtgctgggcttaccactgtgcacctttagctcctcagcaacaccactttccctactttgctgtcacttctattgaactgtataaagaagctggtgggcccgct

SEQ ID NO: 135114 - DNA, 173 bp, Zea mays
  Clone ID: MRT4577_54705C.1
ggttgtcgcgatgacaggtcgcgctgtgcacgtttagacgggcatccgttctaccccggtacacggggaagcgccacgcaaggaccagccgggaagattttccaggttcgtaatgcgaaattcaagtcggctttcctttcgatgatcgatcctcggtagttacacttgaccgt

SEQ ID NO: 135115 - DNA, 344 bp, Zea mays
  Clone ID: MRT4577_54706C.1
tacaacgcagggatgccccactatcgcgttgtgagataattttttggggtctaaaaaatataatagactttatatactcactctatataccaactgcataattagacataaatccttgcattattaaacacatttcatctgaaaaacttcaacctttcacccaaaacattcactacttcaataccaaaaaaacttcattttaccatatacaatatgtgattaaacactctgctgctcaacaaaaaactagacagaaattctaaagacatgacctcaaccaagaacttggcatccatgtcatatatgttgacaccttaaactcaacaagaaatgacatgtattat

SEQ ID NO: 135116 - DNA, 356 bp, Zea mays
  Clone ID: MRT4577_54707C.1
gccgcccttttttttttttttttttttttggttattttttttgtaaaaagcaaggcggtccacggtatatattaagggaagctgctaccttcctagctacagccgagccctcccttttatttaacaaaattaaaggagatgatgatttttctcgccacgtacgttgttggcccgcccccgagcgctgttcatttttaccttcgttacctctcctgcccattccctgtgttacactttgattttacatggccgccctccccatttccaacccttctctatcaccttttatctttcctttttcccccctccttatcttacgtaatttatatttctcctttttcttttttttatcttct

SEQ ID NO: 135117 - DNA, 507 bp, Zea mays
  Clone ID: MRT4577_54708C.1
agcagtggtaacaacgcagagtactttttttttttttttttttttttttttttttttttttttttttttttttttttttttttttttttaaaaaacccagggattttattcgaggttatgaccagggaaattaattaatactccgtacttaagaacacaaaacctcgaaaaaaacaaattttgaacactccaggtattaacagaaaaaaccgcacccacgggttttaattaaaaagaaaaaaaggacaagtttaaggcaaaacagtataggggcaacactaaaatattcccacaacccataaaacgagcttcagcttaaaattataaggcgggaaaacttccaaaagggacaccgggggggaaagaaacttgattcagccagtctaaagaacgggggggggggggcccctttcaggggattaaccccccgggaacttgggggtggtaccaaggcttaagggacaattctgcaaatatccaaaacattggcgggtcgccgagaaatgc

SEQ ID NO: 135118 - DNA, 322 bp, Zea mays
  Clone ID: MRT4577_54709C.1
ttgggtacctcgaggccggggttcgatgctctcaggaaggagtccggcgccaacaagaggcagtacttcccttcttccttcatttgggctgaattctgcctgcataggagcctgcctgcataggagcgtgaatccataccgaagtttatatctattatttgagaaaatgtaggatgaatttgaggtttaccttttatgaatcttaacaagctggatgttaaaaacaagaatacaaatttgtattgtaaattctatatcctatttgttcgcaatcaaagaaaaaaactgattaccgaacaaaaaaaaaaaaaaaaaagcggcc

SEQ ID NO: 135119 - DNA, 619 bp, Zea mays
  unsure (1)..(619): unsure at all n locations
  Clone ID: MRT4577_5470C.1
ctgcatcctgccttttagcttatccgtggaccagtgctctttctttccgctttgaacggacgcctacaactagataatttgtcggatgacaatacaatactacaagcaggaggggacacaaatcctttagatttcgctagtgcaacgctcgtattgacctttagctcgtgggaatcaatcgtagttttgatttcatatcctacgtagtatttgcgtgggcctcgctcgtatgcaaggaataggtttaggaacagggctagcgaaggaagggaccaaggaaggaattcgtagcccagaaccttaagcaggagctcataactactacgaatggaaagattccagctattgaagcttaaaataaaagaacagaagaaaaagatagaggggttcaagttgatggaatccaaatcttatgctgattccagtgatgatgacatatttgcacatatatcatattccacttgatcgatataccaattcctgaaaaaagaagaagatagtggttgtgttaaccagttgggaatgtcatgaaagcacttacttccgagacagnctgtcctcggctatttcattatcanaaggaagtattggcaaggcttgtacattacatgcaggtcct

SEQ ID NO: 135120 - DNA, 314 bp, Zea mays
  unsure (1)..(314): unsure at all n locations
  Clone ID: MRT4577_54710C.1
acccnccccancttttttttttttcacagaacaaaaaaaacnggagccgcgtttttttaaaatgtgagaccgggcccaaaaatggttcccctatcttaccaggaacgaaaaattggccgaggaaccacacttttcggtccgtaattcgaagcatgcatgcatagcataagattgaccaaaatgcgtgtgtgccgccacgatatcattactcatgcattcgaagcagtgctctgccccaaggtcggcgctggcgctggtacccttgcgccataagctggggcatcaagaaaccggcccccctaagcgggggcgcc

SEQ ID NO: 135121 - DNA, 160 bp, Zea mays
  Clone ID: MRT4577_54711C.1
gatcacaattttattataagggggtagggagtttattttttattgtgtactccaaaaacccaaaacataggccgcaaaagaccaagattacgttagatgtacggatccaaactcataatgagcaacataaggcatcacaagcgcatattgaaaaagggag

SEQ ID NO: 135122 - DNA, 164 bp, Zea mays
  Clone ID: MRT4577_54712C.1
atcatgaacaataaaaacccattgacgatcgatcacgaggagtaaaccaacggtattccgggaccggcacctgacaggcgtaccaccctgtccctagggccgagtcactgtttaaaagtgtgccgtgaatgatggcacgtaatctgtcatacctgagacacaaa

SEQ ID NO: 135123 - DNA, 910 bp, Zea mays
  unsure (1)..(910): unsure at all n locations
  Clone ID: MRT4577_54713C.1
cccgggctgcgacgcccaaaccgcagaagaaacatgtcttcttcacctgttaagatcatcggccattcggtaagcccattctcgcaccgcgtcgaggccgctctgcggctcaagggcgtgccgtatgagctgatccaggaagacctgagcaacaagagcgagctgctgctcgccaaaaaccctgtccacaagaaggtgcccgtgctcctccatgccgatcgtgccatctgtgagtccctcgtcatcgtcgagtacgtcgacgagaccttcgacgggccgtccctcctcccggccgacccccacgaccgtgccacggcccgtttctgggcagacttcatggacaggaagctcctgaagccgttctggctggcgcactggacagagggcgacgcgcagaaggctcaggtggaagaggccaagcagaagctggcgctcatggaggcgcagctcgacgggaggaggttcttcgggggcgacaccgtcggctacgtcgacatcgcagcctgcgtgctagctccttggctcagcgtcgtagaggaggtgactggagtggccgtggttgacgaaggtgagttccctgctctgcgccgttggtccagagagtacagctcctgcgaagctctcaagcagtgcgtcccggacagggaccagctcgtcgccttctatactgaaaggaaggaggcgtacaaagtgttcgctaatgcatggttgcagcagtagtttggttttgtgtgtggaataataatgtatggatcacagattgtctgtgctgaaataacagtaatgagcctagctagataagtaaataaccatatgcatgtctcagaaaagtttagatgagttgaccatcgaaatgggggggccccctaccaatttccccagtaaaatnntntttaaggngggggcgccc

SEQ ID NO: 135124 - DNA, 212 bp, Zea mays
  Clone ID: MRT4577_54714C.1
cagggccgcgcatacgtgcaagaggagtgccttctccacatgttatcaaggctgctggtgcggctgcttgggagtctgcatcacatgagggtgcactggctgctgagaacacgcgtacgatctgcttacatagccgagagactgctcttcatgctgatgctatccacaagggtggagggcaggtcattccctccgcccagaggagcacatgt

SEQ ID NO: 135125 - DNA, 1466 bp, Zea mays
  Clone ID: MRT4577_54715C.1
ctctgtccttagcgcataagatcaccctgtcttcttcctcgacgccccctgctcctctctctaccgagcccccattctccacggcgtttggcagcagggagcccttctcccccacgcgcaggagcagagcctccatggcgtccgaccccctctcctttctcctccccgctcggagctctgccatagcgcacgcaaatcccttccccctccattcctaggcgcaggaagttctcccccacgctgtccagctccaggccggatccaattcgccctgtccctgctcgcccagaatttcttgccccaagtccggcaatcccctccttgtcgtggatttcctcgagcttgcctcccccatggccgccaaccatcctgcccccctgcccctggtgcgctgggcgcctagtgctctgacctcgacggccaccctcctctttgctcgagcaatgctagggacgtgcggcaaaccctcattcccagcaccgcgcccttgcctccatcaacactgagaccccggtagcgcctgccatggtggccgcaggtctctgctccttccccaagctcgccctcatctcccaggtcgccactttcctctccctgcccacctcgtcggattctgctcgctgcgtgcttgccggcatgtccgggcgtggccctgcagattcatcatgggtacctcctcgaactcctccacactggttgtggacggcattggtatccctctgctccagcagcgttgcagcgccccgagctcctcctccgcatgccgccatggtcggggtcagtctcatccgacaacgccatgacttccacttcgctctgtggcgagcagcccctgcaccatccatgctcgtcgtgtgttcgtgagttcacgcgcaagtctctgcgtggtggtcgtgtcgctgcaagcttgtgccacgcacccgggcattgtgtcgcaccaaatagcagcagcaacacaccctcaagcctcgcattgaacctgctcgacgaaaagcgcagcaagctgcgtgtcgttcgtccctgcagcaacaccattcttcacttcgcgtcatacatcgcatagccttcatcgctgcgcattgtccgcattgacgcagcagcccttccgttcattctccactcccctcgtcgcgtgtcatcaatctcgtgcttgctgcgcagcccatcctcgtcgtcgtaaaacccttgctagatgttgccgctgcgcctcgcgcgacgcatgattcggtgaaacacctaaaaccgtggaggcacgcgcgacacgagtcggctaggttgttcgcattgagtggttcacgatttgttttatttacatatttggtcgatgatgtgcatgtgtttatatgtgtgtgaaaatatatttgtatgaatggacgtgtgtagaaaagaaaacgaagtagaaagaaactcggatgttttaatatttgataggaaaaatatgcgatgcgttgtttaaatgcgaaaac

SEQ ID NO: 135126 - DNA, 145 bp, Zea mays
  Clone ID: MRT4577_54716C.1
gacgccatcatgatagtaatagggtcagatttcacttgggaaattcacaacgggaaacaaggagaaatcttagcccccaacctttagagaccctagagcataacccaaaaatgcgggagtactggctcggctacacagccaatat

SEQ ID NO: 135127 - DNA, 1764 bp, Zea mays
  Clone ID: MRT4577_54717C.1
ccccagttcccgggatcgcactccacggatgctcttctttcacatttgctcacccattgatcatgttacttctgaatgctgaatttaaataaattgaactgatttgttttgaatctggaccatggaatttgagttagaggccagtgcatggtagggcccttaaatattttcttttcaggtgtcagaacggcaatttgtaggttagctcaaagtgttctctagtcgagaaatggaaaagcagaaaatgagtaagccttaaagttttaaccattaatcatgtactgtaaaaatgtaattatataaacagaaacatgttcactgcaccaaaaaaaaatcgctgtgagcagcttaccttcatttttgaagtcaacttgtctttttaactactcatatagagtttagtcacacttcaagttttaaacatggtttattgcaggtccgggatggacgcacgcctcccggcgcgcccaccccgcccgcgtgcgcgtgcccctgtccgcctcccgtttgccgcctccaccgcaacgcggcgcgcggggtggtggtgccctcgcggtcctcgtgtcgatcccagcggcaggggtgcctgtgcctttgcttcccctggccgttgcccgcgcctcgcggtcgcgcacctgaaccggagccccgcgtcaaatctagggttgcatccgcgccgccccctcctcccgagactcccagcggctggaaccagaacgagggtgacaggcgacgaaagctgcgacggacgccccctcgtcgaatgcactggcgaccgttccgtcgaggagcagccggagcacgcaggaggttagtttagttgagggaaaagctttgaaaatgtcatccaccgtgccgaagtcatcaaatatcttctggcatgattgtccagttggcaagactgatcgccagaagctactcaagcagaaaggctgtgttgtctggattacaggccttagtggttcaggtaaaagtaccttggcatgtacattaggccgtgagctccacacaagagggaagcttgcatatgtccttgacggtgataacttaagacatggtctgaacaaggatcttggcttcaaagctgaagaccgtgctgaaaatataaggagagttggtgaagtagcaaagttatttgcagatgcgggccttgtatgtattgcaagtttgatatctccatataggagagaccgtgaatcttgccgtgcattgttgtctgatagtagcttcattgaagttttcttgaacatgtccttggaattatgtgaagcaagagatccaaagggcctctataagcttgctcgtgcaggaaaaataaagggttttacaggaatagatgacccttatgaagcaccactgaattgtgagattgagatcaaagaggtagatggtgtatgccctccgcctgctgagatggcagggcaagttgttacttaccttgaggagaaaggcttcctgcacgagtaggctgaatccaagcaacatctggggaagatttcagtaagactagcgcagaataagtcaaaggcgctggcagttacggtatagcagttgcatagattggcctcaatgccttagtattttctttccgtacttcctctgccacaggctccatgcaatttcattcagatgagcctggatggttcctaatttctttgacctctagagtagattacttgtaatgcaactctgataaccacttggggcagtatcaatgtggcaatcgcaatcttaaaaaaaaaaaaaaaaaaggcccctagggcc

SEQ ID NO: 135128 - DNA, 247 bp, Zea mays
  Clone ID: MRT4577_54718C.1
ctcagcgactgcgtctcaggtcctggctgtgatgtcgcaagctcctaggattcttctctacgcgtgagctagctagagtggcatcgcgaggaagaaggatgacgcgctgcggaagcaactgcgtatgcggcagcggatgcaagtgcggcagcggctgcggagagtgcaagatgtacccggacatggttgagcaggtgaccaccatcatcaccaatcagactctcatcatggctgttgcgccatccac

SEQ ID NO: 135129 - DNA, 207 bp, Zea mays
  unsure (1)..(207): unsure at all n locations
  Clone ID: MRT4577_54719C.1
tacgtccggaccgacgcgcaaacgttgtccagctaccggatccaacccctgtggcgtctacgctgccattccgccctactactgattcatgatatggtgggaaaacacctctatacatgtgtctctatctctgtatgttaacatgcantcagacgacacacatgatcatgggtggtatcaccaataatatatgcatggtcatgataa

SEQ ID NO: 135130 - DNA, 548 bp, Zea mays
  Clone ID: MRT4577_5471C.1
tatgacgttttacgcacagctgcatcctcttggatcgcgtctagcgcctactggctcgcggagcacccgttcatcgttttgtcccggtggagcccgacgcacctgtggttctccacctgggcgttcctcctggggtcgctggccgcctacgtggcgctctgcctggccctggacgtggcgctggccctggccgcgcagcgcctgcgccggcgcctggcggttccgctgggccccgtgcccgcggcgcacgcgctgctgatggccggcgcgtcgtccgccatcttcgcggggacgctgctgtcggcggtggcggagatacgggacacgcggtggtcgtggcggggccgcagccgcagcaccccgctgcggtggctcctgtgcttcccgcccgggacgcgctcctcgggccgcgtgttcttctggtcctacgcctactacctgtcccgctacctccacgcagcacggggcgtgctggcggtgctgcacaagcggcggaacgcccccccgcgggtgttcacgcacgccacctccgtggccatggcgttcct

SEQ ID NO: 135131 - DNA, 503 bp, Zea mays
  Clone ID: MRT4577_54720C.1
gttggggggggtttttttaatttttatttttttttttatataatatattttttgggcaatgataaacatacatactcaatttgggcttataaccacaccaagaaaactttgggtggagaaaaactttgaccccatacttgcttactcattgacaagggggaaatgctcattggggattataatactccaatgggtcattaatacccacactaaaacatcctaaaaccacgggtcccaaattaagaacctccttcttcagcgccgtcttcaacgaaaattgacataaccccaggggaccggtggtccgatcataggaagatcacgaaaaaacaaaaaaaggtgaacaatggcactaaatgaattgccctctaatacctttgcggccaccccctgctggccttttaactaaatagcgagggccacgactcccccggaaaatcctgacaaagtcctggaactgtaccaccttttcctataatgaaggggtttataccctggcgtaa

SEQ ID NO: 135132 - DNA, 423 bp, Zea mays
  Clone ID: MRT4577_54721C.1
ctagaagaacgcgcccgcgcctagccagatctggtcgagccgcccagggcgagcagggcccacgtgggggccgggcgacggcgcctttgcgcgcgggcagtggccgaagcttacgccggacgcgcccgctgccggtccgtcaccgtttgcagcccgaaccgagaagccggagagcccagcccttgcgccggagcgccagcagcgctcgcactcgatccaggtggccgagcaacgctcgcagtcgcgccatggggggagcgatccaaccgtggtcgactagccgtgccgtcgcgcacacgtctgtgctagccgagccaccgaaccgcgaacgaggctgaggcctgccgtgcaccacggccgaccgagccgaggctgatgacggacgagcacgggccggtaggcggacgtagagcccgcttgccc

SEQ ID NO: 135133 - DNA, 279 bp, Zea mays
  unsure (1)..(279): unsure at all n locations
  Clone ID: MRT4577_54722C.1
gtagtatcgtgtctatagtggatgttgaatagtgtattcgtgggcgcgggaattaatttcggaaaggaacatgcaagggtatgatggttgtgtatcgtgagtaggacttgcgtgtggagatctctgggtaactaatggatgctggtgtgatatgatatgcgatctgtagtcgctgagcatatgctcccatntgnngttatggagntgttttgnggngattagtcggntgatttgatttnaagtttttcttagttttccatgaaattttggttcatcatg

SEQ ID NO: 135134 - DNA, 259 bp, Zea mays
  unsure (1)..(259): unsure at all n locations
  Clone ID: MRT4577_54723C.1
ctatacatttttcccttttttccttccttttttttttctttctcttttttttcttttctttttttttttttttttcttcacctcccaatcaatactgcttactaccttattatcaaaagatactctattttatcctaaggtttgtttgatttccctcaattanactttctaatacaccctacccccttaccccttnaacttaccaaaaatccttttcttttcatatnnancatataacccccccttcccttatttactc

SEQ ID NO: 135135 - DNA, 249 bp, Zea mays
  Clone ID: MRT4577_54724C.1
tttgctcatatataccataagaaaaaaaaaagaaaaaaaaaaaaaaaaaaaaaaaaaaaaaaaaagggggaaagaaaaaaaaaggggaaaataaatgaaaactacaaaacaaaatgatactgtctggggggggcgcagtttatgtcctgggctttcgtgcctctattgtgcctttttggtctcccttcctggcattgctttgcgagtctttgaccaggatgtgtctggcagggtgtgggtacagcgttg

SEQ ID NO: 135136 - DNA, 208 bp, Zea mays
  Clone ID: MRT4577_54725C.1
gcggtatatttttcgttttttcttttttttgatcctcccagatggattgtactgtctcgggaaacgcatcgcacaccttttttttacacatgaacacagacccatcaacatcaacgcagagatacactatagaagtactggcaacaaacaaacagcagagaacatgaagcctcgtacattctaaactggatagctacaggctggcaca

SEQ ID NO: 135137 - DNA, 531 bp, Zea mays
  unsure (1)..(531): unsure at all n locations
  Clone ID: MRT4577_54726C.1
gccggccggttccgggaaaaggnnnnnnnaaaaaaaaaaaatttaccaaaaaaaaaaaaaaaaaaaaaaaaaaaaaaaaaaaaaaaaaaaaaaaaaccccaaggaagctccttatttatttattgccctttcagttcgccatcggcagccgagaaccatgagttccacagggggggacaagggcgccaaaaagttttggccgaaaggggtcggcttcaccctgaaaaaacccaaaagggggttcttgtgggacaagcccgacgccgacttcttcgggttgcccgccggcacgccggggacaatgattttccgccccaaccgcgttcgaatcttcttcaacaccgtcggggaggaaccccacatcggttgaaaatcaaatctataaaaggaataactcggacttgtcttgcgggcttgtccgtccccaaataatgaaggggggggctccttcccataaaatggctagtaaaaatattggcctcgcgggcttgcttgataaaaaggattgaaaaggttcttcctttccaattg

SEQ ID NO: 135138 - DNA, 384 bp, Zea mays
  Clone ID: MRT4577_54727C.1
gagctcactagtctgcggccgccctttctttttctttttttttttttcttttttttttttttttgtttttttcttgtcccggaaaaatgaaacacttgaatttcagacgctccgcttaaaaaagggggtccttataaaccttcatttaaaaacctctgaaaattgccccgccctggctactgttactccacaacgacggaagagaccggggccctactttgtaaataaatacaccccgaacggtttccaaatgggggtccaagctaacaacagttttcttttggcgggccagttcatacctacctgctagcttcgcctccggcgacgaggacaaacccgccgagcgccagggggagggggacagaaagctcactatagccgaat

SEQ ID NO: 135139 - DNA, 365 bp, Zea mays
  Clone ID: MRT4577_54728C.1
ccggccgggattcaatccggccgggtaggtagcaggcagcagcacatctcagccttcacccctctcacactctcttcactcagctcgtgcctcgtggtgtggatgaataaaaagatgcatgtcgatctctgcttactgttatcgtatctgtagtacctcgtgtgatatgaacaatatgtattatttaccaagagcggttgtgtcatgacattcgtgccagacgacagtgatggcgtcgtagcccccagccgctagactgggtgggcatcgagaaccaaacggttaacgatggcggtatatctcaaattattgtcttatttagttaggtctgatttgtgaaaaaaaaaaaaaaaaaatttgcggcc

SEQ ID NO: 135140 - DNA, 502 bp, Zea mays
  Clone ID: MRT4577_54729C.1
attgggtacctcgaggccggccgggattaatccggccgggtaggtagcaggcagcagcacatctcagccttcacccctctcacactctcttcactcagttcgagcaaggggggcagcgagcgaagcggtaggtagcagcagtacgtgctgccgccaagctagttagtgccaatggcgcggcgcggcgtgcgccccggcgatcatcagcgggtcgccgcccacggcgtcgtgctgctccaacctgcgcgcgcaggagccgtgcttctgccagtacgcgcgcaacccggcgtacagcagctacatcaacagccccaacgcccgccgcacgctcacctcctgcggcatcgccgtcccgagctgctagggcgctagctcgtgcctcgtggtgtggatgaataaaaagatgcatgtcgatctctgcttactgttatcgtatctgtagtacctcgtgtgatatgaacaatatgtattatttaccaaaaaaaaaaaaaaaaaagcggcc

SEQ ID NO: 135141 - DNA, 175 bp, Zea mays
  unsure (1)..(175): unsure at all n locations
  Clone ID: MRT4577_5472C.1
gtcaaacttgagactcatcggctcgaaagtcagagacacttttggccggtatggagatagcagcaattgtatgaanattgtggatcggatcacacttcacatttccacttatcgcagcaactcaagctgcaaggataggagtacaatgtaacagaaataaggctgtaccattaag

SEQ ID NO: 135142 - DNA, 409 bp, Zea mays
  Clone ID: MRT4577_54730C.1
ccatgcgtccatgcgtccggcccggcctcacagtggagacggggctccctccctcttctctcttgagagggactgccttgtactcactagtcaccgcacccaagtccgcgctgtgcactgtatcacgagctgaaccaattggagcgtgccgtcaccctagaccgctgctgcggagcgaccaacgagtcacccgaaaccgggtagactcaagccggtgtggatggacttataagggttgcccggaagatgacaagggctcaggtgaaatgaaaaaaaaaggagcacatgtgcttgccggatgaagcggaaaggccgcaatttccctcgattgactggtggaaactgactattgtgggaattatccaaacatggaagactacagctaacttcctgagggctcaaaccatgt

SEQ ID NO: 135143 - DNA, 1160 bp, Zea mays
  Clone ID: MRT4577_54731C.1
tctagaagtacggccgagttttttttttttttttttttcaaaacagagttggagatggtatatatgcagcagaacctacaaatcatcacagcatgtattcacaagagtgcctccatgtatacataggatgatcacattaactattgccctactaaaaaaactgctgtgctcgaacagtgtactcacaaagcgacaattcgtagccacatagtattctcccagcagcagcaccttcttcccaggaaaaaagagaataacttcaaaaaagaaaagaggcaagaggaggatatgttgttcctcgaggaggttctagagggcagagatgaaactactcgtttgtccatctgattgcggcggaagcgaaagtagcattgcagtctaactttccttagatgcctgaaacaaggagaggacgttctggttcatttcagtgtacaaactccaaccatcaaatcgatgttgcttcagactagtcacgtaggataaccgagtccacaatctccatcagcggctcaaggcactcaggagaaaacttgcgggcgaacatgtaagggtgtgtcgtgttcgacttcctcagctccctgatcaagcttgcggatacctctccaggctcatacatgtgtgggtggcctgcaactgaatccgtccaatttacccttgtaagggtatacttagtacaaccctcaggatcctgcatatccagcagtgtggggaagtaatgctcctccgggtagcatgaatccctgcgctcgatcagacagggcaacttgaacttcttccaaagtcgcatatccctcacgaccatgatggcgtgccttctcgtgagcacaaagaactgcgacccagcccggaactgatcatatggaacctctgggagcatgacatcgtcacctcgggcatagtacctgtcatgcagcagcttggtgtcgttgtccatgttgtccattatctctatgaagctgcggtggtggctatgagggccagcattgtcggagaggagtgcgttgtagagggtggggaacgggtggagcgggatgcaggactgcgacaggagcgcgaagaactggttgttggggtcgtcaaggagcgcggtggcgaggaggcggcgcgcggcggagatgagtgtaggggaggcgcgctgcgtggccttggcggggacg

SEQ ID NO: 135144 - DNA, 570 bp, Zea mays
  Clone ID: MRT4577_54732C.1
attcaatcctggccgggtacgtagcaggcagcagcacatctcagccttcacccctctcacactctcttcactcagttcgagcaaggggggcagcgagcgaagcggtaggtagcagcagtacgtgctgccgccaagctagttagtgccaatggcgagggcggtggcgatgctcgtggccctggccctggtcctggcgctgatcgtggcggcgagcgcgggcggggtggcggcgcaggactgcagcgcggagcagctggaggcgtgcgccccggagatcatcagcgggtcgacgaccacgatgtcgtgctgctccaacctgcgcgcgcaagagccgtgcttctgccattacgctcgcaacccggttgtacagcagatacatcaacagccccatcgcccgccgcacgctcacctcctgctgtatcgccgtcccgagctgctacggcactagctcgtgcctcgtggtgtggatgaataagaagatgcatgtcgatctctgcttactggtatcgtatctgtagtacctcgagcgatatcaacaatatggattatttactataaaagagaagaaac

SEQ ID NO: 135145 - DNA, 406 bp, Zea mays
  Clone ID: MRT4577_54733C.1
tctttttcagatcaacaggatttctgttggggggttccaaacataagggggggggacacaaatatcacacctcaaaccacatcagcttgcacctgcttgcccaaatttgacgtgacaccggaaaaaaatagaggtgcaatggcaacagaggaaatggaacacaatgacagtgggccagtttttgaccataccccaactcctcatgatgatacactcaaaggtactacaaactctggatctgatccaccacttacagagcaagagtgtatccgttctctgtgggatttaatttgttccaaggacatttaccaaagcagggttgttattgattaccgtgattacagttcaaactgtatggatttttatgaatctttctcggagggtaaatgtctttagttttcttcat

SEQ ID NO: 135146 - DNA, 231 bp, Zea mays
  Clone ID: MRT4577_54734C.1
atgacaaccgagtttgtgtcacggccgccaccgtgtactggagggaacgaggcccgcggcatttcggatgaaagctcgatagtggagacagcgggaagcatccgagaggagccagaagcggagcaccacttgcacgtggagaaggcccgcgactctctacagagttactcgaccatggttcttggccctcatgtggactaccctttgcgtaggggcaccaatgaggattag

SEQ ID NO: 135147 - DNA, 1451 bp, Zea mays
  Clone ID: MRT4577_54735C.1
cgaccaaaacagggttggagatggtttatatgcaacagaaacctacaaatcatcacagcttgttttcaccatgtttccataggatgatcacattaactattgccctactaaaaaaactgctgtgctcgaacagtgtactcacaaagcgacaattcgtagccacatagtactctcccagcagcagcacctttttcccaggaaaaaagagaataacttcaaaaaaaaaaaaaaagaggcaagaggaggatatgttgttcctcgaggaggttctagaaggcagagatgaaactactcgtttgtccatctgatcacggcggaagcgaaagtagcattgcagtctaactttccttagatgcctgaaacaaggagaggacgttctgcagaaccataaaagaattgacagtttattaatatgtgtaagagaaaattatagacaagtaaagtttcaaaagaacaaagatggacaaagatttacatggacattgttcattggacctagcaaagaaccacagtgagagtcacaggttcagcaagtatagcattgttacgttgatccaatgaatctagcatgacctgtaaaattgttctgaccagaatgcaacagattcccacaaaaaaatctttcaccaccaacggaagggctacctaaggaaccttttgtgtgtgtaggggccttcaattttttttaactataataaaaggaccatataggccaatatttctatcttctaacagaagcaaaatgcttacagtgcctaagaaaataacctaatgttgcaagcactcaattgatgacacaataacaatctaatgtagtatgccgctttattacgaaaatgataagcatacagattactgaacaacctaatacactcacattccgtgctatgtacactccatctgtagacatttctctcaacacaacacctaaatagaagaggatgaattctttcagagaggccgcagcaagtgcatatttccatacctggttcatttcagtgtacaaactccaaccatcaaatcgatgttgcttcagactagtcacgtaggataaccgagtccacaatctccatcagcggctcaaggcactcaggagaaaacttgcgggcgaacatgtaagggtgtgtcgtgttcgacttcctcagctccctgatcaagcttgcggatacctctccaggctcatacatgtgtgggtggcctgcaactgaatccgtccaatttacccttgtaagggtatacttagtacaaccctcaggatcctgcatatccagcagtgtggggaagtaatgctcctccgggtagcatgaatccctgcgctcgatcagacagggcaacttgaacttcttcaaagtcgcatatccctcacgaccatgatggcgtgccttctcgtgagcacaaagactgcgacccagcccggaactgatcatatggaacctccgggagcatgacat

SEQ ID NO: 135148 - DNA, 941 bp, Zea mays
  Clone ID: MRT4577_54736C.1
cgggtatgccactacacccataaggtaaatgaaagtggctgattattgaataaaaaaaaaaaaagccctttttaactcagtggtagagtaatgccatggtaaggcataagtcatccattgcgatccccgggccggccgggattcaatccggccgggtaggtagcaggcagcagcacatctcagccttcacccctctcacactctcttcactcagttcgagcaaggggggcagcgagcgaagcggtaggtagcagcagtacgtgctgccgccaagctagttagtgccaatggcgagggcggtggcgatgctcgtggccctggccctggccctggcgctgatcgtggcggcgagcgcgggcggggcggcggcgcagcagtgcagcgcggcgcagctggcggcgtgcgccccggcgatcatcagcgggtcgccgcccacggcgtcgtgctgctccaacctgcgcgcgcaggagccgtgcttctgccagtacgcgcgcaacccggcgtacagcagctacatcaacagccccaacgcccgccgcacgctcacctcctgcggcatcgccgtcccgagctgctagggcgctagctcgtgcctcgtggtgtggatgaataaaaagatgcatgtcgatctctgcttactgttatcgtatctgtagtacctcgtgtgatatgaacaatatgtattatttaccaagagcggttgtgtcatgacattcgtgccagacgacagtgatggcgtcgtagcccccagccgctagactgggtgggcatcgagaaccaaacggttaacgatggcggtatatctcaaattattgtcttatttagttaggtctgatttgcgtctatgagtaagtgaaagaccacgtaaacactttgcactatataattcattagaattctttatcttaattcaaaatatatttttaaaaaaaaaaaaaaaa

SEQ ID NO: 135149 - DNA, 524 bp, Zea mays
  unsure (1)..(524): unsure at all n locations
  Clone ID: MRT4577_54737C.1
gnnngaangtagnttgtgatanggntatggnagagntatnttngaaatgnnnnnnnnnnnnnnnnnnnnnnnnnnnnnnnnnnnnnnnnnnnnnnnnnnnnnnnnnnnnngacgtgtccttccctcaacatcctcatcaagnttanggcgaagacaagggattcaaccgccataagcttgatgaggatgttgagggaagggccagacgtgtccttgagagganctncaatgnnnccaccaatnacagcctgcattgagaggntcanaacntttanggtacaagggtnctggnatgctacnnaaactccagtactnaatgnacttanttgtagcgncnatggtggtatgctcttcaaatggctctaancaagntagagactnatngataaaanggcttagttttcatanggctaatanagccgnatcgaagtgcatacagcatatatcntatganctntnttncgaanangtnnatgactnaatnntntnanagganttaanatnnnaangtgnattntnantnt

SEQ ID NO: 135150 - DNA, 3374 bp, Zea mays
  Clone ID: MRT4577_54738C.1
cctccgtggtgccggcccccacctgacccccgatccctccaaccttcgatccagaggggaaaaaaagagagacaaaaaccgccggcgagcatgcggcacgcgacccggctcggcggttcgtgtcgctgcggatgagagctcgctccctggactttacttaactctactctgagtctcggatgctccagagtccagacttccgggattagaaatccacgcacatcgccgtgcacgcacgcgacggcggagatgtccgtggccgtggggaagcgggtgctcgatacgggctggctcgccgcgcgctccaccgaggtcgcgctcaccggcgtccagctcaccaccacgcacccgccggcagctgaccccgccccagccgcgccctggatgagcgccgccgtccccggcaccgtgctggggacgctgctcaagaacaagctgatccccgaccccttctacgggctgaacaaccaggccatcatcgacatcgccgacgccgggagggagtactacaccttttggttcttcaccacgttccagtgtgccctgtcaggaaatcagcatgcgactttaaacttccggggaataaactactcagctgaaatgtatttaaatgggcacaaggaggtactaccaaaaggaatgttccgaaggcacaacattgatattactgatatcctccatcctgatggtaacaatctgcttgctgtccttgttcatcctcctgatcaccctggcaaaattcctcctcaggggggccagggtggtgatcatgagattggaaaagatgttgctacacaatacgttgaaggatgggattggatgtgcccaataagggatcgaaatactggtatctgggatgaggtgtcaatttccatatctgggcctgtgaatataacagacccccatctggtttcaacttttcatgatgattttaagaggtcatacctacattgtacacttcagttggagaacaaaagttcttggattgcagattgtaccttgaaaatacaggtttcaactgaacttgaagggaacatttgtttggtggaacaccttcaaagttatgcaataacagttcctcctcaatcagatatagagtacaccattccttctttattcttctataagcccaacctgtggtggccaaatggcatgggaaagcaatccttatacaacattgagattagtgtggatgtaaaagggtttggagaatctgattcctggagccattattttggattccgcaagattgagagtacaattgatgattctacgggtgggaggatcttcaaggtaaatggtgaacctatttttatccgaggagggaactggatattgtcagatggccttcttagattaacaaagaagcgatatatgaccgacatcaagttccatgctgacatgaacttcaatatgcttagatgttggggtggtgggctagcagagaggcctgacttttatcatttttgcgatgtctatggtctgatggtatggcaagaattttggataactggagatgttgatggccgaggaattcctgtatctaaccctaatggccctttggatcatgatctctttcttttgtgtgctagagataccgtgaaattactcaggaatcatgctagtctagctttatgggttggtggtaatgagcaagttccaccggttgacattaacaaagcactgaagaacgatttgaagctacatccaatgtttgtaagttaccagacatcaaaaagtgaagtaatatatttatctgaagaatcaactgaccctagtaaataccttgatggtactcgggtgtatgtgcaaggatcaatgtgggatggttttgcgaatggtaaaggggacttcactgatggtccatatgagattcagtatccagagagttttttcaaggacagcttctacaaatatgggttcaaccctgaagttgggtctgtaggggttccagttgccgcaacaattagggccacaatgcctccagtaggatggagcattccgattttaaagaaaagaattgatgggtacatcgaagaagtaccaaatccaatatgggactaccacaagtatattccatactcaaaaccagggaaggtccatgatcagattgaactatatggagccccaaaagacctggatgatttttgtgaaaaggcacagctggtgaactatgttcagtacagagcacttttggaaggatggacttccttcatgtggacaaagtttacaggtgtcctaatttggaagacgcagaatccttggactggactaaggggccaattctatgatcacctccaagaccaaacggctgggttttatggttgccgttgtgctgctcaacctattcatgtccaactgaatttggctacctattttgtagaggtggtaaacactacagctgatgaactcaaagacatggctgtcgagatttcagtgtgggatctagatggtgcatgcccctattacaaagttaccgagaaaatagttataccgccaaagaaagtgaagcaaattatcgagatgaaatacccaaagatgaaagatgccaagcctgtgtattttctgctcctcaagctcttcaggctgtcagacaatggaacaatctccagaaacttctactggttacaccttcctgggcaggactacaaatcgctggagcagtatcagcagaaaaagattccattaaaaattgattctgatgtttcagtctcaggcacgaggcacaaagtaagaatgacagtagagaacatctcaaagaagtccgtagcagacagcacacgttcagtatcagcaatggatctaggtgatgcaagtggttcccacagcactcgcaaagaaactactcggaagggaaacgggagcgatggactgtggaggaaaatacgcagtggcctcggggtcgcaaggccaagcgacaaccgaagaacactggaggtcaacgggaccgattcaggggttgccttcttcctccatttctcagtgcacacctccgaatcatccacggacggggaggaatacaatgacacaagaatcctcccggtccactactcggacaactacttttcgctgacgccgggggagaacatggccgtcgacatctcgttcgaggctccccaggggtccagtcccagagttgtcctcagaggctggaaccatcatctggaccacgccgtgatgatctgagatccgtgtaataaaataagcacgtaccgaataaagtgcagacatcagatcgtgttcgtgcctgctgttggattataattaggcttgtcctaattttattttattttattaaataaatcgtacgacctaaattgaattctaggttaaatggcttcaaggtactcttcacccccccccccccccccagg

SEQ ID NO: 135151 - DNA, 505 bp, Zea mays
  Clone ID: MRT4577_54739C.1
ccacgcgtccgcggactttgttgttttacccaggcttgcagactctaactgaggaacagacggcccaccacgcggagccggacccggagacgccggctgctgaataggtaaatgacgtaatcgcaaccgcccgctggcgagacaaaagcaaaaccggcagccgctgaacccgaggctgctgctgacgccgaggagcccatgaaggctgaaccggccgcttataaccccgagaaggccgacccgctcgatgaggtgaccgacaaggtctgccagtgacgccggactctgaacccccactgcggcagcggacatggtgtcgggaaatctatgcataagcgcgcgcacgtggcgtgccattctcgtcacgcgcactggcacctactgttcagtacaacgcaaacgcgactggtattctccatatctttgcgtgtgacaaagcgagtgtcggaactatagcagtgcccggagcagactgcgaatgacatggcctaaaaaaagagctcga

SEQ ID NO: 135152 - DNA, 403 bp, Zea mays
  Clone ID: MRT4577_5473C.1
ctcacgcgcacgttcaacgtcagatgcagcgactgaagtgctgaccactacgcggcatgatacgaagattgctacgtatatgggatattcttgctgatacatttgtgtaagcatgcacgccctcgcactcacactgatataggagagaatttagatgagaataaggatgacagttaactaggcaggaaggcatgtatccatgactagactgaatacctgactgggcataattgcagctgttagggctagtgtgcagcctaatgtgcacaatgaagtttcattggaacaaagataattagaatataaatcctttgaaaaatgataatctctaggaaaaactcatgtgccaaactagccctcaaacatatgctgacaaggaatcagtccatgaatcacaggatca

SEQ ID NO: 135153 - DNA, 339 bp, Zea mays
  unsure (1)..(339): unsure at all n locations
  Clone ID: MRT4577_54740C.1
tacnctgccancctgcctttnctaagttcttcttccatcgctccaacccnanacccttactctctcgtancnacgtttggggngncgtcgtgccgctctactcgggtgcccaggtcttgttcgggtccntcgccggcgagccangggacntttccttngtatgagangatcaatgcnnaattattatgatgattacgatgacatngatgagatgnggntgactatgatatggntgatcctgctgntganatggtagacgagcagcgangggttatggatctgatgcgnaggatgatgcttatggacaaccaaatgacangatcccagatacttcatcag

SEQ ID NO: 135154 - DNA, 544 bp, Zea mays
  unsure (1)..(544): unsure at all n locations
  Clone ID: MRT4577_54741C.1
gcacgagcacacacacacaaccagatctcccccaaatccacccgtcggcacctccgcttcaagatgcagatctttgtgaaaaccctgaccggcaagactanntcaccctcgaggtggagtnncgtctgaccaccatgtggaccaactngttgaaggncccaagnnatncnncaggntactnaaggntagggnncannnccctccncagnnaccncagtcagnctgtgctcattcttnntcgctnnggcananacnnnagcttnnngaggacngaggncngncancngncntttngncntngnancnntanncnanancnanntncnncnangnannangngnangnangncancncncntncncancncntntngtngnccttncncngncnccttncnangngngngnnagngncanntgccangnanntcnntttgctgnannaagaccnccntgnannccggnnncaagnacttanntcancncncttnncgnagngnctgngnangntncncntncntgnanncancncantntcgnacc

SEQ ID NO: 135155 - DNA, 417 bp, Zea mays
  Clone ID: MRT4577_54742C.1
ctgacgcgtgggcggacgcgtgggagggtacccagcgttcgggctggtgaacaaggtcaccggctaagccatcaagcactcgctgggacagatccacccggtacgccttgtgccctacaacccggagtacgttgacaagttggtgctgtggacggagagccgccacatcgggcacggcttccgctgcgtgcgcatggagaacaacatctacctcaacatggacggcatctcacgacgacaaggaccactgcgaggaccaggacgtgtacaccgtggagctctgatagtgggccaagggcgacaaccatcgatggaagatcctgccctggtgatcagagacgatctaaatgaatccaaggaaccttacctagctgctgccgacgcctaatacgttgtactccgctctagctgagatct

SEQ ID NO: 135156 - DNA, 149 bp, Zea mays
  Clone ID: MRT4577_54743C.1
ggtcgacgccacgcgtccggataaaggcttggtctcctattcaattctatttagattttgctctccctaagctgatcgaagaggcgcggataaagatataacctgggtcaaaccatctattatttgatgcatcttcagctattcaacct

SEQ ID NO: 135157 - DNA, 379 bp, Zea mays
  Clone ID: MRT4577_54744C.1
ccgggcggggacgcgtgggcggacacgtgggcggacacaatttttgactcgagagcggacaaggcacccgcgaggggaggggccaagaaggacgagaagcgggccacaaccaaccaccgaaagcgccaacaaacaaaaaacaaggggagagcaacagagaccgaggcgaaaacaccacgccacaccagaccacacggacgccccccaccagaccgaaacccacgccgacgacgagagccaaccgacgccggagaagccggcaaccgccacggccagcgaacagcacggccaccacggaaccggacgcaacaggcgcaccaacacacacacccacaaaaacgaacgccgaaaccgcacccccacaaacgagaggaggaag

SEQ ID NO: 135158 - DNA, 504 bp, Zea mays
  Clone ID: MRT4577_54745C.1
atttccaaatattctccctggatctccaattactatagtacctaagagaatatcaccatccccgtgcatgtcatgaaactgggtcaatggaggtaagaaccggggacgagatagactacttgctctactactactgacgaggattcgacgtttgaggagacggtctggtgtatgaagaggggggccgacagtgtacatgtggaagaagtcatgctatctgagcggcaccgctctgtgctgatgcatgacataatgcgagctggaatctaactagcgtcgtgatgacttgcttcgttacatctgactcaacggtgtccgccactacaacgacaacgatgccgactttatccagaaatatatgaacgactagcgtggttctgctcatagactactgtgagattcactagacgctgattgactacccagcacgtcgacttcttataatgctgatgactgctaggacatctaccaccacaagtacgttgagtatcaggagcaggacat

SEQ ID NO: 135159 - DNA, 391 bp, Zea mays
  Clone ID: MRT4577_54746C.1
ggcaaatagctctggaaaagcatatttcacctcagacgcagttaaaccagggtacacagccttgcgtttagcgcgagcaaagacactgaaatcacaccagcggccaaaagcccactttcggtcatccaaattgctaggagggctaactacaaaactaccacagtttagtgcctgtcttaaaccacggctccttttgcgcaaagggaagccagatctgtctcgatgggctgtgtatgaccaccccctgccccgctcaagtatttaatcgtcaccaaaggcgattctcgatcacagctacaatgatatgcgtcacgctacctgagaacaacctttctgaccccgagaaataaccaatgagcctgctgagccactgccactaatttgctcaata

SEQ ID NO: 135160 - DNA, 433 bp, Zea mays
  Clone ID: MRT4577_54747C.1
acctccagcaaaagttctaccgccgcttcgtcgtacgtactactccactccgccatgccgcagttctctcatctccgtgctcccccaggagcttgcgatgtgcatttggatagggcgtgcttgtgtaccggcagtttcgtcagcatcgcactgccgagcgcctgcaccgctgcactcgcccggggattttcgagatctgggcatctggcgcggttgctttcatcgcttcattccgctcgaccgctcgaattcccttcgtttcttttcgaccacaaaaaagagagcaaaaaaataaagaggaatcttggagcaatggctggaaggctggaaccatccattttgcgacccagccccctgaactgtccataatcacggccctccccgcggtgctgttgctttcggtaccctgtggggctacttggtcaccacaccg

SEQ ID NO: 135161 - DNA, 598 bp, Zea mays
  Clone ID: MRT4577_54748C.1
aatcaccgctcctagattccactcccgggcttctctccttccagagcatcccctcccctgtcgctctcactttcatctgcacgcctcctgcttctcggacccgacgcaaaaacaggggatacctctgaggatgagccgcagcaacaggaagagctcatcaaagggccttgacctgaagctgaacctctcgctgcccgcaagaggggactcctccaacagggtgatggctgacgaggagtcgtccccgagctcgtgcctgtcgtcggagaacgagcatggcctgcagtggtccaacagccccgaagcgacgtccatggtgctcgccgcctgccctcgctgcttcatctacgtcatgctcccccaggacgaccctcggtgcccccagtgcaagagccccgtgctccttgacttcctgcaggacagtggcaacaataacaacaacaccaacagcaacagcaggaagagcaggagggggtgaaagaagaggaggagaggctccattcggctgcaccgacatcaagaaaagcgtttatatgaagtcctaggtccagtagttctctttcgtttgatcatttcttcagtgtaaccatgatatgtc

SEQ ID NO: 135162 - DNA, 189 bp, Zea mays
  Clone ID: MRT4577_54749C.1
ttccttgccgcctcgtcgctggttccttctagcggccgccgcctttttttttttttttggtttttttttggggcaccctggtcaaaaggggctagagctcaatcgcttttaaaaaacagggcacaaatcaggtttgaaaatttggcataacgccttgaacttgggaccccttaccaaaaaagtgttctt

SEQ ID NO: 135163 - DNA, 292 bp, Zea mays
  Clone ID: MRT4577_5474C.1
gaaaaaaacgcgacccacgcgaccagttttgctacctaaaacttaactatctctttacacacagtagaaaaaagggacggacgtttttttcacacgccaagtgcaccacatcagcccataaaaaaactcaccctgccaaatgctctgaaacttcacatactctaacaactctccccacaactttcactacccgcttcatttattaacgcagttcctagtcaacatataccttcccttctctctcatactgtcttctcttttgctgattattgagcacaaccagatctttatc

SEQ ID NO: 135164 - DNA, 379 bp, Zea mays
  Clone ID: MRT4577_54750C.1
tttttctttctaatctaattctgtgttttttgttggggcttatttttgaactgggtgcctcttatatccatgacggacgcatggtgcttgccaccaaaccacttgcgccggagaaaaaaaggaaatcccccaaaccgttggcggatgtccacacgggagtggctgtcataacccttaccctaataaaaaactgccgatacaagcatggaggggagcatgggccattctttcccccacaataaaaaacatacgcatttcccgggctcacgaaactaaaaaaactgccgccccaccgcccaattttataccggtggcgcgaagtggtcggccttctgattcgtgtcttcggcggaacaataccccaaagaagagcatgctg

SEQ ID NO: 135165 - DNA, 703 bp, Zea mays
  Clone ID: MRT4577_54751C.1
aattcggcacgaggatccccttgcccacctccttcgcctcagtcacacgcctcgatctcgcctcgccgcgctcccaccaccgcaccatcccggccgcctcgctcgcgacgcaccaaggtgccctcgtatcccgcggcgccggattgggttccctccggggatcacgcggcgagcctcgccgctcgagccacagagtggccttgaaggatgataattgaagcaaaatgattctctatttcaccatattttggagatggatgatctgccaggagatgaaggaagatcccagacacacccttcagaccggaattggccctcccatttggagcagaagttccagtccctgcccctgactaaacaggaaaggaattttgattctgcatattcttcccttgattctagggaagttggtcattcattgcaggctgctcagacattatggtctagcggatccctttcaggtccaatacccaatggtttttattccattattccggaaaagagactcaaggagcattttgataccataccttctcctgatgacctttattctcttggaatagaaggatttaaggctgagattatccttgtggacataggaagagataaaagctatctgccttaaagcaggtatgcacagcactgggtaaaggattgaattaaatcctgctgcatgataaaaaaatgcaggttgggttttgac

SEQ ID NO: 135166 - DNA, 251 bp, Zea mays
  Clone ID: MRT4577_54752C.1
ctacattactgtttttttgtttacccagcaagcccgggcaaacccagaaattatttaccgtcatggcctacttcccagataaacagcgggccgtaaaggacaaaaatactcgacaagcgcagacaccagctcctgatggccaagcgaacacatgagcggggatgactgaataatggggcacaaacccacccgatccataccaaaaaaaaacgacttcggaaggcggccaaaggcagtggccctctgctttc

SEQ ID NO: 135167 - DNA, 892 bp, Zea mays
  Clone ID: MRT4577_54753C.1
ggcgtgcccattgcgttcttgaacgtgcagaccgaggcccttctcaccaagatctccggcgagaccgcatcttcgacagtcaactcgggctcactggccgacctcccgaacctcgccaacgccagcctctatggcttcgaggactatcacggcgtcgacatcggcgtggtgaaggcggtgcgcgtttggtacacggccgctgctggagaaatgcctgtggagatcatactcgaggagggcgacgccaggctcggctttgccattagccgcactcaagagggtttcatctacgtctcgtccgtagtggagaacgacgtcgagcgccaggcaccgtcgacgcgttcggggctccgcgacctctatcgggaggcgaagcgcgcgtccaagctgctggtcatctcgagggtgtcaggccaaaaggtgctgccgtggatggtgtcgacttccggcgccgtccggtgctttgacaccgtgtccctcagccagaaactgtccctgcaccgccacgctttgcagccgatccttcttcacgtgctcatgtgggacggcatgtccgacggcgcaccgactcggccaagccgcgagccctgcccgctgccgctgccgctgccgtccccggaatttgcggagttgccgcggcagaacttgtatgcgtgcgtcgaacagcgggtgcagactgaaggggaccccggggttatgcacgagagggataccgctggggatgcatccttcaggttccataatttctcgctgcccagcaactgggtctgataaatgctactagcctgcttagatgctgtacatatgtagattttaagtgagttgccttgtgctgagaaagggcagctgtgccctgtaacttatttcgtgagaagtataattttggccgatc

SEQ ID NO: 135168 - DNA, 2877 bp, Zea mays
  Clone ID: MRT4577_54754C.1
gttctattaatcaatcacgagatccccttgcccacctccttcgcctcagtcacacgcctcgatctcgcctcgccgcgctcccaccaccgcaccatcccggccgcctcgctcgcgacgcaccaaggtgccctcgtatcccgcggcgccggattgggttccctccggggatcacgcggcgagcctcgccgctcgagccacaggataatatgttcaatctgtttccttgttcatttaaacgtagagtggccttgaaggatgataattgaagcaaaatgattctctatttcaccatattttggagatggatgatctgccaggagatgaaggaagatcccagacacacccttcagaccggaattggccctcccatttggagcagaagttccagtccctgcccctgactaaacaggaaaggaattttgattctgcatattcttcccttgattctagggaagttggtcattcattgcaggctgctcagacattatggtctagcggatccctttcaggtccaatacccaatggtttttattccattattccggaaaagagactcaaggagcattttgataccataccttctcctgatgacctttattctcttggaatagaaggatttaaggctgagattatccttgtggacatagaaagagataaaaagctatctgctttaaagcagttatgcacagcactggtaaaaggattgaattcaaatcctgctgcaatgataaaaaaaattgcaggtttggtttttgacttctacaaccgaccaaacccacatctcagtcctgcaagaacatcctctgaagatctttccaatttattagaaaatcgaggagttcaattgctgggacagataagacatggatcttgcaggcccaaagctatattatttaaagtccttgctgactcagttggtatagattctaaactgctggtgggcattccaaatgaagaacctcatggatatgataattcatccaaacatatgtctgttgtggtcattctgaaatctgcggagtttctagttgacctgatgcgttttccaggacaactagttccattttcatccaaagctgttgtcacatcccatatgtctgcaactggagaaagtgattcagccgactatgattcctgtgattctcctcttgaaccaaatagtcctctatgtgctcaaaggcaagagcaagatgatggcaatagatccttcaaagtcctctcactaagaaacatcatgctcaaatcgacaaattctatggagggtaaaatgagttgttcatctcatagtgagccgaatgttgcaaatgctttctgtggtcgcagccgcgataaagttgtggatgaacatcaaagaactgcaagctcaagtccagagcatccactgtccagagttcgtgggcgctcaatgctgggtgataaacaatatggtggtgctgtagcagtgtcaaggtcagatggcgcatcaacatcaaatacacatagagcacgaagaagtactaatattactcctgaaatcagtgatgatattgtgagagcagttcgagcaatgagtgaaagcatgagacaaaatcgcctttcaagggagcagaaggatggtagtcttggatcctcaaatgattcaatgaaacatgaacctgctggtgactccaatgatgatgaagcatccacaagacgaccgagtgcactggagggtttgagaaggcaatttaatagtcagaaagctgtgtcattgccttcgtcgcccaataggtcaggtattcttggcctcaggagcccatctgactatacagaagccgatctgatggcgacctggaatgaggtgttgcagtcttcaccatttctgaacaagcctttattgccttatgaggaatggtgcattgagttttcagagatcactgttggcattcgtgtgggagtagggttttttggggaagtcttccgtggcctttggaacggaacagatgtagctataaaagtatttctggagcaggatttgacaacagagaatatgaaagatttctgcaacgagatatcaatacttagccgacttcgacaccccaatgtcatactctttcttggtgcatgtatgaagcctcctcacttatccctagtcactgagtacatggaagtgggttctttgtatagtttgattcactcaaaaacacagaaaactaagctccattggaagaggagggtaaagatgttataatgctgtacaaggggtctcatgtgcatgcaccggctaaagattgttcaccgggacctcaagagtgcaaattgcctcgttaacaaatactggacagtcaagatatgtgattttgggctctctcgagtaatgtcaaattctgcaatgaatgacaactcatctgcgggaactccagagtggatggctcctgagctcattcgcaacgagccattcacagaaaaatgtgatatcttcagcttcggggtcatcatgtgggagctttgcactctttgtagaccttgggaaggaattccacctgttcagatcgtttactctgttgcgaatgatggggcaagactggaaataccagatgggcctcttggaagcttgatagcagattgctgggcagaaccggagaggcgtccatgctgccaggagatcctgacccgccttcttgattgcgagtataccttgtgctgaggctttgcttctagtctgtatagcggttataggggcatcagacggtctggcttatatatacatcacttaattttccatttcacatacatcattgagggtgtaaattaccatgtattaataagcaaactttttctaaacctctttaaaaaaaaaaaaaaaaaaagggcgagaaacgacaaaaataaccaaaaaaaaaaaaaaaaaaaaaaaaa

SEQ ID NO: 135169 - DNA, 241 bp, Zea mays
  Clone ID: MRT4577_54755C.1
ggaaaaaatctctattttcgagaggcaaattctcagtatcatgagttcacaaataaggaagcctgtgcaggcacctggacagcaaacgtttcagcaatctggtgggcaagctcctagctctaatatgtcacagcagcatcagacttcccaaggtttgcagcagcatgatagtcatactaatcagatgcctcaagcaagtttaccaagtatgaacacaggagtaccgacctctggagcacct

SEQ ID NO: 135170 - DNA, 331 bp, Zea mays
  Clone ID: MRT4577_54756C.1
agccacccttgctacagtatgaacgttgccgaccgatggagccccccctacagctagctactgcggagcacctgaacgtaccagtgccaccagacagcaggtctgaggagctcagctgccattgtcgtagacgggtacaccaccaccctgactagcgattcgaggtcgcggcacgctgggccgaacgtccagggggtccctgctttgctgcctgctgaggcactagggccagggtgaatcttatccctaggaatagccaccgcacgtataagcgacggctatgtggcatcagtgagacacggagaaggacatttgacttctagctagcaga

SEQ ID NO: 135171 - DNA, 609 bp, Zea mays
  unsure (1)..(609): unsure at all n locations
  Clone ID: MRT4577_54757C.1
ccgggaaaaaaaaaaaaaaaaaaaaaaaaaaaaaaaaaaaaaattaggaaaaaaaaaaaaaaaaaaaaaaaaaaaaaaaaaaaaaaaaaaaaaaaaatgacaaaaaaaaaaaaaaaaaggctcttaaaaaatgattaaaaacctgcaccactgtttataaaaaatgggacgggggttgctaaagaagaattaaaaagcccccaacggaaagttctaaaagctgcaaacttaactttttatccactcatatctgcccaatttctaacaanaagcccgcaaagccggcccccccaaaaaaaaaggaggacaacagtgcgggtcggacccctaggaggaccagccgtacctgcttgggtccttttgggaaagcttttccaacggggagttctggatctgctgccatgtttgccaaaagcggttccatggagagggggttcgcatcaccccctcccaaggcggggcccataaggcggtccaaggggtccagctggtgcccccagcggggcccccaatgacggtaccttgggaacaagacctgctcccagttaacggaagcattttagaatcattttgagctatgatggggggtttttagaaccgctttacctg

SEQ ID NO: 135172 - DNA, 352 bp, Zea mays
  unsure (1)..(352): unsure at all n locations
  Clone ID: MRT4577_54758C.1
gttgttagtgtactaaaaacgatagctgtatttagggttgcggcacccgttcgtggggagtggcagctcaanncatttcaacacctcctactgcatcattccaagtggccgtaaagggcgttgcttgtgcacatcgcctatccttcactgtggcgcccaaaggaacgcacgcatgctccgttacatatcgaagctatactacggcgcattaaccacccgttctggcagccaggttaccaaccgggggtactgatcgaccagactctgcagttctatgagaggatggcttactatgtcaaccctgagtgctcattgttcactgaagaaagggaccggatcaacctgatcccat

SEQ ID NO: 135173 - DNA, 483 bp, Zea mays
  Clone ID: MRT4577_54759C.1
ttttctggaagagtctcctgtttcgagtacgctagagattatccgtagactcccttttccccgagcacaagaaaatcatggaggagcagatagtatacggcgggttcgaggtgaagctcgtcgacaaggatgcccacgagttgctgatcaaccgcatcctcatcacactctcatccaacaacggcaagaacttgtagaaagtttgagctcgattagatagagggagccaaggacaagtattggagaggtaacgaaccagttacgataccctacctaacgttctccacatcaccaatcaaagacaccgcttgcggagaaagaacaaacacatggctatcggtgttgagtgacgaatacacaaaagggtgattgacctaatcagatctcctgatgggatgaagatattcctcactaactatttaacccggaggtgaagttgatggtgaccattgcctgaggtgtatgacgataagctcagcaatg

SEQ ID NO: 135174 - DNA, 2841 bp, Zea mays
  Clone ID: MRT4577_5475C.1
tagctcggaattcggcaaaaacgaagattggctgaaagacaagtaccacccaactaacctattatctgttatcgaaaggaggaatgaacgttgcaaggttatagcaaaggatttctttcttgatttgcagaatggaactctggacctaggccctggaataactgggggtgcagcaagtaaaccaggtggtagtgatggaaattctgatgatgatacggacaatgacaagagaagaaagcatggcaaagattcctcaaagggaactgattctatttctggtgccctcaaggctcatccagttagttctgaatcacgcgagtccaagctgacgggccccaatccccccggtggaaccccagtgatgcaactgtctgcaccagacagaggaagacggagacctagcatggacagtcgtctgaaatttgaccgtagcagtaacaaagaacatgataaagctgagagagatggaggcagatatggtagagacgatcactctccaagccgtgatgggcctgatgatcagatgtttgatggtttccgtgggacggccctctaatgctccttttgttgctgaattcccccctccaccgatattgatgccagtacctggtgctggtcccctaggaccatttgttcctgcacctccagagatagcgatgcatatgctgagagagcaaggcttattttgatctccacaagaatgaagattggttaaaagacaagtaccacccatctaacttgttgtctgttatcgaaaggaggaatgaacgttgcaaggttatagcaaaggatttctttcttgatttgcagaatggaactctggacctaggccctggaataactgccggtgcagcaagtaaactaggtggtagtgatggaaattctgaggatgacatggacaatgacaagagaagaaagcatggcaaagattcctcaaaagcaactgattctctttctggtgcccccaaggctcatccagttagttctgaatcacgtcgagtccaagctgacatagagcaaactctagctctcgtgcgtaagcttgatgctgagaagggcattgatggcaatgtactgtcaagtggtgatcatgacaagtcagatgtagacaaatcacacataggatctatggggcctatagttataatcagaggtttaacgactgtcaaaggcctggaaggcgttgagctcctagacactattcttacctatttgtggcgtattcatggtgttgattactatggcacatcagagtcgcatgaggccaagggccttcgtcacgtgagagtagacagtaagacttctagcacatctgatgtcagttctgctgattgggagaagaagctggatactttctggcaggaaagactgaatggtcaggaccagctggtcatacttactgccaaggacaaaattgatgcagcagctgctgaagttttagaacctcttgtcaggaaaatcagggatgaaaagtatggatggaaatatggctgtggagccaagggctgtacaaagctttttcatgctcctgagtttgttcacaagcatttgaagctcaagcatccagaccttgtattagagtcaacgtcaaaagttcgagaggatctttattttcaaaattacatgaatgatcctaacgcaccaggtggaaccccagtgatgcaacagtctgcaccagacagaggaagacggagacctagcatggacagtcgtctgaaatttgaccgtggcagtaacaaagaacatgataaagctgagagagatggagtcaggtatggtagaggtgaccactctccaagccgtgatgggcctgatgatcagatgtttgatggtttccgcggacggccctcgaatgctccttttgttgctgaattccccgctccaccgatattgatgccagtacctggtgctggtcccttgggcccatttgttcctgcacctccagagatagcgatgcatatgctgagagagcaagggccacctcctccttttgaaccaaatggcgcaccacatggcaatgctggaatgcttgggccaatgatgggtggcccagcaccgattatagctatgcctccaaatttccgccatgatcctcgccgcctgagaagttataacgacctcgatgctcctgatgaggaagtcactgtccttgactacagaagcttgtagggtccagcacctccagatacccgtagtcaagtttcccgttcccccattggtgaattgggcttttttctctttatgaaggcaaaagatggaaggttatgttcaattaaaccaatttttgggtcacctgtagtctgttagattctgttgtaacttgaatactctgtggatgcactgcggttgctacagttcttgtccaacttttttttgacacagtgctgtaataaataggcgtctgtttggaacctgggtggggtggttgtagtgagagatacgtacttcgccaccttgttgcagtctgcaatgccccttgaacatttgctgcaatccgtgacttcgtcagaagtcagaacgaagacttggtactgggtgttgaacggtttacaaacaataaggtcaaaattcttatcaactcgcaatatctggactcaggtattggcagtgtagcgaaagtgtgtagtacccatgaacgtgcatgatttgtttgttgtaaaaaaaaaaaaaaaaaaaaaaaaaaaaaaaaaaaaaaaaaaaaaaaaaaaaaaaaaaaaataaaaaaaaaaaaaaaaaaaaataaaaaaaattaaaaaaaaaaaaaaaaagggggggggccctttttaaagaatcaaagtttacttcccctttgcttgcgacagaaaataatttttttttggg

SEQ ID NO: 135175 - DNA, 146 bp, Zea mays
  Clone ID: MRT4577_54760C.1
aaattccacccccctcaaataataacacaaatcatatgcatgcgaggtaggtgagtcagcgtccgcaagggaacagggatccgcgtggggttgcatggcttgcagtccgtgggggtaggggtagctagatcccgtcgagatcgcgg

SEQ ID NO: 135176 - DNA, 363 bp, Zea mays
  Clone ID: MRT4577_54761C.1
ctatgaaccaaacacaggggtagattattatttgactttttacccgctaataatttgtgataaacaaacatctctaacaagattatataaattagattatataacctgaattatataatctatataaaataagctggattatataatgatgtgtgcaaccctgggagaagaagatctgggtgatgaacgttgtgaacgtggacgcgcccgacacactttcggtcatcttcgagcgcgggctgctgggcatctaccatgactggtgcgagtccttcagcgcctacccgagatcaaagaggtcagtggccagcaccaccagtctgtctggtttcttcacatctttctagcttgatgacgcacatg

SEQ ID NO: 135177 - DNA, 341 bp, Zea mays
  Clone ID: MRT4577_54763C.1
cgcttcttttttcccatgagccacggccatgctcaacgaacgggcgaccacacagaacgacgatggctcgcgtcgacggtgcaccagagcaacagcttcctcgggcaggccctgggtctcccgcgtcgccggcgtcgatgccggcaggcccatcaccatgcgccgcaccggtaagagcgagacccagagcatgtgagacggccctgaccgccccaagtgccttgccccggtctcggagcaaacgccgatggtagctgagcggaggaactcccacgagaactatgggtgaggacgccgcgggcctgctcggccgacccgtaacacccttcacgagcaacggg

SEQ ID NO: 135178 - DNA, 245 bp, Zea mays
  unsure (1)..(245): unsure at all n locations
  Clone ID: MRT4577_54764C.1
cctgggcacggtgtgcttggtggtcctgcatcagctgcnacgtcggcngggcaaagcgccgctgccgcccggncctcaggcgctgccgatcgtgggcaacatggggatgatggaccagctgacgcaccgcgggctggcggcgctggcggagacgtacgnnnngctgctncacctgcngctggtgcggctgcacgcgttcgggnttcncgatntgacatcganatgttccaggngttcntggtgtt

SEQ ID NO: 135179 - DNA, 838 bp, Zea mays
  Clone ID: MRT4577_54765C.1
cattgggtacctcgaggccggccgggaaaaaagtctcggcggcgccggcgtgctcgtgatctcgaccaaggcgtgcctccgctccggtcacccgtcgctccacgcaaccatggtaagcgagcctcttctcgtctggttatggctcgcaagcggacgtaggtgcaagcacggtagcggtggattcggatctggctgcaagcacggtagcgctggattcgattgtttttttgtttagagatgggttaagagcgtaggtttggctgttgactagggctactgttgttttggctggttgcccgtgctggattgcatctgataaattgcaatttgacatctgtgcttggttacatttgttgactgctactcctactcctgagttgaagattgaagtgatgctgtggcaacatattttctaatctgatcacgatttatgagttttcttgttgaaccttttttatctgccaaaatatttgagatgtgctgttaaattggtgaagcatagatatgattagaatctactattacaaattaagagtgagaaatgctggttatgtgggcctttgccctttggcttgggttgatttgcacacggagctggaaagtatatgttttgttaggataactgttggctatatacatcgagagaatttgatatttgccattataacaaaacacgttctgctaccaccagaccccacatttcatagacacagatggaccccacaattgatagacgcagatggaccccacaattcatagacataggtgtaattataacaaggtggcaacgttttaagtggcaaaatttcaattatttcatatacatagtgatgcaagt

SEQ ID NO: 135180 - DNA, 458 bp, Zea mays
  Clone ID: MRT4577_54766C.1
ttcccggtcgaccactcgtctcgcccactcgttcgcccactcgttcgctgacgcttttgctgacgcgtgggaaaacacttaagcggataaggcatacaaggaccggaacaagctaagcagctgaagaagccagcagaggaagagctcctgtcactagaaggcaccctactggaagaagcctaaagctgataagctggtcctctctggcaagtccagctgtcaaggagtacgtcaaggtcaagaggggcaagaagaagggcaaaaacagcgtgtagacctacaagatctacatcttcaaggtgctgaatcacgtgcacccagacattggcatctactccaaggtcatatctatcatgaactccttaattaacgatatcttcgagaagctcgatgctgaggccgtcaagctcgcgcgctataacaagaagcctaccatcacactccttgagatccatacc

SEQ ID NO: 135181 - DNA, 342 bp, Zea mays
  Clone ID: MRT4577_54767C.1
aattattttagttggttcacatgtttattcttggtctttttttttttttttttgtttaaacccgaaaaacttgaccaactgaaaaccctttgtgctttttaacgttacaataccaacatttggtaagaagggaaccattgtcacatgggggttgggaaaatttgtagactgtaaaataagctaaaaaaaattaatctgcccctgagagatttgaacttttggggggaaaccccctgtttttagaaggcacacgccttaaccactcggccaaagggttgttgttgttacggctcacatgagggtatcccatggggatcttgtgcgtccattccctgggggggg

SEQ ID NO: 135182 - DNA, 669 bp, Zea mays
  Clone ID: MRT4577_54768C.1
ccggccgggagctctgagccgttagcaccaggagatcgagctgcccactgatcgatccatcctgcggcggcaccgtgcgtcctctgatgccctagcgacgcggccaacgccccgagcgaagatgagacggcagagccacgagggaccagcaccggacgtgggagacgccaggcaagcaacccacatggagcggacatcgcgcgccactgacagcgctacctcgcctgctagcgcccgatcgcagagagatcgagctgacggagatcgctgccatgatgacagagtaggacaaagccgacaaccgggccccgaccggtctgatcctcgcaggcaccaagccttggccaaccaaggcgaacctgatgctgtactccgaagcaacaagggcaccgcgggcattgcttgggtgaaaacaggctagtcactcatcgctgacatcaacgtagagccgaggactcccgttcagtgccaccggatgtataaaggggagagcgaagaccagctatgacgggggatgcgatgacatccacttcccctggaatgcatggtgccgatagctctggctccaactccctttagagagggagtaacagcgcactggagaccctactagctaccgtatttgcttgagcggatgttgtacgcgccacagataccaactgttgcgct

SEQ ID NO: 135183 - DNA, 321 bp, Zea mays
  Clone ID: MRT4577_54769C.1
cagcgcgcaagttctggaagtggaagtggaagctttcgtttgttccctttcacccgccttcttgtcaattgctcccaatacccaaggtcccaacaactacaatccccttgacgcatttgcttcatttgcaccgccggcctctgagcttaccatcccttgtagcccagaagaacgcgcaccaaatgcttgcgacattgtcacaatggccgccacgtcgtacctagcttccttctcccgcgcttcgccagcaccagcggcggcgtctgcgtgcctgtgcaatgtccatgcctggccacccgcgctgcggcctcggcctcgccg

SEQ ID NO: 135184 - DNA, 370 bp, Zea mays
  Clone ID: MRT4577_5476C.1
aggcaacggagggccaacaggaaaccccacaggcgggggggccccaccaacgggggcccggaaaaagggcccctgcccccggggttgtcaggggggaagggggggggtgcgaaccctcgagccgggccaacaaagcccccaacaaggggaggggcgccaagggaccaggagaagcacccacgaaaaaaagcaagcggccgtagggcgcgggagcaaaaacatccaaaaagacggcaaggctcaggggagcagcaagagaacccagcgcaggccctcagcaggcaataagtagaacagcaggaagccaaaactaacgtggaagcgagccaaagaggtggcaacacaagtaccgcgcgcaaacagaatggcg

SEQ ID NO: 135185 - DNA, 695 bp, Zea mays
  unsure (1)..(695): unsure at all n locations
  Clone ID: MRT4577_54770C.1
cattgggacctcgagccggccgggaaagaaacgcaaatgccacaacccacctcccgactcgccgccgcagccgcatgacacccaccgtcggctggccatcccctcggttcgccacccccttcggccgctgcctcacagctcgctgcatcgtcagtctcggcctccacaacaaccaccacgccctcctatcccgctttgccgccgccttcaatgccctcgcgtccccgtcccgcaacgccgccgccgccgccgccgccagccggccatcccttgcgctcgccactctcctcgggcgctgctgcaccgtgcgctgcctcgcccagctccacgcccgcatcatccgactcggtctccacaaccaccacgccctcctcgcccgcttcagcacctcctgcgatgccctcgaatgcccctccgtcgccgcctctttcatcgccgcgcttaccgactcccacgcagccccgctccgcctccgcaatgcggtgctcgcgtccctcgcccgccacgccccgctccacgccgcgctcacggagttcaacctcctccgacaggccgcgctcccggactccttttccttcccttgcctcctccgcgcgtgcgcccgcgtatcctgcctccccgctggacgagccctgcacgccgncgctatccgncttggcgtgcacgncgatctcttcatccgcactgcgctcatc

SEQ ID NO: 135186 - DNA, 766 bp, Zea mays
  Clone ID: MRT4577_54771C.1
gccggccggttcgggttaaaaaatcttcggtggtaactcgcgacttggttgctatgcactcgctgtgaccatcttttcgctgggtatcttcagggactacctctacaatgaagctcttgcagaccaacccacacatccagcactcctgtctcctgtaatcaagtactcggcaattccgcttttcctcactggaaatgtcctcgtcgtaacctccatgtgggcccttggtgtcactggtacttatctcggagactacttcggaatcctcatggatgagcctgtcacgaccttccctttcagcgtctccagctctcccatgtaccatggctctaccatgtctttcttggctactgcaatctggtatggcaagccagctggtatcttcctttctgggctggtagcagttgcctattcgattgcatgcaagtgggaggaccccttcacggccatgatttaccgcaagagggacgaggagaggtccaggggaaagaagggccagtagagacctcagctctgtggctcatacgatggaacagagcagtgttaggccagagacatcctacaccgctcagaatatacgcactctgatagccatgcttcggctgaagagtagtggagaaagagttggaacagcacgtcttttcaacaccggcgtccaggtctaccttgaaagggtattcaactgccagctggttgagaaacatatataggagcattgaaagcacatttgatttgccacgaaaaaaataaaaaaaaaaggccccta

SEQ ID NO: 135187 - DNA, 561 bp, Zea mays
  Clone ID: MRT4577_54772C.1
ggccgcttttttttttttttttttgtttttttttttttttgagggggagagggctgtaggggaaacccctacagcgcgattttattgaaactttttgaagtgaaaaaaagaaattacaatgcgggaccaaagaaaacgagaaagaagctatcgagagtttagccaaatcagtagactagctttaagagacgcgttacaaaatgttagtggggatactcaagatctgaatcttgctgcaagcagaatacaattttgacaccaatcttccgaagcttatcaacatcaagtggactctgcacatgaatgcagataatcagacaggggtagggagcgatatttctgtctaaagaaggatgcgacgagcacctgtaagcaggatcctacaatcaagtctgggcgtatgaaattggagttcatcccgagttcatgtctatatgtcaacgctataataacatggggggaaaagaaacacatatcagataagttaatagaccaaacttactaaaagcataacgcaatcacaaaaattatatggcaagcgcaatgtttgagacatgaaaa

SEQ ID NO: 135188 - DNA, 309 bp, Zea mays
  Clone ID: MRT4577_54773C.1
agtactatttcacgactcgctacgcacacagagaggagtgtgaccgatgagatgaccttggtcctcaataagtatggcaggtgggttgaggtctgtaattgcgagtgatagttggcgttggatgtattgtactcggtatgctaccattactcatattgctcgtaggacctggtttggaatgcatgcactgttactagcgctgaatcgtgtttggagtctgcacaggggtttgcaattttctgagacaagagggagtcgtcagctttcaggttcaggatcgattagtgaaaagttaggagtacatgctag

SEQ ID NO: 135189 - DNA, 337 bp, Zea mays
  Clone ID: MRT4577_54774C.1
gctactcatacaaaggcagagaggaatggttctactggttcagctgagcctgtgatagcattacatcatcgacaaaaggaaggggttgatcgttatggatcctgtcaggcttcacaaagacggtgttcatacctcctgtgacagatcatgaagccacaaacatatgatgaacctgggttggggaacggtgcctgcttctagatcaggcatagctgaagtgtacgcaaatggtgctcggatggcacttccacacaatcagggaagaggatctctgcaagcactactagaattgagccttgatggatgccttgctggagatcaaggtaagagcatgagc

SEQ ID NO: 135190 - DNA, 254 bp, Zea mays
  Clone ID: MRT4577_54775C.1
tttttatttccattaatgtattcacagtgttcctgacagcaatagaagcagcctgtcagatgatgattccggacaggattaacgttaccacgttctactgctgctcatgaatctatccttttttgggcctactgacgggcatcttgaggacataccctgaagccaccgaagggggatagagattcattgtatcagtcatggacaccggaggcttgaaagattattggtcaccactagtgggaatggcctgtgcc

SEQ ID NO: 135191 - DNA, 334 bp, Zea mays
  Clone ID: MRT4577_54776C.1
tcgcgctgaccgcatagtccacagtcctcgtctttatagactctgaaatgctcgggggggaagcctaatgtataaatgacgctaacgctgaaaaggatctattgcagtgtccattagttgataaggtgtgtcttgagtcatataccaatggaccatttctttttaggaacaattgatctttaggtggttggctatagaaaccataggtatgtctgtaatgacttgtctaactgatggaccgaactattgtatgcagactactctatattggaatcagaataaagtgtagtaactatatgctcgtagatcttgttaaataaacaaggtccgacga

SEQ ID NO: 135192 - DNA, 257 bp, Zea mays
  Clone ID: MRT4577_54777C.1
atcaaaaccctttttgacccttacacataaaacaataatccccgtgctttcggtattacctcgtttctggaatggcccgtccccgcacacaaaaccaaaagtcttccccttttaacaccatacctcaaccaaacccccccggtcgggtacctccttccaacatttccccccttttaatttaacctgcgggtaaacaccccccgtggatttagagacccttggcgcccccccccctaatgttatttaagcgcaccccc

SEQ ID NO: 135193 - DNA, 313 bp, Zea mays
  Clone ID: MRT4577_54778C.1
ctcccgcgtccaccctttctttcttcatcatacaaatcacaatacaggaagatcttttacatacaaaagatgggtccctccttattctcctttattctttcttcaattacttctacatccaccattttccttcaactctcacaagctactattacttcccttcttccccctttccttcaaccaccatatttttcttcattttttaacccatttctacaacccttcattaaccaacactcaatcacaactccctttttacctttatcaccctttttcctccaacaatcatcagacctattacatttcttacctt

SEQ ID NO: 135194 - DNA, 1131 bp, Zea mays
  Clone ID: MRT4577_54779C.1
attccagggccgaccgacccgtccacccacgaatccggtggatttcttcgacctcgtgatcgacgagctcaacaagcccgaccctataatgaacgagaacatcgcgttggacctgttgttcctgctcctcttcgcgagccacgagacgacgtcgatgggactgaccgcgatactcaagttcctcacggacaacccaaaggccctgcaagaattgaccgaggagcatgaaaaaatcgtggaaacaagggtggatccggactctgatatcacctgggaggagtacaagtctatgagattcacatctcatgttatacatgaatctcttaggctagcaaacatcgctccggtggtgttcagacaggcaaaccaagacgtatacataaaggggtacactatcccagaaggatcaaagatcatgatctgtccatctgcagctcacctgaactcaaaggtttacgaggaccccacggcgttcaatccatggagatggaaggatactcccgaaccagttggtggttcaaaggattttatggcctttgggggtggtttgcggttatgtgttggagctgactttgccaagctgcaaatggctatgttcatccactgcttggttaccaagtacagttggaagcccatcagcaaaggaacgatggtgttttatcccggtctacgatttccggaaggctttcacatccagcttcttgcaaaagcatgaaattttattgctggaaaagatttgcacacggggtactaaaaatatgctttttcgttagtaattatagttgtgtaataaaaaaactaaagagacaattgaatatgagtaggttttaattggtcatatctaatacacataaatatacgaacgtgctactaaacctcataaagaaaagcgaactagagcaagacttcaagatcacgcatcagcctactgtacgtgagatgcccaaagcacgtacgagcggtgaccagcaaatcagaaatgcgaagtacgcgcgtagatgaaaggcttttttttttgaaaaaatggtttatgtagtatggtttcccaattttcaagatgtatgcctttatactgaatgttgtaatgtaatgcatgtaattgtttccacttatatataataagttcagctg

SEQ ID NO: 135195 - DNA, 236 bp, Zea mays
  Clone ID: MRT4577_5477C.1
gtgaggaaactttacttacccactatggcgctgcctccgcgtatctctcggtttgtcttattgctgacatagctgtcgtattcaggttccagtggcgctgccgcctgaccgtcatccgcagcatgatagggaagcgctcccccaccggcgacgaggatgacgcccgacccaagaagatccaaagctgacgaactgagcaactgcgaccgtaaggcatccgtttgtcccataagctc

SEQ ID NO: 135196 - DNA, 412 bp, Zea mays
  Clone ID: MRT4577_54780C.1
agcccccttaaagattgggttttaaaaaattttggatttcctttaaaattttcggggataaaccaaaaaattttcggtttgggctaaaattaaaaaaaaaatttttttttttttaattttaaaaaaaaattttgaaccaggctttccccttttccatttggatggggggcccccttgggggaaaaaaggggggcccttttgcccccttttttttttttttttttgggagggaggctttggaatctttttgggccccttggggattaagccgggttttccgaaaattgtgcccaaatttttgtacggggattccccccccaattttgggaaaaacaaggggttgcttaaaagaaggaaaaatgggaattccaaaacccccttgtttttgaaaaagccccccaaaggggggcct

SEQ ID NO: 135197 - DNA, 308 bp, Zea mays
  Clone ID: MRT4577_54781C.1
acccccaatacgagagcagaaacaagacgatcccgatcaagcgcaggcccggacactccctcgtcgccttgcttcatacttccatccctgtgcacttcgtattctctgttccaacaagcaagatgaaccatgccgataccccgtgcgtgggctatacctcactgagctacatcttctgatgatgctcgccccccacatccaccttggcaccaactgctgctattcccacaggtactgctatggctctaactgctgagacgacacctgctacatcatctgactgtgaccagacatattactgactgcag

SEQ ID NO: 135198 - DNA, 860 bp, Zea mays
  unsure (1)..(860): unsure at all n locations
  Clone ID: MRT4577_54783C.1
ggttcgtcgcctccctcgtccctcgcatcttctccctctttctctctccagcccagtagcctgtagccccctcctctctctctctctctctctctcttcctccccccactcgcacagtgcccaatgccgcacaaaccctagtgcccccactcccaatctcgcgcggcggccatgggaaactgctgccgctcgccggccgccgcggcgcgggaagacgtcaagtcgtcgcacttcccggcctccgccggcgggaagaagaagccccaccagcaggcgcggaacggcggccccggctccggggagaagaagcgtctgtcggtgctcggggaggaggggtgcgacgtgggcgccggcgggatcgaggagaagtacgcgctggaccgggagctggggcgcggcgagttcggggtgacgtacctgtgcatggaccggggcacgcgggagctgctggcctgcaagtccatctccaagcggaagctgcggacccccgtcgacgtggaggacgtgcggcgggaggtggccatcatgcggcacctgcccaggagccccagcatcgtgtccctgcgggaggcgtgcgaggacgacggcgccgtgcacctcgtcatggagctctgcgagggcggggagctcttcgaccgcatcgtcgccaggggccactacacggagcgcgcggcggccgcggtccgcgcaccatcggtcgaggtcgtccagctctgccaccgccacggcgtcatgcaccgggacctcaagcccgagaacttcctcttcgccaacaagaaaggagactcgncgctcaaggncatcgactntggtctctcatcttcttcaggcccggtgaaaaagtttcgaaaattgtggga

SEQ ID NO: 135199 - DNA, 792 bp, Zea mays
  unsure (1)..(792): unsure at all n locations
  Clone ID: MRT4577_54784C.1
atgccaattccttaccaatatccctcaattttatttttttngcancccaaanacacgcggcaggatgaacttattcatgcgggtatgcactcttccaataagaattcattttctgaaagattctggctttcgtgctttggcggatctccaacatcctttcgacgacctatgttgtgttgaagggatatctaaatgatccgatcaattgcgtaaagcccgcagtagcaacggaaccggggaaagtatacataagtatacagaaaagacagttcttttcttttctattatattaggattttctattctattagattagttagtgatcttggcgcagtgagtcctttcttccgtgattaactgttggcaccagtcctacattttgtctctgcggaccgagaagaaaggaggctccgcgggaagaggattgtaccatagaagcacggaggtaaacctctttccaatatataaattctggcaatgtagttgggctttcatgttgatccgaatgaatcatctttttcgcggagtgaaatctttgcctgctaggcaagatgataggatagcaagttacaaattctgtttcggtaggacatgtatttctattactatgaaattcaataaaaaaatagttaatcggggggttaccattctctcttttttttttttcgtatctcgccatgttggccttagaaaagggaatttgtcgatttttgggcgtctaaaggggcgtggaaacacataagaactcttggatggaaatgaaaaaagatgtaacttcagttcctttgaaat

SEQ ID NO: 135200 - DNA, 388 bp, Zea mays
  Clone ID: MRT4577_54785C.1
tttcatgcgtgcgcccacgccgccggcaaggacaagaaaggattctaaatctcgtcgctcattgaacccaaatagaaagattcacactaaacaacacacactaggattcaaataatcaaatacacgtcaaggttggctggtaataaccttatttatgacaaggtttcaaattgggaaagtataccccttggataaagaagaataaggggctgtgaaaactcgcaagaaaagttccaaccaaccgtctactcaaattctaacgggttttaaaagcacaacaacgcatacatatgcctgttttcatagcacaaagagttctagatgagactcgttggtgacactaccaggaaaccgttatgattctgaatctcatgccttatcgagcatc

SEQ ID NO: 135201 - DNA, 387 bp, Zea mays
  Clone ID: MRT4577_54786C.1
actaactgagacatcgacaatgcaggggggggctttgcaaccgctgagtgtgaacacaagccggacggcatggccaatggcctcactatcgacatcaatctccgctcgacgtactcttgcttctgcctgtcgctactttaccgtggtggagaacattagcaactaccatggcaaccgcaccacacttttatacggcgactgcatctactcttatctctttatctgataagcggccattaaccaggcggccatgaaccccaacaacaccgtcttttatgccaagcgtcttatcagcatgaggtccagtgatgcgtctgcccagagtgatatcaagctgtggcccttcaaggccataccagagccctgggagaagccaatgattgttgt

SEQ ID NO: 135202 - DNA, 447 bp, Zea mays
  Clone ID: MRT4577_54787C.1
ctgctgagcaggtagatgttgctattctctaggttggcctaggagggaagttcgagtcagctatttttgttgttagtgctggcgaatgtcctgttatctcaaaatacaaagcttcttttctcacctaatctcctaaaatggaaatgtttgactcattttttaattcttctttgaagctgattgtggacttatcctttctatgtagatatattctttcctttttatcattttctttttcttatttttttttaactaatttaataattttttttttcattttttatcatctattttttattatttattttatttgtgctttcatttttcttaatcttaaatatttaaatttctttatattttatcttattatatttctcttattttctattttattttatattctttatatattctctatttatttatcattaatttttttttattttt

SEQ ID NO: 135203 - DNA, 429 bp, Zea mays
  Clone ID: MRT4577_54788C.1
ccggccgggagtcgcagcgtacgtccgctcgctcgcttccgcctttcgtttgccccgccgcgccgcctctatcctttcctcgactcccccacacccaccacctgttcttcgacccagcaccggagagtccccacccacccaatggcgaccgccaccgcggccgtagcgccgccgtccacctccacctcctcggtcctcctgcgccgccgcctcccttccccggcgcccgcgtccgccgccttcccccggcttcccgaacggccagactctcgccaggctgaggaaggctgcctgcatcatcagcgcaccagggagcggagcggacgccaaggaagcgtcgctgagggcacttgacaacggctcaagttcctaggaaggtgtagcgcctggaaattgcagcacgctgttataggagcactgtgaggagac

SEQ ID NO: 135204 - DNA, 546 bp, Zea mays
  Clone ID: MRT4577_54789C.1
atgtcgccgacttgcctaggacggagcccgtccgaccaaccatgccaggcaccacgccgtcccctcagcgtcgtcctctccacggtgtggtcggccgtctcgaagccctcgcgtcccctagcccatgcacccgcctcggatgccccaactgcccaaacgccatgcccccgcctcaccgtcccctctgcgcagccgcgcagtcgaggtgcgaccgaccgtggaggagccctcgcgacccctagcccaaccagccatgggcccccatcgtttccccttccgcgcagccagggccccaaatttggcaatgcaccatcccccccaacaatcgtgctcgatctggcaattgcgtgcatgatatccgccgctgatttggaaagcgcacgatctacaacgatgatttggaaagtgccttgccaaacgattccaacacaaatcccccaaatcgtgcacccatcatcattaaaaaggtcgcaattgccagactgctacaaccatcctacagctacggaaatccttcgctcacactcctccagactggaatactaa

SEQ ID NO: 135205 - DNA, 301 bp, Zea mays
  Clone ID: MRT4577_5478C.1
cggggacggctgcgtcctcgggtaatgcggtttgcgggccgttgcggcctcggggcaacggcggcggaggctgtggacgacggcggtggtctcggggcgcggaccacagcggcctcggcctgcgacgaggtggcctgagctcagcggcgccggccaagggcagggagcgaggcgacctgcgcaaggggcggcctctggcgtgggcggcgctggcccaaggcggtgaggtcccggcggcgctggccaagggcgaggaggcggcggcgctggccaggggcgaggaagcggcgtcgtccaccgc

SEQ ID NO: 135206 - DNA, 357 bp, Zea mays
  unsure (1)..(357): unsure at all n locations
  Clone ID: MRT4577_54790C.1
ccggaannnccgggccgacccgcgcgggcgccaccaactccgagaccgccgncnncgccagcgcccgcatcgacgggaaggagacgcccgaggggcagcgggncaaggccgacctccccagcgncaagaaggaggaggncaagggcgagggcgaggacggcaacgngcnggncatcagcggccagcgcagcagggagaaggaggacaaggacgacaagnggcaccgcgncgagcgcagcagcggccagnncgncaggcgctnccgccngccagagaacgccaaggnggaacagggcaaggcgggccccgagaacggcgngcncacgggcaccgngcccaaggcggaggagaagaagc

SEQ ID NO: 135207 - DNA, 290 bp, Zea mays
  unsure (1)..(290): unsure at all n locations
  Clone ID: MRT4577_54791C.1
tnattttttttttttcnnaatggtccaatattgggggttttttgtgtacaggcgaataggaatccaggggggttcacttttcctctctttttatttcagccacatccaatacagtccaccaatcttgccaggtcaaacactggctttaatggtccttttgacaggactcatcaatataggcctgcgcattggggtgaccatttggcctacacaaagaaaatggcatgctcaacccttggtgagaccggttccaaccactacgatcatgggtgtggttctcaccagacaca

SEQ ID NO: 135208 - DNA, 296 bp, Zea mays
  unsure (1)..(296): unsure at all n locations
  Clone ID: MRT4577_54792C.1
gctcaccagtccatcaacccatcatcaaaccctgccgccagcgtcattttttcatatttatcaacttttattccgaactgcaagccccgtactacaacaccctaggtccgatttatttctagtgcctgggcctgctggttcttccgtcacgatgaacggcactggcgatcccgagaggaaccaggccatcgaagattacaagaagacgcttttggatctccgagaatgggaggcaaagctcaagtcgctccgtatggagattanagactctcagaaagagtacgatattacagaag

SEQ ID NO: 135209 - DNA, 393 bp, Zea mays
  Clone ID: MRT4577_54793C.1
gctcctatacgcagcggacggcccgccctttttttttttttttttttttttttttttttgggtttttttttttttttttttttttttttttttttttttttttttttttttggaaaccgggggggggcctaaaatgttttttccaaaaaacgttaatccaaactttgcttcctggggggggaacaggcgaacagaaagggggggcccccgggcccccgctgtttaacatcccggggggggggtaaaaaccccccccccctggttttaaagaaccattggcagggtttgtttttcactaataacaggggccccataaccagcccccacgggtttggaaatttggtcacccagggaaaggtgggcagggccctttttaattccaaatgatttcgg

SEQ ID NO: 135210 - DNA, 197 bp, Zea mays
  Clone ID: MRT4577_54794C.1
cttccgactggttttggatcgcgggcggccgtttttgtggttccaagtttacgtccgctggcttgcgaggtgttagttttctattggggcggcctaaattaaattaactggccgcggttttacaccgtcttgcctgggaaaaccttggctttccccaacttaattgcttggcagacattccccttttcgccggttgg

SEQ ID NO: 135211 - DNA, 1663 bp, Zea mays
  Clone ID: MRT4577_54795C.1
cgggacgcaagcacgcacggcattcgcatgtcgcatcccacaaaaggattgggtgacccctggccggggagcctgccgcacaacgatccgggcgcgcccgtccctggcccagaagaccccaacgccgggcgcgcgtccccatccgtccgtcgcgccggggtatctatcgcggcgtcgtggggtcggagctccgggtccggggccgggaaggcgggaagcagggcgcaagcgcaatggtggagatagggagccgggtgcgggggttcctgcggaaccggtggctggtgttcgtggcggcgatgtggatgcagtcctgcgccggggtcggctacctattcggcagcctctcgccggtgatcaaggcctctctcgggtacaaccagcgccaggtggccgggctcggcgtcgccaaggacctgggcgacagcgtcggcttcctcgccggcacgctctgctccgtgctcccgctctgggccgcgctcctcgtcggcgccgcgcagaacctcgtcggatacggatgggtctggctcgccgtcacgcgccgtgtccccgtgcccccgctctgggcgatgtgcattctaatcttcatcggtaacaatggtgagacatacttcaacactgctgcacttgtctcatgtgttcagaacttccccaagagccgtggaccaattgttggtatcctcaaaggattcgctggattaagtggagcaattctaacacagatttatgcaattgtgcactctcctgatgatgctgcactgattttcatggttgcagttggcccaacaatggttgttatagcttcaatgttcattgtaagacctgttggaggccacagacaagtgcgaccttctgatggcacaagtttcacatttgtatacagtgtctgcttgctgttagcctcttatcttatgggcgtcatgttattggaagaccttgttgacttaagccagtcagtgactgtcgtgttgaccgtgattctaatcatatttctattagttccaatagtcattccagttctactcagcttcttttcggatgatgatgagactttgtatgcactattgttgccatcacctcggaaagaagaagcaagtgcatcaacatcttccgaggagcaacaggaggttatactcagcgaggtggaggatgaaaagccaaaggacgttgatttacttccagcgtcagagaggcaaaaaaggatagcagaactgcagacaaggttatttcaggcagctgctgatggtgctgtcagggttaagagaaggaaaggtccacggagaggagaggatttcacactgatgcaagcgctcatcaaggcagatttctggcttctgtttctctctcttctgctgggctctggatctggtctcaccgtgattgataatcttgggcaaatgagccagtcgttgggttacgaggaaactcacatctttgtgtcaatgattagcatctggaactttcttggacgcatcggtggagggtacttctcagagatcattgtcaaagactatgcgtacccaagggctatcgcgctaggaatagcccaaatcctgatggcgatcgggcacttcaacttcgccatggcgtggcccgggacatgtacgtcggcacgctgctcgtggggggtaggctacggcgcgcactgggccatcgtgccagc

SEQ ID NO: 135212 - DNA, 682 bp, Zea mays
  Clone ID: MRT4577_54796C.1
ggtaccggcccctttctgcgaggttttttttttctttttttttttttttttttttttttttttttttttttttttttttttttttttttttttttttttgggcccacccataattttttatatataaacagggaaacaaacaggaggcacaaaagccagcccacgggggatgggagggaaactggtgaaacccacaccctccaaatactaaatagttaatcgaccccggaaacccgacagatttaaggaaaaaacctaacccgaagggttcaccataagcaagctttgaaacccaccagggttgcaccgaaggggcacagccgttttattttttacgaatatatacttaaatagcacacgattttaacttggcctttttttcccgggaaaggagccccataaaaggtgggtggaggcttccctaatttttcgaaagcagctccttgttaatttttggggaaaaaaaacccattttttccagctttggagggagaggatcccatttattggccccaaataggtaatcgaaagactgctccaaattggaattgttttgcctgaggatttccttggtgaaaacgacctgcctaaaacccatttctttcaggtccctaaaaaacttttccttattgggaaaatccagttttgaaaggttaggaaccacagcactaaaagggggggg

SEQ ID NO: 135213 - DNA, 430 bp, Zea mays
  Clone ID: MRT4577_54797C.1
gccggccggtccggggaaggaaaactctcccttggccaccgcccattctccgccccgccttatcctcccctcatcccccgtacaaaaccgcgctccctcccgcccgcccgccgctcaagccacctacaccaccacctcgccggccacactcgtctttctcacgagccacagcccacaggcacaggcaggctctcgagctcagtccacccatcgcaggggatggcgtcgtcgttcgccgtggcaacggtcccgtcgctcaacaaggtgaacatgctcggctgtcgccccgggccgcagtctgcttcagaaaccgtgatatatataaccagatgtacgctttcgattcaatttactttggtatgtatccatgacaattggtgaatactgtggaaatatgtttttggaaaaaaaaaaaaaaaaaaggccccta

SEQ ID NO: 135214 - DNA, 619 bp, Zea mays
  Clone ID: MRT4577_54798C.1
cctcgaggccggccgggaagcccctacccaccacctcgccggccacactcgtctttctcacgagccacagcccacaggggatggcgtcgtcgttcgccgtggcaacggtcccgtcgctggcggccccggcggccaagaagcggtccggcggcgtcacgtacgtggagggcatgaacgcctacagcggcctcaaggggctcaacaaggtgaacatgctcggggtgcgcaagaccgccgactactccttcgccaaggtcgtggcgtcgctcagccccgcgggcaggaagcggcgcggcggcgcgttcggcgcccagatgaacgccgccgccgagatcttcaggatcgccgccaccatgaacggcctcgtgctcgtcggcgtcgccgtcgggttcgtgctgctccgggtggaggccgccgtcgaggagtccgagtagggtgcgtgggcctgccactgtcggctgtcgccccgggccgcagtctgcttcagaaaccgtgatatatataaccagatgtacgctttcgattcaatttactttggtatgtatccatgacaattggtgaatactgtggaaatatgtttttggagtcgaggcagaaaaaaaaaaaaaaaaaagcggcc

SEQ ID NO: 135215 - DNA, 790 bp, Zea mays
  Clone ID: MRT4577_54799C.1
cattgggtacctcgaggccggccgggaagccacctacaccaccacctcgccggccacactcgtctttctcacgagccacagcccacaggtaagcgtcgttgcttcacgccccgttccaattctctgcactgcattacagtcacagcgcgtccgtcctgactcctgagtcctgacgctcgcgcgctgctttgcaactcctgattgtcactgccggtcttgcccgtcaccaggcacaggcaggctctcgagctcagtccacccatcgcaggggatggcgtcgtcgttcgccgtggcaacggtcccgtcgctggcggccccggcggccaagaagcggtccggcggcgtcacgtacgtggagggcatgaacgcctacagcggcctcaaggggctcaacaaggtgaacatgctcggggtgcgcaagaccgccgactactccttcgccaaggtcgtggcgtcgctcagccccgcgggcaggaagcggcgcggcggcgcgttcggcgcccagatgaacgacgccgccgagatcttcaggatcgccgccaccatgaacggcctcgtgctcgtcggcgtcgccgtcgggttcgtgctgctccgggtggaggccgccgtcgaggagtccgagtagggtgcgtgggcctgccactgtcggctgtcgcccccgggccgcagtctgcttcagaaaccgtgatatatataaccagatgtacgctttcgaatcaatttactttggtatgtatccatgacaattggtgaatactgtgaaaatgaaattaaaaagcaaaaagctgcc

SEQ ID NO: 135216 - DNA, 315 bp, Zea mays
  Clone ID: MRT4577_5479C.1
tcgcctccccgggcccccggggccaccggggggcggttttggacactctccggggtcacggccaagctccacgaaacccacgactaccatcctcctctactaggcgctccggcagagctaccacggcgtcagccggaacgcgctctacaacggggacaaccccagcgggccgcccaggggcccgaacatgaacgtgagcgccgccaaggacgaccgagatcttggccaacgcgggccgatgctgcacgaaggataagccctgggcaaacatacgccctgctgattaaggaacacataacccgatgacaatctacg

SEQ ID NO: 135217 - DNA, 203 bp, Zea mays
  Clone ID: MRT4577_547C.1
ctttctttaatctctcccaaagataactattgaccgtgggaggcattatatcttgcctcgggagagggcgcagggagctcaatcccttctctctgcttgccaggcagacccatccgccctgccctcccattccatgaatcaatagacttatattattctacgaatatccttcctctaccaaagccttccttgttttaacacca

SEQ ID NO: 135218 - DNA, 199 bp, Zea mays
  Clone ID: MRT4577_54800C.1
aattcttaaacggcgctgtgctttgttctggacccgggccctaaaaaagatgggggggcctgggaaaggtatatgggctttcccccccaaaaaagggaactttaagggcttccaaggccgaattccaattccccgggggcaggattgccaggttcttaaaggggggcaagaacccgaagggcgtggggcccggggcccc

SEQ ID NO: 135219 - DNA, 841 bp, Zea mays
  Clone ID: MRT4577_54801C.1
cattgggtacctcccggccgggaagccacctacaccaccaccccgccggccacactcgtctttctcacgagccacaggtaagcgtcgttgcttcacgccgcgttccaattctctgcactgcatgcattacagtcacagcgcgtccgtcctgactcctgacgctcgcgcgctgctttgcaactcctgattctcactgccggtcttgcccgtcgccaggcacaggcaggctctcgagctcagtccacccatcgcaggggatggcgtcgtcgttcgccgtggcaacggtcccgtcgctggcggccccggcggccaagaagcggtccggcggcgtcacgtacgtggagggcatgaacgcctacagcggcctcaaggggctgaacaaggtgaacatgctcggggtgcgcaagaccgccgactactccttcgccaaggtcgtggcgtcgctcagccccgcgggcaggaagcggcgcggcggcgcgttcggcgcccagatgaacgccgccgccgagatcttcaggatcgccgccaccatgaacggcctcgtgctcgtcggcgtcgccgtcgggttcgtgctgctccgggtggaggccgccgtcgaggagtccgagtagggtgcgtgggcctgccactgtcggctgtcgccccgggccgcagtctgcttcagaaaccgtgatatatatataaccggatgtacgctttcgaatcaatttactttggtatgtatccatgacaattggtgaatactgtggaaatatgtttttggagtcgaggcctgcaattgatcgatctccaggtgatcacatcaaaaaaaaaaaagaaaaaaaaaaaaaaaaaagcggcc

SEQ ID NO: 135220 - DNA, 1173 bp, Zea mays
  Clone ID: MRT4577_54802C.1
ggccgcaaatttttttttttttttttgggtctaagtccacaaaacacacatattattaattccacacaatacataataatgtgtcctagcattacacataatatcaagtttaaggcttccacaaaatctgcatgttcaagcaaaatccgctgacatacttagacgacatttcattgtttgatgtagttcaagcaaaagaaccgtccaagcctatctactaactgccctcacactcctggttacacatagatcgcagttcattgttcaatgtggttcaagcaaaagaaccctccaagcctacctaccaactgccctcacactcctaggaacttttcactgacgaaattgcgagcccagattaacttgtggtcgaatgacaacttgttgaaggctctagcaatgtgagggtgcgccaccagataattgaaatacagagatatgtgggtctgctcaaaacctgaaaggtttatcaaactataaaaagatcatctggcacatcagtgtcccctgtggcaaccttctcagtagcattggataaggtatccccgacacttttgaatgcagcaatcaacccctcctcttcactataacgttttttgtcttcttcctgatcacgctgaggagctcgccggccaggcggccagcagcaggacgctgaggagctcgccggccaggcggccagcagcagggtgaaggaggcggcgctagatttgaggacgagaagggctcgtcccggccggcctctagtttgacgtagttcatgcaaagtaaccgtccaagcctatctactaactgccctcacactcctgggtacacatagatcgcagttcattgttcaatgtggttcaagcaaaagaaccctccaagcctacctaccaactgccctcacactcctaggaacttttcactgacgaaattgcgagcccagattaacttgtggtcgaatgacaacttgttgaaggctctagcaatgtgagggtgcgccaccagataattgaaatacagagatatgtgggtctgctcaaaaccacgctgaggagctcgccggccaggcggccagcagcagggtgaaggaggcggcgctagatctgaggacgagaagggctcgtgaggtgccttgtcccgcggaggacgatattatccgtctaatttggagggacgaaccccggccgg

SEQ ID NO: 135221 - DNA, 219 bp, Zea mays
  Clone ID: MRT4577_54803C.1
agaaatgctctctttgaaccattttcaagcgcagggaagcgttgaaggatggatccatacaaccctgctgacgcatgccattggatgacacaccaacatcgttgcagaaggcggcaaaaacatgccatccgggcaggtgggcgggcatcgaccatcactcgggagcataacctggcgcgcgaaccaccacgcgcttcggacccggagcctggaggcggc

SEQ ID NO: 135222 - DNA, 524 bp, Zea mays
  Clone ID: MRT4577_54804C.1
ccctcgagttttttttttttttttttttttttttttttttttttttttttttttttttttttttttttttttccccgagaaaccaaagttaattttttgacctgggggacagactgccggcggggaacacaaacaaagcaaacccccttttcgacccttgggtgcctacattttaaaacccttgaaacgagacgggcccaccacttttgggaccctcccgcgggcgggggttaaaataaaatgctggcgaggggggggaaaatcccctggaaaggggggtttctgagcaaagcaaacggttaataaacaacaccctaacgacaaggggggtgggacccccaagggggccggggacttgaaaaaaacccaccccgggtcgggagagggggcaacaaccccttgtccgaattgaataaaacgggggggttgaaaaaaataattttaatttcctggactttggggaatcccccgttgggcccctggggcacggaaaaacggccttggatggcccacccaacgggggg

SEQ ID NO: 135223 - DNA, 730 bp, Zea mays
  Clone ID: MRT4577_54805C.1
gaagcacctttctaccaccccggcgggagactcgtctttctcacgaggccaggcacagggaggggtctcgaggtctgtgctgccgtcgcaggggatggcgttgttgttcgccgtggcaacggtgccgtcgttgtgggccccggcggccaagaagcggtccgggggcgtcgcgtacgtggagggaatgaacgcctacagcggcctcaaggggctgaacaaggtgaacatgctcggggtgcgcaagacccccgactactccttcgccaaggtcgtggcgtcgctcagccccccgggcaggaagcggcgcggcggggcgttcggcgcccaaatgaaccccccccccgatatcttcaggatcggcccccccatgaacggcctcgtgctcgtcggcgtccccgtcgggtttgtgctgttccgggtggaggcccccgtcgaggagtccgagtagggtgggtgggcctgccactgtcggctgtcgccccgggccccagtctgcttcagaaaccgtgatatatatataaccaaatgtgcgctttcgaatcaatttactttggtatgtatccatgacaattggtgaatactgtggaaatatgtttttggagtcgaccaaaaaaaaaaaaaaaaaaaaaaaaaaaaaaaaaaaaaaaaaaaaaaaaaaaaacccacgctaccgggatgggtggcggaaccggtggtgtgtgtcaccggcggcagtggctacctcgggagc

SEQ ID NO: 135224 - DNA, 579 bp, Zea mays
  Clone ID: MRT4577_54806C.1
gccggccgggccggggatctagcgcctccttcaccctgctgctggccggcgagctcctcagcgtggaagaagacaaaaaaacgttatagtgaagaggaggggttgattgctgcattcaaaagtgtcggggataccttatccaatgctactgagaaggttgccacaggggacaccagatgatcttttttgatagtttgataaacctttcaggttttgagcagacccacatatctctgtatttcaattatctggtggcgcaccctcacattgctagagccttcaacaagttgccattcgaccacaagttaatctgggctcgcaatttcgtcagtgaaaagtttctaggagtgtgagggcagttggtgggtaggcttggagggttcttttgcttgaaccacattgaacaatgaactgtgatctatgtgtaaccaggagtgtgagggcagttagtagataggcttggacggttcttttgcttgaactacatcaaacaatgaaatgtggtctaagtatgtcaacggattttgcttgaacatgcagattttgtggaaacaaaaaaaaaaaaaaaaaaggccccta

SEQ ID NO: 135225 - DNA, 629 bp, Zea mays
  Clone ID: MRT4577_54807C.1
cccccgtacaaaacgcgctccctcccgcccgcccgccgctcaagccacctacaccaccaccccgccggccacactcgtctttctcacgagccacaggcacaggcaggctctcgagctcagtccacccatcgcaggggatggcgtcgtcgttcgccgtggcaacggtcccgtcgctggcggccccggcggccaagaagcggtccggcggcgtcacgtacgtggagggcatgaacgcctacagcggcctcaaggggctcaacaaggtgaacatgctcggggtgcgcaagaccgccgactactccttcgccaaggtcgtggcgtcgctcagccccgcgggcaggaagcggcgcggcggcgcgttcggcgcccagatgaacgccgccgccgagatcttcaggatcgccgccaccatgaacggcctcgtgctcgtcggcgtcgccgtcgggttcgtgctgctccgggtggaggccgccgtcgaggagtccgagtagggtgcgtgggcctgccactgtcggctgtcgccccgggccgcagtctgcttcagaaaccgtgatatatataaccagatgtacgctttcgattcaatttactttggtatgtatccgaaaaaaaaaaaaaaaaaagcggcc

SEQ ID NO: 135226 - DNA, 750 bp, Zea mays
  unsure (1)..(750): unsure at all n locations
  Clone ID: MRT4577_54808C.1
aatgtgtcctagcattacacataatatcaagtttaaggcttccacaaaatctgcatgttcaagcaaaatccgctgacatacttagacgacatttcattgtttgatgtagttcaagcaaaagaaccgtccaagcctatctactaactgccctcacactcctggttacacatagatcccagttcattgttcaatgtggttcaagcaaaagaaccctccaagcctacctaccaactgccctcacactcctaggaacttttcactgacgaaattgcgagcccagattaacttgtggtcgaatggcaacttgttgaaggctctagcaatgtgagggtgccccaccagataattgaaatacagagatatgtgggtctgctcaaaacctgaaaggtttatcaaactatcnnnnnngatcatctggtgtcccctgtggcaaccttctcagtagcattggataaggtatccccgacacttttgaatgcagcaatcaacccctcctcttcactataacgnnnnnngtcttcttcctgantcttgcttgtagaagatgttgtggcattatcatcacaagctagatatatacacagatatactgtattatagcaatgtgtgtctcttttctaatcagtactccaactccaaattaaaatcagcattcaaactatgtacaccaagttagggtggatatatattcctcatcagcaaactcattgtnnnnnaacactagccagattggtattccttgctagcata

SEQ ID NO: 135227 - DNA, 956 bp, Zea mays
  Clone ID: MRT4577_54809C.1
ccggccgagaaccatccattccgcgccccgccttatcctcccctcatctcccgtacccaaaaaaaaacgcgcgctcaagccatcccatccagttccacggttccacccccgccggccacactcgtctctctcacgagccacagcccacagcaggctagctctctagccagtccagtccacgcagcgcagggatggcgtcgttcgccgtggcaacggccccgtcgctagcggccccggcagccaagaggaggcccgccgccggcgtcacgtacgtggagggcatgaaagcctacagcggcctcaaggggctcaacaaggtgaccatgctcggggtgcgcaagaccgccgactactccttcgccaaggtcgtggcatcgctcagcctcgcgggcaggaagcggcgcggaggagcgttcggcgcccagatgaggtgatctacctgtcggtgcaggacttcttgcagaagagggaaaaggagaagtttgagaaggaggaggccgaaaagcagaaagaggaggcgaggaagaagagggctaagtcgaggcagaagagaagaaattattgatctcaggatgaactacccccaccaatgtgaccatttcttcttcttttccaccatgtttcttgtaatagcaatgattttgtatgtagtgttgcacctttggtatcacattgtggttttccttcactccattgtcggctcttagatgctgtaacactgaactccattgccggctccattgcccggggttgtgctcacgccatcagttttggagtctcttggatgctgtaacactgaactccattgccggctccattgcccggggttgtgccaaaaaaaaaaaaaataaagtcccctagaggtaagacactcactattctcgttttccccaaaatagaacatctcttccaacattgttactgtccagttgtacatattgtcaaaatccatcaga

SEQ ID NO: 135228 - DNA, 806 bp, Zea mays
  unsure (1)..(806): unsure at all n locations
  Clone ID: MRT4577_5480C.1
gggaccctcgaggccggccaaaaccctactaaccgcgtctcctctccagcgcccgccgtcgccgccctcctcttggtcccgccgttcgtcgaggttagcctccacgcctctttctcgaaagatgtcagatccgggttttgattcggtttccgcgatgaggcggtagagcgggtcaggtgctgcggatggggctggctgaggaggactacggtggcgttgcgcgcgcgcgcacctcgttagcttcatagtttatccctgccccttgcgtgctcaagccaggaacggtggcgttggctttgatgcgccttctgctttgacaccattgtattgactgctttgttcagcttgtctgtaattctgaccagcgagtctgtttaagcacaccagacagcaggtgtttggtgcagagaaatcccatactttgtgagtcttcagttggcagcactttgggtacgttctggtgagctgtacatgtggttctgtggtagcttgaaccctgcccaacgctgcttagaataatatcagttaagttctggtaattagatcatgcatcgttcaggattctagttcatgttgatcaaagcaggctaattgcaaactagatgatgataaagggtatgtaatactagtcttattttgatgatatgttggtgacgaactatatctttatcctttgcaatctgttggatgagtagtttacaaccactagagccggcaccatggataatttgctattggtatcntatatattggactgacttatagatacattttgttatggttcttctgagnttcactttaacaga

SEQ ID NO: 135229 - DNA, 797 bp, Zea mays
  Clone ID: MRT4577_54810C.1
agctcgaggcccgctttttttggccgcaaattttttttttttttttttcttttttttttacaaaacacacatattattaattccacacaatacataataatgtgtcctagcattacacataatatcaagtttaaggcttccacaaaatctgcatgttcaagcaaaatccgctgacatacttagacgacatttcattgtttgatgtagttcaagcaaaagaaccgtccaagcctatctactaactgccctcacactcctggttacacatagatcgcagttcattgttcaatgtggttcaagcaaaagaaccctccaagcctacctaccaactgccctcacactcctaggaacttttcactgacgaaattgcgagcccagattaacttgtggtcgaatgacaacttgttgaaggctctagcaatgtgagggtgcgccaccagataattgaaatacagagatatgtgggtctgctcaaaacctgaaaggtttatcaaactataaaaagatcatctggcacatcagtgtcccctgtggcaaccttctcagtagcattggataaggtatccccgacacttttgaatgcagcaatcaacccctcctcttcactataacgttttttgtcttcttccacgctgaggagctcgccggccaggcggccagcagcagggtgaaggaggcggcgctagatctgaggacgagaagggctccggacgcgtgggcggacgcgtgggtgccttgtcccgcggaggacgatattatccgtctaatttggagggacgaatcccaacccggccggc

SEQ ID NO: 135230 - DNA, 757 bp, Zea mays
  Clone ID: MRT4577_54811C.1
ccttatcctcccctcatcccccgtacaaaaccgcgctccctcccgcccgcccgccgctggccgggcctacaccaccacctcgccggccacactcgtctttctcacgagccacagcccacaggcacaggcaggctctcgagctcagtccacccatcgcaggggatggcgtcgtcgttcgccgtggcaacggtcccgtcgctggcggccccggcggccaagaagcggtccggcggcgtcacgtacgtggagggcatgaacgcctacagcggcctcaaggggctcaacaaggtgaacatgctcggggtgcgcaagaccgccgactactccttcgccaaggtcgtggcgtcgctcagccccgcgggcaggaagcggcgcggcggcgcgttcggcgcccagatgaacgacgccgccgagatcttcaggatcgccgccaccatgaacggcctcgtgctcgtcggcgtcgccgtcgggttcgtgctgctccgggtggaggccgccgtcgaggagtccgagtagggtgcgtgggcctgccactgtcggctgtcgccccgggccgcagtctgcttcagaaaccgtgatatatatataaccagatgtacgctttcgaatcaatttactttggtatgtatccatgacaattggtgaatactgtggaaatatgtttttggagtcgaggcctgcaattgatcgatctccaggtgatcacatcaaaaaaaaaaaaaaaaaacccgcggccaagtttttttttggggggtac

SEQ ID NO: 135231 - DNA, 132 bp, Zea mays
  unsure (1)..(132): unsure at all n locations
  Clone ID: MRT4577_54812C.1
tttcggtgccgccgccctcctgacttgttcgcgagatccggccgcatattgacaaatgccggcgagctccngcacccagtgctcgcgagattcggccgcgcatgggcttgcagtctggcaccgatgccgacg

SEQ ID NO: 135232 - DNA, 866 bp, Zea mays
  Clone ID: MRT4577_54813C.1
aaacacagcttgtgtggaccatccctggccaatcagcgtccctccttccgaccaccaaatggacctccatgtcaccaccaaggattgaaggataaactctcccttggccaccgcccattctccgccccgccttatccttccctcatcccccgtacaaaaacgcgctccctcccgcccgcccgccgctcaagccacctacaccaccaccccgccggccacactcgtctttctcacgagccacaggcacaggcaggctctcgagctcagtccacccatcgcaggggatggcgtcgtcgttcgccgtggcaacggtcccgtcgctggcggccccggcggccaagaagcggtccggcggcgtcacgtacgtggagggcatgaacgcctacagcggcctcaaggggctcaacaaggtgaacatgctcggggtgcgcaagaccgccgactactccttcgccaaggtcgtggcgtcgctcagccccgcgggcaggaagcggcgcggcggcgcgttcggcgcccagatgaacgccgccgccgagatcttcaggatcgccgccaccatgaacggcctcgtgctcgtcggcgtcgccgtcgggttcgtgctgctccgggtggaggccgccgtcgaggagtccgagtagggtgcgtgggcctgccactgtcggctgtcgccccgggccgcagtctgcttcagaaaccgtgatatatatataaccagatgtacgctttcgaatcaatttactttggtatgtatccatgacaattggtgaatactgtggaaatatgtttttggagtcgaggcctgcaaaaaaaaaaaaaaaaatccggccaatggccgagtgagaggaatgcaaccaaagtttttttta

SEQ ID NO: 135233 - DNA, 689 bp, Zea mays
  unsure (1)..(689): unsure at all n locations
  Clone ID: MRT4577_54814C.1
gaccctcgaggcttgnccgggaaaaaaaaaaaaaaaaaaaaaaaaaaaaaaaaaaaaaaaaaaaaaaaaaaaaaaccaaaaaaaaaaaaaaaaggtcgggtctcctttttttccctcagctcgcctccttttttgttcgccgggcgcgcttttccttggggctcggacggcgtccggccggagctccctggttcgcccaggcccggggtctcccagttcctcccggccatggccaccacgccggggatcttcctgcgcacgcgccgttgccttgccgagctgctccctttgcctagctggggcccagctccttgcgccctgctccttgtttttacgcgtgggtcgttcctccttgcgtgcgccttgctccgactaggtccggccatggagctcgcccgaaacacccgccgttttgcctacttgggctcgcccctgcgtaaaccccgtcgtcgggccggttccttactaaccctttcctgcattgctcacccaaatccgtggagcactggatgtccgaccgttacattcctggtcgcactctgggtttcctctctttgcctcgatgtccaagcgcctaacctttcctttaatgtccttcgtcgcctgggaacgctcgcatcctttgggcccgttttgccttcgcgcgacaccagttgcgagctgagtttgatttcgccgggttactcgga

SEQ ID NO: 135234 - DNA, 748 bp, Zea mays
  Clone ID: MRT4577_54815C.1
gtgattatgtcataatacaccattctctttagtaatttctttagtatcagttttctgttctttccaacaaaattgtgcatctattgctaacttctatcatgattagagcatctccaggagttttgttaaacaacttcctatttttagtttttagtaaaaaggggaaaaggtgctctccaacagttttgtagatgagctccttaaaaattaaaaagttgtcaaatatcctctccaacttgtaagtttgtgcagtcaagaggaactatgtatcggctccccatccagcgtttttctcaggagaccggaataaattggatgcatgagtaaatttagaaaataaaggcttccagatgaggaagcggtaagagacaaagaaactattaaaaatgattggttggttagaaatagtttgaggtttcccaatgcaaaattgtttagtaggctattatagcagactagagaacaataaactttaaggttgctattttttttttgttaacttgctagatctgtaagtttagcaagtaaagtattaactatatcaaactcttggagatgctctcacaacttgaaagttggaacaaacatttttgtcaattttaaccacatccgtcagtttcttgtgaactagtcccactgctgtgaaatataggttacataggatccatttggccaagccttcaagatctgatattttccagaatttagtcatatgactcatatcatatgccagtaccatagctaaatc

SEQ ID NO: 135235 - DNA, 284 bp, Zea mays
  Clone ID: MRT4577_54816C.1
caagaccgatctccacttccagtcctcctccgtcacctcgctgcatgaggccgacgtggcctacctagtaggactgtactattacaccaacctttgatccatcaacaccatgcgcgttatcatgatgccaaaggacattcatcttgttcgaccaattacaggagagcgcgtctatgctaccgaacagataggacaacatctgtggaacagactctttttcgaagccagtactagtggaagattcaggccaaatgagtggtatactattcatgaacgattaaaac

SEQ ID NO: 135236 - DNA, 413 bp, Zea mays
  Clone ID: MRT4577_54817C.1
ccgaaccaaaatcaaggtccgcgacctcactattactagtccgccctcttccttttttttttttttaaccaaacaattaaccggatatgttatactattgtggcgacactaactatatacaacatacattattcattaactatcgtttctttcttattaactttttctaaaaaaaattcacacatttttactttaaatactttaaaatggaacattttaaacgcattttaagcttaactaaaataacacctatattttccctatttattcactattcatctgaataaaattatcccatcgcttattaaatcatgtaccccatctataccttactaactaacaaatctttattcaaaaatcaagatttatatataccacactcttgccatatcaacacttatcaaatgttcacc

SEQ ID NO: 135237 - DNA, 392 bp, Zea mays
  Clone ID: MRT4577_54818C.1
tcgaccacgcgttcggcgagcgcccccttttatttttttattgtattttttttttatggggaggaaaaaaaaaaaatataaaaaaaaaaaaaaaaaaaaaaaaaaataaaaaaaaaaaataaaaaaaaaaaaaaaaaaaaaaataaaaaaaaaaaaaaaaaaaaaaagggtgggagattaaaaaaaacaaagttaattttctggttcaattaaataaatagatcctttatattagacactaaattaaatgcttacttgcgtttacaaaaaacttggtatgataaaaaccttctgcaaatcaatcttatatgtttttaaaaaacatttgaattccgaaacttggagagttctaaatggcttttttaatttgatttctaaaactacattaatgg

SEQ ID NO: 135238 - DNA, 1177 bp, Zea mays
  Clone ID: MRT4577_54819C.1
cctctctcccgcaaaccccgcgaccgcagtcccagccgcccctaatctcctctctccacaccccaaatcgccgcccacagatctcgccgacaccagcgcagtgacccagcccccgccttccccatcgtgatagcagcgtctcctagacgccccctccccttggcctcggcgcgatgcctgcacagctcctgtctgccgcgtgaggaggcgccacgacacgtgcttgtgtggctgtcgacgcgaaggcacccgtgatctgcgtcgactctgaggaggagcgccgcctccttgagatccaggaggtcgaggtggctacggcgcgtactcgtacggtggtcgagagtgccgagctcgcgacggtcagaggtccgcgctcgtaccccagagattgctccctcccaaaactgctaggctggatgagcgggctgataaaggagatggtgcgtgtcgagtatcgcgccgccgggagtcaacgacgcggctcggtggcgggggtacaagcttccagaggcagtcacagcacaccgtccgctgcaacaaccatgaattgaacgcccctatcgggtacaagaaacacctcgaggagtttgagccatttaataaaaatgaagttttatttgaagactattgcaactctatgttaaaggatgggacttggactggccacatggagttgcaagctgctatgcactcacagttttaaatattgagttagattcatacaataattagtcaaatcgatcgtggagctgtccgtgtttggcattccaagtagtgacaagaaggggagggaacatgcctcgaatgctgctggtttaggggttcttcgcgcgcatgtttggccaggcctcgaaagtcaatggccatggctcactgtcgccatcacttcttcctcatggttgctactgctccagactgactctacaagttctagccctattctacaactacataacgagagagaaatggaaaccttgcacaagaggtacaaatgcttgcacaaaaacttgagaatgagctgtagaaactaacaggaagggagaagcaatgcgccagaattaattttggagtggtgatgctgatgtattccttttgcggttatttctgaataaataatgctagattttttattggaattactttcgtatgattattttttaaataatgtatcattttt

SEQ ID NO: 135239 - DNA, 425 bp, Zea mays
  Clone ID: MRT4577_5481C.1
ggtgacactatagaagagctatgacgtcgcatgcacgcgtacgtaagctcggaattcggctcgaggctctgcattatgtctgacgcgcacaaaacaaacgcgtcccttgtagagactctggattgttatagttacaggtatactgtaaagcttcatttttttttggcgctctgaatcgtttgcagtgagggggaaagacggacatggtttacggagggttcaagacagtttttttttatcgaacaaaaaaaaaaaaaaaagggcggccgccgactagtgagctcgtcgacccgggaattaattccggaccggtacctgcaggcgtaccagctttccctatagtgagtcgtattagagcttggcgtaatcatggtcatagctgtttcctgtgtgaaattggtatccgctcacaattccacacaaca

SEQ ID NO: 135240 - DNA, 852 bp, Zea mays
  Clone ID: MRT4577_54820C.1
aataaaaaatcatgtgtccatataagaaccaattaggattcaatgtctcataaccatctcacaactaaacggccaagtcaatgttccacaaataattacggatccagcccatatattcctcctcttgccgttcctcctgctactgtcctcaccatatgtgcaagctcaacagagaatcaccttgggctcctccttaacaacccaagggcctaacagcttttggctctccccttctggtgactttgcctttggcttccggtccatcgagggcaacacctcctcctacttgctcgctgtctggttcaacaagatcagcgacaagacagtggcatggtatgccaagaccgctgatccagatccagcgctggtacaagtttcatccggttcatgcctcgagctcacgtccagtggagcgctctcgctccaggaccctactggcaaagaggtatggaatccagaagttgtgagtgcaacctatgcttccatgctcgatactggaaacttcgtactggctgctgcagatggctcttccaagtgggggaccttcgataacccagcagacactattctgctcactcaggtgctcacccctgaaaccaagctccacagccggaccattgccacagactactccaatggacggttccaccttaacctgcaaaataatggtgttttcttctatgctactgctgtgcaatccgatcctcaacatgaatataattggtccatgcctgggaacgccacaaatttggtattcaatgcgactggcatgatatacatcaccttggataatggaacacaagtaaaaatcacatctgggaagacaagctccatagcggactactaccatcg

SEQ ID NO: 135241 - DNA, 528 bp, Zea mays
  Clone ID: MRT4577_54821C.1
gtaagctcggaattcggctcgagcgcacctgtgccaaagggattctttacccgaactggaactaaagctactggagtggcttgacagactattcgacttaagcgccaaactgaaggcaacagaaaagcgcacaggtcacgtaaacagagattctttggtgctaatttggtgactaagcccgatcaggatagaggggtgtcagaaagccttccatgcaatcgagggggatatttctatggatctactgcagaaaatgacagctatcaacagtcatagctgagttcatctcgtcatgggcattgtactggctgcttgcatgattggtctgtgccacaatgttgttcacatggtgagatgttactcttcatctcttagaaaataattaacggcagccgctaaggtacgataagttcagacatcactgcctgatgtagcgctagaatataggcactggccagagtgagcaaatgaactcactgcatcggttttggtcatactatctgagagataatttttatgaagatatat

SEQ ID NO: 135242 - DNA, 414 bp, Zea mays
  Clone ID: MRT4577_54822C.1
attcggctcgaggacaaacagcactctaaattatcaggactgcatgctgttgctcatgaccaatacgcttaagctgatcagctgcttgcaacggtcgtagatctcgttacattatgcggaggcatacacaccggggatggcatgattagcgcccatgccggcaacatggacgacatacacaagactgagcgcttaggcttgtactccgatagacgatggtacccgactactcattgccagccccaggatgtgtgatcgatgacgagagctacactgatctactgatcaagccatccatgcacaggctgcagggggagcctcaactaaagatacaccgactactactcccagactactactacaacaacaggtaccactgacacctcaccgttgggcgacgacagaaaccacact

SEQ ID NO: 135243 - DNA, 1171 bp, Zea mays
  Clone ID: MRT4577_54823C.1
gctttgaattcggcacgcgctggccacttcagacattgttgggcggattggtacaagccggagatggccatcgccatcacggagttccgggcgctttgcggctaagcagggtttccctgaaattttgcgaggagttcctctgcagccaaacgtaagggactacacacctccatttaatgagtttgaggtggattggtgctggaggatgatggggttagtgaagtaaaatccactttgcaatcagcttttgctaagctaatgacagcaagtaaagacatggtttctgaagcagttgcaaaactgatcagtcgcctgaatactgagagcaagattaggaccttaacagacaaagaacagctgcttttgtccttggagagacaatatcaagacgatgttggtgttctagcagcacttttttttaactatgtcaagctcagtcctggcgaagcgctttatattggtgcaaatgaaccgcatgcatacctctcgggggaatgcattgaatgtatggccacctcagacaacgttgtacgcgctggtttgacacctaaatacagagacgtgcaaactctctgctcaatgctaacatacaaacaggctttcccagaaattttgcgcggagttcctgtgcagccacacgtaaggcgctacacccctccatttaacgagttcgaggtcgatcgctgcttggtgcctccaggtggatcgctggttgtcgtacccccggtaccaggtccatccatctttctcgtaatgaccggggcaggcgagattcagttggattctgcgtcagatggagaaaaggcagacgaaggtgatgttttcttcgtcccagcatacaccgaggttaagatatctgcgtgtggccccgagtctctgcagctgtacagggccggagtaaacagcaggttcttcagctaacaggcgcgtcgatctttggggctgtcgtaaagtgaccacactgtagttgtagggaagttgtcatatacgagaaatgaaacggttagttagcaaaaaggtctcatatatactaatgtatagggctgtaggctgatgaaagaataatctggttcctttcgtatcttcttgataattcactgtaaagatgccttgcagtgcaatccacgttggatgcgctagaaagaaataaagatgatgattagtatcaacc

SEQ ID NO: 135244 - DNA, 347 bp, Zea mays
  Clone ID: MRT4577_54824C.1
cacgctccacaaagaaatttattacaagttcataacagagcagtgcacaaaaattctacaagtgttttaatatataaggcatgttcatcctacttcagaatttcttgagaagcttcgttgaaggagctattgacagttgaagccaacagcctaatttgttatcctaataacatcaagagcgcccttgagggctgaatcggcctgagggtcgtacggttccggagaaggagaaagctcggttttaagtctttcacgtaatgggggttcttcagatctcctttcttcttataaaggagcacgagagtgttctacattctgtttaaaagcctgatttggcatttttcggg

SEQ ID NO: 135245 - DNA, 357 bp, Zea mays
  Clone ID: MRT4577_54825C.1
atgaccgcatcaaaaaagggaccggaaaaggggatatttcgaaaaaggatccttctcagcgaaggaaacgggccccgagccctcctactgatcaggggttcgaaggctggccccttggaagggttcgacagccgccccagagcacgcagagtcagggatgaccctgggtatgtccgttacatggccgaggctcgagctacgctcctgaggtaccctaggacatttctgagaccagcgggaacgatttgtaatggaatcccaccggagggaggcgccgagccctcggaccctatcgaatgggtttgggtccagcaaatcacccgcaggtacttttggagcgcgcctctgggccactag

SEQ ID NO: 135246 - DNA, 158 bp, Zea mays
  Clone ID: MRT4577_54826C.1
aagggggtataccaaacaggggttggggggagttttttaaatttttttacttaggagtggacatgggaacgaacccggaacagaaattatttagatggtacatagctcgaaaagctaagcgttgtggtctgcgtctgaacttttatccatcgatggag

SEQ ID NO: 135247 - DNA, 536 bp, Zea mays
  Clone ID: MRT4577_54827C.1
tatggaaggcatctagatttagagtagagtccctgtgagatactgtcccaagaagatgattatagaaatcccacactgcctcttttttatcttcctgctcgaacaataatctgtccccgacctgcaacttcccaatgaagttttttctcttcttatacctggcctgtcgatgaaaatatgaggtattggctgttggaatgtgaaccctaaccctaacaggggttccttgacgacccatttggggcactgaagagctataaaatagtagatatgggctgccgaaagcactgatttaaccaaggttgtcctcccagctgggttaattaacgcagctttccaaccaggtagcttatcagccaccttatcaatgagctccagaaaaacacttctaggcagcttcttaatagaaaggggtaaacccaaatacttgcatggaaaatccacaacgttgcaggggaacagatcttgtgcagcaccgaggtcttgctcaacacaacgaatggggtcaggctgcatttgtttatgtttgtgacaag

SEQ ID NO: 135248 - DNA, 355 bp, Zea mays
  Clone ID: MRT4577_54828C.1
cgccaaccataggctccaggcgcccttctcgctgcgcatcacaaacgagtccggcaggaagctggtggccaaccgggtcatcccagccaactgggcgcccaacaacttttaccgctccatcattcagtattagctctgctactacatgcgctctgattcggtgtcattggcttcattggaactgtactgtatgtaattgcatcaatcttcggtgcataggatgttgacagagttaggagatgaggaagcaagtttggatgtgctttcccgctcactgtcaatacatgaaccagtctgatcaaggttataaattactcctatatatatataaagcaacttctcagtggcattcagt

SEQ ID NO: 135249 - DNA, 1992 bp, Zea mays
  Clone ID: MRT4577_54829C.1
atggccaaagataagaaaagcgtagactccgcactcgctggtttctacgaagccatggagaggactaacgttgagaaaatcactgatgaaatgctagttgggttatctagggactctagcgacagcgagagctttgatgttgaaagtgagaacgaagatgtcgaagatcggccgtggagaccaagccatattgttttcgggaaatcaactgtcaaacaagggcaaattgaagcgatgaagggcaaatatttccatgatatatccataatgagggctggaggagaaagcactattcctcttcctgaagtagatgaagtgatgatggtcgaagtgttaaagacatttgagatataccttcatcagcttactcttgaagccttaattaaagttagagtttttatttgggctatgagaagccaagggctggagcgagatgccaagtgcttctgcattcatgaattatcctaccagacgaaggaaattgggaaggagcagtatcataacaacttcggatggtacaattttgtgcaccattctgatgtgagggatttggttcaagagcatattgcttacaaggtgtggccgcttgtaaatgaccgggagatgctgaaggagactgctgctggctccagcgaaggttgtttagagaggatagctgcagtgcttaatacagaaagaatggagattgtagaacatgccgaagccatccctttggcttcgaagacaattcctattgtggcagtcgaagctagtgtcgatccagtagtggagacggaagcaaagagctcaaaggcagaagagcatccgaaactgctgagtcccccaaccatgacggggttgtcgaagttaacaaccgctacaacaatgactcctaggaaaaggagaatgactagtgttttagatgctattttgaaatccacgaagatgctaactcctgttactactgaagcttccgatgacaaaattgaaaatgtaagagaagtagtcgctgcaagcgcttctcctattcacgttgaagcgggacctttgggagctaagccagtagagctggcgaaggaaagtccttcggaaaagccaacatcacctattcccgatgcaccttctcaggaagagccaattgccgaagtgcaacattatgctaaggacctgaaataccctcgagggtccttggtatacagaggaaacaacgaagatgacttcctttactgtctaccagacatcaaggagataaatatctgtcgggagatgatggacaacatgggatatacgaagcttgagcttgggctatctgcaatgacgaaagaccaacttgcagacagccttgcttataacagcttgaaggtgggattacacagatccgtagtgcaaggattggagaagaagctcgatgaagtaactaaaaatttcaatgtggaacaaacaaagcgtgagatatctgatatggaacgattaagagttcagaaaaatgttgaggagcttcgtcaggctaaagaggagtgctacaaggttgctatggaatgttgtaataatttgaaaattagttttgctaaggttggtgcattctcttcagggcagaactttatctgtggtgttcctgacggggttatcaggtggattagcggcgaagccgaagcttttgatgagatacttagtgatagaggagacttctacgccttcgccgtctggtcgaaaggtggccgagagatagccgacgaagctatcagaaaaaatgagaaggagtctcacactgccttggaagaggcaaggaaagctaaagaagttgtagagcatgaaagacttatagcttcggaacttgcctctggtgaactcaaacaaccaccttcgacaacagctcaagcaaccaccttcgtcatgtcgccgaagaaggcaatagctccaggggctgcccttcaccactggacaccaaccaagaagggcttcctctgggagaagtccaaaaccagaaaagaaaggccatcagcccaagactag

SEQ ID NO: 135250 - DNA, 435 bp, Zea mays
  Clone ID: MRT4577_5482C.1
aattcacgggccgacgcacgcgtccaggaaccttatgtgttcttctggcagacatcgcctctattggtggacatctctaaattagcttaaggcgatacatgttatgtccactagagaaacaacatcctgagacactcacctttatttggaaatgtctcgcgattatcgctgatgtggacatgtgttacatgcttctctactcttaaaagtcttttgctccgaatctcgagacgagattattttaaggggggagggctgtaacaccccaggtgtttatattctgctcgacaacgagtatggaattaagcacgttatatcagtgaatgaaacagatactaaaatttaatcattttcgctatcgcgatttttatatcgtatctgttccatctgtcgtgagtgtgacatcatttttattcgtccgggctcttcctgaat

SEQ ID NO: 135251 - DNA, 273 bp, Zea mays
  Clone ID: MRT4577_54830C.1
ctcactcatgagcacactcgtataccaactctagtatatcaacacttgcaatgacatccagggcgcttttaaaagcctttagaaaccctaaatataatacatgggcattatcaactctaataatagtgaatccccactctaagaaaaaagtgattccccccgtcattgtactacaactcaagccgagacgccacaaggacagagtctacatgtacttctaatataatgcttgattgattgttaatcccaaaggtgagattaaaagttcctcta

SEQ ID NO: 135252 - DNA, 211 bp, Zea mays
  Clone ID: MRT4577_54831C.1
gcaactcataagtagccattaacgcgctcatgggcgccttgtctggtcgaacccttatctcgtctgcatgagagccgagcgcatcggcgctgcccatgagagctttgctttgggtggtgtgcaaggactcaactactatggggagctctctatacaggctcgcaaggcgccacacgaagccgaggtacacgaccctgcggaagacctcgtg

SEQ ID NO: 135253 - DNA, 591 bp, Zea mays
  Clone ID: MRT4577_54832C.1
cattgggtacctcgaggccggccgggacttctgttgccctccgctatgctgctctcattgccatcgctagaacatcgactgcacaccttccttgatgctaattgaagtcaggatattacccctgactgtcgctggttcagagagatgctcgtcttcgtcgaggcgagtgctacaaatccttcgctcgtcttagatatcgatctcaccttcgacggacataacctcgacatatcggaccacacaattacactactgctcacctcttacattggcacaatgagaacattgctgaacatgctagatgactatggcatctgcgacgacgctcggactaggcggattgctctgctccaacagtatgaagtcgactccaagaacctccgcgctgattccctccccctgggattctccgtttccagagattacagctgacccatctcaggacatcacgaatactttgacttctgagactgaagctgaacgagtcgttccccaatacacgggtgggaactgtatgaatactatctgtgaaggatctctgcttctgcgataatcacccccttcatgacgcaatgatgatgatcccactct

SEQ ID NO: 135254 - DNA, 349 bp, Zea mays
  unsure (1)..(349): unsure at all n locations
  Clone ID: MRT4577_54833C.1
tatgttttgaattttatgacaatnccanncatgagngcgggtcattcatagtgtccttatactcgaatnccgattttctgtttcaattccacaaacttctttattgttcttaagctaatgaagtaacttatgaagttttacagcttaatatataacttaaagccattaattttctgagcatttataaacagggatgatgatgaaggcaataagatagggaacatgaaaccattggggaggcaatacacttttcttcgttacaaaatccggaaggtcaatttcgtgatatttgttgttgatagtgttgctgtcctctattcaattgatgacagctctaaatgatacactt

SEQ ID NO: 135255 - DNA, 346 bp, Zea mays
  Clone ID: MRT4577_54834C.1
tcgttttatttcagaaacacaccaatttaattacattagcaacaacctaacaacaatggctgccaagatattatccctgcttgcgcttcttgcgctatttgcgagcgcaacaaatgcgttcattattccacaatgctcacttgctccaagtttcattattacacagctcctctcaccagttacttcaatgggcttctaacacccagctgaacaagcctataggctacaacaagcaattgcggcgagcgttttactatcaacaatttctcaagttgtaacaacaaatccttgggcacattttacaataacataaccaatcgtaacgggacacagcaatctaccaatt

SEQ ID NO: 135256 - DNA, 306 bp, Zea mays
  Clone ID: MRT4577_54835C.1
attcatccgccccacacggctgtacaggttgttacagctaagcatacgggccgtagcacactagctagcacgagtgaaatagaagctcgctgtggaaagcaccgattgcatcgccgaaagaggccaatcctagctgcttcttgaccacgtcccgcagcagccggagggtctccagctggaacccaccgatgacggccgttgttgcttgcccaggcgcctggacgaagcctgaggaggccgtgatggtgttcacctccacaatgcttgatgccgacgagcaccttcgaacctcagaccgaactgcag

SEQ ID NO: 135257 - DNA, 205 bp, Zea mays
  Clone ID: MRT4577_54836C.1
ccccgcacgaaaaccctattttctttttacccggcggcggctacaacctattccacggggaaggaccataaggccaccggctagaggaggacgcggtgggaggggcggcaggttccaaagcggcgccgaaggcggacacgggcgaaccgaaccccccgccaaccgcaccagcgcccacgacgagaacccggagcgagacacacac

SEQ ID NO: 135258 - DNA, 377 bp, Zea mays
  Clone ID: MRT4577_54837C.1
gaagtccagttattcattacttataacgattctgctgtgccagcaaccgtttaaaccaacaaataacacggggactcgatagttcattaaaccaacacagtaggactgacacgaacgagaaacagtttaaatgaacgacagggcaccacccaccggacgaccaggataaaccagcaggtcaaacgccagagcagttactgtccaccacggagacggagcaccatgtgaaggggggactccttctgaaaggtgtagtctgcaagggtgcgggcgtcctccagctgcttgccagcaaagatcaggcgcttctggtcccggggaatgccctccttggcctggatcttggtccttgacgttgacgatggtgtcggagcttt

SEQ ID NO: 135259 - DNA, 340 bp, Zea mays
  Clone ID: MRT4577_54838C.1
gcggtaatggcggcggcggccgcggctcacgtgctgatgttcccggaccgtgatgacggccacctaaacaggcttctccacttctacacggagctcctccgcgcgggcgtacacgacactgtgctgcagaccgacgacaatctccgccgcctgggcactggagacgacgaggctccggttggcttggcgcgcctccgatgcctatccatgcccgcggctacccagacaggacccgcgcaccgccgacgggctcgaacaactgatggagtgactgatcaccaaggtcggggcctccaaacgggcactgttcacgtaggtgaccccgggaggcagacgcttc

SEQ ID NO: 135260 - DNA, 432 bp, Zea mays
  unsure (1)..(432): unsure at all n locations
  Clone ID: MRT4577_54839C.1
aagtcgagcggctccgctttgagagtttcgattttcagaacaccatcatnatagncgggggtctgtgctattgcctgactatgtcagatgccaatgcctgtgcaatgaaaatgccctgactgtgagaagcgctgcaaggcttgtactgctctggctccagcctgaccactatgatgtacgtcgctgacatgtaaacatacacgtactaactgacgcagccagatatgcaccagcttgaattgtgacactactacgccctgtgtgggcacactagcgccatgtactatactctctagtaacagcgctgccagtagcatatgaagatgattgacgtgcagtccttnacgcagcatcatgtagatgattatgcaggttgagcgtgcacgctgccgacagcagtaaactgtacgatccatatatgatgcagcatca

SEQ ID NO: 135261 - DNA, 357 bp, Zea mays
  Clone ID: MRT4577_5483C.1
gatcctatcaggggtgaaagttatttgatagctcacgctctaaaccgtgggaagggaacacaatctttgcttctgaccaaaggctcctaattttcattgagcaggtgggcaaaaaggaagcctgtactacttaaaagatgcgtcttaaggggggttcacacggggtcgttttatttaggtcatgtaattcaggtttcaatgaatgtacaccgacgagaaaaccatcctcatcatgctggggtgcttggtctttgacgccctcagtaagtcctgaaggcttcggaaatgatcctagtagatttagaacacctgagggctggcattgatgtttttgcaatatcatgatgggggttgtgc

SEQ ID NO: 135262 - DNA, 397 bp, Zea mays
  unsure (1)..(397): unsure at all n locations
  Clone ID: MRT4577_54840C.1
ttgcacacgncagaaacagccgaggccgggcaggggacggagacggaaccaccagaagcgccacgccgggacgacagagaggaagaccccaaacagcgcacaacaacggtaaagatcggaagagaagcgaacgccgacgaggcaacaggacaggaaggaaaaggagcgagaacgctactccagcaacacaagcacccaagaggaagagacacagacggggcctgagaaacacgctgaagaggggagtgtgacagagcaaggcaacagcaaagaaagccgaacaaggcgagagggaggacgagcacacaggagagcaaactgggaacgaggacaagaacgcaaagaggaagaaggagaggggaattgctctcgcaacgcgtgacaccgggaaagacac

SEQ ID NO: 135263 - DNA, 384 bp, Zea mays
  Clone ID: MRT4577_54841C.1
gtacgtaagctcggaattcggctcgaggccctgctggcctcggatgtgcatgagctgcaacaagctagagctgtggccggggagctgactgaagcacatctggtcacgctagaggcaccttgcggacgagccaacctctgagctgcataggaaggagcggtcactgcatgtggagaacagggctttacagagggaacttccagcgaggcagatggcggtctgatcgccctagaagcctcaacagcaggtgcagagagaccagcagacacaggtacaggtccagacaagctactgatctgactactacatgatgaggcaggatcaacatggactgtcacctgcacaaaacatatgcatctccgcggtgagcataggagagagagg

SEQ ID NO: 135264 - DNA, 818 bp, Zea mays
  Clone ID: MRT4577_54842C.1
agcagtggtaacaacgcagagtactttttttttttttttttttttttttttttttcgctttttttttttttttttttttttttttttttttttttttttttttttttttttttttttttttttttgggccggggccaactaaacgaccccaattggccaagggggggcctttttttacccggggggggggcaggaaaaaagggtcgtcccctaaactttcacccaaacccaaagaaattccccggccttttgggggaaccccccccagggttcaaactaaaagggcaaaagtggcccccaagggccccaaaaaaaaaaggttttgggagccgttggtttcgccccaccgggaaaaaattggggaaaaccccaagggggcccccccttggtttgggggcccccgggggggccgcccccccgggaaaccacccccccaccggttaatggtggaaaccccgcccccccggcgggtgtcccccggggggagggggggaatcctgcaagatcccccacacccggggggggccggcttgcgcccccccttttggggggcccacctggcgcccctgggggggggggggtcctcatctcggggggcggggggtttttacacgcggggggggggggaaaaaccccggcgcggtccccccactcaaaccgcgctggcggggcgaccccccccctttccccggtggggggcagtgcgcggagggggcccgcccccgccgcggcttccctcccccgcgcccccccccctaaggggggttgggccccccccccccgggggcggcctttacggggggggggggggtgggggc

SEQ ID NO: 135265 - DNA, 180 bp, Zea mays
  Clone ID: MRT4577_54843C.1
gcgcactgcacagatatatatatctatgtacacactacactttggaactacgaggagtcagcgagcctctgcctcgcgaggctgggcaggaggtgcagaagactcagcctggctgggggcagccagactggcagggcctggaggctagggcccctcctggttctcagaggtcccttagcc

SEQ ID NO: 135266 - DNA, 894 bp, Zea mays
  Clone ID: MRT4577_54844C.1
cgtggcggcctttcggtcattccacttccacggcggacgcgagaaaggaatcacacggcacgccgtctcgtgtgcttcctagttcggtcattccacttccaccaatctgtctcccaatctttcttgctgctccaattcgctctctttactcggccagcggaaggggagaggagggcgagatgacggtggagaaggtggacgcggggctttccgacttcgacgcccacttcgatcgcctcttcgcttccccggacgccgcctccgacggcaaggtgaagctgctgctcttcctggccgaccgcaagcctggctcctccctctcctggtgccccgactgcaacgtggcggagccggtgatctacgagcggctggaggcactggagggcaaggacgcggtgctcctgcgcgcctacgtcggggacaagcccacttggcgcgacccggcgcacccgtggagggtggaccccaggttcgggctcaagggcgtgccaacgctgatccgctgggaggatggcgccgccgccgcccgcctcggggacgacgaggcgcacctcaaggacaaggttgacgccctcctctgcgctggcggcaactgagtactgacagatctggtttcccgttcgggttccatctgcgtagagtggccataataacatgtactgtaattcagttcatctacatgccggaccagaagctggggaatcgtgtgaagcttaataattcagtttatctacatgccgaaccagaagctgggaaattgtgtggaactaataattcagttcatatatgaccaaaaaaaaagaaactgcgagattgttaagctagtaaaacaaaaagaaaaaacagaacaataaaatggcgtacattcccagaggccgaatcctaggttcaatt

SEQ ID NO: 135267 - DNA, 319 bp, Zea mays
  Clone ID: MRT4577_54845C.1
ttctttcgtgcgtggacactggggcggactcgtgggcggacgcgcgggctcgctcggctacggctcctcgggcaacggcctggacgccggcggcaacgtgtgctacgtcttcaacatgtacttccaggcgcagaaccaggtggagggcagctggtacttacagggactggccgtgcccacggggcagaacccgtccacggacgcctgcaacttgaccatacagatcactgcggttgcagcggggggacgacgcgccgccgctatgacagctgtcgtcctgacggttgttattactgccgtggatgttacggcatgactg

SEQ ID NO: 135268 - DNA, 341 bp, Zea mays
  Clone ID: MRT4577_54846C.1
acacgattgaggatggcaacaacaatggcatcgtggtgctcgtcacaagccagaatgagggcgccgtcaccggggggcgcgccttcatccaggccgtcggcgaccagattcgcgacgcgaccgtgtcggagaaccgcccattcctcgcgacggacgagaagtacaacgaggcgatcttgaacacgggaaaccggctggcggcggcgatcgacgggctggccggatactggtggcccgtccttcaaggagaacaatcggcgagtctacattcgagagcacagaagagaccgaggagaagcgcgggcagttcaagctcgtcgtcggcgggctgctcgtcatca

SEQ ID NO: 135269 - DNA, 278 bp, Zea mays
  Clone ID: MRT4577_54847C.1
acaaaccacccaaaatccacccccataaacctgctgtccttgggtgttccggatctgatccatcagctgataagaggatgatctccgtgtccgccatttcgacgtcgtcgttgatccccaactctccgctcttcatcccggctgcgtaccggcatgaggaggaattctctccatattggcactatctcgtcaacaccaccgcctggttcctgtaccactggttcctccagcaccagcaccacgatgccgccttctcctccgccgactccgagctcgac

SEQ ID NO: 135270 - DNA, 344 bp, Zea mays
  Clone ID: MRT4577_54848C.1
gggaaaaataaaaaaccacacttttgttataaaaaggactatgggccgatgtttaaaattacagggctgtcactgaaatgcaaacaaaaacttttcctcagtttttggcccctgccttaggggataactggttctgaaaaaagctccaacggggccggaaaaagcccggttggtgggggaaccggccccggtaggtttgatacataaacaactccaggaggtggtagaacaagccggggtggaaaactggctgtcttgggggcttcgggatgtgaatttatttctggaataaatggcaacaacacggatttcgacccctgggcggacccatgggcagacccctg

SEQ ID NO: 135271 - DNA, 325 bp, Zea mays
  Clone ID: MRT4577_54849C.1
agcagctgtgcaagcctataggctacttcaagcgattgcgtagagcgtattacaacggcgaattgcccaattgcaacatcaagcagtggcacatctaacaatacaaaccatcgcatcgcaacagcaacaacagtgcctaccagcactgatccaaatgtgcaatggtgcccttgttgactaattgcagcgtgtgctgattggatacaactgacttgctagagcaaacgtagtttcaaaccagcaacaacaacaactgcaacagtttcggacagcgcttagtcaactagccatggtgaaccctgccgtctacctacaacagcaacaa

SEQ ID NO: 135272 - DNA, 337 bp, Zea mays
  Clone ID: MRT4577_5484C.1
gtaccgcccctgtattcccggttcttcccacgcgtcctgcgccgcggctggaacccgaaggaggacgagggggttttgaacctgttggtggacatgccgggcctggggaaggagcactgtaatggtgtgggctgagcagaacatcctggtgctcaagggctagggccagaaggaggacatccaggacgaggcctcccctgcttctagatacagatgtcgtatcgagcttgctccagaggtttacaggattgacaagatcaatgctgaaattaataacggcatgctcactgcggtccggccgaatgtgaaagagcagctacttaaggacgtgtttaca

SEQ ID NO: 135273 - DNA, 591 bp, Zea mays
  Clone ID: MRT4577_54850C.1
cggccctcaggcccggcccaaagtacacctatagtcttaccccctgtatgtcgagtttcttaatacaattaaggtttaaattttaaatatattgccgttgcgtaacaacaccaaggtaccatagatacctgagagagtgaaaggatagagcgaggggcgtaggctggaggtatgctgatcctgggtactatctagctatcggcacacaggagatcgatagaggtttacgccacaaatgtgtcgcaaatgtgtaataccctacatcctctttgtgtatggcagattgacaaaagcaaaggtgaagaacattacatgctcagatataccctgagctagatgaccgactagctctctcttaccttttggttttggtgggagttatcgactaacaagtccctcgttcacctctgtttgtcttgcacagatactagcaggtttcgaccaacctcctctacgttgctctaccccttttatatctcaagggaggagagagtgatacatgtctgctagtgctagtgatccctgcccagtagaggctctactactatcttgtcacaattatggagtggtacatggtgcacaccttgccat

SEQ ID NO: 135274 - DNA, 344 bp, Zea mays
  unsure (1)..(344): unsure at all n locations
  Clone ID: MRT4577_54851C.1
gaagcaacaacgtgaacagccataattattctcaaaaacccgggagcaatgcaggggaattaacgactcttacaacatcaggtgtggaaaaccacacaatccttaataacagacacacataacacgatagcaggagcaactcacgggggatcacgggataagggcagcccactggcctgatgctgcgtaattagcaaacttctttagtactggaaaccctgggggtcatccttgccctgatggaactgaacgccaacctcctcgtagtccttctcgagcgccgccaggtcctcacgggcctgagagaactgaccttcctccataccctgancgacgtaccaatg

SEQ ID NO: 135275 - DNA, 378 bp, Zea mays
  Clone ID: MRT4577_54852C.1
catgcctgatgttcctcgtcatcacggtcgtgtggagccggagcgtggcgctggcggcgctcttcacggcggggttcgggtccgtggagctgacgtacctgtcggcgtgcctcgccaaggtgccgcacggcgggtggctgccgctgctgctgtcgctgggcacgctgctggccatgtcgacgtggcactacggcacgaagaggaagcgggagcacgaggcgcagagcaaggtgcgcctggaccggttcctgggcctgagcgccggcatgggcctggtgcgcgtcccgggggtgggcttcgtctacgccggcagcgccgccgctggaggcggcgtcccccccgtgttcgcgcacttcgtcaccaacttccccggcgttc

SEQ ID NO: 135276 - DNA, 449 bp, Zea mays
  Clone ID: MRT4577_54853C.1
gccggccgggtcgggagacattagtgatatgttgaaaaagaaaaaactatcgtctagcatatttagatacctctgccttttcgctgtcttcttttggattacaacaagaggcttattgtcgattatatatcgtataccaaatacttggttggccatgccttcgatatatgctgtgaaacccatcgaaatatattgctacttgaaccgtgaacgtgggggtttgttttgacgaaaaccatctgcagaaatgccagatcaccctcggttattggatgctcggatacaagacgccagtctgctagcactgccaacagaagcgagtaaggaaggcgccaactgtagctaacaatcttctgaattttggtaactttctaaaaataacatattgattttcaaagttacgcgcccaaatagcaagacagaaatcgaaatctaaaaaagggccccta

SEQ ID NO: 135277 - DNA, 372 bp, Zea mays
  Clone ID: MRT4577_54854C.1
gcgtacggtgctacctctgacgatgaggacgccgtgtaccgacccttcatgatgccggttggcaccatgtccggctccttgtatacagctacgatgaatccacctcagtgggaatctcactgataccttggtgcaacccactgctttgagcaaccacctctgcccgactcaacactgccactggcatatccatacagcggcacgatacatttccaagatggagcgcgctctccaggcctcatcaagggcacatattgaattcggatcatccctgcctctgaccagagtggattttgaatctgcagatggctctatcacctatacaaatgtacgagctgacattctgcattcattgcgatgccaaccgaaacc

SEQ ID NO: 135278 - DNA, 361 bp, Zea mays
  unsure (1)..(361): unsure at all n locations
  Clone ID: MRT4577_54855C.1
cgggggggggcacgcgtccacgccgtgcctgcgcccttccttctgctcgagtgcggccccaactcctgggggtanaagggggggggggcgggctggtctttccagcgcccagtcagangttcctctgggcttggcttgggaggcgggggcacgcgggtggtcctctggggggcggcccaggtccggtccgaggtctctggtcggcccatggggggcgggcgaggtcctcctctggcggggggagtccctggcgggctcggccccatggggggtctctctccacgctggtctctctctctggtacagcattcctcacgggctggtccgaccagggtcggccaggggggggcctcggcggacc

SEQ ID NO: 135279 - DNA, 428 bp, Zea mays
  unsure (1)..(428): unsure at all n locations
  Clone ID: MRT4577_54856C.1
atgacaaagagaaggcgatgcattgactaacaatggtaaacagataatataggtacaagcaggcacatgtgggtggttagacaagtgtgaccacaaataatacacaccatgagcacgctagcagtagccacctcgatcaaagcacgaccaacaatgggagctgcatatagcggcctatatntaccaacacgaagcacaacaatatcaacatatacggatgatgagtgcgtaaacctgacatgaattatgagagcaataccatgatatggcatccattatgttgctgatatggcacggagacctacagtattcagtgcattgttgtatgatgcacgagccattgtgtagaggaacttcatcactcgtgatcatcttcattgcgctgaatacattggtaatcattctcgtccttgatcctaagcttggac

SEQ ID NO: 135280 - DNA, 330 bp, Zea mays
  Clone ID: MRT4577_54857C.1
ggaaaaaaattttttatgggccaaaacatttttgtaaaaagttttaccaaaattttggacattttttgggggccttggtccccaatggggggcccgggtttggttaaatttacaagcccgttactgggtttttacccgctttaacccccccaatgttccccaaaaaaatggaaaaagggaaaaattgggaagggatcacaggttttaaaaaaaaaactggttgggggcccttattttttttgaaactggccaaaaaccatggcctaaaccggaaagacaagggaccgggaaaaattggccaaaaaacaaggggataaaataaagggaagg

SEQ ID NO: 135281 - DNA, 262 bp, Zea mays
  Clone ID: MRT4577_54858C.1
gtcaccactcccaatccagtaccgagtcctacgagcaggcgcacgcaattatcttgtgacccatcggtcgacgtggctcgcccgcattctgccgtagcggtcgccgtggtggccgctgtgctgctgctggcagcggcggcgaccaccttggaggccgccatcacctgcgggcaggtgagcttcgtcattgcgccctgccttttctacgcccgtggcacggggtccgtcccctccgcgtcctgctgtagcggcttcaggaacc

SEQ ID NO: 135282 - DNA, 130 bp, Zea mays
  Clone ID: MRT4577_54859C.1
gtgcatacttgaactgtcagctaacactgagtatttcaccttgtcatccaatgtattctggtacttggtaaaatcttacaccatcctgtaaataactgggttgttgtaataatatatgcttttgctacgc

SEQ ID NO: 135283 - DNA, 847 bp, Zea mays
  Clone ID: MRT4577_5485C.1
cctcgaggccggcggggacctcgagagtggccggggctacgaaaggaaagaaaaaaaggaaaggaaaggacaaaggagcggcggcgaggtctatggcgtcgacggctgggtacctggcgcggcgggcggcgcagaaggagcgggtgcgcctgctctaccgcagggcgctcaaggacacgctcaactgggccgtccaccgccacctcttctaccaggacgcgtcggatctccgggacaagttcgaggccaaccgacacgtggataacctggacgtggtcgataggctcatcgacgatgcggaggctcagtacaggaacttccagcaccccgatccctacattgttccatgggcaccaggcggcactaaattcacaagaaacccccctccacctcaagggatcgagatcatctacaattatggcaaggaggaccagtaaacaagagtcctgcaagcggggggcagaacttccacagttccaaatcacttcctgtttaatcgagttgttgtacgagaaataagaatggaaattactggactccatccatgcttctcatttgcttgttctgaaaaaaaaaaaaaaaaaaccttatcctttctgaccagtgaaatgtttcgcatcaaatcatgtcgaatggcagcattgtttggatagaccattgcatatggattaaattgactttatagtgaatctttcagagttattgcagaagtttatagatttatacctgctagggtattcaaccacacttttcgttttggtcgaaaccttcaagtgcctagagtttagtttactggcgtgcaatcctcatattgcgcaggtcctagtaacagggtcaaataataatt

SEQ ID NO: 135284 - DNA, 1084 bp, Zea mays
  unsure (1)..(1084): unsure at all n locations
  Clone ID: MRT4577_54860C.1
aaatacagcgttcagccctttcccctccccattctccacaccggcacaccccacctctgccgccgccgcgcgctcagatgccaatcctccgtcagatttttcgtctcctccggcgacctggcgtcgccatctctcatgacccactgcgccgcctctcctctacctcgcgacctctcctctctttcatggcctctgccccgccttactggtcgccacaaccgcttgcacggcgaagtttccctctcatgatggttccagatctacctgtccgtcgtgtttcccgatttccacctggatctcggagcatgactagtgggacaaccttgcaagatatgaatactatagccggcaaacatgatgcatcttcgaatattgtggacatctctggttgtgatgaaaacggaaggagtgcaaccaatagaaggagcgcattggtagcaagcgatgccgaagaagatgatgatgtacttgacctgggaattcttccaaaaagcacacaccgtgatggttctttatacaggaacactcatttgtggaaaagggattataatgttgatgaccctagtgagactcggctaccagatcccacagattgcgacatccgcaatggagaatgcattcggcatctacctaatcgcgtgttacaaattttctcattaaagttggctgaacttactgtggatcttggcccagtagagttgtatggatacatagcagtgcgagattatctggatacattgcgcaattatgttgttaatataagcagggatgatcccatcattgtgaagcagggttctctcatcgacatggctggccctaagcgagggatagatttgatttccactattctagtggaatatgacatgcggatcaaggtaggtgaggaagaaagggatgattaccagctgattgatggtgtaacagacatagacgacctgngcccatggaattgtgcattgaaaaatcgcatccaaggcgactgtggtgcggntgacttaaccatagcacgtgtcgatgacgcagtcatggcgaatatttgaagtgtttgtgttagaagtgcagagcagctttgatctatggctgc

SEQ ID NO: 135285 - DNA, 1393 bp, Zea mays
  unsure (1)..(1393): unsure at all n locations
  Clone ID: MRT4577_54861C.1
gnaaggnagcccgtctacgcgngnatgatgggcggctacgagaacggcgagtcgacgggggccgcggcgcttgctgacggtggtgtgattctgggcgtggatggcggcaccaccaacaccgtttgcgtctgcctgccggctgcaatgacgccgccggagtctccggccaccgtacccgtgcttgcacgcaccgtcgccggctgctcaaaccgcaattccgtcggagaaaatgctgccttggaaactctcgagcaggtcatgacacaggctctagcattggccaacacagatcgttcagctgtccgagcagtttgtttagccgtatcaggagtgaaccatccttcagatcagctgaggatgctggaatggatccgggatctgttcccagacaatgcaaaaatttatgtagaaaatgatgcagtggcggccctggctagtggtacaatgggaaagctgcatggttgtgtgttaattgcgggcactggatgcattgcttatggagttacagaagatggaaaagtagcaagagcagctggtgctgggcctgttttgggcgactggggtagtggatatggcattgctgcacaggccctgacagcagttataaaagcatacgatggtcgtgggccacaaactagacttacaagagatatccttgagaagcttgatctttcttcaccagatgaaatcatagggtggacatatgcggatccatcttgggctcgtattgcagcacttgtaccagttgtggtatcttctgctgaagatggtgatgaagtagctaacaaaatcttgcatgattcagtccaagagttggctgacactgttatagcggttgttcagcgtcttagattgtgtggcgaagatggaaaggacatgtttccacttgttttggttggaggggtccttgaaggaaataaaaagtgggatatcagtggtgaggtcataaaatgtatttccaaggtcttcccgggcactgatcctatttggcctgaggtggaaccagcaatcggtgctgccttgctagcctggagccatcaccacaaagggttgaaattggagaatggtagttgattcccagcatttaagggtgtcaattgtacattgaggagttggcgagccaaaggggtattggtcccaatgatacattcatcagcatgaaggcttttcgttcccagcaaaaagaataaatcgtggatgggtgcaaacatgcggtgtggatagaacatatttctgatgtaagtaggtagtaagaattgttcaaatattcctctgattctaactctcggtgattgttgtatgtgttctgtttgtgtttggaggtagtaacatgtatctgtctaccatggataattgatcgtcaaatgttcagatctttttttcatacacttgt

SEQ ID NO: 135286 - DNA, 235 bp, Zea mays
  Clone ID: MRT4577_54862C.1
ggccggggcggggagtccaccaatgccgttcctgatacttggaattcttctcccgagcaggcgttcatccctctttctctcgtggcgaccaagacgaccgacgacaggcgacaggctccgtcgcgtccttcgccggggaagagtatccaccaggcgacgcagtgctggtctggtgcggtttcattgcgtaagtgattgcgtgagattatcccgcggccaagatgatgcgactacc

SEQ ID NO: 135287 - DNA, 442 bp, Zea mays
  Clone ID: MRT4577_54863C.1
ggggacgggaacctacccccccaacaaaaattggggaaaatcccccatgggtcaaaacgggagccagggcaaacccccaaaaacttgacaaaacaagccgaggccgcccccgcccccccaaaggggaaccccaatttttctaacccctgtaaaaaaaaagcttggtgaccccatttatttgggaaccacaaacccgcaaaatttggaggaacccaagggaaaacaccgtctttaacccccaaaacatttttaatttttttaaccccccccaaggtggtcccaaaaccctttaaaacccttttatggaaaccccaaaaaggggcccccccttaaagtcccggaggcctcccagggagcccaacagggggcacaagccccacccccggacttggcaaaacaaaatcgaaagccgtctaaaggtcaaaacaaaaagagcaagggc

SEQ ID NO: 135288 - DNA, 370 bp, Zea mays
  Clone ID: MRT4577_54864C.1
ataacaaaagaacaagatgtagtaataatatataacacacacgcacatatgtgcgcgcgctccaaatccgatcgcatataggacgaggagtatgtgccccaccggaccgctgtctagtagcacagctggcccacgatacacgtgagtggcccgacgaagcacgtgacctgaccgacgaagcggacgggctatgccaccaggaactcgaacctgacgtacttgcgctcgttcaggcccccggactcggagaagaaggcgccgttcatcatgacgtcggcctgctacttccacacccactccttggaggccttgcacggcgtgtactccctgttggccaactccttggcgttggggtcgcacggggcgatga

SEQ ID NO: 135289 - DNA, 299 bp, Zea mays
  unsure (1)..(299): unsure at all n locations
  Clone ID: MRT4577_54865C.1
gttacacacagcaagcaaacatacaggacaaagatggcgcacttgtgccgttagagtgatatggcttataagatcatacaaagcgtttaatatgacacactctaatacaactttcgcatatgtacgcactatgtacggccactgcactacacaagcactgcataacattaccgcctgcaccaacttgactgatgattggatcagggaagctaccattatggcatgaagggtacagagaaggcttcccatataacttttgcaattgatanggggtccagaccagtccagtccaactaaat

SEQ ID NO: 135290 - DNA, 247 bp, Zea mays
  unsure (1)..(247): unsure at all n locations
  Clone ID: MRT4577_54866C.1
cccaagaacatggatcttggaagcaantatgaggacgaggatctattgtcgattgggaactgtcatcattcatatgtggccaatgcaacagtcttgtaagttgcctaacatctaacatctgtccttggatcgatgccagcaccatacatagtgtcctcaatgccgattcacacttcatcatacaaatggcaaccatataccacattcatggattaaggataccttatgctaagccctatgacccatc

SEQ ID NO: 135291 - DNA, 618 bp, Zea mays
  Clone ID: MRT4577_54867C.1
gattcaaccgcacaacaaaaccatcattccacgagcagatcgacaggactgggaaggcaagagcttcgctcgacaagtttaggaccaaccaaccaacgatgaagagcagcacgctggtggcgatcctagtcctccagaccgtcatggtcatgggaatcctctcacaggccgccgccaaagataatttccccaagtgctgcgacaactgcaactcctggtcggggtaccagttctgtgacgacgtcggccccaggtgccgccgcggctgcgccaactgccaggtggtgcagacgagccccgtgaagacgttccggtgcggagatggacgccccgtctatgacgggcacgacacgcccacgccctgcccgccgccgtgcaaaaagcactgatcgctccagctccctcagacactgatgagatcgatgttgcggccaaaacataaaataaaaaggctccgatgagatgagatgagcagagccatgcccagccttctctttcctttgagagataataataatatatttgatgttgctttttaagtaaataaataaacacgggtatcagtttatatatgcgtctctgcttaatcaaataaaaatcagtttatttgttcgatgc

SEQ ID NO: 135292 - DNA, 400 bp, Zea mays
  Clone ID: MRT4577_54868C.1
cttggtgtggtttttttttttttttttttttttttttttttttttttttttttttttggaccaaagtacgggttatttcaagaacaaaagatgcagcatcagtacaacaaaagtttcagagtacatacaccctttggctgcaacgaattcttatgatacccccgccttttttttatacccgccctcttattggcctttcaactcccaaccggggactatttgaatgctattacagctcctgactacatgattcagccggagttcaatgttcaaaaatttttatttcccagccggggcataacttgttcgaaaatctccctgctaagacggacaaaacgttttatgcaaccaaataaccttgataaaaagttgaaaactgtagtcccaaatgacccacaac

SEQ ID NO: 135293 - DNA, 578 bp, Zea mays
  Clone ID: MRT4577_54869C.1
aattcggcacgaggcttgctcgtccacccagtactccactgctcctcgtcctcgtcctcgtcctccctctcccgccatccccatccccgcgacgacgcgcatcggaccctgcgtcgtacgtgctcgcccattccctagccgtcagtggatgtgccgggctggccgcgggccgtccgagcctgcggcggcggcaggggagggcgacaacccggcgggcggcaggagtggcagcgggaaggaagccatccaaccgcggagatgtgggagcccaagaggtcgtagcgaggggtttccttgattggtgaatcttcgatcaaggatggagcaccgggctttgctgctcggcgtggcgctggcctttctgctggcctctggctcccagggcttgaaccatgaaggttggcttctcctagcgctgaagagccagatgaacgacactctccaccacctcgacaactgggacgcgagggatctaacaccatgcatctggaagggcgtgagctgctcgtcgacgcccaacccggtggtggcgtctctcgacctcagcaacatgaacctgacaggcacagttgcgccta

SEQ ID NO: 135294 - DNA, 135 bp, Zea mays
  Clone ID: MRT4577_5486C.1
gctgtccgctgtcagagatcgagctttacctgcacgaggactccatctacttgtacgctcacctactacatcagcccggacgacttctagtactggaagtatgactgacaccacacctatttctaatgtcaatac

SEQ ID NO: 135295 - DNA, 179 bp, Zea mays
  Clone ID: MRT4577_54870C.1
agctcacacgtacacaacaattaattacaatccttatgtgaacatatttgcctccatattgcgggcaaatgtcatacttccatatctcgcactttgcctgactactgcaccttactgatccacatatcaatcgttaagatacatatacaatgcgactccggttatcattgagaccgtcc

SEQ ID NO: 135296 - DNA, 399 bp, Zea mays
  Clone ID: MRT4577_54871C.1
ctgagattatttctatattctttggccactgaatgtgcttcaaatgacagcagcagcaacattttgacagtgttatgtatcaggagaaggacgcactcctggtagctcatgtgtaccattttacaactcagctcaagatgtatgagcctgtttctttgcctgaactaagctggcctggtaggattgagtagagccggaatattctcaaacaggtttggtggactaggtctctttactggttgtacatttaatataaggtctcttttaagggtatttagggataggcttttcctgaagagttgtctctctcttaactatatttatattatgtagttttttagttgtcttttgtactactagaaaaaacgatctctaaattataccatcttcgttttcgaa

SEQ ID NO: 135297 - DNA, 377 bp, Zea mays
  Clone ID: MRT4577_54872C.1
aaaataacatttaaagccactagcctttttagctttcacaatgacagggtgaaacacagtattattcaaaaccagaacaaaaacctaggtggactggactggttttgtgcttacaagctggatataacacatcacacaaagacagacctatagataggaaatattagatacaaccttactgaagtcagggagccgaattacagatgaatgcactgcgctaaacaaggctaaccactaactgcgcaaccttcatgcctacaaataccaactgagacttcctaatcaaccctacaatttgacttctgatatgctcattaaacccgatgcctaagagctgctacaccttatataaaacaacacttggacctggagtaaaa

SEQ ID NO: 135298 - DNA, 2362 bp, Zea mays
  Clone ID: MRT4577_54873C.1
tctcgagctcggcgcgggtcagtcgacactcccctcactccccgttccactgctcctccactggcggcgagatgacgagaggcttgggggccgctcccgtctcgtcgtgcctcgcgctcggggcagcggcggtggtgctgctcgtggcggcggcgctgccttccccggcatctggagtcgacgtgacggccgtgctctcggtgtttcccaacttcgcggactttgcgcgtctgctggcatccacccccgtggccagcgagctgtccgggagatcgtccctgacgctcctggccgtgccgaatgccaacctgccgcagtcaccctcggctttcgtagctagcgccggcgccgacattgccgacgtgctgaggtatcacgttctgctggagtacctctccccctccgacctcgcccgcctctctccctccgggaagctcgtgacgacgctgtttcaaaccacgggccgcgcgccctccgacttcggcgccgtcaacctcaccgtggggggcaactccactgtcgtggtccgctcgccggcgccgtccctgggatcgaatgccacagtcctcggcgccgtgaccgcggttccatacaatctcagcgtgctcgcggtgggtggccttatcataccttccggattcgacctcgctgcctctgagagccgcccgccaccgccggtgaacatcacccgggttctcaccgacgcgcgggggttcaacgttgcggcctccatgttgcaggcctccggtgtagcgagtgagtttgaggccgacgagcacggtgctggcatcaccgtcttcgtccccaccgacgacgcctttgccggcctccccgccaccgaccgcctccagtccctacccgctgagcgcaaggccgtcgtgctccgcttccatgtgctgcactcttactacccgctgggctccctcgagagctctacggcgtccgccacgtcctccacgctcatcgacgcctggggggagcgcttcgtggcgctggaccggggcagcctccgccacccgcagtggcaggaggtcgccgaggtcgtctcctctcgcgacagctactccaaggcgcccaaatccgacgtccagtgcaagaaccgcatcgacacgctcaagaagaagtacaaggtcgagaaggccaagcacgactccgactggcgctacttcgaccgcctcgacgacctgctcgctcccgtgctgctcaagcccaattcttcttcctcctcggctgctgctgctgcggcggcggcggcggcagcccggagcgccgggcccatggtccctccgcgcatcaacttcccgcagcgcacccgcacgcccctccactcctccgcgggggcaaagtggaggatgccgtcgccgctgctccagccgtcggcgtcgtccgactcctccgacgggttcccgccgtccgcggtggcgaacggcaagaggcagcgcgtggaggagcccgccgccgccgccgcggacaacggcgcggagagcagcgtcagccgcgcgcagggtctgcgcgagctggcgcaggcgatccggcggctaggggaggtgtacgagcgcgtggagagcgccaagagggatcaggagctccggatggagcgggagcgcctggactccgcccggcagctggaggagcagcgcgtgcagttctccactagcatgccccgcagcagtcgcattaccagaacagcacaagccccaccgggggcgatgacaacggcagcgactcggacaaggaagctcaggaggatgcggaagacgaagaggaagagagccagtgattgctctcctcttcagcaatggaatggcatcgtgcaggcatccatcacccgtacagtgttcgaccaaaatcctgtggcagtctttgccgtctccaaggttctactgcccaaggaaatgttcggtcgcggcgattctggcaacactgccatggcaccaccttcagttgcgatggcaccccgcgacgccgggagcgagaagacaccacagacaaggctctcatccccgcctgacctccacagcgaagatagcgagtcatcagcttccttgctgacagcaaaggggacttggtggtgtataggactcatgtatctacagctgcatctattactatctctggtatgattagatctgaaggagtgaattcgatagagccctggatcactagggtgaggggatatatccccatgaaatgtatttgcatccggtggattgtatccctgtagtacctactcccaatcaaattattcaaatagatgtagtcccccatccagagggagaaaatatcagggtgagaaatacttgttgtatgtcatttgctacatgttacaactgatatgcctggcattttttggtgcttcagc

SEQ ID NO: 135299 - DNA, 277 bp, Zea mays
  Clone ID: MRT4577_54874C.1
ccccctaaataatttcccctccctcctttattttcttgggggtttttttttattttccccggggtcccgaaaagccggggaaagaccggcttgccaagaccaggcaccccatgtgtaacacatccaagtcactatggggcttacacgatgtgtaagaaggccaggtgcttatccagagcaaagcactgtttttgttgagccagcaacacatttaagtccacatgcctacttgttttccacctacaaaaagggggggccccaaaaataaagcccccaa

SEQ ID NO: 135300 - DNA, 1707 bp, Zea mays
  Clone ID: MRT4577_54875C.1
ggccgcttttttttttttttttttcaacagaaaatactattcattgtagagcaaaaggactgcatagatttgtacacatgacattatttcccttcgccacatgacaaaatggaaagaaattagaataatcaggtgaagcaactaaatttttttttgctactttgaatctacgaaattctctccccaatccctccctcccggtgtagacgttctagacagtaagtaatacaaaaactgagcacaaggaagcaagaaagcaacaagcacgaccagaatctcataccagagatagtaatagatgcagctgtagatacatgagtcctacacaccaccaagaagtcccctttgctgtcgccaaagcagctgacgactcgctatcttccccgtggagatcaggcggggatgagagcctcgtctgtggtgtctgctcggtcccggcgtcgccgggcgccatcgcaaccgaaggtggtaccatggcggtgctgccagaatcgccccggctgaacatttccttgggcagtagaaccttggagacggcaaagaccgccacaggattctggtcgaacactgtgcgggtgatggatgcctgcacgatgcccgtgtcaatggcaatggagccattgacgcgggttatgtttagggtgaagtggccagcctcggtgtgctctgtggcgagagtgggttggacagggttcacgatggactcgagggagcccagcgggtagtaagagtgcagcacatggaagcggagcacgacggccttgcgctcagcgggtagtgactggaggcggtcggtggtggggaggccggcaaaggcgtcgtcggtggggacgaagacggtgatgccagcaccgcgctcgtcggcctcaaactcgctcgctacaccggaagcctgcagcatggaggccgccacgtagaacccacgcgcgtcggtgagaacccgggtgatgttcaccggcggtggcgggcggctctcggaggccgcgaggtcgaatccggagggtacgataaggccacccaccgcgagcacgctgagattgtacgggaccgcggtcacggcgccgaggaccgtggcgctcgatcccggggacggcgcaggcgagcggaccacgacggtggagttgggccccacggtgaggttgacggcgccgaagtcggagggcgcgcggcccgtggtctggaacagcgtcgtcacgagcttcccggagggagggaggcgggcgaggtcggacggggagaggtactccagcaggacgtggtacctcagcacgtcggcgatgtcggcgccggcggcggcgccggctacgaaagccgagggtgactgcggcaggttggcgttcggcacggccaggagcgtcagggacgacctcccggccagctcgctggccacgggagtggatgccagcagccgcgcgaagtcggcgaagttggggaacgccgagagcaccgccgtcgcgttgaccccagctgctggggaaggcagcgccgccgccacgagcagcgccagcgccgctgccccgagactagcgaggcgcggcgagacgggagcggcgcccaagcctctccccatctcgccagtggagcggggagtgaggagcagatagatgacgacggacgggagagggacgggggttgccccggccggattcctgatgagaggggaatattttggtcttttctccccggccgatctcgaggtacccaatg

SEQ ID NO: 135301 - DNA, 377 bp, Zea mays
  Clone ID: MRT4577_54876C.1
ggccaccagaacccggtttttcatttcaatacaatttatgggacttgcaagagggcttttttaagtcatgccattcggtcaaactctttttgttgaactgggggggaaacccatgtttccacttcgattccttgatcaataaatacaatgctagattgctagggctttgaaatttttcttcttccagagagaggggggggtgaaaaactcatcctcccccataatacaatgggtgtgggtgtcactcatcgctttgctcccccccaaaatcagctggttgctgccgccgttggcttttccttaaggtgtgctctggttaagggattttgcttttcttccctttcgcccgtgatgtccgtcgtttctcaccctgtcct

SEQ ID NO: 135302 - DNA, 258 bp, Zea mays
  unsure (1)..(258): unsure at all n locations
  Clone ID: MRT4577_54877C.1
accccnccgcaattccccctatctctcatctttatcttcatcaacatataatctacatcagacaggtttcctaatataccgagaaagacttctcttcatcttccattcttacttctcatttttattaataactcataatttacccctattcatagtcttatattccaatacataataccctcacaccttattttcctacttattttataacaccctattatcatcttacatatttcatctacctgtccatttaatttt

SEQ ID NO: 135303 - DNA, 275 bp, Zea mays
  Clone ID: MRT4577_54878C.1
cattttataatgatgtcatggcatgccattatacgatgtactctagttatgtataatattgtagttaattggtccccagttaagtaacatttagattgtttctagttttctgttattacaaaaaaagtgttgcaaggactcttctggtacatgcatttatgtgcatgtacaatgtgtactagaactggaatcaatgggtcaaagggtgcatgtatttaaagttgcaatcaatattgctgttatattgcactccaaataagttgcaccaccttttg

SEQ ID NO: 135304 - DNA, 630 bp, Zea mays
  Clone ID: MRT4577_54879C.1
atggagaggctgcaaaagttgcaccaagagctcgagagcaaggccagcgacaccgccctcgccgaggagaaactcaaggcgaaggagcaatccttggacaggcgggagacggacctcgccaggcgggagatggatctcaccttccaggaagaaatgtttacctggcgaggcgagatgctggccaagcatgagctcgaggcggaggagaaagagaagaagctggaggagcggatccgacagttccaggcggcgcagggggcaccgggcccccaggcggtggaggccaccaggaaggcccttgaagacgttcaggcggagcatcgcgccggggtgtcggagctgtcgacgtctatctccgacgcactcccggtgctggactccgccgccgactgcctccgacgcctggaccaaattcttggcgcccgcctggaggcagagggcggcaggctctgccgggcggtgatcgaatatatcttgacgtgcttccggagtcacgacccgacgatatccttggagccggtgatcgctggtccagtggccgccactgaagatgccgcccagaagggcgtacaatacgccgtggaactggtggccgaacgcttccagcgggatcctgctgacgacgagtag

SEQ ID NO: 135305 - DNA, 361 bp, Zea mays
  Clone ID: MRT4577_5487C.1
tgcggccacgcgtacgtagcaacatataaagcacatttgtgttctatcaatgggagctaaaatatggggactgcttttgcttcttgggggttttgctagtgctgctacggcgaccattttaccacaatgctcacatgctgctatatctaggcttcttcccctgcaccatacaagaacggtgtcttcggtttgagaaaaccacaattctgtaaccttacaggatggatcaggcattctcagctggaattttacctttatcacccttgtttctcacaacaatcattattcctattacaggagttacctttgtgtgcatttattggttcatataattatggtacatcaacttcaacaacttgtg

SEQ ID NO: 135306 - DNA, 801 bp, Zea mays
  Clone ID: MRT4577_54880C.1
gatcctcagtggaagccacacgaccttcatacgaaggtgcaacaagctcagctagagcaacagagctagcagctaacaatggcgtctagagcagcggcggccgccgtggtcgtcctggccttggtctgcgccgcgcagtcgtccctctcggcggcgaccgccgggggtctgtcccctgacttccacgcggtgacgtgccctccgctggagcaaatcgtggcgttccacgtgggggaggccttcaagaacgactccggcgtggcgccggcgctcatccgcatcctcttccacgactgcttcccgcagggctgcgacgggtcggtgctcatcgagggccccggcacggagcaggacgagatccccaacaagacgctccgcagggtggcgctggacctcattgaccgcatccgtatgcgcgtgcacagcgcctgcagccgcacggtctcgtgcgccgacatcaccgtgctcgccacccgcgagtcgctcgtcctggccggcgggccccgcttcgaggtcgccctcggccggcgcgactccttcttcccggcgtcgccggtccaggtcggcctgctgccggcgcccttccaccccgtggacaagctcatcaagtccttcggcgaccgcggcctgaacgtgacggacctggtgtccctctccggcgcgcacaccttcggggtcgcccactgcggggccttcgatgatcgcttcaagaatgtcttcgacacgaacccagccatcgaccccaagttcgccacggggctgcggaacaagtgcgccaaggacacccccggagggaccctg

SEQ ID NO: 135307 - DNA, 426 bp, Zea mays
  Clone ID: MRT4577_54881C.1
acccacgcgtccgcccacgcgtccgaaaaaaaaaaaaaaaaaaaaaaaaaaaaaaaaaaaaaaaaaaaaaaaaaaagagaagggaaaaaaaaaaacaagcacccaacaaaaaatcaaatataaataaaaaaaaaaaaaaggggggcggccctttaaaaggaccaaaattaactccccgggcctggcgaagatatactttttttttggggcccccaaaataaaattcctggcccggggtttaaaaacgtggggacgggaaaaaccctggcttaaccaaaataaatcggcttgaaaaaaaaccccttttccccaggtggggaaaaacaaaaaaggccccacccgatcccccttccaaaaaattccccaccctaaaaggcaaaaggacccccccccttaaccgcccattaacccggggggggggggggg

SEQ ID NO: 135308 - DNA, 208 bp, Zea mays
  Clone ID: MRT4577_54882C.1
gtggcgtcgcttgcatgcaacaaaataactctcttttaaaggcacttaaaacctactgagtgggcgtcgattaacacattatcctggatcgaaacacgcagaggtcccacggattcagcttggtcaccttctccacggaggaggcgatgcagaacgccattgagggcatgaacggcaaggagctggacggccgcaacatcaccgttaa

SEQ ID NO: 135309 - DNA, 394 bp, Zea mays
  unsure (1)..(394): unsure at all n locations
  Clone ID: MRT4577_54883C.1
gggtacctcgagggcggncggggaagaatccaaaagaggcgcttgccgttcctagccccaccagtgctcccatgcacgacgaggctccgacgtgaaggtgtaggaagtcgcgctctccactgaaggacccgcaccccagaccgtacgcgatggccatctggaagctggcgtggaatgaccatcaaggccactcactgcactgcactgctagtcaccaccggagtcatcagcagcttcaccctcgaaggcaccagtatcgtccttcaccggcgatgatccctgagtcgtcgcagacctcctatgaacgtgtaagttttactctggaactccttgtacttgaggaatatccaatgtctgccgcaaagattaggatcctgaggtaaatttcttcgcc

SEQ ID NO: 135310 - DNA, 359 bp, Zea mays
  Clone ID: MRT4577_54884C.1
cacgcgtgcaggagccgggacggaattatatagccgggtcgacgtgttttattagtcggcggacggcctaggttttttttgagggatctatacgcaactgcactaccattaactctaaaagacgatgcattatgacatatggccaggagccaacaagctcgctgtggatattgcacatgcaggcacactacgctactgctaggctaagcgaactcccttcaggcattaggagcccaggccgtgaaaactaatcaaataggtggtgcttgcctgcctggtagaaagcgaccacatccaaactaggcgccagaaccaccggtggatattacagacgtatgcatgcccttatgcaaaacaac

SEQ ID NO: 135311 - DNA, 272 bp, Zea mays
  Clone ID: MRT4577_54885C.1
ggtgaacctgtgctggaggatctggcacgtcgcgaggaagaagaagcaggtgcaacgggagtacgcgcggcagtaggcgcacggcgcctggagcaggagctgggcagccgggaggccgccgaggagctctccgatggcgagaaggacggcgcccccgacgccgcccagcagcctgtgtcggtggcggcgcccgacggccggatcgccaggatcgggtccgaggcccggatcgtgtcggacgacgagggcggggacggcagctacgtcgacac

SEQ ID NO: 135312 - DNA, 337 bp, Zea mays
  Clone ID: MRT4577_54886C.1
cccgggaacaaattaaaggcccctttaggttaattcccccggcccacatttaggattactttttttttcaggggttctcccccccaacaccccaaacaactgaaaatacccggcctcccccgggaaaaaaacaacgcgggggtcacttactaacaggttgacccttgaacacaaaccctcacacattcactttgaacgtggtatttttttagctggaaataaacccggggggggcgcacacacacacaaaaacattaccctttggggagggaacccaaaaagaacgatcgattgccccctcctccaaacccataaaattgttttatatggggggggg

SEQ ID NO: 135313 - DNA, 159 bp, Zea mays
  Clone ID: MRT4577_54887C.1
acaagcgacgggcacctggtctgggactccatcaggcagtgggcgtccgagtacgtcaacgtctagacgaggccgtggccgccgaccccgaactgagggcgttctgggacgaggtgcgcaacgtgggacagcctggtggagacgctgaccaccatcatg

SEQ ID NO: 135314 - DNA, 681 bp, Zea mays
  unsure (1)..(681): unsure at all n locations
  Clone ID: MRT4577_54888C.1
tgggctccaaccgcgatctgccccgcccgagatagccgccgccgtgcagccccccgcccgagatacccgccgccctcttcatcagtgcgccaaaacctcctcttcgtacctgcccacctcaaaccctaaccccaagccaccgcgggagagggcgacgaagcaaaacaagcagccgcctcccgacacggccaccctccgcccgcatcggcacagccactccagcgccaagcttgtgcacggcctcccgcaccggggacacgacgagggcctctaccgcgcgcgcgcgacaatgactgccgtgttcaagtccatcttcggctgggaccccacctccctgcacacctctctggccatggcgttgatgtacaacatgtcgctcgtcgcctcatctcatcccatcgaccctacgagagcccgtcccaactccaccagaccaccacctctcttctcggtggcgtgagcgagaggactccgacgatcgtggcgtcagcgggaacctaggcttcgttgcatctcctctcctcactctccccatctctctggtacgcattctctctccttcccaagccgctccggtctagcacgtgaagtcaccaggttattagtcgagatctaatttcgtttctgagatagatccgtagtgtttgaagtcgncagggtatcagtcgagatctaattttg

SEQ ID NO: 135315 - DNA, 276 bp, Zea mays
  Clone ID: MRT4577_54889C.1
attcccggctcgacgccacgcgtccgcccacgcgtccgcccacgcttccgacaatctttacaaagcctaacaggtagattgttttgtttttttaatcttgtgtgaattcataaacgtgcctgaagctttcacatatacatcacttgcttttatcatttcaataatttcagcctttctgtcagatgaaaaaaactacaaagtgctttcagtatttattgcaactatgtagtaattgaaagaatggaaacaccatcattatctataaaggaaacattt

SEQ ID NO: 135316 - DNA, 242 bp, Zea mays
  Clone ID: MRT4577_5488C.1
gagcaaagcatgcatcacagctcgcaccaacggaccatctatccccatggggcccgcctttggccgctccatctccttcccgatgagaccggcacgctcctactactacacgaaacaggcgcgccacgtgcgctccatcagcctcccgacctgccgggcgcacccgctgatcgaccaccttgacgccaaagtcagcgccggccgagcctgagccgacgccaccggcgagaaatgatccacac

SEQ ID NO: 135317 - DNA, 563 bp, Zea mays
  Clone ID: MRT4577_54890C.1
gtggggagccctgcggcgagctctagttagtggttacggccggccggggcgcggcgacgcgcggctggccatgcatcagaggtcagtcgagagcctatcgatagcaggcggcccgagctgcacatactgctacctgtggcacgtgacgccgctgaacagctgtgggtgccggggcccaccatacaagggtacctttcagcacaaggccccccggcgggaggtctcgcagaccatctatgacctgctacgacagcacgtgctaagggtgatggcactctcgctgaggctgtggcaccacagccatgcacatcagaggagctcccgctctactctgtggtccacagcaatgtggcactgattcacctgctcgggctaagctgctcttcacataggataccaatatactaatgccatcgcatgattcactataggaccggctgctgaggctgtactcttactatgaacagatatggtcccttgttaggcaactgatgcctatgacggaggcctcgcctgtttactcgatggacaaacgagtgttaggatatgcatggaaagctcta

SEQ ID NO: 135318 - DNA, 313 bp, Zea mays
  Clone ID: MRT4577_54891C.1
gagcgctcgctcgatcctagctttcttccaagaagcgcacgcccatggccgggggaccaagcctcgcgcacgcgccactgctggccgcgctgggcgccggcggcgaaccgcggagctgagctcgcaactcaggctgacgtagtggcctgccgcgatccggcccacgtccgcgcgtgccaccgagaagcagctgaagcgcccaatgcgtttcgggtccccgcactggaccccagcacgccgtgcccgaccttcagcggcagaaccgacgggctgctacggaaggcgcatgaagaggagtgctacgtcatcacgt

SEQ ID NO: 135319 - DNA, 401 bp, Zea mays
  Clone ID: MRT4577_54892C.1
tctcttatacccttctatctagacttaaggagggggctctgttaggttgcgggagccctctaccgatcccatagggtcccgctcatgctcattatgtcaggaactacactggcaaaatatctgtccacaagaatgctctacttcagttatacgtttgcattccaatgaaccttgccatctttttttcatatcgaacacacccctcttagtcgccctgatgcccaacgttatatatgacaaagcctgcttaaacatattgtgaattattctactggaacacaaccatcttgccttaccatgtaacgatataagtgtcacctacatgacaacatgctatgttactacattgatatatacgagagctcatcccaggtgaatcttgttcaatgcttacctacata

SEQ ID NO: 135320 - DNA, 323 bp, Zea mays
  Clone ID: MRT4577_54893C.1
gcgttctatcagtaccatcaatcatcattcatcttagtagtataggcaccaaatcaaatctgcaacatcaattatctaactccaaaaaccatgaagctggtgcttgtgggtcttgctttcattgctttagaatcaagtggttcttgtacacagacaggcgggctgcaggtgtggtcaacaacaaagggcgtgaggcagaaacatcatccacaacaacatcattcccaaaaaccacaacatcaaccccccccaccacatgaccaggggtgagggcaccaaccacaacaggtgttcatggcatccccaaaacatgaggcacaaca

SEQ ID NO: 135321 - DNA, 316 bp, Zea mays
  unsure (1)..(316): unsure at all n locations
  Clone ID: MRT4577_54894C.1
ggttcggaaagaaagaccgnccggttggnncgngncagngnagaatggtgacggngatcgcggtggngtcgggggggttcgggatgctggngggngtcgcgatggncaacaggtcttcgccgncgnccgcgggngtcgcgctgtggaggnccggngggggccccgcgctgcgctggggcggaggnggaggcgccccgcgctgcgaggngtggggggggtcgggnaaggaggactgccgcctctgcgcgngntggnccgacgncggngcccgngggaagaagattagncgntccggggggggngngtgggggcggac

SEQ ID NO: 135322 - DNA, 248 bp, Zea mays
  Clone ID: MRT4577_54895C.1
ctttcttttaaaataattatacttgatttgaattttttacataatctgttatattagatgttgcgttactgactgtgattcaatgtacactcagccatattcctgtgggaagtatcaatcctattgactttcttggcatgagccagaagctcttagtttctctaaggactttaagtataaagatataaactaatcaaaatgtgatgctagtgtcgaaataagaaacttattgtacaaaatgtatttta

SEQ ID NO: 135323 - DNA, 290 bp, Zea mays
  Clone ID: MRT4577_54896C.1
accggccggaatcggtcgacccacctctgcctattttagcggagagagagaggaaagctagctgctgcatggaggcgcgcagaagcagagcgggtgtgcctgtctttcactgggttagctcacgacgcacgcccctctgcaggatcctcacgggtggctgacatatccgagggatttggcatcatgaagcatcttggggaaactggtttctaccatgcttcggagcatggttgcaagcatgccaaattgatgaggaatctgactacgctttgtaattggtggagaacaca

SEQ ID NO: 135324 - DNA, 161 bp, Zea mays
  unsure (1)..(161): unsure at all n locations
  Clone ID: MRT4577_54897C.1
gatcaaagacaagtngctctactcaaatatgtgattgcgcctacaaaaactttcagagttaggtcaagaaatgcttaacaattaaaaagtactttgttgttgatacaatatggtttctttttgaatggtactcgtccacactctaaaccaaatgagtgacc

SEQ ID NO: 135325 - DNA, 624 bp, Zea mays
  Clone ID: MRT4577_54898C.1
ccggccgggaacttatactggccagtcatcctactgcgaacgcacacagacagacggacagtgtgttcgcaaagaaagagcgcgcactaggaaccagctaggtcgaggcggatacccgagacttcatgtcaaactccacaaaccactacttctacgaaccttacaaaaaagaccccccgatgctatccaggaaattacggaaactcgcgaaaacagaggagggcacaccactgcagcatcaggattgatgtgaaactcacacaaaaacatcagaaggagagaaatccgaagagtgcctaggcgaggccgtgtccatatcccacgcaacattaacaatctacaagacgcccaagaagaacaatactctctagcaaccgctcgatgacattcatccagaaggactgaactgtctgggtacccaggttgtgcaggacgtacagaatatctgactgccacactgatctgtagacaactgtcagatcatttattagccgtttttgagaatgaaaaccatcacctcatacgcttgaccagaaatacctgacgtttctcatggcgagctatgctactctccgtggctctcaacttctgaacagacctgctccgaactgtgtgcgctggcaa

SEQ ID NO: 135326 - DNA, 805 bp, Zea mays
  unsure (1)..(805): unsure at all n locations
  Clone ID: MRT4577_54899C.1
aatccgatccgccgccatcgtcactcagtctcacacgcaaaaggctagaaacaagtagttttactttagcctgtgaccaccttaatcctgagacacacccatcagcgtcgtgctcacgagggacctgccgccattgctgcaatttggagcttctccttcccaccgtgatataaaggagctcgacgcgatgcagagcgggcagcagcaagcgaggaggaagaacgcgcaggtgctggacgggtcggacatccgggagctggtggagagcaaggaggcgttcgcgaagttcgtggagaacaagttccggcaccttgacgccgacggcgacgggaggctgtcgctgacggagctccagcccgccgtcgcggacatcggcgccgccatcgggctgccggcgagggggtcgtcggcgcaggcggaccacatctactccgaggttctaaatgagttcacccacgggaagcaagattcggtgagcaagccggagttccagcacgtgctgtccgacatactcctcggcatggcggccgggctcaagagggacccaatcatgatcctgaggatggacggggaagacctgaatgagtttgtcgagagcacggcgtacgaagcagaggcggtcgccatattctctcaaatcgagtccgggaatgcgtcgttgcgacaatgtttgcccgccgctcttcggcagctgacggtcgatcacggcatgccaccggcttcggactctctggnntatggagaaggtcattgaacctgcattgcaggaactgccagcagatcagctcgaccgaccggcatcgca

SEQ ID NO: 135327 - DNA, 383 bp, Zea mays
  unsure (1)..(383): unsure at all n locations
  Clone ID: MRT4577_5489C.1
ggaccttcgagccggccgggncgggatgaagaagacacccgccagcccctctcgtttttctccgccttcgcctccaagcgcgtgcgctccacgcctcctccaggaaagcgagagcttctgcataagaacatcaaatcgaaagcgtgatctgatcggtgccaagcaaacctcaacaaccaagttccatggttgatctcgacgtccagcttccatctggctttgatgcggttgctgaggtaaatgctgaggagtctggtgatgcacctgaaacgaaggattatgtgcatgagcgcatctattatagcgacagttagaaatagtctgaaaatagtctagggattgtgagaaagagtgcagatataataagatcctcatggatttga

SEQ ID NO: 135328 - DNA, 391 bp, Zea mays
  Clone ID: MRT4577_548C.1
aaagacctaaataaggccttaggggggagctagttcttcattactttaggaataggaataagggctatttaaaccttttgtttaatataaagctatgcctcaagatctaattggggcttaaaaaaggggacccacaaattattttataagggataagctgggctaccctgaacaaacaacttttaagaagatcgagcacaactcatgggtttatttatcaatacacataggacctgcctggtttgaaacatccatttggtcttgtccaaaaacaaagaaaggaggcctgttcacgttcttggtttcaacaattttggccccccatttatttgccacgtactggtggcatttcaaggacaggcaaaaaactacacatccctaatacataggg

SEQ ID NO: 135329 - DNA, 403 bp, Zea mays
  Clone ID: MRT4577_54900C.1
tgccgatctagatgcatgtttaattgctaagactaacatgggttggctttagcatcgtcgtctagcacatgttgggatgaagaaccttcctaagcttgtaaagagaggacatgtgttaggactaaccgatgtctgttttgagaaagacagaccttgtacaacgtgtctagtagggaaataggtgggaccaagtcatccaagcaagatcgtgatgacgacatcaagaccattggagcttctcgatatggatttcttcgggtccgttgcttatcttagcatcgggggaagtaagtatggtcttgttattgttgatgactattcccgcttctcttgggtattctttttgcaggataaatctgaaacccaaaaaactctcaaacgctttctaagatgggctcaaaat

SEQ ID NO: 135330 - DNA, 498 bp, Zea mays
  Clone ID: MRT4577_54901C.1
gggagcacctcctgtacgcggcggcgcggcgtcaggcggtgcggcagcagcgagggaccggcggaggcgtgcccgggccggacggcggcgggcagaagggctggcgccgccccttcatcacgcacctcgcggggccccccccccgccgccgcgcccccccccgggtgcacgcgcgggcgcggcgccccggggggcccccccgcgcgcgcgcgcgcgcgcgcccccgggcgccccgcccccgccgccccccacgccccgccccgctccgccaccgcctcgccccgcccccgcgcctccccccccccgcgctctgaggggcggccgcgtcggtgggcggtgggttcggcaactggctatgactaggttaattaaatgagacaaaactatgaatgcaatgcaaagatgtggtgtcaagtcacattttggatttggtccaaagactgaaacagtgaaaccactgtgtggtctttcgtgttcgtcggtacttttagggcatgt

SEQ ID NO: 135331 - DNA, 282 bp, Zea mays
  unsure (1)..(282): unsure at all n locations
  Clone ID: MRT4577_54902C.1
tccatacacattgatctcaatactgtatctactatcgcgagtgccactatgcctcagctaactgctggccatgactcctatctgtgtgggatcaaaacttaattantctccctctacatcttanccaactaagtatctaaccaccactacagaaggtcatctcaagaatcattatatatatactattattctaactatctgaactcgtgcgacaaataattgccttaatttcatcaacattttttcacccctcctggttctcaacctcatcatgtacatcat

SEQ ID NO: 135332 - DNA, 511 bp, Zea mays
  Clone ID: MRT4577_54903C.1
gtagtcaccggtgttgacattgtcatgaaccatcacttacaagaaaccagcttcacaaaagaggcctacaaaaagtatatcaaagactacatgaaatcactcaagggcaaacttgaagaacagaaaccagaaagggtaaagccttttatgactggagctgcagagcaaattaagcacatccttgctaatttcaataactaccagttttttattggtgaaaacatgaatccagatggcatggttgctctactggactaccgtgaagatggtgtgactccattcatgattttctttaaggatggcttagagatggaataatgttaccaaattggatctatcgcctgtcaccataattggctgctgcttaccatccatacaccaccagcgactgtaggacaagtgggactggcagcacccgagtttgtttgccggttggttctatcgcctgtcaccataattggctgctgcttaccatccatacaacatcagtcccatttgtcctaagtcctgg

SEQ ID NO: 135333 - DNA, 330 bp, Zea mays
  Clone ID: MRT4577_54904C.1
ggggcttccgagatggacccgttgccaatggttcactggacccatcagggcaatttatcgcgaggtgaacaggctcgtactcctccgggttacaaaccaagataagcggggactgctgaataatggtgcggcaacggcgccggaagcgactgttgtcacccaggcccccgggggaagcacagacgcgttaatggctgggcgctgcgaatccgcatacgtgcaaggctcaggggtgtggacaattcaagctcatggcccttagcttcttgctgtgtgcaattgttattttctcacagttgaaagagtgtaccagcttcacgtctatagggc

SEQ ID NO: 135334 - DNA, 313 bp, Zea mays
  Clone ID: MRT4577_54905C.1
ggaccaaatgaacatattgtatgtgtaaaacccttaaatacgatatgggataacattctatataactcgcatgaacccaacacacctgggcgccctattcggacatcgagcatatgcttatttcttgcgtggtgtcttgccaccagatacccagccaacaacaaataaacattaaactcgatggcacatggatcacaagacctctttcaaaatatacttcctcatcacatgcttaccagatcttgagggcgctttcacacgtggggtccgccttatagttctcacggacgacctcatcggagattccctcccc

SEQ ID NO: 135335 - DNA, 888 bp, Zea mays
  unsure (1)..(888): unsure at all n locations
  Clone ID: MRT4577_54906C.1
cattgggtacctcgaggccggccgggacgggcccgtgtctcgcgcacacctcttcgtgctcgctcccatggaggccaccccgatctccatgaagccaccggcgccacccccggtcactctggagcccatagaattgtcaacgcatgccgtcggactgaccgagctggagcgatccagcatgaaccagctcgcaatagcgccggaccccaagcggcagagggtggaggaggctgcggatggcaacgggtgcaagcattgcgcctgcaagaagtccagatgcttgaagctctattgcccatgttttgctggaggtggttattgttccgataagtgtggctgccaaccatgtttcaacaaagaagccttttcagaaacagttcagactactcgcaaggtgttactttcaagacagaagcgcatgtcgatgaaaattaataggagacctgaggcaaatgctgaaccaatggaagatgctcaccattcttcttcttcaactccaccaaggagaggttgcaactgcaagaaatcaagttgcctgaagaaatactgcgattgctaccaggtttcatccttttctcaggttctttgctaagtaggcgagacaagattaccaaactcattgttgtggacaggatgggaccggatgttccttgttttgccgttgcgacgattgccagaaccctttcgggaaaaatgacggcataattgctgatgacaaccccaccccatctcagggcctcgagcagagacgcgcacgtgttcccgcaggcggtatcccagtggcaggcgctgccccgctcgtggcactgttccnnacagagggaacgcaacgacagggcgatggacgactccctcgncnnacggcactacnagagctcgagccatgac

SEQ ID NO: 135336 - DNA, 1398 bp, Zea mays
  Clone ID: MRT4577_54907C.1
taggggttttttttttttttttttgtataatctcatttttttattatatccgataccaggctcgaaaccgctatctctacaaagacaatacgtaatgtcaatccataaatacacctcagtaaacaggaaaaaagagcctagaatcctgtgcacgcccacgaccagcagcagaacatgcaggatctaaaagaaaactcaatttcccctccaatctcctcactcgagaggacggcacatggcgcaatgaaacacaccctcccctaagccaggtgctgaatcttgcgcttcagccacatggcgcgcacatcgccgccgagggagacgaaaatttcccggttgcccggcagcaggaagacgtcgggggcaactgacttctccacctgcgacagctccaccatgccgttcaggatctggacgcatctcgatatgctgtagccgtcctcgagcttggacatctgccagtcatggctcgagctcttgtagttgccgttggcggaggagtcgtccatcgccctgtcgttgccgttcctcttgttggaacagtgccacgagcggggcagcgcctgccactgggataccgcctgcgggaacacgtgcgcgtctctgctcgaggccctgagatggggtggggtctggtggaaagaagactccttcgacatgggtgactgcagacgaggcgagcgctccacaacgaagtcatgttcgccctcgctgtgatccaaatcagcaccagtgtacagatagcgcttactgtcatcagcaattatgccgtcatttttcccgaaagggttctggcaatcgtcacaacggcaaaacaaggaacatccggtcccatcctggtagcaatcacagtatttcttcaggcaacttgatttcttgcagttgcaacctctccttggtggagttgaagaagaagaatggtgagcatcttccattggttcagcatttgcctcaggtctcctattaattttcatcgacatgcgcttctgtcttgaaagtaacaccttgcgagtagtctgaactgtttctgaaaaggcttctttgttgaaacatggttggcagccacacttatcggaacaataaccacctccagcaaaacatgggcaatagagcttcaagcatctggacttcttgcaggcgcaatgcttgcacccgttgccatccgcagcctcctccaccctctgccgcttggggtccggcgctattgcgagctggttcatgctggatcgctccagctcggtcagtccgacggcatgcgttgacaattctatgggctccagagtgaccgggggtggcgccggtggcttcatggagatcggggtggcctccatgggagcgagcacgaagaggtgtgcgctggacacggggccccgtcccggccggcctcgaggtacccat

SEQ ID NO: 135337 - DNA, 1455 bp, Zea mays
  unsure (1)..(1455): unsure at all n locations
  Clone ID: MRT4577_54908C.1
cctcgaggcctgccggggggcnccatctacaatctaataaaagaggggagccgcctccgggcagcgaaacggacccgttgcgtgagcgcacccctcgtactcccatagtcccatcccatggaggccaccccgatctccatgaagccaccgtctccggcgccggcggcgccacccccagccactctggagcccggggacttgccaacgcatgccttcggagggaccgagctggagccgtccagtatgaaccagctcgcaatagctccggaccccaaacggccgagggtggaggaggctgcggacggcaacgggtgcaagcattgcgcctgcaaaaagtccagatgcttgaagctctattgcccatgtttttctggaggtggttattgctctgataagtgtggctgccaaccatgtttcaacaaagaagcttttgcagaaacagttcatactactcgcaaggtgttactttcgagacagaagcgtatgtcaatgaaaatcaataggagacctgaggcgaataccgaaccaatggaagatgctcaccattcttcttcttcaactccaccaaagagaggttgcaactgcaagaagtcaagttgcctaaagaaatactgtgattgctaccaggatgggactggatgttccttgttttgccgctgtgacgattgccagaacccttttgggaaaaatgaaggcataatggctgacgacagtaagcggtatttatacactggtgctgatttggatcacagcgagggcgaacatgacttcgttgtggagcgctcgcctcgtctgcaatcacctatctcgaaggagtcttccttccaccagaccccattcatctcagcgcgccctcatctcagggcgtcaagcagagacgcgcacgttttcccacacgcgatatcccagtggcaggcgctgccccgctcgtggcactgttccaacaagaggaacagcagcgaccgagccatggacgactccgcgaactacaagaactcgaaccatgactactggcaggtacccaagcacgaggacagctacagcatatcgaaatgcgtccagatcctgaacggcatggcggagctgtcgcaggtggagaaatcggttgcccccgacgtcttcctgcagccgggcaaccgggaaattttcgtctccctcagcggcgacgtgcgcgccatgtggctgaagcgcaagattcagcacctggcttaaattttccttgtgctgtgccgttcttccgagtggagtacaatcttttagattgtgcatgttcttctggtcgtggggtgggcgtgcacaggattctaggttcttttttcgccctgtatactgaggtgtatttctggattacggttatgtattgtctttgtagagagagccgttttcgagcctggtatcggctataataaaatgagattatacattgtttccaaaaaaaaaaaaaaaaaagcggcc

SEQ ID NO: 135338 - DNA, 1213 bp, Zea mays
  Clone ID: MRT4577_54909C.1
attggtacctcgagccggcggggccagcctggtatacccaccctctcagcgcaccagtaggtgctgtgccatcagatcctccaggccacaacttccatcgcctctctctctctatctctctctatctctcttctcaccgagaatttgttccgatcctcttatggttacgacccgcctgccgtccgctgccacacagcagcggagttagtgactacgcaatcggtcgagctcgtcgtgaggctcttccgctcttggtcggtggtgctgtttcgcgtcctgggaaaaatggatgcggaggcggcgagaaggaagcaggtggcgcctccgcaggagaagaggaagcgcggccggctggagctgcggcggatccaggaccggacgagccggcaggtgcgcttctccaagcgccggagcgggctgttcaagaaggcccacgagctctccgtgctgtgcgacgccgaggtcgcgatggtcgtcttctcccccgccggccgcctctatcactacgcctccctaggcaccagcattgagaaaacattttgtcgttactgggaccttgccaacacagacattgatctcaatatcgaggcgcgagactcgagggacaactataatacacagtttcctgagaatggccagccagctgaaggctcgttatctgacctgctaattatgatggatcaatggtctatggaagaaaatctgaatgggctgagcatggctgggatagcaggcttggaggaagcattaacagtcgctctggcagttatcaggaacaagctggcgatgaaggtgactgggtgcggtgggcctaaacctgaagcacacacgctctttcagcggcggtaagaaggaagtaacaaaactgtattatactagcatctagctctggttctacaaatattggtaattctccagtgctgcagtacatgaacatataaggccatatgttcagagaggtgatggtttcttactgtcatgtaccgcgtgtttaattcatactggtgactggaaagaggaggaggcagctctctaaagtcacaactctgaacgtatggcttttaattcatactggtgcctaagcttggtcgtggctttcttgatcacaaagagaaagctctctgaggaataaagggggggccctcgtagacaggcgttgtgtaactggttctgatggcactacagtatataatttctctcaaacatttccacc

SEQ ID NO: 135339 - DNA, 263 bp, Zea mays
  Clone ID: MRT4577_5490C.1
aaaacataaaactttttcatgatttgtcataattgggggtaggccccacacacaaaaaaaccggtccatttttaaaccaacacttacccgatttttgacccaaacaggatattctttgacaacctccaattggggagggggccccagacgacccaggcacattggtgtattaaactccccatgactttctgaccacctcagatacggtccccaagggggggggctgccttccttttggatgttatactcttaaagggtgcccc

SEQ ID NO: 135340 - DNA, 222 bp, Zea mays
  Clone ID: MRT4577_54910C.1
gtttaatatttaatacattataaattatggactaaaaaacagagtttagaaacatcaacaggatacggagcattgattgaacggggatgaaatggcaataccattttaagttcagtctccactgctaccatccaactgcagatctcgtgcgtccagactaaaacaggaggctacagcttctaacgaccattaagggtgacatctacaatcacgaagcttggt

SEQ ID NO: 135341 - DNA, 498 bp, Zea mays
  Clone ID: MRT4577_54911C.1
taccctcgagctcggccggccttccccacgcgccgctcgcccgccctctccaaatcccaaatccaacccaccggccaccgcaccaccgccgcctatcgtccccacccgcagcccccgcccccgatcgcggcggtacccataatggccgcctcgtcgtcaccgcgcgccgcggggctccgcgggccctccctgaccgccctcctctttctcgtcgccgcgatggtgtcggttccgccggcggtggtcgatatccgagagaccgctatccggcccgaccagaggatcatcattcctttcgtcgagtatcggatgaccccactctgacatcgctggatctgattgactccggagctgttcggaagtcgcactggcctggggagacagcctcggacaggtctgcatctttgcatctctcacggtgctggactccgtcaagctcatgtcagttatcgactgtcctgcgtccacggcgcggatggacaagcgcaactgccgccg

SEQ ID NO: 135342 - DNA, 849 bp, Zea mays
  unsure (1)..(849): unsure at all n locations
  Clone ID: MRT4577_54912C.1
acccaccagagctgcatcatccatccccatagtcaactacacattccccgcttccaccttggcacagtagaaccgattcgtcaatccgtcgatccaccggcagcacagctcctcgccctcctgctcgcatattccccccaaatcctactagatccacatagcacaagagcttggagagatcccgaatccaatccccaacggttcgatggcaagcacccctgagatctactccctccctgagagtcagactcaagatctttcgagatgtaccgaccagatgttgatatccattctcagagagcaccgtgcgtcggagctcgacgcggtccaccacctctggcaagatatcaatgccttgagtggtgaagtcgaccaaatggactcctggtgcctcttgcgccagaatgtttgctcgcaggtcgtggaagccctcaagacagttctcgggacttggttgccgaaaaagatggtctccatccgtaacacctcccaaggtaattcccccaactcccctaaattcgttgggacgaagacgacgatggagttcaaacacacggatggcagcaaggcggttgttggcatgacacggtacaacctacttacgactagggaagatggcgatggattgaatctggatgaggatctggctttatgtcacgtcttcccgctgngaggaaaagccaagggcacccggaaccggaatggcaaaagatcacgatcagggcatgaagtggatccacacgaacccattacccatgccggcgtggaaagattgcaccaaatgatgtccgattcccaaagaatccattatcgagncggacatggatggtcatctgctcttggctgatc

SEQ ID NO: 135343 - DNA, 747 bp, Zea mays
  Clone ID: MRT4577_54913C.1
atgggtttcgacgtaatagaggcgttggcgatagcttcacttttttggagacgcagtggacagacaaacgccaaaatggacatgagacggtcatttggggctgcgccaacagatttcagggtccctttcaccattaccgtcgccgtgctcagacgccgtctgccgtcgtcttcatcccagctggaagaccaccatgctgatcagccatgtgaagacttcattcaagatgagaagagggtggtgtacaatacgatgaatccttctatgcagctaggctatttgtttcctaacatgaaagaatttaggattgctatgcgtcagtatgcaataaagcatgagttcgagcttggaattgatgttacttcgacaaccagatacgttggatactataagggtggtgattacccttggaggatctatgcacgcgaagagaagaaaggattgcctactagcatggtagttgtactaaacgatgtgcacacttgcacatctagtggaaggaggaagactactacgcctaccagtggttgggttgcattccacgctaaacccatgctcatgaagaaaccacaaattcttgatgttaacatgatacttgaaatcgacattttcctgtgcaacaaccagatgatgaagttaaataggacatggcagcatgtgataaccctaaaccccaatctagcaacaaaaacacggcgtacaaacataggagtgcatgagtttgataatacgtacgacatttgttga

SEQ ID NO: 135344 - DNA, 887 bp, Zea mays
  unsure (1)..(887): unsure at all n locations
  Clone ID: MRT4577_54914C.1
cattgggtacctcgaggccggccggggtagccctacatcgccatccactgctgttcaccctgacatgtcttcttccttcactcgtaataccttctccatccctgcgggcgcggagggccatgagagaatcgtcatgtggagttacatccctaaagcttccttaagcccttccgatgctgcctcccccgtcatcatcatggcgaatggtcttgccctcccgagatctgctggactaccgcacattgcggcgcgatttgctaacgctgggtacacggtcttgttgtttgatttccgacatctgggcgattcgacggggcaaccaagacagctagtttcgcaagcaaggcaactggaagattacatgacagtgatacgattcgtgacagattcggactcgaatgcgcaggttttttgccgcaagaatatacccgcgagcgaggtggttctgtggggatggagtaactcaggaggacatgtagccaagctggccacgcaagcggataaactgcccatttccgccgtcatcaccctcgaccccttgtgcgacggttgggcgaatttgaggcatcacatgtggcacaacccgctgggcatggctcgcataggtcattggatcctcggcgatttcttactctccttcttgccggtcctcaacaagcaaaccacccttgtcgtgccagcgtttgggccgggaggtatgctgngctcgtcggaagcagaacacggcttccagatgatgagctcatccagcgcgacagaatcctccgcgngcgcacaggaggggagggtacacgaagagctggagaatcatgggatcgggaaagggccctcggtggtgaacgaaattgcggnccgatacgnattcgagtgctcttgcagcgatgcga

SEQ ID NO: 135345 - DNA, 271 bp, Zea mays
  Clone ID: MRT4577_54915C.1
tttttcacgcgtgcggagtggggcccggacacaggcttcatggcagggcgctcgggatagggttgcacggtggcgctaaccattacgacatgtgaaacttttacctgcgacctggaagacccgtcctggcgcgatgagaccaccgccttccggcgaggattgtacgctgctccgtgacatgatcctcacgcgccggatggggaacgttgccgactccgtctatagggtcaagctgatccgccggttttgacacctgtaccacagccaggag

SEQ ID NO: 135346 - DNA, 618 bp, Zea mays
  unsure (1)..(618): unsure at all n locations
  Clone ID: MRT4577_54916C.1
agcgctcggggaggcctcgctggggccgctcaggcgccgccctgcatcatgccgagctgctgcagcgcgcgctgctgccggagctggtggtcgatgtagcaggaggcgggaccccacggtgcggcccccggcgacggcggtgtacgtgtacatcgccagagccatgttcgcacagcgcaccttcgactcgatccgtccctgagaacctgatactgcctggagatggtgcccaagtacaacggcgtgtacctgcacgacaagatcaagcacctgacgcacgacgtacagagtaggacgacacggtgcatcaacgtcatggtagctcggcgttccacgtgatagtaccttgcaactccatcattgttcgtcgacatacggangtgcaccaacgtcacactacaagaacgcgcacttctttgacatatgcattaatacttaatcagcgcccacctacttactggagcacttctttaagaccgatgccaccgactgttcgtccaccacgtgagtaccagctcgatggactgtgcgattcggcggtcaataacctcaccatggtcgccatgtccatgctcaccaaggaggtgcaccgccgcaaccccaacttcaacgccggca

SEQ ID NO: 135347 - DNA, 120 bp, Zea mays
  Clone ID: MRT4577_54917C.1
accacacgtacgttaagatccaagcgggcgggctgcttagaggatcgacgcttacgtactcgagcatgcgacagtgtagatgagacatggcgtcacttaagttgaacacactggccggcg

SEQ ID NO: 135348 - DNA, 362 bp, Zea mays
  Clone ID: MRT4577_54918C.1
ctgagttagtcatgtatcatacactgaatattagacagctaggtcatagagggtaggcataccatgaaaggatgcatacagatacggtgatggcccatgacatgatcagcagccggaaggagaacgggatggatgcgtggcgatacaatcacggcatgaccgtcgaagtgagcgtggccacgcacggcagagaaagacatggccagaggagcttatccttataagaaggagcatgccatcgcttacgcgcaccgaggagaagagggccacctacctgacgtctactatggccaccacggcacgcgcgatcccctgaccaagacaaaggggcacgacggaactagcgcaagcgccgagcccag

SEQ ID NO: 135349 - DNA, 222 bp, Zea mays
  Clone ID: MRT4577_54919C.1
agggcacaggcgctaggcatacatagccgactacctgcgatacccctactacgattcctaccctacgtacgacctacatacaattacaagataccaatactttgactgactgccactacagcgataccgatacgttgctacgagcaaggtccagtggaccatgagcacgctgcagaccatacacctaccacctacctttaccgtacttcacttgacctatgg

SEQ ID NO: 135350 - DNA, 223 bp, Zea mays
  unsure (1)..(223): unsure at all n locations
  Clone ID: MRT4577_5491C.1
tgactgtttaataattatttcaaagaaaccatctatagtacgtgtggtctgagcaactcaaccttctgatcgtnacccatggccactgccgaagtccaaaccccgatnaactgnatttaccgtcacaggatcaatcacttccatccattgaacctatttaatatctccccaagaggctgtccccaactccaaagcctatgaatcagcacaatcttgccaacaa

SEQ ID NO: 135351 - DNA, 293 bp, Zea mays
  Clone ID: MRT4577_54920C.1
atggtcaagactctttcaacaaggcctgactccaagcccaagagcggttcatacaggtgcaaggctcggcgaaaactgggacatatatgggggtggcaataataaaaaaggtgtttctgaaacactagtgctcaatatgtcaactctgacatggtcagttgttatcactctggaaagacacgttcctcttgccacagagggcatgactctagtgcatatcaattacactgggtatgattatatcgtctctttttgaggatacactggacgatacaacaacgcggtgtacactc

SEQ ID NO: 135352 - DNA, 421 bp, Zea mays
  Clone ID: MRT4577_54921C.1
cggacgcgtgggcaaaaaaagacacttcttaagcttcaacaagaaagaaatagtattcgcatagtattagaagatggattttttcaatcaagctaaagccgtaaggatgcgtaacgtccatgataagtatctaacagcggatgaggacgaggaaacggtgactcaagacaggaatggttccgacaagagagctagatggattgtcgagccggttcgtggttcctttgaagtgatccgtttaaggagctgctacggtaactacctcaccgcttcgaatgagcggttcttgctcggagccactggacgtaaagtggtcttgtctaaaccggctcgactcgactcctccgtagagtgggaaccggtgagagaaggttccaaaatgaagctcaagactagatacggaaacttgcttcgagccaac

SEQ ID NO: 135353 - DNA, 361 bp, Zea mays
  unsure (1)..(361): unsure at all n locations
  Clone ID: MRT4577_54922C.1
aaaaatacaacaacacgacaagcaaaaaccagacaaaacaggaacaaaaaaaagaaaaaaaaaaaacaggaacctaacccggggggccgtcccaaggggggccccctgcgggagcccttcccactannttcctgggggggggggcttttttagcccccccttggccctctcattttgcgctttacttttctctgtccctcttctttcaacgtctttactcggaaaccccctgggtccccctccttattctctttgccctgcttttccttttccccgcctgtggctttcccgtggggccccgcacctgtcgcctttctctaccttttttgcttcctgattggcgtttgctcgccccctgttt

SEQ ID NO: 135354 - DNA, 162 bp, Zea mays
  Clone ID: MRT4577_54923C.1
gtgactgtgcaaagcagtgcagtatatgtaggtgaagggggtgctatcgattcgttcattctttgtacgcgatgtcgatttatttacctcaatcgaaatatttgttcgtggcattccagatgggaagtggcccaatataattgagtctgaaaacgtgcgccc

SEQ ID NO: 135355 - DNA, 277 bp, Zea mays
  Clone ID: MRT4577_54924C.1
ccctctagagcttcttgaattgcagacttgcagtaggcacattgcacaggcgtcagtctcaaggaaggatgtcctccaaatcatctgccgtccgagataccttgtaaacaagcaagcaccgtggatgctggaggatagagactagacagtagtcgctccacggtggcgcccgttttggtcagctacttttcgcgcctactcaccaatgtctaagtcacaaaggagtggttaattatcgtcctctgtgatcaaaaaaaaaaaaaaaaggggggccgcc

SEQ ID NO: 135356 - DNA, 211 bp, Zea mays
  Clone ID: MRT4577_54925C.1
cgttccgcaggatataagttatgcctgtggatgccagtcaaagtttgcgtattatttcggtaggtgcattgtaagtacttccgcggctgaaagtcttagtctaccttggtggtgatattgggagcatgctactccaaagcaaagtgcaccatcagagggtgcgtcgataccccgcggattgcgaaaacaggcttgcaaaagggttcgagta

SEQ ID NO: 135357 - DNA, 305 bp, Zea mays
  Clone ID: MRT4577_54926C.1
caaagagaacaagggggagaggggatcatatgacaatacaacttttttttaacaccttgcaacaggtattggatccattgacacaccatggtaattataaacaaacagctaatgatgctaaagggcctttgatcaggagcagggggcctttgcattttgggccaaaaaaagggggggggagaaaaaaatacaggttgcaaaaaaagacattgttataggacagggtcatgttcttgcatgggttgtctgttctgtattaggacaagaggggggtagatggacactgactgactcttttactgact

SEQ ID NO: 135358 - DNA, 759 bp, Zea mays
  unsure (1)..(759): unsure at all n locations
  Clone ID: MRT4577_54927C.1
actccatagggcgaatgggatcctcgaggccggccgggggctgcccgtatcctccaaattggttcgcgaaacactcatcactagtaccaatggaaacaacactccccatggtccggggcaatggccgcctcctgcccttgtcccttctcttgctcgctgccgccgatttcacaacggtgcatggccaggggcagcagcctgaagggccgtactactcgcgaagcttcaacccatccatggccatcgtcatcgtcgtgctcatcgccgccttcttcttcctcggcttcttctccgtctacgtccgccactgctacggcgacggctctagcggctactccgcgagcccggcccccggcggtgccgccgcgcgatcgcggcgccagcagcgcgggctcgactcggcggtgctggagtccttcccgaccatggcgtacgccgacgtgaaggcgcacaaggccggcaagggcgcgctcgagtgcgccgtctgcctcagcgagttcgacgacgacgagacgctgcgcctgctgcccaagtgctcccacgtcttccacccggactgcatcgacacgtggctcgcctcgcacgtcacctgccccgtctgccgcgaggcttcccgcctgnggatcgcggtcgacgcggaggagcgtccagactgacgggtcgagcaagggcggtaggacagttggcgacgccggcgcaggcgccaagtctttctgacatgacgacccagcgtgcgcgcctggacagcgtgnttgactg

SEQ ID NO: 135359 - DNA, 794 bp, Zea mays
  unsure (1)..(794): unsure at all n locations
  Clone ID: MRT4577_54928C.1
ccctataacccccggtcgcctttcccggcgaaaggtatcccggcggcgatggcggcggctgcggcaaggtccggatcccggcgcttgttctccatatccgccctggtgccaccgaagccaccgagccctcccccgaaggcagatcccttcgccagcctctttgttcccgggttaagcaagcgaacagtagctgatggacttaggggagcttttgcaaagtctggtgaagtcgtgcatggttctcttttgacaaaccttccagcatcatctgtaaaaaaatcaaggtggtatatgatcaatgcaaaccgttcaggtcctttgacagtgcgtaaagaataccgcaaagtacttccttctttcataaggccatctgcatcttactccacacaagcttcagaaaaaagaccaaaacaggagagaacagacttgacgactgttgaagatccctttaatgcgcctacctacaatatacctgagaagccagtgacatttgtcgagggcgcctcttacagtgttgtaatacttgctgggcttggagttgctgcattggctggatacgctgttttcaaagagcttatatttgaaccaaaagagtacaagatttttgggaaagctctagcaagagttcagagtgatagccaggttacagccaaaattggttaccctataactggttatggtacggaatccagaaaccgtgcagctcggcagcgcatccaaaacagggtttggacagatgangatggtgttgaacatgtggaggtaggctttcatatccgagggccgcatggagc

SEQ ID NO: 135360 - DNA, 630 bp, Zea mays
  Clone ID: MRT4577_54929C.1
cccacgcgtccgcccgaggcagttccgtgccagatcatcactctcggcgattaccacacggattactcctcctccggctccatccatgatctaatctagcaagtcactccaccgcccgcctttgtagtcgtcactcttcccgatccgtcagccaacgccaccgattggtcaggcggcggcgatggcgtcccgggacgacacaggtggggaggcccgaagacggcagctcgctcttcgagggcatggtcctcttcgcgccagagcccaccgccgccgaagacctcggtccctgcccctgcccctgcccccgcccccgccgaggactcggtccctgtccccgccgctgtccctgagctgccatccgccgcccgccacgacgccgacgcggcctcgtccgtgccaccaccgctggacgaggatctcttctccgatctcaccctcttcgccccgccgcaggagccgctctcgctggagcagacacccccgcccctgctcccgcaaggcgaggatcggagccacgcggcacttgcccccgcgccgctagcccctactccggggctctctcggcagccgtccacctcgtcgctgcgcaagaagaagagggccgggcgcatcgggtacgcccgctcg

SEQ ID NO: 135361 - DNA, 351 bp, Zea mays
  Clone ID: MRT4577_5492C.1
gaagcaactcactatattggcacaacatcatacctttgcttaataatgtatatagtgcacaagtaaattgtcttcctaataaagcaacagacttatgcgtacatgtctaacaacatcatcattcctgggaaaatattatattatgtttgactgcataagaaacaagcaccgagtgtcccacatacatcaatgtccttgacctttacattcttagttttcaccaggcttggattctcaatctcgatctgacttgctatgcctttgtgttttggtttcgtaaaatcttctgattattcttctggtccccctttcactcttctattgtagacatccttctcatcatgctatatt

SEQ ID NO: 135362 - DNA, 216 bp, Zea mays
  Clone ID: MRT4577_54930C.1
ctgaggcaagttcgacatgcctgaacgcatgtagtgaggctcaagaacaagaatccgcaccttcgtgcccctgaaccaatacttatggtatttgggtaccatctgatgtcataaccaaagagcaacatgttaacagatgctttgaaaaactgtaccgtaactgtcggattcttttaagtacattatagtaaagacttgagcgttagctcaaaatga

SEQ ID NO: 135363 - DNA, 409 bp, Zea mays
  unsure (1)..(409): unsure at all n locations
  Clone ID: MRT4577_54931C.1
ggtggagatgctggggcgcgccggggaggtggaggaggccgagcgactcgtggccgggatggaggcgcgcccggacagggtcatcttcgcggcgctcctcgccgcgtgccgcgtgcacggccgggttgacgttgccgagcgggtggccgggctcatgcgccggtatgccgttgcgtgaaaactcgcggtctgactaatgcatcatcagttgaagacttgaagcgcagttcagacctgtgatctgaaataatcatccatcgccatgcatcttttgggttgattgcttgcttggacacgaatcggactaagaaatactccatagctggcaatgtggtagcgttgcttgtaagtgcattgtatgttttcagtcattcatgcagcangagcccctcctggctagtaaaatcag

SEQ ID NO: 135364 - DNA, 479 bp, Zea mays
  Clone ID: MRT4577_54932C.1
aaagacgggggtagcaggaactcgttctttctttttttgctccaaaaggattaaaacttggggggccgcccagaaaaaaaacctcgggaccggaaaaatatttaatctttatcaggggggggcatgtaatcggaacccctgctgccatttgcccttgggggaaagcccttggcccttgttttgtttcaacaaaacgaacccagctttttttcctttttttggatttcacaggaccaaagtacggggcccacatttttgggcaaggatttttgaagttgggaccccccccttagccactggtaagtttttttgccctcattggcaacagcatttttttcagggggggaaaaagacttggcaacatttttggggccaacaatgcccttaaaaaaatctttaaggggttaagctttcacttgggcatttttacaacgattttcaatgggatctacaagctttaagaataacctttgccaaaa

SEQ ID NO: 135365 - DNA, 211 bp, Zea mays
  Clone ID: MRT4577_54933C.1
tactagagtaatgctactggtattataagctagatggatgtgtgcctgtatctacacgggcatggtgtttatcaatcgtgtacacagtctgtaaacggtgtatcttggatgcatgttgtcgcgagcagagtacgtaggtatgaaccgatgtgtgcgcttgtgtctgactactctatctatgtagcaatgagttgtcagtgtgtgctttgat

SEQ ID NO: 135366 - DNA, 181 bp, Zea mays
  Clone ID: MRT4577_54934C.1
ccggccgggggaaaacttccgaggagcggtgattcctgcgagtttcccacacaaccaagagctagaccggcagccattctcttcgcgccacatcgcacgacctccccaaagcggacgcgcccgctgcccgtctcgcccccgaggcgatgggcgcgaggtggacttccacttgctgcgccgc

SEQ ID NO: 135367 - DNA, 182 bp, Zea mays
  Clone ID: MRT4577_54935C.1
tgccaatgggtcagtgtcaggaacacggtgttttctttgggcaaaggggggtctatcaaaggcgccagtaccatggcatgtcctgtgtttagtcttggccaactgtggaggccacgtgccatcttctgatatgggtgagggtatgttattttgaacgaatttggcaaattcagtgaccggat

SEQ ID NO: 135368 - DNA, 312 bp, Zea mays
  Clone ID: MRT4577_54936C.1
gttaaaaacaattggtttttacagcatttttggtttgcacaaggggaaatctcacccggggccccaataaatagataaaaggggccaggtttacagaggttaacagtttacacaataaccggaacgaccccaaacaaaatttgtgatggtgaaaacttggttttgttaaagcagggcccggatcgcattatttttttttggaggcagccttggacaccttggggccggggggggcctttttttccacccttttgagaactccaacaggaaccgcttgttttatgtgacgggccggaaaccttccaagggggg

SEQ ID NO: 135369 - DNA, 194 bp, Zea mays
  Clone ID: MRT4577_54937C.1
gagtcataagtcggcggccgccctcgacagggggggggatattttgaccgaaggcggccacaccctcgtccacaatgcagaactactaacagcaccggcccgcgctaatctccactgccatgatacaaatgatcgcgatcacaccgacctccatgccaagaggacgaacgacaaacaaaaagacgcgcccgaaa

SEQ ID NO: 135370 - DNA, 1455 bp, Zea mays
  Clone ID: MRT4577_54938C.1
ccgcgcccccccccccgcccgtccgtccgtccgccggtaactgggagtggcaagcgccaaggagtagttagagctcagtagggatacagcagtttctgagtcacttcgtctctgacatccacgagtaccagctataccagttttgattccactctgatttgctcatcaagcgtcaatgctccctccaatcattcttaatctcaggaagttagcagtgagatgctttcagtcacacttgttttagtcttctcctttcagaaggctgatagtcttagccttataccgttggtcttctctatttctctccttcctctgcatgcaatgttgcatttctcgattccagttcagagacttccattcctagagttgcgtggtactcacctcttgtttaaatccacttcattgcatgcaggttgaaagagataggagtgagaggcagttcccttccctactctcacaatgcccatggagcaagcatccaggcactgcgataaagacacgctgaagatggccatgctgaaacacgaagagactttcagacagcaagttcacgagctccatcgcttatacaggatccagaagctcctgatgcgagacctcacacgggagctcaagctcaagagccagaggagcctgcccaccacctcgccgaacggcagctgcgccgagtacagcagaggggctctcggcatgtgcgcctacgagcgcctctacgccgctctcggccgcggcggacacgtagcagcagcagcgacgccgacgccgacgccgcgcaccgctctcggcctcgacgtcgtggcgccagtcgtcgagtacgtgcggagcgcggaggaggaggacgacgacgacagggcggaggaaaccgacgaagacgcggagctggagctcacgctcgcggtgggcggaggcggggccaagaagcggtacgacgagtacccgtccggtggggagagtctgtcttcgtcgtccacggagtccgacgtgctcaccgtctccggccgtgagtggcgtcgggcgcgcggcacgccgtatcacaagatgaggccggcgaccgggctggacgtggtgcaggtggaggacgacgtcggggtgccgccgccgctgctgttccactggctcagcctcaagatggcatgacgcgatgcgaggaagcaagagcacattgcatgtgtgttcgttgctgcttgctgtgtcagggtgttgacttgctactgttcttcagttgaatgcttttgtgtgttaggttttagtggtggatcaagtctagaaatcaataattggctggctgttcatgataacatgtaggagagtcttccctaacataagccgggtgtgggggcctttcagatgaagctgtgtgactgactttctgccaactacaatctgcaagtgttaccttctgccctgatcgacggacgtaatactgcaagacttcagtcgataaaaaaaaaaaaa

SEQ ID NO: 135371 - DNA, 324 bp, Zea mays
  Clone ID: MRT4577_54939C.1
ggtgttattttttttttttttttttttttttcaaaaaaaaaacaagtaacccgtccttcttttttatggaataacaaactacccatttgttaacaaactttggggaatttttccagcaccgaccaatccatttgccaaaaaactttccgactttaatttgtacaccggaaattgggcctagctttgtaatttggaacgggggaacagctttaataggagttgaagaaccaggacccccctgaggactggcaatgtaaaccatttctttgggggggagccgcagaaataattcccccccccttcccatttttaggcgctaaaacc

SEQ ID NO: 135372 - DNA, 284 bp, Zea mays
  Clone ID: MRT4577_5493C.1
gagctggcagaactaaaacaactgttgatgatggggtagtcaacgatttttcaaaacaaaaaaccctgtggtcgacaatgtgaaagggtttcctaagaatgcctgcttgggaactcggaaggacttcaatttgccccataaaaggctccacccttaaaatttttacctttaattaaaaagctcttcaatttttgtttgatagcaccaaattcctaacctgccgttaaatatggttctgtggaagccatttttgctaaaatggcccaccggcaggttctttttcc

SEQ ID NO: 135373 - DNA, 161 bp, Zea mays
  unsure (1)..(161): unsure at all n locations
  Clone ID: MRT4577_54940C.1
tcttcctttgacaagacaaactgggtcatgcgcggcgacaaaatagaaggcctccgcctgctccccaccaacctcncatacacaaccggctcaaccgccgncaactccccnncnncctttaaagcttctgcttataacctttttttttttttttcttcccc

SEQ ID NO: 135374 - DNA, 375 bp, Zea mays
  Clone ID: MRT4577_54941C.1
ggggggctgaacaaccagcccagcgattaatctgatcacgcccaaacgctaggaacactatcccttctatgcaatcaatgcgcaaaccataacatatcggcccatttatttttgctacaatgctcacgagaggaccccctcatggaacaaattttttttgagacagttcttggccctgggcagtagggtggttttccagggatcccaccgtgttaagctatacaattgttttgtgggcttgggggattaggcaacatgcccttgatacatagaggggcaaggaccagcttataggttgttttctcgacccccacaaaaaggcgcttcaattcccttgaattgctccaaaaaacatgccagggcaataggatcacc

SEQ ID NO: 135375 - DNA, 423 bp, Zea mays
  Clone ID: MRT4577_54942C.1
agctgaggccgtttttttttttttttttatggggttgtgttttttttttttttttttttttggggtttttttttttttttacccttagattggcctttattacgcatttgtctttgatcaaaaaaaccgttggggttcaccgaactcccgtttaacaatacaatcatgggccaacccggttgaagggggaatgggtgtatcttttgctcggaaaattatttaacatgggagtttaaaaaaacattgttgcaactggggaaatcaaacttgggttcacctcacccctcggtcattgaacaaaccttgcgtcccctttttgttgccccccttggttttgggggcgccccatcctttaagcttaacaacagggcaaccacaccggttgcggaaaaacagaacggcttggccgtttggcggtgccat

SEQ ID NO: 135376 - DNA, 419 bp, Zea mays
  Clone ID: MRT4577_54943C.1
gagctataatgtcggcggccgccactcttcttcacgggggggcgctctatacatggggcttcggcgcgccgggactcacagcaatacctcataggtagggaccgcgttcgatggcgcgggcatcaggcagtaagctatcgcgctcatgatcgcccccggatacaccgccgaggtggcgcccacctaagcgcgcggcttactcacctacttcccggaggtggtcaacaacttaggcatcctcctcgggtacgtctccaacttcgtcttcgcgcgcctgcccatacacctgagctggcgcgccatgtacctggtcagcgcccagccgaccgtcttcctgggcgtggccgtcctcgccatgccggagactccccgctggctcgtcatgcggggccgaattgacgacacgcgccgagtgctgc

SEQ ID NO: 135377 - DNA, 272 bp, Zea mays
  Clone ID: MRT4577_54944C.1
tttacatttaattttttcaaatactcactatttattaaagggggagtttaataaccagatcactactcttttcattcctactcttagcagaaacactgaaagtatcactgtcacataactgatcaacacttacaaaagcacaaactctaatctttgacaatgatgctgttccactcaaccctacacaaaaaatagattttttcaaagaaacaaaaatttatcttatctcaaactatctgcataaactgtacttatcttttcaactaaccaca

SEQ ID NO: 135378 - DNA, 329 bp, Zea mays
  Clone ID: MRT4577_54945C.1
taaaaaatattcctaaaccatacatcctgactttttttttatatcccacgtgtccaccttctagatgggctcctttatttccaatgtatggcccatctttttacaacctcactcctactaaaaccctgtgatttcctaaataaatcgctatcctaaaatatcctttttatccatcattccaatcttcctaatagtcctactcctatctcccttcccaacaacttcgcattcttaatctcaaatggtacgctccctttaactcatctttaaccacaccttctattttgtttactcttattttatccttcccactttttcattccataccc

SEQ ID NO: 135379 - DNA, 1248 bp, Zea mays
  Clone ID: MRT4577_54946C.1
atggaggaggcagcgccggcggctgggcgcgcagaggagaggaagcagcgccagcggctgtccctggcggcccttccagagagttctttactgaagctagatgatatttgcaggaaagcagacatcgttttggttgctgcacgttcatatggtctaactggtttggtcagggttagcgtcaaggagcactgtgttatagaatcaaaaccagatcacttcttggatgatttgcgacttcacaatccatggactgaactaaagcaatttgcaaaatcaattgatataaatgataaagatcctgttgtccacaaacatactccatacattgttgtccttgtgagacttgctgaaaaatgggcagatgcccatgatggtaacatgccttcaactaggcaagaaaagaaggaatttaaggacctaattcgagcccacatgcttaatgtagatgaagaaaattacaaagaagctgtggactcatcatataaagtctcagtcactccaggaatcagtaatgagatccatcagataattgatgatgactctgcggaagtcaattcatcatcagaagatttctggattttagtagctgctttaaaggagtttatttccaaggagggtaatggtgagctacctctggagggaacaatacctgatatgacttcccttactgagtattatgtaagcttacaaaagatttaccaagctaaggcagaatttgactgtcttgccctggagcatcatgtaaaggaaatcttgaaacagattggtagagatccggattctatttcaagagcatatatcaaaacattttgtaaaaattctaggaaactaaggatttgtagatatcgtagtttcaaggaggaatttagctccccgattgtctctgagattcagaggtatttcagcgatgaagactgcagttacgcaatgaacttctacattctactacgggctgtcgatcgattggctgccaattatagccgattacctggaatcttcgacagtgagattgacgaggatatccctaggctgaagacagttgcggcttcagtgctaagcgagatgggtttgaacggagcatccttatcccaagacctggtaaccgagatgtgccggttcgggggtgcggagattcatccagtggctgctttcatcggtggagtcgcttcacaagaagtgattaaggtgtccatcgacagaccgaatcttccgtggccagtattccttcggcgacgcggttgccgttag

SEQ ID NO: 135380 - DNA, 870 bp, Zea mays
  unsure (1)..(870): unsure at all n locations
  Clone ID: MRT4577_54947C.1
agcaccacctgtttcgtggagaagcccgtcctcgtcgagtgtagcggggcgaagcgatccgaactccgagaaccccaggggccagggctcagtccacagcgagagcagagaacgcagcgggcagcggcctgccggtctccgccccgcactcccgcagccatggccgccgccgccgccgtggttgccgagcccaagaccaagtacgatcgccagctcaggatatggggtgatcaaggccaaactgcactggagaaggccagcatatgcttgcttaactgtggtcctaccggaacagaagcattgaagaatctcgtgcttggaggaataggaagtgtgactgttgttgatggctccaaagttgaagcatctgatctggggaacaattttatgttggatgaaggatgtttggggcaaccaagagctaaatctatatgttcattcctacaagagcttaatgacgctgttaaagccaagtttgttgaggagtttccaacgcatttgatagacactaatccttcattcttttcccagtttactgttgtcattgctactcagcttcaggagagttctttattgaagatagattgcaaaagcatgattagcagacatcgttttggttgctgcacgttcatatggtctaactggtttggtcagggttagcgtcaaggagcactgtgttatagaatcaaaaccagatcacttcttggatgatttgcgacttcacaatccatggactgaactanagcaatttgcaaaatcaattgatataaatgantaagatcctggtgtccacaaacatactccatacattgttgtccttgtgagacttgctgaaaatgggcagatgcccatgatggtacatgccttcac

SEQ ID NO: 135381 - DNA, 832 bp, Zea mays
  unsure (1)..(832): unsure at all n locations
  Clone ID: MRT4577_54948C.1
ccgggngccccattatatattaagcagaaaaaaaaagaaaaaacaaggtctacagaagaacctccttacggaggccaaacagacatacaaatatagatccataaggggattaaaaaaacaaactactcaagtcttcctaaggctctaccaagggtgcaaccaaatgagcgaggccttttgcaccagctacttcccatcttcttcttttctcatcagcagctctgagagttaaagacatacttggattgcagccaccaaaaatgcatttattccgatgattccataaagtacaagctcccaaaatgatgagagaatcttgaaatgcaaaagatgaattgtcctgtgtttttttgtgccttaaaacacaggttttgtttttcttattcttcaactttggttcttccttttaaatgaaatgcacatagtggcttccctactatattccgcataaaaaaacgttttctcaatgtccgcatgcaagatgaatttgagattaaatttgtgcatatttattgaattgtgcactacctacatgattgtgtgatgatttttgaaccactgcaacatgttggcataactttttttttcctaaagaggacaattcctgaacactcggacactaacgaattattgatctcttagtataggagaacatagcacagaagagatcaaataatagaacatgatagcatcgatttgttatatacttggtattcaaatatatgcttcagaaagcaaaacacgatacaacatcaaatcattaaacaaaccanaaagtttgcactaaaccaaaaaacattaactaaagctcactatgaagtatggaagttgt

SEQ ID NO: 135382 - DNA, 617 bp, Zea mays
  Clone ID: MRT4577_54949C.1
gccggccgggtcgggatgcacccacctgtttcgtggagaagcccgtcctcgtcgagtgtagcggggcgaagcgatccgaactccgagaaccccagggccagggcccagggctcagtccacagcgagagcagagaacgcagcgggcagcggcctgccggtctccgccccgcactcccgcagccatggccgccgccgcctccgcgttggttgccgagcccaagaccaagtacgatcgccagctcaggatttggggtgatcaaggccaaactgcactggagaaggccagcatatgcttgcttaactgtggtcctaccggaacagaagcattgaagagtctcgtgcttggaggaataggaagtgtgattgttgttgatggctccaaagttgaagcatctgatctggggaacaattttatgtgtaatttctttgctatgtgattccacctgttcttctgaattcatccccagaaattgatggaactcatattctggtaccttatatttgcattcagtggatgaaggatgtttggggcaaccaagagctaaatctatatgttcattcctacaagagcttaatgacactgttaaagccaaaaaaaaaaaaaaaaaaggccccta

SEQ ID NO: 135383 - DNA, 1916 bp, Zea mays
  Clone ID: MRT4577_5494C.1
tacaacttcccacaggagaccagtggcgcggcgtctcccatcccccgcccccaaatttgttgcggcgggagagccggagaggaggcagctccacagaaacagagagcgcataaccggcggcgttggcggcgatgaggatcgaggaggtgcagtcgacctcgaagaagcagcgcatcgccacccacacccacatcaagggactcggcctcgacgccaatgggatggcgattgcgttggcggcggggttcgtgggccaggcggcggcgcgcgaggcggccgggctggcggtcgacatgattcgccagaagaagatggccggccgcgcggtgctccttgcgggtccgcccgccacgggcaagacggcgctagcgctcggcatagcccaggagctcggcagcaaggtccctttctgtcctatggtaggatcagaagtgtactcctcggaggtcaagaaaactgaggtgctgatggaaaatttccgtagagctataggtttgcgtataaaggaaaacaaagaggtttatgaaggagaggttactgaactttccccagaagaggctgagagtacaactggtggatatgcaaaaagcattagccatgtaatcatcagcttaaagactgttaaagggactaagcaactgaagttagattcttcaatttatgatgctctgatcaaggaaaaggtggcagtgggtgatgttatatacatcgaagcaaatagtggagcagtgaaaagagttggtagatgtgattcttttgctacagaatacgatcttgaagctgaagagtatgttcctatccccaaaggtgaagtccataagaaaaaagaaattgtgcaggatgtcacacttcatgaccttgatgcagcaaatgctcagccacaaggtggccaagatattttgtcccttatgggccagatgatgaaaccacgaaagactgaaatcaccgaaaaactacgccaagaaattaataaggtggtaaatagatatatcgatgaaggaattgcagagcttgtacctggtgttttgttcattgatgaggtccacatgttggatatcgaatgtttttcttatcttaaccgtgcattggagagcccattatcaccaatcgtgatacttgctacaaataggggaatatgtaatgtaagaggaactgatatgacaagtccacatggtataccggtggatcttctagataggctggtgattattcggacagagacatatggccctactgagatgatacagatattcggctcgagcacaagtggaggagattgatatggatgaagaaagtcttgcttatttaggcgagatcggacagcagacatctttgagacatgctattcaattgatatcacctgccagcgtggtctcaaagactaatggaagagagaaaatctgcaaggctgatctcgaggaagttagtgggctctatttggatgccaaatcctcggctcggctgctccaggagcaacaagaaagatacatcacctagatttggatcacctgtcgtggaagtctcgaagagaatgtagttgccagctcgaaagtcatctagtgaattgatctgcttcacaggtcttggagcgagcacatttcgggggggacggcttgaattttgcagtgcctgcttgtgttagtctccagagaagacttggtaccggcatattgcctgttcacgcactgttcgctgattagattggtcaccggtgcaggaattgccgtgtgtgttttttatcttgctcatcggtgtccggaatctgtgcctccacgggttgtattggcccgaaccctatctttgtaaccatggataatggatagcattcttacagaatgcaacttgcatggctttattatttctaaatgtccataaagcttaacaaaatgtttctacaacatatagacctcctgccc

SEQ ID NO: 135384 - DNA, 568 bp, Zea mays
  Clone ID: MRT4577_54950C.1
cgctcggctctactgggcagatgcacccatctgtttcgcggagaagcccgtcctcgtcggagactcggagtgtagaggactagaggggcgaagcgatccgaactccgagaaccccagggccagggctcagtccacagcgagagcagagaacgcagcggcctgccggcctccgcccctcactcccgcagccatggccgccgccgccgccgtggttgccgagcccaagaccaagtacgatcgccagctcaggatatggggtgatcaaggccaaactgcactggagaaggccagcatatgcttgcttaactgtggtcctaccggaacagaagcattgaagaatctcgtgcttggaggaataggaagtgtgactgttgttgatggctccaaagttgaagcatctgatctggggaacaattttatgtgtaatttctttgctatgtgattccacctgttcttctgaattcatccccagaaattgatggaactcatattctggtaccttatatttgcattcagtggatgaaggatgtttggggcaaccaagagctaaatctatatgttcattccc

SEQ ID NO: 135385 - DNA, 162 bp, Zea mays
  Clone ID: MRT4577_54951C.1
ccttttgtttttttttggggggatttaaaaataattttatttgttcacaaatcgtggacgaggagcccccaatgcagactgtgctgcgtaaaacagtctgatcagaaggtgatgatgcacatgctgggtcacaacccctcagaaaagaaacacaaattcgat

SEQ ID NO: 135386 - DNA, 357 bp, Zea mays
  Clone ID: MRT4577_54952C.1
tgacgatgaagtctggagtatctcactcgttcttactaattgagatttgatattttaaggttttctagttctctgtcttgttagattaaaactatgtcaattttagcttagatctaatgccatgttttttttatttttaccctctgacaggcaggttgttgcatgtcattcacattgattaaagaatagctcaagaaaaaagacctaaactaaaatgccaagatctttagttgttgggtttatatgttttttgcgatgaaagtgattattatgttgtttcttttgatattacagttgggatccactgtgattaggttgaagacaaaggatggtgtcgtcctcgctattgagaaactt

SEQ ID NO: 135387 - DNA, 1187 bp, Zea mays
  Clone ID: MRT4577_54953C.1
tccgggccggaattcccgcgtcgacccacgcgtccgcaagctaaggcagaatttgactgtcttgccctggagcatcatgtaaaggaaatcttgaaacagattggtagagatccggattctatttcaagagcatatatcaaaacattttgtaaaaattctaggaaactaaggatttgtagatatcgtagtttcaaggaggaatttagctccccgattgtctctgagattcagaggtatttcagcgatgaagactgcagttacgcaatgaacttctacattctactacgggctgtcgatcgattggctgccaattatagccgattacctggaatcttcgacagtgagattgacgaggatatccctaggctgaagacagttgcggcttcagtgctaagcgagatgggtttgaacggagcatccttatcccaagacctggtaaccgagatgtgccggttcgggggtgcggagattcatccagtggctgctttcatcggtggagtcgcttcacaagaagtgattaagctggtcaccaagcagtttgtgcctttggggggaacattcatttttaatggaatcgatctcaaatctcaagttttggtgctataacatggatgtggagcgttggatttgagttggtccagattttgtgccagggcaccgcgctgcccaacgagtacccaagtctcgcagaaaatatcaatacttgcttcgtatgattttttgccaaatgactagcaaattcctagctcacgcggctgttatgcgtaaaaccagaagagctgctgcttttagattacgtctgttatatattaataggcgagaagtaatatgtcagtaggggcgtggggctgatgtggtaagatggatggtgttaaagactagcatgtgcgcgatttgacgaagacgactacgagagcgggatgagcaatgagcatgtcggccgagctatggacgctcccatcaattcatggaccgaaatcactgtgcatatgatctcaggtgtccatcgacagaccgaatcttccctggccagtattccttccgcgacgcggttgccattagacgaaggaaactgtcgtgtgacagcgaaatgtggttgctacatgctggtagcgcacatagcacactttatcttccaggctgtgctcatgtttgcctcagaagtaaataaaagaacacatgacatc

SEQ ID NO: 135388 - DNA, 354 bp, Zea mays
  Clone ID: MRT4577_54954C.1
ctcaaccaaaatttgctcctaaaatggaaatgaatctttcgggcgcctacgcacgtgtgtgatgatgggaacggagtgtcagacgctacactactgcttgggccctttgggtgtttgatggcctccttttaacctcacctgcatagagaaagttagctagttcagtaaagcaaaaggatctcataacttttcttgtcagcaagacattacaattcttttatatatatatggtccgtttatctggatgcaataataattagatagttttattaaggtggttgcagatgcagtagattatatatctagtctggcaggatgaggatgcaactaggaggctgtcttaacgcaacaaaa

SEQ ID NO: 135389 - DNA, 2321 bp, Zea mays
  Clone ID: MRT4577_54955C.1
tggtacctcccgtacctcggtgttgtaccatgacaacaatgttaatcacacagacacaccatatatatatatatatttaaaagcatgttgatgctaggcatactctctcattagcattcttaggcacatgcctccaaccaaacaacctttttcgtacttgcctggtcagagtcaggcaacttccctagtgcctccaaccaaacatgccttaaattagtacttatttgatacatcccgtcaatgattgtctagttgttattttttcgtaattgaaaaaatagtttccccgttgcttatttggccatgcccataagtggattcatcgggcagaagcacaaactgacaatactaatttctatagttaaccttcttttctaacataatacagttttggtctgcagcgctacagtttgattattccttcaggttttattaatactgatgctagtagagtttctttatctttgttttatagtattgctggcaaaacatttatatgcagtataactcagactattttttgatgccctgtttttttccctatgttgcagcttccagagagttttttactgaagctagattatatctgcaggaaagcagatatcgttttggttgctgcacgttcatatggtctaaccccattggtcagggttagcgtaaaggtacttgatatattcatgtccaaaactaatctctttagtatgcaaacataattaattatcatgatgtcacagttgcagatagcaagtccttgtgcttttgaatgctcatacattcatatttgcgtacgagactacgaatacaaggccttgctataagggtcatgttgtatgtgatttttctttttttttgggggagtcatgtctctgctgtcttggcggaaagtcataacaaaagcattttgggaagattccatatttatttattgttgtccaggagcattgtgttatagaatcaaaaccagaccacttcttggatgatttgcgacttcacaatccatggactgaactaaagcagtttgcaaaatcaattgacataaacgataaagatcctgttgtccacaaacatactccatacattgttatccttgtgaggcttgcagaaaaatgggcagatgcacatgatggtaacttgccttcaactaggcaagaaaaaaaggaatttaaggatctaattcgagcccatatgcttaatgtagatgaagaaaattacaaagaagctgtggactcttcatataaagtatcagtcactccaggaatcaataatgagattcgtcagataattgatgatgactctgcggaagtcaattcctcatcgtcagatttttggattttagtggctgctttaaaggagtttattgcaaaggagggcaacggtgagctacctctggagggaacaatacctgatatgacttcccttactgagtattattcggcgtaagcctacaaaagatttaccaagctaaggcagaatttgactgtcttgccctggagcatcatgtaaaggaaatcttaaagaggattggtagagatccggattcaatttcaagagcatatatcaaaacattttgtaaaaattctagaaaactaagggtttctaggtatcgtagttttgaggaggaatttagctctccgtttgtccctgagattcagaggtatttcaccgatgaagactacagttacgcaacgaacttctatattctactacgtgctgttgatcgattggctgccaattatagcagattgcctggaatcttcgacagtgagattgatgaggatatccctaggctgaagactgttgcggcttcagtggcaagtgagatgggtttgaatggagcatccttatccgaagacctgataaccgagatgtgccggttcgggggtgcggagattcatccagtggctgcttttgtcggtggagttgcttcccaagaagtaattaagctggtcaccaagcagtttgtgccgttgccgggaacattcatatttaatggaatcgacctcaaatctcaagttttgatgctataacatggatgtggaacgttgtctgtgtggactggatttgagttggcccagattttgtgccagggcacaacgctgcaaatggaatctgtttgcccaacgcgtagccaaatatgtgttgcatgatattttagagcctgtttgtttcctcgcaggattatataatccagcttagtttatatagattatataatccaatttatataattttattagagatggctgtttatacaaattattagtgggtacaaagctaaacaataatataaaataagcacctaatgatatgcttaaaaaaaa

SEQ ID NO: 135390 - DNA, 2029 bp, Zea mays
  Clone ID: MRT4577_54956C.1
gcattgcctcgaggccggcgtcgatcccgcactacctcctcattcctcgccggagtgtagcggggcgaagccatccgaactccgaaaagccccccagcggcctcccctccgccccgcagccatggccgccaccggcgtggtcgccgagccgaagaccaagtacgatcgccagctcaggatatggggtgatcaaggccaggctgcactggagaaggctagcatatgcttgcttaactgtggtcctaccggaaccgaagcattgaagaatctcgtgcttggaggcataggaagtgtgactgttgttgatggctccaaagttgaagcatctgacctggggaacaattttctgttggatgaaggatgtttggggcaaccaagagctaaatctatatgttctttcctacaagagcttaatgacgctgttaaggccaagtttgttgaggagtctccagcgcatttgatagatactaatccttcattcttttcccagtttactgttgttattgctacccagcttccagagagttttttactgaagctagattatatctgcaggaaagcagatatcgttttggttgctgcacgttcatatggtctaaccggtttggtcagggttagcgtaaaggagcattgtgttatagaatcaaaaccagaccacttcttggatgatttgcgacttcacaatccatggactgaactaaagcagtttgcaaaatcaattgacataaacgataaagatcctgttgtccacaaacatactccatacattgttatccttgtgaggcttgcagaaaaatgggcagatgcacatgatggtaacttgccttcaactaggcaagaaaaaaaggaatttaaggatctaattcgagcccatatgcttaatgtagatgaagaaaattacaaagaagctgtggactcttcatataaagtatcagtcactccaggaatcagtaatgagattcgtcagataattgatgatgactctgcggaagtcaattcctcatcgtcagatttttggattttagtggctgctttaaaggagtttattgcaaaggagggcaacggtgagctacctctggagggaacaatacctgatatgacttcccttactgagtattatgtgagcctacaaaagatttaccaagctaaggcagaatttgactgtcttgccctggagcatcatgtaaaggaaatcttaaaaaggattggtagagatccggattcaatttcaagagcatatatcaaaacattttgtaaaaattctcgaaaactaagggtttctaggtatcgtagttttgaggaggaatttagctctccgtttgtcgctgagattcagaggtatttcaccgatgaagactacagttacgcaacgaacttctacattctactacgtgctgttgatcgattggctgccaattatagcagattgcctggaatcttcgacagtgagattgatgaggatatccctaggctgaagactgttgcggcttcagtggcaagtgagatgggtttgaatggagcatccttatccgaagacctgataaccgagatgtgccggttcgggggtgcggagattcatccagtggctgcttttgtcggtggagttgcttcccaagaagtaattaagctggtcaccaagcagtttgtgccgttgccgggaacattcatatttaatggaatcgacctcaaatctcaagttttgatgctataacatggatgtggaacgttgtctgtgtggactggatttgagttggcccagattttgtgccagggcacaacgctgcaaatggaatctgtttgcccaacgcgtagctaaatatgtgttgcataatattttagagcctgtttgtttccttgcaggattatataatccagcttactttatatagattatataatccaatttatataattttattagagatggttgtttatacaaattattagtgggtacaaagctaaacaataatatagaataagcacctaatgatatgcttatgaataatcataatctagttacctagattgt

SEQ ID NO: 135391 - DNA, 228 bp, Zea mays
  Clone ID: MRT4577_54957C.1
tgcgaggacagacaagtacacctcgtatgttttcatcgtttacaatgctaaccgcatcacacagtgccttgctacccttgctaagggcattcatgacaacttcggcattggtgacggtctgataacaactgttcatgccattactggcactcatactactgtttactgaccctcatcctaagactgtagaagtgagcaggctcccatctctaacatcattcatagcag

SEQ ID NO: 135392 - DNA, 161 bp, Zea mays
  Clone ID: MRT4577_54958C.1
atgaccctcgttcccctcgcgacgagcggcatcgtcccgttcccgtccgtggctggtgcctttttgttgttgaccacccgctgagctgctgcgtgcccgcgcgcatggccgccgcgaggaggctctcggagctgctgcaggagcagcaggaaccgttcctc

SEQ ID NO: 135393 - DNA, 582 bp, Zea mays
  Clone ID: MRT4577_54959C.1
cctcgaggccggccgggaactcgatgaccgctgactctctctctctattcgctccccgcctcaccccgaggcagccgtctcgataggctttcgccgacgccgccgacatgtctcgccgcagatcacgaaggactgccccacgcccaactccccgcgctgctcctgagaagaacccaccacagccggcacgcctggatcctccaccagctccagttcgagatggcggaggctccttgcttggaagaattgagtccaccgttgctcaacgaatgcgggttgacacgggtagggccatggcacacaagcctggtgatgctatattaagtccccgaaccattcaccactgagactgctagcctcacaaactgctgctgctgactctgtcactctcgtgatcaatgatgatgcttgcagcatccatctctaaggctatccaagattgtctcatcgactatgtaaatacacatcagcaggtgcctattctacctatacatgctgaacgagtgccaacgaacccccagtgtctacctaaactgactctgaaaccattcttggatcctctttcgggggagctatctcatt

SEQ ID NO: 135394 - DNA, 357 bp, Zea mays
  Clone ID: MRT4577_5495C.1
gagacgcggagcagccgcagggccaccgacctcgccgccggtcgacctgcatatcctgggcgctgcctgtggttgatctttggaataatcaacatgatcctggtgggcagtgccggtgcgggtcaaagctctgtgggccatctttaccgaagcagcgagcccgccaaaccaaccatggcaccagctgtaagtgctcgacgtgctgagaaaccatatggtgccaagactgacgcgggcaagcacgacgctgctggaggtaccaaccaaagcaatagctaccacaaggctgatgggcagaacactggcaagttgcatacagaccgtcctgtatacaacgtgcacgctggtgctggcggt

SEQ ID NO: 135395 - DNA, 410 bp, Zea mays
  Clone ID: MRT4577_54960C.1
aaaaaaaacaaggcttttttttttcctttctaaatagcaaaggacaacttgcggggggacacatccccatacaggggcgttggccccatttgcagcctacccataaccgaatacggggaacaagggcctgctaaacatcaaatcactccggacaggcagtctatgcctttttaggggacttgggggcctttttgggcaattttgcctccttgctccccccactggaccccttttccgccgtttttttgggcaaaaaaacagggttgattttggggagcacacccccgggagcgatggtcaccccccccaaaagtttcccaagctccttttttttccggatccccaaaagcacgtggcgcgaaataatgcaagtttttttgttgtccctggcagcattaccgggaagctcc

SEQ ID NO: 135396 - DNA, 299 bp, Zea mays
  Clone ID: MRT4577_54961C.1
gggaacaaacaagcatgcgcatagagcttcctctttgggagaaaatcccttgctatgggtcatgctgcatacaacaggggggagaggaacactactaatccctcaacacatatactctcaacaccaacttcaacaacagtggccaaatcatcacactgtgaggcatacatacagcaggatgaaaatcggagtgaggggacaaaaatcagagctgactgaattacaggatcaacggggtcttagccatctgatccatctgaatgtgataggactccaatccattgccacaccaacaccac

SEQ ID NO: 135397 - DNA, 547 bp, Zea mays
  Clone ID: MRT4577_54962C.1
caggtagactctagagaagacatgtaaatgataccaattgtggaatgaaaacacttgttgttctccggagactccatttttcttcaatgagactactacacataatagacttgaaacaagtattagtctcaaagtcttagattatagagtaacctccccctgaaagtgtgcatgcaagttttgaatacttgtaggagacttgcactttaattttgatatcaagaggagcaaattatctataatccgagctttggcacatataataagtaaaaatgacaccacttgtagaataccactagtaggatataaactttgaagcattattgtcatttacttaggaatgttaaataagctatgtgtcgtgcttaactaaacattttaaaccatgtaggtttgctcaagaatatgaaatgaaaacaagcattcctaccatatgattgacctagtatgcatgcaattataatcaaaagtaaataccacatgtaaaactaggcatgtaaggtaaaaactagatacaggagaatagattcacctatttaaaaaagaa

SEQ ID NO: 135398 - DNA, 409 bp, Zea mays
  Clone ID: MRT4577_54963C.1
cttctgtcaccgcagcaacaagggaagtgttcaagaaggaagaatccaataccaattgggacttccttggcccggatttggcctgcgctgagtgagttaccaggagtaccagggaatcgaagaagatagccgaaaagttgaaggaagcaaaggggttgagcaagcaagaagaacaggtatgtggaggtaagtagtttggtatgggtctggtatgccttcatcacccaatttacagactacttatatccgatcaatatgggccaattacaatccacgggccatacggcacaatttcacaatactatgaccaccctgagtgatgcacatgcgtgacaggatggcggtggcgaactggcgagatggagaaaagggaaagcggcaggggattatgagccaggatggaaccacc

SEQ ID NO: 135399 - DNA, 592 bp, Zea mays
  unsure (1)..(592): unsure at all n locations
  Clone ID: MRT4577_54964C.1
cacaaacgttgcatttatttgatgggcaatattgttgaaaatccacaactgtgattggtttacagtattgtcttattctctgtattttcacacacaaatactataatttttttttgttttgctgtaattttaatttataaacaccgtagaaatcagtaccacagatatcggacggcacgggaactttcgcgccccggctagctgccagagcctgcctgccgatgcatcttcacttgggtttggggaccgtcgccgcgacaaggagctcaccggcagcgccggcaggcatcgcgacggcgagcccatcgcagccagcgccgaggatgctgtacgacacgtgcagtggcttgctgtccctgagcaccagctcctccagcccgagctcctcccacagggcaacgtcaatcttgtaccgcccgccgccgctcggcgacggcggctgcccgtaagccgccgccgcgcacgtntcgacgctcacaccgccttcgcagtcgaagacgacgagcgggaactgcggcggcaccaccttgccatcgccgagccgttcccgcgcctgggcgacacaggcgacggcgagcgcgcggtggtcggg

SEQ ID NO: 135400 - DNA, 472 bp, Zea mays
  Clone ID: MRT4577_54965C.1
ccccaaaaaaaccccattccctttaggcaaaaaaaggcaaaactggggcttttccgtaaaggccaaaaggggcagcacaggccccaaaattccccaaaaaacttggttaaaaaaaagggaagcatcgaggacccggttttaaaaaggggtttcaaaaggttttaattttccaaacccaaattcaaaaaaaacccagaaaggaaaacctcccccaccctttaattagggggggggaaaacaacaaaagggaaaaaacccccggggttcggggagcccctaaaaactgggcccctaaaaattttttgaaaaaggctttttttggcttttggggggggggccaaatggccttctaaaaaagggaaggctttttttgggcttcccccccccttttctaaaaagcaggcaaagggccctaaaaaacgggggcgaaaaaagctaaaaactttgggccccccttaaaaaaaaccggggg

SEQ ID NO: 135401 - DNA, 340 bp, Zea mays
  Clone ID: MRT4577_54966C.1
ggggggaaaattttttcttgcataaggggtcacaacccccacgggtccccttaaaaactggttaccagtttaccgcccatctaattgacccatactccacccattacacgggcatttgggctggggacacaaaggcccaaaaatccttggttttggctgcttgccccggaatacctattccaccccacggggtcaccgggcacttccttgctgggttggggggtgacattcttcccttcatgaaaagcccggtggccccaaaccgtttaaaaaagaaagggtttttaaaaagccccattttcctcccagggggtcaaagcaatataaaaagccgggcccc

SEQ ID NO: 135402 - DNA, 656 bp, Zea mays
  Clone ID: MRT4577_54967C.1
ggtacccacgcaggccgtccggggtacggatcggccgaacgctcacaatcctcccgctttccctgccgcaaaccccaggggcacataaaggactcgaacatcgactcaatccactcgccccactatcctcccgctttccctgccgcatctcgtgtattcctcgccgccgcggtaagaaacagggctgccgcgggagtgttccggcttaccgtctaccgcgcgcccggtgtggggcttggtgacttcccttggcagcgggcaggctctcgtggtcgtggtatcgggagttggtcgccagcatcggacgaattgctcgccgaacttgcgaaatcgcggcggagcccccaccccttcccgtgggcagtgcacgtcgcaccgctgtcgccgaagagccaataacttaggatcccggtgttcagcaggtagaagttgctgagcaggagctcaatgaaggagaagaacaggtgatccaagaggagccgcacaacgaggagttcgactagatctaggtggtgtctcccagtcgactttacgacgtcaaggatggaccttagttcggcttatatttatcttttattttcatgagactttcgcttttgtaataataaattttatgatattggggacatttatccctataccttctggtattaacc

SEQ ID NO: 135403 - DNA, 453 bp, Zea mays
  Clone ID: MRT4577_54968C.1
aaaaaagaaaccgcaaaattttttttaaactttttgttttttgaggagtcggaaaaaaggttttaaaattaaaaaacctttacggaaactttctttttttaccatttgacaacgggattttttaaattaggatccctttttggaagaataaattataaaaaaaactttcctttttacgttctttttttttaacccctaattgcatggtggtggctaaatttttttaatcaagcttttccaaagataaaagttccttttttttcgggaaagggaaatttcccaaacggttttaaaagttttttacccacccccccataaggtttttttggaaaatttgaatttggaaatgttaaccccttttttggggggcgctttcccgggaattttttttgggtttttaaaaccgtttttttttccatttttttttaacccttttttaccaattttttcttt

SEQ ID NO: 135404 - DNA, 288 bp, Zea mays
  Clone ID: MRT4577_54969C.1
agcggacaccatgatcgctgcgctctcctatatcgattcgacacttctcatgagggggtacgagacctccggggtgctgtcagccaacctggacgaaaaactcacacattttgattgcctactcgagataactctcgccaacctcgagccgcaaaaagacacatctgtaaatgcgctctacgcccaaactatcttgctcactgatgttaccgtcatgatagtgctaccatccatgtgactaaaccaaacccctcctgccttatgctactactatagtgacactaacat

SEQ ID NO: 135405 - DNA, 2440 bp, Zea mays
  Clone ID: MRT4577_5496C.1
ccggagaggaggcagctccacagaaacagagagcgcataaccggcggcgttggcggcgatgaggatcgaggaggtgcagtcgacctcgaagaagcagcgcatcgccacccacacccacatcaagggacttggcctcgacgtagctgcccgctcctgcgctcctcctcgccctgtttttttttctagggttttagcttctgtgtgtttgcgtactagttcctcactgttttccctccttcgttttcttattatgggagcggagcaggccaatgggatggcgattgcgttggcggcggggttcgtgggccaggcggcggcgcgcgaggcggccgggctggcggtcgacatgattcgccagaagaagatggccggccgcgcggtgctccttgcgggtccgcccgccacgggcaagacggcgctagcgctcggcatagcccaggagctcggcagcaaggtccctttctgtcctatggtaggatcagaagtgtactcctcggaggtcaagaaaactgaggtgctgatggaaaatttccgtagagctataggtttgcgtataaaggaaaacaaagaggtttatgaaggagaggttactgaactttccccagaagaggctgagagtacaactggtggatatgcaaaaagcattagccatgtaatcatcagcttaaagactgttaaagggactaagcaactgaagttagattcttcaatttatgatgctctgatcaaggaaaaggtggcagtgggtgatgttatatacatcgaagcaaatagtggagcagtgaaaagagttggtagatgtgattcttttgctacagaatacgatcttgaagctgaagagtatgttcctatccccaaaggtgaagtccataagaaaaaagaaattgtgcaggatgtcacacttcatgaccttgatgcagcaaatgctcagccacaaggtggccaagatattttgtcccttatgggccagatgatgaaaccacgaaagactgaaatcaccgaaaaactacgccaagaaattaataaggtggtaaatagatatatcgatgaaggaattgcagagcttgtacctggtgttttgttcattgatgaggtccacatgttggatatcgaatgtttttcttatcttaaccgtgcattggagagcccattatcaccaatcgtgatacttgctacaaataggggaatatgtaatgtaagaggaactgatatgacaagtccacatggtataccggtggatcttctagataggctggtgattattcggacagagacatatggccctactgagatgatacaggttcttacttatttggggcgttatttctatctgttgtttttcctgtgcagaattttcattaatctttgtttgctgccctttacagatattggctatccgagcacaagtggaggagattgatatggatgaagaaagtcttgcttatttaggcgagatcggacagcagacatctttgagacatgctattcaattgatatcacctgccagcgtggtctcaaagactaatggaagagagaaaatctgcaaggctgatctcgaggaagttagtgggctctatttggatgccaaatcctcggctcggctgctccaggagcaacaagaaagatacatcacctagatttggatcacctgtcgtggaagtctcgaagagaatgtagttgccagctcgaaagtcatctagtgaattgatctgcttcacaggtcttggagcgagcacatttcgggggggacggcttgaattttgcagtgcctgcttgtgttagtctccagagaagacttggtaccggcatattgcctgttcacgcactgttcgctgattagattggtcaccggtgcaggaattgccgtgtgtgttttttatcttgctcatcggtgtccggaatctgtgcctccacgggttgtattggcccgaaccctatctttgtaaccatggataatggatagcattcgtatagaatgcaacttgcatggctgtattaggagcaacaagaaagatacatcacctagatttggatctcctgtcgtggaagtctcgaagagaatttagttgccagctcgaaagtcatctagtgcattgatctgcttcacaggttcatagtctactggtcttggagcgagcacatttcggggggaacggcttgaattttgcagtgcctgcttgtgttagtctccagagaagacttggttccggcatattgctcgttcacgcactgttcgctgattagattggtcaccggtgcaggaattgccgtgtgtgtttttatcttgctcatcggtgtccggagtctgcctccacgggttgtattggcccgaaccctatctttgtaaccatggataatggataggattcttacagaatgcaacttgcatggctttattatttctaaatgtccataaagcataacgaaatgtttctacaac

SEQ ID NO: 135406 - DNA, 219 bp, Zea mays
  Clone ID: MRT4577_54970C.1
cccacgcgtccgggcgcgcgccaatggcgccttcgttcttgttttgtgtcgtgccgtcattcatgcgggtagcattcgtggtgaaattcggccatcgctatttttttttaatgatggctcggaatttcgaccccattttaatgtctatatatgtagatgtagctgtgttcatccattgttttagagttttgaatttctactacaagatcaattccatgc

SEQ ID NO: 135407 - DNA, 179 bp, Zea mays
  unsure (1)..(179): unsure at all n locations
  Clone ID: MRT4577_54971C.1
atacaccagaccgcccgcccttttttttttnccaccaaannacgaaggaccgggtgggttcaattaacaaaccaacggggaacaacgagaattaaaacgatgaactctctaaccccaaaaaaaaggacgccctaacacatgtgtccaacgggaccaagaacccacatggggacatgacc

SEQ ID NO: 135408 - DNA, 374 bp, Zea mays
  Clone ID: MRT4577_54972C.1
gccatgtcttgaggagagggagccacaccagggaggatgcgctcgtgccagggacaaggtaaccgtgctgagagagtagacgccagggaaagagggagccgagccagaatggagcttgtgttgtggaggggggaggctggtggtagggatggtaggaggcctgggtggagggaggtcaacaagattgatatacagtatgacaaggtatcaaaacaagtggatgttcatgcttttaaaagaagtgctttggaatcacatccatgcatttgctgagactggtcaggaaagagaggaacctggaccaccgctgcgcctatctcatgtgttacatgacctttcaagcagcattccagatgctgtagcaactgattttt

SEQ ID NO: 135409 - DNA, 152 bp, Zea mays
  Clone ID: MRT4577_54973C.1
gccggggaatcaactcatatatttcccggatttcgaatccaaactcctggaggaacttttctccctcctcccccaacaaggccaatcggaagcccgagaatacgggccattggacttccaccccggcaaccggagcagggggggtaaggggg

SEQ ID NO: 135410 - DNA, 708 bp, Zea mays
  Clone ID: MRT4577_54974C.1
aacattgagccagacctagcctggggtctccgcaccagccccttctctctttgacggcgccgcctcctctcctctctctcgattcccttcgcgccgccgcacctgctccgggctcctcctcttccgggcttccccgtgccgtcggcctccctcgtctgcgtctttcctcgtcggtcgttgctccgagtcgcggacctcctcgctgcggttgcagtggccgaacaagatgaagaggagctgcagagtcgggtccatgcagcggcctcctccccacggaggtcagaagaggaagatgtgctcttccatggtttcaagaggaggagacgcttctcctaccagatcagtggccatcacgtctccatcgacgtcgccgagctccatggcttcctcgtctccttctcaggcgggcgatggtgcacgatatggccaggtgtgacctgcgcaagcagcaccactgatgaggcacatgttgtgggctagcagcgattggaggggacgccgttgcagatcctcattgtttctctgggagaggagcacgtcgacgatctattttttccccatagattcgcgatggaggtgctcgaggaggagcttcttctctagacgccatgcaaatcgtccaggagaggaacacgccgctgaagactcggcatggaggatctgaaactcacaggaagaaggaggtgaccattgtttacacgatatgca

SEQ ID NO: 135411 - DNA, 341 bp, Zea mays
  Clone ID: MRT4577_54975C.1
caagttcctccggggcaacgctggcggttcggagtgcatgtccgctatcgccggctcgtacggctacattgctcctgagtacgcctacacgctgaaggtggacgagaagaggacgggggcccggagaagaagcagcagcagcagcaggaagggccacacgactcgccgccgcagcaggatcttcttagtatctagaagcgcagttgcgagagttggtcgtactgatggtacttggtagcatccctgcctgccctgttctttgagtgaagcgttggaacgtggcgtgtgtgtagtgtaactgtgtatgcaggcggtgatttatatgcatgcttcctttaagt

SEQ ID NO: 135412 - DNA, 3926 bp, Zea mays
  Clone ID: MRT4577_54976C.1
gccggccggttcgccggccgaccactccactcaccacaccatccatggcgatggcgccctccacggcggccgcatccacccttctccccgtcctcctcctcatcgccaccgccacccagtgcaccgcagccgattcattctcttccccgaacgctgccgccctcctcaacctctctgcggcggtagcagacccctcgggctacctctccacgcactggactccggacaccgcggtctgctcgtggccgcgcgtgtcctgcgacgccaccgacacacgagtcatctccctcgacctctccggcctcaacctatctggccccatccccgccgccgcgctctcctctttcccgtacctccagtcgctcaacctctccaacaacatactcaactccaccgccttccccgacgagatcatcgcgtcgctcaagagccttcgcgttctcgacctctacaacaacaacctcaccggttcgctgccggcagcgctccccaacctcaccgacctcgtccacgtccacctcggcggcaatttcttctccggcagcatcccgaggtcctacggccagtggagccgcatccggtacctggccctctccgggaacgagctcaccggcgagataccggaggagctcggcaacctgacgacattgagggagctgtacctcggctactacaacaacttcaccggcggtataccacccgagctcgggaggctgcgggcgctcgtccggctcgacatggctaactgcggcatctccgaggagatcccgccggaactggcgaacttgacgtcgctcgacactctgtttcttcagatcaacgctctgtctgggaggctcccgacggagataggcgcaatggggtcgctcaaatcgctcgacctgtcgaacaacttgttcgtcggggagatccccgcgagcttcgcgtcgctcaagaacctgaccctgctgaacctcttccggaatcgcctcgccggtgagattcccgagttcatcggcgacttgccgaacctcgaggttctgcagctgtgggagaacaacttcacaggcggggatacccacgaacctcggcgtggcggcgaccaggctgaggatcgttgacgtgagcacgaacaagctcaccgggcgttctgccatccgagctgtgcgccggccagcggctggagacgttcatcgctctgggaaattcgctattcggcgacgttccggacgggctcgcggggtgcccgtcgctgacgaggattcggctgggagagaattttctcaacgggacgatacctgcaaagctgttcacgttgccgaaacctgacgcaggtagaagctgcacaacaattttgctctccggcgagctccggctggaccggagggaaggtgtcctcctcgatccgggagctgagtccggtcaacaaccgactgaccggccaggtgcctaccgggatcggtggactcctgggattacagaagctgttgctcgccgggaacatgttgtccggcgagctcccgccggaggtcgggaagcttcagcagctctcgaaggcggacctttctgggaacctgctctccggagcggtacccccggcgatcggcagatgccgtctgctcaccttcctcgatatctcgagcaacaagctctccggcagcatcccgccggagctcggcagcctccgcatcctcaactacctcaacgtttcccacaacgcgctccaaggggagattccgcctgccatcgccggaatgcagagcctgacagccgtggacttctcctacaacaacctctcgggcgaggtcccgtccaccggtcagtttggctacttcaacgccacttccttcgcaggcaacgctggcctctgcggggcgttcctctccccgtgccgctccgtgggcgtggcgacttcggccctgggctccctctcttcgacgtccaaactcctgctcgtgctcggcctcctcgcgctgtccgtcgtcttcgcgggcgcggccgtgctgaaggcgcggtcgctgaagcggtccgccgaggcgcgcgcgtggcggctgacggcgttccagcggctggacttcgccgtggacgacgtgctggactgcctcaaggaggagaacgtgatcggcaagggcgggtccgggatcgtgtacaagggcgcgatgccgggcggcgccctggtgggcgtgaagcggctgccggccatcgggcgcgcgggcgcggcgcacgacgactacgggttctcggcggagatacagacgctggggcgcatcaggcaccgccacatcgtgcggctgctcggcttcgcggccaaccgggagaccaacctgctggtgtacgagtacatgccgaacggcagcctcggcgaggtgctccacggcaagaagggcggccacctgcagtgggcgacgcggttcaagatcgccgtggaggcggccaagggcctctgctacctgcaccacgactgctcgccgccgatcctgcaccgcgacgtcaagtccaacaacatcctcctcgacgccgacttcgaggcccacgtcgcggacttcggcctcgccaagttcctccggggcaacgctggcggttcggagtgcatgtccgctatcgccggctcgtacggctacattgctcctgcgtttcgtcgcgtttgtcgttttaatggatcatcattgggaattgttggctgcgatctcatgtggcctcgcttcctctgtcccccctccccagagtacgcctacacgctgaaggtggacgagaagagcgacgtgtacagcttcggcgtggtgctgctggagctcatcgccgggcgcaagcccgtcggggagttcggcgacggcgtggacatcgtgcactgggtgcggacggtgaccgggtcgagcaaggagggcgtgatgaagatcgccgacccacggctctcgacggtgcctctgtacgagctaacccacgtcttctacgtcgccatgctgtgcgtggcggagcagagcgtggagcggcccacgatgcgcgaggtcgtgcagatactggccgacatgcccggctcgacatccacgtccatagacgtgccccttgtcatcgagccgaaggaggaggacgggggcccggagaagaagcagcagcagcagcaggaagggccacacgactcgccgccgcagcaggatcttcttagtatctagaagcgcagttgcgagagttggtcgtactgatggtacttggtagcatccctgcctgccctgttctttgagtgaagcgttggaacgtggcgtgtgtgtagtgtaactgtgtatgcaggcggtgatttatatgcatgcttcctttaagtagattgccagtagtatttgcgtatggtgagctggtcggtccttaatgtctgtccccatgtacaaaaccagatcaagatgcttgggcttccggttgaaaagaaaaaaaaaaaaaaaaaagcaggctccatagacgtgccccttgtcatcgagccgaaggaggaggacgggggcccggagaaaagaagcagcagcagcagcagcaggaagggccacacgactcgccgccgcagcaggatctttttagtatctaaaagcgcagctgcgagagttggtcgtactgatggtacttggtagcatcccctgcctgccctgttctttgagtgaagcgttggaacgtggcgtgtgtgtagtgtaactgtgtatgcaggcggtgatttatatgcatgcttcctttaagtagattgccagtagtatttgcgtatggtgagctggtcggtccttaatgtctgcccccaatgtacaaaaccagatcaagatgcttgggcttccagttgagtttacgccttaggtgctgtttgtttaccctcgacattatataatccagcttaaataaatcaagagttaaacaaaaaaaaaaaaaaaaaaaaagggggggccccccaaataaaaccccccccccccgggaatttt

SEQ ID NO: 135413 - DNA, 1568 bp, Zea mays
  unsure (1)..(1568): unsure at all n locations
  Clone ID: MRT4577_54977C.1
gctttcgtttcacattgaacaggtttttcgtggggggggggggagattacagaactggtctccttgatatgttgagggtcgtgaagatagatttgaaaggccgtcatcaaacagatagtgatgatgaagatgatggtcgtgttgatattgaagacgatngatgaaactgnntaatggaaggatggagaggggtgtggggtatttttttattgttacagatggtttggatgagaatacagatgatgattctactgatgaagatgacttggatcaagatgatttcaacaaaacagtcccgaatgagacaaaaggtggaggcaaaacagaaactactaaagatggggatgattcagatgattcagatggcatggatgatgatgctatgttccgtattgatccttacattgcaaggatattcaaggagcgcaatcttcctggtagtgatactaagcaatcccaacttatgcgattcaagcttcgtgtgctgacgttacttgatatatatcttcagaggaatccagggaaagttctggtgctggaggtgtattctttcttaatgcaagcttttgtaaaatcacatggtgctgatggtactgaacagttcaggcaacgtatttccggcatactgcagaggagggtattcaaagggaacgagtatccaaaaggcgatgccgtcgaatttggtaaactcgagagcttgttggagaaagctctgaggttgacatcgcgctcaagatacaacacggttgcttccgtagcacagaacgccacattttggatcctgaagatcatcaactcgaagcactgttctgagcaggagctcgcacgcgtggttgatctgttccgttcaatcttgagcgattacgacaggaagaaatcgcggctgaagcttggctttgtgaagcaggttgctaagaggaacccttggatagggcagaagctcttcggttttgtcctgcagagggccgaaaacacgaaggcgcagtatcggagaaaccagctgctggagttggcagagttcatactgaaatcatgggccgatggcacgtcagagatgttcttgaaccatctgtctcagctgtgcgggttgatacaagcagccctttcagccgttgccgaaaacaagtcgcgccgcaaggaagtgcgcaacttctgcactgggatcctgcagacggtgctgaagcttggtctcaaagaccagttccagaaagcgttgagtcctgaaacttattccctctgcgaggccaagctaggggctgcgtttaccgccttcaaaaagtgatcatgtgggacaccgattaaattcatttcacacagaccgtggatccttggaagttttataagaagaattagtgtatcttctagtttttgagctcggtgagagtaggatcaatcaaattaatgtgtgcttgtgctagacttttagccgcagggagggatgcatgtacaagttgcttgagcccttattggatacaaaatgtttttatggtgttgttgcgtctcgatgctacatattaaagtacgtaaatttgagcaaatatttttttattgaaagagcgtatttggat

SEQ ID NO: 135414 - DNA, 449 bp, Zea mays
  unsure (1)..(449): unsure at all n locations
  Clone ID: MRT4577_54978C.1
tccgtccgtacttgtcgaaccctccttcccttctcctctcttcnnccccaggtcannggatgtcccatatggcgtgggagcctnagctattttactgctacggtgccccctcatccatcgatgtcgtcatattcatgcccccgtcgcccgtcgccgtctganntcctatcnnctccagtgctgagnttccatgctccgcnnctccgtccttccaccnnttccatcctcccctttctcgaaatccctcgcttattatatacccatcccgnngcggttcatcttcccgtatctccaaatcccttcccaagcccaggnncctgtcctcctctgtatcctcgtgaccgaaacccgcgccgcnncttctttcnnttcgtcccaaagtctcgcctcnnctgtccctttttagaggtcgcccnnggatctcgctttctcgnntcgtcgnntcgtcg

SEQ ID NO: 135415 - DNA, 265 bp, Zea mays
  Clone ID: MRT4577_54979C.1
gacccaaaaagacaaccaaggtgttagagagaggtgggcttctccttatggcagttaggagacactggaaatattccatttcctcagtggaggctctgattggaaggttccatctggttcttggaggtgacacagaacttggactctggagcagtttgggatgtgctgagaggtccccttaggaaggggtgggaggatagagacaggcagcggatttgcatgtgggatgaggaggtggagctctgatgtctgaagacctgtctct

SEQ ID NO: 135416 - DNA, 261 bp, Zea mays
  Clone ID: MRT4577_5497C.1
cctccttcatcctttaatttttttttttatctggggggtttttttttgatttttttggggaaaaaaccccttttttacccccattcaccaaaaaaaccccgtttttgagggggatcaccatatcagtctccatacaggcaatgtcagcttgtaagggccctctggggtaaccacccaaccggtaacaaaagcccctccccattaaaagatcccaaaaattcctttataaaccccttccgctaaatggaaaaaatcataccc

SEQ ID NO: 135417 - DNA, 534 bp, Zea mays
  unsure (1)..(534): unsure at all n locations
  Clone ID: MRT4577_54980C.1
gccacgcgttcgcggttagatatccgtatgagtgtttgaaataatggatgaatggctctgctgttgcggtcctgtctgatggccagactcaatatacatgggccatgaactgcgggcgagtgtccctgactgatactgtgacggagaattcgccgttgctgtttctttatgggtctatctgtagtccaagccggaatcccgtttttaattttnnnanaannnaaanannaaaaaaaaaaaaggaaaaaacaaaaaaaaaaaaaaaaaaaaaaaaaaaaaaaaaaaaaaaagggaaaaaaatgggggggccccttttttaggttccacgtttacgcacccgtgcatccgacgtattggctctcctatagggacccctatgtccatttctctgcacgtctttttccaacgaaacccctggggaaacccctgttgttccccaactaaaacgcctcccttcacaccccctttttcccagctgggggatcagcaaaaaggccccttccaaacgcttttccaaactgttgggcaaccgga

SEQ ID NO: 135418 - DNA, 159 bp, Zea mays
  Clone ID: MRT4577_54981C.1
ggcgcaggcgagtctatgtgtctgtaagttctggcggcccacatttagggacgctatcaagcagcccccaggtggcgacctgctcatagtctcctcttcatcaattggggggggggcggggcaatgcgccggactacatgcacgatgacttatgggcta

SEQ ID NO: 135419 - DNA, 601 bp, Zea mays
  unsure (1)..(601): unsure at all n locations
  Clone ID: MRT4577_54982C.1
accacccgtccgcggacgcgtgggcggacgcgtggggactagttctagatgccgttgnctttctgagcatggcggaggggttgatgatgaccccgcccgtgctgggccctgcccctgcggcggcggcgctggacggcgacgaggaaggtgtcagcctgtgggatcactcctgatgcgctagctggcgaatcacactactgcttcgacttcgagtagtggcaggggcaggtggtgtaatactgtaatgtaagatgaggacgcgcgccacgtgccgtcccattggagagcgtacatgtggagggcgatcacacacctgatgtggacagagggatgtgtaggtggtagccggtaggccaacatgtatacgctctgcgatgcacttgtacgcacgttacgttgatgaatcatggaatgcatgcagacacgacacgaatacgcacgtataacgagtttgctacgtatatactggagctatagatgccgttgatatggtgcattgaacctccggcttgatgacctaggattcatatcctgaacatcttttggttcatgggataaattgtagattttgcacatagaaaagccctcggacacttgggcg

SEQ ID NO: 135420 - DNA, 361 bp, Zea mays
  Clone ID: MRT4577_54983C.1
gcaacatagaaagcacaatggtgtaccaactatggccgacaaaatattaagcctgcttacgctccatggtctttctgctagttctgctaccgcgaccattttccagaaatgctcgcaagctcctatagcttatatttttcccccgtacctctcaccagtgatgtgctgggtatgcgaaaacccaattcttcatccctacaggatacaacaggcaataacagctggcatcttacatttatcacccttgttcctggaacattcatcaatcctattacatattacacctttggcgcatgtatcgtcacaaaacacaaaggctcaacaactacaaccacctgcgctagcgaaccttgctgcctac

SEQ ID NO: 135421 - DNA, 278 bp, Zea mays
  Clone ID: MRT4577_54984C.1
ctagatctagatcgtctaccgacggtgctccattgttcacatgggcatttttggattaatgttttttgtaattaattagtttatacggagtatatataagagcaactcgttggctcggctccgcattgcgatacacataaacagggtacgaaaattactagaacatcacgtcaattcttttactcaatcagtgatttggagatcagggatcacagaaggattggaagggattaagtgagaaatgaactaatttcccactaatctactcccatcctccc

SEQ ID NO: 135422 - DNA, 469 bp, Zea mays
  Clone ID: MRT4577_54985C.1
aggaatctgcattcacgtttatttgaatgatagtgagttttccaataaacttcccgtttgtattatattacaggggataaacacaatagctaggattcgacgcgactttcctattcgttgggttttgtggctgctttttttttactggggtacgattggaatacgcatggggggggggcatacataccaagcgatacgccgtcatgcatcaagaccagccaaggtttatgagggggttccaaaccccacgaaactagcggaaacaaccagcccacaacgactgaaccaatcggttggcacttcctcaagacactggaagaggggaacatttcggcggtgaacatccaaagggtcttatcaaatgtattaaatcctgttgaaaacagccccaccgtatcatccctaacattgcaacttgtcatatctacctaggtgcacttattttcttgtttggagcaagccttccacg

SEQ ID NO: 135423 - DNA, 368 bp, Zea mays
  Clone ID: MRT4577_54986C.1
ggcgaacggaaagccgcctggcgacggcagatctctccggcctgctcctcggctcctcgctcctcctgcgccgccgcggaggcagatacagcctctggatccagccccgctgcatctccgctgtggcggtgctttggctgcttcctgcaggttggagtttctgaatggccaatcccagggatgcggtggacgtcagctcctccatgtcggagctgagcgtagaagcagcgccttcatcgattgaggttcaagtccccaagcagggtgcgtatccctcacaagcgggcaaccgcgggcgctgtttgatctttttcataggggagttattccgtaccatgtcttgtgcttaattagtagtactgcttgca

SEQ ID NO: 135424 - DNA, 369 bp, Zea mays
  Clone ID: MRT4577_54987C.1
cgcgcgcgacattctcccccaagagcgcgcggcgagccgccacaccaaaccaccaaaagaaaagccgccgccgaccgcaaacggcgccaccgccgccgccgccgccgccaggcacgacacgaccccgccgcaagccaagctggcgacgacggagcaggcgaacaaggaggcggaggcgacggagagggcggacgagacccggctggacgagccgaccgaggcgagggcggacggcaccaacgcgcccacgtcaccgaacgagcaaccaacgcacgaccacccggacccgcacgacaccggagcgacagcaccgccagatcggcgagccgcggaccggctctccgagacgaccaagaccacgcccaccac

SEQ ID NO: 135425 - DNA, 878 bp, Zea mays
  unsure (1)..(878): unsure at all n locations
  Clone ID: MRT4577_54988C.1
gggacctcaggcggcggacattgggctcgtcgaggtggccggggagcccgtccgcgggccagagtcgcgcgactggagtaccgcggcggcgaaccaaagcgaaggcggcgaacggaaagccgcctggcgactccagatctctccggcctgctcctcggctcctcgctcctcctgcgccgccgcggaggcagatacaccctctggatcaagccccgctgcatctcagctgtggcttcctgcaggctggggactttggctgcttcctgcaggctggaggagtttctgaatggccaatcccaggcatgcggtggacgtcagctcctccatgtcggagctgaccgtagaagcagcgccttcatcgattgaggcccaagtcccccagcaggctaatggcggcgttgttgctgctgccgaactcgatgatgtatgggaggatgtttcaggttctcctcagcacgcggataccttagacagagaatggatccacaggcagagtcagtttcagaagatgggatatcgtgatggtgtaacagaagggcagaaggactctgcccaggaaggcttcaatgttgggttcaggcaatctgtaaacgttggctacaaatggggccttgttcgtggggttggcagtgcgctagctagtcttcctgacagcttgaaagaaaaactggtgccggatgttcagcatagggggaaattacaggacctgcaccgctcagtgcaagaaatatcagcagatgacgctgtccagatgttccacgagagtatctgccagagcaaccgtccttccgatggatcaggatcacacgtaacatcaacctcggatggagctacagaatcaaataggatgaaaagcctatcaaggaccttgtgntgct

SEQ ID NO: 135426 - DNA, 1205 bp, Zea mays
  Clone ID: MRT4577_54989C.1
cagagctctcctcgaggccggccggggcgggccagcgccgcgcgactggagtaccgcggcggcgaaccacgcctcgaccgatgcagccgaacggagactccccgggcgcctcggaatttggccgcccccctcaggggggcctcgctcctcctgcgccgccgcggggcatgaggtggacgctagatcctgcacctctgcattgcccctataagtagcgccttcgtcgattgaggcccatgtccccgagcagggcgggagttcctgactggccaatcccagggagccggtggccatcagctcctccatgtcggaactgagggtagaagcagcgccttcatcgattgaggttcaagtccccaagcaggctaatggcggcgatgttgctgctgccgaactcgatgatgtatgggaggatgtttcaggttctcctcggcacgcggataccttagacagagaatggatccacaggcagagtcagtttcagaagatgggatatcgtgatggtgtaacagaagggcagaaggactctgcccaggaaggcttcaatgttgggttcaggcaatctgtaaacgttggctacaaatggggccttgttcgtggggttggcagtgcgctagctagtcttcctgacagcttgaaagaaaaactggtgccggatgttcagcgtagggggaaattacaggacctgcaccgctcagtgcaagaaatatcagcagatgatgctgtccagatgttccacgagagtatctgccagagcaaccgtccttccgatggatcaggatcacacgtaacatcaacctcggatggagctacagaatcaaataggatgaaaagcctatcaaaggaccttgtgttgctgttgcgcgaatgctcggatattaaagtgagtgaagagctggcgtcagattcatgaacaaggtgcccgggaatttcaaccgtgttttctaggtctggcagaatcacatcgagttcccagattactgaacatataaccttagctgtcgatgaacgtgattcacggattctgttttggaaggacctggtactcaaaaggctcgagcttcagagacatggagtgtagctgtagatcctgttattacatatttcccttttgctgcaacctgtaactagaattgtaactgttaatcctataaatttgcagttcttaaacattaaacaatagtaatgcttttttctccctgccg

SEQ ID NO: 135427 - DNA, 187 bp, Zea mays
  Clone ID: MRT4577_5498C.1
ggagcaaacccggtttaaactgtccctgggttaaatattctatgatcccacctggagaaaatacaattttgtttatacccttattggtgccaccttaacctgatcctgaattggaatttaaaaagggttttataaccccttccccacctttaaaccaccaaaatgggccccaaagggttaaccaaaa

SEQ ID NO: 135428 - DNA, 861 bp, Zea mays
  Clone ID: MRT4577_54990C.1
tacctcgaggccggccggggtcgtcgttaaaaccgagaagagaccaggccgaaggaaaacaatcctgaaaccaagccatgggtctgcaggaggaatttgaggagcatgctgagaaggcaaagaccttgcctgagagcacgagcaatgagaacaagctgatcctctacgggctctacaagcaagccacggttggagatgtgaataccgatcgtccgggcatattctaccaaaaggacagggccaagtgggatgcctggaaggctgttgaaggcaaatcgaaggatgaggcgatgaatgactacatcaccaaggtgaagcagctccaggaggaggctgccgcctcttaaaagtctcttaatagtgttgccaaacagctatttgtcagatgagctttgtgccatttcctcattagaagtatatcattcgatccattggggatctgtgaaccatgtacctgtttatgtaactttttttttttcgaaagagcgcaggaggactgcgcacccatatattaaagtagagggaaaataaagggccataatgatgatatccatctatctatctatgtaactggtttatgtaccatgtacctgtttatgtaactggttaccagtgttatccataaaaaaaaaaaaaaaaaagcgatcgcgcatcggcatcgccacaaggccctctcaccgctcacgcctcattacgcccatcgtgttcgcctcgccccatcgaggacctttcctcggtggcgtcgccatctcatcggcgtggggcgtgcggccgacggccggaggccggaggcgatggctagctcgtctgtggcgccggacatgtagctgcaccgcccatacctggaggactacctcccgc

SEQ ID NO: 135429 - DNA, 487 bp, Zea mays
  Clone ID: MRT4577_54991C.1
ggcccgagaaaaatcgcagggccccggcttattttaaaattttggaacgggattggtaacaaaacccctcttttacataaaaaggaaacccggcctaagggctcacaaccgggggggaggggaaaaaacccatagcccaggggggcgggcttccccccctttttttaagggaagccccaaaacagtttggggggagcattcttgaaaaccctggcaggggggccggggtccacccaacccttgttaaaaaaaaaaggggggccaagaaaacaaacaatttccccccatttttttgggggaacaggaccagctaggacaccctggggaaagggttctttaaaaataaggggacgggttccattggacccacccggaccccaatttttggaaaaaccccggggggggaacggaacccccgcataaaaaaactccccctggggggccccctaaagctttttggtatccaccaacacccccggggggcggg

SEQ ID NO: 135430 - DNA, 436 bp, Zea mays
  Clone ID: MRT4577_54992C.1
cgcgggtcgacacacgcctctacactgcgtcgatagtgacccaccgaccgcacgctcgcgcaggggctcacgggtgactccacgtatttggtggtggagcacgacaagacgcggcacctacgggatcaacgccgtgtgcactcacctcggctgcgtcgtgccgtggaacggcgctgggaacacgttcacctgcccctgccacggatccgactacatcacccatggcaaggtggtccgtggaccggcgccactgtcgccggccctgattcacgccgacgtcgacgacggctaggtcctctgcgtcccgtgggtggagaccgacgtcaggaccggcgatgacccatggcggaaagcattatgatcatccggaaccaccagtgctcagtgctcacacatgagagctatgtatgcctccgttccttgtgatgacgcaata

SEQ ID NO: 135431 - DNA, 275 bp, Zea mays
  Clone ID: MRT4577_54993C.1
actccccgccctcaaaaatctctcctacaccttactatcctccctctcttccaactctccacccatccacaagctctctatttcgtcctgcaccttctcacccactgcattcatctccttgctccagtcatcccccctcctctaaaacctctccctcaatctcctcctcatcatatcacacacttccctatcctccagttccatttctcaacatatcaaatttccacctactatgtccctactattctcttacctcaaagatctatataacactc

SEQ ID NO: 135432 - DNA, 126 bp, Zea mays
  Clone ID: MRT4577_54994C.1
actgaaagggaccacacgtgtggtacgggcattattggatgatataacataaacaccgcacgtctaagctcgaaactcacagaaacactcactggggccggccctggcacaccacgacgacccgac

SEQ ID NO: 135433 - DNA, 629 bp, Zea mays
  Clone ID: MRT4577_54995C.1
ccccgcgtccggctggatctgacaataggatacacagcctgtttgagagagctctagctgatgataagttgcagaagtctgtcctattgtggcgctgttatctagcctatgaggcagaaatagtctgcaactcttctgcagcacggcgtgtgttcttcagagctatacatgcctgtccatgggataatgctgacatgtttgatgttggtgtggttttgtctcccttgcagccttctcctaaacgttgttctgtagtcaattgaataaaaaacaagttatttgttatgaaaattgatctacaatttctcctgataccggaccatgaaaagttaatcttgttagaggatgatatttccttttcagctgttgatatctacttaagggcaaccttctctttcaatatggttcctgtataagaaaaaaatgcagtcactattaatttatgtatgtactcataacacctgaacagcttatgaactgtttgctagggacatcttgcagattttttattccttcccatgtgattgtaaaaagtgttttgaggacatcaagtgcattttagtttcatcacgtttaccaattctcttgacatttgtcattatcttatattaactaatcctttatcagta

SEQ ID NO: 135434 - DNA, 561 bp, Zea mays
  Clone ID: MRT4577_54996C.1
atcgtcgcctcgactcaaccagagcacataataagaatcaaacaacgcaacctctgcgcgcgagagatcgacacatccatcggaatcacaagacagagatgagctcgtcggcggccaagaagggggcgtcgctggtggcggcgacgagcatggcggccgtggaggcgctcaaggaccaggcggggctgtgccgctgggactacgcgctccgctcgctctaccaccgcgccgtcccggcgtccctatcctcctcctcccagcacgccgggagcggcagcgcggcggccgtcggcagggctgcgcggcccaggcgatccgaggaggagaagctgcacaaggcgtaccacatcgtctgctggggacccaactgaactgattgtaatagccaaactgattagcactaataagcacattcgtgttctgcttctccatttctattccttcccatcttggttatccgtgaacggtgtgtaaaccgagatataagcatccacggtttgtaaatcgagatatatgtttcaaggtgtgtcatgcactcggccctctgatctgaggcgagct

SEQ ID NO: 135435 - DNA, 581 bp, Zea mays
  Clone ID: MRT4577_54997C.1
tgctcgcgctcggtttacgagaaagacaaaaaaaaaaaaaaagaaaaaacaaaaaacatgggctccttcctgtcgtcgttgtggacccctcccccgctcgccggcgacgaccccgactccgccgtcgtcgccgtccactccaagcccgcctgggacaagcactgggaggaacaccggaacgcgtccaagctgatggtgatcgacttctccgcctcctggtgcgggccctgccgcttcatcgagcccgccttcaaggagatggcctcccgcttcgccgacgcgctcttcgtcaagatcgacgtcgacgagctcgcggaggttgcaaagacattccgcgtagaggcgatgccgacctttgtactggtgaagggcgggcaggaggtgagtcgcgtggtcggggctaagaaggatgagcttgacaggaagatcaagacgttcatctcatctacctgatcctagcttaattaacctgcactccaattgtagtgccaggttctgtcttgttgatcccagtgtcaaggggctcctatggtttccccatggagtagcactaccaatcctcctaaaatgctgcaaatccg

SEQ ID NO: 135436 - DNA, 378 bp, Zea mays
  Clone ID: MRT4577_54998C.1
ggggccggagctcggtaattcccggcaagttccatccgttacaaggggctcgtccttgggctcaagttcctttacagcggccaggcctccgtggccgcgcccaaaagcggccccttcccgggggcggcgcccgcggttgcttgcacacccgatgcggggccgccgtggacttggccttggacacctttgccgccgcccgttctttcggggtcaagcagttggcgctcttggtccaaaagcagttggagagcatggtgaaggaggcgtcggtggacaacttgatgaaggtgctgatggcgtcccgcaagttcaagatgcaggagctggggcccacctgttccaacctggtggcccgctcgggcttttccgccgacctgt

SEQ ID NO: 135437 - DNA, 638 bp, Zea mays
  Clone ID: MRT4577_54999C.1
ggtacacggcgccccctctcgagtttttttttttttttttttttttttttttttttttttttttttttttttttttttccaaaaatatccggggttaataaccggtaaaaccccgggttcccggtttttttttttaaaaacggttatttggaaacccagggccctggaaccacatggttaacgcattccccggtttttccttccattacaccaaattttttaccacccgtttggggccctgggcccaggaaaaaatccttaagggttcaggaaccccaaccaccccgtttagtttttggggggggcggggggaacccgtttgggggggccccggttgccaaagtgggcccctgacctaacgccccggttttaatagcgccgatgggaaccgtaagctttttgggaccttgatggacggttggggctcccagcaccgggccctttggagggggaataaaaggttgccctccagccctaacctgagggggtgggggttcggggcctctcggtttcaggggggcctttaaaataagaggaaacagagcccctgttatcagggatccggagtggacaagaaatttttgacaggaaaaatgatggttttgggaccttcccctttcggcgctaagaattagggc

SEQ ID NO: 135438 - DNA, 583 bp, Zea mays
  Clone ID: MRT4577_5499C.1
ggccgccctttttttttttttttttttgtttttgttttttggttttttttttttttaaacgatgggggcctctgctctgacgaattattcacaaataatggggagaaataaatacataccatgtcttttggtgccaaccaagctggatgcaaatcagtagtccatggagccgaaatccggctcctgcggcctgggaagcatgatgaggctgtcggcccggacggatcgctggcgctgcacgccgcgcatggcgttcttggcgaagcgcgacacgaggagcgtggtcttgaacctgctcgtggaaaccccggacgagtcggcctccatctcctcctcccggcgccgctgctcggccgccttccgcttgaggtacctcctccatgcggcctgtatgaagcaggaggcccaggtgcgccactgctgcgagtagaagcggaaggtctgctgcagctgcttgctgtgcaggcgccggaactgccccgccacgaacttgagctcgtcagcgcgcagcgcgaacgcctccacctcggagatggccctaacggtgcgcgtggacagcgggaagttggcgccggcctttggg

SEQ ID NO: 135439 - DNA, 180 bp, Zea mays
  unsure (1)..(180): unsure at all n locations
  Clone ID: MRT4577_549C.1
gagccggccgggacccgtctcttctactgtctatgcatacggcggttgccgcgagctcgcgacgcttcttaggcttcgagtccgagctggnngaggagagctcgcgttgctcgctcgctcgcatgcagctttcccacacggcgccacgcatgcaggaccccgggcgccggnccgtaccgc

SEQ ID NO: 135440 - DNA, 695 bp, Zea mays
  unsure (1)..(695): unsure at all n locations
  Clone ID: MRT4577_54C.1
ctcttgaaagagagggtgccccccgtcgccgacacaacgttctatcggagcttgatcaacgtgctctagtacctcaccttctgcaggcccgacatcgcctacgccgtccaacaggtgtgcctacatatgcacaccccgcgggagccccgtctcaccactctcaagcggatccagcgctaccttcgcggctcctactacatgctcctactccgatcatccccgacgccagagctcgtggtctataacgacgttgaccgggctgcctgccccgacacgcgtcggtccactttcggttatgtcgtgttcttgggcgccaactgtgtctgctgggctgtcaagtggcatcccgtcatctccccttccaacgtagagaccgagtatcgcgccgtggccaacggcgtggcagaggcctcctggatgcgccagctcctccacgagctccacaaccacctttagtgcgccaccctcgtctactgcgacaacgtcagcgcggtttaattaaaagttgcattgaaagtctacctgatgttttccgagtagtgtggagcatgggctagggctacaccatagccttctagtttcagtttatcatgcttgatgcactagggtgcttggcagnaaaatgtgcccgtagtttgcaagtttcagcttatcatgcctagcattgtagactgggtgttcagtacttgccaaaa

SEQ ID NO: 135441 - DNA, 1011 bp, Zea mays
  Clone ID: MRT4577_55000C.1
gcaatcgcagcaatccgctcggtccgcgcccgcccgcctcccttggtgtgttgaatgtgagaaagcgagggacgtctgatccgtcgtccgtcgccggccatgccgagatcctcctccagccccggatccggctccaagcgcatcctggggagggcgatggccgcgatcctggcgctgccgctgaccccgatcatcaaggccaagctcggcctgctgctcttcaagaagcgcgcctcctccgccgcgggcaggcgccgctgctacaagccgttccgccactacaactacgcctacgtgggcgagtatcagttctctccctcccgctccccgctgctcccggccccgccccccggcgtcaccacctggcggagggccgccgccaggaggcgccggggcagggccaggatggtcctcgcctccctcttctgcggcggcggcggcgccgacgagctcgacgtcgccgtgctggacggcctcgcgcgtcgcaccgacgggcgcgcggagagggaccagctggtggtgctcgccccggctctcgagtgggcgcgcggccgcgacgacggtgcctacgcctgcagcaacagcaaccacgacgacgaggaggaggtggatgtggcggttgtggactacggggaggaaggcgacgtggaagtggacgactgcgccgagcgcttcatcgagcggttctaccaggagatgaggctgcagaggcagcgctctctggtccagcgcctgctctagagacattcgtccgttgctgctgcttcaattccttggtcgatcgggcagaaccagtcgtggttgtcgctgctatcttagctgcacttcggttaaatctctccgtatcttgcatttgcgtcgttccatgtttttttgcttctcatgtggcaattctcttgtctgtggaaggagacattcgtctcccctgctgttgtactgttacttctagtccttacctatataatccatccttgtgttgccatgttcaaaaaaaaaaaaaaaaaactcact

SEQ ID NO: 135442 - DNA, 272 bp, Zea mays
  Clone ID: MRT4577_55001C.1
gagctcacttttcggcggccgcccgctcgcggccgggtgcgtgtgaaggctgctccttcgctgtcttagtcaagggccacacacacaaacatgcagaagttacaaggtacatacaagtaaaggcctctaactacagagcataagggcctattttgaaatcccgcataggtccacaagagggatatgtaatttgacggaacacattggcactagggaacttggtcaccgtcggactggtgaacacctcacgcacctttattgcaagttatttg

SEQ ID NO: 135443 - DNA, 317 bp, Zea mays
  Clone ID: MRT4577_55002C.1
ggggatagctggcatatttttttttcgcacatgaactgggtccagggtttacaaacgcggacacatgcctttattggtttccaaattaacacaaacttatacccgttagtacgtaggggtcgaggcccccatcattcgatttaattctttatagggccgggcggggttcaaaaacctaaaaccgcctaccaacacccaggttaagggcccgaccctttttctttggggggggaaataaaaataataaaaaggtggccaccgatcgagcccgtgttttccggggtcgttttccccgggccggtttatcggccgggggc

SEQ ID NO: 135444 - DNA, 291 bp, Zea mays
  Clone ID: MRT4577_55003C.1
attgtgtatctgatgctggggtgcggaagatgacagcaccagttcgagtgatgaaaagaggccttgagaatctaacatcattagacttatcatgtaaccctgagatcacagatgcaggcattggatacctcttttcttttaggaaactaaactgcttagatatctctgggacagggctcaaggacatcaaaaccgtcaagcacaagctccagacccacataggccttgttcactccaaagtgcctttgaaggaatttgatcatagtaactgcaagacagagggctgggctg

SEQ ID NO: 135445 - DNA, 204 bp, Zea mays
  Clone ID: MRT4577_55004C.1
gatctactggctacttgctgccgaaagacaatacactgaaatgcctcatactcgattcgggggatatatattgggggcacgcataaagcgaagccatctatcacaaaggcctgtcatcaagcgaaagatatcttacaagagacataaaggcaagtcggccatggaacgcttgaaatattattgcctgactataaagaagacgat

SEQ ID NO: 135446 - DNA, 832 bp, Zea mays
  Clone ID: MRT4577_55005C.1
tcgaggggccggccgggccgggaaaaaaaaaaaaaaaaaaaaaaaaaaaaaaaaaaaaaaaaaaactcacgcacacttcctcatcttcgcccgggggcgaaatccgacgccacaggttggagggaaaaagcttccgggggtgggcagggattcccgcctcttatacgcctgcccgcctcgccagattcctcacagcttccctgcgaggtcccgtgcccgagcggagatcctcaactccggaggccgtcgtcgggggtaagattcggcggccatgtcgggcgccgtgctggtcgccatagcggcgtccatcgggaacctgctgcaggggtgggataatgcgaccattgcaggcgccgtcctgtacataaagaaggagttcagcttggagacccagcccttgatcgagggcctcatcgtggccatgtcgctcatcggggcgacggttatcaccacgttctcgggggcggtggctgacgctgttggcaggcggcccctgctcatcgcctcgtctgtcctctactttgtcagtggcctggtgatgctctgggcgcccaacgtctatgtgttgctcttggccaggctcatcgacgggttcggtatcggtttggctgtcacccttgtccctctttacatttcggagaccgccccgactgacattagagggctgctgaacacgctgccgcaattcagtgggtccaggaagggatgttcctttcttactgcatggtgttcaccatgtcgctcatgccgcagcctgactgagagtcatggctttgggggttttgtcgataccgtcgcttatgacttttgcattgactgtcttctatttgcc

SEQ ID NO: 135447 - DNA, 279 bp, Zea mays
  unsure (1)..(279): unsure at all n locations
  Clone ID: MRT4577_55006C.1
taagtacactgccctcccaagcnaaaagaagggagggggttatatacaaacgggtgctgaaaatgggagggatgggtgcttctggtacttgtagggactggtatcacgggacttacctcggtgaggatggagctgttaaagctataagaactcagcattttaataaaaatgggtggaaccagtttacacaataagtatatatactaagagaaactcaacataaaaaagacctgcgatgaataagtgcatgcacaaaaacaccccaaatgtgcataatta

SEQ ID NO: 135448 - DNA, 491 bp, Zea mays
  Clone ID: MRT4577_55007C.1
cacccgtccgttcaaaaaaaaaaaagaaaaaaaaaaaaaaaaaaaatttttattttaaaaaaaaaaaaaggccaaccggggctgggttttcattcttacatactcctgcttccaacctcataactcttttatattgtcacctaatttcatttcactgaccgtctttttacaactttcagactgcgaaaaccctgacttttcccaacttattagccttttagcacttccccttttttccatttggctttttagcgaattggccaatacccatcgccctttccacctttttcacatcctgaatggctaatgggacactccctgtagcgatgcattaagcccttaggctttgggggttacgcgctactttacctttacactttccaacttccttatgccctagcccttaggctttttcctttctttttttgccactttggtccggctttcccctttaagctttaaatctgaagttcccttttggtttccatttt

SEQ ID NO: 135449 - DNA, 764 bp, Zea mays
  unsure (1)..(764): unsure at all n locations
  Clone ID: MRT4577_55008C.1
gccattaataaaatccagaactattgcatcacctaagaagccgtccaagagtttctcccctagttctggtccaaagaggtcctttgattctgcagtttggttaatggatcgtcgcaaagctcctcaagataagttcaggccacttctatcaagtgttccttgcaccacatttggtgttggcaaaggggataatgtacactcatctatgttgtctcataattcctcactcacaacaagcagtaatttaagctctgaccatggtgtcacttttagcccttgtatgggtaatgaacaaggaccaagtgatatagccggtgactgtgaagcaacacctacttacagtttgtctgctactcaaagtagcccaaaatctccaagcacagaaaaaaatgcggaaagtaacatggaagacctcaatatggaaagaagtagaatagtcgagacttcaggtaatgttgcaagtggttccaaggctgggctaactaaaatggcaacatgcactaggtgtgaaaagttatttaatgcgataaaagatgatggagaaattgatttgtgtgaagaatgtggtttagtagatgaggttctttttgtgaaccccaagatagagactgtggaagaacatcaaaaagaccacaaaactagaatttctaaaccttgtgttgccttggaagctnctcacattactcccgatcatggtgaagataccaagaagtcatttcttgatagtcagctggtgaatgatgaacctncagctgattgtctgc

SEQ ID NO: 135450 - DNA, 366 bp, Zea mays
  Clone ID: MRT4577_55009C.1
ggaattcccggctcgagccacgcgtccgagcaggtcaggcaagcggagccggacttccggtaccaggcgaccttaggctgggcggtgcaatccatcctgcagcagcagccgcaaagcgctcagatcgccgtgctgatcgcggcgcatatcgggcagcagctgactgcgatgtacgacctgcagcagctgactttatgcccctaccctgctgccggccatatactccactgtagaaactatttgctgtactataacgcctggctagcttgctagtttaatcatttagcggcgatgatcgaggaataatgtagcatgcatcacgcatgggtggcagtgtcagctgaagcaaagtccttaatgaacaat

SEQ ID NO: 135451 - DNA, 423 bp, Zea mays
  Clone ID: MRT4577_5500C.1
ggaggctggtttaaacaactttaagggccgcatggttaagggggggggagccacccaagggaaaaaaaaatttcggaacaaaagggaaaaaaaaaaaccaaaggggagggggaaaaaaaaaaaaaaaggttggggggagaacgaaaaaaaaaatatttaaaaaaaaccggcaaaaaaggactcccttaaaaaaaaaaccggcgggttttttttgcaaaaaaagcccccaagggtaaccgggaaaaggggccacaagaacccccaggggccccacttgaaagaaagggttttaaaacccttgcaaaaaaaggggggggagacccttgaaaaaacctggggggcgggaaaaaaaaaaaacccggggttttggaaaattgtggggcccccatttttcaaaaacgggttttcccccaaaattaaaaa

SEQ ID NO: 135452 - DNA, 172 bp, Zea mays
  Clone ID: MRT4577_55010C.1
gcccaaagctccgtccccgcggcccaccaaccgccgccgccgcctcacccattcattgccgtcggtacctctcgtcgtcccttacctgggctctgatccatccggcatcgggggccatctcttccacaccgtctctcctctatactctccgagcctcagtgctcgtcccctc

SEQ ID NO: 135453 - DNA, 164 bp, Zea mays
  Clone ID: MRT4577_55011C.1
ctcctgatcgccctgtttctccagaagcacgcatggcgtccgagccggacaagcaggaggcccccgcggtacagtagacgggcgtggacatcgtgtacgttgaccgccccgaggacgccgaccctgaggagttccacatacggagcctcacccccgtcctcggg

SEQ ID NO: 135454 - DNA, 929 bp, Zea mays
  Clone ID: MRT4577_55012C.1
cctcgctccccgcataaaccgaccccgggaagggaaaaaagagagagaagagaagcatcccttcgccatagcagccagcggagtaccaaaccccacacgagcaaaagcagagcacacagcacaaacctctttcccctcccctgccccgcctcctcctcctccattccccatcccccatcccccatccaccgccgtcgatggcgaggccgacgcgcgcgctgctgctcccgctcctcctcctggtcctcgcgctggcggcgctggcccgcgcgtcggggtcgggcgacgttccggcgtcgtctctgagctgggacctcggcgtggtgggcgcgggggaggacgaggagttcggcttccccggcggcgactccgtagcgcgccgggtgctgcagggcggcggctacctcagctacggcgcgctgcgcagggacaacgtgccctgctccgtccggggcgcctcctactacaactgccgccccggcgggcaggccaacccctactcgcgcggctgtaccgccatcacacgctgccgcggctgatctcgccgcctacgcgtccaccgacggaaaacaggaggttcatatctgtcaatcccacgccgttgttgatttgagacacaccaaaaaaaatgttcatctccctccctgtccctttaatcaattatcagtacctgtatgctattgcttgttttctcctgtcgtttgaatttaacgagaatgattggtggtggttgtgggttatgcatgagttggcgcccacttgattccagccggattcgcctctctctctctctggtcctgtaaattccatgaatccatgattcgtgagcaactggtgtacaaactacaagctgatgatgaaaattccaccgtgaaccaaaaaaaaaataattgtaattaagttagcggcggatccgagtcgcaacaacc

SEQ ID NO: 135455 - DNA, 260 bp, Zea mays
  Clone ID: MRT4577_55013C.1
ggtgatgtgatttttctttattaaatgggtgaggatggacacaaacacagtgttgcaaagatcgagggagcccccgattactcccttggtagagatgggcactgagcatcgggaactaaaaacatgatcgacgctgactcaaatacctacgggcgcgactaacaacaatggatgttcccgcctatatacagcaaacaacaaggataaccctattcttggaccaaggcagccgtggccctgaatggaggaggcctgacaac

SEQ ID NO: 135456 - DNA, 990 bp, Zea mays
  Clone ID: MRT4577_55014C.1
ggccctagggtccttttttttttttttttttcgtctgaagctattgtctatgaatatataaattgtatcccctcctcttcaaattacaagtcactccgacttttctagatatgtaataacttttgctatgtaactaggcatataactaaaaagtcaaatcgacttacaattttctggaatgtagggaacacatagtatacagtacaaaactcaaagctcaaagcatggcaaaccaacacaaaccagtgacaagggtgatggttcgccaagcagcactacttagttattgtaccgaacaattcagcaacacgatcgggcaggccagttcacctgccacctcctgaaatccagtcacctccggctgctcctgcgtggagacgacgcggccttctcctcgacgtattcggcgaacctaacccttggtccggggattctgcagtgggagtttagatccgcaaacatctgctggcagcggttcctggccacctcctgcacccggcaggcctgtcttcgggctgcctgtgttgattccggttggccagcatgcttctccagcaggctcctaagactgtccacctccttcagtaagttacttatgatgtcatcggcttctctcatctgcttcctggagaactcgaaagctcggtcggcgtgtaggcgaaacgtacagcagtccaggcacatgcagatacccttgcacccccgtgtactcctcttgagtatccctttctttggggaaagctccttaggagaccgagctcttttttccattgaatgggcaccacttggccatgatatggctgctttgctcgatgctgattgggtgaacagaatgcggccagacatttcctccattgatgaggatctgtcagcagcacagggatcagaaagtctgccgaccatttgtatgtcatcgtcaagaagctgatcatcatgagaaaccacagagtcctgaggttgttgtgcgcaatgccgatgcaacgatggtac

SEQ ID NO: 135457 - DNA, 310 bp, Zea mays
  Clone ID: MRT4577_55016C.1
ttaaactcgagcctccggttcccccccccaaaacgatcgcagttctacgcatggatacctatctagaccgataagtcctctttcatctcactgtccacacaattagccctctctgtgacgtgcccccaatcacttggtcaggactttgatggatgagacctgcctcggcattgcttcatctttgatcagaatgccggactttgcaagcatatgtgaagatttagaactgtgtgcagaggagccctcgtatttaggaccccccccctgcaatccggactgagaacatcactgctaaatacatgatacttgc

SEQ ID NO: 135458 - DNA, 300 bp, Zea mays
  unsure (1)..(300): unsure at all n locations
  Clone ID: MRT4577_55017C.1
gggttttgttttttttttttttgttccgggtggtacatgtgtcagagcattgcggtgacgcagggcacatgtcaagatgcatggggtacattcatggtggtgccggtcctgcccccactttgaagcactaagtgcctccctctcctaggggggggggggggggccttttttattgccccacttaatgcgacaaatgcgtgcgcactaggggcgtgagggggcagaggaagtaaattggagccgncgtgcagccgccgacaaagcccagggaagtggcgaacgcggacgaaaggcgcctta

SEQ ID NO: 135459 - DNA, 126 bp, Zea mays
  Clone ID: MRT4577_55018C.1
cagcaagcgcgcgctcacactatacgcaacttcaactgttactgcaagatcactcgactgcagattccacgagtgtcatacgcagcaagagaaaaatggggactctcgccctctgctgatttcgat

SEQ ID NO: 135460 - DNA, 497 bp, Zea mays
  Clone ID: MRT4577_55019C.1
ccggccgggacggcctgtggaagcgccggtggtcgcaccgcgaccccgccgagggcgaggtgcacctccgccgaggtgccggctcgaggagagagctgcacaagtttgagcagcagcggcgaccgctccccccgatggaccgtttctccctcgtcgtcgagactgggctcaggtcctcggagctccggcgcttcatgaggtacgccgccgaccgccgcgtccaggacctccacgtcgagacacggaagagcatcaagaagaacgagaacctcaacttccacctgccgctgtcgagcccggccctcgtgcgcctctcgctccgccgcatcaacatctccaacatgtactacaggggcgcccagccgttccgcgctctcgaggtcatccagctctacctagtctgcattaatgtgtgcttcgcaaagatgaggggggctgtgccccagcctgctcactctcgacctgcgaggctgcgtcatcagctgcggcgctcaaag

SEQ ID NO: 135461 - DNA, 199 bp, Zea mays
  Clone ID: MRT4577_5501C.1
ggtggacccacgcatgcgtatttgcacctacgcaacaccaggcgcttcagcagaacaacacttggagcttggctggccgacgggccaccatgatcattcccaagaagaaccgcaatgagatctgcaaggacctttttaaggagggcgtgctgtatgccaagaaagactacaacctggcgaaacacccacagattgatgt

SEQ ID NO: 135462 - DNA, 629 bp, Zea mays
  Clone ID: MRT4577_55020C.1
ctctaaacggccgccctgggttttttttttttttttttttttttttttttttggggataaaagccgagctgcgctaccatttataccttaggaaatttaaactgctcaaggggggaacatgcatcatcaaaggtatcagcaaggccacgtgaacacaaacacagtgggagagagggggtgacagatcaaaatggtggaccccagggtttaacaagcatggaaaaggaaacgcccgtaaggaattgcggaaattgaaagcactcactgaccggaagaatcttaggtgaacatatacatacgctacacctgccttgggaaccaaaaattgtgaagcaaggcgctctgtcaaaacaaaagcttgcatttgcaagcttatatgtcaacattacctccggggcttgctggatcagcatcactaccatggctgtcactgctggtagtcccacttgcacgggcgctcccagtggcggggctggggctgctgctggggccaatagaagtgggggcgccctgcccctgctgggccgcttgggtcaattgagctcgcaagggcatcggctgggtggggggctgtcggtggcggatgctttacctttacgtggacaagggggccgtccatatggagctag

SEQ ID NO: 135463 - DNA, 2079 bp, Zea mays
  Clone ID: MRT4577_55021C.1
ctgacatttcgggtgcactgaacttgcagttgatcgattcagcagcatgtactaatctggatgctttcatgacagaactgccacgtgataatgaacacaagattgtaaacatcaataaggaagggcacatgttgacacaacttactatggctgatacttctgatgtccgtatagaagatcctcttagcatcttaaactccagaactgatgatcatcatgccctagagttgagggataaggagctccttgtgtcagagctgcaaaatacgcttgatcaaaaatcaaaacagttgggtgaaactgaaattaaacttagtgccatgatggatgaggttaattctctgaagaaagaacttgaacaaacccggggtcttcttgatgaatctcagatgaattgtgcgcaccttgaaaactgtttacatgaagcaagagaagaggcccgaacaaacaaatgttcagctgacagaagggctgttgagtatgatgctctgcggtcgtctgctttgaggatacatggtttgttcgaaaggctaaataactgtatcactgcaccaggcatgactggttttgcagagtcactgcgttctttggctctttccttggcaagctctgtaaagaaggatgaagctgataccactgtacagtttcaacaatgcatcaagatcctggcagacaaagtttatttactgacacgacagagtgctgagctgctagaacgctattcagctatgcaggcagtacatggagatatcacaaaagagctggatttgaagaaagtgctgattaagaatctctacaataaacttcaacaagaaaaacaggccagcaaggagaagatatcatttggtcggtttgaagtccatgagcttgctgtctttttccgaaaccctgctgggcactatgaggcgatcaaccggaactgctcaaactattatctgtctgaggaatctgtcgccttgttcacggagcaacactcgcagcacccagtgtacataatcgggcaaatcgttcatattgagcggcgcgtagcgcgtccagaccagatgggaggagctccacgccctgatagcagtggcggccatcggtcgcccgcatccatgcttaacccctacaacctacctgggggctgtgagtacttcgtggtgactgttgccatgctgcctgatgctgccagttaaaacataacaccttcctgtagggctggacaaaatgctcgcggctcgtcggctcgctcggttcgtggccggctcggctcggctcggatcggctcgtttgaattttttcgcgagctgagctgacatcctagctcggttcgttaacgagccagctcggtttgttaacgagctagctcgtgagctaaatgagctatcacatttcagcaaaacaaaactatatacatatcatttacgtaacaattgatgaatatgttatatgtatgtgtggtgtctataacctataagttaaactaatgattgatgaattatgtctatgtatgaaattggtctatacgaatataagtgtgggttaaactgttgaatatgtgtgtgaatagtgaattgatgagtgatgagttgtgttaatttggtgttatattggtatggtctatgaaactatgagtataattactattttctgttttaaattagtttaaaattaactagaaattgattattatacacatattatttttttctgctctggctcgcgagctaaacgagccagctcgagctcgtaaacgagtcgagccgagctgactctgtggctcgctaccttaacgagccgagtcgagccagctcgttagcttacccacccagctcgagctcgaacgagccgagccgagctggctcgatatccagccctaccttcctgatcctgcctgacaattggctgttgaaatgaagggagaaaactgtcaaagtgtcaactgtatatatactgaaatttattgccatttgactctcaattctcagttgattcctcaagtgttgtttgtatgtatggtcatattcactgtgtaaataaactcggctactaatgctaggcatctcttcgttcaagcagactgaatatctttcagct

SEQ ID NO: 135464 - DNA, 243 bp, Zea mays
  unsure (1)..(243): unsure at all n locations
  Clone ID: MRT4577_55022C.1
gcccgattccctttttttggccaggggggggggggggggggggaancaannaatatacnnagccctagcnncgaactagggtnngacatggataagcccnnnagcctaaatnntttagggtcnncaaagagcccccanncccccannacacatgaagaangnncctggagccannggccagactggctnnaataagtancnnacccacaaaaaagccctatcannccctaatcnncctaggct

SEQ ID NO: 135465 - DNA, 1198 bp, Zea mays
  Clone ID: MRT4577_55023C.1
attgggacctcgagccggccgggaaaaagtatgctatatgatgtaggagatatgtggacagatatcgaaacagctctctagctagagcgctcgaaggataacctggctatcggtatgacttccaaggagataggagacttgaccaggttcattgccatcaccgctctcgccttcggtccctgcgcatacgacgtgtccatggacgggggctgatctaacggcggcgccacctggaacggccccgccaaggacgatgctagccgacaacggtgcgtgagggtaccagggtgacggctaccaacctccgttctcggcaatgatcaccggcggcagccaataccatcttccaggacggaaaggggtgcgtcacctgctaccaggtgaagtgcaccggacacgagtcgtgctccggcagcccgcggacagaggttatgaccgacctgagccccgaatctacgtgacatgaggaggccgtccacttcaagctgatggagacgcagatgcgagacatggagaaatccgggcagatcgaatgctccgaaacgccggccgcctacaagtccagtacactcgggtggcgtgcaactggaacggcttggacatcgccttcagggtggacgccggctcaaacgccaactacctggccatggccatcgagtacgagtccggggacggggacctgcgcgccgtggagctgaagcagagcggcgcggcggcgtgggcgcccatgcaacgctcctggggcgctgtgtggcagtacaagtccggctccaccaatctgcaggcccccctgtctgtccgcctcacctcgggctccggcagggtttctcgtcgccagcaacgtcatccccgccggatggcagcccggcagaacctaccgctccgtcgtcaacttcggaggaaaccatgcataacgagtggtattaagatgtcgatgtcgtctgcagatgtctccatccaacaataagatgcatgcatatatgatctgtgtggccagctagctgctagaccatctcactccctgagtctgctgatgctcagccaataatgaatcattccatctcgatcggaaattcaacatatataataatgcaagcaccggaaatagaaaaaaaaaaaaaaaaaaaaaaaaaaaaaaaaaaaaggcaaaaaaaaaaaaaaaaaaaaaaaaaaagtactctgcgttgttaccactgct

SEQ ID NO: 135466 - DNA, 685 bp, Zea mays
  unsure (1)..(685): unsure at all n locations
  Clone ID: MRT4577_55024C.1
accttcctcgccactccagcccggccgccgcacccgggaccccgttgcgggccaccctgacccccacgtttcccacctgcccacccgagaggtcgtcgccctcccgcaactacctggtgccggtgacacgtgccgcccccaactaggatctcatgcatccgccatcccccaccaggatccaactatggaggccgcatctcctatgcttcaaccatggaggccgcttccccctgcttcaactatagcagtggccctccctccgcgcgtgccctccctccgcgcgtgccaccagcaaccaccgtcagctggctttctcctgcgcagcggtggtgcatctcctgctcccagatccaggcgcgggccccaaccccttctaccactggatctcgggctcgccggtgggcgacggcgctgcccaccgcccgtggctcatccccccagtgccgtcgaggttcaggtcccgtatcgtacacccctccctcgaatacgtcgctccgaccttctttcatagagccagcggccgctctgccttcctacagttgcccgtgctcctccatcgatgttcccgcggtcatccactgcaccgccaacatcctctctccggncgacctgcagctgggggaggtctcaaactacagctggaggaggtctcgacctgcagcttgccgcgtctgccgctgccgcc

SEQ ID NO: 135467 - DNA, 540 bp, Zea mays
  Clone ID: MRT4577_55025C.1
atgagaacctttcgattaagtttagccacgaggcatcaatctcacaatctatacttcaacatgtagctgaaggcaggctcgaagctgctaacactctcttaagtcttaactaagaagaactagtcttgaaccagccaactcggcgtcagcctagttagcttggcttgcatccaagatatgcagtgattccccaagcagcttctgcgcttccactctcctcctgaagaaaatactcagggggcgttagaatacaagcatttatgcagtcacaatttacaatgaaaccagaagacgtgcaagcaagcgactagtacaaaatttgtatgcatggtagcatagatcaacttcatagaatagcatgtattctacaacccttttttaatcaaaactatcagctaaccatctcttgaattacattaagcctttttcggttattcccatttcatatggattgaatgagattagaaaaaattaatttttttttttgacttgcttagtgctagtttggcaactccattttttaaagggattcttattttc

SEQ ID NO: 135468 - DNA, 806 bp, Zea mays
  Clone ID: MRT4577_55026C.1
cattgggtacctcgaggccggccgggcctcgtcgccctggctcggatccagcgccctgcctccctctcctatggtggccgagttcctctcctgtgcgcgcgcgtccccagcccctgctctgctcatccatggccgcacgctcctccggcacgcggagctcttccctacttccgttctggccgcgccctggcccctgctcggacggcgctcgaactgccctgctcccagttttctctgcgcgctgctttttcttcctctcagccgaactcctccaccgtacagcgcccagtcgagcgctcctccttccatcagccggaagctttctccagccctggagctcctgcgcgtcccctgatttcccccgccgcgcagctcctggctcgcccctgcgttcgccatggcgattccctctgctggcgcttgaccgctcggccctgccccaacgccgggcatcgcctgctcccctcatcgcgcgtcgtgcgtcttccttttgtcaacccgacgtgggctctgtccgtcagctgagtgcttgatgctcgtgctcagtcatctacagcagtttgcttggtggcggctcgccgtggtcgttgtttgctgctcgtggccgtcgtctccttctcaacatcttcgtgtcgtccagtgtgcttgactttgtcttgtcgtaaaaccacaacgccgtcgagcgtcgctgccatcacaaagttccctgctgtcagtctctgcacccgtcctataccgttgtaaaactctagtgtttgtcgctgatatccgatcgtctccaccttttatcttgctgtcgtcgttcg

SEQ ID NO: 135469 - DNA, 398 bp, Zea mays
  Clone ID: MRT4577_55027C.1
aattatttttttttaaaatccaaaggctaagggggctttttttgagttgtttggggtaattcccacaacattaataacccataaaagcaagactagcaccctacagcttgcaggacttcaaatgtaagacaaccggagagccaatattcaaaccgaccgggacaaccgaaccacagccaaaaaaacccgctcagaccaaggaacaaacaagccgcaccccttcatggccgtacccccatcaagcttaaaaagcacccgaaccttggaccggcggcccaccgaaaaacaaacttttggaaaaaggaaaccaaagcccaaccacagtgcaaatgattacatccgacacaccagccaaggccccggcacagccagaacacccccggaaaaagccaccctag

SEQ ID NO: 135470 - DNA, 306 bp, Zea mays
  unsure (1)..(306): unsure at all n locations
  Clone ID: MRT4577_55028C.1
gcacacacacacaaccagtttctcccccaaanccacccggggggaccggcgctgcaagaagcagaacnnngggaagacccngaccggcaagacnatcacccncgaggcggagccgncngacaccancgacaacgngaaggccaagaaccaggacaaggagggcaaccccccagaccagcagcggcacaacaccgctggggggggggngaggacggacgcacgccngcngacgacaacaaccagaaggagagcacccaccaccnagagcaccgccacaggggaggcaagcaagaagaggagaaaacc

SEQ ID NO: 135471 - DNA, 471 bp, Zea mays
  Clone ID: MRT4577_55029C.1
gccacgcttccgatacgttggaatacaggcgctgtcgggactctactgcacccgctccatctaggaaaggaaaccgaggaaactacaggcacttgggactaccagatccgtatgagccggttgggaatgccaaaatacggcccttctacccgcagatgcccggcgatagccaataacttggagacgaggagcacctagggctgcttggatattctaacccgctgcatgggaaggattgtgaaaaaaggatggtacccgcaattcgtccggacgaactcttcgctgtacctgggcgcacagctatcataccttggtcacagtgttctgtttctggccggacttgttgcaccagctaccttgatgactatggtaatgcagggcgacgtgcttgttaggatccgcattgatgaggagattgggaaccttctgtatctcgtgggtatcgcacatgttgatgttctcaatgactat

SEQ ID NO: 135472 - DNA, 236 bp, Zea mays
  unsure (1)..(236): unsure at all n locations
  Clone ID: MRT4577_5502C.1
ctctcaccagcggtgtcttcggtatgtggaaaaancccaattnctnttcanaccccctttaccagngggatnccccaaaaccagggggccaaatcggcagcctgggcgattcttacccctttatcacncctttgtttgccttccaaccaattcatcagcccctatttacagcaggttaccctttgggggggccatttttaatttggggccaccacaaaaaaaacatttcagagggg

SEQ ID NO: 135473 - DNA, 610 bp, Zea mays
  unsure (1)..(610): unsure at all n locations
  Clone ID: MRT4577_55030C.1
gtcagtgccacatcagtggaaaaatcctttgagtggaatcagaaggctaatttggccagtttcagtagttgagggctgttggatgtcagtattatacttcagtggcagtttgagggtgtaaaatgtgctttaccctagatttaagacaaaattagaaaacatgtttttccagagagtgaaaataagatttcatcgactttcctttcctcaacattttcactttacgtttggaagaactgttgcttcggtttctagccagtatggtaaatatgataggatcgccttacctattatgagttctcctaagaccgtatccagcagtttacccatagtttaccaaaatcattgatttacaatgttctgcactgtagacttcactgttcatagagtgaatgggtatgaggatgaataagctattgaagatagtctaagtgattagaaaacttctgttgattttgacctttagtggtctgtgcatccttcagttagttgtaaggttgtttcataatgtcacatggaactgcagttaatcaagataaatttgaaaaatataggaacttctagnaagtaccatttttgcaggtaattgtggggaaacacccagtgtcct

SEQ ID NO: 135474 - DNA, 347 bp, Zea mays
  Clone ID: MRT4577_55031C.1
aaaaggggacaaaaccgggaaaaaaaaaggcatcagcttatacaataattttgggggcccaaaaggggccccccccaaggggcatcacaaccgggcttttgggggaacaaaaaaaaaatgggttgggaaaacgggtccaaaacaggccaaagtttaagccttgtaaaaacaaaaacctgcgggggaaccccccgaataagctttgaaaaaacaaaacggggccgattttcccccatgttttgccaaaggggaaccccgcttaaaaaataagggttttgggggggggggaatttggggaatttcccaaaaccataagggctttaacccaccgggcccttttggggggg

SEQ ID NO: 135475 - DNA, 171 bp, Zea mays
  Clone ID: MRT4577_55032C.1
gcaacttaaggacagcacaccctggtgttttgggagaacccgtaacacataaaatgaaacagctttattgcatcaagcggcttaaaatacctgtatcacatttacaaagtggaggggaaaactaactttttttttgacaccaaaaagtacccgtgccaacgaaagaagtct

SEQ ID NO: 135476 - DNA, 346 bp, Zea mays
  Clone ID: MRT4577_55033C.1
aaaaaaaaaaaaaccctagccgccgccggcgccaattccctgcccgccgccacctcaacggccgaatccttacaggcgcaccacaccagcccgcgtgcctgctctcctcgcccgcgcccgggtctctgcgcgcggcggacgtagacgagatggtgctgcgaacggacggccgttggcaccaccatgccgaggctcgaatgcaacacctaagtgtggggggggagaaggctgccctcggcgggcactacaagctgatggagaacggcgggaggaacctgtcgcggctgattacggaggtgcctaaaggaccttattaagaacggagtggtggtatgaagctcgtggc

SEQ ID NO: 135477 - DNA, 382 bp, Zea mays
  Clone ID: MRT4577_55034C.1
cggacgcgtgggaaaaaaaaaaaaaaaaattaaaaaaaaaaaaaaaaaaaaaaaaagaaaaagaaaaaataaaaaaaaaaaaaaaaaaaaaaaaaaaaaaaaaaaaaaaaaaaaaaaaaaaaaaaaaaaaaaaggggcccccttttaaaaagccaaaatttaacatccccgtatttgcaacttaaaatctttttaaaagggccccaaaattaaatttaatggcccgtttttaaaaaactttaaaattgaaaaacccttggtttccccaaattaaatccctttaaaaaaaatccctttttccaaatttggctaaatacaaaaaagccccaaacaaatcgcttttcaaaaaatttgccaacccaaaatggaaaatgaaaccccc

SEQ ID NO: 135478 - DNA, 344 bp, Zea mays
  Clone ID: MRT4577_55035C.1
aaaaaaaatacaaaaaataaagattcattcttgccggactcatatccattaggcaggttctctgcggatgaagagctggcatcgcactgtgccttctgcacttcaaacattattcattatgggcgctcttcttcctccagctttacctctgcacgctattacctacatcgtctatatacagctgttcggcacttatctatcatgttgtacattcttgataacagcctaacatttataaccttcttgatccttaaaaatacaaataattatatattattataaattttataattattctttaattatatttacttttatctttttttataactttttttaaaata

SEQ ID NO: 135479 - DNA, 260 bp, Zea mays
  Clone ID: MRT4577_55036C.1
caaaaaaaaaatagcacacaaacaaaaaaaaaaaacaacattattttactaaaaaaacaacatagaacaaagaaagggggatgctatctacactaataccagttggcctgttaagaagcccagtcaccctacaacttgggaagggaagccaaggctgacctgaagaggctcgctcggaccagagccaacatatgcaacccagagagcaaccaccatggtagctccgacctgtactaggcgctgaaggcggaccattccgt

SEQ ID NO: 135480 - DNA, 330 bp, Zea mays
  Clone ID: MRT4577_55037C.1
gagcatctaacagacccatgtttttagtaaactgggtgggccataaaatgccaagaagtgaattatacttgaatccaaaaaaagaatggcatcacagcggaattatcctagatgttggattaatgcttgccgctaacatctgacgtgtcggccggtcaggctcggggatgaactggacggtccatccaatcagccacgacaccgaggaacaggtgacacagacaccccaatgggccaagccgcgcctatggatgccagcaaaccttgcgagcagttgcaccatcagaacatggatggcgaacggcacggcgatgatgcacaggaacatct

SEQ ID NO: 135481 - DNA, 290 bp, Zea mays
  Clone ID: MRT4577_55038C.1
tagcactcctcaacagccgccctcctttaatatttttttttttatatcaaaatcaacggcgggttttatcacatagagcggcgacatcccaaggttataaccaaaccatgccttccgcccaacacaaaacaaaggttctagttacttacaccgcacaccctctaacaaacaagcaattttaaaaacagaacaggggcaccatatcagctagaaagtcctaaaaacatactatcacacagcacagcaacatatctacaaaatatttctactgactcgcgccataaatactt

SEQ ID NO: 135482 - DNA, 350 bp, Zea mays
  Clone ID: MRT4577_55039C.1
gccggcagccgctgatatacattacatacggggaacacccaggtcttgccgggcccaccaacaactagccgcttcacaatgccttccgctcacacgagctgatccaccactccaagggcatcaacgacctacagacggtactattccatgtattgccatgttgtcacactagctgataaaaccaaaaactgtaccttatctataacatgaactgaggctaaaatatcgcacgtaccagaaactctatctaaacaaatgctcggaaagatggacgcgccccctaagcccgacgttccagtcatcacaccggaggaacttgctaaggctgacggcatcctctttgcgtttcc

SEQ ID NO: 135483 - DNA, 369 bp, Zea mays
  unsure (1)..(369): unsure at all n locations
  Clone ID: MRT4577_5503C.1
aacgcaangaaaggagggggcgaaacncgcnggggagccgacgccggcgcacggcgccggcngcggcggcggcaccgccggcggacgggcggncgccaccggcccccaagggggcggggaccgacgacccgnccaaggcgcncncggcgggggccgacgcggacgcggacccgcgccgccggcngggcgncaccngcgncaacagcccgcccagcgacggacggcgcgncggagggggggccggcgccggcaagaaccngcccggccacanccccgccgagccagggncgcccgcgnnncaacgccggcncaaccnccacgggaaccgccgggcaggaaccgnccccgcggcgcgcgccaacgccaccg

SEQ ID NO: 135484 - DNA, 243 bp, Zea mays
  Clone ID: MRT4577_55040C.1
aattgggggggatcatgaattggggggtcttccggggcacaacataatgttatgtgcattttattcaaatgggggcggttaaaaagcgtttacagccggttttaaccttgctacatccaaaaagagtggtatatgcctagaaaggcaaacatttttcctttacagaagcctcccatttggcgttaacacatttttgttgcctgttgtacataaacagcccaaatgggttactagccggggttt

SEQ ID NO: 135485 - DNA, 657 bp, Zea mays
  Clone ID: MRT4577_55041C.1
tgaagatctggagcaaagacctgagcttcagtccatttcttcgctgttggattatttcattcatgaactttccttcaggaataactttgagtttgtccaggctgttctgaaattgtttttgaagatacatggtgaaacaatacgacggcactcaatgcttcagagtaaggtgaagaagcttcttgaggtccagagcttagtttggcagaagattgataagatctttcagggtgcacgatgcatggttacattcctcagtaactcacaattttagtagcaggccggagttccacataccagggcatacatggtgcctaatgcctgcacgagttgtggccattggattgagcaagtggatatagtttatattttttagagacggcattaaaatggatctggttctcaaacatggcatgactaggcattggagcgttgttgagcagcagccatggctatattactctaggcttacaattttgctgtagctgttacacagcaaggagtccacttggtaaacattggtagctaccaaaacaaccctatctcatggtgtaacaattttgtagttttacatttgtgtcatctttttgtaacaaactgatgtatcaaaaccccatattgcaaaaaatactaaggcttgccattgctatttgaccc

SEQ ID NO: 135486 - DNA, 311 bp, Zea mays
  Clone ID: MRT4577_55042C.1
cgaagtcgaaaggctactccaccttcctccatacacattcttcttcatccatgcgcatgcggaagatggatctcctcgtaccggacgagcttcctcggacccaccttccccatctccatgtaccttgcggacagcgcttctaagacctactgatctactcaatccaccgaacaaagctgcttacctagatttagcttctcacgcatatgatccagctgaagctgatccacttaaattcttgcattcttcttctgaaaatgatgattattctcaatggataactgctagtcaaaggagccttcttgaagtta

SEQ ID NO: 135487 - DNA, 871 bp, Zea mays
  Clone ID: MRT4577_55043C.1
agtttcgcgcgcacgactacagaaaaaaatgagcggcacgcggccaaaagggaagcttcgcgcgcgccatgggagagctggagatggccggcgagcacgcgcgcgcagcaacgaatggacaccagggcgtgcgcacagggaactttggctgggcgcgagcacagggagcgagcttgagggcgagcaccatggggagcagaggagctccacggcgagcttgagcacacaaaattcgagcagaggtcgcagacaaatccgagggagagaaagagaagcagggagggagccgagcaggaaataaatggaaggacgccctgctcaccaccgcacgtctccacatggcaggacagccaacatgctgaccaccacggccagacccgcgccgctggcctagagcacgcacctggcgtggattgctcctcggtctgcaatcgtgcggcgtggagaggagcaggaacgcgcgcaccagggagctgagcggctgaagacgaagttgcgggaggggcggccattggagaggagcttggaaaactgagcgccgtggaagatgagcgtcggccgaggagggcgcggtccgagcctgaagccggttgagtagaagctgggaactgacgtcgaggggatagaggttttaggcaaatcccagggtgcagcttgaggtggaggacgagcacagccatggacggaaaggagcaggggcatgattcggcgagattgcggaacaaggggcgctcggccgggcgccagagctggaggagaggagcgccggtagagagagcggaggccgaggcgaactggaagctgggcgagctgctcggtagaggaggaaatgagacggagccagcagttctctcgcgtcctctttctttgc

SEQ ID NO: 135488 - DNA, 1057 bp, Zea mays
  Clone ID: MRT4577_55044C.1
caagacatggtatccctcgagcccggaaactagcggatttcctgaatcctgagttcctcaccggcgaggcgagcacggaaaaaatcgcatggccttgcagcacgcaggtccagctagctctacgctgaccaccggccgtcatggcaggagcgccgcagccgtcctccgtcggccaccggcgggttctaggagccgtttgagggcgcacgcgcagaaacccgacgccggatcccgtggcgcgggagccgagaccgcgacgtcgtcctcatcctcccgctcggagaacgccgtcctcaaggccgcctggtacggctccgagctcctcggcatcgccgcgtcgcttctccggcccgcgccgtcgtcgcctcaggagggggatgctggcggtggcggtgacgcagagggcgaagcggcggcggtggcgggggccctggacctggaccacgcgggagtggccgaggccattaaggcggacttcgcgcggtcgtacttcgtcacagggaatctcacgctgagagcttacgaggaggactgcgagttcgccgacccggcgggctcgttcagaggcctgcggcggttcaaacggaactgcactaattttgggtctctgctcgagaaatcgaacatgaagctcaccaaatgggaggacctggaggacaagtcaatcgggcactggcgtttcagctgtgtcatgtcgttcccctggaggcctattctgtcagcaaccgggtatacggaatactacttcgatgctgaatcggggaaggtgtgcaggcacgtcgaaaattggaacgttccaaagatggcgctccttcggcagattttcaggccgagccgatgggtctgggagaagcgttaaagcctgcagtggccgttgttttatgttccaaaccaaaatgcatgtgcgtgtacgtactagatatgtaaaagtacactcagaagaataactcgtatatatactagcagtatataaaatgtggatttacaaaaaaacaaaaaataagagttatcgtatgtacaaatgtgtgttatattgttatgtgaaaaagtttcataa

SEQ ID NO: 135489 - DNA, 624 bp, Zea mays
  Clone ID: MRT4577_55045C.1
ccggaattccggtcgaccacgcgtgcgcgagggcggcggacgtcccggccacggagctcgggttcgtggccgaggcctaccggcaggtggccgaagggcggcggatcctgcgctgggcgcacgcgtacggctacttcctggacccggagcgcgacgtcaccaagcgcgggctgttcgacgacctgcagaaccaggccaaccgctggctcgagtgcctgcacgcctccgccgagctggagaggaaggaactcttcggctccggcggggaggccgcgcccgtcgacggcgaggcgttcagggcgtacaggcagaaggtggccaacctcaccggagtcacccgcaagttcatagggaacctcgtgagggcattcgagaccgacctgtcggaggtggtggcggtcattccggccaactagctagagatactagactgtattccggttaccatccatgttcgtgtttcttgcattgatcggaagaagaagaaccttgcatattgattgatctgaacaacatcgcaccagcctgcagattgcttagcgagtattgataggcgttcataaatatcaaactatctttcctaacagaagacaaaaaagagggcggccgctcgcgagctagaaa

SEQ ID NO: 135490 - DNA, 602 bp, Zea mays
  Clone ID: MRT4577_55046C.1
atggatttggggatgatcaaaatccttatactgaatctgtggatctattggaagatttagtgattcaatatattactgaaataacatataaggcaatggaagttggtaaaacaggtcgagtgacagttgaagatatcatgtatttaatgaaaaaagaccctcgcaaatatactcgtgtcaaagaattgcttctaatgaatgaggaactgaaaaaagcaagaaaagcttttgatgaagtgaaatatgctgcgctttaattttgttttttatcatctccattcataaatataattagcaaaataaatttacaaaacgaaccctctaacaaacgttttgttgaaaaacaaataaattctccgtttaacatgttctaaattttggagaattaaaatcgacattcgataagtttttcaaacgcatttaaaactaaatttaaaatttaatgtctgctatatgtacattgtattaatatattaattaattttgtatctccatgctaatggaaaattaatgaattcaattcaaattcaagctttgttaaataaaaacaacgacttttctataataataaaaaatgatcagcttaagtgaaagcaaacaac

SEQ ID NO: 135491 - DNA, 656 bp, Zea mays
  unsure (1)..(656): unsure at all n locations
  Clone ID: MRT4577_55047C.1
cggtggcgggggccctggacctggaccacgcgnggagtggccgaggccattaaggcggacttcgcgcggtcgtacttcgtcacagggaatctcacgctgagagcttacgaggaggactgcgagttcgccgacccggcgggctcgttcagaggcctgcggcggttaaaacggaactgcactaattttgggtctctgctcgagaaatcgaacatgaagctcactaaatgggaggacctggaggacaagtcgatcgggcactggcgtttcagctgtgtcatgtcgttcccctggaggcctattctgtcagcaaccgggtacacggaatactatttcgatgctgaatcggggaaggtgtgcaggcacgtcgaaaactggaacgttccaaagatggcgctccttcggcagattttcaggccgagtcgttgggtctgggagaagcgctaaagcctgcaggggagcgttgttttatgctccaaaccaaaatgcatgtacgtgtacatactagatacgtaaaagtaccctcagaaggataactcatatatacatactagctaaatgcctgtgcgttgcaacgggaacatataatatacgataacctatgtacaaatgtgtgttatattgttatgtgaaaaagtttcataatcaatttgtgatct

SEQ ID NO: 135492 - DNA, 271 bp, Zea mays
  Clone ID: MRT4577_55048C.1
ctcgcgggccgacacaagcctcagtaatgagtcgtagcaatcctaatgttcctgatcatcatcctgctcggggatgtggcgccagtcacagaaacagagcctagaagcgtgcggctagtacaggaggcgccacatacgaaggtggtggaagatggggccaaggcggggacggtgccggtgtcaaccgtcgcgtggactacgcttgcgatggcctcagctacggggttgggagcggtgcccttctttttcatggagctcgaagcgcaatggg

SEQ ID NO: 135493 - DNA, 222 bp, Zea mays
  Clone ID: MRT4577_55049C.1
ccggatgatataacataaaccccacacctcttgttttttttttcttcttcctctttctgtgttctgttttggcacaccaacactacctgacccccagatgatttatctagataataacaataataagcaaacggaaccgaaggaacaatcgcttttcaatcccttttggaacccttcaacgcaacggccgaggagctcatggcttccaaatgatggtggtct

SEQ ID NO: 135494 - DNA, 311 bp, Zea mays
  Clone ID: MRT4577_5504C.1
aaggggttaacatgggatacatttttagggggcgggtccacataacacaactttgggtccactaacataattacagggttttgggagccaaaagcagtttctcacaatagacgggacgggtttttttttcccggagaaaaacaggcggggaccaaagctgatgggggtccgtttcaatatcctttatttaaacaaaagcctccccaagcattggacgacccccctttttttcttgccggtttttaatcaaaaaactgaatgttctttttaaaaacaaggggggtttttaacaaaacgtcttttattttggg

SEQ ID NO: 135495 - DNA, 165 bp, Zea mays
  Clone ID: MRT4577_55050C.1
ctcacctaatagtctactctccgaccgcacgctccgagacgcgatggcacgactccgactcgtactacttaaccctccgtcccgccgccgccgatgtctctttcggcacgaccacatcagtctacacgagtccgtctccttctcaaatgcggtgcgggggctccc

SEQ ID NO: 135496 - DNA, 389 bp, Zea mays
  Clone ID: MRT4577_55051C.1
ggggggggcctttttaaccccttttattttttccaagggggaaaaacatcccgggttttgggcagaggccccgaagtttaaaaccccaaatttaaaaaaggggggggcgaaaaaaaaggatttggggtttttaaaaaaaaaaagcggggccaaaaaaaaagcttttggggacaaaacggtggggtttacccgggggggcccgtaaaaaaaaaacgaatcccaaagggggcacccctttttaggggggggagataaaaccctttccttggggggggggggggggctttttttaaaacttttacgggggggtgggggaacttttcaggggagcttaaaatttttttggctcggccccccacattttccttatttttcgccccttgggaaaa

SEQ ID NO: 135497 - DNA, 125 bp, Zea mays
  Clone ID: MRT4577_55052C.1
gtcatggtcagcgtcattgctcacgagcttgtggagatttgtctcaacccgttcgtcaactcctggtacgccgtgtgcaacttgttgttcctcacggagattgcatacctttgtttggtcattta

SEQ ID NO: 135498 - DNA, 694 bp, Zea mays
  unsure (1)..(694): unsure at all n locations
  Clone ID: MRT4577_55053C.1
ccgccgcccggcctccagccccggtcgctcacctccagcatcaacgaatcggctcgggcaccatgaggaaaataagccagcgcgggcaggaggctgggcactgctgaccttaacccgacgcctgtggccggcctgattcactcaactgtttgcaccagtgaaggtgaagacaaccgtgtgctagcaccgcttctgctgctagtgtgctatgtgcgtgtgggtgttggtgctactgtgctacataacaagtacgaatgcttggtacctgcgtgtaatccattacttcctcgcttaggaagttagttgataccatttacttttattgctactgcgataggacagatggatgcatgatcaagaaagagaacgggatgtatggattatttactatgccgaatttgaaacctgtatccagcttttttgcctaaatgattgttccaatgtaggtgaagagaacagtgtgctagcactgtgctagtctgctatgttgtgtggctgttagtgctactgtgctagataagaagtcagattatttggtattttggtttaatcaattatttgcttggttagtatgttagttgataaatataattttttttgtttatagggataagatcgatggattctttatcaagaatcagaacgatatgtattgattatttattattgnatttgtagaattcgtatcaatgcg

SEQ ID NO: 135499 - DNA, 783 bp, Zea mays
  Clone ID: MRT4577_55054C.1
cattgggctcctcgagggcggccgggacacccctgtgggaggagccagagccagagccagccagccagccacacaacctcggtcggcgcggcggctcaacccaatggctccttcctccctccgcccgccgcgccaccacccgtctcccctcgtcgtcctcgccatcgccgtcctcctcgtcttgcgcaccgccgatgggctgccggaggcgggaggaggaggaggaggcggcggtctgtaccgggagattctcagggacgagaccgtgcagaggctcaaggagctgggcaaggtcaggcaggccctccaacccgtccactcgttcgttcctgcctagctcctggaatattcgccctctcgcgatccgcttttccggctcgggatgcggaatcctgcgaggttgttttgggccgttcgtttacttggcaaaaccggataagatgcagacgcagttgcagttcagtcgagttctgtttagcggcgctgcgtgttctcagtctcacacgcgcgacttagtagtagagtattgaagatctccgcgcgcggtcaaaacactcgagatatcagctcggggagctctgctccagattgcacctcccttggcttcttttctactcgaattggtatcttcagtaaatcctaagactctgcaccgaagctgctgatgtttttttttttgcttttcccccctcgggataaactgagtatttcatcttgtaacgaattatgtcccatcaatcgtcaatctttttactgggtaaaaaaaaaaaaaaaaaagcggcc

SEQ ID NO: 135500 - DNA, 1293 bp, Zea mays
  Clone ID: MRT4577_55055C.1
ctcgtgttgttcggcgcacacgggcacaggccgcgacctcgatacttcttcacgcgaatctcgacgatcccccccctccccccccttccttccttccttcaggtacggcgagtcggagatcatcccccgctttcccttctcctttctcctctaggtataatgatttgttatagggggtggggacttttgagtcatcgggtcgatctgacgatttgctatgggtgctctgagtactcgacctgggaactgtggggcgcttgtaggcggcgcagagttgggtctggtcgttgtaatgattccatcggctcgttgcgtagggtttgatctgcccgtcgttttcttttcttttaattaaatttctgatgcacagtcatgtattgatctggtttggtgttcctagatgcgtgtaataaatgggggaaaaccatgtcgtaataaaaccaatttatttttaataaaaaatctgaattctggctctagtgaataaatggatagagcctggctctaattctggtaaaataaaaagacaacgagcttaacttcgtaattggtcaattggaagggttctccgatctaattagacgttgaaaacaggaatatatttatgcatttgctcatgattatggattttcgaaccgtgaatttttggttgtaattgcaagaaatttagttcactacttgtgaaacgtttaattattcgaatgtatcagcagaattttttaattaattcggttaattatcctaaccaagatcgattgttggatcaccggtaattatttttattctgagttttattctcagattctatctgaggggcttgcgatcgttgtagaaatcccactctcgctagggcaactatcttgtccggaagaaaaagaaataccaaattttcaaaatttacaatctattcattcaatatttccctttttagaagacaaatttttgcatttacattatctatcacatataaaaataccctatcctatccatttagaaatcctggttcaactccttgaataccggattcaagatgttccctctttgcatttattgcgattctttctccactattattcgaattggaatagttttattacttcaatgaaatccatttttcttttgaaaaaagaaaataaaaaactatttcgattcctatataactcttatgtatcagaatatgaatttttcttgttgtttcttcataaacaatcttcttgcttacgattaacatcttctggaacctttctggaacgaatcatcttttctgggaagatggaacattttggtgtaatg

SEQ ID NO: 135501 - DNA, 770 bp, Zea mays
  Clone ID: MRT4577_55056C.1
cgaggccggccgggaaccctgtgggagaagggaggagccggagcgagagccagccaccacccacggcggccgcacaacctcggtcggcgcggcggctcaacccaatggctccttcctccccccgccgcccgctgcgccaccacccgactcccctcgccgccctcgccgtcgccgtcctcctcacctcgctccgaatctcgcgcaccgccggtgggtgcttcgctccgtcgcccctgcaatcccttcgttaccttctgcgatttttattatctggagccgcctttctcaccggtgggtttttttttttttgtgcttgtgtgtgcgccaaaaactgattagatgggctgccggaggcgggaggaggaggaggcgacggtctgtaccgggagattctcagggacgagaccgtgcagaggctcaaggagctgggcaaggtcaggcaggccctccaacccgtccactcgttcgttcctgcctagctcctggaatattcgccctctcgcgatccgcttttccggctcgggatgcggaatcgtgctaggttgttttgagccgttcgtttacttggcaaaaccggataagatgcagacgcagttgcagttgcagttcagtcgagttctgtttagcggcgctgcgtgttctcagtctcacacgcttgatgtgacccgtgctaaactttagcaggagcaaccaaacacccctaatagagtagagtattaaagatctccgcgcgcgggcaaacactcgagatatcagctcggggagctctg

SEQ ID NO: 135502 - DNA, 688 bp, Zea mays
  unsure (1)..(688): unsure at all n locations
  Clone ID: MRT4577_55057C.1
ctcctctcaactgtaaaccttcttcaccagttcgctgcttctcctcgtcctcacaggcgcgtcgtcgatccggaaggcgcccgccaccgggagcggaggcctgagcgggagcaggagcggggccggcgaatctggagcccgggggacctgcattgcctcgggaccgccgcgcgtagccagatctcccccgtcccctgccgcggcaccggcacggcatggtggctgccgcggcggcggccaccgcgccagatccggaccaatcctcgcgcccgccgctcacgccggcgctcgacaagcccaactccgccgccgcgcggaggaactcgcgctccaacaagcccgtctcctcgagcgcacccggacgtccactccgccgccgcagcactccacgtcgtccacaaccaccgcgtcggcagcggcagcatccgccaccgcgaccacgatgcggagcctctccgtgtcgttccagggggagtccttcttctacaagacgtccgnntgcgccgcgggcttcgtcgccgtcctcaccggcagcgcgccgcgggcccacgccggagcgccggaagagcgtctcctccgtgccggaggccgagaacgcgcggncgtcgggacgatggccggcggcgaagcccaaggcgtcggacccgctagcgcggagcctttgatgcagcctcgaccgcaaggactc

SEQ ID NO: 135503 - DNA, 348 bp, Zea mays
  Clone ID: MRT4577_55058C.1
aaatgttctttcttatttttgggatgtcacatacatttttttttaagcaaccaaaaagcacaccctcttattttaaatacaaaaaagggcacgacacaaaaatgggtgacggcttaacactgacaagtgggacaaatcatgttggccaaaaaaaaaaaatgggtgcggggggcaaatgctttcagacaaaggcggaactttcttgaagagccataacaactgtggaggtgaaaatgcggtatcagggctaacaccatcttaaaagttgggccggcgtagctgaagttgccggcaataacccagagagttcaatgctgctaccggggaaaatggaataaaaatgggggg

SEQ ID NO: 135504 - DNA, 499 bp, Zea mays
  Clone ID: MRT4577_55059C.1
ccgtcctgtcttcaggcatcgcccgccggcctgtggatcatttggagatacacaggggctttttgtgcaaacttatgatgacgcgatgaccgtgtctcttttaaaatcaggggtcaacttatggttttggagattcatacttttatatgccttaacaatcgttagtgactgttgagtcaagcacaaggacacaaacagcaaacattgacttgtgtttgtggagcgaccagaatgctatgtatggcaattcaagtgaccaaaaacagggttacaacttttgacaaaacccattaagttggttgaaccagccatttacacacgttgaacaggcacaagtggtcaagattcatgcaccggttgatctgtttgatctggataagactaatagaagaagagattctatgattgcatggtggcatatttatacaaccagaaccatcacctagtccaatactaactctgcattgcccgatatacatgagcatgtgtgacaaagctc

SEQ ID NO: 135505 - DNA, 265 bp, Zea mays
  Clone ID: MRT4577_5505C.1
ctcctccactccactcccaagttccgactacccctaaccgcgtctctccactggggcgcgggcttcgcttcggctccgctcggctcgagcagaataaaatgcaactggcagtgcaggccgtcaggtcacacgtcaatgttcttaaatatgctgttctacaacacattagcgctcccaagccagaaatgcttcctgctgccttgactcgtttcatgtcactgtcatctgttcgcctagaggatcgtgttattgaaactgtcactga

SEQ ID NO: 135506 - DNA, 256 bp, Zea mays
  Clone ID: MRT4577_55060C.1
gtggcgatgctggcgtcgctgctgctcgtgtgctcgctgccgctgctggtcgcgctgctggagctgctcctgccgccgcggctgctctgcagcgtcgtccgcggtgaccgttctcgctcgtcgtcggctttgctccgaggctaggcctgtgtgctttcgctgttcgcgcggggagcttttcggtgtggccggaccgggtctgtctgcgcgtctgctgtcctacgctcggctaccgcgcggcggggtctgtctgcgt

SEQ ID NO: 135507 - DNA, 447 bp, Zea mays
  Clone ID: MRT4577_55061C.1
acaataaaacatgaaaccttatattaagtactgaattattacatattattattagttttttgagttgcaaaccaaagcgaaaaaatatattgtaattgatgatccatgttttttattgctgaggaaagggtggaggcctatatcactagtggtagggctcctctcctgtcggagcaacatggggagttgaccgtccaaccgtgcttacagggtggttgagaccagtacaccatgaagcggtgtcctgaaaagtacggcggattatgccgtggatgtttttgcccacgcaccgcggaaacataattggaattggcgagcatgtgtcactacttctaccacttaaaggcacatttgggtaggaaatatctgcccattggcccttcgtgcccggataacactttggacaaccagaattttgactgatgcgcgctctgacagaggcgccca

SEQ ID NO: 135508 - DNA, 355 bp, Zea mays
  unsure (1)..(355): unsure at all n locations
  Clone ID: MRT4577_55062C.1
cgcctgcgcggacggcggacttagaacggggagggggatggatcgcctgcccnagtcgacccggagcatgaggaagtacgcgtcggaggccggcggcctgcgcgcggcgcggcagggcccacacgggcggtcgctgacggcgcgcacggagcacagaatgtccacgactgcgctgcgcaccaagtccaagtgggccgcgtcactgctcgccagggtgcccttcgtgccaatgcgacccgtactcagcaacctgaaggaagtgttgcttgagaccaacctagccacgctattccccgccgtgccgctcgacatgaccgaccaatgcgcgcactttgggcacgtgtggatgattaca

SEQ ID NO: 135509 - DNA, 1297 bp, Zea mays
  unsure (1)..(1297): unsure at all n locations
  Clone ID: MRT4577_55063C.1
gaaactatgttcccatatgagctgaagatcatacttgctgtggagcctttgatcccttcagagggaccaaggattggagagaacattttcggttacacgatagtggacatcttcagtagcagctgccgtggccaccataagaatcctccttcagagccatatgtccttgaggttggggttttgcaagattatgttggaagtggaggctgtgtgcaaggcgtgacagcgtgtcgtggtcaaggaccctaagctctagcgccaaattcatatcacatttgttctagaatgagatcatgaatggtccctggggttggcctggttcacgctccattctcagtgcgttttccgacatcgttcttcaagcaagcatgcgagctggctcctattttcactgagcttgtggattgtgtgagcttagatggggagtccttgcaagctgctttgtctagaacaaagcaggttcatgaatttaccgcaaggctgctagatattcatgataagatgatgttgataaataataaagaggattaccaatgctagaatctgtatggattctatcagctgttcgcctactgatgcttatgtgccaatttagtgagactggagtcatacactccannnnnnncaatctatcaaatcagtggttggcaatgcagtgatgctcggtgaaatcataaactacgtgcagtccctacaatgacaagttgagtttatgtccatgaaactggccaccgtgaatccccaggtggacttaaatagcctgcctaacgtcctccctaaagatgtacatcagtcttgtggtccgccacatttctcgctggagacctcagacgcttcgttgtcgtacctcagccagcctcaccatggaagccctcttggctgcatggacaaccagagttgtatgcatccacttgacacgacgttttgcctggcgataaatccgcagtatcatttcctcaacggtgttagcgatgcatcgtctcagttgcagctaatttgatgcttgtgtttatggaaaccaagaggtggcgctgatccattggaaacctggttgtgtatgaatgggtttccagctacttctattcttggagatagaaaccaacatgtttggtttttgtttttattcgctttagaacaactcatttttgtacgaaaagaggcatttagctataattgtttgttgtagtatgtttaccgcaggatagccgttccatgaaatacataaaaacctgatactgttgttatatttggtttagtcatgctcttatggaacctttaatgaggatttttctatatc

SEQ ID NO: 135510 - DNA, 530 bp, Zea mays
  unsure (1)..(530): unsure at all n locations
  Clone ID: MRT4577_55064C.1
gaataactgagtgcccctcttgccgtcccaccattttcgtggctcgccggtgttctaaccttgaagctcggccgcctggaatcgacttggcgcgcggagtgtggaggccccggttgcgcgcgcctagggagcctcagcggcggccaatttctcaatcccccgctggtgccaccatcccgcgcgaagaacgacacccaccctgacacgaagccgaagagcctgtgactgaggatcctggtgaccaacagatagaagtagctgagcagaagctcattgaaggagaagaacaggtggttcaggaggagcctcaaagcgagaagtatgatctgatctaggtggcgtttccccagttgacttttgcgccaaggatggttcttagttcgttttataatttattttgtaagtattccgctatgtaataagtactctgattatattgtgacatttatctctatacactctgttattataanaaaaaaaaaaaaaaaaaaaaaaaaanaaaaaaaaaaaaaaaaaagggccctaaggnc

SEQ ID NO: 135511 - DNA, 374 bp, Zea mays
  Clone ID: MRT4577_55065C.1
tgcaaagctgttaagaatgctctcttcatcagtttgcaacatatgtttgatattgctgtagttttgggtaagtccgaccttgaagaataatccgaccatgaggagtatggagtgtttgccatgttttgtatcttttcagttgttctatttatggatttattgggattttccatgagtttagttgtatctacccgattgtggtatccccacctctatccttgtaattggtcagagagatacaactctattaaaagaaaataacccgagattttgaccctaaagaaaaagaagtgtctctatttagagatttatctacttagatttagatttagattaaaaaataatactccttctatattattctagaatatgta

SEQ ID NO: 135512 - DNA, 420 bp, Zea mays
  Clone ID: MRT4577_55066C.1
gagcatgaaacgccccgcgccgcgccgcgagaagagggggaagaggaggaagaagagccggggctgacaagccagacagcgcgcgacacgacaagcacacacgggggagaccaccaaggccacggagcaccaggccatcccgaagcagaagcaacccaagaaggcccaccaccaccacgcgaccggcgcccacgacgagcggaccccgcaagagaacagggaggccataaccaggacctcagaaccgaacgcacaaacagaccgacgagcccaagaacgacacgacccccaccgagccggggcacaagagccccctgcccaccaacggacgcacccacacgcaatgcaaaacacggcccacccacacggggagaacgccaccgcgaccgcggaagcagcggcacgcaccaaaaagacaca

SEQ ID NO: 135513 - DNA, 364 bp, Zea mays
  Clone ID: MRT4577_55067C.1
gggggaaaggaaggaccaggtaaacataaaagtttaatcagtaatcctaaaaacaaaacattttaatccatcaccagccaaagggaagggttaaaagcacacacgaaacgaacattagttagaaaacaaaaagggggctgggccctggaaaaaaaaaaattgtttaagggaaataatgcttgaaacgacaacacacacgtttatatatgtaaactcgggagggggggcccttggggggtcgtttaaaaaagggcgcatttccctttctaaaattgggaaagaaggggggctccagggcctttttgggggggaaccgcttccttgggtcgtattccagaaatttttaaaaaaaaacgtaaccata

SEQ ID NO: 135514 - DNA, 574 bp, Zea mays
  unsure (1)..(574): unsure at all n locations
  Clone ID: MRT4577_55068C.1
tgcacgcgttttttttcttggnacctctaaaaaaccgggggggttttgttttgggtttaaaattttttttttttttttttttttttttttttttttttttttcggaaaaaagagaccctgttcgtcaagttgaacacgctgccccacgcccagttcgtttgaccgccctgccattggccctggggggggggggggtttttcttttttttcaccgggcgcaggggaaggggcccatagacgcaccgggcgtnaccccccccccaacccggggcgtgttcgggtggctccaagccgccactgttgcagctgtttggactgctgcagttgcattcctttgggagaaaaatctggggaagccgcagccgcngccgtttttctgccgctgcaggccgcntcgaacaagctgacggggtacaaacaaaaaaccttttgcccggtcagggcggggcacctttgaaagggaagaacacagaacgaaacgactggtttgctcaggccccccttggggggggggaaggatggtcagttcttcgncggcctctcccggcggttgtttaaggggtaatttatctcc

SEQ ID NO: 135515 - DNA, 398 bp, Zea mays
  Clone ID: MRT4577_55069C.1
ggcttggacctttgggctgatttatgtgcttgtttatgtgcttgtgttgcggtggttttgtcgtcttcgcgtcgtgtgttgggtgttgtggagtcggttaggtcggagtatttgtttaaggatggtggtctgtctagttcgtctgctgctggtgatcggggttgaaagggtatgcctaattagcttagggctgtttactagacgggtagggccggggagtagtctagtactgatcctgctacacttattggtgataatcctcatgagaatggttcgatgggtatggacgatgaggtgcctgagtagctccctattgacactcatatggtgaagagttcgtagaagttgcggcattcggcgtcgggaaattacgatcataggggcgatgtgtctgtgta

SEQ ID NO: 135516 - DNA, 515 bp, Zea mays
  Clone ID: MRT4577_5506C.1
agagatcccgcggacaatctgtactcctaactataatagggaggttggtataagggcaatggttgccccacactgtatacagagggtgatatccgcgtgcactcaactcatggcttacatttcggactaacttcttaagaggaccgagtccctaatcttgagtccctgggggtagttcctatctatcgttccgaggaactctattacgagggtaattttcgcccgtgggtatgacgtccccgacaggagctgatgcattccctatataccgccgcatttggggcgagacccttatagcgacaataataacgtaatcgtccagtggtcagcgtaggggctattcgcccaacatggcctctacgcccccgtccttatggatcgagaacaatgcgttacgggtcgccctgtaaggggtcgggaaggttatcctggtacagcatgctgagggcgcaagggtgcagttgagggggtggaagaccccgtcaattcctcatattgtgtattactcgtgatag

SEQ ID NO: 135517 - DNA, 284 bp, Zea mays
  Clone ID: MRT4577_55070C.1
aaaaccaaagatccttggtttctaacaaaggaaaggtcctttgttcccccttaaaaaaaagatactttgttttttacaaatcttaaccttattgtttcttttaaggcaattatctttgtgatggcagataacatacgctttcgtggtagcttttccgttatttgtgccggtcttcccacaggggtttagcattttgttgtctaaagttaaccttaagggcttgtttatttgtttgtccttgccatgacttttgatgattaatcctaggacgcttttcttcggcc

SEQ ID NO: 135518 - DNA, 565 bp, Zea mays
  Clone ID: MRT4577_55071C.1
tcttttcttttttattatttttttttttttatttttttttttttttttcgggcgggggggcccggcaaggaaggcccggcccgggccggcgggccagccagccctcccgagaggggggtgaaagcaaggcgggggcaaggacggggggggggggggggggaaagaaaaaggcgcccccaatccctcccaccaaacaaaccggcaggaaaaagaaaaaagccaggcgggggtgccgaaagagcgaaccaacaaaaaaaaaatggggcgcaccgaccgcccgcctttcgggaaacaaaccaggccagccgcctgaatgaatgaaccaacccccggccggaggaagggggctttttggtcgcccgccagggtgtttttttctcccccacagggacagaaaaaaaatgaccttcccccacccgcccggggtgaggggagttcagcaagccacccaagcttggcccccccggggaaaaaaaaatctgttgggggggggcggccggcacgaaaaaaaaacggggcttcctgtgtcgggcggcccctccccccccccccgtgctcgggcccg

SEQ ID NO: 135519 - DNA, 251 bp, Zea mays
  unsure (1)..(251): unsure at all n locations
  Clone ID: MRT4577_55072C.1
agacaaccgnagagaaaccgcggaaaaagagcacaccgccggcaccggaccaaggaaagggagcccnancacggggggcacgcccaacncagncgcagacagcgcaagggaggggggaaccgaaccgccaggncaaccgaangcccncnccggaccccaacggggcgccggaaaacaccgacaggccaccagaaaccggcggagacagagacaaggacgcaaacaacggacgccagcaaaggaacagcacc

SEQ ID NO: 135520 - DNA, 740 bp, Zea mays
  Clone ID: MRT4577_55073C.1
atatatgggctccaatggttcctgggaataggtgtagcctttgcagtcccatagccgttgcagatctggtactccccttgtagcccgtcactctggtcaccgcgaacaccgacgggtcgtcgtcgccccagctggtgctctggccatagtccgccgtcagcgaggcatctttgtttgcctgcaagaagagaccgttgggcgccatgatccgcatcctgtactggtcgccggggctgcggaccagtcggaacgtctctggccgccccggcgacgcggccgtcgcgaccagcgagccgtcgctcttgacgcccacgaactggttgccgaacactttgaagttgaatgtcacctcgttgatccgccacagcttgaaggtctcccagccagacgcctgaggccggttcgccaccagccccgcgccgccgccattctccgcggccacgtaggcgttctgcgttaccgacttgaactgcagctgcgtgccgtccaggagatcgttgttggggatgccgtcgaagagggacggcaggatccagccctccgtgaccagccaccctccgaggttcaccgctcgcacggggagacgaggagcagccatagctgccgagcttcgggagaggaagcacagcacgaggagcaaggagtagtggaagaggcggctcctcatttcgcagctaatgcttcttccgatccactgggctcggttccttgcaagttgcaacgcaattgctcggtgttgt

SEQ ID NO: 135521 - DNA, 487 bp, Zea mays
  Clone ID: MRT4577_55074C.1
acatggacgcacccaactgggttcaaactttattattggctaagaatcaaacacaaaccgactgaattaaccaacaacagaaaggtatctggtgagcagacagaagaaagaatgagtgtttgcaaggaagaaatggtgcctgagttgaggtctaatcctcatcgacccataccaatctgggacggtttgggtgggcatccattgctctctctaggggagctttcagctcatgagggtcgtcgggtgcatcgaagagatggatgcagaggtattccagaccagttatgcttcctaaggtctccacatctttctcactgagtccgtacgtataaaagagtagcttgtgaaggttcacaagtacaccccaccagtctgcaagatccgagacaatatctcccgtgacgacaagttctccaaggtcaactgtaccatggtcatttagcttgttcagtagttctggcggctcgttcaaagtatgaacacgaag

SEQ ID NO: 135522 - DNA, 1213 bp, Zea mays
  Clone ID: MRT4577_55075C.1
agctcggaattcggctcgaggacgatattcatgtcggctttgatgatattggcggtctggatatgatcattgaggaactgaaagaatccgtcatctatccattgacaatgccccatctctaccagcatgccgcttcattgctgtctgcaccgtctggcgttttgctatatggaccgcctggttgcggcaagacgatgctggccaaagcccttgctaaggagagcggcgcatcatttatcaacctgcatatatcaacgctcacggagaagtggtacggcgattccaacaagatagtcagagccgttttctccttggctcgcaagatgcaacctgccatcgtattcatcgatgagattgatgccgttttgggcacacggagaagtggcgaacatgaggccagcggtatggtgaaagccgaattcatgacattgtgggatggactgacatcaagcaactcttctggcataccagcgcagatagttgtgcttggtgccactaaccggatacacgacattgatgaagcaattcttcgacgaatgcccaaaaaattccctattacgctacctgcattggagcaaagacgccgaatcctacaactaatcctgaaagacgctaaggtggatgctgagcattttgacttggatcatgtgtctagactcaccgccggcatgtcgggaagtgacatcaaagaggcttgtcgtgatgccgctatggctcctgtgcgagaatatatgcgacagcacggccgtgatggctctaaaaggccagttgacccagctgatttccgtggaatcaggactgatgatttccttaaacactcgaccgatcaatatatgatagaagtgcttcagcaacgacagaggggatccaacatcctagcaaatgatgtgctcgcagagattgacgagacatttgttgagccccaagactgagcctcgcacgagtcccatgcaagcagcagcgcctcatattacattgcaagaagtaatactccccttttacttgctcgttatagtttgcttttagttgttggcgtattcttttcacgccggcgagcgtatacgtcacgaaatcacccttcgtctgcttaaaggagcccttttagtacttctgatgttaaatagacagtgaaatagcgccctggcggtactttcaggacacacatatataacgaaacacgtttgtaattaatataagtgcctatcgggacttc

SEQ ID NO: 135523 - DNA, 226 bp, Zea mays
  unsure (1)..(226): unsure at all n locations
  Clone ID: MRT4577_55076C.1
aagcgcagatcgagtcatcaagtctagctagcccggagcacgcctagacgccagcagcaatggcggctcagctggccgtcgcgttcctcgccttgttgtcctcctgtgccttgttgcccgcctttctccccgaggcggagcgcctcgccatcctccgcttcggccctgactgggacgagacctgnctgccgatggctgccggggggggggccgtcgctgcgaccct

SEQ ID NO: 135524 - DNA, 633 bp, Zea mays
  unsure (1)..(633): unsure at all n locations
  Clone ID: MRT4577_55077C.1
agccaactgcccagnaattccataaacctagccaattcacttctccaatcgccttagtctagtaaaagcaaatgccctatgcatgtaactttaccttgcactttcttttccacttctgcacttccatccatcatcttcacatgttgagcacttgcacttcatggtccttgccatctccacttcacggttctatatatgtggctcaactatcttgtacactaaatcgcctattcatctcacatgaaataaattagtctggcattcaattatcaaagccaaatcaggtctttcactccagagctcctgcttgactagttgccgctcttccgtgatgtttgccacctcttccacccccagactgcagtggtatactttcccccaatctatttttagtgctaaaattggggctttctcaaattgaattatttgcttctccatatgcgcatcttactgtaatacgcggtggtggcctatgaccgccaggatgtgtctacaacgcagtacctatggctataagttgcagcttcctccacaactggtaggccaatctcccccatgcaggcgcgcacaggagagggaaggctctcacgcgtgagaaactgagaaacgnctgcgggccgcgaatggcgagcg

SEQ ID NO: 135525 - DNA, 265 bp, Zea mays
  Clone ID: MRT4577_55078C.1
cctcctcttattatacacttctattcactccccctaagaggggggtttttttagaaaaaattctggtcatatcacgaaaagaccggggagaaaccccgaatgctccccctctagtcttttaccttccacccaaaacaaacaatgtccgcttggggcaaactcctccccaactcgcggggaccccatttttaaatttcaaatacccaaaccttcatttaaaactcttcacggtccatcagccttggccgggattcgagtcccacca

SEQ ID NO: 135526 - DNA, 792 bp, Zea mays
  Clone ID: MRT4577_55079C.1
cattgggtacctcgaggccggccgggattggctgatggccttatcacctcgcctgatattcctggaggccgcatcccagcttcttcttcctcacacgcatgccgacgctttcctctccagccgatgtccatctcccttccagcacaaacatggccgcctctccgagccccatcgcccatggcagccgtgccctgctcccagctccctcacctcccccatggccgagcgccctctccagccaccggtgctcgccaagcccatctcccatggcgcccagcccagtttccagcgccctcctccatcaccgcgcacctctggtcgcttcagctcatctccctcgccgtggagctctctgcgtgcgcccctggttcctgcaccctggcctccctcatcttccctgggtccggccatagctggccgccgctgctccatctcgagtcgcgctcgcccagctctgttggctgcgccctccctgccgcagctcgcgcctgtcgtcctgcttactcgagctcgccccggcctcctgctccctccagcccttcccatggtgttactactgctgtaacaagtccgacagaagaaccatccaatgcaggcccacgaaggggatccaggctgcgccggcctagtactcggcttagggagtttgtgtgagttgtaattgagatataagggaatattgattagggaaaaggtatcagacttgtaataagaattctggacagactgtcgctctgcctatctactctaccatctgctcatcttcctaaaaaaaaaaaaaaaaaggcccct

SEQ ID NO: 135527 - DNA, 471 bp, Zea mays
  Clone ID: MRT4577_5507C.1
ttttttttttttttttttttttttttttttttttttttttttttttttttttttttttttttttggggaagaaaaaaaaaggtggggactttggtttaaaccccaaaattggcccaaaatttaaaggggttggacttataaaaaaaaccctttttccaaaaccccaaaaaaaaaggggggttcaaatttacgggctaaagttttgaaaaaatttcggggcatacaaatccagggggtccgggagggccttttaagctgggggcggaggaaaaaatgctttaaaagaaacctttttattccaattttttttaaaaaccaaaaaaaaccgtttgtttttttggagggaaagaggaaaaagctcactggtggcgtgggagggacaattttcaggatcttcaccccaaacgggttttttttgggaatccttttaacccgggaaaattaggggcataaggccaattgtttttgttc

SEQ ID NO: 135528 - DNA, 542 bp, Zea mays
  unsure (1)..(542): unsure at all n locations
  Clone ID: MRT4577_55080C.1
gtttggcacgctgaaatggttctgattctacctggaaaccgccggatccatgccaaaagcattgttcctgattcattttgagtgtggaacggctagaaacggttagctcgttttgcctaccaaagagaaacacccaaaacccagtttagctggagaatcactacctnccccgaactcaccttgaatntacctgtattttccactgacatcaccacaagacccatctcctctggtcgcccctaagcacctgttttgattgtggggacctagggagggggcaacggatgctcgattttgcttgattctagtctaggtagctcttgtggctgtatccatgagagagaccaatgtgtgtgtgaggatgaagaagacaagaagatactaggtacgacttgggccaaaaagaaaagataaaggttgtgttcagttaaaaaagaagctgatgagtccgtcagccatgtgcaaaaaaaaaagaatcttctctttgtttttttacattaaaaacaaaaaaaaatagagaatacggcgcgcgtatactagat

SEQ ID NO: 135529 - DNA, 462 bp, Zea mays
  Clone ID: MRT4577_55081C.1
tcgttgacacgtgggcagctccgtgggccgaagaacgctaaccatagcggctgatccagtgctgccccgagccccggttccgcttccgccgtcggccggtcgcccgaaggcgcgagctgcgctccgtgcctccctccccgctgtccgcggaccgcggcaccctgcagccctgctctggcttccgcccgccaggcccctgctccgttgctggctagggagctgtctgctccctggctatcagcctgacgcttgtacattccacttctgccgcagcatctcttatctcggtctacagatcacgaccggcgcgagggactacatttcgtgtcgcattcagcgacacatagggctatatcagccctgccgtgataactatagtagagacaggagaagatgcatgcatgtaaggcaaggcttgtacaggagcacaaggaggtacaccctgagaagtcagctgaccct

SEQ ID NO: 135530 - DNA, 523 bp, Zea mays
  unsure (1)..(523): unsure at all n locations
  Clone ID: MRT4577_55082C.1
gggtaccctcgggctcggccggnactagaacctgctcctactcgcttccccactgacttgatatctgctgcgctcagactacacgctcgacgactctgcgcgtgcctgaacgatgactgagtgagtcacgtccagccaaccaccacacacctggcgatggctgccacaaccctactataaacgccgcgatacaacccagcgttgatagcaacccacttgcgtgcccggaccgagctccctgcctccagatagactcggccatgacgaggaccaaacccgaggcggggagggtaccagaacctacgccaacccaaacaagccttgtactgctgcgcgtggtttccaccatggtgctgatcatctgccatgagcaccgcaagaactacgctgatgatattcagccgcgccacgatggaagaacctcactccgtgcaggagggacagcactgactcttagccgaacgcgatgctacagtcgcggggggacgaggtccgcgacgaaatgcactggcacagccatgag

SEQ ID NO: 135531 - DNA, 703 bp, Zea mays
  Clone ID: MRT4577_55083C.1
aattcgggcacgaggctcgtcctcgccgtcgccgccaccgccaccgccgatgacgcgcatcaccgcgccgccgccaccttcctcgccgccggggtccccgccacccatccgccactccccagcgccggcaacgccgccctctcgccgccgcggacgccactcgccgtccccgtctctcgcgctcaccccttcctccgcctccacctcctcgaggccgaagccgcggcccgctccgaagcgggcctactctccggcgcagtgggtgcctctgaactcccaccccgtgttctcccgacgcgacggcgacggcggcggcggggacgccgcgtgggacgccgcggcgtcgcggctgtacgcgtgggacccttcagcgtgcagcgtccaccgcattggcgtgcggactagggacccggacgcggagaatggtgaggtggatgtgaccgtggaatctgccgtgccttccgagctgttgacgccagagtccgatcttggttatatggtcactcacatatcacttaacactgatggttcatcactgctgcttgttggatcacataacttaaatatcatgtatgtacatgagaggatatctgaagatggggatacaatcatatgcaggactgcaccgattgcttctcagatcctacccagtgacagtgatggcataaaaggtctccaggcatcttggcatccctttagcaat

SEQ ID NO: 135532 - DNA, 587 bp, Zea mays
  Clone ID: MRT4577_55084C.1
cccacgcgtccgcccacgcgtccgcaacatttgctgctttatcttatcaggcaactgatttcgtgatgcaaattccgatgccgattggattgagtccctctgcatcatttgcaaagttataaatggaacaagtaagctaactgcttttgtaaaggattagatctgttacatttgatttgatatttttgtatattactaaccatgaattttgtttttttctttattggtgctattgttataagaatgtttaaatgactaaaggatataacaactttgggcttacagcacatatgagagatgactatcaaaaattgggttccattaattggttgccttgactgattttcttgattggagtcctactgctcggagtttgtgtaagaacttattaggatgtccagtcaaaactatctctctgattccctctcagtttagtagatgccatagtgtgtagagttttgcccccttgaattcttatacaaactttgaataagcattgtctgtataaagatgctcatgtcattttcccaccaagtcaccatgactaaagaaagctaggttgtgcctataatggcatggtatttgtt

SEQ ID NO: 135533 - DNA, 530 bp, Zea mays
  Clone ID: MRT4577_55085C.1
ggcccaggaggtcatgaaggcccgcgacctggcctacgcgagccgccccaggctgcgcatggcggagcgcctcctgtacggccgcgacatggccttcgccccctacggcgagcgctggcgccaggcgcgccgcgtctccgtgctccacctcctcagccaccgccgcgtcctctccttccgccgcgcgcgggagcaggaggccgccgcgatggtcgcccgcgtcagccgcgcccgcgccgccgtcaacctcaacgccgccctcatatcctacagcagcggcatcatctcccgcgccgccctcggcgtcgccgacgtccggacctacgggctggacggaggcggcggcggcgccggcgagaagctcacgaagctgttcgacgacttcgaggcgctgcttgggacggtgaccgtgggggagctgctgccgtggctggcgtgggtcgacacgctgacgggcctacacgccaaggcggcgcgcacgtccgcggagatggacgccttcctcgagcgggtcattgcggaccaccgcc

SEQ ID NO: 135534 - DNA, 818 bp, Zea mays
  unsure (1)..(818): unsure at all n locations
  Clone ID: MRT4577_55086C.1
atctgctgggcgtctgatgggaatcttggtaataacagtgagaggtcaccacgaatttcacataggtggattcagtgtgatggttgtggagtacaaccaattgttgggccacgctacaagtctaatgtgaaagaagattatgatctgtgtgatacctgcttccgtcgtatgggcagtgaggttgagtacaccagaatagacaagcctatcctgccacacaagttatctcgcgaccctaatttgtgccggaaaatccattcacgtgcttcgatgaagtcaaagcgtgagaagcttgaaagccgcttcattttggatgtaacggtgctggatggcacacttatgtcaccttcaagcccgttcactaagatttggcgcatgcacaacaacgggtctatcatgtggcccttgggcacacagctaatttgggtcggtggtgatcaatttgcactgcagacctctgtcccactagagattccattgaatggatttccggtggatcaagagatggatgttgctgttgattttgtggcacctgcaaggcctgggaggtatatatcttactggagactggcatcaccttctggtcaaaanatttggtcagcgagtttgggttcatatcccaggtggaagatccatcttttgtcagtgacaacaggactgctgctgttaacttgaatcagcctcaggaaagcaacatcacaaacacaagtagtctgcctcaggaaagcaacatcacaaacacaagtagtctgcctcaggaaagcaacatgacaaacacaagtaattttgattgatgtcaacatggagcctgctaacca

SEQ ID NO: 135535 - DNA, 612 bp, Zea mays
  Clone ID: MRT4577_55087C.1
catgtgcgcccttgggcacacagctaatttgggtgggtggagatcaatttgcactgcagacctctgtcccactagagattccattgaatggatttccggtggatcaagagatggatgttgctgttgattttgtggcacctgcaaggcctgggaggtatatatcttactggagactggcatcaccttctggtcaaaaatttggtcagcgagtttgggttcatatccaggtggaagatccatcttttgtcagtgacaacaagactgctgctgttaacttgaatcagcctcaggaaagcaacatcacaaacacaagtagtctgcctcaggaaagcaacatgacaaacacaagtaatttgattgatgtcaacatggagcctgctaaccaagtcctagatgaacatgtctacggcactagaatggaactgctggagccttcgatataccgtgaagctgctgagcccaagaaatccccctcagcattttcagcagctcctccataccccatggtcgatgttccgtcatccagtgaaaatgccagctgcttttgtgccaagcgttactgtacttgcacctgaagtcattccgagacctgctgtgactacacctgctgat

SEQ ID NO: 135536 - DNA, 884 bp, Zea mays
  Clone ID: MRT4577_55088C.1
gggaggacatcatcaattcgtcgtcaacacgagcttcctgaggtagtatattcactataactcattttggtatttaagctgggttccgtgaatctgaaaattcatgtgcatcagccccgaagttttataaacaacaatagatatccacacattgtatatgtggaagggccaaaaattgaggatgttgattttttggatgcgatgatttacgaggcaaaaacgactagtgaaatggaaggtgtggtgcaaagttctcttatttttgctggaatgaagaaattccatattcatacatctttttgtatgttaagccattgatacgtaactataaatttgttcttattttgtgtctaataaattagttgttctttctttatgattactgaaattatttttctcttaactggattaccttttaacttcagaggtgatgctcaaaggtctgaatagagtttcatgggaaagggtagatgttagcttcaagaaaagtagacaaaggattttcgctcatagcactattcaggtcaagacctatttcttgaactccgatggagctgacgtgatcaaccacatgatcgaccattttgtttattaagatgggtgtactaagttggtaccaagttctctttgtcgatcgattctcggccaaagaggaacatgtgggaaatgttcttgttctgaagacaggattagagttatactgaaggagtagaacccactgtaaagtgtaaaggggtatcttgtctctacccttcttgctaattttgggccgtttagtttcttttcttcccttttcataattcagaatctcagttgttttgtacccatatactggaccagaatttgttctccaaatacaaagatatttgctgcgtatttgcttc

SEQ ID NO: 135537 - DNA, 768 bp, Zea mays
  unsure (1)..(768): unsure at all n locations
  Clone ID: MRT4577_55089C.1
tcgagggccggccggggatcccatatgctatagttcaaccatgggccttttatatcactgagctagtaaagataatggtgtttattctctgtgacttcaggaaaaaaaatctaagataacccgtatggtaaccgatcaaagagtataagtttataatgctacaggtctcatggttgcagagccatgaagaatccacatatttgactgattcggtttctgttatgcactggcagataccacttcttcgtggttccaacaaattagaaaagatggcgtatcgtttgtcttggattgctgggagaagtggaaaacatctcttcctgaaagatacggaagatgagaaaccaccacttcttctacagatggttactgattatggtggtctccatttcatgtcagctctccgctctttcaagcggcgtgttgcttactccaatgtttgtaatgactgtatccttatccttataaatgcttcaagttttgacatcacataagccttttgatttatctattgagtaactatcaactaccattactatggccttgactgataaactagttatcgttggctggaggacatcatcaattcgtcgtcaacacgagcttcctgagaggtgatgctcaaaggtctgaatagagtttcatgggaaaagggtagatgttagcttcaaaaaaagtagacaaaggattttcgctcatagcactattcaggtcaagaactatttcttngactccgatggnagctgacgtgatcaacccacatgatcg

SEQ ID NO: 135538 - DNA, 313 bp, Zea mays
  Clone ID: MRT4577_5508C.1
ttttggttttactacaaaacaaccttatctgtgaaaagggtgaattttttcgtttttaaaacaattctatccttttatcaaacacccaccttttaaattatgtacatacccaggctcaaaatacttatcactttggaagttggaacacaaaacgaacaactctcaacattccgtctaggtcgtccattaattcacacgccaactctgtgtccaatctcctaaaacaaattcccaaagcctggaacgccgacagcggaaaccgctataccatggggaacatgttcctccccaccttggcgaactgcaggatcac

SEQ ID NO: 135539 - DNA, 645 bp, Zea mays
  unsure (1)..(645): unsure at all n locations
  Clone ID: MRT4577_55090C.1
ccagggcctgcggcggtatactcggttccctgcccccccacgaccacgccgccgcctcctccccacgcccgcccggcgctcccggaaccgccggaagtgggaaacaacggctacggtggacatcggatcttcataatcgctttgtggatgccatcgcccagcttggtggaccagacagagctacacctaaaggggttctcactgtgatgggtgtaccagggatcacaatttatcatgtgaagagccatctgcagaagtatcgccttgcaaagtatatacccgactctcctgctgaaggttccaaggacgaaaagaaagattcgagtgattccctctcgaacacggattcggcaccaggattgcaaatcaatgaggcactaaagatgcaaatggaggttcagaagcgactacatgagcaactcgaggttcaaagacaactgcaactaagaattgaagcacaaggaagatacttgcagatgatcattgaggagcaacaaaagcttggtggatcaattaaggcttctgaggatcagaagctttctgattcacctncaagcttagatgactacccagagagcatgcaaccttctcccaagaaaccaaggatagacgcattatcaccagattcagagcgcgatacaacac

SEQ ID NO: 135540 - DNA, 1522 bp, Zea mays
  Clone ID: MRT4577_55091C.1
ctacataagaaaaaagatccgtggccccagcacccgcggccgagtcagagccccagtcccagagggagggggaaatggcgagcggggacggggacggcggggacgggaagaagcagagcagacggcagctgtgggcggcgtgcctcccgcggccggggtgcttcacggtgtccgccgccgacgagggcccgtcggctcacggcgccggccagggggagagcaagcccaagcccacgcatctggtcgtcacggtcaatgggatcgtcggaagtgcagaaaattggcgttttgcggcaaagcacttcatcaggaaacaccctgaagacgtggttgttcactgcagtgggtgcaactcagcagctcgaacctttgatggagttgatgtgatggggagaagattggcagacgaggtggcttctattgttgacagtagaccagagctttgcaagatttcctttgttgcgcattcattgggtggactaattgcaagatatgctattgcattattatatgagagcgagacacaaaaagattctcatgaaaagtttgagaaccatgctgttgactattctagtaaccagcacagcatagggaaaattgctggtttggagcctattaacttcatcacttttgcaacaccacacctcggtacaagatcacacaaacagataccacttcttcgtggttccaacaaattagaaaagatggcgtatcgtttgtcttggattgctgggagaagtggaaaacatctcttcctgaaagatacggaagatgagaaaccaccacttcttctacagatggttactgattatggtggtctccatttcatgtcagctctccgctctttcaagcggcgtgttgcttactccaatgtttgtaatgactttatcgttggctggaggacatcatcaattcgtcgtcaacacgagcttcctgagccccgaagttttataaacaacaatagatatccacacattgtatatgtggaagggccaaaaattgaggatgttgattttttggatgcgatgatttacgaggcaaaaacgactagtgaaatggaagaggtgatgctcaaaggtctgaatagagtttcatgggaaagggtagatgttagcttcaagaaaagtagacaaaggattttcgctcatagcactattcaggtcaagacctatttcttgaactccgatggagctgacgtgatcaaccacatgatcgaccattttgtttattaagatgggtgtactaagttggtaccaagttctctttgtcgatcgattctcggccaaagaggaacatgtgggaaatgttcttgttctgaagacaggattagagttatactgaaggagtagaacccactgtaaagtgtaaaggggtatcttgtctctacccttcttgctaattttgggccgtttagtttcttttcttcccttttcataattcagaatctcagttgttttgtacccatatactggaccagaatttgttctccaaatacaaagatatttgctgcgtatttgcttcc

SEQ ID NO: 135541 - DNA, 401 bp, Zea mays
  Clone ID: MRT4577_55092C.1
agaacctagagtgcttaaagcgaccgtcttcaatttcaaatgcttttactagagctgttcagtaagtgtttgatggttggaaacatccaatcattccccaggggggcctggtactcaaacaaaggtttttcaacaccacatcctggctcgacagcctaacagattcatgcaagcggatcagttttcctcctcctcgtcaccgtcttcactgccggcctctgcggcgacctcctgcttgttcttttcctaggcggccaggtgctcgcggtgcctcggagaactccccctgctccatgctctttccgtcgttccactgcgctaacgcgcgcttggcgttcattaggtctacacttgcgtcggtgtctttgaacccctttgctgctctgggcgttgttggggat

SEQ ID NO: 135542 - DNA, 528 bp, Zea mays
  Clone ID: MRT4577_55093C.1
cccacgcgtccgcccacgcgtccgcccacgcgtccgaggacctcaaggtgcctgtccacgcgggcaacggcgagttcctcatggacctgtcggtcggcacgcccgcgctgccgtacgcggccatcgtggacacgggcagcgacctggtgtggacgcagtgcaagccgtgcgtcgagtgcttcaaccagaccacgcccgtgttcgacccggccgcgtcctccacctacgccgcgctgccgtgctccagcgccttgtgcgccgacctgcccacctccacctgcgcgtcgtcctcctcctcctcgtccagcccgtgcggctacacctacacctacggcgacgcctcgtcgacgcagggcgtgctggccaccgagaccttcacgctggcgaggcagaaggtcccgggcgtcgcgttcggctgcggggacaccaacgagggcgacggcttcacgcagggcgccgggctcgtggggctcggccgcgggccgctctcgctcgtgttccagctcggcatcgaccgcttctcctact

SEQ ID NO: 135543 - DNA, 1396 bp, Zea mays
  Clone ID: MRT4577_55094C.1
cgaaaaaaacaccaaatttctcaggcctccctccccgcgtcgctttcgccggccccaccacctgccgctttcccctcgcccctccccctcccctcctcccctcccctcgccgcccatctcctccgcccctttttgaccccggttacgaatccgcaccagggcctgcggcggtatactcggttccctgcccccccacgaccacgccgccgcctcctccccacgcccgcccggcgctcccggaaccgccgcattcacatgatgtatcatgcgaagaatttttctgtgccctttgctccgcagagggcacaggataatgagcatgcaagtaatattggaggtattggtggacccaacataagcaaccctgctaatcctgtaggaagtgggaaacaacggctacggtggacatcggatcttcataatcgctttgtggatgccatcgcccagcttggtggaccagacagagctacacctaaaggggttctcactgtgatgggtgtaccagggatcacaatttatcatgtgaagagccatctgcagaagtatcgccttgcaaagtatatacccgactctcctgctgaaggttccaaggacgaaaagaaagattcgagtgattccctctcgaacacggattctgcaccaggattgcaaatcaatgaggcactaaagatgcaaatggaggttcagaagcgactacatgagcaactcgaggttcaaagacaactgcaactaagaattgaagcacaaggaagatacttgcagatgatcattgaggagcaacaaaagcttggtggatcaattaaggcttctgaggatcagaagctttctgattcacctccaagcttagatgactacccagagagcatgcaaccttctcccaagaaaccaaggatagacgcattatcaccagattcagagcgcgatacaacacaacctgaattcgaatcccatttgatcggtccgtgggatcacggcattgcattcccagtggaggagttcaaagcaggccctgctatgagcaagtcataaggcaaacttcaccttgacagaaaattttcagagttgacctctccacgagatgagcattctcatgtgaatatatattatcttaacaacagaatgtacgggtttttgaccctgcacctgatcccttcagccacgtccagttattcttatcactgtagtatccatcaacaagtcctgtaattatgaggatggtgttacagagtttctagcaagcatttccatcgagggaatggccctgagttgatccatgtagcaagaaagagaacatgcttacaagcaatatatttgctgtgaaaagggcacgcccctggatcttcctgaaaaaaaaaaaaaaaaaaaaagattatggcaaaaaaaaaaaaaaaaaaaa

SEQ ID NO: 135544 - DNA, 601 bp, Zea mays
  Clone ID: MRT4577_55095C.1
ttggccgggaaaaaaaaaaaaaaaaaaaaaaaaaaaaaaaaaaaaaaaaaaaaaaaaaaaaaaaaaaaaaaaaaaaaaaaaaaaaaaaaaaaccccctcacctccgaggcagggctaaaaaagctggaggagacccttttaactcgcagttacataattggttaccaagcttccagggataactgggttgtcaacccttggttttgggttgctccctcgcccaagtttataaacgtaccaggggggttaaaccacattgatgccctcgggaggttgaccgaaattactgcaaaggcccaaggggaaggttaaatcctaagaagttccttaagccccaactccaaatgttgttgaaccacaggccccatttgttgaggaggacaacaacaataatgttgacctttttggggatgaaaccaaaaataaaaaaaaggctgttaaaaagcgtgctgaacttgccaaggtttttggcaaaaaaaaaaaatctggaaagtcatcagttttatttgatgggaacccttggaacaataaaactgacttggccaacctcgaggaacctgttagaagtgtccaaatggaagggctgttttggggcccatcc

SEQ ID NO: 135545 - DNA, 375 bp, Zea mays
  Clone ID: MRT4577_55096C.1
cgcgcgcgcgtgcgtgatgagcacagaacccggtcgagaagctgctcctaacatcccccatggttcacgaccgagctactccttgccgtgatcttgctcggtggccagcagaactgagccccacgtactacatgaccgagattgtaacagactgatggattcactatggacatatctttttgcaagttcaaatacgcatccctctccaacggctgtctgcacgctaaccaatgagcgcccatctatctattgtagatctacctcctcagatacggtatgctagtgacggcactaagactgatgacgcgcacaagcacatgtagacggacgacgataatgctgtcgctaccattgtgacgttgttgggtgcgctct

SEQ ID NO: 135546 - DNA, 2264 bp, Zea mays
  Clone ID: MRT4577_55097C.1
gtgttcaaattcgaacgtcctccgccgccccaacgataccatcttccccagttccccacgccggcacacccaagctcggccactcgtcttgttgcgaccaaacccaaaatccgaacaccctctcgttccccatccccggcgtccggcgctgaccgcgtgatcctcgccccgatggcggccgcctccacacccgcccgttcttccgcgcacctttcgcagccggtgcgcgtcgtgctgcgtgtgcgcccgttcctgtcgtcggaggccgcctcagcgacagcgccttgcgtctccctcctcggctgccaccccggcggtggggtcaccgtccagctcaaggaccagcacacaagtcggagtgaacagtacaaactggatgcgttcttccgtcaagaggacagcgtcagccagatatttgaccaggaggttcgtgcagtgatcccaagcatcttcgaggggatcaacgcgacggtctttgcctatggggcaaccggcagcggcaagacctacacaatgcagggcacagaggattttccagggctaatccccttggcagcttcgaccatcctagcactctgcactggcacatggtgctctgttgagatctcgtactatgaggtgtacatggagcggtgctatgacctgctggagcctaaagcgaaggagatcatggccttggatgacaaagatggtaacatgcagctgaaaggcttaagctgggtccctgtgcgatccatggaggaattccaggagctctattccataggcgtgcagaggagaaaagttgcccacactggactgaacgatgtttctagtcggagccacgctgtgctctcactcagggtcagcagcactgatgtggtgaaagggaagcttaatctcattgatttagctggtagcgaggacaacaaaaggactttgaatgagggcatacgccttcaagaaagctccaagatcaaccagtcattgtttgcgttgtccaatgtcatttcagctctaaataagaatgagcatcggataccatatagacagagtaaactgactcggttacttagagattctctaggaggcggtagccgcactgtgatgatagcttgcctgaatcctgcagaataccaggagtcggccaacacagtaagtctggcggctcgttcatgccatattgagaatttcaccagttcaagcaaacaagaaactcccaaacttaagatcgacatggaagccaaattacgagcatggttggaatcaaaggggaaaacaaagagcatccaaagaatggatggtcttttctccccaattgccagcaagactccattgtctgtgagccatatgaagcaaccaacatcttcaagaattccttgtagagttaaggcaatggatcaggatggtggtaaaatcaagaagatactttttgatccagtagtccatgttcccactgaaaatataccacgagagcacaggcagacagaagtaaatacaccaaagaaagtggtgcttccttcagttactccatgcaatgaaaaacatgaagcttctctcaggaaagctctttctccaatttcttcaaacatggtgcctgtagagcagcaaatacctgataatggcaattgccccgttttattggagccccaaactccaatagaaaaacgtaatatagtcgaggagactcctggtgcaacaccactagagagatttaatgcactagggtctaacctaaaggaagctctagttcagcagtaccttgaccttttaaatgttgcaaacaaggaagagctacagcagctgaaaggaattggcgcgaggagagcagaatatattctggaattacgggaggactcaccaaaaccattcaaaactcttgaagatttgggaaacatcggcctctcgtcaaagcagatccgagacatccttaagaagacggccactgggatcttcaaatgatgacctcaatggatgatgatgtattggcgctagacattcataggtgtaacagctaaatgactggcttgtgttgctgacggagaagttagttcaatgtttgtgttggtgacttcaggcagtgccctgctgctactttcaactagattcccttgattgtgtgtagaattgcagttgaagtgttgaacaagtaaactatcggagttgtgatgctacttttacgtccaggggagtttttatggaacgagctattcgaacattttatatgatgaagtggagcatcagttttgctcatttgaataatgataacaagcagagtttttatc

SEQ ID NO: 135547 - DNA, 235 bp, Zea mays
  Clone ID: MRT4577_55098C.1
ccgcgccaccatagctatatgatgatagcaacctccgctcttctcctattactgtcgcaccttaggaattaggattgcactgcctatggaggtttccgttggatatgtccaaaccatctcaatcggtgttaaacaaacttttgttcaactgatgccacacctagcttatcacatatatatcgttccgggctcaatctcttattgcatactcataaatccaatgcaagatacacat

SEQ ID NO: 135548 - DNA, 244 bp, Zea mays
  Clone ID: MRT4577_55099C.1
atgcgttcgttgttaaattagttacccatgttgggttctacttatgtactattattatattcaaaactattgttaagcaggaccgcttcgaacacaaaaggggagcgtttaaaaagaaatccaatcttggggacaattgtttgttaaacaaaccggggggggttgaagtcagcccggacaactataggttgggatataaaaatagtacatagataggccccaacatgggtaactaatttcgccg

SEQ ID NO: 135549 - DNA, 256 bp, Zea mays
  Clone ID: MRT4577_5509C.1
cccacgcgtccaccctgcaactgctacattccacctgcagtcgtcacacgtactgacagttattatatagggcggcgctcgatcagtagcacatcaaacatggctatcatgataaatcgactagtcactgaagtacccaacaaatgacggtagtgcctctacttgacctatcgcagtacatttccctgtcgtacaagatctcatccttcccattcttctaccaactgtatcactgcctccacacacgcgccatcta

SEQ ID NO: 135550 - DNA, 460 bp, Zea mays
  Clone ID: MRT4577_550C.1
gacagtcacacacaacataccgatccatgagcataaattgatgagcctggggtgcatactgagatagctaactaacataagatgcgatacgctcactgtccactgtgcagttcaaaaaacggaagggccgcctgggttaccgaatcacccaaagaccaggaaggaggcggtcaagcgtatagatcgctcttccacttgctaattcactgacttgctgagattgccaaataggtctgccgttagcaactgcatgttaattacatgagcaggtacgagactacctagaaaactgagacatcttaggagacaacataagagaaagcggacaccataacggcagtaaccgtaaacgagacgggagcatgctaaaccgcataactccgcgccgagacgacacacacaaagcgatgctaagcgaagaggtggagagacccaccctgaatatataaagaccaggcgt

SEQ ID NO: 135551 - DNA, 545 bp, Zea mays
  Clone ID: MRT4577_55100C.1
aaatcgtgatctcacagcgccggctctcccccgctccgtctccctcccctatccttcgccgttctgcttcctcatttcgccaatggcgcagagcaccaacgagccccagccgccgccatgagggagcgcatctcgatccacatcgggcaggccggcatccaggtcgggaacgcgtgctgggagctctactgcctcgagcatggcattcagcctgatggccagatgaccggcgacaagaccgtcgggggaggcgatgacgccttcaacaccttcttcagcgagactggagctgggaagaatgacccccgcgctgtctttgtagatctcgagcccactgtgattgacgaggtgaggactggtgtttaccgacagctcttccaccatgagcatattatgagtggaggagaagatgcacaccacatactgcgcgcgtggtctatacacccttggaggagagagtggagctctgtgtgttgagcgtatgcgggatgttccagaccagcgctgtgctgtcgaggtattcgttgtattccacggtgtgggag

SEQ ID NO: 135552 - DNA, 401 bp, Zea mays
  Clone ID: MRT4577_55101C.1
ccataaacaccaattaattcgaggcaggaaaaacgggggaggtttccaagcccccacacaaggggggcaccccccttactttaattaaaggacgtggggtgactcaaactttaatggacaacaacaaaaagcgaccgaggggggggctttggctccccattcattcccaggggggcatacgcccccgtaaactattaagtgggggacctcaacaagccaaggacgggccaggggcttgggtattggaccagggggggagcagcaccggaagccgccagggaccccggggtggaagaacccccaccggaagggggggaagccgccccccccgcccccgccggaacccgggtagccccccccgccgggccaatttgggacccccacctttttttcttttttgg

SEQ ID NO: 135553 - DNA, 197 bp, Zea mays
  unsure (1)..(197): unsure at all n locations
  Clone ID: MRT4577_55102C.1
cacaagggtttcaactagagagttcagggagatatgaacatgagcagcgaacgctgatggtagaaaaacagcgaatggagagtgaagaggctcagaggagaatcttcaaagctcaacctgcaatgaaagaggatcctttcccacatccggagaaagagccgnaacctctcagcgaagttgaacagtttgtgttgcat

SEQ ID NO: 135554 - DNA, 335 bp, Zea mays
  Clone ID: MRT4577_55103C.1
cccacgcgtccgcccacacgtcctaaacataaaaaaaaaaaataaaaaaagaaagggcggagtctattcctgatcctgggaagcaatcgcactccaatgacacaattcttgttctatcatggtagctaacccaaattaacaactctatgattaacaccttgtgcaaatactaagaccacagcttctgtcaacttagttgctatgaatgtaatccctattttttcatctgacatcacatagacccagacaattcaactgaactgaataacatttagaacaactgaaagactaccaagatgcatcttcacaaaggacttttaacacggttgctatga

SEQ ID NO: 135555 - DNA, 488 bp, Zea mays
  Clone ID: MRT4577_55104C.1
aagctaggatcctctagattgtttttttttttttttttttttttttttctcttgggttaacccggggattcctggggggaacctgggggggaccccgtaatcccacaccgagacctgtaagcgctcgacttaaccataaagatagccgtataaaaggtgaaagtgatattgggtcacaatgccacacaagaaaaaagccgaaagcataaaatttcaacccagcgtagcctccggagggaaaaaactaacatccgggggggcccaatgagtgacctatttccaattaataaacctgccctgacaacccccttaacaaaccggaaaacccgcggggaaaggggattaaagaattggccaccccggggggaaaggctttcaccatttagaccgccaagaggttatttcctttcaccacttgaacctgaaaaagttgattgccttttaccaccctggcttgaaagagtaggcgaaaaaccctcccgctggtt

SEQ ID NO: 135556 - DNA, 943 bp, Zea mays
  unsure (1)..(943): unsure at all n locations
  Clone ID: MRT4577_55105C.1
cctcgaggccggccggacatgtcatcgactcacagctaaccaaggaaaaacacccttttcctttcctctggctctatgtacgtacactagctccctctcatcccatcactccatggccgacaagcaagaacaccagcagcagccccacggccaccatttcctggtggtggcctacggcatgcagagccacgtgaacccagggcgcgccctagcccaccgtctcgctcggctcagccgcatcgacggccgccccatcctcgccacgctctccgtgccggtcgccgcccaacgccgcctgttcccgttgcccacgacgatggtggacaaggaggtctgcagcgacggcgtcatctcctacgtcccccactcggacggcttcgacgacggcgccagcgcgcccaagaccgccgaggactgggcccgccggcgccgcgcgaccgccgccagcctctccgccgtcgtcgcgcgcttcgccgccgccgggacgccggtcacgtgcatcgtgctcacgatggtggggcccgcgatggtggacgtggcgagggaccacggcatccccttcgccgtctactggatccagccggccgccgtcctcgccgccgagtaccactacttccacggctacgacgacgacgaccccgcccgcgcgcgcgaggtgagcctgcccgggctgcgccgtcctctcccggtccgggacttcccgtccttcctggtcgacacgacgggcagcgtgctggccaaggtcatcaccgaaatgttccgggaactgttcgagagcatggaccggtggcggcccaaggtgctcgtgaacacgctcgaggagctggaggcgggcgtgctcgcggggatgaggcgccactggacctggntcgccgtcggccccatgctcggggcctcggcggacgacgcgcggatccatctggtcgagcacgacgacgacgtc

SEQ ID NO: 135557 - DNA, 307 bp, Zea mays
  Clone ID: MRT4577_55106C.1
tttctatgtaacccccctctacacactcggtcgatccacttaaaacctgttggggcatctcacctacgctctaatcattgacacagatttcacattcccgtgaaaaataaaaacactgccttttcctactcatttttcttgaacaacatgcatcttacctccacctccatctaatgcttaagatcaccctccaattctcaagcctccattttctatttctgacacataatctagacctcccttttaacttagcattaatctcaaacgttaaaactctttcgttatctttacatcgctcatactttac

SEQ ID NO: 135558 - DNA, 488 bp, Zea mays
  Clone ID: MRT4577_55107C.1
gccgtccgttccggatgcgttccattgctgcttgattttttgcttcccgctgccttttcgtgccgaggaggtctgaggtggaacgaatcgaggcggctttccgcggtgatcgcatcgcattgcgttgcgtcgtcaggggaacggggcgatgattgagaggtcgacgggcgttgcttagccgcgtcgttgcgatcgtttagttttctatctagatctgtagtagcccaatttatgtttgtgttttttctgacgcaaattggcgtgcttttatgtgggtatcgcacttgcattgcatgcactcctttttacaattgattcattcacacttcctccccctcgtcgaccttttcgtcacttcttttccattcatagattttatttccacgttgagctgggattagtaggtagctaaagttattgtttttgagacagggctacactgaattgggagaaaacaaaagtaaaaaaaaaaaaaaaaaaggccccta

SEQ ID NO: 135559 - DNA, 523 bp, Zea mays
  unsure (1)..(523): unsure at all n locations
  Clone ID: MRT4577_55108C.1
aaaaaaaaaaaaagggggcnncnnnnaacgcaagtaaagaaagaaagaaaaggggcaggaagaaagggagccncacncganccancgccncgccgcagcacacacgaggccggcggcgccagggccangaagcnggacangnccgcgcncgagaccaacnncgccaaccggaccgccnccgccggcgacgacacgnacnncnccgccgaggcccccgacgngccgnacaatangttccccagcggcgacgacnccgacggcnnccaggcgggcaccaaggannacggggcggacgaagaaggggacgaccacgcnggccnncancnncgacaggggcgaaaacgncaccgcaaannccagggccagcangggcggnnanananccncacaaaccgngaggaaaannanngaaanaaanccnnacangcnggggacaanggcnggaggngcngcnganngccaannnnggcanaggaaccnaggaaccaagngncgncnccangagcnnncaaacaagcgaagg

SEQ ID NO: 135560 - DNA, 128 bp, Zea mays
  Clone ID: MRT4577_55109C.1
actcctcaaagcatcgggggagcatgtaacttccttcatcgtttcaaaagcattacatatatcatgataaccagaaatatttctttaggggaaaaaactaacacaatacgaccccgtacacgtaccac

SEQ ID NO: 135561 - DNA, 181 bp, Zea mays
  Clone ID: MRT4577_5510C.1
tcttcttttccattccggttccggctttcgcggccagcggctgtaatcccgtaatcgctgctccctgttcctggacgccttttccttcgccgtttccttattgttcttgtttgattgattgggtgttcactttatatgtctgtcattttactaatttatatttcgatcttttcatcaattt

SEQ ID NO: 135562 - DNA, 647 bp, Zea mays
  Clone ID: MRT4577_55110C.1
attctctccctcctgaccccctcagctcagctcccctctctcctcgagatctcccacgggccaaggccaggagccaacaaacgcaaggccaccgccgcctctgcgcctacgcagtcgccgttctgcgatcttgcccgccgccgcccggagatatggcgaaggcgttttacgcggtaggtttctggatccgggagaccggtcaggccctcgaccgcctcggctgtcgcctccaggggaactacttcttccacgagcagatttcaaggcatcgcacacttatgaacatctttgacaaagcccctcatgttcacaaagaggcatttgtcgctccaagtgcatcccttattggcgatgttgaagttgggcaagggtcttcaatttggtacggatgcgtcttaagagggcatagtgctgtattacaaggatgcactgttgaggatgaagcttttgttggtatgggagctaccctgttagatggtgttgttgtggaaaagcatgggatggttgctgctggagcccttgtaagacagaacacgaggatcccttgtggagaggtatggggtggaaaccctgcaaaatttctgaggaagctcacagacgaggagatcgcttttattgcggaatcagctgccaactattccaactta

SEQ ID NO: 135563 - DNA, 616 bp, Zea mays
  Clone ID: MRT4577_55111C.1
gttgcgagatgctcccggctcagctcccctctctcctctagatctcccggcgcaacaaacgcaaggccaccggcgcctccgcgcatccgcagtcgccgcctctgcgatcttgcccgccgccgccgccgctgccgccccgagagatggcaaaggcattttacgcggtggggttctggatccgggagaccggtcaggccctcgaccgcctcggctgccgcctccaggggaactacttcttccacgagcagatttcagggcatcgcacacttatgaacatctttgacaaagcccctcatgttcacaaagaggcatttgtcgctccaagtgcatcccttattggtgatgttgaagttggacaagggtcttcaatttggtacggctgcgtcttaagaggggatgcaaataacgttcaagttggatctgggacgaatatacaggacaattctgttgtgcatgtggcaaaatctaatctaactgggaaagtctttccaaccatcattggagacaatgtcacagtaggacatagtgctgtattacaaggatgcactgttgaggatgaagcttttgttggtatgggagcaaccctgttagatggtgttgttgtggaaaagcatgg

SEQ ID NO: 135564 - DNA, 292 bp, Zea mays
  Clone ID: MRT4577_55112C.1
atggaacttgcgtgttcagaaccttgacacctggtacttgggtcaagaagtgtacataaatgtggttaacccagaggacagcagcaccactcttccggagaacgcaattttctgtggtgcactctcaagcctacagaaagaacaattacatagattccagtactcgaaagctgccccagttccacaatggggaggaacaatttctctcctgattttgttggcatgctttgccctttggtcgctatgattcaacccccacctaagggcttgttcggttattcccaatacacat

SEQ ID NO: 135565 - DNA, 612 bp, Zea mays
  Clone ID: MRT4577_55113C.1
agcgcgttgctgctaaggacgactaccgaaccacaggctggttaatccgcacgccgccatggaccccgactccaaactagagttggagatgcccggcatgttgcgtgtgtacaagaccgtgcgagaaaagcgcttagacggcaccgagaccggacaggcctgaccagatggcgatacagtcaacggagatacgtacaaggacatcgttctgtacaccgacgcatgcatatgcggccagatctacctacctgcggaagtgaatgcagggaagaagcttgaccgtctaatgggtgaatccacggaggcgcgcttatggcgccagagcagacaacttcccagtgcaccatatgtacgccggactacctctgtggacgggagcaccacccaggccattacctgagacaaccgcgtatggaaatagcactaaagctcgagcgcctacagaccagtgtacacagggtcatgagagggccaagtggcaagtgaaaagcctatgagcacaaagccaaaaggtttgaggtaacttttgaaatatggcaagaaaagccatgctgagggcgcaatggatacatcagttgacgaaacctcagcaagagatggtacgatgctgaa

SEQ ID NO: 135566 - DNA, 732 bp, Zea mays
  unsure (1)..(732): unsure at all n locations
  Clone ID: MRT4577_55114C.1
cattgggtacctcgaggccggccggggggatttgcgctaccatcacacgagggcggggagcttccaggtcaagagctgtgtgccgtccgtccgttacctctccccccgctccgacgctgctggctggcagcatcggtgaaaagcagctggaattgaccggcggcttcgctgcgcacctccgcgtgcgcatatctggataagggttcgaggacggaagggctgcgacggctctgtccactggacgctgatccgtcgtcgtcatcgtcgtcgcaagtacaggcgccgtcgtgctcgtgacgacagcggctggccaaaaatctgcgaaacgaggaccaaggaagatggtagactggtattagctctctcgccttcaatgccacgtagaatccaagggttttacttgacacatggaagtaaaaccaaccaatcaatcattgcccagagttgatagaacaaatgacagattggtgctcatgagctaccaccatggtgagagcacggtcagtacagggcctttatcggtctaccggtggtccaggaattattctgaagacacatatgccctccttcctattgagtcttgaccacgagtggtgaataagcccaaataaacggctggtcggtcaacatgggaggatttttggcgcctggaaggttttccctgggggcagtgatttcaccnaaactcctttttttttctaaagaaaaaaaaaaaaaaaaaagcggccctcn

SEQ ID NO: 135567 - DNA, 520 bp, Zea mays
  Clone ID: MRT4577_55115C.1
gaatagaaaatatagaggtgtaatacttatttactgaaaggaacaccatatcagcttggggaccttattattacgagcataataacatagaaaaatctaagaagatggcaccaccaatggggggccggtgcaataagggggtggggggggggagagcatcttgcctaaatggtaacaaacggtggtgtgtgtgaagaaggcaacactgtttgccacattctgtgggtagaatggaatcaaatgatgttgttgcaggaaggcattaatgtttcccacaactggtgggtaaaatgtcaaccaatgttgttgaataaagaaagcaacaatgtttgccacagcttgcacatagaatggcagaatctatagaatcagtaagaaggcataacggctcgcgacaagtgtgataaatggtagtagattgagtgcctgcaaaaacatagcaaggttcaccccaacttggtgattgaatagaataaactgtagatgctggaggtaaccaagaaggttctcttgaactact

SEQ ID NO: 135568 - DNA, 326 bp, Zea mays
  Clone ID: MRT4577_55116C.1
gaaaaacaaaccttagttttttttacttgggcaaaccacttacttaaatggacattgacggtacccagttgggacttcgcatagacaccattgaatactccaggaccggatgtacgcttcagcgaaccttgtgggcttgaaggccatgaaacttttgtattgtactcgacggttgtttgaaaatccgatgatcctaatgaaaaaacccggctccccctttttgcattctaaaacttccttcaacacttgagcggggtcgtagctttcgaacaatggaagattccacattgttgagaaccgcacatcggagtattcgagagtgttta

SEQ ID NO: 135569 - DNA, 316 bp, Zea mays
  Clone ID: MRT4577_55117C.1
acgggattttgctgaccagaacgctacggctactggcgtgtctctctgagtgtgtgtgtgtgtgtcatacgtagacaggtacgtatgtagcagtgactggcatggggacctgtgcagagtgaactgcgagcgacgtgcactaaataaagagtgcgactgttggtaatggaggtgactcccagtctcagcgggacacgtgccccatacactgcacttgttgctacttgcgtgctttgtggagacagacacatgcactcagtgagagactattgtcacgcatggcgagcttgactagaaaatcccgtcggacgcgtgg

SEQ ID NO: 135570 - DNA, 205 bp, Zea mays
  Clone ID: MRT4577_55118C.1
agacttacgggcaccggtattagaagtaacggataagggacatggtgatacgaacagagttcctggccttctgcccccagctcagatatggccatcaaatgtgcgcagacgtaccgagcccaagaccaaacgaaagtttgtgccttacttggcacggccgtagaacaaatccgaccacaacgggtgatgtagcatgacgaggaac

SEQ ID NO: 135571 - DNA, 194 bp, Zea mays
  unsure (1)..(194): unsure at all n locations
  Clone ID: MRT4577_55119C.1
gggactgcacgaaagagagtctgggtggtctcgcgagtcgatagatcgctgagtggctgtatcgagcccttactggccatcctgtatgggtaccttgctggcagactaagcggatnnaacacaaaggcgtgggcggggcaaggcggtccctcgggcagagctggacggggtactggctctggtgcggaacctac

SEQ ID NO: 135572 - DNA, 364 bp, Zea mays
  Clone ID: MRT4577_5511C.1
ttctttttaattttttaggtggcttctcattcttttttgtggggactaaatcaaacatttaacttttttttattaattttttcgataatgcattttaatcattttatatcattcctaaaaaaacactgcttatacatttcaccaaagcggaataataggataaagaccatcatcatcattcttcaactccagtacccaatttcatagattattcaccgatccatgagaactgattaattgcaagcagggtggatacaacttacccacatcgacctggaacattgaggatactagaacatatatcatttcattttcagaagatgtgcaccacaataaattctcgttttggaaaaatcataaccaa

SEQ ID NO: 135573 - DNA, 264 bp, Zea mays
  Clone ID: MRT4577_55120C.1
gtgtttttagggtgagcccgtccaagatggccatgcgtccccgcgcacctcgccagctgatgtcgtactaggctaggggattgaagaagcacttgaagaggctcaatgcgcccaagcattggatgctcgacaagcttggcggacttttgtaagtcaaaaatattttctagctttggtacctacaatcttctgtacttccccatttgtctaatgcttcaggttgttcttttttctgtagatctgtgtaccttatccttgctatac

SEQ ID NO: 135574 - DNA, 579 bp, Zea mays
  Clone ID: MRT4577_55121C.1
cattgtgacctcgaggacggcgggaaccagatcctacccactagagcgtgcaacactgtctcaccgccaccatagagatcccccgtctcccattcttctcgaatgagtcaccaccgccgaggctaccccctttccacacactcatgagggagtgcatcgcgatcgacatccgccggtcagcaatccaggtcggaaacgcgtgctgcagagctgtactgtctcgaacatgccattcaggttgatggccagatgcccggagaccagaccatggggggaggtgatgatgctctcaacaccttctgcagtgagactggagatgtagaccacgtcccccgcgatgtctgtgaagaatttgaggccactgccatcgatgaggtgaggagtggaagctatagtcagctcttccatcctgagcagctcgtcacagagaaggatgacgtagccaacaacttcgcttgtggtgactacaccaatggtaaggagattgtatgacctgtcatttgaccagttcacgaagcttgtagataatatgcactgggctccagaggttactcgactccaacactgttggtggaggaa

SEQ ID NO: 135575 - DNA, 321 bp, Zea mays
  Clone ID: MRT4577_55122C.1
gtgtctttttcagcgatacacttcatgtactatcgataccatgattaattctgataagcatacagggcagatatgtacatgctcagaaaactcagttccactgtctggtattccagaatctcaagctgatgctcagattgatacagatacaggtcacaggcagacagatgttgattctactgcagatggattgagtatgtcggatggagataattcatgcatagccaaagaatcagaaacaggaactagtgcatcaagcatctcaaatgagggtccacaggacaatgcaacatctagaaaaaagtttaggaaattgttttt

SEQ ID NO: 135576 - DNA, 282 bp, Zea mays
  Clone ID: MRT4577_55123C.1
ctttttgatttgtttttttggttctgtgcagaaacaggggaaaccggtctgccttaaagccaaacagaattggagcctgcaaaacaacgaatcggcttgaaatttactactgcccgcaaggacccaagtgcaagcttaccatgagcgcataaccctgctggtgggtgatgaaccagtcgaagtcgtccacgcccccgattatttctaatcccgtaatttgtgaccaataccgcttacatttcctgtgccgggtaaggagccggtttcagggcgtgaaaacaa

SEQ ID NO: 135577 - DNA, 654 bp, Zea mays
  Clone ID: MRT4577_55124C.1
ccgcgattacatctgtagccgcgcctctccgtatcactccgcgcctctctcccgccaggccgccacccaagcaaccatggcggccgcgctgctccgccgcgcgctccacctccgccgtgtgctcccctcgcccgccgtcaccgccgccgcctcccagcgcctcatccccgccttctcgaccacccccacgccgaccccgaccacctcccagcagaacgccgccaccactacgatcgacctctcctccgacgagagccgccgccgcctcctcaataggttggtgtaccggagcaagcagcgaggttttctggaactggacctggtgctggggacctgggtcgagcagcacgtgcacgccatggacgaggccaacatccgcgccctcctgcaagtgctcgacctcgaaaacccagatttgtggaaatggttgactagccaggagcagccaccagaggatctaaattctaatccggtcaaccatgggttagaggatgggacgacataaagaaaggcaaagatggacccaagtatggaaatcagtgataagctgcttgaaatggggatgacggctttccatcctaaataatagctgtccgcccaccccaccccccaatatgcttgctttgcgattgtgtacaataaagtgaactgcga

SEQ ID NO: 135578 - DNA, 1104 bp, Zea mays
  Clone ID: MRT4577_55125C.1
agggaaagtggccccgcccgcaggtctcggttccgtaataccgggcccccccaacccttccggccgggaacggaaggcctgcgctccacggaagacggcaacggggatgtggaggggcaccgccggtccggccgggattcacatctgtagccgcgcctctccgtatcactccgcgcctctctcccgccaggccgccgcccaagcaaccatggtggccgcgctgctccgccgcgcgctccacctccgccgtgtgctcccctcgcccgccgtcaccgccgccgcctcccagcgcctcatccccgccttctcgaccacccccacgccgaccccgaccacctcccagcagaacgccgccaccactacgatcgacctctcctccgacgagagccgccgccgcctcctcaataggttggtgtaccggagcaagcagcgaggttttctggaactggacctggtgctggggacctgggtcgagcagcacgtgcacgccatggacgaggccaacatccgcgccctcctgcaagtgctcgacctcgaaaacccagatttgtggaaatggttgactagccaggagcagccaccagaggatctgaattctaatccggtgtttgctgccatcaaatcaaaggtcacagataacctgaccaagcatgcttctcctgagacccgatctacaccaggtcaaccatgggttagaggatgggacgacataaagaaaggcaaagatggacccaagtatggaaatcagtgataagctgcttgaaatggggatgacggctttccatcctaaataatagctgtccgcccaccccaccccccaatatgcttgttttgtgattgtgtagaataaagtgaactgcgaccggcatgtgtgaagtttgttaaattgtagaatcagcttgtaactatggatggtactcctgatgtttgcctggcaattccagccttccaggtatcgtctactacttggaaatatgttatattatgcattgcagtctgttagtgatggcaatcgttgaagcttaaaattaaaaacctttggagaataaaaaaaacagggggcggccgttttaaagaatccaagtttacttacgcgtgcttgca

SEQ ID NO: 135579 - DNA, 687 bp, Zea mays
  Clone ID: MRT4577_55126C.1
attcggcacgacgctggttctgtgcttcaagctcctcttcggcccacggccgccatcttcctgtcggcggtcgtgatcctctcctgcttcaccaacgtgccgcagctgcagctcagcctcagctacaccggcgagctcgacagctcctacgtcgcgccggcgccggtgcccaagtgcgacatcttccggggcgagtgggtgccggacccggccccgccgcaggacaccaatgagacctgcgacttcatccaggagcaccagaactgcgtgctgtacggccgcccggacatggagttcctcaagtggcgctggaagccggacggctgcgacctcccgcgcttcgacccgcacaggttcctccaggtcgtcgcgaacaagtccgtcgccttcgtcggcgactcgctggccaggaaccatatgcagtccctcttctgcctcttggccaaggtggagaagcccaaggacgtgtcggtgacggacagggcggacccgaacatgatcctgtactacgagggctacaacttcaccatgtacctcttctggtcgccgttcctggtgaggtcggaggaggacgtcgccggcgtgttcaagctgtacctggacgagcccgacagcaggtggctgtccgtcgcgtcccggctcgactacgtgctgctgtcgggggccaactggttcacgcgccagtcc

SEQ ID NO: 135580 - DNA, 2089 bp, Zea mays
  unsure (1)..(2089): unsure at all n locations
  Clone ID: MRT4577_55127C.1
gaagcccgccccaccatccggccgtccatcggtcaacgccagcgtacggctggcgtgccgccgctcgtgcgccggggccgaagctgtcagattttacgggggttcggttcgatctggtgtccgacggaggcggcggcggcggctcctctgctgttcgattgagggagaggggccatggaaaacccggcgccgccgaccaacccggcctccgccacgccgtcgccgtcgcggcagctgccggacttccagcagtcggttcgtctcaagtacgtgaagctggggtaccattacctcatcacccacggcatgtacctgctgctcaccccgctgatggtgctcgtggccgtgtacctctccacgctctccccgcgcgacgtcgccgacctgtgggcccacctccgcctcaacctcatctccgtgctcgcctgctccacgctcctcgtcttcctcggcacggcctacttcctcacccgcccgcggcccgtgtacctggtcgacttcgcctgctacaagcccgggcccggagcgtcggtgcacgcgcgacaccttcatgcgctgctccaggctcaccggctgcttcactgacgccagcctcgagttccagcgcaagatcctggagcgctcggggctgggcgaggacacgtaccttccccccgccgtcacgcgggtgccgcccaacccgtccatggacgaggcgcgcgcggaggcgcgggaggtcatgttcggcgccgtcgacgagctgctcgccaagacgggggtcaagcccaaggacatcgggatcctcgtggtgaactgcagcctgttcaacccgacgccgtcgctgtcggccatggtggtcaaccactacaagctgcgcgggaacgtggtgagctacaacctcggcgggatggggtgcagcgccgggctgctgtccgtggacctcgccaaggacctgctgcagacgcacccggggtcgtacgcgctggtcatcagcacggagaacatcacgctcaactggtactcggggaacgaccgctccaagctggtgtccaactgcctgttccggatgggcggcgccgcggtgctgctctcgaatcggcggtccgaccggcggcgggccaagtacgagctggtgcacacggtgcgcacgcacaagggcgcggacgaccggtgcttcggctgcgtgacgcaggaggaggacggcgagggcctcgtgggcgtgtcgctgtcgagggacctgatggcggtggcgggcgacgcgctcaagacgaacataacaacgctgggcccgctggtgctgccgctgtcggagcagctgctgttcatggcgacgctggtcgccaagaagctgctcaagatgaagaaggtgaagccgtacatcccggatttcaaactggcgttcgagcacttctgcatccacgccggcggccgtgccgtgctggacgagctggagagcaacctggcgctcacggattggcacatggagccgtcgcggatgacgctgcaccggttcgggaacacgtccagcagctcgctctggtacgagctggcctacagcgaggccaaggggaggatccggcgccgccaccgggtgtggcagatcgcgttcgggtcagggttcaagtgcaacagcgccgtgtggagggcgctccggtcggtgaacccggcggaggagacgaacccgtggatggacgagatcgacaggtttcccgtggatgttcccaaggtctctaaggtttcaagcgactgaaatgcattgctagttgcgtgaatgatggagcttgcaattgtttggatagaagatctggttggaatttttcatagttcattactatatagttgtaggagataggaaaggcgatcgacttctctaatcttgaattatacatctgttaatgttgtttctgtatggcactcggtccctggcctatctatatagttgactgctcggtgttctgacagttctactatatctgttcattctccaactgttgatcactgttcttccacaaatgaaccatctgaacgatnttgttggcccttcggcaanttagggaatatatgtgattanaatctaaaaaaaaaaaaaaaaaaaccctcgtgccgaatt

SEQ ID NO: 135581 - DNA, 290 bp, Zea mays
  Clone ID: MRT4577_55128C.1
attaatatccacagtaatctcagtgtgggcatgcaaaatggggtgtacaaacattcaaatcttaaacctatccacaaaccttatacttcgcttcatctctgagagggggttactccgagaagggctgacacctttccacccactatctatataggcgaacccctcctacacaatattacacgaaggcctcaggacaaacactaactttctattgctactgtagtctacacaaacttaatgactggacccccaacaacttctaatgcccatttcctgtcaaaacgcctccc

SEQ ID NO: 135582 - DNA, 318 bp, Zea mays
  Clone ID: MRT4577_55129C.1
taataatttcccgggtccaaaaggaattaattttccagccctttaaatctcttaaccaaagccccaaaaaaggggccatcccaaattcaataactttactttaaaaaaaagtggaaaaaaccaagggcgcgaaaatgaaaaaacccctttattttttaaataaaaaaggcaccacaaggaatctaccccaaatacaatttcccggttttaaattaaaattctaattaacaaggataaaattaacaagttattcaagttggtcaataaactgcaaaattcaggcatatcaccccagacattactctacaatacagtact

SEQ ID NO: 135583 - DNA, 1112 bp, Zea mays
  Clone ID: MRT4577_5512C.1
gtaccggtgcagaattcgcgggacgattcacgggtcgaggcacgcgtctgcacacgcgtccgcccacgcgtccgctaaagcgagcggcggtcttgcaccaggagttgctattcccaacgttgctgctgctggggagcagggacagcatatcacaattataacccttaacaaaaagggcccgttaaaggttctgctccaactggtaatggcccaagcaatgtgattaacaacacaaccagcatgccccccggcagaaacaacagcttcaagtcggtgagcagcagtccagctgctgctaccggtggcattgcggtgaactcgaaggtcgacgactccttccatcaactggaggacctcgacctggacggcttgatcacaaacgaactgatggagagcgggttgttcggcgccggacaagggtggtgagcatgtcgcaccacgcctcacactactatcgagttccttcaccgaaagcgccaagcaacaatataagctttgccacccttctccccagcagcagcaacgttgggaatagcaactcctggtgcaagaccgccgctcgctttaggtgcatctggaggcagttgctgtgctttcacgtggttattgttcttaacttcctgcagaagctgattaagcacatggtgctggtactgtgggttaacaccaccaaagccctggaaattgctttgctgcggcataggctgctggtgttgaatcgccgcagggtgttggagctgcacttggttaggtcctcggaaggatctggctgcttccagctgtatgccactgtgcattgctgtaggacctttgaagacactcgtatgcctcctgctgcagcaagactggatttgcactggagcttctgagcatattgtggtagctgtttagaggtgtggcatgctcaagagcattattgccgatggctccgacaccaggagtctggttggtcgcagaagcacttgcttcctgtttggtccccattagttcggtgttgctctggttattggcaaggttggcagcagccatgagctgtcttgcccacgcggccgcccacgcgtctgcccacgcgtcggcccacgcggctgcccacgctgccgcccacgcgcccg

SEQ ID NO: 135584 - DNA, 340 bp, Zea mays
  Clone ID: MRT4577_55130C.1
gtgcggcgctcgaggcggccgtttccgactcgtcagatccaattatctactctacaccaatgacatcgcttgatatgactaatatacttaatttaacctgtatctgccttaattctgttctttgtccgactagctctttcttcaccatattaccctacgcttatggcattttccacccaatcgcgaatgttatgcctgtcatacctgcaatcttttttctattagcgtttgtttcgactaaggtgctgtagagattcccacgctgtctttactattctgcctgccatactgactgttgtattcattcctctcctgaaatacccaaatgcccctaggcgcc

SEQ ID NO: 135585 - DNA, 145 bp, Zea mays
  unsure (1)..(145): unsure at all n locations
  Clone ID: MRT4577_55131C.1
ggccgcttttttttttttttttttcgcaagtcaatttgaggccatcacattgaccaaatgggtctccgcctccgcccaagagacgcaaaccaaatcataaagcgaggacanccattgttccaaagcagtaaaagaaagnnatgna

SEQ ID NO: 135586 - DNA, 410 bp, Zea mays
  Clone ID: MRT4577_55132C.1
tcgataagcaccggtgaaacgtcgcgtgagttgaccattactcattcatcaccgcttatgctgtctgagggcacttgatgacaagtggtactgacaactgatgctaacaaggccattggggttcataggctctgtggggaggaccacatgccttatatcatattgaaaggccgcctgacctcgatcatagaccaatttatctgagatgataaaatgacagtgaccaaagagaactcagcgatccagagtgtttagctcccttaagtgcttgataacaccaggattaatgttggaattatgcagactcttacatcggctaaagctgctgatgcgaaaggaggcccaacttaaatgactggtttcataatggcctgtgtctaacttgcggaataaaaaacaggtgctgatcg

SEQ ID NO: 135587 - DNA, 240 bp, Zea mays
  Clone ID: MRT4577_55133C.1
ccccagaggacaaaatcaactaggctaggcacccttgaacgtttgtttaaaaaaacccacatggatgttcaccttccgacttggccaccggctgggggcagaaagggggccttccacgggctatatatttgcctgcttaataaacgaccacggaacgcagacatacgagctacataagccatttttcccctgggcgctttggtttggtcatatgcctaaccatacgaccctgccggtggt

SEQ ID NO: 135588 - DNA, 406 bp, Zea mays
  Clone ID: MRT4577_55134C.1
gaaccgcaagacctggggtaacgctggttacgacaccggggcattgcaggcgcacacatcttccaggtgatcttattacaggcgcgagcatgtcttcggcaggactctagcttccggacgccggccttgaattgggtgtgcgggctaggagaatcgactggcgtgtgcctggctcagttcatgcgacggggagcgggttctatacttactccagcggggggaaccacacttgggggctcacaaacaaccctcctgttggtgaaaaattagcaagcactgccagttggttggggctcaccaacatccggccgaacactcctgccttggggtgggggctacatgactggtgggggctccccgagaaagggacagtcacatggttcattactagcgccgggaacacatt

SEQ ID NO: 135589 - DNA, 682 bp, Zea mays
  Clone ID: MRT4577_55135C.1
cgctggaggaagttgatcctgatcttgtcaatgctggcaagcagaccgtcacctttgtccccggtgcctcaacctttgactcttccgagtcctttggcatgatccgcggcggtcacgtcgatgtttccatcctcggcgccctccaagtcagtgctgccggcgacctcgccaacttcatgatcccaggcaagctcttcaagggcatgggcggcgcaatggacctcgtcgccaaccccgaagccacaaaggtcattgtcgcgacggagcatctctgcaaagatggatcgtccaagattgtgcagcagtgcagcttgccactcactggcgcgcgatgcgtgagcaccatcattacagatttgtgtgtcttccaggtagaccgcgagaagggcaccttgacgctcaccgagctcgcaccaggtgtcaccgtcgacgaggtgaagagcaagacggacgcgacatttgcagttgcagatgagattgtgactatggaataagttgtaaaataggaaataattggatgggtggtgaaggatataccagcgtgcactagcatggagtttttattttggatgaatgggggttcgttctatggatatagagcgcatggttgggatattatagcatttcggcgtgagtgatggagagcttataagaggaagagagacgtaaagatgttcttgag

SEQ ID NO: 135590 - DNA, 443 bp, Zea mays
  unsure (1)..(443): unsure at all n locations
  Clone ID: MRT4577_55136C.1
gngcgacaacatgattgagaggtgcaccaaccttgactggtacaaaggaccaaccctgcttgggggtctgcgaccaccatacaccgggcgcaagaggactttggacaagctgttccgtctgcccttgcacaatgatgtcaagattatgacccttgagaaggggaacggctccaccgtgaacgtgtgcatccacccttccaaggtcatgggtacaaagctgaagcttgacaaggaccgcaaggcgctccttgacctcaaggcccggggccgcgccgtcgacaaggctaacggcaagtttactgccgacgacctcgccaccgctgttggtggcgccgccgacactggcgcgtcttttcatgacatcgactaggcgcttcgcggagatctgatggtggggctaccgcctattactccgtatcggtctaatttttgctatcaatgat

SEQ ID NO: 135591 - DNA, 2002 bp, Zea mays
  Clone ID: MRT4577_55138C.1
attggtacctcgagccggcgggcgggaatcgtgatcatccctttgttgcgaagatgacaagtatagtaagctgtaagcaccggacagcaaaaatcttgcacacgcaaaccgcagccaagcaagcgttcccctccctgtgatcgcgatggggtccaccgagaagcaggagccggaggcgtcgccggagatcatcttccggtcgaagctcccggacatcgccatcaccaacaccctcccgctgcaccgctactgcttcgagcggctccccgaggtgggcgagaggccctgcctcatcgacggcggcacgggcgccgtgctcacgtacgccgaggtggaccgcctgacccggcgcctggccgcggcgctccggcgcgcgccgctggggctcgggcgcggctcggtggccatgaacctcatgctgaactcggcggagttcgtgctctccttcttcgccgcgtcgcgcgtgggcgccgcggtcaccaccgccaacccgatgtcgacgccgcacgagatcgccgggcagatcgcggcctccggcgccaccgtcgtgttcacggagtccatggccgcggacaagctccccgccatgggcgacaagctcacggtcgtcctcatcgacgcgcgccgcgacgggtgcctccacttctgggatgacgtcatggccagcgtccccgacgaggaggccggcggcggcgagcaagacttggacttcgaccccgacgacgtggtggcgctgccctactcgtccggcacgacggggctgcccaagggcgtgatgctgacgcaccgcagtctgagcacgagcgtggcgcagcaggtggacggcgacaaccccaacatcggcctgaccgccgccgacgtggtcctgtgctcgctccccatgttccacatctactcgctcaacaccatcctgatgtgcgggctgcgcgtgggcgccgccatcgtggtggtgcgccgcttcgacctgcgcaggatgatggagctggtggagcgccaccggatcaccgtcgccccgctggtgccgcccatcgtggtcgccgtggccaagagcgacgaggcggcggcgcacgacctgtcgtccgtccggatggtgctctccggcgccgcgcccatggggaaggacatcgaggacgcgttcgtggccaagctccccggcgccgtgctcggacaggggtacggcatgacggaggccgggccggtgctgtccatgtgcctggcgttcgccaaggagccgttcagggtgaagtcgggcgcgtggcgggacggtggtgcgcaacgccgagctgaagatcgtggacccggacaccggcaggtccctcgcccgcaacctgcccggggagatctgcatcaggggccagcagatcatgaaaggttacctgaacaacccggaggcgacgaggaacagcatcgacgccggcgggtggctgcacacgggcgacgtcggctttgtggacgacgacgacgagatcttcatcgtcgacaggctcaacggctcgagcaagtacaagggcctccaggtggcccccgccgagctggaggcgctgctcatcacccacccaggcatcgccgacgccgccgtcgtcgggaaacaagtggagccggagatcggggagatcccggtggccttcgtagccagggccaaagggtgcgacgacgggctcaccgaggacgacgtgaagcagtttgtggccaaggaggtggtctactacaagaaggtccgcgaggtggtcttcgtcgacaggatccccaaggccccgtcgggcaagatactgcgcaaggagctcaggaagcggcttcaacttcagcaccagcacctgcagcaagcggtgtgatgtacctggctcaatgagaagcgttggagttgccaagctagtgtacatcatatttggggtgactgtgctccgtgtttttggtctagtttggcggtgggtgatggtgattaattgtctacctcataatgttcattttgttttcagacgtaatttccatcagtgtgcgcatt

SEQ ID NO: 135592 - DNA, 420 bp, Zea mays
  Clone ID: MRT4577_55139C.1
gtgggtcgttacaagactctagactgagtcgtaggacggtcgcgggcgtcgtccagtttgacagaggaacggggcgactcgggttgcgccgtcagatcatcgttgaacgactcatattagttagccagataccagttgggacccctgatctacaccattgattcactagtgggcggtgaagatctggttgccgcgcccatcgcgagaactaatctggaccgtagatctagagataaatgattcggattaagttgggtcatgttggttcggatgggagcgatccagggcatcgtgtgtcgatcggatggctctgataggatctgaggttatttaaatctgcactgttggattttgatcgggcgggtgacgtcaggtaccggttcgagcgacgatagatctaatccatgtcgtccaccgttg

SEQ ID NO: 135593 - DNA, 866 bp, Zea mays
  Clone ID: MRT4577_5513C.1
cattggtacctcgaggcggcggggtcttctcctcatggagctggttgtgagctccgcgtacggctccggccatcactcctctggttgtgtctctccagcatcacgactccatcccttcatgctcgtatctggagctcgctcggcctacagctcgcttgtaccccggccgccgtgttgttcctgttcgtcttcagcgccggtcgagcatcgccgcttgggaatggcgcacggccatcccgtctcgacctcctccagctcctccatcccttgttccttggcgctcgccaagggcctctccttcatcttttgtcgcgtctcaactcccatggccgcctctacgcacgagctcgccggacgccgcagcatatgctccctgctcggcctccccggcgtgctgctccctcgccttggcgcccctgcgagctccttctccctcgcccggtttccagctcgagcctcgccggatgccgacgctgcttctctgacctcgtctcgacactcaatcgctgcagcacgccatatcgccaattttcctcgtcatttctcggctacaacctcgtcagcttctgcgagtcgtgcgcgtcttgtgttcgggtcgagcccaaggattttaaggaaaaagaagctctagtgcttcggccggtgaatgaataaaatggtggtagtcatggtccttgcaaaatccgagatcgacttagttgcggtacgataattaatcatgttgatgtggaagacaaccccagtcgaccccaggataatgcagagattggacatctccgcaagacgacgtcgtcagtcgggccaacctgaagatggataatctaacgagtgccaagacaaaggatggtcgtcaaagtgatcgacgt

SEQ ID NO: 135594 - DNA, 294 bp, Zea mays
  Clone ID: MRT4577_55140C.1
tgtgctgtgtcatcaatgtggttctggctgacacagttgagaacgtcgtggtgtctgatctcgttgtggactcaccgtgctgtcttctcacgggtcactacggctagaccgctcccatggataggatcatcaacgcacaggccttcacggactcgggtatagaggtctagatgtcttcacactaggcaatggccatcaacccatagaatcctatcgtcactgagctgccgaagcttgcccacgctgacatcagtgacaagcctgtctgggatcacgtgatgctgctgttccata

SEQ ID NO: 135595 - DNA, 362 bp, Zea mays
  Clone ID: MRT4577_55141C.1
cttcacatagaaacatggtcccaaaggacatgattgctcctggggaactgtcactaactcataacggccacccgggaatataagcgcagctgttttacttatgttgaaatcaggcaccggaaatagggtggttacgcaacaacatttttcacgcacagaaggcttgatccacttttcgcttggggggaaaatgttttttattgttaccccagtagacacttttgggatcatggttcataaccggttttctggaagaaattggtaaaccatacaattggacacaaaatacgatccaggggtatcaactgtcaaggctctggtttctattgagataccaaactaacattaatttgaatgcgctc

SEQ ID NO: 135596 - DNA, 306 bp, Zea mays
  unsure (1)..(306): unsure at all n locations
  Clone ID: MRT4577_55142C.1
ctctacaaacaagctatagcgtagaaaaatatttagacatgtacaacaaagtcttttatacattgcctaagataaatcaatactcaataagctccttgatgcttcggattccgggataacatacttgtgtttacggacggttgganccggccccaacaaaaaatacccttacgaacagccctttgagaagaaaaacaagagccttctatttcttatcaaaaaaaaacttctagccctaaaccagcctaacattagcctagaatcgtgcaacttctacattgagcgccactccccccgaccccgaac

SEQ ID NO: 135597 - DNA, 307 bp, Zea mays
  Clone ID: MRT4577_55143C.1
cccaccccgcgtcaaggccagcagccagtggatcctccactccatcgcccacggggcacatctaggggggggcacctgcttctacgtcacctcccaccttcgcaccaatgaccttcccgcgctgcaggtctagctgctcaggcatctcaactccggaatcttcggcacccgcagcgatggccacacactgccgtcggaggtcacccatgcggtgatgctgctgcgcatcaacacgctcctgcagggctactccggcatccgcttcgagatcctcgaggccatcaccaagctgctcaacaccggggtc

SEQ ID NO: 135598 - DNA, 501 bp, Zea mays
  Clone ID: MRT4577_55144C.1
ctgcaggaattcggcacgagggttcaccgacgtccccttcttgatcgcgtaccctgcgtgtcagagattccacggcatcagtccatgttgctgtctgtccgccagtgcggtgagggcgtcgctgccactgaccgtcgatgctgaagtcctgtgcggctttcctcgagtaccatggcaggatggttgctctcctcagggtctcgttcatcaccttgtttgtgtaaggcatgttgttgacatcagaccacctgagacgcgacgagccgttgaggctctccttgatctccaggtgctcctcctgcaaccacacgtatagcttgagatggaagccgcctgagcctgacggacagggacagagaggctcacccgtagcttgtccagaacgtcggggttctccccgaggaacttgacgagccaggtgaggcccgccgtggtggtgtcgtggccgtcgaccagcagggtgaggatgttgcccttgagctgcgcgtccgtcagcttgtc

SEQ ID NO: 135599 - DNA, 585 bp, Zea mays
  Clone ID: MRT4577_55145C.1
cgcttattgcaccaagaactccaacgcggagggcgtcgacaggaggaattaatggctgccggctgtctagcaccagccaccgccggtcttatgcctcgcagcctgccgtctctgcgtctccgtgcgtctgcggctgccagcgcgcagcgcacgggtacctcgctgcgtgcacgccgtgggcgcatcgccgcacaactccggctcccgaggctcgccgcgtgctgcgtcgaccaagccgggacctgcggctgtcggggccgccgcctcctcgtgcgcccgagcgtgaagaggagatgcttgccgtgagctggcgggacatcccggcggtacttgccggtgcacggttgctgagcatcctcatggtcggcgcgatcccgccgggcccggacgcgcagctggagggccgcctagaggacctgccggcctgcccgcgtgaggtgcacaggggattcgtctgcaccctcgtcacggaggccgagtgcaacctggccaccatcagcggggttgccgaatgcccctggattctctgcggcggatcgatgcgctcccagctactgccaagagcatagcgcgtgacgaaagtgc

SEQ ID NO: 135600 - DNA, 241 bp, Zea mays
  Clone ID: MRT4577_55146C.1
ttctctcccctcctttttattcatatcctcaattctacagagtagcttttcaaaattagcgtatccaaactacgtcatctcatgttaactaccacttcttattccacaacctcacacttaccacataccaccactccctccacaacaccttcatcacctaccaccaactcctccaatccaatatcattctccatcataatactcactaatccctcctcttctactctcatcaccttctcca

SEQ ID NO: 135601 - DNA, 2435 bp, Zea mays
  Clone ID: MRT4577_55147C.1
ggaaatacgattacataaaaaggtgtgggagcccgatccgatcgccagatccgccggcctgggcgccgactcgggcgtccttccacagatcctcttccttctatcgtaggctcgccctcgccgctcgctggagcggaggtctctccctgcagcccatactccttgattcattctattgcctcgccgccggctctatggataagcaggagccagtagccaatggtgaacaaacgataggtcttgctgagaagccgaaggagctgcctgttgccagtaaggatgagaaagcaactgtgcccccgattttagttgattcaaatgctttcaatctaccaagtgaaggccaaacccaagctggcacatctaacatggatgggggccataatggtgcacacaacttttatgcttctcaggcacaaccattctattaccaaggctccggttctgaaaaccctacacaagcatgggatacatatcctccctacatgagtgttgaaggattggaagtgggtccaccagttgtatacaatgaggacccctcattgatgttccatggtggctatggttacgacccatattattctcctattgcaacacctgtaccaaatgctgttagtggagggtgatacaataatgccgattgacccaacacaaggagcttttatcgctgataccctgagtccaaacagcttcctgtttggcccaagacctgaatggttcagatcttcagaaggaactgggtcatttccatcacctgcagcttcacctcaaccttctaggggtgttccagggtcctatgaccaaaacaactttccaatggcttcaagaatgtcatcacctcaccagaagcccttctatggtttgagatccacaactgactcctatggaaggggtttttctcatggtggaatgttcccacaggccagtaattatgggggatccgtcaccagctttggccttaatggtagaagtttgatctcaaccgagaaagggcgcaggaggggaaggggcaatgcacttatttgcagctgcaatggtcctcttgactttcttaatgagcaaagtcggggtccacgtgcaactaagcctaagaagcaaccagaggttgacagtaaggatgaggtgcctactacaggagttggtcgtgagttatacaacaagcctgactttgttatggagtacacgaatgcgaggtttttcatcataaaatcgtacagcgaagataatgtgcacaagagtgtcaaatatggtgtttgggctagcaccacaaatggaaacaagaaactggactcagcctatcgcgaagctaaggagaaaggagagcactgtcccattttcctgttattttcggtgaatgccagtgcacaattctgtggtgttgctgagatgattggaccagtggactttgagaaaagtgtggattactggcagcaagataagtggactggtcaattccctgtgaagtggcacatagtgaaggatgttcccaataatcttttccgacatataattcttgaaaacaacgacaataaacctgtaacaaacagcagagatacacaggaggtgaaactagagcaaggaatggagatgctgaagatctttaagaaccatgatgatgatgcatcaatccttgacgactttgagttttacgaggagcgtgagaaagcgctgcaggaaaataaggcacgcctgcatcagcaacatctacccagttctattgttattgagcccaagaaacccttgactgcacccagtgacctcgtgggccatatcaccaagagttttgctgaggctgtgcggcttggtgaggccaagactgtaagccatttgactgagaaggtttctgggggtgatccgtctattcctgtgaagcatgttgaagttaagcagagtggtttatcttaggaactcttgatcgatgtgaatgaactgtaccaaaaattcacccatacgcttcctgatcaaaatgtcgggaatgcatatgcagatggatgatgatgaaacccaagacatcggcaaaagcatgcatgcacactagggtaggtctttgccaaccttggaagcatagtttcttgaatagtttctctctttttttcttctttcttcctagtattttctccccttctcttcgcatcatatgatgattccttagtgtctagcctcaaggagagttgctgtttttgtgtaagcctctgtaagtttcctgttccatcacatatgagtaaggcctttttgtttctttttatttaagtaaaagatccatcttttatgtactgtcgtggcagttttattatactatgtctgaacaaggcctattcactatgtaagcaaaacataaacgctatccaggtgacctggttgtgatgactacagtaataagtaactgaataattttttatgtttgcggagaaaaaaaaaaaaaaaaaaggccccta

SEQ ID NO: 135602 - DNA, 918 bp, Zea mays
  Clone ID: MRT4577_55148C.1
gccggccgggtcgggatctctaatcgctctcatcaaatcacgattcacataaaaaaggtgtgggagcccgatccgatcgccagatccgccggcctgtgcgccgactcgggcgtccttccacagatcctcttccttctatcgtaggctcgccctcgccgctcgctggagcggaggtctctccctgcagcccatactccttgattcattctattgcctcgccgccggctctatggataagcaggagccagtagccaatggtgaacaaacgataggtcttgctgagaagccgaaggagctgcctgttgccagtaaggatgagaaagcaactgtgcccccgattttagttgattcaaatgctttcaatctaccaagtgaaggccaaacccaagctggcacatctaacatggatgggggccataatggtgcacacaacttttatgcttctcaggcacaaccattctattaccaaggctccggttctgaaaaccctacacaagcatgggatacatatcctccctacatgagtgttgaaggattggaagtgggtccaccagttgtatacaatgaggacccctcattgatgttccatggtggctatggttacgacccatattattctcctattgcaacacctgtaccaaatgctgttagtggaggtggtcagctctactcccctcagcagttcttctcggctccttactaccagcagtcagtaccacctgacatgcaatatttaagctctcctactccaatatcacagggtgatacaataatgccgattgacccaacacaaggagcttttatcgctgataccctgagtccaaacaagcttcctgtttggcccaagacctgaatggttcagatcttcagaaaggactgggtcatttccatcacctgcagcttcacctcaaccttcta

SEQ ID NO: 135603 - DNA, 123 bp, Zea mays
  unsure (1)..(123): unsure at all n locations
  Clone ID: MRT4577_55149C.1
aagccangattaagggcgcaaagatttacaagcaaccaaccacagggctccgttggacttgacccatgaatacattacatcaaagtttactcaactccgattgatatatgctcattagaactg

SEQ ID NO: 135604 - DNA, 360 bp, Zea mays
  Clone ID: MRT4577_5514C.1
gccggcgcccgtaaaacaactcaaaaaattcttagtttttggtacaagaaaacgatttggacccagcataccaactattggggaattgaaatgataccactatataatgaaaagataaattgctggaaatgacattcggactgaggaaattagtgcctacctaaggtagaacgatgttggcataaggtgcatccctaataaagattaacattccctgggtgggctgctgatggtggttcactccagcagtagagagaaaaacgttattcttttaattaaatttgagtgcacctgctaggaccggaacaatggatgtttatatttcttgggagcctaacttttgaaaagattcttccaaat

SEQ ID NO: 135605 - DNA, 601 bp, Zea mays
  Clone ID: MRT4577_55150C.1
gcccttctcgagttttttttttttttttttttttttttttttttttttttttttttttttttttttttttttttttttttttaaaaccaaaaccggttttttataaggaaaccacctaaccccatggccatgggcaaccccaccccgggttttttacccctcaaaaaaccccccaaaacaacgggttaactggtcccttagggcagcccaaaacggggaaaaccttccccccccccaccacttgaaataactggggtagcccaaaaaccagtagggaacccccgggggaacaaccggcccgggaaaacaccccaaaaaaatggcaaaggggaaagccctcctttttaaaaaccggacctggggggagaaccctttgggagaaaaaacaaaaccagggcttttcgggccccccttgtaaccggcccccaaaagggcaaaaaactttggttggcccttcaggccccagttaattttgtggtggttcccagccccaaaaaaataaggaggggctggtcccgaaaaaaaaccatcctggccaaggggccccccacctaaaacagggggtaaaaaccagggccctctgggaggccaacagggaaaa

SEQ ID NO: 135606 - DNA, 207 bp, Zea mays
  unsure (1)..(207): unsure at all n locations
  Clone ID: MRT4577_55151C.1
tcagggnntcagcncanngcagcatncnnagcggtgcnnntgactgannnatcatggtnnngaactcacnnngcgccggnnatcgnnccggtggtnnncacccagnntttttnncgggtaacccgggcagnagnngcgttaanntgccttcgcgcctgtnngcgtccgcattcccttgcaggngctcagnngcctgtcgacnnaatt

SEQ ID NO: 135607 - DNA, 341 bp, Zea mays
  Clone ID: MRT4577_55152C.1
ggttacttcgcggagtaggcgctttggcggctcaggccctgagggcccacggaccccgtggcgtggccgctacccgctccatggcttctggaggtggtgtcctactgatgaggagcaggctaccgggctggagagggagatcatgatagcagcacagaggggactggatccatgcaatatgctacctccacaggcagcttcgggcaccaaggaagaccccagtctagtcccatccgttagcatcaagagaatagtgggctgcatctgtgaagaggacaactgcactgtcatctggttctggctgcaccaaggcgagaccagcgatgcccaactgtggacac

SEQ ID NO: 135608 - DNA, 300 bp, Zea mays
  Clone ID: MRT4577_55153C.1
tcccttttttttttttttttttttttttttttgttttttttttttttatttgtctgcttctttggcaatctaaacaaaagacgctttttataacccacacaccaacgacggaccaaagaccctcgaggctcacctcgccggcaaaacctatgtgggtggagaactccattactaaggatgacattaagggcttcgccgcggagccggcgaagcctggcgctgagtttcctaatgccgcccgctggtacaagaactcctttacgaggaactccccaaagaaaccgggcatgggggacgcaa

SEQ ID NO: 135609 - DNA, 295 bp, Zea mays
  unsure (1)..(295): unsure at all n locations
  Clone ID: MRT4577_55154C.1
caacaaccgncagcccgaggacaggagnnaccnnnggcgcannngnnggcacaaaacancaaggcacaacaacgacaacaacnngngcnaggaaaccccgcngccnacncncancaacaggaagaacgggcanncaaccaacngncngcannnaacccnncnncnnangggcaacaacaacnaccanncannnagnnagcngcngcccacccccagcannnncngccangcaaccaacgggcagccacgaaccccgcngcngaacgacaacagcggcggcggccaccanncagcc

SEQ ID NO: 135610 - DNA, 474 bp, Zea mays
  Clone ID: MRT4577_55155C.1
gggtacctaaaaactaggagcacgtaaaaggggaaagagggggaattaattacatggaaagggatccagggtaaccttttccccaaataaggatccagttaaccagttgagaggagcaacggtagcaggggcaggaggaggaaagtctcttcttggcaaggaaaaaggggggaccgccggcaatcaggaatttaaaaccacaaccagccccaagggaggaaacgggtaggggggaaaaggcaaaacagcgcggatcacaacaaagaggaaaaaaagcttaactcctttccttttgacagactgacaccaaaaggatatcccataaatttttaaatttccccacgccttgcccgtttttgggctcgggaacttacaaggccccaacggggcgggaggaaacggaaaaaaaaaaaccccttcccccgcccggggggggaagccccggggaaccggtgcgggggggcctgacccagg

SEQ ID NO: 135611 - DNA, 1304 bp, Zea mays
  unsure (1)..(1304): unsure at all n locations
  Clone ID: MRT4577_55156C.1
cattgggtacctcgaggccggccgggagtcgctacttcccctccgatcctcgtcgccgacgcatccacccgaaccctcctccgcgacctcgccgtcgccgcagccttggccatgtcgatcttcgagtataatgggtccgccgtggtggcgatggtggggaagaactgtttcgcgatcgccagcgaccggcggctgggcgtgcagcttcagaccatcgcgacagacttccagcgggtgttcaaggtccacgacaagctttacatcggcctctctgggctcgccactgacgcccagacgctgtaccagcggttggtgttcaggcacaagctgtatcagctgcgggaggagagggacatgaagcccgagacctttgccagccttgtctctgcgctcctctacgagaagagattcgggccatatttctgccagccagtcattgctggacttggagatgacaacgtaccatttatttgtactatggactgcttaggtgcaaagtaggtatctgttttatgctgttttcttattgaataagtgcttggtttgttttctgcttgagattattgcgttttagggtcctagtcaaggcaatattttcagctaacgagtcttgtgccactagttcatcaaagttgccctggaaatgtcactggtatctggccggccgggtttgtccttaacatgctgctaatttgcaacattgttctgaaagtgggcagtaatactgtgctagagttgaaccagtggtataagacccacaattttgtcaatggcttggaatgaaaattcctctctgcttatcatctgcttccattttactgtattgagcaatatgcctattcaagttttgttcacctaggaacatatttcaaaaacaatctacaaggcaagtaaatgcaatatgttatttaacaaaaagtatgaaaataaaaataaagccacactaatcaattttctgaatgcttattagggtttatttagttgcccctcctgacgcgaatgaacacaacacacactgacacagagcttgttcttcatcaacaatgcatgatgctggtcacattttgtttgcacaaaagaaattattgataatctgagtatttgcaacttgctacttatgtccatgtatacaattatatagtctcctctggttccgaatgtaagttgtataggacatctaggcagtctccagtgaggtgacttgcaaaaaaaatttgttaaagaaatattttanacaggaagactatttttggtcatcgaactaccgcaatagtgcttgagtctgattttggttgtcaaacttc

SEQ ID NO: 135612 - DNA, 262 bp, Zea mays
  Clone ID: MRT4577_55157C.1
ggggagaaattttatgaaaaaaaaataaccggaggcttttttttaacaattgatggggaggtgggattgttcaaggggcatggtgaaaaggttctggaacaaaacaatctccttgtgcgccaaaaaaaaatgtctggaggaattgtatttccacagaaaaaaaaaaatggaagccgttgggctggtctgttgcctaaaaaaagacgttgggcaaaaaacccgtgagtaaagtgttttattcaccctacatggggcccagggg

SEQ ID NO: 135613 - DNA, 429 bp, Zea mays
  Clone ID: MRT4577_55158C.1
ggggttatacacagaaaaagttcctttatatgaaacacttcatggactttaggacaaccccctaagaaattttactaaacaaaaaaaaaaaaaaccctcggagaaaaaaaaaagcgggggaaaaaaaaaaaaatttaatgaatttttccccaccccccccaaaagttttttttaaaaaaaaaaaaggggggggcccccaaaaaaaaaaaaaaaaacttttttttttcctaaagataaggcgccccaaaaaaaaggcggggggggggccaattttttgggaagtttaataaggaggggaaaaaaaaaccctttttctttttgggcacaggcgggcaaatttttttttttttttaaaacccaatttttgtggggccatcaaaaaggcccccgggttcttcccgattttgggcgcaaggaactttttaaaaa

SEQ ID NO: 135614 - DNA, 558 bp, Zea mays
  Clone ID: MRT4577_55159C.1
aaaaaatattcgaaaacagaggttatagttcacaatacaggcttgaaacggaacaaaaaaattacatgcacaggcagatttgagacatctcttactctgctgtgcttgcaagtagacgtgataattgccggtgctttattaattagctcaagagataaggtcatcctgcttgtgcgtcttgatgactacgggggaggtggggtacgccacgcaagtgagcacccagacaggggggatctggtcgctgtctaggtatctctgtgccgactggaccccagagccggagaccaccttgccggcgcatgaagagcaagaccccgatcggacgagtagggcaggccgatgccttcctcctcggtgtataacatgatgtatacgacactgggcacctgcagctacacctgcccctgcggcctgatgagctatacactgtaggtagactgcgcacgcatcctgatgctggcgccaccgccaccagtcatggccacggtagtgagcgctggcgcagcacacacggagaaggataaggcctgagcgctgcggctgttcaagacagag

SEQ ID NO: 135615 - DNA, 1908 bp, Zea mays
  Clone ID: MRT4577_5515C.1
accaaaggccaaacttaggagtataaactaaatatctcaagatcctttttacggccctaaggtgagcttccttaggatcggcttggaatcttgcacacatgcatacggaaagcattatatccggtcgtgaagcacataaatagagtaaagaacctatcatcgatcggtataccttttgatctacggatttacctcccgtgtcgaggtcgagatgcccattagttcccatgggtgtcttgatgggcttggcatccttcatcccaaacttgtttagaatgtcttgaatatacttcgtttggataatgaaggtgccttcttggagttgcttcacttgaaatcctaagaagtacttcaactcccccatcatagacatctcgaatttttgtgtcatgatcctactaaactcttcacatgtagattcgttagtagacccaaatatgatatcatcaacataaatttggcatacaaacaaataattttcaagtgttttagtaaagagtgtatgtggcagaacctcccaagttattgggcccacatgcacctgtccttgtcccaaagacctcaaacggctatgcatgtgcaccagataacttaacaggatctgtcgcgattgccccaaggacatcagataaaccacttataaccagaaccgcggattaagtaatacaaatcacacacaccaatatttttgcagcggaaaatcttactaccaaattttacaagttacaaaaattttatattattttatcggagtgattacaaaagtataagtttgaaatatatgctagctcaaatgaccatcctcaataagaaatataagggagttacttagacttataagaaggccgagcccaccggcacttaacaccatcacagcagcacaaggttagaacctgagtaacactaggttagtgttgttagacggcgatcctttggcgagcagcttttgttctgccactcgttcagtctatccatcttcaggttcatcattcgcatcacctcgcgaatcagtctgcgcttggggtcgacttggctcgggttctccgcatcacgtggttaattcacataccgcgactaagctgatctcggattttgcaaggaccatgactaccaccattttattcatttcaccggccgatgtactggagcttccttttcctcaaaatcctggggctcgacccgaacacaaaacgcgcacgacacgcaggagctgacacggttgtagccgagaaacaacgaagaaaattggcgaggatgaggatagcgaacgatgacagtgcagcacacacggcatggcgtgctgcagcgattgagtgtcgaggcgaggtcagaaaagcgacggcggcatccggcgaggcctgagctggaaaccgggcgagggagaaggagctcgcagggataccaaggcgagggagcagcacgccggggaggccgagcagggagcatgtgcggcggcgtccggcgagctcgtgcatagaggcggccatgggagttgagacgcgacagaagatgaaggagaggccctcggcgagcgccaaggaacaggggatggaggagctggaggaggtccagacgggatggccgtgcgccattcccaagcggcggtgctcggcaggcgctgaagacgaacaggaacaacacggcggccggggtacaagcgagctgtaggccgagcgagctccagatacgagcatgaagggacggagtcgtgatgctggagagagacaaccagaggagtgatggccggagccgtacgcggagctcacagccagctccatggaagatgaagacagcgtgtcttccgagacctggcaacaccagaaggacaactcacgtggctgtgggtgtcaactcctggaggctatcatgatggggataagcacatagtacagggacgttacgtcccgg

SEQ ID NO: 135616 - DNA, 313 bp, Zea mays
  Clone ID: MRT4577_55160C.1
gaaaactataaacaccaacctgtttacgaattacctgccgccggtaattcttagagcgctagagcatgggtccggagcagacggagcctgccagttacctctgcggaaattggggagataagtacactctcaaacccagggatgtcatccagaggcgaaaatgtcggtacagcatcctgtacaagtagccgacgcgtcggattggcctatctgaagcgcgctcaagagtgaggacaaaggaaaacactgaagaaggtacatctattactacaacatcaccgatgtaaacaatctgttaggggaaatgaaaatg

SEQ ID NO: 135617 - DNA, 285 bp, Zea mays
  Clone ID: MRT4577_55161C.1
aaaaaaaataataaaacaaataaaaaaaaactaaaaagcgaaaaaaaaaaaaaaaaataagggaaaaatagtacgcaaaggcgaaagatgaattaaacaaagaaaacaacggataaacttggggccgccggttttggatgttccaactttttgtcctgctcttttaccggtaatactttttttttggggaagccgatacagattgagtccggccggattatacaagagcgcctttggtaaagctcccgcattcccaaatttattaccttgggaagtttccccttt

SEQ ID NO: 135618 - DNA, 701 bp, Zea mays
  Clone ID: MRT4577_55162C.1
gccggggaaatctttttggtaaatagttttatacggcataccacactagagccgccgccgccgccgccgccgtttcgcgcaccgtaccctagccgtcgtcagcggcggcttcgagctcctccagccatgacgttcaagcggaggaatggcggacgcaacaagcacgggcgcggccacgtcaagtacatccgctgctccaactgcgccaagtgctgccccaaggataaggctatcaaacggttcttggtgaggaacattgttgagcaggctgccgtgagagatgtgcaggaggcctgtgtacatgatggatatgttctacccaaattgtatgcaaaggttcatcactgtgtctcgtgcgcaatccatgcgcacattgtccgtgtccgctctcgtgagaacaggaggaaccgtgagcccccgcagcgcttcagacgccgggatgatggcccaaggcctggtcagggcccgccgcgcccaggcggtgcagctcctgcagctgcacctgctgctgctcctcgtacctaagttctggaattagtttcggggcttagttttgtgaaacattacctgttttgagaaaccattgttactgtatccccttgatgtcaaactttttagcacaatttgtggttctgaaaaggttggttgaatgttgcagctaatgtttgaatgtactcaaaaaaaaaaaaaaaaaagcggcc

SEQ ID NO: 135619 - DNA, 1035 bp, Zea mays
  Clone ID: MRT4577_55163C.1
ggtaccccttcgagtgcccggcccgggaaatataataaaaacggcataccacactagagccgccgccgccgccgccgatgccgtttcgcgcaccgtaccctagccctcgtcagcggcggcttcgagctcctccagccatgacgttcaagcggaggaatggcggacgcaacaagcacgggcgcggccacgtcaagtacatccgctgctccaactgcgccaagtgctgccccaaggataaggctatcaagcggttcttggtgaggaacattgttgagcaggctgctgtgagagatgtgcaggaggcctgtgtacatgatggatatgttctacccaaattgtatgcaaaggttcatcactgtgtctcatgcgcaatccatgcgcacattgtccgtgtccgctctcgtgagaacaggaggaaccgtgagcccccgcagcgcttcagacgccgggatgatggcccaaggcctggtcagggcccgccgcgcccaggcggtgcagctcctgcagctgcacctgctgctgctcctcgtacctaagttctggaattagtttcggggcttagttttgtgaaacattacctgttttgagaaaccattgttactgtatccccttgatgtcaaactttttagtacaatttgtggttctgaaaaggttggttgaatgttgcaaaaaaaaaaaaaaaaaaaaaaaaaaaaaaaaaaaaaaaaaaaaaaaaaaaaaaaaaaaaaaaaaaaaaaaaaaccaaaaaaaaaaaaaaaaaaaaaaaaaggttggccctgggccggaacccccttagggggaatttttgaaaatttccataacatggggggccgttcaacattgctttaaagggccccatttccccttataggggggggattaaaaatcaacgggccggggtttaaaaacgtggggacgggaaaaccccgggggtacccaaattaaatcgcttggaagaaaatccccttttcccaagtggggtaattaccaaaaaaggcccgacccgatcgcctttccaaaaatttgcccaccctt

SEQ ID NO: 135620 - DNA, 698 bp, Zea mays
  Clone ID: MRT4577_55164C.1
cattgggtacctcgaggccgggccgggacggcataccacactagagccgccgccgccgccgtttcgcgcaccgtaccctagccctcgtcagcggcggcttcgagctcatccagccatgacgttcaagcggaggaatggcggacgcaacaagcacgggcgcggccacgtcaagtacatccgctgctccaactgcgccaagtgctgccccaaggataaggctatcaagcggttcttggtgaggaacattgttgagcaggctgccgtgagagatgtgcaggaggcctgtgtacatgatggatatgttctacccaaattgtatgcaaaggttcatcactgtgtctcatgtgcaatccatgcgcacattgtccgggtccgctctcgtgagaacaggaggaaccgtgagcccccgcagcgcttcagacgccgggatgatggcccaaggcctggtcagggcccgccgcgcccaggcggtgcagctcctgcagctgcagctgctgctgctcctcgtacctaagttctggaattagtttcggggcttagttttgtgaaacattacctgttttgagaaaccattgttactgtatccccttgatgtcaaactttttagcacaatttgtggttctgaaaaggttggttgaatgttgcagctaatggttgaatgtaaaaaaaaaaaaaaaaaaaaaaaaaaaaaagcggcc

SEQ ID NO: 135621 - DNA, 3113 bp, Zea mays
  Clone ID: MRT4577_55165C.1
atggtcttcttcgagggcccggcgctggcgttcgacctggaggatctgctccgcgcctccgccgaggtcctcggcaagggcgcgttcgggacggcgtaccgggccgtgctggaggacgccaccacggtcgtcgtcaagcggctcagcaaggaggtgagcgccgggcgccgcgacttcgagcagcagatggagctggttggccggattcgccatcgcaacgtcgtcgagctccgcgcctactactactccaaggacgagaagctgcttgtgtacgattactacgccagcggaagtgtatccaacatgcttcatggtatgtatgatcctttgaccatctcctcctctgtctcttcttcgtcctgtcactttgatcgttttcagtgctcaaattggaattacgggcttcataactacaagcgtcggcctgtttgtgcgttacaattttagcaatcatgatagcgagacagacgtggcgattttgaaaggaaaggaagaaactttgtgacgtctgattgatatcatggtgacctggagatgcaatgttgcttgttgtttggaaagatgctcatgggttgatatgctaactggttgtttagtgcaagcaacaacctttgcttggcttttatcggattgctataggtaggagtttaggattcggggtaaataaaggcaatgcaggacctgaaggctactaaatattggaaaaggcccttgtttcttgtttgtgccctgtttcttgtctagcttcacattttaatctcttctgatggctgtcacactaggcttttcaaccgatatatatttgaaaacttctcatctcccggcttcctatctttacgccataccagtcaatatctgatcgcttttctgctttgacaaaaaaaaatcctcatgtggagtaacagactggtgagcatgccacttttgacctcttcttaaggagaagatgaactttagcgctctgtgcatgtctcaccggaagtccggaagtagcatgtgctgcccatttcttgcttatttttttgtttgctaacttgctgtcatgtattgaatctcatgcgtttcatttaagttgtctagctgcttggtgtgatgtgcttattagctgtcttcacttgcgacgcgtcttcaaacattatgccgtttcaattcaagttcacatggcatgcttgatgtgtggtggtcactggtcagctctgatcacatcagtgccgtcttagcagcaagataatctgtttcccatctcatcctatgaggttaagcgggccatgctaacaaaagcatacttaaatcatatgatgtcatggaatttgaatagcaaactgcatagttagttaactactccctccatttctttttatttgtcgctggatagtgcaaaattacactatctagtgacaaataaaaagaaacggagggagtactaattaatttgtagccatcagccatgtgacgttgtgaatatgctaaataaaggtaaaatagggagctataagtggtggtaggtatagagaaatggctggcggttgtgaaagagaactgcatgacaggtccattagtaagcagacagtagttgagtgttgtcacctagtagtaccataaagtttgaagtcttttcagattgaattggtaaaacccttggatctgttagcgctggtgttcactgtcatggccccgctcctccatttcagtgtcagaatctggaccataggaggaccgccgccagatttttcggtactatgcatcagctatctgcattcatgttaactctgaatctgtctgtaccatgatgtagcattacatctaaacagtactacaagcttgcactgtgcagggaacacctggttataaatgtttttttggccatacagagaacaaatttggtattaattgtgctgtggtctgatggttaatatctgacgttctaatctaaactcttcacgtgatcgaatgaagtagacatactgcctgtgctcctttcagggaagaggggagaggagcgaacgccattggactgggaaaccaggtggaagatcgctctgggtgcagcaagaggagtggcacacgtccacgccgagaacaacggcagatttgtccacggcaacatcaaggcctccaacgtgttcgtcaacagggacggatacggctgcatctcggacctcggcctggcacagctggcgaacccgatcgcggcgaggtcccgctccctcgggtactgcgcgccggaggtcgccgacacgaggaaggcgtcgcaggcttcagacgtgtacagcctcggcgtcctcgtgctggagctgctcacggggaggtcgcccgtccaggtatccggcgggcgcggcagcgaggtcgtccacctcgtgaggtgggtgcagtcggtcgtccgcgaggagtggaccgccgaggtgttcgacggcgcgctgctgcgggtccctgacatcgaggaggagatggtggagatgctccagatcgcgatggcgtgcgtgtccaggacccccgaccggcggcccaaggtggcggacgtggtcaggacggtcgaggaggtgcgccggagcggcaccggcacacggccgccctccccgccggccaccgccgcggatgcagaccagagtgagatggagagctcctcctcggcggcggcggcggcggcgcagtgacggcgggagttgatgcttcgcagccgcatctggtgatccgttcgtcgccctttgtgttgtgctcttccaaatccacggccattccattcttttggcgggtgctgtaccattccattctttttttctctctctcttgtgttaagaagattccgtgttacgaaattgtaacacagtgtcacgtggagacggtggtccgtccgatgctcatggcagcagttgctcactccttgccgatgagatgagagtgtcagcgcatgaagacaagcaattaacattcggtgctgctttgctctgttgcttcttcagcttcggatcagatgcccttgagggcatggcaatggtttgcatcgtttgagtactcaacttgggcttgttcggttagctcttaatctacgtgtattgagtgagattagatgagtttgaatcccaaataagttaaaattattcttaattttttgg

SEQ ID NO: 135622 - DNA, 278 bp, Zea mays
  Clone ID: MRT4577_55166C.1
gcttcccttcctcacctcgctagactagcgacccctggtttaagccgccgtagaagcccttctcggtgtaactattaattgccttgcacgttcccagatgggtggcccaaacccttgataaaatctgaagacgcgtcccagcaacgcaaatttgtcctttggctagctctgagaaacacgtgctggactgttgttactctacagaagagggacctgcaggtacggctagcaaacttgatgagatcggtcggccccggtccttttgctttatggtaacc

SEQ ID NO: 135623 - DNA, 456 bp, Zea mays
  Clone ID: MRT4577_55167C.1
ttaacttttggaaaatcaaaaattcatggttttggggtctttgccaaggttgcccacaaggccggaaatttgatggttgaatacttaggggaaattgttaaaccaccgttttcaaacactaaaaagcggcaaatttacaactcattagtgggtgctgggacatatttgttcaggataaataataaacgtgttttaaatgccattcgggttgaaagtttagcccgtttgatcaataattaatgcaagcctaattgcttttaacgtgccataactatttttggaaataaacacataatcatttttgcaaaacgggacataaatccatgggaaaagctgacatataattataggtttttttcaagtgataaacaacttccatgtttttggggattccccaaatgccggggagtatttaatgattttaaggcaaagaaacatccggttaaaatacaagtt

SEQ ID NO: 135624 - DNA, 472 bp, Zea mays
  Clone ID: MRT4577_55168C.1
tggagatgcaatgttgcttgttgtttggaaagatgctcatgggttgatatgctaactggttgtttagtgcaagcaacaacctttgcttggcttttatcggattgctataggtaggagtttaggattcggggtaaataaaggcaatgcaggaccagaaggctactaaatattggaaaaggcccttgtttgtgccctgtttcttgtctagcttcacattttagtgcccgttcggttaactaggattaggacctagaactattccagctgatcagttttaatataaataaaactaacattttaggtgaaacagttccagaagatccgtttcgaacaaaacgaacaagcccttaatctcttctgatggctgtcacactagccttttcaaccgatatatatttgaaaacttctcatctcccggcttcctatctttacgccataccagtcaatatctgatcgcttttctgctttgacc

SEQ ID NO: 135625 - DNA, 438 bp, Zea mays
  Clone ID: MRT4577_55169C.1
gcttgtaacgataattgccccaagtcattttctaccctttcgcgtggttgtggtagagaacggatggacagcaatagctgcctggtggactatgtatgtatctgtgctcgcacccacaggaagccgcagccagatccgggtgttgacaccggcaatgcgctcagagcgtgggacagggcaccagggcgaggatggacccggcacgatccagcccggaggcagactcacgcggggcggggcgcacacgtccgggcgcacgcagttgctaactggcatcttcccaatgcaagggcatggtgccgtagaccaaatgatgttggggaacgcagatctaccagccttaccagcgcgtgtggctggggacttcacgcgcgatgtgctggccaagcgttcctacaaaatagcttctccaggtttgtggggccgctgaacacctac

SEQ ID NO: 135626 - DNA, 290 bp, Zea mays
  Clone ID: MRT4577_5516C.1
aagagaaattgggaatcgaaaacattgggccacctttttttttccggttcttctttattttgtcccttttacaaatttacagtcttgtacctgatggatggttggatgaaccagcgtttgagcacttgacgaatgccttgttccttaacgaaccaaaatggcatgcggttgctggtgctttccctggccgggcagccaggccaaccgccttaacgcgtgttttctttgtttctgaagcaaatgcagccggtactgcctttgtccctgttgggtcacgcagatgagccttt

SEQ ID NO: 135627 - DNA, 255 bp, Zea mays
  Clone ID: MRT4577_55170C.1
gagacacgtcagtggactcgtgcatgacttcgtttgctatggccatgacaccattcgggagcgagtgcaacatgagccttgcagcttatctacagtctaggcctttggctcgcgtgcggactgctggtcttggccctagcacatggccactaccgacgtgcaggacagcacgcagctgtcgaccgagagctactacgacggcggctagccccgcctgccttctcagcatcaggaccggaggctggacgggcgggc

SEQ ID NO: 135628 - DNA, 976 bp, Zea mays
  Clone ID: MRT4577_55171C.1
aagaattgctccccaaacatcgaaacgtactccaagatgattaaagcctttttgagaggtcgcagggtagctgatgcgctccaaatgtttgatgacatgttgattcaaggagttctgccaaatactgggatgataacatcatttatcaatccactgtgtacatttggaccgcctcatgctgctttgatgatctacaaaaagagtaggaaggctggttgtgtaatatccttgaaagcttataagcttttgctggaaagactcgctaaatttgggaagagtggaatcgttttggacatttgggaagagatgcaggagtgtggatatcaacctgataaagagatttacgaatttattgtaaatgggctttgcaatgtgggtaaggtcgatgctgctgtgtctgtggtggaggaatcacttcggaatggcttctgtcttgggagagttgtttacagcaaactgaacaacaagctgttggaaatggacaaagttgagaccgcatataatttgttcaagaaagtcaaacatgcacgtgcacttacgaattcacgcaattattgccgtgctaatggttggcatttttgagcataaccagtttgtctgcagaagagccatggagtccattccgcatcggggaacgctgtttacgtgcacccaggtcgtcctccaaccaacatctagcaattcaagtgggcagaacggcgatagaggatgtgagctacaacacttgaaggtcaaagtgacatctggtgatgatgctcaatgtaatcttctatatggacactttgtacgcatgaggaaaaattatgctgcactaatattcaagagagaaagctcgtggatgccagtaggtcttttgtacatactgcttgctcaacacatgtcatgtcgaggctgcccttttgtgtattgcttggtaaatgctgcgaaacgttcctgaatatatggggtaattgcaatgtcttaatcctacctttcc

SEQ ID NO: 135629 - DNA, 1207 bp, Zea mays
  Clone ID: MRT4577_55172C.1
cagagctagtcttagttgccaggcttcaacataagaaccttgtgaggctcataggcgtttgcttggaagaagacgagaaactacttgtgtatgaatacatgccaaacaggagcctcgacaccattctttttgattctcagaaaagcaaagagctggattggtggaagagactcgagattgtgagcggagttgcacggggcctgcaatatctccacgaggagtctcagctgaagatagtccatcgagaccttaaaccaagcaacgtgctccttgactctgcttacaccccgaagatatcagattttggcctagcaaaactcttccacatggatcagagccaaggtgccactagccatattgctggaacatatggatacatggcaccagaatacgccatgcacgggcaatactcggtcaagtcggatgtcttcagttttggtgttttgatcctggagatggtcacagggaggaaaaacagtaactcggaccaatcagttgacctcttaagcctagtatgggagcactggagctcaggaacaatccaagagctgctggacccattcctgatgagccaccgagctcctccagaccagatggcgaagcttgtcaacatcgggctactatgcgttcaggacagccctgcagacaggccgctgatgtcgtctgtaaacgttatgctcagcagcgacaccatctcactacaggccccgtcaaggccaacattttgcattcaggagacggaagaccattcgcgcccctactccgatgcgtataagagggcgctgaagctgcagtcgtccactgatagggcagcaatgtcccgaacgaggttacgctcacggagcttgaaccaagataagcatgcatgaacgccgacaagaatatacatatggccgaaagatatatatatatatatatatatatatatatatatatatatatatatatatatatatatatatatatatatatatatatatactgttttcaagaatctcaagtcgtattagataatgtttttttttctgaatgaactggaggggtaccccgtacggataataattttatttgaatgaaaaggacttgtcatagaatcacataaacgaaaagaaagaaaaagggagtctgtaaaaaaaatgtgaaaggcatctatgcagacttggggatgtctttgaagatgaggttgctccttaggcaccaaatgctc

SEQ ID NO: 135630 - DNA, 302 bp, Zea mays
  Clone ID: MRT4577_55173C.1
acaaacaatatttttaatttgggacctgtttaaattttctttaaaaaacagcatcacccccttatgtactacaacaagccactacttccatcccatccaaatttttccttacgcacacgttacacacaacagatacaggcaccataccaaaaatcaaacaacaacataccccccccaattattatcacacccttataaacacactttctcacctgaccctactatcctcaccaaaccaaaacctttgtattccctacatatggtacaccttatcagagacctctatagcttaatacccgctg

SEQ ID NO: 135631 - DNA, 426 bp, Zea mays
  Clone ID: MRT4577_55174C.1
gggccacaaaaacatgctgggggttattagttttgcacacccttggcacaacagaagaaaaaattgggggaataccccctcccaatcccagaggtgggataaatgcctcaactaatccttaaaccccctgagggttttggttacgggtgggaaacctccccccaccatgagggtgaccgggctgacctacctccccttgtgggtggccagggaaaacaccccctgggggaaatcctcgggcatggggttgacccccttgagggtggcctccccccccacaaaggccaagaagtccttgagcgcgttatttgcgcgcgccccctgggggaggggggggatccacagggccgggggccccggatagggggacacccagttgacccccaccccggggggggccaactcccgggggacccttttggggag

SEQ ID NO: 135632 - DNA, 202 bp, Zea mays
  unsure (1)..(202): unsure at all n locations
  Clone ID: MRT4577_55175C.1
ccttgttgcctactttgagctgcatttgtttatgttgttnnctgttctgcgtgcggttgactctagttgtagcttgtactagccagttctgctgtagatgcagttactggttgtctcttcctagggttttatccttttgtccatgctgttggcgctgatcttgtcctgtttttgtcgtctctaccagtttcagctgttcatt

SEQ ID NO: 135633 - DNA, 520 bp, Zea mays
  Clone ID: MRT4577_55176C.1
cctcgaggccggccgggccaactctcgctaattccttccgcggcgatcccgagcaagaaacccagcagcgcgacggatctcgtctagcggcgtgcgccactatgatgagcaggagctcgcctccgccgccctcgcttcccgccggcagtggaggcttcttcacgagatacacaaagctgcgccaggtgctcgccgatcatattgctcattgtgcacctggaaatccagttgattccgtccgccgacacctatctcgcgcttatccctggaaaaaccatcccttttgcttgatagaccagataactgccgtgctatggccagtgcaacaattccagtcgatgatgagtcagatatcatgtgaccattcgttatattgtgaataatgtgttagaacatctactgggactcaacagagtagcacagctcattgcaagtgtatgccgatctactactgatagtagtaataatgactgatagtgtgatgtgtatgaaactcaacaagagatctgcctctatactc

SEQ ID NO: 135634 - DNA, 852 bp, Zea mays
  Clone ID: MRT4577_55177C.1
gccggccgggtcgggagataagctgcaagctgcttatcttctcccgtcccataggttgctaggctcggccgtgtagagcagcaagagcacgccgcgccaagcaacaaagagggaccccgcttccatggaggtggtgggcggcgtgtcgctgaggccgtcgccagcgccggcgcgtatccggactaccctgccacccgtcgacgtaggcggacgcttccttctccgccgggtcgcggggcgccagccggcgaggcgcgcgctggtcgtggaggcccggggcggcaggggctggtcggagcggcagatgcagcagcagcgccgcgcgccgctgctgccgaaaatcgaggacgacggcaacccgcgattcgtcatcttcatccgcaccgccaatgtctacttctggtacccgctcaacatcatcacgggcggtacgacggcgaagatcatgctcgccgccaaggacaacttcctcggcaagtacatctacaaggacacgctcgccaggaacctcgccgccgtcatttacaaagagaaagggaacataaggtctgctctgacgacaagcaatgtgatcgaacttccaaagaaggacgagctcaaaaccgtggttgacaaggtgaaggacttctttggcgacgtgactgccggcgccaaagaatcctttgcgcagataacagggtctggctgtcagcaaggaggaagaggaagcagatagcaaagagaagttccgctccaagagacgaaagaagcagcggaagtcgaaggagggcccctcagacgagaaatgattcagtcagtcacacaagtaaagcaccggctgtagtttcgctatcgatgtccgagaactgttct

SEQ ID NO: 135635 - DNA, 1103 bp, Zea mays
  unsure (1)..(1103): unsure at all n locations
  Clone ID: MRT4577_55178C.1
gntaaagctgcaagctgcttatcttctcccgtcccataggttgctaggctcggccgtgtagagcagcaagagcacgccgcgccaagcaacaaagagggaccccgcttccatggaggtggtgggcggcgtgtcgctgaggccgtcgccagcgccggcgcgtatccggactaccctgccacccgtcgacgtaggcggacgcttccttctccgccgggtcgcggggcgccagccggcgaggcgcgcgctggtcgtggaggcccggggcggcaggggctggtcggagcggcagatgcagcagcagcgccgcgcgccgctgctgccgaaaatcgaggacgacggcaacccgcgattcgtcatcttcatccgcaccgccaatgtctacttctggtacccgctcaacatcatcacgggcggtacgacggcgaagatcatgctcgccgccaaggacaacttcctcggcaagtacatctacaaggacacgctcgccaggaacctcgccgccgtcatttacaaagacgaggatgagatcatagacacagcgaaagagcagtaccgtgtgctcaagaccgaaaatgagtttcggtatggctacaaagttgtggagaaagggaacataaggtctgctctgacgacaagcaatgtgatcgaacttccaaagaaggacgagctcaaaaccgtggttgacaaggtgaaggacttctttggcgacgtgactgccggcgccaaagaatcctttgcgcagataacagggtctgctgtcagcaaggaggaagaggaagcagatagcaaagagaagttccgctccaagagacgaaagaagcagcggaagtcgaaggagggcctcaagacggagaaatgattcagtcagtcacacaagtaaagcaccggctgtagtttcgctatcgatgtccgagaactgttctgtaatttctccagcttccttttttttgtttgttttgtaaaaagacgtcgtgtaacttcattgcgactaacgtgtgctatgccttctcactaaatctcacaaaatgtgaaggtactccctacgttctgaatcatgagtcgttttggatttgtctccaatgaaatggatggagtccaagtgt

SEQ ID NO: 135636 - DNA, 280 bp, Zea mays
  unsure (1)..(280): unsure at all n locations
  Clone ID: MRT4577_55179C.1
gcagttttggcgtgtaacttagaaggattgaacttctctgaacttactggacataacattttcagaatagttggacatctagcaaccgcgtcaaaatgtgtaagcaggagagaaatttctcattacagggatttagacttactattacataaaggctaactatgagcttgctcattaattctgataagatgtacctggtggatatctagctagtaatatattctggagcaacattttagctctattgatactctntctaatgctgatatgatcttgagta

SEQ ID NO: 135637 - DNA, 331 bp, Zea mays
  Clone ID: MRT4577_5517C.1
gcactatctataggaagtgccctgtgtttttttttctcattccttgctagtgtcactaagggggctactaacatcacaaagggtcttcaatcacattctccacttcattcttcatgccccaatatccttcttttattccacacctactggtataattttaaacaagtcctctaattaccaaacttttctacattttgaaatatcaaacatactaagctcttctttttcttcaatcattactatttcttggcaccactcttcttatttcatattttatcattcccaacttttctacctttattcaccaacatcaaactttcttttttctatt

SEQ ID NO: 135638 - DNA, 762 bp, Zea mays
  Clone ID: MRT4577_55180C.1
cctcgagccggcggggtgctcttctgaggggccgcttatattccgcttgagattaaccgaccggaccgctgactgcgagccgcagctgctcctgcttccgatccgaacttctctctaccgccggttgttcgcgagcgattctgatataccatcctcatcaccacttgtgatgggtgcaaaccagaacaaggatgactgctcgctgcccaatgccgatatcaatcttgtctcttggctgcgacacttgcggtatggaaacagtgcaactgcaaacaccatccttggatggtaagcatttgtatcataatcttcacattctgctgttctaatacttgtcaactggctagcactaccctgatgtacggacggaccatcaatgttattgattcaccacggttattggatatgagcattgcatcagataatgcttgcaaaaatactgtcaaaatggatgaacatggctatagatggcatacgagccgacttaacggatattagagacacgtcttggttttctctagaggacgccagcacaattgagactattaagcccttttttggagacaagattgttgaccagcatggttttaagtctcacttatgactaactatctggtgaatactaatttgaagaacatgctcaatgacggggcagaatatttgcgcaatgctgatgcgctatgccagaacacatgcgtcgtcttcttatacaggaccatcgaccgaacgctcctagagcaccaacttgagaacttgctctat

SEQ ID NO: 135639 - DNA, 1656 bp, Zea mays
  Clone ID: MRT4577_55181C.1
atgtcgggagatcatgccaagagggagatcgtgaccgacggcaacaagtccgcaagctcggagagaacccattcgagggagtccgaccacaagcataaggaggaatcctcttcctccatcaagtcacaacggagaggtgacaagaagaagaagatgaagaaagtggtctactacgagactgactcatcgtcaccctccacctccggctccgactcgtcgtccactacttctaagcgccatgagcgcaagaagtatagtaagatgtccctccgctactctcgcatctctaagcgcactccattactttctgttcccttaggcaaaccaccatcctttgatgtgcgcaacctcgggagcaccaaatgggatgaccatgaaatggtcaaggttattcttagatcacttgtatttcgtaatcctactcaagttcaattaatacatggtgatcctagatacaagctaatgtctcccaaggaggttataggaaagtttgtgagctttgaattgatgatcaaaggctccaaacaaatcatcaacttggagcaaggcggcacctccacacccgaggtgcaacccgtcgcattcaaagcgacgggggagaagaaagaagagtctacatcaagtaggctccccatcgacgcctccaagcttgacaacgaggaaatggcgctcatcatcaagagcttttgccaaatcctcaaggaaaggaaggggaaagattacaagccccgttccaaaaaggtgtgctacaagtgtggtaagtctggtcattttattgcaaaatgtcctttttctagtgacaggagcgacgacaagagagggaagaaaaaggagaagaagagatattacaagaagaagggcggtgatgcccacgtgtgtcaagaatgggactccgacgtgggctccaccgactcctccgacgaggatgccgccaacatcgccgtcaacaaaggtctcctcttccccaatgtcggccacaagtgcctcatggcaaaggacggcaaaaagaagaaggttgaaagattaaatgcttgtattgattcaattgtcaatcttaaaaatgataatgctagtttaattgctaagattgataaattgaatgaatcaatttctagccttaaaattgagagtgatagtttaatttccaaggctagagatttaaatgtttgcaacgattctatttcctgtcttagaaatgaaaatgctacattacatgctaagatagaagaattaaaatcttgcaaaccctctacatctacagttactcatgtctctatttgtactagatgtagagatattaatgttgatgctattcatgatcacctagctttaattaaagaacaaaatgatcatatagctcaattaactactaaaatcaatgagcatgagatacaaaatgaaaaatttaaatttgctagaagcatgctctataatgggagacgccctggcatcaaggatggcattggtttccaacagggaagcaatgtcaaacttaatgcccccacaagattgtctaattatgtaaagggcaaggctatcatggctcaggataatgaaggttacattttatatcctgatggttatcctgagcacaagattaggagaattcatgctaggaagtctcattctgtttcccatcatgattttatgtactaa

SEQ ID NO: 135640 - DNA, 254 bp, Zea mays
  Clone ID: MRT4577_55182C.1
ctcaagcacaagcaggaatgaattataatctgggagatcaaccacatcatttccttcctcagtctggtggaccaaacccccaaaaaagaaaaatgcagtttccacttcccctcggcaacacaggaccaaatcatttttataaaaccttaacgacgacaacaaacaacgaccaatcccaccccatgacaactctacttaacttgagaggttttctcccacccgaaccaaatttgaaaacggcggacggccacctt

SEQ ID NO: 135641 - DNA, 394 bp, Zea mays
  unsure (1)..(394): unsure at all n locations
  Clone ID: MRT4577_55183C.1
aattcggcacgaggcgcgatcgattgattcggttcgagccgggcggaggaggagggagcgccgcggggcggggtgagcccaccagatccgactaccgcagcggctatgatgaagtcgctgctgccgcagagccagctgcggcgctcggcggcggcgcgcggcgcggtcgtcggcgggcggcgccgcgggggcagacggggctatgtccgacggcggcggcgcggggccgcgggcgcccgcctcctccaccttctggttcctgctccacgcgctctgctgcctcatctcgctcttcctcggcttccgcttctcgcgtctcctcttcttcctgctctntctccccnccgcgctctaccgctccngcncctcctcctcctcggccgcggtccttcgc

SEQ ID NO: 135642 - DNA, 2033 bp, Zea mays
  Clone ID: MRT4577_55184C.1
ctcgaggccggcacgcacttttaccgcccatactagcaaggaatggccggcgccgtctccgtctccgctcaccggcggcaatggcggtacacgtgggaagccctaacccatcttcccctcctccgcctctacctcttaccccgccccgcgctgtccttccgcatcccctcggacctccgcgccgaccttcgactccagggctctctcctccacctgtccttttcgctccccggggacggggctgccgtcgcgctcagggtccccgtcccgagggtgctcgtagacccttccgcccccgtagagtgccgcgccgccgccgcgggggaccacctcgagctccgcctcgcgctcgtcctgcccgtcgaccaccctgtcgtcgccgccgcgttccctccacccgccggtgcggagcctccggcttctctagcgctgcgcgatgatttgaagggtttatctactggagacgttcacttgtattgcaaaaattgttcgtcaaggttgacaaaacagccactaaggaaaatcatggaaatgccatctgtagattgggtagatgtgtctgacaattggtttggtggatgttgcacctcatttggtggtgcaggcgagaaacttgtatctcagtttattagggcatatggtcgtttagaaggaacaagtctactggatgcaacttccattactgtagaaacagacgatcttgaaacagatttagtgtctcaggtagcttgttcagcacttagtagacattttgttgctataaaagaagatatatttaatgttagtgtagaaaaagatcataccactgggaagataaagttgaagaattcagaagagcaagcaaatatcacagctactcatgcacaaccacctattattttggaagaggggcctagtgttagttgtagtgaaacaaacggagtcactcagactaatcagcctggcatttctcagacagaagctgatactgatgcgtactttgagaagtctgaaaatgactgttgtgttgagaaagtggggaaatctaagaaagaggttgatttgttgctggtagatccatgccgttgctgttgtgtcaatggatacagtgagaaagctgaagataacccttcacagttgtccttggtcaatgagaaaaagcagaatatgttggagattaaaagagattacaaattaacaaaaactatttctcttggtagtagcttcattgttaaagcatctaaccttttgaatgattttgagtgggttgaacttctctgtggtcaatgttcatcacctcttggctcatacccttctcagtgttcgcttggtccagctgatggccgcctacgactcttcaagtgctacacatctacagaaattcctgtaacagggtctcatgatgtgtttagggggcatacattggaaagagtttttgtgaatctgctgcttgaagttgcagaagacgaaatatcttttcgcacattagtcagagatttgaaaaccaaaaggcccatgctgcaattagttcttcttagttcaaaagcatggttatcttctggttgctgttatgaaaatgatatcgatggttcacatggaacaacagatctgcagccaagtgttaaactcttgtattctgattatagcaatgcttcagaagcagatttaaggatagtagaagcgtgggcatccaaatatcgggctgaagagctgtacatgatgaagcgtcagatagacgaacttactgaatgcctaagctcaggaatggacaactttccagtttcttgttcttcccttgaagggatgcggctctcatcgcttaggcgctgacttcagtatatgacatggaaattgtgcctggactgatcatatttttgtactgatcaaaggagtctacagcatagaatcctgatgggcatacatgatcatcctcggtgtcttttgagctttcagcaagctccctaataatttcttatttaaaatttaagatgccatgccttgtcctctgctctgaaaagacttggtggcatccgaaatggagcaatggcttatcc

SEQ ID NO: 135643 - DNA, 300 bp, Zea mays
  Clone ID: MRT4577_55185C.1
cccacgcgtccgcgtacgcgtgggctgacgcttgggcagacgcgtagatacaatcgcgtgggttatattcatacgctcgtcaggatcaaggcgccgtatcctgcgtgtccgcgctcatatggatcaagatatcatcacccacaacttgtatcacgtcatgaattaattaaggccacatgcatacatgcatcatgcatgcatgcttaatctacattccattattaagcttttacaatgcatgcatgcatatattaattaattatcatcaattatcatgtacatacgagacctacttactac

SEQ ID NO: 135644 - DNA, 333 bp, Zea mays
  Clone ID: MRT4577_55186C.1
cctccgtgtccactctcgatcttcccttccccctcggcgccggtctccaaacccgctgtccgcgtttcgtaccgcttccggttccgggggcgggcgggcagcaccgtctcggctctcggatactatggcttccggcgaggggtgggaggcggcggtgcgggcggaggtggtcgccgctgcattgttggaccacctgcagatggtggagctcggagcctgttcaaaggttcacaatgcacagcctatggactgactactaccaacggacctgttctggaaggtgccgctgcacccaattggcgatcgacaacatattggcactgaaggaggtga

SEQ ID NO: 135645 - DNA, 478 bp, Zea mays
  Clone ID: MRT4577_55187C.1
gccctccctcgagttttttttttttttttttttttttttttttttttggtttctttttttttttttttttttttttttgttgggaatgaacaaaaagactgaaacacacctgttggtgggtggacacaaatgtgcaaaccacatgcaactttaacagacgctttttttcaaaaaggaacctttgttttccaaatttagcctacccccaggttattatatgggataaaggcccgcctagggtggtcaaaaagggcttgctgggggggatgccccccccggtgacccccgggttggaaaagggattggaccaaatcttgcgggacaaccccgggacggatcagatttttgggggccagggtggggctgaatttcgggaggaaaccctggatcggctttatccggcgcccgaattttgcaaacaccctgttaaacgtgggattctcctttccctagagaggagagattctccccctggtct

SEQ ID NO: 135646 - DNA, 267 bp, Zea mays
  Clone ID: MRT4577_55188C.1
caaggggaagggcaagcaaacagacgggtgcggtgacggcgacaacggcagcggcaagggagacaagggcaagggcaagggcaagggcgtgaagtccgctgacggactcggcactagcacctacgtaaaaacaaggaacgtattgcgtagaaagcatgggcagatcaatgaagcttataaaaagttgttggatggatggctgaataatggggacaaaataccttctgctgaatttagtaaggtagtacaaaaatatactgaatgccc

SEQ ID NO: 135647 - DNA, 339 bp, Zea mays
  unsure (1)..(339): unsure at all n locations
  Clone ID: MRT4577_55189C.1
ccgtccggaacgagaagcaatagcaaagcaccggaccggacgtgtacgggtctctgcacgccgggcccgtcgcgtcgcggtcncgcgcgcgccggacaccatcccgcggcaagtaatgagggccccccgggcccggcgccgcgtctctcgcccgcnncggcgcctggcgcgccctgctgctggcnncgcgacacttcctgnngcggccggccctggttgaccgacngnntcctcccttggggcgccgtnnacctgctgctncgccgcnntggccctggggtcgctgccnnngtgcctggccgnngcggtgacncnngcgccgnngcggggtccccgggt

SEQ ID NO: 135648 - DNA, 558 bp, Zea mays
  Clone ID: MRT4577_5518C.1
tttttttttttcttgatccggcatctgcagtcaggggctctcgatcactctgacgccgagagcgagttcctccggaaaatcgcgaagattgcaactgctgagattgttacctcaaaggaattcaatgttgattggcaaagagcagctgcttgtcttctggttgctataggttcacatgatccagacttgatgattttggaaatttttcttcacttctctggaccaacttctgctctgccagccatgttacaaatacttgcagattttgcgtcttctgaagctttgcagttcaccccacggttgaaggacgtgcttttgcgtgttttacctatcctatgaagtgtgcgagatggccaacggcctgtttttgcgaatgcattcaagtgttggtgccacgctgcatggcattacctgggagatgccccctctgagcttcctcttgataacgatgttatgtccttcatgaattcagcatttgagttacttataaaagtatggacaggctcacgtgatctaaaggtgatgtcgttcctctgtggaggctttgggtgaaatggt

SEQ ID NO: 135649 - DNA, 540 bp, Zea mays
  Clone ID: MRT4577_55190C.1
gtgtttttttttttttttttttttttttttttttggttttttttttttttttttttttttttttttttttttttttttttttttttgagcaaaaaaaagcccggttactggtccccccccccccaaacaagggggagcaacaaatgcgggggggggggggccgccaaaaacccggggaaaatattttaaacccaaacccggggggaacgaccccgggaacaaggggcacaacgggtttccccgccacaacccataatgggggccccaaacaaaaacccacccggggggaaagattttccaacccccaaaaaaccccccgggaggggggtaacggcatcatgggccccccggcccaagggcccgggtttagccccaaatcgaagatgcccatgggggccctggggggggaaagcccaacaggggggactttttaaaacccccgaacgagggcccccccctgggaaacccgcccaaatacaacaaggtgggcattcaagtcaggaattggggcccccgggaaaaacaaaaaaaaacccttgg

SEQ ID NO: 135650 - DNA, 672 bp, Zea mays
  unsure (1)..(672): unsure at all n locations
  Clone ID: MRT4577_55191C.1
cagttcgcagcagagttaccgcgaacccgtgcacttcaccttcaccttcaccatggattccgggcttgccttgccctcgccctcggcgcgccttaactcccccaaccacaatctcaagcatggcagaggtgaatgagcctttaaggagccaccattactggacctgtcccgttgcggaaacggacggcagcgcctcgtgccggtgtctctcgaccctcgcctacccgcccggctgcatagcctagacttcactcgaggagtgagtggacgtcagtgggtcgagctagccagctagtgagtgtgtgcggtgcgccactgccttgcggcgctgcggctctcgcgcggttccatggcgatctcccggctctccgtgctcgtcgccgccctggcctgctgctgcctcgtgcggctcgcccaatgcggcggcggcgggcagaactacacctccatgttcagcttcggcgactccctgaccgacaccggcaacctgctcgtgtccagcccgctctccttcaacatcgtcggccacttcccctacggcatgacctacttccaccgccccacgggacgctgctccgacggccgcctcgtcgtcgacttcctcgcgcaagcgttcgggctgccgctgctgcagccgtacctgtcgcgcgngaaggacgtccggcagggcgt

SEQ ID NO: 135651 - DNA, 475 bp, Zea mays
  Clone ID: MRT4577_55192C.1
acgcgtttcgtgatgcctgacctgtcacctgcgtggagtggaatactctgtgattaaagcagactggtcttccatggatgtcgcggacgtctttccgtggcatgcatgtttgcgttgattaaagcagaagcaaaatattctcacaaatcttcttcgtcttggccttgagctccgcgaggtgctcgctcttggttacgtccaagtaccagtcggcgaactggtcttgtggtacgcagttcttcgggttcgccgtgccgatgccaaggatagccgcggggccatcggctcgcagtcggtgacggatgccatgcagtacggtggccgaattggcacagcttcttgtggttgtggccatggcttttttcctgatctaaagcacctctgctttgcttgtcatttacgcatgcagtcgacgcttgtataatgtcgtatccattcacgcgaaaataatgcagatgctagcaacggccaacac

SEQ ID NO: 135652 - DNA, 951 bp, Zea mays
  unsure (1)..(951): unsure at all n locations
  Clone ID: MRT4577_55193C.1
agggtttcatgatcgaggctcccaccgagacagtggaagcttgaacgtcttagtttactgttccaagtgtcgcgaaaagagttttctgtactagctacatattttaaatgttattttgaattatgatgagaaaccaaggtatgcacccaagataattgatgtcctgttgttttcgtaaaaaaaaaaaaaaagggcggccgcccttttttttttgtaatgaccaaatatgtattgtagtatataattggtcgagtacaaacaacacacaagtcaagtttttatgagtgtgattggggatagtcaagtaacacactccctcgattttccaaaacaaacatatatatagtagagtaggcttacataacgcatccaattattcactttcattaggcttacaaataagagtcaaccttatatatactagtgatgatgtaatgtaactctagcaatgtccataccgtaccacacactccatgtatcgctttttaatttcatggcatgcacgcactcaacgtgcgcgcgccgagctcccgccacctctagagtccaccaccgatgccaccacccgaacctccgccacctccgaagccaccacctgcacctccgccaaaaccaccacccttgcctcctccaaagccaccacccgcacctccgccgaaaccacctcccttgccaccgccaaaaccaccacctttgcctcctccgaacccaccaccggcgcctccgccaaaaccacctcccttgccaccaccaaaaccgccacctttgcctcctccgaacccaccaccggcaccaccacctgcgcccccgcccccgccaatcccaccaccaaagcctccgcctttgcctcctccaaacccaccaccgacaccactgcctgcaccaccaccgagaccaccgccagctccagcaccaccgccagcaccgcctcccgcacctccaccaacaccn

SEQ ID NO: 135653 - DNA, 310 bp, Zea mays
  unsure (1)..(310): unsure at all n locations
  Clone ID: MRT4577_55194C.1
cccgccgaccgacgcgtacgcgtacgcctnntcttattctatctcangtagncctcacctctcatcctctccgtctctcgccccttcttctacatccaaagccgcncgtaaacagtaacccacatctcctttcctcgccgcggccacggcgccgactgagcgaggtcttcatctgcgcttcaccagcgaccattatccactacgtaggacatcatcccatcatgtccagcgcggcggtgaacgggctttcccgctccgaccgctgcatcatcccccacatcatcacctacccctttcaaacccttaacac

SEQ ID NO: 135654 - DNA, 559 bp, Zea mays
  unsure (1)..(559): unsure at all n locations
  Clone ID: MRT4577_55195C.1
gcaggtgcttttcttggtcgctttgcctcctcagattcctcatactccaaatgcttgttgcgctcagcccaccgttggatgacagctgccactgacgtaggcccatctcgtgatctgcgaggtcgcttcttcctgcttaattaacgaagtgaattttagtactggcgtcgcataaagcactgtatcgagaatgcaatgaagtacaaataagcaaaataacaaaaatgccccaacaggtatactatttcaaccagaaataaaccaataagaaccatgcaataataagcagagaacaatcaaaataaccaaaacgttaaaacagaacaggtgactatttcacccactccttattttagagtgctcagaataccaaatgttcaaacatgataatatcatcaccttcacagaaacagatactattttgctccctacacnctgntagttgcccttttatcaaaaggtcctacacataaacatatttgcataacagatacatatctgtcattgaaacctactatattaattctgacacattgatatttctacgagagacacctgt

SEQ ID NO: 135655 - DNA, 340 bp, Zea mays
  Clone ID: MRT4577_55196C.1
gtttaatctgcaaaaggacctaaggttcgaaggacagtattaaagggagtcgtacgatgtctacagaacgcctaaagtcctagacacaaaaacttaatagaagacttccaacatccaaaaaccaagttcacggctcgacctacgacgaaaagactaatgcagcataaagcatttatctgaacaatgattacacactacatgatggcgagctgctgtcgaacagcatatacaattatataacgatgaagattgacgacacgaatacggagagtagagtgattcatgacattgatcattgcatacatttagaggactataaaaactggatagctgagattga

SEQ ID NO: 135656 - DNA, 1043 bp, Zea mays
  Clone ID: MRT4577_55197C.1
gctcacttggacccggccgggtttgccctcacagccctcgaaggcaccacccgcgccgccgccaccgctccgaaaatacagccatcgtagtgcggcggctaggtcggccggcgtttggaggagctccgaagatgtggtgccagtcgtgcaaggaagggtacgacgaggaggacgccgggacctgcaaggagtgctacgaggaggccagcgagacggaggaggagctcaagcgggagatcgacgacctccgctcccgcctcctcttcctccgcctcccctcccctaccctagacgccgcatcagcccccaactgcgacctcctcctccacgccatcccctcgaccggcgcgggaggcgaacgcgatgctgggcgcacccccgacacacccgccgtgcccgcccatcgcgtcatccttgccagcagatctcctgttttcagagcgatgcttgagaatgagatggaagagagtaggagtggtgtcatcaagatctatgatgtgtcttacgacatccttcgtgcttttgtccattacatgtacactgcagaagcccttctagatgaacagatggcatctgacctcttggtgttggctgagaagtacgaagtaaagcacctgaaggcatactgtgagaagttcataacatccaaagtgaatgacgacaatgctattacccactacgccttcgcgcaccgtcacagcgcaaagcagctgctggaggcctcgctttctgtgctcatggccaacatgtctacgctatcggatcgtgaagaatacaaggagcttgtggagaaggacccaaggcttgttgtggagatttatgaagcatatctcaaccggcaagtcaacactgcagctgggaaggacacaaattgtagcaacaggaagtgataattacgaacagaactcgtgcagtagcaatattctaactacgcatttgtgcattcatgtaagcaagttaagaacatcatattctcatgctgtcttgatttaactgctaatttttttgatgataaatcaattaaaaaaaaaaaaaaagcggcc

SEQ ID NO: 135657 - DNA, 323 bp, Zea mays
  Clone ID: MRT4577_55198C.1
tctctcacgcgtccggcaccgtcaaagtctacaggcgtgtgcaatccctttctccctcttatccccaaggcgaggagctgagggggggggggggcccttctgctgctgttcttgttttcccgctctccaagatgtcatttcccgagcaagcgccgagagacggaccttattaagcttgttgatgagcgactatcaaggtcgtgatggttaacgtttggatcttcgaattcttcgtcgaatttcaggggccgtccgtaagttttagccctttctctgaattccccgttgctcttctttttccctgccctcccttgcttatggtg

SEQ ID NO: 135658 - DNA, 969 bp, Zea mays
  Clone ID: MRT4577_55199C.1
ggtgctggtgatggtgatgaagtgcacggacgtttacgtgatgaacgtcggggacagccgcgccgtgctggcgcggaggccggagcccgacctgaagaacgtcctcggcaaggcgtcgcaggacctgcagcagttcaaaggtggagatcatgcgcgagctggaggcgcacgacatggacggcctgcaggccgtgcagctcaccccagagcacagcaccgcggtccaggaggaggtgacgaggatcaaaggccagcatctgaatgatcggaacgcgatagtcaatggccgggtcaaggggaagatcaacgtcaccagagcgttcggggtcgcctacctgaagcagcccaagtggaacagcaggcttctggaagccttcaagatcaactacgtcggcactgacccgtacgtgacctgcgcgccgtcgctgtgccaccaccgcatcggctcgcaggacaagttcctggtgctgtcctccgacgggctctaccagttcttcaccaacaaggaggtagtggaccaggtggaggcgctcaccgctgcggagcccgacggcgaccccgcgcagcacctcgtcggggagctcgtgaaccgcgccgcgaggaaggccggcatggagacgcgccagctgctggacatcccgcgcggcgcgaggaggcactaccacgacgacgtctccatcatcgtcatctcgttcgaggggcggatctggaggtcgtctgtctaggtgtgtcgtgtctgagtctgacgtggttttcagaggtccaaggcgtcctcgtaggtcagatgaggaggagagatggaatgaggaggcgatggtcgacagtctcaagggcgagggcacggcgctgccatgagctgccttcagtgtccggctatcgtttttggtttaccttataccatatactagagccatgttcgtccttgccgaaactgttggtacatagttccgcaagacgaactctaatagc

SEQ ID NO: 135659 - DNA, 443 bp, Zea mays
  Clone ID: MRT4577_5519C.1
ctggcttacagcttcagacaatgaaaggttgttcatattgtgctttcccttttttggtctatcaggtgtcatgtctttttgtgcatggtatggtatagcagtcagaagtaattagtatgccatttttttattaactccttgacatcttttctcagatgtctaagcagattatcaggagacctgagcatcattgcattaactaggaaatagttcaagtagaacatacactccagaacacatagaaacacaaacacccatgaaagcacacacatggattacaaatcgcgcaacaaaaacacaaacatgcacgaatcacacacatggattacaaatcgtgccacaaaaatgccgctgtgtatgggtgttagtggtttaagggttttctcgacctgtgtgagaaggtttcttcttaatataatgcctgggggctgtcttaccccctg

SEQ ID NO: 135660 - DNA, 597 bp, Zea mays
  unsure (1)..(597): unsure at all n locations
  Clone ID: MRT4577_551C.1
agtcctccatgacnagatacggatacacgagtggcaggccattagagacagtaatctattcgatgctgagggcaaagagcgtagagtatctgcatgtttgaggttgagctatctgaacttgccctctcaatctgaagcagtgcttcacgatttgttcactgtttcctaaaggtcccaagattgacaaggaacgtttgattgaccaatggattgctcacgacatgttcgctagtgcggatgctgttgattacttggagtacactggatatgagtgttttagttctcttgtgcaaatgtcttttttgtaggatgtggaagaaaattattatgggagagtgacatgcaagatgcacgatttggttcatgatctagcccactccatacttaaagatgaaatcttagtgacaaggttcccggaacgttgggaacgaggaacgggaacgaggaacacggtacgtctgttaaagcaacatggaacgttgaggggtatacagctgatccacgttcattcgatgcgtggaacgtgttcccaacgatttaggaacgcagttagggaacgattgtaatgaaacagggaacacagttctatttaaatag

SEQ ID NO: 135661 - DNA, 561 bp, Zea mays
  Clone ID: MRT4577_55200C.1
aaaataacgaaaaaagaaaaaaaaaaaaaaaaaaatttccgtgagtcccgtgcgtctcttctatgctcttccatcaatcggcccaggttttcctccgattgacttccgccgagacagacgctcgcatcgaaaaacacaagaagcacccgggacgtcgcggtaaccccggggacatgcaccaccaccgtatccactacgacaagtaccatccgggctactacgaaaaaggaggcatgcgttacttccataagctccccaacaagttctactgccccgcgggcaacatcgagcgcctctggtcgatggagcccaccgacaaggcagcggagggcggcgacgacaaggtcccgcagatcgacgtcacgcagctcggttacttcaaagtgctcgggaagggtgtgctgccgccaaagcccattgtcgtcaaggccaagctcatctccaaggtcgacgagaagaatatcaacgcagcaggcggcggcggcgtgctcaccgcctaggcttcaggccttgcccgcctcctggttttgaaatctatatctgaactgatagggctttcct

SEQ ID NO: 135662 - DNA, 346 bp, Zea mays
  Clone ID: MRT4577_55201C.1
ctgatatgacaggggtagtagttgatattggggatggagctccacaaattgtgccagttgtaaatggctatgtaatcgggagtagcataaagtcttttcctttctccggaagtgatgtaacccagtttgtttcacagcttttacaggagttcaagaagcatgacaggaagcctgataagtacatcaaacattggtcagctgttaaaccaaagactggggtcccatatacaattgacattggatatgaacgctttcttgggccagaggtttattcctatttctgcatcaaaattgcaatactttttttgtgttcctaaactgttcggctaaaatgggataatattat

SEQ ID NO: 135663 - DNA, 353 bp, Zea mays
  Clone ID: MRT4577_55202C.1
gtcctccctttccatcatcggactccaccgatgcacgcgcgcgccaccgcggctccccggcactgcgcaatggacgccgtcgcgttcccgccgccgcccgcaccgtccctcgacgacgacctcgatttcggggacttcacctttgcctccgcgtcgcagccgtagccgcccaccgccgccttcacggccttcagagacgactggggtgactttctggcaagcgggctcggatccaacgcgggcgcatctgccccgacggccgcgccagccgccgctccctcctcctcgccttgggagaagccgtggggcccgctgcccctctccctgttcggagccgatgcacggcgacgacg

SEQ ID NO: 135664 - DNA, 364 bp, Zea mays
  Clone ID: MRT4577_55203C.1
cttccctggctgctaccttggagttttgggccaaccatcagcaagctagagctagaggaggctcatccatcagcaagctgaagccaaagaaggcgactacgcacgcaggatcttcttcagggaataattatatcgatgtatatcacaccaagtttgaagctaagtcagctagagatggctcttggtaccttgtcgaagaattcttgactgaaaagttttgtgaatcaggcgatttgcaagtattggttcgctttcctggatttggagttgaggaagctgaatggatcgatgttcgtacatgtactttgcggcaacgctcagtgccatacaaggccacagaatgtgcagatgttcatatttggga

SEQ ID NO: 135665 - DNA, 741 bp, Zea mays
  Clone ID: MRT4577_55204C.1
cattgggtacctcgaggccggccgggctctgccgccacttgtcactttcaccgtgcttctccaccttcaaggttgcctctgctagcgaagatactctctactcagatgcgcacgctgtgtctccggctccgagcgcgtaccaactgaacgcgaccaccctcgtggccgctggcatctgtggccatccattcttcctgaacatcactgctcaaccccgcaaagtctagcaaaatcacccactacagagatacctgttgtgtctctgagaaccattgacaagatagaccacacaccatgcatgagcctaagaaccttgtgagcactaccacactcctgagattctgcctgcacctaacaagctcttcaatgaccctaatcgaagcatgtggattgcgatactactactactacttggtactgttgatcttacactttgctgccaactcaatatgcctcggacatccatgacctctacaagcactctaagcgcttgtcgataacttcgcatactcgtatgatgtcgaacgaccctgatcctgcatgcttgatgaacatatacatctgccatcagcacttgccgcactttggtgataccactgtcatatgtatactggcaatgggacctcatttgtgaagttcgctccaccgacccacgccaccgagcgcctctcgagctccagatgttgctctcttgatagcagcgtaattctcctgttgcagtaatcatgcaactacctggtt

SEQ ID NO: 135666 - DNA, 2066 bp, Zea mays
  Clone ID: MRT4577_55205C.1
ccaggacgtatatttttactgaaatgatgctgggaagagcaaaaaaacagaagtacagacgcagcaaagaagattacaattattctctagcgggctcctcgtgaggtctcctccccatcgccacgcccacgcgccgcacaccgcccgcccgctcgccccgcctccgatcccaaatcaatcggcctgaccctagcccgccgccggccgcccacgcccgcccgcctcggctcgtctcaaatcgggcgcccgaggggagcgaggcctcgatcgcggcggaccccgatgccccgcattccggcccctccggcgacgtcggcggcagcggaggcatgatccggtggggactcggcggacctgccagccatggacgccaccgcacgcccggccatcgtcatcgacaacggcacagggtatagcaaacttggattttctgggaactcggagccgtctttcactctccccactgtagtagctgcgaatgaatcttttctagaccagacagagctgttgagtagtgcaaactggatagcacagtataatgcaggcatcatggctgatcttgacttttttattggagatgaggctttatcgcggcttaggtctagtgggctgtacactttaagaaggccaatccgtcatggtcaggttcatgactgggatacaatggagagattttggcagcaatgtattttcaattatctacgttgcaatcccgaagagcattatttccttcttacagatagtcctgtcagtacacctgaaagtcgtgaatgtacaggagaaataatgttcgaaaccttcaatgtccctggactatatatttccgttcaatctgttctcagcctttctgctggatatgcctatctgaaaagtatttctgatgacgattcagatactgggtctgatatgacaggggtagtagttgatattggggatggagctccacaaattgtgccagttgtaaatggctatgtaatcgggagtagcataaagtcttttcctttctccggaagtgatgtaacccagtttgtttcacagcttttacaggaaagaggtgagcttttgccacctgaggattctttagatatatctcgtaaagtgaaagaaatgtattgttatacttgttcagacattgtcaaggagttcaagaagcatgacaggaagcctgataagtacatcaaacattggtcagctgttaaaccaaagactggggtcccatatacaattgacattggatatgaacgctttcttgggccagagatcttcttcaatcctgagatttactctgccgatttctccactcctttgcccgagttgattgacaactgtgttcagtctgcaccaattgacacaaggagagctctgtacaagaatatagtattatctggtggatctaccatgtttaaagacttccacaagagactccaaactgatataaagaagatagtggatgaccgtgttgctgcgactaatgcccgtcatcgtgtggaagtgagacctattgaagtcaacgtggttgcccatccaatacagagttacgcggtttggttcggggggtcactagctgcatctaaccctgacttctttgagttttgccacacaaaggaggactacgaggaacatggagccagcatctgcagaacaagccccgttttcaaaggaatgtactgaatttttcctcacgacccatcctctagttggtgactctagttggtgagctcatttaggtttcttcgacagaatatagtcaattttgattcttttttggtgcgttccaaccattgtcgggccaccctgattaggtatgtagctctgtttgtactagttgtttgttttgtgttctgcgtcgaatgttgtgtatagccaacagtttggttcctgttcgaggtgcttcattgtagccagaacctcggacagtttagaggaaaaatatttggttattcttttacattagcttgttcagacagatttacgggactcttattaataagagaagtcaaatttaggactttgtcgtggatgaccacattatttcaattgaataatatggtatccctactttcaac

SEQ ID NO: 135667 - DNA, 665 bp, Zea mays
  Clone ID: MRT4577_55206C.1
tgatttgttcagagagtgcggaagggtaccaatggtggtgtaaccatagatgggcttctggcagcagcagcagctggattctcgattgggcttgcatttgtgctgataggattcttcaccactcagtgtgctcctgatgtattctggaaccagctgctggctatacccttggctacagctgctggcctatgtggaagtttgatcgattcgttcttgggcgcaacagttcagtatagtgggttctgcagtgttcgcaaaaaggtggtgggtgtagatggtccaacggtaacaaggatttcagggatgaacatactggataacaacggggtcaatgtagtctctgtgttcttgacaactgctcttactgcggtggcttgcccatacattttctgaggttagctatggcgagtattggtgcgccatggtaggtccacattagatgacacagagaaacctgattgatgaattagaacagcagattgtgtagcagtggcattaatcattttcgaacacctagcagaagatgaacaattgttctcctttaacaaaaaatgttttcaacagtagatgagatcctgtaaaaatagagaaatttcatgtctctcttaaagatgtctcgaagtcgttgctcaaaaaaaaaaaaaaaaaaaaaaaaaaaagcttgt

SEQ ID NO: 135668 - DNA, 427 bp, Zea mays
  Clone ID: MRT4577_55207C.1
ctaaaaaggtgggatatttcctttaatcgggaatacacccaaaaatgggcggggggggccaaattgaaaatgctgcttgaaatggaacctccactctttgggcaaattgaaccaggcccaaaaaacatccaacagttttcgggtggcaaaataaacgttgacccccaccatctttagcattttccaaccaaaaaataattcgggccggaaaaaaaccccacacagggtggcaaaggccatttggccctaaattcccataaacaaaccggacctcctagttagggcccatttaaaaaaaaagcctggttcgaattgttgttgaacagccagtcctgtcccttgtaaagccctttgcgggtgggggcaaaagagctttgaatgtccctttgtcttggccgaagggggggtattccaattttgcctggga

SEQ ID NO: 135669 - DNA, 152 bp, Zea mays
  unsure (1)..(152): unsure at all n locations
  Clone ID: MRT4577_55208C.1
cccccagnncagatttctttccatttcaaccccaactgnngcagcattgaaccctctcctnggcttatttacccagcagcaacaacctaccctaccattnnncagccagcttagcnntggtgtgagggccctnnngctacctntnncttgat

SEQ ID NO: 135670 - DNA, 310 bp, Zea mays
  Clone ID: MRT4577_55209C.1
cccacgcgttcctttttacaattatgacccaagttgacctagacgaccgggttggagttaacataccatgccctcagacagaagaacaggttgaagcaccaggtgggcttgaactgaacattataagttatcctcgcacaacaaagctaaaaacgccagcttctagcacggcgccaacttttccattaccggcgccacctctctctacaccgacttatttcggaagcgagggctcggcaagaccgtctggaaatcctgctccctccttacgcaaattcaatggctgcttatacctcaagccatcgctctg

SEQ ID NO: 135671 - DNA, 380 bp, Zea mays
  Clone ID: MRT4577_5520C.1
ggggggggtttttttttgggggggttttttttttttttttttttttttttttttttttttttttttttgggccctaaaagtcacacccaaaagggtgacaaaggccggggcacattatcgggttaacccaggggattaaggtcacattttagggggttcactcccttggccccataataagcccaattttcctcctttccattaggggggccctcattgatctaaactgtggtgcataaagggggggggggtcaaaaagctcaaggtttggggttttaaaaaggcccccaacctttgggtaaaccagaaggaacttttggggaaggggggtgttttggccccctcttcttcaaaggggatgggagcgtgtgaaacttttc

SEQ ID NO: 135672 - DNA, 1599 bp, Zea mays
  unsure (1)..(1599): unsure at all n locations
  Clone ID: MRT4577_55210C.1
attcggctcgaggggactgtgatgaaatatcgcgatgaagcaggggtgtagccacgattccttccgttccatctccaccggctaaactgccctcgcctccgatcgaacagacgttcctcctccgtcgccgccgcggccgtttgatcctccttgcgagtccgaacctccccacgacggcacgcggccggatccagatcgggagtactccccactccccgcgcttctccttcgcatcacaagcggccccggccccagacccctagccggatcggatctcgcgcggcgccgtgccggagatgatgtcgtcgtcgtcggacgcggcagcggcgctggagctgcaggagtccgggtgggaggagctgcggcgggaggcgcgcaagctggagggcgacctcgacgtgaagctctcctcctacgcgcgcctcgccgcgcgctcctcctcctccgcctcgggcgccgcctcccccaccgccgaccgctcctcctggaagtccatggagttcgagatccagtcgctgctcggcaagctgcaggacgtcaacgacgccatgagccgctgcgccgcctccagcgccaccaccacctccgtctcccagaagctcgcgcgccaccgcgacatcctccacgagttcacgcaggagttcaggcggacgagggggaacctgagctccatgagggagcacgccgatctactcaactccgtccgagacgacatcaccgagtccagggcctccggtggcatgtcgccaagagtgcatttgctcagggaacgagcttccattcatggcagcatcaaccagattgatgaggtaattggccaagctcaaagcacaagagtagctcttaacaatcagagggccatgtttggagacattcaagggaaagtgaagcagctgggtgaaaagttcccggtaatcagaggtcttcttggtgccatcaagcggaagaaatcaaaggacaccataatcctctcggcagtgatcgcggcctgcaccatcttcctgatcatttactggctttcgaaatgatgggtcgcacctgagagaagctcccgatctcccttggcccggattagctggttgatatcagatagctgtatcgtctgcctcaccgagaaagatggaacgaacgagagatcagtttcttcagcttttcattgattttgttcgacaactgttgtgccctgtatctgagattccacatgtagagaatttttgctggttcagtaaatacacatatacatgcatggtaacatcaaggtaatgctttctgtcatacaaagtgcttgctgttcgaatgcttagcagtatctgtacgcctgaatgaaattttgcggcgatttttgtgttaaaaaaaaaaaaaaaaaaaaaaaacccancccggactcctgcagctccagcgccgctgccgcgtccgacgacgacgacatcatctccggcacggcgccgcgcgagatccgatccggctaggggtctggggccggggccgcttgtgatgcgaagcagaagcgcggggagtggggagtactcccgatctggatccggccgcgtgccgtcgtggggaggttcggactcgcaaggaggatcaaacggcaacggc

SEQ ID NO: 135673 - DNA, 220 bp, Zea mays
  Clone ID: MRT4577_55211C.1
gacttcttttttttttttttttttttttttttttggaccacacaatcgagcctagaggtagttggaatttcgatcttacgttcataccctgacgagccaaaaggggatggtgcataccactagaattaccgacaggggaagctaccctactgcttggcaaaagccatactggacccgacacacaagcgcggaccatcgccggcgggtgcgtacctgaccg

SEQ ID NO: 135674 - DNA, 1082 bp, Zea mays
  Clone ID: MRT4577_55212C.1
cattgggtacctcggccggccagaactggttgaaacctagggtttacatcccttataaaatctcgtcttccacccccgccgcccggagtcgcacttcctccggcggcggcaactcgacggccaaccgcgccaccctgccgcggcagccatggtgcatgttaacttctaccgcaactatgggaagactttcaagaagccaaggcggccgtatgagaaggagcgcctagatgctgagctgaagctggttggtgagtatggcctgcggtgcaagcgtgagctgtggcgcgtgcagtatgccctgagccgtatcaggaatgcagccagggagctgctcaccctggatgagaagaacccacgccgtatctttgagggcgaggcgctcctccgccgcatgaacagatatggtcttcttggcgagggacagaacaagcttgattacgtgcttgccctcactgttgagaacttcctccagcgccgcctccagaccatcgtcttcaagaatggcatggccaagtccatccaccatgctcgtgtcctgatcaggcagcgccacatcagggtgggaaggcagctcgtcaacatcccctcgttcatggtcagggtcgaatcagagaagcacatcgacttctccctcaccagccctctgggtggtggtcctgccggaagggtgaagcggaagaaccagaagaaggcctcagggggcggcgacgctgaggaggacgaggagtagagggggggggcacgtagggattctgcgacggcaattggttgaaatgtgaggtggacactttagttgttgtgcctgagtgtgtttgttcattgtaatgaattcagaaattctactgtggtagacaattttgcacccccactactgacactcgtgtttacatttaaacattggcatcgtgtctctggacacgatgaattgtattctggtttgggtggctatttgctagtttggtctttaggccaatgtttaagactgaaacaaattggtagccaactttactttcttaaaaaaaaaaaaaaaaaagcggccattggcatcttaggctctgctggtctgtttggtgtttttttac

SEQ ID NO: 135675 - DNA, 3111 bp, Zea mays
  Clone ID: MRT4577_55213C.1
cctgcacgggcagttttcatccctgggttctgatacccttttgtgtccctgtgccctgcttacgattcatcacggcgtgtttcaaatgaaatttgctacaatattatttactcccatccctgtatccaaacctgcaattcaattgcaatttagaacgcatatatttatttaaatccatgtatgcacagctgcctgaagttactgaaatcatcatcaatcgttaaaaccgtacacgcctacactgctccttccatgctttttcattcacccaacgttgctctcccaaaggccataaaccactgacacatgagggaggtgttctctatagagtatcgacgacgataacgctgaactgcataaatttggttatatcatctgaaatatagaaatcgggtgcaaatgaaattagttactatttgttcattcaaactatgatgtctgaaaattcaggcaattacagattctcacacgagattatgaggttgtgatccaaatcgacaattatctgttgatttgttcaatgtcttatggctgatcctgttggagtttattgggtttggtccatttactcaacaacttttaaaggtcccctctgtttctgaccttaccttgtgcgttgagttcataattgaatccatgaaatcgtggataccgtaaccgaactaaatccatggataccgtgactgagttagtttcagttttctatcttttgtgtctggttattatgagtaatttttctgtgtaaagacgattctctcctcgaaagatatgagaaataaccaacctgctatgtggtatggttttaggcaaaaggagcattcggtgttgtgtgattttaggctcctgtcaacactagtgtgacgacgaaaacagtctttgaaatcttactctgctgaagaacctgaagggttattgcttgtcgagttgtgatttgatgatctgtagtgttacgtcaatggacttgaacaatatcgtgaactcatatttgattgtttggagcaatctctgttgtgagtaataatgattttatcgcttttggttttgttagatacatttaagatagattttactcttatttgctatgcgtggtttatccattgtttatatagtggttgtcttagaaattactttaatccttaaaaaggtgtgcaatcttccaacacatcatgtggactcaaaattactctctagttgatttgtctaaatatactgcagctgttcttgttggtttgtcagctatcatcattcttccattattaattattatcaattaaggtttcacaaggtattatgaaagattgttctttcttagtttgtactctatccattctaaattataagtcattctaatattgtttgagccacaagtttgattaaagctatagagaaaattatgaagattcatatcaaatgtaaaatctaaattaataagaatctagtgacatttagtatcataaatgttattattttaatgtacaacttaggttagacttaatatttctttgactcctcaagaaagttggactgacttaccatttaggatggagtatgatttattattgtcttataaaagcctggatcggtatactctgaatatctgagtacctacatgatgagtatttgtaagatgtgtgaaggtcgactgctaggtatacattgtcagtatgaaatggctatcgtcttcagctttctttcctggtcagtggacagtgaaatatttatacgatgtgttaatgtggactgctctgtataaatcgttggtacaaaatggctatggtcttcagcttcatttcctggtcactggacagtgaactgctcaagcacacttagtagatactaggcacaatcagagcttatcgaacttgtgcgatatagttcgtttcagtactccatggttatgatgttattgatcactattgagctgaagcactacaatctgtgacaaaaaaatttgatacagcagcaaccaccgctgaagcttggcagaagggatgaaattaggaatacgaaacccattaggcctgtttggttgttcggtcgattatgtgtttatgttgattttgaatggattttaccaggtcaattcttatagaagcaagctcagaagctgaaaaaagctgaggcccaatatgccatagatgggagatctgttttctttttgttcccgggcaaatatgctttgctctaggttcagcttcttgtcttctatattccaaatttttttgtataataattctctttgggtttaaccatttactctgaagcttctgtttatatatatgcgagtctattcttgagcagtttttttttcattaaaactctttttgcaaagcatctgtgtaagtcaatttattgctaaactgaacagttctcattagaagttgcgcacaataaatatggtgcctgccatgcgagcgcacccacaatgcaaaggccttcaagatgtcacacctcacttctttcatattttttcctcccttctcagtatctttccccctcttttgacttcacacacgcaactctgtagttacatgtgtttaacttaccttgccatttaggcgcggatcgctccgaccaacatctctcagatctaataattatcgaaatttcatccaataattatcaacacagagacatcatcgagaggcgcggtgcagaaagagatccagccacgctttaatagcccttcgacgtctagatctcgccagaacgacccggctctgaaggtcggcagattgcaatttgccgggtcaggcaccaatagtctcggagcaaacacgcagatcagaagcctcggagcacggaaaccatgcagcctcgtctcgcttcaatccgattcgccactcatcaatcaaaccaatcagatcggaacctgcacatcatctcaaaaacaaaaccacgcgtttcgaacaaacaaataacagagcgagattcaccgttgctcgatcgtaccaaacaccctatctggaaaccgcaggtgtaggcatgcttagatgtagacgagaagcgagaagaacgcgtcgatttctagaccgaggcaacatatagaccggggagggtacgcgagcaaacctagggttagcgggttccccaattgagcctcgagggtac

SEQ ID NO: 135676 - DNA, 430 bp, Zea mays
  Clone ID: MRT4577_55214C.1
tcgtccacgcgtccgcgcggctcggggaaagggaccagcaggagtggctgagcggcgagaggtttctcaccggctgcaagcgacgggagtcgacgttcctcaccaggcgggagaggttccgcagagagttcctgcgccgcgtcgtgccgtgggagaaggggtcgctctcgtggcagaatttcccctactacgtcaatgacaatgcgaggctcctgctaagtgagtgtgtggcgtcccacctgcgtcacaagagtgtcacatcagaatatggctcacgtttggaatcctctggagggcggatattgctccaaagttctccaggaactgagctttacagggagagatttgttagagctcttgcacatgagttgcaagtgccgctattggttctggacagcagtgttcttgcaccatatgattctggggagga

SEQ ID NO: 135677 - DNA, 977 bp, Zea mays
  Clone ID: MRT4577_55215C.1
gccgcgccctcctcctcctgtcctgctccaccgctcattggcaccagcgcagcagcgcatctctcgctcgtcgttggtccttgtcaacgatctcgccgcttccatggccgccaaacctgcagagacgacagggagcaacaaagctgagtcctccttctcctcctccatggcggtggcggccgacgtttacaaaggcgagctgacgccgctgcagcggcacgtcgccttcttcgaccggaacaaggacggcgtcatctaccccgccgagacataccaagggttccgcgcgatcggggccggcgtcacgttgtctgccttcagctccgtcttcatcaacggcctccttggacccaagaccataccggagaacgagaaggctccagctttcaagctccccatctacgtgaagaacatccaaaaaggaaagcacggaagtgattcgggcgtgtacgatgccaatggaaggttcgttgctgaaaaatttgaggagatcttcaagaagcatgcccacactaggccagacgccctgacaggcaaagagctgaaggagctgctcaaagcaaacagggagcctaatgacttcaaaggatgtatgtttgggaaaatttactgcaggctgggtggtttcacagagtggaagatgctttactccctctgcaaagatgaaaaagggtttcttcacaaggacactgtcagggctgtctacgatggcagcctgtttgaaatgttggaacgcgagaggaacgctaaggagtctactaagacgaaatgagaagagcatcgtcttgcacccgttcgtgtggtcggtagtagaatttgtaaattgcggtgtgctgtgtgcatgtggaccagaaaaatagtacactagtttgattatgtacgtcattagatgcatatatgtttatttatatttatggagctatatatgcatggcattggcatctctcccccctcaacaggcaacaccctcagcgaca

SEQ ID NO: 135678 - DNA, 1299 bp, Zea mays
  unsure (1)..(1299): unsure at all n locations
  Clone ID: MRT4577_55216C.1
ttnnnnnggtgtgcaatcttccaacacatcatgtggactcaaaattactctctagttgatttgtctaaatatactgcagctgttcttgttggtttgtcagctatcatcattcttccattatcaattattatcaattaaggtttcacaaggtattatgaaagactgttctttcttagtttgtactctatccattctaaattataagtcattctaatattgtttgagccacaagtttgattaaagctatagagaaaattatgaagatccatatcaaatgtaaaatctaaattaataagaatctagtgacatttagtatcataaatgttattattttaatgtacaacttaggttagacttaatatttctttgactcctcaagaaagttggactgacttaccatttaggatggagtatgatttattattgtcttataaaagcctggattggtatactctgaatatctgcacccccatcatggaggtgatggcgtttttagatatgatgtatatgaagatcagtacaaatactctgagtacctacatgatgagtatttgtaagatgtgtgaaggtcgactgctaggtatacattgtcagtatgaaatggctatcgtcttcagctttctttcctggtcagtggacagtgaaatatttatacgatgtgttaatgtcgactgctctgtataaatcgtcggtacaaaatggctatggtcttcagcttcatttcctggtcactggacagtgaactgctcaagcacccttagtagatactaggcacaatcagagcttattgaacttgtgcgatatagtttgtttcagtactccatggttatgatgttattgatcactattgagctgaagcactacaatctgtggcnnnnnnntttgatacagcagcaaccaccgctgaagcttggcagaagggatgaaattaggaatacgaaacccattaggcctgtttggttgttcggtcnnnnntgtgtttacgttgattttgaatggattttaccaggtcgattcttatagaagcaagctcagaagctgnnnnnngctgaggcccaatatgccatagatgggagatctgtttcttttgtccggcaaatcaaatatgctttgctctaggttcagcttcttgtcttctatattccaaannnnnctgtataataattctctttgggtttaaccatttactctgaagcttctgtttatatatatgcgagtctattcttgagcannnnnnnnnnnnnnnnnnnnnnnnnnncaaagcatctgtgtaagtcaatttactcctcccctccacag

SEQ ID NO: 135679 - DNA, 296 bp, Zea mays
  Clone ID: MRT4577_55217C.1
aggtgcccgagctactgagggtctaagtccgggcagccgaagagtgtggtaggtaacggtcctcagcgcaagggtcatttcgtcgctgggaagggacggccctcgcccgcggtgatggtggttagcaagatgaacaaagatgcgcagatgagagcagcgattaaccaaaagttgatagaaactggagaaagagaacgcctcaaagagttgctgagagctagattaattgaatgtgagctggagagatcagttgaaggcacactgtaaagaggtaattaaagaaaaaggactagaac

SEQ ID NO: 135680 - DNA, 418 bp, Zea mays
  unsure (1)..(418): unsure at all n locations
  Clone ID: MRT4577_55218C.1
gtnttttttttttttttttttttttttttttttttttttttttttttttttttttttttttttttagggagagaattttcatgggctcatgacaatttttacccataaacatgcccaccagtggtctcgcgattcaaagggggttgtacagggggggcccccgtttaaaattagaccaccggcaaacaaaattagggaaaaccaccccttaaaaaaaccggggaaaacaaaccctgaaaaaaaaatttgaaccttcgcatgtttcagggatgaccattacacgggtatttggggggtacgaccggtggccaacaaggacaccttacccgggcaacgaaaggagcacattacttatctttaaacacggttatgacaatgggaagtcttctgcctgtaccaagctaagtaaaggggggga

SEQ ID NO: 135681 - DNA, 454 bp, Zea mays
  Clone ID: MRT4577_55219C.1
gggaacccccccaaaaaaaaataaggggaagggggtgggggggggcaaaccgaaaaaggggcccaaaaggggggggcaaaaaaaaaaaaaagggaggaggggaggatcggggaaaaataaaaggggggtgggaaaccaaagggacaaaaagggggggaaaaaaaaaaaaaaacctgttgccggggaaaaggaaggcccaaaccgatctaaaaaaaaaaaaaaaggttaaggggagccaaggaaaacgggtcccaggaaggggaaaattgctccaaaaaaaacgggggggggggagccctaaaactgcccaaaccggtttaaaaaggttccaaaggggggggcaataaaaaaaggttgttaaaaacgttaaaaggggtcgaaattttggccttcagcttaacaaagggctccaaaagggaagggacttgggggacccgacatggtgaagttttga

SEQ ID NO: 135682 - DNA, 263 bp, Zea mays
  Clone ID: MRT4577_5521C.1
cgaatacttcaaaatgactggcggatacgcacccaagcacggaagctggcagcaaggctggaggggacacattggccgccctgagaagcgaggtaccacctatacccttgccgcgaaccgtcagcgtctcttccctaacttctggcacaccgcgatcttcaatactttccgccgattccgacaccaagtcctctacgttgctcgcccattcattgtggcgtatacattgatggactgggccgctgagcgcaacgatacttgac

SEQ ID NO: 135683 - DNA, 291 bp, Zea mays
  Clone ID: MRT4577_55220C.1
caccgtacgtggagacgcacgtacaccagcacgaccttctgagttttcggccagaaggtcgatgacgacgtgaagacggagaccccgccgtatgcattgggggaggagaagaaaggcctgctggacaagatcaaggagaaacgttccctgtggctccaacaagaagcctgaagccgctgtcgaaccgggtccgtccgttcacgcgccggcgccagcgctgcacgctgagaacgtgagcagcccggatggcaaggagaagaagggtttgctgggcaagatgatggacaagat

SEQ ID NO: 135684 - DNA, 623 bp, Zea mays
  Clone ID: MRT4577_55221C.1
ggggaaggcgctacggcgacgacgtaccgcgtggtcatgggaggcaacgacgcgagcgacgccgccgccgaggaggcccgcggagaggtggtggtggttaagaggttgaggaggagggacggcgcgtcgagggacgacgagaggcggcggagggagctgaccagggagatgggcacgtggcggcacgcaaacgtcgtcggcctgcgcgcgttctacgcgtccacggaggagctgctcctcgtcttcgactacatgcccaacggcagcctccatagcctcttgcacgagaaccgtggcccggcaagagttcctctgggctggcagaccaggctgaagctggcgcaggacgcggcccacggcctcgcctacctccacggcgtgtccggcggcaatctctcccaccggcacctcacttcctccaacatcctcgtcgacggcagcggcaacgcgcgcgtctccgacttcgctcttctccagctgctcgcgccggcgccacctggagaggccctgcagaagcaggacgtgcacggcttcggcgtcatcctgctggagatcctgacagggcgccaggcgggcgagtacgggagcgcggacctgccgcggtgggcgcacaccgtggcgcg

SEQ ID NO: 135685 - DNA, 185 bp, Zea mays
  Clone ID: MRT4577_55222C.1
gggggcgcattttaaaactttagggcgttcacaaatcatcctaagaaagcttaccactaccccatattcctctggccacctaccccttttctcctatcaaaccacgaacaatacattggctaaaaaccctttctcccctcaaccggtactcatttccctgtgaaccccaccccatacaacatctt

SEQ ID NO: 135686 - DNA, 467 bp, Zea mays
  unsure (1)..(467): unsure at all n locations
  Clone ID: MRT4577_55223C.1
gtgtggttctgtggttttttgggcttcgggcgcctagctgtgcngtctncgggctgcaactggcgcttgcggcgtgcgtcttctncgtctcgttnaccaattgcgacctctttccttggctcctctccccgtgctgaccctcgcttcgcttctgcttcttctgttcctaccttctctgtgccgactcgatgtggtgnnccctgtcgcctgcttgcctctgcgggtgcttgcttcccacccacttgctctggctgccgttgctgcgttccgtcttcggcgtcttttgcgtcagtttctgccggcgctcagtcttcttgcgctggtgttccctgccgtcttcctgctgctgcttcagctgctttcttctagccctctcgttgtgggttttgccccttctttcctgcggcatcgtttgctggctctgtttgtcccagctcttgactcagctagctgtggtctcccctgct

SEQ ID NO: 135687 - DNA, 343 bp, Zea mays
  Clone ID: MRT4577_55224C.1
gggggccccacctattttttttcctaactgtttacattagaaccaaagctcaaaaggtccgaaactgggcgggggcggttcagggagacacaaaaagggatccgcacaaaaaaccagccgggtcccaaaccccaggggcaccggccacaaggagccccagtaaaaacaattttcaaatatggccagcgaccaagggggatcggggacaacggccattggggaggccccttttttggggggctgagatttgttcctacgggggttcgggccggaggcgggtctggtttaccccccctttgttgcatcccaccaggggggcctgcctaagggggtgctaaagaaa

SEQ ID NO: 135688 - DNA, 639 bp, Zea mays
  unsure (1)..(639): unsure at all n locations
  Clone ID: MRT4577_55225C.1
aattcggcacgaggcacacacactccccggcctcgcccaggccgccgtcctctccatcctcggaagctccagccgccgctaccattaccagtgagttgaggtgctctggtgctgggctgactgtacccgccgctaccattaccacgcgctgcaccgtagcagagcggttccaaccccgtcgaggcaaaaagccctggccgttccctggccccgtgccgccgccgccgcctccgtgcgcccaggcttctttctgtgacttcgctaaaatgggtcatgtcctcatcatcaggaccacactttcaagtcaaaattgaagataccatcttccactattccactttcatgtcaaaactcaagatgacggacatgaggcgtcactctgtggatgtcccgctgtcaagaaccttggtgcagctcaagcgattgagatcgcttgcgggatccagcgacaaacttcaatgggcaagttcgcatctcctgccgaccacatggtgtgggagactgcttctagcaatgnggtggctctggagctcggcaggtcggcacataatcaccaggttgaagagacgaggacgtgggagccgagcctaaatgnggtcggagcggnagttttcggggaccaaacgcagggactgcgtc

SEQ ID NO: 135689 - DNA, 265 bp, Zea mays
  unsure (1)..(265): unsure at all n locations
  Clone ID: MRT4577_55226C.1
accattagcttatctactccagagcgcagaagaacccgatcgacaccatgagggtgttgctcgttgccctcgctctcctggctctcgtgcgagcgccacctcacgcatacaacggcggctgcggtgcagccaccgcgcggttattaccgccgcgggcattgcacctcgtacctgcactcgtgcattcacgcnncctgcgcgcggcactgacgcgcatgtgcggcgtattgcggacatcatctatacgccgctagctatcagcaca

SEQ ID NO: 135690 - DNA, 456 bp, Zea mays
  Clone ID: MRT4577_55227C.1
cctcttcgtaccgcacccggctgccgccgggaccacccaccacgcagggggtcgatcccacctgcacgggggcacgaagggcacgtagtgaagagagagccgtagattggctttctcctgcatccctccccagcagtggaggtccttcgatgtgtagttacgctacgatacggattctgaccaaaccaactccgaaacaagaaacctctctacctgctgaacgtgccgtgtaccgttatgggacaaggaccagctcgagaagctacactagacacccaccattacaactcacaaggacggcaaacgtccacgtctctcccacccttcccaaaggccctagacagcgccggaataacccactaaattccggaagagagtccgtcggctcatgtagggtctcgggtttggagtcctaggtacgttctacactggtacccgctctaccgtctcctgtaa

SEQ ID NO: 135691 - DNA, 909 bp, Zea mays
  Clone ID: MRT4577_55228C.1
ccggccggggcgacatttttcattggtccttcacgcccgccgagcacgtccaccaccaggtcccgccgcatctccatccctatcatctccatccccgtcgagatctcccaggtccaaactccggcaagctggctccctgctccgtgccccggagatctctgtgcagcgtgccccgtcgagtacacgcccgtcgagctccaacggcgcgtgcttgcggcctccggcaggggcctgctctccaccggagtcggcgcccctgacgtgtcctccagcgtgggcttgcggcctctggcgtgggtctgctccctgccgcagatctgcgtcgcgctgagcccgacgagacctatgtcacgtgcattgatctgctgcttcctctggctccgtctcaatctccgtcgagctcctctccttgcgccgcacgctcctattctattgaacagcgcattgtccgtggctccgtgccctgtccgtatccatcgagcgcggacatcagcaatttcagcaacctcctcctcccctctgtgtgcgactccactatccctcaaggctgacctttgcgactcaacagaatttgcagggaacatgtgctgcagcctgcagggaacatgtgttgtaatgtgctgcagaagttgcggtggagactagaagctgtatcagggaaggtctgaagtctgaactgaacagacatgccgaacctaaaaaaatacgatcgtttgtttgcttgtacaatactgtcatgtagcatgtttctgtaccctcgtttggtggtgctcgaggtgcagggttcgaccccatttatccagtctttatctctctttttttttgcttttggccaaacgtgtacatatactattgtttaatcccatgtaaacttttgtctaaaaaaaaaaaaaaaaaaaaaaaaaaaaa

SEQ ID NO: 135692 - DNA, 535 bp, Zea mays
  Clone ID: MRT4577_55229C.1
ctgtgcggcgctcgaggcggccggtcgggacagagacaaatggccgccgctaagaacatgttgcgatcgtcaagaagcacaccaagcgcttcaaccgccaccagtcggaccgctttatgcgcgttgacccctcatggcgcaagcccaagggtatcgacaaccgcgtccgcaggcggttcaagggccaggctgctatgcccaagatcggttacggatccaacaagaagacccgccacctgatgccctcaggccacaaggctttcgtcgtcaacaacgttaacgacgtcgagctcctcctcatgcacaacaccaccttcgccgccgagatcgcccacgccgtttccgcccgcaagcgcatcgacatcatcgcccgcgccaagcagctcggcgtcaaggtcaccaacgaccaggcccgcgtcaagaccgagtcgtagagcagttgttgatgttttccattggacggggccaaaggcatggcatacaaaggcgtctctctgattagttacgatctcaatgggaaggcttttttttcccc

SEQ ID NO: 135693 - DNA, 833 bp, Zea mays
  Clone ID: MRT4577_5522C.1
atttaccgaatccccacgtcctctgacctcgttccccacccgaatccgccgccgccgccgccgccgccagaactctcgcgtggcgatgatatcatcggagaaactctgtcttggagcagacgggaaccgcctttcccatcccgacgccgggtacctcgacagcgtctgcgcggacctgtccgacttggggttgccgtcggacatgggccatgatctgcgggaggagaagacggagtcccttgtcaagatcggcgattcacatccgtgtccaattgggcgtgacgacgtctgtctagacgacatgttcgatgatatcttcggggactggccgctcacgggcgatccaattctgtgggatgacatccgctcagagaacagcgacgattacgtcgtcccagattccgatgaaggtgataggttcgcagacgtgaaaacaaattgcccagggagaaacattcccaggcagctagcaaagaaaatggacagcgcatggctaaggagcatcgcggaacagaacgagaaatacgacgcgcggtgccaggagatcctgagccagaacgaggatgccgatctccctcctgttccactagatgtgttccctgaggcaacaggtttatgcgtggaaaggggttgctgctaccacattgaatacatgacccatgacacttccaccactaattcagatctcggatatagcggaccagaactgatgctacagatatttttctctgcgtttatcaagcttttctgcatcctattcttaccccatcaatgtctatggagtattcgctggttcggatgtactggagcctctgcggaacatgtcttcaccg

SEQ ID NO: 135694 - DNA, 536 bp, Zea mays
  unsure (1)..(536): unsure at all n locations
  Clone ID: MRT4577_55230C.1
ccggccgggaggtgtcgcttccaatccgatagctgtactgttccacttcattaccatcatctccccgaatatcaaagggcgatcccaaatcgccattcacaatgaggatcgcgggtttcctctcgacaatctgcgccgccgcgcttgtcgtagcagagcagcgcactgcccaaatctacgttcaggctgtccaatcctcaccctcactccctcaacccctagccgagatcgcctacgacgccgcctcgctcatctccaccgaggttgtttcttacgaggcgcctgagctacccgagacagcgtcgcttgtccgcatcggcatctacgatcccaagtctgagaaatggattgctggaaccactgctgcttcgacggagaactttgatcgcggttacgcccctacactattgctctctgtggatgagagcgntgatgtgcgcagtgtgacgctgaagggcattagagtcgatgctgggcagacgagagattttggaccaaggcgattgtgatcgcagataagaaggcagccaacctga

SEQ ID NO: 135695 - DNA, 432 bp, Zea mays
  Clone ID: MRT4577_55231C.1
cacctctctgtgggccggtactgagggactccgagctgcattcattacatgaaaggccgacgcgcactctggccgcctatccgatgatgcatgataactagacggatcgcacggtcttagcgccgaccacacatcagttcaaatctgctgccgctcataaagagtgaacgaactgacattagcctaccatggctcactggccggtatcagaattagaaactctgattccgccagagtggatcctggaatacggtcaccacacgcagagaggggagcaggcgctcgaactaccctttcgctacctggctgagtgactgcatgtactagcactaccggccgcgttaaggggtgtcaattgacttgaaggcctcgatacgcgatctcactgaggtcgaggttaaccgcacgtaaagaacctgtgctcgtggagcc

SEQ ID NO: 135696 - DNA, 384 bp, Zea mays
  Clone ID: MRT4577_55232C.1
atcacacgtacgatgctgaacttgaggcgtttgctttactagagactccaactgaaccacggcatagggttgatcgtgataggcttactagatatccgcctactaatgcatctaagcatactatggctcatatacaggcccagctctacagcacaatcacatgcattagatggtggcaaagaccatgatcctcatgcaacctcatatgctgtcacgaacactcacagcaacatggatcctgttgtacagataagtatctctcagttacatgacatcactgcgctaaaggccaatcaaggatacaggaaaagacatgtgtcacatgagaaaatttctgatgagacagcaattgcttgaataaccactggaaatattaagaaaaat

SEQ ID NO: 135697 - DNA, 2659 bp, Zea mays
  Clone ID: MRT4577_55233C.1
gccggccgcggccgggcccttcgctgtcctccggccgggaaaaagaaccgcagaaagatcgttttttttccctgtccccgttcttgcactcgagttcttcagttcttaggaatagtcagacggaacaactcgagtttgccatggtggtgatctggaaccggggtgtgctgccccctctttgattccctgattggtctcgctccagttcgacgcgggatttggacgggacgggcggaagttgggagagcagagcggccggcatgtttgggtccagggtccaggatgaggtggagatgcagaggaggcctaacaacaggatctttcccgacgagagacaaaatcaatctaagtcattgtatcaaactacacgggctgacagatttggcgcaaatagaatagatctgaagaatcctgagaagcttaaggtgttaaatgaaagcaacaaaccctggcaccagcgtattctagaccctggaagtaatattgtactgagatggaacagggtgtaccttgtggcatgtttgtttgctctttttatagatccttttttctattaccttccattgattagacaaaatggcaatggatcttcatgtgttgccaaggaccagggactgagcataagaatcactgtcctacgatcacttgctgacttattttacatgttgaacatagcaatcaagtttcatactgcatatgtggatccaaagtccagagtccttggaaagggagagcttgttgtggatattaagaagattcaacgaagatatataagaactgatttctttgtagacatacttgcagctgtgccacttccacaggttactgtgtggttaattatgcctgcgataaaaagctcagattataacatccggaacactacatttgctctcgtaattgtaattcagtatgtcataagaatgtatctcatcatccctttaagcaatcagattatcaaagctgttggagtagttgcaaagtcagcttgggggggagcagcatacaatcttcttctctacatgcttgcaagccatattactggtgcaatatattaccttctctccatcgaacggcagattacatgctgggatcagcagtgcgttgctgagtacaatgatacacattgcaactttagttttataagctgtgagaataatggttctaatgattattctgtgtgggcaaataagacaaaagtatttgccaactgtgatgccacgaatagtagtatatcatttaactacgggatgttttctagtgcactgagtaaaggtgctgtatcatctccattccttgagaagtatttcttttgcctatggtggggcttgctgcagcttagttcaagcggaaatcctctcgtgacaagtgcatttatcacagagaatgcatttgcgatagcaattggtgctatcagtctcatactctttgctcagttgattggcaaaatgcagacatacctgcagtctatcagtaaaaggcttgaagagtggaggctgaggcaaagggacatggatgagtggatgagacaccatcaactcccatctcatcttcaagaacgtgtgcggcggttcgttcaagtcaaatggcttgctacaagaggagtagaagaagaatccatcttgcaagctttgcctgctgatattcgtcgggatgtgcagcgtcatctttgtttggacctcgttagacgtgtaccttttttctctgagatggataaccaacttctcgatgccatctgtgagcggctggtgtctttcctgtgccctgagaacacgtacatctctcgcgagggtgatcctgtgaacgagatgctcttcattatacgcgggaaactagagagctcaacgacaaatggtggccgcagcaacttcttcaactccatcatcctgcgccccggcgatttcgcaggcgaggagctgctcacgtgggccctgctccccaagaccaacgtccacttcccgctctcgacaaggaccgtacggagccacacagaggtggaggccttcgctctgcgggctgaggacctgaagttcgtcgcgaaccagttccgtaggctccacagcaagaagctccagcacacgttccggttctactcccaccactggaggacctgggccgcctgcttcatccaggccgcttggcggcagcaccagaggaggaagctggccgagagcctcagccgctgggagtcgtactcgtggtggtcggcggaggaccacccaaccggcgataagcccaggcaggagggcacctcgagcggcggcggcggcggcacgaggacgatcgctgaaggtgccatcgcccatatgcacaagctcgcctctgcttccagaaggttccgcaccgaggacatcgctatccgcaggctgcagaagcctgacgagcccgatttctctgcggaccattttgattgaaccttcttaatattgtgcttcgcagctgggagttgcatgttgtacgaacgatcgcagccgtagcatatatactctactgtaattttactgcacagccatcttaggtgtcgtgaattgtaatagaaaaagaagatgtatcgtgtaattctaaatccagaatctaccctgtataggcttaaccttttgtgcagtgcataaacttgagtatttcgaagcgtcaaaaaaaaaaaaaaaaaaaaaagcggccc

SEQ ID NO: 135698 - DNA, 782 bp, Zea mays
  Clone ID: MRT4577_55234C.1
caccttttcagttcaagcggaaatcctctcgtgacaagtgcatttatcacagagaatgcatttgcgatagcaattggtgctatcagtctcatactctttgctcagttgattggcaaaatgcaggtagtgtcataaattatcacttctgaactacactaagaagttttggggtcgatactttacttttcatgcttgtattaccagttaactcagcattagtaattgcattatgtgataaatttggaagcaatttaaaagctgaactagttttgcaaaattaccttgttatcagttctattgtgcattctgtgttaggctattgtcactttctgtcttttttttaacggatgcttcaacttcaagcatataaagtatgaacttccatttcatgttttgagatttctgataaaaataaggatattgctgttcctgtgttcagcaagccattttccacactgctaacccacttgaagtctgattcagagatcacttcctattcttcttcttgtagacatacctgcagtctatcagtaaaaggcttgaagagtggaggctgaggcaaagggacatggatgagtggatgagacaccatcaactcccatctcatcttcaagaacgtgtgcggcggttcgttcaagtcaaatggcttgctacaagaggagtagaagaagaatccatcttgcaagctttgcctgctgatattcgtcgggatgtgcagcgtcatctttgtttggacctcgttagacgtgtaccttttttctctgagatggataaccaactta

SEQ ID NO: 135699 - DNA, 239 bp, Zea mays
  Clone ID: MRT4577_55235C.1
ctatatattcattttcgacccgtgaaggggtaaaggagggcccccagccaaaacacccgatattaattgggggccacgaagaacccaacagttcccttactgccaccgacatgcagaccacacggcgccaaatttttgaacgtgtgaaaccaacaaaaacctggtgaaaacacctaaaaaggtggggaaaatgccaaggggcgaaggtggaaataccctgccaacacctaggacaagaa

SEQ ID NO: 135700 - DNA, 445 bp, Zea mays
  Clone ID: MRT4577_55236C.1
ccggaattcccgggtcgacccatcgcgtccgacatcacatacggtagcctaacacttatcggctgaccactcatctccagcggatgcctgccgatcagatctcgacagcgacaccgtcgggctacagaggttataccgagccggcgactactgcatcatcataaatatgtacactatactatactactacgtacctaccgataagcacccgagcaatgtgaatgcgtccagtactatatatctggtgcgctgcatatacatatatgttcctgatcattctcccattgtgaatgcaagctgcaccctcatatactaccacttcgcattcctaacactgagctttcgatatgctacaccagaagaggagggccaacagggccgaccagctgctgggggctgctgcgggtgcgccgcagcagtggcgcccctcgctcggcgacatctg

SEQ ID NO: 135701 - DNA, 183 bp, Zea mays
  unsure (1)..(183): unsure at all n locations
  Clone ID: MRT4577_55237C.1
cccgggtggctcanattttttatcatccagcatccatcagcagctggtggagattgcgcttgatgaacccggggcccttgttgagaaccatccttcgtgcaggaaaaacgtgagggccagaaagtgcttccgaatggccaaagctggaggcatcagatgctgcttttgtgctanctcctcaaa

SEQ ID NO: 135702 - DNA, 278 bp, Zea mays
  unsure (1)..(278): unsure at all n locations
  Clone ID: MRT4577_55238C.1
agggcgggcgtccgtgcanctttttcantgagctaccatgttcactatgggcttcttccannacaccgggngagttcnnttttgggtggggtagggcnnccanntttctccactaccaaaagctttantgcttttaagacncccnattccctcccagtgggaggtccccgtgttttttgccgtagctgccaacagagaatggttagatggctcccccctgtttgttcaatgtcaagaggctgaagtggagcaagatcacctcggctctgatacttcca

SEQ ID NO: 135703 - DNA, 577 bp, Zea mays
  Clone ID: MRT4577_55239C.1
caataccaaaagagtgctccccctcctcctctttcgccgacgcttctcctcctccggaagatacacagagagcgtacagttctcactcagccagagagatggcgaggcaatgtgcgagggtccgcttgagaggcatcgacctcggcccgacctactcccgcgtctgcatgttcctccacgacagggacggaatcattgccaatgaccatcgcaaccgcaccacgtcgtagtaccaggcctgcatcgactccgagggcgtcgacggcgaggataccgagaactatctggacatgaaccccatcgacaccgttcttcgacgaccattgactcgtcgaccgcagatttaccgattcaactgtggacactgaggataagctgtggaccttcgaggatgttgatggaccaggagacgatcctatgattaacggccagtactagggtgaagagaggtaccttgctgcatgaccagatatcctgcatgatcccccatcctgatgcgtgcgattggagaagctttccctggaagtactgtgaagaatgctggtgttgctgtacctgcatacctcagtgactccca

SEQ ID NO: 135704 - DNA, 328 bp, Zea mays
  unsure (1)..(328): unsure at all n locations
  Clone ID: MRT4577_5523C.1
ttnnnnnananaaanggggagggntaagagcaaggaaccatggggtcccattctaagaatttatttcttttttcgggtagctccaccattggaaatgttggtgaaaacaaaaacacacccaaataaactgccaactcttgggtcatgtcaaacggactagccgagaccatacactcaagattcaggaagggtttcttccaaacaatttatgatcagcagtttattttaacttccgccagcattttttttttctggacgagcttttatttgatctaaacgtcaaaacattatccctggtggaatcagcctgaccaaaaacatgcatacg

SEQ ID NO: 135705 - DNA, 1851 bp, Zea mays
  unsure (1)..(1851): unsure at all n locations
  Clone ID: MRT4577_55240C.1
cacgactctcggcaacggttatctcggctctcgcatcgatgaagaacgtagcaaaatgcgatacctggtgtgaattgcagaatcccgcgaaccatcgagtttttgaacgcaagttgcgcccgaagccttctggcggagggcacgtctgggttcctcgcgcccgggcgcgataacaaagccacgttagccgagagctcctctgctcctctcgtgtctggccgaacaggcagagcgaccagtctcaagagcgctccccatggcgtcaggagatgcggcggcccctgtcgttcagactgtggtgctgaaggttgccatccactgccatggctgcaagaagaaggtccggaaggtgctcaggggcatcgaaggcgtgcaggacgtgacggtggacgcctcgcagcacaaagtgactgtgacgggcaccgtggacgccgacacgctcatcaagaggctgtacaagtccggcaagaagggagtgccctggcagtgtcacccgcccgccaagaacagcgagcccgcgccggaggccccgccggctccgcagcctgccggcgacggcggcaaggatgctgctgctgctgctgctgtggccgcggcggacaagaagtcggaggaggcggtgaaggagccgcagggcgagagctccgaggaggaggagaagaagaagaagaagccggagcaggagcaggaggacggggccgcagagaagaagcagcccgaagcagagtcgtcaaaggaggtggagaaagtggaggcgaagacggacggcggtgacagcgagggagctgagacgaagcagtccaagggcgcagcagcagagccggcaaaggaagcccctgccgctgccggcgctgccaatgacgaggacgaggcaaagaagagcgacaaggccaaggacgccggcacggcggagcctgccgctgtgacgacggagaggtccctgcctttggcgccggcgccggcgccaaagcacgcgtacgagcatgagtaccggccgccctactacgccgcgcccgcgcagccggtgctgagctaccacgcggctcagcgcagctcgagcgtgtcgcacttcgcgccgcaggcgcagccggcgtactccacgcaacaggcgcacccgcatcaagcgtactactccgcgcagcagccacagccgcatccgcagccggggaagcagtggtcgccgtcgtacctgtacatgccgtacccgcacgccgcggcgccggagccttactaccagcaggactactacggcccgcccgggatgcacgcgtcgcctatgcacgactcgtcgtaccgcatcttcgacgacgagaaccccaactcctgcagcgtcatgtgagaggagagcggatcggcgcggcccgggccggccgtggccagcagctgcagcagcaggtagttggggggggaggcggcgccgctaccgcaatagagaaccctctttctctccctctctctctctctgtggttgtaagtagagtagcctgttgctttgctggcctcttccacttagtatagaggtcaaacctctctccatgcacgagcacgacagagcttttcttcgttcctttaaatcttttttttactgtttctaatgataatgagatacgcactcgcgtttacctgtagtgatgttcaccgcgtctacgccggccggctgcttcaagaaattttgtactatgggctatacggcaaatacatatacataacagactatacatgtacgactggtagacagagaaaggcanaggcgtatttgtatctctttggtatgtactcctgaccgagaaagaagagaagagaagagagcnaaggtgtgtttgcagagtaaaaaaaaaaaaaaaagcggcc

SEQ ID NO: 135706 - DNA, 1635 bp, Zea mays
  unsure (1)..(1635): unsure at all n locations
  Clone ID: MRT4577_55241C.1
cctcgaggccggccgggatacaaatccacgttagccgagagctcctctgctcctctcgtgtctggccgaacaggcagagcgaccagtctcaagagcgctccccatggcgtcaggagatgcggcggcccctgtcgttcagactgtggtgctgaaggttgccatccactgccatggctgcaagaagaaggtccggaaggtgctcaggggcatcgaaggcgtgcaggacgtgacggtggacgcctcgcagcacaaagtgactgtgacgggcaccgtggacgccgacacgctcatcaagaggctgtacaagtccggcaagaagggagtgccctggcagtgtcacccgcccgccaagaacagcgagcccgcgccggaggccccgccggctccgcagcctgccggcgacggcggcaaggatgctgctgctgctgctgctgtggccgcggcggacaagaagtcggaggaggcggtgaaggagccgcagggcgagagctccgaggaggagaagaagaagaagtcggagcaagagcaggaggacggggccgcagagaagaagcagcccgaagcagagtcgtcaaaggaggtggagaaagtagtggaggcgaagacggacggcggtgacagcgagggagctgagacgaagcagtccaagggcgcagcagcagagccggcaaaggaagcccctgcggctgccggcgctgccaatgacgaggacgaggcaaagaagagcgacaaggccaaggacgccggcacggcggagcctgcctctgtgacggccgggaggtcccttcctttggcgccggcgccggcgccaaagcacgcgtacgagcatgactaccggccgccctactacgccgcgcccgcgcagccggtgctgagctaccacgcggcgcagcgcagctcgagcgtgtcgcacttcgcgccgcaggcgcagccggcgtactccacgcaacaggcgcacccgcatcaagcgtactactccgcgcagcagccacagccgcagcaggggaagcagtggtcgccgtcgtacctgtacatgccgtacccgcacgccgcggcgccggagccttactaccagcaggactactacggcccgcccgggatgcacgcgtcgcctatgcacgcggggtcgtaccgcatcttcgacgacgagaaccccaactcctgcagcgtcatgtgagaggagagcggatcggcgcggcccgggccgccgtggccagcagcagcaggtagttggggggaggcggcgccggtaccgcaatagccaatagagaaccctctctctctgtctctctctctctgtggttgtaagtagagtagcctgtttagtgctgggaatctgggccgggcttttcgggccagcacgagcacggcccgaaaataagagcccaaagcacggcccggcacgaaataatgtgggccgggctagcacggcccgaatgcgggcctgggccgggcctcaaattccgacccgtcgggcccccagcacggcacgcatagatgggccgggcttgggccggcacggcccaattaagcccaaacggtttaatctctttaatttagtaagatattgagtttatattgttgccaaaaaaaaaaaaaaaaaaaaaaaaagtnctctgcgttgttaccactgct

SEQ ID NO: 135707 - DNA, 291 bp, Zea mays
  Clone ID: MRT4577_55242C.1
acggcgctctcgaagcggacggacggcggcagggcacggtggcaacggcggttgtcctgtccgtctctgtgatggccaccgctgccgccgctccaacgtctgtggcgccgtcccctgcgccaaggccaacgacagcagaaaggcggtggtgcccgtggacgcgtcggagctggagaagctcgtgctggcggtggcttataactccgtggaccgcgccgtgatcgccaggatcctgcgcggctccaggtacagggtgaccgccgtagagtcggcgacgcgcgtgctggagtt

SEQ ID NO: 135708 - DNA, 1052 bp, Zea mays
  unsure (1)..(1052): unsure at all n locations
  Clone ID: MRT4577_55243C.1
ccacgcgtccggtttgttgggcttgctgagatggtgggttgtgttgattttaacaaaacagtagatcattggcaacaggacaagtggactggttgtttccctgtcaagtggcacattgtgaaggatgttccgaacagtttgctgaagcacatcattcttgagaacaatgaaaacaagccagtgacaaacagcagagatacacatgaggtgaagcttgagcaaggccttcaagtgcttaaggttttcaaggatcatgtgtgcaagacatccatactggatgactttggcttttacgataatcgtgagaagatgatgcaatataggaaagcaaaacagcagcagtcactgaaaaaggtcatcgatgtgaaggtgcctaacgccaccgacgcagatacaagtctcgtaggaactgtatcaacggaactcaccaatgttgaggctgatgtcttgaacaaagagctttcattagacaaagcagtagagaaaaacgaggagaaaggaaatgatgtcgccccacaggacctgaaatcaccagctgagaagtcggcaagcccaaatggctgttaaattttttttttggttagctcggccattgacagtggtatggggcgggaacctgaggctgggggttgtttgaggaaatcctgagatcccattgagcttgtttcttgcccttgttttctgtagttcataggagcttgaggattagttagttgcttgtgtgtttgggtgataggtgaggtcagtgtcctggcatggcaggtatttaggaataaaaggacgattaactgggttttacaatggtggttcatgggtttgaggttgtgtttccatctatttgcctttcccctcttttattccagttcctacctctctagattctggacaaacgtagtgcttatttaatgctggctggtttaagtacctgaaatggacaaaggaatccaatcaagtgtttacaaacttcctatcctgagtacattatgtgaaacccgtatattctcnnnnnnnnnnnnnnnnnnnnnnnnnnnnnnnnnnnnnnnnnnnnnnnn

SEQ ID NO: 135709 - DNA, 883 bp, Zea mays
  unsure (1)..(883): unsure at all n locations
  Clone ID: MRT4577_55244C.1
cattgggatcctcgccgccggccggggcccgggaacacagccagaaagccacgttagccgagagctcctctgttcctctcgtgtctggccgaacaggcagagcgaccagtctccagagcgctccccatggcgtcaggagctgcggcggcccctgtcgttcagactgtggtgctgaaggttgccatccactgccatggctgcaagaagaaggtccggaaggtgctcaggggcatcgaaggcgtgcaggacgtgacggtggacgcctcgcagcacaaggtgactgtgacgggcaccgtggacgccgacacgctcatcaagaggctgtacaagtccggcaagaagggagtgccctggaagtgtcacccgcccgccaagaacagcgagcccgcgccggaggccccgccggctccgcagcctgccggcgacggcggcaaggatgctgctgctgctgctgctgctgtggccgcggcggacaagaagtcggaggaggcggtgaaggagccgcagggcgagagctccgaggaggagaagaagaagaagaagccggggcaggagcaggaggacggggccgcagagaagaagcagcccgaagcagagtcgtcaaaggaggtggagaaagtggaggcgaagacggacggcggtgacagcgagggagctgagacgaagcagtccaagggcgcagcagcagagccggcaaaggaagcccctgccgctgccggcgctgccaatgacgaggacgaggcaaagaagagcgacaaggccaaggacgccggcacggcggagcctgccgccgtgacgacggagaagtcccttcctttggcgccggcgccatagcacgcgtacgagcatgagtaccgggcgccctactacgncgcgtccgcgc

SEQ ID NO: 135710 - DNA, 1053 bp, Zea mays
  Clone ID: MRT4577_55245C.1
gagctccgctatacagctgctagtcctagctcctagcattgcagttgaacccattttatttgaaaaaaaagaatagaactaatttgaaccgactagtccaggtgtcagagagcccatgtataccttttggcccattccttcctcattcggctataagatgagcacctcggctgccgttaccgccttcctcccataacaaagccacgttagccgagagctcctctgctcctctcgtgtctggccgaacaggcagagcgaccagtctcaagagcgctccccatggcgtcaggagatgcggcggcccctgtcgttcaggtgagcgtccatggctttctcacctgccgccgagtactcgaatgctcctcgatcccataccatcatatgggctgccaatttggttgctaggtcgtcgtaaatgctaacccccttgattcttccgttctctccagactgtggtgctgaaggttgccatccactgccatggctgcaagaagaaggtccggaaggtgctcaggggcatcgaaggtgcgtgcctagccgtctagaaacacatgcctcttgcgagtcagcaggttcctgcatacattttgggctgtttttggctgaaccgagcggggtggttccggcgattgttttcaggcgtgcaggacgtgacggtggacgcctcgcagcacaaggtgactgtgacgggcaccgtggacgccgacacgctcatcaagaggctgtacaagtccggcaagaagggagtgccctggcagtgtcacccgcccgccaagaacagcgagcccgcgccggaggccccgccggctccgctgccggccggcgacggcggcaaggatgctgctgctgctgtggccgcggcggacaagaagtcggaggaggcggtgaaggagccgcagggcgagagctccgaggaggaggagaagaagaagaagaagccggagcaggagcaggaggacggggccgcagagaagaagcagcccgaagcagagtcgtcaaaggaggtggagaaagtggaggcgaagacggacggcggtgacagcgagggagctg

SEQ ID NO: 135711 - DNA, 416 bp, Zea mays
  Clone ID: MRT4577_55246C.1
cccccaaaatcttacagttttttttaaaaatatgaagaaaatttggaaaacttatcccaaaccccttttttggggggtttcaacaactaaaaaggaggttagtttgttacatttaaataattttggggggagtttgccaccactggagggagtccacgggaagcacacaaaaagcttattggttacccttttgaaagcctggtcatagctttacaacatatttaggttgatctcctcaagctaggggggcctatttttgtttggaacccaacatttaatcccgccgttgaagctaggaatctccttctttgtttgggtcatgttgacaaaaatgacccgatgtaaataagtcaatgaaaatgacccgatgtccttgagcggatgtaaattgactgatgcaggggtcaatgtcaatg

SEQ ID NO: 135712 - DNA, 534 bp, Zea mays
  Clone ID: MRT4577_55247C.1
gggggccaggaaaaattgcaacatttgtattgcatcgaacaatagaaagggggaacatgtctgcataccctctttatcaggggtaaactacaacgccatttttttctggagcggttttttataaaaaaccctggggacggcccccatgatttttgatggggaaagccaacacgccgggatggccccctttgtttgttggggaaagccaaacggcaaggggtgatggggtcctccaggatgcaccaccacaaagagacacacccggcggtgcgggaaatcctagaagtcaaccgcaagccgggggggaggatctgtacgccatgcgcgaccttaggaaaaaaaatcacctttgggccttttcaagggcaccgccgccccactgctatgcaaaattggaccacaccctgggaccggacctggaacctaatccggagcctgtacctagggaaaaaacactcaccacgggcacaaatctgggggccatgggggcaaaacccttttaaagaattcctccacgcggggggacccaatatt

SEQ ID NO: 135713 - DNA, 114 bp, Zea mays
  unsure (1)..(114): unsure at all n locations
  Clone ID: MRT4577_55248C.1
gtanggacgcgctgaagtgtaacaacagcgtcctgccggaggagaccgccgcggacttttttctgggcagacgtggagaaagactgctatctcgtatttaatctgttttacttc

SEQ ID NO: 135714 - DNA, 1562 bp, Zea mays
  Clone ID: MRT4577_55249C.1
attgggtacctcgaggccggccgggctgacttcccccagatccagatcgtttccccagatccagatcgcaggcgtgaagggcgactgttaccagattatgatccgttttcgagcttcgaggaatcgacggtcaagcttcggtgaccaagtgacctggttcttcgagttctgcaaggttgaagaccctgagcatctatttggtgaagggaaggaatcttgcatcatcgcctgctaatataatctactccacttggactgtgcttgttgcaagcttcaggatactataccagcctcctaagtgaaggcacaaatccacaagactatgacgatttagttgacttgtatcctgaggaacaaccacaaagggtcgaagtaaacacttatgcaccctctgctagaccgaaccataagaggtcaaagaatttcagtgacgtggaagacgagcttttggtgtctgcatggcttaacataagtttggatccaattattggttataatcaaactcgcagttcatattggactagaatttatgactactttcatgccaataagaccttctcctcaacccgtagccagaactctattatgcaccgttggaccagcatacaagaaggtgtaaacaggtttactggatgccttgctcaggttgagagaagaaggcaaagtggtgctacaatgcaagacaagcttacacaggcgtgtgctttatataagtctgaagataagcaacataaagcttttccatatatgcattgttggaataagttgcggacacagcgtaaatgggagatgaaacttgaagaattggctgttggcaagtcatctaataagaagcaaaagatgaactcaaatgaaacctcacctccacatttaccaagtgccaccgaaacaagcgagcctacaactccaaatgagactgtcacaacaagaccacctggaaagaagaaggccaaagcagcagcatttcaagctgaaaagaaaggctacacagaaactttaaacaaattatttgaaaagaagaaagaaacagatgaatttaaagaaatgaaaaaagacgagaggtttagattagcattagcagttgaacaagagagggctgcgaatgagaaattaaatatgcagttaaggagtaaagagctagaattgaggcagcaagaagttgaacaacataagaagagggaagaagagaggattatgacactagaccttagtgtcatgcctgctgatcagaagcaatattacatgagactacgatctaagatattgtctgaaaatgcctaatgttacatggtacattaggtgttgattagtctttagctaaactgtttgctttttatcactatagatttaggtttctttcttttggtgctatgtaattggataatacacaactagctttgcttattttttagctaaaatgtttgctgtttttatcactgcgattttaggtttctttcttttggcaatatgtaattggatactgcccaactagcttgtcatatataattcaaacatcaggtgtttgtttaaaaaaaaaaaaaaaaaaaaaaaaaaaaaaaaaa

SEQ ID NO: 135715 - DNA, 285 bp, Zea mays
  Clone ID: MRT4577_5524C.1
gggccacaggacagcattgggggtatcatcatcatcatcatcatcatcttctttgcttgggttattattaaagaacaggaattctaaagcgggctgtttcacaacacccctcaccagagagggtaccggggtctagtcaggggtacagcaaccgcatccatcggcagattactttccctccgattaaacacccaccccccccttttctctgcataatagttaaggaaaattagcatgcctccaagtacaaactgggcttacaagaaaaagggctactagcggggc

SEQ ID NO: 135716 - DNA, 153 bp, Zea mays
  unsure (1)..(153): unsure at all n locations
  Clone ID: MRT4577_55250C.1
ggccgcttttttttttttttttttcgctcacgggcttggcttattattagaaaatgcccgcaccactacaatcccgcaggtggtcatgtgaacttggnacttggagctacacgacaaataatgcatgnagaacggctaggctcctaaaaaaca

SEQ ID NO: 135717 - DNA, 643 bp, Zea mays
  Clone ID: MRT4577_55251C.1
gccggccgtactcagaccgctcaccagactccacgttcctcacgtcttcttcctccccagcactctctcattcatgtcacctcttttcctcactgtccctctctgttccctcgacggtcaggcctctccttaaccgcggatgccgatctctgccaccagcgcacggtcgaccatcatcctcctcccttttgctgcgtgcctaggtcggacctcaccttgccactgtgccgtaatatctctggcgcatgcgcccagcaccacgcaccggacgctcgactactccttgcctcatctacaccaggccatggctccctgaagtactccccgttccggccatcgatccctggtgttggtgctccctttctcctatgctcgctaggtattcggtgggacgcccgagccatgtgattgacgtcgttcttgtgtattcgaaattgattgatgttggtaagatgaattgttatttcctgctattgaattagcgagtaaattagataaataaattagtggtaatgattctttatccttagcagatgtgctctgggataacctcatgatccgtagcagtgcttgtgtactagtccattgagttatacatggaaggattctttcctcgcaaaaaaaaaaaaaaaaaaggccccta

SEQ ID NO: 135718 - DNA, 145 bp, Zea mays
  Clone ID: MRT4577_55252C.1
tctattaccacttcgtgtctttagtccattaaaacctaagcttcgcgcttttattgcaggggggggagtagtacattttgcctcaccatggagacttcacccactctctcgataagtgaggaatctctgcctaggatgtacagta

SEQ ID NO: 135719 - DNA, 297 bp, Zea mays
  unsure (1)..(297): unsure at all n locations
  Clone ID: MRT4577_55253C.1
ggggagtcagaagatctatacaatagtgttggtgatcgactccatactgtcaataacggcctatcacngctcgataacaggatgatcagctcgtggctgcgcaaggcaacatctaggcctttgcgcgcccgtgcttgcatgtgttcattcatcctactgttactgtacttttgtttttcctcccctgcttttcgggttatggcagtacttgtatgtagcaagcagaaatggatcaaatgtataatatggctgggacagaagttagggtcaaaaaaaaaaacataaacttaaatccnc

SEQ ID NO: 135720 - DNA, 318 bp, Zea mays
  Clone ID: MRT4577_55254C.1
attcggctcgagggctgagccacaagtaatttttagaacacctgcttatccaagccaccatgtgatggccaaatggggccagtaccgtcacactgcctcaatatgctacggccggaccgcatcatcaggcttggtctgctgcccacccactaggcaagagcatgcactgatgagcctctattgggacaaaagctatgatgcttgacgctgccatgtattactctctgaatatccaggtatcccgttcgagaccacacaccttacagtggccagagtaggagctcaagaatgaccccagaggacggcgaaatgcattcc

SEQ ID NO: 135721 - DNA, 402 bp, Zea mays
  Clone ID: MRT4577_55255C.1
agggcacaaaacaagaccgttttcatggtgataagttaataaccgacacacttgaccacataagtattactcaaggtattcgcaagcaataggactgccataaaacttacaaacattacgacagcataaagtttacatagtaataaacaccactaaaattagggattaatagtatccaacacttgcttactcgaagagaccactgtttctgcctgcggatatccttttcctactcacgggtgcaagcattcttgatgttcaaggtctgtggaatctcttttggtgtcttgcccttaatcatgtgagcaacagtctgacaggtcatgtcaaacagacccttgatgttcagatagtttgcaccccagatgaggtctaaaagccttggctgatctaccttaacga

SEQ ID NO: 135722 - DNA, 292 bp, Zea mays
  Clone ID: MRT4577_55256C.1
gaggtggatcaggttatgtattaggacagatactaaagttttcaaataaaaccttacacgctaagactcgaccgttgcatttacctacgtacgttattaacacacagaaatacacacaaacacatacacatatacgaactgtctgagtagcttggaagaaacccacagcgaaaacactgggaaagccacactgtgtcctgtgaaacctaggcacaccagcttaatttgatacgtacggaaacgacaaattttaattccaatgcaaggtcttactccatgcagtatgacgatt

SEQ ID NO: 135723 - DNA, 458 bp, Zea mays
  unsure (1)..(458): unsure at all n locations
  Clone ID: MRT4577_55257C.1
naaattcattcgcccccttcctccgccactctgcccccttcctccgcccgccccctttgactccgcccactgagccgattcctctgctcattccagccgttcctccgcgattcaccccaccatcacgagcactcccaggggcatttgggcggcgagtcgtgcagagagcttgacctgagctatggagaagttgtggaatctcggagatgaggtccgtgagcaataaatcgaggcgcaggagcgccaacggaccctgatgacattaaagttggttgtgattacaaagtaaaaggctgagaggacgaatgactaagaggaggcaaggatgaacaccgtcactgacgagaagcactgtgcataagcgaacctaccaccaacaagacaataagatggaccccctcgatcgtggcactcatgcaacctggatcctcagatgaacgatctcccgattaacgagg

SEQ ID NO: 135724 - DNA, 281 bp, Zea mays
  Clone ID: MRT4577_55258C.1
gatacttgtgccgccgtcggcaatcccctcccgtggtgcgacaccggcaatcccctaccatcctccgccacctctgttgacagcgagaagagatggccggtaagggtgatgggccgggaatcggcatcgatctcggcaggacctactcttgcgtcggtgtgtggaaagacgaccgtgtcgagatcatgggggggggggagggtaaccggaccacaccctcggacgagaacttgaccgactgggaacggctaaagggagatggggtcgagagcgaggggggg

SEQ ID NO: 135725 - DNA, 183 bp, Zea mays
  Clone ID: MRT4577_55259C.1
aaaaaacaagtgacacaacacggacactttcaacatttaaggggataacattgccaattccaccaacatggtttttttactaaaacatattgccttaaaatattacccggattaaaactttgggggggttggccaaaaaaagcggtttattcttcaaccaggttgaacccattttcttaatcc

SEQ ID NO: 135726 - DNA, 428 bp, Zea mays
  Clone ID: MRT4577_5525C.1
ctaaaggattcatcgtgttggcaaacaaagaaacttgcgccaagcaaatgaggtcccaagattcctgacaacattctaacgaaaacagtgcacaagcgcaaacggccaccatcatattcaggatttgaaagtttagcgggtaactctaaaagtcatctaaacgtatctccacgggtagcgcctgatattccaaatatctgagaccttaactgaactacacgccattgttcttactaagacaatgaatgaggcgacatccatgaatagacattgctgacaaagatgtcagcattaagttccacggctggtgcctggctaaaaatcgcatgggtatgggggcccgctagcattgcatgcacctaggaagactcgatggacttgcgataccatggcctgctaacggtgctagatactgcacccaacgagga

SEQ ID NO: 135727 - DNA, 222 bp, Zea mays
  Clone ID: MRT4577_55260C.1
cgaggagttgatgattgcgtacaaggaccaccaggtccttgaccccttaattccgcaagcaaaaaagaagatccacccccaccacctcttatattaaatggcctggtgtgtaaatataaatataaccaaattcctttgggtaagctatatatatgggtgggatataataaatgacacgcgctatagtgtgtcgtgtatatagccccaataaaaaaaattata

SEQ ID NO: 135728 - DNA, 459 bp, Zea mays
  Clone ID: MRT4577_55261C.1
aatccaaatctaatttgtattcatttatgagttctatactaaaagacccaaattcctttactattaaaaatatgtttaggttccagccatatggttgggggtattttggtctatcaattgtaatttaggtagtacaaataacgctctcgataaatagtgtacataatacttcttgttgcaaacatcgacaccactcttctaccttcacattcgtccaggtacccaactatccaaggcttcaatcaaggaaaactctgcaattcaatgaaatccatatctatgaggctgtggtaacctgaaaattgagcagctaatagatatcatggggccactgtttgcgaagagaaattctcaacacctcacttgtaactttgtgctaagagaccaagggatggcaactaagttgcatggctagatgtgagttccttcagtactactacttgcaacaattatttgatc

SEQ ID NO: 135729 - DNA, 563 bp, Zea mays
  Clone ID: MRT4577_55262C.1
gctccgtgatcccccacctcgccgactggcttcttcgctccacctcgtcgacgggcagaggagacccctcagggccgggatcggactcctctttcaccgatttttccatgcactttaggctaaaaatgctttggtctgaaacctatctgcccttttttctggccgccaacggtttcagccaacgcataccagtgatgaagatcttccgctgagttttgaaggtggcgagggatctttgctgcggggttctatttgttctcagtgatttttggcaaacactctttggttagattaagaatcatggaaaggtacaaattgatacggaagataggtgatggaacctgtgggaatgtttttatggcttctaatgtagaaactaatgaaattgttgctgttaaaaaaatgaagagaaaattttgtcattgggaagaatgtattagtctgcgagaagtgaaggcccttcagaaactatttcaccctaacattgtgaagctgagggagtgacgatggaaaaccatgagctgttcttcatctttgaacacatggagtgcaatttatatgat

SEQ ID NO: 135730 - DNA, 739 bp, Zea mays
  Clone ID: MRT4577_55263C.1
aatttctcgcggcgtcgttccgtccaaatatcgccccgcgatcccccacctcgccgactggctcccctcctccacctcgtcgacgggcagaggagacccctcagggccgggatcggactcctctttcaccgatttttccatgcactttaggctaaaaatgctttggtctgaaacctatctgcccttttttctggccgccaacggtttcagccaacgcataccagtgatgaagatcttccgctgaagcttgctcaagctgcaataaagcatgacggtggacctagttttgaggtggatgcgctgagttttgaaggtggcgagggatctttgctgcggggttctatttgttctcagtgatttttggcaaacactctttggttagattaagaatcatggaaaggtacaaattgatacggaagataggtgatggaacctgtgggaatgtttttatggcttctaatgtagaaactaatgaaattgttgctgttaaaaaaatgaagagaaaattttgtcattgggaagaatgtattagtctgcgagaagtgaaggcccttcagaaactatttcaccctaacattgtgaagctgaaggaagtgacgatggaaaaccatgagctgttcttcatctttgaacacatggagtgcaatttatatgatgtcataagggaaaggcaagttgctttccctgaagggatataaagaactttatggtccagatactgcaaggtcttgcatatatg

SEQ ID NO: 135731 - DNA, 2256 bp, Zea mays
  Clone ID: MRT4577_55264C.1
cattggtacctcgagccggccgggaattctcgcggcgtcgttccgtcccaatatcgccccgcgatcccccacctcgccgactggctcccctcctccacctcgtcgacgggcagaggagacccctcagggccgggatcggactcctctttcaccgcaggcaattgaactcacgcagggtatacggttaataaggccaaagtataccaatttgattgccgtgtctgtcgactgcactcgcaaccgaatcgaatgtggaaagtgcctgtctccagaggtcctttatagcctgttttaggctttgttttgcacgatttttccatgcactttaggctaaaaatgctttggtctgaaacctatctgcccttttttctggccgccaacggtttcagccaacgcataccagtgatgaagatcttccgctgaagcttgctcaagctgcaataaagcatgacggttgtgcacataatgatgcttaatcattcatgttgcgaaaccctccagtggaacttccttcttctgatgcaaccatgtataggtggacctagttttgaggtggatgcgctgagttttgaaggtggcgagggatctttgctgcggggttctatttgttctcagtgatttttggcaaacactctttggttagattaagaatcatggaaaggtacaaattgatacggaagataggtgatggaacctgtgggaatgtttttatggcttctaatgtagaaactaatgaaaattgttgctgttaaaaaaatgaagagaaaattttgtcattggggaagagtgtattagtctgcgagaagtgaaggcccttcagaagctatttcaccctaacattgtgagagctgaaggaagtgacgatggaaaaccatgagctgttcttcatctttgaacacatggagtgcaatttatatgatgtcataagggaaaggcaagttgctttccctgaaagggatataaggaactttatggtccagatactgcaaggtcttgcatatatgcataataatgggtattttcaccgtgatttaaaacctgagaatttgttggtgacaaatggtattattaaaattgctgactttgggttggcaagagaaatatcttccaatcctccttacactgattatgtttccaccagatggtatcgggctccagaggttctactgcaatcttcagtttatacacctgctattgacatgtgggcggttggtgctattttggctgagctttttacactgtccccactttttcctggtgaaagtgaaactgaccagctttacaaaatatgcactgtgcttgggacccctgattgcactatttggccagagggaatgaacctgcctcgttcatgcagctttaagttttttcagaatcctccaagaaacttatgggagcttattcctaatgcttcatctgaagcaatcgatttgatccagcaactttgttcctgggatcctcgaaggaggccaactgctgagcaagcattacaacatcctttcttcaatgtgtgcaattgggtaccaagacctgtacatgatgcttaccatacaaaaacaaacggacctaaagctgaaccaagattggaactgaacctgtgggatttcagcacagaacctgatgattgtgtccttgatttaactctcagtctgaagccaagtttttctggaacagaccttggtaagcatgttccacgacgtacagaagaggaaattctcctgtacccgggatttgagaatacccctgtgaagtccggtttttggcctctggtgccatctgatcgtcccgttggtgatgttccggccataccatcctggcagcaggcgtacatggttgacagccaaggcgcattttctggctctccgttcttgcagtcgaacctgttggagaaccgttcgttagcacctatccggcaggtgaatttcttctgacggagacaggattaacagattcatacgattcttgatacgtccagcttctcgctgtatacacactatcttgaataaagtgttgccagtagaggaaatgtatatacagttcgttcgtagctcttgagcttctttctttctagagtacctctttttttttaatcgtctgttcatattccacaccactcctatgtaaataacggcatgcatgataatctctctcccaaaaacaaacaattttgtttgtacgccggctgctttgattttagaaaactttaaaacagatacagtatttgcaatacttcagttttaaaaaaaaaaaaaaaaa

SEQ ID NO: 135732 - DNA, 361 bp, Zea mays
  Clone ID: MRT4577_55265C.1
gtttgatggtaaacgacaacttaggcgatatcagccacaagttcaacgtacctctgcctgacaaggtcttccaaattaatgcacgcgacaaagctttgaatttgccctcacgaatgccggacttacccaactacgaattaagagaacacctttattcgtttaagaccgcctcagctcttggaatttcctatggtgctttatcaagcaattggaatttgacctccgacgacaaagtgtacatcagcgagatcgtcaagtacaaagatatcttcgacgggaacctgacaattcgctatggcattggcatgcgtgtattctatcaactgaagattctgaacaccgaggcgaaagtatccagtct

SEQ ID NO: 135733 - DNA, 484 bp, Zea mays
  Clone ID: MRT4577_55266C.1
tggagaaaccgggtcatgaaacggatattgcgggttcaagacgaacccatctgaagaaatgattgagaatccactcttcgacatcttctcactgcttgctccaaacaggattttgttgatattttctcgaaattcagtggggctgagcaagaactgctttttcagttgtatactcgggttgttgtgaatttgcatcagacaatagaggaagagtttgatgaacaatgtcacgaaactcaggtcggaccaattcttgatacagtcgaggagctggtcgaagaacagagtttggatcccttgttttctgataagactgatgtaatggcaatagcatatgatcttacaacatctaagaagaacgagatacaaaagttaacagttttgctccaaagggctgaagaacagaatcgccagaaggaagcccggatcagcatgctcaaaaaacaaacacaagatctctcaggcacagcggacagaatcgaaa

SEQ ID NO: 135734 - DNA, 356 bp, Zea mays
  Clone ID: MRT4577_55267C.1
acttgaggccgctttattatagggatgctagccgatcaccactgttgtaatgcacacgaaggcactagaaacccacgcttcattagttgtgcacaaaaagcagctgtatcctattccagtctgactcctgcggaaaggggaagtaggcagagttagtgcacggcttacgcgcggacataaacgctgagcagattaaggttacagagctggaaccgaggccgggcgggcgggacttaagacgccgacatagcctgtgggcgtcgcggggaccctgagccccagctgccgctgcaggatccgagaactcattgcctcgtcgaaccacggtggtcgcagcagaggtaccgccccccggc

SEQ ID NO: 135735 - DNA, 180 bp, Zea mays
  Clone ID: MRT4577_55268C.1
atgggtgtgctccatctgctgctgatcccaatgggtgtgctccatctgctgctggtcccagtggggctacttcgggtggcgaccttacgcccgatcatcaatttatctctcacgatttgggagtcccttcgttcttctccaatctccaggcattggtggacgggatggctagccaactga

SEQ ID NO: 135736 - DNA, 487 bp, Zea mays
  Clone ID: MRT4577_55269C.1
tttgttttgaatggtaaacaatatttccattataaatgtacctttggcgttggatgagaaaagaaaatacctgagtgacgcagtaagcaaatgccaagtgggctttaacagtaccgggggtctgcccatgtatttatagtcacggggtataatgtatacaaaatgacctatatgcggctttacatttggtgataattctttagggaagtatggaggtttataatagcttatgctgtttgaatctgatccccttgtttggaacatgctgaaagtttggttgtttacacgaaccgcactgtgagaaccttcgcttcttctgagcttctacctttctgattgaggtccacaagatacctagacaaacattatactctagaaacattgactaataatatgattaaggaacttaggtatgtcgaacggcgctaccacaatatatgatatttagactacactgcatctacactaatactagatattcaaccac

SEQ ID NO: 135737 - DNA, 767 bp, Zea mays
  Clone ID: MRT4577_5526C.1
ggtgagcaagttggtggaggtggccatcattgatttccatggcgaccaggagctaccgggggaaaaggtttaccacatcaatatgaccagcaactctggcattaatcccctagtaattaacctcgaccaggaagggggcggccccaatctgcgggccattgagctggccatgctattcgccaaaaccctacggttgggcagtaatcaacagggcaaactactagatgcgttcaaacattgctatttccgtcggggcatctcccaggaatccccccagagttggttgaaagtaccccctaacttttctgacttggaagctttgctggaggaaatggccgaggaagacaaggaagcggaaaagctgagactaaagctatccaccatgtttgagtacggcattttcaacaaaacccagcccccctatgaaaggttaacccgttggaatcttgccaaacttcccccccaattgcaggcgatcgccggggatgctttagcgtcccagttgatgagtcaccaccgtttactaggggaatcgactctcaggacggttttgttcattgatgaagctaaggagttgggccattccaaagcgttggacagaattgcggcggacggcagaaagtatgggctgggcctgtgggtggcttcccagtcttcccgccatatttccaaggatgtgctaaccaatacgttcactaagctgattctgccggttgattcttccgagttacccctaactgcccgcacctttaggttttccgaggagg

SEQ ID NO: 135738 - DNA, 789 bp, Zea mays
  unsure (1)..(789): unsure at all n locations
  Clone ID: MRT4577_55270C.1
ttttattttttttttngggataactaatgattttacccgctttttttttttttcccggtttttttttttttttttttttttttttttcttttttttaatatttctctttttcctgaaaggccccaacacaagggggggggttttaatattttataatactttacgggccctttttttaagaaccaaaaaattaaaaaaaaaggttaaaagccgcttaaatcccattaaaacccttcaaacccggggtataaacctaaaccccggggggagaccaaaaaattttttaaaaattttggggaaaaaaaaaaaaatttccccctttattttttggaaaagccccaaaatttttgaggcccccctcctgtgggttttttttttgccccccaaggaaatttgttggggacccctctttgttgaaaaaaaattttcttttaaggccttctaaataaaaagaggccaaaaattttttccagaggggcctcctcgggggaaaaaaaaaaaattattttggtcaaaaacacccccttaaagaggggggacccccctgtttgggggtcaaataaaaaaaccccttctttttttaaaaaaagtttttttcttcctccccccgggggggctccctattccccccccccaaaatattttgggaatacccccccttttttttttctcaaaaagggttcaaagagcccaaatatattttgtaggctccacgttttttttcaacaccacatattggcacccttttttttgggggggtcttttttttatcaaaaaaattggggtttt

SEQ ID NO: 135739 - DNA, 285 bp, Zea mays
  Clone ID: MRT4577_55271C.1
aaaagcccccgggcaggcccactgaaaaaacaggggttcatgggaaaaacaacttcggcaaggaagaggtttagcaattcccggtctaaaaatttaaaattggaatttttaaaaaacctggggggccaactttttgttttcatggaacaaaattgggcccctaacaaaacgagggggctggcatcacaggatcccttttccttttggggggccccgcctccaccagaagccttttttggggttttttttttcccccttccggggtctccccccccaagggggctg

SEQ ID NO: 135740 - DNA, 178 bp, Zea mays
  Clone ID: MRT4577_55272C.1
cggtctcttggttttggatacgccagtccaggagcggggggcagtaagccagcattgcgactgatgaccgcgtacacaatggatgatgcgaagttgtctacttacctgcagactaccagacccgatggcctatgatgtgtctctgcgacaaactaaagatctactattatgctatatg

SEQ ID NO: 135741 - DNA, 798 bp, Zea mays
  Clone ID: MRT4577_55273C.1
gccggccgccccgccaaggcggccaagacgtcggccaaggccacgccaggaaagaaggcgccggtgaccaagaagcccgcggccgccgcgaagaaggcgccggtggccaagaagcccgttccggcgaagaaggcggctgcccctgcccgaaaagcgccggcacggaaggcgaagaagtagaggggtaggcggcggagaaatgtagggtttggttctcgtatgacgctagatgtttgctctccctttagcctaggtggtgtctgtgtgtgcaatgttgtaaatttgatatcggatgctgggaacactaagtcaatcttacaaggacaagctcccgcccaacttccgcaagcttctgaacgttcagctcaagaagctcgtcgccggcggcaagctgaccaaggtgaagaactcgtacaagctgtcgtccgccaccaagccaaaggccgccccgaagaagaccaagaccggcgtgaagaagcccaaggccgctgccaaaccgaaggccaagtcccccgcgaagcccaagcccgccgcgaagaaggcgccggtagccaagaaggccgctccggcgaagaaggcggctgcccctgcccgaaaagcgccgtctcggaaggcgaagaagtagaggaggggtaggcgtcggagaaatgtaaggtttggttctcgtattacgctagatgtttgctctccctttagcctaggtggtgtctgtgtgtgcaatgttgtaaatttgatatcggatgctgggaacactaagtcaatctttcagtataaaaaaaaaaaaaaaaaaggccccta

SEQ ID NO: 135742 - DNA, 272 bp, Zea mays
  Clone ID: MRT4577_55274C.1
taggccgtcgcgacctcctatctgtgtctagtctagtcgtgccggggggcccgttgaagagcctttggcgggttcctggccgatactcgctcgtgtgtagcattgtctgcactcggccgctctcgtccccgctcgctgcctgcctccgccatgcttgcgctcatctcctgactgctggattggttccgctcgctcttctggaaggatcatattgaacttacgctagtggggcttcagtactctggctataccactttcgtcgatgtcatcgc

SEQ ID NO: 135743 - DNA, 281 bp, Zea mays
  Clone ID: MRT4577_55275C.1
gacttatgtccagttcacatggtacccaacttacatgaactcaacatttcggtgggctgaacaaacacaagctcatgacattattgatccgtgctatgacttgacgcagatgatagaactgcatgctctgctaacgatctagcgacggagactagctattctatgatggagatagtctgagaattacagcttatcaccagactatgagcttagtccttgagcacacgatcgtgctgtgaaatgcgcgtaatatagcgctcatactctgctgcgatacgaaa

SEQ ID NO: 135744 - DNA, 963 bp, Zea mays
  Clone ID: MRT4577_55276C.1
cgacgacgacgaggaacatggacatggagaggacccgccgcaggaagctcaacgagaggctctacgcgctccggagcgtcgtgcccaacatcaccaagatggacaaggcgtccatagtcagggacgccatcgcccacatcgagcatctgcaggagcaggagcgccgactgctcgccgagatatccgttctccagtcttctgacgacggcaccgccgccgccgccgccgtcaagacggaggacgctgccgccactgggggtgctgcgtacgacgtcgacagcgtcccctggaggaagaagccgagggcggtgccactgccgtccgtgtatttcaccgacaacccgacgagctccatctcgtcatctccgccagtccgaatcctggaggtgcaggtctcgcaggcaggggagagggtggcggtggtgagcctctggtgcagcaggggcagggacgccgtgggcaagatttgcctcgcactggagccgctgcgcctccgggtcgtcacggccaccatcaccgcgcgcggcgacactgtcttccacacactgttcgtggagacaggagaaacgggtggtgctcggctaaaggaggcgatactggctgctctcgctcggttcaacgtcctcgctaacgctgaccaagtcgtccatgagttactgggatgattgatgcggtggcatctcggacagcaacacctggtgttgttgtcgttgtcaccactctcgactgtccgattcaataatgatgtacctagggctgacaataggcctcaaattttacactataaaacttaaggattaaatcggattaggatcggctttgtttctattcatttttgaactacaaattatttagggccttaacaaatggtgaagaggcatttggatcgtgatccattaccacccctagatgtacctcaggaatgtttgaatatgatgtcattgccatttcttggcctgaagt

SEQ ID NO: 135745 - DNA, 368 bp, Zea mays
  Clone ID: MRT4577_55277C.1
ttttgtttttttttgttttttgatgaaacaaattctcaggccaggattacactacacgactcccaacaggaaatggaaagcgggagcctgtaccgcccgttccgggactgcctacaactcatatatatatataacatacctctctttcagggaagaatgagcataatatcatctatggaaagaaccctcgcccccgggctgtgcctatccaagagaaaagaacccggggctgatgctgtcgacaccttggactcggaggcctaggggttgggcttgcggaaatcctccagagggtttgccctgctggccggcggacgaccgggccacttgggcggcaccacttgcgccagatcaaccacgcgttggct

SEQ ID NO: 135746 - DNA, 324 bp, Zea mays
  Clone ID: MRT4577_55278C.1
gccatacggatgccgatgctcagagtgtccaacttcgtcgacgcatcatcctcattatccgatgggcagggagctggtgtcagctacgcgatcatggtcttggtccttccggctccagttccgaccactaagaatcacaggactagaggacccagaggagaaggaggagcacgagagtggagcaggcaggagctggagatcgtggaggttgcggcggaccagttagccgtggcgctgtcgcacgcggcggtgctgaaggagtggcagctgactcggcacaagctggcggagcggcagagggtcctggtgcaggcccggcatgac

SEQ ID NO: 135747 - DNA, 426 bp, Zea mays
  Clone ID: MRT4577_55279C.1
cgggcccggaattccggggcggaccacagccgtccggggcgccgccaccgccggggaatttttggttgttgttaaggcctgggcgtgcccacaaacccatgcccctggctgtggattaacgtgccccgaaaaaggggacctgtttgtttagattaagggccttgcaggtggcaaagttttataggttgaaatcaaccaggtcggtaaggaggcaggcatgtaaaaactaaggctgttttaagttaattggtccaattgggacctgaatggtattaagctaaacttttgtgaagggatttttttaaaaaaaaaaaaaaggggtggccgttttagaggtaccatgttttcttccccgtgcatgctacgttttaattttttttatggggtccccaaaatttaattaaatggccttggttttaaaacctt

SEQ ID NO: 135748 - DNA, 2234 bp, Zea mays
  Clone ID: MRT4577_5527C.1
cattgggacctcgagccggccgggaacttgctctcctctcacctaatcaatacaggcatcggatcctcctctgctctgccgctctggagagagtgaggcgtcgactctagctcgacgcagcaggcgccccctagtcgccacccctgccgctgccaaggagacctcccccgccctgcaaatcatctcacgaaggaggattcgagggctgatgcaacgggattcgagggctcatggttaggatggacgctcctgattccctacgaaggtggtttctattggccctaaacatgattgcgcaagcactagcaaggtgacaggaaaggaagcttctgcagcttggattgccaatagagtgaagcctatgttgattaaagagccagggcttggtgcaagagaaatgcagtataggttggaggatcagttcacagtcactttgtcatataacaaggtctgggaagggagaaagttggcactaaaggaacttcatggtacatgggaggatagcttcaagttgctatggaattggaaagcagccgttgaggcaacttgtcctggaagtctcattgagattgattgcaagaaggtaaagggacagatgcacttctcaaagatgtttgtggctttacggccttgtgtcaatggatttcttatgggatgtcggccttatcttggagtagactcaactcatttgactggaaagtaccttggacagcttgcttcagcgacagccatagatggacataactggatgtatccagtagcatatgccatatttgacaaagaaacaaatttgaattggaaatggtttatgacactcctgaagagggctattggaacacccccaggtttgaccatacacactgatgcatgcaagggtcttgcatatggggtgtcacaagtgtttggtgatgcagctgaacatagggagtgttttagacacctcatggctaatttcaggaggaagtacaatggtgaggtgctgaaatacatgtggccttgcgcatgggcatgcacacatgagagacatcaagtacttatggataaaatttcagaaacttgtccaaacgctgtcgcatatcttagatatgaccacccacacttatggacaagagccaaattcaataaaatctgcaaggtggattacgttaataacaacatttcagaatgtttcaacaattggattaaaaatgtgaaggagttgcctgcagttgatctcatggacatgctcagggtgatgataatggagaagattgctacaagacagtccatagccaataaaatgcaaggccacatcctacctagtgtagttaatgatctgcatgagaagagtaggaatcttcgatataccatcactaaaagtgggtacatgaagggtgaggtttctggtgctagtagagatggtgttgcttggagatatggagtaaaccttgttactcaggcttgttcatgtggacagtgggatgtaactggaaaaccatgcactcatgccatagcattcataacttctcaacgaaatttgagaatcgaggactatgttggagaatgttattcggttcaaaggtttaaagatgcataccaatttgaggtgtatccaatgggagacaggttacagtggccgaaattggacccaggattcgaaatgaggccaccaaaacttgagggcaggcctgctggcagaccaagaaagaaaagaatcaagagtgctggagagccaggtaagagagggccatatcaatgcaagaggtgcttccagtatggccacattgaaaaaggatgcaaaaatccagtggtggagccacatgaagaccttccagacaaccatttgcagagaaagacaaaaaaaggcaccaaaaaaaggaagaaaagtgagccagaacagacttcaacttcacttgttcaaatatcgccatctagttctggaccaatgacaaggagaagggtggcgatgtccccaacctgcagctcaccttcagccagcaagcaaggagaagcaccggcttcaagcaaaaggagattaattatctagctgactgtgatggattgtatgtcatttgcatgtgtttgctacttatgcgatggacgtgtaagccatatattgtattttattgttagaatcaggcacccctgaattatattgttgcaaagtatcgattgggagagaggagggcaagagtgtcttttcccatgggctgctgggttaaaaaaaagaaaataattcaaaaaaaaaaaaaaaa

SEQ ID NO: 135749 - DNA, 346 bp, Zea mays
  Clone ID: MRT4577_55280C.1
ccttcttacgggcaaactttaatattcagcaaagccaacggaatcatttacatcctttacctagcggccttctaaacaagagacttctttgtgcggaacttcttctccgcaaccaacaaaatgggctaagccctccccctgttttagcaccaattttgttgtccatgctaaaggggtgccattttaattaaaaaccaaaagaaaccgtttcccccttttaccaattcgattaaaatgccctgctttgaaatttaaaggtgtttttcctaccccttgcattaacaaggcctgttttgggcaatttaaggggaacctaaggacaagctctttttttttaaaccaaaaa

SEQ ID NO: 135750 - DNA, 561 bp, Zea mays
  Clone ID: MRT4577_55281C.1
cccgggttgacccagcgtcctctacttttatcaaaaaaaaaaaaacggggggggagaggagaaaaaaaaaaaaaaaaaaaaaagaaaaaaaaaaaaaaaaaaaaaaaaaaaaaaaaaaaaaaaaaaaaaaaaaaaaaaaaaaaaaaaaaaaaaggggcggccgttttaaaggatccaatttttttttcccttccttccaacgtaaaagtgggggggggggggaacttaattcaaattcactgcccccctttttaaaacggtgggattggaaaaacccgggctttcccaaacttaattcctttgaagcacatcccctttttgccaattgggataatccctaaaaggccccaacaattcccccttccaaacaggggggccgcctgattgccaattgttttttcccctttatcgcccctttaattccggctgttttgggttttccccccagcgtgcccgttacctttcccagggcctttgcccccgaaaatttccttttttgcctttcttttttcgccacattgcacgttttccccccaaaagctttaaagggggggctccctt

SEQ ID NO: 135751 - DNA, 1724 bp, Zea mays
  Clone ID: MRT4577_55282C.1
cacccgcctcgcgttgcgtcgccgagacaattctcaaaccggccggcaaaaacccacacgatgacacgacccacgcatcggcatcgcattcacgtccaaccgttcgcttgcgccctccgcaacaacgcaacgcatcgtgacgccgccgctttttgcttttccgactgctgtttccgccttttgagtaggcgttgggcgagcttcggtttcgacggacgcagccgtcaccgcctcaccggcccggccatgggcgccgccgccgcctgctctcttcgcctctgccacacgtcaccatccgctgcaacggtagggccgcgatgactccggcggttcgggtggggaatcctcgcgcgcccggtccgggcgccgcggtggtggaggacgaggaggaggcggcggtcgcgtggcgggagctgcgcggcaaggccgcggagctcgcggctgcgggcgaggaacgggcgatcctggcccgccgaatcgaggccgcgctccaggtaaggagggaggcgctgcggcaggcggaggagctggacgagttgacgcggatggtagacctccagcaagcgcgtttggaggcggccgtcgtcggcaggaggcgggcgctcgaggccgtggagcgggggaaggagcggctgcaggagcagatcgaccgggtgctgccgctgtcgaggtccctcaccgccgcgcaccatcgagtgcaggaagcgaaggaggcgttatccggagacaaattcagactcaaggatctgcagaggctgcttcggacgaggcagcagtgcatggttagccaggttgctggtttgtaccctgtgagagtcttccatgatcttccaagacatgcagaaaacccctgtgccgatactaatggggagcatgtgacacttccagaggaaaacagaacattttcaggtggagatggaacacatttacccaccattatcaaatctccagaagcacgtggctggacattttttggttgggacattatgaagcataaaatgaagcaaaaaagttacaggaacaaggtgctacagaggtccgcagctgttctgggatatgcagcacatgcagtcttgctcatagcttgctatcttgatgttcccctccgatatcccttgcgctttggagggtcccgatcttatgtgagtgatcgcttgccttcagctgatacagcatcatcggctgctttagcaagtaccaggaacaccgaatcagaactaacagaataccctcttttcctggaatgccaagacgatgactccactagtgcctcctatgccatttatttattgcacaaggatacggagcagcttctgaactatgttggagctgagagctgtggaaggcacgtgtttggtaacctacgagaacttcttaggatcgtgcagtctgataagtttgtgtacagatgatggttccaatccatgtggttttggagtgcttatgctgtagatgtattatagagatgtaagtaggtgtttttcttttctcttcctattctttcgtgtgattcattccctctttccctgcgctaggttttttatatgtgcaggaaataggcaattatgtttttctagagaaatgaaatgtactcacacgtatggcttcttgcatatcttattcgagaaaaaagatggtccaatcgaaagtcctacaaccactgggtctgtctccttgacaagcaagtgtttgatatttagattatccaataagtcacattttgc

SEQ ID NO: 135752 - DNA, 471 bp, Zea mays
  Clone ID: MRT4577_55283C.1
atggcaaggaacatagggtttccgaagctcgagcttggcctatctgcaatgtcgaatgatgaccttgtagacagcctcgcttacaacagtctgaagggcttaatcttgagcattgctttaagggcacaaaagaatgttgaagacgaaagctgccaaatagcccttaggaaccttcggtcagaggttattagactgagtaatgaagccctagaaaaggataaaattctgctttccttggtagacaaagtaaaggtcagcgaagtcaaacttactgcacagtccgcaactcatacaaccgaagtcgaagatcttcagaaaaagcttgccgaagctaatgaaaactttgaacttgcaaaggcaaagcaagagataagtgaatggacaagtgcaaggttggaaaagaatgtgaaagagcttcgtaaatccaaggaaagatgctatgagaaatccttagattgcgccaagaaatga

SEQ ID NO: 135753 - DNA, 718 bp, Zea mays
  unsure (1)..(718): unsure at all n locations
  Clone ID: MRT4577_55284C.1
ggtacnncctcgaggctcggccggtaacacaattcaaccacccacatccccacgccgcattcacacaccagtgacaccccaaaactcgccaattgcgcaccccttcacaccccaatccagaagaaagcaacccaaacaccgcccaaaatgtccatgttcttcggcgcaaaaccccgaatctcctcggagcaaaagattgcgcaggcagaggcggaaatcgatatggtttctgacatgtacagtcgtcttgtcaaatcctgcacggccaaatgcatagacacgtcgtaccgcgaggcggatctcaacaagggcgagtcggtgtgcttggatcgctgcgtgtccaagtttttcgaggtcaatgtcaaggttagcgagaagatgcagggagaggcgcaggggaagcagggtggtgggatgtttgggggtatgtaaatgtggaggagacgatacgattgtggggggaaaggaaagagattggctctggtagctgggatagggctactgggtacgatattccaggtgactcactatcgagagctgaagagcatatggaagatatctgtgggttccggatgcatgaggccgatgaacacactccacctttggtcgggtgttgtatgcaatctcagtcacgactacaatgctcaaaatctgtacaataaaaggttcatgaattcaactgatcgatctattcaaaaaaaaaaaaaaaaaagcggcc

SEQ ID NO: 135754 - DNA, 321 bp, Zea mays
  Clone ID: MRT4577_55285C.1
aagatcgagcttttaatttgctttgttcacgaattgttgtttttgcatgcaccatggacgacgacctgaaacatctgagggtcagcttctctggggtgaggcagggcggcgagacagtaccactaccatcacagcgaaggacgagttcacgcagaggctctcgcatttctgttttagcgagtgatgcggcagaggagtacgacgcggcgtacgcggccacggtggcagcagtcgcctacgccatcgccgcgcgagaggagaggctgtcagcgtctcaagagagcacgccgtatgctgccgcggacaggcttgcgcgtggaa

SEQ ID NO: 135755 - DNA, 713 bp, Zea mays
  unsure (1)..(713): unsure at all n locations
  Clone ID: MRT4577_55286C.1
ttttcggcacgagggtccagtgtgccagcgcgtgccagagccggagaaaaatgctggcacgattgtaggagcacgggcgatgcactaggcgcgggcagcgtagggataagacagcagcacagcagccgggccgacggctggacgtggccggcgcgcatgaccagcaagcagcacgccggggagcaccagccgttgccgcattccagcagcgacaggcaccgagccgaaaatcgccaggcgccagcccacgccgccaggcctagtgctccctcataaaagcgtcgcattcctctcacggtcacggcactcgccgcgccagcagccagcctatgagcagcgcttgcggcggcggcggttgtagggaatggaggcagcagccgtgggcgacggcgcgccagcgggccgctcccatcagggcgccaagcgcgcgcgcggcggcgccgtgaagggcagcgagacggaagtggcggcgtggggccagccgccgccgctcccgccgccgccgggcccgggggcggggtcccggatctcccgcgtgggggcgagcgggggcaaggaccgccacagcaaggtgtacacgaccaagggcatccgcgacggccgcgtgcgcctgtccgcgcccaccgccatccagttctacgacctgcangaccggctcggcttcgaccagcccagcaaggccatcgaatgggtcatcaacgccggcgccttcg

SEQ ID NO: 135756 - DNA, 669 bp, Zea mays
  Clone ID: MRT4577_55287C.1
ggccgcgggttttttttttttttttttgtagaagtgaagaccctattgacacggagtagctagcagaggccttccccgtcagtatcctccacaccatgttcccattatccaaccaatcaacccatcctgcacatcctagcactcagagagagagctgcgagctgctaatgcaactggtcctctagaggaacttgacacagttgaggagagcaacgttgatgaaagagccaacaggggcgtcagtcttgcagcagtaagagttgccattgcagttgctgccgagaacctggataggacagttgaggataccgtcacagcagacctggttgttctgagcagagcagacggggttgttgcctccgctgctgtggggagcagcgacggcagcggcgacgagggcgaagacagtggtgagagtagagaactgcattttgtatgatgaagttggttttgggagagtggaaaagtgttgaaagtgttggaggatgttgttggaagatggagttgattgttggtggtcccggccggcctcgatggatccttttttttttttctgccattacgctgtacgctcgtttcaggacatccgagttgttttttcccgctgaacagcttaactatagggtgtactcaaaccatcttgtatgtcgcagttttcccaaaacaaac

SEQ ID NO: 135757 - DNA, 876 bp, Zea mays
  unsure (1)..(876): unsure at all n locations
  Clone ID: MRT4577_55288C.1
cagcgaccttgttgctgccgtcctggcgtgtcttccgcntacttaacccgcgagggccggccgcatctcgcaggcgcgatcgagctcaccaagcgcggatattggcccgtcagcagaacaagtgcactgcacgcgacgcgatcgaccggccggccgggcaggcagacagacattatttcaattcccactagctagctagctagctgctgcaggaggcaagagacgacgacgacagccagccgccaccgtgcggtgccaaggcgagctccggtccgcgacctgttgtgcgccgccggtgctggcttctcttccgcctcgacgcgcgacgatcgatggggttccccctgctcgcgttcgtggcggcgaggggcctcatgcaggtgttcaacctctcggcgccgctcaacctccgcctgccgctcgcgcgccacctgccggaggccttcgccgtcctcttcggcgtgctcgcgtcccacgccgcgtggctcagcgacgccctggcgcgcggcgccgcctggcgccacaccgggaaccggggcggcgtcgacgagtatgtccgctacgccatgctcagcatctccgactgagacgcgcgcatccacggcggacgacaatcaccatctccgaccccgtccctgcgcgatcgagagggcgtagattagcttaggatctctctccccctccccctttgtaacacattgctcgctcctttcgtttcttcttgttcgtagcatgcgtgatttttggtagcatcggaaagatctgggagattgttgtaacatgcaaccgtggaccgtggttaatttgtaaatacaggtcccggccggcgaggaattttgtttgagctaaaaaaaaaaaaaaaaaatcggcccgtac

SEQ ID NO: 135758 - DNA, 1094 bp, Zea mays
  Clone ID: MRT4577_55289C.1
ggagcataaacaaaataaaataggtttgagagatcaccgaaggaaagcgactcctggaaaagccaacgcgacaccaatccattcttccctcttccacaggctgaggaccgaacaccgaagccaggcagccagccgaggaagccaggcgacaggcgacgccaagtcgagaacaccctaggtggtcgctcgcaggctgcgagtgagagccgtggcggagtcgccgtccttgcccacggaggaggacacagccgccggcgcagtgggatggcgacgccgacgcccatgcccggaagcgaggggacgctcgtggcggtgatgccgcggtccccgtccccgacgccggcggaggcggggacctcggcgaccgagacgcccgtgctaatattcctttacttccacaaggcgatccgcgcggagctcgaggcgctgcacggcgccgccgtgctcctggccaccgagcgcaccggcgatgtcgcggcgctcgccgagcgctgccgctttttcttcagcatctacaaacaccactgcgatgccgaggacgcggtcatctttccagcacttgacatccgagtaaagaatgttgcagggacctattccttagagcataaaggagaaagcgatctttttagccagttatttgatctcctggaattggacatacagaatgatgatgctcttcgtagggagcttgcgtcatgtacaggcgcgatacaaacgtgtctcagccaacatatgtccaaggaggaagaacaggtctttccattgctgacaaagaaattttcatgtgaagaacaagctgatttagtgtggcaattcctctgcaacattcctgtcaatatggtagcagagttccttccatggctttcaacttctgtcacatctgatgagcaccaagacatccgtgactgcttatgtaaagtagttcctgatgagaaacttctccaacaggttgtattcacatggatggaggggaaagcagcaagagaagtggcagagagctttgccactgaatctaatggttctcaagccgacaggcatcctatagatgatattttatactggcacaacgctatccgcatggagttacatgatat

SEQ ID NO: 135759 - DNA, 212 bp, Zea mays
  unsure (1)..(212): unsure at all n locations
  Clone ID: MRT4577_5528C.1
gattaaaaagatctcgacgccgaggggttcgatctcgacgcagaggggttccccctttctagcccccgagggagggtcgggccccgctatggcgaggccgacccttccttgatgatcaaggcgcanaggctgcctgacgaggcgggcccccgcccaaatatccagcgagtgttcggcggcatccctcggtatgccgggcctgtccgagggac

SEQ ID NO: 135760 - DNA, 335 bp, Zea mays
  Clone ID: MRT4577_55290C.1
gactagttctagatcgcgagcagccgccctttttttttttttttaggacaagcccccctatgcaatcaggctgggcgtagtgttacttgcattgccaactggtgggtagatgccaacaagtggatgatacagatacagtactggtatatgatgctgctgcctgtattgaggatgctctcggatgtctggctagacgaagaagcgtatacggatagtctgctttagtaaagctcagacagacaactatgcctgagtggtgtgggatagctacctagcaccagacatggcaaactaatgtttccagagtatatgtaactgaaccattacctcatctg

SEQ ID NO: 135761 - DNA, 185 bp, Zea mays
  Clone ID: MRT4577_55291C.1
gcaaaatcgactctatttagtaagaatcaatgtgttctcttttgagatacttttattttgcaaattgcaatggacaacgacacctcagcgatcgttcgctggaaaagaatagagaatcaatttctggaaacaaggagttgatcccgccgactaggaagatacgctaggtctggactgcacgctcg

SEQ ID NO: 135762 - DNA, 903 bp, Zea mays
  Clone ID: MRT4577_55292C.1
caccccacgcgtccgcggacgcgtgggcgaccgtgtgtgtccttcgcctacttaacccgcgaggacacgccgcattccgcaggcgcgatcgagctcaccaagcgcggatattggcccgtcagcagaacaagtgcgctgcacgcgacgcgatcgaccggccggccgggcagacagacattatctcaattcccactagctagctagctgctgcaggaggcaagagacgacgacagacagccagccgccaccgtgcggtgccaaggcgagctccggtccgcgacctgttgtgcgccgccgctgctggcttctcttccgcctcgacgcgcgacgatcgatggggttccccctgctcgcgttcgtggcggcgaggggcctcatgcaggtgttcaacctctcggcgccgctcaacctccgcctgccgctcgcgcgccacctgccggaggccttcgccgtcctcttcggcgtgctcgcgtcccacgccgcgtggctcagcgacgccctggcgcgcggcgccgcctggcgccacaccgggaaccggggcggcgtcgacgagtatgtccgctacgccatgctcagcatctccgactgagacgcgcgcatccacggcggacgacaaccaccatctccgactccgtccctgcgcgatcgagaaggcgctagctatcaagctgcggtccgtcgtgcatgctcgtggtggcaactgcatgccgcccctcgctagattagcttaggatctctctccccctccccctttgtaacacattgcttgctcgctcctttggtttcttcttgttcgtagcatgcgtgatttttggtagcatcggaaagatctgtgagattgttgtaacatgcaaccgtggaccgtggttaatttgtaaatacaggtgaattttgttcgagctt

SEQ ID NO: 135763 - DNA, 301 bp, Zea mays
  Clone ID: MRT4577_55293C.1
actcaggaaaccatccaactgggccattctcctggcttgcgcgtgctactcctgcttccgccatgcttcacatcaaagacttccgcatcgtcatgcccatgtccatgtaagagtacgatatatggctgatctacaccatcatgaagatggagcagcagaacaccaacagcaaggagggcgtgcaggtgctgcaacatgcccccttccacgaggatgccaaccttggcaaggtccacttcactttcaaagtttatcatctgcaaagcaacattccgtcatggatgaagggcttttcaccttc

SEQ ID NO: 135764 - DNA, 298 bp, Zea mays
  Clone ID: MRT4577_55294C.1
tgtgaagcgcctcaatcgctcgcgagagtccgcatccaccctcgagcgctcagtcactcgaacggaggcggatagatagtgagacagatccctcccgtctcctgcctcgtacccatcgcggagtgagttcgcgctgctcggtgcggcgactgcagcttcgccggcgccgcgtcaacgacacggccgtgctctcgaggatctcgcacctcaacgacttcacgcggctgctggcgtccagtccccgagctggggacttcgacagggcggccgccgcatgacgcttatcgacgagccgaac

SEQ ID NO: 135765 - DNA, 403 bp, Zea mays
  Clone ID: MRT4577_55295C.1
gcggccggttcgggaggcactctgcaaagagggaacaacccaatcccaccattattcatcagttgtcgccatcagttgtcgccaatacaaagtactttcgttctctttcaaaactgcctattattccgaattatccagtcatcgaaacactttcagtgaccacacgaaccttcacattttaccgcagttgtgcaagttttcctctcatgatggtggcgctcgctctattgatcacgaattggcttatttgtgctgcactgggctctacaaaattcataccacaagcacaaaattgccacacatacaccaatggaaacacgaatcatggcacttggggaaattttatctggccctatgggtggtcttgggctttcggcaccgcggagaactggggcccagcggc

SEQ ID NO: 135766 - DNA, 444 bp, Zea mays
  Clone ID: MRT4577_55296C.1
agcacgcgtatgtgaaaacacaggtgtacaggcctataggctccaacaagcaatggcaacgagcaacatacctttatcacccttgttcggtcaacaatcgtccgccctatctttgcagcagccattggtacaaaccatcagggctcagcatctagaccaactatggctaccacggagcaaccaactaggtgtcacaaacaagcatccctactctgcagaacaacaatttcttatcattcaaacaactgtctacactgaactctgctgcttatttgcaggaacaactattaccattcacccagctagctactggctactctcagcagcagcaacttcttacatttaaccaattggccgcactgaacaccgctgcttatttgcagcaccaaatactactaccatatagccagctagctgcagtagaccgtgctttcttcttgacac

SEQ ID NO: 135767 - DNA, 1094 bp, Zea mays
  Clone ID: MRT4577_55298C.1
cgcgaacgtttcagccgatcgagcaccatcgtcacagtcagtagtagccaagcatatttctttctccgagtgatttgcgctgagcgatcagttcatccagagcgagcggagctgagctgagctgagcgagcttgcgttgcttgagagaccctgccatggcttcccaccaggacaaggctagctaccaggccggcgagaccaaggcccgcaccgaggagaagaccgggcaggcggtgggggcgaccaaggacacggcgcagcacgccaaggaccgggcggcggacgcggcggggcacgcggcgggcaagggccaggacgccaaggaggccaccaagcagaaggcgtccgacaccggcagctacctgggcaagaagaccgacgaggccaagcacaaggccggcgagacgacggaggccaccaagcacaaggccggcgagacgacggaggccgccaagcagaaggccggcgagacgacggaggccgccaagcagaaggccggcgagacgacggagacgaccaagcagaaggccggcgagacgacggaggccgccaggcagaaggcagccgacgccatggaggccgccaagcagaaggccgccgaggccgggcagtacgccaaggacaccgccgtctccggcaaggacaagtccggcggcgtcatccagcaggccactgagcaggtgaagagcgcggcggcggggcgcaaggacgcggtgatgagcacgctggggatgggcggggacaacaagcagggcgacgccaacaccaacaccaacaccaacaccaccaaggactcctctaccatcaccagggatcactagacgcgtgtatgcacacgcagcacttggtccgatcctgtcgtccgtgaccctgtttgcttgttcgcgagtccagtatgggtttgtgcatgttttcagtgtcatggtttccttttctacgaatttggtgttgtaattttgatttgcaggtacgttgctgtgttttttctgcgtcatcaagtgtctgtaaacgagtcgggcgggtttgagtgtcctttgttgtgataataaagttggtaaatcctaattaatatatagcatgcgactgtcttgcta

SEQ ID NO: 135768 - DNA, 585 bp, Zea mays
  unsure (1)..(585): unsure at all n locations
  Clone ID: MRT4577_55299C.1
ccgggtcgacccagcgttctgaagctttcagttcagccgagcaccatcgtcacagtcagtagccaagcatatttctttctccgactccgagtgatttgcgctgaacgatcagtttccagagcgagcggagctgagcgagcttgcgttgcttgagagaccctgccatggcttcccaccaggacaaggctagctaccaggccggcgagaccaaggcccgcaccgaggagaagaccgggcaggcggtgggggcgaccaaggacacggcgcagcacgacaagcagggcgacgccaacaccaacaccaacaaggactcctctaccatcaccagggatcactagacgcgtgtatgcacacgcagcacttggtccgatcctgtcgtccgtgaccctgtttgcttgttcgcgagtccagtatagggttgtgcatgtgtttcagtgtcatggtttccttttctacgaaatttggtgttgtaagtttgattcgcatgtacgttgctgtgttttttctgcgtcatcatgtctgtaaacgagtcgggcgggtttgagtgtcctttgttgtgataataaagttggtaaatcgtaattn

SEQ ID NO: 135769 - DNA, 815 bp, Zea mays
  unsure (1)..(815): unsure at all n locations
  Clone ID: MRT4577_5529C.1
ccggccgggacgtaccgaattcaaacggccgcgggcaatcccccaatttccaattccagggagggtcgcgaaccctccattggccattgctcgatctctgtccctctcgtcgcaccttcgcagccgtcgttcaccgaggccgcggatggcgaggacttcgggcccgccgggtcccccggagcccggccgccacgacgcgccgatgctgctgcgcgtgcacgtgatcgaggcgcggggcctgccagccatctacctcaacggctccagcgacccctacgtgcgactgcagttggggcggcgccgcccgcgggagaccacggtggtgaagcggagcctcagccccgtgtgggacgaggagttcgggttcctcgtcggcgacgtcgccgaggacctcgtcgtgtgtgtgctcaacgaggaccgcttcttgggcngccgagttcctagggcgggtgcgggtgcccctcaccgcgatcatggagacggacgacctttcgctcggtaccaggtggtaccagctccagcccaggagcggcgtcaagttcaggaagaaaaggcgcggtacaccctacttgcatccgatctttcctcttgcatgccatggaaatcaatgcttgatctgtgtgatatgattcaaagcagtcgaaacagacaccaaggagttgtgggtaggagaatggatgcttgctctacacatggattacacctcatgataggcgtgctagtgtggtacctgttcagggaaataaaatcataagggcttgactttgattctgggtgttatagccaagatttttttctacttcctatagtcatgc

SEQ ID NO: 135770 - DNA, 366 bp, Zea mays
  unsure (1)..(366): unsure at all n locations
  Clone ID: MRT4577_552C.1
tttgcgggacgaggcgcgagctagggctctcggcccccgcgcaccgagcgagcgcgctcgaacgcgcgccgcggagccgcgcgacacaacagccgcagccagcccgcctgagggagccgacagaagacagagagcgcccgaccgaaaacactctctncaacaaccncgcacgcacggagcgcgagcgaccccggcttttttgtttacgagcccaagctcaccagcagtgatatgagaccgccatgaaatgccgtataccaccaagctgctgaatcgcgaggcaggccgcgacaaacaagagagattaagggaacgaaaagatgaacagcgccgagaccaaaaacgagaacccgtgaactatgatgt

SEQ ID NO: 135771 - DNA, 518 bp, Zea mays
  Clone ID: MRT4577_55300C.1
ggaaaaaaaaaaaaaaaaaagcctacggattggacccaacatcgtgcaggtcgctcatggcagctttccgactctctgcttgcgtgcttggatctcggttccaggccactgagcaggtgaagagcgcggcggcgggcgccaaggacgcggtgatgagcacgctggggatgggcggggacgacaagcagggcgacgccaacaccaacaccaacactaacaccaacaccaacaccaacaaggacacctctaccatcaccagggatcactagacgcatgtatgcacacgcacttggtccgatcctgtcgtccgtgaccctgtttgcttgttcgcgagtccagtatgggtttgtgcatgttttcagtgtcatggtttccttttctacgaatttggtgttgtaattttgatttgcaggtacgttgctgtgttttttctgcgtcatcaagtgtctgtaaacgagtcgggcgggtttgagtgtcctttgttgtgataataaagttggtaaatcgtaattaatgca

SEQ ID NO: 135772 - DNA, 312 bp, Zea mays
  Clone ID: MRT4577_55301C.1
agtagagcatgcacaacctcaacttacagatcttaattggcagatgcacactgaggacaacgatgtgccactacgatggcgactgctaaggcagcttttagatacgattgatgatgaacaaccggctgatgctctgctagctattcgtacttgaggtgatccaaaatgttcgagcgacaactccaatgctgcatcatatgacaagctatgtcaaggcgtacaagcgtgaagaaccgatctgcatcttgggcatgaagttacctacacactacatacgaagaaagctcactgagtccagactgatatactact

SEQ ID NO: 135773 - DNA, 422 bp, Zea mays
  unsure (1)..(422): unsure at all n locations
  Clone ID: MRT4577_55303C.1
aaatacaaacaaaccgtggggcgagggacccaagggcgacaggaaccaaaggccgaccccaaggacaaggggggggggggcgggaccaccctaggggggaaccccagcacacgggcggccgggcctaggggaccccggcgggaaaccaagatagggggaaaaatggacaaagctgttccccgggggaaattggtagccggtcacaattccccaaaaaagacgggccggaaacataaaggggaaagcccggggtgcccaaagagggggcgaaaaaacaaaaatggcagtgggctcactggccggttttcagcccgaaaaccggccgtgcccgctccatcaaggaattggccaacccgcggaaaggggngatatgctttttggggggtttttcncttactccttcactggcttcntggcctcgg

SEQ ID NO: 135774 - DNA, 414 bp, Zea mays
  unsure (1)..(414): unsure at all n locations
  Clone ID: MRT4577_55305C.1
ggtaccactcgggtccggccgggnaaaaaaaaaaaaaaaaaaaaaaaaaaaaaaaaaaaaaaaaaaaaaaaaaaaaaaaaaaaaaaaaaaaaaaaaaaaaaaaaaaaaaaaaaaaaaaaaaaaaaaaaaaaaaaaaaaaaaaaggggggtctttctttttaaggggggggggaaaaaaatcccttttggatttgggagcccccatggaataaagttccctccaggcccaggggggttccctggtatggggagaatccaccatttcgcggggttctttgggccccaagctttgggggaccttatctcccccctggggccttttatgttcctaaagcggggggggggcccagggtgcgaaaaactccaccccggggttggaaaaaggggtgagaaaacccccggcgcttttttttt

SEQ ID NO: 135775 - DNA, 620 bp, Zea mays
  unsure (1)..(620): unsure at all n locations
  Clone ID: MRT4577_55306C.1
ctttttctcccctctgtcaatttttcctcaaagagttttgaaacaggagcctagttggactttttgaagagcatgccaaaacttcnatagaaaaccatgcattttactcttgttatcaaacattttacagtggattgtaatctcgacaagcgcaagtgacagctgccagcctgctagcctacaaaacttatgatcagttacggatgctttaacatggatggacaataatcgtcagtgctgcgagcatccagattacctgatgcatatttttgactagtcttcattggtcacatgctttgcttctctatcctgaactccattgtacctgatattcagaacctatttcgtgcttgtatgagttgtggtccttgactgttgtattgatttgggttccattagatgattgctagcatgcattattgactttaaatgcctagcgtgaaatgtgaatgatggagcatcccttanaaaaaaaaaaaaaaaaaaaccananaaaaaaaaaaaaaaaaaaaaaaaaaaaaaaaaaaaaaannaanaaaanaaaaaaaaaaaaaaaaaaaaaaaaaaaaanaaaaaaaaaaaaaaaaaaaaanaaaaaaaaaaaaaaggggggccctttt

SEQ ID NO: 135776 - DNA, 272 bp, Zea mays
  unsure (1)..(272): unsure at all n locations
  Clone ID: MRT4577_55307C.1
agacagacagnaagagcgacgaccaggncggncggggggcannggaaggcggaccggcacccncccngaaaccccacgncganggcggcagcaaaaggcccccgcacgggcacggcggnggcaaccggcggggggacaagcngacgcgnnnccacgccggcnacnnccgcancagcccggcgcccagcgggcaggcgccgcngnggcgcacgcccaacagcagcgaccccnccgcaaccacggcggccacggagcccccccngccccngccc

SEQ ID NO: 135777 - DNA, 108 bp, Zea mays
  Clone ID: MRT4577_55308C.1
gaccaatctgaaggggtgcatcatgggaccatacatcaaacataggggaatgactttatggcacatactaatacttaacaactaattctttaaagccaaatttcgggt

SEQ ID NO: 135778 - DNA, 441 bp, Zea mays
  Clone ID: MRT4577_55309C.1
ttgtgaatgatgagcacaggggtgcgctgcctgaagagtgaagcaaggacactatgcggacatgctggggtatggcatccaaggagatcagcgactactggcttgtgaattcagtgcgataggatctgtacatgagatgtgggatggaagaaaatgggttgcaggcgcacaacctggacctgctgttgataggatgcaaacaggtaaaagtgctgttgatgctgcagacgggctcgaatatgttcatgagaggggtgaaccttccataggccattgagatataccacccagaaatattgtattatcagaggattacacgggcaaaagtggatacttgaatcttacaagacaatctacagatatggctgctcgtgtacatgctactcgtggccgagggaccttccgatatgatgctccagagtctgctatgactggccaact

SEQ ID NO: 135779 - DNA, 655 bp, Zea mays
  Clone ID: MRT4577_5530C.1
ccggccggggcgacgagacgagatctctccgggggcaggagctgcgccgggagcatgcttgctgctagctgctcatcatccctactatgatagtgcgcggttgctcacacgtcaggaggggccgccgcccgtgccgtgctgccggtaacctgaactttaaatcgtttgtctcaaccaaataacctgaacttgcatcttttttttgtgaatgcatggagtatatcgagtactgttggcaagaggattgacgaccctgtgcgtctattaactcaagctatgacgcgcactgacctacagtagctagaacaatttagagaagttattagaattgaattcacagaagccaaaatcatattgcgacgactctttgttgttctggttccttgctagttgctacagaactcagacaagttagaacgggtgaagaagaaaaaaaaagtagttctacctcctcttgattcatttatcagggacctaattatggatcgatgattggtggatgggcctgcctcggcaagtcagcacaatttttcttcaattagatcaaccttctaataaaaatttcggcaactctcctgccgttttttttttaaaaaaaatagacaagtccaattgattttactttacgaaaaaaaaaaaaaaaaaatttgcggcc

SEQ ID NO: 135780 - DNA, 589 bp, Zea mays
  Clone ID: MRT4577_55310C.1
cccagcgtccgtgcttgcagaaccaggacgtcgtgtcgtgcttggtatgtagcctcgacctatagtgctgtccttgacccaacacagttatattttttaattttacaaaaaaatatatacatatatacaatttatatttaatattaaaaatttgagcatgatgttctactggttagacagcttcactcagtgtcttccgcccttcttccattagggcatgggttcaaaccccaccttctgcactatttttttaatattttacgtcgatttaatcaaatgggccgacggtctaacgggctggcctgacacagtcagcaggccggcatgacatgcctgggccagagttatggcccgctggcgtctggcccatgccgggccaccgtttggccatctataggcgtgcaacagattaatttgaaatagctgtgagaggttatttgtaaaaagatgacgcgggacgaccgttaaaactggtgctttaagtatagtatagatatagatgtctgataaacatgtataatcagtaaattgcattgtgtgcaaacaactgagatgataagatcctttagagaactccaatgtatacaat

SEQ ID NO: 135781 - DNA, 294 bp, Zea mays
  Clone ID: MRT4577_55311C.1
actggagccataaatgggcaacgacaaaaaaacagcagtcccttggtatacaagagtacccttccgcatgacagaattccagcttatgtcggaacacttctaagaatgtgccggaataaacactgaacatttgatccaaaaaacaaaaggcctaattgatgtggaaattaaactacactggttggatcgcctgccttagcatcttggggttgtaaaccacacctctggatacctataaacaagcaagttacctgggtattaatcggacatggaccaattcacagtcatgcacct

SEQ ID NO: 135782 - DNA, 2208 bp, Zea mays
  Clone ID: MRT4577_55312C.1
aaaaaccagactcctttagcctggcctatacatgtagtcttggattatgtgataatagtattgcctacctattgcctaccaggggcagttgctagtcaaatatacgctactgttaacctgcacacagtttactgttatgtgtggcatccgagcgaaactttctgggacttgcatctccttgttccttgtcgagatgcccagggtcataccaacagaaacaagggtctccagtgacctttcgctgtttgccacgagatcagcgtcaaattggatggcgtccttctcgaagacgcatatcactgtgctccctccaaaggagaaatacccaaactcatctcctttgcggacgtagtcaccctcttttttcaagaacgtgatgcttcctaccatggttgctccaatcgcaacaaatgctacctttccaaactctgaagttgatatcattgatacaactcttttattctcagtgaatacattgcaatacttgctattcacagcgatgggattcaccgtgtacaggcacccgggaatttccacaaatttctccacagttcctgagactggtacgtgaaacctgtggtaatcctgaggtgcgagccggaaaatgaccaacgatccgttgcttaaagcattcgagtgtgcactggtacctaggagaccctcaattgaaaatttacggcccttgatccaaagccttgtgctctcatcaacggaactgaaagccattaatcggctatcagcagcacaggtagcaatactgttttgatcaccatgtgcaattggtctagcaccaggcttcagtcctcttatgaaaaactcgttaaaagtcttaaaactttcaacagggtccttgatctcatccatattaatttgatccttaaataactcaaggaacttgggaatatcttttgcagattccagcgagttcatcttttttccttgcttctcagataggttcttcaagaggtctttaacacctgtattgataagagtgagtcctacttttgattggtataaagccctcatggacaatacaatttttccgtcaataacttcttcgactatcctctttgttcgccggtcgaaaaccagaatatgtgaagctgtagagccagagtgcaaaccaacatcatacgtggagaaatgtgcccattcactgagcttgaacatccacccataagatgcctgtttgtcagttagaaatccaccagtcataatctgattaccagttccctcatcgaagcaaagtgtcatatgtatcatatcatttatgttatcatattttccaagatcttcaccacagacagggcagttacttataagtggttcttcttcttgttgagcagccagtagggctgccagttcatctatgtcaactatgccatcactatttgtatctgcttgacggaaaagctcttcaatctttgcaactgctaatttattaccaaaagctttcatcaagtctgagaattctgataaggaaagagttccatcttcatcatagtccactatagctaagacacggcgggcaaagctttgttctgtttcaacagggtcttcaatgtgacaggagatggatatgctgcccacggtagtattgggtgacgatgggtccaacagacgaaggtcctcagagtgttcctccaagtccttagtaagcatttcaaagagattaacctcgcagtaaccaaccaaagtgttcttcgaaaatcggttcgtctcaaaaacagagatacgtgcaatatgaggtccattcgtctccactataaccttcttctccgagtcccacacaggcctgtgcgtgttgtcggacgtctcggtgcggtacgtgcggtcgccgagagagaggcacgcgaagaacttgtccttgaactgcatatccgccttggctatccggacgcgtgcgatgccggcgaactcgtcggcggcgagggccttggaggagaccgagtcgtcgccggcgccgcggcgcaggcggttgcgcaggcggcggcggaaccgcgcgaagcgcgagggcagcgcctcgccggcgccggcgcaggcagtgggccgcgacgccgagtggcccatccggacaggttggtggggactggggacgaagacggacgggacggcgcggcgcggcgcgccttttgcgggacggtggtgggcgcggcgtcagacagacaggcagacagacgcctaggcagatgtcccggccggctcgag

SEQ ID NO: 135783 - DNA, 677 bp, Zea mays
  Clone ID: MRT4577_55313C.1
gcggaggacccacgcgtccgcccacgcgtccggcaggataccatcgccgacgtggtgctgtcgccggaggagatggagatgtacgtcgacctgcaccccttcaccaacacgtcgccgtacacggtggtcgagaccatgtcgctggccaaggcgctcgtgctcttccgggaggtcggcctgcgccacctcctcgtcgtgcccaaggcctgcgataggtcgccggtggtcggcatcttgacgaggcatgacttcatgccagagcacattctggagctgcaccctgtccttctgaggagcaggtggaagaggctccggtggcagaggggcgccatggccaagtacttccgatcgctcatcgtgtgggtcgccaacagcggctgaagcagatacattgctgccaggaaactgctgctggctcctgcagattgaaggagtcatcatcattgggtatttgtgaaataacaacacgtgttgatagcttcatatacatatatgcatatatatgttcagtcaaaattttgtcgttgtcttttggtactacgtttgtataattttcattttagtgaaagaagacgagttcgccccattgttttatgtcttctatacacttgaacaggtggcgtcctttggacgccctgcaatgactaaatgaagcaagtccctgctgatcccaggcc

SEQ ID NO: 135784 - DNA, 2611 bp, Zea mays
  Clone ID: MRT4577_55314C.1
ccccctccctcgagtttttttttttttttttttttttttttttttttttccaaaaatctaaaagctaaatttacccacagagaatacattttgtgcaaaacatttttacacatacaatactacaatggacatttttacacatacaatactacaatggacgtggaattcaaggtacactaaggtctggtttggtgactagaaatcacaggtggattggatgacactgagggagaaattagtttatttctccttcaatctccctttgtcacaaaaccaaaccagccctaaggctgaatttactggtatgaataagtgaatgtgcaaaacattgtttagacagtgtgaatttgaagtagacggtagaatcgtcatcaactcagattaatagggcaaggtacagttatccactactagtggatagcaccactgggatacgtaatccggaaatccttaccatgatcaacatgtgtaaagaaagagaatcaatcaaggacgtagcaaaagcatacttgcaaagggccacaatgcacactgaacaatgtttctttcactttgctcctgtaggtgaagaattactggattttattttatgaattttcaggaaagatagtttgaatgaatttcaggaagcgctccgagtagagactgggttccacgacagatattgacaatgagttatattggatgcacttgtaagcatgctcaatcttcttccttatgctgtactcctgcaagatatcaattattcccaggtacagcaccacatcatacacctgaccattatcttcactgtcatcatcctcaaccgtctgttttgccctggccggcatgttaaccccaagttggatctggagccttgcggtgcctggaagcaagagatctacttcctcaaaacttgcacttgatgatcgaagacgggccccccttatatgggaaccaatgacaacatcattttgatcactagctcgctgaaccaaaaccagtccttcaggactgttcaaaacatcctcctccagagcaccttcttctgaaagaacagccagcctatctggtaggattgcttgatgaaaggatgcctgtgtccgtaggctttgaggagcccggaaatgaacgccaagaagcaaactataatccattattgcgtgctgctttagaaatttgctatcggtctcaatttgcgcaagcaaagtctgccgccaagaaggctcgagataaaatgaatagtttagatccaagtctttcagtgttgtgttctcgtcgatttttactttgtctgttgagcggcctaaggatgaacctttcaagtcaaacctccggtgaattctaagttcagtgcaaaacatgtttcccatcactacaaaccggaacttttgactgctggacggtttaaccctgtggaggccaaaaaacttagttatgagtgtgttctcataggtacggacatggtgataatactctggaagcattcgtagaagaacctgcacttcagacttccgtagagtcttgatcataaatcgatcatcctgagatagaaagaagacacttccactctttccaggagaagatagctccctaagtgcgtcacttccacaaatggaaaccatataatccgctgcatcaatcttgaacatctccctcaaatttctgaacaccattgggcagtagtctttccatttaaaattatcagcatgatgtgaaggagtaagtcgtgaaccatttttggggaagttcatccagaaacttgctctggaaccataatcagaagctcgcacttcacgtctctgaataggtgtaatctttccaactgtatacctagttctccttcgcattttgttgacacttcacctccggctgacggccgcgggcgtggtctgcccaggtttctttttgtccttcactattttctgagtgcggcgcgatacccttttcccccacggcgagaagcttgcatccaccacgacctcgctgatgagaacaccttgcatatattcccgttccagtataggaaggttggaatcagccttgttttcacatctttcaattgcagaactttcattggtttcgcgaccgaggaatttttcaatagccactccaaggctccaccttctttccagtagcacattagtggagcgagttttctcaaaattcaagcttctaacagatgaaatacctacagagtcctgatttctgctagccaccatgtctgccatgtccgatgaggcagagtgaaggatacgggaaccatgagtctggctttcagcaccaggcagtacacctctgtttcttaaatcgtcgatgtcggtaaccggaatcccacggcattttggatagaacgtgccttttccgtccttgaccccccttgtccaggttcctacatagtagccagagtccttccatgtgtagattccatagccatgcatggcaccatctaaccagttcccttcaaatgaatctccattgttccatgtgagaatttctttgcctgacatgaccccatctttcatggcgccaacataagtgttcccatttgcccaggtataggtgccatgcccctgcatttgcccatgcacccaagaaccttgaaaagtgtcttcgctgggatatgtctgta

SEQ ID NO: 135785 - DNA, 366 bp, Zea mays
  Clone ID: MRT4577_55315C.1
cacgaggacaaccacggccgactggctatgaacgtgcttctgatccagatcgtcagcggcggcatagacaacgcggtcatccacgtgcctgaacaagggcaccgccgacttcacgaacctgacggacgcgaccgaggctctgcaagactgcgcgatgcacctgcatgacagcctcaagctggacttactactgcccatctgcatggccttcttactgaagtcttaacgcgcttgtaccacaactgccagcgctacaccagacaactactactgctctgccaggcggtgtccgactccgccgagaaaatgcgtaggctgccttacactgccatgaacagcactgctgcagtcaacaataactcccac

SEQ ID NO: 135786 - DNA, 208 bp, Zea mays
  Clone ID: MRT4577_55316C.1
gcctgcacgcgccgggactgactggccggaccgacgcacgcgttttattttgagtgccagggaccgacacacaaccaccagcgctcttctgcactccctcacgccgtatgttgcgaccaagaagtcggtcccactctctgctagcgaggcggcagctggacatgaaggataggttcaaggagtgggcccacgcggccattaggcacct

SEQ ID NO: 135787 - DNA, 383 bp, Zea mays
  Clone ID: MRT4577_55317C.1
gacacctataaccctgcagtctgccaaccgaacctgtcacacctgcccgcatctactagggaaccaaccgttatggaagcctccacagcaatatcgctcttgctgactggcgtaaacaccacaggcaggggacgctcttgttttttactcggccagagatccgaaccgaacactgaagtactacacagctatgcttggcaaccaaactgctgagaacaacggctggaactaatcaaaaggacaccaatgccacgcttggctccagccaaacaaacaaacttaagacgcacaattgacataccactatggcgtgctacataatttatcattgaacgcactctgggtatttcactaacactaatgatgatatctacaagttagct

SEQ ID NO: 135788 - DNA, 548 bp, Zea mays
  Clone ID: MRT4577_55318C.1
tttttttttttttttcggcaaacatcattttattttgagctggtccaatatctgaactgacttacatcttagagcctacctactatgggtaattaccaatagcaaacaaaacaatactcaagtgctcaaacaccccgcaatccatgatactaataatacagtgccaatgctttcaacttgtcatcttctcctttcatttacttggcagcattcttgccgaagttgttgtggaaaaactggctgaacaagccaccctttgcttgttggtccgacatactcgcacgacgggcggcgttggcatcaccggctcgcttctgttcgctgaggctggcgaaggctggcatgaagcctgagcttcggcgacggccgctgacattgccagtaggagcagtctgaggagcactggaatccatggtatcggttgattggagtgattaaagtgagtattgagttagttggtggatttggatatatatccttcgccgttatggtctggcagtagtgtttgggtataatgtcggtgggtagtttgacagagagaaaatcta

SEQ ID NO: 135789 - DNA, 491 bp, Zea mays
  Clone ID: MRT4577_55319C.1
acgcggggtgtgcggtgttactgaacaaatttagttaagaagttaggcatttccatatttaaaaaaaaaaaaaaaaaaaaaaaaaaaaaaaaaaaaaaaaaaaaaaaaaaaaaaaaaaaaaaaaaaaaaaaaaaaaaaaaaaaaaaaaaaaaaaaaaaaaaaaaaaaaaaaaaaaaaaaagccctgggggggaaaccaaaaaaggggaaaatttggaaaaattcaaaaaaagggggggggggtcaaaattgctttaaaggggccaaattcccctaaaagggggcggaataaaaataaaggggcgggggttaaaaaacgggggaaaggaaaaaaacggggggtaaaaaaaataaaggttttggaaaaaaacccctttttgaaaaggggggaaaaaagaaaaaaggccaaaacaaaggccctttaaaaaaatatggcacccccaatgggcaaaggaaccccccttgaaggggccaataaacccgggcgggggg

SEQ ID NO: 135790 - DNA, 298 bp, Zea mays
  Clone ID: MRT4577_5531C.1
ataaaaaaaataggggtttggttttttttaggacaagccaaaaagacattttattataattggatatgtgacccacacaaacacaaagcaatttcttggaattgcatcatacaatgccacaaaataactatatatatagggactatatgctcgtggaaacaaagtaggcattaaataagcccggccttcctgaaagacttgtaaaacaaaccaaataatccgcttctgtaactggggaaaaattgtgctaccgaatggtgaaaagtagttttccaaacattagcaaaaggggtctaaa

SEQ ID NO: 135791 - DNA, 2359 bp, Zea mays
  Clone ID: MRT4577_55320C.1
gttcttcagctaaacgtcttcggtcactcgtgctggtcgcgcggcgatctacgcctctccgtcctccaaacgaaaccctaacccgcgcatccaacctccatccatcctccgagccccaaactccaaaccctagacccctccccctgccttcgcggccgatgggcgcagatgagcagccatctccgacgcggaaacgcgaccgcgaggaaggggaggacctctccgacgggggcgccgccgagaagcggccgcgcgccgaggtcgcgtccctgctggggctggccacctacgaggacgaggaggaagacgaagcggccaggggtcacacgaatggccgacacgcggtggagcctgagctagaggacgacgaggatgatgatgatgaggacgacgacgtgaggagggctcctgagaggaggcccagacaggtagagctgcgccgggactgcccatacctcgacaccgtgaacagacaggttcttgattttgatttcgagaagttctgttcaatctccttgtcaaatttgaatgtgtatgcgtgcttggtctgtggaaaatatttccaaggaagagggttgaaatctcatgcatatacgcacagccttgaagcaggccatcacgtgttcattaatcttcaaactgagaaggcttactgtcttcctgatggatatgagattaatgatccatcgttagaagatattcgacatgttctgaatccaaggttcactaaggagcaggttctaaatcttgacaaaaataagcagtggtctagagcacttgatggctccaattatctacctggaatggtgggtcttaacaacatcaaggagactgattttgtgaatgtcacaatacagtcattaatgagagttacacctctgagaaatttctttctaatccctgaaaactatcagcatagcaaatcaccattggttcatcgttttggggaattgacacgtaagatttggcatgctaggaacttcaagggccaggttagtccacatgaatttctgcaagcagttatgaaggccagcgacaaaaagtttcagattggtgtacagtcagatccagtggaatttatgacatggctcttaaacacactgcatgcgaaactaaaaagttcaaagaagaaaaacagaagcataatacacgattgttttcagggagaacttgaagttgttaaggaggttcataggaagcatataatggaaaaaagagaggatggcggtgagctgaatggtgaggcaggttcagtggtgggaactgcagatggaattgttactgaaacatccaaggtcccattcctgatgctcggtcttgacctgccacctccacctcttttcaaagacgccatggagaaaaatatcattccacaggtaccattgtttaacatactgaagaagttcgatggtgagacagttacagaggttgtccgaccttccattgcccgaatgaggtaccgagtcactagactgccgaagtatctgatccttcatatgcgaaggtttaccaaaaataacttttttgtcgagaaaaaccctactctagttaattttcctgtgaagaacttggagttgaaggactacattccattacctaagccgaaagagaatcataagctacgttcaaagtatgacctcatagcaaacattgtccatgatggcaaacctggcgagggatgctacagagtatttgtacagcggaaatcagaagaggcctggtatgagatgcaggatctccatgttactgagacccttcctcaaatggttgctctctcagaaacctacatgcaaatatacgagcaacacgaatgagtaatggacagtggtcatcctatggtcagtctgtttgcttaacagagatcagaatatcacaaactaatccttatctttggagcagctttttttggggcagaattttgtagtatcttcacacatgtccagacttaatttcttgacaagcagagatcgagggaatgtacttgggtcatcaagtcaatgctatggaggctgaaacatcgtgaattgtttttagagctgctttgatagaggaacgatttcccacatatttcatgtttgtagtgcagcactgcagcctgtatctgttgtgaaccggtacgcttccaaccgttatcagcaaacttttgaagctcataaagtataattttttatgctacgtgctactcatttctgctttttttttgctacgctttaggtagagcagggttccagctgtatggtttagtattgcttttcgaagccttgagtttgtttctgtacaggaccggcaaatcacagtttcaaacaattgcggcagggtggttctggtccagttgtttcaaaaaaaaaaaaaaaaaaaa

SEQ ID NO: 135792 - DNA, 558 bp, Zea mays
  Clone ID: MRT4577_55321C.1
aatgcctcatacagtggtcgtcaggatcagatagagggagttagtgaatgcattatcatgggcattcccatgcagctcggtaccggtattctcaaagtcaggcaaaggctcgaccatgtgcctgaattcaagtaccaaccggacccgatactgtcgtgatacatacatgtggactgaagctggaactctgtacatatatatagctgggtcatacatgcatagcgtagcgtagcctagggcaaccctggcggcttgtcatttctccggtgaacatctaactagtctcgttccatctccatgaggcagactctaggtcaacaactccctcttcggctgcatcggcaaatgcgagagtaaaattgtggcaaacacttgctacatcttctaggcagtggtacatgatcgtgttacatatctctgcaggctaatgaagcctgggaagaatcattgtttttttcttgactagataaatatctgtgttgtaaaggaaaaataataatacaatgagaattaagaattacaaaaaaaaaaaaagggcggccaccgactagtgagctc

SEQ ID NO: 135793 - DNA, 632 bp, Zea mays
  Clone ID: MRT4577_55322C.1
cattgggtacctcgaggccggccgtgctattcttcttatcttaagccgcaatacatcctgacaaggttggtgttgtggttgataagactactttactgcaatgtgctgcattgattcgatgagctatctgatgagcacatactaccgcctcctcatgctctctccatagagactattcgactcttagcgcgggtctcttggcagaagaaagacctcttacggcactgattccttttcttagagaaacaacgatgatgaagacgaggtgctacttgccatggctgatgatttgtctgcgatcattcggtgtgtgggctgtggacaaaatgatcatgcgttgctaccacctttgtgagaccttgtgaacagcgtattaaacgtgggcgcgtgatcaaccaagggaatctctcgcgccgtattgcacgcatcatatgaaggcaccatcgacattgactattgctccattactaccattcacaggataggaacgtgcagagaggataacagcgtcgacctatcctccatgcgtaggtttctcacacactattgctatcatgtgtgatcaggcgattgagatcaaagttggggactatctatggacagctatgtacggacgtgatgctgtatgtcct

SEQ ID NO: 135794 - DNA, 411 bp, Zea mays
  Clone ID: MRT4577_55323C.1
taaaaaaaaaaaaaaaaaaaaaaaaaaaaaaaaaaaaaaaaaaaaaaaaaaaaaaaagaaaagaaaaaaaaaaaaaaaaagaaaaaaaaaaaaaaacccaaaaaaaaaaaaaaaaaaaaagggccgccctttttaaagatcccaactttacttccccttccttccaactttaaaccttttctatagtgcccccaaattcaatttaattgcccttcttttaaaaccttctaacctggaaaacccttggcttacccaacttaattccctttgaaaaaattccccttttcccaagttgccttattaccaaaaagcccccacccaaccgcctttccaaaaatttgccaaccctaattgccaattggacccccccttttaccggcccttaaaccccgtcggttttggggttacccc

SEQ ID NO: 135795 - DNA, 169 bp, Zea mays
  Clone ID: MRT4577_55324C.1
gcccgtcaggcaatgggtgcgacaccggtggccgttcccatagcctaggtctcccgcgtcttggttgagctctacctccctgtctccgtcatgctccccagtgtagcgtagatcaacgcttaccactctggcacccacaacgaagctgtggccgcagttaccgccgttg

SEQ ID NO: 135796 - DNA, 685 bp, Zea mays
  Clone ID: MRT4577_55325C.1
gaggccgcgccgggaatgcatgtgttagcaataaagcagtgaccaagagaaggaaccggagaaagaaaggtacaccagagggaggagtacggagatcagctagcgtaacgcctggctgccatagtgtctcgtttcgggtagtcaagccacaacggtatgcacgggagaaccgccatggcagtggcctgccttctgtgcatgacggctctgctgctagtccaggatgtccagtccaggaggctactgtggacggagcaggagaagaaacaaacccatggtggccttgttggcaaccatggcgccgctgaccggcgaagcacctccctgcaggaaccgtgcagtggcgctacgggaggaggcggcacaggaagtgcagacaagcagggcgaactcccgtgtgatgatgatacgtcaaaatggacagaactgcacacggattacatatacacccaagacttcaagcacccatgaactgttagctagctggctcgatcgtgtgccaagtttctgaagattattagttttgtctgtaggcgttgcgcgttcaatgctgtagtatgggtgtataattaattagctagccagtcatcagtgactactgtagttaagacttaagagtacgctaaatgtgagtatcatgtatggacgcattagatggtttaatatatgcgtgcacgtttgtatc

SEQ ID NO: 135797 - DNA, 268 bp, Zea mays
  Clone ID: MRT4577_55327C.1
atataaagtatggtggacccatttggacaacaggtccattttgactgacgctcacagataggagctcacttaattgttggtgacaacgaaaagaagaaactacagagcaggaccagtgctagatatagcatctaaagatatataccaagacaagtaccgcacatctaggcatacatctagacatgacttttcgcgcgtatgtcttaaccatgcaagcgttcaacagttcttatagagaggtataatatgagcatacatactacatatg

SEQ ID NO: 135798 - DNA, 416 bp, Zea mays
  Clone ID: MRT4577_55328C.1
aaaaaaaaaaaaaaaaaaaaaaaaaaaaaaaaaaaaaaaaaaaaaaaaaaaaaaaaaaagagaaaaaaaaaaaaaaaaaaaaaaaaaaaaaaaaaaaaaaaaaaaaaaaaaaaaaaaaaagggggggcctttttaaagattccaagctttcccccccttgcttgcgccgttttattttttttttagggccccctaatttaaattcattggccgccgtttaacaacgcctggacgggaaaaaccctggctttccccaattaaatccctttgcagcaaatccccttttcccccgctgggttaatagcaaaaaggccccccccgttcgcctttccaaacaatggcccaccctgaatggcaaatgggcccccccctttagcggccctttaaccccgggggggttgggggtttcccccagg

SEQ ID NO: 135799 - DNA, 345 bp, Zea mays
  Clone ID: MRT4577_55329C.1
ctcagtcagcggatggcgagaggaggtcctaatgacggccgagaaggtggacgcggggctttgcgacttcgacgctcacatagatcgcatatgctttatggcggacgccgaattcaagggcaaggtgaaactgatgaaatttctgtcgtatcgcaagcctgtctacttcctttcctggtgcaacaacttaaacgtggcggagacgatgatctactagacgttgaagtcacttgatggcaaggacggcggtgattactgctcgcttaatatagattacaagcttaatagatgggatccgtggcatctcgtgaagggttgtaccctattttttgcctttaatggcgt

SEQ ID NO: 135800 - DNA, 388 bp, Zea mays
  Clone ID: MRT4577_5532C.1
gtccggctttgaggaggcaagggttttgttgcactggacaagaaattattcccccaggtctggggaaactatgctccttgtcaatcaacatgcaactgatgaaaggatacctttagaggagcttctgagcaagggtttatcataacgacatggagttaactacttggactctgaagaagaaatggcccttcctgagactgggtttcaactggtccagaagtatgcttagcagattcagaaatggggctggatcatcagcggggggagcaatttatttgaatcattcaaaaagaacatgaacattttgaaaagacaaggccgtcttggcactcttggtgctgttccatgttttttcgggggcaaattgactgggaaagatctcatggag

SEQ ID NO: 135801 - DNA, 733 bp, Zea mays
  Clone ID: MRT4577_55330C.1
cgtgacagtgtgctaggataaaccctagtcctccctccagccgtagcctcctcctcccccgtctccgtcgccgtcgctttctgctggctcccggtttgctccccgccctgaggctgctgcggctccctgcctcgcgcgccgtcatcaggaaaatgtcgtcaaatactgaaggacccaagagtcatgcacgtagagaccttttgctcaagatccaatcagatgctcaaacttgctgggaggagagcaaggtttttgaggctgaacctggcaatggacctcctggccctggtgaaaaattctttggcaattttccgtacccttacatgaatggattgctacatctgggtcacgccttctcactgtccaagcttgagttcggtgctgcataccacagactccgcggctcgaatgtccttttgccgtttgcttttcattgtactgggatgcccatcaaggcctcagctgataagcttgctagggagattcaacagtatggaaatcctccagtgttccctgctgcagaggatgattcaagtgctgaagtggcagatgatagccaggctgaccaggctgctcttgccccagggcaatttaagagtaagaaatctaaggctgctgcaaagactggcatgcagaagttccagtgggagatcatgaagggctttgatctgtcagatgaagaaattgccaaatttcaggatccgtctcactggttaacctacttccctccgct

SEQ ID NO: 135802 - DNA, 489 bp, Zea mays
  Clone ID: MRT4577_55331C.1
agggggagagagcgatggctgtgtctcgtgaggcagcggtggcgaagtgctaaggcggcgggccggcggcagcagcagcaggctcacaacaacggcggcctagatccctgcaaggcacacagcaaggttgatttccctagttagcaatgaatgtggaattaaagggccatcttagaaagtgaagagatgagaaagcgaacgagaaattttcattgcctgagattctgtgctatatagggaggcacctgatgcaatgatgagtcattctactggaaagaactctttaccctcagaaactcaaaacaaattaaatcatagatcattttagcatggaaggaacaagatatttgtgatatcatctctttttgcatattttgtggatcatatatctataaatcttaccctgcactattgtatcatacatctttgaattgtaccctgcttgtgaattgtatcaaatctaagttttatgtgtgtggattgtgatgg

SEQ ID NO: 135803 - DNA, 995 bp, Zea mays
  Clone ID: MRT4577_55332C.1
cttgcttccccgcagcaacgaacacgaacctaggcagaacgaagctgaagtagttcgttgtgaacccagtatggcaaacgcgccgaggaccctggcggtcctggctctcgggctagcgctcctgtgcgctgccgccggcccggccgccgtgcagaactgcggctgccagcctaacttctgctgcagcaagttcggctactgcggcacgaccgacgactactgcggtggcggcgcaaacgtggctaacgtggtcaccgacgcgttcttcaacggcatcaagaaccaggccgggagcgggtgcgagggcaagaacttctacacccggagcgcgttcctgagcgccgtcaacaagtacccgggcttcgcccatggcggggcggaggtggagggcaagcgcgagatcgccgccttcttcgcgcacgtcacgcacgagaccggacatttctgctacatcagcgagatcaacaagagcaacgcctactgcgacgcaagcaacaggcagtggccgtgcgcggcggggcagaagtactacgggcgcggcccgctgcagatctcgtggaactacaactacgggcccgccgggagggacatcggcttcaacgtgcaccgcctgatgccgcagggcttcggcgccaccatcagggccatcaacggcgccctcgagtgcaacgggaacaaccccgcccagatgaacgcgcgcgtcggctactacaagcagtactgccagcagctccgcgtcgacccagggcccaacctcacttgctaggccagcagctcctgctagctcgtccacaataaatgctcggcgtcgcaccctcgcgaaaccaagagtttactactgactagtacgagctagctagcatgcagtaataataatcatcgtaataataataataaaacgacggggctgagccactttgttcgacctgaatgaataatgaagcagctgtatgttccctcggtacatagttgtgtatgcttgtgcttgtgcttgt

SEQ ID NO: 135804 - DNA, 684 bp, Zea mays
  Clone ID: MRT4577_55333C.1
acgcgggagagagcgatggctgtgtctcgtgaggcagcggtggcgaagtgctaaggcggcgggccggcgtcgtaagcagcaggaacgcttccacggaggggcaagggggagagagcgatggctgtgtctcgtgaggcagcggtggcgaagtgctaaggcggcgggccggcggcagcagcagcaggctcacaacaacggcggcctagatccctgcaaggcacacagcaaggttgatttccctagattgctcacccgcgctagaaattggagaacaggctaccactgtcctaggatctgataccctctcatttagttagcaatgaatgtggaattaaagggccatcttagaaagtgaagagatgagaaagcgaacgagaaattttcattgcctgagattctgtgctatatagggaggcacctgatgcaatgatgagtcattctactggaaagaactctttaccctcagaaactcaaaacaaattaaatcatagatcattttagcatggaaggaacaagatatttgtgatatcatctctttttgcatattttgtggatcatatatctataaatcttaccctgcactattgtatcatacatctttgaattgtaccctgcttgtgaattgtatcaaatctaagttttatgtgtgtggattgtgaaaaaaaaaaaaaaaaaaggccccta

SEQ ID NO: 135805 - DNA, 1168 bp, Zea mays
  Clone ID: MRT4577_55334C.1
cgaagctgaagttgttcgttgtgaacccagtatggcaaacgcgccgaggaccctggcggtcctggctctcgggctagcgctcctgtgcgctgccgccggcccggccgccgcgcagaactgcggctgccagcctaacttctgctgcagcaagttcggctactgcggcacgaccgacgactactgcggcgacgggtgccagtcgggcccgtgccgctcgggcggcggcggcggcggaggcggcagtggcggcgcaaacgtggctaacgtggtcaccgacgcgttcttcaacggcatcaagaaccaggccgggagcgggtgcgagggcaagaacttctacacccggagcgcgttcctgagcgccgtcaacaagtacccgggcttcgcccatggcgggacggaggtggagggcaagcgcgagatcgccgccttcttcgcgcacgtcacgcacgagaccggacatttctgctacatcagcgagatcaacaagagcaacgcctactgcgacgcaagcaacaggcagtggccgtgcgcggcggggcagaagtactacgggcgcggcccgctgcagatctcgtggaactacaactacgggcccgccgggagggacatcggcttcaacgggctcgccgaccccaacagggtggcgcaggacgccgtgatcgcgttcaagacggcgctctggttctggatgaaccaacgtgcaccgtgtgatgccgcagggcttcggcgccaccatcagggccatcaacggcgccctcgagtgcaacgggaacaaccccgcccagatgaacgcgcgcgtcggctactacaagcagtactgccagcagctccgcgtcgacccaggggcccaacctcacttgctaggcgacggcgtccacgttgtacccatggctcctgctagctcgtccacaataaatgctcggcgtcgcaccctcgcgaaaccaagagtttactgactagtacgagctagctagcatgcagtaataataatcataataataaaacgacggggctgagccactttgttcgacctgaatgaataatgaaacaactgtatgtctgtatgttccctcggtacgtaattgtgtatgcttgtgcttgtactttccgtttgcagcatgggtttaccatcgattcttttttttttttttttttttttggaaagaaa

SEQ ID NO: 135806 - DNA, 381 bp, Zea mays
  Clone ID: MRT4577_55335C.1
gttggttattttttttttttttttttttttttcttactttaaaaaaaaaaacccccaactgggcccaacatttttttacccaaaaacaaagggggggggttaaattccccggcccccaaacttaagaacacaaaaatttcttcacccgaaccaaaccctcctggggaaaaaaaaaccaaaaacctaacagttttaaaaaaaaattcccaaaatttccgggagggttcttttttcctaaacccaccaaaatttcaggggggcgaaacccccgggtggaccccccggacttaaaaaaacccccggcaaaccttaaaatggagggaaaatcttatttccaaacccaagggcttaaaaaaatttttcccaaaaaccctatttccc

SEQ ID NO: 135807 - DNA, 1141 bp, Zea mays
  Clone ID: MRT4577_55336C.1
cattgggtaccctcgaggccggccgggaatcacctcacaacaagctgccccgcagcaacgaacacgaaccttggcagaacgaagctgaagtagttcgttgtgaacccagtatggcaaacgcgccgaggatcctggccctcggcctgctagcgctcctgtgcgctgccgccggcccggccgccgcgcagaactgcggctgccagcctaacttctgctgcagcaagttcggctactgcggcacgaccgacgcctactgcggcgacgggtgccagtcgggcccgtgccgctcgggcggcggcggcggcggaggcggaggcggaggcggaggcagtggcggtgcgaacgtggctaacgtggtcagcgacgcgttcttcaacggcatcaagaaccaggccgggagcgggtgcgagggcaagaacttctacacccggagcgcgttcctgagcgccgtcaacaagtacccgggcttcgcccatggcgggacggaggtggagggcaagcgcgagatcgccgccttcttcgcgcacgtcacgcacgagaccggacatttctgctacatcagcgagatcaacaagagcaacgcctactgcgacgcgagcaacaggcagtggccgtgcgcggcggggcagaagtactacgggcgcggcccgctgcagatctcgtggaactacaactacgggcccgccgggagggacatcggcttcaacgggctcgccgaccccaacagggtggcgcaggacgccgtgatcgcgttcaagacggcgctctggttctggatgaacaacgtgcaccgtgtgatgccgcagggcttcggcgccaccatcagggccatcaacggcgccctcgagtgcaacgggaacaaccccgcccagatgaacgcgcgcgtcggctactacaagcagtactgccagcagctccgcgtcgacccagggcccaacctcacttgctaggcgacggcgtccacgttgtacccatggctcctgctagctcgtccccaataaattatattctcggggtcgcaccctcgcgaaagtaaaccaagagtttactgactagtacgagctagctagcatgcagtaataataatcatcgtaataataataataataaaacgccggggctgagcccctagcttcgttcg

SEQ ID NO: 135808 - DNA, 276 bp, Zea mays
  Clone ID: MRT4577_55337C.1
aagggaaaaagttttttttctaaaaaaggttacttttgggaaattaaaaatttacccaattggggccttttttgttttacaaaaaatgggtaacccttggcccaaatttttcttttaagggaggggttgaaaaacatgcaaattggggggttaatcctaagggttgaaagtttctcaaaaggaacaatccaattccccttaccaaaaattaagccagggggaaccccacctgtgaagatattaaaatttttggggtttacccttttccaaacaaaa

SEQ ID NO: 135809 - DNA, 668 bp, Zea mays
  Clone ID: MRT4577_55338C.1
ccggccgggaaatcacctcacaacaagctgcaccgcagcaacgaacacgaaccttggcagaacgaagctgaagtagttcgttgtgaacccagtatggcaaacgcgccgaggatcctggccctcggcctgctagcgctcctgtgcgctgccgccggcccggccgccgcgcagaactgcggctgccagcctaacttctgctgcagcaagttcggctactgcggcacgaccgacgcctactgcggcgacgggtgccagtcgggcccgtgccgctcgggcggcggcggcggcggaggcggaggcagtggcggtgcgaacgtggctaacgtggtcaccgacgcgttcttcaacggcatcaagaaccaggccgggagcgggtgcgagggcaagaacttctacacccggagcgcgttcctgagcgccgtcaacgcgtacccgggcttcgcccatggcgggacggaggtggagggcaagcgcgagatcgctgccttcttcgcgcacgtcacgcacgagaccggacatttctgctacatcagcgagatcaacaagaacaacgcctactgcgacgcgagcaacaggcagtggccgtgcgcggcggggcagaagtactaccggcgcgggccgctgcagatctcgtggaactacaactacgggcccgccgggagggacat

SEQ ID NO: 135810 - DNA, 327 bp, Zea mays
  Clone ID: MRT4577_55339C.1
gccgagccacgcgtcagctgggccatccgccgggctattgctctgacagcttgcccgaggacgtgcataagtacgtagatagatacatcgatcgctagctagctggctaccatggtgtcgctcacgtcggcggtcatcaacgccccatccatcacagccgcactcgctcacgcagtggtcagcacgatggccatcaccatgtctgccacgcttcgaaaagggaatgacaccgccactgtaacggttgccgttaccgtggtggttagcgtccggcgagccatgggccacgacatggtgcatggacgcaaggcagggccgactcgactg

SEQ ID NO: 135811 - DNA, 594 bp, Zea mays
  Clone ID: MRT4577_5533C.1
tttttttttttttttccttagggttggaattagtaaggatttcatttccagttgctgcataaattgagttacttggttacaaacagaaccatactcaactggatattggttacatcaatcccaataccggttatttgttctctcttacttattcatcacatatcactctggtaggtgccctcagttattttttgctggaagttgtgtccccgaaaggaaggctttgatcagcacaagtgcctctgctggcttatcttgaggaactgcatggcctgctcctctcacagtggccatggtcagcccttcgtactcaacataccttccagcaacctgatcttttaaataccatggttgccactgtgacttgattggaaggccaagtgcctctacccagtagcgggatccaataaccggaaccctgccgtccacatctccgctgtagacccaaattttgagtccagccttgacaagcttggagtaaatcggaagaacagagaagacctccatgtcgtagatgtcaaaaactgggtcgctgcagaggctccaccttctgtccctgatccgtccactggtattagcatggagtgatttctg

SEQ ID NO: 135812 - DNA, 678 bp, Zea mays
  unsure (1)..(678): unsure at all n locations
  Clone ID: MRT4577_55340C.1
gwacaagaaggagcgctattgctacaatcgggggaaagcagtaattccgaagtgataamctgkkcccctttttctcgcngcsctaccgccgtacctggcccttaccctaccragcagccatcctgsagtactactkcaavcccgrgcttktaccaatccgcgatgtccrgacsrgcracaaaccggctagaggcacgccghacgarcacatcaatgcaactttbcccagsaccgtthrccagccccctcagccrccacskacygagtaccaccrtgaasatcaacaacaccagagtagmcggaactaccckgtgccctkccgtgcctcaccaccctagccgtcattartagrcgccrtaccccccgtcacaatgttacmcataccgtkagtgtkaccctccataaaaaasaaakccaacacgaagtcgatttyaacatcaccaatgtccttracaatacccagcacsracaasaaatrcscsacattaaccatrcgstgactcttwccaccaccaaacaccataacattaatgatatccmccttaaccttmayacscacgttcaagtcccccttgagacamcataaagctgtccrscagmttgcccakgaatctgttgcttttgtccratmcggrtcatagccctccccccccccaccccacccmatctctgttgaac

SEQ ID NO: 135813 - DNA, 1164 bp, Zea mays
  Clone ID: MRT4577_55341C.1
agctgcaccgcagcaacaaacctttggccagaagctgaagtactactgatctgatccagtatggcaatcgcgccgaggatcatggcggtcctggctctcggcctagcactcctctgcgctgccgccgcgcagaactgcggctgccaggcaggttactgctgcagcaagttcggttactgcggcacgaccgacgagtactgcggcgacgggtgccagtcgggcccgtgccgctctggcggcggcagcagtggaggtgggaacgtggctggcgttgtcaccgacgcattcttcaacagcatcaagaaccaggccgggaacgggtgcgagggcaagaacttctacacccggagcgcgttcctgagcgccgccgacgcgtacaaaggcttcggtggcaggtcggtgcagggcaagcgcgagatcgccgccttcttcgcccacatcacgcacgagaccggacatttctgctacatcagcgagatcaacaagaacaacgcctactgcgactcgagcaacaggcagtggccgtgtgccgcgggtcagaagtactacgggcgcggcccgctgcaaatctcgtggaactacaactacgggcctgccgggagggacatcggcttcgacgggcttcggaacccggacagggtggcgcaggacgccgtggtcgcgttcaagacggcgctctggttctggaccaacaacgtgcacggggtgatgtcgcaggggttcggcgccaccatcagggccatcaacggcgccctcgagtgcaacggcaagaatactgcccagatgaacgcgcgggtgggctactacaggcagtactgccagcagctcggcgtcgaccccggacccaacctcacttgctaggtagctaggcgagcggcgtcggcgagtcctttggctcctcgtcgcacggctcgtccagaataaataaatgcttggcatcgcacccttcgcgaaacctagttttgcgacggaacgtgctagcaagcagtaataataaaacgccggggctgagcccgtttgttcaaccggaataatgaagcaactgtattatatgcatgttgcctcgaaacagtgtgtacgattgcagatcgcttgtactctttacggttgcagcgagggtttaaaaactgaaccaatatgcaaagtttacggttgcagcttgct

SEQ ID NO: 135814 - DNA, 1371 bp, Zea mays
  Clone ID: MRT4577_55342C.1
ctcgagggcctggccgggaaaaaaaaaaaaaaaaaaaaaaaaaaaaaaggatgataggccaatttattgggcttaattcgaattagtatgtaagaattcgtataattataaccggttgaagccttaaattcaagtctcttggctcttttcacgctttcaaaaaatcacctcacaacaagctgccccgcagcaacgaacacgaaccttggcagaacgaagctgaagtagttcgttgtgaacccagtatggcaaacgcgccgaggatcctggccctcggcctgctgctagcgctcctgtgcgctgccgccggcccggccgccgcgcagaactgcggctgccagcctaacttctgctgcagcaagttcggctactgcggcacgaccgacgactactgcggcgacgggtgccagtcgggcccgtgccgctcgggcggcggcggcggcggcggcggaggcggaggcagtggcggtgcgaacgtggctaacgtggtcagcgacgcgttcttcaacggcatcaagaaccaggccgggagcgggtgcgagggcaagaacttctacacccggagcgcgttcctgagcgccgtcaacaagtacccgggcttcgcccatggcgggacggaggtggagggcaagcgcgagatcgccgccttcttcgcgcacgtcacgcacgagaccggacatttctgctacatcagcgagatcaacaagagcaacgcctactgcgacgcaagcaacaggcagtggccgtgcgcggcggggcagaagtactacgggcgcggcccgctgcagatctcgtggaactacaactacgggcccgccgggagggacatcggcttcaacgggctcgccgaccccaacagggtggcgcaggacgccgtgatcgcgttcaagacggcgctctggttctggatgaacaacgtgcaccgcctgatgccgcagggcttcggcgccaccatcagggccatcaacggcgccctcgagtgcaacggggaacaaccccgcccagatgaacgcgcgcgtcggctactacaagcagtactgccagcagctccgcgtcgacccagggcccaacctcacttgctaggccagcagctcctgctagctcgtccacaataaatgctcggcgtcgcaccctcgcgaaaccaagagtttactactgactagtacgagctagctagcatgcagtaataataatcatcgtaataataataataaaacgacggggctgagccactttgttcgacctgaatgaataatgaagcagctgtatgttccctcggtacatagttgtgtatgcttgtgcttgtgcttgtactttccgtttgcagcatgggtctaacaccgaccgaatcaagttatttcgcccataccc

SEQ ID NO: 135815 - DNA, 768 bp, Zea mays
  Clone ID: MRT4577_55343C.1
atggagcaacgtcccgggctgaagaggttgctggagactacccatctagaactcgacgggaagttgctcgtcaacacgcagcaggcccctacctggcgcgccaactgtcggtgtttcgaccccagggggtccctggaccgacgagtgaaattgtcgctgcgtgccccagcccagatgggttggcgcgagatggaacacaaaggggggggggaaaccgtggctcgtgttatcctgtgccagaggggtcgggcgaggcggagactcctcctgaggccgaggccggggtcgagcgaggacgcgattcctcccaaggtcgaggttgaggctgagccctggggtcgggcgaggcggagaccaccttctgaggccgaggcgggggccgagccctggggtcgggcgaggcggagacttcctcctgaggccgaggcccaaggtcgagcgaggcggagcttcctgttgctcctgaggttgggctcagctgctgtcagcctcaccctggcgggtggcacagcagtcggagaggggcgagcggcgctattttcctgtcaggcatgtgctatggggattggagactttggtggcttggagccttggacgcttagtggatgcctcgttggtggttggggtgtttgtgggctcaacacatgggcctattttagtgaccccaaatcggaattcagaagcatgcacaaaagccacaaggcccacaacaaatttaacttcgggcctaatgggtactttgggtatcatgatttgttacccgattag

SEQ ID NO: 135816 - DNA, 1131 bp, Zea mays
  Clone ID: MRT4577_55344C.1
aattcatcaaagagctgcaccgcagcaactaacacgaaccttggcagaacgaagctgaagtagttcgttgtgaacccagtatggcaaacgcgccgaggatcctggccctcggcctgctagcgctcctgtgcgctgccgccggcccggccgccgcgcagaactgcggctgccagcctaacttctgctgcagcaagttcggctactgcggcggcggcggcggaggcggaggcagtggcggtgcgaacgtggctaacgtggtcaccgacgcgttcttcaacggcatcaagaaccaggccgggagcgggtgcgagggcaagaacttctacacccggagcgcgttcctgagcgccgtcaacgcgtacccgggcttcgcccatggcgggacggaggtggagggcaagcgcgagatcgctgcctccttcgcgcacgtcacgcacgagaccggacatttctgctacatcagcgagatcaacaagaacaacgcctactgcgacgcgagcaacaggcagtggccgtgcgcggcggggcagaagtactacgggcgcggcccgctgcagatctcgtggaactacaactacgggcccgccgggagggacatcggcttcaacgggctcgccgaccccaacagggtggcgcaggacgccgtgatcgcgttcaagacggcgctctggttctggatgaacaacgtgcaccgccctgatgccgcagggcttcggcgccaccatcagggccatcaacggcgccctcgagtgcaacgggaacaaccccgcccagatgaacgcgcgcgtcggctactacaagcagtactgccagcagctccgcgtcgacccagggcccaacctcacttgctaggccagcagctcctgctagctcgtccacaataaatgctcggcgtcgcaccctcgcgaaaccaagagtttactgactagtacgagctagctagctagcatgcagtaataataatcatcgtaataataataataaaacgacggggctgagccactttgttcgacctgtatgaataatgaaacaactgtatgttccctcggtacgtaattgtgtatgcttgtgcttgtactttccgtttgcagcatgggtttaacatcgcagaaatcaagaaatttcgagaac

SEQ ID NO: 135817 - DNA, 1530 bp, Zea mays
  Clone ID: MRT4577_55345C.1
gactcctatagggcgattgggcatccagaggccggccgggaaaatcacctcacacaacaagctgcaccgcagcaacgaacacgaaccttggcagaacgaagctgaagtagttcgctgtgaacccagtatggcaaacgcgccgaggatcctggccctcggcctgctagcgctcctgtgcgctgccgccggcccggccgccgcgcagaactgcggctgccagccaaacttctgctgcagcaagttcggctactgcggcacgaccgacgcctactgcggcgacgggtgccagtcgggcccgtgccgctcgggcggcggcggcggcggcggcggcggcggaggcggcggaggcagtggcggtgcgaacgtggctaatgtggtcaccgacgcgttcttcaacggcatcaagaaccaggccgggagcgggtgcgagggcaagaacttctacacccggagcgcgttcctgagcgccgtcaacgcgtacccgggcttcgcccatggcgggacggaggtggagggcaagcgcgagatcgccgccttcttcgcgcacgtcacgcacgagaccggacatttctgctacatcagcgagatcaacaagagcaacgcctactgcgacgcgagcaacaggcagtggccgtgcgcggcggggcagaagtactacgggcgcggcccgctgcagatctcgtggaactacaactacgggcccgccgggagggacatcggcttcaacgggctcgccgaccccaacagggtggcgcaggacgccgtgatcgcgttcaagacggcgctctggttctggatgaacaacgtgcaccgtgtgatgccgcagggcttcggcgccaccatcagggccatcaacggcgccctcgagtgcaacgggaacaaccccgcccagatgaacgcgcgcgtcggctactacaagcagtactgccagcagctccgcgtcgacccagggcccaacctcacttgctaggcgacggcgtccacgttgtacccatggctcctgctagtgctagctcgtccacaataaatgctcggcgtcgcaccctcgcgaaaagtaaaccaagagtttactgactagtacgagctagctagcatgcagtaataataatcatcgtaataataataataaaacgactgggctgagccactttgttcgacctgaatgaataatgaagcaactgtatgttccctctgtaaaaaaaaaaaaaaaaaaaaaaaaaaaaaaaaaaaaaaaaaaaaaaaaaaaaaaaaaaaaaaaaaaaaaaaaaaaaaaaggggcggcccttaaaaaaaaaaacaagcttacctccgggtgcttgacgacttaaatactttttttttggggccccctaaatttaaattagtggccgtggtttaacaacgtggggacggggaaaaacccgggggtcacccaaaataacctggtggaacaaaatccttttttcagaaggtggattaataaagaagaggcccccactgatcgtccttaacaacagttgagcctccttattgaaaattggaaccccccct

SEQ ID NO: 135818 - DNA, 386 bp, Zea mays
  Clone ID: MRT4577_55346C.1
ctcggtccattagcaaagaccaaactgggggggcatattaactgagaaaaaactcgcccgggccacaagcccggttaaaattcggggggcttccggccacgggtttaaacaaaccaaaacaaaggagggggtcttcgcacggtaataaaaaggaaggggaaaaagggccccaaaacaaggggggggaccaaagacctcacctaaaggtggaaccatggggggggccccgaacacggtattttatcgggggtggaaacctttcccctgggaaaacctcttgaacaaacaacctgtagaaaaaccccgaaaaaaaaagggggcggggaaagaaacctgaaaaaaacccccttccgacccaaatcccgtaaaagggccccggggcaaaa

SEQ ID NO: 135819 - DNA, 492 bp, Zea mays
  Clone ID: MRT4577_55347C.1
ggggggcccctaattctggcgcgcttttgaacggaaatcccccgccccaaaacaacaagggccccagctaaaacaaggggacaaagggcccccagccagggggccagccggggggtccgcccccagcccacccgggccgggggacgggcccggagcgggcgtgtccccccccccgggtaacataaaatttaaacccccccgtcagccgtcgccgggggggctccggcactgctcggggggcctggccttggggggccccccgaggggggggcatccgtgggccggggaccccattgggaggtccatgcatttgtaggacaggcaaagcgcgggggaatccggcagcggcccggaaggcggcacggggaaggcccccaggaaattgtgctgcccctacaacgggggaatccgcccgtccagaacgctgggggccaccgccggcgggacctccccggacagccggttgttgttgacaaacaggctggccccccc

SEQ ID NO: 135820 - DNA, 226 bp, Zea mays
  Clone ID: MRT4577_55348C.1
gttgctctatggggcctatacgcatgctgccattctgtgctgtcgtgatgattgtgcaggcatcggcgcgggacattcacaggttcgtcatccaggatggtcccatcatgtaccgtgacatcacgccacacttcaagatcccgctggcctctatgcgcaaggataccaactccggcatgctgtggaccctggccttctacgatcgtgtgcttgtccgggtgctcgc

SEQ ID NO: 135821 - DNA, 471 bp, Zea mays
  Clone ID: MRT4577_55349C.1
gagatcactagagttaggctgaaggaaatggacttgcctgattctattctaccattggaaggtaatgtcagcatacctgcagatctgaaggaagatgttgaggctgtgcagataagcggtggccctgctggtttggaagctgagttgcagcagctgagagatttgaatagggtcaatcaggagttgcttgttcagactgaagagatgctgcagaaggaggcaagtgaagatgctcaattccggacgcaattcggaagtcgttggactaggcctcaatcaagcaccctaacaaagaacattcaagaccgattgaatctttttgctggtaatcttaaaaaagcggctgcgagtgatgctttgatcgaacgagatgtgaaggagagctaccccttgatgtctattcttgacagaagaccgatagagtctgcactaccaagtatttcaaggcctatcatgtccttggatgggaat

SEQ ID NO: 135822 - DNA, 493 bp, Zea mays
  unsure (1)..(493): unsure at all n locations
  Clone ID: MRT4577_5534C.1
gcgngggcacggnncncgccggcgcgcaggcgaaacancgccanganncggcggggcnngaagcancnccgggaaccaccgggcccggagcnncncccaagcccgcgncgccgncgagggcngnnaaccnggcaacacncncaccaaccaacaaacaaacgcgcgggggcgcggggggggccgccgccgngaaggggagccnagacgngcangagaggaaggcgcagaagagcnacggggaggagcacnccggggagcncaaccncgaggccannangcncgacncccgngccgccgaacncgacaaggaggagcgccccgaggnncngncnnnacnnccnncanangaagggaaancnanacnggagcngggagcnggaanaggccgcnnaacnggngaacnggcnaaaacancngggcaggggnnngcagnggannncgnngaaagggngannaaaaagaanggaagnnnaaangaacacnanggcaacac

SEQ ID NO: 135823 - DNA, 768 bp, Zea mays
  Clone ID: MRT4577_55350C.1
tgattcatccgctcggggcaaatccacgtcttttgtcgtggggtggtgtctggcattgcattattggaggatcgaaaccatcgccaccgcaccaatgatccccttctccgtcctcgccggcgccctcgtcttgctcgtcggcgtcgccgatgccctgcccgggtaccagataagctgcggcgcgacgtcggacaaggtcgcggggaacgtgacatgggtcgccgacggggcgttcatccacgccggcaaggtggcggagctggactccccgggcgtcatgccgatgctctcctcgctcaggtacttcccgccggacgcgtcgtccgccgccaagtactgctacgcggtcccggcggcgatgcacgccaggtacctggtccgcacgacgtactactacggcgggttcgacggcggcggggcgccgccggtgttcgaccagatcatcgacggcacgcggtggagcgcggtggacacggcggggggctacgcccgcgggctcgccacgtactacgaggccgtggtggaggccgcggggaaggagctcagcgtctgcctcgccaggagcgccgccaccgcgcccggccggagccccttcatctccgcgctcgaggtggtgccgctcgaggagtccgtgtacagcgccgtcaacttcaccgcctacgcgctgagcaccgtcgcgcgccacagcttcggccacaacggctccatcatcggctatccagacgatcggttcaaccgatactgggagccgtacagcgacgggggcat

SEQ ID NO: 135824 - DNA, 584 bp, Zea mays
  Clone ID: MRT4577_55351C.1
acaaaattggtccaatcaaacaaaacacaaaaaacggaaggacgaacgtggcagcaaagccagagccgggggggggggcaacaaaaagggacaaaaaaggccaggaaaaaataacaaaaaaaaacatattaaaaggcagaagaatcaaaagaagcctgggcagaatcttactgcggagacccctttggggccaaaccctcacgggagaagcccttttgttcttagaacctttggacaaaaagcctgtgggcctaaaaatcctgaaactaattctaggaaaacatctttttagggaaaacgattttacaacccttaattttaaagggaaagggggtaacaatcaagggggtctaaagggccttgatcacctgctcgcgattaacgaaaagaaaacacctgcgtgccgaggaaaagtaaacaggcaccaaatccttgtggacaagatggaacacctcaacaatgaagaaggacctttagggaaaccacccccttggatcctaaatttctggacaaccaccgagatggtaacaaaccggtttaacattacccaactaaaaaagaaatagggcctgcctcaaaaaaca

SEQ ID NO: 135825 - DNA, 461 bp, Zea mays
  Clone ID: MRT4577_55352C.1
gggtttggttttttttttttttttttttttttttttttgtttttttttttttttttttttttttttttaccttggaattcccttaccggttcccgaaggggacccagcgggccccaaaaagaggcaaaagaaaggaaaaaaaaaacaagggggggggggggaaaaaaaaaaaatccttaaccaaaaacaaacccaaacaaaaaaccaaccaaaaacaaaaacggaaaaaaaaacgaaaaccaaagagggcccaaacaaaaaataaccccgcggggcttactgaaagattaacagaccccaaacaaggggggaaaccctcattaaacaattggcaaaaaaacaaccaaaggcccctgggaaaaaagggggccaagggggccccaagaagaagcacaaaaacgggaaaaaggccatcgcccttaacggccccaccaagaaaaagctccaaaaaaggggccacc

SEQ ID NO: 135826 - DNA, 264 bp, Zea mays
  Clone ID: MRT4577_55353C.1
gggaacatcaaaggatgcgagctgttgggtgctatacaaaactcaatttcggtacagagccgtttaatgggtaccctaatgggggccagttttttccaaaaggcagggggtcaattgggggttggggggggggggagagtttaaaatggagagcttttattaccagtttgggggggggtcccaaacccagcccctttcatttaagcaatgcttgcttcttttgccgttgagtcgtttactcccagtgggtttgttttttttttc

SEQ ID NO: 135827 - DNA, 475 bp, Zea mays
  Clone ID: MRT4577_55354C.1
cggactcttgcgacggcgggcaggcaaagcgtattgggacacaccaatatgaaggacggggacaagcaggccaaccaacaggctgatgccgcagacggagcagcagaccaaaggggggaggaacgggctccggaaaagggggggggtgattggccggagcaggcgcaggagaacacgaggcgcgcgttggaactcccggaggccctagatgcgcgcaccccgtgagaagtgaacacgtaacgaggccacgggaacccaagggcgacattcggtccggcagggggacgtcacatcagctaactgaccgggctaccctactgagtggagcacatgctgggcacgttcggagcaagcccgctccttagggaacggaccgacggcaggggacaaaccaacgcacggcgtgacatgaggcaccacagacctagagggccaggtggccgagagaggcaacaggtaccagctggggtacacc

SEQ ID NO: 135828 - DNA, 316 bp, Zea mays
  Clone ID: MRT4577_55355C.1
tttgttttcattcctggtacctgcaggaccacgtgaaactaaatggtctgggtccaacatcacttcgactgctccaaacggcttataattgcatacctattaaccagacaacctcagccctctagggtatctctacgtactcatacccgctcaattcgatacttactactacaaaatactgcactccactactggtgattgaatgtacacatttaccagagttattctgctcagtatatggatacacagtgcaattgcttgcaggcatattcactcgttcttgagctgacgctttcgttctcttcaagagtttaca

SEQ ID NO: 135829 - DNA, 160 bp, Zea mays
  unsure (1)..(160): unsure at all n locations
  Clone ID: MRT4577_55356C.1
naganacngcaaagcacgcgnacagcncggaattcggcnngcncggnccnagagcacnngcnangctanntcaccncgacnnggttnccaggnagggantncaggacccntcgtatctgganangccntanagataaggnncnnccatagcancggacan

SEQ ID NO: 135830 - DNA, 276 bp, Zea mays
  Clone ID: MRT4577_55357C.1
atcatacatcatattgcatcaatggcacaataaggggatacaatgttgaccttcggagaatgcttcgaaaaagtaaaattgtgctaaggcacaaaataagttttgaagaaatacaactttatcagctctgatgtggagaaaaaaatctattgttgatgaagcattaatgttttggcgacgcttggaggattttttatgaagcactctgatatggaggaaaaaactcattgttgacgaagcataatgttttggcgacgcttggaggattttttacga

SEQ ID NO: 135831 - DNA, 187 bp, Zea mays
  Clone ID: MRT4577_55358C.1
acgttaatccatgctttgagcgatgacgaaaactcaagctctagagtgtctatacattaaaccctgctgtctagagcgtgaggatataagacgctgcaacatatgaggctaaagcttaatacagggtaaaaacagggtgtctccagattctaagagctaaagcttgatagagtcaaccacttcatat

SEQ ID NO: 135832 - DNA, 266 bp, Zea mays
  Clone ID: MRT4577_55359C.1
tcctaggggccttttttttttttttttttgctagcaggaaacaaaaaccaccactattgcacaaacatggttcatcttagtgtacaacgccaactcatcatctcgacttgcctatgcaatgcaacgtgaaaccaaagacacacatgcctctcccagcacccatccatccacggccgtaccccctctccgatcccaaagaccatggagctgcatagcatagccgttgagcttacttgccggggacgaagccggcggcgcacgcccat

SEQ ID NO: 135833 - DNA, 226 bp, Zea mays
  Clone ID: MRT4577_5535C.1
agcgtccggacacacggcagagtcgccggcgacagcgaaaggaagagaagggcgggcgggggatggcgagaggagtagtgaaacgaagtgtcgacggaggagggggatgtggctagagagcggcggaccgaggcgccaagaaaggaaccggcgggctcagaagggccaaggagcccacgggccaagaaggcggccaaagagaagaaggcacctaacgaaaagaagg

SEQ ID NO: 135834 - DNA, 562 bp, Zea mays
  Clone ID: MRT4577_55360C.1
ttttaaaatccttttttttttttttttttttttttttttttttttttttttttttttttttttttttttttttttttttttttaaaacgggctacccggcccaaaaatttttaaacggaaaacaagggaaaggcaaaggcaaaggtttgtcccaaaaaaaaacccccggccccggagggggtaaaggtttttccggggggggggtttagggggccctcccccgggggggggggaagttgcccattggaaaggggggggctccccgggtttccgttttgggggggggggttcttggggggacccccaggggcggaaccgggggaggggcccttggtcccaggggggggacaaaaaacaaaaacattggggggggtcccaggcccgggaacaaaaaaaaaaaagggccgggaattggattgggcccaaggggcgggaaaaaaaacggaaaaaggcccggggtttaatttggtttaaaacccggaagaaaaaaaaggaggggggtgggcctttgttttcttttaaggaaggggagcaaaataagaagagggctcaaaattggatt

SEQ ID NO: 135835 - DNA, 431 bp, Zea mays
  Clone ID: MRT4577_55361C.1
gcaccaacttaaaaaaatttattggaaaataaatccttaatacatgcaaaaatttattgggtacaaaatgggcctttttataaagagggaatatttggaatcttttcctgtgccctgcatggggtataaactataaaaaagttaatggacagagagattgcttgcttttgctggccccttttgggaaaaaaagaaggggggttttgggcttggaaaaagcctggcaaaggactgtctccccattttagggaggcccaggttccttttgaacgttctgaacccaacttttgtccagggcacaacccttatattggactccttgggccccctggggatctcacgcacatttatttttgccttgtccaatggattttccctcttcctggcattcaatttttgacccgcaggcaccaaatttttccctttccatt

SEQ ID NO: 135836 - DNA, 986 bp, Zea mays
  Clone ID: MRT4577_55362C.1
tgtgcgtagcctcgaggccggccaatccaacgaactgaccacaaccacctaaagctaaaagctaaccaccagacccccggccatggcgctcgcgcccacttccgctgccgtgctcaagaccccgttcctcggggccaggcgcgcgctcgccaatgccgccgccaagcccgcgcctcgccgcgcgctggtcgtcgccgccgcggccgccgccaagaagtcgtggatcccggccatcaagagcgacgccgagatcgtcaacccgccctggctcgacggctcgctccccggcgacttcgggttcgacccgctggggctgggcaaggacccggcgttcctcaagtggtaccgggaggcggagctgatccacgggcggtgggcgatggcggccgtgctgggcatcttcgtggggcaggcgtggagcggcatcccgtggttcgaggccggcgcggacccgagcgccatcgcgcccttctccttcgggtcgctgctgggcacgcagctgctgctgatggggtgggtggagtcgaagcggtgggtggacttcttcaacccggactcccaggccgtggagtgggccacgccctggtcccgcactgccgagaacttcgctaacttcaccggcgagcagggctacccgggcggcaagttcttcgacccgctcggcctcgccggcaccgtcaaggacggcgtctacatccccgacgtcgacaagctcgagcggctcaagctggccgagatcaagcacgcccgcatcgccatgcttgccatgctcgccttctacttcgaggccgggcagggcaagacgccgctcggcgcgctcggcctatgatttgcatgctgccatgtgaaccagatggggtgttcctctctgtttttctttctttcttttctgtgtatgtatgtaccatgtaatgtatagtatagatcgatttcattgcattaaggcatgtttggttcacaaaaaaaaaaaaaaaaaaaggccccta

SEQ ID NO: 135837 - DNA, 516 bp, Zea mays
  unsure (1)..(516): unsure at all n locations
  Clone ID: MRT4577_55363C.1
aattcggcacgaggggtggccttccacaaggtggtcaggacgacgacattgcagtgggctgtaatcagatgcagttgagctattttctgcgcaactctaatctcaagtagatcaagcaaccatgtacattccttgcttatatgatgtcctaatttttttttatctttgctggaaagcaaatacacaatctaaataattgctttgtttcctggacagtcggacagtcctgtaggcattggattgttacacattatctatatattttttttctgattatctgttccttattttaagtagtccaaataatgacaatctgcacatggttctgctgtctttttgcatacatataaatatacagaaattagtggtgaaactatgcaggtatctgttagcaaaggctggtgagtggtgaagtggttacaccctatttgcaacatttatcggcacanagtagtacaagagtttgggtgaacttcacacactcaaatgtccattatgtttacagtaagttgcatc

SEQ ID NO: 135838 - DNA, 895 bp, Zea mays
  Clone ID: MRT4577_55364C.1
cagcaatctacgaggcaaggcgtctgatccgctgcagccgtacgtccctaggagctcacccaccccgcgcaatcgagaactgactcggtcgccggcagcatgcaaatcataggccgagatcaagcacgcccgcatcgccatgcttgccatgctcgccttctacttcgaggccgggcagggcaagacgccgctcggcgcgctcggcctatgatttgcatgctgccggcgaccgagtcagttctcgattgcgcgcggggtgggtgagctcctagggacgtacggctgcagcggatcagacgccttgcctcgcagattggaggctaaagaagagcgtagcagcaatctactgtctgtgttggtggtttcttctgggtaacgtgcgtgaaccagatggggtgttcctctctgtttttttttttttcttttctgtgtatgtatgtaccatgtaatgtatagtatggatcgatttcattgcattaaaaaaaaaaaaaaaaaaaaaaaaaaaaaaaaaaaaaaaaaaaaaaaaaaaaaaaaaaaaaaaaaaaaaaaaaaaaaaaaaaaaaaaaaaaaaaaaaaaaaaaaaaaaaaaaaaaaaaaaaaaaaaaaaaaaaaaaaaaaaaaaagggccccaagggccggggccctttaaaaaaaaggggtccccccggggggggggaattaaaaataaagtttttaaaacccgccccccccgggggggggcccggaccccatttccccctaaggggggctgtataaccccggctcctgggccgctttttaacaagggggggggtggaaaaacccgggggtaccccaatttaatccctttgggaaacttccccttttccccagtgggggaaaaaggaaaaggcccccccccaatcccccttcccaa

SEQ ID NO: 135839 - DNA, 364 bp, Zea mays
  Clone ID: MRT4577_55365C.1
aagggcagcagaaaaacccggttttttgtaagagagaacgattttatcgcgaaaacttgacatatatcttgtccaacgcacgctaactgagcaccgtggaaatcgcactctaacccaggtccgaggcaacactagatattgataatgatagctagtggcttgacttctgtcaaaccctcagtgtatcactagtgaaaccgtagctcgtgtactcgacatagtgcttccttttatgctattgcaccgactgtgactactagctaacaaaattgcaaaaagggcctctagcaacagaaacaaaaaaacaacaacttgctctcctaataagtcactacagcgaagttgcgtatatcccagttctacc

SEQ ID NO: 135840 - DNA, 1360 bp, Zea mays
  Clone ID: MRT4577_55366C.1
gccggcctcgaggcgctcgcgctcactcgcggccgggccccaatccaacgaactgaccacaaccacctaagctaaaagctaaccaccagacccccggccatggcgctcgcgcccacctccgctgccgtgctcaagaccccgttcctcggggccaggcgcgcgcttgccaatgccgccgccaagcccgcgcctcgccgcgcgctcgtcgtcgccgccgcggccgccgccaagaagtcgtggatcccggccatcaagagcgacgccgagatcgtcaacccgccctggctcgacggctcgctccccggcgacttcgggttcgacccgctggggctgggcaaggacccggcgttcctcaagtggtaccgggaggcggagctgatccacgggcggtgggcgatggcggccgtgctgggcatcttcgtggggcaggcgtggagcggcatcccgtggttcgaggccggcgcggacccgagcgccatcgcgcccttctccttcgggtcgctgctgggcacgcagctgctgctgatggggtgggtggagtcgaagcggtgggtggacttcttcaacccggactcccaggccgtggagtgggccacgccgtggtcgcgcaccgccgagaacttcgccaacttcaccggcgagcagggctacccgggcggcaagttcttcgacccgctcggcctcgccggcaccgtcaaggacggcgtctacatccccgacgtcgacaagctcgagcggctcaagctggccgagatcaagcacgcccgcatcgccatgcttgccatgctcgccttctacttcgaggccgggcagggcaagacgccgctcggcgcgctcggcctatgatttgcatgctgccggcgaccgagtcagttctcgattgcgcggggtgggtgagctcctagggacgtacggctgcagcggatcagacgccttgcctcgcagattggaggcgaaagaagagcgtagcagcaatctactgtctgtgttggtggtttagcgtgcgtgaaccagatggggtgttcctctctgttttttctttctttcttttctgtgtatgtatgtaccatgtaatgtatagtatggatcgattttcattgcattaaaaaaaaaaaaaaaaaaaaaaacagacgagagagaaagggcgaccgggggccgactggactggcagataaaaaaaaaaaaacgggccgctccgatctagaactagtctcgagccgaattccagctccttatgaatgcctgtggttgactgggtgcgcaggtcattctacttggctatcgtactgtgcacgcactcagctcctgtacgaattacgacaataagctcgtgacctgaataaaacttcttcgtaatact

SEQ ID NO: 135841 - DNA, 1119 bp, Zea mays
  Clone ID: MRT4577_55367C.1
gccggccgggttccggctcctgctccctggctgcaacggacttgaccactgaaagctaagcacacccccggccatggcgctcgcgtccacctccgccaccgcgcccgctgccgtgctcaagaccccgttcctcggcgccaggcgcgcgctcgccaatgccgccgcgcccaagcccgcgccgcgccgcgcgctcctcgccgtcgccgcggccgccgccaagaagtcgtggatccccgccttcaagagcgacgccgagttcatcaacccgccctggctcgacggatcgctccctggcgacttcgggttcgatccgctggggctgggcaaggacccggcgttcctcaagtggtaccgggaggcggagctgatccacgggcggtgggcgatggccgccgtgctgggcatcttcgtggggcaggcctggagcggcatcccgtggttcgaggccggcgccgacccgggcgccatcgcgcccttctccttcggctcgctgctgggcacgcagctgctgctcatggggtgggtggagtcgaagcggtgggtggacttcttcaacccggactcgcagtccgtcgagtgggccacgccctggtcccgcactgccgagaacttcgccaacttcaccggcgaccagggctacccgggcggcaagttcttcgacccgctcggcctcgccggcaccgtcaaggacggcgtctacgtccccgacgtcgagaagctcgagcggcttaagctggccgagatcaagcacgcccgcatcgccatgcttgccatgctcgttttctacttcgaggccggacagggcaagacgccgctcggcgcgcttggcctatgatctgcatgctgccggccacgacgtgtgtcgtgtcatcagtcatcctgtgtgcttgtgctcatcgatcgatcgaatccaccgagctagttctcgattgcgagcgtcgtggtacggctgcatcggatcagacgcatgcatgcaacaaaatgggggagtttttttcttcttcttcttcttccagtatgtaccatgtagtgtatagtagtctggtcatggaaccaattaaggcagaatgagtgagcgagggacatttcgttactaaaaaaaaaaaaaaaaggccccta

SEQ ID NO: 135842 - DNA, 289 bp, Zea mays
  unsure (1)..(289): unsure at all n locations
  Clone ID: MRT4577_55368C.1
ccagcacaggtcaccttacagtagatgggttgttggttatctgaatattaattataacanactaagtggcctcttacaattaatattcagataaccaacaacccagcaacaggtcaccttacagtagatgtcaggaatactaattgtaagaggccacttagtctgttatagctggtggatcgcctttatcaaacaatattattttttttttatccactgaaaattctcgcatttcgcacattggaagaactgtacagggtcaatacgactgacaggcgcttgttatttt

SEQ ID NO: 135843 - DNA, 486 bp, Zea mays
  Clone ID: MRT4577_55369C.1
gaactttgggctgatttatgtgcttgtttatgtgcttgtttatgtgcttgcttatctgcttgtttatgtgcttgattatgtgcatgggtgatttactgatcacggaaggaaggtgtgagttggaggtggatggtggaaaggttgggggttcattgatgctggagttggtgtattcgtagggttagttgttgtatgagcatgggcatggtatgccttagggtttctgatacttctttgctgggcctttgtagatcgttttgctcattgggtctggtggtggtggtggtggtggtggtcactataattagaagtagctgcatgtgttcgtggagatgcatcatgtttaggggcattaggttgcattaggtcacggcttcgccgtcgaaggaagattcgcgagaacgacgtgctctttacgccgcggttctggtccaagtcggcgctcgcctacaatcgggccccctccggtcgttaccttacggccta

SEQ ID NO: 135844 - DNA, 304 bp, Zea mays
  Clone ID: MRT4577_5536C.1
ggggaaaccaaattagccaaattcgggcgggtttgttttttacccattagggcaactggtgttttggacttttgactggtttatgggttttacaggggccagcattgggatttgggtgctgtttacaaaacttcaggggttttcacagggaacgtgttttaaacacctgtttttcagggggggggttctttttgatgggggaagaatagttttttttggtgggggtccccaagggttttttttcccttcccttgttgcggctttctttttaaatggggggggggggaattgccacctgggcctt

SEQ ID NO: 135845 - DNA, 1024 bp, Zea mays
  Clone ID: MRT4577_55370C.1
cccacgcgtccgcccacgcgtccgcggacgcgtggttagagccgggtcggcctaggccagcaagttgcattggtttaatttggagctaccaacaatggcggccagacgaggcggcatggcgtccggagccggagcggcggcggcgcacatcgcatcatcgatggtgttgtctctgttgcttgttggagttggcgtctcccgtgcccagctccaggtgggcttctactccgactactgcccggacgccgaggacacggtcaccgccgccgtccaggacgccgccggcaacgaccccaccatcctccccgcgctgctccgcctccagttccacgactgcttcgtcaaggggtgcgacgcgtcggtgctcatcaggagcgccagcaacgacgcggaggtggacaacggcaagaaccagggcctgcgcggccagaacgtggtggacgccgccaaggcgcagctcgaggaccagtgccccggcgtcgtctcctgcgccgacatcatcgcgctcgccgcgcgcgacgccgtcgccatgacgggcgggccgtcgttcgacgtgcccacggggcggcgcgacgggctgacctctaacatccgcgacgccgacgtgctgccggacgccggcgactctatcagcgtgctccggtcacgcttcgccgcgagcggacttgacgaccgcgacctcgtcctcctcacagcggcgcacacggtgggcacgacggcgtgcttcttcgtgaaggaccggctctacagctacccgctgccgagcggcgggagggggccggacccgtcgatcccggcgtcgttcctggcggagctcgaggaccggtgcccaccgggcaacttcaacacgcggctggcgctggaccgcggcagcgagagcgacttcgacgactccatcctccggaacatccgctctggcctcgccgtcatcgcctccgacgccgcgctggccaacagcaacgccacccgcgcgctcgtcgacgcgtacctgggcccctgggcgggcagcttcgagcaggacttc

SEQ ID NO: 135846 - DNA, 241 bp, Zea mays
  Clone ID: MRT4577_55371C.1
gacaagcaccagcattaccatcttgtggcagcatcagatagggagtaggatcaccgcgccgcgagcgggcacggagagtacgtctcttacaccaaggtcaccgtgacggtaagtcagggccacggacgagagctagtaggacaagttcatgactgaggggaaggatcatgagcaccatctgtatctcggcgagggcgggagcatcggcgacggttgcttggcactctacgagatgcacgag

SEQ ID NO: 135847 - DNA, 311 bp, Zea mays
  Clone ID: MRT4577_55372C.1
gaaaagggcaaccggttttaaatggttacaacccccaaggggcttgggggaaaataaaaggtttgcactacatcaatttgatttaagcggaccaggtaaaactacccccttttttgggtgggtcccaaaaaatttaattttgggggcataattggccgtgaaccaaaaaaaaggcccatttttttgaaaaaaagatttttggtaaacaaaattttatgggctttgaagcaacttttgtttggcccattgtgaccgatttttggaaaattgtgttttttttacctgaaccctttgcccttttttggggtttt

SEQ ID NO: 135848 - DNA, 325 bp, Zea mays
  Clone ID: MRT4577_55373C.1
tccagcgggcgccgtgtggggagggggtgatatcaaagatctataataaaaaaacctcaacttacaacccaacactgcattcattttctgaggatatatcctcccgatttgtatgtacgccgctgcaaactgctaataacgcactgttgaccaaagacgtcaccaccatagctgagatatgttactggctgccagagtgtttgatcattatgctttcaaaattatagactccacccccttcaaattgaagggcttgaataactttaagccgtacacttctgctgatgcgcgacattttaagatttactgggggtgggtggctcgc

SEQ ID NO: 135849 - DNA, 1425 bp, Zea mays
  Clone ID: MRT4577_55374C.1
ctcgaggccggccgggctaaaaaaaatctgagacccccacttgggcactcgacgaaacggcgactcctgcgccgggggatccccataccatacgccgcgccgccgccacgaacagcgacagccgcgagggcgacacgaccggcaaccggccgaggggagagacgataggcgagtgcggacggcctatcgccgtgcgacagcggcaccccggtgtggtcgcgtgcgccgccggcgccgcgccaaggcgtcaagcgctgcccagtcccgattccgctctgcactgcctctcgccctgttctgtctgactgtccgagactctgactccgccctggtgagcgttcttcactcctccgattcttcacctcgcactggtccgatggaatccgacgccgaggaggaagcggcggcgaccccagcagcggcggcgaccccaggcgctgggcgtctgaaggggaacccggaactgactgtggacgcagacatgcgagagatggcgaagacggccgcgtggagcgtcagttcctgcaaggccggcaacggcgtcgcggccctgcgcgacgacaacctcgacacctactggcagtctgatggggcgcagccgcacctggtgaacatccagttccagaagaaggtgcagctgcagctcgttgtgctctacgtggatttcaagctcgacgagagttacacgccgagcaagatctccatccgggccggggatggcttccacaacctaaaggagattagaacggtggagcttgcaaagccagttggatgggtccacatatcattatccgggattgatccacgagaaacattcattcacacatttatgctccaaattgctgttttatccaatcatctgaatgggagggatactcatgtccgacagatcaagatctacgggccaagaccgaatcctgttccccaccagccgtttcattttacttccagggagttcatcacatactctactattagatgacagtggatgagcaatcaagataggatcggcagctcatggctctggatgatcgcgccatattagtatatttgcctgcttgtgtgctgtctatcgggtcttggacgtgtatgtgtaatgaagttgttaagttagctcagcagcatccacatctcatattttaaaccccactacataaagagtgcagtgcaaaatagtgatttgcagggcacatgtacctgctggccatagccttaggtagcaataacatacttttgaatttgtttcgcggcctctgttggcttgcagtgtttgcttggttcattggttggtcccaatcattttgtgcccttgatgttcagtgccttaggttagcctatacagtttatggacggtcgtactgttaaacctttgaaactttgtagtttcatttaaaaaaaaacatttttatgaaaaaaaaaagaaaa

SEQ ID NO: 135850 - DNA, 505 bp, Zea mays
  Clone ID: MRT4577_55375C.1
aatattcctcagcgcggagccttcctctgtagcacacttcatgaactcactgatgatacgctggtcaaagcatggaacatcacgaggtcatgatcaccactgtttcgcttcgtatccctcttccttgtcctgagcctactgacagctggcaccgtgcatgcctgcgaaccttactgcgtctgcgccggcctctacctcccgccacatttgactagtatcaacaacactttcttacagaaacttgaagatcaaggatgattatctcaagataagaatgatggagatatgcctctttgagacaccactactccacgacaagatatgttatgataacttggaggataatgatgagacctccacccctattgttgctctataccatcatcatggacgacttcctcttgattgaactcttcacgaccctaatgcgatcattcatgacttgcaactgatcacacgaattaaactgcatgacttcaacctggcccatactaagcttgatgat

SEQ ID NO: 135851 - DNA, 788 bp, Zea mays
  Clone ID: MRT4577_55376C.1
aattcggcacgaggcaggacgcgacgtgcccgtgcgtgagcgtggcgccgtccaccaaactcttctagttccggtcctcacccaccccgcccgtccatttccgacttggccgttcctcctccacgccccggcgcgcgctccggcaaacgggaggcgaggccatccgcgcgcgcgcgatggcgccggacccgtgcggcgacctcgtggtgacgccgaagacggcggccaaggacgaggcgtcctgctccgtgcccacgccgcccaaggtcactcccgacgaggtgcgcgcggtggcgcgcaagttcgcggaccagcctatccaggagacggagcccgacgtctgggccgtcctcactgccatctccaagaaggcccgcctccggccccaggggatgaacatacttttgagtgctgacgagcactgcctgggacgatctgttgaggagcggtttcggatttttgcccagcagatcagcgggatgcattgcaagatatacagggacaccgtcttaggggagctgaaccgccacgagcctgtgcctgttttcctcaaggacacaagctcaaatggcacattcatcaactggaaaaggctcaagaaaaattcatccccggtcaagcttaatcatggcgacattatatcattatcatcacctcctcatgacgacaattcctttgtatttgtctaccgcgaagttaatacaatcagtcgtgtagagaatggggctcccattcttaaaggaagtcagtggagggtggttctggaagtaagaggctaaagggtcttg

SEQ ID NO: 135852 - DNA, 126 bp, Zea mays
  Clone ID: MRT4577_55377C.1
aattaaattctgtttcattctcctacttgtttaactaatctatcaaataacctcttcacagtttataaaaaaaatacataagtcaactttcatccgcttctccataatctaacttctcttttacct

SEQ ID NO: 135853 - DNA, 699 bp, Zea mays
  unsure (1)..(699): unsure at all n locations
  Clone ID: MRT4577_55378C.1
gctttatttattgattgtttttttagagttctagagcaaagccccatgtcttagcatttccaagacaaaaagaataatccatatatatatcctttggatggttcacatctttcactccaggtttaagtttacccaaccaaattaaaaatatataattaaacgnccggcacatagagacaaaaactcaaatctccaagaacatctccactgtcagcagcctccaaggtaaaccataaattttcaatggaacgatcatcaaccaccagggaggaggatatatagcctctgctcttcaaatcttcaggtcttgtggccagattcttgagtttctccagcttcactttgaagtccagtttctatgcctgaaggcagagcagcctcagccttgcttgtagcatgactgccatgttcaagagtaaagacctcgtgtctctaaggaacaccatgaaaacacagttgtttcgtgtcagtttcgaaagcctccacagggctgcaagaatcatttgtgtagtagtggtggttgacgtactctctctcaaagaaagaacatcatgtttcttaggttgttttttagtgcgccttcatttcattctctgaatatgcccataagctttagttgaacatactgatatgtaaatttggctcggtggctcaccgttattgcatgtgcagaatttatggcactggtctgatttatat

SEQ ID NO: 135854 - DNA, 254 bp, Zea mays
  unsure (1)..(254): unsure at all n locations
  Clone ID: MRT4577_55379C.1
tnttttttttcgttggtatttatcttggttgcattaaccgttttgggatgtccaagctgcaaagctgcaaagaaaaccagccctaaagggatccaaccctaaccccaaggcctgctaacccccgggaaccaaagaatgccctgcaggaaaacctatggaccttgcgagacacaatgttacgtagaggaacgttttcaaaacccgccccaggtatggcccaagaagtggccccccccgggtatttttggggggaa

SEQ ID NO: 135855 - DNA, 351 bp, Zea mays
  Clone ID: MRT4577_5537C.1
ggagaggcgccacaaggggggcagggaaataccctgccaatcttatggtttttatttatggatcataacaagtttaataacacaaggcaacaacacaaacaacttcacgttacaacagatggagacaggtctacatacttcagtccgctccacagataaaatgtcaccaccctaataacgagttacactttaaaccgggtacacacatttgtacctgccaacataaaaaaaacggaaagataactacatgctgggcagcctactgctgaacattgctgtactatgcggttaaccacaattattattcttaaagcaaatgcgaggtattggcctaaacacacaaagcaacag

SEQ ID NO: 135856 - DNA, 622 bp, Zea mays
  Clone ID: MRT4577_55380C.1
cctgccgggtaataacctttcgaaatgaaatcaccacattgattctaaaaaaaaaaaataaaaaaaaaaaaaaaaaaaaaaaaaaaaaaaaaaaaaaaaaaaaaaaaaaaaaaaaaaaaaaaaaaaaaaaacaaaaaaaacaaaaaaaaaaaaaaaaaaaaaaaaaaaacaaaaaaaaaactaaaaaaaaaatttaaaaagggggggggtctgggggggtcccctggccccccctgaccactggggggtgtttccggccccaaactttttgcggggtgtaaaaataacccttctcccgggcctccccaaaagggccccctttttaccccccccggtgacccccgcgcccgggaaaaacccccccgggggattaaaccttttttttcccccggggaaaaaaaaggaaatgctttcccccttttttgggggccgaaatttggccccctcctcccccgaaaccgggggttggggggaaaccacctccccccttttttttttggggcacggggtttcccccccccccctttttggtccaccccccatgcccaaaaactttttttttttcccctttcccccaggtaccgtggggccccgggtaccccgtgggaattaaaggggcccc

SEQ ID NO: 135857 - DNA, 350 bp, Zea mays
  Clone ID: MRT4577_55381C.1
cattattgtttatttgttcacccatctagcggccaccaaaaggctgatagtttcttggaaaacctgaaactcaaattgccaactgccttcgaaggccttattctctccaggtgcaaagggactttctcatcccatttaacaacaagccagggtaagagggtctgaaacatggggaaacaccgccccccctggggcaattttaatcactaacaatcccatcgggatacaaagaaaacaaactcatactgataatgctggggcgtacaatacatagtttcttattacagttcataatggcattcacaaactgaaggtgagcaacaccagttttatttacatactgcttacca

SEQ ID NO: 135858 - DNA, 734 bp, Zea mays
  Clone ID: MRT4577_55382C.1
cattggtacctcgaggcggcgggactatctcccatcctccctctctccatctccctgctcctccgcctccttcttgatccccgccgcctgggaatcgccatgccctactcatggacacccttctatcgaggtcacccgatcccaacacccagagtggtcgtcataagttctcgatccaacgccctgcctgtgggtctccacctcgagactgttcatggcatgtcaatgttactttgtgcctacactattcctagaaagtgaagatattgctacttcgctacaatggatattccgtatggaccgactgataccatgtgattgatatcaaggatgagggagcttcttacttcaatggaacactactgatgatcttaactccgactgatgaactctggcccaatcaggaacgtctgaatgcggacaggatctctgtcgactgcagggctgctatgtcgcaggagcagatctgcgcgctgaacgatagttggccccaagtaacttccctgccttgtaatactgtatctcagaacctaaatctgaacaagaagtgtatcaatgattgctacagagacatccatctggcttgagctggcttttgctatggcaaacacaagtgcaggcaatcgctgagtgggtagcaccgtgtcttgcattatgtggatacattctgcgaccctggattatctatgcttttatgcccctactgtttagtattactatccaataaatttgtt

SEQ ID NO: 135859 - DNA, 364 bp, Zea mays
  Clone ID: MRT4577_55383C.1
cccacgcgtccgcccacgcgtccggatcttgtgtactgctacctacccaatcccttggggtgggcgagggtggaagcgagcgacgatggcggcgctgtaggcggcgagggagtgggcgggctacgtcataccagcggagctcgccgccgctggaggggagagacccactcgccgcgctggcggtcaccgacgaggccctcgacgcggggctgcttatgatcgctagatggttccgatccggaggctggacgccgtacaagccggcaccacaccaggacggcaccgccgatcaagagtggacgccgtcgccgacaccaatgacagacgcaagcgcgtcccatcttcttcaggcacaaactagccc

SEQ ID NO: 135860 - DNA, 125 bp, Zea mays
  Clone ID: MRT4577_55384C.1
gcagaccagacgagacctctcgcgttccgtcctcgtcgctgagcacgcacctggtgccatgtgacctgcgaccgcgataatcgcgtcacgcagcaatattgaagaaatctgaacttatgtggtta

SEQ ID NO: 135861 - DNA, 567 bp, Zea mays
  Clone ID: MRT4577_55385C.1
ttttttttttttttttgatttctttcttgttctcttgattttccttgtttcttcttacttcagttgcttcgagtctgttgttcccctttgtttacttcctcatctaatatagaacggagcggcaagcctttttgccccttcctttaaaaaaaaagaataatcatgaatcataagcccatcaaaataggacttcaccccctatttcgataaggggacttgccctggatcctatccaaataggcccttaatgttttccttctctaaaatggtattaaagaggcaaaaagttggcctgcacatcattttttgcctcactcaaatggattgagttcaggaaaaaacaatttggtattgggatgggccagtagacagaacacaaggggcaaggtctacctggtgggaagagaaacaaagacacatctgtgcaatctcatgctattccaaacaaagtgctattgaaagtgcagcattcaaagcatgctaccaatttaaagctatgtagaagttcaacataaaaacacacttggcatgacacaactgtatgatggctgaagtcctaaaatgaac

SEQ ID NO: 135862 - DNA, 312 bp, Zea mays
  Clone ID: MRT4577_55386C.1
gattgctttcgttcgcccttttcttatgaacgccaaagcttgttgccattcgcatacacaaggacatgtatgaggtgtaatttcctgaacctgcttaacatggtggcgacatcatgtgcaggctgacaagattcgtcaaataactttgggacgcgcgatggtttacaaatggatttacggaccacttttcatagaaagttggatagtgaatatgccctctcatggctatcatactacctacctcaaaaatgaggctgggtatttgctgaatcgttctaccctttttttacacggcaaaatcctacgcacttg

SEQ ID NO: 135863 - DNA, 378 bp, Zea mays
  unsure (1)..(378): unsure at all n locations
  Clone ID: MRT4577_55387C.1
tcgcggacgcgtggggccattccaggcggtcccaacatatagcggccccatcagcccggccggggcgtggcctcgggggcgcggactcagtcataccttgccccccggtggctcacggcgtcggtcggcccatcagcacgcggcaaccgacggctcggtcaccaaccccatcctcggccaggggcgcacgacccccatccccagctccccggcggctaggctcgaggcctggatctttgcggcgcgcggggnagggcttnncngtttctgttgacgcggccccacgcatggcgcccaggctcacggacccctccgactgcggcggctggcaaccccggcgcgggttccaccctgcatggcggttcacatcccgacacc

SEQ ID NO: 135864 - DNA, 135 bp, Zea mays
  Clone ID: MRT4577_55388C.1
cacaccttgccctgcacggcgtctccctctcctttggcgcaactgctttggccggtgatgccctggcacggtggcgtggtgaccagccggcgcacaacgcccaggtcccgtgtcgcacaacagccctcgtcggcg

SEQ ID NO: 135865 - DNA, 527 bp, Zea mays
  unsure (1)..(527): unsure at all n locations
  Clone ID: MRT4577_55389C.1
ccgtccgtnnttgatcaagatatctaagaatgatncctcgtcacnnctgtctnnngtccctgnnccccttcnncttctctcnntctctcgnngggaggganngggagggtnncagggaggaatnntggttagtnncgttggaattannggttggnnggagtggnngagtagtnntaggtaatnnctgtccttagttcaatcannatcaannngaggtttnntctttttcttcttttttggnngttttcgaaatggaattnggtttttgtcccgtcccgtcccatgccaaccannagaaagaaaaagaaaaatttccaaagggctccatgganngaatctgtaccaaaaagaagtggcttacgtgccaagaaaggagcgtnttgagtctgnntgagcaggacnncaagcagnncagcagcagctttagggttgttcaagtcagnnngcagtggatgaagcctgttngtgtgtgaagaagagaaagacatcnntatttnngtggcgtnntttcccttttttnnttcccc

SEQ ID NO: 135866 - DNA, 460 bp, Zea mays
  Clone ID: MRT4577_5538C.1
tacgtaagctcggaattcggctcgagggtctccagcggcatccttctcgtgactcccggagcagaggcatggacaccgacttttaactggaactggggctagagacggagcagaagccagaggctgggtactggaacgtggtgagcgcgcgcgcttgagacacatgcacctcggcgcctgcacggctgcactgtcacacggacgggtcgtcactgtgcccagggtgctacgcccgggcgcacagcgccgggtagcgccacgcgcgcatctaaatacacgagggctgcgagcattcccacggctgcgggacctggcatgccgactaccgccgcgctgtgcgccgcctgcgacgtcgacatccactgagtcaacccgctggcgcgccgacacgagcgcctacccgttgcccctctgttctgcgcgctcgctgacactccgcaaccctttccgagcccggact

SEQ ID NO: 135867 - DNA, 503 bp, Zea mays
  Clone ID: MRT4577_55390C.1
ctagacgccacacaccacatcgcttctccacacgacctcgctgaaccggaagacccgcgcacacacgccacttgtgcaccatggcgccccgggtggcggacaagacgccattgccgctggccaccggcctgaagctgggcgtaggcggaggcatgggcctgggtccacactaccgaggcgtgaggaagcggccgtggggacgttacgccgcggagatccgcgacccagccaagaagagtcgcgtgtggctgggcacgtacgacacggccgaggaggccgccaaggcctacgacgtcgccgcccgcgagttccgcggcgccaaggccaagactaacttcccgttccccctcgccgtcgccgtcgccggcggtgctggtagccccagcagcgacagcaccaccgtggaatcgagctgcggcggcagcgggtgtggcgtcgaagcgccggctgtgcaggcggccatgccgctgacgccggccctcgacctcgatctcttccaccgg

SEQ ID NO: 135868 - DNA, 267 bp, Zea mays
  Clone ID: MRT4577_55391C.1
gccaaacagatggcgtaccaactatgcattggacgatggaaagggtatcgagtcctctgctgcgtcaactgcgccgatgcgcactatgagctacatggtggtgctagttgacgtctgtagatataaggtactggccaattcgtcatgcgacggaatcaccaagctgcgatgctacaaccacagcagcaatcgcttggactcctgatggtacaagacagagctgctctacgacgtcgacgccaacgtgatcaaggaggagttcatgca

SEQ ID NO: 135869 - DNA, 608 bp, Zea mays
  unsure (1)..(608): unsure at all n locations
  Clone ID: MRT4577_55392C.1
attaatcttggactttttaatgaacattcacatttaggtagagtttgggaaactatgcttggttgggttttctttgaattctgttagtgacgtggagaagaaaaaccttcgggtcccaccttccagtctttttttacatggtttcacattgctcactgtggctggacacagatccatctgtctcatttatcagaaaggcctactcccccattgtaccatcttcacccgaactctattctaaatgaaaagagttaaaatttctttgaagagtttggttttgagatgcatttacattcccattccttgttaaaattagccacaagaagaaaactcgacaaaaggctagagtatctataaacgtgaaaaaaaaataaaaaatcaagtgtcaagtctctatttcagagtgaaaagtagaactcatgatccatgtgtaccatcttcaggccagggctaattgacttgcttgacactctgcccttgtctcagtaatcccaagggtgatccctaaaactcctaaaatgataacgacttgcaggggcagagatgaatgaaaggagtttgttttctcatttatacagccagtttcagtccgtgttggtntcacgtgt

SEQ ID NO: 135870 - DNA, 403 bp, Zea mays
  Clone ID: MRT4577_55393C.1
aggaggacacgggacgttacgtatacatacatggcgacatattttccaagtcaaagggcaaaggggaaaactaacactggaccaagtactgggggggggacgtctccgtttattatttttgggcaatactaaactttgcccaaaagggctcaagtggtaggaccataccccacgcgggggcggtcgatcgatcgatcgagcagggggatggatccaactgatggggctagcggcggacttacgcttagaataaacagctgggcaaaaacaccttacagggggggaaaacctttttgccgttgggggagttgacctaacgctgcatgctggggttccttttggactggcagaaacaacttgccgggggcgccttgagcctggggcaaaacgccggggggggcgc

SEQ ID NO: 135871 - DNA, 185 bp, Zea mays
  unsure (1)..(185): unsure at all n locations
  Clone ID: MRT4577_55394C.1
cgatgatgtcanatttcctcagtgagtacgtttagctcgattcgagaatgatagtactatatcgctcataccgtactgatggctcgtactgatctagtgatatacagcctgagcactcaggtaagacctcttatctcgatcgtagcacagattgagaaacattctagaagccttatagaactcat

SEQ ID NO: 135872 - DNA, 522 bp, Zea mays
  Clone ID: MRT4577_55395C.1
atcggatgaatttaaacggcacccaatttctttcccggtgtatccacacatactaaaaggatatttccaggtattctacaaccacggaaaatataattcgagcaagtaaaagaaaggttaacacaatgcacttaagctagtttataatacatctgaatccttgcgctccaataaagacttcctactccaaccctatcctccttccatactggacggctacagctatgtacacgagagctgtcccaccaaaagcagctatgagctatgtggtgccttcactcacccatgagcttgagttctccctcttgaagttggttgaattcgcctgttagatcgtctaggttcagcagaatcagaagtagtccttcggggctcagcagaatcagaactcgacttttcagaggtttttagtatacctctgtttgtgttactgacagtgggaacatatttccttttagctcgattagtagtggatacatttggcttggaactaggaacatagatgcagtttgcagttcagga

SEQ ID NO: 135873 - DNA, 2127 bp, Zea mays
  Clone ID: MRT4577_55396C.1
ggctactggaagtctgcgagtgcgagaaataaatctggaagtggtaatgataatccagtaacagaaacattggatgtagatgcacctgctaactttaacaaatctggcagaaagcgtggtcggaaacctaaatatgatcaagcactaccaaattcggagccatcttcaagctgcaaagaattacagtcatatggaatacactcaggagtaggacatggagttgttgaagatgttcccattactgtgtcacctaatggtaacaatgttacatcaccaataaacattatctggaatggcattgaaaagggatctgcagttgaggttttatctgacaaaggtgggtttggagtagcttggttttctgctaaggttattgatataaatggaaataatgtttttgtcaactatgacaaccacaatggatctgggtctcatgaagaagggtgccattgcgacaaggggggataagccgctcagagcacgaggcgcaccctgctaccctctcaaaattcaaaactaggaaacgactcagggaaacagcaggaagttgtttatgggttatcggagatcatgtagacgcttgggtcaacaatagctgttggcgagagggagttatttctcagaattatgagactgatgagacgaaatatgatgtacatttttcagttggaggtggtggtgagtccttagtagttgatgcttggagccttcgtccatcgcgtgtttggaaagatggtcaatgggtagagtggtcccatgcaagagaaaggaaatccaaatctaataagggcgattcacctcctgagaaacgccaaagaatcgacttgcttcaaactggtggcaatctatctgttcttggcgaagtggggggttcttcgaaggacaataatataaacaatgcaaaaaacccggaggaattaaagccattgtctttgtctcagggggaaattgttttcaacattgggaaaagtgtagttgagaataaatctgattctcttgcattcagacgtcctggactacaaaaagaaggatcaaaggtcgtctatggtgttccaaaacatggaaagaagaagaagtttatggaagtaagcaaacattatgatgcaggccaatctgacaagatttctgagggcaattcatctaacagattcgtgaaacatctgatgccacaattgccaaggccacgtgaaaatgcttccaaagttgaccctattagaggaaggagagtaggtgaaacaaggtctagattacctaaacctacgaagtcccacaatgttggagctagcagtgttcctggaaaggattccttgcctatgcaaatgcatgttccaaattctggtgtttctgaaaggagttctagttttgcaggaagttcgacaagcacttccaacaatgagaagcccacttcagaaaataataatccggtgcttggtgtgggccttagaactgaagtttcttctggtcctgaactgcaaactgcatctactgttcctagttccaagccaaatgtatccactactaatcgagctaaaaggaaatatgttcccactgtcagtaacacaaacagaggtatactaaaaacctctgaaaagtcgagttctgattctgctgagccccgaaggactacttctgattctgctgaacctagacgatctaacaggcgaattcaaccaacttcaaggttactagagggcttgcaaagttccctcgtaatctcgaaagttcctggcgagaaggttcctaggagcaattacaaaagtgcatcctcaagagggagaactcaagctcatgggtgagtgaaggcaccacatagctcatagctgcttttggtgggacagctctcgtgtacatagctgtagccgtccagtatggaaggaggatagggttggagtaggaagtctttattggagcgcaaggattcagatgtattataaactagcttaagtgcattgtgttaaccttttcttttacttgctcgaattatacttttccgtgttgtagaatacctggaaatatccttttagtatgtgtggatacaccgggaaagaaattgggtgccgtttaaattcatccgataatttaacgtgagtctgaacgtcaatttgactcgctactatcgtttgatca

SEQ ID NO: 135874 - DNA, 696 bp, Zea mays
  Clone ID: MRT4577_55397C.1
atcattataagctactattccaggacactttacctgctatgaagactttgcaggatgtgccttacagaggctggaagtgagatagttacaattgcaactcaaagtgaaagtctagatattggtacaccaacattctaccatacgggacagcatttacaacttttaagacataatttctgtctctctgcacgtccattttcttttcttgtctcacatattatactctctacagtacacacataacatactcgtgtctctttcttgtcacacctcatggtggctgtctacatgcgagcgggtcttcagaggagggttccttctccttacgcccatatatcttcagaagagatcatctcggaggtaacctagctcaagtgcccccgccatttcaatgtctgtgaaatctgtcagatactctggtatgctcggcaccatgaacaggttttcaaagctttcttcctggattccatagacatcattgtgaacaaacgttgggctgctactgctttggttctgattggcaatcggcacactgtaatagtgtgctgtgtcaacaacacacggatggttgacgacatccttcttgcaaatgtggtggccgtaatattcaacatcgaacaacctcactgtcccgcttccatctgattccttctgttgaactgtcttggttgcaaggcaccttgtctttacattggc

SEQ ID NO: 135875 - DNA, 244 bp, Zea mays
  unsure (1)..(244): unsure at all n locations
  Clone ID: MRT4577_55398C.1
gggggggggnnnnnnnnnnnnnnnnnnaaaaaaaacaggggaccaacacaaggacccccgaaacngcngccaacaacaaaaacaaacaacagaccaaggcacaaccagggagcgngcagcgcaaaaaaaaacacacagcggcaagaaacagcacgcaaggaaacaacaaccganggcagaaggccnncagcaacaganagagagaaagccccaaaccggganaacaaagccagaaagaaaaaca

SEQ ID NO: 135876 - DNA, 535 bp, Zea mays
  unsure (1)..(535): unsure at all n locations
  Clone ID: MRT4577_55399C.1
ccggccttattattatttctactgaaaccaacgtcaattatatccgttaaanaaaaaaaaaaaaaaaaaaaaaaaaaaaaaaaaaaaaaaaaaaaaaaaaaaaaaaaaaaaaaaaacccccctacaaacgctttaagttcttagttaaccctagccacgtacccacacatcgaaaacaacgcaattagttaggaatagcatccagggggtccggggttgcggtttcctcgggcctcttgctcctcgtcggggccttgggggccaccagggggaggggggccacattcaccatcaccaacaactggggttcgacgggggggccgggggccaccccggggggggggggaacgcagtttgaccccgggaaaacggggaccggggacgtgccgggggggacccagtccggaagggggggggggcgcacggggggctccttcaacgggggaagggggagttgccaaacgggcgactgcggnggggcactctcctgcacgctctcggggaagcctcccatgacgctggccgagttcaccat

SEQ ID NO: 135877 - DNA, 427 bp, Zea mays
  Clone ID: MRT4577_5539C.1
gaaaaaatgcacacagcacaagtccaacaaccatattccttctcgatcttaactttgtactgctactgctaccaccaaatatataaatctatatatttcatttcccttcgccccttcagaattgggtggatgaggttctccgaagtgagctcttggttgggaggaccagtgccgctacctcccgtttcagctctttgcactgcttcttgagcttcaagttgtcatccactagccggcgaacctctttctccaggttctccacgtatgccctcttcctggccctggagcggagcgcggactcccggttcctcatcatcctgatgctcctccgatcgtcgccgctggcctgctgcacctccatgtcgacctcgttgccgacgaagcccgcgagcgagacgggcgtggagggcagcgcgtggccggcgcg

SEQ ID NO: 135878 - DNA, 382 bp, Zea mays
  Clone ID: MRT4577_553C.1
gggagggacgcgtacggggagctctaggcggcggaggaaggcgttcgccacagtcgctgagttccctggggaaggggggggtctctccttggggaagctgttcatcctccttttctccaataaggagatgagggttctcatggtcgggctcgatgccgccggtaagaccaccatcctctacaagctcaagctcggggagatcgtcaccaccatccccactatcggattcaatggtgaaactgtgtgatataataacattatcttcactgtttaggattgtgtgtgggcaggacaagatcatggccctgtggagggactacttttagaacacacagggacttattttttttggttacaagaaccacagggaacgtgttgttga

SEQ ID NO: 135879 - DNA, 741 bp, Zea mays
  Clone ID: MRT4577_55400C.1
atgcacaagacggctcaagctcggttcaccggcaggaccgctgccttctctggccctactgccgagtcgcagcttccctgctcgtcgatggcctcgacggtgcgaggtagagagggccccgcctcgcccgttcggcattggccacgctccaagaggagcgacgccgaaaacaccggggaagcgcagagaaggcaccaaggtcggcgaccaccgcgacgtcgccctaaggttacggttccgacaatttccctcccctccgcatcgtggcgaacgcatgggagatccgccatatgtcgtctcattcctcgcccaaccacggcggaggcggatccccaacccaccgagccgaccgaggtgatgtaccggacgagagccgatgacttcctcggacgatgcaagtccatcgtctatcagaacaacaacgggctctgcccactcctcaccatatgtaacgtgctgctgctgaagaatgtgatcagcctgaaccctgacgcggaggaggtatcgcagaagaggttgctctcgctcgtggccgagcgcctcatcgatcccaacattgctggacagcatgttaatggttcgattcgtaggtcatggatgaggggcgacctagacgtggaatctttcgaaggatcccatctggtcttggttgccaccggatcagactcatttgaggtggtgtcttataaaaatgttaactgtctgaaacaagattcactcgacaagagaatcatcgagtga

SEQ ID NO: 135880 - DNA, 124 bp, Zea mays
  unsure (1)..(124): unsure at all n locations
  Clone ID: MRT4577_55401C.1
gctggaagccgntggacaagtgcgaggtcaaggatcagacggtcagccagagagtcagaaggccagtagatgacgactctgaacagcttgatgatcagaaggaccaagtcgcggacgagcaaat

SEQ ID NO: 135881 - DNA, 257 bp, Zea mays
  Clone ID: MRT4577_55402C.1
atctcctaccatcctacagctttcacccagcatttgtgctcccgtatccttggtcatccccagacccacttccgcttcgtatcctttccctctctgtctaaaccacaacagcctcttccagcataacaatattcacctaatattcagctcatccgctctcctataaaaacgaaacgcaaatccaaaaaaaaaaaaaccccttcctcacgacacattgtccgctcccttttgacccatgatatatctctcttggatct

SEQ ID NO: 135882 - DNA, 2166 bp, Zea mays
  unsure (1)..(2166): unsure at all n locations
  Clone ID: MRT4577_55403C.1
tccgggnggtctggctcttcgnaattgcaaagggggnagtgtccccatttaccttgtggcaaagcgcatattgtcgctagatgtcggtctacttattgctggtgcaaaggagaggggtgaactggagtctagggttactaatataatccgcgaggtccgggaagcaggcgatgttattctttttattgatgaggtccacaaccttattggatctggaactgttggaaagagtaagggttctggtcttgacattggcaacttgctgaagcccgcgcttgctagaggtgaattgcagtgcattgctgctacaactctagatgaacaccggatgcattttgagaaggataaggctttggcccgccgcttccagccagtactagtagatgagcctagtcaggaagatgctgtgaagatattactgggtcttcgtgaaaaatatgaagcttaccataaatgcaaattcacattggaagccatcaatgcagcagtttatttgtcagcaagatacattcctgacagacagcttcctgataaggctattgatctgattgatgaggctggaagtagagctcggatggaatcatttaataggaagaaggaagggcagtcttcgattctcttgaagtcaccagatgaatactggcaagagataagagctgctcaggcgatgcatgaagtggtgttatctaacaaggaaaaatattctccaaatgagaatgctgaagagagtggtagttctaacgttgaagcaccacgccgagacaatattgagtcaacatctacttcatcactctcagctgacgaaccagttgtagttgggacagaggaaattgcaagggttgcctcattatggtctgggataccagtacagcagttgactgctgacgataagaaacttctagtaggactggacgacgaactcagaaaacgtgtcattggccaagatgatgctgttgtggccatatctcgtgcagtgaagagatcacgtgttggccttaacgatcctgatagacctattgctacgctgcttttctgtggtccaacaggagttggtaaaacagagctcaccaaagctctagcagctagttattttggatcggaatctgctatgcttaggttagacatgagcgagtatatggagaggcacactgtgagcaagctcataggctctcctccagggtacattgggtatggtgaaactggtactttgacagaagcagtcaggagaaaaccatttactgtggtattgttggatgagatagagaaagctcaccctgatattttcaacatccttctccaaatatttgaggatggacatttgacagactcacagggtcgcagggtttccttcaaaaatacgttgattgtcatgacttcgaatgttggttcaacatcaatttcaaaaggaagacagagcataggtttcttgaaggaagataccgagtcaggctcatacttcgcaatgaaatccttagtgatggaagagctcaaggcatttttccgtccagagttgctcaatagaatcgacgagatggttgtgttccgtcctctggagaagactcagatgctggccattcttgatatcatcctaaaggaagtcaagggccgacttttggccctcgggataggtttggaggtgtctgatgcaatgaaggacctgatatgccaagagggctacgacaaaagctatggcgctcggcctctgaggagagctgtcacccacattatcgaggatgtcatcagcgaagcgattctttttggcgagttcaagcccggtgacacgatactgatggacatcgatgcagaggggaagccatgcatgggccatctggaccaacagatcgtccaggtctctgacccaacacgggcaatctgaagctgtgttggaccttttccagtgtagtagattagggatctaaatcttttattctttcaagatagagattattaattctttgttacgtagatatatagagtagtatttcattatgtatatatatcaaccagatgatccagataggggaatctggtcagtcattggagttatttgaaattttcatccagctgtatgtatattgttgaattgtttctgattcaactggccatatatatcatcattaaactatcttcatcggcttattctcctctctctctctctcctcgtgc

SEQ ID NO: 135883 - DNA, 849 bp, Zea mays
  Clone ID: MRT4577_55404C.1
tcggctcgagcgccccgccatcctagcccctgagcccgcaatccccttccattggtggcatcacccaggcgttgcgtccccgccgtcgtcctcgccccattacgagtggaaggaggacgtccacatgaccacaccaggcaaggccatgcccctgcccgacgccaccccccagaccccccctctagaagcctagcgatggcaccgtctatccgtgcgagatctccgtgcttgaggtatctctgtgtcgagggaaagcgagtgctcctctcctagcctaacctcctctgaattcatgtcccaaccttctcttatttgtgtgtttatctcgtctacctgggttgatgttgtttgattccttctcctttttgtttgggaggtcgccaaattccatcccatctctcagcgtcgtggtctccccgatatggatgggggaagagacaagctcgaacaaggaggctacgggcattgctttatgtttgtgacgctaaaggatctctatccatcattgtttccatattatcatggtattattgccttcaatattattctctatatcaactacagctaccgtggaggagttgatagtgaaggttgtccagttatttgtcgttgtcggtgctcactttcttcttcgctgcttgattcttgagttatttggtctatatgtagcaaatgtgattgaatcttaactgtcagtggacataattagacattttcaataagaagaatatcaattttagttgattcctaaaaaaatttgcggccatgcccttaataaccatgcagttcctgagcctgctcagtcatccctgttctctcttgacatacatgaatatcctaatcttaccg

SEQ ID NO: 135884 - DNA, 393 bp, Zea mays
  unsure (1)..(393): unsure at all n locations
  Clone ID: MRT4577_55405C.1
gggggggagccgnagctgcncgccgtcgccgtctcccaatgccctgcggccactgccgccagttcctgcaggagatccgcggcgccgccagcatccgaatcctcgtgaccagcgacgccgctgaggggtncgcgcccgagtggcgcacggtggcgtccctcctcctccgccccttcgggcccaacgatctcctccccggagatgtgcccctcgtcctcgaggctcacgacaacgccctgggtgatcccgtcgccaatggcctcgcccgcagcgacctggacgcgcgcctgaggcaggccgcggaggcggcggcgcgggcggcgcacgcgccgtacagcaagtgtccgtcggggttcgcggtggcagacgggnacgggaggatctatgccggtg

SEQ ID NO: 135885 - DNA, 1646 bp, Zea mays
  Clone ID: MRT4577_55406C.1
tctgggaggtaacgacctggttgtgaggcgagacgtgagggagaaaaacatatttactctacgcgctgtcacgcttcgcgcgtgacgcacgacacacgaaactcgtgctttaaaggagtagagatatacagtttttgtgtataacataaaccaacatgagctgcagcggttagagactagtgctttgttcctagagaccatagttcgaatcccagtgggggtgcctttttgatatttcgtgatattttgctgagcgtgtgagaaactttggcaacgcgcgtggaggagggcgcgtggaggaggggagcggttgcatcgagcgggcgtaccaagggagaaacttccgttttatattagtagagatgtttatgaagcaagcattgattttttccttcctgatcccagaataacttcagcttatgctctgcaggtacaactacatgcggatgaggaaacttaccgatcaatgggtaaagagcatgcactcgtcatatcaaatcatcgaagtgatattgattggcttattggatggatattggcccagcgctcagggtgccttggaagtacgctcgctgtcatgaagaagtcatccaagttccttccagtcattggctggtcaatgtggtttgcagagtacctctttttggagaggagctgggccaaggatgaaaagacactaaagtggggtctccaaaggttgaaagacttccctagaccattttggctagctctttttgttgagggtactcgctttactccagcaaagcttctcgcagctcaggagtatgcggcttcccagggcttaccagctcctagaaatgtacttattccacgtaccaagggatttgtatctgccgtaagtattatgcgagattttgttccagccatttacgatacaactgtaatagttcctaaagattcccctcaaccaacaatgctgcggattttgaaagggcaatcatcagtgatacatgtccgcatgaaacgtcatgcaatgagtgagatgccaaaatcagatgatacgtttcaaaatggtgtaaagacatttttgtgacaaaggatgccttactggacaaacatttggcaacaggcactttcgatgaggagattagacctatcggccgcccagtgaaatcattgctggtgaccctgttttggtcgtgcctgctgttgtttggtgccatcgagttcttcaagtggacgcagctcctatcgacatggagaggagtggcattcactgccgcagggatggcgctcgtgacaggggtcatgcacgtcttcgtcatgttctcccaggctgagcgatcgagctcagccaaggcggcacggaaccgggtcaagaaggaatgaaaacggagggtggagatgtgattctgggctctatttatgggcagctttcaaaatgactcgattcatattaatgtatacagcaccaaattccagacattgatatgctctgaaacaggatgctctgctcctcttgtatttgtgtgcaggaaagaattttagggagttcatttttgcccccctcttttgggcagaggaactgtaggacatgaacttgatgttggtacatttgccctgtagacattctggaagcctttcagtagttcatttatttatcagtaaagcttgcatctttcttc

SEQ ID NO: 135886 - DNA, 1719 bp, Zea mays
  Clone ID: MRT4577_55407C.1
cacctcctctttcttgtcccaattcagcggccgcgtcgacaattagcgctcatgcatccacccccaccctataacaaaacctccgaatgcgcctcgcgtgccccgtcctcctcgtcgccggcggagccgcctactatcgcctggagaaggagcgccgcggggagcttttcccactgccgactgccgtctgaccctccgagatcggaagcggcgccggcgccggccggcgatggcgatcccgctcgtgctcgtcgtgctcccgctcggcctgctcttcctcctgtccggcctcatcgtcaacgccatccaggccgtcctatttgtgacgataaggcccttttcgaagagcttctaccgtcggatcaacagattcttggccgagctgctgtggcttcagcttgtctgggtggtggactggtgggcaggtgttaaggtacaactgcatgcagatgaggaaacttacagatcaatgggtaaagagcatgcactcatcatatcaaatcatcggagtgatattgattggctcattggatggatattggcccagcgttcagggtgccttggaagtacacttgctgtcatgaagaagtcatccaagttccttccagttattggctggtcaatgtggtttgcagagtacctctttttggaaaggagctgggccaaggatgaaaagacactaaagtggggtctccaaaggttgaaagacttccctagaccattttggctagctcttttcgtcgagggtactcgctttactccagcaaagcttctcgcagctcaggaatatgcggcctcccagggcttaccggctcctagaaatgtacttattccacgtaccaagggatttgtatctgctgtaagtattatgcgagattttgttccagccatttatgatacaactgtaatagtccctaaagattcccctcaaccaacaatgctgcggattttgaaagggcaatcatcagtgatacatgtccgcatgaaacgtcatgcaatgagtgagatgccaaaatcagatgaggatgtttcaaaatggtgtaaagacatttttgtggcaaaggatgccttactggacaagcatttggcaacaggcactttcgatgaggagattagacctattggccgtccagtgaaatcattgctggtgaccctgttctggtcgtgcctcctgctgtttggcgccatcgagttcttcaagtggacacagcttctgtcgacgtggaggggtgtggcgttcactgccgcagggatggcgcttgtgacgggtgtcatgcatgtcttcatcatgttctcccaggctgagcggtcgagctcagccagggcggcacggaaccgggtcaagaaggaatgaaaaatggagggtggagatgaggttctcgtggggtttgttatgggcaaccttcaaaaggactctccattcatattagtattaattcatatatatgcagcgccaaattccagacattgatatgctctcaaataggatgttctgctcccctcttgtatttgtatgcaggaaagggtttgtagggagtttaccccccccccccccccccccccccgcctttcttttgggcagaaagacatattctggaagcctttcagtagttcatttatcagcaacaattgcatctttcttccattgctgtgcaccttgtatcacctatcagaatgtggtcatatggggattgtacggcagcactgctgtgtgtgttg

SEQ ID NO: 135887 - DNA, 2346 bp, Zea mays
  Clone ID: MRT4577_55408C.1
atctgggaggtaacgacctggttgtgaggcgagacgtgagggagaaaaacatatttactctacgcgctgtcacgcttcgcgcgtgacgcacgacacacgaaactcgtgctttaaaggagtagagatatacagtttttgtgtataacataaaccaacatgagctgcagcggttagagactagtgctttgttcctagagaccatagttcgaatcccagtgggggtgcctttttgatatttcgtgatattttgctgagcgtgtgagaaactttggcaacgcgcgtggaggagggcgcgtggaggaggggagcggttgcatcgagcgggcgtaccaagggagaaacttccgttttatattagtagagatgtttatgaagcaagcattgattttttccttcctgatcccagaataacttcagcttatgctctgcattggcctcgaggccggccggacccgacctcctggaaacctcgaggccggccggggtccgacgtggcacgccacagccacacccatcgcttcactccaccacctccttcctccttttcccagcgcgcatccccccaccgccgccccgacctccctgcaataataattacggagtataataataataaaaaaactccgaatccgccgcgcgcgccccgtcctcgtcgccggcggaggcgcccgccaccgcccacagcagcctatcgccggagaaggaacgccgcggggagcttttccactgccatctcccgtctgacccctccgagatcggaagcggcggccatggcgatcccgctcgtgctcgtcgtgctcccgctcggcctcctcttcctcctgtccggcctcatcgtcaacaccatccaggccatcctatttgtgacaataaggcccttttccaagagcttgtatcgccggatcaacaggttcttggccgagctgctgtggctccagcttgtctgggtggtggactggtgggcaggcgttaaggtacaactacatgcggatgaggaaacttaccgatcaatgggtaaagagcatgcactcgtcatatcaaatcatcgaagtgatattgattggcttattggatggatattggcccagcgctcagggtgccttggaagtacgctcgctgtcatgaagaagtcatccaagttccttccagtcattggctggtcaatgtggtttgcagagtacctctttttggagaggagctgggccaaggatgaaaagacactaaagtggggtctccaaaggttgaaagacttccctagaccattttggctagctctttttgttgagggtactcgctttactccagcaaagcttctcgcagctcaggagtatgcggcttcccagggcttaccagctcctagaaatgtacttattccacgtaccaagggatttgtatctgccgtaagtattatgcgagattttgttccagccatttacgatacaactgtaatagttcctaaagattcccctcaaccaacaatgctgcggattttgaaagggcaatcatcagtgatacatgtccgcatgaaacgtcatgcaatgagtgagatgccaaaatcagatgatgacgtttcaaaatggtgtaaagacatttttgtggcaaaggatgccttactggacaaacatttggcaacaggcactttcgatgaggagattagacctatcggccgcccagtgaaatcattgctggtgaccctgttttggtcgtgcctcctgttgtttggtgccatcgagttcttcaagtggacgcagctcctatcgacatggagaggagtggcattcactgccgcagggatggcgctcgtgacaggggtcatgcacgtcttcatcatgttctcccaggctgagcggtcgagctcagccaaggcggcacggaaccgggtcaagaaggaatgaaaacggagggtggagatgtgattctgggctctatttatgggcagctttcaaaatgactcgattcatattaatgtatacagcaccaaattccagacattgatatgctctgaaacaggatgctctgctcctcttgtatttgtgtgcaggaaagaattttagggagttcatttttgcccccctcttttgggcagaggaactgtaggacatgaacttgatgttggtacatttgccctgtagacattctggaagcctttcagtagttcatttatcagtaaagcttgcatctttcatccaaaaaaaaaaaaaaaaaaaaacccgttgtgcaccttgtctgtcactcatcacatgttgttgtgttctaactgttctgtgatgaaaagcaagggatacagtatgttcaataaagcaatagaaatgttttgtgacgaaaaaaaaaaaaaaaaaagcggcc

SEQ ID NO: 135888 - DNA, 439 bp, Zea mays
  Clone ID: MRT4577_55409C.1
gaccaaagccaaaaagggcccggcagaaacaaacaggggggggggggtaaaaaaacaacccccaagtaacaggttacatttttaaggcaaaacccctcacactgggaaattgttgccgggggccaccaactaaagcagggggtacctaaagggccccttccccttggccccaaaaacccccaccaccttttttttttcccccaatttcccggggcttttaaagggggaacccaacgccttggcccccaccccggggcgggttcttgtgcttttggtccaaaacctggtgccccaaccccccttttttttcccacgggggcgtcccccaaaaaaccaccaagttgtcggggtcttttcttatccccgggagggagcgggggttaaccccctcctcctgggggtgggggcccataaaataaaatagcccacccgccccccc

SEQ ID NO: 135889 - DNA, 397 bp, Zea mays
  unsure (1)..(397): unsure at all n locations
  Clone ID: MRT4577_5540C.1
gggcccagaacaaggggcccattttttcccacaaaaaaacaacagggggcccccaaatttggggcccttctttaaatcgaaaatttttttataactagcaagggggggggggaggggggaaggaaannaantttcccccacaaggtcaggggggggaaaaatcgcccccccccccggggtggggaagaccgcccaccgatggggaacccttaaaccacgggaaggcccccacacccgcggggggaaactttttttttggggggggcacccttggggggctcctgggacttgatcagacttacaaaatccatccctttcaggaaccgggcaaaaaacaaatgcctttcggccaaacaaggggttttggcaggggaaaaaaaaaaagggggcccttggg

SEQ ID NO: 135890 - DNA, 335 bp, Zea mays
  Clone ID: MRT4577_55410C.1
ttcttcaaagaacataatcggatagctgctggcacgattacattatatatataaccacacacacactaaactacaactgcatagccattaccccacttttcctgggtttgaaagtcagagaaaggttccctttggggaaggggattacccccccacccactggcccaaagggcaccagatttggttccaatccctgcacgcttaaacttggttttaaaaacattaattgggtgctgggaaaatcagaacacaccccaaggttaaaaacaaggtcgggcttaacccctaaggaaagaaaggtggcaacaagcattatttgcgcctcttgggcattt

SEQ ID NO: 135891 - DNA, 597 bp, Zea mays
  Clone ID: MRT4577_55411C.1
tcaggccggccgggaccgacgacaaataccgcaaaaatggttgccgcaaagaagcatgtcccgatcgtcaagaagcgcactgcgcagttcaagcgtcaccagagtgaccgcttcgaccgcgttggcgagagctggaggaagcccaagggtatcgacaactgcgtgaggagacgcttcaagggccaggctgttatgcccaagattggctacggttccaacaagaagacccgccacatgatgccctccggccacaaggctttcctcgtcaacaacacccgcgacctcgacctcctcctcatgcacaacaagacctacgccgccgagattgctcacgccgtctccgccaagaacaggatctccatcgtctcccgcgcgaaggagctcggtgtcaaggtcaccaacggcaaggccaagctctccactgaggcataagcgtgaagcgtgtgttatttgcggtaggcgaacggctgggatgaaattttgggcgtttgcatcggctttagacgagtgtgcattgccagcacctagctagccgaaatgaaagaggccgaacaaaaaagccatgaacccactaaaaaaaaaaaaaaaaaagcggcc

SEQ ID NO: 135892 - DNA, 396 bp, Zea mays
  Clone ID: MRT4577_55412C.1
accaaatccacataagtgttgctccccacaaagtttaccacacaagacctatataccttttcagctaccacagactcacccaccggagtagaaacacgaataggcatatcaagaaattcacaatgtaaatttagaccattatcaaatgaggaagatatataagaaaatgtggatctgggatcaaacaatacagaagccatgcaatcacaaaccagaagattacctgtgatgacagcatcagatgcctccgcttcagaccgcccagggaaagcgtaacaatgggccctatcgttcgtctgtccgttgcccctaccatgttgtgatgtagtggccccagtttgcccattacctctgccgttttggtgaccaccattacctcgaccaccacgtcctcta

SEQ ID NO: 135893 - DNA, 374 bp, Zea mays
  unsure (1)..(374): unsure at all n locations
  Clone ID: MRT4577_55413C.1
tnaataattttttttctttttatttttttttggtacgttttttttttggttggttccgcccatcccccaatatattttgtggtagaatcccctttgtttatcaatctaaaagacggcaccagttaagctcccaccaagaaacgcggaaaaggagccctttaattgggggggggcccaagccaacgccaaaaaactttgtttttggaatccacccaaaaaccaattcaaaagggggccccccccaaaatgtttttaggggaggggggcgcccggtttgcaaaaaaaaggtggcaaaagggcaacaaaatttgcatatgaaaaagggcctagggggacgcccacaacctttggaaaaaggaaaaaaaccgtgtttt

SEQ ID NO: 135894 - DNA, 874 bp, Zea mays
  unsure (1)..(874): unsure at all n locations
  Clone ID: MRT4577_55414C.1
ctcgaggccggccgggccggggtcgtctcgtcgccgctgctccctcgcgcacccaacgcctcctgccgtctcctcctctcccccgcgcactcgtcgcaaccttctctcatcgcgcacttggggccagctgcgggtacgaggccgaccacggggactgggaccgcagggacgacctcctcttgctcatctgaagcagttcgttggaaggtggaaacgttcctcaagagcagcatgttctgatctgaatgagactcttatatactcagatttgaaggtggaaacagcatccccactccggaatgcacgcaggaaaggtagacccaagactgagtccaaagataatgctagtgtgaaaccttgcagtgctgggagctgtgaaaagaataatttggaggagcaaacagaatcgcttgataacattgatgcaactgaaatggactgggaagaggggcacgtggagcacattgaggattctgttgagctcagagagaccatgactgttgagttcaacgacataccttcttccactaagaagaagagtgttcggaggcccagtgctgaggaaaaggagttggctgaacttgttcacaaggtccatttgctttgcctaatagcaaggggtagagtagttgacaaggcttgctatgatacactcattcaggcctcagttctttctcttgtaccatgccacttactatggagtcttgttgatgttccaaacctgaaagctgttaacctacgtagtcttgtgagctggttccatcgtactttttgtgtaactgcacaatccactgacaggngatcttttgaatcaaatttggctttcactatttcagatcatgtagggactgctgaagagatttgtgcactctct

SEQ ID NO: 135895 - DNA, 360 bp, Zea mays
  Clone ID: MRT4577_55415C.1
agaccgcatgatccttctgcttttcactatgaggattacggtcacggcgtccctattggacctcggatggtgtgggtggtaaagggaaaacactatttatttctttgccctcctgcctttcattggagcaggcgtggaacgtccctggttctaaggggatcagttggcttgggcgaggcgagcatgggccacgtgggctggtgatgatgctcgtggtgcttggagttcacttgggggaaacgctccttattgcgcttgaggtctccgagctggggtccggcgccccgggcaccggggacccccggcatgacataaggcccctcaactgcgccagggactggccggccgcctatgcccagg

SEQ ID NO: 135896 - DNA, 331 bp, Zea mays
  Clone ID: MRT4577_55416C.1
tgaacaccttgagctgacgcggtgcctcatgggcgcttttattttcaaacacacttgtggttacataataggcgagggctttttctaccggctagtgtaccacattagatcaggattatatgaggaagaactagaaggacattactggcaacccctaggtgcctccggtcggctgatgaccgcttgctacaggcctaagaggacgctctcattcaacgtccaatccaccatcgacatcgactcgctctatgagggctttgacttctacacgaccaataaccctgcccggatcgaggagtttaacatggacctcttccccaagtgcatggag

SEQ ID NO: 135897 - DNA, 1356 bp, Zea mays
  Clone ID: MRT4577_55417C.1
ctcgaggccggccgggccgggctcgcaaacccgttgtcgtctcgtcgccgctgctcacctcgcgcacccaacgcctcctgccgtctcctcctctcccccgcgcactcgtcgcaaccttctctcatcgcgcacttggggccagctgcgggtacgaggccgaccacggggactgggaccgcagggacgacctcctcttgctcatctgaagcagttcgttggaaggtggaaacgttcctcaagagcagcatgttctgatctgaatgagactcttatatactcagatttgaagggatactaacaaatgggttctagaattgagttgataaggaaacatttgaaacaggaggaggaggatgatgatgagttattttttgtgttagttccagctatatatgcttccctttattctgaaaagagtagccgatgtgtggctccaaagggcagcagagcagctaatccgtggggctccaaagggcgtcagggcagcgcagccccgctgggtaatgcccatccagggagcctaaaagggccggtgcccccccccccccttcttttgcttcttcgtcccctccaacaatcacagggagggaacgagctccaagcacctagtaatgcggcggacgaggagccagtccgccagcggggttaaccctccacccgctgctggaccaagcgcggaggtcgctggtcgccggagggcttcgcctgccgcgaatgggaaatcacctgccaccaaggtggaaacagcatccccactccgggatgcacgcaggaaaggtagacccaagactgagtccaaagataatgctagtgtgaaaccttgcagtgctgggagctgtgaaaagaataatttggaggagcaaacagaatcgcttgataacattgatgcaactgaaatggactgggaagaggggcacgtggagcacattgaggattctgttgagctcagagagaccatgactgttgagttcaacgacataccttcttccactaagaagaagagtgttcggaggcccagtgctgaggaaaaggagttggctgaacttgttcacaaggtccatttgctttgcctaatagcaaggggtagagtagttgacaaggcttgctatgatacactcattcaggcctcagttctttctcttgtaccatgccacttactatggagtcttgttgatgttccaaacctgaaagctgttaacctacgtagtcttgtgagctgggttcatcgtactttttgtgtaactgcacaatccactgacaggggatcttttgaatcaaatttggctttcactattcagatcatgtagggactgctgaagaatttgtgcactctctgtggcatattcagggcactca

SEQ ID NO: 135898 - DNA, 804 bp, Zea mays
  unsure (1)..(804): unsure at all n locations
  Clone ID: MRT4577_55418C.1
ggcccgctcgagngccggccgggcccgggatacttttctgttcatccatttgtccaagacattcgagcttgttaagttctagtagttttatttgttgcagagttagtaccagagaaatggagccacaggaaggaaggaaagggataccatctctgctgtcctcgcagggggagtgcattgccaccaacatcacacagctcattggttggacaccactgatagaactgagaaacatcactgagaaagacagcataggtgctcggctgattgggaagattgagccgtaccagcccctttcctctgtgaaggatcggagtgctctcagattgattgaagatgcagaggagaaaggcttgatcacacctggcatcacaacactgctgggggtcacaagtggtaatcttggcatcggcgtggcgttcattgctgctcagaaaggatacaagttcatcgccctcatgcctgctaaactctcgcttgataagcagatactgatgcgataccttggcgtagaagtggtattagttgatgctgtacagcatggattcaaagctttacttgatagggtagaacagatgaagaaggatgtggaagatgtgtatgttctagatcaattcaccaatcctgcaaatcccgatgcccacttcagatggactggacctgagatatggaaagatacagcaggcaaagtggacatatttatagctgcttcaggntcaggaggcaccatcacaggccgtgggggaggtatctcaagacgaagaacccatctgntaaatttatatgcgttgaaccagctgaaag

SEQ ID NO: 135899 - DNA, 863 bp, Zea mays
  unsure (1)..(863): unsure at all n locations
  Clone ID: MRT4577_55419C.1
acacacacacacaccattattttcctctccctcctcctgaccacccacccacctaccagccaccaaggcggccgatctcccctccccagccgcgccaccgccgacgccgcagctccggcagccgttcgtctcgagattgacctttggtgactgttagaagccacagacactgaagatggcgcagcctgctgagctttcccgcgaggagaatgtgtacatggccaagcttgcagagcaggctgagaggtacgaagagatggttgagttcatggagaaggtggccaagacagttgactccgaggagctcaccgtcgaggagcgcaaccttctatcagttgcttacaagaatgttattggtgcccgccgtgcctcgtggcgcatcatttcctccatcgagcagaaggaagagagccgtggcaatgaggaccgtgtcacactcatcaaggactaccgtggaaagattgaggttgagctcactaagatctgtgatggtatcctcaagcttcttgattcccaccttgtcccctcatccactgctccagagtccaaggtcttctacctgaagatgaagggtgattactacaggtaccttgcggagttcaagagtggaactgagaggaaggatgctgctgagaacaccatggtggcatacaaagctgctcaggagattgcactgaaagagctgcccccgactcatcctattaggcttgngctggcactcaacttctcggtgttctattatgagatcctcaactctccagaccgtgcttgtgacctcgccaagcaggcttttgatgaggcatctcggactggactctctgagcgaggagtctacaggacagcacttgatcatgcagctctgc

SEQ ID NO: 135900 - DNA, 194 bp, Zea mays
  Clone ID: MRT4577_5541C.1
gtgaactgcgcgcgtactactcaacagcggatatacagctaatctgtgctctacccagcatttcacatgacgtcctgcactactgagggggagctatacctaaagtgcagacgaaatgacgtatctgctgaagagatttccgcttacacccgactcgtctacaccttgcaccagggatgggagtccgacgagac

SEQ ID NO: 135901 - DNA, 1324 bp, Zea mays
  Clone ID: MRT4577_55420C.1
aatcatcagtcattcaccttcccggctttccacaaactcaaaccctgctacccatgaccgccgccgccgccgccgcccgcgcggcgcgccggcacttctcttctcggctccagactaccacctcgcgccttctccatgcaagtgattctcaggcagcggcgcgggagacatccgggagcttcatccaccccgccgctgtcgtccacccggatgcagccatcgggcaggctgtctcaataggtcccttttgcactgttgggccttcagccagagttggtgatacctgtcagttacatgccgggagccatgtcatgggccatactgagctaggggagggatgcattgttcaaacactggagatgaatgctttctacatattggtagaaataatgagatcagagagtactgctctgttcaccgctcttctaaatcttgtgactgcacggttattggtgacaataatctcattatgggttcgtctcatattgctcatgattgcaagattggtaacaataacatctttgctaataatactctatttgctggtcacgtaattgttgaagattggactcacactgcaggggctgttgttgtccatcaattttgtcatattgggtcatactcatttcttggcggaggctccgtggttgcacaagatgtgccaaggtacatgatggttgcaggtgatagagcagaactccgtggtctaaatattgaaggtctcaggcgcaatggattctccgaccaaaaggtccgtaggttgaggaaagcttatcagagagtatttatgccaactataactagcaagagtagctttgaagacagactggctgaattggagcaggaagttgagctgtcggaatctcctgctgtgtcctgcatggtcgaatcgatccgcatgtcgtttgttcaaggacatcgggggatttgcaaattcagaagttggaacagctcttgaatgtgccaattcttaaattatcttggcagttacctcagacgttacttaggtgcatattcaatcttggcatcgatctactatatactatactatacccgaacagatgatgcattgccaagaccctgaaagttggattaatccatgtcaaatctgagtgaccaacaagatgttcttcgcatgcacgtatgggaacattctagaagccctgtatacgtgtgaatgttcacggtaccaagtagtgcgctaatttgctagaatgtacatgttggcctggatcagaggttcaaatctgtataatattgccataagttgccccaaacttttcaacgattattctttgggataaagaattaaacctttcttgcc

SEQ ID NO: 135902 - DNA, 1071 bp, Zea mays
  Clone ID: MRT4577_55421C.1
gaaaaaaaaaaaaaaaaaaaaaaaaaaggcggtcctattcatcaaatcatcagtcattcaccttcccggctttcgacaaactcaaaccctgctacccatgaccgccgccgccgccgccgcccgcgcggcgcgccggcacttctcttctcggctccagactaccacctcgcgccttctccatgcaagtgattctcaggcagcggcgcgggagacatccgggagcttcatccaccccgccgctgtcgtccacccggatgcagccatcgggcaggctgtctcaataggtcccttttgcactgttgggccttcagccagagttggtgatacctgtcagttacatgccgggagccatgtcatgggccatactgagctaggggagggatgcattgttcaaactggtgctattgttggtgcagatatccctggacggacaattattggggaaaacaatgtcatcggacactatgctgttgttggtgcaaaatgccaagatttgaaatataagactggagatgaatgctttctacatattggtagaaataatgagatcagagagtactgctctgttcaccgctcttctaaatcttgtgactgcacggttattggtgacaataatctcattatgggttcgtctcatattgctcatgattgcaagattggtaacaataacatctttgctaataatactctatttgctggtcacgtaattgttgaagattggactcacactgcaggggctgttgttgtccatcaattttgtcatattgggtcatactcatttcttggcgggagctccgtggttgcacaagatgtgccaaggtacatgatggttgcaggtgatagagcagaactccgtggtctaaatattgaaggtctcaggcgcaatggattctccgaccaagaggtccgtaggttgaggaaagcttatcagagagtatttatgccaactataactagcaagagtagctttgaagacagactggctgaattggagcaggaagttgagctgtcggaatctcctgctgtgtcctgcatggtcgaatcgatccgcatgttcgttgttcaaggaca

SEQ ID NO: 135903 - DNA, 669 bp, Zea mays
  unsure (1)..(669): unsure at all n locations
  Clone ID: MRT4577_55422C.1
aattcggcacgaggcgccggtcgccgcacgtgaggctgagatctcggggggttcgccgtctcgcggcgccgccaccaccatgccgtctctgcagctgctgcagctgacggaccacggccgggggcttctcgcttccaggaggaggacgctcgccgttgtctccggcgcggtgcttgccggtggagctctggcgtacgcccgctcgagccagagccgccggcggaggaggcgcccggaggcgagtcgcagcggcggagccggtgcattggccgccaatggggatggtttcagccagaacggtgccggcggtggattggctgcagcggaccagaggagaagtggcctcaaatctctgcatttcctcgcttctatcctactcaagaagatggggcccagtggcacgcgctaccttctatgcttggtattaacatcggtgctgcgtacagccgtggggcatagattagcaagagttcaagggtttttgtttaaagcagcatttcttcggcgcatcccaacatttacacgccttgatcatagaaaatcttacgctatgtttcctccaatcaacattatatcagacctcanaatacttaacaggctctttaaagtttgcgtttcaagaaaattctaacagatatcgcccatgctgattactntgagaatatgggt

SEQ ID NO: 135904 - DNA, 258 bp, Zea mays
  Clone ID: MRT4577_55423C.1
ctgatctctctcctttatataaaaacaaggccattacttcattctataggaaagatacccagccctgtgaaacacaacggccacatatccagaggcccattggagcagtggcatggccatgccattaacgctacaagaaatatgggcgagtcaactctcaaaagcagtgcgcactaattaaggcgaggcaccaatggctagatatcacatggcaggccggataagagtctatgccattactccgggaggaaggccttc

SEQ ID NO: 135905 - DNA, 710 bp, Zea mays
  unsure (1)..(710): unsure at all n locations
  Clone ID: MRT4577_55424C.1
aattcggcacgagggaaaaatagagacaaagaaggggcaggagcagtgacctgccacaccagaggaaacgagagagagaaaaacagcccgatctcctcctcccactccgatcgccctaccgatcgccgcctcgtgaagcttccctgttccctccccgccgcccgcgacgccatggagccgccgcacaccgaggaggccgccgctgctgcagcaggaggagcagagggcggcagcgcaagcccgggcaccggcctcgaagggccgatgctgaggctggggctggacggcggcggggagggggaggacggggagctgggggctggggaggaggcggacacgtggcttccagagcggcctggcgaggcggactgtggctactacctccgcacgggcgcctgcggcttcggggagcgctgccgctacaaccaccctcgcgatcgtggcggcactgagtttggtggaggtgccaagaatggagcagcacaatactttccagaacgacaagggcaacctgtatgtgaggtacattaacaccttcacacatgatttaacaatcatctatagaaatctgggcatcaatcagacattgaagcattaacctggcaactnctgcacactatttgcatgctcccagtgtagcatgtactgctgcttgtccatgggtatgcagggtgcacanatataaaaggaaaataacattcatgcctgac

SEQ ID NO: 135906 - DNA, 117 bp, Zea mays
  unsure (1)..(117): unsure at all n locations
  Clone ID: MRT4577_55425C.1
cctcgagccgccgggccgggatggcttcaccggttagacatctgntaaggttgcgaaccaccaattcgcgcgagcgcattatcgtctcaagtttggcccaagacttttttccccaaa

SEQ ID NO: 135907 - DNA, 353 bp, Zea mays
  Clone ID: MRT4577_55426C.1
aggactcctgggtgcagctgcagcgtcagcagcaagtactcaaactcgctgctgccgatactgctacgtgggcaatggcgcctcccgacactgtcgccccatcatgcttctcttctcctgtgcttacacggtctccatgactgcatagcacttctgtatcaactgggcaacctgacgttgtcgctgaacctaactcgatatgcaaacttcaggctcatctcctcattgccagcaggcactctcttaagcgtttccttgcgaaacgcctcgtccggatcttcaggcaagactccatacgcagcgctaagtcattcgatggcatggagtcaccgatgattgacgtgacatgctta

SEQ ID NO: 135908 - DNA, 130 bp, Zea mays
  Clone ID: MRT4577_55427C.1
cggccgcctgggaactaataacaggtgcggttcgacttctcgagctctccgtctagcgaatccccttccaacttgccataatcttggcaagacccgtgtcctgtgagcaaccatcatgctgtcaacctac

SEQ ID NO: 135909 - DNA, 832 bp, Zea mays
  Clone ID: MRT4577_55428C.1
ctattattttgcaatttcttactgtgtaaccttcggcctttacaagctgggatacggaggtaataaaaaaaaacccatttcggggagctcgcaaaactgttttcaaaagtgacaaacggaagtcatgcatgacatttgcattttgttttttggcgaggggagacgcttcttaaaaattataatcatgccctcaagcctatacatatgagctacaaaaggagatcaaagacattgtcgtctttttccttggtagtcttgcagaacaagttgagggtcccatcccgctcttgccagctccttcgtcacacatgtatgatgtggatctcaagcgtggagcttcgttgattctgcttcattatctccgacagaacatgtacttgggcgttttaccatataatggcaactccaagacaacgcatttggggcacgtggtaggaggcccacccgggccaggctctgggacaacatgtagtcctccggggggctcagctggtcgagcttgtggcgcagaagttcaggccccaggaacaccgaggctggaacgtgctctgcatccgtgtacggtgtccatccagtctgacacggtaaccttcggacggtagtggcggcggtcagcggcgtctggctctgcaggtcgggcacgtagtaggagctcacccgggccaggctctgggacagcgtgtagtcctccggtgggctcagctggtagagcttgtggcgcagaaattcaggccccaggaacaccgaggctggaacgtgctctgcatccgtgacggtgtccatccagtctgacacggtaaccttctcgatgacctgcgcctcgtgccgaatt

SEQ ID NO: 135910 - DNA, 492 bp, Zea mays
  unsure (1)..(492): unsure at all n locations
  Clone ID: MRT4577_55429C.1
ggcggacgggccaaccaaaaataagaagttacattaccagattctaatgtgnaaaaaaaaaaaaaaaaaaaaaaaaaaaaaaaaaaaaaaaaaaaaaaaaaaaaaaaaaaaaaaaaaaaaaaaaaaaaaaaaaaaaaaaaaaaaaaaaaaaaaaatttaaaaaagaaagggttttcccctcccgggggggcttttaaaaggggcaattttggggaattccctaaaccttggggggggggggccctttcttttagggggccaattttcccaaaaaggggggggtttaaaaataaaggggccggggttttaaaaccctggggttggaaaaaactttgggtttcccaaaaaaaacctttttgaaaaaattcccttttttccaaaggggggaaaaaggaaaagggcccaaacaattcccctttccaaaaggttgcaaaccccccttggaaaaggaccccccccttaacgggccttttaatccccccgcgggggggg

SEQ ID NO: 135911 - DNA, 492 bp, Zea mays
  unsure (1)..(492): unsure at all n locations
  Clone ID: MRT4577_5542C.1
gntnnttttganttaanatttttattgtttttgttttttttttttttttttttttttttttttttttttttgtggggaaaaaaaagcttaacaccttaaaaacagaatgtttaaacagtttgggccctgtcccgttttgtttttttacaaatgggggaaagcccctttttgaagggcaggccttccccaaattagggggcaatttttttttaaaccttggggttttggggggggcccaccctggggtttttttttttttttagcaaaacacatttccctttactttgggggtttggggggcccccccaacagggcccgggaccctttgggggggttttgttttgggtgatcccccgcccccctttgcctttaaattggtgggttaaaaaggggggccgggtaacttctaaatccttttcaagtttagttaataaaggggttggtcaaaaaggggggtggggttccaaattcccatttggccaaaagaggtcc

SEQ ID NO: 135912 - DNA, 117 bp, Zea mays
  Clone ID: MRT4577_55430C.1
cgtgtagtcgtcgctcagctggctggtcacaacccccgtcagccgacgtgcgctatcgtactatgctgagtcacccgtagacacatatgcctgcgaccatgtacagatacaacagat

SEQ ID NO: 135913 - DNA, 418 bp, Zea mays
  Clone ID: MRT4577_55431C.1
ggaaaattcattattgaaagttttaccatcagcttccaagacatctttagtagagttagtgaccgtatttggtgtcatttcacatgatttatcttcaggtgctgcaatcaagatttaggagagttattaagctaccataaactatgtgaaaaacagtgttttcaactatggtacattctgcatgcgaagtatctagcatgctgatcaaaagaatcattaaccatagggaccaaaaatggttgaatttatttctccagtaggttatctctaaagcataaatgtttaggtacaaatttaagcaaaaaaagggtgaatgaaggttactgcccaacatgaccaatgaaaatcgaaggatctctgaattactgttgaagaccaagggaaggtatgctttcagtcaatcaggtatgacaaatga

SEQ ID NO: 135914 - DNA, 1405 bp, Zea mays
  Clone ID: MRT4577_55432C.1
cttcgtctcctcctcccctgcccctgcctgccaccaactgccaaggtgccaagcaagtgcagataccttccctgcctcacaaacaacggcctcggggtcttcgaggcctgcccgggtggtttgacagctagctacatggactcctgctttcacgttctcatacaggcactcctgcactgtgctccttcgtctcctcctcccctgcctgccaccaactgccaaggtttatgttcaggtggcactgccagcagaagtgatccgttgacttcagctatgggcaacctgtgctgctgtgttcaagtcgaccagtcgactgtggccatcagggagcagtttggcaagtttgacagcgtgcttgagccaggatgccactgcatgccttggttcgccggcaagcgtgtagctgggcaactcacactcaggctgcagcaactggatgtgcgctgtgagacaaaaacaaaggacaatgttttcgtgaatgtggtggcatctattcagtaccgcgctctggctgacaaagcaagtgacgctttctacaaactgagcaacacaaggtcccagatccaagcctacgtctttgacgtgatcagagcaagcgttcccaagctccatttggacgatgctttcgagcagaaggacgagatcgcaagggcggtggaggaagagcttgagaaggccatgtcggcttatggctttgagatcgtgcagactctcatcgtggacatcgagccagacgagcatgtgaagcgcgcaatgaacgagatcaacgcagctgcgaggctcagggcggctgcaaacgagaaggcggaggcggagaagatcgtgcagatcaagcgcgcggagggggaggcagaagccaagtacctgtccgggctgggcattgcgcgccagcggcaggccatcgtggacgggctcagggacagcgtgctggggttctccgtcaacgtgccgggcaccaccgccaaggacgtcatggacatggtgctcatcacccagtacttcgacaccatgaaggagatcggcgcgtcgtccaaggcgtcctcggtgttcatcccgcatggccccggagcggtgcgcgacattgccacgcagatccgcgacggcctcctgcagggatcctctgtcgccaaacactaagctgcctgccgttgccgttgctgctgaagaacaccaccaccactattatatatataatataatgatgatcttggtaccagagtgatgcttgtctatattgttcatcactcatcgtcaccatctgctaggatggctatctttatgcttggggattggagaaaaccttatctaaccttttagggaaccggtaatatatatataatgcagcatgagtttgcagtaaaaaaaaaaaaaaaaaaagcggcgaaaaaaaaaaaaagaaaaaccg

SEQ ID NO: 135915 - DNA, 2223 bp, Zea mays
  Clone ID: MRT4577_55433C.1
ccggccgggaattgccgccgcaagtgctgtgtgtttgcctctcgttcatccccaaaccctacctctcgcctcggtctcctttgaatttctccatcgatctattattgttcctatataaaaggatgctgtcgtcggcaaggaaatcctcttgtctgccgcgacgactccaaagtctactgcaaacctgcattcttatccgctgcagtttctgattccgacaccattcatccagtttccatacttttgaccggccctataatttctcaaacgtgtggaggcgcctgcaattcgcccccagatatcccccccaaccaatttgatagaatttccaagttttttttcccgcaagtcttccgaatctcggcaacgtcaaggcgccaagagcagataccttccctgcctcacaaacaacgccaccctgtactagataccatcagggtcttcaaccagggcaggatcatgttcaggtggcactgccagcagaagtgatccgttgacttcagctatgggcaacctgtgctgctccaatccgtcgtggagacatctaagcaggctttactgaatctagttgcgttttcgccaggggcctggcgccgattccgtcccgccctctcgctcaccgcccccctgttcggttcccctcacggtcctccaccaggcaggtttatgttcaggtggcactgccagcagaagtgatccgttgacttcagctatgggcaacctgtgctgctgtgttcaagtcgaccagtcgactgtggccatcagggagcagtttggcaagtttgacagcgtgcttgagccaggatgccactgcatgccttggttcgccggcaagcgtgtagctgggcaactcacactcaggctgcagcaactggatgtgcgctgcgagaccgccgggggggtggtgtggactcctgcactgtgctccttcgtctcctcctcccctgcctgccaccaactgccaaggtgccaagcaagtgcagataccttccctgcctcacaaacaacgccatcagggttcttcaaccagggcaggttctcttctttcattcagctatgggcaacctgtgctgctgtgttcaagttgaccagtcgactgtggccatcagggagcagtttggcaagtttgacagcgtgcttgagccaggatgccactgcatgccttggttcgccggcaagcgtgtagctgggcatctcacactcaggctgcagcaactggatgtgcgctgtgagacaaaaacaaaggacaatgtttttgtgaatgtggtggcatctattcagtaccgcgctctggctgacaaagcaagtgacgctttctacaaactgagcaacacaaggtcccagatccaagcctacgtctttgacgtgatcagagcaagcgttcccaagctccatttggacgatgctttcgagcagaaggacgagatcgcaagggcggtggaggaagagcttgagaaggccatgtcggcttatggctttgagatcgtgcagactctcatcgtggacatcgagccagacgagcatgtgaagcgcgcaatgaacgagatcaacgcagctgcgaggctcagggcggctgcaaacgagaaggcggaggcggagaagatcgtgcagatcaagcgcgcggagggggaggcagaagccaagtacctgtccgggctgggcattgcgcgccagcggcaggccatcgtggacgggctcagggacagcgtgctggggttctccgtcaacgtgccgggcaccaccgccaaggacgtcatggacatggtgctcatcacccagtacttcgacaccatgaaggagatcggcgcgtcgtccaaggcgtcctcggtgttcatcccgcatggccccggagcggtgcgcgacatcgccacgcagatccgcgacggcctcctgcagggatcctctgtcgccaaacactaagctgcctgcctgctgttgccgctgctgctgctgaagaacaccaccaccactattatatatataatataatgatgatcttggtaccagagtgatgcttgtctatattgttcatcactcatcgtcaccatctgctaggatggctatctttatgcttggggattggagaaaaccttatctaaccttttagggaaccggtaatatatatataatgcagcatgagtttgcagtatgttcatcagaaccttttagagtctagatgcatgcccggccccatagaatagaatgcgagagttgcatccaaaa

SEQ ID NO: 135916 - DNA, 171 bp, Zea mays
  Clone ID: MRT4577_55434C.1
acaagatgaaatattccagaaatttaatctggacactgaatgggccgtgaggtaatatcgaggataacgaatgatgaagacatagctatcgagagcaatgttgttgtgaaacagcttctaggccttcaaatcaacgcggagaaatattattttggattaaggaaaactctg

SEQ ID NO: 135917 - DNA, 1519 bp, Zea mays
  Clone ID: MRT4577_55435C.1
gtacactcgaggctggccgggatcaccacagcatatgacgcagggcaatcacggatttcatggtacaagataagaagaatgccagggcactgcccctgcccctgtggtttggacagctagctacatggactcctgctttcacgttctcatacaggcactcctgcactgtgctccttcgtctcctcctcccctgcctgccaccaactgccaaggtgccaagtgcagataccttccctgcctcacaaacaacgccaccctgtactagataccatcagggtcttcaaccagggcaggtttatgttcaggtggcactgccagcagaagtgatccgttgacttcagctatgggcaacctgtgctgctgtgttcaagtcgaccagtcgactgtggccatcagggagcagtttggcaagtttgacagcgtgcttgagccaggatgccactgcatgccttggttcgccggcaagcgtgtagctgggcaactcacactcaggctgcagcaactggatgtgcgctgtgagacaaaaacaaaggacaatgttttcgtgaatgtggtggcatctattcagtaccgcgctctggctgacaaagcaagtgacgctttctacaaactgagcaacacaaggtcccagatccaagcctacgtctttgacgtgatcagagcaagcgttcccaagctccatttggacgatgctttcgagcagaaggacgagatcgcaagggcggtggaggaagagcttgagaaggccatgtcggcttatggctttgagatcgtgcagactctcatcgtggacatcgagccagacgagcatgtgaagcgcgcaatgaacgagatcaacgcagctgcgaggctcagggcggctgcaaacgagaaggcggaggcggagaagatcgtgcagatcaagcgcgcggagggggaggcagaagccaagtacctgtccgggctgggcattgcgcgccagcggcaggccatcgtggacgggctcagggacagcgtgctggggttctccgtcaacgtgccgggcaccaccgccaaggacgtcatggacatggtgctcatcacccagtacttcgacaccatgaaggagatcggcgcgtcgtccaaggcgtcctcggtgttcatcccgcatggccccggagcggtgcgcgacattgccacgcagatccgcgacggcctcctgcagggatcctctgtcgccaaacactaagctgcctgcctgctgttgccgctgctgctgctaagaacaccaccaccactattatatatataatataatgatgatcttggtaccagagtgatgcttgtctatattgttcatcactcatcgtcaccatctgctaggatggctatctttatgcttggggattggagaaaaccttatctaaccttttagggaaccggtaatatatatataatgcagcatgagtttgcagtatgttcatcagaaccttttagagtctagatgcatgaatggcatcatagaatagaatacaagagttgcttcaaaaaaaaaaaaaaa

SEQ ID NO: 135918 - DNA, 270 bp, Zea mays
  Clone ID: MRT4577_55436C.1
tttttgggcattattaaaccttcgcacacttctatgcataaagtgctccggggtgcacccaagatctgggaaagcatattatcaaaagcttgatctatcacactggatgtcagagtttggcagccatatctaatcaatcattctcagtcattacgcaacatgtttgacaacactatttaggaagacatgttgacagataatcatataagcgctaatggatcatacacatcacacttcctctctgctagcacgcctaaacacacagatgca

SEQ ID NO: 135919 - DNA, 803 bp, Zea mays
  unsure (1)..(803): unsure at all n locations
  Clone ID: MRT4577_55437C.1
gcgtgactctaaagaaacctatactactgtctcatatgtcatatgtccttcctctgcaactcaccaacctacacatgcaaagagcttcagccacaacagagccctattgtaaatcatccttgataataagcagcgtacgttattagctctcccatccaccgactccaagatgaggatgcgcaaggccccggagctgctgaagaaggcggcgactgtgttcaggagcaagactgacaccctaagaacaaagctcttcatcctggcctcgctccgccgcaagatagcaacggtccgggcaatctctcgcaggatacatgcgctggtgtcatcgtcggaccgggagaatcaggccaggttggagtatggcgacgatagggcgcttgtcttgcagaaggtggctgcggggatccagcaggcgccagctgatactaatactgattgtgaacaagatggtgtggtcgatctctctgaggtggcgatgtttgtagaagatgatcacgattactaccctgactggacgcactcattgttcgatgacgaatattatgacgacgacaaggatgacgacgatggagaagaaggccaccgtgacgatgatctcggtgcacttgatgcgctcgacgagccctccgtcatcgacatcatcaggagcaaccggaaggtggaaggtttggagttcgtcatggaggatgagattgaccaggcctgtgacatgttcataaagaggtttcggaagagggatgataggagcttctagtgcatgatcctggtttctgtaaggnacaaagagagtgctactaact

SEQ ID NO: 135920 - DNA, 265 bp, Zea mays
  Clone ID: MRT4577_55438C.1
gcatcctctcttcctctcctctccaatctccattgcagcagcactgcagcagcgggtgcgggtggcatggctatggcgtccgcactgccgctcctcctcgcgccgcgcgccgtctttgcgtccgcggggccgtcttcgcctcatctccgctcccgcgcctcgccagctactacacgaatgtccgacacgccgccctctccgcgccaccagccgccccgcgccgcctcctgctgccaagatcccgctccggccgcgggaggaggcg

SEQ ID NO: 135921 - DNA, 222 bp, Zea mays
  Clone ID: MRT4577_55439C.1
cccctatatttttccgcccaacaggcactaacgccgggggggataaataagagaataggcgggcaccaacagaagcagccgcacgtctgccaacaccacacacttactctactagtgctcaacatcgcatgggggccacgagcatgcacgcacgtggcacctcgccgatgccggcggagcgacgccgccctccaaccaacgaacgaagaccaggggcggacg

SEQ ID NO: 135922 - DNA, 391 bp, Zea mays
  Clone ID: MRT4577_5543C.1
gatcaaatgtcacatctttactatataataagagttctatacaaaataaataattacatcaaaaggagacaacggtctagcaacctaaagttgactgggagacgacggcctagacctctcatgaacacatcgcatcatcctccatgagcctcatcctatggtacctgttcttgaccggtaattaagcaatggttagagcaggcctagctgagaagcggacgcactgcagcgacaaacgtggatgaacaagtcttagctctcgcgcggcacccgcgccaagcccgagttgactgaaccaggcacatgcgacggagaggcctcccaagacaccacccctcgtacactgaatagggagacgtcgtggccatatcccatggcggcattcggacgc

SEQ ID NO: 135923 - DNA, 663 bp, Zea mays
  Clone ID: MRT4577_55440C.1
aaaaaaaaaaaaccgcagccaccaccaccccaacccaacccaccggagcagaccaaggcggcgccgcggcgacctcatctccggccaagggaaatgactaccgttccggggtctctggtgtgggagctggtgaagaagaacaactgcttcttgatcaagcagttcggcaacagcaacgccaaggtgcagttcagcaaggagcccaacaacctctacaatgtccactcctacaagttctccggcttggcgaacagcaagaccgtggcggtccagccatcagcaggagaggacaaggctgtcgtcctgtccacgaccaagaccaagaagcagaacacccctgccaagctccagcacaagactctgatgcgcaaggagttccgcaagatggccaagtccgtcaagaaccaggtctgcgacaactactacaggcctgatctgaccaagccggcccttgcaaggctgagcgccgtgtaccgcagcctccaggtttccaagtctggaatcaagaagaagaacaggcagccaactaagctgtaaactcattgagattgcctttcagcgctcatgttaccatgtctgttccgacagttttgagtcataagtgagacccttggaggaaccatgttacaaacccgccctagtttgtaccctgacagtgttacg

SEQ ID NO: 135924 - DNA, 367 bp, Zea mays
  Clone ID: MRT4577_55441C.1
ggcaccggcccggaatcccggtgtagacacacgcgcgcgtctactgcgtgcgcgatcaggctctaaaggaggggggacacgaccgcgcagccgacatcagaggcacactagagaaccgctgccgcattgcactgctagtaaccgaagccgggatctaccacattggagatggcaagtggcgatataagtgctgtcacacatactgtagctactaggaggcggcagcatagacccagaggctatgtgcctgtacatggcgaacgcgctgaacgagcatagggacactctactgacacactgtggatcccaacatggtgaaactagctgaaaagttcaaaaccacctacagacttaggccgataaggga

SEQ ID NO: 135925 - DNA, 1326 bp, Zea mays
  unsure (1)..(1326): unsure at all n locations
  Clone ID: MRT4577_55442C.1
cccacgcggcggccgtagcatatgcatatgagcatatcctaaccacgattcggggggcaagcgaacggacacgatggtggccttgaccgcggggatttccgtagccaccggcgtcgtgttcagccccgccggccgccggcgaggccgcggacacgccgcctttcgctgctcgtcgtcctctgccggagagaggcaggctctcttcagccgcatcgcccccgtctacgatcatctgaacgacgtgctcagcctgggacagcaccggacgtggaagcgcatatgcgtctcttggtcgagagcgaagatgggggatcgagttcttgatctctgctgcgggagcggggatttggcgttcctgctgtctcagaaggtcggcttagatggagaggtgatggctgtcgatttttcaagtcagcaactacagactgctgctgggcgtcaggagcaacggtggaagctgtgttacaagaacatcaaatggatcgagggtgatgcacttgatttaccattcacagactgctacttcgatgctgtaacagttggctacggattgcgcaatgtggttgataaaccgaaagcgatgcaagaaatatatagggtcctgaaaccaggatcaagagcctctattcttgattttaacaagagctcgtcacttttcacagcatcattacagagttgggcgatagacaatgttgtggttcctttagctagtggctatggactaactgaagaatacaagtacttgaaaagctccatatcacagtatctaacaggagaagagttggagaaactggccaaagaagctgggttctgtgcagcgaagcactacgagcttggtggagggcttatggggaatctagtagcgactagatgagtagaatgtagaacggaaaatcgagttgcatggttcctctgcatcattttagctgattgtacgctcttcttctatgtatcggcctcagatgaggtcaatgacaagtgttgattccagaggggcctggacggcttgattttcacagtctaaaaaatctgtttgaacctgcgcttctgtagagcatcaacgttttgaccacgatcaagatggaccgagacgctgacgcatgcttctgcagattacaccggcatgctgttctacagcgcgggagcattcaaaggttcttattaattatgcgttgcaatgtgtgagactgagagcatgtgggaatttcagcttttcactgtgcgttgcccattttgcccagaactgacatccagcttttcnaccgcgttgctcatttgctctgaactgaatcctttttccctcagtaaaactgcgtgcagtcctct

SEQ ID NO: 135926 - DNA, 695 bp, Zea mays
  unsure (1)..(695): unsure at all n locations
  Clone ID: MRT4577_55443C.1
ctgtgcggcgctcgagccggccgggccgcgctagctattttctgtattctcttcctgccggccgccagagagatcgccattttgactgagtccctttcgtttctgtacgccgtcagggagctttctccggccgccgttctactcggttgccagggagaaccagccgttggctgaacctggccactaatttcctagccgagcccaggcaactgaccggacgaccgtcgatgaatcggccggcagccatactcggctgttcagtctgcgcggcgaagcggggccctgcgggctctcccgccggcgtgcgcgtcccctagtgcgggcgcgccgccgtcggtagagcggtcagcggtggtccctgcaaacccggctaaatctgttgttactgtgactttctgttttctcgcccggatctagcctctatctcgaatccctctgagtgaatgaatgtatgaaatgaaactatatgtaattttgggattgagtatggaggtctaaagtgtggatctggttccctttgcgttttcccctgtgattcacgcttggatccagtctctggattaaacgaacattgctctgtgcaatttgaccgatccggattttagggttaaatcgattaaggttgaaccctaactcgttctgcttttaaaaaaaaaaaaaaaaaaannnnnaaaaaaaaaaaaaagggcggccgc

SEQ ID NO: 135927 - DNA, 576 bp, Zea mays
  Clone ID: MRT4577_55444C.1
ctagctattttctgtattctcttcctgccggccgccagagagatcgccattttgactgagtccctttcgtttctgtacgccgtcagggagctttctccggccgccgttctactcggttgccagggagaaccagccgttggctgaacgtcagatcctctctccctttttttttctttgtttctagcagctggccgctagtttctcttcaactcattttttttttttggttctagcagctggcctctaatttcctagccgagcccaggcaactgaccggacgaccgtcgatgaatcggccggcagccatactcggctgttcagtctgcgcggcgaagcggggccctgcgggctctcccgccggcgtgcgcgtcccctagtgcgggcgcgccgccgtcggtagagcggtcagcggtggtccctgcaaacccggctaaatctgttgttactgtgactttctgttttctcgcccggatctagcctctatctcgaatccctctgagtgaatgaatgtatgaaatgaaactatatgtaattttgggattgagtatagaggtctaaagtgttggatctggttcc

SEQ ID NO: 135928 - DNA, 320 bp, Zea mays
  unsure (1)..(320): unsure at all n locations
  Clone ID: MRT4577_55445C.1
gnnnannnggggcccaaaaggctaaaccatttaaattaattaatctatcccccctgggcatcaaattttaatagtaccatgcttgttttaaaagtagtagtgctggtcatgactaaacaaacattttcccacacacacccaccatttgccaaagctgcaaaaaggaaggggtacagttacagcctattacagggattttctttttacggctttttttcggggctggagtaaaagctgcagcggtaaaaaaagtcttaaagggnnnncaaaaatttcggcgtcccccaaagatcaatccacggggcccgtgggttgacccc

SEQ ID NO: 135929 - DNA, 288 bp, Zea mays
  unsure (1)..(288): unsure at all n locations
  Clone ID: MRT4577_55446C.1
tctcgaaaccctagtcctctgttacttctcccgcctccgccaanccccncccggggggcggcgccggcaanccccncccgncccccgccagcggngcngagagcgagaagaganggccggcaagggngangggccggcaancggcancgancncggcacgaccnacncnngcgncggngngnggcagcacgaccgngncgagancancggcagcgggcggggnaaccgcacttttttttcgnacgncgccttcaccgactccgagcgccagatcggagangcggacaa

SEQ ID NO: 135930 - DNA, 395 bp, Zea mays
  Clone ID: MRT4577_55447C.1
atggattaacagtaaaacaaacaagcccttaatgagtctagttgatataaaatggattaagtgacatggaaaaaaaaagaaaaaaaaaaaaaaaaaaaaaaaaaaaaaaaaaaaaaaaaaaaaaaaaaaaaaaaaaaaaaaaaaaaaaaaaaaaaaaaaaaaaaaaaaaaaaaaataaaaaaactcaaaaaaaaaaaaaggggatctattttaaaattaccaaaattaaagttcactaattttaaagaataaatctatttaaaatattcacaaaatctaaattatatggccgctaataaaaacgtataatttggaaaaaccatcatttatcaagattaaatcctcagtgaataaattcattctatggcattagatacatttactaaaagacctat

SEQ ID NO: 135931 - DNA, 366 bp, Zea mays
  Clone ID: MRT4577_55448C.1
gcctgcaggagccgggcctgaagttatattgccggcacgacgttcttatcttgtcggcggacgccctttgtttttccttttgctaactaaaaaagactattcataccaaggctatagttagacgcgcgagtcttgatagtcagcatgagcattgtcatagccaacactggacactgccagcggccacacccgcaccgatggggcacccgacgaagtgtcaccgggggacaccaaccatgacaggcgtcgaacacgttgagtaggccactgcactcgccgacttcgacggtcacgttcacgctacagatactgctaggtaggttcccggctacgaacggcacgcacacgcacacgcagcaggagacg

SEQ ID NO: 135932 - DNA, 472 bp, Zea mays
  Clone ID: MRT4577_55449C.1
ccggccgaagtataccggaggatcggcacgcaccttgccaacctgagatgttacacactcatgctcggctgcggccggcaggaggttctttcgctcctgttcttgataaaacgaaacaaagatgcgagcagtgcctcacggagttgccctattcttgtttctcctcctcgaccacaaacaggtgggaaccatcgatgccaaaatgggagtatccatgcccatgcatgccttgataatggagaacgggaaacatgagcgcgacaaagagaacgagaatgatgataaaagcacagagaacgaagagagtccatgcttatcgtggagtgttcaggtcaagggcttctgcttcaacagagacagatgcgccgaggtgagcatgaacgagagctttgccggaggtgagtgcaatcgtcacgtgaccatgcgcaagtgctactgcaagaagccttgctagctcatcgggcttgataac

SEQ ID NO: 135933 - DNA, 416 bp, Zea mays
  Clone ID: MRT4577_5544C.1
ccccgcgtccgcccagcgtccgcggtagcgtgggcggacgcgtgggcgacaacgtggctgttacgagaaacggacggtctagggtcgttctgaggccattcaagagattatgagctacgtggaggaggatctggtttccaccgacttcaccggtgacaacatgtggaggatgttcgacgccaaggccgagattgccctgaacgaccactttataaatctcgtctcttggtacaacaacgagtggagctacatcaaccacgtcataaacctgatcctacacattgttcaaaactccaaagcatacagatatattctgactaatctatcaaggtatattaccacatagcttttgatcttaaacgatttttgatggacttctttacttttaatatccgtataaggttcccgttggatct

SEQ ID NO: 135934 - DNA, 2019 bp, Zea mays
  Clone ID: MRT4577_55450C.1
gcggtgacgcgtcccggccccggcggccggtgggtctgcctaccggtaccggcccgcgtggctcgtcgagtcaacggcttgactgctcccgtccgccacgttcgtattactatacaagcccgttgcccggggcagaagccggcgaaacttccaagcccaaggaagaaaaaaaaagctgtcacctttaactcgatcccctcttccccgcccgtgtccgagcggcggcgccggagccgacagcttccggcaagcgggggctacttggtgcggccctcaggccgggctcctcccagtcccacccgtttcgcagtgcggaagccggcgaaacttccaagcccaagggaaaaaaaaagctgtcacctttaactcgatcccctcttccccgcccgagtcagagcggcggcgccggagccggtgccggactgacagcttccggcaagcgggggctacttggtgcggcgggctatttccgcggttttgtgccacagcggactgaactgcccgcccaggcttccctgtcagggtcaccaagattgaacaagactgaactgccgcgcttcaggatactgaactgccatctcagttaaatgatacactgcacaacagtgggcagcgatagtttgagacacattaacaatgagttgtttttctcactttttcaagagaaaaagggggccacaacaacaagacgatccatctgacaattatttcactggttctgagaatataacaagattcagctacagggaactggttagagccacatcaaattttgaccaaggcaataagattggtgagggcggctatggacctgtctacaagggaacactcaaggatgggacagttattgccgtaaaggttctgtctttacattctagacaaggggcaaaggagtttcttaatgagcttcttgcaatctctgatgtaacacatgagaatcttgtcaaactctatggctgctgtgtagaaggaaaccacaggatccttgtctacaattatcttgaaaataatagtcttgcacatacccttctagattcgcgacacagcaacatccagttcaactggagaactcgggtaaatatctgcatcggtgttgcccaaggattagctttcctccatggcagtgtcagccctcacattgttcaccgtgacatcaaggcgagcaatatacttcttgataaggacatgacgccaaaaatatctgattttggtctggcaaagcttctacctccggatgtatcacatgttagcacaagagtcgcagggaccctaggttacttggctcctgaatatgcaattcgaggacatgttacacggaaggcagatgtctacagctatggcgttctgcttatcgaaattgtgagcggaagatgcaacactgatacgaaattgccctatgatgaccagattctccttgagaagacatggagatactatggtcgcgggaatctggagaagatcatagacagctcccttggcgacgacctggacgttgacgaagcctgcaggtttctgaagatcgggctcctctgcacccaagacggcacgaaacgccggccgggcatgtctgcggtggtggccatgctgagaggcgaggcggacgtggacacggagacgatcagcaagcccgacgtgatcagggatttcggagacctgaagctgcggagcagggccacgtcgtccacgctgctgacctcgatcatggcgcggtcgtccccgctgtcgtctgaggagacgacgcgcacctccatcaccttcaccgagatatcggagcgcgactgactgacgatcgccgttaattcgccgacaagaagtgggctgtgagcctgtgaccgtgtagctggaggagcggaaagtgtacgtagcataggccggggagaattctttttgctggttttatgtgatctgtgtgcgtatttctatattacaatcgcggtaggaaacggcgcttcaaagactatccacgtcagcttctaatttatcatccgttggatactaaaaaaaaaaaaaaaaaaaaaa

SEQ ID NO: 135935 - DNA, 615 bp, Zea mays
  Clone ID: MRT4577_55451C.1
cctcgagtttttttttttttttttttttttttttttttttttttttttttttttttttttttttttttttttttttttttttttttttggcaaaaacccctgcccaaattttggggcagcggttcacagggttcacccaaaaactaaaacagcacaacgggttttgtttcctttccttcaaagggcggggggggattccccccccaaattttcccccaaaaatccaagggaacgtttaccctacttaaatcccggggacccctatgggggggggcaaaccaaaaggatttttaaggggttcacttcctttggagggggaggagcggcttccccccccttggtttttttgggttaaccacctttttaatttttgttagccctttcaaccccatttttttttttatccccaatttgggggtcatcagcccctcctatgtccagtttcgaaaagcccttttccccaaagtttttaaatccagcattttaataatcctggcccggcctttgggcccagacaaccttaaaaaacaaaggggggttgcccccctgtttaaaaagccttggccaccacccgtttttatttttttttttaggggaccaaatgggcccttgggg

SEQ ID NO: 135936 - DNA, 642 bp, Zea mays
  unsure (1)..(642): unsure at all n locations
  Clone ID: MRT4577_55452C.1
tttttttttnnnnnnnnnnnnnnnnnnnnnnnttgaatgagtttattcctggtaataagttaatgatgttaactagttttgtcaaatgctcatcctttgatcattgaagctatttatactaatcaacagtagcattcttgtgcatgtacttttactgattctgtgaattggtaagattagaagggtatttttctgttttgtcttgttgtgcatacatttgttgagttttttgtggcgtagggtgactgtgtgagattcaggctgctcctgtccccatcccctcaatataaaataatctttgtatcttataacttttttgggtatacatttgtctgacgtacagtttcttttgttaacagtcccgcaaccagttttaccttagatctcctacactcgctacatgctgctgctccctgacggcactctagttgaagaaggttataatgattcaatttttcttaataatttcataaaatcaggaagaaaaattgatacatcacaacattcttcaacaagagtatcgtcagggagtagcagcatgtagcgagtgtaagagatctagaacataataggattgggtattcctattttgaagaggatctgagcctttgttcgggatctgagcctttcttttgggtattc

SEQ ID NO: 135937 - DNA, 1022 bp, Zea mays
  unsure (1)..(1022): unsure at all n locations
  Clone ID: MRT4577_55453C.1
ccgcggtaccccgcggtgacgcgtcccggccccttcggccggcgggtctgggtggggggaccgggcccgctcgctcgcccagtcaacggcttgactgcgcccgcccgccacgttcgtagtactatacaagtacatgcctttgccttccctttcctctcctctcctcctctcccacaggcccctctacagtcccacccgttttgcagtgcagaagccggcgaaacttccaagcccaaggaagaaaaaaaaagctgtcacctttaactcgatcccctcttccccgcccgtgtccgagcggcggcgccggagccgacagcttccggcaagcgggggctacttggtgcggcgggctatttccgcggttttgtgccacagcgggactgaactgcccgcccaggctgccctgtcagggtcaccaaggttgaacaagactgaactgccgcgcttcagccttcaggatactgaactgccatctcagttaaatgatacactgcacaacagtgggcagcgatagtttgagacacattaacaatgagttgtttttctcactttttcaagagaaaaagggggccacaacaacaagacgatccatctgacaattatttcactggttctgagaatataacaagattcagctacagggaactggttagagccacatcaaattttgaccaaggcaataagattggtgagggcggctatggacctgtctacaaggtagtagcacagccattttcaatttgatgaaggaccagaatgcnactagtggtgtttgaaacctttctaacttacaacttcagggaacactcnaggatgggacagttattgccgntanaggttctgtctttacattctagacaaggggcaaaggagtttcttaatgagcttcttgcaatctctgatgtaacacatgagaatcttgtcaaactctatggctggctgtgtagaaggnaaccacaggatccttgtctacaattatcttgaaaataatagtcttgcaaaaaaaaaaaaaaaaaggccct

SEQ ID NO: 135938 - DNA, 382 bp, Zea mays
  Clone ID: MRT4577_55454C.1
aaaacaacatccttttccttttgttggttcgccgtaaaaaattttttgaaagaaaggtaacctttccaatttttttttttgtttcgcctttaccctagttttacttgtttttaaaaacagcggggggcaaaaaaaaatttttttgacggtttttggacccgatttacattagggggtgtgcaaacaatttatttttttcaattttaacccccggggggggagggcaacccttcccggggggccaaggacttttttccgaagttccaaccgaagtgggcccttaaaaacccggcaaaagttggggatcaaaccccccccccttttgaccttccatttgtaaaccccttttttttcttttttcaaagggtttgccttgttgggg

SEQ ID NO: 135939 - DNA, 479 bp, Zea mays
  Clone ID: MRT4577_55455C.1
aaaggaaacggggaaccccacccttttttttatggggggcagaaaagggccaaacggaatggaaacaaggcgttataacccacggggcggaaaagaatcccccaaaaacctttgggggggaaaaaaaaaaaaaaatttgggggggaaaccccccccccatttttttaggggcggcccccacataagggggcccccaatttaaaagggggggaaaaaattttttgggggggctttttcggggggggaaacggttcaaaccactgggaaaaccccttaagggagggggggcaattatggggggggccaaaaaaaacaaggccaaaagggggggggaacccggaaaaccattaaagggggcccaaaaaaaaccaaacaaaaaacccttgcccatttgaccccaagtctttggattccttaaaagaaccggagggggcccgggaaaaaaacaaccctttgggagccattaaaggccccccccg

SEQ ID NO: 135940 - DNA, 362 bp, Zea mays
  Clone ID: MRT4577_55456C.1
cgtactcttggtcggactcttgtttatccatcgagtccgtacagatgctgggacttcaggtatggtaggtgagcctcatcaccgcgctcaccggctagctggaggacgtccagattgtcggggactcactactcatacgcttgatcatatactgatgcgacgccttcatatttaccacctcaaggccggtatcagctacatgctctgcaacgagtcttggtagccccgtcggacggtcacgctggacgagttccatatgccgcggcccaaggccgctgagctcctcattaataccaaagcctgcggggtctgtcactacaaactgcatgtccttaaaggcgagctgcctttctacactccct

SEQ ID NO: 135941 - DNA, 741 bp, Zea mays
  Clone ID: MRT4577_55457C.1
ctctgagctttcggcggcggcggcgcactcatcgtgatctcaaccaggcgcgcactcctcctcctcgccgtcgtcgtctccggtccaccgccgctccacgcgaccatgtcgtcgaagaggaagaccagggagcccaaggaggagaatgtcacccttggaccggctgtccgtgagggagagcatgtctttggcgttgctcacatctttgcatccttcaatgacactttcatccatgtgactgacttgtctgggagggaaaccctggtgcggatcactggtggaatgaaggtcaaggctgatcgtgatgagtcttcaccctatgctgctatgcttgcatctcaggatgttgctacacgttgcaaggagcttggtattaccgcactgcacattaagctccgtgccactgaaggcaacaagaccaagacacctggacctggagctcagtctgctctcagggctcttgctcgttctgggatgaaaattgggcgcattgaggacgtgactccagttcccactgacagcacccgccggaagggaggaaggaggggaaggaggctgtaggctatcttccaactctactggtggcaatcaagaaacttactcctctctgggtagtcctgctgtttctatgaatgtcatgaggagctttaattttgctctgttgaggatcatttgctgttagtcgtactatgaatgttgcttggatcctatttttggttcagaaacttgtggtatttatgc

SEQ ID NO: 135942 - DNA, 618 bp, Zea mays
  Clone ID: MRT4577_55458C.1
ttttttttttttttttttttttttaaacgattaaatcatgcaaaacgagacaaaaggggaccactggcgtccatacaattcagaaattacaggcatgccttcctgtattacttctgctccaaatttgagcactaaaatttcctgaaacagatattattagtagctagcctcaaccctcaactacaggtattaattaattatgaattattacatcgaagacgcactagagccttccgtgacagttccagtgccttgtgtgattgctgcaagcagccttggcatcggtggcatatcgatctcctgctggccctcaagaacacggaccacttcacccatcgtcgggcgatgaagctcgttatcctggatgcaccagcacgcaaccttgcaaaccctctcaacctcctccagatcgaagtcgccgtgtagctgcggatccaccaaactcctcacgtctcccccgtgaagcttgccgatagctcgcacagggaagtattcgatgtggtagttgtcgtcgctgctatacgcctcaggcgaatttctcctacccgatacgatctccagcagcaccaaaccgaagctatagacatcaacctttgacgtaatagcgacaccaccaag

SEQ ID NO: 135943 - DNA, 233 bp, Zea mays
  unsure (1)..(233): unsure at all n locations
  Clone ID: MRT4577_55459C.1
tctnctgctctccggagtgccattaagttaagaagaagactttttaaatggaagtgggttcctcctatacatcttatcacatttatcacgaaattttccatacgtttatttttctttcccatctttcacgactccatgttaattcttcttcaaccttttcgttaacaatacccccctcgaccttactcttacccaacctcccttctactaaaacttcttttttctctccacct

SEQ ID NO: 135944 - DNA, 547 bp, Zea mays
  Clone ID: MRT4577_5545C.1
atagctgaaacttttcacgacatatatagttttttctgatgtttttatgcattttcgtgacctaggcatacctttgcttttaatgtatacaactatgttaatttttttagtttaatgagtttcatgatgttaataatattgatctatttattataattgctataaaggatattttgtatgaatataggtgctgaaatctatgataaatataatatgtatgtatgcactcaataacacacaactttttttggttaatccctttttcatatcttctgtctaaatttaccatgatcattttggtatatcataacactcacagatgaagtctattgaccgaccacccaccaatcctaaacgtatcacaattgaatcaagccaggaggtttttagtgtggatataccacggatcgttgcagatgttacaaaccaaaacacatcaatatatgctaccgatggatcatcatagcagccgcaacattgtaattccactcagcatgaacaaaatactggcatgtcagtgtctataaatatttgcaaaggcatcaag

SEQ ID NO: 135945 - DNA, 522 bp, Zea mays
  unsure (1)..(522): unsure at all n locations
  Clone ID: MRT4577_55460C.1
gccggccgggccggaaagattccttccactcgcgctaacactccaaactagagtacaatccctacaaacagaactgatgaaattgaattgtagaaacaggcaacctaagaggataataaacaaatcggctgcaatacctagaacgatcctcgcactgctgctcttcatctcgcctggctcagcttgctggactccctgcctccacaaatacgaaacgcttcaacatcacgaccatggcgacccaaaagaaccggaaccgctactactataactggtcgaaggaatggttcggcgcgggcatcttcacctaatccacataagcggtgaccataaacgcgttcaaaaagatatcatcatcgcaaggcgatgaccaccgccgacaactccgcactgctgtcctatgccgaggagctgnctatgacgatctcctcgctggagaacttgtcgctgctctccaaggcctaggatctgagtctgctcagcctctgcgataccacatcgctgacgtccacctccgtactc

SEQ ID NO: 135946 - DNA, 328 bp, Zea mays
  Clone ID: MRT4577_55461C.1
gacaaagctgggactgggaggagcgccacatgcatgcatcgagaagacgatggggccatatgagtagagcgcccatgaatttatgaatataaacgcatgtgccgtctccaaccacctgatctcagtcctgaaacacagatcatcatcattcatggtcatggctatggcaaactcggcaacgatcctgaccgtcgtcctgctctgatcggctagcgctctccggccgagctcagcctcggcaaacactgtgagctgccgcagctctgtgagaagtcggtactgggaccacttgactctgaatggcacactgcatccggccggcacggcg

SEQ ID NO: 135947 - DNA, 369 bp, Zea mays
  Clone ID: MRT4577_55462C.1
ggtcaatgctcaagttcatcctttagcaaaatatcccacttttctgagtcatcagttgtgaacggaggccaaaaaacagatttcagagcgatggtcaatggttacatgcaatgagatgagtcaagtgcaactgtcgagaagaaaatgcacgttaggtgagatgctctccattaaggaagcaaaggaagacgaggccaccactgggatgttttatgtttccagcaaccagtcatgtggcctggagaatgaaccgactacacgttctacaaatgtaactacttctagaaaaaatggtgacaatggggagagatcttcgaaattgccaagatcaaaatctgttccagtgatttcatccacgtctgataacat

SEQ ID NO: 135948 - DNA, 355 bp, Zea mays
  Clone ID: MRT4577_55463C.1
cacaacccctatcctaatcttcttcctttctaacctttccggtcctttattcatttctcgtctcttcaatattcatatcttttataatacccttaccttcaatactatcacccttaatttttaatcttctgacaccatttacaattttttttctaatattcattacaataatttcattctctccttaccatatcttcttatctttttcatctattaatttatatacttactctcactttcttaacttcaacatttattatgatctaacacctacatttttatcttctcctttattataatcatactatatctttttcaatacctattactttcaatacaattcatctctttattt

SEQ ID NO: 135949 - DNA, 489 bp, Zea mays
  Clone ID: MRT4577_55464C.1
cacgcacgcgtacgcaggcatgctttagagcgggcgcccgtcctttttttatttttgatattttttttgatttttttttttttttggggtggtttttttttggaaaacccacgatccattaaacgaacgaagcactggtgcaagacagaaaggccattgccaatgtttacccaaaaaaaacagcccccgttttaatagccgggctcaccaccttgatgaatcggggggggggcaccggataaaaccaacaacgtaaatggaaaagggcattgtttattacaggcctaaaaatactaccacgcacgctccaacaaagggggggcatccttccgctccctccataataattattccaagccccggggcataggactgtcctttaggtacagggttccttgggcatcaacgacgacaataaaaaaaaactccagaccggtgttagcttttaaaagcttttggcagctgcaatgatgctttccacggggatgc

SEQ ID NO: 135950 - DNA, 238 bp, Zea mays
  Clone ID: MRT4577_55465C.1
atgacgatagtgatcgtcatgtcaccagactagatgctatcacactatcatcagtaagcctatgatgctatgatgatcacttagattatactattatagtggctatgtacatatgacatgacatgtctgaatgtctgcgattctctccacgactgatctctgagtagtgataactatgagagatcgtcagtgactactatattgctaccggtacgactggcaactatgcggctatagt

SEQ ID NO: 135951 - DNA, 346 bp, Zea mays
  Clone ID: MRT4577_55466C.1
aaaaaaataaaaaaaaaaaaaaaaaaataaaaaaaaaaaaaaaaaaaaaaaaaaaaaaaaaaaaaaaaaaaaaaaaaaaaaaaggggggggcgtttttgaggatccaggttttctttcgcgtgctttcgatgtaattgcttttttttggggtcccctaatttcaattgatgggcccggggtgttccacgtcttgattgggtaaaccctggtgttccccaacttaattggcttggtggcgatgcggttttcgccggttggcgttattgccaaggggcccgcctggatggcccttgccaacatttgtgcagcctgaattgataatgggacgggcccttgggcgggccc

SEQ ID NO: 135952 - DNA, 257 bp, Zea mays
  Clone ID: MRT4577_55467C.1
aaaaaaaaaaaggcttgtgccccagggggggcttaatcctggaaacccccccctcccaaaggtgccgggtttttttcctccggggggggccccccccctttttttttggggccccccccccccaaaaaaaaaacggggtcctgctttaaaacttggtcgtcccccccccctgggttaacccacccggttgggggcgctaccccattttaaaccggtgcctcttttgtaggttccccccccaatttttgtttttttgg

SEQ ID NO: 135953 - DNA, 816 bp, Zea mays
  Clone ID: MRT4577_55468C.1
atgacgtccgccttccacccccaatcggacggccaaacggaggcggccaacaaagtcatcgtcatgtacctccggtgcttcacaggggaccggcccaagcagtggctgcgttggctgccatgggcggagtacgtctacaacacgacgtaccagtcgtcgctccaggacacccccttcaaggtgtatggccgggatcctccatccatccggtactacgaatcgggggagacgcgggtggctgctgtggccaagaccatggctgctcgggaagagctcctcgcggatgtccgctatcggatggagcaagctcaagccgtacagaagaagttctacgactggctgcaccgcccgctgtctaggggcaagctcaagccgcgtttcgtcgagctgtaccgcatcaccgagtgcatcaacgaggctgctgtccgcctcgccctgcctctgcgtgccaagctgcacgatgtcttccatgtggggtttcttaagaagttcatcggcgatccaccggaggtgccttccccactgccatccatgcttcacggggctgtgactccagaaccggagcacgttgtacgcttccgctcggcacgtggtgtccgccaggtgctcatccactggaagggtcagtctgctgcgtctgcaacttgggaggatgtggctgatttccgcgacaagtttccccaatttcagctcgaggacgagctggacgtcgaggggggagagatgtcatgtacgggcaaacgtataggcgccatcgtgacatcaggcgcgcgcagagcgggctgctcgcacgacacaggaaggtgccaccgttag

SEQ ID NO: 135954 - DNA, 548 bp, Zea mays
  Clone ID: MRT4577_55469C.1
gagagaaatgttcatttccattccagataaaaagtttcgcatagacatttgacctattgaaataagaaagagccaaggagatttggggtgattctctatgactatagaaggtagaaatgagtctgaattctcctagcccaaatggagttacttttcacatttgtggggttgtgttcacccattctgttacatggtaggtccatccatgcatccttcaaagggaactattgatgtatcctcagggagtgtattttatttaaattttgtcttgacacttgacagggcctcttggtatcttgttcagcaaattggaaccaatccttctgtagaacctcttaatgtcttggctaatttatagatccactgtcggcctggaactattactagccaaatttttgtctaatttatataacctttgattagttggggtcttaataggaaaacatctatgctagcttgtcagctcaacagaactttgggtggcaattccagattactcgtgcttccttccagcatctcgactactctagtcattgttggccggtccg

SEQ ID NO: 135955 - DNA, 215 bp, Zea mays
  Clone ID: MRT4577_5546C.1
aagaatatgctatggtgcatgcagaccttacttgcctatcgtcatgaagctatactgttgtctgataccatataaattttcggaaatgctagcatcacaccatttattttccttggtttttttttcccagctattcttccctgttggccccttacaggttgctgttggcactgataatagaacatagcacagcaatacgattgacaagcgcaacg

SEQ ID NO: 135956 - DNA, 738 bp, Zea mays
  Clone ID: MRT4577_55470C.1
atgggcggagtacgtctacaacacgacgtaccagtcgtcgctccaggacacccccttcaaggtgtatggccgggatcctccatccatccggtactacgaatcgggggagacgcgggtggctgctgtggccaagaccatggctgctcgggaagagctcctcgcggatgtccgctatcggatggagcaagctcaagccgtacagaagaagttctacgactggctgcaccgcccggtctcctatgccgtgggcgacttggtgctttcctaccgcagctgtctaggggcaagctcaagccgcgtttcgtcgagctgtaccgcatcaccgagtgcatcaacgaggctgctgtccgcctcgccctgcctctgcgtgccaagctgcacgatgtcttccatgtggggtttcttaagaagttcatcggcgatccaccggaggtgccttccccactgccatccatgcttcacggggctgtgactccagaaccggagcacgttgtacgcttccgctcggcacgtggtgtccgccaggtgctcatccactggaagggtcagtctgctgcgtctgcaacttgggaggatgtggctgatttccgcgacaagtttccccaatttcagctcgaggacgagctggacgtcgaggggggagagatgtcatgtacgggcaaacgtataggcgccatcgtgacatcaggcgcgcgcagagcgggctgctcgcacgacacaggaaggtgccaccgttag

SEQ ID NO: 135957 - DNA, 354 bp, Zea mays
  unsure (1)..(354): unsure at all n locations
  Clone ID: MRT4577_55471C.1
ggcctccgcgtcttctgttctccccagatctcctccggggaaccctacccggggctaggcaggggcgatcgcagcgcgcgtcctgcgccgcctcccgctccacctctacccctcgctcgctcgctctttctgcgcagtttccccggccgccgcctcggccgccccggcgtccgccaaggtcgcctttcgcatcgtgcgcgtcctcgggttcganctggaggggncncgccncnaggtcntnnncctctccnnncagggggggatccgttctctcgccaacgcggagctcattgagccggcctgccaccggctcgaggatatggaggcgagctccgccgagtgcgaggttcacat

SEQ ID NO: 135958 - DNA, 337 bp, Zea mays
  Clone ID: MRT4577_55472C.1
aaaacgggaaaaccccggcccttgttggtggatttccccaggggttgtgtcaaatttaccccaataccaatatccaattggtgtgtgctctttaagaggattcccctactggattttatttgtccagggcattggtttttttccatgttgagataaattgtttcggaaaggggaagcacttttctttatcacaatattagtgggggggggggggggcttaaaccaaggacgggaggccggccccacactttggaaaaattggggtgtaaaaacgaggtggattccctcttcccactttgggggaccaggattttaccccacccccggctgggggggg

SEQ ID NO: 135959 - DNA, 159 bp, Zea mays
  Clone ID: MRT4577_55473C.1
attcccagtgccagccgccgtgcgctcggtagagcgcgctctatttatgggacgaccacggggaaaactcaacgggcgccttacgcaaggggcggacctttgcgagattcttggccagcgaaaggggtccataagtaaaaagggaggcccttgcaaaaa

SEQ ID NO: 135960 - DNA, 264 bp, Zea mays
  unsure (1)..(264): unsure at all n locations
  Clone ID: MRT4577_55474C.1
gtcgcatcagttggaccatttgtttcattcttaacctcaagggcggtttcacttgtctctttgtcaaccgacaagttttcttgcttgatatgagaattaatctcactgggaacaccaggaatcacattacaccttgatgcagacagatttccatcantaccataactantttttatgggcttttgaggagctcgcatgtcagcctttgcatcaacctctcgtttcagatatgatgtcttgttattgtggtcaagctgctcaggc

SEQ ID NO: 135961 - DNA, 261 bp, Zea mays
  unsure (1)..(261): unsure at all n locations
  Clone ID: MRT4577_55475C.1
acgggnccggaatcccggggcggaccacacccttccggggaaaaccctgcacacacaataatggggttaatttccggccacaattcggccgtaaagggggggcagaacaacttggcgggttacttcccaaaccggccgacaacaatccgaaagaacatcccgttgaaggaggccggcccggccaaggaaatgagaaagttcttgaaaaacccgtggcctaccctatttaaattgcttccaaccaaattccagttcatcaag

SEQ ID NO: 135962 - DNA, 1233 bp, Zea mays
  unsure (1)..(1233): unsure at all n locations
  Clone ID: MRT4577_55476C.1
ctatggggtcattctttctcctttgaaatgataatttgaaaggatattgtacattgtcaggttcattctttctccttttacagaggcatgaggccaattacgtttattctgctgggtacagaggcatgaggccaagtagttttagcattagcattgctcttgggtcatttttctctttatatcggacagtactctgctggatacagaggcttctcagattgcttgcaagagatctgcctcatgttcaggttgctcgcagggttctcaccgctgcttgattnggcgtgcagggatctgctcttattctgtgaacaaaccggaccagtactctctattctttgtaccggcggggttaacatttggtaacaccgtagcaggcatccgccgatcctcggctccgatcaatggcgtccaccaacgcaatcgatttccaactcacccaggcccgggcgctgctgtccgaattcgacaaccggctccgcgagattgattccaagtgggagacccgcgtcggcgtcctcgaaacgaaagttgcggactctgctcgaaatctggagacgatctccaaggagatccgcgacggggtggtggcgcagttggcggcggccgaggcgggtgtggatttccggatccgcctgcttgagacggggaccatcattcgcgtcgctgcgctcgagtcgactgcccacgccttcgagctgtggcgtcctcacgtcgacttgtcgatcgacagtctcttctcctccattgacgcggtttgtaccgaggtcgagaaattggggatccaccggttcccaggaccgcgtcccagcgatggcgcagcagcaccggggaccgcgacgcaaccggaaccctcttctcatcggccacgttcatcgcctccgcccgaggaccatgacggcgacgatgacgatgaagaaattgacgatgacgatgacgacgacgacgacgacgatgacgacgacgatgacgacgaggtttgggtttgtttccagcttcacgcgggtctcttggggttgtgtgcgttggcaggttctggatttcttgattcgcggcacccaatttcttggggattaatttctcccgttctgatagaaggcgatggctcatcgactgggtcggtcgtaggctggttttcgtttgaacacgtcctcgatttgattgaccattgggtcgggtttttgattttatggggaaacccagaaaagaaggcccggccggcctcgaggtacc

SEQ ID NO: 135963 - DNA, 1706 bp, Zea mays
  Clone ID: MRT4577_55477C.1
atacattgtcaggttcgtagaatgatagcaggaccactataaatatatgatgccattgtttcaagactgtaagccattgttttctatggggtcattctttctcctttgaaatgataatttgaaaggatattgtacattgtcaggttcattctttctccttttacagaggcatgaggccaagtacttttattctgctgggtacagaggcatgaggccaagtagttttagcattagcattgctcttgggtcatttttctctttatatcggacagtactctgctggatacagaggcttctcagattgcttgcaagagatctgcctcatgttcaggttgctcgcagggttctcaccgctgcttgatttggcgtgcagggatctgctcttattctgtgaacaaaccggacagtactctctgaagaaacgaaccaacagatgcaaattgggaaccgggggcaatacggtcagattattaggtgaggaaaaggaaataattagaaaacaggttagaatactattttagagaacaataacacttataaatactattatagagaaggttatatttagagtaccataagaaagaaacatgttaataagagtactataatagcaaaaaactctagggaggattaagaaacattcagacaatagacaatttacctattcttctgtaccggcggggttaacatttggtaacaccgtagcaggcatccgccgatcctcggctccgatcaatggcgtccaccaacgcaatcgatttccaactcacccaggcccgggcgctgctgtccgaattcgacaaccggctccgcgagattgattccaagtgggagacccgcgtcggcgtcctcgaaacgaaagttgcggactctgctcgaaatctggagacgatctccaaggagatccgcgacggggtggtggcgcagttggcggcggccgaggcgggtgtggatttccggatccgcctgcttgagacggggaccatcattcgcgtcgctgcgctcgagtcgactgcccacgccttcgagctgtggcgtcctcacgtcgacttgtcgatcgacagtctcttctcctccattgacgcggtttgtaccgaggtcgagaaattggggatccaccggttcccaggaccgcgtccccagcgatggcgcggacgcacgggggaccgcgacgcaaccggaaccctcttctcatcggccacgttcatcgcctccgcccgaggtccatgacggcgacgatgacgatgaagaaattgacgatgacgatgacgacgacgacgacgacgacgacgacgacgacgacgatgacgacgtatgcagacgagagcttcgaaatttcttcacttgaataccattgaatttagtggggcccgcccctgcgcgcaggggtgctccagagcgcgcggctagggaaggaactcagggagaggggcgcgccatggctgagggagctcggggaaagggaagccgcggcgcacagggagaaacaccggtgagccagggagctccggccgggcgcgagcaagcataggggagggggaggggcgcgacgccggagagagagagagttcgccagcatggaagtaggggtgcgtggaggagaatctggatgcgcacggctggaggcccgatgagcagggagctgtgcagtggccatgaaagcagggagggcgcaccatggggagctcggctgggccgcccgcctc

SEQ ID NO: 135964 - DNA, 139 bp, Zea mays
  Clone ID: MRT4577_55478C.1
tttttgtctacgtccactactaaaccgggtgagtatgtggaggagcacgagggctaggtaaacttccttgcttctaacccagttaacgaatgaactgatgcaacttcttgtgctcttgatattgaaaaaacttattatc

SEQ ID NO: 135965 - DNA, 628 bp, Zea mays
  Clone ID: MRT4577_55479C.1
ggccgctttttttttttttttttataaccctaaaacaagtgtccggcataatactaaattgttatgagctaacacttcagaaatctccatgcgtggacagagagctgctcacaagaaggaccacggaaaaacattatactaacacggtttgcctgacacgtctggagccaactgaatctacagtgaacagagcttgacattggcggttggccagcctctcggaaccaaagcacggtaagacatcctgagtgtgtgaggcacaaaaacgattgctgttgtacaacaagaaggagagccaccgaacgcacacaaagatctcgtaatccagactaacactttggcatcggaggaagactaaaactgaattgacagacaacctttgacatggcacttgatacacatatccaactgcatactgctgcgtgttaccctgcgcttggcgttaacttggctagggttccctattacgccagtaatgtaacgataccgttgcaatagctcactaagatccgatagatcggtactgaattaggcatccatgcacccgaataagcgcttgtggaatattgtgctcctagcaccaccttaatccgattgttggccacattgataaccctcggaacggaaa

SEQ ID NO: 135966 - DNA, 335 bp, Zea mays
  Clone ID: MRT4577_5547C.1
caaaaaaattggtcatattttttttggggggcccttttgtttaaaatttggcaaggggggggttaaaacttttttggataaagcacccaattgaaacttgggggaaaaaaaaacaaagggggccccattgttccaatcccccttggggaggcccaacaaaaatggccgggggctttataatcctttaggtttgggaaacgggggcccagttcaatttttttccattttttttaaaacccggcccccaaatggcccccttgggggcctgggcctaaagccccaaaagggcttttcccaaatttttttttttcggaaaaaaaacaaaacccgtttgg

SEQ ID NO: 135967 - DNA, 317 bp, Zea mays
  unsure (1)..(317): unsure at all n locations
  Clone ID: MRT4577_55480C.1
gaaaaangggccgaccgcnacaagacagcacccacgccagaggatccacgctttttttcccaaccaatcgacgccacaccgggcggtgtatttcaaacactttttctccccccctacgacactaactaccactccggccaccaaaatgcgctcccctcaccacctactcacagagacacactcctccatccagaaagttacagcccggatactctccatcaagaaagacagcgcccccaattcagaactccctgagctcgtcacttaaatatttttgcacctcgacacgctacaccaagtgaacaaatagatactta

SEQ ID NO: 135968 - DNA, 428 bp, Zea mays
  Clone ID: MRT4577_55481C.1
aactattatacttagaacccttcacgagcggccggttcttttaaaaaatcagggcgcttaaaacacaattcatcagatccatactatcatattttctcaaatttatgattcctgtaactgtaaaatgaactccaacattacaacttgcaaccatttcattgcacatttacaagttctataatacatttccttacccccaaataaattttaaaaaggtaaactggatgccaaaacaagatccttaaagttagccttcacaggacccattttaactttacaattttacaaatttgtcatagctccatccaaaaaactatccttactttttgctaacctaagttagctccaccacaccatccttaaagatagccttctcactcaactcttaaaatgctttaacaacaatttttgtgttcttctacaaactc

SEQ ID NO: 135969 - DNA, 597 bp, Zea mays
  unsure (1)..(597): unsure at all n locations
  Clone ID: MRT4577_55482C.1
tctgctgctcgctgaggacagcgacaaaacctgcggtnnnccggtgcccgctctgcctgcnnggcggtggnnagttggnagcgtgcggactgcgaggggnaagaaaccgnaagnaannncgagctagnagactcgcaaggaatgnannnaggcgccaaggggccaacgccgctcggtccctcgtgcccggnnagtatgcgggaggtgggagggggcgcgcggccnnggtacggacccggttcanngcgacgttcttgggcaaggggcgcgatccaagaattgctgtacccggnngcgttcgacgagtcaccaggggcatnnggaggtgnngcgtggaaccccaggtgaagctgcnnacgacttccttgcagagctccccgagggaccctggnnagcggnnctctacnntgcgagnaatccacncnnttctcaagaacgncnntcaagcannccgcaacccatcatgnaagttacctacacncnntcctggnngtcgatnngtctcccnngccgcaaccatcaaccttcatactaccgagnaatgttcaaacctccnnggcaccctttccgccagctaccccggcagnaggggcaccg

SEQ ID NO: 135970 - DNA, 685 bp, Zea mays
  Clone ID: MRT4577_55483C.1
gcctgagcactcagtacagtagaccacggtcacggacagcggcgacctccttcacagcgtcgctttgccgccggccgtagaaaccctgcaccgccgccgtttggtttcgcttgcgcgctccgcctcagctcgccggcggtaccagccttggtcgcggttaccggccctgtcttgcctcctccggggtccccaaatccaaagtgctgagtgttagctgcccgatgaagtcctataggctgtccgatctcagcgatgccgaggttagcggcctcaaggcgcgccctcgcattgacttcacctccattttcagcacggtgaatccgattgttgaagatgtgcgcgtcagaggtgatgctgcggttaaggattatacagaaaagtttgacaaggtcactctcgataatgccgttgtgcgtgttagcgatctcccagatgcagagcttgatccagctgttaaggaagcctttgatgtggcgtatgacaacatttatgccttccatgtttcacaaaagtcgccagaaaagacagttgagaatatgaaaggcgtgagatgtaaaaggataacaagatgcattggttctgtcgggctgtatgttccagggggcactgcagtcttgccttcaactgcattgatgcttgctgtgcctgcacagattgctggatgcaaaactgtagttcttgccac

SEQ ID NO: 135971 - DNA, 408 bp, Zea mays
  Clone ID: MRT4577_55484C.1
gcaaagaagctatttgccgtgtgctaaaaacacacctggcaacaaagcttttatcgagtgttttctcctatcatattttgtttgatactcggcaaaaagccggattacagtagtgaattcaatgtatttaatacatctttcttaagtatatataacagagtgacgtgtacacaagaataaaaacaagtactgtgtgggatggcaatacagctatccatgccatgaaagtagcagtgaaaaattacattgggaacctagggctctatatattcgttcatgatattcatgctcccctaacagcacagacgggtgtaattttcgcgaacgtttttgagctgttccttagtgttgtgatacattcattgattaacaattggggtagagcccgagcgggcactggtgatcatt

SEQ ID NO: 135972 - DNA, 844 bp, Zea mays
  unsure (1)..(844): unsure at all n locations
  Clone ID: MRT4577_55485C.1
ctctttgcagcagtttcgttgccggagcactcagcacagtagaccacggtcacggacagcggcgacctccttccgagcgtcgctttaccgccggccgtagaaaccctgcaccgccgccgtttggtttcgaaacagaattgaatcgggctctgttgatgggcagcttgcgcgctccgcctcagctcgccggcggcaccagccttggtcgcggttaccggccctgtcttgcctcttccggggtccccaaatccaaagtgttgggtgttagctgcgcgatgaagtcctataggctgtccgatctcagtgatgccgaggttagcggcctcaaggcgcgccctcgcattgacttcacctccattttcagtacggtgaatccgattgttgaagatgtccgcgccagaggtgatgctgcggttaaggattacacagaaaagtttgacaaggtcactctcgataatgccgttgtgcgtgttagcgatctcccagatgcagagcttgatccagctgttaaggaagcctttgatgtggcgtatgacaatatttatgccttccatgtttcacaaaagtcgccaggaaagacagttgagaatatgaaaggagtgaagtgtaaaaggacaacaagatgcattggttctgtcgggctgtatgttccagggggcactgcagtcttgccttcaactgcattgatgcttgctgtgcctgcacagattgctggatgcaaaactgtagttcttgccacaccccctagtcgtgatggtagcntaatgttagggaggttctttactgtgctaaaaaaagctggtgttacacacatactaaaagctgggggagctcaggcaatctc

SEQ ID NO: 135973 - DNA, 162 bp, Zea mays
  Clone ID: MRT4577_55486C.1
actccatagaaaggatatttggccttatagcttaatatctcaacggtttattaaattactcgagcatttaggaagtcctgtctgatattttacagagtttaatcacattatgctaaaaaatggttatttcattcataagtttttttacttagtacttagggt

SEQ ID NO: 135974 - DNA, 284 bp, Zea mays
  unsure (1)..(284): unsure at all n locations
  Clone ID: MRT4577_55487C.1
acctgngctcctaaaggtcctcagttgagagatttggatagagggggngatgcccccgactccccaccaggaaggntaaaagacatcttggagatgccaaaggaaagtcccaagcaagagccatatctcgtaccggatgaggcccaccgcatgcgcaacagacaaccgtgagccccacatacccaagaaagagaaagagatacctcaccgccggcaaacccttatgtacaccgctacatggcccaaggaagaccgaaggattgcagatgaacttcttgtccatc

SEQ ID NO: 135975 - DNA, 455 bp, Zea mays
  unsure (1)..(455): unsure at all n locations
  Clone ID: MRT4577_55488C.1
nnnnnnnnnnnnnnnnnnnnnnnnnnntnnnntnnnttttttttttttttgaaaacaagattttttttttagtcttcaaatcgaggcaaatgtaaagttttgccccagttttgtaaatgccttgtttttggaaaaattttgagtcccgtcccagcaaaaacttttgctgcaattaaccaaagagagacaacggggaggaggaagaaaaatgaaccccaaaaaaaaaaacccgaaaaaaaaaaagaaaaagccaatattctcccaatcaagaggtaatggtgggaacttttataacctgttgtttgccaaatgcacaaaaaaaggaggggtaaaaaggcaggccttctttacaccaattttgcgctgctcctagatttcgcagcagggaagcaagcaaacaaacaaacaaaaaagcacagtggagtagtagtaaagatccaggagcggaagtacag

SEQ ID NO: 135976 - DNA, 468 bp, Zea mays
  Clone ID: MRT4577_55489C.1
gcgaggagttgttatggctgcacgttcactcgacacgactagtgcagaatggcgagcagaatataagacgggccggtcctgacgctcttggtgtactctgcatatctaatcccaaggtaaaagatgtggacacactaagcacagtgagacatgacgcatacacacgatgtcgataagggtgcaataatctaatagggtctgattggggctggcacacacaatgccagaatagctggcatgcttagcaatctgtcaagatattactacaaagaagctgctcatctgatgagtggcaaaaacgcccagggcctaggtcacctcagagagggcttgacgaccatttcctcataccatccggatagactggttctttgcccgatggcactagtaggccttgtgacgcggctccacgcgagcctcgatatgaagcacaccatgctagggaaataccactacatcctctacatt

SEQ ID NO: 135977 - DNA, 611 bp, Zea mays
  Clone ID: MRT4577_5548C.1
cgctactggtggaaggagaaggagatgtcggagctgagcgtgcaccagagccaccagctcgtgtgggcgcgcgcccaccacctcgtctacgactactgcgtcgacaccgaccgcttccccgtgcagccgcccgagtgcgccggccgctgagttactgagtcctgaccgaccgacctcgatcggcgcggcgcggcgctgctccatgggtggtgggtggtacgtactagtcttgacaatggatggcatggcaatggatggcgtcgggtggggtggaaatggaactgcttgtttctgtttcagcaatggtgtctgtctgtagttctgtttcagctttgtgaaggtcgcattgttggcgacccatgtgtgggtgaaccggcggtggtgtctcttgtagaaacaagtgtatgggattatgggaacgaatgaacgatgccgcgctccgtttcagggatttgctactccacactgtgttcagtgctttgatctgattcctctgtacagaggcatgatttgtgttccctcgaggcttgcagctgtgcctgtgcgtgggtgtacttgaagctactttctcccttctttttttttttactgcggatgcttttaaccgagcc

SEQ ID NO: 135978 - DNA, 2522 bp, Zea mays
  Clone ID: MRT4577_55490C.1
acctcgaggccggccggtgaccatttcgctgtggctctatttggggatgtcgtcgctgcgccgcgcgctccgctctaccgcctccgcaccgcagagccgcagccaagcaagctgcgcccctggacttggcctcaccggtgaagcggagcttgaggataggcggtgctcgggagataccaagcggtcggccgcaggcgccacgtcggcggagatgacggacggtcaccacttcaacaacatcctcctcggagggcgcggcggcacaaaccctggtcagtttaaagtgcattctggtggacttgcatggaagagacaaggtggaggaaagaccattgagatcgacaaagctgatgtaactgcagttacttggatgaaagtccccagagcatatcagcttggagtcaggattaaggctggcctgttctacagatttattggcttccgtgaacaggatgtaagcaacttgaccaacttcatacaaaagaatatgggtgtcacaccagatgaaaaacagctttctgttagtggccagaattggggagggattgatatagatggaaacatgctaacctttatggttggttcaaagcaagcatttgaggtgtccctaccagatgttgcacaaacccagatgcaaggaaaaacagatgttctcttagagcttcatgttgatgatactactggagccaatgagaaagactccctcatggatttgagttttcatgtgcctacttcgaatactcagtttgttggggatgagagtcgccctccggctcatattttatgggagaccatattgaaatttgctgatgttggttcttctgaagaaccagttgtcacatttgaaggaattgcgattcttacaccaagaggacgttatagtgttgaacttcatctgtcatttctgcgactccaaggacaagctaacgattttaaaatccaatacagcagtattgttcgcctctttcttttgccaaagtcaaacaatcctcatacatttgttgttatcactcttgacccaccaatccgtaaaggacaaacattgtatcctcacattgttattcagtttgagacagaggcagtagtggaaagagatctggcattgagtaaagaactgttggttgaaaaatacaaggacaggcttgaggaatcttacaagggtctaatacatgaggtatttaccaaagtccttcgtggtctatctggtgctaaagtcacaaggccaggttctttcagaagttgccaagatggatatgcagttaaatcatctctcaaagctgaagatggactgttgtatccacttgaaaagggtttctttttcctgccaaagccacctacactcattcttcatgaggagattgagtttgttgagtttgaacgtcatggtgctgggggtgccagtatatcatctcactattttgacctccttgtcaaactgaaaaatgaccaagagcatctcttcagaaacattcaaaggaatgaataccacaacctcttcaatttcatcaatggaaagaacattaaaataatgaaccttggaggagatggtcaaggtgcaagtggtgtagttacagatgttctacgagacactgatgatgatgctgttgatccacatctagagcgtattaagaatcaggccggggatgaggaaagcgatgaagaggatgaagattttgttgcagacaaggatgatagtggatctcctactgatgactcaggtgatgaggaatcagatgctagtgatagtggtggtgaaaaggagaaatcatccaagaaggaagcaagcagttcaaagccagttcagaaaagaaagcataaggccagggatgacgaaggacaagagaagaaaaagccaaagaagaaaaaagatccgaatgctccgaaacgagccatgaccccgttcatgtatttctcaatggctgagcgaggaaacatgaagagcagcaacccagatttgcctacgactgagatcgcaaagaagcttggggagatgtggcaaaagatgtcaggcgaagagaaacagccttacatccagcaggcccaggtcgacaagaaacgttatgaaaaagaatccgctgtctatcgcggtgaagctacagtcgatgtggattctgggaacgagtctgactagagatccaagctcttgggctggcatggtggcacgggatgaaagtctagtgccatgtgtgctattgttatgtcagcaaccgttgcctccaacattgctgacagtaaagagagtttctctcgcagcttacctctgcagggcaaaagaatgtacgagtgtagtctagtgattttgtgtaaaacaaccaacatacgtggttttctgagagatggtaagacgtcagtttaactgttgtcgattggctgttttgccccctctcaaaaaaaaaaaaaattataaaataaatcaaatatagggaagggaaataatttaggggcgtccttttttaaggatccaatcttacctcactcttgcatgcaacgttatagcttcttttataggggctcctaatttt

SEQ ID NO: 135979 - DNA, 374 bp, Zea mays
  Clone ID: MRT4577_55491C.1
cttaaaaaaaaaaaaaaaaaaaaaaaaaaaaaaaaaaaaaaaaaaaaaaaaatataaaaaaaaaaaaaaataaaaaaaaataaaaattttttttaaaaaaaaaaaaaaaaaaaaaaaaatttttttttttcctggggggcctttttaagggggatttttgcaaatttccataaaactggggggggttttagcttccttttagggggcccattttgccttttagggggtggttttaaaattaaggggccgtgtttttaaaatgtttggattggaaaaaccttgtttttcccaattttaaaccctttgaaaaaaatccccttttttcaatttgggttattagaaaaaaggcccgaaccatttcccttttcaaaaat

SEQ ID NO: 135980 - DNA, 351 bp, Zea mays
  Clone ID: MRT4577_55492C.1
cacactttgttcggaagaagcttcgaaccccttctggccatctctcgtcctcctttcaattcttgagctttgtgcttccatctcctctcctctgctctcttctttgtctctgcgtgcctgttcttgtcgtctcgctcgatcgtaagtgcaacggaattaagaatggcgtcgccgtcagcgtcaggagagaagaagactacgatcctggtggcgaggaagggccggctgcggcagcgctaccacggcgagttccgcctggtggccgggtgcgtgccgttaccgtgtggtcgccggcggccagacgcagttggtcatggtgttcacgcccaacagggaccacctcgtcttccc

SEQ ID NO: 135981 - DNA, 450 bp, Zea mays
  unsure (1)..(450): unsure at all n locations
  Clone ID: MRT4577_55493C.1
caggcgcgaccacgtcttcttccaaataaaaataccgcctcnctacgcggcagcagccatctgagtcttacattgccaatggaagacaatcttatcgaatggtggtggacccaaatcaaactggcagcgaccagcaacagtgttaatcaaatgcaatgtacacaggtaatctacaaaacttctgctctaagagcaagtccttcgggattgtgtgcctcgatgtcaacatgtttaatcccaggcacaagcttttggatctcagactccagccgatccacttcatatcccagagcttcaactacatcctccccgtagttggccatgacccttagcaattccgtatcatccttggacattgcagcttcccggaacaatttcagccttgaatctaaaaaaacctggcccaatcacctcacttttgcaatcataaagagcatgtacaaccggatc

SEQ ID NO: 135982 - DNA, 1452 bp, Zea mays
  Clone ID: MRT4577_55494C.1
actcctatgggcgattgggtccctcgaggccggccgggctcttgtctgcgtcagatgccgcgggcctcttcagcctccgtggcgggtggcggagacgggctcttcctcccgcggcgtcacggccccccggcgccgtcactgacgcagctcccgtccggctcaccgtctcccgcaaatattctctgcgtgtggccaaggggaagaagaaggcacattttgacgatgaacacagccatcgagcggttaacatggcactatggtgcaactttctcgtcttctctctaaagtttggagtgtgggatttcaacttcaagtcatgttatgctagctgagctagtgcattccattgcagactttgctaaccaggctcttcttgcttatggtttgagcagctcaagacgtgctccagatgctctacacccctatggttattcgaaggaaagatttgtatggtctctcatatctgcagttggaatattttgcttgggttcagttggcttttcaatcatgtccaattggctcaattactgttggcgatttactggggatggttgctatttttctcattcagaggaataggcatgctttaattggccgggccattgatgatcatgacatgcaacgagtccttgaatttctgaagtctgatccggttgtagatgctctttatgattgcaaaagtgaggtgattgggccaggtttttttagattcaaggctgaaattgatttcaatggagttgttctggtacaaaattatttggaaaggactggacgtgggagttgggcaaaacagttccgggaagctgcaatgtccaaggatgatacggaattgctaagggtcatggccaactacggggaggatgtagttgaagctctgggatatgaagtggatcggctggagtctgagatccaaaagcttgtgcctgggattaaacatgttgacatcgaggcacacaatcccgaaggacttgctcttagagcagaagttttgtagattacctgtgtacattgcatttgattaacactgttgctggtcgctgccagtttgatttgggtccaccaccattcgataagattgtcttccattggcaatgtaagaatcagatggctgttgttgcgtagcgaggcggtatttttattttggaagaagacgtggtcgcgcctgacatggaaggctttatgttcaaggttggcatcagtatgtatttttgccttgcgatgcagtcccataagtattactccctccaaaaaaaattttataatttgtttaacgttttcaatctcaaatttgaccactcatcttaacaaaaaattatgaaaaaacgaaaattttcattgtagttttgtttattatcaattatactttatatactttacatatggctttttttttgttttcttaagatgagtggtcaaacttgaggttgaaaaagtctaaagaattatattttc

SEQ ID NO: 135983 - DNA, 1152 bp, Zea mays
  Clone ID: MRT4577_55495C.1
atgccgagtacgtagctcgaattcgctcggttggaatattttgcttgggttccggtgctacaattgtgcatggagttcaaaatttatggaattctcatcctccagagaatattcactgggctgcattagtgattggtgggtccttcctaattgaaggtgcttcactgcttgttgctataaaggctgttaggaaaggtgcagaagcagagggaatgagtatctgggactatatctggcgtggtcatgatccaacttccgttgctgttatgactgaagatggtgctgctgttacaggccttgctattgctgcagcatctttggtagctgttcaaatgacaggaaatgctatgtatgatccaattggctcaatcattgttggcaatttactggggatggttgctatttttctcattcagaggaataggcatgctttaattggccgggccattgatgatcatgacatgcaacgagtccttgaatttctgaagtctgatccggttgtagatgctctttatgattgcaaaagtgaggtgattgggccaggtttttttagattcaaggctgaaattgatttcaatggagttgttctggtacaaaattatttggaaaggactggacgtgggagttgggcaaaacagttccgggaagctgcaatgtccaaggatgatacggaattgctaagggtcatggccaactacggggaggatgtagttgaagctctgggatatgaagtggatcggctggagtctgagatcaaaaagcttgtgcctgggattaaacatgttgacatcgaggcacacaatccagaaggacttactcttagagcagaaagcgtggtcgcggccgaggtacattgcatttgatttaaacaacttacacatagaacatctgtatactactaaacagaaaccacacaactagagagcatgcatggacaacataagagagcggctacacaagttgcataacatccacacgactttacatatacatatacatcacacaatcagtaaatatagagatgactggattgctcgacttgttggatagacatctcatgtaaaatagctatatgcctatatcaagaatgaacaagatgctgtcttgtcaaaaaaaaaaaaaaaaaaggtacctgcccgggcggccgctcga

SEQ ID NO: 135984 - DNA, 300 bp, Zea mays
  Clone ID: MRT4577_55496C.1
cgtattgacagattgcctctgccaggacggatccattggagctcgtccccaatggcaatgcgtcaccagttcggggcttcggtgctgctgcatctactggtgttagcgggggcgggggccatggtcactgctgaccaagagagcgaccggatccgcgagctccgggccaccgccaacgtggggtctcgagactccgctactaacgcaacccggcggggcccccctttctactgctcgtgagcggtccgcggcggcccatgcgccgtcgtctctgctcaaggcggcctgatgctcgtagtc

SEQ ID NO: 135985 - DNA, 383 bp, Zea mays
  unsure (1)..(383): unsure at all n locations
  Clone ID: MRT4577_55497C.1
accgccaccaccaccaccaagcacaccagnaccgcagcaccaaggacggcagacgcgacagcagcggggacccgacgcagcgacgcggcggccacaccgaggctaggaaagacgaaaaaggccgcgccagggccggagtccncatggggcacgaacaagagagcgacgaaagcggcgcaggcgacggaccagaacaacgaacggaaagacgagcagaacatgaagaaggcggcgggacgcgcacgacacgcgcgtggacacgcacatcaacgcggacgtgacggacaagtacaacgggctcgaccatgcatggagcccaccaacgccgccttcaagaagaagaaggcggccgtcctgaacaggcgcgaaaagcaagagcaaat

SEQ ID NO: 135986 - DNA, 600 bp, Zea mays
  Clone ID: MRT4577_55498C.1
cttgcgatacattcgtgcactccgccgtcgctctatcatctccaaaacgtcgtcttcatcaccacgctatcagcactatgccaggaggaaatgcatacatgagatggtgaagggacatgcgcggccccaagcgaaacgctatcaccgaggactcgctgttggatacccaggagaaagggctcaacggcacgatactacgataccggtgcaaatcgttcgcgcgaatactgaggaagatgtcttacgccactgcaccgaatcgcgagcgcatacatctacctactactgaccttcaaacaagtacccctataacgattcatatgagggacatcacgccatgctgatggccaatccggcacaccactagtctacttgaatgcctatctacctacgcaatccatgaaacaaaaagggacgctgtgcatgtaccccactcaaatactaagataatctgcatgcggggaggaccctattcttctattatctatacccacctgctcttggaagggcccggtacacgatgagacctataaggatgagctgtatatctgataaccgttcaaagttctcagacgtctggagtgatgaatcactggaagt

SEQ ID NO: 135987 - DNA, 780 bp, Zea mays
  unsure (1)..(780): unsure at all n locations
  Clone ID: MRT4577_55499C.1
acgcctcgcggtaccggtccggaattcccgggtcgacccacgcgtccgcgcagagagcacgttgttctcggcctctcccggagctaggccagccatggcggcggtaaagaccctaaatccgaaggccgaggtggcccgggcccaggcagcgctggcggtgaacatcagcgcggctcggggcctgcaggatgttctgaggaccaacttggggcctaagggcaccatgaagatgcttgtatctggtgctggagacatcaaacttactaaagatggcaatgtgctgcttcatgaaatgcaaattcaacacccaacagcctctttgatagcaaaagtggctacagcccaggatgacataactggcgatggcactacatccaatgtcctcatcatcggggagctgctcaaacaggcggacctgtacatttctgaaggtcttcacccaagaataataactgaaggttttgaagcggcaaaagaaaaggcactccaatttctggaacaagtcaaagtaagcaaagagatggacagagaaacactcatcgatgtggccaggacatctctgcggactaaagttcatgctgaacttgcagatgtcttgacagaggctgtagtggactccatcttggccattaggaaaaaggacgagcccattgacctcttcatggttgagatcatggagatgaagcatanatctgagacagatacaagcttaatcagagggcttggtntggatcatggagctcggcatcctgatatgaagaagagagtgggaaatgccta

SEQ ID NO: 135988 - DNA, 437 bp, Zea mays
  Clone ID: MRT4577_5549C.1
gacgctacctaacatctacttatctactttgcctaccaagctactaaccctgggttcgcgtgttgccctttctgtgtgcgcgacctatgcgtatgtgattccacaatgatcactcgctcttactgatatcacacttcaatccctcctacctgttacttcaacggtcttcgaccacttacatgtgcatgcgtaaaccctacagcatccgctagcgcctagcagtctgacatcttccaattacccatttccaacatcaatcactgacacatgcaaatataaacattatcaccacagcacagcaacagcaacaactactagtaccaacactgctacatctagatgtccttaacccttacttctacctgcaacagcatgcgcttagattaatcgcacttgctatggcaaacgtaactgcattaccaacaacaactgcaatt

SEQ ID NO: 135989 - DNA, 795 bp, Zea mays
  Clone ID: MRT4577_554C.1
gggaaaaatccgcacggacggaacgtctgaaccccaccggccgcaccgcgcgcgtccatcccccaatgcccccagcagcggcagttcgtcgggctccctcgccggacgcggcgggcggagcgaggctagccgcggagcaagcctctggcccgtgagaaacatgtctccacaggagacacggcaacgcgcccttgtagattgcaacggcggagaggaggttattgtgctgttccatttggctgaatacggaagttaatggtggttgagtgcaagaaaagaaatttaactaacactgtaaagatcgaggaatatagaaacagagctaattgacactagtgatgaaaacagtctcatgacttgtgaaaggtagcttctacctccctcatctattatatggttttctaggagactgctaacagacggcaagtttcaaagatcatgttcacattgccttatcccatcttaatcagtgctgtccttgtagaattacgtgaggaatgtggacattgagctatattatagttggaagcttcatgtttaatccttttacttaatccaacatgatgctatcttgtagaaggaaattctgatttgtggatgtcaaatgatcgcaagaatttcttgtggctagcgccattgtatgtcccaggttcagggtgcttttgtgttttgtgcgacagttttgggttctagttggtgtttcttggtgtctaaacatggggctgattgtaacatttaaactttattccttattgaataaataggcagagctcgtgacctcctgccatctgtttc

SEQ ID NO: 135990 - DNA, 607 bp, Zea mays
  unsure (1)..(607): unsure at all n locations
  Clone ID: MRT4577_55500C.1
gttaatatactacttgtgtgcttcctaacttttcctacttacaaagtgttctcttgcaaatatatgccaagagagctttgcatgtatcttcttgtgtggttctatccttaagaggagcattacccaactgctcgtaatttattatatattactggttaggcttaggcttacggttatgcttttgtggggtgtctttgtattttaaatctcgtcattttaggctcctctctttttaatataacagataggtctcctgtcggttcgcttaaaagaaaactggcttacgaacagctctacctttctttctattagcaaaactgaccggccggagcgccttgttgaagcaaaggtttattttacctagtttccacaagctctaccttctcttgtagcattcttttgggagcactcctctacaacttctagttctagccaacaacagttcatggtatatatgtttaatttttaactttntctgaataatctttccgcttcataacatcaactgcaacaagcaaatgttacttgtattagtgtccggctggttctaaaaataaacctagtacacttgagcggttagttctaaacaaaatgaacttacctgtgt

SEQ ID NO: 135991 - DNA, 286 bp, Zea mays
  Clone ID: MRT4577_55501C.1
cccgagtcggtgcgggctgaccttactagcaatgtgaaatggaatgccatgcaacccaatttacatgaactactgcagaagagcagctgctcacgttcacagcatgggggttgctctaagaacaaggggttaggcagcaagtggacagggcaagttcacattacagtatttatggcacgccaaataggtttgaaagcggaacgcttacatcatgaaggttttgcgcccggacaactagggtcgtccctcatcaatgcatctagactggaggggtactttcaaaaag

SEQ ID NO: 135992 - DNA, 625 bp, Zea mays
  Clone ID: MRT4577_55502C.1
cccccctcgagttttttttttttttttttttttttttttttttttttttttttttttttttttttttttttttttttttttgaaaggccggaaccattttaaaaatcaccagtttctaatttttgccagccaaaagggaaataacaaacgggggattttaaacccggaccccaacctttttcttttgtttttttttcggggggggggttgttttaaaaagggtggaaccctgccccccccctgccaaaaaggggaaacccctgaaccaaaaaaatccggggggggcccaggacaaaccctaccgtttaatggctccggggacccacacaagcggggggacgggggccccttaaatttttaagccccatttggtgggcaaaatccctcccctgaaggaggaccaagcttgaaaaaaaccttaaaccccccatcctaaggaggcagggcaggctctcccccttgaccataaggccaaaccccgggttgatccccaaaaagggccccctgggcggaaaaaacttttccagctccagctcttttttaaggaacatttaaacaactttggccaggtccggggcggggctttgaatttcccaaaaaagggcccctttgagggtcttccccc

SEQ ID NO: 135993 - DNA, 443 bp, Zea mays
  unsure (1)..(443): unsure at all n locations
  Clone ID: MRT4577_55503C.1
ctcttttaaatanatttaaacacacgcacacaacacacaccgctnggtattaaaaaaataacccgaaatacccccccctttaatttcacaaaaaaaggcttaaaatcctaaagtattcccatatacacacagacaacaaaaacaaaaattaatttaattcataaaacagcctcttttcttttacaaacatgtagactgaaaaatgcatcttcccccaataaaaacaaaaaaaccccatatctacttaccattctttgaaaaaaaatcacaaaccaattaatataccctcttaaaaataagcgagctagacaaaaactatattcaaacgccaagcacaacaataaccaaacccataacgaaccaccgtaattttccaaaaaccgtcaaaaaaaataatccaaaaaaaatacctcaaaaaaaaaaaattaccttttcccctaaaa

SEQ ID NO: 135994 - DNA, 236 bp, Zea mays
  Clone ID: MRT4577_55504C.1
gtgcaatgcgccagctcctatatatactatatttgcattataccatcacgcctactgctgtactgaccgaaccgatactcctattgtgcgaaacttcaaccgctctcgggcgattgcggatcgagctctaggtgacatcgatagcaggaggcggcgtcaggggcgctgcggctgcggctgcgagcgctctagcgctggcggctctagtgtgctcgctgtactgttgtcttttgcag

SEQ ID NO: 135995 - DNA, 422 bp, Zea mays
  Clone ID: MRT4577_55505C.1
agactgtcactcacacctatgccgattccacaggtagcccggcacatgcagatgtccgtaaagatcgcggcgcttgctcttctgctagagccaacatctgaccacgcactgctgcctatgccaacggcgtgatgctactgtgtccaccggaacatgtactacccccggggactgaccctcctcgcgttcccgcatcacttcctcttctggacacgcgcgtgtgtctaccatccccaaaggaggcgcaaccacggcgtctgctgccccaccatctcgcacaccttcatagaacctcccgacaaccatccctaacatgacgccgctgacgcgatcagaccagagtcactcatctcagaaggaagattcacacataatgaaccaacatgaacctttgatgctctagcgatcatctatctcttcga

SEQ ID NO: 135996 - DNA, 212 bp, Zea mays
  Clone ID: MRT4577_55506C.1
gccaagcataattcacatgtctcgccatcagggctgcggtgtgtgtccgaacggctaggtctcctacacatgactactcaggccactttgaaggctttgacaagacaccttgtcatgcgtgaggcatgtaaaccccgtgctctacaccatgtgcgcccgagagacaaagaatatacacatgcatgatataggcgccatggtggctgagcact

SEQ ID NO: 135997 - DNA, 530 bp, Zea mays
  Clone ID: MRT4577_55507C.1
ctaagtgtaagagcggcggatgcagttctggcccgcgcggccggcgtcgctcgtggggctcctgcacgagtacgccctggccccggccggtgggtggacgtgcccgtgctcgcccgcgacgagctgctcgtcgtcgtcggcgaggagatggagatcatgagcaacgcggtgttcagggcgcccacgcaccgcgtggtcaccagcggcagggagaggatgtcgctcgtgctcttctaccagccggagccgcacaaggacctgcagcccgcggaggagctggtgagcgaggaccggcccgcgatttacaggaggctcaaggccaagaccttcggcgacgggttctgggatgcgttcgcgctcggcgagcgcaccatcgacttcctcaacatcaaggtcgacgacaaggagcatggaggcggattagtaacctcagcgccagcttgacgccatgcatgtgaacgaactactgtacacgatgtatcactggtagtgtaatgtaataagagacatggagcggttttccatgcaat

SEQ ID NO: 135998 - DNA, 1413 bp, Zea mays
  Clone ID: MRT4577_55508C.1
caaacaaattgtttactagcctaagtgtaagagcagcacgatggtgcatcaggctcagggacagatggtgcaggaggtggccgccgccggcctccccgcgctgccgagccggtacgtgctgagggaggaggaccgcccaactggtgacgtcgcggcacccgagttggccttccccaccgtggacgtcaatgtcttgccgaccccggtgacgtggaggaggccagcaagctccggtcggcgctcgaatcctggggcctcttcaaggtgaccggccacggcatgccggtatccctgctggacggcatccgggacgccgggctggagttcttccacctgccagcggcggagaagctgaagcacgccaaccgggacgacgccggcgagttccagcccgagggttacggcatcgaccgcgtggacaccgacggtcaggtgctggactggtgcgaccggctgtacctgacggtgcagccggaggaggagcggcggatgcagttctggcccgcgcggccggcgtcgctcgtggggctcctgcacgagtacgccctgggcagcgagcaggtggccaggcgcgtgctccgggccatggcgcgggtgctggggttcggcgaggggttcttcctcgggcacgtgggcgagaagggcggcacgtacgcgcggttcacctactaccctccctgcccgcgcccggacctcgtgtacgggctgaagccccacacggacaactccgtcgtcaccgtgctcctcctcgaccgcgacgtcggcggcctccaggtgctgctcagggggcctggccccggccggtgggtggacgtgcccgtgctcgcccgcgacgagctgctcgtcgtcgtcggcgaggagatggagatcatgagcaacgcggtgttcagggcgcccacgcaccgcgtggtcaccagcggcagggagaggatgtcgctcgtgctcttctaccagccggagccgcacaaggacctgcagcccgcggaggagctggtgagcgaggaccggcccgcgatttacaggaggctcaaggccaagaccttcggcgacgggttctgggatgcgttcgcgctcggcgagcgcaccatcgacttcctcaacatcaaggtcgacgacaaggagcatggaggcggattagtaacctcagcgccagcttgacgccatgcatgtgaacgaactactgtacacgatgtatcactggtagtgtaatgtaataagagacatggagcggttttccatgcaatataatctagtttatcacaggatctggttggtgttgatgtgcaaaccgtaaggagccgttctgttgtgtagaaatggtgacctgaaactattccaaaacgaattactttttaaatttatataagttttgaacaacatgcaaaaaaaaaaaaaaaaaaggcccctagggcc

SEQ ID NO: 135999 - DNA, 1143 bp, Zea mays
  Clone ID: MRT4577_55509C.1
cgacagcgtcatcccgcaggggccaccgttcagcgacaccacggcgacggccgtggtcgagtacctcggctcggacacggaccccaccacgccgccgacgctgccgccgcggccggaggtcaacgacacggccacggcgttccggttcctctccaacctgacggcgctggtgcggccggggcagccgacggtgccgctgtccgtggacacgcgcatgttcgtcaccgtcgggctcggcgtctccgactgccagccgacgcagctgctctgcaaccgcagcgccaccgtcttctcctccagcatgaacaacgcctccttcgtgctccccgcccccggcaagccgtccatgctccaggcccactacgacggcggcgacacggcgggggtgtacacccgcgacttccccgaccgcccgccgctcgtcttcgactacaccgccgacgccagcgacaccgccgcgctgcagtacacggccaagtccaccagggtgaggacgctccggttcaacgagacggtggagatggtgctgcagaacacgcggctgatcgccagggagagccaccccatgcacctccacggcttcaacttctacgtgctcgcgcaggggtttggcaactacgacgaggccacggccacgccccgcttcagcccgggcaacccgcaggagcgcaataccgtcgccgtccccaccggcggctgggctgtcatccgcttcctggcaaacaaccctgggatgtggttcatgcactgccacttcgacaaccatcttgatctgggcctggccatggtgtttgaagtaccggacgggcccacgccggaaacgtcggtgccgccgcctccagcagacctaccacagtgctagccatcgtcgatccacagccaaccgtgattgtttggattcaccatgcaattgcgtgcggaagaaccttaattagcttggcgtgctatatacgatgcgatttaaatttaactattgtttgtctgttatatatataggtcgtggtcgactggtagactcgcatacttgtatttgcatagatatatgtttgttccaatgcgtcagaagcttggacagtatgtttcagtaatcacatttgattatatttatttggagacaattaaaaaaaaaaaaaaaaagcggcc

SEQ ID NO: 136000 - DNA, 254 bp, Zea mays
  Clone ID: MRT4577_5550C.1
cggccgggcggggatttacagacaaacctccatcgagagaattacagattttttatattttagagtcccactagttctgggttgcagctgcaccaggtattgttagtcaccatatgaaggaacctgcctgcccatcgcttcacgccagcttaatgggcctcataggtcttcagttctcctagaactgtaatagggtaccgcttataccggagcatatgggggcagtgtgtactttgatccgttgctcgatagaa

SEQ ID NO: 136001 - DNA, 454 bp, Zea mays
  unsure (1)..(454): unsure at all n locations
  Clone ID: MRT4577_55510C.1
ccggccgtcttcttccgccgccttctttttcctttttatcagagcatatcacanagcgggagcaaagattaacacgatgtatggggtccaactacatcnacacaacggccgatgagggactgttccacgtcccttacagccacagcaccagcgcgacccctaccattttttcggcggctgccgcatatccacacaacttccatcgcatcttctcctccacgtactacgtgggccacattcactgcagctgctgctggtgctcccancaccatcacccactccaaaacaaagaatccttattaatattccgattacaatgactaacttataggagtttttgccttcattgaaaaaagtttcacttactataatgccttgagattgacataccacataataaaattgctcaaaacattctattttccataatctgtagacgatggtgaaattctac

SEQ ID NO: 136002 - DNA, 228 bp, Zea mays
  unsure (1)..(228): unsure at all n locations
  Clone ID: MRT4577_55511C.1
ccttccaancgccactcaaccccttgcactgactttggccaattgcaccgcctcgtggctaagaaaaaaccgcttttgagctgactccattgaaccatcacatctaggccgacgaagatttggtgcttcattccatggctgatgaattgtctgcattcttaacatatcccaagggcttagaacatgctcatgtcttgctggcggaatgggaaacaccttgaacagctt

SEQ ID NO: 136003 - DNA, 1462 bp, Zea mays
  Clone ID: MRT4577_55512C.1
ctcttccccgcggcgtcccacgcgtccctcctccccctctcctccctcgaccgccccgccgccggccacctagtccgtggcaccctcaggccccacacctcgagcctccgcctgcgccgccccccgggggcaaccgggcgcggccgcgggcgtggccgagggggcatcccagacgagtggggcgagcgctcgccgccggacaaccccgagccccccgcgcagcccgatcctcccatcgacaaagacgagtggggccgcgacgactctgccgacggcaactcacgccctatcgtcgtcgacgagtggggcgagcccggggtgcctgagcccgagccgccctccgccgcggacccgcctagcccctccgcagacgacgactggggaaaggagccggaggcgccggcgccggcccctgctccggcggcggaggaggacgagcaggaggtgaagagggaggagctcaagcggtgcctggtggacacggtgtacggctccgacctcggcttccgggcgtccacggaggtcagaggtgaggtcgtcgagctagtcacccagctcgaggcggttaaccctactactgctcccgtcgagtcgccggatctcctcgacggcaactggatcctcatatatacagcatattctgagcttctgcctattctagctgctggggcaacacctttggtcaaagtaaagcagatatcccaagaaattgactccaaaatcatgacgatagtcaatgcttcgacccttacgactccattcgcttcattttcattcagcgcaaccgcctctttcgaggttcaaagcccatcaaggatagaggtccaatttaaggaggggagctttcagcctccgacaatatcatcatccgtggatctacctcaacaagttgatatatttgggcagaagatcagcctggggccagtccagcaggcactgaatccattgcagcaagcatttgctagcattgctgggtccatttctgggcagccacccctcaaggtaccaattcccggcaacaacagagctcgatcctggctcttgactacctacctggacaaagacttaaggatctcgagaggcgatggaggcttgtttattcttgccaaagaggggagccctttgctagatcaattgtaaatctgtaattggttgctaccggaaaggatatccagaactccacaggtaacctaacagaggacgcctcacattgtatttatcaatcaatattgttgttggcggcaaaaaaaaaaaaaaaaaaaaaaaaaaaaaaaaaaaaaaaaaaaaaaaaaaaaaaaaaataaaaaaggaaaaaacttagaaagggcgaactctggaaaggtccattactgtggatatccattaaactggcgtccataggggcaagtttgtccagaggggaattctcccaaaattcactggcacttcatttcactggccgtggctttaaaaagccctgact

SEQ ID NO: 136004 - DNA, 1299 bp, Zea mays
  Clone ID: MRT4577_55513C.1
atggatcctaagggaaaggggattatgatcaacaacaaggagaccctcaacattgacgagccgaaagcatccctatgcagggatgaatacagcaaggttagtggcttggacagcgccaagcaaagacgggacaccctcaagatctctcatgagggaaacgatgctacaatgatcaccaagatggaattagtgaaaggcgagctcgaaagatttgacatgaagaggggagaggagccaactgaaacatacaacatgctcaagaccctagtgaacaaaatacaaagctatggaagcacaagatggatggatcacgacgtcgtgcacctcatgttaaggtcattcattgtaattgatccccatcttgttaaccttattcgtgaaaaccccggcgagtgcatgatggtaaaagacgcaaggtatgtcgatgacatcgccaacatacctcttcctctttatgagccacaacctattgcactcaaggcaacaactagcacggagacgctaccaagcaaggtagcacaagtggaggctgtcagacttaatgaggatgaaatggcgcttgtaataaatcacttcaagaccgcattaaaaggacgcaaggactactccaacaagagcaaatcaaaggaaagtgttcgtgcttcaagtgcggcacaagaaaagaaagggaagaaggaaaagaagaagttttataggaagacaaagggtgaggcgcatattagcaaggaatggaactcggacttctcttcatccgactccaacgacaaaggacttgttgcctccaccttcgacaagtcctcccttttccccaacgagcatcacacttgcctcatggcagaggagaagaaggaatgtgatgatgacgtagattatagcaacctctttaagggcttagatttatcaaaggtagataaaattaatgaattaattgatgctcttaatgaaaagaatagattgctagaaaaacaagaggatctactttatgaggaacatgataaagtagtagaagtagaaatgtatcttgctttagaaatcaataagaatgaaatgtttgcttttgaattgtcttcttgtcactcctctatcactagcatcaagagtttaaatgatgatttaaatgctagaatagagaaagtaaatgttgcaagttcttcaattcagcatgtttcaattcgtgtaaactgcaaaggtcatgattttaatgtttatagtgatcatgcttctactattgcaaaattaaatgatgagattgcccagttaaatgttcaacttaaaacttacaaaagtttagagaggtga

SEQ ID NO: 136005 - DNA, 728 bp, Zea mays
  unsure (1)..(728): unsure at all n locations
  Clone ID: MRT4577_55514C.1
ggggaccctccagtctgccctggatgcctgcaggttgttgttgatatgatggacaatggatgtacaccgaatgcagtgacatatggcacagtggtgaatgggctgtgcgtaagcggattatacgataaggcggaggcctacctggtggacatggttggtaaagggcttgtgccacatttctcggtgtttcattcagttatcaggggttgctgtacagttgggaaagtagaagaggctgcacaaattatgagtcggatgcttgatcttggagtggttccgcatgttgagagctggagttcagtgatcaggtgcgtttgtaaggatgaggattgtattgaggcagaattgttgcagattgtgggaaggcagcgtggttcaaacatgatctctgacagagtaccttaagtgatttcacttgacatatgcaaaacaaactattgagctttaatctctgttggatgtaaaggaacaattctgcaagaagatagcagtagatgtggcaaaaactggacagcatgaacaattttcttgctgaagtgcctctagtggagtattaggagcatcatctgttttttcttgctgggtagcttcaataaggtatatgccatctcctgatagaccataatacgaatcatagtaccacaggcaaagccttgttttatttagccttttagggatgtgntttggttgcaatgacaggacgggacgggatggagacgatccctcag

SEQ ID NO: 136006 - DNA, 375 bp, Zea mays
  Clone ID: MRT4577_55515C.1
ggcaaaaggagtgataccacacagatagaggtacacattacacaactggtgaacaagttcagacactggccacaagaaaaacaaaccaccctgaagcctaccagaaccgggtaaaacgggaccagaatcgatcaaggcaaccagagcgggggcttaccaatttacccaagagtcacaaaaggcatcacgtagccggtatcctgaaggaacaacagtgcgaaggaagggcttagggcacgagcacgggatagtgagacactgaaagagatcccatatgggatagccggagcagagtgcacctgtcagaataaccataggtccgggcaacggtctataaaagctatggacagactatgacctatggacctcgcacaa

SEQ ID NO: 136007 - DNA, 491 bp, Zea mays
  Clone ID: MRT4577_55516C.1
gggggcccacataacagtctgctgacattccccaccgcttaaaacgcagcttgtccccaagctgttcttcgcatgaccaccaggatctcacacatagattgagaaattgccttgtccactactgacagtacccaaaccagaggtaataagaccagcgacagcaccaattcctaaacgaatgagaccgaggccagtgccgacaattccaacaccagcatctaaagcaccgatttccgaccctgacctccctccatcaagctggcgagtgcactttccaacccataggaaataggcagagcagtcataatagatgctagggaaaaattcctcatgggtgagtgcttgctcataaggcacaagaagacactcgtgtgacatccagaattctgttgttgtcattatagggtgacaaaaaatgagtccagcagccgacctgaattccaggacttcagtaactcggcgagccaactctctgaacttgtcatcttgct

SEQ ID NO: 136008 - DNA, 532 bp, Zea mays
  Clone ID: MRT4577_55517C.1
ccggtcgggattttccaacgaccagtagcgcccaagcaagatttacctgcccatcgatcatatcgtcaactggtgccggtagctcgcgtcaccatgagcttccacggagtgcggcggcggcggcgtctccgccaagacgtctggtgcggaggtggtcgggctgagcgtggaggacggccaagagggtgatcctcaaggacaagacggacgccgagcatcgtggtgctgcccgacggctccgtggtgaccgcggattatcgccctaaccgtgtccggatcttcgtcgacatcgtactccacacgccccacatcgagctgagactatataatgtagccgctattgcgtttccttgccgcggaacttgaaataaatatacgatactatgatataacgcgagcatgctgaagactgcctgtgcgaatcctcacttatcaagtatatgcatcacataaacgttattccaatgtgtcccgcttccaacattaatactatgaaaggggcggacctatgagctccgacttttgtcctctt

SEQ ID NO: 136009 - DNA, 197 bp, Zea mays
  Clone ID: MRT4577_55518C.1
gccggccggggatcaaacatgaacatggatctcttggttctcgcatcgatgaagaacgtagcaaagtgcgataactagtgtgaattgcatattcagtgaatcatcgagtctttgaacgcagcttgcactctatggtttttctatagagtacgcctgcttcagtatcatcacaaaaaaaaaaaaaaaaaaggccccta

SEQ ID NO: 136010 - DNA, 564 bp, Zea mays
  unsure (1)..(564): unsure at all n locations
  Clone ID: MRT4577_55519C.1
attgggaccctcgaggccggccgggaccttcactacanaactagccggacaagctgaacaaaatgtgtaagagcttacgaccgaacgacggacaaataaaaatcgggcatcgatgagataggcgacttcgtactcgccaacgtccgcggctcaaacttttcccccttctcccaattcccgcggccgctcgcacccgtatgaggacaccaggagggagggctttgcaatgccacatcggacagcgcggtatccaggtgggaaacgcgggatgggagctggactgccttgacgatgacatctaggatgacggatacatgtaccggagacaagaccattgggggagggaaagatgctttcaacaccttcttcaatgacatgggggctgggaagcacgcgccccgcggtgtttttgctgaccttaaacccactgaaatggaggaggagaggactggaacctaccgccagttctgccacccgtgacaactcttcagggggaaggaggatgaactcaacaactttgcccggggtaactacaccattgccaaggagattagggacctatgc

SEQ ID NO: 136011 - DNA, 2739 bp, Zea mays
  Clone ID: MRT4577_5551C.1
aggctttgctctgagggtactatacattatctaatccaatcatactgatgcctttaaagctaacagtactactttaaatagtgtaccacagtaggtttgagaaaaaaattaatagcataccatctttcatagattggttggctcaatgcaatatgcgagtggcaagaagagtttgttggtaatatgagttctagggaatttgttgatactatcacccggatcttctaggaagtcgtgtctttagctgcaaaggcatataaagagaagcaatcaaaggagctgcatggtcgtgaagtaagacttgacttcgctaaaggaagaagtacacaaactcctcgcagcggcaatgatggatctttccagaaggctgctcggggtaacagcagctcaatatttatccggggctttgataaaaatctttcagaggatgagatccggagctctctcgaacaacattttagtgattgtggtgagatgacaagggtctctatcccgactgatcatgaatctggtgcaataaaaggaatggcttacatagacttcaaggatcaggactctgtgtctaaagcccttgagctcagtggctctgacattggtggtggctatgagctttatgttgatgaagccaaaccaagaggcgatggccagcgtggtggtggtagatctggtggccgttctggtgggagatttggtgaccgttctggtggccggcgtggtggtggtagatttggtgaaagatctgggggcagggatggtggcggcagattcggtggccgacgtggtggtagggatggcggcgctgctgggcgccggggtggcggcggcgaccaagttcgacgacgtggtgcagcccagctgggccaacgaccacgtggtgtacgacggcgacctcctcaagctccgcctcgactccagctccggcggagggttcgtgtcaaggaccaagttcctgtacggcaaggccagcgccgacctcaagctcgtgccgggggactccgccggcgtcgtcacggctttctatctgtcgtcggccggggacaagcacaacgagttcgacttcgagttcctgggcaacgtgaccggcgagccgtacctggtgcagaccaacctgtacatcgacggcgtgggcaaccgggagcagcgcatcgacctgtggttcgaccccacggccgacttccacacgtacgccgtgctgtggaaccccagccaggtggtgttcatggtggacgacacgcccatccgggtgtacgagaacgccacgctgcaccaaggccacggccacggccaccaccggcacggcggcgcggcggcggaggccaacggcaccaacaccaccaccaccacgctggctgctgccccggcgccgttccccgggccgcagccgatggccgtgtacagctccatctggaacgcggacgactgggcgacgcagggcgggcgcgtgaagacggactggtcgcacgcgccgttcgaggccacgttgggcggggcgacggggtgcgacctagtggggctccgcctggattgcaactgcgggggagcacccgtggcgacggccctgttcccggacggggaggcgaacgtgcaggaccacgtgtggaggagactgccgcgacgacacggagacccgaactctggaatcggaagggcaatccgacccagtggagactgaaggcaactgcagctaaagattgatcctgggcctcgagaaactaaccaaaggagcagtgatgtggagatccgtggaaagacctttgagtggtggttgtgggaccaccagggcagccatccggactgctcttggatgtagttccagaaaagggttggaatacatagacgtcaaggatcagcagccatgggctaaagcctttgagcacaggggctctgacattggtggtggctatgagcttaaggttgatgaagccaaactgagaggcgatggccagcgtggtggtgggagatgtaggggcgtaatggtgggagattggggaccttctggtggccggcgtggccgtggtggatttcgtcggcccgccgccggaaggcatgtacggctcaatctcgaaggcggacgagtggtcgacggaaggggggcgcgtgaagagggactggtcgcacgcgccgttcgaggtcacgttccgggaaggtgcgcgtggacgggtgcgcctgggcgggcaacgccacggacggcgacgccgcggaggcgcgccggtgcagcgagtcctcgtggggcaatggagggccgctactggtggaaggagaaggagatgtcggagctgagcgtgcaccagagccaccagctcgtgtgggcgcgcgcgcaccacctcgtctacgactactgcgtcgacaccgaccgcttccccgtgcagccgcccgagtgcgccggccgctgagctcctgaccgacctacgtcgatccgtgcatggcatggcaatggatctcgtcgggcggggtggaaatggaactgcttgtttctctcgctggaccgtgggggtttgtgttcgtgcgtctgcagcaatggtgtctgtctgtctgtagctctgtttccgcttattgaaggtcgcattgttggcgacccatgcgtgggtgaaccggcggtggtgtctcttgtagaaacaagtgaatgggagggattatgggaacgaagaacgatgctgcgctccgtttcagagatttgctactccactgtgttcagtgcttatgatttgattcctctgtacaaaggcatgatttctgttc

SEQ ID NO: 136012 - DNA, 360 bp, Zea mays
  Clone ID: MRT4577_55520C.1
catgtatgctccatattttagttttttatatgttgacctcagtagatacaaacatatttgctgtttgatgtttttgaaattatttagctcgtcttcaaaatgttgtctccaatcttattaaaaattctagtgatacatttaaaatgtgtactatggctcatttgtcttgatcaggcaatcctctctgtgttgtggctggaaaatggcttattctcagatattaagtttctactcctattttagttgattttttttcattagttaacttttttctaaaaaaaaggaaaccatgttctaatcgcatgctttactcttgttgtgttataggaagatgttatccgtaggatggatgtattgaat

SEQ ID NO: 136013 - DNA, 552 bp, Zea mays
  Clone ID: MRT4577_55521C.1
attgggtacctcgaggccggccggggctgctttccctcatctggtagctctgtgcgcagactactacacattgccgagcgatgacctggtcgtcccctcaggccatggggtgattccctaccccagagataggtgctcgctccacgattgtgtgatgacgacaccgctcgataggacggcggccctggaccactgcgacgtcagctccgggctccgcgaaggagccctagtggcgccccgcccgttccgccagagtcggggagccacgtccgggactgtgctcatggggcggccagcttacccgcgatcccctcctcagcaaactccgggaaaagggactcgacctcttctgtctaccggcacggatgcctgccctcttccactttaggagaatgcaaagcactgcagaagacgctccactgacagtagtacaccacgcctatctttatgctgcaatttgcgctgcaccagtcatgactctatcgaacttgcggaggttgatcaaagggttaccccaacatgtactccttccatccttgcatacatttcact

SEQ ID NO: 136014 - DNA, 256 bp, Zea mays
  Clone ID: MRT4577_55522C.1
cggctcgaggaaatctgcaaaccatccaaccatgaagaagtgagaggatcaaggcccgtatgctgagcttcaaagtctcctttgacactagggccaccatatgccccccatgcttgatgatgtgtccggtctcaacttcccatgcctgttaaatttccttctatccaagatattacagactttattggtatctatccagagattcatgcttccaccttgcagaaggtggttgttgaccgttgcggcatgctacctg

SEQ ID NO: 136015 - DNA, 3509 bp, Zea mays
  Clone ID: MRT4577_55523C.1
ccttcggcccttgcttcctcttcctttcactcctccgcctgtccccttctctctctgctcggttccttgatccagattccgcagcggtgagggcacccagcccgatcgtccgtctccgtcgatcccccgaagccctaggagagacccttgtccgcgtcgaattcgatcgcgggctgatttgatcccgagaattcgcggggggcaccggcggcggggaatcggatgttgtaggaaaggtcccggatttctgcgcgggcaggcgggcgggcggccatgcatctgaaactgtggaagccgctgtcccactgcgccgcgctgctcctggacaagaagaaccgtccgccgaggacgccgccggcaggggcgggcgcggggtccggcggcgggcggcggctgcaggagagcaagctgcgggaggcgctggaggaggcgtccgaggacgggtccctcgccaagtcccgcgacgcggcgctcctcgatggaggggacggcggtgccgaggaggggtccgtggggcggtcgcggtcgctggcgcggctccacgcgcagagggacttcctgcgcgcgacggcgttggccgcggagcgcgcgttccagtcgccggacgcgctccctgtgctggaggaggcgctcgccaagttcctcgtcatgtaccccaactacgcgtccgcgtcggacgtggaccgcctccgcgccgacgagtacccgcacctggacaaggtatgcctcgactactgcggctttggcctcttctcctacctccaaagctgcaaccctgcggactcgtcagcggcgttcacgctctcggagatcaccgccaacctcagcaaccatgcgctctacggcgccgccgagaagggcaccgcggagcacgacatcaagaaccgcatcatggattacctcaacatccccgagtccgagtactgtctcgtcttcacggtcagccgcggctcggccttccggctcctcgccgagtgctaccccttcggcaccaacaagcgcctgctcaccatgttcgaccacgagtcccagtccgtgaactggatgacgcaggtcgcgcgtgacaagggagccaaggcatactccgcctggttcaagtggcccacgctcaagatctgcaccacggagctccggaagctgatctccaccaagaagcggcggcgcaaggactccgccactggcctcttcgtgttccctgtgcagtcgagggtgacgggggcaaagtactcgtaccagtggatggcattggctcagcagaaccactggcatgtcctgcttgatgctggggctctggggcctaaggacatggactcgctggggctgtctctgttccggccagacttcatcataacttcattttacagggtgtttggggctgacccaacgggctttggatgcttgctgatcaagaagtcggtaatggcttgcttgcagagcccaagcggcgggacgggggcagggctagtgcggattgtgccggtcttcccacagtatctcagtgattcagttgatgggtttgatggtgtcctcgacgggctggaggatgataacatcattccaatcgaggaggggtcagcctcgaacagtcaccatgcaccccaattgcctgcattctcaggcgcatattcatcggcgcaggtgagggaggttatcgagagcgagatggaccaggacagttcagacagagatggtgccagcaccatatatgaagagagcgagagtgtttctgttggagaggtgatgaagagccctgtgttcagtgaggatgagtcatcggagaactccttctgggttgatttgggacagagtccacttggttcagaccattcagagcaatcaagcaagggaaaattgggctctccattgccagcatcctggttttctggcaggaagagtgctaagaaggcgtcgccaaaggtgccatccaaactgtcaaggagccctattcatgataaccatgttatgtcatttgatgcagccgtgaggtcggtatcacaagagccagggcctgagaaaggggatccggatgaagataattcacatattaacatcaagaatactcctatcagtgagattgaagaagataataaagatgctaaagtaaataagaggtttgtaaagttttcttgtgccaacgacactgctgaaggtgaaggcaatgcaacttctgtttttgggagctgtaccgcccgtgagaatggctccacatccgagatttgctcagaaagtcaaggggaaaccaaagatagtgcaatcagaagagaaaatgaaggtgacttccgtctactgggaaggagagaagcatataatggcagattcaatggtggaagattctttggagtagaagaatcggaacgagtgccaagtatggggcacaatgtatcattcactttggatgatagcaagctttgtcgtaatgcagatgctggggaaacatctgggtatggaatggcagatgacgatgacgacgacgacgatgcatacagtgactacgacgaggctcaggacggcaggaaagagcccgagatcgtctgcagacacctcgaccacgtgaacatgctggggctcagcaagaccacgctcaggctgcggtacctgatcaactggctggtgacgtcgctgctgcagctccggctgcccgactcaggggacggcgagggggcggcagcggcagcggcgccccccctcgtctacatatacggtccgaagatcaagtacgaccgcggggcagcggtcgcgttcaacgtgaaggactgcgggtccggaacctccctgatcaaccctgagaccgtgcagaagctggcggagaaggagggcctctccttgggcgtcgggttcctgagccacatccggctcacggacagccagagacacggcgcggccgacgtggggctcagctcttcctcctcgccagctgcggcgagcggccgccgcgagaagaagagtactcgcaagaacgctgtcgtcgggaccgaagtggtcactgcttctctcgggttcctcaccaacttcgaggacgtctacaggctgtgggcgttcgtcgccaagtttctcgactcgtcgttccttgagcaggagaggctgtcgtccattccggaggatgcagaaagatagcatcagatggtttcatagtagtaactgaaagtggggtgtgggggtagaagaagagagatgccatggcgcttgtgcgtagtattgttttttttccaaatgcctcagcatggaatcgaggtcttggtggcgcggcttttatatttcttcattcttatttccatccttttctaggcatgcaacgtttttgtttgtagattttttttggagatctatatgtaccagctaattattttgagcatcctttccatgtacttgcttgtaagttgtaaattggctccattggacatgaaatagatttgctcgcttgtatgattcttgcggcatgaatattgaatagcagcatgatataggtgataaaaaaaaaaaaaaagggcggccgctcgcgatctagaacc

SEQ ID NO: 136016 - DNA, 1959 bp, Zea mays
  Clone ID: MRT4577_55524C.1
tgaacagtcaccatgcaccccatttgcctgcattctcaggcgcatattcatcagcgcaagtgagggaggtcattgagagtgaaatggatcaggacagttcagatagagatggtgccagcaccatatatgaagagagcgagagtgtttctgttggagaggtgatgaagagccctgtgttcagtgaggatgagtcatcggagaactccttctgggttgatttgggacagagtccacttggttcagaccattcagagcaatcaagcaagggaaaattgggctctccattgccagcatcctggttttctggcaggaagagtgctaagaaggcgtcgccaaaggtgccatccaaactgtcaaggagccctattcatgataaccatgttatgtcatttgatgcagccgtgaggtcggtatcacaagagccagggccggagaaaggggatccggatgaagataattcacatattaacatcaagaatactcctatcagcgagattgaagaagataataaagatgctaaagtaaataagaggtttgtaaagttttcttgtgccgacgacactgctgaaggtgaaggctgtgcaacctctgtttttgggagctgtaccacccgtgagaatggctccacatccgagattttctcagaaagtcaagcagaaaccaaagatagtgcaatcagaagagaaaatgaaggtgacttccgtctactgggaaggagggaagcatacaatggcagattcaatggtggaagattctttggagtagaagaatcggaacgagtgccaagtatggggcacaatgtatcattcactttggatgatagcaagctttgtcgtaatgcagatgctggggaaacatctgggtatggaatggcagatgacgatgacgacgacgacgatgcatacagtgactatgatgaggctctggatggcaggaaagaacctgaaattatctgcaaacatcttgatcatgtgaatatgcttggacttagcaagaccacacttagattacgatacctaatcaattggttggtgacctcattactgcagctccggttgcctgattcaggggatggcgagggggtaccccttgtttatatatatggtccaaagatcaaatatgaccgtggagcagcagttgcattcaatataaaggactgcaacactggaacctccctgataaatcctgaaactgtacagaaactggcagaaaaagaaggcctctccttgggcgtcgggttcctaagtcatatacgcctcatagacaaccagaaacatggtgcggttgatgtggggttaagttcttccttgccagcggcaaatggccgtcgtgaaaagaaaaatagcaagaatgctattattgggaccgaagtggtcactgcatctcttgggttccttacaaattttgaggatgtctacaggttgtgggcatttgctgcaaaatttcttgattcatcatttcttgagcaagagaggctatcatctattcctgaggatacagaaagatagtattagatggttccagtttatggctattgcagctacttcataatagaggagggtggcaccagtgtaattgaaacgaggatagtagaagagatgtcatgttgcttctgcgtattgttttttaacgtctcagcatggagtcaaggggcaatacttggtagtgcggcttttatatttcttcattcttatttccatccttttctaggcatgcaacgtttttgtttgtagatttttttttggagatctatatgtaccagctaattattttgagcatcctttccatgtacttgcttgtaagttgtaaattggctccattggacatgaaatagatttgctcgcttgtatgattcttgcaaaaaaaaaaaaaaaaaaaaaaaaaaaaaaaaaaaaaaaaaaaaaaaaaactcgaaagagggcggccgccgactagtagtacgtcgtcccagaaataaaa

SEQ ID NO: 136017 - DNA, 335 bp, Zea mays
  Clone ID: MRT4577_55525C.1
aaggttattatagaagcttgtgtgtgccaatatttttttgtttattttgaagctctcttttcattattagtttttggcacaagtaatgtaaatatgaccccgttggttggaaatgctagatgcaacacctggaaaaagaaaaataggtggcttgatccaaaaaaaaaaggccccgtgcaccttacaaaaaaaggataatttgccgggcacagcgtcctcccaaaaggagcacaagacacagtgttctctttgttactgttgtcaagctgatatgtgcaaccccacgggaagatgattatatgatgttggggaagaacttctgggggggagggggc

SEQ ID NO: 136018 - DNA, 1014 bp, Zea mays
  unsure (1)..(1014): unsure at all n locations
  Clone ID: MRT4577_55526C.1
aaatcaaacacttgaaagaaaaattctttactataattaccactaatatttaaatgcattattttaagttgatggttttgaggtgttacaccatggcggcgcgaactagagctccatgcctctacgaccaccatcccatccctacgaatggaatgccggcagaggatgacatggttactactccggggggtcagcatcctcatcaaccccgacagcaaacgcgctgctcgctgtggatggccaccatacttcatcgacgaagacaccggtcttccaacaccaacgccggcttcaccggtaccggctcggactccatggaatccggccttcaccttcctcccgagcgtaggcaccctcaacgctaatagtggaggaggcgccttcttctcccctggcaagggggataccccttggaattaaaccaggagaaggggcaaggggtcggcagtgcccgtgggggcctcgaccggagcgcccaaggctaggacgctctcagccggcgcgccctctgctgacgcgcacgtggctggtgcgccctcggccgatgcacccttggtcggcgcgccctagttcgccaccatggctaggatgctcttggccggcgcgccctcggccggtgcaccctcggctggcgcggccacatcgactacggcaatggatggatctccacggcaacagcggcgacggcgggtggcgtccattggcggcggcggttacagggcgccggcagctgtagggcgattagggtttccctgtcgcgcctcaaataggccatgcacctctgttgggtcggcctgcaaggcccagcaccgtctaccctccccctccttactacgccatnagttgggtcggtccctaggcccaatgtccgcctccccctgcgccaatgggctgacctacaagttggcccatctagcactcccatacacatttacctttatatttttanagttcagttctaaattcgcaagaaaaacctttcagtctgaaaaaaaaaaaaaaaaatttgcggcc

SEQ ID NO: 136019 - DNA, 782 bp, Zea mays
  Clone ID: MRT4577_55527C.1
tggtaccctccgagtcctccgggttgaagttttctaccatagtaactaccaaactggagcaggttttgatcattgttctccagactattcagatgttcttgcaatgggtacaaaaagagaacactgatgctatcagtggccatcagatttctcttggcattgaccttattaactcaaatagacaaggaagttctgtagtgatgaccccctttccactagctctcaaacatcttactgtcctcaatcatgcaaaaggatgaggccagaggatcatagcaatcagctccatggaactatgggtaagctttcttccgcatcagcattttctgatggtttgaacacaaacaaagtttcagctatgaaccctagaattggtaccttggctgacgtacaattgttgatggcccttgagaaatcaaaagcttcacaacaaatgtttgagtttgactatgttacgtcacaaaataacatgatccatgaacgtactgggcttgctctgcaaaatattgctgacaaaggatttattgctctacctaataaacagttcccaagcttcgctgcacagaacatacctttgcctggcagtactgtgaaccaattgggagaaagtaataccttgaggaatggagtgcatcaaattcaaccttgggaaattacatataggctacatgactctagagacaatttttctttaccagggaacacacagttctcgaatggcacagtgaatccatcctcagaaaactatatttcagagtaatgctattcatgaacatcaatgc

SEQ ID NO: 136020 - DNA, 107 bp, Zea mays
  Clone ID: MRT4577_55528C.1
atgctttcgtggtcatcgtggtcacggtctggggtcggtcaaccagttcgcctttggccttcttacggtatacttgctgcgggcgagcgggaaacagaaaacgggcc

SEQ ID NO: 136021 - DNA, 261 bp, Zea mays
  Clone ID: MRT4577_55529C.1
cctccagtcagcacgtctgtcgccgcgtccacccttgcgaccgacggctctcgttcacctcttcgccgccatacgcgcccgccgtctcccagcgagccggcagccgcccgctatcccaggcttcggtttcgtgttcgctccgccactgtgacagatggctgcggggggcgggcggagctagctcgccttggcgctcgccgccgcgtggagtccctgcgcggtggtctccgcctcatcgtcgggtgatcaggaacgcggaag

SEQ ID NO: 136022 - DNA, 328 bp, Zea mays
  Clone ID: MRT4577_5552C.1
ggggcaacatcaaaaaacagccaaaagctttgattctcccaggcccggaacccaggatatatatcaaacaacggggggggggcaccaggaaagcccaaagcaacacccttggcaacaacaaaattttttttggaaactaaaaaaattccaatatcccattttacttttccaaaggggacaaacaaaactgccaaacatttgggtatggttttggaacaaaaaggtgaaagggtccagctgcaactaacttgataggaggggaaaaagaaaaatgccctatcaaccattgttctggcaaaaatgcacttgggaatccaatttgttttct

SEQ ID NO: 136023 - DNA, 586 bp, Zea mays
  Clone ID: MRT4577_55530C.1
ccggccgggatactcccactaccctcactcagcgaattgcgcaaccgtgccctacatcgccgccgtgtgcagtttagtacgccggtacccaccaccgttgccgcgtgtcgtgctgccgtccgaggtctgcaagacgggtctgggttgatcgccgagctgcgtgagagccatacatgcgctcgaatcgggaaaccacccgcctgtgctcctgggattcctcgctggtgattccgttgaacagggaaccatctccgccgcgactaggtcaccggcgcttcttgtcccaatccgggtgttcagcaggtggagactgctgagcaggagctcgttgaaggtgaagagcaggtgatccaggaggagccgccgtataatgaagagtacgagttgatctaggtggcgtctccgagtcaacttgatggcgccaaggaataatattagttcgttttattattatcatttatttttgtaagacttccactatgtaataatgacacttgtgacatttatctctatacactttgtcattatatgtgatcttcttttttggcgcaaaaaaaaaaagaaaaaaaaaaaaaaaaaagcggcc

SEQ ID NO: 136024 - DNA, 402 bp, Zea mays
  Clone ID: MRT4577_55531C.1
atggccgatcctaaagatctcaacgacgttccttcaggtagtgacacaagaccaactatacataatttattggccactgagcgaaaggaatttgaagactacataaagaagctggacaaggaggggtccttttatagccccaagggacctaagaaccattggagctccatttggaaggccctggttgccatctgtccgcgagtgcaccggacactgcacaatgcaacggctacagatcgcttgattggctgcttttccgcttctgggggcactggactgtccgcgggtggcacccgactgtctggtgcacttgttgatcgttggctccggttgatgtgtcaactagccgttggtcagctagcacaccggactgtctggcgctccgcgcggactgtacagtga

SEQ ID NO: 136025 - DNA, 648 bp, Zea mays
  Clone ID: MRT4577_55532C.1
agaaagactccccacttgccgcagatatgtcgaccgccatccttcagctttcagagagtggacagcttcagagcatccatgacgagtggttcacacagccaagctgcgccaccaatgatgagagcaatgtgggtgcaaccaggcttggcctcggaagcttctgggggcttttcctcatctgtgccctgatctgtctcttcgctgtggtggtgttcttcatacgagtctgctggcagtacaagcagtactccaattctgaagatgctgacgagtccaatgaacctggcgctgatggtgctggcaaaagacagcggaagttgtcacgccttggcagcttccaggagattctaaagtttttcgacatgaaggaggaggaagtcatgaagagctcgatgaaacgacggccaggtgagaaagataaccatgctgctggattctagatgcgcaatcagtggcttcagcatagaacatgcatccccgatcgacttcaacgctattttttatacgacgatccgagaatctgtcttttatcacggttattagaattttgcaaagatatacatgcttggaaaggctactcatgaccgctattttttatgattacctgaatttaattataagagtttactaaaaaaaaaaaaaaaaaaa

SEQ ID NO: 136026 - DNA, 225 bp, Zea mays
  Clone ID: MRT4577_55533C.1
tctcttttcttctttttttttacaaagaaatcggggggtcattatgaggtggggccaaaggttgaccccgtttgaaggaagatgccactctcaagcccactgatcccaccctagtgcctctcgaatttgtagagaagaactggccgctcttcgcctttgttctctcggacccattcccaccccttcaagaaccggaccctcaatcaaatccggtcaggaaggacc

SEQ ID NO: 136027 - DNA, 272 bp, Zea mays
  Clone ID: MRT4577_55534C.1
cgacgacggcgtcggccgcgtcaacttcggcgacgccggcagccgcggccaggccgagacgccgttcaccgtctacagcttgaagtacgtcacgccgccctctgtgccacgttccatcgcgcggttcttgtcgcttgcttgcttgctacaacccaccgtcgacggcgacgagcgactgatccccctgccgtgcgtttgtgcttgtgcagcccgacgtacaacgttagcttcacgtccatcggcgtcggcagcgagtcggtggcagcggagtt

SEQ ID NO: 136028 - DNA, 194 bp, Zea mays
  Clone ID: MRT4577_55535C.1
cttttcttcttttcttttttttttttagcataaaaggagatttttacattaaaagggggagctctacactctacacctaactacataatgggaagacgatcggctttgtcatcctacagaatccaggtcttgctcatacatacaagtttgcacatgggttactaatgacaaaaattttcaccttataacatttg

SEQ ID NO: 136029 - DNA, 441 bp, Zea mays
  Clone ID: MRT4577_55536C.1
ggttaatgaaagaaaagagtgcatatatgtaccttatgttgtggtttctaagtttataattgagatagaagataggcttttaagccgttttgctccagttatcagactttgtaaatcactgttttgctcagtagagtaaagcaccagtttggatagaaaataggcttttaaactacaattgctcaaaggctgcccctttttgttaatatgcagatcattcatcaaatgtgggaaagaaatgacatcagggatgtactctctgcgatggaaaggatgggtgatcatgctgtcagtactttgctgctctttcttttgtacgcaataatcagcatgttaatgattgtgtgatttctggtaattcaggtctgtgctgatatggctagcgttctgatggaaaaaagtgatgtaatcacacttgatttatgtacctctatcctacct

SEQ ID NO: 136030 - DNA, 742 bp, Zea mays
  unsure (1)..(742): unsure at all n locations
  Clone ID: MRT4577_55537C.1
cgctgcgcgcgcccatgggcacctcctgcatcctgtggcccggcggcagcgtgtggccgcgcgcacccttttttttccaaagacacaacgctcttccttgtgggggggggcgacaccnncctccttnccnccccctaatcccccgcggaggagaataatggccagcgcgctgcgcgcgttcctcaactcgccgcacccgctcgtgacactgagcgacctgtctgcctacggcgcggggggcgccatactccgggaccacgagtccagcaactacttcagggctctcagtgcgctggccagggcgccaccgcggcgccggaagcaaccggagatcgtgtggcagttgcccggcgtcgagcggctgcagcagtattggtggccggggatcgccggcaccgtcatccccgcaccggtggccgtcctcagcaacaaggagctggtgtccgaggcataggacttcacgctgcgttccttgggtttgctcgcttgagcaatgtaacattatttggttctttggttggttccgcacgaggtacatagagaatgcacagcttcttttggtgtttgcgttcgtgtaaaaactgtaataatcatgcatagcgtaggacggtaggagcgtgtctggtttggtgtcctgatccgcggctgctcaataagacaatgggctttgtcttgggttcctgcgaaggaacggatgagttaacatgtaaacttgtttcaatgaagccttagaattcttaac

SEQ ID NO: 136031 - DNA, 983 bp, Zea mays
  Clone ID: MRT4577_55538C.1
gtgcggcgctcgaggcggccgggttcgaatacaagcgcacagaattgcatcattatcgttagctgccacagatggagatcttccaagtgacgacgatgatcctgcagcatccgttactcacatacttcttctctgcactcctgctcacacagctgctgacggcgcctattgcggcggcggagacaacggtgaaagtgagcaccacccctatcttccccgagatcccacaaggccaggcgagaaaggacttccaagtgctggtgcgcgtcgaggcgccggcgcgtccagaggcgcgcatccccatcgacgtcgtcgccgtcctcgatgtcagcggcagcatgaacaacccggcggcagcgccgacggagagaacgagaacgacgtcgagttcctgacgccggcgatgcggctcctgttggaggaggcgcgaaagctgccgcgctggcagcaggctgcaacgacgacggcggcgcccacgaacgtccagtacgcgggctgcgtcggcggcggcggcttcgagatggtggaccggaggctggagctgtggtccaagatgaagcgcgacgtgcagctcctcgtgtcggtccaggagcaggcggcggcggacgaagaggagcagcacctcgccgccgtcttccaggaggcgtcgctggcggccatcgaccgcgcgatgcaccgcgacatttacctggccgcggtttatgcgagcaagcagacgcgatgccactcggtcgggtgccaacaagtgaaggactgagaactcgatcggcaccagtagattaagtgggcatgacgtcaataactaattgattacctacctagccgcttgtactagtcatgctctactttatattactttaaaagatacatttcgttgtgtaatcatcttatggttcatcatcgtcatgtgctccaatatatactgtctcagatctatattcatcactggcagatctcaatctagctagcaccactcgtttatc

SEQ ID NO: 136032 - DNA, 341 bp, Zea mays
  Clone ID: MRT4577_55539C.1
gctaacaacaactcgtctatgagtattgttcactacactctccgtacaaggccaacggaagctgcagtatactgcacgacacacacaaagcttggtttcaaactaagcagctcttcacctagacgcgctgtactccacgcccatcgtatgccctcgccccttgactccgatgacattgtccccgcccaacctcctataacaggctcatgatgtcacctttcaccacactgacctaatttacccatcattcaacccgaaaaaccttggctgatgacattgagcacgggttccgttcacgatgcgcactttgccgaccagggatcccctaagggtgacctcca

SEQ ID NO: 136033 - DNA, 127 bp, Zea mays
  Clone ID: MRT4577_5553C.1
acagggataagccttaagagtggatttaatactcaaacctctgttttggattgacaggccttggtcggctagtgtaaacatgccattgagacaacatagggtcagcaacatatacaccttaaaaatt

SEQ ID NO: 136034 - DNA, 272 bp, Zea mays
  Clone ID: MRT4577_55540C.1
gctcgggagggagttgttttgcaaagactgccctttattttaccagaaggagatgttcaacagacacattgggggcaatgtgcgccttagaagatgatggggtgagatcacccacagaggtgaaacagttggaaggggaaaaaacacatctatgaggaggaagagcgcgcattaagacagaccacacgctactggacgtatggccgcgcttggaggaaatgatcctgtcacgcacatacaggatgtgcaccaatggaacggataaaagacaa

SEQ ID NO: 136035 - DNA, 219 bp, Zea mays
  Clone ID: MRT4577_55541C.1
ctcatggaaatgtatcttatgctcgaatgtagtccatcatatgtaagacggattaatccaggggggatcagcctccaggtgatcgtgcatctgaaaattcgtgtcggtgtgtcgtccctaggtccagtcaccgtgcacagggtctgaagatcaagaagtgtgtactgtcctgtacaagtctgcagacatcaactcatcaccccgttgtctgcatgacta

SEQ ID NO: 136036 - DNA, 404 bp, Zea mays
  unsure (1)..(404): unsure at all n locations
  Clone ID: MRT4577_55542C.1
gtnattatagggtgggttttttttttggggggggggggggcaaaacaacaaccccaaacatattaaatatccccaaatttattaatacttcccctcgtcttaaaaacaacccccaaattacatgtcccccaaaaaaacccacaactttgtagttccccaccccccctaaaaattaaaaaaccaataatatttgctccccccctccccaaaaattaaaaaaaaactctcttgtttttcagaacctccaaggtaacaaaaacacaattgaacagtttgaatcttcaacccttttttaaaaccaatccctataaaaaaaacttctttatattttttaaaaaaatctctctaaaactctaaaaataaatccccccctcttcaaattttccacgaaaaatcacaatttt

SEQ ID NO: 136037 - DNA, 148 bp, Zea mays
  Clone ID: MRT4577_55543C.1
cttcggctcgagcgctctccaacccctttttataatcccggcccggcgcttggtcgcaaggcatctttgcctatcgccagtggacataacactgggacgcaaacatggacactggtagcgctctgcgtacacaagcatccaatgctag

SEQ ID NO: 136038 - DNA, 675 bp, Zea mays
  unsure (1)..(675): unsure at all n locations
  Clone ID: MRT4577_55544C.1
aattcggcacgaggcggcgctccctccctcccgctcctccgccgaggtctgtgatcttctgccgctcctccgattggattcctcctcctccggcgttgcccggccccgcgccaccgggctcctctcctctcccgatcggaccggaccgcaccgcgccgggcgtgccctttggcgctgccgccaaatgcccggcgcgcgcggcgctgccgccccgcccccgctgcctcgctgcgacacgggtgcggggcgcgacgtaggattctgacaccggggatctttgcgcggtggagttctgggcccctcctccgtggaccgtggcggtgcctcgattagcaagcggcgcgcgcctgtcgctcgaccgatcctgctcgcgcttcctcggattccgatgcaatgcgcaccgcgggccgcgcggctcctcttctgaccgatctcggaggagctctgagatttctgtcgcatcagatgaggatgcaagtatgaaggtttctttgaggtggtacagttttagctgccaatggaggacccaaataaaacgttntctgacgtagttaagcttttgacatcatggctgccgcgacgctccaacccanataatgtctcccgggacttctggatgcccgatcacagctgtcgagtttgctatgactgtgattcacaattcaccatattcaa

SEQ ID NO: 136039 - DNA, 393 bp, Zea mays
  unsure (1)..(393): unsure at all n locations
  Clone ID: MRT4577_55545C.1
attaggacgttttctaatatttattacacgtttacggtacaactgtatttgaattttgtggacagcctgtttggtgtaaagctatttaatattttttttttccccgtcccataatgagattgatatttgacaacgagtacttgaaccaaatttaaagatcccagttaacggcggnccgncgcacccaaaaagagaaaannngagcagcacgcaacaaaacgaagggggcagggcactngnnnggncacaaacncaacaaaactcgacgctgcaaccngngggcngggcgaacnngagcgacgacgcggngnngnngacgccggggaagcccgcggagagcacggcggggcagcngacgaagaggnggaagcngccggagacccagcagccgac

SEQ ID NO: 136040 - DNA, 701 bp, Zea mays
  unsure (1)..(701): unsure at all n locations
  Clone ID: MRT4577_55546C.1
ccggccggtcgaccttgctctagaggaagacgatggagtttttaggattgtcatccatgaactcttgtatattgatggagtgctacatcgagtgggaactattcaaaaaaacttggtgactctaccatattgcagctcatggtcaggtatgtaatttgtaatctacatatctatatcagtctaccatctcgctgtccttggtagtcgaagtaaggttgcattcatttatgaaccatgtagccataagacataaatagaaaatatcatgtagtttgctatgttttattgcacctttatgtaatgattaaacaatagttttgtataatctctatacctgctataatccgattttttttacacaattttcatttgctaattcgctttagtgctggataatttttgttatatgttggagaggaacacatcctctacaatgaggaagcaaaattttgaggggtcctttgtactctcttgtgaacaagatcatagtgtccgcatgccattaattgagagtggtacgtgttgtgaatctgccctcccaaaaatctttttatattgcttccttcatttctagcaatttagggaacatgttttgtacaattgctgcagaagttagttcgccaggtacatgtttgctatctttcaaacattttgatattgaaaaaatctatggagcttgntttatgactcgacgtaaattt

SEQ ID NO: 136041 - DNA, 687 bp, Zea mays
  Clone ID: MRT4577_55547C.1
gtttccggcgctctcgcttgctattgccctcgcgccaccgtcgacggcggtaggagaagacaccgccctggctgctcctgatgtactaccctactgcaccggcatgtggtgtatgtacggccgtgctaatgcaatctcttcatcgtcgctgccgtactagaggactcctccgatctgcgtcaagacttctaccaccgtggcggaagagatgattacctgagctgttgagaatgaccagatggcttgcatatgggagtatctgctacgtgacctatacggcatcccgcttgtctcgagagagactggcaacgagatcctccgtatgctcaatggccatggaaatggcgactatcatcccggaggatctctacttcctcatgaaaagggcgctggagaatatgaatcatttgtggaagaactggaatgaccaggactgcttactcatactatttcttgtagagagcatgatccaacgtcttgcccgctactacagtggtacctagaagctctgccccaactggaagtactagtccactacggcgagcactctgtggtcctaagcgatatcctccgatggcttggtctgtatcacctatgagcttgctctaaatatggatgaaagtacatcttgatatgtctggagctggatagatggacaggtacctccctttttctatgtttacttgg

SEQ ID NO: 136042 - DNA, 738 bp, Zea mays
  unsure (1)..(738): unsure at all n locations
  Clone ID: MRT4577_55548C.1
ttttgcttgcgacacgtctgttcctgagtctgctcatcgctggatgaccatctagagcggtcgtcgccaccaacgccgctctcctcaccaggaaggatgacggattctccatctacgccgacgagcagagctcttgtcgtgatcccatgtactacgaggaagttgaccacccacacctaccagacaagctgttggacaagatcgagttcgccggcatccccctggcactcgctgcctgccacatgtccctgagtgcttgtgcatctaataccatggctcctggaacgggtatgacaaagagatcatccactggctaaatatcgatactgctagcactgacaaccatacccgtctcactgaggaggacacttcgcataggaaacaagacgctcaaataacacaatccactacatgatcacatcaataataaggtggaattcgagaactcgatgtagaactactcctacaacctgcactagaccatcaaggacgagaatactgcattccagctgccggtcgatgacactaacaatatcgaggacgtcatctacgccttcatcaattcgttggacgacaaccagctcgtcgaggcggacgagttcgaggactagatgaacgagctgtagagcctctgcaaccccatcatcgccaagatgaacagagacgcgggtgaacacatggngcggcgctggcggcatggacgaggacgcccccgccggtagcggtggtcctggcccc

SEQ ID NO: 136043 - DNA, 421 bp, Zea mays
  Clone ID: MRT4577_55549C.1
ggccgccccttttttttttttttttttgccttctccggcggcggtatggtcgcccgcggatcgcctcgggcgtcttcctcggagtattccgagcgcgcgctcttgtctgggaaggaagcggcagcgagacacttctccgccgtagcgtcgccatccatttagcgggagagagaagaaatcgggaggggagaggaggaggaggaggaacgcgatgaacgggatagaggggtactgttgcccctacccctgcaacagtaataggggagggggagcgtgggggcatgcgttgaagacaatctcaactcttcatcaagccggcaggtcactggcctagccgaactgtcctacgcgacaggtttcgattcccctcgacgcaatcgagtggtatgtatttctagtggagtgaatctactgttcacgt

SEQ ID NO: 136044 - DNA, 490 bp, Zea mays
  Clone ID: MRT4577_5554C.1
tcttctaatacgactcactatgaggcacactactggacctgcagactagagctcctcgcttgggatcatcatgtattgagcgaggcgggagcggttaattggatgtgaagaacgactcaactcatgcctgataattacgggccgcgctactgtgacctttgacgatggcagggtgacaggatctttcattagagcatactgaatagtatcgaggaatccatctggtatggccccaaggattgcctcactttccatagcttcagaagcagcaatttttgctcctaccatcacggtgcacaaaatactgaatgattttgggatcacccccaatcttccacagaatattaactgcactaaaaaacaactgatcattgaatgctctgccatctttcgagatgtgcaactgagaagacagattccttgttgccccttgagatatggacattaatggaggcaagctcgttgaaaagctggttatgcttgaacacgg

SEQ ID NO: 136045 - DNA, 266 bp, Zea mays
  Clone ID: MRT4577_55550C.1
tgtaggcatgttgaaagatatctaatattaggggtcaaattagaaattattgtgctcacacaccaaaagtaaattttaaaggagatgcactataaacgcttaaacggtgtagaccgtttgatgctagaaataattttgacaacaatataatcatattgctacttttatctaaaaagctaacattatgatcatgtggaagtctgtgggaggacttcagttcgggtggaggcatgagatttcaaatgaattttttaggattgcgaaaa

SEQ ID NO: 136046 - DNA, 303 bp, Zea mays
  Clone ID: MRT4577_55551C.1
tggagttggggcgagggttactgctaactgggagtacgattgaggccgtgctacgggggatacgagcgtggtggaccggggccggtgaggcttcggattcgttggcagcttatctgtttggggtttggggggtggggggcggtgatgagtgggggagcgcatgagggttggttttgggggggggtgggtatgggcggggtgggggtggagggggggggtgggtggtgggggttgtgggtggtgtatgttgatggggtggtgtgggggggggtggggggggggggggggggggggggggggggg

SEQ ID NO: 136047 - DNA, 389 bp, Zea mays
  Clone ID: MRT4577_55552C.1
cggacgcgtgggcaacggtttaaaccgtagaacaagaaaactgactatttaatatagtagagatataaacggttcatttgacccttgtaactagattcatttaacaatgcagcactgtattttctatgatgatgcggaaatatgaatgctgccaagcctttttttactttcgaaaagaacacacttccatcttgtctctaaattctgcttgttgattttgaaatctaatctatgcctcctcatctagtccaccttgaaaagtagttctagggtacttgaatgctgggaagtggtaaggtcaggtcatgggctcatggcaaacctgcttactcttctactcccaccttaaacagtactacagtagtagttctaaagtacttaaatgctga

SEQ ID NO: 136048 - DNA, 282 bp, Zea mays
  Clone ID: MRT4577_55553C.1
cggctcgagccaataacccagttaggtattatagattagtatttttgctagttgcctacctactgagataaataagcacaatcttgcaatggatccaataacccagttaggtattatagattagtatttaagtttgctgtagattgtgtgtgtgtgtgctaagtaaaagttccatgattcacaattttagtattaacccatgttgcaaaagctgttactggccaacagattgtaatgatgtgtaccatataacacaagcattaactaggcattaacgtttgt

SEQ ID NO: 136049 - DNA, 139 bp, Zea mays
  Clone ID: MRT4577_55554C.1
ctaaactgtcagtttgcccgcttctctggctcggtttctgttctgtccctcgctttccactcgtttggtccactttaattcggtttgcggttcccctcatcatctcaaagaaaacactaaaggcagcatggccttgtaa

SEQ ID NO: 136050 - DNA, 267 bp, Zea mays
  Clone ID: MRT4577_55555C.1
gagactgttatgagatattgagtgcctccccttcctttctatgactgatagcaccaggcttatcttgacaatctatgtttttagcattatcacgtcgatcattatgatctctctctgtaacatctaccatatgttatgcagcaacaaaatttctgctggaatacacattgtggcctcttcttggaaaggctcgagcacgaaatgcttttaatgctccaaaggcattattcacgagggcctatgtcaggtcacaccctctccaaactt

SEQ ID NO: 136051 - DNA, 457 bp, Zea mays
  Clone ID: MRT4577_55556C.1
gaaccctccaagccggcaggccggagcagagcgcgctccaagctgaatccccccatctcctatcgccgtcgaaagccgcaggtaggctgcctcctcccttgccttccccaatccatccatctcctgcgccgcgcgtccgcgcgcgggatatctctctccggactgcggagatccagctactcgagcggttagggtctcccaggggccaggccgccagggcatggacgccgcaggcgtgtacactttagggacgcaatgccaatgtttttttcacgccgtggcggcgtggatgcggcggttccctcgcgatcggtgctcgtgtgatcgtgtctgttggaaatgtttgcagatgaccgtgggtttcgggtacctgcgattggaggagcgtccttcaataagcctttcattgcatagtgcaaattttggcttggttcggcctacatgagtttgcggattt

SEQ ID NO: 136052 - DNA, 1637 bp, Zea mays
  Clone ID: MRT4577_55557C.1
tacctcgaggccggccgggccgggctttcttcgcctccgaattccgatcaccaaaaaaaggcctttcttttcttttcgtcgccctctcggtgctctgcttcgctgcgtcgcccgcccgtctctaaaagccttgtgtggatcgtggacgccgacgcggccgcagcagcagccacgggacgggagtagaggcgcagagagagagaaagagagaaagagagagaggttgtgctcgctgcctgccgctgagagacggatgaagaagtgcccatcggagctggagctggaggccttcctccgcggccgggaggacgccacggcggcggcggcggcggcggcggtggccgagcagaagcctgcgcacgacgtcgctgcgctggcgccgttcggcgccggtggcgtgttcccctccagcgatctgtccgccttcagcttcgctgactcgaacaccctcaatggaactggaaacatccataatcacctttggtcccataaccacaacgtcaggcatcccgcagtctccacgacgatcgagtcgcagtcgtcgatctgtgcagctgcagcagcaagtccaacatcggctaccaacctgtacctgaaagagagccaggctctgggcggcacgagtggttccgactccgacagcgattcgctgctggacatcgagggtggcccgtgcgagcagagcacgaacccacaggacgtgaagaggatgcgacggatggtgtcgaaccgtgagtctgctcgacggtccaggaagaggaagcaagcccacctagctgaccttgagacacaggtcgaccagctgcgaggcgagaacgcgtcgctcttcaagcagctgacggacgccaaccagcagttcacgaccgcggtcacggacaacaggatcctcaagtcggacgtggaggccctcagagtcaaggtgaagctggcggaggacatggtggcgcgcggcgcgctgtcgtgcgggctgggcagcctggggctgtcgccagcgctgaacccgcggcaggcgtgccgcggccccgacgtgctgtccgtgtccggcctggacttccccggcgccgacgacgcctgcttcacggggctgtccccggcggagcagctgcagctccagagctcccccctgcagagcatcgccgccagcctcgagagcctggacaaccggatggccagcgaggtcaccagctgcggggggcccggcgtcgacgtctggccgtgggaccaccactccaacggcggcctgtccaagtgaagccggagacgccgggtgggagtggggtgagactcgcgccgctcgccgacggcacctatcctgtcctagtgtatgcgtatatcgatatgcatggcgggcgctagctatgaccatgagccgccgttatttctgtgttcgctggagtggtgaaagtgaacggacttgagtttttcagagtccctcgtctccgtcggtacatttactagttctgtaatagaactgactagcttaagctcgtgctactacatatatatatgtatgctgagagactgaactcgaagcataatcatgctaccatattatgtcatcattacatttctatctctaaaaaaaaaaaaaaactcgagactagttctctcctcgtgccgccgatatatttattccg

SEQ ID NO: 136053 - DNA, 381 bp, Zea mays
  Clone ID: MRT4577_55558C.1
gataattttttatcgatttttttttttttttgggggttttttattttttattgtttttttttaaacaaaaaaaaccaggtcattattttattttaagggaaaattaccgagacggggaaaaaattccacattgcaaagggctttgggggggtggatgtccatggaaaccacggtacagaaaagggggggagcacaccttaaaaggaaagcgatattatggaggggggcaaccaaatgcatgaattcttagggcgggggggaaaaaagccaaaaggaatcccccggggggaaagcccttgattggtcgttccaaggggggggggggcaaaaatgcaacccttggcgggaacatgtattctcactgggaagagacggtacttg

SEQ ID NO: 136054 - DNA, 736 bp, Zea mays
  unsure (1)..(736): unsure at all n locations
  Clone ID: MRT4577_55559C.1
gcgtcgacccacaggggaggaggagccctggggcaggtaggaggaggaggggcaagcaggggaggagaggaggcgggaaggaggcagagcacttcgtgaggattgcggacactgagccgacgaaggcacggccactgcaagggctgtggaagactttgaacccttaactgttatcagaactacctgtccatgtggcaattgggttaatgaaatgacaagttttctttgtcaagcaaagctgtatggtttggttcctgccatcgcttaatcccttgcacagatcgattctcatagtgttatgtcattgttgattaagagccatgaactgaagtgtactacgcctttgaccctgcagccatactgtgagtcttgaccatgaaccggtgtcagcaggaagcatgctagtgctgaattgcattatgcgaatgggtgcccaaaacaaccctaagatttgttttaatttcatcggatcttgatacttcagaagcttggaaaaatctcattcaatcatcccaaaacatttctagacacaaaaactactctatgactggttagtttcaaatgctatctgcacgcccccccataataatggttttnctggattattctcggttcactaaaacgctggggaattatcagttaactttccagattcccgatattgctgtgttgttatcaaccacttttttatgaggaaacaattgtgggaggctggatataacaccccccccccccc

SEQ ID NO: 136055 - DNA, 408 bp, Zea mays
  Clone ID: MRT4577_5555C.1
ataataaccactccggtaacgtgattattataatgcatgcatgtgtgtacaatcatgtgtcagaatgacgagcctagcacgctgtatatttgcacactaaatcaggttggggaggcatatgtatatggtaaactcacagatgaatcgtgtacggcatacgcaaggctaacatgttggactcagagccagggccaccatacgcagacgtggaggcgacgaacagtgctttttccagcggctggttctcagcctgaaatagtgcctgcgccgggctggggaaaccattctgtttgactgagccggcttcgtggctgaagagctgctacgcggcaaactggcctagcactctgcagtcggtgagcgagcagtattgcatgggtgcggtctcgatcatgggcgcttgatgct

SEQ ID NO: 136056 - DNA, 310 bp, Zea mays
  Clone ID: MRT4577_55560C.1
aaaaaacaaaacaataacaaaaacaactaaatttatacctaacatcaatagataacaacagagggtaaacaccctaacggtacacggccatacgacaacaacaagccttctctcactgcaacataccttaatcacccttgccatctcaacaatcgtcatccctatctttcccgcacccattcttacataccatcacgtcacaacaactgcaacatctcgagctacctgcgatctaccaagtctctctggcaaatctctctacatactctgagcaacaacaaatttctaacattcacccaacttgctacac

SEQ ID NO: 136057 - DNA, 165 bp, Zea mays
  Clone ID: MRT4577_55561C.1
caatcatggcgcgttacaacgcggctggaaacctgcgtaccaactaatgctgcagcacatcccttcgcagctgcgtataacgaaaggccggacggacgcctttccacagtggggagctcgaattggaaatgggccgcgcctcgtaccgggcaataaaaccccgcc

SEQ ID NO: 136058 - DNA, 709 bp, Zea mays
  Clone ID: MRT4577_55562C.1
gtaccctccgggctcggccggcaagcacaggcaagatgcgattctggagtctgacaatcgctgccaccagcttgctgtcgcaggcaagcgctatcaacgttgagcatgtcgccgacacgtacgacttcatcatcgtgggtggaggaacagcgggactcgcggttgcatcgcgcatcagtgttgggctcccaaatagcaccgtgcttgtgatcgaagcaggcccagatggacgtcaagagccgggcatctacatcccaggaagaaagggctcgacactcggtggcaagtacgattggaatctgacgaccactccgcagtccaatgccaacaaccgaacctttgcgcagaaccgggggaaagtgctaggaggaagcagcgcgctcaacttgatgacatgggatcgcacttcgattgctgagctcaacgcctgggagaagctcggcaacaaggggtggaactggaacaccttgtatcccgcaatgttgaaggctgagacgttcttgccatcaccagagtacggtacagaaggcgttggcaaaaccggtcccatccaaacgctaatcagccgcatcttccccaagcatcagtcttcttggatacctgctctgaacaatcttggtctcgtcaccaaccgcgagtcgctcaatggtcatcctgttggagtcagcacacagccgaacaacgttagccccaactacactcgatcata

SEQ ID NO: 136059 - DNA, 456 bp, Zea mays
  unsure (1)..(456): unsure at all n locations
  Clone ID: MRT4577_55563C.1
gggggggggggggggnggggggggggnggggggggcgattgtgtacctcgcagccggtcgggagatcgttcccagccgagacgaggaagaggagcatggtcaggcagctggagagtaagagcgagcgcagcgagacactcactatcgcaaccgtgatgcaagatatgatacgatagagccgacttcaaatggtatctgcaattgggcctgactccagatatcaggcgcaggaaatatgacggagtacagacataatttgatccataaaggtaccagaggactgtatttgccttccaactatatttgaatggacaccagagatatgtttatgagttcttctcaagggttgcaaaggatcgagatgctctctttatcgtgcaccgcaactcaagacgctctagaggagtggtgattgcacactgaaatttagtagtttggcgtaactgctgggatcat

SEQ ID NO: 136060 - DNA, 500 bp, Zea mays
  Clone ID: MRT4577_55564C.1
ctcgaggccggccgggccgagaccagcaagactcaaccaacccacttctgactgaccactgtgaccgcgcacgtggtcaccgatacggacacacagcaacgacgcatgtgccgcgttcggcgcctgcaccagcaccaccatgcctgtcctcgggtcaggatccctggctcatcccgacgaccgaccgtgttgtcgcatgtccggatgcgacgtcatcagccatgccgcaggcaccgtacaaaagatgatccccactacaatatgtccacagccctgatcgccccaagtatcttgggccgttctccgagcagacgccgtcgtacctgaccggcgagttccccggcgactacgggtgggacaccgcggccctctcggacgacccggatactatcgcaggcaatcgaggactgaaggagatccaatcatggcgcgcaatggtagccgccgtctccaaggtggtccccgacaacgtgggcgacaactccgcaacatcaccgccg

SEQ ID NO: 136061 - DNA, 320 bp, Zea mays
  Clone ID: MRT4577_55565C.1
aaccccggcgccaatggcttacagggccatggaaacaaataattctgaagggaggacaaactttgggccgcttctttaactgcatatgaaaaacgagggtctccctccttgcctcccttcactgaatgtagccatccggagaactttgagctgaccacggacacgaaccgttaaagctatgggagcgggcggaggacctatgtggtggccccactttaatgaaaaggctgcacccctactgccactgggagggcttcttacccaggttgaaccccccgggggggaaccttttgatgagaaaaaactcactttttccctgg

SEQ ID NO: 136062 - DNA, 639 bp, Zea mays
  unsure (1)..(639): unsure at all n locations
  Clone ID: MRT4577_55566C.1
ggggcgatcgccacgtttcataatggctcggttccaaatttctcccttcccaagcatggcgtccctgccgcagcccccgcgatccccttctcaagcctggcgtccctgccccccgcgatcgcgcctgccaagcatggcgtcgtcgcggccgttgcccccgcgatccccttccatcgacctgccaagcatggcatcgccccggccgttgccacgcccgccgcacacgccgcgatgagatcctggaccccccgcgacatcctcctccaccgcgccatggccgcccccgacgtcctcgcgcgccgctccccgaggtgggcatggtgcgcacgaccatcgcgggggtcacgacggcggcgcggttccaggagctggtggactggatggaggagtggaaggcggcgttcagggacaacagcaagtggacggagacggtgaacctggggctcgggagcctcgcgctcatcatgtccgggctgcttccgttcgccatcgacggggacctcgggttcgggaagcccagcctcgtgctaccctgngtgcgccatggccggctgggatccgcgtccgtgatgggtggtgccctgccccacggcgacatgtcgtggttcttcggcggcaccaggatgtggctgcggctca

SEQ ID NO: 136063 - DNA, 273 bp, Zea mays
  Clone ID: MRT4577_55567C.1
gcgtgtgctgatcacctcgcaagacgctctgccgcgccattgccgtgcctcgcgctcgccgcgctcgtcctcgcgggcgctgcgatggccatcacacgcgcccgcgccgcgccccacgttcggtgccggcgtccggtcgccctccggagggccgccggcctctccccgccgctgcgctgctgttaagagccctgcccccctggcgggtcccagccccgaccggctggcccggtgccgctgtctctggaccctcgccaacgctggcaagagcgt

SEQ ID NO: 136064 - DNA, 412 bp, Zea mays
  Clone ID: MRT4577_55568C.1
atcacaccactgggtcttacaccatacctccatgtacgtatcgagcgcacaatagcccgaccgacaccatgagggcgttgctagttgccctccctctcctggatctccctgggagcgcgcacctccacgtcatacaagaaggcggctgccgatgccaagcacaggctgcggttcatgcaccgccggcacatcatccgccacctccgattcaactgccacctccggagcatattccaccgggggaacaactgccgccgaagaaagatcccccatcgctagctcaagggcctccgactgagtgatatgacaaactcaccgtgccattaccctatctaagctggcttaccccatgcacaatcacagccacacacaggcccatgccaaaatggggatcctatcccgcgacccaagc

SEQ ID NO: 136065 - DNA, 107 bp, Zea mays
  Clone ID: MRT4577_55569C.1
acccatatcgcatccactaacactgctactagaactcattatactgaatccaacatggtgataggttaccttcgtcggattcgcaaatacctattccttaacgcata

SEQ ID NO: 136066 - DNA, 227 bp, Zea mays
  Clone ID: MRT4577_5556C.1
tgtttagttccagaccaacctggtaccctacccgaggatccacttaatgcttccttcgtacgctcctgtcatctctgctgagaaggcctaccacgagcagctgtctgtggctgataacacccacagtgccttcgagccatcttacatgatggccaagtgcgacccagtccatggcaacgacatggtctgctgactcattgcaccgcggtgatgtggcccccaaggct

SEQ ID NO: 136067 - DNA, 508 bp, Zea mays
  unsure (1)..(508): unsure at all n locations
  Clone ID: MRT4577_55570C.1
cattcttaatccatgttgcaacaaaacatcaaagaacgtgaaccagagaaagcacaggatcagctatatgaataatcaccgtggaaagaacagcctgggccaccattgcctcaaaccacgcgcatgaatttgtttgtgtgaaactgcactggagattgtagcgcccgatagggcgctgtcctgccctagtgacactttaaagcttatggactagattgtcacacatgcacaaggggactgaaaatgcactttactcatcaacttacgtatgtcagcatgaaaagttcttgagaaatattttctatgtttctctaaattgttggcctagcaaaaatgttggccacagtgatttagatagcaaagataatataaggatctgtttgaatgcaatagagctaataatagaatattcggntgaaaaattnctagtaaattagtcgctaacatgctaatttgctaaaaagnagnttaataggttaaactatttgctagacagttatatgttttt

SEQ ID NO: 136068 - DNA, 405 bp, Zea mays
  unsure (1)..(405): unsure at all n locations
  Clone ID: MRT4577_55571C.1
gttataccggccacacgcggcctccgaagttgctacgctacgctagtgttgaatattcgtgaaggctagtgttgtgcagctggtggatgggtcgcacaagatgttggttgggaaattcggagcttttcttggtacagatacacgacggtaaaggaaatggatattcaattgtgtagtagtcagaaagccgtctctcgctggactcggaaaaaaaaaggagaagagaacttacaggtaactgtagctgtgatctcgtttcaagcctcccggttggatgagatcatgagaatgagatgaggactgcctcaggatcggaaatgcangcaagcgagagacggcggctggcgtctggcgcttgaaaagatctttggaaaacggcttttggagcgagcaagagacggcagc

SEQ ID NO: 136069 - DNA, 461 bp, Zea mays
  Clone ID: MRT4577_55572C.1
cgcgtcaattaagaaccttgcttaaggggccccatcacatcggaaacaactccaaaagtgataggggggcttcagcagcaacgcccaaccccttgtatccacaaaccctgaatacacacaatttctgggagggttttattaacagacacggtgggcagggttaccccccccgagggcggggcgccatttatagcacccctaaagggctctcaccactgcaagtcatgcagaggaacccctccacaccttggatcttttaaaagaacgaagacttcaaagcagtttttgaaaaaagggagtatttcacaaataggaatagggccttttcagttctgaacaagattctcttcctaacaacatacacgaactgcccgtttgataaacctgcagggacgaaggacttttttttgactatgcaaagaataaaacacttttcaggcttttcaacaagcactggaatt

SEQ ID NO: 136070 - DNA, 588 bp, Zea mays
  Clone ID: MRT4577_55573C.1
gagcccgtcgtcctcgcggctcaagatctcgctcatcccccgccagatgcctacgtggtgtggatcatctacatacctcggcgatgatgagggatatcctgcacatccatggatggcaatgaggcaaccagattgacgccaagttctgcgatgtggtgtgcaatgaacatggcattgaccctaccgggcggtacactgagaattccgaccttcaggtggagcgcgataatgtctactacgatgaagcctcctgctgacgctttgttccccgcgctgttctcatggatcttgagtctgagacaatggacagtgaccagaccggaccctatgggcagatcttccgccctgacaactttgtgtttggggaatctggtgctggtaacaattgagctaagggccactacaccgagggtgctcagctcattgactctgctctggatgttgcgaggaaggaaactgagaactgtgactgcttgcaaggattccaagaatgccactcccttggtgggggtactggatcctgtatgggtacgctgatgatctcaaagatcatggaagagtaccctgaccccatgatgcttacattct

SEQ ID NO: 136071 - DNA, 524 bp, Zea mays
  Clone ID: MRT4577_55574C.1
gaaacgacacaaatctttttgtttttatatttatcagaacaaactccactcaattaggatacacaagatccggtttagagaaaacaaagcctacaacaagtgcagcatgtcagcctcagcttcgtcttcttcatccgcaaactgcacaggtccaagcagcatatacaccatcgccaattgcctcatctgcctgtacctagaaacaagcgagcgccagtccgatgagtcctccttggcgtcactgctcagtaggtcttctgggcgcaagttaccggcacccggcaaatacttgaggtttgagtaatcagcaggatcggagatgtctatcattaaatctggtgaaagtgagcgccccatcacttggacatggcagacacatatgtaatacttatcatctgtagattgtttctgtaatctccccagaagttcaatcttcactataccaccaatgcaaagggcaagggccgtggaagcttgaaagtttggcaacacattttccctgaagcatagggaaactctggcgg

SEQ ID NO: 136072 - DNA, 485 bp, Zea mays
  Clone ID: MRT4577_55575C.1
ccgcctcccgattcgctcgtcgcgccagttgcctgcatttggatatctatacctaggcgaagatgagggagatcctgcacatccagggagggcaatgtggcaaccagattggtgccaacatctgggaggtggcgtgcgatgaacatggcattgaccctaccgggcggcacactggcaattccgaccttcagttggagggtgttaatgtctactacaatgaagccttgtgctgacgctttgatccccgagctgttctgatggatcttgagcctgtgacaatggacagtgttcgcaccgtaccctatgggcagagcttgcgccctgacaactttgtgtaagggctatctggcgctggacacaattgggctaggggccactacaccgagggggctgagctcattgattctgttctggatgttgagaggaaggaagctgataactgtgactgcttgctaggattccaagtatgccgctcccttggcggt

SEQ ID NO: 136073 - DNA, 1374 bp, Zea mays
  Clone ID: MRT4577_55576C.1
aaaaaaaaaaaaacctcaagacaggaaaaaatatgcttgttacgtgagcggccgctacgtagctgcctgtgcctctttctggctccctgctgtctgcctggccggtgctcacagacacgcgcaagatggccggacgcacggaggaggctcgcaggagcggggagagggagacggtgtgcgtgacgggcgccggcgggtacatcgcctcatggctcgtcaagctcctcctctcccgcggctacgccgtgcacgccaccgtccgtgacccgcgtgatcccaagaacgcccacctggggcagctggaatgggccgcggagaatctccggctgttcaaggccgacgtgctcgacagcgacgcgctggctgccgcagtctccgggtgccggggggtcttccatgttgcctgtccggtgcccacggatagggttcttgatccggagtcagaagtactggctcctgctgtgcaaggtaccttaaacattcttcaggcttgctcagctaataatattcagaaggttgttgtggtttcgtctaccgccgctgttcatttcgacccaaattggcctccacatagacctaaagacgaggattgctggtcggacataaacttttgcaaaaagaacgaggactggtatatggttgccaaggttattgctgaaaagacagctctagaatatggagagagaaatggattaaatgttgttacagtttgccctactatggctttaggaccgctcctgcggcctatgctcaatgtcagccatgaattcctcatgtacattattaaaggaggtcctactatgatgaagaacattccatggcacatagttgatgtccgagatgtggctgatgctttgcttatggtatacaagaaagaggaatcgacagggagatacatctgtgcaccaaattgcatcagtgcaaaagatctggtgaacatgctgaagagggattatcctaattacaattatgtaaactgcgacaatgatatggtgcttaactctatagttacaccacttatgtcggagaaactgaagaatttgggctggaaaccaatgaagacactagaggaaacattattggatagtgttgaatgctataagaagatggggcttctaaaagatgctgagggatgcccttgtcgtcttcctcacctttttcatatggctatagaaaaatgaagaatactcaccattgcttcttgtgttacctaattactctttgaacattgttgggtatgtgttctaatcacacaccaataatgttgacattcaatgggttgtggttgatttgaaataaatgtttggtttcttatgtaatctatatggaacaaagtgcacctttcacttagttttgtatgtaagttgtcatccc

SEQ ID NO: 136074 - DNA, 694 bp, Zea mays
  Clone ID: MRT4577_55577C.1
gggactcgcccccggcctcctcccgcctcccagatctctttcgctcggcgccagttgtcggggaggggggggatctcatacctcggcgaagatgagggagatcctgcacatccagggagggcaatgtggcaaccagattggcgccaagttctgggaggtggtgtgcgatgaacatggcattgaccctaccgggcggtacactggcaattccgagcgggggggggagcgtgtttatttttactacaatgaagcctcctgcggacgctttgttccccgcgctgttctcatggatcttgagcctgggacaatggacagtgtccggaccggaccctatgggcagatcttccgccctgacaacttcgtgtttgggcaatgtggtgctggtaacaattgggctaagggccactacaccgagggtgctgagctcattgactctgttctggatgttgtgaggaaggaagctgagaactgtgactgcttgcaaggattccaagtatgccactcccttggtggtggtactggatctggtatgggtacgctgttgatctcaaagatcagggaggagtaccctgaccgcatgatgctgacattctcagttttccccctcacccgaaagtatctgataccgcggatgagcccataccatgccactccttttctgcccacagttgcttgagaatgcagatgagtgcat

SEQ ID NO: 136075 - DNA, 1100 bp, Zea mays
  Clone ID: MRT4577_55578C.1
cgggtattgcctggatccctcttagtgctgtagaaaaccaaaatttgatcaaagctccttcagatgctcgtttgacctcctggtatcaagggttttgcctcttggatgctatagattttctgcagcttccttctcgggatgtttcaaagcccttgattattccaatctgtgatgttataaagtctcagtcaacaggacaattggcagcttatggaaaattggaaactggagccatccaaattggttctaaggtgttagttctaccttctgggcaagaggcgactgtgaaagccattgagcgggactctaattcatgcaccgtagcgagagctggtgataatgtggcaatttgtttacagggtattgatggaaaacaactaatacctggcggggttctttgtcaccctggtttccctgtgcctgtagctaaccacttggagctgaaggttctagtcctggacatcactactcctattcttgttggctctcaggtggagtttcacatacatcatgtgaaggaggctgcaagagtaacaaaaattgttgcattacttgacaagactggcaaaccaagtaaatcggcacctcgatttcttaaatccaagcagaattctgttatacaggtcacactagatggagctgtctgtgttcaggaattctccaagagccgagctcttgggagggcatacttgaggtcggctgggcgcaccattgctgttggcgttgttaatcggataattggccaagatcagaactagaagacctactacactcttctgaaatctgaaccaaatccttgtcgttgccttgtcgttgctacggttatactctacgtagtagacactggcaacatgatgttgggaaattttgtttagcagctgcttatagccattccattgtattgagttatatgtgtaagatagtagtcacagctgagttgtgttctaacccccggcttttgcaaaaatgctatggaatccttcgaagttatatatgctgactacttgtgattcgtgaccgctgattcgttatcgttcattactatatgtagtggacccaagtaaaacgatgttggcaaattttgtttagaaattgcaaaa

SEQ ID NO: 136076 - DNA, 749 bp, Zea mays
  Clone ID: MRT4577_55579C.1
ccggccgggaaaaaaaaaccctccccctctaaccacgcacatctcgatagaattactatcgccttctcatatccaccacaccgacaccgacaccaacactccctcaactcaacttcatacacaatgtccgagtgctgcaagcagggatcgttccacaaggacaccgccgtcggctccgagaccaagctcgccgaccgcgacgtctacgtgacgggcgacgagtcctcgtcggtcgccatcctcctcgtccccgacattttcggatggaggctcaacaacacgcgctgcctcgccgacaagtacgcaaagggagtcggcgcgcgcgtctacgtgcccgactttttcgatggagaggccgtgccgaccgaggtcatgtcggaccccaagctgcgcgaaaagtttgacatcatggccttcctgggcaagtaccacccgcgcgaggcgtcgtggcccaaggtcgaggccgtcgtcgaggccatccgctcgacgcagaagggcgtcaagaaggtgggcgccatcggcttctgctggggcgccccctcgtgcctctacctcggctcgacgcgcgccaaaaagtcggcccacgtcgacgccatcggcttcgcccacccctcggtcagcgagacttcggactttgagcacctcgacgccccctcgctcttcctctgcgcagagcacgacgagatgctccccgacgaagagcgcaacgccgccatcgacgtcacaaaagagctcacaagggaaaaggg

SEQ ID NO: 136077 - DNA, 629 bp, Zea mays
  Clone ID: MRT4577_5557C.1
agtatcacatcgctgcagcatatccaggcagagaattcataccacatcgctacgggaacgggggtccattgcatctgcagtccgctgaggcaacacaacaggcaagccacggatgcttcttctcattggcaggcgcaggttgttttttagtattgtattattgccagtgtatgatgctgacaccacaaccgctcccgctaaacgctaatgacagtgtttttttcccagctattgctctgtctgatgtttcaggggctcatgaaggagctcttcaccatcgcgtgttctttagctgcacggctccggggctgctgcacatggacgtgccaaacggtgcagcgtgcacgtgaggccataatggaggaagcatggcaaggtagaaagcctagccgtcgggtgactctggtgttgtaccgtcgtctcgtgaaaatatttctttgtacagcagatttgaaagaaatgtcctgctgctggtccatatcatcattcattcatgtggtatggaggcacttggtattgaacgtgtgaacttttgttgcacaatctcaaagaccaccactagagtatagttcatgtgaaactagtgagcttttgttacaccgtctcaaagaccatgtactagagttcat

SEQ ID NO: 136078 - DNA, 641 bp, Zea mays
  Clone ID: MRT4577_55580C.1
gccccccctcgagtttttttcttttttttcttttttttttttttttttttttttttttttttttttttttttttttttttttttttttttaacaacacaaaaaacttttgggggaaggttctttcaaaagaacctttggggggcctatatgggggggaaaaggggggcggccaaaaacaggcaaactttgaaccccattttttttaaagcaacttttgtttaacaaaccctatttaaaaaaaggggggaaaatgtttttacaaaggggggcccttttttcagcggggccattgggttcgggccccccctccctaaaatccgggggaaaaaaacaatccgggaaaaaagggtttttttcgaaaacgggaaagcccaacccctggatgaaacccccagaaacggccgagcaggggctcacctttttattccggggccaactaaaaacgggaaaaaagggccaagcctttgtttccccctttgttttttgaccctgcccttgggggaggggaatgtctaaaaaaggaccccctggaacttttggaggaacaggccccacttttaaggttttatgtcaccccgcttgacaaacctcacacttgaggggggcaggggggtggcccttccccaattacaagggtaaa

SEQ ID NO: 136079 - DNA, 310 bp, Zea mays
  Clone ID: MRT4577_55581C.1
aaaaacaacatttaattggtgtgtattaagtaccagacagcggtttggcctgatacacactctaatggcattacaccggtcgtaatatctaatgtggtaggttgatgattatcgaaagttgacgagtctacttcttgttaggtagattaaaattcggtgcccacacaatttcaattagggccggacacatgctctggtccataaagttttgatactcaagggtgtcaccagggattttcttgatctttatgagatgataattaggtgtgattagaaatatttctggattttttgacatcacaccttttat

SEQ ID NO: 136080 - DNA, 1437 bp, Zea mays
  Clone ID: MRT4577_55582C.1
atggcgtcaaagcggaagaagcagagcaccgttgctgcaatcatcccgcccatcgaccccaacagccagcttccattcgctgaaggattccctgaagatttgttgagccgactatacatgatcttgaggggcagggtttcaaatgctggtgctcctgtggcctattctgcatggaacctaccgccacttaggccattctctgagtttgtatccaaccctcctgctcgcaacggtagtctgggtcatagagtgcgaccctctcctgaggatattgaggctttgattgctccacttcgagtcttcctgaggatgagagatgttgtgcttagcctgctggctagggtatcatccgactctacccgcaccgagccgatggccatcacaactgggcaagaatttggtgaagaggtggaaactcagaaacccgaaggtgcctgcccaaagcgtccacatcgagtgaacctaccgactgcacctatcgaggagaaaagaaagaagaggcgacttcagcgactgtcgtgcttggatcaggatgatggcccttctgtaccggttcctgatgatgtcccggcagaggccattcccgagggtattggctgcatgattgatgaggatgaagaggtagaagaagaagtcccgctgatacgcaagaacagccgacactatagaggcagcgaggggggtagcgatattccctctccagctctgtcggcacttgtcagtcttcaggagctttcaatgtcagattttgatcaagtactggaggaggtcatccctgaagacatgctatcagagcctcctgaagatgatatcccagctatctgttcagaggtaacccgagtggtgtctcgtgcatcgtcgaccttggaaggcagtcttccatgcaaagacgctgatttgagtcatctgactcccatggaggtggctgaggggccttcagccttagaggtggctaatgcagaagacctagcctccaagagtggcgctggcagctacccagccctcgagggtgttgctggtagcgatccagttcttgtgggtagtgcaaactacaacctagcccccgaggctgtattgtcggatatatctcaacgatgctctgaccttgaggagaagtattctcaaagtcaagccgacttggcccagacttctgcttttctagacggtgcacgctctctggactcctctcttaatgaccaacttgactctgaaaagatggcgcgtgaggaggagaagcgagcacttgttgcctctcgtgacaatctagacaggttgtaccgtgacgccagtaactccttgaccttcttggagaggagccaccgcttcaccatgtctgacttagatcatcaccgcaatgagctgcaggcgtctcaagatgaagttctgcgacttggacgactactatcgactaaggattccaccatcaaggacctgtga

SEQ ID NO: 136081 - DNA, 378 bp, Zea mays
  unsure (1)..(378): unsure at all n locations
  Clone ID: MRT4577_55583C.1
ggcgattaaaacggggcatttttattggtccaaaacaattccatttttttttattcgttctgacagcagcaggagaccccacgaggggccccccacgggacaaaacacaccggatggggtaactggggcatggggctacacgaacaccacacttacgggacagattaaagctaaccggtcgaaggaagggaatttattcgtccaacaacaacaaagtcccaaattaaaaaaaaccccgggatggcgccccggcccaaataaaacactgtttgcatgctggcacggggatgcttgcttaggcgtccacaaccttgtngtccttggacgcaataacaaaattcttgggcagggccggggacacctttgggatgggccccc

SEQ ID NO: 136082 - DNA, 304 bp, Zea mays
  Clone ID: MRT4577_55584C.1
cccacgcgtccgcccacgcgtccgcgtacgcgtgggtttagcaccaggcaaacggggcgactatgccaacgcagtgtctctagagcactgtaggctctagttctccagaggcccgccacaaccacaagccaaggccacagccagtgccctcgccatggctcccaacctcagcaagaagacgcctgctggcctcctcggcgacgaggtggccccggtggagggactcaagccgtcgcggttcacccttaagggcaaggacctgtccgtggacgggcactcggtcctgctggacatgccgggcaag

SEQ ID NO: 136083 - DNA, 608 bp, Zea mays
  Clone ID: MRT4577_55585C.1
aatacaaaaatctgccgtgctccaccttctgctccccctccggctacggcggcgctgatctccggtaagccgccgcctcctcccgtaatattctagatctatacatgcatgtgtagggtcgaacggattgggttgcccgtgcccgcgcactcgttcttttttctctcggttcgaacggatcggattgattgacgatgctttcgtgtgtcttctctgtcgattcttatcaggtcgggagataggttcttcccccctcgcgaatcgaagagataaataaaagttatggattagtctttaccttcgtttagttccgttttctttcgatctgatccggaatttaagtgcctgctgattttgaaggttccaccggaattgggatgagttgcttgcagtatctactcatgacaagttcttgttccccctcctttgagtgtttatccgttaatcttggctgcaatctcgtgtgtgtgatttgtgattcgtgtgatgggagtgcagagatctctagcttttctgcgggggcgcgaatccggggggcggcgccatggtcgagcacctcgcgtcgatcttcggcacggagaaggaccgcgtgaactgcccgttctact

SEQ ID NO: 136084 - DNA, 328 bp, Zea mays
  Clone ID: MRT4577_55586C.1
gtgaatctcagtgatggtacgttgtcggcaacacgtaaacaggctgattctgctcatgaggaagcatccgcatggcgacgctaatatgatgttactgttaatgacgctagaacagctctgcagagagcggcgatagcacaggtacacacagataagaaactgcatgcgtgcgtagatgccttgacggtagagcttgctaaccgagtatctgtgaaggtcgagtgaattgcaagattacatacataacttaatcgaatggatattgcagctacgcgtttgatctcgaggcttcaggccactgaagcgaagtcgtagaaccatgagtctg

SEQ ID NO: 136085 - DNA, 189 bp, Zea mays
  Clone ID: MRT4577_55587C.1
taaaacttatatccaatgcttaagtcccaatatttgattgctctatctcagcacactctcctagtatgcatatctgaatattagaagcaagcttacttaaatatcttttccactaccgacacctacacattcttaaagtacttgactgcctgacatagtccatgcaccagttctttatgcacacatcac

SEQ ID NO: 136086 - DNA, 347 bp, Zea mays
  Clone ID: MRT4577_55588C.1
gttgccaatgctatctgtttcacacactttcttgctccccttgctaaaggcattcattgcaacttttgcattctagaaggctcgatgacaactgatcatgccatcacttacacccacaatactattgatggaccctcagtccattacttgatagctcgcagtgctgccaactttaacatcattcccaacagcaccgctgcttccaaaactatcggaatggatcttcctgaattgaatcgcaatctcactggcatatccttccgtcatcccaccaccaatctgtcatatgtatacctcactctaacaatcgagaatgtgtcctcctaccaataaatcaataactctat

SEQ ID NO: 136087 - DNA, 1204 bp, Zea mays
  Clone ID: MRT4577_55589C.1
ggcactacaacaaaggtttattcatccaagctgtataatttcatcattagcttcaagcacctgttaacttagagtgctccaatacgcttaggcccaattacaaagttacatataccaaaataaaactcgacaaggaaaattatctagtaccctagagtaaattttgaatagttggcgccaagcaggtaacatagagtgctccaatactcttaggccctttcacttgaaacatcgagggggaaatagctatgaagtatggccctttgacctatgtctcttccatggaggacaccactggagcctccaacgccgtgcagatttggcgacacagggtgtggaggcacactgtgactcaccatgccatgccgaggacgaagacgccgatggagacggcgatgcccaaggcagagaagatgaagggcgatatctgcaccacgggtgagcggcctctgtcggggtggggcgagaaacacgtatggggacgctggggacgcctgctccggcctcggctatatactgctccatcacaggtgtctgcctgctgtgcaacgacatccgctgagttgttgccttgccttcgtaagcttctccatgcggcaaaggggttgtctccctccgtgaaactcaatcccaaagtgcaaggcgacgggctcgtcccacgacgcctccatgaagtccaagctgcctatctcggatccagacccttgcttttgccttgaccatctctagcgcgagtccagcctctagtgatccctcacccgcacgggcgcagttgacgcagtttttgctgaacacccccaaatatagtttgggaaattaactgcacccagcaccttagtggattgatatcgtgcactgaagaacgagaaccaattggggaggtggatgggggcgaggcgaaggggccagctccgcctgatgtgcagcttcgggggccggatcgtcccgcgcccgaccgataagtcgctctgctacttgggcggggagacccggatcgtggccgtggacaggcacgcgtcgctcaccgaaagcaaatatggcgggtcggtcttaatgttcaatgatttaacatgtccctcatgtagaggctacgacaagaagggctcacctcatgtagaggctacgacaagaaggggtgcaataatgcagttgtacagtaacaactattttaattctgaaccggacgctgtgggtcgccggcggg

SEQ ID NO: 136088 - DNA, 211 bp, Zea mays
  unsure (1)..(211): unsure at all n locations
  Clone ID: MRT4577_5558C.1
ccccnnctccnttccagagcangaaacaccaaagggcggggaacatggaggacgcgaccccngccgcccncacaacacaaanncccncggcaccaagggacaaacaaagcaccgccacacgaggacaagcaaaccccacagccaagagaggaagcgcagccaacgcagaccaanggccaacccccccgggagcacggaagcacgaacacgg

SEQ ID NO: 136089 - DNA, 3212 bp, Zea mays
  Clone ID: MRT4577_55590C.1
gaatggccaaaaaaactgtcatcttaatcgcactttaaacacaaatctgttgatgcaaatcatacacttcaaaatattatgatttattgttggtgaaaaagctgtaattttttttcttcccctctagccaaaatgtacttccaccgattgattgtgtttgaccggttccgtagcacgcctccttgtcttgcaagcaggcgccgacgagtcaacgacactctgctgtgtcttttgcccagccatgctatgtactctactgagtagtataaaaggtgtggtgactgcagggcattcaaaacatttcggaaccatagcgatgtcgcattcgcatcgcacgcacccggcaaagcatgtagatgcaatcgcaccactggatcaagcgtggagacatggaggtacatgagcagagggaggaccggctgagcaggctccccgacgacatcctccactccatcctccgcggtctcccactcaagcacgccgcgcgcaccagcgccctctcgcggcgctgggcgcgcacgtggctgggtgtcggcgatgcaaaaggtatccccagaggctcagctcaccgtgtgctcaccgtgtgcagccagaatcctggggacggaagggtctaacgcaaagttttggaagggtaaactggccccatctggtcccccaacacttacccttcgttgagagagttaggtgtcgagaatgtcatgccgtacttttaatcgtaagctatatactgctccatcacaggtgtctgcctgctgtgcaacgacatccgctgagttgttgccttgccttcgtaagcttctccatgcggcaaaggggttgtctccctccgtgaaacttataccaaaaacagaatgacacaataccgaaatttcaggtccaccaccacgtaacaggtcgcccccaggaagaacaacatcggtaactccagcacaaaagatctccaaggatcatcttacaaccagagaattataaagccgcctgcaggcatctctcgaacaaagtcaattaacaccttcacatcttgttactagagaaaatgaatagcagactggttaatcactagtacccatagatattcaagttcagacttccgatacaaatatttatggactaacggaggaggcaactaagaggctacgtcacgcagatcgcttctcatataaatgccttcttgaaaatagaagtaatcataccagtacaccttttcaactgtattatttccagtacaataaacagtagggtaaaggtaaatataatatataggccccaagaaagcctacaaccttaactactgctgttcattaatgtaaagagattgcccgttcccgacctcaatattgatatatagttctttacctacatcaaatgagtactataacaagctaaagttcttttacacggaaaaagtagcagtacaataaaacctattataacaaaaaaaataaaataaagggcacaagtatttctttactctttacttctttagtccctcaattttgagagataggccattccctacctcagttttgagagatagtccattccctacctcaattttgtcatcttgcttctctttatatgttctttgtcatctgaattttatgcaaaagatcaatggtacctggtctttaggccactgaattaaccaaaattctgtcgagtctgttggtgatatatcaagcatggcttattctttgacctcctcaaaagccggtccaggctcatagctacaacagttcacacaaagttcagatgacaaagaacacagcatacaagtattcaaggtgcgctgtcgaaagtatactgtaactcaattttaggcaagaaggcaagccgaacttgttaagctttatggtaggaagaagatatgcaaatgtgatactcctactcacattgaattaaatgggcagcaaaatgtaggaaaatgcaatgaaaacaatgaattccaattcagagtactgagcagtttatcaaactgttgcaaattattcagaatactgagcactcgaagcgtccccattcacaccatcgcagtaacgcaaaggaactaagggaatgtcaatatcataccagacccttgcttttgccttgaccatctctagcgcgagtccagcctctagtgatccctcacccgcacgggcgcagttgacgcagtttttgctgaacacccccaaatatagtttgggaaattaactgcacccagcaccttagtggattgatatcgtgcactgaagaacgagaaccaattggggaggtggatgggggcgaggcgaaggggccagctccgcctgatgtgcagcttcgggggccggatcgtcccgcgcccgaccgataagtcgctctgctacttgggcggggagacccggatcgtggccgtggacaggcacgcgtcgctcaccgaaagcaaatatggcgggtcggtcttaatgttcaatgatttaacatgtccctagcatcagaacatcaagataacacatgcttaaaccagtatccagcagttttggacaatgaacaagaagaaattggagaaaatggagcagaaatcacaacagtattgcatacctcatcacattacagcagttttggacaatgcacgtaaaacatcacattagtacaaccgtcgcatattcaaaatttgtataggtgtataacagatatgatttgagccaaaatatttctcatagaccatttatcacatttgagttcccctagtggtacattgaaccgaattttctccattattttgatgcagtaaatggataaataatggttgcagagcttaacttcaatctttctcagtcatgtggtcttattatgttgtcaatactaaaagattatggatgtgtttggtatgaagtcaaagtatggcatgcctgaggtgttaatcttaatacaaaaaacattcggtggtgttacactgcccaaattatctctcatatatgctggtataaaggtaatactatcaatgcacaaaaaatacttaaatggttagcagtgctttcattgtgtatccaaaatgtaatccatttatggacagtaatgctcaagcagtcctgcttcttgtttttacttataatttgaatagcttccctgttattagcatacttctgaaatctatcaacctggttataattttggtattctacatgtcatgcagttggtctaggtggaagtccagatgagaactgccaaaatacaacctattatta

SEQ ID NO: 136090 - DNA, 2105 bp, Zea mays
  Clone ID: MRT4577_55591C.1
caaaactgctgtaatgtgatgttttactatgaaatgtaatgtgatgcatcaaaagaaaattagtatgatgaggtatgcaatactgttgtgatttctgctccattttctccaatttcttcttgttcattgtccaaaactgctggatactggtttaagcatgtgttatcttgatgttctgatgctagggacatgttaaatcattgaacattaagaccgacccgccatatttgctttcggtgagcgacgcgtgcctgtccacggccacgatccgggtctccccgcccaagtagcagagcgacttatcggtcgggcgcgggacgatccggcccccgaagctgcacatcaggcggagctggccccttcgcctcgcccccatccacctccccaattggttctcgttcttcagtgcacgatatcaatccactaaggtgctgggtgcagttaatttcccaaactatatttgggggtgttcagcaaaaactgcgtcaactgcgcccgtgcgggtgagggatcactagaggctggactcgcgctagagatggtcaaggcaaaagcaagggtctgctatgagcctggaccggcttttgaggaggtcaaagaataagccatgcttgatatatcaccaacagactcgacagaattttggttaattcagtggcctaaagaccaggtaccattgatcttttgcataaaattcagatgacaaagaacatataaagagaagcaagatgacaaaattgaggtagggaatggactatctctcaaaactgaggtagggaatggcctatctctcaaaattgagggactaaagaagtaaagagtaaagaaatacttgtgccctttattttattttttttgttataataggttttattgtactgctactttttccgtgtaaaagaacttttgttttggatacttctcttttcatgtaggcatatatcagtatatcaatctatgtttcatttactcttagttctttcttccttttgaccagcagctcttgtctttgtagtctgagctggaatatctatccttcatgtacgttaaccccactggttttgctggagtaagaaaaagagttgaagacttgtacaaggcccatgaacaagaattgcaagattacgatactataacaccacatctgcttgatgtagtgttgtgctagcatgctctggtgttccctatatatttcttacacagttttctaactcatttcatatgggatcgtacaattaaccagtctgctacacattttcattagttccaaaatttgatggtggtattttaattcattaggctgatgcctatagggagctttacaattagctgcatgtaacaaggttcttagataactgtaggatccgagataggcagcttggacttcatggaggcgtcgtgggacgagcccgtcgccttgcactttgggattgagtttcacggagggagacaacccctttgccgcatggagaagcttacgaaggcaaggcaacaactcagcggatgtcgttgcacagcaggcagacacctgtgatggagcagtatatagccgaggccggagcaggcgtccccagcgtccccatacgtgtttctcgccccaccccgacagaggccgctcacccgtggtgcagatatcgcccttcatcttctctgccttgggcatcgccgtctccatcggcgtcttcgtcctcggcatggcatggtgagtcacagtgtgcctccacaccctgtgtcgccaaatctgcacggcgttggaggctccagtggtgtcctccatggaagagacataggtcaaagggccatacttcatagctatttccccctcgatgtttcaagtgaaagggcctaagagtattggagcactctatgttacctgcttggcgccaactattcaaaatttactctagggtactagataattttccttgtcgagttttattttggtatatgtaactttgtaattgggcctaagcgtattggagcactctaagttaacaggtgcttgaagctaatgatgaaattatacagcttggatgaataaacctttgttgtagtgacataagaagtttcgaaactgcaaggaattttaaatttgaatatttttc

SEQ ID NO: 136091 - DNA, 358 bp, Zea mays
  unsure (1)..(358): unsure at all n locations
  Clone ID: MRT4577_55592C.1
aaaaaaaaaaaaaaaaaagggcataaggtacggtacataaaaccaattcaggggaggtcgcacgtttgtgtgtcgatatatataagaaaggtcaccgtttgttccgatggatcaagggaaagagcaaggcgccggacgaggagcggccggcaataataaagagcggcagcagcttttttttttctttatttttttcttatggtgcacagccaggcgcggcggatcaagaaggaggacgaggaggccttcagggagcgcctcctgaaactgcgcctgctggagaccnagaccaacgccggcggcgtggcctggcgagccccccactttctgtcgtctgttcgccgtgccggcagcgcca

SEQ ID NO: 136092 - DNA, 257 bp, Zea mays
  Clone ID: MRT4577_55593C.1
aaaggggcccttgggggggtttttttttaaaaacagggcaaaaaaagctttaatagtttgaataggagaggggggggtagctttattttggattccaggaaaaaccagcccaagcattcaaaaataagaaaagggcttcattcatttaaaggggaggggttattttggaaccatttaaccccccttttgggggggtttggaaaaacttttatttggtttccaagttgaaagggccaaaacgatgcgtttttttcacc

SEQ ID NO: 136093 - DNA, 360 bp, Zea mays
  Clone ID: MRT4577_55594C.1
gtgcagcataataagagtttgggtgacacaaataaataccaccattcggtcatacataggggggaacaaaatactcataaagagaaaaagacttcgcgccagaagggtttttcttttcatactaatgaaccccaacagcagcacattaccacaagggctaggaaggtacaaaaattccaaatcatggaataaaggagaaaaaataacaaattgtccatgaccaactaattaaacatagcaaaccccccaccgtcacttatcaccaactaatcccacggtgtttcagacaaaaccaatccttaccaggttccctcaccaccatgggaagcactggttctacctcaaattgaggacagaaag

SEQ ID NO: 136094 - DNA, 310 bp, Zea mays
  Clone ID: MRT4577_55595C.1
cgcgctggtcgtcgcaacaccctacagtgacgtcgtattaacgcgtccgcccactgcgtccgcggacgcctgtgttaacttctactccgaaggtggttggctcacatgcctcatcagaggccgtctcaatgttcatgttgagtggatgctgcttcaaccgcagtgccgctggtaaccccaagatatcttagcagcgatgaggactacgcgtgatcacggagagggacgcatccgtgatcaccttagacgtttccacattagaagtcgatcagtgccgtaccattttgctcaactggctatgactcctgaa

SEQ ID NO: 136095 - DNA, 472 bp, Zea mays
  Clone ID: MRT4577_55596C.1
tttcatcgctgtccccaactgtacattaatatgcaacacatgaactatcctgactgacccttaccccattaagtttaccatctcacattcacatgacgtgaaaatgacattgcttcgttgtccactgttcttccttccttcacctatctggctgcatcatcatggattttgacccattgttcctgaagctgaatctctcccctctccccatatcttaggcggatgatcatgtcctgccttaacttacgcctcctccactacacttggatctctgcaatacattttgttagcgatacataacccgcctccacggatttcgaacaccattcctcaatgtctcctccgggctcctgtgcctctcctccaaccggtgtactgattaaaccttctggacaccatattctcagcactccttagaatcccctaggaataaaccatccctcttcaaagatacgttgcattctgtttgctc

SEQ ID NO: 136096 - DNA, 475 bp, Zea mays
  Clone ID: MRT4577_55597C.1
cttagcctttgtgaacttgttgaccgtcttggtgccctattaaacggcgtgcttggtgagctccgcgctaaggaccaggctcacggtggtctggattctcacggcaggagatggtttgcttcttgttattaagcgccatctttgcggactaaagagggatcttgtacaaaatatcattattgaactaattcataatgcgacatggccttgcaggaggataccagtgccctgttgcatctggttcacctcttctacttatgtaggatattcatatgtatccaccacatcttattgtccttctttttggccctcttgtcctagccgtcttgcttgcatttgtactagccacacttgacccgcttctccgtcttcatctttttcctcttgaacgcctttttggacgttgtctcgtacttcattgtctactatgacctggttttgttctcgatcttgctcatcatcaaatctttatgca

SEQ ID NO: 136097 - DNA, 103 bp, Zea mays
  Clone ID: MRT4577_55598C.1
cgcgctcggacattcgctcgagcacagctgaattcccgcttgatgactaggacgatgtcaatggatctagtagagctctcatctatcaatgtctgaagtccag

SEQ ID NO: 136098 - DNA, 354 bp, Zea mays
  Clone ID: MRT4577_55599C.1
aattcccttccgacccactcttcctaccaaaacatctcccaatctcctcctactttttccttcttcacacctttcttcattcgaggcgcttttaaaaattcaccaagaaatcctttccccatcccaaacaaattatcataaaaaatcaacttcctcaataaacctttccactttcccctttccaaacttatctgctacttcttccactgtaaccaaccttttatcttcaccaatttattcccaacgacactcttacccaacacctttttcacttttaaaaccatacaatttaattggctattcctcttataatttcatactacatatcttaaacactttactatttcatcactt

SEQ ID NO: 136099 - DNA, 729 bp, Zea mays
  unsure (1)..(729): unsure at all n locations
  Clone ID: MRT4577_5559C.1
atnacccatctcacttatataccactctctaggaggacccagcaacacaacagccgagctttgcttaggcaagatgaacaggaagccaggagactgggactgcagggcggcggctttggcgctgctggctctgacgtccggcctggtgactggtactgctcctgcggcgcgcacaacttcgccagccgctccagctgcttcaagtgctccgcctacaaggaggaggccgctgtgaacagtggcgctggcggctttgacggcgacatgtcacgctcacggggctacggcttcggcagcggtgctgctggtgctggtgctggcgctgcccgtactaccaaccgccccggttggaagtccggagactggatctgcaccagatccggatgcaacgagcacaacttcgccagcaggatggagtgcttcaggtgcaacgcaccgcgggactctggtagcgctgccatgacctacgaaaactacttgcactgaggtgtaggatcgagcaagttcaaaagtctgcagcgccgaagaaagcgacgacaagaggagtcctcatcacgtcgtaacgtaagagagagagaggagtgagagagagtagtggatttgccaaaaaaaaaaagacggccgcgatgctctgttactagctagttntgttcaaccacccctctgccgtctcttctcttttattagatttggtttggttctcatagccctttattaccatttgggacc

SEQ ID NO: 136100 - DNA, 449 bp, Zea mays
  Clone ID: MRT4577_555C.1
atcctctttcccaaacccgccatctccccaggccgcggtggaggcgaagcgacgcgacagcgctcgtatccgagagatcacaaggaaggggacgacgggacgccgcatcgagccaagaggaaggagagatacggaggctgggcggagctcgggggacaaagaacatggcctttgtgccctatttgagggggatgtttgatagcctatacctatcaacggatgcttattcttacaagagccgaaaacctattcttttggaaataaaaggatcctgaatgaaataggttaacacaccagccctacttgggggggaatgtagaaaagctcaatggccacaggtggacaaattagggaaaaaggagcactctaaaaagggacgcttcaagacccggcataacaagcttaaggagaaaaagtcttgttaaaactcgaaactcttccaaatacga

SEQ ID NO: 136101 - DNA, 2461 bp, Zea mays
  Clone ID: MRT4577_55600C.1
ttcggccgggggactctgtgaaagggaaatgtgccgccatttcctgggaggctggtaccatttctctccggattctcagctttaatcacggtgcggcgtcagctcctcacagataggaccggcgggcggctgccggctttgtggcgttaagcagtggccggactgccggaggagggcagaggtggtcaggtggagttcgccagttcggagtcgccgattgagtcgggagccagagaggccgagaacggatgcttcctgttgcttgctgcgcacctcgtgggctggaagttgggcgtcagctaattttccgctccgcaccgactgcagccccgggcaccgtatccgctctttagcaatcataacaaacatacccgaaggaagccaacagatttcagtatttcacggtcaccatcaccactcaccagtccctcctacccgcttcccataaaatcttctgatctgtaacgcattcgtcgacgcccacctccgcttcgctctcttgctcttttagtcccatctcccatcccacctggaggcgaatttcgtctggggaaaaagtcggcggccatggccgggcgagactccctcccggagggttctctcttcctcgggttggacagctccactcaatcactgaaagctacggtgctcaataatgagctcacaatagtagcttctgaaattgttaattttgactctgaattgccacactacaaaactgaaggtggggtgtacagagacccagcagatgataggcacattttttcaccaaccattatgtgggtggaagctttggatgtgctgcttgagaagctaaaaccaaagatcaacttcggtaaggtagtggctgtttctgggagtgggcagcaacatggcagtgtttattggaagaagggcagccatgctgtgttatcctccttggatgctagtaaaagcttgttatcgcaactcaaggatgcattttctacaatgaactcaccattatggatggatagtagcacaacaaagcaatgcagagaaatagagaatgcagttggaggtgcactggagttagcaaaactgacaggatctcgtgcgtatgaaagattcactggcccccagataaggaagatctatcagacagcgcctgatgtttatgaagataccgagagaatatctttggtgagctcgttcatggcatctatccttgttggaagctatgcaagtattgatgaaactgatggtgcggggatgaacttgatggatatcaagcaaaggacctggtcaaagtctgctttagaggcaactgctcctggacttgaagcaaagcttggaaatctggcaccagcatattcagctgctggccgaattgctccttattttgtagaaaggtttcagtttgataagaactgtttggtcattcagtggtctggagataatcctaatagccttgcaggtttaactctgaatacccctggtgatcttgccattagccttggtactagtgatacagtattcgggataacaacagaagctaaaccaagccttgaaggacatgttttccccaatcctgttgagcctaatggttatatggtcatgctatgctacaaaaatggctccttgaccagagaagatgtacgaaatcgctgtgcagacaaatcatgggacgtttttaacagctatctggagaaaacgccccctctaaatggtgggaagttaggattctactacaaagaccatgaaatcctccctccacttccagtgggtttccatcggtacactgtcgaaaacctcaacgacgtctcatcagacgctctgttggagcgtgaagtggaagaatttgacccaccgtccgaggttcgtgccatcattgagggccaaatgctgtcgatgcgaggccacgccgagaggtttggcatgccgaaccctcccaaacggatcatagcaaccggcggggcatcctccaacgaaagcatcctcaagtcagtcgcgcagatcttcggctgccctgtcttcacagtccagagacctgattcggcatcgctgggcgcagcgctgagagctgcccacgggtggctgtgcaacgcgcaaggtagcttcgtccccatctcgtgcctgtaccagggcaacctggagaagacctcccttggctcgaagctggcagtcccggccggcgacaaggagcaggaccgggagctcctccagaagtacaccatcctgatgaggaagagaatggagatcgagagacgcctggtggagaagatcgggcgatcgtaggaaaaaaaatcatgaagcgctgctgaggctggcaggaccgaataatttgtgaataaatatggattatctcgatcgtaggaaacaaattcatggcaggaccgaacaattcgtgaataaaagtggattatcttccattacgcagaaaaaaaaaaaaaaaaaaaaaaaaaaaaaaaaaaaaaaaaaaaaaaaaaaacccacgcgtccg

SEQ ID NO: 136102 - DNA, 551 bp, Zea mays
  Clone ID: MRT4577_55601C.1
gtcgctcagtcctcgatagatggcttgggagggtcgtagaggtgtcccgatggtgtcatgaccttacccctcccccagaacttgggcggtcgcacgacaatttctcgccgaagtggaggaaccaccgcaattccgcccttcatcgtggcctggcctgtcgtcatctccaccgccggatgtcaaggaaaatgttgtctatcgctcgtagtttgcttgggacgaggagtagctcgaggagcagctcgaggggtgaggattcagtttttcagggcacaggttctaccatgaggagacgcagagcgctggcagaacattttcctccacatgatgatgttgaaatcgaggaaccagtggtagatgatcatgcgagagatgatgatgaagatgatggtggagatgatgctggagacgatgcttgtgtgtattctgcaggaatggattctgggctggtggtgattccccagctgggtctggaactttcgagttaggagaacgaggaagctgcattttgtggaccaccttcagagcttccactcgaatttaggttttga

SEQ ID NO: 136103 - DNA, 2174 bp, Zea mays
  Clone ID: MRT4577_55602C.1
gccggccgggctgcgccccgtcctcgagatcgttctcgcctccctccgctccccttcccctcgtgcgcagtgcgctcctcgagcaccccacactccagatctccgaacccctcccacatgccattgccattgcactgagcggcagccaatagccaactagccacacgccatggcgcagtcctgcagttggggaatcctcctcgccgtcctcgtcgcgggactcgcggcggccgtcgccgtcccgccggcgaccgcggcggtggcgagcatcgacctcggctcggagtggcttaaggtcgcggctgtgcatcttgccccgggccgtgctccgatcgctgttgtcatcaacgagatgtccaagcgcaagtccccggccctcgccgcgctcgccgacggcaaccgtctcattggggaggaggcggcgggcatcacggcgcggcacccgtccaaagtattcgcccgcgcgcgggacctcttggccaagcccttctcctacgtgcagtccgtcacggagtcgctcttcctcccctacgacctcgtccccgacgcgcgcggcgccgccgcggtccgcgccgatgacgggcaggtatactccgctcgaggaaatttgaagagctgtgtgaggatttatgggagcaagctctaactccagttaaagaagtgctgacacattctggcatgaagatcgatgacatctatgctgtagaactaataggaggagctacccgggttccaaaactgcaggctaagctgcaggaatttctgggtaggcgtggcctggataaacatcttgatgctgatgaagcaattgttctcggagcttcacttcatgctgctaacctgagtgacgggattaagttgaaccgtaagttgggaatgattgatggctctacttatgcttttgtacttgagatagatggcctagattatgtcaaggatgaaagtattgaccaaattttggttccaagaatgaagaaaatgccaataaagatgtttagatccatcagacatacaaaggacttcgatgtctctctcaactatgacaaagcttatgaactgcctccaggcattccatcacacaagtttgcagagtattccgtatcaggactgacagatgccagtgaaaagtatgcaaaccgtaatttatctggatccatcacagcaaatctacatcgggtcgagcgtcgccatggtgctccactacgccgcggggctcgccgatgcgcacgttggggcgcccgtgcgggacgcggtgatcgccgtgccgccctactttgggcaggccgagcgccgggcgttgacgcaggctgcgcagctggctggaatcaacgtgctttctctcatcaacgagcacgctggggccgcgcttcagtacgggattgacaaggacttctccaatgcgtcgcggcatgtcatcttttacgacatgggcgctggtagcacctacgctgcattagtgtactactctgcatacaacgccaaggagttcggaaagacagtgtccgttaaccagttccaggttaaggacgtaagatggaactctgagcttggaggcgttcaaatggaaatgcgtctggtcaactattttgctgcccaattcaataagcagctcggtgatagggttgatatccgtcagtctcccaaggcaatggctaagttgaaaaagcaagtcaagcgcaccaaagaaattcttagtgcaaacactgcagctccaatttcagtagaatctctgtataatgatgttgatttcaggagtaccataacacgtgagaaatttgaagagctgtgtgaggatttatgggagcaagctctaactccagttaaagaagatgctcaagctaatgaagatcgatgacatctatgctgtagaactaataggaggagctacccgggttccaaaactgcaggctaagctgcaggaatttctgggtaggcgtggcttggataaacatcttgatgctgatgaagcaattgttctcggagcttcacttcatgctgctaacctgagtgacgggattaagttgaaccgtaagttgggaatgattgatggctctacttatgcttttgtacttgagatagatggcctagattatgtcaaggatgaaagtattgaccaaattttggttccaaaaaaaaaaaaaaaaaacggagactagttctctctctcctcgtgc

SEQ ID NO: 136104 - DNA, 688 bp, Zea mays
  Clone ID: MRT4577_55603C.1
ttttgaattcggcacgagatggccacttcagacaatgttgtacgtgctggtttgacacctaaatacagagatgtgcaaactctctgctcaatgctaacatacaagcagggtttccctgaaattttgcgaggagttcctgtgcagccacacgtaaggcgctacacacctccatttaatgagtttgaggtggattggtgcttggtgcctccaggtggactggtcgtcatatccccggtaccaggtccatccatctttctcgtaatcaccggggaaggcgagattcaattggattttatgtcagatggggagaaagcagaggaaggtgatgttttcttcgtccccgcgtacaccgaggttaagatctctgcgtgtggccccgagtctgtgcagctgtacagggctggggtaaacagcagattcttcagctaacactgtaattgtagggaatgaggattttggcggttgtcgtaaagtggactaccctgtaattgtagggaagttttcccagctaagaaatatacgtgaaacgaaatgattagttagcaaaaggtctcatatactaatgtatagggagggctacgtgctgataaaagaataaactggttactttcatatcttgatgatttactgcaatgcagccttgcagtgcaatccacgttggatgcgctagaaagaaataaaaatgatg

SEQ ID NO: 136105 - DNA, 366 bp, Zea mays
  unsure (1)..(366): unsure at all n locations
  Clone ID: MRT4577_55604C.1
ggacacataccatcaaatgacgaccaacctgggcctacaagccagactagctagccaagctttgttcttcanaacccctaccggtgactggtcgggggcaanacccccctaactcctcctcntcaccgagggactgcaaccccaacttaacgccacctttctagctcgctacgccaactgaccgcttcccaataccaaggctcaccgctgcggccgggcagacgccctctctctttaccgcatcatgttacgcttccacctcgacctgctcaatcaccaaatacggtatgctctcaccgccgggccatgggacaacctcctcctgaacaaaaccgtctgtaacaccaagacaaactacgggccgcg

SEQ ID NO: 136106 - DNA, 492 bp, Zea mays
  Clone ID: MRT4577_55605C.1
gctgaattggtcggcaacccatactttagctgaatttttaacctatggctttgcggcccgcgtgttaccggaaatgctcctaacgcaggagtagagccgtgtgccatatctgctcccggcacgaatggtgtgatcggcttgcgtcgcgcactgacgctggctcagcttaatactgacctgacggaggttacccacagggcatacttcatcatcgagatcaacgggcagccattatggcgacatgacatggggcttgctgggaagactgcacctaaaacggtacagaccttccgagctgtttacccaggaaaaaaaggggatgacaagattgacagagaccttcactacatgggaagccagactcacagcctcatgcatactttcatgctcgaaggcggcgacttcactctttgagacggtaggattggtgaatctatctacggcttgaactctgctgatgagatcttctagatcagacacactggtgctggc

SEQ ID NO: 136107 - DNA, 282 bp, Zea mays
  Clone ID: MRT4577_55606C.1
ccgcaacagcagcatttcgcgcctgagatggtgcctggctcctaggaagtcatgcacatgctcgttcaagctacgcccatgggcatgatgatggcctcgatgcccctgcaagcccaggctatggttgatcaccaacctgctcaaggtatggcgccatccgtccatgatggaggcgcagaagctcaacctggacacacgacgcatgacgacaccacaacctctgccactcggcccttcgttgacgcagcagcagccttcacaagctgatacgattataatggc

SEQ ID NO: 136108 - DNA, 368 bp, Zea mays
  Clone ID: MRT4577_55607C.1
tctatgatgttggtgcagtagccattttcccagatggccagtatttgtgatgttacggtctataaatcgaaagaactttccttaagcattgacaatgttcaatgttccatactggtactggcaacttatatgtaaaaatctgccttcaacagttatagctgtatgtaaatgatgtatgataatgcattgagctatagtcttctctaataaaaacattttattctgtggttttatgaaagaacaaccacatatgcacctttaagtttggagcacatggatacctttagtgccaaatctgctgcatgggaaccatctagagactgtatctctgaggatgaaaggaatggattcgtagaggctgacaacaa

SEQ ID NO: 136109 - DNA, 222 bp, Zea mays
  Clone ID: MRT4577_55608C.1
ggaaaagaaaagagggctaaaaacctagcattcccctgctcgccgatgctgtgggacgatgcaaccatgggcgcagggggcaccagccacttatgataccccgagtcacagcactagggctactgaagccgatgtgagtgcaaggcgatgcagacgcatacttagaaccagggtattggaccggccgcctctgagatcaaagttgaatgaggactagatgcg

SEQ ID NO: 136110 - DNA, 553 bp, Zea mays
  Clone ID: MRT4577_55609C.1
cctcgaggccggccgggctaccacgtgctattgaactcccacagcaaaagatcgagtgatggtttaattttgaatgacggactagaagtcagcagctcagtctcagcattcagttgggcagattagctcagggccaagccctttgagaatggaccgaggccaagcctctttcagttgggcagatttagcaatgatcagatcagcaacaggaggatcaggaggtgagagccccctccagggggcaggaaaggaaacaaaaggttgttctgcctcgaacaaagattcaagaaaccaaagatctctagagaaactcgtatggcactacaagcagtaatacgaacaccgagaacatgaggggtacatatgtattttcagtgaagaggagccacagtttactctgcagcagccccaaatccagtctaccctaacagtctggttgtatccactctcaccagcttgaggtgactaggtaaggagggatgtttggcaacaatgttttttcaaaattatagttttacaaaaaaaaagaaaaaaaaaaaaaaaaaaagcggcc

SEQ ID NO: 136111 - DNA, 832 bp, Zea mays
  Clone ID: MRT4577_5560C.1
ccggccgggatcaccaccatctcacttcatataccactccctaggaggacccagcaacacacacagccgagctttgcttaggcaagatgaacaggaagccaggagactgggactgcagggcgtgccagcacctcaacttcagccgccgagacatatgccagcgctgcagcgagccacgtggagttgctgatcgtggcggcggaggaggaggaggcgactacgccagcttcggtggccgcggtggctcctccttcggcggcggctttggcgctgctggctctgacgtccggcctggtgactggtactgctcctgcggcgcgcacaacttcgccagccgctccagctgcttcaagtgctccgcctacaaggaggaggccgctgtgaacagtggcgctggcggctttgacggcgacatgtcacgctcacggggctacggcttcggcagcggtgctgctggtgctggtgctggcgctgcccgtactaccaaccgccccggttggaagtccggagactggatctgcaccagatccggatgcaacgagcacaacttcgccagcaggatggagtgcttcaggtgcaacgcaccgcgggactctggcactgaggtgtaggatcgagcaagttaaaaagtctgcagcgccgaagaaagcgacgacaagaggagtcctcatcacgtcgtaacgtaagagagagagagagtagtggatttgcaacaaaaaaaaaaaaaaaacaaaagcgatgctctgatactctctagctagttttgttcaccacccatgccgtctcttctctttttttagaatttggttttggtctcatagccctttaatta

SEQ ID NO: 136112 - DNA, 670 bp, Zea mays
  unsure (1)..(670): unsure at all n locations
  Clone ID: MRT4577_55610C.1
ccggngtcgacccacgccgtccgcccacgccgtccgcccacgccgtcccggccgaccccgntcgagtccttngagcgccnagtggaggagggagagacacnncgcatcacgtcgccggggcttagacgggnnccgcacatggccacnncgcctcgccaccggagtcgtctcgtggtctacccgccatcgcgcccatgccgagagcgagagggtncgagagagacagagagagcgcgggggggggggaaggccgccgcggttgaccttcacgctccgagccgcctagctccaaccacgtgcacgggaggtgtcgccggtgcacgccgcccacatacgtggattttccgggtggaatagttggtcggagtacgggagatttctcaccggagctgcttcatcgccgccgagtcgccctactcgtggtctgcaccaccacggccttaatcaccgaagtgaggttacgaggaacctgaagcccaacttagagaagtacctggagttgcacccaaaaaggcaagttgtgtccttgatcacattctttgacctaataatgttagctgttatgttctcaccaatgctcgcactgttaggttaagctgatgggacctaataggttacctagttttgtttaccccacacttgcatataaatgaattattgggtagttctg

SEQ ID NO: 136113 - DNA, 401 bp, Zea mays
  Clone ID: MRT4577_55611C.1
attcggctcgagcgccctaacccctttttcatccgcttctttgcgggagtggtaaacactgactcgtcttctatgggggggtgagcacgagccacggcactagggtttagacggggccagatgaccgcgtactacgagcaggatagcgaggacatgtactgcaactccagctgaaaggtacacatccctgcccatgtgcgacctattctagagcacgctggacgacctccgcctctggaagaaaactgcgggctgcccctcgtgctcaatctgcctgaccggtgcgtacaccgcccaggattcaccatactgctaagaacggacctacagaccgtcctccagcacaggatccgcggcctgatgtgggccatgcaaggctagatcgccgaatggaatgtatc

SEQ ID NO: 136114 - DNA, 209 bp, Zea mays
  Clone ID: MRT4577_55612C.1
cacgcgtgcgtaccagtgcaagtctattactgatgattggttttcttctttatcaaatgtgttcatgatgattgagttgctgaacttgaaatactgcaacaagatcacttatactgatttgggtcacctatactccctgtatgatctcacaaacctttaactgacatgcttgttcctcttaacaagcattgagatctcctcaatttcaa

SEQ ID NO: 136115 - DNA, 265 bp, Zea mays
  Clone ID: MRT4577_55613C.1
ggaaaaaaagggggccacaacaaagggcccgggcacaaattggcaaaaatatgccccgcccaaaaggccttcctgggatttagaatttttaaaaaggaaatgtaaccgaaatttttggggggcccacgaaaatgggggccttgcttttaaaggaattggtctcaaaaactggaggttataatcccacaaaatttttaacaacatgttaaaaaaaaagccccaaaatagaaatcacaaattttaacaaacaaaaactgggcttctt

SEQ ID NO: 136116 - DNA, 577 bp, Zea mays
  unsure (1)..(577): unsure at all n locations
  Clone ID: MRT4577_55614C.1
aaagcttccagaggagaacaggaggctcccataagagcccgccacagaaactaataaaactctcaccggngccatcccagagaacaaggccaacgaccccggccccaagggaagcgggcggcgacgtaccaccggccaccgcaggagcgagatggacatgaagaggatccccttcgccggcctcggcggcatccccgcctcggccaccgcaggggtggcccccaccgagggcgccggcgcgggcgccccaactgcctcccagccgtccggcgagggtcccgctggcgctgccgctggcggtgccgctggcgccgccgccgcgggggcctgccgcagcagcggagcgccccgccctccccgccgcgcccgcccggctcctcccctccccccctcgcccactaccctcccccaagcggggcccccgccgcccgcaccgcccgcctcggcccacgacgggccccccgcccgcgcctcgccaccgcagaccccccccgcccgccccccggccgactggccccccccccgccgcccgccccccgcccaccgtcccccccgccccgccggcttccccccacac

SEQ ID NO: 136117 - DNA, 506 bp, Zea mays
  Clone ID: MRT4577_55615C.1
tgtcgctgacattctatacagtgtcacaaatattttattctaaccatttgaatcttgacaaagagagatactccaggccttcttcgtgacaaaggagatcacaaagctgtatgatcagtcgtcggagacgagcggcgtttggttagattggccggctgtgatctcaccgtcccataactcttgtgctgttttgtacggcccagattcatggatcaagaaatcgtagttgcccctggactcagggagctcgctaatcttgcggtggtcatcgtcggtgagctcccagtcgaagatgtggaggttctctcgcatcctgctctggttaaagctcttgacgatcacgcagtcaccctgctcgtaaacccacctaatgcacacctgggcgacggttttgccgcgagcgtgggcgatttgtttgaggacaggggagtccatgacggagttgttggcccacgctgtgccgctcgcacccatcgcagagtagccgcagagctggataccattgg

SEQ ID NO: 136118 - DNA, 954 bp, Zea mays
  Clone ID: MRT4577_55616C.1
gagctaggcaccctttggtttcagctatttgttggtctcaatgttgctaatgaatttcttgcactgctgcgtgacatgaatctgataaaggtagcgattcatcaattgatggggcaagatcagaaatttcagagtatggataaaacaatggatgccgtcaactgtcatcgacgcattaaatgcccaacacctatataccaccaactggaaacaaactgccgggtctccaacgaaacaggtcgtacaaatttcgttccccatccaagatagaaatgacctctgtttagcaataagccaccaaaaaacaaagaatcgcaatggagaacgtatatcaattagatccaatccaaacctcatgtgatactctttgcatgcacttacaagttattactacctgtatatgtggtgccagttttcgaatcaacagatgacatccagatgaccctggttctgtctaaaaaaaacatcccttgtgtaagggaatctactgtggagctgctcacacacaaggcaatgtgcctgatgacactccagcttaaaaagcgtcatcctttgggcattccacgcgtactgactgcaacctccacgcgcaaaaccatcatcacaggtgaaactaaacccttttcaagcgacggtttctcaacttcaattatcttttgttcctgtcgattcctttcatacgggcaaacgacaggcaattgacaagtcgtgtgaatgtggagtttttatcagcatcctcttcaggcatgtttatctgcttgggtctcggagttgattttcttctgcctttatccatatttccaacatcaacagctctttcttcagaaattgcacaaggaaagtccaagtcagggacagcattcggtacaccctcctctgttggcaaattaacttcagctaatttcctccttgatgacactatcttcctttttctcacagcaccaagattctcaa

SEQ ID NO: 136119 - DNA, 279 bp, Zea mays
  Clone ID: MRT4577_55617C.1
cggctcgaggaggcttcaccaccagaagaaggtatctttcttgtcttccctttggtcgtggctggcttatctttgaagccgttatgcatacacagtaaaggtttgattgcattgcatacatgattctcatcatccattgcaagttaagttgttgcttgtagaaggaagctaacaggggtggtgatgatgcctttttgcagcccccatcgatggcagcagcagcagctgggctagcaagagcactcgcaaggggggaagagggagggggagtagccgagt

SEQ ID NO: 136120 - DNA, 916 bp, Zea mays
  unsure (1)..(916): unsure at all n locations
  Clone ID: MRT4577_55618C.1
nganaaaggggaaatcgcagttatcatcggggaatccgaccccaagcatcgaactgctttcgtgccgtcggctcgttcccggcatgtagctgctacttgtcagctttcaaaggtttctgcatctgcatgacgcctaatctacattgttaaaggttttctgatggatggtgataaggtgaaggaatcagctccggattgtgcgtccggtgcagcagagccaaccaagaagcaggataagaggaaacgtgcctatgctgaatttgatgtggtggacaagaaatctgtatctgctgaatggcagcaagaaatggatgcactgtataaatactacaaggaggtttctggtcatcagctgaacccagaggagctttcatgcaccacaaatgactctattatagcatgcttgctggaggagagcagtctttcttgtgccaagttaacagatggaatctacaagaggatgaagctgcaatatggtgtcactgagtcttcagtgcgcacctcagtactcaacattggtaggagatcttcatatgggatttctgctatggatgtcaatggtctggaggatgagtcggattcaagcctttggtgttgggagacagaagatttggcattattacccttgcatctacgtagtagtttgagcattcgacgcacagctcggaaattaatccataaaaggattctggttctttcgggcaagctggctaccaaagatgccagtaatgcttgtagcaaccagaacagccttatggaaaatgctggggaagcgctagatctagatgagattcgctctatcattgagtcaaaacacaagaatgatgatgacattaaaacggaggcacaagatttccaagccatcaggaaagccgtgaagaaacagcaaatgatggtggggcatattcaaactgag

SEQ ID NO: 136121 - DNA, 278 bp, Zea mays
  Clone ID: MRT4577_55619C.1
tggcgcttcacgttcccaaggctccgggctttgccagatgctcaaggagggagcgaaacacttttcaggattagaagaggctgtgtatagaaacatacaagcttgcaaggagcttgcccaaaccactcgtacagcatatggaccaaatggaatgaaaaaatggttatcaaccacttggagaagttgtttgtgacaaacgatgcagcaactattttaagagaactagaagtacagcatcctgctgcaaaaatgattgtactggcttctcatatgcaaga

SEQ ID NO: 136122 - DNA, 207 bp, Zea mays
  unsure (1)..(207): unsure at all n locations
  Clone ID: MRT4577_5561C.1
ggcngatcacagcaggagattttggcgctataatgagttcttcctctctgagatcccctccacatgttgttcatctcccatcggggctccgggcggttggtgggtctcatgggcctgctggcgcatggtctttggtggccgggactggtgcggtgtggcgtcgtcggcggttgggcctccgtggggatgccccgcggtggcgccttg

SEQ ID NO: 136123 - DNA, 1036 bp, Zea mays
  Clone ID: MRT4577_55620C.1
cccgggtcctaaatgcagtatacgatgctttgagggcattggggctgaaaagtctccacatcaccagattacggccggcggcggcccgctctgttccatcgcccccaagcggcgggccttggctgcgccgcctaaatccaccggcgagagtaaagggcgcccctctctcacacgatggcctcgagctccgcaagcggcgccggggtggagggcggggtcggggaggggccgacgacgctggacgagctgtaccagatcaacgtagtgccggccgagctccacttcaagttccgcaaggagctgcagggcctccgcgtcggcctcaacctcgagttctacaatcttgaggtcaatgactttgaggcaaagatagtactgaagcctctagattacgagcggaaatggaagttccagtacaagcccatcagtggcgacatacagctgctttccaagaagataccagtcacaaagtttctaaatctacaggttggcattggccacaattttcaactgaatgcaactggatggaagtggaagctttctacttgcctggggggagatggtgtgtctcagataagaaacaagtcaaaactcagcttgttcccagggtttgatttgaggattggatggaaagcagagtatgtgcttcctgagattcatggggctgttggcacaggagaaccagccttcagtatgaactatggaaggttgcatgcatcgatagatcgggtcgaggctatcgttactcagtcagatcagtattgatcttccagtgcggaaaggcaagggagtttcttgatcaataacaaacacgttgagtagatcccagggttacaagaagcattctgaagctccgtgcctgatgtacagcaaataccaaagtttaggaccacgctttgagaagctgtttgagttctccaaagcttttgactttgagcggcttctgttgcttctgaaagcgtaactataaataatgtttatcctgcttgtgtacgaaacaccagagtatcagtaattcagtatagtgagcgacgtc

SEQ ID NO: 136124 - DNA, 1776 bp, Zea mays
  unsure (1)..(1776): unsure at all n locations
  Clone ID: MRT4577_55621C.1
ggggtactgccgattctcgttacggtgaccggcgcgtccgagaacctcggggcgggtctgagctccgcggcgtcctacgccggtgagcggggatcgttgccgcgcgcaatgtcagccatcgtaccaccaaaacccctcccgttcctcaccacgctcaccacccgcttctcacttgcctgcttacccacgcggcgtttcacccaaacccgctgttccagtgccgggcaccgcggtcccgcggtcgcggccactcctcgtcccggtggagtttgcagggtccattccccccttaggtctcttctccttgccagcgcggcagcttcggcccgaaccgcggcagcggcggaagacatgtctgacccggagctgaggctggtgctcgagcttgctactgacgaggagctgatggaggtcgaggagatcctctacggcaccagctattttagcccattgctaaaatcaattgcaagaagaccgaactcagatggtgttgttattttggatgatatcgaggagagagatcatttcatctcaaaattagagtcaaggttcctgtatcttgctgcagatgctcgttttgttataagggggtggagaccatcgtacagagatgtcttgctcagagtaagaaaaaaaattggtgttcagtgctctagcaaattgtgtactgcagaccttgaggcagaaatatttcttcacctcgtgaatgaatattcaagccaccagaaagaccgactttcatttccatgggataaacgaaaatctccaaacaatatctctagccttggtgcaaacaagtggaagatgcttactgatgtggtttggaggattggaacaaagggaatggaaagtacctttctgaagggtggtagtgcattgactatgaaaacgatatatgaatcgttagccaatagattgactggaaaactgctgaaggaggctacnaattncaagataaagaaagaacttgttaagcagggtgggcgattggctgctgttaacctggagtctagagctggtttgcttgcagctaggcagggtttggttcgtgctgcatcgagatacgttggactcaggagtgtcgtgacatttcttggaccaatattgtgggggacgctcttggctgatattgtgattcaaatgttgggcaccgattatgctaggatcgtccaggcagtctatgcatttgctcagattcgtttgactcggacaagttacgtagaatctgatggtgaaggaccagagtgagatcgctactggactagcctaactggcattctaatctaaaagcaaccgtattgtacattctagccatgaagaccaccatctgattctgcgggttccagtgcaaatactccacgggacaacgaggttatattatagcttcagacttcggagtactgtactgctaatgtgagtgcgtataagtgacagacgagcggtgttacaagacgttgggtcgcagggacagtcatagagcacaacacaaccggctactcccctgatcgatgtaaagcttagcaaaagtaacctaaccgtgacaatgaaaatatgatacagtaatgtttaacaacgagctccgcaagtgtcatttggtcggcgacctaccctgtgagcgcggaagttgtgactgaatttacttgggcgtcacacttccgcgcggggcccgaagttgtagaccatgcattctgctctgccccggtaaaatactgtaaaatattgctccccttatcctaaactattcctcctaacgttcggttaggcaagccagatctc

SEQ ID NO: 136125 - DNA, 168 bp, Zea mays
  Clone ID: MRT4577_55622C.1
acgcgtccgtgggtagtggtgagagcccccgtcaggtccccctgcctcctgcctgggtcgtcctctgttctgatcgcgagctcgggtgttcagggtctagtggcagcctggctgtacatgccatgcgggtcatggatggcatagcaatgtggtgtgcgacatgatgca

SEQ ID NO: 136126 - DNA, 365 bp, Zea mays
  unsure (1)..(365): unsure at all n locations
  Clone ID: MRT4577_55623C.1
aaataaaaataaaaaaaaaaacaaacaaaataaaaaaaaacaaactaacatacacaaaacaatgcggggaaataaaatatagtggggtgaaacctaaaatacaattcactgactcgcagatttacaacttaaaagaactgggaaaaccaaagacattacgttgcctccctttaatnnnnttgccatttctatttcccgcagtttgcgaaataaatatttttttttggccgccctaaaattaattacagggccgcggtcttaaaaacgaatggtaggaaaactcctggggctcaccaatctaatccgctttggaaaatacccccttttccaccgttgcaataaacaaaaaaagccccccccctact

SEQ ID NO: 136127 - DNA, 317 bp, Zea mays
  Clone ID: MRT4577_55624C.1
gcgctgagaccatagacctatatctactatcatactgcagagcgaacacgaacgacaccaggagggtgagggtggtggtcctcgctctcctctctctggctgtgagcgccacctccacccatacaaacagaagctgcggctgccagccaccgccaccggctcatgtacagccaccggcgcatgtgccacctccagctcacctgccacctccagcgcatgtgcaaccgccagtgcaggtgccgccgccggtccaggtgccaccgccagtgcatgtgcatgcgccggttcatgtgcctgcgccaccatgccaataccct

SEQ ID NO: 136128 - DNA, 1273 bp, Zea mays
  Clone ID: MRT4577_55625C.1
actacagcacgacatggggtccagggcataacgaaaattggcacaacaacactgatacaacctggtggcaggctgataaaaatactaatcttatcctacacatccccaatgcaatcacacatgacatctatagaaccaatacacactctggtccacaccttgaacctaaactttatcatatgaatataaataccacacatctattttataatcacaaacacaactacatcaccgtaaataacgggcaggtcaacaaacatctaatacaactacaacgcacctactcaacaacaagataattattacaaccaatatatctatccaatccattcaatcaaataagggggaacaacaagtgagctcaccataaccaggtcaacacggaatctggagaaacgacgacgatcccaggttcagacaatttgtcgagcactttgcgggcgtcgtattggactacgcttctttcccacacattccggtgattactcagtaatttaatccgactcgaaggccacgagcacagctacgatttggagcattactcttcaacttcattttcttcttcatccataaaattttgtagatctcccttctccaattggttcgtctccattttacaaattcctggcaagcgttgaggaacagggagaccagagcaagagatcgaagacgttgatagaacctgagtactataaacgacgaggacagagagttttctatgcgagcatcggcgtggagctgggaacagcatctcggccagcggccatgggaacagaagcaataagctagggcgcgggtgctctggtgccggtgattgcggacgagacgaagtcccatgactgtggcttggtgtgctggtgtagaggaggactgagacgctacgatgaggagtctggtcggcggagaaacacgaccacgccgctgaaaatgacggcgtacaggagctgctcatgcacaaatacgagggaggacgaagcagggacgtgagcagctcggtgcggtggggagcagtgatgcgagcagcttgacgctgatgatgaaggccaggacgaggtcgtcggcgctgatgtgttgagtacaagggcaaggaggaagcaggaagggacgcttggcgttgtccggcctaggtgagcggcacgatggcgggtgaggacgttacgaggatgctggcggtctgcgtgagagacttccagcgatgcaataatgcacaagataagagcaaggctggcgtcatctcattctagcgggtactatcccgtccggcctcgaggta

SEQ ID NO: 136129 - DNA, 287 bp, Zea mays
  Clone ID: MRT4577_55626C.1
ctccttcactatttcctgggggccgaggaaaacaccccccttttttttcctcccccccctgcgaccccgggaaaaaacccctttgtaaaaacccccgtaaaaacccccccccccccccaaagaaaagaccgcggcttccccccccaaaacagatggtgacacggggcactcatgggggcgttttgcatatccaaccccccaaacacctagaaagtatttttctagcgccccggtctggaaattttccatcccccaaaggggggcttttacaccaaaaatgcgccccc

SEQ ID NO: 136130 - DNA, 344 bp, Zea mays
  Clone ID: MRT4577_55627C.1
cgcctgcttgttcacctccatgtgctgatggctccatctcctcctgtccctaaccccctccggccctcccctcctccaaagccctaaaccccacgtagctcggtgtgtcagtccactcgcccgcccggtcggcgccgcacccatctttcggattctaccctaaaggcatgaccttggtcttccaatctggaaattgagtagcaatcaagtatggctgcaagagcaatcacgaggagaaggaagtatcttttcgaccatgttaaaacacctaacctctcatcttcatcctctactttccaacatggaagaattggttctgaagatgagccaaaaataacactact

SEQ ID NO: 136131 - DNA, 244 bp, Zea mays
  Clone ID: MRT4577_55628C.1
ggaattattgggtcgacccacgcgttcgaggctgtggaggaactgggaacattatgtgctccaagtgtggaggccgggggcatacctgaatgataaaaagcgtggacattgcaatgtcttcgcagcatgacagatcaattctgctagcatatcttcccgagtttaccatggtggggtattagggctaatggcgacatcgtcaattcaaaagagttacccattcttttcggaggaatttttcctt

SEQ ID NO: 136132 - DNA, 232 bp, Zea mays
  Clone ID: MRT4577_55629C.1
aatttcttcgacatagggaccacgggggttttctcaagtttttggaggctttggagaaaaccaaagtgcagcgacagaacccgtttcaacacataacgtgtatattgaaaacacaacgctatggaccagtaaactgtcgaccctcgagagaacaacccacctatgcggtcagcccatattcagaacaagcgcgaaaacgagttctactcgagcactgactatgaacctgggg

SEQ ID NO: 136133 - DNA, 1195 bp, Zea mays
  unsure (1)..(1195): unsure at all n locations
  Clone ID: MRT4577_5562C.1
ctagctccatagcacttgttccagctagctaggagagagagctttgtttaagccgcnacgagacgaggcgacgcgagtcgcgaggagtcgaggaggatcggggctcattgggccctcggggccggccggggcatcaccaccatctcacttcatataccactccctaggaggacccagcaacacacacagccgagctttgcttaggcaagatgaacaggaagccaggagactgggactgcagggcgtgccagcacctcaacttcagccgccgagacatatgccagcgctgcagcgagccacgtggagttgctgatcgtggcggcggaggaggaggaggcgactacgccagcttcggtggccgcggtggctcctccttcggcggcggctttggcgctgctggctctgacgtccggcctggtgactggtactgctcctgcggcgcgcacaacttcgccagccgctccagctgcttcaagtgctccgcctacaaggaggaggccgctgtgaacagtggcgctggcggctttgacggcgacatgtcacgctcacggggctacggcttcggcagcggtgctgctggtgctggtgctggcgctgcccgtactaccaaccgccccggttggaagtccggagactggatctgcaccagatccggatgcaacgagcacaacttcgccagcaggatggagtgcttcaggtgcaacgcaccgcgggactctggtagcgctgccatgacctacgaaaactacttgcactgaggtgtaggatcgagcaagttaaaaagtctgcagcgccgaagaaagcgacgacaagaggagtcctcatcacgtcgtaacgtaagagagagagaaagagtagtggatttgcaacacaaaaaaaaaaaagacggccgcgatgctctgttactagctagctagttttgttcaaccacccatgccgtctcttctcttttattagatttggtttggttctcatagccctttaattaccatttgggacctatgtttgctgttctgtttcccgttcgtctcctccgcatgtttgcgcttggatcgagtcttgtgatgtaaccccccaaaaaacgcttgcttaactagtactgttgcttcttaatatctccgggggcgttcatcttgttcttgctttatggtgtaaggctagctccaacaaggagctttaaaaggttctgtaccct

SEQ ID NO: 136134 - DNA, 833 bp, Zea mays
  unsure (1)..(833): unsure at all n locations
  Clone ID: MRT4577_55630C.1
ttttttatcaatcacacaattgatattctcgcatacgagattacnccacgcaaatatgaaaatatacccatccctccctcaaatatacacttcggatcatctctcttatccctatattttcttattatactactccttaaacaccacttcatgtagtgtaatttcgcgagctccattacatgtaatcgcgagctgatgaccagcttctcgaaaatggaggtgccatcgtcgatgccgctcagttcagttcagtcacactgtcacagagcacctccagtgcatcggcgaagcaggagccgaagcgcgccatctcggcctcctgcagcacgacgccgacctccaccccggcgtcgcgggcctccgccagggacaccgtgccgggcgtcttgtcgatggacaccagctccaccttggccggccggcccaacccgaagtcagtctcgtacacaccgtaccgcggggacccgcccaccgacatcgggcgctccgggaccagcnacaggatcttgttgaaccacccgcctnccccanccagcacgccgccgtcgagcgccgcgacggccgcnccgatcgccgcggccgcagccgccacgccgtcgccgcccagcagcncgcccgtncccacctccacgaagcacggccggaggagtgtgcccaggtactcctgcgggatcngcggcgcaggcgggnggncactccaccnanaacagcaggggcnccccgggccgctccccgccgcccacgcgcgccaggcaggcccacgccancccgcacgccaccgtnaaccccgagcagtcgacgcggcccgtgccgccgccgtccgccgcgacctt

SEQ ID NO: 136135 - DNA, 212 bp, Zea mays
  Clone ID: MRT4577_55631C.1
gggcgtgtgcttaaactatggtgaccgttcgtaccggactcttcctgaacaaataaccggccccgaatgggcgggaccccgacattgcggaggactctatgttgcccaccgcagcaaccagcatcctccgcgctatgtgcatcatggccgacttaccccacaactggccgtgcatcaacaagttcttggccaaaagcgcaagggacctgccg

SEQ ID NO: 136136 - DNA, 196 bp, Zea mays
  Clone ID: MRT4577_55632C.1
ctcttgcctattcggctcgaccgcataggggggtggctatcgagtggggggggtattccactatcacgcctgttgacatttcctcatatacgaagcatgtatgcctgcaacgggccttactgtctccgacaccattaacccatgcatattattactgggatcctgaacgataccggttgcctgttgtgaacatttc

SEQ ID NO: 136137 - DNA, 783 bp, Zea mays
  unsure (1)..(783): unsure at all n locations
  Clone ID: MRT4577_55633C.1
ccggccgggaagcaacttgccatttctctcctccgcaactcgtgtttctcctcaacatttcagaaacttccgcaatcgcgctccaactttgacgaaaggagacgcgcctcggcatccatcacgcgaatatggcacgcgattcttcaccacccgagtcaccactctcatcgacgtacgagtcggagatagacgaggatggtggccatgactacgacgagtcgacactgcgaccctcgaagcgtcagcgacccgaagccggatcaacgacatcatctgctgtagttcccgatgccgaaccagaagccgtaccagagcctgaccctctcgagggcatgtccgacgtctcgtctgacacttcaggcgacattcccagttctcctatcaatgcgcgtctcgatgaagaggatttccaagagcaagtgacgaagtgcgactgggatggttgcccagcaggcgaccagggcaatatggacaagttggttgagcacattcacaactcccatattgagaacagacaaaagaagtacacatgtgaatggatgagctgtagtagaaagggtctgcctcatgctagtgggtatgcactcaaggcgcacatgcgcagtcatactagggagaagccattctactggttatttgcctgagtgtgatcggtcattcacaagatcagacgcgctggctaagcacatgcgaacccgtcacgagacagaagctctccgnccatcgannccagntccgaagtcgatgcaatccggactcagggcaggggagccagatcaggat

SEQ ID NO: 136138 - DNA, 170 bp, Zea mays
  Clone ID: MRT4577_55634C.1
ttgatcctcatatacggtctgaatccggtgcgaccagtttctggccgtactggacttcgggctggccaatgctatgcctgactctcacactcacttcacctcgtccaactttgcctgcacgctgtgctacatcgctcctgagtactaccagactgtcaatttcactgcca

SEQ ID NO: 136139 - DNA, 132 bp, Zea mays
  Clone ID: MRT4577_55635C.1
agtacgcgtagacggactcgtggcaatccaagtcgatcggctaggccaatgccagctactgcatgaccgaaagcgcgcgcgaggactgcaagcagctcttgcaggacgctgcatacgacctgatgggcatgc

SEQ ID NO: 136140 - DNA, 367 bp, Zea mays
  Clone ID: MRT4577_55636C.1
aacttgctattagaaagaaactgcacgtctttcccaattatacgaatattgcgcttggtgcatgctctcaaacaaaataacgcagattcaatatcttacttgccaattgatgaaaaagaccagaaatcttattgctttactcgtgtctttccaaaacacaaatattataacttgaaaagctttcaatcaagaaaacatatattcttcattacttggaatagtataaattatgccccaacttttaaaaaagctgatatttggtgattattaaatctttgctcaacaactccggccaatttttccaaaaggattaaagaattacccccattctattcttggtatcggattaaccaatcccctaattggg

SEQ ID NO: 136141 - DNA, 561 bp, Zea mays
  Clone ID: MRT4577_55637C.1
agggtcactaaaggtgacgatacattgagtaagctagagaggcttccaacccggagagaaggcatttttgtaatgccgatcgagcgtatcaacatcctatcaacttactattatgatattgatctagagagctgtgaagcagaaaaatctattctccggaggagactttctgaatcagcatcagaagttgagcgatggagaagaaaatgctttgcttaatggtggaataaggcgtgctaggtgctacgagtggcccaaactacgagttgggaaatgagatggcggtggatggttggttgcccaatgcgtggctgggagatgtggcagggcaaggcttgggcgccagtgatggtgcataggctaggtaggagagcacagcagggaattagtaggggactacattcatgaatatatgtaaggccaagttacaaatcctatccttcctcaatacaagctcaactgaattctaatccaatgtatcaatatctctagctaacaaaccgatgaactcatctcctaaacaaaaaagcacctatgactctttaaaaagagagaaaggag

SEQ ID NO: 136142 - DNA, 1186 bp, Zea mays
  Clone ID: MRT4577_55638C.1
aaaacttcgttttttttgccaattgtccgtgttagcaccgcttgcacgataatggaacaaatgtcaaaaccatcgggggcaaaaggataggagaataaggaaaaaacaatggcggtgctactccgccgcgccgcggcgctcctcgtcgtcgctgctgtctgcgcggacggcgcctccacgttctactcctccgaccccaacctcggatccgcccgcgtcgtcttccagacgaattttggtgatattgagtttggcttctttcctcatgttgcacctaagactgtcgaacacattttcaaacttgtgcggcttggatgctacaacacaaatcacttcttccgggttgacaagggtttcgttgcacaagttgctgatgttatgtcaggtcgaaccgcccctatgaatgaggagcagaaaaaagaagcggagaaaacaattgttggtgaatttagtagtgtcaagcatgtcaggggaatcctctccatgggaaggcactctgatccagacagtgctggctcttccttttctattcttctgggcaattcaccgcatcttgatggccagtatgctgtatttgggagggtcactaaaggtgacgatacattgactaaactagagaggcttccaacccggagagaaggcatttttgtaatgccgatcgagcgtatcaacatcctatcaacttactattatgatattgatctagagagctgtgaagcagaaaaatctattctccggaggagactttctgaatcagcatcagaagttgagcgatggagaagaaaatgctttgcttaatggtggaataaggactgcatattccgtttcatgatgctggatggtttcctgaggctggatatggacgacggtgtggaaatgtgtatgccgcgtgttcttatgctatcactgtaatacttgagtagatgttagatgggtcctaaggttccacatggatcttgtttgtaacacatgagcagatgagttgttacaataaaccttcaattcgtttagttttgtcttcggcttccccaattgtagtttgaggctgcgctgcacctgatggcatttttagtttgaatcagtctttgtctcttgggaaaaaaaagcccttggctaaaaaaaaaaaaaaaaaaaaaaaaaaaaaaaaaaaaaaaaaaaaaaaaaaaaaaaaaaaaaaaaaaaaaaa

SEQ ID NO: 136143 - DNA, 164 bp, Zea mays
  Clone ID: MRT4577_55639C.1
gggaggctctgcagccctgctgaagggccctaactagagttctagagattctgattctgtttctcagtagtccttttagaggcttgctatacctggtctgcttcaaggaggtcgaccttctaatgtatgaagaatgggatgcatttgatctcaagaccaaagac

SEQ ID NO: 136144 - DNA, 863 bp, Zea mays
  Clone ID: MRT4577_5563C.1
ccggccgggggccggcgctgccctttgacccgcctcgacgtcggtgcctcgcgtcccttcctctggcaccgaaaaaaaaaaaaaaaaagcacgcgaacgcaaagaaaaaaaaaactgttgttttgttcttgcgagacgagacgaggcgacgcgagtcgcgaggagtcgaggaggatcggggctcaggcaagatgaacaggaagccaggagactgggactgcagggcgtgccagcacctcaacttcagccgccgagacatatgccagcgctgcagcgagccacgtggagttgctgatcgtggcggcggaggaggaggaggcgactacgccagcttcggtggccgcggtggctcctccttcggcggcggctttggcgctgctggctccgacgtccgccctggtgactggtactgctcctgcggcgcgcacaacttcgccagccgctccagctgcttcaagtgctccgcctacaaggaggaggccgctgtgaacagtggcgctggcggctttgacagcgacatgtcacgctcacggggctacggcttcggcagcggtgctgctggtgctggtgctggcgctgcccgtactaccaaccgccccggttggaagtccggagactggatctgcaccaggtgcgtgttactaaacttgaaccctttccaccttagtgactacatgtttcatggacgggcggcgtgggtattcactgtttccatgaatccatgtgcttgttttgttgtcgtacacaaggtctgatggtagttgtaccccttttgtatgcttatgtcttctttgttaaggaaaaaaaaggattgttttatcagcaaacatgctggagtaagggacaacagaatcgtctggcta

SEQ ID NO: 136145 - DNA, 271 bp, Zea mays
  Clone ID: MRT4577_55640C.1
gccggccaccccaccatgctgacaacacccgaccgctttgcggcccccccacttctcgggctaccctatgcatgtgcgtgggaagccgccaggcgctgcatatcttcctctcctatcgctggccgatgctaatcctcactcgggtccaggggctccgcttgcaccaccacgtctttctctcacggctgttaactaccaactaagttcaccatgacatcaagccagacatgaaatgggatttctacatgctaatataaataatgcaatgaga

SEQ ID NO: 136146 - DNA, 556 bp, Zea mays
  Clone ID: MRT4577_55641C.1
ggccctaggggccttttttttttttttttttctttttttttttttttaagaaaaccagtggcacacttttttgttcagtcctatacgagccaagaattattctcttcgaatagaggtccaaataaattacggaaaccaaattaattttcgggaagataaatacttgggtgcccaagctttaaagcaccagtatacatactcgcagatacagaagcatagcagcagctcagggtcagctagctggcaaagcatcaaagcgaatttgtacagaagctcgtcccaaacgtggaagtcaggtctgtgcacggggacggatgcacgtcgagagcgccaccgctgacagcctcgcacttccacggacggacaggggcaccaccagtgaacttgacgatcgacaggaagatccgggagaaggccgacttggtgatgcccttgatcgggccagcctccctgaggatctggccctggacattctttaccataagggggtcgacgatcgggagggcactctggttgtagctgttgtcggggtgattgccgacatcgccaacgatcc

SEQ ID NO: 136147 - DNA, 349 bp, Zea mays
  Clone ID: MRT4577_55642C.1
gggatccaaagcccagcgggccacagtttggcatcgacttgacctaaataatccacagctcagccggcaatggtatacaccacgccgccatcaaacgaagaagcagtacaagtactgaaatacaccacacgtcgccatgtgtacagctaaaaccagtgaccgtagccacgtatgcctatatagctgcacttattttccctcgccaacctagcgtcctagccggcggtgatgattgatatggggcatgcggcgaccggcctgcttcactattttttgctgcatcacaccagtcttcatatggactgcacggccctggccatggcgaaggcggcggcggaggcgagagcgc

SEQ ID NO: 136148 - DNA, 516 bp, Zea mays
  unsure (1)..(516): unsure at all n locations
  Clone ID: MRT4577_55643C.1
aagctttnttttttttttttttttttttatcgagataaatctcaatcaatatattgattatttctaggaaacacatgtcggtatgagggcaccattgtcgagtacatcccccccccccttttttttttttttttttttttttttttttttttttttttttttttttttttttttttttttttttttccccgggcccccccccccctagggggaatttcaccccactggggggccgttcttgggggtcccagcttgggacccaagttgggggaaaacaggggaaaagcgtgtcccgggggaaaatttttttcccttcccattccccccaaatttccaacccgaagccaaaaagggaaaacccggggggccccaggggggggccaacccaaaataaaaggggtgggcccaatggccccttttccggggggaaaacctgtgggcccccctggtttaataaatcccccaccccccgggaaaagggggttgggnattgggccccttttccgttcccccctt

SEQ ID NO: 136149 - DNA, 168 bp, Zea mays
  Clone ID: MRT4577_55644C.1
tcgttcgttaaggttggccaattcaacaaaagggggccttttccaaaaggggggccagcaaccaattttcctttgcccggaaaaagccaacctatacccatttgacaggcctcaaaaacccccgcaagcaaattttcccaaagtccgcacaaatttaaatcccaaaaa

SEQ ID NO: 136150 - DNA, 273 bp, Zea mays
  Clone ID: MRT4577_55645C.1
ttgggtttttgtatattttaattgggttttcagccattttcccatagttagtgatggaaaggacccaacctacaggaaagaaagttgcaataaattacgagcaaaaaaccacgcttacgaatggagacataccccccccaagcaacgaaatagaaaagccatcctggcctgcataaaagctgtgttcaccgtggaggcggggaaaaattttcttttgggggccagaaaaaaaaaaatcccgaccccccattcaaaagctggcggattggaaaa

SEQ ID NO: 136151 - DNA, 253 bp, Zea mays
  Clone ID: MRT4577_55646C.1
cgctatctactcttccgtcccaccccggagtggcgctgttccatcgcctaggacaggggcgccagaacctgcgcgacgccgtggttactgttggctccctgctattcacaaactcagtcgcgagaactatcatgcggggccgaacatggtgtctcttaacgtgccggagcgcatcgacggaagcgttctacagtgtcgcaaacgcaatgtgtagcttgacccccatgagaacagtgcgatctgcatcgcgaac

SEQ ID NO: 136152 - DNA, 257 bp, Zea mays
  Clone ID: MRT4577_55647C.1
ggggggggtttttttttttttttgggggggatccattttttgctttttttaaattggttggccaaaaatccaaacctcaagtggcttgggcgtaaaacaatttaacccctcccagggtaataacggggccaattttacctccaaaaacagggggaacccgggggaaatattttttacaaaaacaccgatggggcctgaatctccttttcagagaaatttagtgtaataagggcccgcctcaactgggggaaaacctt

SEQ ID NO: 136153 - DNA, 477 bp, Zea mays
  Clone ID: MRT4577_55648C.1
gtataaaaccctagcggctaaaccttcgttccccgccgcctcgtccacccgtcgccggcgcgctgccactgccaccgccagcgagattgcgacctgagaggtcccgcgtcctcgtgctgttcccggctctaccttcgccgcggccaccatgatctgtgcaatctccggcgaggtgccggatgagccggtggtatcaaagaggtcggggctcctctttgagcggcggctcatcgagcgctacattgaggaccatggaaagtgtccagttacgaaggaggaactctccatggacgacatcgtgctggtgaagaccaacaaggtcgtgaggcccaggcctctgcaggctgcaagcattcccggactccttggaatctttcaaaacgagtgggatgctcttatgctttctaattttgctttggagcagcagcttcacacagcaagacaagaacttagtcatgcgttataccagcatgatgc

SEQ ID NO: 136154 - DNA, 543 bp, Zea mays
  Clone ID: MRT4577_55649C.1
ccagcgtccggctctttccgcaccattcgtatttatcacatgattccctgtccttcttgcatcagcacagggtttctctttgtagggatatgaacaacgggactttggtttttaacggcagctagagggtagcctggagtgagcatttcattctggagatacaatgggtggctgctgctgctgctgctgttctgcaagggcatctgattcagatagagcaccggtgcgcatctatatgtggagaagtcaggcattaaaatcaaaactgacgggcagcagtccccaaaagtggacgaatttgagtcgtgcgaaaaagtgcccctgaggataaggctgatgaggaggaggatgtttgtccaatatgtcttgaaggcctgcattcttcttgttactaggcttaagaattttggagctcatctgtggatatacattcagttgggtgaaacacgaaatggattgcatttctgaactaggtagtttgaacaagtgctgctgctgtgaagtgtctttgatagatgttatatgtgttccatatcctttctt

SEQ ID NO: 136155 - DNA, 219 bp, Zea mays
  Clone ID: MRT4577_5564C.1
gcgaagggaacggagctcgaggaagcgtagggacacggggttgaggtggagctcaggagagaagtaaggcgaagagagcgagagcgtgccgagcccggcgcggaactcacctctgcacgggataatccttcggtagcggggatctccggggaggagagggggaggcgataggaggagaggacgaatggaccgggtgcgtctcccttggcgagcgaggag

SEQ ID NO: 136156 - DNA, 293 bp, Zea mays
  Clone ID: MRT4577_55650C.1
gatacgggccagctccccaaatgtacccaaaacggggaggctgtgctaaaaaaacagaattccagaaacggttccaaagaataagcgttaacccgggaaacatcttctaaaaaaaaaaaaccttcgataaataaaaacttcgaaacaaagtgcccaatttaaaagaaacctcaagaaacagcttcctttagaataaaacaaattccctgctgggcttcctgggacatatatcaccccaattcttttcaaacggtccattgaagggaaaaactttcatttttcccctttggttt

SEQ ID NO: 136157 - DNA, 587 bp, Zea mays
  unsure (1)..(587): unsure at all n locations
  Clone ID: MRT4577_55651C.1
ctgtgcggcgctcgaggcggccgtcaaaaaagatgaatttgacatgaattccttgccgcttatcttcttctcgtcgctggtggtaacaccactccctctaacgaagacatcaagaagcttttggcttccgttggtgccgaagctgatgctgctcgtctcgattccttgttgaaggctttggaaggcaagaccgttgctgaagttattgctgaaggctctaccaagcttgcttccgtctctgctggtcccgttgctgctgccggtgctgctgctactggcgctgccgctcaagatgctcctgctgctgaagaaaaggctgaagaaaaggaagaatctgatgatgatatgggtttcggtctcttcgactaaacatcttatatctaaaaataaaagcttttcaaatcttaaccacttcaaaaaaaaaaaaaaaacaaaaaaaaaaaaaaacccaaaaaaaaaaaaaaaaaaaaaaaaaaaaaacccganacccaaaaaaccaagccaaaccccagagccctgcgaaccccgcaaataaaaaaaaaaagggcccctaggcccccggccgctcaaaaaataggggtcccccc

SEQ ID NO: 136158 - DNA, 834 bp, Zea mays
  unsure (1)..(834): unsure at all n locations
  Clone ID: MRT4577_55652C.1
gttcatcagccgagcaggcccaatctctatgttagtgatgagtaggaaggagcagagagatacatggnagaagggggcaaggaggtagagaagaagggagatggtgacgagagcccgacgacatctcgatgggatatgaacaacgggactttggtttttaacggcagctagaggatagcctggagtgagcatttcattctggagatacaatgggtggctgctgctgctgctgctgttctgcaagggcatctgattcagatagagcaccggtgcgcatctatcaccgacaaaatcccgaggaacatgcacccttgtcgtcagcctttgatggaccatcgccaacttctgctatagttgcagttgacacaaatcttgatacatcatctcttgacacttaccgagcaccacctgcacctttgccatatgatgtttgcttcacagtttcagaaaatcctgatgtggagaagtcaggcattaaaatcaaaactgatgggcagcaggccccaaaagtggacgaatttgagtcgtgcgaaaaaggtgcccctgaggataaagctgatgaggaggatgtttgtccaatatgtcttgaaggtttgtttcttctgaccacgggatcgtcaactctttacattatcattccgtggttagaactttagaagtgaaataccctattgttgaatagtatctttacctggtcactttttgattcacatgtttttgctacctttactataggcctgcattcttcttgttactaggcttaagaattttggaactcatctgtggatatacattcagttgggtgaaacacgaaatggattgcatttctgaact

SEQ ID NO: 136159 - DNA, 659 bp, Zea mays
  unsure (1)..(659): unsure at all n locations
  Clone ID: MRT4577_55653C.1
ctcgaggccggccgggccgggaatctaaaaaagtacagtttctgtactttatntgcgggctccttnagggaaaaaaacaaaacaaaatgccgcccaagttcgaccccaaccaggagatcaacatcatcgtccgcgctgtcggcggtgagatgccggccaccgctgccctggcccccaaggtcggtccgctcggtctgaacgccaagaagattggtgaggacatccagaaggccaccaaggactggaagggcctgaaggtcacctgcaagctgaccgtcaagaaccgtgtcgccaccgtccttgtcaccccgtccgtcgcgtcgcgcgtcatcaaggccctgaaggaggccccgcgtgaccgcaagaaggtcaagaacatcaagcacaacggcaacgtcaccttcgccgagatcctgaagatcggcaaggaggcccaggccaagtcgatggccaagagcatgaagggctgcgtcctggaggttctngggcaccgccgtctcggttggctgcaccgtcgacggtgagcaccccaccaagatccaggaggccgtcgccgccggcaagctgaaggtcccggagaagtaaaaatcctttccttgtccgtctcttcctaccagtcatttttcccaaaaaaaaaaaaaaaaaaggcccctagggcc

SEQ ID NO: 136160 - DNA, 238 bp, Zea mays
  Clone ID: MRT4577_55654C.1
tcgagctcacttgatggcggccgccctctctttttataagggggggggtttaattaaaattttggtcggaccaccaccacacaggccaagataacggaaccatgtcctttggcccgcttgttcaaaagaaggacctcacaatcagccggtgagggggaacacggaactgagcggggaagggccccaaagaggaatgcaccccctaaacacccatggcaacggaggcgaaaaaaaccca

SEQ ID NO: 136161 - DNA, 317 bp, Zea mays
  Clone ID: MRT4577_55655C.1
gcacgagatttcgacggagaggaggacggcattggcaaggggagggccggcgatggtcaggacggcgcgggggaaagccatggccacgaggatgagtagctagctgcattgcattgcatgcatggcgccatggatgcgacgaccacaggacatacgatgcgagctgggcgccatctgtttaatttgttcgttcgttctttctttcttcttgctactaaatcagagtactactagcttttatcactaccttttgttattagctaccacctgcatgcatctgctgctgcttctagctagctgttattatgtatactact

SEQ ID NO: 136162 - DNA, 1540 bp, Zea mays
  unsure (1)..(1540): unsure at all n locations
  Clone ID: MRT4577_55656C.1
cggtgccggnatatcccggggcccagcctgnacgaaggattgaggaggctgcgagctacgtcaggatccaacaccaccatggttacgggaaagaagaggacattcgtgctctacccgtcgctgggcgtgggccacctgatcccgatggtggagctggccaagcacctcttgcgccacggccacggcgcgctcatcgccgtggtcaacccgcccgacaccgacgccgtgtcggccgccgcggtggagcgcctcgcggcggccaacccggccatcgcgttccgcctcctgccggtcccggcctacttcttcttcgcctccgcggcgggggacctcgccgtgttcctcaacctgccgtacctctaccccaccctgccgtcgttcagggacatgggcgaggcgccggtgcgctgccccggcatgccgccggtccgggcgatggacatgccgctgacggtgcaggacagggacagcgaccggaccaaggtccggatgtaccagttccgccgcatcccggaggggaagggcgtgctggtcaacagcttcgcctggctggagcccagggcactgagagcgctcggcgacggcgtctgcgtgcccggccgcccgacgccgagggtcttctgcgtcgggccactggtcaacgacggcagcagcacggcggggggcggggggaggcacgagtgcctggcgtggctggacgcgcagcctaagcggagcgtcgtgttcctctgcttcggcagcaagggcgccttccccgccgcgcagttacaggagatcgcccacgggctggagagctccggccaccggttcctgtgggccgtgaggagcccgccggaagaaccggacacggacctggggaagctgcttcccgaagggttcctggacaggaacagagacagaggcatggtggtgaaggactgggtgccacaggcagaggtggtgcggcacgaggcggtcggcgcgttcgtcacgcactgcggctggaactccacgctcgaggccatcatgtctggcctgcccatgatatgctggccgctgtacgcggagcaggggctcaacaaggtgttcatggtggaggagtggaggatcggggtggagctgcgcgggtacgaaaagttcgtcaaggcggaggagctggaagcgaaggtcagactggtgatggaggctgaggaagggaggatcctccgggagaggctcgcggtggcgagggagaaggcgttgggagctactaaggaaggcgggtcttctgaagtggcattcacggagttctttggagatttggacaagaccagatctccgtccgtaaacggagaatgcgattgaatttgatcagggtgtgctgctgtggcagatggactgcgaacgtatatatactttaggattcaatatcacttagtatttgacagtacgagactaaaatattgcatctgtggtatgggaataaaattggatccaagcagagagccacttgcgttgcgtgttacaatgtgattgacagttttaccttattttatgaatcaattcactgatgattgtaagt

SEQ ID NO: 136163 - DNA, 672 bp, Zea mays
  Clone ID: MRT4577_55657C.1
atggagcttggagaccaggaccagttggatggatggccttttgatgaacatggcaggccgcagaccgcggttctctggtttcaacttgggtgtgctgatgaccatgacgcggacttttcgtctgtgctcgagtgcaccgcatactgggctgggggctgcggcgtggcgtggccgagggagggaggcgcgcgcagaagtcgcgcaagggggctcgcagtgcacgagcggatgagtggcgctgccgccgccgactctgatcggttgccattcatgtccgtttgccccgatggagctcacatgaagcatctgcggcatttccgtcgaccagaagcagccgcgtactgcagagcaacaatttgctgtcacttcggcaggcacggacagcatcagaatccgagcaccgtcgctgtcctcccatcggcgtggcgtgcgggtgcggccaccgtttccccggatttcagcgcgatttggcccgctctatacacccagccagccaaccagccgtgcggcgcctacacgaacgttagcgagccgcgggactgcgggcgcgaagtgttcagacggtcagacctcaggcgtgggtgggtacgggttttaccctgcctagcgtgcgtgctcggccgttccaggcggctctgtagagggagcagcgaccgggtaggccaattttga

SEQ ID NO: 136164 - DNA, 1784 bp, Zea mays
  Clone ID: MRT4577_55658C.1
ggccagcatcgtcgatgtatttaagcgtgccggtgcagctgccgggtgcgggatcttatcccttccaggcagcatccccagcctgacgaaggaattgaggaggctcgagctacgtcaggatccaacaccaccatggttacgggaaagaagaggacattcgtgctctacccgtcgctgggcgtgggccacctgaccccgatggtggagctggccaagcacctcttgcgccacggccacggcgcgctcatcgccgtggtcaacccgcccgacaccgacgccgtgtcggccgccgcggtggagcgcctcgcggcggtcaacccggccatcgcgttccgcctcctgccggtcccggccagcccggacgccggcgcggactgggtgaagcgcgacctggacacgctccggctcgccaaccccgtgctccgggacttcctgctccggtcccagcccaccgccgccgccgacgcgctcatcctcgacatgttctgcgtcgacgcgctcgacgtcgcggcggagctcggcgtcccggcctacttcttcttcgcctccgcggcgggggacctcgccatgttcctcaacctgccgtacctctaccccaccctgccgtcgttcagggacatgggcgaggcgccggtgcgctgccccggcatgccgccggtccgggcgatggacatgccgctgacggtgcaggacagggacagcgaccggaccaaggtccggatgtaccagttccgccgcatcccggaggggaggggcgtgctggtcaacagcttcgcctggctggagcccagggcactgagagcgctcggcgacggcgtctgcgtgcccggccgcccgacgccgagggtcttctgcgtcgggccactggtcaacgacggcagcagcacggcggggggcggggggaggcacgagtgcctggcgtggctggacgcgcagcctaagcggagcgtcgtgttcctctgcttcggcagcaagggctccttccccgccgcgcagttagaggagatcgcccacgggctggagagctccggccaccggttcctgtgggccgtgaggagcccgccggaagaaccggacacggacctggggaagctgcttcccgaagggttcctggacaggaacagagacagaggcatggtggtgaaggactgggtgccacaggcagaggtggtgcggcacgaggcggtccgcgcgttcgtcacgcactgcggctggaactccacgctcgaggccatcatgtctggcctgcccatgatatgctggccgctgtacgcggagcaggggctcaacaaggtgttcatggtggaggagtggaggatcggggtggagctgcgcgggtacgaaaagttcgtcaaggcggaggagctggaagcgaaggtcagactggtgatggaggctgaggaagggaggatcctccgggagaggctcgcggtggcgagggagaaggcgttgggggctactaaggaaggcgggtcttctgaagtggcattcgcggagttctttggagatttggacaagagcagctctccgtcggtaaacggagaatgcgattgaattgatcactggtgtgctggtgtggcagatggactgcgaacgtatatatactttaggattcaatatcacttagtattttgacagtacgagactaaaatattgcatctgtggtatgggaataaaattggattcaagcagagagccacttgcgttgcgtgttacaatgtgattgtcagttttaccttattttatgaatcaattcactgatgattgtgaaaaaaaataattta

SEQ ID NO: 136165 - DNA, 392 bp, Zea mays
  Clone ID: MRT4577_55659C.1
gggccccccccccagttccttattagaacaagacctgtcaaacacattgcattacattttgtgccttaattcccttggatttttttgtgggggcttgccgtgtttggtttttttcctcaaattcctttttttcctttcaaccaacaaggtttaagcagtggcccaaactggacattcctggttgggaaggtgaagctttaatactttagggctgggttttgggttgggggaagttcaaattttttttttaaaaggttccccttgggggaggtctttttattttgtgggaagcgggcttggggtgcccacttcgttgcccccccagaggttgtttctttttggtggggtgcgccctttgtccctttttttggttttttctggggttccttttg

SEQ ID NO: 136166 - DNA, 101 bp, Zea mays
  Clone ID: MRT4577_5565C.1
atcacccaacctccatcgcaaattcaacccaccctctatcgccacattaagcccagcatgtctaattcttacacccatccaaacctctacacttgccacat

SEQ ID NO: 136167 - DNA, 766 bp, Zea mays
  Clone ID: MRT4577_55660C.1
atgcactctcgtccctcccggtctgtctctctgtgcggcggcggcgctccctaaactccctcctcgacgctctctgctccctcctcgacgctctctgcatgcttcttccagccgccaccgcccctgcatgaatggtccgctgctacgggaggcgctgcccctcctgttgcagtcgcctacgcgcgccgcctcccagtcccagacgcagccagacgcagccgcgcaggcagacgcatgcgagacagccgcgcaggcagacgcatgcaaccatgcgtctttgtctctttgagctttccttcttttgaagattcattcacatgtgacatgtctggtagctagtctcgtagctttccttcttttgaagatccaacgtgcatctgtttttttttaattttctttttgggtagtggtagttttgtgttttgcgggctcgggctggcacggactatgaaatgggccgggctattcgggccggtccggcacggtcgggcctataccgtgccgtgctcgggaagaggtataggcccgtcgggcggcacggcacggcacgattaagtagacgggcctaaccgtgccgggctcaaacaggccgggccgagtcgggctcgggccgggccgtccatttggacatctatatgccgaaccatagtcttgacaagtggctacatgaccttgatcctgattcagatgcgtccggacctgtaccaggcctgacgctactgcagagattgaacattgctgtcaatgtcgccgacgctatggacta

SEQ ID NO: 136168 - DNA, 193 bp, Zea mays
  Clone ID: MRT4577_55661C.1
ctctgctccttcgaagcgacctcgctctgacggctcgattggcctaaccttgtctcaagctcccaccacaggactctgccgatgtctcaacagtttcattgatcgctccagatcgtttgcagctttgttaaccgaacaacaagtgtacagagaggaagcagggtagcagtctatgcatccgttcttttttatt

SEQ ID NO: 136169 - DNA, 276 bp, Zea mays
  Clone ID: MRT4577_55662C.1
ctgccttgggcggatcgtcgatgccggcgggcttcttcttatacgtggcctaggacttggcggtagccgacaccggcgcgggcacaggggtgggctgataggacccgaacaggtcgtaggggagcggcaccctgtccacggggtagaaggtgagcggcaagtccttgctgacggggctgcccagcaacaaccagttgacgcccggggacacgaggacgttggtgcccaaccgcaaggagtcgaacccgtagggcccgtcatggccggagccctgcg

SEQ ID NO: 136170 - DNA, 368 bp, Zea mays
  unsure (1)..(368): unsure at all n locations
  Clone ID: MRT4577_55663C.1
tatgaagcagaggagtattggcatgatgctagaaaagacccagcaactcattcaattgatggtggaatatcattaaatgacattgcagaatttgatggtggggcaacaactgaagaaaggagcagcctagagaagcaccgatctgatgagggtgtgaagattgctgtctcccagaattttggtagtatgaatgaaaaagtggcaattgcacctacctcaagttttgagaatcaagaaggattgcagcagcctcgtgaagttcttccaaatgctaaactaagcaaaaataatgaccaagagaacagtgatgtgcatgatatacaagtggttgctacatnctgtgattcaaaaggacacaagtttggatc

SEQ ID NO: 136171 - DNA, 569 bp, Zea mays
  Clone ID: MRT4577_55664C.1
attgaaagggaagaccatctctttgccgccttccaatactttgataaagacggcagtggatacatcacagctgatgagctgcagcaagcatgtgacgagttcggaatagaggatatcagactcgaagacatgattggcgaagtggatcaagacaatgatgggcgcatagattacaacgagttcgtcgccatgatgcaaaaaccaacagccggatatggcaagaaaggtcatcggtataaccttagcattggttttagggatgctttgaaggcaaatagctgacaatgttgcccatcatactaagtgacgtggtgttgtgcatacgtgttgtaattgtaaacggaactcgggttctgattaattcataggatctttttttgatcaaagtcctgaacccagctttattagaaagtcgccgagtttaaacgaaggaaggccacaccaacaaaccgggtgccagatggagacagacgcggaaaagttctaagacaactgaacccttctttcctcaaggctccagcagatccaaggctagcttctcagtcaccgactccgccaacaccttggac

SEQ ID NO: 136172 - DNA, 548 bp, Zea mays
  Clone ID: MRT4577_55665C.1
ccccgacatcaacctgcccgggccgaacgcgaccatccccagccactattattattaccaacatcatcacctacccgctgcctccatcctcctcctcgccccttcccatcgccgattcctcgcgtcttcccgtcgtctccgactcgcttccagttcccgatttgccgaacgccagcgacgccgtcgcatggagatctccttcgaggcgtgggagggcgtgcagcggcacggccaggacctcgcggaccgcctcgcgcagggcttcacgggcctgctccaggcgccgccgcagttcccgtggccgccggcggccacgccgcacaagcggatgcccttcgacatcgacctccccgtcgtccccttcggcgccggcgtgccgaaaaaggacctccccttcccggccgccgccgccgccgtctcctcggtcatcgacatcggcggcaggctgggccaggccggcgccgagcttggggcgtccgtaggcggggacgtgcagcacgccgtgcgccaccggcccgtgccgttccgcaacgcccagatccggagcc

SEQ ID NO: 136173 - DNA, 403 bp, Zea mays
  unsure (1)..(403): unsure at all n locations
  Clone ID: MRT4577_55666C.1
ggcacaaaaaattatgctaatttcctttttnnttaacacagacaaatatgaaagatgacaatacttcatgcctataataaatgccatatcgtattttagtttcaaataagggaatacagctcaaagacaaacttgaaacacaggtacatcgatatgatcttatagcccaagagtgaaattttgtcctagatgggttcttgtttcatgtgtttccttaaagtatgcacaacgacttcttcacactgaacttcataattaattattaaaaacgctttaataatgaattttaactatacaaacttcagtggatcaccttgaaaccaatattacctctgctttagtctttttgtagatcatcacttcatctttgactattctgtcgattatttctttttcaagctcg

SEQ ID NO: 136174 - DNA, 321 bp, Zea mays
  Clone ID: MRT4577_55667C.1
atcgaacagctccacggcgtgcgggcgggtgtacactaccggaacaatctctgtctcccacgcacagatcccttcacaaaaactggtgcaacctgcagtacgtaggaatacagaacgtatacggtacacgcatgcaaacataatgccctcgatcacttgccggggaccaaattggtggcgtaagcccaggcgctgctgatgacggcgccggcgatgaggtcggcaaggttctaaaaggggcccttgcctggtgacgatagcacgcaccaagaaaccgaacatggaaaacatggagaggcggaccgtcttgatcaccttcac

SEQ ID NO: 136175 - DNA, 374 bp, Zea mays
  Clone ID: MRT4577_55668C.1
cccacgcgtgcgcgccaaggtcctggtcgaggaggacttcctggccgtcgagaaagaggggtaggtgcaggtgcaggtgcaagcgctcgaggcggagctccggcgagccggccaggagaacagactcctcatcgacatgctccgagcggtggtggccaagtacgcggagctgcagggccaggtcaacggcatggcggcgccggtgtccacggcgggcaacatcgccgacgccgccgacgcctaccgccagttctccgcgtcgatcgacgacagcggctgcgcgtacggctcgtcgtacatgaagcggacgatccggaacgactgcctcaacaccgagccctagcatcacaaccgcaagccggcgacgtcgtacg

SEQ ID NO: 136176 - DNA, 391 bp, Zea mays
  unsure (1)..(391): unsure at all n locations
  Clone ID: MRT4577_55669C.1
tcgagcggccgcccgggcaggtacaagctttttttttttttttttttttttttttttttccctgatgtgaagttaaacctccttttcaataaaagaaaaaccgccaccggggagatttaaaacaataaagccggggaatccttgggccacgttaatgaaggctggaccttgaaaaatgttaggaagtgcaacggacaaaaaaagtccgtgacactttggccaaataaacatgtccatacgaaaaagcgcactaaaggtgcccatatttttgcaagccttgtaaccataaataacaaaagtggaggggcccccaattctggggaagttggggtaaccatactttancgcaaccactgtggggaggaattctgccgataccactctcacggcc

SEQ ID NO: 136177 - DNA, 1071 bp, Zea mays
  Clone ID: MRT4577_5566C.1
atcccatctcacttcatataccactccctaggaggacccagcaacacacacagccgagctttgtttaggcaagatgaacaggaagccaggagactgggactgcagggcgtgccagcacctcaacttcagccgccgagacatatgccagcgctgcagcgagccacgtggagttgctgatcgtggcggcggaggaggaggaggaggcgactacgccagcttcggtggccgcggtggctcctccttcggcggcggctttggcgctgctggctctgacgtccggcctggtgactggtactgctcctgcggcgcgcacaacttcgccagccgctccagctgcttcaagtgctccgcctacaaggaggaggccgctgtgaacagtggcgctggcggctttgacggcgacatgtcacgctcacggggctacggcttcggcagcggtgctgctggtgctggtgctggcgctgcccgtactaccaaccgccccggttggaagtccggagactggatctgcaccagatccggatgcaacgagcacaacttcgccagcaggatggagtgcttcaggtgcaacgcaccgcgggactctggtagcgctgccatgacctacgaaaactacttgtaaattaccgaatctttttcccctcatcggccgctctggctgccatatccatgacctaaccgagtacgggttccgtgtgcaggcactgaggtgtaggatcgagcaagttaaaaagtctgcagcgccgaagaaagcgacgacaagaggagtcctcatcacgtcgtaacgtaagagagagagaggagtgagagagagtagtggatttgccaaaaaaaaaaaagacggccgcgatgctctgttactagctagctagttttgttcaaccacccctgcctgccgtctcttctcttttattagatttggtttggttctcatagccctttaattaccatttgggacctatgtttgctgttctgtttcccgttcgtctcctccgcatgtttgcgcttggatcgagtcttgtgatgtaaccccccaaaaaaacgcttgcttaactagtactgttgcttctt

SEQ ID NO: 136178 - DNA, 462 bp, Zea mays
  Clone ID: MRT4577_55670C.1
ctgggttttttttttttttttttttttttttttttttttttttttttttttttttcattttcattatttcattcttatttgtgtttttcgttacctttggttattaattatttttcataaatacaacaacacaacggttaaaaaaaactttgggggggggggggggattcccacaaaacacggactacaccacttcctgaaaaactgaagcattaaagggaaaaaagggggaaggccacaaaaccacaagggcaaggaaacccctgatggcacaacaaaccaacaaagccaggcctggaagtgttttacacaaagcccgtaggcatggggggttttggccacggagaaacattgggaaaaagagccaccatattgccatgggctgaacttgactgaagggacatctgtctcgtgggggacataaaaacgggctatggaaacccggggctctgtgtatttgcc

SEQ ID NO: 136179 - DNA, 1282 bp, Zea mays
  Clone ID: MRT4577_55671C.1
ttgggaccctcgaggtacgtcggggccccggggccggccgaacgaacccatcgtttgaccgaccaactgcccaacaaacgatggccggcgtgtcagcaagcatcccgtgcgtggtgctcaacacgggccacgcgatgcccgtgctgggcttcgggaccggctcctccagcacgccggaggatctgccggcgaccatcctccacgccgtccgccttggctaccgccacatcgacacggcctccatgtacggcacggagggggcggtcggagccgccgtctccgacgccgtcgctgcgggggccgtcacctcccgcgctgacctcttcatcacctccaagctcgtgatgaaggacgcgcatccggaccgcgtgctccccgcgatccgggagtcgctggcccgcctaggcctggactacctcgacctcttcctcgtccactggcccgtcgccgccgacgagaacaacaagcccgtgccgttcgacatggaaggcgtctggcacgccatggaggagtgccaccgcatcggccttgctaggtccgtcggcgtcagcaacttctctgcggccaagatgtcccggctgctcgccttcgccgccgtaccgccggctgtgaaccaggtggaggtgaacgtcggctggcgtcaagagaaggtcagggaggcctgcgccaagaacggcgtcgtcgtcaccgccttctcgccgctgggcgcgatcggcacggcgtggggatccaacgccgtcatggaaagcggcgcgctggaggacatcgccgccaggagaggcaagaccattgctcaggtagcgttgaggtggcttcacgagcaaggggtgtgctttgtggcgaggagctttaacaaggagaggttgaagcaaaacatggagcttttcgattgggagttgagcgtcgatgacaaggagaagatcatggggattccacagaggagagcatgccgtgcagagttctttttgtcaccagacgggccgtacaagaccttggaggagctatgggacggggagatatgagataccatgtagctgttgtatctattgtttgtcgacatcgttgttgcttgctgctgtggggaaatatcttcggaatactctctgaatgaatgtggactaacagttggtcctggacaattaccttgcaaatcagtatacattttgttgcattctagctaggttgggtgtggtagtactgctagtgattaagattattagggcttttcttagatcatgtacaacctttagtttgccaaataataacttgattttgtgtcatt

SEQ ID NO: 136180 - DNA, 156 bp, Zea mays
  Clone ID: MRT4577_55672C.1
tttctgctattcttcatttcgtacattagggcgggcaaccttacagggtggggagggtcatcattctcttcaatctcactactatatcaacttccatcgcctctgtaatgcatattcccttcccacttctctaccctcataacttgtacaactctt

SEQ ID NO: 136181 - DNA, 127 bp, Zea mays
  Clone ID: MRT4577_55673C.1
gaccagaaacgtgatccatttgggtggtacattgcagaaaagactgcccagattcctgtagccgaattaagcctcaacatggacaaggccctactcaagtactaggctatgtgtctaactactgacg

SEQ ID NO: 136182 - DNA, 183 bp, Zea mays
  Clone ID: MRT4577_55674C.1
ctcttccatggcctctacgagcctccagctccatcttttgtcttctttagtgatgactaattgaccgcttggcgccgtcctggacataacatgatgaccgtgcgcgatagcatccgctcccgttccacccaggataggatccagaaagatatggcgtaccaactgcccaggctactgaatgtc

SEQ ID NO: 136183 - DNA, 112 bp, Zea mays
  Clone ID: MRT4577_55675C.1
gatactctgtccaggacacgtacttagatgactgatgtgatgacgtagacgatgttatacacaaggtcttagaatacggaactgaaacgcgaactaagcagctggcaaccct

SEQ ID NO: 136184 - DNA, 426 bp, Zea mays
  Clone ID: MRT4577_55676C.1
gttcagtagtgtgctatgacaatgagatgtttagcgtgaaagtgctcgcgtcaggcacttgggcggatgtcacccgcgtgctcatgtgcctctacgagaaggaggcgcactaacatcatgatccgcggcgacgcctacctcggcaccaaacgcatgccccagtacctcaagctgcagatcgaaggcgaggcgctcacctactatgacgagatcctcaccatatccgactccacggggattctgcgccacatgtcccacacgtacgcgaatcagggcaacctgtacctgattggcacgggcgcgctggaccgggcgtacatcgagcagtagctgcagactgaggcgcacagcttctacgcacccaacgccgacatggtctacagactcgacttcctgcctgctaccctgcccatgcagaacgacaac

SEQ ID NO: 136185 - DNA, 592 bp, Zea mays
  Clone ID: MRT4577_55677C.1
cattgggtacctcgaagccggccgggatatgcatactcaagccacttatcgctcaatcactgacgataaacgctatcgcactactctaactcctagctagtacgctcggatccttctccacgaatgatatccccacacgtccacccagcagctgcaccatgctgctgtaactgctcctcgtcacactgacgctgtcggtgatggacataacagagtcaaggtcgactcgctggagctaataaacatctggcggtgcgattcgtgatccctccctacctatatgcggcatactcgctcgccttccatccggaaacgagctaataacgataatgtgatacacaccatgggcgcgcggcatctattgatagacagcatgcaacttgcaacggacccaacactatgcacaggtattcatcaaaacatgcttcatgataaccgccgccactcctgctatacgagtgacaatgtctctggcatgatccttactactaccgagtctaatgcgagatcgatcactatgaacagaagcagcatagagagatgaaacatcgttattcttatgtactataacctatcttagatagcaaactga

SEQ ID NO: 136186 - DNA, 356 bp, Zea mays
  Clone ID: MRT4577_55678C.1
cggtaagacgacacacattatcattgtgtggtatagaccaataatatatagcatcataataagagttctggttgttaaagagaaaaaaaagaaaaaaaaaagaaaaaaaaagaaaacaaaaaataaaaaaacaaaaaataaaataaaaataaattaaaaaataacataaacaacagaggagaaaatcaatgaagaaaaaaaacaatagatcaatccatacaggatccaacaggcaataagcaacaagcatcttaccattatcacccttgttcctacaacaaccgtaacaccttattacagcagttacattaggtacatgggatgagacaaaacatcatggcacaacatctacaaca

SEQ ID NO: 136187 - DNA, 757 bp, Zea mays
  unsure (1)..(757): unsure at all n locations
  Clone ID: MRT4577_55679C.1
ccgggaaaccaacaaaaacagcaccgaccacaaaaatctgcctcttaccacctgctcatcacctcgtctcatatataaagcacatcactctcagttaacatggtcgtcaaggttggtatcaacggcttcggtcgcattggccgtatcgtcttccgcaatgccatcgagcacaacgacgtcgacattgtcgccgtaaacgaccctttcatcgagccccactacgctgcatacatgctcaagtatgacagcacacacggccagttcaagggtgacatcaaggttgacggcaacaacctgaccgtcaacggcaagaccatccgtttccacatggagaaggaccccgccaacattccatggagcgagactggcgcttactacgtcgtcgagtccaccggtgtcttcaccaccaccgagaaggccaaggcccacttgaagggcggagccaagaaggttgtcatctctgctccttccgctgacgcccccatgttcgtcatgggtgtcaatcacgagacctacaagcccgacattgaggtgctctccaacgcctcttgcacaaccaactgcttggctcctctcgccaaagtcattcacgacaagtacaccatcattgagggtctcatgaccaccatccactcctacactgccacccagaaggtcgttgacggcccctccgcaaagactggncgtgtgggacgtactgctgcccagaacatcattcccagcagcactggtgccgccaaggctgtnncgcaggtca

SEQ ID NO: 136188 - DNA, 233 bp, Zea mays
  Clone ID: MRT4577_5567C.1
tgttcactacacagttcgccactcctttagtatcttgtgatttgtacgtcgacgagatcactggtcgtgtgtcgtacgactacacattgggaatggtagtgttggtgcatcatggtaggcgttcctccggctcgccatcgttctgctggtcgtagcatgcatggccggttcggagatactatttggctaacgttacgtcaatgatgaccctctgtagtgtaagcaggcgtgct

SEQ ID NO: 136189 - DNA, 256 bp, Zea mays
  unsure (1)..(256): unsure at all n locations
  Clone ID: MRT4577_55680C.1
ttcggtgggcggtgggttcggcaactggctatggctaggttaattaaatgagacaaaaccatgaatgcaatgcaatgtgtcaagtcacagtgtgtgtactatacattttggatttgggtgtcatccatattcgtccaaagactgaaacagtgaaaccactgtgtggtcttcgtgttcgtcggtacttttaggacatgtacagcgtgtcttgtcttttccctacactctctcgctgttgttgtcgtcatgtatccna

SEQ ID NO: 136190 - DNA, 444 bp, Zea mays
  unsure (1)..(444): unsure at all n locations
  Clone ID: MRT4577_55681C.1
gcgtcccgccgcctccgccgcgcgctctcggccgacaaggcgtggctggcgcagtgccgccggctggtgccctatcaggcggacctgctcgcctggcacgccgccaccgcgggctattgcctcgccatctgccgattactccactccgacgcgccgctgctcggcctctgggcgcaccataaccccgagctcggcaacctcatcgctgctgtcccgggcttcctctccgtcgtcgccggccgcgccataccgcaagagctctccccgcgcctccgctgggcgcccgtctttgagctccttgccgacacccactgccatcccgcactactttnnncttcaccgtcaccatcacacccacctattgccaagcctgctcagccttcctgcaaccccacgccaacgtcatctttctttaagcgcacattgccagggatccgtttgctt

SEQ ID NO: 136191 - DNA, 242 bp, Zea mays
  Clone ID: MRT4577_55682C.1
cgctgatcatctaaaggagttgttgccaccagacctcctcaagaagcttttgagtttataaggtcgtgccttttgcgactgtgtggcggaggcttatttgccttttctttagatcttgcctttgatgtgctgggtggctttgtgttgcgtgctcatgttgtcagagctggtgtgtgctcttggtgctagagtgttgttgttggtgatagggttagcgtagtttttgctggaacagttgtttg

SEQ ID NO: 136192 - DNA, 167 bp, Zea mays
  Clone ID: MRT4577_55683C.1
cacaaggcgtacgcaatctggcattgttaccgtccttctgctccagattttcgagttcatttaagacctggtgcatcctaacaagaaaccaagctatctttccaagtaggaaggagcttgatcaccgtaaatccagttttgcccgcttcttttgacaggatatacac

SEQ ID NO: 136193 - DNA, 209 bp, Zea mays
  Clone ID: MRT4577_55684C.1
gggcggctaactataaaagtcatgttcaatctctatgcgagaaagccgtctcgctctagatgcagagcgttaagcgccgtttgcgtttgcgcatgcccctgcccccacccaggccacagctcctggaataaaaatgacagaacagaatctttatacttcggtgaatgggcactttgccgaggattaagaataatttggactttgtcttc

SEQ ID NO: 136194 - DNA, 1308 bp, Zea mays
  Clone ID: MRT4577_55685C.1
atgccaccgaaaaaagcttcaacgacaggggctgccactctgcagccgctggaccccaatcaggatgtcatctctcttagggaggcccgaagccagaagaggaaggccatcagtccaacgcctccggaagacgacttggaccaagaaatacaaaaaatggagatgctccatcaacaggttcaacggaagaaggagaagatggctcgtctagctgatcttcaaaagcagatagatgaagcctctgaagagcttcgacacctcactcaagatgaccagaatcaaaggcccccgcgcagagagcttcatcaagagggtttctacaacgaggatgactggtatgaagatttccatcatggaaattttgcttttgatgacacttctcccctgtcaacagaactgcaggctacaccttggccacagtcttataagccacctcagctccctatgtatgacgatcattcagacccgaagcaattcttgatgagctatgaggcaactatatcttcgtatggtggcaacacagcggtcatggcaaagtccttcgtcatggttgtcaggagcgttgcacaaacttggtactcctcccttaggccaggaacaatcacctcatggcaaaagctgaaggatatgttgataaccagcttccaagtgcccaatgaaattgtcattgaggccatgattaaggggcttcggccaggaccttcagctcagtactttgccaggaaacctcctcaaactttggagaagctgctccagaagatggacgagtatattcgagctgacaatgattttcgccaaagaagggaggaagctctcaggttttctgaaatgaccaggggcttcggaggaaggttttatccgaggcatgtcaggtcaattcacaattctactcaaaatgatgacaaagggagtcagcagcaaaggtcacagtattcctcgcaagcttcggggcaacagcaagctttggggcaacagcaaagctcttttcggccgccagcgccaagaggcagaggcgccaggggcttcgggggaagatttggagatcaaccaagaaaaatttactgcttattctgcggtgaaggcaagggccataccaccagaatgtgtcatgttaccattcaaaagcaaaaggagctagcagaggctgcagcacaacagagccagctgaagcaggttatgcatactgcttcgtatcattcgccttacattccagaatatgtaggcaatcaccctgcagcctctgttgcttcggcaagccaaccccaagcttcctggcaacagcttccaccgccaccaccaatacaatga

SEQ ID NO: 136195 - DNA, 1386 bp, Zea mays
  Clone ID: MRT4577_55686C.1
atgccaccgaaaaaagcttcaacgacaggggctgccactctgcagccgctggaccccaatcaggatgtcatctctcttagggaggcccgaagccagaagaggaaggccatcagtccaacgcctccggaagacgacttggaccaagaaatacaaaaaatggagatgctccatcaacaggttcaacggaagaaggagaagatggctcgtctagctgatcttcaaaagcagatagatgaagcctctgaagagcttcgacacctcactcaagatgaccagaatcaaaggcccccgcgcagagagcttcatcaagagggtttctacaacgaggatgactggtatgaagatttccatcatggaaattttgcttttgatgacacttctcccctgtcaacagaactgcaggctacaccttggccacagtcttataagccacctcagctccctatgtatgacgatcattcagacccgaagcaattcttgatgagctatgaggcaactatatcttcgtatggtggcaacacagcggtcatggcaaagtccttcgtcatggttgtcaggagcgttgcacaaacttggtactcctcccttaggccaggaacaatcacctcatggcaaaagctgaaggatatgttgataaccagcttccaaggttttcagacgaagccagtcactgctcaagctttattccagtgcacccaggatcgccaagaggcacaggcaccaacagtgcccaatgaaattgtcattgaggccatgattaaggggcttcggccaggaccttcagctcagtactttgccaggaaacctcctcaaactttggagaagctgctccagaagatggacgagtatattcgagctgacaatgattttcgccaaagaagggaggaagctctcaggttttctgaaatgaccaggggcttcggaggaaggttttatccgaggcatgtcaggtcaattcacaattctactcaaaatgatgacaaagggagtcagcagcaaaggtcacagtattcctcgcaagcttcggggcaacagcaagctttggggcaacagcaaagctcttttcggccgccagcgccaagaggcagaggcgccaggggcttcgggggaagatttggagatcaaccaagaaaaatttactgcttattctgcggtgaaggcaagggccataccaccagaatgtgtcatgttaccattcaaaagcaaaaggagctagcagaggctgcagcacaacagagccagctgaagcaggttatgcatactgcttcgtatcattcgccttacattccagaatatgtaggcaatcaccctgcagcctctgttgcttcggcaagccaaccccaagcttcctggcaacagcttccaccgccaccaccaatacaatga

SEQ ID NO: 136196 - DNA, 827 bp, Zea mays
  Clone ID: MRT4577_55687C.1
ccggccgggaaccagcggcgcagacaccgttcattccatggcgaactcctacgccgcgcccttgcgcccgccctctgctcgttcctgcgccaggctataaaaccagcccctgtcgcgcccctctcggccggcggccgaccgccacatatccccgtcatgggcaccgtgccaccgccgctacgatgggtgagaacgggatctccggcgcatgcgaatacttcaattcaacattgctgtgcgaatgggtctggtcagggaggttcgccggtgagctcctgacgcggttgcggctcgattgggcatatgggactactgaatcaaggtggatttgtcgctggtgcttgagtaggttggcagagccgcctcatgtcatgggttgtcgtcgctgctacaccattcacggatatgaggtgtatcctgttcatgatcactgatggtcctcataggcatccgttgacctgttgctcccatcgttacactatccattgcattgccaccattgaccccctggcgcccacaaatctacgggtggtgttagaatatctcttcgtggatctgcactactttttggagatgcaattgaagcaccagtatggtttggcgatgcctgagatcctcccagcgatgtcatgtgatgcattgctggcactaacccccaacatgctctgctcgtcccccggcaggaccgattgatgctgcagtgcacgccgtcgaagacatatcagcaactagtggtctcacaatatgatggatttacaaaatgatggcgttcatgcgttacaaaatgatggtagacgtcatattgtatctcacctgatgcagcacta

SEQ ID NO: 136197 - DNA, 230 bp, Zea mays
  Clone ID: MRT4577_55688C.1
gcaccgggcccctaaaaagtcaggaacgaccctgctgagcagggcaggccacgttactaatttgtactagaaattaagccatggacgaggcgcacacacacacacacacacaccctgcaacctgcactgtgcattccgtcggttcacgtgttcagcagttggttgttacacttgtagcgctcgcagtgccagatgtggagaaatgaaatgaaatgaaaagagagagagag

SEQ ID NO: 136198 - DNA, 339 bp, Zea mays
  Clone ID: MRT4577_55689C.1
gttccttctgcacccttctaccaactccatccgtatcttacatacaaaccaaccacgcgatcaaaacaagccccgcagaccgaccacgccagccccaacgaccaagcccgcccaaataaccaatcccaaaaccttaccctccccccccacacccccttcctccctccctttgccatccccacgacctccatccaagggaagagcaacaccaaagggaaaccaaagagaaacagggaccccaacacacactcaacacccgagcggcccccttcaccttcaaagtccagaactctcctgctgacccagaaccgcccgaccgccacccgccgccggaccagc

SEQ ID NO: 136199 - DNA, 250 bp, Zea mays
  Clone ID: MRT4577_5568C.1
acggcaacatggtatatggagctagggtttgcaggcgccgccactcgagctgcgacttgcgcgtgtgatgaagaatgctgtcacccagtctagcccggagcctgagcaggaaaccgtggtggagaagcgcgtggaggaggcggatccatggagcgcatctcggcggtcggtcccctggcagttggcgtgtcgagctcatccgcgcgtcctctactcgtccgcgcctgtgtcggtcgtcgttcccgttctt

SEQ ID NO: 136200 - DNA, 402 bp, Zea mays
  Clone ID: MRT4577_55690C.1
cgtacaaacttaaaccaacccataaacgattttcccattttttttggcaaaaatttcccaatgggacaatgaaaataagggccatcgcaattttttttttgggggaaataccgggcctagttttagcatacaaaagggaaggccaaaactggaaggggtcaattgttgcaaaatgcgagaagggtttaatggagcgcattccgggaataaaccccggaaaaaacacaacgccctaggggtcctttcagaggggggggttttaacagaccatttgccccctttttgttaacagcaaagaagttttaaaactttttcacaggattggtttttgggggggcaatgggaagtttggcttgctttaaaatgggaaacacccgtttttttatggggtttttttccccc

SEQ ID NO: 136201 - DNA, 141 bp, Zea mays
  Clone ID: MRT4577_55691C.1
cggcgctgcttgggcccgtgacggattgtaagctgctggtattgcggctgggaagagcggcgagagggttcggcatctttcgtcgggatccccgcaaggatgagtgctgccagagagtctcacccgcatggggtgaagcgt

SEQ ID NO: 136202 - DNA, 103 bp, Zea mays
  Clone ID: MRT4577_55692C.1
agccgctacagctgcatcagccggcgacgccgattgctaggtccagcactatactatcgggctgcacggttatcgtctttccgataccagctatgctgctgct

SEQ ID NO: 136203 - DNA, 231 bp, Zea mays
  Clone ID: MRT4577_55693C.1
gcatcctacacggagaagcgtgaggaaaggaagctattgaaactcggtgcagatccttttcgtttgaacgggcctagctttggcggccttggtgaaagattcaaagcgaaaagggtgcttcttgcaaggaggggcaagcacaagagaaatggaaagcatacgaaagcgcaagagggccttgcgttgtgctcatgtctgctgctggttacccatttaccatcctgtccatgg

SEQ ID NO: 136204 - DNA, 124 bp, Zea mays
  Clone ID: MRT4577_55694C.1
gagtgggcccctaatgggcctctctccctataaccggttttccccccttgtcgtcgggtccccctctttatatagggcttctgtttcaactggacaaaccctaacctcttttcgtctatttttt

SEQ ID NO: 136205 - DNA, 238 bp, Zea mays
  Clone ID: MRT4577_55695C.1
agtgagtcgtattaaaaccgcctagtcacgcgagtgatcggcgattgaggtatggaacgatcatcatcgacgcgggcaactagactgacggagcggactgctgccgggcgggtctgaacgtcctccatcagcgtttctcagcaccgcagtctgctcggtagcaggcacggcaatgcgtatgaatgggaaccggctaggaatccagaacgtgcatacgctgaccatcagaggcgacggc

SEQ ID NO: 136206 - DNA, 391 bp, Zea mays
  Clone ID: MRT4577_55696C.1
actagtgctagaccgctcgcctgctctcaccgaccagcgccgcgccactcctccgacggatctgcagcatgcagccctactcctcgtactcctccgctcacccgcccgaccatcccaactccaagcccccggccccgccggcccccgccatgggctaccccgccaaccccgcccccaacgggaaccccagcgcctactttggcgccgcgccgcccgccagcgtcgccgacaacggctccgctccggcgaccttcggcgtagcgtacccctaccccgcccctgctcaccaccattacccggcgtcggaccagcactacccgtaccccccgcccccgccgacgcaccatcactacgtgtgccacccggcggcgccggccacctgcctgggccg

SEQ ID NO: 136207 - DNA, 492 bp, Zea mays
  unsure (1)..(492): unsure at all n locations
  Clone ID: MRT4577_55697C.1
ggccgggnacaccaccactggtgtcttcagaccattttctttatctactccagagcgcagaagaagccgagcgacaccatgagggtgatgctcgttgccctcggtctcctggctctcgctgtgagcgccacctacacgcatacaagcggaggctgaggctgccagccaccgccgacagggcatctaccgtcgccggggcatctgccacctgcgggtcacctgccacctttgatgatttcccaccgccggtccacctggcgccgccgatccaggtgacaccgtcggtccatgcgccgccgccgattcatatgccgacgacaccatgccagtaccctactcaaccgacccgggctaaggcttatccccagacacacccatgcccgtgccaacagccgcatacaagcccgtgccagctgaatggaacctgcggtgtggtgagcaccccgatcctagatcagagcgtccagttcctgaggcataattgcaggccga

SEQ ID NO: 136208 - DNA, 382 bp, Zea mays
  Clone ID: MRT4577_55698C.1
ctttgcctactgagaagttatttagaagtctggtcaccagacttctaatccctcttattatagggaaggtatgtgatgcgcagacctcctttcagtttaatacttgaaagtgaaaaacatgagggctcactgtaagtttcatgtaactgcctttcatgattaatataatctggtctacatgatttgcgcggtggacgtttaggagtacgttttggcgaaatcgcatttcctttagtataattgaatatatttaatttttttaaggtttttatatggtttttttggtatttttttcttaatattttttaaatttttttttcatttgttgtttggaaattttttataacatttttttatgaggtttttttattatatttttttt

SEQ ID NO: 136209 - DNA, 343 bp, Zea mays
  Clone ID: MRT4577_55699C.1
ggcttgtattgttcattcatgattagttttttggtgctgggacccccgtggagggggttagtctctacaccatcactgctggaacaaggccccagcttcgccttctatgtgcccctggtggtcctcatctccatctcccttgtgctgcagatcggcgtgggggtgctgctcatcttccttgtcaagtacgaccttaacaaccctgacaagcacgccaagctggacttcctcaacaacctggccacgggcctggtgttcatcatcgtggtagtcaacatcttcatcacggccttcggagtccaaaagcccttgatggacatggcaccccagcagtatgacaccc

SEQ ID NO: 136210 - DNA, 479 bp, Zea mays
  Clone ID: MRT4577_5569C.1
caacaagcaacataaaaagtggaatccagtcacaacaatagagcatccatggcgaccaagatattcaccctccggatgcgccttgctcttactacatgtgttgctaacgcgacaattttccctaaatgctcacatgctcctatagcttccattgttacaccataccttgcatcaactatagcttcaatatgtgaaaacccacctcttcaaccatatatgcttcaacaagcaatcgcagcacgcaacatacctctatcgcccttgtggtttcaacaatcgacagccttatctttggtgcagtcattggtccaaaccataagggcacaacagctgcagcaactcgtgctacctatgatcaaccaattatctctggcaaaccttcctccatactctaagcatcaacaattttttccattcaaccaactgtttacactgaaccctgctgcttatttgcaggaccaactattaccatttaccca

SEQ ID NO: 136211 - DNA, 555 bp, Zea mays
  Clone ID: MRT4577_556C.1
gggtacctcgaggccggccgggatcccttctgtgcgccgccaccacattgcagcgcacgaattgcacgtgaggtcaaagagggagctgtatactcagccaccgaactccaaaatcgccgccggagctaccctcaaccccgtgaggtcccaagaatctgaagatcatcctggagcctggaatcttgagtcccagtatgaagcaaagctcttgcctggcttgatctatcgaatgaagcagccaaaaatcgtgctgctgatttttgtttccggcaagattgttctgacaagagctaaggtgagagatgagacattgcttttgaaattatctatccagttctcgtaaagtcataaaagtccggcaatgctaagtacatggtaattgctaatggacaagaataattagggtatgttgttcaagtatgtgcccagttgttgttgttgtcccccttttattgttttgttttctgatttcgatggtaccattacctaggacgctcacgagacttctataatatactatccttctatggaaaaaaaaaaaaaaaaaaagcggcc

SEQ ID NO: 136212 - DNA, 398 bp, Zea mays
  Clone ID: MRT4577_55700C.1
agcgggcgccctcttttttttttttttgaacaaaaaaatgcataacgacagaggggaaaagtcttcctgaatacagccatttcacaaccggaccctaattgtgattgtcatggtactcaaaagcaggaaggaggacacgacacactcaaagttgcgaaacacactgtcggactataaccgctcatcagaaaagaaagtcaaaaatgacgcatagggtgtgacatcgcaaccaggactaggatgaggaacacatgcaagacgatgccatctaggttcgacagggcattgttgaccactctggcggagccataggtgacgaaaccaaacacacttgacctgccgatatgcctgtggcagatgaccttaggatgaagcagtagcccttgctcactgaacag

SEQ ID NO: 136213 - DNA, 384 bp, Zea mays
  unsure (1)..(384): unsure at all n locations
  Clone ID: MRT4577_55701C.1
cggaacaaanacggggccgttgcatttaaaaggttgggtgggtccccaaaaacaaagaccacagaaccccttcttgttgttttctgcgatggcaactaatttactgcaagggtgtatggatggattcacatcatcctctggcttcaccatcttcaccatcatgaatctactaaggatcataatatactactgaaccccttcttgcctactttggctatcccaattaatttactccatggatgaatggatccacattattctctgtatggcttcaccattgtcaccatcatgattgctaataaatcatgcttatctttatctatttcctattccaaattatttccttcggcctctatatttctactttataaatatctaccattt

SEQ ID NO: 136214 - DNA, 344 bp, Zea mays
  unsure (1)..(344): unsure at all n locations
  Clone ID: MRT4577_55702C.1
gtgcaccgaacaagagttccctcgaacttcacacaagtggactgggaccattttacaatcgccaaatgtcattacgcacataccccgtcacaactagtacaaatggattcgcgaaggagacatgcatccacacttgcagattaactagattgtcacaaaagcattaggttagctgctcagtatctgggtaagggttcacttgttcaagagcgactcgtgagtaacatgccttctgagtggagcatgagtgagcccagctgctgccacttaacgngagagatgtagttgcataggcacctaaagtagactattaagcactgctccttgagcgaatcatggagcgg

SEQ ID NO: 136215 - DNA, 367 bp, Zea mays
  unsure (1)..(367): unsure at all n locations
  Clone ID: MRT4577_55703C.1
ctacaaccactttttttatttccccccncgacccccaccnaacgacgaangtacttaagcaaaacccaaaaaggcccccccttgctggattcatcaatctaataaattcaagtagctttgtgaatttaacaggaactctaaaccaccttaaccggggctttagtaactgaaattgcaagttatcgatgttccatgctcaaaaaacatgaaaacaaccaaccccctctgctgtaaactaagggcatttgacatcaaaaattacggcacaaacctctgaaggtcccgaagaaacatcgacggcttcctgatattgtgtagggcgcaaaacaagataaccaccctcttcaaacccaccccgaaaccacca

SEQ ID NO: 136216 - DNA, 182 bp, Zea mays
  Clone ID: MRT4577_55704C.1
cggaaaagggtcctcataaattcctcttattcagggttaaagatgcttaaaacattttccaacctttgccctcaaataaccgaaatcccctatcatcaggtcaaacaaaacttctcctccctgaatcaaaaaagcttccccccctacattttcttggctttacttcctaccccctttcccat

SEQ ID NO: 136217 - DNA, 826 bp, Zea mays
  unsure (1)..(826): unsure at all n locations
  Clone ID: MRT4577_55705C.1
gtccgaggacccaagccccaaggttctccatctccagctatggagcaccatataattcagcaagtcggagagcatgagagggaggaggaggaggatggcatgggaacagaagcggcattcgagggggtgcacaatcacgacactttcaggtacaagcacaagaagaggtccaaggtgtgggaggagtacaaacccatcttcctgaacgggaaggttcagtttgcagagtgcctgtactgccacagccgcatgagctgcaaggactccaatggaacgagccatctctggcggcaccagaagatctgccctggcaagagggacgtggtgtttcggcggctcaaggattcctacttcccatgtgttttggtgaatcagagtgaaccggttacaccaggtgattcggtgaatcagattatttcagagacacttgacgacataagttcagtaattcccaatagattcaaatccaaggtggtggagagagttttcacctatctatgttgagggtaagctccaggctgctgactgcgtgcattgccgcaaacgcctcagtgcaaataagtttggggggaagaagccatctgagtcgacatctgcagacctgtcaggcacgaaggggctacaataatcagaagggaacgctttacccttctagtgtccctgatttgaagtccattgggcaagatgagctctcacctgccttgccnaaatgggaaggttcacatagcaggatactccagcaaacatctctggtctagtagctctgctgacacttccccctattgtccggcccatcaagtgtcggcgcatcaacctctggcatcac

SEQ ID NO: 136218 - DNA, 274 bp, Zea mays
  Clone ID: MRT4577_55706C.1
atctttcggtcaaaaccgggaacacgccccccgtgggttcacccattgagtgaagcccgttaattcctgttgcttccccttgtatgctaccactcccaaatacttcaaagaactttatccatagatccagtaggtagtcttattctacctcatgaagttaggttcaacccttgtcagacttcccttggttccatttctagttttgcgggctaccaccttgtcgggaaggccaccaaccctgactcttacaaatgcccaacccttattgaagctt

SEQ ID NO: 136219 - DNA, 493 bp, Zea mays
  Clone ID: MRT4577_55707C.1
cattgggtacctcgaggccggccgggagccgcgtcacccgaccccgctagagttcctcacactgccactgctcgttgccgaccctctccgctacctcgagcacctcagtgaggttccgatcatgttcgccttcactctagctccctcctgagcgattctcccagcatgttaggccccgaagcgccgttctggccaactctgaagacactcctgtgttagagaataaaaaatagtttgaagaagaccctcaagactattgtgaagaagaaggatgtgaagaagaaggctttgaggaggacgttgatgggttctagatctagcgatgcgtcggtcatcttcctgtgggagatcacccatgagaactgttgtgatgtgatggaataatgtttaagacaactaagttgtaataagtactctacttttatttatgtttcaagcattgtcttatgatattttacacttgtgacacaaaaaaaaaaaaaaaaaagcggcc

SEQ ID NO: 136220 - DNA, 342 bp, Zea mays
  Clone ID: MRT4577_55708C.1
gaccgaccaagcagctaccccgactcaacctgcagcgccctccatagatctttccactttaaccccggaacaagccgagtacttccagaaatttggtcgtcttccaaagcctaacttgataaagcaacacaagaaaggatttgattcagcggattggcaattagccaacaaacaaaaggcaggtggtcctggtgcgaacgtagaaggaactacaccaaccaagaaaccattcgttatgaccaagcaataattatgaatgtgtttgtgtttattttcgtgtaaggtcaaagtataatgggattgttaagtagttagataaattctgtctctttttttgcctgc

SEQ ID NO: 136221 - DNA, 307 bp, Zea mays
  Clone ID: MRT4577_55709C.1
gtgcagtgctaacagatgaagtcctacaccatggccgatccatgtttgttgtttcttactaaaaacgtacaagcgcatgaccaatgttacgctgacactattctaacaatgattactgttcgaatcatatattagattgaaaacagcccctgtttatctttgcctagaccagggaaatgtgatccttttggcttatgtggattaccatcaatgtatggttaatatttatgtgttgttttacacacggagttcgttgctagataaatatttgtcttgcctagcaactagatttggccgatccatgtct

SEQ ID NO: 136222 - DNA, 155 bp, Zea mays
  Clone ID: MRT4577_5570C.1
aaatacgggtactatcggacgcttggaacttgccagaggtaatacttgactaaaagacaacctgacatttataaacaaactagatccgtagcatggggaacgcggtgctggacactgaaaactcagcatgccccaaacgagttgaaagaaattat

SEQ ID NO: 136223 - DNA, 246 bp, Zea mays
  Clone ID: MRT4577_55710C.1
caaccaattgcccaattgcaacatctttccttggcacatctaaacctacaaacgcatcgcatcgcaacagcagcaacagtttctgccatcagtgagccagctagccgaggagaaccatggggcctacttgcaacatgcgctgggtgggtacatgccatgtgccatcggttgattaagtgtagccctagagtgggcacgtctgcaacagtttatgtcagcgctcagtcaactagccatggggaaccc

SEQ ID NO: 136224 - DNA, 320 bp, Zea mays
  Clone ID: MRT4577_55711C.1
cggacgcgtgagcggactcgtacgtgctaatgctaaataaggatggctgaatgtgggtgcagcaatcatcacttccggagatccgatttacactccatccgaccagcctacttctgaggatcaagaagcgacatgaattttaactcttgagtgccatcagcccaatatacctgatgttactgttatgacacctgtagcttgaaactactatagtctaattgattgatacgtcatgctttcacagctcgctttacaactggacattcatatcttacaagcttctatccatttagtccgcaaccgatttatggtacagatca

SEQ ID NO: 136225 - DNA, 259 bp, Zea mays
  Clone ID: MRT4577_55712C.1
gcgggcattctgtacaaattcattaaggttttgcacagaacatacttgtaatacaggggcatccctgggcgaggctcctgctggtacagctactcacatggcgccaaaactccggacttaatatcagttccacggccgggatggatctgaccggagggtactactacagcggcgacaacgtgaagttcgggtttccgatggcggtcacggctacgctgatgttgagaggcctggtcgaattaggacgcaggttcggccc

SEQ ID NO: 136226 - DNA, 244 bp, Zea mays
  unsure (1)..(244): unsure at all n locations
  Clone ID: MRT4577_55713C.1
cgctctttgcgataaaggnatatatataactccgattacatttattatattgacacccccattccagngatctgagagggcatgcatctaaagattacatatattcattcatttgttcccctacactacgcttcattcgtatttgttcttttgagtttggattgtatggtcagaccacgtggagaaaacgaggccctttgcgtcttaatcgcggaggcatagtatttttgcagtattagcccca

SEQ ID NO: 136227 - DNA, 153 bp, Zea mays
  Clone ID: MRT4577_55714C.1
gcaggccgccctttcttttgttcttttttttttttttttgttccttactgacactcactcaaattgctacttttacggtcttaagaacacttacctgctattaaacatgaggacgatccttcacatatggagtgggacactaaaaccttgcaa

SEQ ID NO: 136228 - DNA, 339 bp, Zea mays
  Clone ID: MRT4577_55715C.1
aactactaaccactttattcctcttcacttgattattgttccacaggcctaataaagatgtaaataacatatgcgtgtctgtttctctctacaggggcttcactcctaagctaacggaaatcctaacactcatatgattgattcctaagctaatcaagcaccaacactcgatcgacataattttacccggttgctgcccttcatgccgccgtctggacaacgatggggctcttcacgaactggaccccgttgctccatatgagcgcgccaaacgcgttctttttggccagctttgcgttcttggtctccaacttgacctcgaacgtttttttcttcccc

SEQ ID NO: 136229 - DNA, 1112 bp, Zea mays
  Clone ID: MRT4577_55716C.1
ctctcctctcctctcgccccgcctcgtcatgtcacgtctcccaaagtcccatctcgccttcgcttaaacataaaccacacccatcgcacccagccagccctcgccatccatggccaccaccgccgccatccacctgcgcccgctccgttccgtcgccgtctcctccgcgaggtcacgctcgctcctccacctcctcgcccggcccctctcctcttcccaatcgtcctacgcctaccgcccttcccctacagcgcccgccgccgccgcccccaaccatgtccaccaccctccccatcaccaccagtcggtgcctcccccaggaccccctccacagtggtccgcgcagggacatccgcctccgccgccccgtggctatgggcctccaccgccgcagcaccagcatgtgccgcctccgccaccacgcggctacggacctccaccacgcggctacggacctccaccaccgcctccgcctccacacggccacgtacctccgccgcctccgccgcgacacggccacgggcctccaccaccgggccagcacgtactgccgcccctgctaccacacggccacggacctccgccaccgggccagcacatgccaccgccacacggccacgggcctccaccaccgggccagcgcgtaccgccgcctccgccgccacacggccacggtcctccgccaccgggccagcacctaccgccgcctccaccaccacacggccacggtcctccacccccgcaccagcaggcaccgccgccgcctgatcctgtggcggggcctggggagctgatgggactgtgccgggaggggcgggtaaaggatgccgtggagcttctctccaagggtgcgcgcaccgacctggacaccttctacgagctcgcggccacctgctccaaccctaagctgctggaggagctcaggaaggtgcacgacttcttcctccgctcgcccttccgcggcgacctccgggtcaacaacatgctgctcgcgatgtatgccaagtgcgcagccatgccacatgcccgcaggacgtttgacaatatgcctgaccgcgacatggactcgtggcacatcatgatcgacggctactctggaaatggacttgggg

SEQ ID NO: 136230 - DNA, 232 bp, Zea mays
  Clone ID: MRT4577_55717C.1
gaagtcgcctaattctttcgatcgaattaggcgccttcttcgtccctttctccgtctttagttgcccggtgaggcttaacaggtgctggtacagggatcatatttatctcgcaggtctgactgtggaatctctctactccggggatttaaacttccttgccatccctatacactaaccatgacatacttcttgtcgtgctgatgtgcccctaccctcctttgttgttgtcac

SEQ ID NO: 136231 - DNA, 489 bp, Zea mays
  Clone ID: MRT4577_55718C.1
cacgcctgcatgtaccgggctcctaattacacggtcgacctagtctttcgtttcaacaatataaaaacaactttgtcatacatgggaagccaaaacattagcctaaatatgcttcttggaccttttgctaatactaattctaaaacagtcaccaccaatgctgacaagctgctataactctccttgtttcgccaaacctagtaccatcaatggcttcaatttgtgaaaacccaattaggtaaccctattagatccaacatgctattacaactggaataattacctgttatcaccacttagatgcgccaacaatcataccagcctatctacagtaaatagccttaggtgcatttattggcacataaacatgagagcacaaaaactacaacaacttgaactaaaaaaacttgttggcgtatgctaaaaacaacaggctgtatcattcaaccaactagctgcaataaaatctgcttcttatttgcctcaaca

SEQ ID NO: 136232 - DNA, 413 bp, Zea mays
  Clone ID: MRT4577_55719C.1
gcgaacaagtgaggagagttaggaatgaagacacatgtccatccgctctacaaatgagtgggtgcatactcgagtctgcgcctcgcgggtgacctattgctgctgagtatgatgtgtatagaatggagacctgtgactctgcttgtggaaataaagatgagacttgcctgatatcctgtctaaacgaaacatattctgacttgaatctactgcattcacgccagagctacccattctttactgtgcgtgcattagatgatgtcgtacttgatcagatcaatccagctggcacatgcgtatggacagagtgacacgtgtgactctaggctactggtgtctctttggaggaattgatcactcgtgatgaaaaacttaacctgcttgctgagcgcttactgctcgaggtggcattt

SEQ ID NO: 136233 - DNA, 234 bp, Zea mays
  Clone ID: MRT4577_5571C.1
aagttccagcactccgccggcccgcgcgaccgtcgcctgcgcgacttgtgctccgtcctatggggtgtcggcgtcgtggcctcttccgaggacgactcggacgtcggcgagcgacgcactgtcccggatgcggcagccatgatgccggtggtcaccgaggtgctcggcgactactggaaaacgaatgagcgagccatggcaggggtgtcccttgagaagggcctgtccctactg

SEQ ID NO: 136234 - DNA, 446 bp, Zea mays
  Clone ID: MRT4577_55720C.1
aaaaaaaaagttaaacgagacgttcctttggggcttttttaaacccataatggacgggttttaaaaaaaattttttccgaaacccataccaggcccaaacccaaaaaaaaaaaggttaaaggggttcccgacccaacaaatgggcaacaaaagtatcccttagggggggggcccggccccaaaaaggggggttgggaaaaaaaccccctgttttggccggtctggaccctctcctgggggcccccctggggggccttgaaggcttcaccctttttgcccgggggggaaagcgcgtgggccccccccgggggaacttttttaaaaccaccgccaagggggaagcggggggccatgaggggagtaaaattcccaaccttgaaaaacccctggacggggaacttttgggccgttttttggggggagccctgggggacccccttttgggg

SEQ ID NO: 136235 - DNA, 574 bp, Zea mays
  Clone ID: MRT4577_55721C.1
ctccactctcctccttggcacgccggcaccttcgcctgcggaatactccaactatgtcctgcgccgccggtgcaggatgccttgtgcatgtgccaagtgggaggaagaggaggaggactgcactgcacgggaggagccaacgtcacgagggcgtccatgcggccactcggctaaattggcatctagtgagacctgacaccgagcaaggtgcggccgtgggtaacatgcgccagacaagactgcccaaacattggcaccatgccacccgctggtgctgacgaccttgagcgcgttccttcgcacgactttcagtgttgaagatgtattcaccgtgctgaacactggttatgccttcatatgctatagatcccttagaagacgttttatcaacaaacgtatgtcagagccatgcattaaaaaacaggtcactgacctgctttaaacttgagtgatctccaagctcggtgtttataatgtgattcatacctatgtggtcaatccattttataattgtgcccaacgcttgaagctgtacatttgttgaagtttgcacaacgaccaccatttggataac

SEQ ID NO: 136236 - DNA, 313 bp, Zea mays
  Clone ID: MRT4577_55722C.1
aaaaaaaacaaccggtcattctcataccagggggggggatacaattttacttcaaaatccaaacccaacattgggctaagcgttggaaacccgctaaaaattataggggtgggggccatgatttaacccatcctggttttaaacacatgccccctcacttcaggggggggcacaatcagaacatagcccccccacccgctaaggggggcacgggctattgatgaattcaaagcttgggatacagtttcaaagagttcatcagggtccatggtcgggttggacatgggcccacaagccccatacaaagattctg

SEQ ID NO: 136237 - DNA, 2067 bp, Zea mays
  Clone ID: MRT4577_55723C.1
cccacgcatccgaccatgcacgcgcgcacaaggcacgcccagcaacacaaaagttccaaggcctccccttcctctagcagtggcgaggcaggaaggcaggccgggtgtcctgcctcccttgcgcgcgctctcacgacccatcccgtcgtgcgtcatcgagctccggcgggcgggccatgcacgcgtccagctagctcacacagcgccgtctcgaccggctgccggtgctccacccggcccgcgtccacatcacggcgggcgggcgcgcgcgtgaacggtttcctctccgcatgaccctgtgatggtcggtgggttcctgcggcgcggccacagcctcgacaggctcctgtcgaggaggcgccgggccgtttcgcccagcccctcgttctcgtcctcctcctccacgccgtcgtctccgcgtggcagcagcgtcaggagcggcatgatggcagaggacgacgacgacgcgcccaccaccgtggcggcgccaccgctgcagagacgggtgctgtccaggagccacggctcgcgggccactcccggccggtcccaggacctgccgccggtgccatcgaggaccgtccgcgacagtgggccgccttcagatttagatttgatgaaggataagttcgccaagctgctgctcggggaggacatgtccggcacgggcaaaggggtgtcctccgctctcgctctctccaacgccatcacaaatctggcggcctccatattcggggagcagcgccgcctcgagcccatgtccgcggagcggagggcgcggtggaacaaggagatcgactggctcctctcggtcgccgaccacatcgtcgaattcgctccctcgcagcaggtgtccgaggacggaacaaacatcgaggtgatgggcactcagcagcgcggggatctcctcgtcaacatccccgccttgcgaaaactcgacgcgatgctcctagagtatctggacagtttcggcgaggcccaggagttctggtacgtggcgaaggacgcggacgggggcgaggacgacgacgacagcacgtgcgacaaatggtggatcccgacggtgagggtccccgccgagggcctgtcggacgcgtccaggaagtggctccagcaccagaaggacctcgtggggcaagttctcaaggcggccatggccatcaacgccgacgtcatcgcggagatggagatccccgaggagtatatcgagtccctgccgaagaacggaaggtccattcttggagactccatgtacaagatcataaccgacgacgtcttcgaccccaacgagctcctgcagtccgtggacctgtcgacggagcacaagatcgtggacctcaaggaccggatcgaggcctccgtcgtcatctggcaccggaagatcagcaacaagctctcgtggggccccgccggcgtcagcctggagaagcgggaggagttcgaggagcgggcgcagaccgccctgctcatcctcaagcacaggttccccggcatccctcagtcggcgctcgacatcagcaagatccagtacaacacggacgtcgggtacgccatcctggagagctactccaggaccctcgagagcctagccttcgcggttctgtctcggatcgaggacgtcctccacgccgacgccgtcgcctgcgaccccaagcgcaccaagtccaggaggcggcctagcctagagtgtgacgccgccgccgaagccgaagccgaagccgagacggcgcaccacagcggttccgtgcactggcaggaccatcaggatgccgaggacgacggcggcgagaagcatccggacggcaacggtaggaagctgaagaagctccacagggtggcgaccaagaagtttctccacacgcagaagatcgacggtgtggccggcgggctcaagagcttcgcacacaggtagcgtttttgcgtgcgtgcgtgcgtgcaatggtgccatactgtttggaaacgaagaacgtgtgtaaatagttccaagtttatttatatgcaaaaataggaccacggggtgcgggtcttgcccgtaaaaaaaaaaaaaaaaaaaaaaaaaaaaaaaaa

SEQ ID NO: 136238 - DNA, 218 bp, Zea mays
  unsure (1)..(218): unsure at all n locations
  Clone ID: MRT4577_55724C.1
ccgctttttacgcccaacgaccccagtgccgagtgcgagattttccctgagaccgtcggcgagtccagtctgcgccaacgcacaatggtgtatcctaccctactccatgctcaagcgccgtgccaccggtggaaagcagaaggcctggaggaagaagcacagtatgagcttggtcgcccatccggccaacaccaattttgttaagnaataaccacagt

SEQ ID NO: 136239 - DNA, 919 bp, Zea mays
  Clone ID: MRT4577_55725C.1
ttgggaccctcgaggggccggccggttgggtacctcgaggccggccgggaagggggaaaaaggtaaggtaggcagtttcccgaagcaacctcccgttcctccgcgacccagcgacgcctccgcggccgtccgatcgccctatccgccgccgcgcgattccggcaggggagtagacggttccagcaaatttggtccaacaattctttgtttggccgcttgggctccggtctctcgattcttcgtagcttggtgggagggcgccggatccagcggccatcatggttgtcgacacggtcagcgcgagcacctccataatagccccccacctgttcgaccacaggtccaggggagccggcgcttcccaccaccacctccgccggacgttccatgtcgtcgcctgccgacccctgcccaccgccttcgccggccgccgcctcgtggcccgggtcaccaggcagccgtcgtcgcgcctcgccgattggccggtcagggcgctggctatgggggtcacgaaggaggtcagggccagccctcgcagggagtatcgggggatccccggggatggtggcgacatgggggacgttggggtcaccagccccacgccgtcatggcctccgcggaacagggcagatgaccccaagctgcacaacccgctgctccgcctcgagcgcatgggctgcgggtggctcggcgtcatcttcgagtggggagggggtcatcgttgaggatgatgccgaattggaaaggcaggcgtggttgaccctggcacagggaggagggcaagtcgccgcctcccgcttttgtgttgcggagagtcttagggatgaagaacgagcaggcgatttctgaggttctatttgtatctccatttgaagacatgtgtcgggattttcgttgtatgtgagtaccaggtcttatg

SEQ ID NO: 136240 - DNA, 284 bp, Zea mays
  Clone ID: MRT4577_55726C.1
atctggctatcggaagcgatggagcgaagggccacactgtttgagggggctcgctgcggcgtcgcgaaggcgctcccggcaactcggactctcccactcagcaagatatagtcccgatgaggttgaaagctcgactttgtagcgaaggcgctcccgacgactcggactctcccactcagcaagatagtctcgatgaggttgaaagctcgactttgtagagtgaaaggctacgccctgtcagcgttcgggcccatttctaagcccctatttggggtaagtttaaa

SEQ ID NO: 136241 - DNA, 742 bp, Zea mays
  Clone ID: MRT4577_55727C.1
tccttgcttcgtccgcttcccctttgctttccttcccccccccactcattgatctcggcttgagcttcaactacggattgattgattgattgggttcctggcgttagtttgcgcgattccggcaaatttggtccaacaattctttgtttggccgcttgggctccggtctctcgattcttcgtagcttggtgggagggcgccggatccagcggccatcatggttgtcgacacggtcagcgcgagcacctccataatagccccccacctgttcgaccacaggtccaggggcgccggcgcttcccaccaccacctccgccggacgttccatgtcgtcgcctgccgacacctgcccaccgccttcgccggccgccgcctcgtggcccgggtcacgaggcagccgtcgtcgcgcctcgccgattggccggtcagggcgctggctatgggggtcacgaaggaggtcagggccagccctcgcagggagtaccgggggatccccggggatggtggcgacatgggggacgttggggtcaccagccccacgccgtcatggcctccgcggaacagggcagatgaccccaagctgcacaacccgctgctccgcctcgagcgcatgggctgcgggtggctcggcgtcatcttcgagtgggagggggtcatcgttgaggatgatgccgaattggaaagcagggcgtggttgaccctggcacaggaggaggggcaagtcgccgccttctgctttttg

SEQ ID NO: 136242 - DNA, 778 bp, Zea mays
  Clone ID: MRT4577_55728C.1
aaccccttagctccagccagggaccacagaagagcttcctccccggccagctgaacgaccaccaccaagcttggggaggaaccattaaagaccacgccatttctatgcttccacagcatccaagcacccagagcgaccaaagagtcaaagcccttcttactcagcccatctagccaagcactattggaacaccaccagagatcaaaatcctcaatatcatgtcctggaatgaagccctgcagtccaaaagtcctgaacaattcgaaccagaaaagacgtgcaaatgagcagcccaccagcaagtgattgatcgactcatcatgttggtcacaaagtgggcaaagaagcgactgagtcaagcctcttttagccaacctaactgttgtccaacatttgttgtgagccacaagccacagaaagaaccgacatttgctaggggcccaagtcttccaaattcgaccagcttgcttgaaaaacactgagccacaaaacatagcagcataagcagattttgaggaatagtcaccagaactagaataccgccaaacatgacgatcttgcacattaggtttcagcaagaaaccctccaggatctcagtcaagtctaaaaactgcacccagaaagcaaagagctccctgaacatcttgcacccaactcaagttaggcaaggcatcattaaccaatattgttttggtaaccttcctaggaatagaggcaaagactgcagggttaagctcttgtatgcagtgcccatgcagtcacttgtcagtccaaaaa

SEQ ID NO: 136243 - DNA, 1458 bp, Zea mays
  Clone ID: MRT4577_55729C.1
ccggccgggctccctccttatctccttgcctcgtccgcttcccctttcctctctttcccccacccaatcattgatctcggcttgagcttcaactacggattgattgattgattgggttcctggcgttagtttggtagccgtgcccttcctcttgcttgttggttgccttcctcatcttctttcatgtgttggattggagtctcagctattcgtttctccctcttttcttgcagcgcgattccggcagaggagtagacggttccagcaaatttggtccaacaattctttgtttggccgcttgggctccggtctctcgattcttcgtagcttggtgggagggcgccggatccagcggccatcatggttgtcgacacggtcagcgcgagcacctccataatagccccccacctgttcgaccacaggtccaggggcgccggcgcttcccaccaccacctccgccggacgttccatgtcgtcgcctgccgacccctgcccaccgccttcgccggccgccgcctcgtggcccgggtcaccaggcagccgtcgtcgcgcctcgccgattggccggtcagggcgctggctatgggggtcacgaaggaggtcagggccagccctcgcagggagtatcgggggatccccggggatggtggagacatggggggacgttggggtcaccagccccacgccgtcatggcctccgcggatcaggtcagatgatcccaagctgcacaacccgctgctccgcctcgagcgcatgggctgcgagaaccatcgcgtcatcaattgctgactgggggtcatgtgccggaatgaacatagacttctacgttctgaagaactcaatgcaagaaagaaatgccatggatgattcgggttcactcgaggagatgagtgaatcatgcagaagtttctttggccgattaaacgagtcgttgttagtctggggaagcaaattacctgttgagtcaagggcatgctactcgaagatggtagaggagctatgcgcgcttctggtggacaccccaagcgagacgctgaacctacccatggggtgtcttctaatgatgctcaacgctccagttccggacgagagcaggtcgtcgtacctgcaggacgcactctccgtcttcaccgaaatcctttgcagcgatccgtagcacaagggtccacggtgttgccataatctgggtgaagggaagtgaagcctacaggcaacacgccgaagagtttgtacgtctcatgtttggtacttgtagaaaaaattaggaatgtataactatgacctgatgttgctccggtgaatttgtaactccgtctgaagacatgtgtcgggattttcgttgtatgtgagtaccaggtcttgtgaaacgttgacttgcgagctgtaccaatagggagtgatttcctgggcttaaaaaaaaaaaaaaaaaaaaaaaactcgagaaggggggcggtacc

SEQ ID NO: 136244 - DNA, 398 bp, Zea mays
  unsure (1)..(398): unsure at all n locations
  Clone ID: MRT4577_5572C.1
gtacctcgagccggcgcaacagacgtccccatcgttgtacggccccacgattgcancgacgctcgctttgccgctgtgatgtgagatcgacctggacacccccctttggacctcggctttggtttcgcgccttcctgacacgggacaggaacacgatcgcccaccagcaccaggtactccgtactcacgaggtcttcaatgtacaatacatatccagacacaatcgagtcaaagcagtccactccgaccaaatcaccaaactaaccagacgcctgcactccaaccgaagatggataagatgataccttctgcctctgtaagatggattcctccgcaatggatacgaaattacatcaagataacgtactgcacgcatggatgaaaatatgaaaaatttg

SEQ ID NO: 136245 - DNA, 325 bp, Zea mays
  Clone ID: MRT4577_55730C.1
gatgatcctgctcgagaggaaaggctactataggtatgatgccctttttatcagatcgtccaaaccggcagtggtgggtgctatcccagatggcgggcagcatgcctcgcttatctaggcatggtgaccaccttttcgtcacatggaattccttatctggctattaatattgattcattgtacattctaatattgtactgtgattaggctatactcgctttgcatgtctttcaccgatagatggccagagtcatatcctgccaaccaagcagagcagccattctgattttggtctatgatacttttaccaacaaaaattaagaat

SEQ ID NO: 136246 - DNA, 446 bp, Zea mays
  Clone ID: MRT4577_55731C.1
ccacgcgtccgtgttgactgtgatcaagatggcactcatgcagggatgatatttaatctgtttgacggatctttgtaaaaaagaaaaaaataaaaaaaaaaaaaaaaaaaaaaaaaaaaaaaattaaaaaaaaaaaaaaaaaaaaaaaaaaaaaaaaaaaaaaaaaaaaaaaaaaaaaaaaaaaaaaaaaaaaaaaaaaaaaaaaaaaaaaaaaaaaaaaaaaaaaaaaaaaaaaaagggggcccccttttaaaaaaaccaaatttaactaccccgtcattccaacttaaaacttttttattagggccccaaaaataaaatcactggcccgctttttaaaaactgcgaaatggaaaaacccttggctaccccaaattaaatccctttaaaaaaaatccctttttcccaagttggtaaaaaagaaaaaagcccccccccaaccccct

SEQ ID NO: 136247 - DNA, 616 bp, Zea mays
  Clone ID: MRT4577_55732C.1
aacagttgtgtatgtccgtccatatatttctcagcaagagcgctgatcagggtgcctccagataggctatcggtaacctcaaaagctttcttctcatcaggagtaaaatgtccgaattttccccgccaaccatataggatcattttagcatgtcacatcttatagttgaacccgtaagatgcacctggcttcaacgcggcaatgaaaccactaataacaaagaaactgtctactagtatacatttgtattgttatgaatttaggattttctatatttgacttaataaaaaatagtagtaaattcatgactatacacacacacatagtgtgtgtatatatatatactaggtatgtgcccgtgcgttgctacgagagttataaattcgaataaaacatagatacgaaatactaaacatcactacaatatgtaaatccgtatgacaaaatatcactataacactaattttatatcttcgtagcaagaattttacatatccctatattagtgttactttgataaaaaataatgtagaaaaatcaaatagctcaattaaagagtaaaaggggagctaaatataggaaaggattgggttaacagttttgagcggacgctggg

SEQ ID NO: 136248 - DNA, 777 bp, Zea mays
  Clone ID: MRT4577_55733C.1
gccggccgggccgggatgcagggttccgcgcgcacggagcagccagcagctgggtgcagccggaggacgacgatggggttccttctcgccgtggccgtcctgctctccgcctgcgcgcgcgagtgctctggcacgaccgacagccaggacacttccgtgctccgggcgttgatggatcagtggcagaacgcgccgccgacctggggccagtccgacgatccctgcggagagtcgccgtgggagggcgtgacgtgcggcggcgacaaagtgatctccataaaactttccaccatgggcatccaaggaagtctagctgctgacataggccagctcagtgacctgcaatccatggacctgtcattcaacaacgaactcggcggcgtgctcactccgaccatcgggaacctgaagcagctcaccaccttgattctgtccggttgcagtttccatggcaccatccctgatgagctaggaagcctgccaaagctgtcctacatggccctgaattcgaaccagttctctgggaaaataccagcttcgctgggaaacctctcgagcctctactggtttgacatcgccgacaatcagttgagcggtcccttgccggtctcgacagacggcggaatgggtctagacaagctcatcaaaaccagacactttcacttcaacaagaaccagttgtctggtccgatccccgacgctctcttcagcccggagatggccttgatccacttgctcttcgatggaaacagattcaccggggatatcccggactct

SEQ ID NO: 136249 - DNA, 180 bp, Zea mays
  unsure (1)..(180): unsure at all n locations
  Clone ID: MRT4577_55734C.1
aggacctttccggaattccttggtctttcccaccgccctcggacccgagctacaagaaggcncggggcattttaaaggcctttttccgttttacccggtgcgctggttaccatctcccacggggagagtggacgtcataattcgtggtagagggggtacgcgttcgcgcggcccctgtcg

SEQ ID NO: 136250 - DNA, 330 bp, Zea mays
  Clone ID: MRT4577_55735C.1
gcgaccacacgcacggcgacgcgtccgactttatttggcaaagccataataatcgacaccggtctcggagaccgttccgaatctggggcgacgtctgcggagaaaccggctcccgcgcgcgtgctctactgcggtgtgtgcggactcccaggcgtgtactgcgagctcggacccgacttccagcgctggaagccctggctgcgcgcgctcgcacccggagtataccccgacgaccttgtcgccgaccgctcctgacccggaggtggatacaatgacctctacacggtggaggatcggcttcatggcgcagggttctcctactgatcctcc

SEQ ID NO: 136251 - DNA, 566 bp, Zea mays
  Clone ID: MRT4577_55736C.1
ccggccgggataaccactcccggattctggaatcaccgcaacgttcgacgaccagcttcgcagaacaccggcatcatgtctacccgaaggccccaattctcccagcaggtgcttatcgacaccactccgttgccctcagatattcccgctgtcaaggaggtcggtgccagttctgcgcctcttctttcggcctccttcttcatcggcgcccgatgccgcgactacaacgatgattacatgcaatgcaagaacgagaaccccggccgaggagagtttgagtgcttgaaggagggccggcgagtcacccgatgtgccaccagcgtcattaaggacatcaacacccactgtctggccgagttccgcaagcactgggagtgccttgacgaccgaaaccaccagctatggcagtgccgccctgctgagtggaagctcaacaagtgtgttttcgacaacatgaaactcgagaagaaggttcctgaccagcctaccaactcgactcccgttcacctccgaccagtgcagacctttgccgacgtgcgcatcggccctggtgatggcaagccttt

SEQ ID NO: 136252 - DNA, 777 bp, Zea mays
  Clone ID: MRT4577_55737C.1
gcgattgggatcctcgaggccggccgggactccggcaaacaatctcccctcagtcctttgtcgtctgaataaccatccttcaaaatggctgcctctaccggatccaccaaggtcgacgccgtcgtccagaacatcaaggctgagacccccgagaagaagtctggcctcgctctctactcccgattcgcccttgccggtgctgtctgctgttccgtcacccacggtggtctcacccccgtcgatgtcgtcaagacccgtatccagctcgaccccgctacctacaaccgcggtctcatcggtggtttccgccaggtcgtcaagaatgagggtgctggtgctctcctcactggtgtcggccctacctttgccggttacttcctccagggtgctctgaagttcggtggttacgagttcttcaagcagcagtggattgacgctctcggctacgagaccgcctccaagaaccgaactgctgtctatctggcctcttccgccaccgctgagttcttcgccgatatcgccctctgccctcttgaggccactcgtatccgtctcgtctctgagcccacctacgccagcggtctcgtctctggcttcggcaagattgtcaagaacgagggtttcggtgctctctacggccggtttcggtcccattctcttcaagcagatcccttacaccatgggccaagttcgtcgtcttcgagaaggtctctgaggctgtcttccgcactttccccaagaagaccctctcgacggtatgcagactgttgccaacct

SEQ ID NO: 136253 - DNA, 829 bp, Zea mays
  Clone ID: MRT4577_55738C.1
cagatccaaatactaacagtgtgcatttgtagtcaatattttatatgggggtctgcatgcattctaggatgatgcactgaagtactatgtcaatactggttataatgctgtaggtatatgttggtgggcttgaccccaatgttagtgaagatgaactgaggaaagcatttgcaaaatatggtgatcttgcctctgtcaaaattccttttggaaagcaatgtgggtttgttcaatttgtaaacagagttgatgctgaagaagcattgcaagggttgaatgggtcaactattgggaagcaagcaattcgactttcctggggccgcagccctacaagtaaacagtctaggggtgattatggccaccggcgcaacggcaatggcatgtactacgggacgccattctacggtggatatgggtacgcctcaccggtcgcccacccaaacatgtatgccgcggcctacggagcctacccgtactatggaaaccagcagctagtgagctgatgtggcgatgctctctgctcagtttcctccctcggatcggagggaggaaaccaagtttttggtcctgtaagatagtagctacaatgagatattataggcggccatacaaatgggcgagagagacgagaagggtatgtgatgataatgctacctgcagacttgtgctgctatagcagaacataaaagagcttgtagtagacaataaaaacctacttttgtcttggaaattttgactcgctataaaactagagctatcggttgttgtgaccactgtttgcatacacaattgtttgggataatatctgatgggttccccaattccggct

SEQ ID NO: 136254 - DNA, 361 bp, Zea mays
  unsure (1)..(361): unsure at all n locations
  Clone ID: MRT4577_55739C.1
gggggaaccacgcgnncggtcanntaatcaaaaaaaagtttatccgggttagggatttaaacagcggtgggggcggcgggcttactttttgctgctatggctgcgaccgcttcaaccgctgatgccagtgcccccgagggcgagggcgcggtggacttcaaggaccttcatcagcagagcaaggcgctcgacaagctcactgatcatgtcgaggaccggcagctcgattttatccccgttcaatacgccatggcagcacttgcttcatccaaagaagctgactggaactcgattaggcttatggataaagaattggcttctgttaagatcaaccctgccgatgttgaaattatttcttctt

SEQ ID NO: 136255 - DNA, 132 bp, Zea mays
  Clone ID: MRT4577_5573C.1
ctacatcaactacattcacctctacaacaaaatcaacaatttcaatcttacatttcccttctacccttacaatctctcctacaagctactctacattccctccaatatcatcaaacacatccacatcttcta

SEQ ID NO: 136256 - DNA, 1127 bp, Zea mays
  unsure (1)..(1127): unsure at all n locations
  Clone ID: MRT4577_55740C.1
cccacgcgtccgttaagtctaccttgcaagnagccaaggaggctcatgtcccaaagccaagtccagttagcttatttgctataccaaaatagattctttagatgttcctgtatatggctgccctatttagtatttggtatattttgcaaattggtcggatgcagtgcacacggaaggtagatttctgttttcaccttatgcggaacatttcgtaaagatcaaatttattatttgcagagagccctcgaacaccaacccgctcaggtgaggactggaggtcagcttttgattccgcttcaaatggtcctgttgctggaagcacaaacagtcaatcaaggtccaaaagtgctgacggtcgcagtcggcgctatgagaacggggacgtgagctcaggtgccaactctggcagccggcgcacaccaaaccggttgccaccagcaccgccaaaatactaatcgtgctgattggtattcatgaacatttatgtattcttgcctggcacatgcgcccagatcggctgctagagattgtggtgtagtggatggagtatcgggtgattgcgtgaacattgtgttcgcaggtcgctgcgtctcagatgagctgtttatagaaaaaactacaggtaaccgtggtttctaaggttcccctttgattcatcttcaaatgggcctgttgctccaagcccaaccagtgaatcaaggtcgaaaagtgctgatggtcggagccggcgctatgagaacggggatgtgagctcaggtgccaactttggcagccggcgcacaccgaaccggttgccaccagcaccgccaaaatactaatcgtgctgattggtattcatgaacattatgtattcttgcctggcacacgccccgtgcttgtcatatgggttattggagcgtattccagatcggccgctaaaaattgtgttgtagtggagtctggtgattgcgtgaacattgtgttcgcaggtcgctgcgactcaggtgagttgtttatagaaatatataggtaaccatggtctctatctttactgtttattatccccgcccattaaaaaaaaaaaaaaaaaaaaaaaaaaaaaaaaaaaaaaaaaaaaaaaaaaaaaaaaaaaaaaaaaaaaaactcga

SEQ ID NO: 136257 - DNA, 626 bp, Zea mays
  Clone ID: MRT4577_55741C.1
gtaccctcgggctcgccgggaggcttgcagcagcatcgcgagaaccgcagctacccaccaccctgcagctccgactccgagcttttaccccgctttgactccactctaccgctcctccagcctctgttgtttttgtttcccaccgcaacaatccggccgcctacctccgcctctctccgctcctcccgacgcctctctgctagcgcgcgctagcgctaccgctaactagagctcgatccacacgtcaccgccgtacccacgcgccccggcttgttcgttaagcttgccggcaggccgcctggcgcgcaccgccgctacgcgcgctgggcctggcatgagaaggcggtggtcccgcgccgcggtgctcgcgtgcttactgctcctcgcgtgcgtcgccgagtcgcgcgcggtgcccgacgcctcggggggcggcggcggcccaggagagcagcggcggggcgcgttcgacgtcgtggtcgtcggcctcgtcagcatcggcctcggccgtcggtggcgcgccggcgagatggtcgacgaggacaagcgccgcgtgcccacggggcccaacccgctgcacaaccgatgagcgccagccaccgcgcgggcctagctacctgcctacctta

SEQ ID NO: 136258 - DNA, 394 bp, Zea mays
  Clone ID: MRT4577_55742C.1
ggggttaaaaactttatgggcttaaattggggtggccctggttgaattttagcatttaaaaaaggggggcgggcattttttgggagggaatttttacaacttttatttcctaaaaagggtttacccttgaagtttttgattccggtttaaagttatccaaaacttggaaaaggtttggttttttttggttttaattttaaagctaaacctgaaaatcctgaacctataaaaaagcataacttatttactttggatcaaaaacttggaaatgcctccaagcttgtaaatcagggggccaggggggggcgacttgccaaagtcgacatgggcaataaccacaagggggaaatgggacttttttttacccatgactaggggggaagcttaaacttgg

SEQ ID NO: 136259 - DNA, 224 bp, Zea mays
  Clone ID: MRT4577_55743C.1
ccgcatcatccacatgagggcgggtcgcgttgatttattagaacctcacatactgaattatgaccatgcgtatatttttggtcatcccacacatgaaaatagtgtggcaatttacgtggattgaccactacatattatcatgtgaggtgtgaccaggaatatatccatggtcatgataaagttgtggggctaatgagtcgatggggccgctggaggggtatgat

SEQ ID NO: 136260 - DNA, 484 bp, Zea mays
  Clone ID: MRT4577_55744C.1
ttttttttttttttttgatacaatggttattactaatccatctttaattcatctaacacattgccacacctgtatttaaggaacaaagccgggtgcatctcatatatgcgccagagaaaacaacacatataatagagtgcatagagataaatatcataaatatacttattacatagcctcagtgttaggcggctcttcttcgaccacttgttcttctccttcaacgagctcctactcagcaacttctacctgctgggcaccaggatcctcaatgacttgctcgtctggataaatttggcagagccctccgactacagtggttacaatcacaacaagattggttggaccaaaccaagccttgggcaggaatcgaggttgctgggccgaggatggcgaggagacaggcgtctgtatgctctccagtccagagccagcggagccagcaagggaaccagctgatggccgccagagaagacggattagt

SEQ ID NO: 136261 - DNA, 432 bp, Zea mays
  unsure (1)..(432): unsure at all n locations
  Clone ID: MRT4577_55745C.1
tttttnnnnnnnnnnnnnnnnnnnnnnnnnnnnnnnnnnnnnnnnnnnccagtgtaggcgacggcaccagcagcagcagcaggagcaggtaatggctatggcaccggcagcagcaacccgagctagagctattggtggctcaggccctagtcacttcatctccacgagcagtttcttggggccacctcccaatcccattcggctgccacgtcgcgccggcgcgaacagggccgtgctcctcggcgccgggcggcgcgacgcgtggggcgccgacggcggctcttctccctcctccgagggcggccggctggtggacgaggacatggcgacgctgcggcggcgcatccgcgaggcgcgggcggagtcgtcggaggaggacggcattcttgacgccgacgacgccggcatcccgctgccgccgaccgggtggac

SEQ ID NO: 136262 - DNA, 169 bp, Zea mays
  unsure (1)..(169): unsure at all n locations
  Clone ID: MRT4577_55746C.1
ggcttaaatccagctattcttcatctgtaacgtcttctgcgatttctgaggagaggggtgcgctggagcgcactancacgttggagcgtgggccttngtcctcacgtgttgggggggtcaccactntgcggctgccttggggctacacccggcccgagcgcgctccggg

SEQ ID NO: 136263 - DNA, 170 bp, Zea mays
  Clone ID: MRT4577_55747C.1
gaattcgggtcgagatcaattgtttacgggggacaggatatttgctatgtatctctgtagcattggccatactgattatttgttacattgtgtgaatatatgcagctgtagagggcatcttctggtcagtttttatccatatcaatgcaatagtagagcatatgttgtct

SEQ ID NO: 136264 - DNA, 275 bp, Zea mays
  unsure (1)..(275): unsure at all n locations
  Clone ID: MRT4577_55748C.1
tttaggagaaaccacaaaccaccaagccgtgcaagcatcatggagtacggtcagcangggcagcgcggccacggcgccacgggccatgtcgaccagtacggcaacccagtcggcggcgtcgagcacggcaccggcggcatgaggcacgggacgggaaccaccgcggcatggccagctggtgagcacggggcgctgcatggtgggcggcagtccagctgcagggagagcacagacgcggatctgcatcgtcggcagtcagtcagctgtggagacac

SEQ ID NO: 136265 - DNA, 289 bp, Zea mays
  Clone ID: MRT4577_55749C.1
cacgcctgcgggagctgggacggagtatattgccgggatgtgcagcttagtttgcggaggacgccctatgaggaattgcttgtactaggagaacgcatcgggtgcgtaaacacatgagttaatggggaaaaattcctaagtgactaaaaacatcggaagtatgtattatatcataggaagaaacttaggaggtgacaaaccatggatgatactccaggaagtacacgcattgggttaggactagtgcagagtggactgagtggacgaattccacaacgtatgcatgaaa

SEQ ID NO: 136266 - DNA, 506 bp, Zea mays
  unsure (1)..(506): unsure at all n locations
  Clone ID: MRT4577_5574C.1
aagtcaaaatctatttcaatccattccaatacacatgngaattagaataaccgaacaatgtcttagggcttgttcgtttcagcattaatccatgtggattgggtagtattgaatcggtttaaattcataacaagtcgaaatctatcacaatacattccaatacacttcgatccaagtaaaattagaataaccgaacaagaccttatctgatcacgcttgattggctgtcacagaggcaccactgatacttggatttcatatgtaaataaatatacagcacaaaaaaaatttgacataaaggatatactacaagcgttgtatcgttgctgcctattaataatggcatcagtaatggacagttcgggcgcaattatgttgacatcttgttaacagaagggggcagcctcacaatctgcttgatgcccaagatacttggtgtgacgggcctgcgccatcagttttcctgtctttntcttcctgaaatcgacagagacgacaccgactga

SEQ ID NO: 136267 - DNA, 383 bp, Zea mays
  Clone ID: MRT4577_55750C.1
ccttcttttatttgatttttgaaaacagacaaaaacatacaggggggaggggggttattatacaccgtgaaccccaaaacccataatgaaagggcgcaaaaggcaaagattaagccagaagtacggaaccaaacacattaggacaagtaaaaaccttcaaacgcgcccacagaatgggggagatcaatcaagatacctggaaaaaggaagactatcaggttccaggcgacaggcaataaagggaaacgagcaggatcaacgctgaccagagaagtccaagtcgaggcacggactggaaacacggtaaaaaccgtggcagggacgaaaaacttgctgggaacgttcgaacccaagcaatataggcagtagtccccacccgtggg

SEQ ID NO: 136268 - DNA, 3596 bp, Zea mays
  Clone ID: MRT4577_55751C.1
cgagacgcgcaggagaactgcgccccattatatattaagcagaagaaaatagaaaaaaaaaacaatggtttacagataaaacctccttacggaggccagaaacaggcatacaaataaagatccataaggggatcaaaaaacatactactcaaacttcctaagcctctatcactggtgcggccaaatgaacaaggccttttgcaccagcaacttcccattttcttctttcctcatccgcagctctgagacttaaggacaaacttggattgcagccatcaaaaatgcagttatttcggtgattccataaagtccaagctcccaaaatgatgagagagttaaggcccttttttgtgagtccaataactgctccctccaccacttcccaccaatccaggaaggagtttgcagttggctgtggagcaagtgaatgaagaccaaatttcctaagtaaaaggtaccagaattcccgcgagaaggaacattgtacaaggaggtggtctatagtttcttcctcttgatcacatagaagacacttatctggatgatttaggcctcgctttgccaatctatcagctgtccagcacctcttatgagcaaccaaccaaaggaagaagcgacatttgggcaatgcccaagacttccagattcttttatagtgtccaaatgacacagatcccaggaacagaccttcatatgctgatttggctgagtatacaccattcggggcaatactgaagatatgcctgtcttcaacctccggctgcagctcgatgccagaaatcaattcccaaagctgaatgtaatctgtcaaaacccccactgacaaggctcctctgatgtcagaaatccatttggcactaacaattgcttcctggactgtcctacaattaattagccgcttcggaattgcgccgatcagccttggaaacagatctgcaattctttttccattcagccatttatccttccagaatttggtgttgattccgttccccacttcagtggtcacaacttcagaaaagaaggctctagccttttttgggatttgtatttgaagcccagaccaggggcgagagtgatcagtcttttgtaaccaaagccatcttagtcgaagtgcccaacataattctggaaaactagaaataccaagcccgccaagctttagggggcggcaaacttttccccaggcaacaagacaatgaccacctttagcttctttgcggcctctccaaagaaaacctcttctaattttatcaatagcatccaaaccccactgtgggatatctactgccattgctaaatatactatcatgctagtaagaacatgctgaacttgcactcttcttccagcccgtgtcattaagtccgccttccaattaggaagctgatcagctattttatccacaaaaggttggaactgctgccttgttagcttgtgtaaggataaggggagccccaaataccgacaaggaaaggttgagatttcacatggcagcaaggattggacttcgagtagaacctcctcagagcatctaatcggatacacattggacttttgcacattattgtgtagcccagaggcgtctccaaacaaatgaagaatgctaagagtaaggtctatatctgtcggtgttgggcataagaaaaggaccacatcatcagcatacatggagactctatggagcttttttgaactagaaagctgctgaagcaaaccatcattttctgcctttgagaacatgtagccaaggacatccataactaaaatgaatagcatgggggagagggggtctccctgtcgaagtcccctgcgatgcttaatatgacgacctggaaatccatttaaaagaatccgagtagaggaggtgtccagaagcccacatatcaaatccctccaaatctgcccgaaacccaacttcttcattacctcgatcagaaaaggccaagagacagaatcaaaagcttttgtaatatctaattttagcagcaagctggccttgttttgctgatgcagcatcctggaggtttgttgaaccagcattaaattgtcttgaatgaatctcccttttataaatgcgctctgattcggtgacaccatctcattgagcttgctggccaatctattagcaaggattttggtgaccagcttggcaaaactatgcaccaaactgataggcctgaaatcttttatattatctgctccgtcttttttggggatcaatgtgatataggctgtattaaggcgcccaaaattggcaaatttcctgccccaaacagccgagatagctgccataatatcagccttaataattgtccagcaaaccttatagaaccttcctgtgaatccatcagggcctggagccttatctgaaggaagacatttgatggcatcccagacttcttgttctgaaatgggggcttccagaacggtcagatcaaaattaggcattccaagagcctctaactcaatcgccctttccctatccgtactgtttcccaacagcatggtgtagaaatggtccacacactcagctttctcctcatggctggttaggatttgttccccctcaaccagacatgccacaaaatttttcctcttacgatgacgggcgtgaaggtggaatagctttgtattagcgtccccatctttgagccaagaaatcctcgctctcagccttgcaatggatcgcttgcaagatgacaataataatgcttgtttcttgagtctgaatttgagccagcgctcagcagggctgagaactctaccatcctgcgctatttccagcatatgtaggatttctttagcaagagcaagttgggatctaacgtgccccacctgcttttcgctccaggcctgcaaacttttagcaactccttgtaacttcatttccagggacttaaaagggcatgtagctgactcaatagaattccatgtggcaagaacaatatcctgaaacccctcaagcttggtccagaaggattcaaagtgaaaacgcctttttccggatttattatccctaagccccaaaattagaggacaatgatctgaatcttgtgaggcagtactctgaagaagaacattgggaaagagaaactcccaatccactgaacaaaacactctgtctagcttgaccagtacaggcacatttcgttggttggaccaagtgtactgcctgccatgcaagggaatttccttcagggtcatatcctcaattaatctacgaaacctacccatcattgctctgtcgtaattactgttgttcctatctgagtctttataaatgagattgaaatcgccagccaacatccacggtccaagacattcggccctaatttctctgatttcttgcaggaacaaaatcttctcattgcctccttgaggaccataaacacaggtcagccaccattcatttcccctactattacaaaactgaactgagacactgtaattatccagtcttttttgaccagtgaatcccaaatgtcgtctccaggccactagaatgcccccggctgccccaacagaagggagataaataaagtcattaaaatctgtccccagcattgaaagaatgaaacgatccgaaataatttgc

SEQ ID NO: 136269 - DNA, 315 bp, Zea mays
  Clone ID: MRT4577_55752C.1
aatatatctatctggaaattcactcaccgggaacatacctggatggttattaagaagaaacaagatcgcggacatatcttttaataacttcacgatggggagttcaggtccgagccaatgccttcaagggagtgtcaatctggtggagagctattcagctgaagtgaaccgtttaaatagtattcatccatgcttaaagaggaacttcccatgtgttgcttcgaatggacaatatcactcttcactgcatatcaattgcggcgacaaagaagcaactattaacggaactacatatgaagccgacacaacacccat

SEQ ID NO: 136270 - DNA, 712 bp, Zea mays
  unsure (1)..(712): unsure at all n locations
  Clone ID: MRT4577_55753C.1
atcctgataaacataactaaatttagtatgtacatagtaaaataagggacttcatagctatttaagaagacacatgcatggaacatagatagtgtacatatacaatggatttttgttttaatataaaagacttccttctaatatatatactgttattatagaatctaaaccataaagtaagcaactcgtgatactcgtttgaagagggacaaggctaccttgcttggatattgtccatgaatcttcgaacaaaacgaatcacatacaatgcatgctaattgaaaactatatattaattatattttccaaagtgtgtaatctttctgtcaattatttcttgtgtaatacaggttcttccaatttgattgaaatctgtaatttcattctccactttttaaaaatttgtattgtaagtttctccagctggacttggttgagaggttttttccttttcttcaaaaacttcccatccaattcttatacacttttttttatgtgcgtgttactcataaataggtttgaaatttttataagcaatgacagcattaaaaggatcgggcgtagaagctaaaccgataaaacccataagccgagtcaaaaccgatatctgagctccaggctgntgccggatgatctccggctgagtaaacccttcaatagactgaaagtactgaaccaccaattggatccgactgtattcggttccatcacg

SEQ ID NO: 136271 - DNA, 349 bp, Zea mays
  Clone ID: MRT4577_55754C.1
ggggagaaaaaaggccagatgtttggttttgacaggggcgggcccaaattttcataaaaggggaggggaaattcgacaaaaggggggggtcccaaaggggggggcttatttccggggcaaatctccaaaggagggaatcactttggcaggctttcgagaggggtctttgaaaaaaacgggggagaactttttatttctggacgacaacgctggtctgggcctgggcaagcatggtaaagaagggcctatttttcctttgctcggtccaggggggcattttccaaatgccccccgggaacaaacccaggggtcagcgaaaagaaagattttcttaaacacaatgggggcc

SEQ ID NO: 136272 - DNA, 255 bp, Zea mays
  Clone ID: MRT4577_55755C.1
atccaaactacactgagttcagattcatgcaacggatttcctcacgtgtgggagtaccaacaacctttattatctcaacaagttgatccacagcactttcgccaggaaagagaggctggccaagaagcagctcaacaggaacacatccagctgaccaaatattaattgatgttgtgtactcgcttgtcccaaatatgaactttggagccccgtataaacgactgcatatctataaaatggttccattcaaattta

SEQ ID NO: 136273 - DNA, 398 bp, Zea mays
  unsure (1)..(398): unsure at all n locations
  Clone ID: MRT4577_55756C.1
acgaccgcgactgatgggaaggaccggcggcaaaaccccgggaaaccggaacaattccggaacaatgaagaattccgggggctccaacctgaaccaacaatcaagcccgggcacgcggcngtggcacttcctcggcacgctggcctcgctcgcctgcgcggtgctcgcggccgccactggccgcgccgcggtcctcctcgtgggccccgttctcggggtacggcatggcgtggtacagccacttcttcgtggagggcaaccgccccgccacgttcggccaccccgtgtggtccttcctctgcgacctccgcatgttcctgctcatcctcaccggccgtatcgacgccgagctcgcacgcctccgcgtccggccggcggcctctgcgcaacatgactga

SEQ ID NO: 136274 - DNA, 347 bp, Zea mays
  Clone ID: MRT4577_55757C.1
ccggccgggatctctcccatactgcattctcccagacctcatccgaccaaatacaatatcctcatatgctacacacggccacgcgaacgtagattccatttcgatttctaaaccactaaacgctctttcaaatcctctttcgtgtcacatcatgaggtgaatactccacgcttaaggtgcctgagctcaaaaagctgttggcggaaaagagccttcctcagactggaaacaaggccgatcttatcgccagactccaggagaacgacaagcagtccgagacagaggcgaagcctgcccagaagaaagaagacgagagcagctacatggacgaggaggttgcctcccca

SEQ ID NO: 136275 - DNA, 325 bp, Zea mays
  Clone ID: MRT4577_55758C.1
gatctggactcgaggatgtcatggataaagtaggggctaacttaattaacacacagcttggatgcagacggagatgaacatgtcaacgtgtatatataggagcatatgcctcccgaccacgcaaaacctaatccagccacccagattgatgtcaaatgaagccaggccgggccgggccaacgctcgccagcagttaacctcgctcaccccgccgggcacgagctagcctacgttaatgtggacgccctcagcaaggaggaagatcgctacacaggctaagtaaataacggcattgataaggatggccaggcctcctggctggaat

SEQ ID NO: 136276 - DNA, 479 bp, Zea mays
  Clone ID: MRT4577_55759C.1
cgaggactccccgctcctgcaccggtcgttccagttcacgcccgcgtccatcgcgcgcgtcaaggcggcggcggcggcggcggcgctggagggccgcgcgtgcaccacgttcgaggcgctggccgggttcgtgtggagcgcgcgcacgcgggcgctggggatgcgggcgtctcgcccgagcaagctgctgttcgcggtggacgggcggccgaggttctcgccgccgctccccgaggggtacttcggcaacgccatcgtgctgaccagcgcggcgtgccccgcacaggaactggagcgctcgctgccgcgctctgtgcggctgctgcgcggcgccgcggtggccgtgacggacgcctacatgcggtacgagggggactacttcgaggcgacgcgcgcgcggccgacgatggcgtcgacgctgctcatcacagcgtggtcgcggctgccgctccacgcggccgactatctgtggggcccgc

SEQ ID NO: 136277 - DNA, 378 bp, Zea mays
  unsure (1)..(378): unsure at all n locations
  Clone ID: MRT4577_5575C.1
tgttgatggggtcacaggcttattcaacattaagaacctctcctccaagtaacagttaaatctttttttgtttgtccataaaaccaanccatatctctntaattagaacacctcctgcattcacacctaatctttgcaggagaggaacttaatgtttattgggtcacaagccaatacaattatcacaatgcattgacccatggatatatacctggtacaaacatagacacattgtcatcaactaacaatctcccataacaccagtcatgtttccaattacaactcggagcttcagaaaaataaatctatttattcataaaacaaactccttcgatcattctgtcaaatattcaaaaataccaaccagttttcactcaa

SEQ ID NO: 136278 - DNA, 365 bp, Zea mays
  Clone ID: MRT4577_55760C.1
ccgccgcagtcttcgccaccatgccgccctacaccgtggtctatttcccagttcgaggccgctgcgcggccctgcgcatgctgctggcagatcagggccagagctggaaggaggaggtggtgaccgtggagacgtggcaggagggctcactcaaagcctcctgcctatacgggcagctccccaagttccaggacggagacctcaccctgtaccagtccaataccaatcctgcgtcacctgggccgcacccttgggctctatgggaaggaccagcaggaggcagccctggtggacatggtgaatgacggcgtggaggacctccgctgcaaatacgtctccctcatctacaccaactatgaggcggg

SEQ ID NO: 136279 - DNA, 237 bp, Zea mays
  unsure (1)..(237): unsure at all n locations
  Clone ID: MRT4577_55761C.1
cacaggctgcacaagtatgcccagctctctcttctccaccgcgccttccacctgcatctcctctctcccgaacgcggtcatggcctcanagccgccgtcatccgagttcgactgccctcctctcaacacaccccaccgtgcgcccgcnaattaatggagatggatgcaagtgtgacgtgtcagcgaatcattggcacttatatcattttttcgaaacaaaaaaanaaaaaagcggcc

SEQ ID NO: 136280 - DNA, 295 bp, Zea mays
  Clone ID: MRT4577_55762C.1
ggggggttataaaatccaaaaagaccctttggggggcgtgtaaaaacccacaaaccggacccgggggggaaggtaaatcattgaaaacaaacataaaaaggaaaaaaaatattggaaaagaaaaacaagaagctaaaaaaaaatttaagaaaaacaaatcgggtctacccgtacaccccaaaaaacgggggggttaacacagttgaaaaaaccaaagaggaaagggaaaaagggggttccaataaaacacccgggcatttaatgaaaacacccccgaacgaaccgccatgtaaaa

SEQ ID NO: 136281 - DNA, 372 bp, Zea mays
  Clone ID: MRT4577_55763C.1
tgtgcggcgctcgagccggagggtcgggaatccgacaccacaggctgcacaagatgaaccagctctctcttctccaccgcgccttccacctgcatctcctctctcccgaattaatggagatggatgcaagtgtgacgtgtcagcgaatcattggcacttatatcattttttcgaaacattagcgatggttctgatgatggagctatatacatgtatagatggtattcgatcgtgtactcaagtttgcttaccttgaacacggcttcgttttccagttagaacagcaatgacgtactgaaattgaagtttgcttactttgagcaacaagctaaacatttcaacacacaaaaaaaaaaaaaaaaaaggccccta

SEQ ID NO: 136282 - DNA, 891 bp, Zea mays
  Clone ID: MRT4577_55764C.1
gtgcggcgctcaggcggcggtgcgggctcccgggctcatccgacaccacaggctgcacaagatgaaccagctctctcttctccaccgcgccttccacctgcatctcctctctcccgaacgcggtcatggcctcacagccgccgtcatccgagttcgactgccctcctctcaacacaccccacgacagcacgcaaagcgcctcctcgcagtagcacctcacgaaagcatcgcggcagccacggaggagagcagccgtccgcgtcaagagctcgcggcggcgggcaataagaacgacggcggcggcggcggcggcaggacctgcgcgctgccgacgtgggcgctcatcggcggcatcacggcgggggtggccgtggcgctggccctgtccgcgggggccggccccgccctggcgctggggccggagggccccctggtggaggagttctgggacaacatgcggcgttacgcgctgtacgtggtgacggtgagcacaggggtggcgtatacggtgctgcagcccatagtggagctgctcaagaaccccatcacggcgctgctcatcgtggccgtcctcgccggcagcggcttcctcgtctcgcaggtgctcaatgccatggtcggcaactccgacttcatctacatgtacgagtaggtagagcaggccggccaggggatggcgagcttgtggcgctgaggcagccacggcccaccgtgcgcccgcgaattaatggagatggatgcaagtgtgacgtgtcagcgaatcattggcacttatatcattttttcgaaacattagcgatggttctgatgatggagctatatacatgtatagatggtattcgatcgtgtactcaagtttgcttaccttgaacacggcttcgttttccagtt

SEQ ID NO: 136283 - DNA, 190 bp, Zea mays
  Clone ID: MRT4577_55765C.1
gatgtgctattcagaagctgctgggcattttacagtgagcacttcatgccaacaccacgtggaaccagtagtgtggctgctttgcaaggagtaatgtcagagggttaggctgcaagtgatcagtgtttgagagccctgcagtgatcttgtttaactcatttactgtacatccatatgcaaaaataaaatg

SEQ ID NO: 136284 - DNA, 379 bp, Zea mays
  Clone ID: MRT4577_55766C.1
ataaaatataaaataaaaggctcgacgtcgtcgtcgcctctctcgccgtccacgagtcacggcgggcgggcggcggcggcggccgggggtcccggctgcacacggctcgccaccatgcctgaccccaccaccaaactcccctctccacgcccccgccgttagggaggcggaggtgcggctcatggccaccgcagggctgcgcctgctcgaggagcgcgcccaggaggcgatcttagcgtcttgtagggacgttctacgagcctctgggttccggttcgaggacgcgtgggccaaggtgatcccaggctcggatgaaggtgtctatgcttgggttgcggcaaattatgctcttggaagacttggaggggatcctaacaaa

SEQ ID NO: 136285 - DNA, 563 bp, Zea mays
  Clone ID: MRT4577_55767C.1
tttttttttttttttttgatactacaagtgaggtcgacctttgactttggattccacatatatttgtttggaacacgatttgtatgatgaacatacaaaatataacaacatacatgtttcctaaattatgaagtgatcttccagttctattacatgcaaaagtctaacgattcatctactccttactaaaatctctctatcagctgggtgttatgccaacggctagcatgcatgctagcagtcattttctcacgcacttcaagcatcaactcgatccgatcctacgtgcttccagcacctcttcctgctgctgcagaaccttgggccaatgttgattttttgttacgactcatcactgtgaccaatggatgtcatccaagaatctgtcgtcgtcggctgtccgcatgcactcgcacgcactccttgatttctgtggagccaaagtgcgacggctgccggcgagatgagcggatgaccggagaagggaagggaccacggcgggccggcggctggcatgccgcatctgtgttttcagcgacaacgctaatttgggaacctagaac

SEQ ID NO: 136286 - DNA, 204 bp, Zea mays
  Clone ID: MRT4577_55768C.1
gaccaacgaccagaacttatggtgcgtgcaacagaggtagggatatggcgggaacaatacaaacaccgccaatatatgagtaacaaggcccaaagaaggacctagcggtatcccgtggatcgaaaaaggcacaacgcctccgtccagtacaacaccacttgaggaccaccaatgcacgtcactgttaagggctagagcaaaagc

SEQ ID NO: 136287 - DNA, 1970 bp, Zea mays
  Clone ID: MRT4577_55769C.1
attgggtacctcgacgacgcggccgggaaaaacgcgatgtaaaatatatctaaataaaatataaaataaaaggctcgacgtcgtcgtcacctctctcgccgtccacgagtcacggcgggcgggcggcggcggcggccgggggtcccggctgcacacggctcgccaccatgcctgaccccaccaccaaactcccctctccacgcccccgccggcgccgcaggctcttcagcctctgcctcggcacagcgctcctcgcgctcatcgtctccgcgctcgtccacgtcgtcgcccagccgccgggtcccgctcccgcctccgcgcgcttctccgtcatcatagacggaggcagcacgggcacccgggcccacgtcttcgcggcggggcccgacggccgcccggatctggcgcgctccaccgtgatgcgcgtctccccgggcctctcgtccttcgccgccgacccggcgcgggccggggagtccctgaagcctctgttagattttgcgagggataagattggcggcgccgctagggaggcggaggtgcggctcatggccaccgcagggctgcgcctgctcgaggagcgcgcccaggaggcgatcttagcgtcttgcagggacgttctacgagcctctgggttccggttcgaggacgcgtgggccaaggtgatcccaggctcggatgaaggtgtctatgcttgggttgcggcaaattatgctcttggaagacttggaggggatcctaacaaaaccgttggaataattgaacttgggggcgcttcagctcagcttacctttgtttctgatgaagtacttccacccaaactgtcatataattatacttttggtgaaacaacatacactctctataccaacagctttttaaactttggtcaaaatgcagctcaagactcattccatgaaatgctgaggtcaagaggctctttcaaaaatggtacacttgctgatccttgtgctcccagaggatattcacgcaatgaagaaatgatgctgaggatgagtggtgcttcaaggtcaacattagagaaccagtatgttaataatgggactggaaactttacagagtgcatatcttcttcacaacttttactgcaaaaaggaaaggattagtgccacatgtatctcatataaatgcagaaaagtgccagtatcaacaatgtcacctgggatctacttttgtacctgagctgcgtggatacttcttgggaactgaaaatttctattttacttcaaagttctttggacttaagaagtcttcatcactatctgatttcatgtttgctggagaacaattttgcaatcagcatttgtcgagtcttagaaaaaagcatcctaataggtcagatgaggatttttcacggtattgcttctcgatggcatacattgtggctctactgcatgacagtcttggtgtaccactggatgacaagaggattgagtattcaaaccaggttggagacattcaggttgaatgggctctaggagctttcatcacactgatgcaaaatgcgagtttaaagccattacacaccgctgtagaatcaacccatagcaatagaccattgtttgctgtgctgggaatgtttcttttatgtggagtactctttgtatcaagatggaggaagcccaagacgaaaatcatatacgacttagagaaaggccgatacatcataacacgcatcagctgacgctaaatcttgtgcagaagaactatatttatacgacatgaatagatgttgtgttgtgcaacaatgtacgagttcaattctttgtgttttatctttaggtagcagagctgggtgggtggagcaggaagatagcgcatttgtgcgtatagaagaatgatgtgtagaacaaattgccatgtgttaattgaattatttgatgaataattatagttgctttgttcatctaatgaggtcgacaaaaaaaaaaaaaaaagcggcccccggc

SEQ ID NO: 136288 - DNA, 1284 bp, Zea mays
  unsure (1)..(1284): unsure at all n locations
  Clone ID: MRT4577_5576C.1
gaaataaatgactcgtgtttgttctttattcgttttgtgttgttatcggttacagttggagcctattggataacattattgaacagtgtaggattgtgtcactttatatctggaatttttttttctggtagttataaaaagtaaccatcttggtagttgatacaaccagatgccgcgttgtatacgggctgatggtcctttggttaactttcggcattacatttaactttcggngttaattggggagttggctggggttgccaacgcgacacctcgtcggaatccggtcgcgcgacctccccttctcgccggccggagcgggtgcgccatcaccatggacccggaagcggtacggaaaagcctggagcccaccgcaactgtcgaaaaaatcaccggctccacccctgcgcggctccacttctacgaccccttcgtcctcagcggagtcagcatcgaagccgccgagcacggtcgcctcctctgctcctttgtcgtcacccctcgccttgcgagtcccgcggggtacctccgcagcggtgtcacagcgacgctcgccgaccagctgggatcggccgtgtttttctgcagcgggctccccagcagcggggtatccctcgaaatcagcgtctcctttgttgacgcggctgccgtcggggaggaaatagaggtcgagggaaagctgttgcgtgccggcaagtcagtcggtgtcgtctctgtcgatttcaggaagaaaaagacaggaaaactgatggcgcaggcccgtcacaccaagtatcttgtggcatcaagcagattgtgaggctgcccccttctgttaacaagatgtcaacataattgcgcccgaactgtccattactgatgccattattaataggcagcaacgatacaacgcttgtagtatatcctttatgtcaaattttttttgtgctgtatatttatttacatatgaaatccaagtatcagtggtgcctctgtgacagccaatcaagcgtgatcagataaggtcttgttagcgtgatcagataaggtcttgttcggttattctaattttacttggatcgaagtgtattggaatgtattgtgatagatttcgacttgttatgaatttaaaccgattcaatactacccaatccacatggattaatgctgaaacgaacaagccctaagacattgttcggttattctaattccatgtgtattggaatggattgaaatagattttgacttactttctaggagggcccggcctcggccgtcacttccgactctttcttatatgtttcc

SEQ ID NO: 136289 - DNA, 1441 bp, Zea mays
  Clone ID: MRT4577_55770C.1
cccactcgtccgcccacgcgtccgcaggtacagtatatactatatagatattgaaaacccaactttgtgatcctattagtataatagtattcattctacgttggaatttgaaaactggggcaaaaggtcattgcgccgtcgtcgtcgtcgttcgcaagcagcaaccaggcagctccgggctccggccatggcatcaccaccaaggaatgtcggtaccaggactaccagcaacccggagatcccagagttcctggtgggcccggctggccggccggtgccggccgtggggctcggcacggcatcgttcccgttcgtggaggaaaacgtcaggaccgccgtcctcgcggcactggagctcggataccgccacctcgataccgcttcgctctaccgctccgaacgtgccgtcggcgacgccgtggccgaggcagcgcggcgcgggatcgtggcgtccagggaggaggtgttcgtgacgaccaagatgtggtgctcgcagtgccacccggatctcgtgctaccttccctcaaggagagcttgcagaaccttcaaatggattatgttgatttgtacctggttcattggccgatagctgcaaagcccggcaagccacagttcccgtttaaaagggaggacatcatgcccatggacctaataggtgtatggcgggcaatggaggaatgccaccggcttggccttgctaggatgattggtgtcagcaatttcacaacaaagaagctccaagagctactggccattgctaaaatccccccgtcagtaaatcaggttgaaatgaatccaatttggcagcagaaaaggttagctgagttctgcaaagacaaaggtattcatttgactgcctattctccgctagcaggccaaagcacgtctaaggtcaatccagtaatgcagtctgaggttctgcaagaggttgcaaaggctagaggaaagtcagtggctcagatttcgctgaggtggatctacgagcaaggcgctagcgtggttgtcaagagtttcggaagggataggctcaaggagaacgtggaaatcttcgattgggaactgaccaatgaagacaggcgtaagattagtcagatacctcagcacaagagggtcacagtgttggggatcctcagcccagacggcgtctccagcgtggatcttgctgagcttgatattgttgaaatgtagcagaaatctccatctatcaggttgcaaggacaaaaaatggtgattggagtagctttcatacggctacgttgaatcagttgcttagatacggccatattgaatcaagaattagaagtagaggacgatctctctacttgtcgtccggacctcattttcttaaaatgtattttcaggtgtctgaccttgtcctgaaatgccatccaggccattactttttagaatgccatttttaggaaaaaaaaaaaaaaaaaa

SEQ ID NO: 136290 - DNA, 578 bp, Zea mays
  unsure (1)..(578): unsure at all n locations
  Clone ID: MRT4577_55771C.1
gtttctagtacagcaatagctctatattcgactcgagcaccaaacgagaaatgcatatatcatggctgatatcatgggagcaatggtcatcactgaagatgaacttgattctagcagtctcacatctgcagttgatgaaatttttggtgatgaaaaattgatggcagacatgtctcagaaggcactaactgcagcccgaccaaatgcttcagctgatataatccgccacatatgttcattgattggttcaacctacccatcatgaaactggttttagacattgcaaagagttcatgtcatgaacacattttgtattgtttttttttgagcaaccgcatcatgtcatgtttttcttgaggtggaaactgatgtttaattccatcatgacagtgcagtttgcgcctgcttccaggtagcgttcaattggctattcttcacatccaatggacgactttttatttttttgatacaatgataatgtggagctcccgttggttcatgaatggtaatgtaaatggtcacacttcaaaaaaaaaaaaaaataaaaaaaaaacaaaacataaaatangcantctnng

SEQ ID NO: 136291 - DNA, 417 bp, Zea mays
  unsure (1)..(417): unsure at all n locations
  Clone ID: MRT4577_55772C.1
gacccacgcgtacgaccatcgcgtccgcccacgcgtccgcccacgcgtccggtcgtagctctgctcacgtcgcgacgaggatctcctcgagaggagacggagagctcgaggagggggcgcacggaggccgttctaggcttgggcgtgggcgtggtctcagagcggcacatcgggcagctggagctcccgcgcatccacgtgtcgatgcagtcggagtggaagtagcgcatgcactcggggagcacccagacgacctctccggcttagaagtcggccaggcacaccgggcacgtngactcgctccaggcctcctccttggggnaccggctcaccaccgccgcgcccaccaggacgacacatgcatggcgcggcgcgctataagtggcccgcgacgatgggggcgggcttggggcacaa

SEQ ID NO: 136292 - DNA, 295 bp, Zea mays
  unsure (1)..(295): unsure at all n locations
  Clone ID: MRT4577_55773C.1
cacatcactgcantacaaatagagcatgtcctgatcttccaaaatataattggattgcattgtattacctctctcaatctggatatccatagtttttatatctatccttccaacatcactgactcaatcttctcccctcccccttctcaaatcatgaccaatcatccatcctagttgatttttatcccttgtttagcaagctaacaccgatatttttgttctacaatgaaatctcaaacccaattttattttacgttttatctccccattagcaataaaaattttctttacattc

SEQ ID NO: 136293 - DNA, 185 bp, Zea mays
  unsure (1)..(185): unsure at all n locations
  Clone ID: MRT4577_55774C.1
cgcctgcaggtaccaatcccaattggggggcgacggcgcgtccctgatccccacctccacccttccctctgctcaaacaacaggggcacagcgctctatagaggtggcctctactcgggggctcccctcncaaaactctaaacccctctgagagaacctatccgggccaccacaacctgcaccca

SEQ ID NO: 136294 - DNA, 367 bp, Zea mays
  Clone ID: MRT4577_55775C.1
aagtattacatatgtgtctgccatgtccaagtgacggggcgctcgctctcaccagatttaatgatagacctctccgatcctgctggttactcgaacctcaagtatctgccgggtgccggtacaggcagatgaggcaactggccatggtgtacatgctgcttggacccgtgcagtttatggatgaagacgaagttgacttgcagatgtaggctttgttttccctgaaccggatcttgtgtatcctaattgaacggagcttgctctgataaatatagtgagaaaagatatgtgtcgctgttttaaaaaaaaaaaaaaaaaaaaaacaagaaaaaaaaaaaaaaaaaaaaaaaaaaaaaaaatttttaat

SEQ ID NO: 136295 - DNA, 1576 bp, Zea mays
  unsure (1)..(1576): unsure at all n locations
  Clone ID: MRT4577_55776C.1
gtaccctncgagggctccggccgggggctcggttcccccgcttcagttcccggtcccgtccgtcgctcgctcgcttccctttccttgcttccttcctccaccgccctaacctcccctcccgcggtcccgcctcccgcacgggcacggcacgcggatctgaaccggccaggaggccctctcccagcggcgggcgcccgcgcgcagcaacctgctccccccctgtcctgtggcatcggcttccaatccggtcgatgcgcccgatggagacggaggacagcgtcgggtgggacttcctcgactggctcggcccggacatctccaccaccatcttccagctcctcgacgaccccgcggacctcgcccgcgtcgccgccgtctcccgctcctggcgccgattcgtcgccgtgaacaaattcagcaagcacctgtgcaggcagatatgtccggaggccgccagcttcacccgcgcggtcgtggtggcccgattgccgccgccgccgccgccggcggcgcacgccgcgtgcgagtccagccaggtcgccgagtgcagggcccgcgatggggagcacgcggcctactcctacctcgccggcgcgctcgtctccggcaagcccgccacggacctcgtcatgcgctgcgtcggcgcctccagcaccgacaacttccccgacgagaccatcgagaacacgctcgtgccgcacgacatggttaacttccgcccctcctactggtccagcggcggcgaggacgaccccgatgtccccgagagcttgacctacacgctcgcctctgatctctgcgtcatcgaggagatcaggatacgcccgttcgaagctacttttcagcatggccatccgatttactcttcgaaggcggtgagaatccggctgggtcattccaagcttgaccctggaagagagacttttgtttcggatgaggatgagaacctgactgcgatcgctgatgagaactacatgtggacatacacgtcgccagagtttcctatgcttcaggaaaatgtgttgcaaaccttcaagcttccacgcccggccctttgcattggtggtatagtgaagattgaactactggggaggatacagaaacaatttacagatgataagtattacatatgtgtctgccatgtccaagtgacggggcgctcgctctcaccagatttaatgatagacctctccgatcctgctggttactcgaacctcaagtatctgccgggtgccggtaacttgcgcccagaagacctaatcagcattgacgccaaggactcaccggactggcgctcgcttgtttccaggtacaggcagatgaggcaactggccatggtgtacatgctgcttggacccgtgcagtttttatggatgaagacgaagctgacttgcagatgtaggctttgttttccctgaaccggatcttgtgtatcctaattgaacggagcttgctctgataaatatagcgagaaaagatatgtgtcgctgtttaaaaaaaaatgccttctggtttttcagctatgcttgaactcgatcatggcagagacaaaagagtttgcaaatagtgccttgat

SEQ ID NO: 136296 - DNA, 216 bp, Zea mays
  Clone ID: MRT4577_55777C.1
attcggctcgaggcgggtcgaagtttttattatacgcgattggacgtttttttatgggtggttttaaaggagccaggcgtggcacaaaaatgcgttgaacatggggtggtgtgcctaaaaacgacttatcaattgctcttgactggatgactagagaaatatgggggaaggaacagatgtctcaactaacacccactgagatactagttgtagaaa

SEQ ID NO: 136297 - DNA, 405 bp, Zea mays
  Clone ID: MRT4577_55778C.1
tttttcacactaacccatacaggggcggggaatttttatcctctaaacctcttacccctaaaataacacatattaattatttccaaataaattgctaaaaaaatcaaaatcttcaattacaactcttcttttactcaattccattatatcactaccatctttccatattccataacctacactgtaaaacccatcactgaaacaacaacctcatccatagcaatctcttcctctttaataaaaaaaaatatacttatatttttcttaatccgacagccctgttacaaatctatataacactgtgcacatgaccatcactatacttcaccctttctccctgtatccactccttccctttaatcctcaataaatactctcagttactcttccccccttataacacaa

SEQ ID NO: 136298 - DNA, 368 bp, Zea mays
  Clone ID: MRT4577_55779C.1
cccacgcgtgcgcccacgcgtccgctggtggacactcagggcaaggtctccaccgacgcccgctctccggtggctgatccgaccagttatcagagtcttgtcggagcattgcagtaccttgtcttcacccatctcgacatcgtctatgctgtccagcaggtgtgccttcatatgcacgcccgcaggagccgcatctcaccgctacgaagcggatccttcggtacctccaaggcaccaccgacttcggccttcttcttcgccgacctacgaccactgacctcgtcgtctacaccgacccctattggggtgggtgtcccaatactcggcggaccaccttctgtttcgtcgtttttcttggcgacaacctt

SEQ ID NO: 136299 - DNA, 384 bp, Zea mays
  Clone ID: MRT4577_5577C.1
aaaaaaaattgtttttttttttggggttggaacaaaaaaaaaaatgttggggggcccttttttaaatttacccgattccaaaacgatccgtgggggtaaattcttgggactcaaatataaaacgttcccaacccccatgggctcccaagtttttaaaaaaaaaaagcccgggccaaaccaaaccgaaaacctgaaacttctccaactgggcccgggcccaaaggaaagaaaccgtattccaggggtaaggggcaccaaatttcccttggacggggccaaacaaattatttcaccccccgggaaatttgggggcaagggcaaccaccccaattacttaattgggggtggggcccctttttgggttcacccccccttttcccccaa

SEQ ID NO: 136300 - DNA, 231 bp, Zea mays
  Clone ID: MRT4577_55780C.1
tcgttagaactttgatacacacttcgtttccagaattatggacaaccttaggccagcggctaccaagatattatttctaacgtgcgcgtgttgggctttttgcgggcgcaacacaagctgttattcttgcacaacggccacttggtccaagtggcaattttacacagttgctccgaccaattactttaattggctttgaacacccacctgtgcaagtctataaggtacaac

SEQ ID NO: 136301 - DNA, 429 bp, Zea mays
  unsure (1)..(429): unsure at all n locations
  Clone ID: MRT4577_55781C.1
cccacgcgtccgcccacgcgtccgaaaaaacaaaaaacaagaaaaaaaaaagaaaagaaaagaagaaaaaaaaaaagaaagaaaacagaaattgttgggcggccggtctaaaggagccaagcggaacgacgcgagcaagcgacgcctgactactagaaagggggaagcaaaacgaaagntatttgaacgtaggtcaacacccacaggacggggagaccaccaccacaacccattgtaatagacccgcagcagaaaccccttgacgcagatgacggaagagcgaaagggcccgtgccgatcgcccttgccaacagcagcccaagcagaagggaaagcgcgacccgcccggtgaaggggcactaaggcgacacgacagtggagaacccgcgccaggacacagttaccctaggcagacaccaacaggccgaa

SEQ ID NO: 136302 - DNA, 303 bp, Zea mays
  Clone ID: MRT4577_55782C.1
ctcagacgctgcagaatggctcccgcaaagaagggtggcgagaagaaaaagggccgttctgccatcaacgaagtggtaacccgagaatacaccatcaacattcacaagcgcatccatggagtgggcttcaagaagcgtgcacctcgggcactcaaagagattcggaaatttgccatgaaggagatgggaactccagatgtgcgcattgacaccaggctcaacaaagctgtctgggccaaaggaataaggaatgtgccataccgaatccgtgtgcggctgtccagaaaacgtaatgaggatgaa
